United States Patent Application Publication US 2015/0141320 A1 - sequence listing, part 39

SEQ ID NO: 1495668 - DNA, 15 bp, Homo sapiens
gagtattataaaata

SEQ ID NO: 1495669 - DNA, 15 bp, Homo sapiens
agagtattataaaat

SEQ ID NO: 1495670 - DNA, 15 bp, Homo sapiens
aagagtattataaaa

SEQ ID NO: 1495671 - DNA, 15 bp, Homo sapiens
aaagagtattataaa

SEQ ID NO: 1495672 - DNA, 15 bp, Homo sapiens
taaagagtattataa

SEQ ID NO: 1495673 - DNA, 15 bp, Homo sapiens
ttaaagagtattata

SEQ ID NO: 1495674 - DNA, 15 bp, Homo sapiens
attaaagagtattat

SEQ ID NO: 1495675 - DNA, 15 bp, Homo sapiens
aattaaagagtatta

SEQ ID NO: 1495676 - DNA, 15 bp, Homo sapiens
taattaaagagtatt

SEQ ID NO: 1495677 - DNA, 15 bp, Homo sapiens
ataattaaagagtat

SEQ ID NO: 1495678 - DNA, 15 bp, Homo sapiens
gataattaaagagta

SEQ ID NO: 1495679 - DNA, 15 bp, Homo sapiens
agataattaaagagt

SEQ ID NO: 1495680 - DNA, 15 bp, Homo sapiens
cagataattaaagag

SEQ ID NO: 1495681 - DNA, 15 bp, Homo sapiens
tcagataattaaaga

SEQ ID NO: 1495682 - DNA, 15 bp, Homo sapiens
atcagataattaaag

SEQ ID NO: 1495683 - DNA, 15 bp, Homo sapiens
aatcagataattaaa

SEQ ID NO: 1495684 - DNA, 15 bp, Homo sapiens
aaatcagataattaa

SEQ ID NO: 1495685 - DNA, 15 bp, Homo sapiens
gaaatcagataatta

SEQ ID NO: 1495686 - DNA, 15 bp, Homo sapiens
ggaaatcagataatt

SEQ ID NO: 1495687 - DNA, 15 bp, Homo sapiens
gggaaatcagataat

SEQ ID NO: 1495688 - DNA, 15 bp, Homo sapiens
ggggaaatcagataa

SEQ ID NO: 1495689 - DNA, 15 bp, Homo sapiens
tggggaaatcagata

SEQ ID NO: 1495690 - DNA, 15 bp, Homo sapiens
ttggggaaatcagat

SEQ ID NO: 1495691 - DNA, 15 bp, Homo sapiens
attggggaaatcaga

SEQ ID NO: 1495692 - DNA, 15 bp, Homo sapiens
tattggggaaatcag

SEQ ID NO: 1495693 - DNA, 15 bp, Homo sapiens
ctattggggaaatca

SEQ ID NO: 1495694 - DNA, 15 bp, Homo sapiens
gctattggggaaatc

SEQ ID NO: 1495695 - DNA, 15 bp, Homo sapiens
agctattggggaaat

SEQ ID NO: 1495696 - DNA, 15 bp, Homo sapiens
aagctattggggaaa

SEQ ID NO: 1495697 - DNA, 15 bp, Homo sapiens
caagctattggggaa

SEQ ID NO: 1495698 - DNA, 15 bp, Homo sapiens
acaagctattgggga

SEQ ID NO: 1495699 - DNA, 15 bp, Homo sapiens
gacaagctattgggg

SEQ ID NO: 1495700 - DNA, 15 bp, Homo sapiens
tgacaagctattggg

SEQ ID NO: 1495701 - DNA, 15 bp, Homo sapiens
ttgacaagctattgg

SEQ ID NO: 1495702 - DNA, 15 bp, Homo sapiens
attgacaagctattg

SEQ ID NO: 1495703 - DNA, 15 bp, Homo sapiens
cattgacaagctatt

SEQ ID NO: 1495704 - DNA, 15 bp, Homo sapiens
gcattgacaagctat

SEQ ID NO: 1495705 - DNA, 15 bp, Homo sapiens
agcattgacaagcta

SEQ ID NO: 1495706 - DNA, 15 bp, Homo sapiens
tagcattgacaagct

SEQ ID NO: 1495707 - DNA, 15 bp, Homo sapiens
ttagcattgacaagc

SEQ ID NO: 1495708 - DNA, 15 bp, Homo sapiens
cttagcattgacaag

SEQ ID NO: 1495709 - DNA, 15 bp, Homo sapiens
ccttagcattgacaa

SEQ ID NO: 1495710 - DNA, 15 bp, Homo sapiens
cccttagcattgaca

SEQ ID NO: 1495711 - DNA, 15 bp, Homo sapiens
gcccttagcattgac

SEQ ID NO: 1495712 - DNA, 15 bp, Homo sapiens
tgcccttagcattga

SEQ ID NO: 1495713 - DNA, 15 bp, Homo sapiens
ttgcccttagcattg

SEQ ID NO: 1495714 - DNA, 15 bp, Homo sapiens
attgcccttagcatt

SEQ ID NO: 1495715 - DNA, 15 bp, Homo sapiens
tattgcccttagcat

SEQ ID NO: 1495716 - DNA, 15 bp, Homo sapiens
ctattgcccttagca

SEQ ID NO: 1495717 - DNA, 15 bp, Homo sapiens
tctattgcccttagc

SEQ ID NO: 1495718 - DNA, 15 bp, Homo sapiens
ttctattgcccttag

SEQ ID NO: 1495719 - DNA, 15 bp, Homo sapiens
tttctattgccctta

SEQ ID NO: 1495720 - DNA, 15 bp, Homo sapiens
atttctattgccctt

SEQ ID NO: 1495721 - DNA, 15 bp, Homo sapiens
gatttctattgccct

SEQ ID NO: 1495722 - DNA, 15 bp, Homo sapiens
tgatttctattgccc

SEQ ID NO: 1495723 - DNA, 15 bp, Homo sapiens
gtgatttctattgcc

SEQ ID NO: 1495724 - DNA, 15 bp, Homo sapiens
cgtgatttctattgc

SEQ ID NO: 1495725 - DNA, 15 bp, Homo sapiens
acgtgatttctattg

SEQ ID NO: 1495726 - DNA, 15 bp, Homo sapiens
gacgtgatttctatt

SEQ ID NO: 1495727 - DNA, 15 bp, Homo sapiens
agacgtgatttctat

SEQ ID NO: 1495728 - DNA, 15 bp, Homo sapiens
cagacgtgatttcta

SEQ ID NO: 1495729 - DNA, 15 bp, Homo sapiens
acagacgtgatttct

SEQ ID NO: 1495730 - DNA, 15 bp, Homo sapiens
gacagacgtgatttc

SEQ ID NO: 1495731 - DNA, 15 bp, Homo sapiens
agacagacgtgattt

SEQ ID NO: 1495732 - DNA, 15 bp, Homo sapiens
aagacagacgtgatt

SEQ ID NO: 1495733 - DNA, 15 bp, Homo sapiens
taagacagacgtgat

SEQ ID NO: 1495734 - DNA, 15 bp, Homo sapiens
ataagacagacgtga

SEQ ID NO: 1495735 - DNA, 15 bp, Homo sapiens
aataagacagacgtg

SEQ ID NO: 1495736 - DNA, 15 bp, Homo sapiens
gaataagacagacgt

SEQ ID NO: 1495737 - DNA, 15 bp, Homo sapiens
tgaataagacagacg

SEQ ID NO: 1495738 - DNA, 15 bp, Homo sapiens
gtgaataagacagac

SEQ ID NO: 1495739 - DNA, 15 bp, Homo sapiens
agtgaataagacaga

SEQ ID NO: 1495740 - DNA, 15 bp, Homo sapiens
cagtgaataagacag

SEQ ID NO: 1495741 - DNA, 15 bp, Homo sapiens
gcagtgaataagaca

SEQ ID NO: 1495742 - DNA, 15 bp, Homo sapiens
agcagtgaataagac

SEQ ID NO: 1495743 - DNA, 15 bp, Homo sapiens
tagcagtgaataaga

SEQ ID NO: 1495744 - DNA, 15 bp, Homo sapiens
atagcagtgaataag

SEQ ID NO: 1495745 - DNA, 15 bp, Homo sapiens
tatagcagtgaataa

SEQ ID NO: 1495746 - DNA, 15 bp, Homo sapiens
ttatagcagtgaata

SEQ ID NO: 1495747 - DNA, 15 bp, Homo sapiens
attatagcagtgaat

SEQ ID NO: 1495748 - DNA, 15 bp, Homo sapiens
gattatagcagtgaa

SEQ ID NO: 1495749 - DNA, 15 bp, Homo sapiens
ggattatagcagtga

SEQ ID NO: 1495750 - DNA, 15 bp, Homo sapiens
gggattatagcagtg

SEQ ID NO: 1495751 - DNA, 15 bp, Homo sapiens
tgggattatagcagt

SEQ ID NO: 1495752 - DNA, 15 bp, Homo sapiens
ttgggattatagcag

SEQ ID NO: 1495753 - DNA, 15 bp, Homo sapiens
gttgggattatagca

SEQ ID NO: 1495754 - DNA, 15 bp, Homo sapiens
tgttgggattatagc

SEQ ID NO: 1495755 - DNA, 15 bp, Homo sapiens
ggtgttgggattata

SEQ ID NO: 1495756 - DNA, 15 bp, Homo sapiens
gggtgttgggattat

SEQ ID NO: 1495757 - DNA, 15 bp, Homo sapiens
tgggtgttgggatta

SEQ ID NO: 1495758 - DNA, 15 bp, Homo sapiens
ttgggtgttgggatt

SEQ ID NO: 1495759 - DNA, 15 bp, Homo sapiens
gttgggtgttgggat

SEQ ID NO: 1495760 - DNA, 15 bp, Homo sapiens
tgttgggtgttggga

SEQ ID NO: 1495761 - DNA, 15 bp, Homo sapiens
ttgttgggtgttggg

SEQ ID NO: 1495762 - DNA, 15 bp, Homo sapiens
tttgttgggtgttgg

SEQ ID NO: 1495763 - DNA, 15 bp, Homo sapiens
ctttgttgggtgttg

SEQ ID NO: 1495764 - DNA, 15 bp, Homo sapiens
actttgttgggtgtt

SEQ ID NO: 1495765 - DNA, 15 bp, Homo sapiens
tactttgttgggtgt

SEQ ID NO: 1495766 - DNA, 15 bp, Homo sapiens
gtactttgttgggtg

SEQ ID NO: 1495767 - DNA, 15 bp, Homo sapiens
ggtactttgttgggt

SEQ ID NO: 1495768 - DNA, 15 bp, Homo sapiens
aggtactttgttggg

SEQ ID NO: 1495769 - DNA, 15 bp, Homo sapiens
taggtactttgttgg

SEQ ID NO: 1495770 - DNA, 15 bp, Homo sapiens
ctaggtactttgttg

SEQ ID NO: 1495771 - DNA, 15 bp, Homo sapiens
gctaggtactttgtt

SEQ ID NO: 1495772 - DNA, 15 bp, Homo sapiens
tgctaggtactttgt

SEQ ID NO: 1495773 - DNA, 15 bp, Homo sapiens
atgctaggtactttg

SEQ ID NO: 1495774 - DNA, 15 bp, Homo sapiens
tatgctaggtacttt

SEQ ID NO: 1495775 - DNA, 15 bp, Homo sapiens
atatgctaggtactt

SEQ ID NO: 1495776 - DNA, 15 bp, Homo sapiens
tatatgctaggtact

SEQ ID NO: 1495777 - DNA, 15 bp, Homo sapiens
ttatatgctaggtac

SEQ ID NO: 1495778 - DNA, 15 bp, Homo sapiens
attatatgctaggta

SEQ ID NO: 1495779 - DNA, 15 bp, Homo sapiens
tattatatgctaggt

SEQ ID NO: 1495780 - DNA, 15 bp, Homo sapiens
gtattatatgctagg

SEQ ID NO: 1495781 - DNA, 15 bp, Homo sapiens
cgtattatatgctag

SEQ ID NO: 1495782 - DNA, 15 bp, Homo sapiens
acgtattatatgcta

SEQ ID NO: 1495783 - DNA, 15 bp, Homo sapiens
cacgtattatatgct

SEQ ID NO: 1495784 - DNA, 15 bp, Homo sapiens
gcacgtattatatgc

SEQ ID NO: 1495785 - DNA, 15 bp, Homo sapiens
agcacgtattatatg

SEQ ID NO: 1495786 - DNA, 15 bp, Homo sapiens
gagcacgtattatat

SEQ ID NO: 1495787 - DNA, 15 bp, Homo sapiens
ggagcacgtattata

SEQ ID NO: 1495788 - DNA, 15 bp, Homo sapiens
tggagcacgtattat

SEQ ID NO: 1495789 - DNA, 15 bp, Homo sapiens
gtggagcacgtatta

SEQ ID NO: 1495790 - DNA, 15 bp, Homo sapiens
tgtggagcacgtatt

SEQ ID NO: 1495791 - DNA, 15 bp, Homo sapiens
ttgtggagcacgtat

SEQ ID NO: 1495792 - DNA, 15 bp, Homo sapiens
tttgtggagcacgta

SEQ ID NO: 1495793 - DNA, 15 bp, Homo sapiens
atttgtggagcacgt

SEQ ID NO: 1495794 - DNA, 15 bp, Homo sapiens
tatttgtggagcacg

SEQ ID NO: 1495795 - DNA, 15 bp, Homo sapiens
atatttgtggagcac

SEQ ID NO: 1495796 - DNA, 15 bp, Homo sapiens
aatatttgtggagca

SEQ ID NO: 1495797 - DNA, 15 bp, Homo sapiens
taatatttgtggagc

SEQ ID NO: 1495798 - DNA, 15 bp, Homo sapiens
ctaatatttgtggag

SEQ ID NO: 1495799 - DNA, 15 bp, Homo sapiens
cctaatatttgtgga

SEQ ID NO: 1495800 - DNA, 15 bp, Homo sapiens
acctaatatttgtgg

SEQ ID NO: 1495801 - DNA, 15 bp, Homo sapiens
cacctaatatttgtg

SEQ ID NO: 1495802 - DNA, 15 bp, Homo sapiens
tcacctaatatttgt

SEQ ID NO: 1495803 - DNA, 15 bp, Homo sapiens
ctcacctaatatttg

SEQ ID NO: 1495804 - DNA, 15 bp, Homo sapiens
actcacctaatattt

SEQ ID NO: 1495805 - DNA, 15 bp, Homo sapiens
cactcacctaatatt

SEQ ID NO: 1495806 - DNA, 15 bp, Homo sapiens
tcactcacctaatat

SEQ ID NO: 1495807 - DNA, 15 bp, Homo sapiens
ctcactcacctaata

SEQ ID NO: 1495808 - DNA, 15 bp, Homo sapiens
actcactcacctaat

SEQ ID NO: 1495809 - DNA, 15 bp, Homo sapiens
tactcactcacctaa

SEQ ID NO: 1495810 - DNA, 15 bp, Homo sapiens
ttactcactcaccta

SEQ ID NO: 1495811 - DNA, 15 bp, Homo sapiens
cttactcactcacct

SEQ ID NO: 1495812 - DNA, 15 bp, Homo sapiens
ccttactcactcacc

SEQ ID NO: 1495813 - DNA, 15 bp, Homo sapiens
tccttactcactcac

SEQ ID NO: 1495814 - DNA, 15 bp, Homo sapiens
ttccttactcactca

SEQ ID NO: 1495815 - DNA, 15 bp, Homo sapiens
gttccttactcactc

SEQ ID NO: 1495816 - DNA, 15 bp, Homo sapiens
tgttccttactcact

SEQ ID NO: 1495817 - DNA, 15 bp, Homo sapiens
gtgttccttactcac

SEQ ID NO: 1495818 - DNA, 15 bp, Homo sapiens
tgtgttccttactca

SEQ ID NO: 1495819 - DNA, 15 bp, Homo sapiens
gtgtgttccttactc

SEQ ID NO: 1495820 - DNA, 15 bp, Homo sapiens
tgtgtgttccttact

SEQ ID NO: 1495821 - DNA, 15 bp, Homo sapiens
ttgtgtgttccttac

SEQ ID NO: 1495822 - DNA, 15 bp, Homo sapiens
cttgtgtgttcctta

SEQ ID NO: 1495823 - DNA, 15 bp, Homo sapiens
tcttgtgtgttcctt

SEQ ID NO: 1495824 - DNA, 15 bp, Homo sapiens
gtcttgtgtgttcct

SEQ ID NO: 1495825 - DNA, 15 bp, Homo sapiens
agtcttgtgtgttcc

SEQ ID NO: 1495826 - DNA, 15 bp, Homo sapiens
tagtcttgtgtgttc

SEQ ID NO: 1495827 - DNA, 15 bp, Homo sapiens
atagtcttgtgtgtt

SEQ ID NO: 1495828 - DNA, 15 bp, Homo sapiens
gatagtcttgtgtgt

SEQ ID NO: 1495829 - DNA, 15 bp, Homo sapiens
tgatagtcttgtgtg

SEQ ID NO: 1495830 - DNA, 15 bp, Homo sapiens
ctgatagtcttgtgt

SEQ ID NO: 1495831 - DNA, 15 bp, Homo sapiens
cctgatagtcttgtg

SEQ ID NO: 1495832 - DNA, 15 bp, Homo sapiens
acctgatagtcttgt

SEQ ID NO: 1495833 - DNA, 15 bp, Homo sapiens
aacctgatagtcttg

SEQ ID NO: 1495834 - DNA, 15 bp, Homo sapiens
aaacctgatagtctt

SEQ ID NO: 1495835 - DNA, 15 bp, Homo sapiens
taaacctgatagtct

SEQ ID NO: 1495836 - DNA, 15 bp, Homo sapiens
ttaaacctgatagtc

SEQ ID NO: 1495837 - DNA, 15 bp, Homo sapiens
cttaaacctgatagt

SEQ ID NO: 1495838 - DNA, 15 bp, Homo sapiens
gcttaaacctgatag

SEQ ID NO: 1495839 - DNA, 15 bp, Homo sapiens
agcttaaacctgata

SEQ ID NO: 1495840 - DNA, 15 bp, Homo sapiens
tagcttaaacctgat

SEQ ID NO: 1495841 - DNA, 15 bp, Homo sapiens
gtagcttaaacctga

SEQ ID NO: 1495842 - DNA, 15 bp, Homo sapiens
agtagcttaaacctg

SEQ ID NO: 1495843 - DNA, 15 bp, Homo sapiens
cagtagcttaaacct

SEQ ID NO: 1495844 - DNA, 15 bp, Homo sapiens
acagtagcttaaacc

SEQ ID NO: 1495845 - DNA, 15 bp, Homo sapiens
tacagtagcttaaac

SEQ ID NO: 1495846 - DNA, 15 bp, Homo sapiens
atacagtagcttaaa

SEQ ID NO: 1495847 - DNA, 15 bp, Homo sapiens
tatacagtagcttaa

SEQ ID NO: 1495848 - DNA, 15 bp, Homo sapiens
ttatacagtagctta

SEQ ID NO: 1495849 - DNA, 15 bp, Homo sapiens
cttatacagtagctt

SEQ ID NO: 1495850 - DNA, 15 bp, Homo sapiens
tcttatacagtagct

SEQ ID NO: 1495851 - DNA, 15 bp, Homo sapiens
gtcttatacagtagc

SEQ ID NO: 1495852 - DNA, 15 bp, Homo sapiens
agtcttatacagtag

SEQ ID NO: 1495853 - DNA, 15 bp, Homo sapiens
aagtcttatacagta

SEQ ID NO: 1495854 - DNA, 15 bp, Homo sapiens
aaagtcttatacagt

SEQ ID NO: 1495855 - DNA, 15 bp, Homo sapiens
taaagtcttatacag

SEQ ID NO: 1495856 - DNA, 15 bp, Homo sapiens
gtaaagtcttataca

SEQ ID NO: 1495857 - DNA, 15 bp, Homo sapiens
agtaaagtcttatac

SEQ ID NO: 1495858 - DNA, 15 bp, Homo sapiens
cagtaaagtcttata

SEQ ID NO: 1495859 - DNA, 15 bp, Homo sapiens
ccagtaaagtcttat

SEQ ID NO: 1495860 - DNA, 15 bp, Homo sapiens
tccagtaaagtctta

SEQ ID NO: 1495861 - DNA, 15 bp, Homo sapiens
ctccagtaaagtctt

SEQ ID NO: 1495862 - DNA, 15 bp, Homo sapiens
actccagtaaagtct

SEQ ID NO: 1495863 - DNA, 15 bp, Homo sapiens
aactccagtaaagtc

SEQ ID NO: 1495864 - DNA, 15 bp, Homo sapiens
gaactccagtaaagt

SEQ ID NO: 1495865 - DNA, 15 bp, Homo sapiens
agaactccagtaaag

SEQ ID NO: 1495866 - DNA, 15 bp, Homo sapiens
tagaactccagtaaa

SEQ ID NO: 1495867 - DNA, 15 bp, Homo sapiens
ttagaactccagtaa

SEQ ID NO: 1495868 - DNA, 15 bp, Homo sapiens
tttagaactccagta

SEQ ID NO: 1495869 - DNA, 15 bp, Homo sapiens
ctttagaactccagt

SEQ ID NO: 1495870 - DNA, 15 bp, Homo sapiens
gctttagaactccag

SEQ ID NO: 1495871 - DNA, 15 bp, Homo sapiens
ggctttagaactcca

SEQ ID NO: 1495872 - DNA, 15 bp, Homo sapiens
aggctttagaactcc

SEQ ID NO: 1495873 - DNA, 15 bp, Homo sapiens
aaggctttagaactc

SEQ ID NO: 1495874 - DNA, 15 bp, Homo sapiens
aaaggctttagaact

SEQ ID NO: 1495875 - DNA, 15 bp, Homo sapiens
caaaggctttagaac

SEQ ID NO: 1495876 - DNA, 15 bp, Homo sapiens
tcaaaggctttagaa

SEQ ID NO: 1495877 - DNA, 15 bp, Homo sapiens
ttcaaaggctttaga

SEQ ID NO: 1495878 - DNA, 15 bp, Homo sapiens
cttcaaaggctttag

SEQ ID NO: 1495879 - DNA, 15 bp, Homo sapiens
tcttcaaaggcttta

SEQ ID NO: 1495880 - DNA, 15 bp, Homo sapiens
ttcttcaaaggcttt

SEQ ID NO: 1495881 - DNA, 15 bp, Homo sapiens
attcttcaaaggctt

SEQ ID NO: 1495882 - DNA, 15 bp, Homo sapiens
gattcttcaaaggct

SEQ ID NO: 1495883 - DNA, 15 bp, Homo sapiens
tgattcttcaaaggc

SEQ ID NO: 1495884 - DNA, 15 bp, Homo sapiens
ctgattcttcaaagg

SEQ ID NO: 1495885 - DNA, 15 bp, Homo sapiens
actgattcttcaaag

SEQ ID NO: 1495886 - DNA, 15 bp, Homo sapiens
gactgattcttcaaa

SEQ ID NO: 1495887 - DNA, 15 bp, Homo sapiens
tgactgattcttcaa

SEQ ID NO: 1495888 - DNA, 15 bp, Homo sapiens
ttgactgattcttca

SEQ ID NO: 1495889 - DNA, 15 bp, Homo sapiens
tttgactgattcttc

SEQ ID NO: 1495890 - DNA, 15 bp, Homo sapiens
ctttgactgattctt

SEQ ID NO: 1495891 - DNA, 15 bp, Homo sapiens
actttgactgattct

SEQ ID NO: 1495892 - DNA, 15 bp, Homo sapiens
cactttgactgattc

SEQ ID NO: 1495893 - DNA, 15 bp, Homo sapiens
ccactttgactgatt

SEQ ID NO: 1495894 - DNA, 15 bp, Homo sapiens
gccactttgactgat

SEQ ID NO: 1495895 - DNA, 15 bp, Homo sapiens
tgccactttgactga

SEQ ID NO: 1495896 - DNA, 15 bp, Homo sapiens
ctgccactttgactg

SEQ ID NO: 1495897 - DNA, 15 bp, Homo sapiens
tctgccactttgact

SEQ ID NO: 1495898 - DNA, 15 bp, Homo sapiens
ctctgccactttgac

SEQ ID NO: 1495899 - DNA, 15 bp, Homo sapiens
actctgccactttga

SEQ ID NO: 1495900 - DNA, 15 bp, Homo sapiens
tactctgccactttg

SEQ ID NO: 1495901 - DNA, 15 bp, Homo sapiens
ctactctgccacttt

SEQ ID NO: 1495902 - DNA, 15 bp, Homo sapiens
cctactctgccactt

SEQ ID NO: 1495903 - DNA, 15 bp, Homo sapiens
tcctactctgccact

SEQ ID NO: 1495904 - DNA, 15 bp, Homo sapiens
ttcctactctgccac

SEQ ID NO: 1495905 - DNA, 15 bp, Homo sapiens
attcctactctgcca

SEQ ID NO: 1495906 - DNA, 15 bp, Homo sapiens
cattcctactctgcc

SEQ ID NO: 1495907 - DNA, 15 bp, Homo sapiens
ccattcctactctgc

SEQ ID NO: 1495908 - DNA, 15 bp, Homo sapiens
cccattcctactctg

SEQ ID NO: 1495909 - DNA, 15 bp, Homo sapiens
tcccattcctactct

SEQ ID NO: 1495910 - DNA, 15 bp, Homo sapiens
ttcccattcctactc

SEQ ID NO: 1495911 - DNA, 15 bp, Homo sapiens
tttcccattcctact

SEQ ID NO: 1495912 - DNA, 15 bp, Homo sapiens
gtttcccattcctac

SEQ ID NO: 1495913 - DNA, 15 bp, Homo sapiens
agtttcccattccta

SEQ ID NO: 1495914 - DNA, 15 bp, Homo sapiens
aagtttcccattcct

SEQ ID NO: 1495915 - DNA, 15 bp, Homo sapiens
caagtttcccattcc

SEQ ID NO: 1495916 - DNA, 15 bp, Homo sapiens
tcaagtttcccattc

SEQ ID NO: 1495917 - DNA, 15 bp, Homo sapiens
ctcaagtttcccatt

SEQ ID NO: 1495918 - DNA, 15 bp, Homo sapiens
actcaagtttcccat

SEQ ID NO: 1495919 - DNA, 15 bp, Homo sapiens
aactcaagtttccca

SEQ ID NO: 1495920 - DNA, 15 bp, Homo sapiens
gaactcaagtttccc

SEQ ID NO: 1495921 - DNA, 15 bp, Homo sapiens
agaactcaagtttcc

SEQ ID NO: 1495922 - DNA, 15 bp, Homo sapiens
tagaactcaagtttc

SEQ ID NO: 1495923 - DNA, 15 bp, Homo sapiens
ctagaactcaagttt

SEQ ID NO: 1495924 - DNA, 15 bp, Homo sapiens
cctagaactcaagtt

SEQ ID NO: 1495925 - DNA, 15 bp, Homo sapiens
gcctagaactcaagt

SEQ ID NO: 1495926 - DNA, 15 bp, Homo sapiens
ggcctagaactcaag

SEQ ID NO: 1495927 - DNA, 15 bp, Homo sapiens
gggcctagaactcaa

SEQ ID NO: 1495928 - DNA, 15 bp, Homo sapiens
tgggcctagaactca

SEQ ID NO: 1495929 - DNA, 15 bp, Homo sapiens
ctgggcctagaactc

SEQ ID NO: 1495930 - DNA, 15 bp, Homo sapiens
actgggcctagaact

SEQ ID NO: 1495931 - DNA, 15 bp, Homo sapiens
gactgggcctagaac

SEQ ID NO: 1495932 - DNA, 15 bp, Homo sapiens
agactgggcctagaa

SEQ ID NO: 1495933 - DNA, 15 bp, Homo sapiens
cagactgggcctaga

SEQ ID NO: 1495934 - DNA, 15 bp, Homo sapiens
tcagactgggcctag

SEQ ID NO: 1495935 - DNA, 15 bp, Homo sapiens
gtcagactgggccta

SEQ ID NO: 1495936 - DNA, 15 bp, Homo sapiens
agtcagactgggcct

SEQ ID NO: 1495937 - DNA, 15 bp, Homo sapiens
gagtcagactgggcc

SEQ ID NO: 1495938 - DNA, 15 bp, Homo sapiens
agagtcagactgggc

SEQ ID NO: 1495939 - DNA, 15 bp, Homo sapiens
cagagtcagactggg

SEQ ID NO: 1495940 - DNA, 15 bp, Homo sapiens
acagagtcagactgg

SEQ ID NO: 1495941 - DNA, 15 bp, Homo sapiens
cacagagtcagactg

SEQ ID NO: 1495942 - DNA, 15 bp, Homo sapiens
ccacagagtcagact

SEQ ID NO: 1495943 - DNA, 15 bp, Homo sapiens
accacagagtcagac

SEQ ID NO: 1495944 - DNA, 15 bp, Homo sapiens
aaccacagagtcaga

SEQ ID NO: 1495945 - DNA, 15 bp, Homo sapiens
taaccacagagtcag

SEQ ID NO: 1495946 - DNA, 15 bp, Homo sapiens
ataaccacagagtca

SEQ ID NO: 1495947 - DNA, 15 bp, Homo sapiens
gataaccacagagtc

SEQ ID NO: 1495948 - DNA, 15 bp, Homo sapiens
agataaccacagagt

SEQ ID NO: 1495949 - DNA, 15 bp, Homo sapiens
gagataaccacagag

SEQ ID NO: 1495950 - DNA, 15 bp, Homo sapiens
ggagataaccacaga

SEQ ID NO: 1495951 - DNA, 15 bp, Homo sapiens
tggagataaccacag

SEQ ID NO: 1495952 - DNA, 15 bp, Homo sapiens
ctggagataaccaca

SEQ ID NO: 1495953 - DNA, 15 bp, Homo sapiens
cctggagataaccac

SEQ ID NO: 1495954 - DNA, 15 bp, Homo sapiens
ccctggagataacca

SEQ ID NO: 1495955 - DNA, 15 bp, Homo sapiens
cccctggagataacc

SEQ ID NO: 1495956 - DNA, 15 bp, Homo sapiens
ccccctggagataac

SEQ ID NO: 1495957 - DNA, 15 bp, Homo sapiens
tccccctggagataa

SEQ ID NO: 1495958 - DNA, 15 bp, Homo sapiens
ttccccctggagata

SEQ ID NO: 1495959 - DNA, 15 bp, Homo sapiens
tttccccctggagat

SEQ ID NO: 1495960 - DNA, 15 bp, Homo sapiens
ttttccccctggaga

SEQ ID NO: 1495961 - DNA, 15 bp, Homo sapiens
attttccccctggag

SEQ ID NO: 1495962 - DNA, 15 bp, Homo sapiens
cattttccccctgga

SEQ ID NO: 1495963 - DNA, 15 bp, Homo sapiens
ccattttccccctgg

SEQ ID NO: 1495964 - DNA, 15 bp, Homo sapiens
tccattttccccctg

SEQ ID NO: 1495965 - DNA, 15 bp, Homo sapiens
gtccattttccccct

SEQ ID NO: 1495966 - DNA, 15 bp, Homo sapiens
tgtccattttccccc

SEQ ID NO: 1495967 - DNA, 15 bp, Homo sapiens
ttgtccattttcccc

SEQ ID NO: 1495968 - DNA, 15 bp, Homo sapiens
attgtccattttccc

SEQ ID NO: 1495969 - DNA, 15 bp, Homo sapiens
tattgtccattttcc

SEQ ID NO: 1495970 - DNA, 15 bp, Homo sapiens
gtattgtccattttc

SEQ ID NO: 1495971 - DNA, 15 bp, Homo sapiens
ggtattgtccatttt

SEQ ID NO: 1495972 - DNA, 15 bp, Homo sapiens
tggtattgtccattt

SEQ ID NO: 1495973 - DNA, 15 bp, Homo sapiens
gtggtattgtccatt

SEQ ID NO: 1495974 - DNA, 15 bp, Homo sapiens
agtggtattgtccat

SEQ ID NO: 1495975 - DNA, 15 bp, Homo sapiens
gagtggtattgtcca

SEQ ID NO: 1495976 - DNA, 15 bp, Homo sapiens
ggagtggtattgtcc

SEQ ID NO: 1495977 - DNA, 15 bp, Homo sapiens
tggagtggtattgtc

SEQ ID NO: 1495978 - DNA, 15 bp, Homo sapiens
gtggagtggtattgt

SEQ ID NO: 1495979 - DNA, 15 bp, Homo sapiens
ggtggagtggtattg

SEQ ID NO: 1495980 - DNA, 15 bp, Homo sapiens
aggtggagtggtatt

SEQ ID NO: 1495981 - DNA, 15 bp, Homo sapiens
aaggtggagtggtat

SEQ ID NO: 1495982 - DNA, 15 bp, Homo sapiens
aaaggtggagtggta

SEQ ID NO: 1495983 - DNA, 15 bp, Homo sapiens
gaaaggtggagtggt

SEQ ID NO: 1495984 - DNA, 15 bp, Homo sapiens
tgaaaggtggagtgg

SEQ ID NO: 1495985 - DNA, 15 bp, Homo sapiens
atgaaaggtggagtg

SEQ ID NO: 1495986 - DNA, 15 bp, Homo sapiens
tatgaaaggtggagt

SEQ ID NO: 1495987 - DNA, 15 bp, Homo sapiens
ttatgaaaggtggag

SEQ ID NO: 1495988 - DNA, 15 bp, Homo sapiens
attatgaaaggtgga

SEQ ID NO: 1495989 - DNA, 15 bp, Homo sapiens
gattatgaaaggtgg

SEQ ID NO: 1495990 - DNA, 15 bp, Homo sapiens
ggattatgaaaggtg

SEQ ID NO: 1495991 - DNA, 15 bp, Homo sapiens
aggattatgaaaggt

SEQ ID NO: 1495992 - DNA, 15 bp, Homo sapiens
aaggattatgaaagg

SEQ ID NO: 1495993 - DNA, 15 bp, Homo sapiens
aaaggattatgaaag

SEQ ID NO: 1495994 - DNA, 15 bp, Homo sapiens
taaaggattatgaaa

SEQ ID NO: 1495995 - DNA, 15 bp, Homo sapiens
ttaaaggattatgaa

SEQ ID NO: 1495996 - DNA, 15 bp, Homo sapiens
cttaaaggattatga

SEQ ID NO: 1495997 - DNA, 15 bp, Homo sapiens
tcttaaaggattatg

SEQ ID NO: 1495998 - DNA, 15 bp, Homo sapiens
ttcttaaaggattat

SEQ ID NO: 1495999 - DNA, 15 bp, Homo sapiens
gttcttaaaggatta

SEQ ID NO: 1496000 - DNA, 15 bp, Homo sapiens
tgttcttaaaggatt

SEQ ID NO: 1496001 - DNA, 15 bp, Homo sapiens
atgttcttaaaggat

SEQ ID NO: 1496002 - DNA, 15 bp, Homo sapiens
gatgttcttaaagga

SEQ ID NO: 1496003 - DNA, 15 bp, Homo sapiens
tgatgttcttaaagg

SEQ ID NO: 1496004 - DNA, 15 bp, Homo sapiens
atgatgttcttaaag

SEQ ID NO: 1496005 - DNA, 15 bp, Homo sapiens
catgatgttcttaaa

SEQ ID NO: 1496006 - DNA, 15 bp, Homo sapiens
acatgatgttcttaa

SEQ ID NO: 1496007 - DNA, 15 bp, Homo sapiens
tacatgatgttctta

SEQ ID NO: 1496008 - DNA, 15 bp, Homo sapiens
ttacatgatgttctt

SEQ ID NO: 1496009 - DNA, 15 bp, Homo sapiens
tttacatgatgttct

SEQ ID NO: 1496010 - DNA, 15 bp, Homo sapiens
ctttacatgatgttc

SEQ ID NO: 1496011 - DNA, 15 bp, Homo sapiens
cctttacatgatgtt

SEQ ID NO: 1496012 - DNA, 15 bp, Homo sapiens
gcctttacatgatgt

SEQ ID NO: 1496013 - DNA, 15 bp, Homo sapiens
tgcctttacatgatg

SEQ ID NO: 1496014 - DNA, 15 bp, Homo sapiens
ctgcctttacatgat

SEQ ID NO: 1496015 - DNA, 15 bp, Homo sapiens
cctgcctttacatga

SEQ ID NO: 1496016 - DNA, 15 bp, Homo sapiens
gcctgcctttacatg

SEQ ID NO: 1496017 - DNA, 15 bp, Homo sapiens
tgcctgcctttacat

SEQ ID NO: 1496018 - DNA, 15 bp, Homo sapiens
ctgcctgcctttaca

SEQ ID NO: 1496019 - DNA, 15 bp, Homo sapiens
tctgcctgcctttac

SEQ ID NO: 1496020 - DNA, 15 bp, Homo sapiens
ttctgcctgccttta

SEQ ID NO: 1496021 - DNA, 15 bp, Homo sapiens
gttctgcctgccttt

SEQ ID NO: 1496022 - DNA, 15 bp, Homo sapiens
tgttctgcctgcctt

SEQ ID NO: 1496023 - DNA, 15 bp, Homo sapiens
gtgttctgcctgcct

SEQ ID NO: 1496024 - DNA, 15 bp, Homo sapiens
tgtgttctgcctgcc

SEQ ID NO: 1496025 - DNA, 15 bp, Homo sapiens
atgtgttctgcctgc

SEQ ID NO: 1496026 - DNA, 15 bp, Homo sapiens
aatgtgttctgcctg

SEQ ID NO: 1496027 - DNA, 15 bp, Homo sapiens
aaatgtgttctgcct

SEQ ID NO: 1496028 - DNA, 15 bp, Homo sapiens
taaatgtgttctgcc

SEQ ID NO: 1496029 - DNA, 15 bp, Homo sapiens
ctaaatgtgttctgc

SEQ ID NO: 1496030 - DNA, 15 bp, Homo sapiens
cctaaatgtgttctg

SEQ ID NO: 1496031 - DNA, 15 bp, Homo sapiens
tcctaaatgtgttct

SEQ ID NO: 1496032 - DNA, 15 bp, Homo sapiens
ctcctaaatgtgttc

SEQ ID NO: 1496033 - DNA, 15 bp, Homo sapiens
tctcctaaatgtgtt

SEQ ID NO: 1496034 - DNA, 15 bp, Homo sapiens
ttctcctaaatgtgt

SEQ ID NO: 1496035 - DNA, 15 bp, Homo sapiens
gttctcctaaatgtg

SEQ ID NO: 1496036 - DNA, 15 bp, Homo sapiens
tgttctcctaaatgt

SEQ ID NO: 1496037 - DNA, 15 bp, Homo sapiens
gtgttctcctaaatg

SEQ ID NO: 1496038 - DNA, 15 bp, Homo sapiens
tgtgttctcctaaat

SEQ ID NO: 1496039 - DNA, 15 bp, Homo sapiens
atgtgttctcctaaa

SEQ ID NO: 1496040 - DNA, 15 bp, Homo sapiens
catgtgttctcctaa

SEQ ID NO: 1496041 - DNA, 15 bp, Homo sapiens
tcatgtgttctccta

SEQ ID NO: 1496042 - DNA, 15 bp, Homo sapiens
atcatgtgttctcct

SEQ ID NO: 1496043 - DNA, 15 bp, Homo sapiens
aatcatgtgttctcc

SEQ ID NO: 1496044 - DNA, 15 bp, Homo sapiens
aaatcatgtgttctc

SEQ ID NO: 1496045 - DNA, 15 bp, Homo sapiens
gaaatcatgtgttct

SEQ ID NO: 1496046 - DNA, 15 bp, Homo sapiens
agaaatcatgtgttc

SEQ ID NO: 1496047 - DNA, 15 bp, Homo sapiens
tagaaatcatgtgtt

SEQ ID NO: 1496048 - DNA, 15 bp, Homo sapiens
ttagaaatcatgtgt

SEQ ID NO: 1496049 - DNA, 15 bp, Homo sapiens
cttagaaatcatgtg

SEQ ID NO: 1496050 - DNA, 15 bp, Homo sapiens
gcttagaaatcatgt

SEQ ID NO: 1496051 - DNA, 15 bp, Homo sapiens
agcttagaaatcatg

SEQ ID NO: 1496052 - DNA, 15 bp, Homo sapiens
tagcttagaaatcat

SEQ ID NO: 1496053 - DNA, 15 bp, Homo sapiens
ctagcttagaaatca

SEQ ID NO: 1496054 - DNA, 15 bp, Homo sapiens
tctagcttagaaatc

SEQ ID NO: 1496055 - DNA, 15 bp, Homo sapiens
ctctagcttagaaat

SEQ ID NO: 1496056 - DNA, 15 bp, Homo sapiens
gctctagcttagaaa

SEQ ID NO: 1496057 - DNA, 15 bp, Homo sapiens
tgctctagcttagaa

SEQ ID NO: 1496058 - DNA, 15 bp, Homo sapiens
atgctctagcttaga

SEQ ID NO: 1496059 - DNA, 15 bp, Homo sapiens
aatgctctagcttag

SEQ ID NO: 1496060 - DNA, 15 bp, Homo sapiens
gaatgctctagctta

SEQ ID NO: 1496061 - DNA, 15 bp, Homo sapiens
agaatgctctagctt

SEQ ID NO: 1496062 - DNA, 15 bp, Homo sapiens
tagaatgctctagct

SEQ ID NO: 1496063 - DNA, 15 bp, Homo sapiens
ctagaatgctctagc

SEQ ID NO: 1496064 - DNA, 15 bp, Homo sapiens
actagaatgctctag

SEQ ID NO: 1496065 - DNA, 15 bp, Homo sapiens
gactagaatgctcta

SEQ ID NO: 1496066 - DNA, 15 bp, Homo sapiens
agactagaatgctct

SEQ ID NO: 1496067 - DNA, 15 bp, Homo sapiens
tagactagaatgctc

SEQ ID NO: 1496068 - DNA, 15 bp, Homo sapiens
ctagactagaatgct

SEQ ID NO: 1496069 - DNA, 15 bp, Homo sapiens
tctagactagaatgc

SEQ ID NO: 1496070 - DNA, 15 bp, Homo sapiens
ctctagactagaatg

SEQ ID NO: 1496071 - DNA, 15 bp, Homo sapiens
tctctagactagaat

SEQ ID NO: 1496072 - DNA, 15 bp, Homo sapiens
ttctctagactagaa

SEQ ID NO: 1496073 - DNA, 15 bp, Homo sapiens
tttctctagactaga

SEQ ID NO: 1496074 - DNA, 15 bp, Homo sapiens
atttctctagactag

SEQ ID NO: 1496075 - DNA, 15 bp, Homo sapiens
catttctctagacta

SEQ ID NO: 1496076 - DNA, 15 bp, Homo sapiens
gcatttctctagact

SEQ ID NO: 1496077 - DNA, 15 bp, Homo sapiens
agcatttctctagac

SEQ ID NO: 1496078 - DNA, 15 bp, Homo sapiens
aagcatttctctaga

SEQ ID NO: 1496079 - DNA, 15 bp, Homo sapiens
caagcatttctctag

SEQ ID NO: 1496080 - DNA, 15 bp, Homo sapiens
acaagcatttctcta

SEQ ID NO: 1496081 - DNA, 15 bp, Homo sapiens
tacaagcatttctct

SEQ ID NO: 1496082 - DNA, 15 bp, Homo sapiens
ttacaagcatttctc

SEQ ID NO: 1496083 - DNA, 15 bp, Homo sapiens
attacaagcatttct

SEQ ID NO: 1496084 - DNA, 15 bp, Homo sapiens
tattacaagcatttc

SEQ ID NO: 1496085 - DNA, 15 bp, Homo sapiens
atattacaagcattt

SEQ ID NO: 1496086 - DNA, 15 bp, Homo sapiens
tatattacaagcatt

SEQ ID NO: 1496087 - DNA, 15 bp, Homo sapiens
gtatattacaagcat

SEQ ID NO: 1496088 - DNA, 15 bp, Homo sapiens
agtatattacaagca

SEQ ID NO: 1496089 - DNA, 15 bp, Homo sapiens
cagtatattacaagc

SEQ ID NO: 1496090 - DNA, 15 bp, Homo sapiens
acagtatattacaag

SEQ ID NO: 1496091 - DNA, 15 bp, Homo sapiens
aacagtatattacaa

SEQ ID NO: 1496092 - DNA, 15 bp, Homo sapiens
taacagtatattaca

SEQ ID NO: 1496093 - DNA, 15 bp, Homo sapiens
ataacagtatattac

SEQ ID NO: 1496094 - DNA, 15 bp, Homo sapiens
tataacagtatatta

SEQ ID NO: 1496095 - DNA, 15 bp, Homo sapiens
ctataacagtatatt

SEQ ID NO: 1496096 - DNA, 15 bp, Homo sapiens
actataacagtatat

SEQ ID NO: 1496097 - DNA, 15 bp, Homo sapiens
gactataacagtata

SEQ ID NO: 1496098 - DNA, 15 bp, Homo sapiens
cgactataacagtat

SEQ ID NO: 1496099 - DNA, 15 bp, Homo sapiens
acgactataacagta

SEQ ID NO: 1496100 - DNA, 15 bp, Homo sapiens
gacgactataacagt

SEQ ID NO: 1496101 - DNA, 15 bp, Homo sapiens
agacgactataacag

SEQ ID NO: 1496102 - DNA, 15 bp, Homo sapiens
tagacgactataaca

SEQ ID NO: 1496103 - DNA, 15 bp, Homo sapiens
ttagacgactataac

SEQ ID NO: 1496104 - DNA, 15 bp, Homo sapiens
cttagacgactataa

SEQ ID NO: 1496105 - DNA, 15 bp, Homo sapiens
acttagacgactata

SEQ ID NO: 1496106 - DNA, 15 bp, Homo sapiens
cacttagacgactat

SEQ ID NO: 1496107 - DNA, 15 bp, Homo sapiens
ccacttagacgacta

SEQ ID NO: 1496108 - DNA, 15 bp, Homo sapiens
gccacttagacgact

SEQ ID NO: 1496109 - DNA, 15 bp, Homo sapiens
agccacttagacgac

SEQ ID NO: 1496110 - DNA, 15 bp, Homo sapiens
cagccacttagacga

SEQ ID NO: 1496111 - DNA, 15 bp, Homo sapiens
acagccacttagacg

SEQ ID NO: 1496112 - DNA, 15 bp, Homo sapiens
aacagccacttagac

SEQ ID NO: 1496113 - DNA, 15 bp, Homo sapiens
caacagccacttaga

SEQ ID NO: 1496114 - DNA, 15 bp, Homo sapiens
ccaacagccacttag

SEQ ID NO: 1496115 - DNA, 15 bp, Homo sapiens
tccaacagccactta

SEQ ID NO: 1496116 - DNA, 15 bp, Homo sapiens
ctccaacagccactt

SEQ ID NO: 1496117 - DNA, 15 bp, Homo sapiens
cctccaacagccact

SEQ ID NO: 1496118 - DNA, 15 bp, Homo sapiens
acctccaacagccac

SEQ ID NO: 1496119 - DNA, 15 bp, Homo sapiens
cacctccaacagcca

SEQ ID NO: 1496120 - DNA, 15 bp, Homo sapiens
acacctccaacagcc

SEQ ID NO: 1496121 - DNA, 15 bp, Homo sapiens
tacacctccaacagc

SEQ ID NO: 1496122 - DNA, 15 bp, Homo sapiens
ttacacctccaacag

SEQ ID NO: 1496123 - DNA, 15 bp, Homo sapiens
tttacacctccaaca

SEQ ID NO: 1496124 - DNA, 15 bp, Homo sapiens
gtttacacctccaac

SEQ ID NO: 1496125 - DNA, 15 bp, Homo sapiens
agtttacacctccaa

SEQ ID NO: 1496126 - DNA, 15 bp, Homo sapiens
cagtttacacctcca

SEQ ID NO: 1496127 - DNA, 15 bp, Homo sapiens
ccagtttacacctcc

SEQ ID NO: 1496128 - DNA, 15 bp, Homo sapiens
accagtttacacctc

SEQ ID NO: 1496129 - DNA, 15 bp, Homo sapiens
taccagtttacacct

SEQ ID NO: 1496130 - DNA, 15 bp, Homo sapiens
ataccagtttacacc

SEQ ID NO: 1496131 - DNA, 15 bp, Homo sapiens
tataccagtttacac

SEQ ID NO: 1496132 - DNA, 15 bp, Homo sapiens
ctataccagtttaca

SEQ ID NO: 1496133 - DNA, 15 bp, Homo sapiens
actataccagtttac

SEQ ID NO: 1496134 - DNA, 15 bp, Homo sapiens
aactataccagttta

SEQ ID NO: 1496135 - DNA, 15 bp, Homo sapiens
aaactataccagttt

SEQ ID NO: 1496136 - DNA, 15 bp, Homo sapiens
aaaactataccagtt

SEQ ID NO: 1496137 - DNA, 15 bp, Homo sapiens
aaaaactataccagt

SEQ ID NO: 1496138 - DNA, 15 bp, Homo sapiens
caaaaactataccag

SEQ ID NO: 1496139 - DNA, 15 bp, Homo sapiens
ccaaaaactatacca

SEQ ID NO: 1496140 - DNA, 15 bp, Homo sapiens
cccaaaaactatacc

SEQ ID NO: 1496141 - DNA, 15 bp, Homo sapiens
tcccaaaaactatac

SEQ ID NO: 1496142 - DNA, 15 bp, Homo sapiens
atcccaaaaactata

SEQ ID NO: 1496143 - DNA, 15 bp, Homo sapiens
catcccaaaaactat

SEQ ID NO: 1496144 - DNA, 15 bp, Homo sapiens
ccatcccaaaaacta

SEQ ID NO: 1496145 - DNA, 15 bp, Homo sapiens
gccatcccaaaaact

SEQ ID NO: 1496146 - DNA, 15 bp, Homo sapiens
tgccatcccaaaaac

SEQ ID NO: 1496147 - DNA, 15 bp, Homo sapiens
ttgccatcccaaaaa

SEQ ID NO: 1496148 - DNA, 15 bp, Homo sapiens
attgccatcccaaaa

SEQ ID NO: 1496149 - DNA, 15 bp, Homo sapiens
aattgccatcccaaa

SEQ ID NO: 1496150 - DNA, 15 bp, Homo sapiens
aaattgccatcccaa

SEQ ID NO: 1496151 - DNA, 15 bp, Homo sapiens
caaattgccatccca

SEQ ID NO: 1496152 - DNA, 15 bp, Homo sapiens
ccaaattgccatccc

SEQ ID NO: 1496153 - DNA, 15 bp, Homo sapiens
gccaaattgccatcc

SEQ ID NO: 1496154 - DNA, 15 bp, Homo sapiens
tgccaaattgccatc

SEQ ID NO: 1496155 - DNA, 15 bp, Homo sapiens
ttgccaaattgccat

SEQ ID NO: 1496156 - DNA, 15 bp, Homo sapiens
tttgccaaattgcca

SEQ ID NO: 1496157 - DNA, 15 bp, Homo sapiens
ttttgccaaattgcc

SEQ ID NO: 1496158 - DNA, 15 bp, Homo sapiens
attttgccaaattgc

SEQ ID NO: 1496159 - DNA, 15 bp, Homo sapiens
gattttgccaaattg

SEQ ID NO: 1496160 - DNA, 15 bp, Homo sapiens
agattttgccaaatt

SEQ ID NO: 1496161 - DNA, 15 bp, Homo sapiens
tagattttgccaaat

SEQ ID NO: 1496162 - DNA, 15 bp, Homo sapiens
gtagattttgccaaa

SEQ ID NO: 1496163 - DNA, 15 bp, Homo sapiens
ggtagattttgccaa

SEQ ID NO: 1496164 - DNA, 15 bp, Homo sapiens
cggtagattttgcca

SEQ ID NO: 1496165 - DNA, 15 bp, Homo sapiens
tcggtagattttgcc

SEQ ID NO: 1496166 - DNA, 15 bp, Homo sapiens
ttcggtagattttgc

SEQ ID NO: 1496167 - DNA, 15 bp, Homo sapiens
tttcggtagattttg

SEQ ID NO: 1496168 - DNA, 15 bp, Homo sapiens
atttcggtagatttt

SEQ ID NO: 1496169 - DNA, 15 bp, Homo sapiens
aatttcggtagattt

SEQ ID NO: 1496170 - DNA, 15 bp, Homo sapiens
aaatttcggtagatt

SEQ ID NO: 1496171 - DNA, 15 bp, Homo sapiens
aaaatttcggtagat

SEQ ID NO: 1496172 - DNA, 15 bp, Homo sapiens
taaaatttcggtaga

SEQ ID NO: 1496173 - DNA, 15 bp, Homo sapiens
ttaaaatttcggtag

SEQ ID NO: 1496174 - DNA, 15 bp, Homo sapiens
tttaaaatttcggta

SEQ ID NO: 1496175 - DNA, 15 bp, Homo sapiens
gtttaaaatttcggt

SEQ ID NO: 1496176 - DNA, 15 bp, Homo sapiens
cgtttaaaatttcgg

SEQ ID NO: 1496177 - DNA, 15 bp, Homo sapiens
acgtttaaaatttcg

SEQ ID NO: 1496178 - DNA, 15 bp, Homo sapiens
tacgtttaaaatttc

SEQ ID NO: 1496179 - DNA, 15 bp, Homo sapiens
atacgtttaaaattt

SEQ ID NO: 1496180 - DNA, 15 bp, Homo sapiens
tatacgtttaaaatt

SEQ ID NO: 1496181 - DNA, 15 bp, Homo sapiens
atatacgtttaaaat

SEQ ID NO: 1496182 - DNA, 15 bp, Homo sapiens
tatatacgtttaaaa

SEQ ID NO: 1496183 - DNA, 15 bp, Homo sapiens
ttatatacgtttaaa

SEQ ID NO: 1496184 - DNA, 15 bp, Homo sapiens
cttatatacgtttaa

SEQ ID NO: 1496185 - DNA, 15 bp, Homo sapiens
gcttatatacgttta

SEQ ID NO: 1496186 - DNA, 15 bp, Homo sapiens
agcttatatacgttt

SEQ ID NO: 1496187 - DNA, 15 bp, Homo sapiens
aagcttatatacgtt

SEQ ID NO: 1496188 - DNA, 15 bp, Homo sapiens
caagcttatatacgt

SEQ ID NO: 1496189 - DNA, 15 bp, Homo sapiens
tcaagcttatatacg

SEQ ID NO: 1496190 - DNA, 15 bp, Homo sapiens
gtcaagcttatatac

SEQ ID NO: 1496191 - DNA, 15 bp, Homo sapiens
agtcaagcttatata

SEQ ID NO: 1496192 - DNA, 15 bp, Homo sapiens
aagtcaagcttatat

SEQ ID NO: 1496193 - DNA, 15 bp, Homo sapiens
caagtcaagcttata

SEQ ID NO: 1496194 - DNA, 15 bp, Homo sapiens
tcaagtcaagcttat

SEQ ID NO: 1496195 - DNA, 15 bp, Homo sapiens
ttcaagtcaagctta

SEQ ID NO: 1496196 - DNA, 15 bp, Homo sapiens
tttcaagtcaagctt

SEQ ID NO: 1496197 - DNA, 15 bp, Homo sapiens
atttcaagtcaagct

SEQ ID NO: 1496198 - DNA, 15 bp, Homo sapiens
aatttcaagtcaagc

SEQ ID NO: 1496199 - DNA, 15 bp, Homo sapiens
aaatttcaagtcaag

SEQ ID NO: 1496200 - DNA, 15 bp, Homo sapiens
aaaatttcaagtcaa

SEQ ID NO: 1496201 - DNA, 15 bp, Homo sapiens
gaaaatttcaagtca

SEQ ID NO: 1496202 - DNA, 15 bp, Homo sapiens
tgaaaatttcaagtc

SEQ ID NO: 1496203 - DNA, 15 bp, Homo sapiens
atgaaaatttcaagt

SEQ ID NO: 1496204 - DNA, 15 bp, Homo sapiens
catgaaaatttcaag

SEQ ID NO: 1496205 - DNA, 15 bp, Homo sapiens
acatgaaaatttcaa

SEQ ID NO: 1496206 - DNA, 15 bp, Homo sapiens
gacatgaaaatttca

SEQ ID NO: 1496207 - DNA, 15 bp, Homo sapiens
agacatgaaaatttc

SEQ ID NO: 1496208 - DNA, 15 bp, Homo sapiens
tagacatgaaaattt

SEQ ID NO: 1496209 - DNA, 15 bp, Homo sapiens
ctagacatgaaaatt

SEQ ID NO: 1496210 - DNA, 15 bp, Homo sapiens
cctagacatgaaaat

SEQ ID NO: 1496211 - DNA, 15 bp, Homo sapiens
tcctagacatgaaaa

SEQ ID NO: 1496212 - DNA, 15 bp, Homo sapiens
gtcctagacatgaaa

SEQ ID NO: 1496213 - DNA, 15 bp, Homo sapiens
agtcctagacatgaa

SEQ ID NO: 1496214 - DNA, 15 bp, Homo sapiens
tagtcctagacatga

SEQ ID NO: 1496215 - DNA, 15 bp, Homo sapiens
atagtcctagacatg

SEQ ID NO: 1496216 - DNA, 15 bp, Homo sapiens
tatagtcctagacat

SEQ ID NO: 1496217 - DNA, 15 bp, Homo sapiens
atatagtcctagaca

SEQ ID NO: 1496218 - DNA, 15 bp, Homo sapiens
gatatagtcctagac

SEQ ID NO: 1496219 - DNA, 15 bp, Homo sapiens
ggatatagtcctaga

SEQ ID NO: 1496220 - DNA, 15 bp, Homo sapiens
aggatatagtcctag

SEQ ID NO: 1496221 - DNA, 15 bp, Homo sapiens
taggatatagtccta

SEQ ID NO: 1496222 - DNA, 15 bp, Homo sapiens
ataggatatagtcct

SEQ ID NO: 1496223 - DNA, 15 bp, Homo sapiens
tataggatatagtcc

SEQ ID NO: 1496224 - DNA, 15 bp, Homo sapiens
ctataggatatagtc

SEQ ID NO: 1496225 - DNA, 15 bp, Homo sapiens
tctataggatatagt

SEQ ID NO: 1496226 - DNA, 15 bp, Homo sapiens
ttctataggatatag

SEQ ID NO: 1496227 - DNA, 15 bp, Homo sapiens
tttctataggatata

SEQ ID NO: 1496228 - DNA, 15 bp, Homo sapiens
atttctataggatat

SEQ ID NO: 1496229 - DNA, 15 bp, Homo sapiens
aatttctataggata

SEQ ID NO: 1496230 - DNA, 15 bp, Homo sapiens
gaatttctataggat

SEQ ID NO: 1496231 - DNA, 15 bp, Homo sapiens
agaatttctatagga

SEQ ID NO: 1496232 - DNA, 15 bp, Homo sapiens
gagaatttctatagg

SEQ ID NO: 1496233 - DNA, 15 bp, Homo sapiens
tgagaatttctatag

SEQ ID NO: 1496234 - DNA, 15 bp, Homo sapiens
atgagaatttctata

SEQ ID NO: 1496235 - DNA, 15 bp, Homo sapiens
catgagaatttctat

SEQ ID NO: 1496236 - DNA, 15 bp, Homo sapiens
acatgagaatttcta

SEQ ID NO: 1496237 - DNA, 15 bp, Homo sapiens
cacatgagaatttct

SEQ ID NO: 1496238 - DNA, 15 bp, Homo sapiens
tcacatgagaatttc

SEQ ID NO: 1496239 - DNA, 15 bp, Homo sapiens
ctcacatgagaattt

SEQ ID NO: 1496240 - DNA, 15 bp, Homo sapiens
cctcacatgagaatt

SEQ ID NO: 1496241 - DNA, 15 bp, Homo sapiens
ccctcacatgagaat

SEQ ID NO: 1496242 - DNA, 15 bp, Homo sapiens
accctcacatgagaa

SEQ ID NO: 1496243 - DNA, 15 bp, Homo sapiens
caccctcacatgaga

SEQ ID NO: 1496244 - DNA, 15 bp, Homo sapiens
gcaccctcacatgag

SEQ ID NO: 1496245 - DNA, 15 bp, Homo sapiens
tgcaccctcacatga

SEQ ID NO: 1496246 - DNA, 15 bp, Homo sapiens
ttgcaccctcacatg

SEQ ID NO: 1496247 - DNA, 15 bp, Homo sapiens
tttgcaccctcacat

SEQ ID NO: 1496248 - DNA, 15 bp, Homo sapiens
ttttgcaccctcaca

SEQ ID NO: 1496249 - DNA, 15 bp, Homo sapiens
tttttgcaccctcac

SEQ ID NO: 1496250 - DNA, 15 bp, Homo sapiens
atttttgcaccctca

SEQ ID NO: 1496251 - DNA, 15 bp, Homo sapiens
tatttttgcaccctc

SEQ ID NO: 1496252 - DNA, 15 bp, Homo sapiens
atatttttgcaccct

SEQ ID NO: 1496253 - DNA, 15 bp, Homo sapiens
tatatttttgcaccc

SEQ ID NO: 1496254 - DNA, 15 bp, Homo sapiens
atatatttttgcacc

SEQ ID NO: 1496255 - DNA, 15 bp, Homo sapiens
catatatttttgcac

SEQ ID NO: 1496256 - DNA, 15 bp, Homo sapiens
acatatatttttgca

SEQ ID NO: 1496257 - DNA, 15 bp, Homo sapiens
aacatatatttttgc

SEQ ID NO: 1496258 - DNA, 15 bp, Homo sapiens
gaacatatatttttg

SEQ ID NO: 1496259 - DNA, 15 bp, Homo sapiens
tgaacatatattttt

SEQ ID NO: 1496260 - DNA, 15 bp, Homo sapiens
ttgaacatatatttt

SEQ ID NO: 1496261 - DNA, 15 bp, Homo sapiens
cttgaacatatattt

SEQ ID NO: 1496262 - DNA, 15 bp, Homo sapiens
ccttgaacatatatt

SEQ ID NO: 1496263 - DNA, 15 bp, Homo sapiens
tccttgaacatatat

SEQ ID NO: 1496264 - DNA, 15 bp, Homo sapiens
atccttgaacatata

SEQ ID NO: 1496265 - DNA, 15 bp, Homo sapiens
tatccttgaacatat

SEQ ID NO: 1496266 - DNA, 15 bp, Homo sapiens
atatccttgaacata

SEQ ID NO: 1496267 - DNA, 15 bp, Homo sapiens
aatatccttgaacat

SEQ ID NO: 1496268 - DNA, 15 bp, Homo sapiens
gaatatccttgaaca

SEQ ID NO: 1496269 - DNA, 15 bp, Homo sapiens
tgaatatccttgaac

SEQ ID NO: 1496270 - DNA, 15 bp, Homo sapiens
ttgaatatccttgaa

SEQ ID NO: 1496271 - DNA, 15 bp, Homo sapiens
attgaatatccttga

SEQ ID NO: 1496272 - DNA, 15 bp, Homo sapiens
cattgaatatccttg

SEQ ID NO: 1496273 - DNA, 15 bp, Homo sapiens
tcattgaatatcctt

SEQ ID NO: 1496274 - DNA, 15 bp, Homo sapiens
ctcattgaatatcct

SEQ ID NO: 1496275 - DNA, 15 bp, Homo sapiens
gctcattgaatatcc

SEQ ID NO: 1496276 - DNA, 15 bp, Homo sapiens
tgctcattgaatatc

SEQ ID NO: 1496277 - DNA, 15 bp, Homo sapiens
ttgctcattgaatat

SEQ ID NO: 1496278 - DNA, 15 bp, Homo sapiens
attgctcattgaata

SEQ ID NO: 1496279 - DNA, 15 bp, Homo sapiens
aattgctcattgaat

SEQ ID NO: 1496280 - DNA, 15 bp, Homo sapiens
taattgctcattgaa

SEQ ID NO: 1496281 - DNA, 15 bp, Homo sapiens
ataattgctcattga

SEQ ID NO: 1496282 - DNA, 15 bp, Homo sapiens
aataattgctcattg

SEQ ID NO: 1496283 - DNA, 15 bp, Homo sapiens
taataattgctcatt

SEQ ID NO: 1496284 - DNA, 15 bp, Homo sapiens
ataataattgctcat

SEQ ID NO: 1496285 - DNA, 15 bp, Homo sapiens
aataataattgctca

SEQ ID NO: 1496286 - DNA, 15 bp, Homo sapiens
taataataattgctc

SEQ ID NO: 1496287 - DNA, 15 bp, Homo sapiens
ataataataattgct

SEQ ID NO: 1496288 - DNA, 15 bp, Homo sapiens
aataataataattgc

SEQ ID NO: 1496289 - DNA, 15 bp, Homo sapiens
taataataataattg

SEQ ID NO: 1496290 - DNA, 15 bp, Homo sapiens
ataataataataatt

SEQ ID NO: 1496291 - DNA, 15 bp, Homo sapiens
aaaataataataata

SEQ ID NO: 1496292 - DNA, 15 bp, Homo sapiens
aaaaataataataat

SEQ ID NO: 1496293 - DNA, 15 bp, Homo sapiens
caaaaaataataata

SEQ ID NO: 1496294 - DNA, 15 bp, Homo sapiens
tcaaaaaataataat

SEQ ID NO: 1496295 - DNA, 15 bp, Homo sapiens
ctcaaaaaataataa

SEQ ID NO: 1496296 - DNA, 15 bp, Homo sapiens
tctcaaaaaataata

SEQ ID NO: 1496297 - DNA, 15 bp, Homo sapiens
gtctcaaaaaataat

SEQ ID NO: 1496298 - DNA, 15 bp, Homo sapiens
tgtctcaaaaaataa

SEQ ID NO: 1496299 - DNA, 15 bp, Homo sapiens
ctgtctcaaaaaata

SEQ ID NO: 1496300 - DNA, 15 bp, Homo sapiens
cctgtctcaaaaaat

SEQ ID NO: 1496301 - DNA, 15 bp, Homo sapiens
aaccctgtctcaaaa

SEQ ID NO: 1496302 - DNA, 15 bp, Homo sapiens
aaaccctgtctcaaa

SEQ ID NO: 1496303 - DNA, 15 bp, Homo sapiens
aaaaccctgtctcaa

SEQ ID NO: 1496304 - DNA, 15 bp, Homo sapiens
caaaaccctgtctca

SEQ ID NO: 1496305 - DNA, 15 bp, Homo sapiens
gagcaaaaccctgtc

SEQ ID NO: 1496306 - DNA, 15 bp, Homo sapiens
agagcaaaaccctgt

SEQ ID NO: 1496307 - DNA, 15 bp, Homo sapiens
cagagcaaaaccctg

SEQ ID NO: 1496308 - DNA, 15 bp, Homo sapiens
acagagcaaaaccct

SEQ ID NO: 1496309 - DNA, 15 bp, Homo sapiens
gacagagcaaaaccc

SEQ ID NO: 1496310 - DNA, 15 bp, Homo sapiens
tgacagagcaaaacc

SEQ ID NO: 1496311 - DNA, 15 bp, Homo sapiens
gtgacagagcaaaac

SEQ ID NO: 1496312 - DNA, 15 bp, Homo sapiens
ggtgacagagcaaaa

SEQ ID NO: 1496313 - DNA, 15 bp, Homo sapiens
gggtgacagagcaaa

SEQ ID NO: 1496314 - DNA, 15 bp, Homo sapiens
tcctgggtgacagag

SEQ ID NO: 1496315 - DNA, 15 bp, Homo sapiens
atcctgggtgacaga

SEQ ID NO: 1496316 - DNA, 15 bp, Homo sapiens
catcctgggtgacag

SEQ ID NO: 1496317 - DNA, 15 bp, Homo sapiens
ccatcctgggtgaca

SEQ ID NO: 1496318 - DNA, 15 bp, Homo sapiens
tccatcctgggtgac

SEQ ID NO: 1496319 - DNA, 15 bp, Homo sapiens
gtccatcctgggtga

SEQ ID NO: 1496320 - DNA, 15 bp, Homo sapiens
agtccatcctgggtg

SEQ ID NO: 1496321 - DNA, 15 bp, Homo sapiens
cagtccatcctgggt

SEQ ID NO: 1496322 - DNA, 15 bp, Homo sapiens
tcagtccatcctggg

SEQ ID NO: 1496323 - DNA, 15 bp, Homo sapiens
ttcagtccatcctgg

SEQ ID NO: 1496324 - DNA, 15 bp, Homo sapiens
cttcagtccatcctg

SEQ ID NO: 1496325 - DNA, 15 bp, Homo sapiens
acttcagtccatcct

SEQ ID NO: 1496326 - DNA, 15 bp, Homo sapiens
cacttcagtccatcc

SEQ ID NO: 1496327 - DNA, 15 bp, Homo sapiens
ccacttcagtccatc

SEQ ID NO: 1496328 - DNA, 15 bp, Homo sapiens
accacttcagtccat

SEQ ID NO: 1496329 - DNA, 15 bp, Homo sapiens
caccacttcagtcca

SEQ ID NO: 1496330 - DNA, 15 bp, Homo sapiens
acaccacttcagtcc

SEQ ID NO: 1496331 - DNA, 15 bp, Homo sapiens
tacaccacttcagtc

SEQ ID NO: 1496332 - DNA, 15 bp, Homo sapiens
ttacaccacttcagt

SEQ ID NO: 1496333 - DNA, 15 bp, Homo sapiens
attacaccacttcag

SEQ ID NO: 1496334 - DNA, 15 bp, Homo sapiens
gattacaccacttca

SEQ ID NO: 1496335 - DNA, 15 bp, Homo sapiens
tgattacaccacttc

SEQ ID NO: 1496336 - DNA, 15 bp, Homo sapiens
ctgattacaccactt

SEQ ID NO: 1496337 - DNA, 15 bp, Homo sapiens
tctgattacaccact

SEQ ID NO: 1496338 - DNA, 15 bp, Homo sapiens
ctctgattacaccac

SEQ ID NO: 1496339 - DNA, 15 bp, Homo sapiens
gctctgattacacca

SEQ ID NO: 1496340 - DNA, 15 bp, Homo sapiens
agctctgattacacc

SEQ ID NO: 1496341 - DNA, 15 bp, Homo sapiens
gagctctgattacac

SEQ ID NO: 1496342 - DNA, 15 bp, Homo sapiens
tgagctctgattaca

SEQ ID NO: 1496343 - DNA, 15 bp, Homo sapiens
gtgagctctgattac

SEQ ID NO: 1496344 - DNA, 15 bp, Homo sapiens
agtgagctctgatta

SEQ ID NO: 1496345 - DNA, 15 bp, Homo sapiens
cagtgagctctgatt

SEQ ID NO: 1496346 - DNA, 15 bp, Homo sapiens
tcagtgagctctgat

SEQ ID NO: 1496347 - DNA, 15 bp, Homo sapiens
ttcagtgagctctga

SEQ ID NO: 1496348 - DNA, 15 bp, Homo sapiens
gcttcagtgagctct

SEQ ID NO: 1496349 - DNA, 15 bp, Homo sapiens
ggcttcagtgagctc

SEQ ID NO: 1496350 - DNA, 15 bp, Homo sapiens
tcaaggcttcagtga

SEQ ID NO: 1496351 - DNA, 15 bp, Homo sapiens
gtcaaggcttcagtg

SEQ ID NO: 1496352 - DNA, 15 bp, Homo sapiens
ggtcaaggcttcagt

SEQ ID NO: 1496353 - DNA, 15 bp, Homo sapiens
aggtcaaggcttcag

SEQ ID NO: 1496354 - DNA, 15 bp, Homo sapiens
gaggtcaaggcttca

SEQ ID NO: 1496355 - DNA, 15 bp, Homo sapiens
ggaggtcaaggcttc

SEQ ID NO: 1496356 - DNA, 15 bp, Homo sapiens
gggaggtcaaggctt

SEQ ID NO: 1496357 - DNA, 15 bp, Homo sapiens
gcctgggaggtcaag

SEQ ID NO: 1496358 - DNA, 15 bp, Homo sapiens
agcctgggaggtcaa

SEQ ID NO: 1496359 - DNA, 15 bp, Homo sapiens
gagcctgggaggtca

SEQ ID NO: 1496360 - DNA, 15 bp, Homo sapiens
tgagcctgggaggtc

SEQ ID NO: 1496361 - DNA, 15 bp, Homo sapiens
ttgagcctgggaggt

SEQ ID NO: 1496362 - DNA, 15 bp, Homo sapiens
ccttgagcctgggag

SEQ ID NO: 1496363 - DNA, 15 bp, Homo sapiens
tccttgagcctggga

SEQ ID NO: 1496364 - DNA, 15 bp, Homo sapiens
atccttgagcctggg

SEQ ID NO: 1496365 - DNA, 15 bp, Homo sapiens
gatccttgagcctgg

SEQ ID NO: 1496366 - DNA, 15 bp, Homo sapiens
ggatccttgagcctg

SEQ ID NO: 1496367 - DNA, 15 bp, Homo sapiens
aggatccttgagcct

SEQ ID NO: 1496368 - DNA, 15 bp, Homo sapiens
gaggatccttgagcc

SEQ ID NO: 1496369 - DNA, 15 bp, Homo sapiens
ggaggatccttgagc

SEQ ID NO: 1496370 - DNA, 15 bp, Homo sapiens
gggaggatccttgag

SEQ ID NO: 1496371 - DNA, 15 bp, Homo sapiens
tgggaggatccttga

SEQ ID NO: 1496372 - DNA, 15 bp, Homo sapiens
ttgggaggatccttg

SEQ ID NO: 1496373 - DNA, 15 bp, Homo sapiens
gttgggaggatcctt

SEQ ID NO: 1496374 - DNA, 15 bp, Homo sapiens
agttgggaggatcct

SEQ ID NO: 1496375 - DNA, 15 bp, Homo sapiens
aagttgggaggatcc

SEQ ID NO: 1496376 - DNA, 15 bp, Homo sapiens
taagttgggaggatc

SEQ ID NO: 1496377 - DNA, 15 bp, Homo sapiens
ctaagttgggaggat

SEQ ID NO: 1496378 - DNA, 15 bp, Homo sapiens
gctaagttgggagga

SEQ ID NO: 1496379 - DNA, 15 bp, Homo sapiens
ggctaagttgggagg

SEQ ID NO: 1496380 - DNA, 15 bp, Homo sapiens
aggctaagttgggag

SEQ ID NO: 1496381 - DNA, 15 bp, Homo sapiens
gaggctaagttggga

SEQ ID NO: 1496382 - DNA, 15 bp, Homo sapiens
ggaggctaagttggg

SEQ ID NO: 1496383 - DNA, 15 bp, Homo sapiens
gggaggctaagttgg

SEQ ID NO: 1496384 - DNA, 15 bp, Homo sapiens
ggggaggctaagttg

SEQ ID NO: 1496385 - DNA, 15 bp, Homo sapiens
tggggaggctaagtt

SEQ ID NO: 1496386 - DNA, 15 bp, Homo sapiens
ctggggaggctaagt

SEQ ID NO: 1496387 - DNA, 15 bp, Homo sapiens
actggggaggctaag

SEQ ID NO: 1496388 - DNA, 15 bp, Homo sapiens
tactggggaggctaa

SEQ ID NO: 1496389 - DNA, 15 bp, Homo sapiens
ctactggggaggcta

SEQ ID NO: 1496390 - DNA, 15 bp, Homo sapiens
gctactggggaggct

SEQ ID NO: 1496391 - DNA, 15 bp, Homo sapiens
agctactggggaggc

SEQ ID NO: 1496392 - DNA, 15 bp, Homo sapiens
tagctactggggagg

SEQ ID NO: 1496393 - DNA, 15 bp, Homo sapiens
ctagctactggggag

SEQ ID NO: 1496394 - DNA, 15 bp, Homo sapiens
cctagctactgggga

SEQ ID NO: 1496395 - DNA, 15 bp, Homo sapiens
tcctagctactgggg

SEQ ID NO: 1496396 - DNA, 15 bp, Homo sapiens
gtcctagctactggg

SEQ ID NO: 1496397 - DNA, 15 bp, Homo sapiens
ggtcctagctactgg

SEQ ID NO: 1496398 - DNA, 15 bp, Homo sapiens
tggtcctagctactg

SEQ ID NO: 1496399 - DNA, 15 bp, Homo sapiens
atggtcctagctact

SEQ ID NO: 1496400 - DNA, 15 bp, Homo sapiens
tatggtcctagctac

SEQ ID NO: 1496401 - DNA, 15 bp, Homo sapiens
ctatggtcctagcta

SEQ ID NO: 1496402 - DNA, 15 bp, Homo sapiens
cctatggtcctagct

SEQ ID NO: 1496403 - DNA, 15 bp, Homo sapiens
gcctatggtcctagc

SEQ ID NO: 1496404 - DNA, 15 bp, Homo sapiens
tgcctatggtcctag

SEQ ID NO: 1496405 - DNA, 15 bp, Homo sapiens
atgcctatggtccta

SEQ ID NO: 1496406 - DNA, 15 bp, Homo sapiens
catgcctatggtcct

SEQ ID NO: 1496407 - DNA, 15 bp, Homo sapiens
gcatgcctatggtcc

SEQ ID NO: 1496408 - DNA, 15 bp, Homo sapiens
tgcatgcctatggtc

SEQ ID NO: 1496409 - DNA, 15 bp, Homo sapiens
gtgcatgcctatggt

SEQ ID NO: 1496410 - DNA, 15 bp, Homo sapiens
agtgcatgcctatgg

SEQ ID NO: 1496411 - DNA, 15 bp, Homo sapiens
tagtgcatgcctatg

SEQ ID NO: 1496412 - DNA, 15 bp, Homo sapiens
ctagtgcatgcctat

SEQ ID NO: 1496413 - DNA, 15 bp, Homo sapiens
gctagtgcatgccta

SEQ ID NO: 1496414 - DNA, 15 bp, Homo sapiens
tgctagtgcatgcct

SEQ ID NO: 1496415 - DNA, 15 bp, Homo sapiens
atgctagtgcatgcc

SEQ ID NO: 1496416 - DNA, 15 bp, Homo sapiens
catgctagtgcatgc

SEQ ID NO: 1496417 - DNA, 15 bp, Homo sapiens
gcatgctagtgcatg

SEQ ID NO: 1496418 - DNA, 15 bp, Homo sapiens
ggcatgctagtgcat

SEQ ID NO: 1496419 - DNA, 15 bp, Homo sapiens
aggcatgctagtgca

SEQ ID NO: 1496420 - DNA, 15 bp, Homo sapiens
taggcatgctagtgc

SEQ ID NO: 1496421 - DNA, 15 bp, Homo sapiens
ctaggcatgctagtg

SEQ ID NO: 1496422 - DNA, 15 bp, Homo sapiens
gctaggcatgctagt

SEQ ID NO: 1496423 - DNA, 15 bp, Homo sapiens
agctaggcatgctag

SEQ ID NO: 1496424 - DNA, 15 bp, Homo sapiens
aagctaggcatgcta

SEQ ID NO: 1496425 - DNA, 15 bp, Homo sapiens
taagctaggcatgct

SEQ ID NO: 1496426 - DNA, 15 bp, Homo sapiens
ataagctaggcatgc

SEQ ID NO: 1496427 - DNA, 15 bp, Homo sapiens
aataagctaggcatg

SEQ ID NO: 1496428 - DNA, 15 bp, Homo sapiens
aaataagctaggcat

SEQ ID NO: 1496429 - DNA, 15 bp, Homo sapiens
aaaataagctaggca

SEQ ID NO: 1496430 - DNA, 15 bp, Homo sapiens
taaaataagctaggc

SEQ ID NO: 1496431 - DNA, 15 bp, Homo sapiens
ttaaaataagctagg

SEQ ID NO: 1496432 - DNA, 15 bp, Homo sapiens
tttaaaataagctag

SEQ ID NO: 1496433 - DNA, 15 bp, Homo sapiens
ttttaaaataagcta

SEQ ID NO: 1496434 - DNA, 15 bp, Homo sapiens
attttaaaataagct

SEQ ID NO: 1496435 - DNA, 15 bp, Homo sapiens
aattttaaaataagc

SEQ ID NO: 1496436 - DNA, 15 bp, Homo sapiens
aaattttaaaataag

SEQ ID NO: 1496437 - DNA, 15 bp, Homo sapiens
aaaattttaaaataa

SEQ ID NO: 1496438 - DNA, 15 bp, Homo sapiens
aaaaattttaaaata

SEQ ID NO: 1496439 - DNA, 15 bp, Homo sapiens
aaaaaattttaaaat

SEQ ID NO: 1496440 - DNA, 15 bp, Homo sapiens
caaaaaattttaaaa

SEQ ID NO: 1496441 - DNA, 15 bp, Homo sapiens
acaaaaaattttaaa

SEQ ID NO: 1496442 - DNA, 15 bp, Homo sapiens
cacaaaaaattttaa

SEQ ID NO: 1496443 - DNA, 15 bp, Homo sapiens
ccacaaaaaatttta

SEQ ID NO: 1496444 - DNA, 15 bp, Homo sapiens
tccacaaaaaatttt

SEQ ID NO: 1496445 - DNA, 15 bp, Homo sapiens
ctccacaaaaaattt

SEQ ID NO: 1496446 - DNA, 15 bp, Homo sapiens
tctccacaaaaaatt

SEQ ID NO: 1496447 - DNA, 15 bp, Homo sapiens
gtctccacaaaaaat

SEQ ID NO: 1496448 - DNA, 15 bp, Homo sapiens
cgtctccacaaaaaa

SEQ ID NO: 1496449 - DNA, 15 bp, Homo sapiens
ccgtctccacaaaaa

SEQ ID NO: 1496450 - DNA, 15 bp, Homo sapiens
cccgtctccacaaaa

SEQ ID NO: 1496451 - DNA, 15 bp, Homo sapiens
ccccgtctccacaaa

SEQ ID NO: 1496452 - DNA, 15 bp, Homo sapiens
accccgtctccacaa

SEQ ID NO: 1496453 - DNA, 15 bp, Homo sapiens
aaccccgtctccaca

SEQ ID NO: 1496454 - DNA, 15 bp, Homo sapiens
ggaaaccccgtctcc

SEQ ID NO: 1496455 - DNA, 15 bp, Homo sapiens
gggaaaccccgtctc

SEQ ID NO: 1496456 - DNA, 15 bp, Homo sapiens
agggaaaccccgtct

SEQ ID NO: 1496457 - DNA, 15 bp, Homo sapiens
tagggaaaccccgtc

SEQ ID NO: 1496458 - DNA, 15 bp, Homo sapiens
atagggaaaccccgt

SEQ ID NO: 1496459 - DNA, 15 bp, Homo sapiens
catagggaaaccccg

SEQ ID NO: 1496460 - DNA, 15 bp, Homo sapiens
acatagggaaacccc

SEQ ID NO: 1496461 - DNA, 15 bp, Homo sapiens
aacatagggaaaccc

SEQ ID NO: 1496462 - DNA, 15 bp, Homo sapiens
caacatagggaaacc

SEQ ID NO: 1496463 - DNA, 15 bp, Homo sapiens
gcaacatagggaaac

SEQ ID NO: 1496464 - DNA, 15 bp, Homo sapiens
ggcaacatagggaaa

SEQ ID NO: 1496465 - DNA, 15 bp, Homo sapiens
gggcaacatagggaa

SEQ ID NO: 1496466 - DNA, 15 bp, Homo sapiens
aaccagcctgggcaa

SEQ ID NO: 1496467 - DNA, 15 bp, Homo sapiens
aaaccagcctgggca

SEQ ID NO: 1496468 - DNA, 15 bp, Homo sapiens
aaaaccagcctgggc

SEQ ID NO: 1496469 - DNA, 15 bp, Homo sapiens
caaaaccagcctggg

SEQ ID NO: 1496470 - DNA, 15 bp, Homo sapiens
tcaaaaccagcctgg

SEQ ID NO: 1496471 - DNA, 15 bp, Homo sapiens
gtcaaaaccagcctg

SEQ ID NO: 1496472 - DNA, 15 bp, Homo sapiens
ggtcaaaaccagcct

SEQ ID NO: 1496473 - DNA, 15 bp, Homo sapiens
aggtcaaaaccagcc

SEQ ID NO: 1496474 - DNA, 15 bp, Homo sapiens
gaggtcaaaaccagc

SEQ ID NO: 1496475 - DNA, 15 bp, Homo sapiens
ggaggtcaaaaccag

SEQ ID NO: 1496476 - DNA, 15 bp, Homo sapiens
aggaggtcaaaacca

SEQ ID NO: 1496477 - DNA, 15 bp, Homo sapiens
caggaggtcaaaacc

SEQ ID NO: 1496478 - DNA, 15 bp, Homo sapiens
ccaggaggtcaaaac

SEQ ID NO: 1496479 - DNA, 15 bp, Homo sapiens
cccaggaggtcaaaa

SEQ ID NO: 1496480 - DNA, 15 bp, Homo sapiens
gcccaggaggtcaaa

SEQ ID NO: 1496481 - DNA, 15 bp, Homo sapiens
agcccaggaggtcaa

SEQ ID NO: 1496482 - DNA, 15 bp, Homo sapiens
gagcccaggaggtca

SEQ ID NO: 1496483 - DNA, 15 bp, Homo sapiens
tgagcccaggaggtc

SEQ ID NO: 1496484 - DNA, 15 bp, Homo sapiens
ttgagcccaggaggt

SEQ ID NO: 1496485 - DNA, 15 bp, Homo sapiens
cttgagcccaggagg

SEQ ID NO: 1496486 - DNA, 15 bp, Homo sapiens
ttcgcttgagcccag

SEQ ID NO: 1496487 - DNA, 15 bp, Homo sapiens
gttcgcttgagccca

SEQ ID NO: 1496488 - DNA, 15 bp, Homo sapiens
ggttcgcttgagccc

SEQ ID NO: 1496489 - DNA, 15 bp, Homo sapiens
aggttcgcttgagcc

SEQ ID NO: 1496490 - DNA, 15 bp, Homo sapiens
gaggttcgcttgagc

SEQ ID NO: 1496491 - DNA, 15 bp, Homo sapiens
ggaggttcgcttgag

SEQ ID NO: 1496492 - DNA, 15 bp, Homo sapiens
gggaggttcgcttga

SEQ ID NO: 1496493 - DNA, 15 bp, Homo sapiens
tgggaggttcgcttg

SEQ ID NO: 1496494 - DNA, 15 bp, Homo sapiens
gtgggaggttcgctt

SEQ ID NO: 1496495 - DNA, 15 bp, Homo sapiens
ggtgggaggttcgct

SEQ ID NO: 1496496 - DNA, 15 bp, Homo sapiens
aggtgggaggttcgc

SEQ ID NO: 1496497 - DNA, 15 bp, Homo sapiens
gaggtgggaggttcg

SEQ ID NO: 1496498 - DNA, 15 bp, Homo sapiens
tgaggtgggaggttc

SEQ ID NO: 1496499 - DNA, 15 bp, Homo sapiens
ctgaggtgggaggtt

SEQ ID NO: 1496500 - DNA, 15 bp, Homo sapiens
gctgaggtgggaggt

SEQ ID NO: 1496501 - DNA, 15 bp, Homo sapiens
ggggaggctgaggtg

SEQ ID NO: 1496502 - DNA, 15 bp, Homo sapiens
tggggaggctgaggt

SEQ ID NO: 1496503 - DNA, 15 bp, Homo sapiens
ctggggaggctgagg

SEQ ID NO: 1496504 - DNA, 15 bp, Homo sapiens
actggggaggctgag

SEQ ID NO: 1496505 - DNA, 15 bp, Homo sapiens
tactggggaggctga

SEQ ID NO: 1496506 - DNA, 15 bp, Homo sapiens
ctactggggaggctg

SEQ ID NO: 1496507 - DNA, 15 bp, Homo sapiens
cagctactggggagg

SEQ ID NO: 1496508 - DNA, 15 bp, Homo sapiens
accagctactgggga

SEQ ID NO: 1496509 - DNA, 15 bp, Homo sapiens
taccagctactgggg

SEQ ID NO: 1496510 - DNA, 15 bp, Homo sapiens
gtaccagctactggg

SEQ ID NO: 1496511 - DNA, 15 bp, Homo sapiens
ggtaccagctactgg

SEQ ID NO: 1496512 - DNA, 15 bp, Homo sapiens
tggtaccagctactg

SEQ ID NO: 1496513 - DNA, 15 bp, Homo sapiens
gtggtaccagctact

SEQ ID NO: 1496514 - DNA, 15 bp, Homo sapiens
tgtggtaccagctac

SEQ ID NO: 1496515 - DNA, 15 bp, Homo sapiens
ctgtggtaccagcta

SEQ ID NO: 1496516 - DNA, 15 bp, Homo sapiens
cctgtggtaccagct

SEQ ID NO: 1496517 - DNA, 15 bp, Homo sapiens
gcctgtggtaccagc

SEQ ID NO: 1496518 - DNA, 15 bp, Homo sapiens
tgcctgtggtaccag

SEQ ID NO: 1496519 - DNA, 15 bp, Homo sapiens
atgcctgtggtacca

SEQ ID NO: 1496520 - DNA, 15 bp, Homo sapiens
tatgcctgtggtacc

SEQ ID NO: 1496521 - DNA, 15 bp, Homo sapiens
gtatgcctgtggtac

SEQ ID NO: 1496522 - DNA, 15 bp, Homo sapiens
tgtatgcctgtggta

SEQ ID NO: 1496523 - DNA, 15 bp, Homo sapiens
atgtatgcctgtggt

SEQ ID NO: 1496524 - DNA, 15 bp, Homo sapiens
gatgtatgcctgtgg

SEQ ID NO: 1496525 - DNA, 15 bp, Homo sapiens
tgatgtatgcctgtg

SEQ ID NO: 1496526 - DNA, 15 bp, Homo sapiens
gtgatgtatgcctgt

SEQ ID NO: 1496527 - DNA, 15 bp, Homo sapiens
ggtgatgtatgcctg

SEQ ID NO: 1496528 - DNA, 15 bp, Homo sapiens
tggtgatgtatgcct

SEQ ID NO: 1496529 - DNA, 15 bp, Homo sapiens
gtggtgatgtatgcc

SEQ ID NO: 1496530 - DNA, 15 bp, Homo sapiens
tgtggtgatgtatgc

SEQ ID NO: 1496531 - DNA, 15 bp, Homo sapiens
atgtggtgatgtatg

SEQ ID NO: 1496532 - DNA, 15 bp, Homo sapiens
catgtggtgatgtat

SEQ ID NO: 1496533 - DNA, 15 bp, Homo sapiens
acatgtggtgatgta

SEQ ID NO: 1496534 - DNA, 15 bp, Homo sapiens
tacatgtggtgatgt

SEQ ID NO: 1496535 - DNA, 15 bp, Homo sapiens
atacatgtggtgatg

SEQ ID NO: 1496536 - DNA, 15 bp, Homo sapiens
catacatgtggtgat

SEQ ID NO: 1496537 - DNA, 15 bp, Homo sapiens
tcatacatgtggtga

SEQ ID NO: 1496538 - DNA, 15 bp, Homo sapiens
gtcatacatgtggtg

SEQ ID NO: 1496539 - DNA, 15 bp, Homo sapiens
agtcatacatgtggt

SEQ ID NO: 1496540 - DNA, 15 bp, Homo sapiens
tagtcatacatgtgg

SEQ ID NO: 1496541 - DNA, 15 bp, Homo sapiens
ttagtcatacatgtg

SEQ ID NO: 1496542 - DNA, 15 bp, Homo sapiens
attagtcatacatgt

SEQ ID NO: 1496543 - DNA, 15 bp, Homo sapiens
aattagtcatacatg

SEQ ID NO: 1496544 - DNA, 15 bp, Homo sapiens
aaattagtcatacat

SEQ ID NO: 1496545 - DNA, 15 bp, Homo sapiens
aaaattagtcataca

SEQ ID NO: 1496546 - DNA, 15 bp, Homo sapiens
aaaaattagtcatac

SEQ ID NO: 1496547 - DNA, 15 bp, Homo sapiens
taaaaattagtcata

SEQ ID NO: 1496548 - DNA, 15 bp, Homo sapiens
ttaaaaattagtcat

SEQ ID NO: 1496549 - DNA, 15 bp, Homo sapiens
tttaaaaattagtca

SEQ ID NO: 1496550 - DNA, 15 bp, Homo sapiens
atttaaaaattagtc

SEQ ID NO: 1496551 - DNA, 15 bp, Homo sapiens
aatttaaaaattagt

SEQ ID NO: 1496552 - DNA, 15 bp, Homo sapiens
aaaaatttaaaaatt

SEQ ID NO: 1496553 - DNA, 15 bp, Homo sapiens
taaaaaatttaaaaa

SEQ ID NO: 1496554 - DNA, 15 bp, Homo sapiens
ataaaaaatttaaaa

SEQ ID NO: 1496555 - DNA, 15 bp, Homo sapiens
tataaaaaatttaaa

SEQ ID NO: 1496556 - DNA, 15 bp, Homo sapiens
ctataaaaaatttaa

SEQ ID NO: 1496557 - DNA, 15 bp, Homo sapiens
tctataaaaaattta

SEQ ID NO: 1496558 - DNA, 15 bp, Homo sapiens
ctctataaaaaattt

SEQ ID NO: 1496559 - DNA, 15 bp, Homo sapiens
tctctataaaaaatt

SEQ ID NO: 1496560 - DNA, 15 bp, Homo sapiens
gtctctataaaaaat

SEQ ID NO: 1496561 - DNA, 15 bp, Homo sapiens
tgtctctataaaaaa

SEQ ID NO: 1496562 - DNA, 15 bp, Homo sapiens
ctgtctctataaaaa

SEQ ID NO: 1496563 - DNA, 15 bp, Homo sapiens
cctgtctctataaaa

SEQ ID NO: 1496564 - DNA, 15 bp, Homo sapiens
ccctgtctctataaa

SEQ ID NO: 1496565 - DNA, 15 bp, Homo sapiens
accctgtctctataa

SEQ ID NO: 1496566 - DNA, 15 bp, Homo sapiens
gaccctgtctctata

SEQ ID NO: 1496567 - DNA, 15 bp, Homo sapiens
agaccctgtctctat

SEQ ID NO: 1496568 - DNA, 15 bp, Homo sapiens
gcaacatagggagac

SEQ ID NO: 1496569 - DNA, 15 bp, Homo sapiens
ggcaacatagggaga

SEQ ID NO: 1496570 - DNA, 15 bp, Homo sapiens
agagtttgagaccag

SEQ ID NO: 1496571 - DNA, 15 bp, Homo sapiens
cagagtttgagacca

SEQ ID NO: 1496572 - DNA, 15 bp, Homo sapiens
ccagagtttgagacc

SEQ ID NO: 1496573 - DNA, 15 bp, Homo sapiens
cccagagtttgagac

SEQ ID NO: 1496574 - DNA, 15 bp, Homo sapiens
gcccagagtttgaga

SEQ ID NO: 1496575 - DNA, 15 bp, Homo sapiens
agcccagagtttgag

SEQ ID NO: 1496576 - DNA, 15 bp, Homo sapiens
gagcccagagtttga

SEQ ID NO: 1496577 - DNA, 15 bp, Homo sapiens
tgagcccagagtttg

SEQ ID NO: 1496578 - DNA, 15 bp, Homo sapiens
ttgagcccagagttt

SEQ ID NO: 1496579 - DNA, 15 bp, Homo sapiens
cttgagcccagagtt

SEQ ID NO: 1496580 - DNA, 15 bp, Homo sapiens
gcttgagcccagagt

SEQ ID NO: 1496581 - DNA, 15 bp, Homo sapiens
tgcttgagcccagag

SEQ ID NO: 1496582 - DNA, 15 bp, Homo sapiens
ttgcttgagcccaga

SEQ ID NO: 1496583 - DNA, 15 bp, Homo sapiens
gttggctcacgcctg

SEQ ID NO: 1496584 - DNA, 15 bp, Homo sapiens
tgttggctcacgcct

SEQ ID NO: 1496585 - DNA, 15 bp, Homo sapiens
atgttggctcacgcc

SEQ ID NO: 1496586 - DNA, 15 bp, Homo sapiens
catgttggctcacgc

SEQ ID NO: 1496587 - DNA, 15 bp, Homo sapiens
gcatgttggctcacg

SEQ ID NO: 1496588 - DNA, 15 bp, Homo sapiens
agcatgttggctcac

SEQ ID NO: 1496589 - DNA, 15 bp, Homo sapiens
aagcatgttggctca

SEQ ID NO: 1496590 - DNA, 15 bp, Homo sapiens
caagcatgttggctc

SEQ ID NO: 1496591 - DNA, 15 bp, Homo sapiens
ccaagcatgttggct

SEQ ID NO: 1496592 - DNA, 15 bp, Homo sapiens
gccaagcatgttggc

SEQ ID NO: 1496593 - DNA, 15 bp, Homo sapiens
ggccaagcatgttgg

SEQ ID NO: 1496594 - DNA, 15 bp, Homo sapiens
aggccaagcatgttg

SEQ ID NO: 1496595 - DNA, 15 bp, Homo sapiens
taggccaagcatgtt

SEQ ID NO: 1496596 - DNA, 15 bp, Homo sapiens
ttaggccaagcatgt

SEQ ID NO: 1496597 - DNA, 15 bp, Homo sapiens
attaggccaagcatg

SEQ ID NO: 1496598 - DNA, 15 bp, Homo sapiens
cattaggccaagcat

SEQ ID NO: 1496599 - DNA, 15 bp, Homo sapiens
tcattaggccaagca

SEQ ID NO: 1496600 - DNA, 15 bp, Homo sapiens
ctcattaggccaagc

SEQ ID NO: 1496601 - DNA, 15 bp, Homo sapiens
actcattaggccaag

SEQ ID NO: 1496602 - DNA, 15 bp, Homo sapiens
tactcattaggccaa

SEQ ID NO: 1496603 - DNA, 15 bp, Homo sapiens
ttactcattaggcca

SEQ ID NO: 1496604 - DNA, 15 bp, Homo sapiens
attactcattaggcc

SEQ ID NO: 1496605 - DNA, 15 bp, Homo sapiens
tattactcattaggc

SEQ ID NO: 1496606 - DNA, 15 bp, Homo sapiens
atattactcattagg

SEQ ID NO: 1496607 - DNA, 15 bp, Homo sapiens
tatattactcattag

SEQ ID NO: 1496608 - DNA, 15 bp, Homo sapiens
atatattactcatta

SEQ ID NO: 1496609 - DNA, 15 bp, Homo sapiens
tatatattactcatt

SEQ ID NO: 1496610 - DNA, 15 bp, Homo sapiens
ttatatattactcat

SEQ ID NO: 1496611 - DNA, 15 bp, Homo sapiens
tttatatattactca

SEQ ID NO: 1496612 - DNA, 15 bp, Homo sapiens
atttatatattactc

SEQ ID NO: 1496613 - DNA, 15 bp, Homo sapiens
tatttatatattact

SEQ ID NO: 1496614 - DNA, 15 bp, Homo sapiens
atatttatatattac

SEQ ID NO: 1496615 - DNA, 15 bp, Homo sapiens
tatatttatatatta

SEQ ID NO: 1496616 - DNA, 15 bp, Homo sapiens
atatatttatatatt

SEQ ID NO: 1496617 - DNA, 15 bp, Homo sapiens
tatatatttatatat

SEQ ID NO: 1496618 - DNA, 15 bp, Homo sapiens
atatatatttatata

SEQ ID NO: 1496619 - DNA, 15 bp, Homo sapiens
aatatatatttatat

SEQ ID NO: 1496620 - DNA, 15 bp, Homo sapiens
aaatatatatttata

SEQ ID NO: 1496621 - DNA, 15 bp, Homo sapiens
gaaatatatatttat

SEQ ID NO: 1496622 - DNA, 15 bp, Homo sapiens
tgaaatatatattta

SEQ ID NO: 1496623 - DNA, 15 bp, Homo sapiens
atgaaatatatattt

SEQ ID NO: 1496624 - DNA, 15 bp, Homo sapiens
aatgaaatatatatt

SEQ ID NO: 1496625 - DNA, 15 bp, Homo sapiens
aaatgaaatatatat

SEQ ID NO: 1496626 - DNA, 15 bp, Homo sapiens
aaaatgaaatatata

SEQ ID NO: 1496627 - DNA, 15 bp, Homo sapiens
aaaaatgaaatatat

SEQ ID NO: 1496628 - DNA, 15 bp, Homo sapiens
aaaaaatgaaatata

SEQ ID NO: 1496629 - DNA, 15 bp, Homo sapiens
aaaaaaatgaaatat

SEQ ID NO: 1496630 - DNA, 15 bp, Homo sapiens
taaaaaaatgaaata

SEQ ID NO: 1496631 - DNA, 15 bp, Homo sapiens
ttaaaaaaatgaaat

SEQ ID NO: 1496632 - DNA, 15 bp, Homo sapiens
tttaaaaaaatgaaa

SEQ ID NO: 1496633 - DNA, 15 bp, Homo sapiens
atttaaaaaaatgaa

SEQ ID NO: 1496634 - DNA, 15 bp, Homo sapiens
aatttaaaaaaatga

SEQ ID NO: 1496635 - DNA, 15 bp, Homo sapiens
aaatttaaaaaaatg

SEQ ID NO: 1496636 - DNA, 15 bp, Homo sapiens
aaaatttaaaaaaat

SEQ ID NO: 1496637 - DNA, 15 bp, Homo sapiens
aaaaaatttaaaaaa

SEQ ID NO: 1496638 - DNA, 15 bp, Homo sapiens
aaaaaaatttaaaaa

SEQ ID NO: 1496639 - DNA, 15 bp, Homo sapiens
aaaaaaaatttaaaa

SEQ ID NO: 1496640 - DNA, 15 bp, Homo sapiens
caaaaaaaaaattta

SEQ ID NO: 1496641 - DNA, 15 bp, Homo sapiens
tcaaaaaaaaaattt

SEQ ID NO: 1496642 - DNA, 15 bp, Homo sapiens
tctcaaaaaaaaaat

SEQ ID NO: 1496643 - DNA, 15 bp, Homo sapiens
tcactccagcctggg

SEQ ID NO: 1496644 - DNA, 15 bp, Homo sapiens
ttcactccagcctgg

SEQ ID NO: 1496645 - DNA, 15 bp, Homo sapiens
cttcactccagcctg

SEQ ID NO: 1496646 - DNA, 15 bp, Homo sapiens
acttcactccagcct

SEQ ID NO: 1496647 - DNA, 15 bp, Homo sapiens
cacttcactccagcc

SEQ ID NO: 1496648 - DNA, 15 bp, Homo sapiens
accacttcactccag

SEQ ID NO: 1496649 - DNA, 15 bp, Homo sapiens
caccacttcactcca

SEQ ID NO: 1496650 - DNA, 15 bp, Homo sapiens
gcaccacttcactcc

SEQ ID NO: 1496651 - DNA, 15 bp, Homo sapiens
tgcaccacttcactc

SEQ ID NO: 1496652 - DNA, 15 bp, Homo sapiens
ttgcaccacttcact

SEQ ID NO: 1496653 - DNA, 15 bp, Homo sapiens
attgcaccacttcac

SEQ ID NO: 1496654 - DNA, 15 bp, Homo sapiens
gattgcaccacttca

SEQ ID NO: 1496655 - DNA, 15 bp, Homo sapiens
agattgcaccacttc

SEQ ID NO: 1496656 - DNA, 15 bp, Homo sapiens
gagattgcaccactt

SEQ ID NO: 1496657 - DNA, 15 bp, Homo sapiens
tttgaacctgggagg

SEQ ID NO: 1496658 - DNA, 15 bp, Homo sapiens
gtttgaacctgggag

SEQ ID NO: 1496659 - DNA, 15 bp, Homo sapiens
tgtttgaacctggga

SEQ ID NO: 1496660 - DNA, 15 bp, Homo sapiens
ttgtttgaacctggg

SEQ ID NO: 1496661 - DNA, 15 bp, Homo sapiens
attgtttgaacctgg

SEQ ID NO: 1496662 - DNA, 15 bp, Homo sapiens
aattgtttgaacctg

SEQ ID NO: 1496663 - DNA, 15 bp, Homo sapiens
gaattgtttgaacct

SEQ ID NO: 1496664 - DNA, 15 bp, Homo sapiens
agagaattgtttgaa

SEQ ID NO: 1496665 - DNA, 15 bp, Homo sapiens
cagagaattgtttga

SEQ ID NO: 1496666 - DNA, 15 bp, Homo sapiens
gcagagaattgtttg

SEQ ID NO: 1496667 - DNA, 15 bp, Homo sapiens
ggcagagaattgttt

SEQ ID NO: 1496668 - DNA, 15 bp, Homo sapiens
aggcagagaattgtt

SEQ ID NO: 1496669 - DNA, 15 bp, Homo sapiens
gaggcagagaattgt

SEQ ID NO: 1496670 - DNA, 15 bp, Homo sapiens
tgaggcagagaattg

SEQ ID NO: 1496671 - DNA, 15 bp, Homo sapiens
ctgaggcagagaatt

SEQ ID NO: 1496672 - DNA, 15 bp, Homo sapiens
gctgaggcagagaat

SEQ ID NO: 1496673 - DNA, 15 bp, Homo sapiens
ggctgaggcagagaa

SEQ ID NO: 1496674 - DNA, 15 bp, Homo sapiens
aggctgaggcagaga

SEQ ID NO: 1496675 - DNA, 15 bp, Homo sapiens
gaggctgaggcagag

SEQ ID NO: 1496676 - DNA, 15 bp, Homo sapiens
ttacttgggaggctg

SEQ ID NO: 1496677 - DNA, 15 bp, Homo sapiens
gttacttgggaggct

SEQ ID NO: 1496678 - DNA, 15 bp, Homo sapiens
agttacttgggaggc

SEQ ID NO: 1496679 - DNA, 15 bp, Homo sapiens
cagttacttgggagg

SEQ ID NO: 1496680 - DNA, 15 bp, Homo sapiens
ccagttacttgggag

SEQ ID NO: 1496681 - DNA, 15 bp, Homo sapiens
cccagttacttggga

SEQ ID NO: 1496682 - DNA, 15 bp, Homo sapiens
tcccagttacttggg

SEQ ID NO: 1496683 - DNA, 15 bp, Homo sapiens
atcccagttacttgg

SEQ ID NO: 1496684 - DNA, 15 bp, Homo sapiens
aatcccagttacttg

SEQ ID NO: 1496685 - DNA, 15 bp, Homo sapiens
taatcccagttactt

SEQ ID NO: 1496686 - DNA, 15 bp, Homo sapiens
ttgtaatcccagtta

SEQ ID NO: 1496687 - DNA, 15 bp, Homo sapiens
cttgtaatcccagtt

SEQ ID NO: 1496688 - DNA, 15 bp, Homo sapiens
gtgcttgtaatccca

SEQ ID NO: 1496689 - DNA, 15 bp, Homo sapiens
ggtgcttgtaatccc

SEQ ID NO: 1496690 - DNA, 15 bp, Homo sapiens
gggtgcttgtaatcc

SEQ ID NO: 1496691 - DNA, 15 bp, Homo sapiens
tgggtgcttgtaatc

SEQ ID NO: 1496692 - DNA, 15 bp, Homo sapiens
gtgggtgcttgtaat

SEQ ID NO: 1496693 - DNA, 15 bp, Homo sapiens
ggtgggtgcttgtaa

SEQ ID NO: 1496694 - DNA, 15 bp, Homo sapiens
tggtgggtgcttgta

SEQ ID NO: 1496695 - DNA, 15 bp, Homo sapiens
gtggtgggtgcttgt

SEQ ID NO: 1496696 - DNA, 15 bp, Homo sapiens
ggtggtgggtgcttg

SEQ ID NO: 1496697 - DNA, 15 bp, Homo sapiens
aggtggtgggtgctt

SEQ ID NO: 1496698 - DNA, 15 bp, Homo sapiens
gaggtggtgggtgct

SEQ ID NO: 1496699 - DNA, 15 bp, Homo sapiens
cgaggtggtgggtgc

SEQ ID NO: 1496700 - DNA, 15 bp, Homo sapiens
gcgaggtggtgggtg

SEQ ID NO: 1496701 - DNA, 15 bp, Homo sapiens
ggcgaggtggtgggt

SEQ ID NO: 1496702 - DNA, 15 bp, Homo sapiens
aggcgaggtggtggg

SEQ ID NO: 1496703 - DNA, 15 bp, Homo sapiens
caggcgaggtggtgg

SEQ ID NO: 1496704 - DNA, 15 bp, Homo sapiens
ccaggcgaggtggtg

SEQ ID NO: 1496705 - DNA, 15 bp, Homo sapiens
gccaggcgaggtggt

SEQ ID NO: 1496706 - DNA, 15 bp, Homo sapiens
agccaggcgaggtgg

SEQ ID NO: 1496707 - DNA, 15 bp, Homo sapiens
tagccaggcgaggtg

SEQ ID NO: 1496708 - DNA, 15 bp, Homo sapiens
ttagccaggcgaggt

SEQ ID NO: 1496709 - DNA, 15 bp, Homo sapiens
attagccaggcgagg

SEQ ID NO: 1496710 - DNA, 15 bp, Homo sapiens
aattagccaggcgag

SEQ ID NO: 1496711 - DNA, 15 bp, Homo sapiens
aaattagccaggcga

SEQ ID NO: 1496712 - DNA, 15 bp, Homo sapiens
tgcctctactaaaaa

SEQ ID NO: 1496713 - DNA, 15 bp, Homo sapiens
ctgcctctactaaaa

SEQ ID NO: 1496714 - DNA, 15 bp, Homo sapiens
cctgcctctactaaa

SEQ ID NO: 1496715 - DNA, 15 bp, Homo sapiens
ccctgcctctactaa

SEQ ID NO: 1496716 - DNA, 15 bp, Homo sapiens
accctgcctctacta

SEQ ID NO: 1496717 - DNA, 15 bp, Homo sapiens
aaccctgcctctact

SEQ ID NO: 1496718 - DNA, 15 bp, Homo sapiens
aaaccctgcctctac

SEQ ID NO: 1496719 - DNA, 15 bp, Homo sapiens
gaaaccctgcctcta

SEQ ID NO: 1496720 - DNA, 15 bp, Homo sapiens
tgaaaccctgcctct

SEQ ID NO: 1496721 - DNA, 15 bp, Homo sapiens
gtgaaaccctgcctc

SEQ ID NO: 1496722 - DNA, 15 bp, Homo sapiens
ggtgaaaccctgcct

SEQ ID NO: 1496723 - DNA, 15 bp, Homo sapiens
tggtgaaaccctgcc

SEQ ID NO: 1496724 - DNA, 15 bp, Homo sapiens
atggtgaaaccctgc

SEQ ID NO: 1496725 - DNA, 15 bp, Homo sapiens
gatggtgaaaccctg

SEQ ID NO: 1496726 - DNA, 15 bp, Homo sapiens
agatggtgaaaccct

SEQ ID NO: 1496727 - DNA, 15 bp, Homo sapiens
tcagcctggccaaga

SEQ ID NO: 1496728 - DNA, 15 bp, Homo sapiens
atcagcctggccaag

SEQ ID NO: 1496729 - DNA, 15 bp, Homo sapiens
gatcagcctggccaa

SEQ ID NO: 1496730 - DNA, 15 bp, Homo sapiens
aagatcagcctggcc

SEQ ID NO: 1496731 - DNA, 15 bp, Homo sapiens
caagatcagcctggc

SEQ ID NO: 1496732 - DNA, 15 bp, Homo sapiens
tcaagatcagcctgg

SEQ ID NO: 1496733 - DNA, 15 bp, Homo sapiens
ttcaagatcagcctg

SEQ ID NO: 1496734 - DNA, 15 bp, Homo sapiens
gttcaagatcagcct

SEQ ID NO: 1496735 - DNA, 15 bp, Homo sapiens
agttcaagatcagcc

SEQ ID NO: 1496736 - DNA, 15 bp, Homo sapiens
gagttcaagatcagc

SEQ ID NO: 1496737 - DNA, 15 bp, Homo sapiens
agagttcaagatcag

SEQ ID NO: 1496738 - DNA, 15 bp, Homo sapiens
aagagttcaagatca

SEQ ID NO: 1496739 - DNA, 15 bp, Homo sapiens
caagagttcaagatc

SEQ ID NO: 1496740 - DNA, 15 bp, Homo sapiens
tcaagagttcaagat

SEQ ID NO: 1496741 - DNA, 15 bp, Homo sapiens
gtcaagagttcaaga

SEQ ID NO: 1496742 - DNA, 15 bp, Homo sapiens
ggtcaagagttcaag

SEQ ID NO: 1496743 - DNA, 15 bp, Homo sapiens
aggtcaagagttcaa

SEQ ID NO: 1496744 - DNA, 15 bp, Homo sapiens
gaggtcaagagttca

SEQ ID NO: 1496745 - DNA, 15 bp, Homo sapiens
cgaggtcaagagttc

SEQ ID NO: 1496746 - DNA, 15 bp, Homo sapiens
acgaggtcaagagtt

SEQ ID NO: 1496747 - DNA, 15 bp, Homo sapiens
cacgaggtcaagagt

SEQ ID NO: 1496748 - DNA, 15 bp, Homo sapiens
tcacgaggtcaagag

SEQ ID NO: 1496749 - DNA, 15 bp, Homo sapiens
atcacgaggtcaaga

SEQ ID NO: 1496750 - DNA, 15 bp, Homo sapiens
gatcacgaggtcaag

SEQ ID NO: 1496751 - DNA, 15 bp, Homo sapiens
ggatcacgaggtcaa

SEQ ID NO: 1496752 - DNA, 15 bp, Homo sapiens
aaggtgggtggatca

SEQ ID NO: 1496753 - DNA, 15 bp, Homo sapiens
caaggtgggtggatc

SEQ ID NO: 1496754 - DNA, 15 bp, Homo sapiens
tgctgggtgtggtgg

SEQ ID NO: 1496755 - DNA, 15 bp, Homo sapiens
atgctgggtgtggtg

SEQ ID NO: 1496756 - DNA, 15 bp, Homo sapiens
catgctgggtgtggt

SEQ ID NO: 1496757 - DNA, 15 bp, Homo sapiens
tcatgctgggtgtgg

SEQ ID NO: 1496758 - DNA, 15 bp, Homo sapiens
ctcatgctgggtgtg

SEQ ID NO: 1496759 - DNA, 15 bp, Homo sapiens
actcatgctgggtgt

SEQ ID NO: 1496760 - DNA, 15 bp, Homo sapiens
tactcatgctgggtg

SEQ ID NO: 1496761 - DNA, 15 bp, Homo sapiens
ttactcatgctgggt

SEQ ID NO: 1496762 - DNA, 15 bp, Homo sapiens
attactcatgctggg

SEQ ID NO: 1496763 - DNA, 15 bp, Homo sapiens
tattactcatgctgg

SEQ ID NO: 1496764 - DNA, 15 bp, Homo sapiens
atattactcatgctg

SEQ ID NO: 1496765 - DNA, 15 bp, Homo sapiens
aatattactcatgct

SEQ ID NO: 1496766 - DNA, 15 bp, Homo sapiens
aaatattactcatgc

SEQ ID NO: 1496767 - DNA, 15 bp, Homo sapiens
aaaatattactcatg

SEQ ID NO: 1496768 - DNA, 15 bp, Homo sapiens
aaaaatattactcat

SEQ ID NO: 1496769 - DNA, 15 bp, Homo sapiens
aaaaaatattactca

SEQ ID NO: 1496770 - DNA, 15 bp, Homo sapiens
aaaaaaatattactc

SEQ ID NO: 1496771 - DNA, 15 bp, Homo sapiens
taaaaaaatattact

SEQ ID NO: 1496772 - DNA, 15 bp, Homo sapiens
ttaaaaaaatattac

SEQ ID NO: 1496773 - DNA, 15 bp, Homo sapiens
tttaaaaaaatatta

SEQ ID NO: 1496774 - DNA, 15 bp, Homo sapiens
ttttaaaaaaatatt

SEQ ID NO: 1496775 - DNA, 15 bp, Homo sapiens
tttttaaaaaaatat

SEQ ID NO: 1496776 - DNA, 15 bp, Homo sapiens
ttttttaaaaaaata

SEQ ID NO: 1496777 - DNA, 15 bp, Homo sapiens
ctattttttaaaaaa

SEQ ID NO: 1496778 - DNA, 15 bp, Homo sapiens
actattttttaaaaa

SEQ ID NO: 1496779 - DNA, 15 bp, Homo sapiens
cactattttttaaaa

SEQ ID NO: 1496780 - DNA, 15 bp, Homo sapiens
tcactattttttaaa

SEQ ID NO: 1496781 - DNA, 15 bp, Homo sapiens
ctcactattttttaa

SEQ ID NO: 1496782 - DNA, 15 bp, Homo sapiens
tctcactatttttta

SEQ ID NO: 1496783 - DNA, 15 bp, Homo sapiens
ctctcactatttttt

SEQ ID NO: 1496784 - DNA, 15 bp, Homo sapiens
cctctcactattttt

SEQ ID NO: 1496785 - DNA, 15 bp, Homo sapiens
gcctctcactatttt

SEQ ID NO: 1496786 - DNA, 15 bp, Homo sapiens
tgcctctcactattt

SEQ ID NO: 1496787 - DNA, 15 bp, Homo sapiens
gtgcctctcactatt

SEQ ID NO: 1496788 - DNA, 15 bp, Homo sapiens
agtgcctctcactat

SEQ ID NO: 1496789 - DNA, 15 bp, Homo sapiens
tagtgcctctcacta

SEQ ID NO: 1496790 - DNA, 15 bp, Homo sapiens
ctagtgcctctcact

SEQ ID NO: 1496791 - DNA, 15 bp, Homo sapiens
actagtgcctctcac

SEQ ID NO: 1496792 - DNA, 15 bp, Homo sapiens
aactagtgcctctca

SEQ ID NO: 1496793 - DNA, 15 bp, Homo sapiens
taactagtgcctctc

SEQ ID NO: 1496794 - DNA, 15 bp, Homo sapiens
ttaactagtgcctct

SEQ ID NO: 1496795 - DNA, 15 bp, Homo sapiens
tttaactagtgcctc

SEQ ID NO: 1496796 - DNA, 15 bp, Homo sapiens
gtttaactagtgcct

SEQ ID NO: 1496797 - DNA, 15 bp, Homo sapiens
ggtttaactagtgcc

SEQ ID NO: 1496798 - DNA, 15 bp, Homo sapiens
tggtttaactagtgc

SEQ ID NO: 1496799 - DNA, 15 bp, Homo sapiens
ttggtttaactagtg

SEQ ID NO: 1496800 - DNA, 15 bp, Homo sapiens
attggtttaactagt

SEQ ID NO: 1496801 - DNA, 15 bp, Homo sapiens
aattggtttaactag

SEQ ID NO: 1496802 - DNA, 15 bp, Homo sapiens
taattggtttaacta

SEQ ID NO: 1496803 - DNA, 15 bp, Homo sapiens
ataattggtttaact

SEQ ID NO: 1496804 - DNA, 15 bp, Homo sapiens
cataattggtttaac

SEQ ID NO: 1496805 - DNA, 15 bp, Homo sapiens
ccataattggtttaa

SEQ ID NO: 1496806 - DNA, 15 bp, Homo sapiens
accataattggttta

SEQ ID NO: 1496807 - DNA, 15 bp, Homo sapiens
taccataattggttt

SEQ ID NO: 1496808 - DNA, 15 bp, Homo sapiens
gtaccataattggtt

SEQ ID NO: 1496809 - DNA, 15 bp, Homo sapiens
tgtaccataattggt

SEQ ID NO: 1496810 - DNA, 15 bp, Homo sapiens
gtgtaccataattgg

SEQ ID NO: 1496811 - DNA, 15 bp, Homo sapiens
ggtgtaccataattg

SEQ ID NO: 1496812 - DNA, 15 bp, Homo sapiens
tggtgtaccataatt

SEQ ID NO: 1496813 - DNA, 15 bp, Homo sapiens
atggtgtaccataat

SEQ ID NO: 1496814 - DNA, 15 bp, Homo sapiens
tatggtgtaccataa

SEQ ID NO: 1496815 - DNA, 15 bp, Homo sapiens
gtatggtgtaccata

SEQ ID NO: 1496816 - DNA, 15 bp, Homo sapiens
cgtatggtgtaccat

SEQ ID NO: 1496817 - DNA, 15 bp, Homo sapiens
tcgtatggtgtacca

SEQ ID NO: 1496818 - DNA, 15 bp, Homo sapiens
gtcgtatggtgtacc

SEQ ID NO: 1496819 - DNA, 15 bp, Homo sapiens
tgtcgtatggtgtac

SEQ ID NO: 1496820 - DNA, 15 bp, Homo sapiens
atgtcgtatggtgta

SEQ ID NO: 1496821 - DNA, 15 bp, Homo sapiens
gatgtcgtatggtgt

SEQ ID NO: 1496822 - DNA, 15 bp, Homo sapiens
agatgtcgtatggtg

SEQ ID NO: 1496823 - DNA, 15 bp, Homo sapiens
tagatgtcgtatggt

SEQ ID NO: 1496824 - DNA, 15 bp, Homo sapiens
ttagatgtcgtatgg

SEQ ID NO: 1496825 - DNA, 15 bp, Homo sapiens
attagatgtcgtatg

SEQ ID NO: 1496826 - DNA, 15 bp, Homo sapiens
cattagatgtcgtat

SEQ ID NO: 1496827 - DNA, 15 bp, Homo sapiens
ccattagatgtcgta

SEQ ID NO: 1496828 - DNA, 15 bp, Homo sapiens
gccattagatgtcgt

SEQ ID NO: 1496829 - DNA, 15 bp, Homo sapiens
agccattagatgtcg

SEQ ID NO: 1496830 - DNA, 15 bp, Homo sapiens
tagccattagatgtc

SEQ ID NO: 1496831 - DNA, 15 bp, Homo sapiens
ttagccattagatgt

SEQ ID NO: 1496832 - DNA, 15 bp, Homo sapiens
cttagccattagatg

SEQ ID NO: 1496833 - DNA, 15 bp, Homo sapiens
gcttagccattagat

SEQ ID NO: 1496834 - DNA, 15 bp, Homo sapiens
tgcttagccattaga

SEQ ID NO: 1496835 - DNA, 15 bp, Homo sapiens
atgcttagccattag

SEQ ID NO: 1496836 - DNA, 15 bp, Homo sapiens
gatgcttagccatta

SEQ ID NO: 1496837 - DNA, 15 bp, Homo sapiens
ggatgcttagccatt

SEQ ID NO: 1496838 - DNA, 15 bp, Homo sapiens
tggatgcttagccat

SEQ ID NO: 1496839 - DNA, 15 bp, Homo sapiens
atggatgcttagcca

SEQ ID NO: 1496840 - DNA, 15 bp, Homo sapiens
aatggatgcttagcc

SEQ ID NO: 1496841 - DNA, 15 bp, Homo sapiens
taatggatgcttagc

SEQ ID NO: 1496842 - DNA, 15 bp, Homo sapiens
ttaatggatgcttag

SEQ ID NO: 1496843 - DNA, 15 bp, Homo sapiens
tttaatggatgctta

SEQ ID NO: 1496844 - DNA, 15 bp, Homo sapiens
ctttaatggatgctt

SEQ ID NO: 1496845 - DNA, 15 bp, Homo sapiens
tctttaatggatgct

SEQ ID NO: 1496846 - DNA, 15 bp, Homo sapiens
ttctttaatggatgc

SEQ ID NO: 1496847 - DNA, 15 bp, Homo sapiens
tttctttaatggatg

SEQ ID NO: 1496848 - DNA, 15 bp, Homo sapiens
ttttctttaatggat

SEQ ID NO: 1496849 - DNA, 15 bp, Homo sapiens
tttttctttaatgga

SEQ ID NO: 1496850 - DNA, 15 bp, Homo sapiens
ttttttctttaatgg

SEQ ID NO: 1496851 - DNA, 15 bp, Homo sapiens
tttttttctttaatg

SEQ ID NO: 1496852 - DNA, 15 bp, Homo sapiens
ttttttttctttaat

SEQ ID NO: 1496853 - DNA, 15 bp, Homo sapiens
tttttttttctttaa

SEQ ID NO: 1496854 - DNA, 15 bp, Homo sapiens
ttttttttttcttta

SEQ ID NO: 1496855 - DNA, 15 bp, Homo sapiens
ctttttttttttttc

SEQ ID NO: 1496856 - DNA, 15 bp, Homo sapiens
tgtcttttttttttt

SEQ ID NO: 1496857 - DNA, 15 bp, Homo sapiens
gtgtctttttttttt

SEQ ID NO: 1496858 - DNA, 15 bp, Homo sapiens
cgtgtcttttttttt

SEQ ID NO: 1496859 - DNA, 15 bp, Homo sapiens
ccgtgtctttttttt

SEQ ID NO: 1496860 - DNA, 15 bp, Homo sapiens
tccgtgtcttttttt

SEQ ID NO: 1496861 - DNA, 15 bp, Homo sapiens
ttccgtgtctttttt

SEQ ID NO: 1496862 - DNA, 15 bp, Homo sapiens
tttccgtgtcttttt

SEQ ID NO: 1496863 - DNA, 15 bp, Homo sapiens
ctttccgtgtctttt

SEQ ID NO: 1496864 - DNA, 15 bp, Homo sapiens
cctttccgtgtcttt

SEQ ID NO: 1496865 - DNA, 15 bp, Homo sapiens
acctttccgtgtctt

SEQ ID NO: 1496866 - DNA, 15 bp, Homo sapiens
tacctttccgtgtct

SEQ ID NO: 1496867 - DNA, 15 bp, Homo sapiens
atacctttccgtgtc

SEQ ID NO: 1496868 - DNA, 15 bp, Homo sapiens
tatacctttccgtgt

SEQ ID NO: 1496869 - DNA, 15 bp, Homo sapiens
atatacctttccgtg

SEQ ID NO: 1496870 - DNA, 15 bp, Homo sapiens
gatatacctttccgt

SEQ ID NO: 1496871 - DNA, 15 bp, Homo sapiens
tgatatacctttccg

SEQ ID NO: 1496872 - DNA, 15 bp, Homo sapiens
atgatatacctttcc

SEQ ID NO: 1496873 - DNA, 15 bp, Homo sapiens
aatgatatacctttc

SEQ ID NO: 1496874 - DNA, 15 bp, Homo sapiens
taatgatataccttt

SEQ ID NO: 1496875 - DNA, 15 bp, Homo sapiens
ttaatgatatacctt

SEQ ID NO: 1496876 - DNA, 15 bp, Homo sapiens
cttaatgatatacct

SEQ ID NO: 1496877 - DNA, 15 bp, Homo sapiens
acttaatgatatacc

SEQ ID NO: 1496878 - DNA, 15 bp, Homo sapiens
cacttaatgatatac

SEQ ID NO: 1496879 - DNA, 15 bp, Homo sapiens
tcacttaatgatata

SEQ ID NO: 1496880 - DNA, 15 bp, Homo sapiens
ttcacttaatgatat

SEQ ID NO: 1496881 - DNA, 15 bp, Homo sapiens
tttcacttaatgata

SEQ ID NO: 1496882 - DNA, 15 bp, Homo sapiens
ttttcacttaatgat

SEQ ID NO: 1496883 - DNA, 15 bp, Homo sapiens
tttttcacttaatga

SEQ ID NO: 1496884 - DNA, 15 bp, Homo sapiens
ttttttcacttaatg

SEQ ID NO: 1496885 - DNA, 15 bp, Homo sapiens
cttttttcacttaat

SEQ ID NO: 1496886 - DNA, 15 bp, Homo sapiens
gcttttttcacttaa

SEQ ID NO: 1496887 - DNA, 15 bp, Homo sapiens
tgcttttttcactta

SEQ ID NO: 1496888 - DNA, 15 bp, Homo sapiens
ttgcttttttcactt

SEQ ID NO: 1496889 - DNA, 15 bp, Homo sapiens
tttgcttttttcact

SEQ ID NO: 1496890 - DNA, 15 bp, Homo sapiens
atttgcttttttcac

SEQ ID NO: 1496891 - DNA, 15 bp, Homo sapiens
aatttgcttttttca

SEQ ID NO: 1496892 - DNA, 15 bp, Homo sapiens
taatttgcttttttc

SEQ ID NO: 1496893 - DNA, 15 bp, Homo sapiens
ataatttgctttttt

SEQ ID NO: 1496894 - DNA, 15 bp, Homo sapiens
aataatttgcttttt

SEQ ID NO: 1496895 - DNA, 15 bp, Homo sapiens
aaataatttgctttt

SEQ ID NO: 1496896 - DNA, 15 bp, Homo sapiens
taaataatttgcttt

SEQ ID NO: 1496897 - DNA, 15 bp, Homo sapiens
ttaaataatttgctt

SEQ ID NO: 1496898 - DNA, 15 bp, Homo sapiens
gttaaataatttgct

SEQ ID NO: 1496899 - DNA, 15 bp, Homo sapiens
tgttaaataatttgc

SEQ ID NO: 1496900 - DNA, 15 bp, Homo sapiens
ttgttaaataatttg

SEQ ID NO: 1496901 - DNA, 15 bp, Homo sapiens
attgttaaataattt

SEQ ID NO: 1496902 - DNA, 15 bp, Homo sapiens
tattgttaaataatt

SEQ ID NO: 1496903 - DNA, 15 bp, Homo sapiens
atattgttaaataat

SEQ ID NO: 1496904 - DNA, 15 bp, Homo sapiens
aatattgttaaataa

SEQ ID NO: 1496905 - DNA, 15 bp, Homo sapiens
aaatattgttaaata

SEQ ID NO: 1496906 - DNA, 15 bp, Homo sapiens
caaatattgttaaat

SEQ ID NO: 1496907 - DNA, 15 bp, Homo sapiens
acaaatattgttaaa

SEQ ID NO: 1496908 - DNA, 15 bp, Homo sapiens
tacaaatattgttaa

SEQ ID NO: 1496909 - DNA, 15 bp, Homo sapiens
ttacaaatattgtta

SEQ ID NO: 1496910 - DNA, 15 bp, Homo sapiens
attacaaatattgtt

SEQ ID NO: 1496911 - DNA, 15 bp, Homo sapiens
aattacaaatattgt

SEQ ID NO: 1496912 - DNA, 15 bp, Homo sapiens
aaattacaaatattg

SEQ ID NO: 1496913 - DNA, 15 bp, Homo sapiens
aaaattacaaatatt

SEQ ID NO: 1496914 - DNA, 15 bp, Homo sapiens
aaaaattacaaatat

SEQ ID NO: 1496915 - DNA, 15 bp, Homo sapiens
aaaaaattacaaata

SEQ ID NO: 1496916 - DNA, 15 bp, Homo sapiens
aaaaaaattacaaat

SEQ ID NO: 1496917 - DNA, 15 bp, Homo sapiens
aaaaaaaattacaaa

SEQ ID NO: 1496918 - DNA, 15 bp, Homo sapiens
aaaaaaaaattacaa

SEQ ID NO: 1496919 - DNA, 15 bp, Homo sapiens
aaaaaaaaaattaca

SEQ ID NO: 1496920 - DNA, 15 bp, Homo sapiens
aaaaaaaaaaattac

SEQ ID NO: 1496921 - DNA, 15 bp, Homo sapiens
cgcaaaaaaaaaaaa

SEQ ID NO: 1496922 - DNA, 15 bp, Homo sapiens
tcgcaaaaaaaaaaa

SEQ ID NO: 1496923 - DNA, 15 bp, Homo sapiens
atcgcaaaaaaaaaa

SEQ ID NO: 1496924 - DNA, 15 bp, Homo sapiens
catcgcaaaaaaaaa

SEQ ID NO: 1496925 - DNA, 15 bp, Homo sapiens
ccatcgcaaaaaaaa

SEQ ID NO: 1496926 - DNA, 15 bp, Homo sapiens
tccatcgcaaaaaaa

SEQ ID NO: 1496927 - DNA, 15 bp, Homo sapiens
ctccatcgcaaaaaa

SEQ ID NO: 1496928 - DNA, 15 bp, Homo sapiens
actccatcgcaaaaa

SEQ ID NO: 1496929 - DNA, 15 bp, Homo sapiens
gactccatcgcaaaa

SEQ ID NO: 1496930 - DNA, 15 bp, Homo sapiens
agactccatcgcaaa

SEQ ID NO: 1496931 - DNA, 15 bp, Homo sapiens
gagactccatcgcaa

SEQ ID NO: 1496932 - DNA, 15 bp, Homo sapiens
cgagactccatcgca

SEQ ID NO: 1496933 - DNA, 15 bp, Homo sapiens
gcgagactccatcgc

SEQ ID NO: 1496934 - DNA, 15 bp, Homo sapiens
agcgagactccatcg

SEQ ID NO: 1496935 - DNA, 15 bp, Homo sapiens
aagcgagactccatc

SEQ ID NO: 1496936 - DNA, 15 bp, Homo sapiens
aaagcgagactccat

SEQ ID NO: 1496937 - DNA, 15 bp, Homo sapiens
tgacaaagcgagact

SEQ ID NO: 1496938 - DNA, 15 bp, Homo sapiens
gtgacaaagcgagac

SEQ ID NO: 1496939 - DNA, 15 bp, Homo sapiens
ggtgacaaagcgaga

SEQ ID NO: 1496940 - DNA, 15 bp, Homo sapiens
gggtgacaaagcgag

SEQ ID NO: 1496941 - DNA, 15 bp, Homo sapiens
tgggtgacaaagcga

SEQ ID NO: 1496942 - DNA, 15 bp, Homo sapiens
ctgggtgacaaagcg

SEQ ID NO: 1496943 - DNA, 15 bp, Homo sapiens
cctgggtgacaaagc

SEQ ID NO: 1496944 - DNA, 15 bp, Homo sapiens
gcctgggtgacaaag

SEQ ID NO: 1496945 - DNA, 15 bp, Homo sapiens
tctccagcctgggtg

SEQ ID NO: 1496946 - DNA, 15 bp, Homo sapiens
ctctccagcctgggt

SEQ ID NO: 1496947 - DNA, 15 bp, Homo sapiens
gctctccagcctggg

SEQ ID NO: 1496948 - DNA, 15 bp, Homo sapiens
tgctctccagcctgg

SEQ ID NO: 1496949 - DNA, 15 bp, Homo sapiens
ctgctctccagcctg

SEQ ID NO: 1496950 - DNA, 15 bp, Homo sapiens
actgctctccagcct

SEQ ID NO: 1496951 - DNA, 15 bp, Homo sapiens
cactgctctccagcc

SEQ ID NO: 1496952 - DNA, 15 bp, Homo sapiens
ccactgctctccagc

SEQ ID NO: 1496953 - DNA, 15 bp, Homo sapiens
gccactgctctccag

SEQ ID NO: 1496954 - DNA, 15 bp, Homo sapiens
tgccactgctctcca

SEQ ID NO: 1496955 - DNA, 15 bp, Homo sapiens
atgccactgctctcc

SEQ ID NO: 1496956 - DNA, 15 bp, Homo sapiens
catgccactgctctc

SEQ ID NO: 1496957 - DNA, 15 bp, Homo sapiens
tcatgccactgctct

SEQ ID NO: 1496958 - DNA, 15 bp, Homo sapiens
atcatgccactgctc

SEQ ID NO: 1496959 - DNA, 15 bp, Homo sapiens
gatcatgccactgct

SEQ ID NO: 1496960 - DNA, 15 bp, Homo sapiens
cggaggcggaggttg

SEQ ID NO: 1496961 - DNA, 15 bp, Homo sapiens
ccggaggcggaggtt

SEQ ID NO: 1496962 - DNA, 15 bp, Homo sapiens
cccggaggcggaggt

SEQ ID NO: 1496963 - DNA, 15 bp, Homo sapiens
acccggaggcggagg

SEQ ID NO: 1496964 - DNA, 15 bp, Homo sapiens
aacccggaggcggag

SEQ ID NO: 1496965 - DNA, 15 bp, Homo sapiens
gaacccggaggcgga

SEQ ID NO: 1496966 - DNA, 15 bp, Homo sapiens
tgaacccggaggcgg

SEQ ID NO: 1496967 - DNA, 15 bp, Homo sapiens
ttgaacccggaggcg

SEQ ID NO: 1496968 - DNA, 15 bp, Homo sapiens
cttgaacccggaggc

SEQ ID NO: 1496969 - DNA, 15 bp, Homo sapiens
gcttgaacccggagg

SEQ ID NO: 1496970 - DNA, 15 bp, Homo sapiens
cgcttgaacccggag

SEQ ID NO: 1496971 - DNA, 15 bp, Homo sapiens
tcgcttgaacccgga

SEQ ID NO: 1496972 - DNA, 15 bp, Homo sapiens
caatcccagctacat

SEQ ID NO: 1496973 - DNA, 15 bp, Homo sapiens
gcaatcccagctaca

SEQ ID NO: 1496974 - DNA, 15 bp, Homo sapiens
tgcaatcccagctac

SEQ ID NO: 1496975 - DNA, 15 bp, Homo sapiens
gcgcctgcaatccca

SEQ ID NO: 1496976 - DNA, 15 bp, Homo sapiens
ggcgcctgcaatccc

SEQ ID NO: 1496977 - DNA, 15 bp, Homo sapiens
aggcgcctgcaatcc

SEQ ID NO: 1496978 - DNA, 15 bp, Homo sapiens
caggcgcctgcaatc

SEQ ID NO: 1496979 - DNA, 15 bp, Homo sapiens
gcaggcgcctgcaat

SEQ ID NO: 1496980 - DNA, 15 bp, Homo sapiens
ggcaggcgcctgcaa

SEQ ID NO: 1496981 - DNA, 15 bp, Homo sapiens
gggcaggcgcctgca

SEQ ID NO: 1496982 - DNA, 15 bp, Homo sapiens
tgggcaggcgcctgc

SEQ ID NO: 1496983 - DNA, 15 bp, Homo sapiens
ttgggcaggcgcctg

SEQ ID NO: 1496984 - DNA, 15 bp, Homo sapiens
gttgggcaggcgcct

SEQ ID NO: 1496985 - DNA, 15 bp, Homo sapiens
tgttgggcaggcgcc

SEQ ID NO: 1496986 - DNA, 15 bp, Homo sapiens
gtgttgggcaggcgc

SEQ ID NO: 1496987 - DNA, 15 bp, Homo sapiens
cgtgttgggcaggcg

SEQ ID NO: 1496988 - DNA, 15 bp, Homo sapiens
gcgtgttgggcaggc

SEQ ID NO: 1496989 - DNA, 15 bp, Homo sapiens
ggcgtgttgggcagg

SEQ ID NO: 1496990 - DNA, 15 bp, Homo sapiens
gggcgtgttgggcag

SEQ ID NO: 1496991 - DNA, 15 bp, Homo sapiens
cgggcgtgttgggca

SEQ ID NO: 1496992 - DNA, 15 bp, Homo sapiens
ccgggcgtgttgggc

SEQ ID NO: 1496993 - DNA, 15 bp, Homo sapiens
gccgggcgtgttggg

SEQ ID NO: 1496994 - DNA, 15 bp, Homo sapiens
agccgggcgtgttgg

SEQ ID NO: 1496995 - DNA, 15 bp, Homo sapiens
tagccgggcgtgttg

SEQ ID NO: 1496996 - DNA, 15 bp, Homo sapiens
ttagccgggcgtgtt

SEQ ID NO: 1496997 - DNA, 15 bp, Homo sapiens
attagccgggcgtgt

SEQ ID NO: 1496998 - DNA, 15 bp, Homo sapiens
gtttctactaaaaat

SEQ ID NO: 1496999 - DNA, 15 bp, Homo sapiens
tgtttctactaaaaa

SEQ ID NO: 1497000 - DNA, 15 bp, Homo sapiens
ctgtttctactaaaa

SEQ ID NO: 1497001 - DNA, 15 bp, Homo sapiens
cctgtttctactaaa

SEQ ID NO: 1497002 - DNA, 15 bp, Homo sapiens
ccctgtttctactaa

SEQ ID NO: 1497003 - DNA, 15 bp, Homo sapiens
accctgtttctacta

SEQ ID NO: 1497004 - DNA, 15 bp, Homo sapiens
caccctgtttctact

SEQ ID NO: 1497005 - DNA, 15 bp, Homo sapiens
acaccctgtttctac

SEQ ID NO: 1497006 - DNA, 15 bp, Homo sapiens
gacaccctgtttcta

SEQ ID NO: 1497007 - DNA, 15 bp, Homo sapiens
tgacaccctgtttct

SEQ ID NO: 1497008 - DNA, 15 bp, Homo sapiens
gtgacaccctgtttc

SEQ ID NO: 1497009 - DNA, 15 bp, Homo sapiens
ggtgacaccctgttt

SEQ ID NO: 1497010 - DNA, 15 bp, Homo sapiens
tggtgacaccctgtt

SEQ ID NO: 1497011 - DNA, 15 bp, Homo sapiens
gtggtgacaccctgt

SEQ ID NO: 1497012 - DNA, 15 bp, Homo sapiens
cgtggtgacaccctg

SEQ ID NO: 1497013 - DNA, 15 bp, Homo sapiens
acgtggtgacaccct

SEQ ID NO: 1497014 - DNA, 15 bp, Homo sapiens
aacgtggtgacaccc

SEQ ID NO: 1497015 - DNA, 15 bp, Homo sapiens
caacgtggtgacacc

SEQ ID NO: 1497016 - DNA, 15 bp, Homo sapiens
ccaacgtggtgacac

SEQ ID NO: 1497017 - DNA, 15 bp, Homo sapiens
gccaacgtggtgaca

SEQ ID NO: 1497018 - DNA, 15 bp, Homo sapiens
agccaacgtggtgac

SEQ ID NO: 1497019 - DNA, 15 bp, Homo sapiens
tagccaacgtggtga

SEQ ID NO: 1497020 - DNA, 15 bp, Homo sapiens
ctagccaacgtggtg

SEQ ID NO: 1497021 - DNA, 15 bp, Homo sapiens
cctagccaacgtggt

SEQ ID NO: 1497022 - DNA, 15 bp, Homo sapiens
gcctagccaacgtgg

SEQ ID NO: 1497023 - DNA, 15 bp, Homo sapiens
agcctagccaacgtg

SEQ ID NO: 1497024 - DNA, 15 bp, Homo sapiens
aagcctagccaacgt

SEQ ID NO: 1497025 - DNA, 15 bp, Homo sapiens
caagcctagccaacg

SEQ ID NO: 1497026 - DNA, 15 bp, Homo sapiens
acaagcctagccaac

SEQ ID NO: 1497027 - DNA, 15 bp, Homo sapiens
gacaagcctagccaa

SEQ ID NO: 1497028 - DNA, 15 bp, Homo sapiens
agacaagcctagcca

SEQ ID NO: 1497029 - DNA, 15 bp, Homo sapiens
cagacaagcctagcc

SEQ ID NO: 1497030 - DNA, 15 bp, Homo sapiens
ccagacaagcctagc

SEQ ID NO: 1497031 - DNA, 15 bp, Homo sapiens
tccagacaagcctag

SEQ ID NO: 1497032 - DNA, 15 bp, Homo sapiens
ttccagacaagccta

SEQ ID NO: 1497033 - DNA, 15 bp, Homo sapiens
gttccagacaagcct

SEQ ID NO: 1497034 - DNA, 15 bp, Homo sapiens
agttccagacaagcc

SEQ ID NO: 1497035 - DNA, 15 bp, Homo sapiens
gagttccagacaagc

SEQ ID NO: 1497036 - DNA, 15 bp, Homo sapiens
ggagttccagacaag

SEQ ID NO: 1497037 - DNA, 15 bp, Homo sapiens
aggagttccagacaa

SEQ ID NO: 1497038 - DNA, 15 bp, Homo sapiens
caggagttccagaca

SEQ ID NO: 1497039 - DNA, 15 bp, Homo sapiens
aacttgaggtcagga

SEQ ID NO: 1497040 - DNA, 15 bp, Homo sapiens
taacttgaggtcagg

SEQ ID NO: 1497041 - DNA, 15 bp, Homo sapiens
ataacttgaggtcag

SEQ ID NO: 1497042 - DNA, 15 bp, Homo sapiens
gataacttgaggtca

SEQ ID NO: 1497043 - DNA, 15 bp, Homo sapiens
ggataacttgaggtc

SEQ ID NO: 1497044 - DNA, 15 bp, Homo sapiens
tggataacttgaggt

SEQ ID NO: 1497045 - DNA, 15 bp, Homo sapiens
gtggataacttgagg

SEQ ID NO: 1497046 - DNA, 15 bp, Homo sapiens
ggtggataacttgag

SEQ ID NO: 1497047 - DNA, 15 bp, Homo sapiens
aggtggataacttga

SEQ ID NO: 1497048 - DNA, 15 bp, Homo sapiens
caggtggataacttg

SEQ ID NO: 1497049 - DNA, 15 bp, Homo sapiens
gcaggtggataactt

SEQ ID NO: 1497050 - DNA, 15 bp, Homo sapiens
ggcaggtggataact

SEQ ID NO: 1497051 - DNA, 15 bp, Homo sapiens
aggcaggtggataac

SEQ ID NO: 1497052 - DNA, 15 bp, Homo sapiens
gaggcaggtggataa

SEQ ID NO: 1497053 - DNA, 15 bp, Homo sapiens
cgaggcaggtggata

SEQ ID NO: 1497054 - DNA, 15 bp, Homo sapiens
gaggccgaggcaggt

SEQ ID NO: 1497055 - DNA, 15 bp, Homo sapiens
cattgggaggccgag

SEQ ID NO: 1497056 - DNA, 15 bp, Homo sapiens
acattgggaggccga

SEQ ID NO: 1497057 - DNA, 15 bp, Homo sapiens
cacattgggaggccg

SEQ ID NO: 1497058 - DNA, 15 bp, Homo sapiens
gcacattgggaggcc

SEQ ID NO: 1497059 - DNA, 15 bp, Homo sapiens
agcacattgggaggc

SEQ ID NO: 1497060 - DNA, 15 bp, Homo sapiens
cagcacattgggagg

SEQ ID NO: 1497061 - DNA, 15 bp, Homo sapiens
ccagcacattgggag

SEQ ID NO: 1497062 - DNA, 15 bp, Homo sapiens
cccagcacattggga

SEQ ID NO: 1497063 - DNA, 15 bp, Homo sapiens
tcccagcacattggg

SEQ ID NO: 1497064 - DNA, 15 bp, Homo sapiens
atcccagcacattgg

SEQ ID NO: 1497065 - DNA, 15 bp, Homo sapiens
aatcccagcacattg

SEQ ID NO: 1497066 - DNA, 15 bp, Homo sapiens
gtaatcccagcacat

SEQ ID NO: 1497067 - DNA, 15 bp, Homo sapiens
tgtaatcccagcaca

SEQ ID NO: 1497068 - DNA, 15 bp, Homo sapiens
atgagcctgtaatcc

SEQ ID NO: 1497069 - DNA, 15 bp, Homo sapiens
catgagcctgtaatc

SEQ ID NO: 1497070 - DNA, 15 bp, Homo sapiens
acatgagcctgtaat

SEQ ID NO: 1497071 - DNA, 15 bp, Homo sapiens
cacatgagcctgtaa

SEQ ID NO: 1497072 - DNA, 15 bp, Homo sapiens
tcacatgagcctgta

SEQ ID NO: 1497073 - DNA, 15 bp, Homo sapiens
ctcacatgagcctgt

SEQ ID NO: 1497074 - DNA, 15 bp, Homo sapiens
gctcacatgagcctg

SEQ ID NO: 1497075 - DNA, 15 bp, Homo sapiens
ggctcacatgagcct

SEQ ID NO: 1497076 - DNA, 15 bp, Homo sapiens
tggctcacatgagcc

SEQ ID NO: 1497077 - DNA, 15 bp, Homo sapiens
gtggctcacatgagc

SEQ ID NO: 1497078 - DNA, 15 bp, Homo sapiens
ggtggctcacatgag

SEQ ID NO: 1497079 - DNA, 15 bp, Homo sapiens
tggtggctcacatga

SEQ ID NO: 1497080 - DNA, 15 bp, Homo sapiens
atggtggctcacatg

SEQ ID NO: 1497081 - DNA, 15 bp, Homo sapiens
catggtggctcacat

SEQ ID NO: 1497082 - DNA, 15 bp, Homo sapiens
gcatggtggctcaca

SEQ ID NO: 1497083 - DNA, 15 bp, Homo sapiens
gggctgggcatggtg

SEQ ID NO: 1497084 - DNA, 15 bp, Homo sapiens
tgggctgggcatggt

SEQ ID NO: 1497085 - DNA, 15 bp, Homo sapiens
ttgggctgggcatgg

SEQ ID NO: 1497086 - DNA, 15 bp, Homo sapiens
attgggctgggcatg

SEQ ID NO: 1497087 - DNA, 15 bp, Homo sapiens
tattgggctgggcat

SEQ ID NO: 1497088 - DNA, 15 bp, Homo sapiens
atattgggctgggca

SEQ ID NO: 1497089 - DNA, 15 bp, Homo sapiens
aatattgggctgggc

SEQ ID NO: 1497090 - DNA, 15 bp, Homo sapiens
aaatattgggctggg

SEQ ID NO: 1497091 - DNA, 15 bp, Homo sapiens
caaatattgggctgg

SEQ ID NO: 1497092 - DNA, 15 bp, Homo sapiens
acaaatattgggctg

SEQ ID NO: 1497093 - DNA, 15 bp, Homo sapiens
tacaaatattgggct

SEQ ID NO: 1497094 - DNA, 15 bp, Homo sapiens
ttacaaatattgggc

SEQ ID NO: 1497095 - DNA, 15 bp, Homo sapiens
attacaaatattggg

SEQ ID NO: 1497096 - DNA, 15 bp, Homo sapiens
aattacaaatattgg

SEQ ID NO: 1497097 - DNA, 15 bp, Homo sapiens
caaattacaaatatt

SEQ ID NO: 1497098 - DNA, 15 bp, Homo sapiens
tcaaattacaaatat

SEQ ID NO: 1497099 - DNA, 15 bp, Homo sapiens
atcaaattacaaata

SEQ ID NO: 1497100 - DNA, 15 bp, Homo sapiens
tatcaaattacaaat

SEQ ID NO: 1497101 - DNA, 15 bp, Homo sapiens
gtatcaaattacaaa

SEQ ID NO: 1497102 - DNA, 15 bp, Homo sapiens
ggtatcaaattacaa

SEQ ID NO: 1497103 - DNA, 15 bp, Homo sapiens
tggtatcaaattaca

SEQ ID NO: 1497104 - DNA, 15 bp, Homo sapiens
gtggtatcaaattac

SEQ ID NO: 1497105 - DNA, 15 bp, Homo sapiens
agtggtatcaaatta

SEQ ID NO: 1497106 - DNA, 15 bp, Homo sapiens
aagtggtatcaaatt

SEQ ID NO: 1497107 - DNA, 15 bp, Homo sapiens
aaagtggtatcaaat

SEQ ID NO: 1497108 - DNA, 15 bp, Homo sapiens
gaaagtggtatcaaa

SEQ ID NO: 1497109 - DNA, 15 bp, Homo sapiens
cgaaagtggtatcaa

SEQ ID NO: 1497110 - DNA, 15 bp, Homo sapiens
acgaaagtggtatca

SEQ ID NO: 1497111 - DNA, 15 bp, Homo sapiens
tacgaaagtggtatc

SEQ ID NO: 1497112 - DNA, 15 bp, Homo sapiens
ttacgaaagtggtat

SEQ ID NO: 1497113 - DNA, 15 bp, Homo sapiens
cttacgaaagtggta

SEQ ID NO: 1497114 - DNA, 15 bp, Homo sapiens
acttacgaaagtggt

SEQ ID NO: 1497115 - DNA, 15 bp, Homo sapiens
cacttacgaaagtgg

SEQ ID NO: 1497116 - DNA, 15 bp, Homo sapiens
gcacttacgaaagtg

SEQ ID NO: 1497117 - DNA, 15 bp, Homo sapiens
tgcacttacgaaagt

SEQ ID NO: 1497118 - DNA, 15 bp, Homo sapiens
ttgcacttacgaaag

SEQ ID NO: 1497119 - DNA, 15 bp, Homo sapiens
tttgcacttacgaaa

SEQ ID NO: 1497120 - DNA, 15 bp, Homo sapiens
ttttgcacttacgaa

SEQ ID NO: 1497121 - DNA, 15 bp, Homo sapiens
tttttgcacttacga

SEQ ID NO: 1497122 - DNA, 15 bp, Homo sapiens
gtttttgcacttacg

SEQ ID NO: 1497123 - DNA, 15 bp, Homo sapiens
tgtttttgcacttac

SEQ ID NO: 1497124 - DNA, 15 bp, Homo sapiens
ttgtttttgcactta

SEQ ID NO: 1497125 - DNA, 15 bp, Homo sapiens
tttgtttttgcactt

SEQ ID NO: 1497126 - DNA, 15 bp, Homo sapiens
ttttgtttttgcact

SEQ ID NO: 1497127 - DNA, 15 bp, Homo sapiens
attttgtttttgcac

SEQ ID NO: 1497128 - DNA, 15 bp, Homo sapiens
aattttgtttttgca

SEQ ID NO: 1497129 - DNA, 15 bp, Homo sapiens
gaattttgtttttgc

SEQ ID NO: 1497130 - DNA, 15 bp, Homo sapiens
ggaattttgtttttg

SEQ ID NO: 1497131 - DNA, 15 bp, Homo sapiens
tggaattttgttttt

SEQ ID NO: 1497132 - DNA, 15 bp, Homo sapiens
atggaattttgtttt

SEQ ID NO: 1497133 - DNA, 15 bp, Homo sapiens
tatggaattttgttt

SEQ ID NO: 1497134 - DNA, 15 bp, Homo sapiens
atatggaattttgtt

SEQ ID NO: 1497135 - DNA, 15 bp, Homo sapiens
tatatggaattttgt

SEQ ID NO: 1497136 - DNA, 15 bp, Homo sapiens
ttatatggaattttg

SEQ ID NO: 1497137 - DNA, 15 bp, Homo sapiens
tttatatggaatttt

SEQ ID NO: 1497138 - DNA, 15 bp, Homo sapiens
atttatatggaattt

SEQ ID NO: 1497139 - DNA, 15 bp, Homo sapiens
tatttatatggaatt

SEQ ID NO: 1497140 - DNA, 15 bp, Homo sapiens
ttatttatatggaat

SEQ ID NO: 1497141 - DNA, 15 bp, Homo sapiens
tttatttatatggaa

SEQ ID NO: 1497142 - DNA, 15 bp, Homo sapiens
atttatttatatgga

SEQ ID NO: 1497143 - DNA, 15 bp, Homo sapiens
aatttatttatatgg

SEQ ID NO: 1497144 - DNA, 15 bp, Homo sapiens
taatttatttatatg

SEQ ID NO: 1497145 - DNA, 15 bp, Homo sapiens
ataatttatttatat

SEQ ID NO: 1497146 - DNA, 15 bp, Homo sapiens
tataatttatttata

SEQ ID NO: 1497147 - DNA, 15 bp, Homo sapiens
atataatttatttat

SEQ ID NO: 1497148 - DNA, 15 bp, Homo sapiens
aatataatttattta

SEQ ID NO: 1497149 - DNA, 15 bp, Homo sapiens
aaatataatttattt

SEQ ID NO: 1497150 - DNA, 15 bp, Homo sapiens
caaatataatttatt

SEQ ID NO: 1497151 - DNA, 15 bp, Homo sapiens
gcaaatataatttat

SEQ ID NO: 1497152 - DNA, 15 bp, Homo sapiens
tgcaaatataattta

SEQ ID NO: 1497153 - DNA, 15 bp, Homo sapiens
gtgcaaatataattt

SEQ ID NO: 1497154 - DNA, 15 bp, Homo sapiens
tgtgcaaatataatt

SEQ ID NO: 1497155 - DNA, 15 bp, Homo sapiens
ttgtgcaaatataat

SEQ ID NO: 1497156 - DNA, 15 bp, Homo sapiens
tttgtgcaaatataa

SEQ ID NO: 1497157 - DNA, 15 bp, Homo sapiens
atttgtgcaaatata

SEQ ID NO: 1497158 - DNA, 15 bp, Homo sapiens
tatttgtgcaaatat

SEQ ID NO: 1497159 - DNA, 15 bp, Homo sapiens
atatttgtgcaaata

SEQ ID NO: 1497160 - DNA, 15 bp, Homo sapiens
catatttgtgcaaat

SEQ ID NO: 1497161 - DNA, 15 bp, Homo sapiens
gcatatttgtgcaaa

SEQ ID NO: 1497162 - DNA, 15 bp, Homo sapiens
tgcatatttgtgcaa

SEQ ID NO: 1497163 - DNA, 15 bp, Homo sapiens
atgcatatttgtgca

SEQ ID NO: 1497164 - DNA, 15 bp, Homo sapiens
aatgcatatttgtgc

SEQ ID NO: 1497165 - DNA, 15 bp, Homo sapiens
aaatgcatatttgtg

SEQ ID NO: 1497166 - DNA, 15 bp, Homo sapiens
aaaatgcatatttgt

SEQ ID NO: 1497167 - DNA, 15 bp, Homo sapiens
gaaaatgcatatttg

SEQ ID NO: 1497168 - DNA, 15 bp, Homo sapiens
tgaaaatgcatattt

SEQ ID NO: 1497169 - DNA, 15 bp, Homo sapiens
ttgaaaatgcatatt

SEQ ID NO: 1497170 - DNA, 15 bp, Homo sapiens
attgaaaatgcatat

SEQ ID NO: 1497171 - DNA, 15 bp, Homo sapiens
tattgaaaatgcata

SEQ ID NO: 1497172 - DNA, 15 bp, Homo sapiens
ttattgaaaatgcat

SEQ ID NO: 1497173 - DNA, 15 bp, Homo sapiens
attattgaaaatgca

SEQ ID NO: 1497174 - DNA, 15 bp, Homo sapiens
gattattgaaaatgc

SEQ ID NO: 1497175 - DNA, 15 bp, Homo sapiens
agattattgaaaatg

SEQ ID NO: 1497176 - DNA, 15 bp, Homo sapiens
cagattattgaaaat

SEQ ID NO: 1497177 - DNA, 15 bp, Homo sapiens
tcagattattgaaaa

SEQ ID NO: 1497178 - DNA, 15 bp, Homo sapiens
ttcagattattgaaa

SEQ ID NO: 1497179 - DNA, 15 bp, Homo sapiens
tttcagattattgaa

SEQ ID NO: 1497180 - DNA, 15 bp, Homo sapiens
ctttcagattattga

SEQ ID NO: 1497181 - DNA, 15 bp, Homo sapiens
cctttcagattattg

SEQ ID NO: 1497182 - DNA, 15 bp, Homo sapiens
tcctttcagattatt

SEQ ID NO: 1497183 - DNA, 15 bp, Homo sapiens
ctcctttcagattat

SEQ ID NO: 1497184 - DNA, 15 bp, Homo sapiens
actcctttcagatta

SEQ ID NO: 1497185 - DNA, 15 bp, Homo sapiens
gactcctttcagatt

SEQ ID NO: 1497186 - DNA, 15 bp, Homo sapiens
tgactcctttcagat

SEQ ID NO: 1497187 - DNA, 15 bp, Homo sapiens
gtgactcctttcaga

SEQ ID NO: 1497188 - DNA, 15 bp, Homo sapiens
tgtgactcctttcag

SEQ ID NO: 1497189 - DNA, 15 bp, Homo sapiens
atgtgactcctttca

SEQ ID NO: 1497190 - DNA, 15 bp, Homo sapiens
tatgtgactcctttc

SEQ ID NO: 1497191 - DNA, 15 bp, Homo sapiens
ttatgtgactccttt

SEQ ID NO: 1497192 - DNA, 15 bp, Homo sapiens
tttatgtgactcctt

SEQ ID NO: 1497193 - DNA, 15 bp, Homo sapiens
ttttatgtgactcct

SEQ ID NO: 1497194 - DNA, 15 bp, Homo sapiens
gttttatgtgactcc

SEQ ID NO: 1497195 - DNA, 15 bp, Homo sapiens
agttttatgtgactc

SEQ ID NO: 1497196 - DNA, 15 bp, Homo sapiens
gagttttatgtgact

SEQ ID NO: 1497197 - DNA, 15 bp, Homo sapiens
agagttttatgtgac

SEQ ID NO: 1497198 - DNA, 15 bp, Homo sapiens
aagagttttatgtga

SEQ ID NO: 1497199 - DNA, 15 bp, Homo sapiens
gaagagttttatgtg

SEQ ID NO: 1497200 - DNA, 15 bp, Homo sapiens
tgaagagttttatgt

SEQ ID NO: 1497201 - DNA, 15 bp, Homo sapiens
atgaagagttttatg

SEQ ID NO: 1497202 - DNA, 15 bp, Homo sapiens
aatgaagagttttat

SEQ ID NO: 1497203 - DNA, 15 bp, Homo sapiens
taatgaagagtttta

SEQ ID NO: 1497204 - DNA, 15 bp, Homo sapiens
gtaatgaagagtttt

SEQ ID NO: 1497205 - DNA, 15 bp, Homo sapiens
agtaatgaagagttt

SEQ ID NO: 1497206 - DNA, 15 bp, Homo sapiens
cagtaatgaagagtt

SEQ ID NO: 1497207 - DNA, 15 bp, Homo sapiens
ccagtaatgaagagt

SEQ ID NO: 1497208 - DNA, 15 bp, Homo sapiens
accagtaatgaagag

SEQ ID NO: 1497209 - DNA, 15 bp, Homo sapiens
aaccagtaatgaaga

SEQ ID NO: 1497210 - DNA, 15 bp, Homo sapiens
taaccagtaatgaag

SEQ ID NO: 1497211 - DNA, 15 bp, Homo sapiens
gtaaccagtaatgaa

SEQ ID NO: 1497212 - DNA, 15 bp, Homo sapiens
ggtaaccagtaatga

SEQ ID NO: 1497213 - DNA, 15 bp, Homo sapiens
aggtaaccagtaatg

SEQ ID NO: 1497214 - DNA, 15 bp, Homo sapiens
gaggtaaccagtaat

SEQ ID NO: 1497215 - DNA, 15 bp, Homo sapiens
agaggtaaccagtaa

SEQ ID NO: 1497216 - DNA, 15 bp, Homo sapiens
cagaggtaaccagta

SEQ ID NO: 1497217 - DNA, 15 bp, Homo sapiens
ccagaggtaaccagt

SEQ ID NO: 1497218 - DNA, 15 bp, Homo sapiens
cccagaggtaaccag

SEQ ID NO: 1497219 - DNA, 15 bp, Homo sapiens
tcccagaggtaacca

SEQ ID NO: 1497220 - DNA, 15 bp, Homo sapiens
gtcccagaggtaacc

SEQ ID NO: 1497221 - DNA, 15 bp, Homo sapiens
tgtcccagaggtaac

SEQ ID NO: 1497222 - DNA, 15 bp, Homo sapiens
ttgtcccagaggtaa

SEQ ID NO: 1497223 - DNA, 15 bp, Homo sapiens
tttgtcccagaggta

SEQ ID NO: 1497224 - DNA, 15 bp, Homo sapiens
ctttgtcccagaggt

SEQ ID NO: 1497225 - DNA, 15 bp, Homo sapiens
cctttgtcccagagg

SEQ ID NO: 1497226 - DNA, 15 bp, Homo sapiens
tcctttgtcccagag

SEQ ID NO: 1497227 - DNA, 15 bp, Homo sapiens
atcctttgtcccaga

SEQ ID NO: 1497228 - DNA, 15 bp, Homo sapiens
aatcctttgtcccag

SEQ ID NO: 1497229 - DNA, 15 bp, Homo sapiens
caatcctttgtccca

SEQ ID NO: 1497230 - DNA, 15 bp, Homo sapiens
tcaatcctttgtccc

SEQ ID NO: 1497231 - DNA, 15 bp, Homo sapiens
ttcaatcctttgtcc

SEQ ID NO: 1497232 - DNA, 15 bp, Homo sapiens
tttcaatcctttgtc

SEQ ID NO: 1497233 - DNA, 15 bp, Homo sapiens
ctttcaatcctttgt

SEQ ID NO: 1497234 - DNA, 15 bp, Homo sapiens
cctttcaatcctttg

SEQ ID NO: 1497235 - DNA, 15 bp, Homo sapiens
gcctttcaatccttt

SEQ ID NO: 1497236 - DNA, 15 bp, Homo sapiens
tgcctttcaatcctt

SEQ ID NO: 1497237 - DNA, 15 bp, Homo sapiens
ctgcctttcaatcct

SEQ ID NO: 1497238 - DNA, 15 bp, Homo sapiens
actgcctttcaatcc

SEQ ID NO: 1497239 - DNA, 15 bp, Homo sapiens
cactgcctttcaatc

SEQ ID NO: 1497240 - DNA, 15 bp, Homo sapiens
tcactgcctttcaat

SEQ ID NO: 1497241 - DNA, 15 bp, Homo sapiens
ctcactgcctttcaa

SEQ ID NO: 1497242 - DNA, 15 bp, Homo sapiens
actcactgcctttca

SEQ ID NO: 1497243 - DNA, 15 bp, Homo sapiens
tactcactgcctttc

SEQ ID NO: 1497244 - DNA, 15 bp, Homo sapiens
ttactcactgccttt

SEQ ID NO: 1497245 - DNA, 15 bp, Homo sapiens
tttactcactgcctt

SEQ ID NO: 1497246 - DNA, 15 bp, Homo sapiens
ttttactcactgcct

SEQ ID NO: 1497247 - DNA, 15 bp, Homo sapiens
gttttactcactgcc

SEQ ID NO: 1497248 - DNA, 15 bp, Homo sapiens
agttttactcactgc

SEQ ID NO: 1497249 - DNA, 15 bp, Homo sapiens
aagttttactcactg

SEQ ID NO: 1497250 - DNA, 15 bp, Homo sapiens
aaagttttactcact

SEQ ID NO: 1497251 - DNA, 15 bp, Homo sapiens
aaaagttttactcac

SEQ ID NO: 1497252 - DNA, 15 bp, Homo sapiens
taaaagttttactca

SEQ ID NO: 1497253 - DNA, 15 bp, Homo sapiens
ttaaaagttttactc

SEQ ID NO: 1497254 - DNA, 15 bp, Homo sapiens
attaaaagttttact

SEQ ID NO: 1497255 - DNA, 15 bp, Homo sapiens
aattaaaagttttac

SEQ ID NO: 1497256 - DNA, 15 bp, Homo sapiens
taattaaaagtttta

SEQ ID NO: 1497257 - DNA, 15 bp, Homo sapiens
ataattaaaagtttt

SEQ ID NO: 1497258 - DNA, 15 bp, Homo sapiens
aataattaaaagttt

SEQ ID NO: 1497259 - DNA, 15 bp, Homo sapiens
aaataattaaaagtt

SEQ ID NO: 1497260 - DNA, 15 bp, Homo sapiens
aaaataattaaaagt

SEQ ID NO: 1497261 - DNA, 15 bp, Homo sapiens
aaaaataattaaaag

SEQ ID NO: 1497262 - DNA, 15 bp, Homo sapiens
aaaaaataattaaaa

SEQ ID NO: 1497263 - DNA, 15 bp, Homo sapiens
taaaaaataattaaa

SEQ ID NO: 1497264 - DNA, 15 bp, Homo sapiens
ttaaaaaataattaa

SEQ ID NO: 1497265 - DNA, 15 bp, Homo sapiens
gttaaaaaataatta

SEQ ID NO: 1497266 - DNA, 15 bp, Homo sapiens
agttaaaaaataatt

SEQ ID NO: 1497267 - DNA, 15 bp, Homo sapiens
aagttaaaaaataat

SEQ ID NO: 1497268 - DNA, 15 bp, Homo sapiens
aaagttaaaaaataa

SEQ ID NO: 1497269 - DNA, 15 bp, Homo sapiens
caaagttaaaaaata

SEQ ID NO: 1497270 - DNA, 15 bp, Homo sapiens
ccaaagttaaaaaat

SEQ ID NO: 1497271 - DNA, 15 bp, Homo sapiens
gccaaagttaaaaaa

SEQ ID NO: 1497272 - DNA, 15 bp, Homo sapiens
tgccaaagttaaaaa

SEQ ID NO: 1497273 - DNA, 15 bp, Homo sapiens
gtgccaaagttaaaa

SEQ ID NO: 1497274 - DNA, 15 bp, Homo sapiens
cgtgccaaagttaaa

SEQ ID NO: 1497275 - DNA, 15 bp, Homo sapiens
ccgtgccaaagttaa

SEQ ID NO: 1497276 - DNA, 15 bp, Homo sapiens
accgtgccaaagtta

SEQ ID NO: 1497277 - DNA, 15 bp, Homo sapiens
aaccgtgccaaagtt

SEQ ID NO: 1497278 - DNA, 15 bp, Homo sapiens
aaaccgtgccaaagt

SEQ ID NO: 1497279 - DNA, 15 bp, Homo sapiens
caaaccgtgccaaag

SEQ ID NO: 1497280 - DNA, 15 bp, Homo sapiens
tcaaaccgtgccaaa

SEQ ID NO: 1497281 - DNA, 15 bp, Homo sapiens
ttcaaaccgtgccaa

SEQ ID NO: 1497282 - DNA, 15 bp, Homo sapiens
tttcaaaccgtgcca

SEQ ID NO: 1497283 - DNA, 15 bp, Homo sapiens
gtttcaaaccgtgcc

SEQ ID NO: 1497284 - DNA, 15 bp, Homo sapiens
tgtttcaaaccgtgc

SEQ ID NO: 1497285 - DNA, 15 bp, Homo sapiens
atgtttcaaaccgtg

SEQ ID NO: 1497286 - DNA, 15 bp, Homo sapiens
aatgtttcaaaccgt

SEQ ID NO: 1497287 - DNA, 15 bp, Homo sapiens
aaatgtttcaaaccg

SEQ ID NO: 1497288 - DNA, 15 bp, Homo sapiens
taaatgtttcaaacc

SEQ ID NO: 1497289 - DNA, 15 bp, Homo sapiens
gtaaatgtttcaaac

SEQ ID NO: 1497290 - DNA, 15 bp, Homo sapiens
tgtaaatgtttcaaa

SEQ ID NO: 1497291 - DNA, 15 bp, Homo sapiens
ctgtaaatgtttcaa

SEQ ID NO: 1497292 - DNA, 15 bp, Homo sapiens
gctgtaaatgtttca

SEQ ID NO: 1497293 - DNA, 15 bp, Homo sapiens
tgctgtaaatgtttc

SEQ ID NO: 1497294 - DNA, 15 bp, Homo sapiens
atgctgtaaatgttt

SEQ ID NO: 1497295 - DNA, 15 bp, Homo sapiens
tatgctgtaaatgtt

SEQ ID NO: 1497296 - DNA, 15 bp, Homo sapiens
atatgctgtaaatgt

SEQ ID NO: 1497297 - DNA, 15 bp, Homo sapiens
tatatgctgtaaatg

SEQ ID NO: 1497298 - DNA, 15 bp, Homo sapiens
gtatatgctgtaaat

SEQ ID NO: 1497299 - DNA, 15 bp, Homo sapiens
agtatatgctgtaaa

SEQ ID NO: 1497300 - DNA, 15 bp, Homo sapiens
cagtatatgctgtaa

SEQ ID NO: 1497301 - DNA, 15 bp, Homo sapiens
acagtatatgctgta

SEQ ID NO: 1497302 - DNA, 15 bp, Homo sapiens
aacagtatatgctgt

SEQ ID NO: 1497303 - DNA, 15 bp, Homo sapiens
aaacagtatatgctg

SEQ ID NO: 1497304 - DNA, 15 bp, Homo sapiens
aaaacagtatatgct

SEQ ID NO: 1497305 - DNA, 15 bp, Homo sapiens
taaaacagtatatgc

SEQ ID NO: 1497306 - DNA, 15 bp, Homo sapiens
gtaaaacagtatatg

SEQ ID NO: 1497307 - DNA, 15 bp, Homo sapiens
agtaaaacagtatat

SEQ ID NO: 1497308 - DNA, 15 bp, Homo sapiens
aagtaaaacagtata

SEQ ID NO: 1497309 - DNA, 15 bp, Homo sapiens
gaagtaaaacagtat

SEQ ID NO: 1497310 - DNA, 15 bp, Homo sapiens
agaagtaaaacagta

SEQ ID NO: 1497311 - DNA, 15 bp, Homo sapiens
cagaagtaaaacagt

SEQ ID NO: 1497312 - DNA, 15 bp, Homo sapiens
acagaagtaaaacag

SEQ ID NO: 1497313 - DNA, 15 bp, Homo sapiens
tacagaagtaaaaca

SEQ ID NO: 1497314 - DNA, 15 bp, Homo sapiens
ttacagaagtaaaac

SEQ ID NO: 1497315 - DNA, 15 bp, Homo sapiens
gttacagaagtaaaa

SEQ ID NO: 1497316 - DNA, 15 bp, Homo sapiens
agttacagaagtaaa

SEQ ID NO: 1497317 - DNA, 15 bp, Homo sapiens
tagttacagaagtaa

SEQ ID NO: 1497318 - DNA, 15 bp, Homo sapiens
ttagttacagaagta

SEQ ID NO: 1497319 - DNA, 15 bp, Homo sapiens
tttagttacagaagt

SEQ ID NO: 1497320 - DNA, 15 bp, Homo sapiens
ttttagttacagaag

SEQ ID NO: 1497321 - DNA, 15 bp, Homo sapiens
tttttagttacagaa

SEQ ID NO: 1497322 - DNA, 15 bp, Homo sapiens
ttttttagttacaga

SEQ ID NO: 1497323 - DNA, 15 bp, Homo sapiens
tttttttagttacag

SEQ ID NO: 1497324 - DNA, 15 bp, Homo sapiens
ctttttttagttaca

SEQ ID NO: 1497325 - DNA, 15 bp, Homo sapiens
cctttttttagttac

SEQ ID NO: 1497326 - DNA, 15 bp, Homo sapiens
ccctttttttagtta

SEQ ID NO: 1497327 - DNA, 15 bp, Homo sapiens
gccctttttttagtt

SEQ ID NO: 1497328 - DNA, 15 bp, Homo sapiens
tgccctttttttagt

SEQ ID NO: 1497329 - DNA, 15 bp, Homo sapiens
ttgccctttttttag

SEQ ID NO: 1497330 - DNA, 15 bp, Homo sapiens
gttgcccttttttta

SEQ ID NO: 1497331 - DNA, 15 bp, Homo sapiens
tgttgcccttttttt

SEQ ID NO: 1497332 - DNA, 15 bp, Homo sapiens
ttgttgccctttttt

SEQ ID NO: 1497333 - DNA, 15 bp, Homo sapiens
tttgttgcccttttt

SEQ ID NO: 1497334 - DNA, 15 bp, Homo sapiens
ctttgttgccctttt

SEQ ID NO: 1497335 - DNA, 15 bp, Homo sapiens
tctttgttgcccttt

SEQ ID NO: 1497336 - DNA, 15 bp, Homo sapiens
gtctttgttgccctt

SEQ ID NO: 1497337 - DNA, 15 bp, Homo sapiens
tgtctttgttgccct

SEQ ID NO: 1497338 - DNA, 15 bp, Homo sapiens
ttgtctttgttgccc

SEQ ID NO: 1497339 - DNA, 15 bp, Homo sapiens
attgtctttgttgcc

SEQ ID NO: 1497340 - DNA, 15 bp, Homo sapiens
aattgtctttgttgc

SEQ ID NO: 1497341 - DNA, 15 bp, Homo sapiens
aaattgtctttgttg

SEQ ID NO: 1497342 - DNA, 15 bp, Homo sapiens
aaaattgtctttgtt

SEQ ID NO: 1497343 - DNA, 15 bp, Homo sapiens
aaaaattgtctttgt

SEQ ID NO: 1497344 - DNA, 15 bp, Homo sapiens
taaaaattgtctttg

SEQ ID NO: 1497345 - DNA, 15 bp, Homo sapiens
ttaaaaattgtcttt

SEQ ID NO: 1497346 - DNA, 15 bp, Homo sapiens
tttaaaaattgtctt

SEQ ID NO: 1497347 - DNA, 15 bp, Homo sapiens
ttttaaaaattgtct

SEQ ID NO: 1497348 - DNA, 15 bp, Homo sapiens
tttttaaaaattgtc

SEQ ID NO: 1497349 - DNA, 15 bp, Homo sapiens
atttttaaaaattgt

SEQ ID NO: 1497350 - DNA, 15 bp, Homo sapiens
gatttttaaaaattg

SEQ ID NO: 1497351 - DNA, 15 bp, Homo sapiens
agatttttaaaaatt

SEQ ID NO: 1497352 - DNA, 15 bp, Homo sapiens
aagatttttaaaaat

SEQ ID NO: 1497353 - DNA, 15 bp, Homo sapiens
aaagatttttaaaaa

SEQ ID NO: 1497354 - DNA, 15 bp, Homo sapiens
caaagatttttaaaa

SEQ ID NO: 1497355 - DNA, 15 bp, Homo sapiens
ccaaagatttttaaa

SEQ ID NO: 1497356 - DNA, 15 bp, Homo sapiens
gccaaagatttttaa

SEQ ID NO: 1497357 - DNA, 15 bp, Homo sapiens
agccaaagattttta

SEQ ID NO: 1497358 - DNA, 15 bp, Homo sapiens
cagccaaagattttt

SEQ ID NO: 1497359 - DNA, 15 bp, Homo sapiens
ccagccaaagatttt

SEQ ID NO: 1497360 - DNA, 15 bp, Homo sapiens
cccagccaaagattt

SEQ ID NO: 1497361 - DNA, 15 bp, Homo sapiens
acccagccaaagatt

SEQ ID NO: 1497362 - DNA, 15 bp, Homo sapiens
tacccagccaaagat

SEQ ID NO: 1497363 - DNA, 15 bp, Homo sapiens
atacccagccaaaga

SEQ ID NO: 1497364 - DNA, 15 bp, Homo sapiens
catacccagccaaag

SEQ ID NO: 1497365 - DNA, 15 bp, Homo sapiens
ccatacccagccaaa

SEQ ID NO: 1497366 - DNA, 15 bp, Homo sapiens
accatacccagccaa

SEQ ID NO: 1497367 - DNA, 15 bp, Homo sapiens
caccatacccagcca

SEQ ID NO: 1497368 - DNA, 15 bp, Homo sapiens
ccaccatacccagcc

SEQ ID NO: 1497369 - DNA, 15 bp, Homo sapiens
gccaccatacccagc

SEQ ID NO: 1497370 - DNA, 15 bp, Homo sapiens
agccaccatacccag

SEQ ID NO: 1497371 - DNA, 15 bp, Homo sapiens
gagccaccataccca

SEQ ID NO: 1497372 - DNA, 15 bp, Homo sapiens
tgagccaccataccc

SEQ ID NO: 1497373 - DNA, 15 bp, Homo sapiens
gtgtgagccaccata

SEQ ID NO: 1497374 - DNA, 15 bp, Homo sapiens
aggcgcgatctcggc

SEQ ID NO: 1497375 - DNA, 15 bp, Homo sapiens
gaggcgcgatctcgg

SEQ ID NO: 1497376 - DNA, 15 bp, Homo sapiens
agaggcgcgatctcg

SEQ ID NO: 1497377 - DNA, 15 bp, Homo sapiens
cagaggcgcgatctc

SEQ ID NO: 1497378 - DNA, 15 bp, Homo sapiens
gcagaggcgcgatct

SEQ ID NO: 1497379 - DNA, 15 bp, Homo sapiens
tgcagaggcgcgatc

SEQ ID NO: 1497380 - DNA, 15 bp, Homo sapiens
gtgcagaggcgcgat

SEQ ID NO: 1497381 - DNA, 15 bp, Homo sapiens
agtgcagaggcgcga

SEQ ID NO: 1497382 - DNA, 15 bp, Homo sapiens
gagtgcagaggcgcg

SEQ ID NO: 1497383 - DNA, 15 bp, Homo sapiens
ggagtgcagaggcgc

SEQ ID NO: 1497384 - DNA, 15 bp, Homo sapiens
tggagtgcagaggcg

SEQ ID NO: 1497385 - DNA, 15 bp, Homo sapiens
ctggagtgcagaggc

SEQ ID NO: 1497386 - DNA, 15 bp, Homo sapiens
gctggagtgcagagg

SEQ ID NO: 1497387 - DNA, 15 bp, Homo sapiens
ggctggagtgcagag

SEQ ID NO: 1497388 - DNA, 15 bp, Homo sapiens
aggctggagtgcaga

SEQ ID NO: 1497389 - DNA, 15 bp, Homo sapiens
cctgtcacccaggct

SEQ ID NO: 1497390 - DNA, 15 bp, Homo sapiens
ccctgtcacccaggc

SEQ ID NO: 1497391 - DNA, 15 bp, Homo sapiens
accctgtcacccagg

SEQ ID NO: 1497392 - DNA, 15 bp, Homo sapiens
caccctgtcacccag

SEQ ID NO: 1497393 - DNA, 15 bp, Homo sapiens
tcaccctgtcaccca

SEQ ID NO: 1497394 - DNA, 15 bp, Homo sapiens
ctcaccctgtcaccc

SEQ ID NO: 1497395 - DNA, 15 bp, Homo sapiens
tctcaccctgtcacc

SEQ ID NO: 1497396 - DNA, 15 bp, Homo sapiens
gtctcaccctgtcac

SEQ ID NO: 1497397 - DNA, 15 bp, Homo sapiens
agtctcaccctgtca

SEQ ID NO: 1497398 - DNA, 15 bp, Homo sapiens
gagtctcaccctgtc

SEQ ID NO: 1497399 - DNA, 15 bp, Homo sapiens
agagtctcaccctgt

SEQ ID NO: 1497400 - DNA, 15 bp, Homo sapiens
cagagtctcaccctg

SEQ ID NO: 1497401 - DNA, 15 bp, Homo sapiens
acagagtctcaccct

SEQ ID NO: 1497402 - DNA, 15 bp, Homo sapiens
gacagagtctcaccc

SEQ ID NO: 1497403 - DNA, 15 bp, Homo sapiens
agacagagtctcacc

SEQ ID NO: 1497404 - DNA, 15 bp, Homo sapiens
aagacagagtctcac

SEQ ID NO: 1497405 - DNA, 15 bp, Homo sapiens
taagacagagtctca

SEQ ID NO: 1497406 - DNA, 15 bp, Homo sapiens
ttaagacagagtctc

SEQ ID NO: 1497407 - DNA, 15 bp, Homo sapiens
tttaagacagagtct

SEQ ID NO: 1497408 - DNA, 15 bp, Homo sapiens
ttttaagacagagtc

SEQ ID NO: 1497409 - DNA, 15 bp, Homo sapiens
ttttttttaagacag

SEQ ID NO: 1497410 - DNA, 15 bp, Homo sapiens
tttttttttaagaca

SEQ ID NO: 1497411 - DNA, 15 bp, Homo sapiens
ttttttttttaagac

SEQ ID NO: 1497412 - DNA, 15 bp, Homo sapiens
gactaattttttttt

SEQ ID NO: 1497413 - DNA, 15 bp, Homo sapiens
tgactaatttttttt

SEQ ID NO: 1497414 - DNA, 15 bp, Homo sapiens
atgactaattttttt

SEQ ID NO: 1497415 - DNA, 15 bp, Homo sapiens
aatgactaatttttt

SEQ ID NO: 1497416 - DNA, 15 bp, Homo sapiens
gaatgactaattttt

SEQ ID NO: 1497417 - DNA, 15 bp, Homo sapiens
ggaatgactaatttt

SEQ ID NO: 1497418 - DNA, 15 bp, Homo sapiens
tggaatgactaattt

SEQ ID NO: 1497419 - DNA, 15 bp, Homo sapiens
ttggaatgactaatt

SEQ ID NO: 1497420 - DNA, 15 bp, Homo sapiens
tttggaatgactaat

SEQ ID NO: 1497421 - DNA, 15 bp, Homo sapiens
ctttggaatgactaa

SEQ ID NO: 1497422 - DNA, 15 bp, Homo sapiens
actttggaatgacta

SEQ ID NO: 1497423 - DNA, 15 bp, Homo sapiens
gactttggaatgact

SEQ ID NO: 1497424 - DNA, 15 bp, Homo sapiens
ggactttggaatgac

SEQ ID NO: 1497425 - DNA, 15 bp, Homo sapiens
tggactttggaatga

SEQ ID NO: 1497426 - DNA, 15 bp, Homo sapiens
ttggactttggaatg

SEQ ID NO: 1497427 - DNA, 15 bp, Homo sapiens
attggactttggaat

SEQ ID NO: 1497428 - DNA, 15 bp, Homo sapiens
cattggactttggaa

SEQ ID NO: 1497429 - DNA, 15 bp, Homo sapiens
acattggactttgga

SEQ ID NO: 1497430 - DNA, 15 bp, Homo sapiens
gacattggactttgg

SEQ ID NO: 1497431 - DNA, 15 bp, Homo sapiens
tgacattggactttg

SEQ ID NO: 1497432 - DNA, 15 bp, Homo sapiens
ctgacattggacttt

SEQ ID NO: 1497433 - DNA, 15 bp, Homo sapiens
tctgacattggactt

SEQ ID NO: 1497434 - DNA, 15 bp, Homo sapiens
gtctgacattggact

SEQ ID NO: 1497435 - DNA, 15 bp, Homo sapiens
tgtctgacattggac

SEQ ID NO: 1497436 - DNA, 15 bp, Homo sapiens
atgtctgacattgga

SEQ ID NO: 1497437 - DNA, 15 bp, Homo sapiens
tatgtctgacattgg

SEQ ID NO: 1497438 - DNA, 15 bp, Homo sapiens
ctatgtctgacattg

SEQ ID NO: 1497439 - DNA, 15 bp, Homo sapiens
tctatgtctgacatt

SEQ ID NO: 1497440 - DNA, 15 bp, Homo sapiens
atctatgtctgacat

SEQ ID NO: 1497441 - DNA, 15 bp, Homo sapiens
aatctatgtctgaca

SEQ ID NO: 1497442 - DNA, 15 bp, Homo sapiens
taatctatgtctgac

SEQ ID NO: 1497443 - DNA, 15 bp, Homo sapiens
ataatctatgtctga

SEQ ID NO: 1497444 - DNA, 15 bp, Homo sapiens
gataatctatgtctg

SEQ ID NO: 1497445 - DNA, 15 bp, Homo sapiens
ggataatctatgtct

SEQ ID NO: 1497446 - DNA, 15 bp, Homo sapiens
cggataatctatgtc

SEQ ID NO: 1497447 - DNA, 15 bp, Homo sapiens
acggataatctatgt

SEQ ID NO: 1497448 - DNA, 15 bp, Homo sapiens
aacggataatctatg

SEQ ID NO: 1497449 - DNA, 15 bp, Homo sapiens
caacggataatctat

SEQ ID NO: 1497450 - DNA, 15 bp, Homo sapiens
acaacggataatcta

SEQ ID NO: 1497451 - DNA, 15 bp, Homo sapiens
aacaacggataatct

SEQ ID NO: 1497452 - DNA, 15 bp, Homo sapiens
aaacaacggataatc

SEQ ID NO: 1497453 - DNA, 15 bp, Homo sapiens
aaaacaacggataat

SEQ ID NO: 1497454 - DNA, 15 bp, Homo sapiens
caaaacaacggataa

SEQ ID NO: 1497455 - DNA, 15 bp, Homo sapiens
ccaaaacaacggata

SEQ ID NO: 1497456 - DNA, 15 bp, Homo sapiens
tccaaaacaacggat

SEQ ID NO: 1497457 - DNA, 15 bp, Homo sapiens
atccaaaacaacgga

SEQ ID NO: 1497458 - DNA, 15 bp, Homo sapiens
catccaaaacaacgg

SEQ ID NO: 1497459 - DNA, 15 bp, Homo sapiens
acatccaaaacaacg

SEQ ID NO: 1497460 - DNA, 15 bp, Homo sapiens
tacatccaaaacaac

SEQ ID NO: 1497461 - DNA, 15 bp, Homo sapiens
ttacatccaaaacaa

SEQ ID NO: 1497462 - DNA, 15 bp, Homo sapiens
attacatccaaaaca

SEQ ID NO: 1497463 - DNA, 15 bp, Homo sapiens
gattacatccaaaac

SEQ ID NO: 1497464 - DNA, 15 bp, Homo sapiens
ggattacatccaaaa

SEQ ID NO: 1497465 - DNA, 15 bp, Homo sapiens
aggattacatccaaa

SEQ ID NO: 1497466 - DNA, 15 bp, Homo sapiens
gaggattacatccaa

SEQ ID NO: 1497467 - DNA, 15 bp, Homo sapiens
agaggattacatcca

SEQ ID NO: 1497468 - DNA, 15 bp, Homo sapiens
aagaggattacatcc

SEQ ID NO: 1497469 - DNA, 15 bp, Homo sapiens
gaagaggattacatc

SEQ ID NO: 1497470 - DNA, 15 bp, Homo sapiens
ggaagaggattacat

SEQ ID NO: 1497471 - DNA, 15 bp, Homo sapiens
aggaagaggattaca

SEQ ID NO: 1497472 - DNA, 15 bp, Homo sapiens
caggaagaggattac

SEQ ID NO: 1497473 - DNA, 15 bp, Homo sapiens
ccaggaagaggatta

SEQ ID NO: 1497474 - DNA, 15 bp, Homo sapiens
tccaggaagaggatt

SEQ ID NO: 1497475 - DNA, 15 bp, Homo sapiens
ttccaggaagaggat

SEQ ID NO: 1497476 - DNA, 15 bp, Homo sapiens
tttccaggaagagga

SEQ ID NO: 1497477 - DNA, 15 bp, Homo sapiens
ttttccaggaagagg

SEQ ID NO: 1497478 - DNA, 15 bp, Homo sapiens
gttttccaggaagag

SEQ ID NO: 1497479 - DNA, 15 bp, Homo sapiens
agttttccaggaaga

SEQ ID NO: 1497480 - DNA, 15 bp, Homo sapiens
cagttttccaggaag

SEQ ID NO: 1497481 - DNA, 15 bp, Homo sapiens
ccagttttccaggaa

SEQ ID NO: 1497482 - DNA, 15 bp, Homo sapiens
gccagttttccagga

SEQ ID NO: 1497483 - DNA, 15 bp, Homo sapiens
tgccagttttccagg

SEQ ID NO: 1497484 - DNA, 15 bp, Homo sapiens
gtgccagttttccag

SEQ ID NO: 1497485 - DNA, 15 bp, Homo sapiens
tgtgccagttttcca

SEQ ID NO: 1497486 - DNA, 15 bp, Homo sapiens
ttgtgccagttttcc

SEQ ID NO: 1497487 - DNA, 15 bp, Homo sapiens
gttgtgccagttttc

SEQ ID NO: 1497488 - DNA, 15 bp, Homo sapiens
ggttgtgccagtttt

SEQ ID NO: 1497489 - DNA, 15 bp, Homo sapiens
gggttgtgccagttt

SEQ ID NO: 1497490 - DNA, 15 bp, Homo sapiens
tgggttgtgccagtt

SEQ ID NO: 1497491 - DNA, 15 bp, Homo sapiens
ttgggttgtgccagt

SEQ ID NO: 1497492 - DNA, 15 bp, Homo sapiens
attgggttgtgccag

SEQ ID NO: 1497493 - DNA, 15 bp, Homo sapiens
aattgggttgtgcca

SEQ ID NO: 1497494 - DNA, 15 bp, Homo sapiens
taattgggttgtgcc

SEQ ID NO: 1497495 - DNA, 15 bp, Homo sapiens
gtaattgggttgtgc

SEQ ID NO: 1497496 - DNA, 15 bp, Homo sapiens
tgtaattgggttgtg

SEQ ID NO: 1497497 - DNA, 15 bp, Homo sapiens
gtgtaattgggttgt

SEQ ID NO: 1497498 - DNA, 15 bp, Homo sapiens
tgtgtaattgggttg

SEQ ID NO: 1497499 - DNA, 15 bp, Homo sapiens
atgtgtaattgggtt

SEQ ID NO: 1497500 - DNA, 15 bp, Homo sapiens
catgtgtaattgggt

SEQ ID NO: 1497501 - DNA, 15 bp, Homo sapiens
tcatgtgtaattggg

SEQ ID NO: 1497502 - DNA, 15 bp, Homo sapiens
ttcatgtgtaattgg

SEQ ID NO: 1497503 - DNA, 15 bp, Homo sapiens
tttcatgtgtaattg

SEQ ID NO: 1497504 - DNA, 15 bp, Homo sapiens
atttcatgtgtaatt

SEQ ID NO: 1497505 - DNA, 15 bp, Homo sapiens
gatttcatgtgtaat

SEQ ID NO: 1497506 - DNA, 15 bp, Homo sapiens
ggatttcatgtgtaa

SEQ ID NO: 1497507 - DNA, 15 bp, Homo sapiens
aggatttcatgtgta

SEQ ID NO: 1497508 - DNA, 15 bp, Homo sapiens
aaggatttcatgtgt

SEQ ID NO: 1497509 - DNA, 15 bp, Homo sapiens
aaaggatttcatgtg

SEQ ID NO: 1497510 - DNA, 15 bp, Homo sapiens
gaaaggatttcatgt

SEQ ID NO: 1497511 - DNA, 15 bp, Homo sapiens
tgaaaggatttcatg

SEQ ID NO: 1497512 - DNA, 15 bp, Homo sapiens
ttgaaaggatttcat

SEQ ID NO: 1497513 - DNA, 15 bp, Homo sapiens
gttgaaaggatttca

SEQ ID NO: 1497514 - DNA, 15 bp, Homo sapiens
agttgaaaggatttc

SEQ ID NO: 1497515 - DNA, 15 bp, Homo sapiens
gagttgaaaggattt

SEQ ID NO: 1497516 - DNA, 15 bp, Homo sapiens
agagttgaaaggatt

SEQ ID NO: 1497517 - DNA, 15 bp, Homo sapiens
cagagttgaaaggat

SEQ ID NO: 1497518 - DNA, 15 bp, Homo sapiens
ccagagttgaaagga

SEQ ID NO: 1497519 - DNA, 15 bp, Homo sapiens
accagagttgaaagg

SEQ ID NO: 1497520 - DNA, 15 bp, Homo sapiens
taccagagttgaaag

SEQ ID NO: 1497521 - DNA, 15 bp, Homo sapiens
ataccagagttgaaa

SEQ ID NO: 1497522 - DNA, 15 bp, Homo sapiens
aataccagagttgaa

SEQ ID NO: 1497523 - DNA, 15 bp, Homo sapiens
caataccagagttga

SEQ ID NO: 1497524 - DNA, 15 bp, Homo sapiens
ccaataccagagttg

SEQ ID NO: 1497525 - DNA, 15 bp, Homo sapiens
tccaataccagagtt

SEQ ID NO: 1497526 - DNA, 15 bp, Homo sapiens
ctccaataccagagt

SEQ ID NO: 1497527 - DNA, 15 bp, Homo sapiens
cctccaataccagag

SEQ ID NO: 1497528 - DNA, 15 bp, Homo sapiens
acctccaataccaga

SEQ ID NO: 1497529 - DNA, 15 bp, Homo sapiens
tacctccaataccag

SEQ ID NO: 1497530 - DNA, 15 bp, Homo sapiens
atacctccaatacca

SEQ ID NO: 1497531 - DNA, 15 bp, Homo sapiens
tatacctccaatacc

SEQ ID NO: 1497532 - DNA, 15 bp, Homo sapiens
ctatacctccaatac

SEQ ID NO: 1497533 - DNA, 15 bp, Homo sapiens
cctatacctccaata

SEQ ID NO: 1497534 - DNA, 15 bp, Homo sapiens
ccctatacctccaat

SEQ ID NO: 1497535 - DNA, 15 bp, Homo sapiens
tccctatacctccaa

SEQ ID NO: 1497536 - DNA, 15 bp, Homo sapiens
ttccctatacctcca

SEQ ID NO: 1497537 - DNA, 15 bp, Homo sapiens
cttccctatacctcc

SEQ ID NO: 1497538 - DNA, 15 bp, Homo sapiens
ccttccctatacctc

SEQ ID NO: 1497539 - DNA, 15 bp, Homo sapiens
tccttccctatacct

SEQ ID NO: 1497540 - DNA, 15 bp, Homo sapiens
gtccttccctatacc

SEQ ID NO: 1497541 - DNA, 15 bp, Homo sapiens
agtccttccctatac

SEQ ID NO: 1497542 - DNA, 15 bp, Homo sapiens
aagtccttccctata

SEQ ID NO: 1497543 - DNA, 15 bp, Homo sapiens
aaagtccttccctat

SEQ ID NO: 1497544 - DNA, 15 bp, Homo sapiens
caaagtccttcccta

SEQ ID NO: 1497545 - DNA, 15 bp, Homo sapiens
acaaagtccttccct

SEQ ID NO: 1497546 - DNA, 15 bp, Homo sapiens
aacaaagtccttccc

SEQ ID NO: 1497547 - DNA, 15 bp, Homo sapiens
aaacaaagtccttcc

SEQ ID NO: 1497548 - DNA, 15 bp, Homo sapiens
aaaacaaagtccttc

SEQ ID NO: 1497549 - DNA, 15 bp, Homo sapiens
taaaacaaagtcctt

SEQ ID NO: 1497550 - DNA, 15 bp, Homo sapiens
ctaaaacaaagtcct

SEQ ID NO: 1497551 - DNA, 15 bp, Homo sapiens
cctaaaacaaagtcc

SEQ ID NO: 1497552 - DNA, 15 bp, Homo sapiens
tcctaaaacaaagtc

SEQ ID NO: 1497553 - DNA, 15 bp, Homo sapiens
ctcctaaaacaaagt

SEQ ID NO: 1497554 - DNA, 15 bp, Homo sapiens
tctcctaaaacaaag

SEQ ID NO: 1497555 - DNA, 15 bp, Homo sapiens
gtctcctaaaacaaa

SEQ ID NO: 1497556 - DNA, 15 bp, Homo sapiens
ggtctcctaaaacaa

SEQ ID NO: 1497557 - DNA, 15 bp, Homo sapiens
gggtctcctaaaaca

SEQ ID NO: 1497558 - DNA, 15 bp, Homo sapiens
tgggtctcctaaaac

SEQ ID NO: 1497559 - DNA, 15 bp, Homo sapiens
atgggtctcctaaaa

SEQ ID NO: 1497560 - DNA, 15 bp, Homo sapiens
tatgggtctcctaaa

SEQ ID NO: 1497561 - DNA, 15 bp, Homo sapiens
ctatgggtctcctaa

SEQ ID NO: 1497562 - DNA, 15 bp, Homo sapiens
actatgggtctccta

SEQ ID NO: 1497563 - DNA, 15 bp, Homo sapiens
gactatgggtctcct

SEQ ID NO: 1497564 - DNA, 15 bp, Homo sapiens
agactatgggtctcc

SEQ ID NO: 1497565 - DNA, 15 bp, Homo sapiens
tagactatgggtctc

SEQ ID NO: 1497566 - DNA, 15 bp, Homo sapiens
gtagactatgggtct

SEQ ID NO: 1497567 - DNA, 15 bp, Homo sapiens
ggtagactatgggtc

SEQ ID NO: 1497568 - DNA, 15 bp, Homo sapiens
aggtagactatgggt

SEQ ID NO: 1497569 - DNA, 15 bp, Homo sapiens
gaggtagactatggg

SEQ ID NO: 1497570 - DNA, 15 bp, Homo sapiens
agaggtagactatgg

SEQ ID NO: 1497571 - DNA, 15 bp, Homo sapiens
tagaggtagactatg

SEQ ID NO: 1497572 - DNA, 15 bp, Homo sapiens
atagaggtagactat

SEQ ID NO: 1497573 - DNA, 15 bp, Homo sapiens
aatagaggtagacta

SEQ ID NO: 1497574 - DNA, 15 bp, Homo sapiens
caatagaggtagact

SEQ ID NO: 1497575 - DNA, 15 bp, Homo sapiens
acaatagaggtagac

SEQ ID NO: 1497576 - DNA, 15 bp, Homo sapiens
aacaatagaggtaga

SEQ ID NO: 1497577 - DNA, 15 bp, Homo sapiens
gaacaatagaggtag

SEQ ID NO: 1497578 - DNA, 15 bp, Homo sapiens
agaacaatagaggta

SEQ ID NO: 1497579 - DNA, 15 bp, Homo sapiens
tagaacaatagaggt

SEQ ID NO: 1497580 - DNA, 15 bp, Homo sapiens
ctagaacaatagagg

SEQ ID NO: 1497581 - DNA, 15 bp, Homo sapiens
cctagaacaatagag

SEQ ID NO: 1497582 - DNA, 15 bp, Homo sapiens
tcctagaacaataga

SEQ ID NO: 1497583 - DNA, 15 bp, Homo sapiens
ctcctagaacaatag

SEQ ID NO: 1497584 - DNA, 15 bp, Homo sapiens
actcctagaacaata

SEQ ID NO: 1497585 - DNA, 15 bp, Homo sapiens
aactcctagaacaat

SEQ ID NO: 1497586 - DNA, 15 bp, Homo sapiens
taactcctagaacaa

SEQ ID NO: 1497587 - DNA, 15 bp, Homo sapiens
ttaactcctagaaca

SEQ ID NO: 1497588 - DNA, 15 bp, Homo sapiens
tttaactcctagaac

SEQ ID NO: 1497589 - DNA, 15 bp, Homo sapiens
gtttaactcctagaa

SEQ ID NO: 1497590 - DNA, 15 bp, Homo sapiens
ggtttaactcctaga

SEQ ID NO: 1497591 - DNA, 15 bp, Homo sapiens
tggtttaactcctag

SEQ ID NO: 1497592 - DNA, 15 bp, Homo sapiens
gtggtttaactccta

SEQ ID NO: 1497593 - DNA, 15 bp, Homo sapiens
cgtggtttaactcct

SEQ ID NO: 1497594 - DNA, 15 bp, Homo sapiens
acgtggtttaactcc

SEQ ID NO: 1497595 - DNA, 15 bp, Homo sapiens
aacgtggtttaactc

SEQ ID NO: 1497596 - DNA, 15 bp, Homo sapiens
caacgtggtttaact

SEQ ID NO: 1497597 - DNA, 15 bp, Homo sapiens
ccaacgtggtttaac

SEQ ID NO: 1497598 - DNA, 15 bp, Homo sapiens
accaacgtggtttaa

SEQ ID NO: 1497599 - DNA, 15 bp, Homo sapiens
aaccaacgtggttta

SEQ ID NO: 1497600 - DNA, 15 bp, Homo sapiens
aaaccaacgtggttt

SEQ ID NO: 1497601 - DNA, 15 bp, Homo sapiens
taaaccaacgtggtt

SEQ ID NO: 1497602 - DNA, 15 bp, Homo sapiens
gtaaaccaacgtggt

SEQ ID NO: 1497603 - DNA, 15 bp, Homo sapiens
tgtaaaccaacgtgg

SEQ ID NO: 1497604 - DNA, 15 bp, Homo sapiens
atgtaaaccaacgtg

SEQ ID NO: 1497605 - DNA, 15 bp, Homo sapiens
gatgtaaaccaacgt

SEQ ID NO: 1497606 - DNA, 15 bp, Homo sapiens
ggatgtaaaccaacg

SEQ ID NO: 1497607 - DNA, 15 bp, Homo sapiens
aggatgtaaaccaac

SEQ ID NO: 1497608 - DNA, 15 bp, Homo sapiens
caggatgtaaaccaa

SEQ ID NO: 1497609 - DNA, 15 bp, Homo sapiens
tcaggatgtaaacca

SEQ ID NO: 1497610 - DNA, 15 bp, Homo sapiens
gtcaggatgtaaacc

SEQ ID NO: 1497611 - DNA, 15 bp, Homo sapiens
agtcaggatgtaaac

SEQ ID NO: 1497612 - DNA, 15 bp, Homo sapiens
aagtcaggatgtaaa

SEQ ID NO: 1497613 - DNA, 15 bp, Homo sapiens
aaagtcaggatgtaa

SEQ ID NO: 1497614 - DNA, 15 bp, Homo sapiens
caaagtcaggatgta

SEQ ID NO: 1497615 - DNA, 15 bp, Homo sapiens
gcaaagtcaggatgt

SEQ ID NO: 1497616 - DNA, 15 bp, Homo sapiens
ggcaaagtcaggatg

SEQ ID NO: 1497617 - DNA, 15 bp, Homo sapiens
tggcaaagtcaggat

SEQ ID NO: 1497618 - DNA, 15 bp, Homo sapiens
gtggcaaagtcagga

SEQ ID NO: 1497619 - DNA, 15 bp, Homo sapiens
ggtggcaaagtcagg

SEQ ID NO: 1497620 - DNA, 15 bp, Homo sapiens
aggtggcaaagtcag

SEQ ID NO: 1497621 - DNA, 15 bp, Homo sapiens
caggtggcaaagtca

SEQ ID NO: 1497622 - DNA, 15 bp, Homo sapiens
acaggtggcaaagtc

SEQ ID NO: 1497623 - DNA, 15 bp, Homo sapiens
gacaggtggcaaagt

SEQ ID NO: 1497624 - DNA, 15 bp, Homo sapiens
tgacaggtggcaaag

SEQ ID NO: 1497625 - DNA, 15 bp, Homo sapiens
ttgacaggtggcaaa

SEQ ID NO: 1497626 - DNA, 15 bp, Homo sapiens
gttgacaggtggcaa

SEQ ID NO: 1497627 - DNA, 15 bp, Homo sapiens
agttgacaggtggca

SEQ ID NO: 1497628 - DNA, 15 bp, Homo sapiens
gagttgacaggtggc

SEQ ID NO: 1497629 - DNA, 15 bp, Homo sapiens
tgagttgacaggtgg

SEQ ID NO: 1497630 - DNA, 15 bp, Homo sapiens
ctgagttgacaggtg

SEQ ID NO: 1497631 - DNA, 15 bp, Homo sapiens
tctgagttgacaggt

SEQ ID NO: 1497632 - DNA, 15 bp, Homo sapiens
gtctgagttgacagg

SEQ ID NO: 1497633 - DNA, 15 bp, Homo sapiens
ggtctgagttgacag

SEQ ID NO: 1497634 - DNA, 15 bp, Homo sapiens
aggtctgagttgaca

SEQ ID NO: 1497635 - DNA, 15 bp, Homo sapiens
aaggtctgagttgac

SEQ ID NO: 1497636 - DNA, 15 bp, Homo sapiens
caaggtctgagttga

SEQ ID NO: 1497637 - DNA, 15 bp, Homo sapiens
ccaaggtctgagttg

SEQ ID NO: 1497638 - DNA, 15 bp, Homo sapiens
cccaaggtctgagtt

SEQ ID NO: 1497639 - DNA, 15 bp, Homo sapiens
gcccaaggtctgagt

SEQ ID NO: 1497640 - DNA, 15 bp, Homo sapiens
tgcccaaggtctgag

SEQ ID NO: 1497641 - DNA, 15 bp, Homo sapiens
ttgcccaaggtctga

SEQ ID NO: 1497642 - DNA, 15 bp, Homo sapiens
tttgcccaaggtctg

SEQ ID NO: 1497643 - DNA, 15 bp, Homo sapiens
atttgcccaaggtct

SEQ ID NO: 1497644 - DNA, 15 bp, Homo sapiens
gatttgcccaaggtc

SEQ ID NO: 1497645 - DNA, 15 bp, Homo sapiens
tgatttgcccaaggt

SEQ ID NO: 1497646 - DNA, 15 bp, Homo sapiens
ttgatttgcccaagg

SEQ ID NO: 1497647 - DNA, 15 bp, Homo sapiens
tttgatttgcccaag

SEQ ID NO: 1497648 - DNA, 15 bp, Homo sapiens
ctttgatttgcccaa

SEQ ID NO: 1497649 - DNA, 15 bp, Homo sapiens
cctttgatttgccca

SEQ ID NO: 1497650 - DNA, 15 bp, Homo sapiens
acctttgatttgccc

SEQ ID NO: 1497651 - DNA, 15 bp, Homo sapiens
gacctttgatttgcc

SEQ ID NO: 1497652 - DNA, 15 bp, Homo sapiens
agacctttgatttgc

SEQ ID NO: 1497653 - DNA, 15 bp, Homo sapiens
cagacctttgatttg

SEQ ID NO: 1497654 - DNA, 15 bp, Homo sapiens
tcagacctttgattt

SEQ ID NO: 1497655 - DNA, 15 bp, Homo sapiens
ctcagacctttgatt

SEQ ID NO: 1497656 - DNA, 15 bp, Homo sapiens
cctcagacctttgat

SEQ ID NO: 1497657 - DNA, 15 bp, Homo sapiens
ccctcagacctttga

SEQ ID NO: 1497658 - DNA, 15 bp, Homo sapiens
tccctcagacctttg

SEQ ID NO: 1497659 - DNA, 15 bp, Homo sapiens
ctccctcagaccttt

SEQ ID NO: 1497660 - DNA, 15 bp, Homo sapiens
cctccctcagacctt

SEQ ID NO: 1497661 - DNA, 15 bp, Homo sapiens
tcctccctcagacct

SEQ ID NO: 1497662 - DNA, 15 bp, Homo sapiens
ctcctccctcagacc

SEQ ID NO: 1497663 - DNA, 15 bp, Homo sapiens
actcctccctcagac

SEQ ID NO: 1497664 - DNA, 15 bp, Homo sapiens
cactcctccctcaga

SEQ ID NO: 1497665 - DNA, 15 bp, Homo sapiens
gcactcctccctcag

SEQ ID NO: 1497666 - DNA, 15 bp, Homo sapiens
tgcactcctccctca

SEQ ID NO: 1497667 - DNA, 15 bp, Homo sapiens
ctgcactcctccctc

SEQ ID NO: 1497668 - DNA, 15 bp, Homo sapiens
cctgcactcctccct

SEQ ID NO: 1497669 - DNA, 15 bp, Homo sapiens
gcctgcactcctccc

SEQ ID NO: 1497670 - DNA, 15 bp, Homo sapiens
agcctgcactcctcc

SEQ ID NO: 1497671 - DNA, 15 bp, Homo sapiens
gagcctgcactcctc

SEQ ID NO: 1497672 - DNA, 15 bp, Homo sapiens
ggagcctgcactcct

SEQ ID NO: 1497673 - DNA, 15 bp, Homo sapiens
gctgggagcctgcac

SEQ ID NO: 1497674 - DNA, 15 bp, Homo sapiens
cgctgggagcctgca

SEQ ID NO: 1497675 - DNA, 15 bp, Homo sapiens
acgctgggagcctgc

SEQ ID NO: 1497676 - DNA, 15 bp, Homo sapiens
aacgctgggagcctg

SEQ ID NO: 1497677 - DNA, 15 bp, Homo sapiens
gaacgctgggagcct

SEQ ID NO: 1497678 - DNA, 15 bp, Homo sapiens
ggaacgctgggagcc

SEQ ID NO: 1497679 - DNA, 15 bp, Homo sapiens
gggaacgctgggagc

SEQ ID NO: 1497680 - DNA, 15 bp, Homo sapiens
tgggaacgctgggag

SEQ ID NO: 1497681 - DNA, 15 bp, Homo sapiens
gtgggaacgctggga

SEQ ID NO: 1497682 - DNA, 15 bp, Homo sapiens
cgtgggaacgctggg

SEQ ID NO: 1497683 - DNA, 15 bp, Homo sapiens
ccgtgggaacgctgg

SEQ ID NO: 1497684 - DNA, 15 bp, Homo sapiens
cccgtgggaacgctg

SEQ ID NO: 1497685 - DNA, 15 bp, Homo sapiens
ccccgtgggaacgct

SEQ ID NO: 1497686 - DNA, 15 bp, Homo sapiens
cccccgtgggaacgc

SEQ ID NO: 1497687 - DNA, 15 bp, Homo sapiens
acccccgtgggaacg

SEQ ID NO: 1497688 - DNA, 15 bp, Homo sapiens
gtccccacccccgtg

SEQ ID NO: 1497689 - DNA, 15 bp, Homo sapiens
cgtccccacccccgt

SEQ ID NO: 1497690 - DNA, 15 bp, Homo sapiens
acgtccccacccccg

SEQ ID NO: 1497691 - DNA, 15 bp, Homo sapiens
cacgtccccaccccc

SEQ ID NO: 1497692 - DNA, 15 bp, Homo sapiens
tcacgtccccacccc

SEQ ID NO: 1497693 - DNA, 15 bp, Homo sapiens
gtcacgtccccaccc

SEQ ID NO: 1497694 - DNA, 15 bp, Homo sapiens
cgtcacgtccccacc

SEQ ID NO: 1497695 - DNA, 15 bp, Homo sapiens
acgtcacgtccccac

SEQ ID NO: 1497696 - DNA, 15 bp, Homo sapiens
tacgtcacgtcccca

SEQ ID NO: 1497697 - DNA, 15 bp, Homo sapiens
atacgtcacgtcccc

SEQ ID NO: 1497698 - DNA, 15 bp, Homo sapiens
aatacgtcacgtccc

SEQ ID NO: 1497699 - DNA, 15 bp, Homo sapiens
gaatacgtcacgtcc

SEQ ID NO: 1497700 - DNA, 15 bp, Homo sapiens
tgaatacgtcacgtc

SEQ ID NO: 1497701 - DNA, 15 bp, Homo sapiens
atgaatacgtcacgt

SEQ ID NO: 1497702 - DNA, 15 bp, Homo sapiens
gatgaatacgtcacg

SEQ ID NO: 1497703 - DNA, 15 bp, Homo sapiens
tgatgaatacgtcac

SEQ ID NO: 1497704 - DNA, 15 bp, Homo sapiens
ctgatgaatacgtca

SEQ ID NO: 1497705 - DNA, 15 bp, Homo sapiens
actgatgaatacgtc

SEQ ID NO: 1497706 - DNA, 15 bp, Homo sapiens
aactgatgaatacgt

SEQ ID NO: 1497707 - DNA, 15 bp, Homo sapiens
gaactgatgaatacg

SEQ ID NO: 1497708 - DNA, 15 bp, Homo sapiens
tgaactgatgaatac

SEQ ID NO: 1497709 - DNA, 15 bp, Homo sapiens
atgaactgatgaata

SEQ ID NO: 1497710 - DNA, 15 bp, Homo sapiens
catgaactgatgaat

SEQ ID NO: 1497711 - DNA, 15 bp, Homo sapiens
tcatgaactgatgaa

SEQ ID NO: 1497712 - DNA, 15 bp, Homo sapiens
ttcatgaactgatga

SEQ ID NO: 1497713 - DNA, 15 bp, Homo sapiens
cttcatgaactgatg

SEQ ID NO: 1497714 - DNA, 15 bp, Homo sapiens
acttcatgaactgat

SEQ ID NO: 1497715 - DNA, 15 bp, Homo sapiens
aacttcatgaactga

SEQ ID NO: 1497716 - DNA, 15 bp, Homo sapiens
taacttcatgaactg

SEQ ID NO: 1497717 - DNA, 15 bp, Homo sapiens
ttaacttcatgaact

SEQ ID NO: 1497718 - DNA, 15 bp, Homo sapiens
attaacttcatgaac

SEQ ID NO: 1497719 - DNA, 15 bp, Homo sapiens
cattaacttcatgaa

SEQ ID NO: 1497720 - DNA, 15 bp, Homo sapiens
tcattaacttcatga

SEQ ID NO: 1497721 - DNA, 15 bp, Homo sapiens
atcattaacttcatg

SEQ ID NO: 1497722 - DNA, 15 bp, Homo sapiens
tatcattaacttcat

SEQ ID NO: 1497723 - DNA, 15 bp, Homo sapiens
atatcattaacttca

SEQ ID NO: 1497724 - DNA, 15 bp, Homo sapiens
catatcattaacttc

SEQ ID NO: 1497725 - DNA, 15 bp, Homo sapiens
acatatcattaactt

SEQ ID NO: 1497726 - DNA, 15 bp, Homo sapiens
tacatatcattaact

SEQ ID NO: 1497727 - DNA, 15 bp, Homo sapiens
atacatatcattaac

SEQ ID NO: 1497728 - DNA, 15 bp, Homo sapiens
aatacatatcattaa

SEQ ID NO: 1497729 - DNA, 15 bp, Homo sapiens
caatacatatcatta

SEQ ID NO: 1497730 - DNA, 15 bp, Homo sapiens
tcaatacatatcatt

SEQ ID NO: 1497731 - DNA, 15 bp, Homo sapiens
ttcaatacatatcat

SEQ ID NO: 1497732 - DNA, 15 bp, Homo sapiens
tttcaatacatatca

SEQ ID NO: 1497733 - DNA, 15 bp, Homo sapiens
ttttcaatacatatc

SEQ ID NO: 1497734 - DNA, 15 bp, Homo sapiens
cttttcaatacatat

SEQ ID NO: 1497735 - DNA, 15 bp, Homo sapiens
ccttttcaatacata

SEQ ID NO: 1497736 - DNA, 15 bp, Homo sapiens
accttttcaatacat

SEQ ID NO: 1497737 - DNA, 15 bp, Homo sapiens
aaccttttcaataca

SEQ ID NO: 1497738 - DNA, 15 bp, Homo sapiens
aaaccttttcaatac

SEQ ID NO: 1497739 - DNA, 15 bp, Homo sapiens
caaaccttttcaata

SEQ ID NO: 1497740 - DNA, 15 bp, Homo sapiens
acaaaccttttcaat

SEQ ID NO: 1497741 - DNA, 15 bp, Homo sapiens
aacaaaccttttcaa

SEQ ID NO: 1497742 - DNA, 15 bp, Homo sapiens
gaacaaaccttttca

SEQ ID NO: 1497743 - DNA, 15 bp, Homo sapiens
tgaacaaaccttttc

SEQ ID NO: 1497744 - DNA, 15 bp, Homo sapiens
ttgaacaaacctttt

SEQ ID NO: 1497745 - DNA, 15 bp, Homo sapiens
cttgaacaaaccttt

SEQ ID NO: 1497746 - DNA, 15 bp, Homo sapiens
ccttgaacaaacctt

SEQ ID NO: 1497747 - DNA, 15 bp, Homo sapiens
tccttgaacaaacct

SEQ ID NO: 1497748 - DNA, 15 bp, Homo sapiens
atccttgaacaaacc

SEQ ID NO: 1497749 - DNA, 15 bp, Homo sapiens
aatccttgaacaaac

SEQ ID NO: 1497750 - DNA, 15 bp, Homo sapiens
aaatccttgaacaaa

SEQ ID NO: 1497751 - DNA, 15 bp, Homo sapiens
taaatccttgaacaa

SEQ ID NO: 1497752 - DNA, 15 bp, Homo sapiens
ttaaatccttgaaca

SEQ ID NO: 1497753 - DNA, 15 bp, Homo sapiens
tttaaatccttgaac

SEQ ID NO: 1497754 - DNA, 15 bp, Homo sapiens
atttaaatccttgaa

SEQ ID NO: 1497755 - DNA, 15 bp, Homo sapiens
tatttaaatccttga

SEQ ID NO: 1497756 - DNA, 15 bp, Homo sapiens
ttatttaaatccttg

SEQ ID NO: 1497757 - DNA, 15 bp, Homo sapiens
cttatttaaatcctt

SEQ ID NO: 1497758 - DNA, 15 bp, Homo sapiens
tcttatttaaatcct

SEQ ID NO: 1497759 - DNA, 15 bp, Homo sapiens
gtcttatttaaatcc

SEQ ID NO: 1497760 - DNA, 15 bp, Homo sapiens
cgtcttatttaaatc

SEQ ID NO: 1497761 - DNA, 15 bp, Homo sapiens
tcgtcttatttaaat

SEQ ID NO: 1497762 - DNA, 15 bp, Homo sapiens
atcgtcttatttaaa

SEQ ID NO: 1497763 - DNA, 15 bp, Homo sapiens
catcgtcttatttaa

SEQ ID NO: 1497764 - DNA, 15 bp, Homo sapiens
tcatcgtcttattta

SEQ ID NO: 1497765 - DNA, 15 bp, Homo sapiens
ttcatcgtcttattt

SEQ ID NO: 1497766 - DNA, 15 bp, Homo sapiens
attcatcgtcttatt

SEQ ID NO: 1497767 - DNA, 15 bp, Homo sapiens
tattcatcgtcttat

SEQ ID NO: 1497768 - DNA, 15 bp, Homo sapiens
atattcatcgtctta

SEQ ID NO: 1497769 - DNA, 15 bp, Homo sapiens
tatattcatcgtctt

SEQ ID NO: 1497770 - DNA, 15 bp, Homo sapiens
atatattcatcgtct

SEQ ID NO: 1497771 - DNA, 15 bp, Homo sapiens
aatatattcatcgtc

SEQ ID NO: 1497772 - DNA, 15 bp, Homo sapiens
caatatattcatcgt

SEQ ID NO: 1497773 - DNA, 15 bp, Homo sapiens
tcaatatattcatcg

SEQ ID NO: 1497774 - DNA, 15 bp, Homo sapiens
ttcaatatattcatc

SEQ ID NO: 1497775 - DNA, 15 bp, Homo sapiens
attcaatatattcat

SEQ ID NO: 1497776 - DNA, 15 bp, Homo sapiens
aattcaatatattca

SEQ ID NO: 1497777 - DNA, 15 bp, Homo sapiens
taattcaatatattc

SEQ ID NO: 1497778 - DNA, 15 bp, Homo sapiens
ttaattcaatatatt

SEQ ID NO: 1497779 - DNA, 15 bp, Homo sapiens
attaattcaatatat

SEQ ID NO: 1497780 - DNA, 15 bp, Homo sapiens
tattaattcaatata

SEQ ID NO: 1497781 - DNA, 15 bp, Homo sapiens
ttattaattcaatat

SEQ ID NO: 1497782 - DNA, 15 bp, Homo sapiens
attattaattcaata

SEQ ID NO: 1497783 - DNA, 15 bp, Homo sapiens
cattattaattcaat

SEQ ID NO: 1497784 - DNA, 15 bp, Homo sapiens
tcattattaattcaa

SEQ ID NO: 1497785 - DNA, 15 bp, Homo sapiens
ttcattattaattca

SEQ ID NO: 1497786 - DNA, 15 bp, Homo sapiens
attcattattaattc

SEQ ID NO: 1497787 - DNA, 15 bp, Homo sapiens
cattcattattaatt

SEQ ID NO: 1497788 - DNA, 15 bp, Homo sapiens
gcattcattattaat

SEQ ID NO: 1497789 - DNA, 15 bp, Homo sapiens
tgcattcattattaa

SEQ ID NO: 1497790 - DNA, 15 bp, Homo sapiens
ttgcattcattatta

SEQ ID NO: 1497791 - DNA, 15 bp, Homo sapiens
cttgcattcattatt

SEQ ID NO: 1497792 - DNA, 15 bp, Homo sapiens
ccttgcattcattat

SEQ ID NO: 1497793 - DNA, 15 bp, Homo sapiens
gccttgcattcatta

SEQ ID NO: 1497794 - DNA, 15 bp, Homo sapiens
ggccttgcattcatt

SEQ ID NO: 1497795 - DNA, 15 bp, Homo sapiens
aggccttgcattcat

SEQ ID NO: 1497796 - DNA, 15 bp, Homo sapiens
aaggccttgcattca

SEQ ID NO: 1497797 - DNA, 15 bp, Homo sapiens
taaggccttgcattc

SEQ ID NO: 1497798 - DNA, 15 bp, Homo sapiens
ttaaggccttgcatt

SEQ ID NO: 1497799 - DNA, 15 bp, Homo sapiens
tttaaggccttgcat

SEQ ID NO: 1497800 - DNA, 15 bp, Homo sapiens
ctttaaggccttgca

SEQ ID NO: 1497801 - DNA, 15 bp, Homo sapiens
cctttaaggccttgc

SEQ ID NO: 1497802 - DNA, 15 bp, Homo sapiens
acctttaaggccttg

SEQ ID NO: 1497803 - DNA, 15 bp, Homo sapiens
cacctttaaggcctt

SEQ ID NO: 1497804 - DNA, 15 bp, Homo sapiens
acacctttaaggcct

SEQ ID NO: 1497805 - DNA, 15 bp, Homo sapiens
aacacctttaaggcc

SEQ ID NO: 1497806 - DNA, 15 bp, Homo sapiens
aaacacctttaaggc

SEQ ID NO: 1497807 - DNA, 15 bp, Homo sapiens
aaaacacctttaagg

SEQ ID NO: 1497808 - DNA, 15 bp, Homo sapiens
caaaacacctttaag

SEQ ID NO: 1497809 - DNA, 15 bp, Homo sapiens
tcaaaacacctttaa

SEQ ID NO: 1497810 - DNA, 15 bp, Homo sapiens
ctcaaaacaccttta

SEQ ID NO: 1497811 - DNA, 15 bp, Homo sapiens
cctcaaaacaccttt

SEQ ID NO: 1497812 - DNA, 15 bp, Homo sapiens
ccctcaaaacacctt

SEQ ID NO: 1497813 - DNA, 15 bp, Homo sapiens
accctcaaaacacct

SEQ ID NO: 1497814 - DNA, 15 bp, Homo sapiens
caccctcaaaacacc

SEQ ID NO: 1497815 - DNA, 15 bp, Homo sapiens
ccaccctcaaaacac

SEQ ID NO: 1497816 - DNA, 15 bp, Homo sapiens
accaccctcaaaaca

SEQ ID NO: 1497817 - DNA, 15 bp, Homo sapiens
caccaccctcaaaac

SEQ ID NO: 1497818 - DNA, 15 bp, Homo sapiens
tcaccaccctcaaaa

SEQ ID NO: 1497819 - DNA, 15 bp, Homo sapiens
ttcaccaccctcaaa

SEQ ID NO: 1497820 - DNA, 15 bp, Homo sapiens
tttcaccaccctcaa

SEQ ID NO: 1497821 - DNA, 15 bp, Homo sapiens
gtttcaccaccctca

SEQ ID NO: 1497822 - DNA, 15 bp, Homo sapiens
agtttcaccaccctc

SEQ ID NO: 1497823 - DNA, 15 bp, Homo sapiens
aagtttcaccaccct

SEQ ID NO: 1497824 - DNA, 15 bp, Homo sapiens
caagtttcaccaccc

SEQ ID NO: 1497825 - DNA, 15 bp, Homo sapiens
tcaagtttcaccacc

SEQ ID NO: 1497826 - DNA, 15 bp, Homo sapiens
ttcaagtttcaccac

SEQ ID NO: 1497827 - DNA, 15 bp, Homo sapiens
attcaagtttcacca

SEQ ID NO: 1497828 - DNA, 15 bp, Homo sapiens
gattcaagtttcacc

SEQ ID NO: 1497829 - DNA, 15 bp, Homo sapiens
agattcaagtttcac

SEQ ID NO: 1497830 - DNA, 15 bp, Homo sapiens
gagattcaagtttca

SEQ ID NO: 1497831 - DNA, 15 bp, Homo sapiens
agagattcaagtttc

SEQ ID NO: 1497832 - DNA, 15 bp, Homo sapiens
gagagattcaagttt

SEQ ID NO: 1497833 - DNA, 15 bp, Homo sapiens
tgagagattcaagtt

SEQ ID NO: 1497834 - DNA, 15 bp, Homo sapiens
atgagagattcaagt

SEQ ID NO: 1497835 - DNA, 15 bp, Homo sapiens
gatgagagattcaag

SEQ ID NO: 1497836 - DNA, 15 bp, Homo sapiens
tgatgagagattcaa

SEQ ID NO: 1497837 - DNA, 15 bp, Homo sapiens
ttgatgagagattca

SEQ ID NO: 1497838 - DNA, 15 bp, Homo sapiens
gttgatgagagattc

SEQ ID NO: 1497839 - DNA, 15 bp, Homo sapiens
agttgatgagagatt

SEQ ID NO: 1497840 - DNA, 15 bp, Homo sapiens
cagttgatgagagat

SEQ ID NO: 1497841 - DNA, 15 bp, Homo sapiens
acagttgatgagaga

SEQ ID NO: 1497842 - DNA, 15 bp, Homo sapiens
cacagttgatgagag

SEQ ID NO: 1497843 - DNA, 15 bp, Homo sapiens
gcacagttgatgaga

SEQ ID NO: 1497844 - DNA, 15 bp, Homo sapiens
tgcacagttgatgag

SEQ ID NO: 1497845 - DNA, 15 bp, Homo sapiens
ttgcacagttgatga

SEQ ID NO: 1497846 - DNA, 15 bp, Homo sapiens
attgcacagttgatg

SEQ ID NO: 1497847 - DNA, 15 bp, Homo sapiens
tattgcacagttgat

SEQ ID NO: 1497848 - DNA, 15 bp, Homo sapiens
ctattgcacagttga

SEQ ID NO: 1497849 - DNA, 15 bp, Homo sapiens
actattgcacagttg

SEQ ID NO: 1497850 - DNA, 15 bp, Homo sapiens
aactattgcacagtt

SEQ ID NO: 1497851 - DNA, 15 bp, Homo sapiens
taactattgcacagt

SEQ ID NO: 1497852 - DNA, 15 bp, Homo sapiens
ataactattgcacag

SEQ ID NO: 1497853 - DNA, 15 bp, Homo sapiens
tataactattgcaca

SEQ ID NO: 1497854 - DNA, 15 bp, Homo sapiens
atataactattgcac

SEQ ID NO: 1497855 - DNA, 15 bp, Homo sapiens
aatataactattgca

SEQ ID NO: 1497856 - DNA, 15 bp, Homo sapiens
taatataactattgc

SEQ ID NO: 1497857 - DNA, 15 bp, Homo sapiens
ttaatataactattg

SEQ ID NO: 1497858 - DNA, 15 bp, Homo sapiens
gttaatataactatt

SEQ ID NO: 1497859 - DNA, 15 bp, Homo sapiens
agttaatataactat

SEQ ID NO: 1497860 - DNA, 15 bp, Homo sapiens
aagttaatataacta

SEQ ID NO: 1497861 - DNA, 15 bp, Homo sapiens
caagttaatataact

SEQ ID NO: 1497862 - DNA, 15 bp, Homo sapiens
ccaagttaatataac

SEQ ID NO: 1497863 - DNA, 15 bp, Homo sapiens
tccaagttaatataa

SEQ ID NO: 1497864 - DNA, 15 bp, Homo sapiens
atccaagttaatata

SEQ ID NO: 1497865 - DNA, 15 bp, Homo sapiens
catccaagttaatat

SEQ ID NO: 1497866 - DNA, 15 bp, Homo sapiens
ccatccaagttaata

SEQ ID NO: 1497867 - DNA, 15 bp, Homo sapiens
gccatccaagttaat

SEQ ID NO: 1497868 - DNA, 15 bp, Homo sapiens
agccatccaagttaa

SEQ ID NO: 1497869 - DNA, 15 bp, Homo sapiens
tagccatccaagtta

SEQ ID NO: 1497870 - DNA, 15 bp, Homo sapiens
atagccatccaagtt

SEQ ID NO: 1497871 - DNA, 15 bp, Homo sapiens
catagccatccaagt

SEQ ID NO: 1497872 - DNA, 15 bp, Homo sapiens
tcatagccatccaag

SEQ ID NO: 1497873 - DNA, 15 bp, Homo sapiens
ctcatagccatccaa

SEQ ID NO: 1497874 - DNA, 15 bp, Homo sapiens
actcatagccatcca

SEQ ID NO: 1497875 - DNA, 15 bp, Homo sapiens
aactcatagccatcc

SEQ ID NO: 1497876 - DNA, 15 bp, Homo sapiens
aaactcatagccatc

SEQ ID NO: 1497877 - DNA, 15 bp, Homo sapiens
aaaactcatagccat

SEQ ID NO: 1497878 - DNA, 15 bp, Homo sapiens
caaaactcatagcca

SEQ ID NO: 1497879 - DNA, 15 bp, Homo sapiens
gcaaaactcatagcc

SEQ ID NO: 1497880 - DNA, 15 bp, Homo sapiens
tgcaaaactcatagc

SEQ ID NO: 1497881 - DNA, 15 bp, Homo sapiens
ctgcaaaactcatag

SEQ ID NO: 1497882 - DNA, 15 bp, Homo sapiens
tctgcaaaactcata

SEQ ID NO: 1497883 - DNA, 15 bp, Homo sapiens
ctctgcaaaactcat

SEQ ID NO: 1497884 - DNA, 15 bp, Homo sapiens
cctctgcaaaactca

SEQ ID NO: 1497885 - DNA, 15 bp, Homo sapiens
tcctctgcaaaactc

SEQ ID NO: 1497886 - DNA, 15 bp, Homo sapiens
ttcctctgcaaaact

SEQ ID NO: 1497887 - DNA, 15 bp, Homo sapiens
tttcctctgcaaaac

SEQ ID NO: 1497888 - DNA, 15 bp, Homo sapiens
ctttcctctgcaaaa

SEQ ID NO: 1497889 - DNA, 15 bp, Homo sapiens
gctttcctctgcaaa

SEQ ID NO: 1497890 - DNA, 15 bp, Homo sapiens
agctttcctctgcaa

SEQ ID NO: 1497891 - DNA, 15 bp, Homo sapiens
cagctttcctctgca

SEQ ID NO: 1497892 - DNA, 15 bp, Homo sapiens
ccagctttcctctgc

SEQ ID NO: 1497893 - DNA, 15 bp, Homo sapiens
cccagctttcctctg

SEQ ID NO: 1497894 - DNA, 15 bp, Homo sapiens
gcccagctttcctct

SEQ ID NO: 1497895 - DNA, 15 bp, Homo sapiens
agcccagctttcctc

SEQ ID NO: 1497896 - DNA, 15 bp, Homo sapiens
aagcccagctttcct

SEQ ID NO: 1497897 - DNA, 15 bp, Homo sapiens
taagcccagctttcc

SEQ ID NO: 1497898 - DNA, 15 bp, Homo sapiens
ttaagcccagctttc

SEQ ID NO: 1497899 - DNA, 15 bp, Homo sapiens
tttaagcccagcttt

SEQ ID NO: 1497900 - DNA, 15 bp, Homo sapiens
atttaagcccagctt

SEQ ID NO: 1497901 - DNA, 15 bp, Homo sapiens
gatttaagcccagct

SEQ ID NO: 1497902 - DNA, 15 bp, Homo sapiens
ggatttaagcccagc

SEQ ID NO: 1497903 - DNA, 15 bp, Homo sapiens
gggatttaagcccag

SEQ ID NO: 1497904 - DNA, 15 bp, Homo sapiens
tgggatttaagccca

SEQ ID NO: 1497905 - DNA, 15 bp, Homo sapiens
ttgggatttaagccc

SEQ ID NO: 1497906 - DNA, 15 bp, Homo sapiens
attgggatttaagcc

SEQ ID NO: 1497907 - DNA, 15 bp, Homo sapiens
aggtctagcattggg

SEQ ID NO: 1497908 - DNA, 15 bp, Homo sapiens
caggtctagcattgg

SEQ ID NO: 1497909 - DNA, 15 bp, Homo sapiens
ccaggtctagcattg

SEQ ID NO: 1497910 - DNA, 15 bp, Homo sapiens
accaggtctagcatt

SEQ ID NO: 1497911 - DNA, 15 bp, Homo sapiens
caccaggtctagcat

SEQ ID NO: 1497912 - DNA, 15 bp, Homo sapiens
ccaccaggtctagca

SEQ ID NO: 1497913 - DNA, 15 bp, Homo sapiens
gccaccaggtctagc

SEQ ID NO: 1497914 - DNA, 15 bp, Homo sapiens
agccaccaggtctag

SEQ ID NO: 1497915 - DNA, 15 bp, Homo sapiens
tagccaccaggtcta

SEQ ID NO: 1497916 - DNA, 15 bp, Homo sapiens
ctagccaccaggtct

SEQ ID NO: 1497917 - DNA, 15 bp, Homo sapiens
tctagccaccaggtc

SEQ ID NO: 1497918 - DNA, 15 bp, Homo sapiens
gtctagccaccaggt

SEQ ID NO: 1497919 - DNA, 15 bp, Homo sapiens
ggtctagccaccagg

SEQ ID NO: 1497920 - DNA, 15 bp, Homo sapiens
aggtctagccaccag

SEQ ID NO: 1497921 - DNA, 15 bp, Homo sapiens
aaggtctagccacca

SEQ ID NO: 1497922 - DNA, 15 bp, Homo sapiens
caaggtctagccacc

SEQ ID NO: 1497923 - DNA, 15 bp, Homo sapiens
tcaaggtctagccac

SEQ ID NO: 1497924 - DNA, 15 bp, Homo sapiens
atcaaggtctagcca

SEQ ID NO: 1497925 - DNA, 15 bp, Homo sapiens
aatcaaggtctagcc

SEQ ID NO: 1497926 - DNA, 15 bp, Homo sapiens
caatcaaggtctagc

SEQ ID NO: 1497927 - DNA, 15 bp, Homo sapiens
gcaatcaaggtctag

SEQ ID NO: 1497928 - DNA, 15 bp, Homo sapiens
ggcaatcaaggtcta

SEQ ID NO: 1497929 - DNA, 15 bp, Homo sapiens
tggcaatcaaggtct

SEQ ID NO: 1497930 - DNA, 15 bp, Homo sapiens
gtggcaatcaaggtc

SEQ ID NO: 1497931 - DNA, 15 bp, Homo sapiens
ggtggcaatcaaggt

SEQ ID NO: 1497932 - DNA, 15 bp, Homo sapiens
cggtggcaatcaagg

SEQ ID NO: 1497933 - DNA, 15 bp, Homo sapiens
ccggtggcaatcaag

SEQ ID NO: 1497934 - DNA, 15 bp, Homo sapiens
cccggtggcaatcaa

SEQ ID NO: 1497935 - DNA, 15 bp, Homo sapiens
acccggtggcaatca

SEQ ID NO: 1497936 - DNA, 15 bp, Homo sapiens
gacccggtggcaatc

SEQ ID NO: 1497937 - DNA, 15 bp, Homo sapiens
agacccggtggcaat

SEQ ID NO: 1497938 - DNA, 15 bp, Homo sapiens
tagacccggtggcaa

SEQ ID NO: 1497939 - DNA, 15 bp, Homo sapiens
ctagacccggtggca

SEQ ID NO: 1497940 - DNA, 15 bp, Homo sapiens
gctagacccggtggc

SEQ ID NO: 1497941 - DNA, 15 bp, Homo sapiens
tgctagacccggtgg

SEQ ID NO: 1497942 - DNA, 15 bp, Homo sapiens
atgctagacccggtg

SEQ ID NO: 1497943 - DNA, 15 bp, Homo sapiens
aatgctagacccggt

SEQ ID NO: 1497944 - DNA, 15 bp, Homo sapiens
caatgctagacccgg

SEQ ID NO: 1497945 - DNA, 15 bp, Homo sapiens
ccaatgctagacccg

SEQ ID NO: 1497946 - DNA, 15 bp, Homo sapiens
cccaatgctagaccc

SEQ ID NO: 1497947 - DNA, 15 bp, Homo sapiens
cgcttaaatcccaat

SEQ ID NO: 1497948 - DNA, 15 bp, Homo sapiens
tcgcttaaatcccaa

SEQ ID NO: 1497949 - DNA, 15 bp, Homo sapiens
gtcgcttaaatccca

SEQ ID NO: 1497950 - DNA, 15 bp, Homo sapiens
ggtcgcttaaatccc

SEQ ID NO: 1497951 - DNA, 15 bp, Homo sapiens
aggtcgcttaaatcc

SEQ ID NO: 1497952 - DNA, 15 bp, Homo sapiens
gaggtcgcttaaatc

SEQ ID NO: 1497953 - DNA, 15 bp, Homo sapiens
agaggtcgcttaaat

SEQ ID NO: 1497954 - DNA, 15 bp, Homo sapiens
tagaggtcgcttaaa

SEQ ID NO: 1497955 - DNA, 15 bp, Homo sapiens
ttagaggtcgcttaa

SEQ ID NO: 1497956 - DNA, 15 bp, Homo sapiens
tttagaggtcgctta

SEQ ID NO: 1497957 - DNA, 15 bp, Homo sapiens
ttttagaggtcgctt

SEQ ID NO: 1497958 - DNA, 15 bp, Homo sapiens
tttttagaggtcgct

SEQ ID NO: 1497959 - DNA, 15 bp, Homo sapiens
ttttttagaggtcgc

SEQ ID NO: 1497960 - DNA, 15 bp, Homo sapiens
tttttttagaggtcg

SEQ ID NO: 1497961 - DNA, 15 bp, Homo sapiens
ttttttttagaggtc

SEQ ID NO: 1497962 - DNA, 15 bp, Homo sapiens
tttttttttagaggt

SEQ ID NO: 1497963 - DNA, 15 bp, Homo sapiens
ttttttttttagagg

SEQ ID NO: 1497964 - DNA, 15 bp, Homo sapiens
cgtgatttttttttt

SEQ ID NO: 1497965 - DNA, 15 bp, Homo sapiens
ccgtgattttttttt

SEQ ID NO: 1497966 - DNA, 15 bp, Homo sapiens
tccgtgatttttttt

SEQ ID NO: 1497967 - DNA, 15 bp, Homo sapiens
ttccgtgattttttt

SEQ ID NO: 1497968 - DNA, 15 bp, Homo sapiens
attccgtgatttttt

SEQ ID NO: 1497969 - DNA, 15 bp, Homo sapiens
gattccgtgattttt

SEQ ID NO: 1497970 - DNA, 15 bp, Homo sapiens
agattccgtgatttt

SEQ ID NO: 1497971 - DNA, 15 bp, Homo sapiens
gagattccgtgattt

SEQ ID NO: 1497972 - DNA, 15 bp, Homo sapiens
agagattccgtgatt

SEQ ID NO: 1497973 - DNA, 15 bp, Homo sapiens
gagagattccgtgat

SEQ ID NO: 1497974 - DNA, 15 bp, Homo sapiens
agagagattccgtga

SEQ ID NO: 1497975 - DNA, 15 bp, Homo sapiens
aagagagattccgtg

SEQ ID NO: 1497976 - DNA, 15 bp, Homo sapiens
aaagagagattccgt

SEQ ID NO: 1497977 - DNA, 15 bp, Homo sapiens
caaagagagattccg

SEQ ID NO: 1497978 - DNA, 15 bp, Homo sapiens
ccaaagagagattcc

SEQ ID NO: 1497979 - DNA, 15 bp, Homo sapiens
gccaaagagagattc

SEQ ID NO: 1497980 - DNA, 15 bp, Homo sapiens
ggccaaagagagatt

SEQ ID NO: 1497981 - DNA, 15 bp, Homo sapiens
aggccaaagagagat

SEQ ID NO: 1497982 - DNA, 15 bp, Homo sapiens
aaggccaaagagaga

SEQ ID NO: 1497983 - DNA, 15 bp, Homo sapiens
gaaggccaaagagag

SEQ ID NO: 1497984 - DNA, 15 bp, Homo sapiens
ggaaggccaaagaga

SEQ ID NO: 1497985 - DNA, 15 bp, Homo sapiens
aaggaaggccaaaga

SEQ ID NO: 1497986 - DNA, 15 bp, Homo sapiens
aaaggaaggccaaag

SEQ ID NO: 1497987 - DNA, 15 bp, Homo sapiens
aaaaggaaggccaaa

SEQ ID NO: 1497988 - DNA, 15 bp, Homo sapiens
aaaaaggaaggccaa

SEQ ID NO: 1497989 - DNA, 15 bp, Homo sapiens
aaaaaaggaaggcca

SEQ ID NO: 1497990 - DNA, 15 bp, Homo sapiens
caaaaaaggaaggcc

SEQ ID NO: 1497991 - DNA, 15 bp, Homo sapiens
acaaaaaaggaaggc

SEQ ID NO: 1497992 - DNA, 15 bp, Homo sapiens
aacaaaaaaggaagg

SEQ ID NO: 1497993 - DNA, 15 bp, Homo sapiens
aaacaaaaaaggaag

SEQ ID NO: 1497994 - DNA, 15 bp, Homo sapiens
gaaacaaaaaaggaa

SEQ ID NO: 1497995 - DNA, 15 bp, Homo sapiens
agaaacaaaaaagga

SEQ ID NO: 1497996 - DNA, 15 bp, Homo sapiens
gagaaacaaaaaagg

SEQ ID NO: 1497997 - DNA, 15 bp, Homo sapiens
tgagaaacaaaaaag

SEQ ID NO: 1497998 - DNA, 15 bp, Homo sapiens
ctgagaaacaaaaaa

SEQ ID NO: 1497999 - DNA, 15 bp, Homo sapiens
gctgagaaacaaaaa

SEQ ID NO: 1498000 - DNA, 15 bp, Homo sapiens
tgctgagaaacaaaa

SEQ ID NO: 1498001 - DNA, 15 bp, Homo sapiens
ctgctgagaaacaaa

SEQ ID NO: 1498002 - DNA, 15 bp, Homo sapiens
actgctgagaaacaa

SEQ ID NO: 1498003 - DNA, 15 bp, Homo sapiens
gactgctgagaaaca

SEQ ID NO: 1498004 - DNA, 15 bp, Homo sapiens
agactgctgagaaac

SEQ ID NO: 1498005 - DNA, 15 bp, Homo sapiens
tagactgctgagaaa

SEQ ID NO: 1498006 - DNA, 15 bp, Homo sapiens
gtagactgctgagaa

SEQ ID NO: 1498007 - DNA, 15 bp, Homo sapiens
ggtagactgctgaga

SEQ ID NO: 1498008 - DNA, 15 bp, Homo sapiens
tggtagactgctgag

SEQ ID NO: 1498009 - DNA, 15 bp, Homo sapiens
ttggtagactgctga

SEQ ID NO: 1498010 - DNA, 15 bp, Homo sapiens
cttggtagactgctg

SEQ ID NO: 1498011 - DNA, 15 bp, Homo sapiens
gcttggtagactgct

SEQ ID NO: 1498012 - DNA, 15 bp, Homo sapiens
agcttggtagactgc

SEQ ID NO: 1498013 - DNA, 15 bp, Homo sapiens
tagcttggtagactg

SEQ ID NO: 1498014 - DNA, 15 bp, Homo sapiens
gtagcttggtagact

SEQ ID NO: 1498015 - DNA, 15 bp, Homo sapiens
cgtagcttggtagac

SEQ ID NO: 1498016 - DNA, 15 bp, Homo sapiens
tcgtagcttggtaga

SEQ ID NO: 1498017 - DNA, 15 bp, Homo sapiens
ttcgtagcttggtag

SEQ ID NO: 1498018 - DNA, 15 bp, Homo sapiens
cttcgtagcttggta

SEQ ID NO: 1498019 - DNA, 15 bp, Homo sapiens
tcttcgtagcttggt

SEQ ID NO: 1498020 - DNA, 15 bp, Homo sapiens
ttcttcgtagcttgg

SEQ ID NO: 1498021 - DNA, 15 bp, Homo sapiens
gttcttcgtagcttg

SEQ ID NO: 1498022 - DNA, 15 bp, Homo sapiens
ggttcttcgtagctt

SEQ ID NO: 1498023 - DNA, 15 bp, Homo sapiens
aggttcttcgtagct

SEQ ID NO: 1498024 - DNA, 15 bp, Homo sapiens
caggttcttcgtagc

SEQ ID NO: 1498025 - DNA, 15 bp, Homo sapiens
tcaggttcttcgtag

SEQ ID NO: 1498026 - DNA, 15 bp, Homo sapiens
ttcaggttcttcgta

SEQ ID NO: 1498027 - DNA, 15 bp, Homo sapiens
tttcaggttcttcgt

SEQ ID NO: 1498028 - DNA, 15 bp, Homo sapiens
ttttcaggttcttcg

SEQ ID NO: 1498029 - DNA, 15 bp, Homo sapiens
attttcaggttcttc

SEQ ID NO: 1498030 - DNA, 15 bp, Homo sapiens
gattttcaggttctt

SEQ ID NO: 1498031 - DNA, 15 bp, Homo sapiens
cgattttcaggttct

SEQ ID NO: 1498032 - DNA, 15 bp, Homo sapiens
ccgattttcaggttc

SEQ ID NO: 1498033 - DNA, 15 bp, Homo sapiens
tccgattttcaggtt

SEQ ID NO: 1498034 - DNA, 15 bp, Homo sapiens
ctccgattttcaggt

SEQ ID NO: 1498035 - DNA, 15 bp, Homo sapiens
cctccgattttcagg

SEQ ID NO: 1498036 - DNA, 15 bp, Homo sapiens
acctccgattttcag

SEQ ID NO: 1498037 - DNA, 15 bp, Homo sapiens
gacctccgattttca

SEQ ID NO: 1498038 - DNA, 15 bp, Homo sapiens
cgacctccgattttc

SEQ ID NO: 1498039 - DNA, 15 bp, Homo sapiens
acgacctccgatttt

SEQ ID NO: 1498040 - DNA, 15 bp, Homo sapiens
cacgacctccgattt

SEQ ID NO: 1498041 - DNA, 15 bp, Homo sapiens
acacgacctccgatt

SEQ ID NO: 1498042 - DNA, 15 bp, Homo sapiens
tacacgacctccgat

SEQ ID NO: 1498043 - DNA, 15 bp, Homo sapiens
gtacacgacctccga

SEQ ID NO: 1498044 - DNA, 15 bp, Homo sapiens
ggtacacgacctccg

SEQ ID NO: 1498045 - DNA, 15 bp, Homo sapiens
aggtacacgacctcc

SEQ ID NO: 1498046 - DNA, 15 bp, Homo sapiens
aaggtacacgacctc

SEQ ID NO: 1498047 - DNA, 15 bp, Homo sapiens
taaggtacacgacct

SEQ ID NO: 1498048 - DNA, 15 bp, Homo sapiens
ataaggtacacgacc

SEQ ID NO: 1498049 - DNA, 15 bp, Homo sapiens
aataaggtacacgac

SEQ ID NO: 1498050 - DNA, 15 bp, Homo sapiens
aaataaggtacacga

SEQ ID NO: 1498051 - DNA, 15 bp, Homo sapiens
aaaataaggtacacg

SEQ ID NO: 1498052 - DNA, 15 bp, Homo sapiens
aaaaataaggtacac

SEQ ID NO: 1498053 - DNA, 15 bp, Homo sapiens
aaaaaataaggtaca

SEQ ID NO: 1498054 - DNA, 15 bp, Homo sapiens
gaaaaaataaggtac

SEQ ID NO: 1498055 - DNA, 15 bp, Homo sapiens
agaaaaaataaggta

SEQ ID NO: 1498056 - DNA, 15 bp, Homo sapiens
cagaaaaaataaggt

SEQ ID NO: 1498057 - DNA, 15 bp, Homo sapiens
tcagaaaaaataagg

SEQ ID NO: 1498058 - DNA, 15 bp, Homo sapiens
ctcagaaaaaataag

SEQ ID NO: 1498059 - DNA, 15 bp, Homo sapiens
ctctcagaaaaaata

SEQ ID NO: 1498060 - DNA, 15 bp, Homo sapiens
gctctcagaaaaaat

SEQ ID NO: 1498061 - DNA, 15 bp, Homo sapiens
agctctcagaaaaaa

SEQ ID NO: 1498062 - DNA, 15 bp, Homo sapiens
aagctctcagaaaaa

SEQ ID NO: 1498063 - DNA, 15 bp, Homo sapiens
taagctctcagaaaa

SEQ ID NO: 1498064 - DNA, 15 bp, Homo sapiens
ttaagctctcagaaa

SEQ ID NO: 1498065 - DNA, 15 bp, Homo sapiens
cttaagctctcagaa

SEQ ID NO: 1498066 - DNA, 15 bp, Homo sapiens
gcttaagctctcaga

SEQ ID NO: 1498067 - DNA, 15 bp, Homo sapiens
agcttaagctctcag

SEQ ID NO: 1498068 - DNA, 15 bp, Homo sapiens
cagcttaagctctca

SEQ ID NO: 1498069 - DNA, 15 bp, Homo sapiens
tcagcttaagctctc

SEQ ID NO: 1498070 - DNA, 15 bp, Homo sapiens
ctcagcttaagctct

SEQ ID NO: 1498071 - DNA, 15 bp, Homo sapiens
tctcagcttaagctc

SEQ ID NO: 1498072 - DNA, 15 bp, Homo sapiens
ctctcagcttaagct

SEQ ID NO: 1498073 - DNA, 15 bp, Homo sapiens
gctctcagcttaagc

SEQ ID NO: 1498074 - DNA, 15 bp, Homo sapiens
tgctctcagcttaag

SEQ ID NO: 1498075 - DNA, 15 bp, Homo sapiens
gtgctctcagcttaa

SEQ ID NO: 1498076 - DNA, 15 bp, Homo sapiens
tgtgctctcagctta

SEQ ID NO: 1498077 - DNA, 15 bp, Homo sapiens
ctgtgctctcagctt

SEQ ID NO: 1498078 - DNA, 15 bp, Homo sapiens
gctgtgctctcagct

SEQ ID NO: 1498079 - DNA, 15 bp, Homo sapiens
ggctgtgctctcagc

SEQ ID NO: 1498080 - DNA, 15 bp, Homo sapiens
aggctgtgctctcag

SEQ ID NO: 1498081 - DNA, 15 bp, Homo sapiens
gaggctgtgctctca

SEQ ID NO: 1498082 - DNA, 15 bp, Homo sapiens
ggaggctgtgctctc

SEQ ID NO: 1498083 - DNA, 15 bp, Homo sapiens
gggaggctgtgctct

SEQ ID NO: 1498084 - DNA, 15 bp, Homo sapiens
ggggaggctgtgctc

SEQ ID NO: 1498085 - DNA, 15 bp, Homo sapiens
tggggaggctgtgct

SEQ ID NO: 1498086 - DNA, 15 bp, Homo sapiens
ctggggaggctgtgc

SEQ ID NO: 1498087 - DNA, 15 bp, Homo sapiens
cctggggaggctgtg

SEQ ID NO: 1498088 - DNA, 15 bp, Homo sapiens
tcctggggaggctgt

SEQ ID NO: 1498089 - DNA, 15 bp, Homo sapiens
ctcctggggaggctg

SEQ ID NO: 1498090 - DNA, 15 bp, Homo sapiens
tctcctggggaggct

SEQ ID NO: 1498091 - DNA, 15 bp, Homo sapiens
atctcctggggaggc

SEQ ID NO: 1498092 - DNA, 15 bp, Homo sapiens
aatctcctggggagg

SEQ ID NO: 1498093 - DNA, 15 bp, Homo sapiens
taatctcctggggag

SEQ ID NO: 1498094 - DNA, 15 bp, Homo sapiens
ctaatctcctgggga

SEQ ID NO: 1498095 - DNA, 15 bp, Homo sapiens
gctaatctcctgggg

SEQ ID NO: 1498096 - DNA, 15 bp, Homo sapiens
cgctaatctcctggg

SEQ ID NO: 1498097 - DNA, 15 bp, Homo sapiens
ccgctaatctcctgg

SEQ ID NO: 1498098 - DNA, 15 bp, Homo sapiens
gccgctaatctcctg

SEQ ID NO: 1498099 - DNA, 15 bp, Homo sapiens
tgccgctaatctcct

SEQ ID NO: 1498100 - DNA, 15 bp, Homo sapiens
ctgccgctaatctcc

SEQ ID NO: 1498101 - DNA, 15 bp, Homo sapiens
tctgccgctaatctc

SEQ ID NO: 1498102 - DNA, 15 bp, Homo sapiens
ctctgccgctaatct

SEQ ID NO: 1498103 - DNA, 15 bp, Homo sapiens
tctctgccgctaatc

SEQ ID NO: 1498104 - DNA, 15 bp, Homo sapiens
atctctgccgctaat

SEQ ID NO: 1498105 - DNA, 15 bp, Homo sapiens
gatctctgccgctaa

SEQ ID NO: 1498106 - DNA, 15 bp, Homo sapiens
ggatctctgccgcta

SEQ ID NO: 1498107 - DNA, 15 bp, Homo sapiens
cggatctctgccgct

SEQ ID NO: 1498108 - DNA, 15 bp, Homo sapiens
gcggatctctgccgc

SEQ ID NO: 1498109 - DNA, 15 bp, Homo sapiens
cgcggatctctgccg

SEQ ID NO: 1498110 - DNA, 15 bp, Homo sapiens
gcgcggatctctgcc

SEQ ID NO: 1498111 - DNA, 15 bp, Homo sapiens
cgcgcggatctctgc

SEQ ID NO: 1498112 - DNA, 15 bp, Homo sapiens
gcgcgcggatctctg

SEQ ID NO: 1498113 - DNA, 15 bp, Homo sapiens
agcgcgcggatctct

SEQ ID NO: 1498114 - DNA, 15 bp, Homo sapiens
cagcgcgcggatctc

SEQ ID NO: 1498115 - DNA, 15 bp, Homo sapiens
ccagcgcgcggatct

SEQ ID NO: 1498116 - DNA, 15 bp, Homo sapiens
cccagcgcgcggatc

SEQ ID NO: 1498117 - DNA, 15 bp, Homo sapiens
tcccagcgcgcggat

SEQ ID NO: 1498118 - DNA, 15 bp, Homo sapiens
ctcccagcgcgcgga

SEQ ID NO: 1498119 - DNA, 15 bp, Homo sapiens
tctcccagcgcgcgg

SEQ ID NO: 1498120 - DNA, 15 bp, Homo sapiens
ttctcccagcgcgcg

SEQ ID NO: 1498121 - DNA, 15 bp, Homo sapiens
tttctcccagcgcgc

SEQ ID NO: 1498122 - DNA, 15 bp, Homo sapiens
ctttctcccagcgcg

SEQ ID NO: 1498123 - DNA, 15 bp, Homo sapiens
cctttctcccagcgc

SEQ ID NO: 1498124 - DNA, 15 bp, Homo sapiens
gcctttctcccagcg

SEQ ID NO: 1498125 - DNA, 15 bp, Homo sapiens
agcctttctcccagc

SEQ ID NO: 1498126 - DNA, 15 bp, Homo sapiens
tagcctttctcccag

SEQ ID NO: 1498127 - DNA, 15 bp, Homo sapiens
ctagcctttctccca

SEQ ID NO: 1498128 - DNA, 15 bp, Homo sapiens
gctagcctttctccc

SEQ ID NO: 1498129 - DNA, 15 bp, Homo sapiens
ggctagcctttctcc

SEQ ID NO: 1498130 - DNA, 15 bp, Homo sapiens
gggctagcctttctc

SEQ ID NO: 1498131 - DNA, 15 bp, Homo sapiens
ggggctagcctttct

SEQ ID NO: 1498132 - DNA, 15 bp, Homo sapiens
tggggctagcctttc

SEQ ID NO: 1498133 - DNA, 15 bp, Homo sapiens
ctggggctagccttt

SEQ ID NO: 1498134 - DNA, 15 bp, Homo sapiens
cctggggctagcctt

SEQ ID NO: 1498135 - DNA, 15 bp, Homo sapiens
ccctggggctagcct

SEQ ID NO: 1498136 - DNA, 15 bp, Homo sapiens
gccctggggctagcc

SEQ ID NO: 1498137 - DNA, 15 bp, Homo sapiens
cgccctggggctagc

SEQ ID NO: 1498138 - DNA, 15 bp, Homo sapiens
gcgccctggggctag

SEQ ID NO: 1498139 - DNA, 15 bp, Homo sapiens
ggcgccctggggcta

SEQ ID NO: 1498140 - DNA, 15 bp, Homo sapiens
gggcgccctggggct

SEQ ID NO: 1498141 - DNA, 15 bp, Homo sapiens
agggcgccctggggc

SEQ ID NO: 1498142 - DNA, 15 bp, Homo sapiens
tagggcgccctgggg

SEQ ID NO: 1498143 - DNA, 15 bp, Homo sapiens
ttagggcgccctggg

SEQ ID NO: 1498144 - DNA, 15 bp, Homo sapiens
gttagggcgccctgg

SEQ ID NO: 1498145 - DNA, 15 bp, Homo sapiens
agttagggcgccctg

SEQ ID NO: 1498146 - DNA, 15 bp, Homo sapiens
aagttagggcgccct

SEQ ID NO: 1498147 - DNA, 15 bp, Homo sapiens
gaagttagggcgccc

SEQ ID NO: 1498148 - DNA, 15 bp, Homo sapiens
ggaagttagggcgcc

SEQ ID NO: 1498149 - DNA, 15 bp, Homo sapiens
tggaagttagggcgc

SEQ ID NO: 1498150 - DNA, 15 bp, Homo sapiens
ttggaagttagggcg

SEQ ID NO: 1498151 - DNA, 15 bp, Homo sapiens
gttggaagttagggc

SEQ ID NO: 1498152 - DNA, 15 bp, Homo sapiens
agttggaagttaggg

SEQ ID NO: 1498153 - DNA, 15 bp, Homo sapiens
gagttggaagttagg

SEQ ID NO: 1498154 - DNA, 15 bp, Homo sapiens
ggagttggaagttag

SEQ ID NO: 1498155 - DNA, 15 bp, Homo sapiens
cggagttggaagtta

SEQ ID NO: 1498156 - DNA, 15 bp, Homo sapiens
ccggagttggaagtt

SEQ ID NO: 1498157 - DNA, 15 bp, Homo sapiens
cccggagttggaagt

SEQ ID NO: 1498158 - DNA, 15 bp, Homo sapiens
tcccggagttggaag

SEQ ID NO: 1498159 - DNA, 15 bp, Homo sapiens
ctcccggagttggaa

SEQ ID NO: 1498160 - DNA, 15 bp, Homo sapiens
gctcccggagttgga

SEQ ID NO: 1498161 - DNA, 15 bp, Homo sapiens
tgctcccggagttgg

SEQ ID NO: 1498162 - DNA, 15 bp, Homo sapiens
ttgctcccggagttg

SEQ ID NO: 1498163 - DNA, 15 bp, Homo sapiens
attgctcccggagtt

SEQ ID NO: 1498164 - DNA, 15 bp, Homo sapiens
gattgctcccggagt

SEQ ID NO: 1498165 - DNA, 15 bp, Homo sapiens
ggattgctcccggag

SEQ ID NO: 1498166 - DNA, 15 bp, Homo sapiens
tggattgctcccgga

SEQ ID NO: 1498167 - DNA, 15 bp, Homo sapiens
ttggattgctcccgg

SEQ ID NO: 1498168 - DNA, 15 bp, Homo sapiens
tttggattgctcccg

SEQ ID NO: 1498169 - DNA, 15 bp, Homo sapiens
gtttggattgctccc

SEQ ID NO: 1498170 - DNA, 15 bp, Homo sapiens
ggtttggattgctcc

SEQ ID NO: 1498171 - DNA, 15 bp, Homo sapiens
gggtttggattgctc

SEQ ID NO: 1498172 - DNA, 15 bp, Homo sapiens
cgggtttggattgct

SEQ ID NO: 1498173 - DNA, 15 bp, Homo sapiens
ccgggtttggattgc

SEQ ID NO: 1498174 - DNA, 15 bp, Homo sapiens
tccgggtttggattg

SEQ ID NO: 1498175 - DNA, 15 bp, Homo sapiens
ctccgggtttggatt

SEQ ID NO: 1498176 - DNA, 15 bp, Homo sapiens
cctccgggtttggat

SEQ ID NO: 1498177 - DNA, 15 bp, Homo sapiens
gcctccgggtttgga

SEQ ID NO: 1498178 - DNA, 15 bp, Homo sapiens
ggcctccgggtttgg

SEQ ID NO: 1498179 - DNA, 15 bp, Homo sapiens
cggcctccgggtttg

SEQ ID NO: 1498180 - DNA, 15 bp, Homo sapiens
ccggcctccgggttt

SEQ ID NO: 1498181 - DNA, 15 bp, Homo sapiens
gccggcctccgggtt

SEQ ID NO: 1498182 - DNA, 15 bp, Homo sapiens
cgccggcctccgggt

SEQ ID NO: 1498183 - DNA, 15 bp, Homo sapiens
ccgccggcctccggg

SEQ ID NO: 1498184 - DNA, 15 bp, Homo sapiens
cccgccggcctccgg

SEQ ID NO: 1498185 - DNA, 15 bp, Homo sapiens
ccccgccggcctccg

SEQ ID NO: 1498186 - DNA, 15 bp, Homo sapiens
cccccgccggcctcc

SEQ ID NO: 1498187 - DNA, 15 bp, Homo sapiens
tcccccgccggcctc

SEQ ID NO: 1498188 - DNA, 15 bp, Homo sapiens
ctcccccgccggcct

SEQ ID NO: 1498189 - DNA, 15 bp, Homo sapiens
cctcccccgccggcc

SEQ ID NO: 1498190 - DNA, 15 bp, Homo sapiens
ccctcccccgccggc

SEQ ID NO: 1498191 - DNA, 15 bp, Homo sapiens
cccctcccccgccgg

SEQ ID NO: 1498192 - DNA, 15 bp, Homo sapiens
tcccctcccccgccg

SEQ ID NO: 1498193 - DNA, 15 bp, Homo sapiens
gtcccctcccccgcc

SEQ ID NO: 1498194 - DNA, 15 bp, Homo sapiens
tgtcccctcccccgc

SEQ ID NO: 1498195 - DNA, 15 bp, Homo sapiens
ctgtcccctcccccg

SEQ ID NO: 1498196 - DNA, 15 bp, Homo sapiens
gctgtcccctccccc

SEQ ID NO: 1498197 - DNA, 15 bp, Homo sapiens
agctgtcccctcccc

SEQ ID NO: 1498198 - DNA, 15 bp, Homo sapiens
cagctgtcccctccc

SEQ ID NO: 1498199 - DNA, 15 bp, Homo sapiens
acagctgtcccctcc

SEQ ID NO: 1498200 - DNA, 15 bp, Homo sapiens
tacagctgtcccctc

SEQ ID NO: 1498201 - DNA, 15 bp, Homo sapiens
ctacagctgtcccct

SEQ ID NO: 1498202 - DNA, 15 bp, Homo sapiens
cctacagctgtcccc

SEQ ID NO: 1498203 - DNA, 15 bp, Homo sapiens
ccctacagctgtccc

SEQ ID NO: 1498204 - DNA, 15 bp, Homo sapiens
cccctacagctgtcc

SEQ ID NO: 1498205 - DNA, 15 bp, Homo sapiens
ccccctacagctgtc

SEQ ID NO: 1498206 - DNA, 15 bp, Homo sapiens
gccccctacagctgt

SEQ ID NO: 1498207 - DNA, 15 bp, Homo sapiens
cgccccctacagctg

SEQ ID NO: 1498208 - DNA, 15 bp, Homo sapiens
ccgccccctacagct

SEQ ID NO: 1498209 - DNA, 15 bp, Homo sapiens
accgccccctacagc

SEQ ID NO: 1498210 - DNA, 15 bp, Homo sapiens
caccgccccctacag

SEQ ID NO: 1498211 - DNA, 15 bp, Homo sapiens
ccaccgccccctaca

SEQ ID NO: 1498212 - DNA, 15 bp, Homo sapiens
cccaccgccccctac

SEQ ID NO: 1498213 - DNA, 15 bp, Homo sapiens
ccccaccgcccccta

SEQ ID NO: 1498214 - DNA, 15 bp, Homo sapiens
tccccaccgccccct

SEQ ID NO: 1498215 - DNA, 15 bp, Homo sapiens
atccccaccgccccc

SEQ ID NO: 1498216 - DNA, 15 bp, Homo sapiens
catccccaccgcccc

SEQ ID NO: 1498217 - DNA, 15 bp, Homo sapiens
ccatccccaccgccc

SEQ ID NO: 1498218 - DNA, 15 bp, Homo sapiens
cccatccccaccgcc

SEQ ID NO: 1498219 - DNA, 15 bp, Homo sapiens
tcccatccccaccgc

SEQ ID NO: 1498220 - DNA, 15 bp, Homo sapiens
ctcccatccccaccg

SEQ ID NO: 1498221 - DNA, 15 bp, Homo sapiens
actcccatccccacc

SEQ ID NO: 1498222 - DNA, 15 bp, Homo sapiens
cactcccatccccac

SEQ ID NO: 1498223 - DNA, 15 bp, Homo sapiens
ccactcccatcccca

SEQ ID NO: 1498224 - DNA, 15 bp, Homo sapiens
tccactcccatcccc

SEQ ID NO: 1498225 - DNA, 15 bp, Homo sapiens
atccactcccatccc

SEQ ID NO: 1498226 - DNA, 15 bp, Homo sapiens
catccactcccatcc

SEQ ID NO: 1498227 - DNA, 15 bp, Homo sapiens
gcatccactcccatc

SEQ ID NO: 1498228 - DNA, 15 bp, Homo sapiens
agcatccactcccat

SEQ ID NO: 1498229 - DNA, 15 bp, Homo sapiens
gagcatccactccca

SEQ ID NO: 1498230 - DNA, 15 bp, Homo sapiens
ggagcatccactccc

SEQ ID NO: 1498231 - DNA, 15 bp, Homo sapiens
gggagcatccactcc

SEQ ID NO: 1498232 - DNA, 15 bp, Homo sapiens
cgggagcatccactc

SEQ ID NO: 1498233 - DNA, 15 bp, Homo sapiens
ccgggagcatccact

SEQ ID NO: 1498234 - DNA, 15 bp, Homo sapiens
cccgggagcatccac

SEQ ID NO: 1498235 - DNA, 15 bp, Homo sapiens
acccgggagcatcca

SEQ ID NO: 1498236 - DNA, 15 bp, Homo sapiens
gacccgggagcatcc

SEQ ID NO: 1498237 - DNA, 15 bp, Homo sapiens
tgacccgggagcatc

SEQ ID NO: 1498238 - DNA, 15 bp, Homo sapiens
ctgacccgggagcat

SEQ ID NO: 1498239 - DNA, 15 bp, Homo sapiens
agctgacccgggagc

SEQ ID NO: 1498240 - DNA, 15 bp, Homo sapiens
gagctgacccgggag

SEQ ID NO: 1498241 - DNA, 15 bp, Homo sapiens
agagctgacccggga

SEQ ID NO: 1498242 - DNA, 15 bp, Homo sapiens
cagagctgacccggg

SEQ ID NO: 1498243 - DNA, 15 bp, Homo sapiens
ccagagctgacccgg

SEQ ID NO: 1498244 - DNA, 15 bp, Homo sapiens
gccagagctgacccg

SEQ ID NO: 1498245 - DNA, 15 bp, Homo sapiens
tgccagagctgaccc

SEQ ID NO: 1498246 - DNA, 15 bp, Homo sapiens
gtgccagagctgacc

SEQ ID NO: 1498247 - DNA, 15 bp, Homo sapiens
agtgccagagctgac

SEQ ID NO: 1498248 - DNA, 15 bp, Homo sapiens
gagtgccagagctga

SEQ ID NO: 1498249 - DNA, 15 bp, Homo sapiens
cgagtgccagagctg

SEQ ID NO: 1498250 - DNA, 15 bp, Homo sapiens
gcgagtgccagagct

SEQ ID NO: 1498251 - DNA, 15 bp, Homo sapiens
ggcgagtgccagagc

SEQ ID NO: 1498252 - DNA, 15 bp, Homo sapiens
tggcgagtgccagag

SEQ ID NO: 1498253 - DNA, 15 bp, Homo sapiens
ctggcgagtgccaga

SEQ ID NO: 1498254 - DNA, 15 bp, Homo sapiens
gctggcgagtgccag

SEQ ID NO: 1498255 - DNA, 15 bp, Homo sapiens
agctggcgagtgcca

SEQ ID NO: 1498256 - DNA, 15 bp, Homo sapiens
cagctggcgagtgcc

SEQ ID NO: 1498257 - DNA, 15 bp, Homo sapiens
tcagctggcgagtgc

SEQ ID NO: 1498258 - DNA, 15 bp, Homo sapiens
ctcagctggcgagtg

SEQ ID NO: 1498259 - DNA, 15 bp, Homo sapiens
gctcagctggcgagt

SEQ ID NO: 1498260 - DNA, 15 bp, Homo sapiens
ggctcagctggcgag

SEQ ID NO: 1498261 - DNA, 15 bp, Homo sapiens
gggctcagctggcga

SEQ ID NO: 1498262 - DNA, 15 bp, Homo sapiens
tgggctcagctggcg

SEQ ID NO: 1498263 - DNA, 15 bp, Homo sapiens
ctgggctcagctggc

SEQ ID NO: 1498264 - DNA, 15 bp, Homo sapiens
gctgggctcagctgg

SEQ ID NO: 1498265 - DNA, 15 bp, Homo sapiens
cgctgggctcagctg

SEQ ID NO: 1498266 - DNA, 15 bp, Homo sapiens
gcgctgggctcagct

SEQ ID NO: 1498267 - DNA, 15 bp, Homo sapiens
ggcgctgggctcagc

SEQ ID NO: 1498268 - DNA, 15 bp, Homo sapiens
tggcgctgggctcag

SEQ ID NO: 1498269 - DNA, 15 bp, Homo sapiens
ctggcgctgggctca

SEQ ID NO: 1498270 - DNA, 15 bp, Homo sapiens
actggcgctgggctc

SEQ ID NO: 1498271 - DNA, 15 bp, Homo sapiens
gactggcgctgggct

SEQ ID NO: 1498272 - DNA, 15 bp, Homo sapiens
agactggcgctgggc

SEQ ID NO: 1498273 - DNA, 15 bp, Homo sapiens
tagactggcgctggg

SEQ ID NO: 1498274 - DNA, 15 bp, Homo sapiens
ctagactggcgctgg

SEQ ID NO: 1498275 - DNA, 15 bp, Homo sapiens
cctagactggcgctg

SEQ ID NO: 1498276 - DNA, 15 bp, Homo sapiens
acctagactggcgct

SEQ ID NO: 1498277 - DNA, 15 bp, Homo sapiens
cacctagactggcgc

SEQ ID NO: 1498278 - DNA, 15 bp, Homo sapiens
tcacctagactggcg

SEQ ID NO: 1498279 - DNA, 15 bp, Homo sapiens
ctcacctagactggc

SEQ ID NO: 1498280 - DNA, 15 bp, Homo sapiens
gctcacctagactgg

SEQ ID NO: 1498281 - DNA, 15 bp, Homo sapiens
ggctcacctagactg

SEQ ID NO: 1498282 - DNA, 15 bp, Homo sapiens
gggctcacctagact

SEQ ID NO: 1498283 - DNA, 15 bp, Homo sapiens
ggggctcacctagac

SEQ ID NO: 1498284 - DNA, 15 bp, Homo sapiens
tggggctcacctaga

SEQ ID NO: 1498285 - DNA, 15 bp, Homo sapiens
gtggggctcacctag

SEQ ID NO: 1498286 - DNA, 15 bp, Homo sapiens
cgtggggctcaccta

SEQ ID NO: 1498287 - DNA, 15 bp, Homo sapiens
ccgtggggctcacct

SEQ ID NO: 1498288 - DNA, 15 bp, Homo sapiens
gccgtggggctcacc

SEQ ID NO: 1498289 - DNA, 15 bp, Homo sapiens
cgccgtggggctcac

SEQ ID NO: 1498290 - DNA, 15 bp, Homo sapiens
ccgccgtggggctca

SEQ ID NO: 1498291 - DNA, 15 bp, Homo sapiens
accgccgtggggctc

SEQ ID NO: 1498292 - DNA, 15 bp, Homo sapiens
caccgccgtggggct

SEQ ID NO: 1498293 - DNA, 15 bp, Homo sapiens
tcaccgccgtggggc

SEQ ID NO: 1498294 - DNA, 15 bp, Homo sapiens
ctcaccgccgtgggg

SEQ ID NO: 1498295 - DNA, 15 bp, Homo sapiens
cctcaccgccgtggg

SEQ ID NO: 1498296 - DNA, 15 bp, Homo sapiens
ccctcaccgccgtgg

SEQ ID NO: 1498297 - DNA, 15 bp, Homo sapiens
tccctcaccgccgtg

SEQ ID NO: 1498298 - DNA, 15 bp, Homo sapiens
gtccctcaccgccgt

SEQ ID NO: 1498299 - DNA, 15 bp, Homo sapiens
cgtccctcaccgccg

SEQ ID NO: 1498300 - DNA, 15 bp, Homo sapiens
gcgtccctcaccgcc

SEQ ID NO: 1498301 - DNA, 15 bp, Homo sapiens
agcgtccctcaccgc

SEQ ID NO: 1498302 - DNA, 15 bp, Homo sapiens
gagcgtccctcaccg

SEQ ID NO: 1498303 - DNA, 15 bp, Homo sapiens
cgagcgtccctcacc

SEQ ID NO: 1498304 - DNA, 15 bp, Homo sapiens
gcgagcgtccctcac

SEQ ID NO: 1498305 - DNA, 15 bp, Homo sapiens
ggcgagcgtccctca

SEQ ID NO: 1498306 - DNA, 15 bp, Homo sapiens
tggcgagcgtccctc

SEQ ID NO: 1498307 - DNA, 15 bp, Homo sapiens
ctggcgagcgtccct

SEQ ID NO: 1498308 - DNA, 15 bp, Homo sapiens
tctggcgagcgtccc

SEQ ID NO: 1498309 - DNA, 15 bp, Homo sapiens
gtctggcgagcgtcc

SEQ ID NO: 1498310 - DNA, 15 bp, Homo sapiens
cgtctggcgagcgtc

SEQ ID NO: 1498311 - DNA, 15 bp, Homo sapiens
ccgtctggcgagcgt

SEQ ID NO: 1498312 - DNA, 15 bp, Homo sapiens
gccgtctggcgagcg

SEQ ID NO: 1498313 - DNA, 15 bp, Homo sapiens
ggccgtctggcgagc

SEQ ID NO: 1498314 - DNA, 15 bp, Homo sapiens
gggccgtctggcgag

SEQ ID NO: 1498315 - DNA, 15 bp, Homo sapiens
tgggccgtctggcga

SEQ ID NO: 1498316 - DNA, 15 bp, Homo sapiens
ctgggccgtctggcg

SEQ ID NO: 1498317 - DNA, 15 bp, Homo sapiens
tctgggccgtctggc

SEQ ID NO: 1498318 - DNA, 15 bp, Homo sapiens
ctctgggccgtctgg

SEQ ID NO: 1498319 - DNA, 15 bp, Homo sapiens
cctctgggccgtctg

SEQ ID NO: 1498320 - DNA, 15 bp, Homo sapiens
tcctctgggccgtct

SEQ ID NO: 1498321 - DNA, 15 bp, Homo sapiens
ctcctctgggccgtc

SEQ ID NO: 1498322 - DNA, 15 bp, Homo sapiens
actcctctgggccgt

SEQ ID NO: 1498323 - DNA, 15 bp, Homo sapiens
aactcctctgggccg

SEQ ID NO: 1498324 - DNA, 15 bp, Homo sapiens
taactcctctgggcc

SEQ ID NO: 1498325 - DNA, 15 bp, Homo sapiens
ctaactcctctgggc

SEQ ID NO: 1498326 - DNA, 15 bp, Homo sapiens
tctaactcctctggg

SEQ ID NO: 1498327 - DNA, 15 bp, Homo sapiens
atctaactcctctgg

SEQ ID NO: 1498328 - DNA, 15 bp, Homo sapiens
catctaactcctctg

SEQ ID NO: 1498329 - DNA, 15 bp, Homo sapiens
tcatctaactcctct

SEQ ID NO: 1498330 - DNA, 15 bp, Homo sapiens
gtcatctaactcctc

SEQ ID NO: 1498331 - DNA, 15 bp, Homo sapiens
cgtcatctaactcct

SEQ ID NO: 1498332 - DNA, 15 bp, Homo sapiens
acgtcatctaactcc

SEQ ID NO: 1498333 - DNA, 15 bp, Homo sapiens
gacgtcatctaactc

SEQ ID NO: 1498334 - DNA, 15 bp, Homo sapiens
tgacgtcatctaact

SEQ ID NO: 1498335 - DNA, 15 bp, Homo sapiens
gtgacgtcatctaac

SEQ ID NO: 1498336 - DNA, 15 bp, Homo sapiens
ggtgacgtcatctaa

SEQ ID NO: 1498337 - DNA, 15 bp, Homo sapiens
aggtgacgtcatcta

SEQ ID NO: 1498338 - DNA, 15 bp, Homo sapiens
gaggtgacgtcatct

SEQ ID NO: 1498339 - DNA, 15 bp, Homo sapiens
ggaggtgacgtcatc

SEQ ID NO: 1498340 - DNA, 15 bp, Homo sapiens
tggaggtgacgtcat

SEQ ID NO: 1498341 - DNA, 15 bp, Homo sapiens
ctggaggtgacgtca

SEQ ID NO: 1498342 - DNA, 15 bp, Homo sapiens
cctggaggtgacgtc

SEQ ID NO: 1498343 - DNA, 15 bp, Homo sapiens
tcctggaggtgacgt

SEQ ID NO: 1498344 - DNA, 15 bp, Homo sapiens
ctcctggaggtgacg

SEQ ID NO: 1498345 - DNA, 15 bp, Homo sapiens
cctcctggaggtgac

SEQ ID NO: 1498346 - DNA, 15 bp, Homo sapiens
tcctcctggaggtga

SEQ ID NO: 1498347 - DNA, 15 bp, Homo sapiens
gtcctcctggaggtg

SEQ ID NO: 1498348 - DNA, 15 bp, Homo sapiens
agtcctcctggaggt

SEQ ID NO: 1498349 - DNA, 15 bp, Homo sapiens
gagtcctcctggagg

SEQ ID NO: 1498350 - DNA, 15 bp, Homo sapiens
cgagtcctcctggag

SEQ ID NO: 1498351 - DNA, 15 bp, Homo sapiens
gcgagtcctcctgga

SEQ ID NO: 1498352 - DNA, 15 bp, Homo sapiens
agcgagtcctcctgg

SEQ ID NO: 1498353 - DNA, 15 bp, Homo sapiens
aagcgagtcctcctg

SEQ ID NO: 1498354 - DNA, 15 bp, Homo sapiens
aaagcgagtcctcct

SEQ ID NO: 1498355 - DNA, 15 bp, Homo sapiens
aaaagcgagtcctcc

SEQ ID NO: 1498356 - DNA, 15 bp, Homo sapiens
aaaaagcgagtcctc

SEQ ID NO: 1498357 - DNA, 15 bp, Homo sapiens
gaaaaagcgagtcct

SEQ ID NO: 1498358 - DNA, 15 bp, Homo sapiens
tgaaaaagcgagtcc

SEQ ID NO: 1498359 - DNA, 15 bp, Homo sapiens
atgaaaaagcgagtc

SEQ ID NO: 1498360 - DNA, 15 bp, Homo sapiens
aatgaaaaagcgagt

SEQ ID NO: 1498361 - DNA, 15 bp, Homo sapiens
taatgaaaaagcgag

SEQ ID NO: 1498362 - DNA, 15 bp, Homo sapiens
ttaatgaaaaagcga

SEQ ID NO: 1498363 - DNA, 15 bp, Homo sapiens
attaatgaaaaagcg

SEQ ID NO: 1498364 - DNA, 15 bp, Homo sapiens
cattaatgaaaaagc

SEQ ID NO: 1498365 - DNA, 15 bp, Homo sapiens
tcattaatgaaaaag

SEQ ID NO: 1498366 - DNA, 15 bp, Homo sapiens
ttcattaatgaaaaa

SEQ ID NO: 1498367 - DNA, 15 bp, Homo sapiens
tttcattaatgaaaa

SEQ ID NO: 1498368 - DNA, 15 bp, Homo sapiens
gtttcattaatgaaa

SEQ ID NO: 1498369 - DNA, 15 bp, Homo sapiens
ggtttcattaatgaa

SEQ ID NO: 1498370 - DNA, 15 bp, Homo sapiens
cggtttcattaatga

SEQ ID NO: 1498371 - DNA, 15 bp, Homo sapiens
ccggtttcattaatg

SEQ ID NO: 1498372 - DNA, 15 bp, Homo sapiens
gccggtttcattaat

SEQ ID NO: 1498373 - DNA, 15 bp, Homo sapiens
ggccggtttcattaa

SEQ ID NO: 1498374 - DNA, 15 bp, Homo sapiens
cggccggtttcatta

SEQ ID NO: 1498375 - DNA, 15 bp, Homo sapiens
ccggccggtttcatt

SEQ ID NO: 1498376 - DNA, 15 bp, Homo sapiens
gccggccggtttcat

SEQ ID NO: 1498377 - DNA, 15 bp, Homo sapiens
cgccggccggtttca

SEQ ID NO: 1498378 - DNA, 15 bp, Homo sapiens
gcgccggccggtttc

SEQ ID NO: 1498379 - DNA, 15 bp, Homo sapiens
cgcgccggccggttt

SEQ ID NO: 1498380 - DNA, 15 bp, Homo sapiens
ccgcgccggccggtt

SEQ ID NO: 1498381 - DNA, 15 bp, Homo sapiens
cccgcgccggccggt

SEQ ID NO: 1498382 - DNA, 15 bp, Homo sapiens
gcccgcgccggccgg

SEQ ID NO: 1498383 - DNA, 15 bp, Homo sapiens
cgcccgcgccggccg

SEQ ID NO: 1498384 - DNA, 15 bp, Homo sapiens
gcgcccgcgccggcc

SEQ ID NO: 1498385 - DNA, 15 bp, Homo sapiens
tgcgcccgcgccggc

SEQ ID NO: 1498386 - DNA, 15 bp, Homo sapiens
atgcgcccgcgccgg

SEQ ID NO: 1498387 - DNA, 15 bp, Homo sapiens
catgcgcccgcgccg

SEQ ID NO: 1498388 - DNA, 15 bp, Homo sapiens
gcatgcgcccgcgcc

SEQ ID NO: 1498389 - DNA, 15 bp, Homo sapiens
cgcatgcgcccgcgc

SEQ ID NO: 1498390 - DNA, 15 bp, Homo sapiens
gcgcatgcgcccgcg

SEQ ID NO: 1498391 - DNA, 15 bp, Homo sapiens
cgcgcatgcgcccgc

SEQ ID NO: 1498392 - DNA, 15 bp, Homo sapiens
ccgcgcatgcgcccg

SEQ ID NO: 1498393 - DNA, 15 bp, Homo sapiens
gccgcgcatgcgccc

SEQ ID NO: 1498394 - DNA, 15 bp, Homo sapiens
tgccgcgcatgcgcc

SEQ ID NO: 1498395 - DNA, 15 bp, Homo sapiens
ctgccgcgcatgcgc

SEQ ID NO: 1498396 - DNA, 15 bp, Homo sapiens
cctgccgcgcatgcg

SEQ ID NO: 1498397 - DNA, 15 bp, Homo sapiens
gcctgccgcgcatgc

SEQ ID NO: 1498398 - DNA, 15 bp, Homo sapiens
ggcctgccgcgcatg

SEQ ID NO: 1498399 - DNA, 15 bp, Homo sapiens
cggcctgccgcgcat

SEQ ID NO: 1498400 - DNA, 15 bp, Homo sapiens
gcggcctgccgcgca

SEQ ID NO: 1498401 - DNA, 15 bp, Homo sapiens
ggcggcctgccgcgc

SEQ ID NO: 1498402 - DNA, 15 bp, Homo sapiens
aggcggcctgccgcg

SEQ ID NO: 1498403 - DNA, 15 bp, Homo sapiens
aaggcggcctgccgc

SEQ ID NO: 1498404 - DNA, 15 bp, Homo sapiens
gaaggcggcctgccg

SEQ ID NO: 1498405 - DNA, 15 bp, Homo sapiens
ggaaggcggcctgcc

SEQ ID NO: 1498406 - DNA, 15 bp, Homo sapiens
gggaaggcggcctgc

SEQ ID NO: 1498407 - DNA, 15 bp, Homo sapiens
agggaaggcggcctg

SEQ ID NO: 1498408 - DNA, 15 bp, Homo sapiens
gagggaaggcggcct

SEQ ID NO: 1498409 - DNA, 15 bp, Homo sapiens
agagggaaggcggcc

SEQ ID NO: 1498410 - DNA, 15 bp, Homo sapiens
gagagggaaggcggc

SEQ ID NO: 1498411 - DNA, 15 bp, Homo sapiens
cgagagggaaggcgg

SEQ ID NO: 1498412 - DNA, 15 bp, Homo sapiens
gcgagagggaaggcg

SEQ ID NO: 1498413 - DNA, 15 bp, Homo sapiens
agcgagagggaaggc

SEQ ID NO: 1498414 - DNA, 15 bp, Homo sapiens
aagcgagagggaagg

SEQ ID NO: 1498415 - DNA, 15 bp, Homo sapiens
gaagcgagagggaag

SEQ ID NO: 1498416 - DNA, 15 bp, Homo sapiens
ggaagcgagagggaa

SEQ ID NO: 1498417 - DNA, 15 bp, Homo sapiens
gggaagcgagaggga

SEQ ID NO: 1498418 - DNA, 15 bp, Homo sapiens
ggggaagcgagaggg

SEQ ID NO: 1498419 - DNA, 15 bp, Homo sapiens
gggggaagcgagagg

SEQ ID NO: 1498420 - DNA, 15 bp, Homo sapiens
agggggaagcgagag

SEQ ID NO: 1498421 - DNA, 15 bp, Homo sapiens
gagggggaagcgaga

SEQ ID NO: 1498422 - DNA, 15 bp, Homo sapiens
ggagggggaagcgag

SEQ ID NO: 1498423 - DNA, 15 bp, Homo sapiens
gggagggggaagcga

SEQ ID NO: 1498424 - DNA, 15 bp, Homo sapiens
ggggagggggaagcg

SEQ ID NO: 1498425 - DNA, 15 bp, Homo sapiens
aggggagggggaagc

SEQ ID NO: 1498426 - DNA, 15 bp, Homo sapiens
aaggggagggggaag

SEQ ID NO: 1498427 - DNA, 15 bp, Homo sapiens
aaaggggagggggaa

SEQ ID NO: 1498428 - DNA, 15 bp, Homo sapiens
gaaaggggaggggga

SEQ ID NO: 1498429 - DNA, 15 bp, Homo sapiens
tgggaaaggggaggg

SEQ ID NO: 1498430 - DNA, 15 bp, Homo sapiens
ctgggaaaggggagg

SEQ ID NO: 1498431 - DNA, 15 bp, Homo sapiens
gctgggaaaggggag

SEQ ID NO: 1498432 - DNA, 15 bp, Homo sapiens
ggctgggaaagggga

SEQ ID NO: 1498433 - DNA, 15 bp, Homo sapiens
cggctgggaaagggg

SEQ ID NO: 1498434 - DNA, 15 bp, Homo sapiens
gcggctgggaaaggg

SEQ ID NO: 1498435 - DNA, 15 bp, Homo sapiens
cgcggctgggaaagg

SEQ ID NO: 1498436 - DNA, 15 bp, Homo sapiens
gcgcggctgggaaag

SEQ ID NO: 1498437 - DNA, 15 bp, Homo sapiens
agcgcggctgggaaa

SEQ ID NO: 1498438 - DNA, 15 bp, Homo sapiens
gagcgcggctgggaa

SEQ ID NO: 1498439 - DNA, 15 bp, Homo sapiens
agagcgcggctggga

SEQ ID NO: 1498440 - DNA, 15 bp, Homo sapiens
gagagcgcggctggg

SEQ ID NO: 1498441 - DNA, 15 bp, Homo sapiens
tgagagcgcggctgg

SEQ ID NO: 1498442 - DNA, 15 bp, Homo sapiens
ttgagagcgcggctg

SEQ ID NO: 1498443 - DNA, 15 bp, Homo sapiens
attgagagcgcggct

SEQ ID NO: 1498444 - DNA, 15 bp, Homo sapiens
gattgagagcgcggc

SEQ ID NO: 1498445 - DNA, 15 bp, Homo sapiens
agattgagagcgcgg

SEQ ID NO: 1498446 - DNA, 15 bp, Homo sapiens
gagattgagagcgcg

SEQ ID NO: 1498447 - DNA, 15 bp, Homo sapiens
agagattgagagcgc

SEQ ID NO: 1498448 - DNA, 15 bp, Homo sapiens
tagagattgagagcg

SEQ ID NO: 1498449 - DNA, 15 bp, Homo sapiens
ctagagattgagagc

SEQ ID NO: 1498450 - DNA, 15 bp, Homo sapiens
gctagagattgagag

SEQ ID NO: 1498451 - DNA, 15 bp, Homo sapiens
agctagagattgaga

SEQ ID NO: 1498452 - DNA, 15 bp, Homo sapiens
gagctagagattgag

SEQ ID NO: 1498453 - DNA, 15 bp, Homo sapiens
cgagctagagattga

SEQ ID NO: 1498454 - DNA, 15 bp, Homo sapiens
gcgagctagagattg

SEQ ID NO: 1498455 - DNA, 15 bp, Homo sapiens
agcgagctagagatt

SEQ ID NO: 1498456 - DNA, 15 bp, Homo sapiens
gagcgagctagagat

SEQ ID NO: 1498457 - DNA, 15 bp, Homo sapiens
cgagcgagctagaga

SEQ ID NO: 1498458 - DNA, 15 bp, Homo sapiens
gcgagcgagctagag

SEQ ID NO: 1498459 - DNA, 15 bp, Homo sapiens
cgcgagcgagctaga

SEQ ID NO: 1498460 - DNA, 15 bp, Homo sapiens
gcgcgagcgagctag

SEQ ID NO: 1498461 - DNA, 15 bp, Homo sapiens
agcgcgagcgagcta

SEQ ID NO: 1498462 - DNA, 15 bp, Homo sapiens
gagcgcgagcgagct

SEQ ID NO: 1498463 - DNA, 15 bp, Homo sapiens
ggagcgcgagcgagc

SEQ ID NO: 1498464 - DNA, 15 bp, Homo sapiens
gggagcgcgagcgag

SEQ ID NO: 1498465 - DNA, 15 bp, Homo sapiens
agggagcgcgagcga

SEQ ID NO: 1498466 - DNA, 15 bp, Homo sapiens
gagggagcgcgagcg

SEQ ID NO: 1498467 - DNA, 15 bp, Homo sapiens
agagggagcgcgagc

SEQ ID NO: 1498468 - DNA, 15 bp, Homo sapiens
gagagggagcgcgag

SEQ ID NO: 1498469 - DNA, 15 bp, Homo sapiens
ggagagggagcgcga

SEQ ID NO: 1498470 - DNA, 15 bp, Homo sapiens
gggagagggagcgcg

SEQ ID NO: 1498471 - DNA, 15 bp, Homo sapiens
ggggagagggagcgc

SEQ ID NO: 1498472 - DNA, 15 bp, Homo sapiens
cggggagagggagcg

SEQ ID NO: 1498473 - DNA, 15 bp, Homo sapiens
ccggggagagggagc

SEQ ID NO: 1498474 - DNA, 15 bp, Homo sapiens
cccggggagagggag

SEQ ID NO: 1498475 - DNA, 15 bp, Homo sapiens
gcccggggagaggga

SEQ ID NO: 1498476 - DNA, 15 bp, Homo sapiens
ggcccggggagaggg

SEQ ID NO: 1498477 - DNA, 15 bp, Homo sapiens
cggcccggggagagg

SEQ ID NO: 1498478 - DNA, 15 bp, Homo sapiens
acggcccggggagag

SEQ ID NO: 1498479 - DNA, 15 bp, Homo sapiens
cacggcccggggaga

SEQ ID NO: 1498480 - DNA, 15 bp, Homo sapiens
ccacggcccggggag

SEQ ID NO: 1498481 - DNA, 15 bp, Homo sapiens
tccacggcccgggga

SEQ ID NO: 1498482 - DNA, 15 bp, Homo sapiens
ttccacggcccgggg

SEQ ID NO: 1498483 - DNA, 15 bp, Homo sapiens
tttccacggcccggg

SEQ ID NO: 1498484 - DNA, 15 bp, Homo sapiens
ctttccacggcccgg

SEQ ID NO: 1498485 - DNA, 15 bp, Homo sapiens
cctttccacggcccg

SEQ ID NO: 1498486 - DNA, 15 bp, Homo sapiens
tcctttccacggccc

SEQ ID NO: 1498487 - DNA, 15 bp, Homo sapiens
atcctttccacggcc

SEQ ID NO: 1498488 - DNA, 15 bp, Homo sapiens
gatcctttccacggc

SEQ ID NO: 1498489 - DNA, 15 bp, Homo sapiens
ggatcctttccacgg

SEQ ID NO: 1498490 - DNA, 15 bp, Homo sapiens
gggatcctttccacg

SEQ ID NO: 1498491 - DNA, 15 bp, Homo sapiens
tgggatcctttccac

SEQ ID NO: 1498492 - DNA, 15 bp, Homo sapiens
gtgggatcctttcca

SEQ ID NO: 1498493 - DNA, 15 bp, Homo sapiens
agtgggatcctttcc

SEQ ID NO: 1498494 - DNA, 15 bp, Homo sapiens
aagtgggatcctttc

SEQ ID NO: 1498495 - DNA, 15 bp, Homo sapiens
gaagtgggatccttt

SEQ ID NO: 1498496 - DNA, 15 bp, Homo sapiens
ggaagtgggatcctt

SEQ ID NO: 1498497 - DNA, 15 bp, Homo sapiens
cggaagtgggatcct

SEQ ID NO: 1498498 - DNA, 15 bp, Homo sapiens
ccggaagtgggatcc

SEQ ID NO: 1498499 - DNA, 15 bp, Homo sapiens
accggaagtgggatc

SEQ ID NO: 1498500 - DNA, 15 bp, Homo sapiens
caccggaagtgggat

SEQ ID NO: 1498501 - DNA, 15 bp, Homo sapiens
ccaccggaagtggga

SEQ ID NO: 1498502 - DNA, 15 bp, Homo sapiens
cccaccggaagtggg

SEQ ID NO: 1498503 - DNA, 15 bp, Homo sapiens
ccccaccggaagtgg

SEQ ID NO: 1498504 - DNA, 15 bp, Homo sapiens
accccaccggaagtg

SEQ ID NO: 1498505 - DNA, 15 bp, Homo sapiens
caccccaccggaagt

SEQ ID NO: 1498506 - DNA, 15 bp, Homo sapiens
acaccccaccggaag

SEQ ID NO: 1498507 - DNA, 15 bp, Homo sapiens
gacaccccaccggaa

SEQ ID NO: 1498508 - DNA, 15 bp, Homo sapiens
tgacaccccaccgga

SEQ ID NO: 1498509 - DNA, 15 bp, Homo sapiens
atgacaccccaccgg

SEQ ID NO: 1498510 - DNA, 15 bp, Homo sapiens
catgacaccccaccg

SEQ ID NO: 1498511 - DNA, 15 bp, Homo sapiens
ccatgacaccccacc

SEQ ID NO: 1498512 - DNA, 15 bp, Homo sapiens
gccatgacaccccac

SEQ ID NO: 1498513 - DNA, 15 bp, Homo sapiens
cgccatgacacccca

SEQ ID NO: 1498514 - DNA, 15 bp, Homo sapiens
ccgccatgacacccc

SEQ ID NO: 1498515 - DNA, 15 bp, Homo sapiens
gccgccatgacaccc

SEQ ID NO: 1498516 - DNA, 15 bp, Homo sapiens
cgccgccatgacacc

SEQ ID NO: 1498517 - DNA, 15 bp, Homo sapiens
acgccgccatgacac

SEQ ID NO: 1498518 - DNA, 15 bp, Homo sapiens
gacgccgccatgaca

SEQ ID NO: 1498519 - DNA, 15 bp, Homo sapiens
agacgccgccatgac

SEQ ID NO: 1498520 - DNA, 15 bp, Homo sapiens
gagacgccgccatga

SEQ ID NO: 1498521 - DNA, 15 bp, Homo sapiens
cgagacgccgccatg

SEQ ID NO: 1498522 - DNA, 15 bp, Homo sapiens
ccgagacgccgccat

SEQ ID NO: 1498523 - DNA, 15 bp, Homo sapiens
tccgagacgccgcca

SEQ ID NO: 1498524 - DNA, 15 bp, Homo sapiens
gtccgagacgccgcc

SEQ ID NO: 1498525 - DNA, 15 bp, Homo sapiens
agtccgagacgccgc

SEQ ID NO: 1498526 - DNA, 15 bp, Homo sapiens
cagtccgagacgccg

SEQ ID NO: 1498527 - DNA, 15 bp, Homo sapiens
acagtccgagacgcc

SEQ ID NO: 1498528 - DNA, 15 bp, Homo sapiens
cacagtccgagacgc

SEQ ID NO: 1498529 - DNA, 15 bp, Homo sapiens
tcacagtccgagacg

SEQ ID NO: 1498530 - DNA, 15 bp, Homo sapiens
atcacagtccgagac

SEQ ID NO: 1498531 - DNA, 15 bp, Homo sapiens
catcacagtccgaga

SEQ ID NO: 1498532 - DNA, 15 bp, Homo sapiens
ccatcacagtccgag

SEQ ID NO: 1498533 - DNA, 15 bp, Homo sapiens
gccatcacagtccga

SEQ ID NO: 1498534 - DNA, 15 bp, Homo sapiens
agccatcacagtccg

SEQ ID NO: 1498535 - DNA, 15 bp, Homo sapiens
cagccatcacagtcc

SEQ ID NO: 1498536 - DNA, 15 bp, Homo sapiens
acagccatcacagtc

SEQ ID NO: 1498537 - DNA, 15 bp, Homo sapiens
cacagccatcacagt

SEQ ID NO: 1498538 - DNA, 15 bp, Homo sapiens
ccacagccatcacag

SEQ ID NO: 1498539 - DNA, 15 bp, Homo sapiens
cccacagccatcaca

SEQ ID NO: 1498540 - DNA, 15 bp, Homo sapiens
ccccacagccatcac

SEQ ID NO: 1498541 - DNA, 15 bp, Homo sapiens
tccccacagccatca

SEQ ID NO: 1498542 - DNA, 15 bp, Homo sapiens
ctccccacagccatc

SEQ ID NO: 1498543 - DNA, 15 bp, Homo sapiens
tctccccacagccat

SEQ ID NO: 1498544 - DNA, 15 bp, Homo sapiens
gtctccccacagcca

SEQ ID NO: 1498545 - DNA, 15 bp, Homo sapiens
cgtctccccacagcc

SEQ ID NO: 1498546 - DNA, 15 bp, Homo sapiens
ccgtctccccacagc

SEQ ID NO: 1498547 - DNA, 15 bp, Homo sapiens
gccgtctccccacag

SEQ ID NO: 1498548 - DNA, 15 bp, Homo sapiens
cgccgtctccccaca

SEQ ID NO: 1498549 - DNA, 15 bp, Homo sapiens
gcgccgtctccccac

SEQ ID NO: 1498550 - DNA, 15 bp, Homo sapiens
agcgccgtctcccca

SEQ ID NO: 1498551 - DNA, 15 bp, Homo sapiens
tagcgccgtctcccc

SEQ ID NO: 1498552 - DNA, 15 bp, Homo sapiens
ctagcgccgtctccc

SEQ ID NO: 1498553 - DNA, 15 bp, Homo sapiens
actagcgccgtctcc

SEQ ID NO: 1498554 - DNA, 15 bp, Homo sapiens
cactagcgccgtctc

SEQ ID NO: 1498555 - DNA, 15 bp, Homo sapiens
ccactagcgccgtct

SEQ ID NO: 1498556 - DNA, 15 bp, Homo sapiens
cccactagcgccgtc

SEQ ID NO: 1498557 - DNA, 15 bp, Homo sapiens
ccccactagcgccgt

SEQ ID NO: 1498558 - DNA, 15 bp, Homo sapiens
tccccactagcgccg

SEQ ID NO: 1498559 - DNA, 15 bp, Homo sapiens
ctccccactagcgcc

SEQ ID NO: 1498560 - DNA, 15 bp, Homo sapiens
tctccccactagcgc

SEQ ID NO: 1498561 - DNA, 15 bp, Homo sapiens
ctctccccactagcg

SEQ ID NO: 1498562 - DNA, 15 bp, Homo sapiens
gctctccccactagc

SEQ ID NO: 1498563 - DNA, 15 bp, Homo sapiens
cgctctccccactag

SEQ ID NO: 1498564 - DNA, 15 bp, Homo sapiens
tcgctctccccacta

SEQ ID NO: 1498565 - DNA, 15 bp, Homo sapiens
gtcgctctccccact

SEQ ID NO: 1498566 - DNA, 15 bp, Homo sapiens
ggtcgctctccccac

SEQ ID NO: 1498567 - DNA, 15 bp, Homo sapiens
tggtcgctctcccca

SEQ ID NO: 1498568 - DNA, 15 bp, Homo sapiens
ttggtcgctctcccc

SEQ ID NO: 1498569 - DNA, 15 bp, Homo sapiens
cttggtcgctctccc

SEQ ID NO: 1498570 - DNA, 15 bp, Homo sapiens
tcttggtcgctctcc

SEQ ID NO: 1498571 - DNA, 15 bp, Homo sapiens
ctcttggtcgctctc

SEQ ID NO: 1498572 - DNA, 15 bp, Homo sapiens
cctcttggtcgctct

SEQ ID NO: 1498573 - DNA, 15 bp, Homo sapiens
gcctcttggtcgctc

SEQ ID NO: 1498574 - DNA, 15 bp, Homo sapiens
ggcctcttggtcgct

SEQ ID NO: 1498575 - DNA, 15 bp, Homo sapiens
gggcctcttggtcgc

SEQ ID NO: 1498576 - DNA, 15 bp, Homo sapiens
ggggcctcttggtcg

SEQ ID NO: 1498577 - DNA, 15 bp, Homo sapiens
gggggcctcttggtc

SEQ ID NO: 1498578 - DNA, 15 bp, Homo sapiens
agggggcctcttggt

SEQ ID NO: 1498579 - DNA, 15 bp, Homo sapiens
gagggggcctcttgg

SEQ ID NO: 1498580 - DNA, 15 bp, Homo sapiens
ggagggggcctcttg

SEQ ID NO: 1498581 - DNA, 15 bp, Homo sapiens
gggagggggcctctt

SEQ ID NO: 1498582 - DNA, 15 bp, Homo sapiens
ggggagggggcctct

SEQ ID NO: 1498583 - DNA, 15 bp, Homo sapiens
aggggagggggcctc

SEQ ID NO: 1498584 - DNA, 15 bp, Homo sapiens
gaggggagggggcct

SEQ ID NO: 1498585 - DNA, 15 bp, Homo sapiens
ggaggggagggggcc

SEQ ID NO: 1498586 - DNA, 15 bp, Homo sapiens
gggaggggagggggc

SEQ ID NO: 1498587 - DNA, 15 bp, Homo sapiens
ggggaggggaggggg

SEQ ID NO: 1498588 - DNA, 15 bp, Homo sapiens
cggggaggggagggg

SEQ ID NO: 1498589 - DNA, 15 bp, Homo sapiens
ccggggaggggaggg

SEQ ID NO: 1498590 - DNA, 15 bp, Homo sapiens
cccggggaggggagg

SEQ ID NO: 1498591 - DNA, 15 bp, Homo sapiens
acccggggaggggag

SEQ ID NO: 1498592 - DNA, 15 bp, Homo sapiens
gacccggggagggga

SEQ ID NO: 1498593 - DNA, 15 bp, Homo sapiens
ggacccggggagggg

SEQ ID NO: 1498594 - DNA, 15 bp, Homo sapiens
gggacccggggaggg

SEQ ID NO: 1498595 - DNA, 15 bp, Homo sapiens
ggggacccggggagg

SEQ ID NO: 1498596 - DNA, 15 bp, Homo sapiens
aggggacccggggag

SEQ ID NO: 1498597 - DNA, 15 bp, Homo sapiens
aaggggacccgggga

SEQ ID NO: 1498598 - DNA, 15 bp, Homo sapiens
gaaggggacccgggg

SEQ ID NO: 1498599 - DNA, 15 bp, Homo sapiens
ggaaggggacccggg

SEQ ID NO: 1498600 - DNA, 15 bp, Homo sapiens
gggaaggggacccgg

SEQ ID NO: 1498601 - DNA, 15 bp, Homo sapiens
ggggaaggggacccg

SEQ ID NO: 1498602 - DNA, 15 bp, Homo sapiens
taggggaaggggacc

SEQ ID NO: 1498603 - DNA, 15 bp, Homo sapiens
ataggggaaggggac

SEQ ID NO: 1498604 - DNA, 15 bp, Homo sapiens
gataggggaagggga

SEQ ID NO: 1498605 - DNA, 15 bp, Homo sapiens
ggataggggaagggg

SEQ ID NO: 1498606 - DNA, 15 bp, Homo sapiens
gggataggggaaggg

SEQ ID NO: 1498607 - DNA, 15 bp, Homo sapiens
ggggataggggaagg

SEQ ID NO: 1498608 - DNA, 15 bp, Homo sapiens
gggggataggggaag

SEQ ID NO: 1498609 - DNA, 15 bp, Homo sapiens
agggggataggggaa

SEQ ID NO: 1498610 - DNA, 15 bp, Homo sapiens
gagggggatagggga

SEQ ID NO: 1498611 - DNA, 15 bp, Homo sapiens
ggagggggatagggg

SEQ ID NO: 1498612 - DNA, 15 bp, Homo sapiens
gggagggggataggg

SEQ ID NO: 1498613 - DNA, 15 bp, Homo sapiens
ggggagggggatagg

SEQ ID NO: 1498614 - DNA, 15 bp, Homo sapiens
gggggagggggatag

SEQ ID NO: 1498615 - DNA, 15 bp, Homo sapiens
ggggggagggggata

SEQ ID NO: 1498616 - DNA, 15 bp, Homo sapiens
tggggggagggggat

SEQ ID NO: 1498617 - DNA, 15 bp, Homo sapiens
ctggggggaggggga

SEQ ID NO: 1498618 - DNA, 15 bp, Homo sapiens
gctggggggaggggg

SEQ ID NO: 1498619 - DNA, 15 bp, Homo sapiens
ggctggggggagggg

SEQ ID NO: 1498620 - DNA, 15 bp, Homo sapiens
aggctggggggaggg

SEQ ID NO: 1498621 - DNA, 15 bp, Homo sapiens
gaggctggggggagg

SEQ ID NO: 1498622 - DNA, 15 bp, Homo sapiens
ggaggctggggggag

SEQ ID NO: 1498623 - DNA, 15 bp, Homo sapiens
aggaggctgggggga

SEQ ID NO: 1498624 - DNA, 15 bp, Homo sapiens
aaggaggctgggggg

SEQ ID NO: 1498625 - DNA, 15 bp, Homo sapiens
caaggaggctggggg

SEQ ID NO: 1498626 - DNA, 15 bp, Homo sapiens
gcaaggaggctgggg

SEQ ID NO: 1498627 - DNA, 15 bp, Homo sapiens
ggcaaggaggctggg

SEQ ID NO: 1498628 - DNA, 15 bp, Homo sapiens
tggcaaggaggctgg

SEQ ID NO: 1498629 - DNA, 15 bp, Homo sapiens
ttggcaaggaggctg

SEQ ID NO: 1498630 - DNA, 15 bp, Homo sapiens
gttggcaaggaggct

SEQ ID NO: 1498631 - DNA, 15 bp, Homo sapiens
cgttggcaaggaggc

SEQ ID NO: 1498632 - DNA, 15 bp, Homo sapiens
gcgttggcaaggagg

SEQ ID NO: 1498633 - DNA, 15 bp, Homo sapiens
ggcgttggcaaggag

SEQ ID NO: 1498634 - DNA, 15 bp, Homo sapiens
gggcgttggcaagga

SEQ ID NO: 1498635 - DNA, 15 bp, Homo sapiens
ggggcgttggcaagg

SEQ ID NO: 1498636 - DNA, 15 bp, Homo sapiens
gggggcgttggcaag

SEQ ID NO: 1498637 - DNA, 15 bp, Homo sapiens
agggggcgttggcaa

SEQ ID NO: 1498638 - DNA, 15 bp, Homo sapiens
aagggggcgttggca

SEQ ID NO: 1498639 - DNA, 15 bp, Homo sapiens
aaagggggcgttggc

SEQ ID NO: 1498640 - DNA, 15 bp, Homo sapiens
gaaagggggcgttgg

SEQ ID NO: 1498641 - DNA, 15 bp, Homo sapiens
ggaaagggggcgttg

SEQ ID NO: 1498642 - DNA, 15 bp, Homo sapiens
gggaaagggggcgtt

SEQ ID NO: 1498643 - DNA, 15 bp, Homo sapiens
agggaaagggggcgt

SEQ ID NO: 1498644 - DNA, 15 bp, Homo sapiens
gagggaaagggggcg

SEQ ID NO: 1498645 - DNA, 15 bp, Homo sapiens
agagggaaagggggc

SEQ ID NO: 1498646 - DNA, 15 bp, Homo sapiens
gagagggaaaggggg

SEQ ID NO: 1498647 - DNA, 15 bp, Homo sapiens
gggagagggaaaggg

SEQ ID NO: 1498648 - DNA, 15 bp, Homo sapiens
ggggagagggaaagg

SEQ ID NO: 1498649 - DNA, 15 bp, Homo sapiens
gggggagagggaaag

SEQ ID NO: 1498650 - DNA, 15 bp, Homo sapiens
agggggagagggaaa

SEQ ID NO: 1498651 - DNA, 15 bp, Homo sapiens
gagggggagagggaa

SEQ ID NO: 1498652 - DNA, 15 bp, Homo sapiens
ggagggggagaggga

SEQ ID NO: 1498653 - DNA, 15 bp, Homo sapiens
gggagggggagaggg

SEQ ID NO: 1498654 - DNA, 15 bp, Homo sapiens
cgggagggggagagg

SEQ ID NO: 1498655 - DNA, 15 bp, Homo sapiens
gcgggagggggagag

SEQ ID NO: 1498656 - DNA, 15 bp, Homo sapiens
agcgggagggggaga

SEQ ID NO: 1498657 - DNA, 15 bp, Homo sapiens
gagcgggagggggag

SEQ ID NO: 1498658 - DNA, 15 bp, Homo sapiens
cgagcgggaggggga

SEQ ID NO: 1498659 - DNA, 15 bp, Homo sapiens
ccgagcgggaggggg

SEQ ID NO: 1498660 - DNA, 15 bp, Homo sapiens
gccgagcgggagggg

SEQ ID NO: 1498661 - DNA, 15 bp, Homo sapiens
cgccgagcgggaggg

SEQ ID NO: 1498662 - DNA, 15 bp, Homo sapiens
gcgccgagcgggagg

SEQ ID NO: 1498663 - DNA, 15 bp, Homo sapiens
agcgccgagcgggag

SEQ ID NO: 1498664 - DNA, 15 bp, Homo sapiens
cagcgccgagcggga

SEQ ID NO: 1498665 - DNA, 15 bp, Homo sapiens
tcagcgccgagcggg

SEQ ID NO: 1498666 - DNA, 15 bp, Homo sapiens
gtcagcgccgagcgg

SEQ ID NO: 1498667 - DNA, 15 bp, Homo sapiens
ggtcagcgccgagcg

SEQ ID NO: 1498668 - DNA, 15 bp, Homo sapiens
gggtcagcgccgagc

SEQ ID NO: 1498669 - DNA, 15 bp, Homo sapiens
ggggtcagcgccgag

SEQ ID NO: 1498670 - DNA, 15 bp, Homo sapiens
gggggtcagcgccga

SEQ ID NO: 1498671 - DNA, 15 bp, Homo sapiens
ggggggtcagcgccg

SEQ ID NO: 1498672 - DNA, 15 bp, Homo sapiens
tggggggtcagcgcc

SEQ ID NO: 1498673 - DNA, 15 bp, Homo sapiens
atggggggtcagcgc

SEQ ID NO: 1498674 - DNA, 15 bp, Homo sapiens
gatggggggtcagcg

SEQ ID NO: 1498675 - DNA, 15 bp, Homo sapiens
ggatggggggtcagc

SEQ ID NO: 1498676 - DNA, 15 bp, Homo sapiens
gggatggggggtcag

SEQ ID NO: 1498677 - DNA, 15 bp, Homo sapiens
ggggatggggggtca

SEQ ID NO: 1498678 - DNA, 15 bp, Homo sapiens
tggggatggggggtc

SEQ ID NO: 1498679 - DNA, 15 bp, Homo sapiens
gtggggatggggggt

SEQ ID NO: 1498680 - DNA, 15 bp, Homo sapiens
ggtggggatgggggg

SEQ ID NO: 1498681 - DNA, 15 bp, Homo sapiens
gggtggggatggggg

SEQ ID NO: 1498682 - DNA, 15 bp, Homo sapiens
ggggtggggatgggg

SEQ ID NO: 1498683 - DNA, 15 bp, Homo sapiens
gggggtggggatggg

SEQ ID NO: 1498684 - DNA, 15 bp, Homo sapiens
acgggggtggggatg

SEQ ID NO: 1498685 - DNA, 15 bp, Homo sapiens
cacgggggtggggat

SEQ ID NO: 1498686 - DNA, 15 bp, Homo sapiens
tgttcccacgggggt

SEQ ID NO: 1498687 - DNA, 15 bp, Homo sapiens
gtgttcccacggggg

SEQ ID NO: 1498688 - DNA, 15 bp, Homo sapiens
agtgttcccacgggg

SEQ ID NO: 1498689 - DNA, 15 bp, Homo sapiens
cagtgttcccacggg

SEQ ID NO: 1498690 - DNA, 15 bp, Homo sapiens
ccagtgttcccacgg

SEQ ID NO: 1498691 - DNA, 15 bp, Homo sapiens
cccagtgttcccacg

SEQ ID NO: 1498692 - DNA, 15 bp, Homo sapiens
tcccagtgttcccac

SEQ ID NO: 1498693 - DNA, 15 bp, Homo sapiens
ctcccagtgttccca

SEQ ID NO: 1498694 - DNA, 15 bp, Homo sapiens
gctcccagtgttccc

SEQ ID NO: 1498695 - DNA, 15 bp, Homo sapiens
ggctcccagtgttcc

SEQ ID NO: 1498696 - DNA, 15 bp, Homo sapiens
aggctcccagtgttc

SEQ ID NO: 1498697 - DNA, 15 bp, Homo sapiens
caggctcccagtgtt

SEQ ID NO: 1498698 - DNA, 15 bp, Homo sapiens
gcaggctcccagtgt

SEQ ID NO: 1498699 - DNA, 15 bp, Homo sapiens
tgcaggctcccagtg

SEQ ID NO: 1498700 - DNA, 15 bp, Homo sapiens
gtgcaggctcccagt

SEQ ID NO: 1498701 - DNA, 15 bp, Homo sapiens
tggagtgcaggctcc

SEQ ID NO: 1498702 - DNA, 15 bp, Homo sapiens
gtggagtgcaggctc

SEQ ID NO: 1498703 - DNA, 15 bp, Homo sapiens
tgtggagtgcaggct

SEQ ID NO: 1498704 - DNA, 15 bp, Homo sapiens
ctgtggagtgcaggc

SEQ ID NO: 1498705 - DNA, 15 bp, Homo sapiens
tctgtggagtgcagg

SEQ ID NO: 1498706 - DNA, 15 bp, Homo sapiens
gtctgtggagtgcag

SEQ ID NO: 1498707 - DNA, 15 bp, Homo sapiens
ggtctgtggagtgca

SEQ ID NO: 1498708 - DNA, 15 bp, Homo sapiens
gggtctgtggagtgc

SEQ ID NO: 1498709 - DNA, 15 bp, Homo sapiens
agggtctgtggagtg

SEQ ID NO: 1498710 - DNA, 15 bp, Homo sapiens
gagggtctgtggagt

SEQ ID NO: 1498711 - DNA, 15 bp, Homo sapiens
agagggtctgtggag

SEQ ID NO: 1498712 - DNA, 15 bp, Homo sapiens
gagagggtctgtgga

SEQ ID NO: 1498713 - DNA, 15 bp, Homo sapiens
aggagagggtctgtg

SEQ ID NO: 1498714 - DNA, 15 bp, Homo sapiens
aaggagagggtctgt

SEQ ID NO: 1498715 - DNA, 15 bp, Homo sapiens
caaggagagggtctg

SEQ ID NO: 1498716 - DNA, 15 bp, Homo sapiens
gcaaggagagggtct

SEQ ID NO: 1498717 - DNA, 15 bp, Homo sapiens
ggcaaggagagggtc

SEQ ID NO: 1498718 - DNA, 15 bp, Homo sapiens
aggcaaggagagggt

SEQ ID NO: 1498719 - DNA, 15 bp, Homo sapiens
aagaggcaaggagag

SEQ ID NO: 1498720 - DNA, 15 bp, Homo sapiens
gaagaggcaaggaga

SEQ ID NO: 1498721 - DNA, 15 bp, Homo sapiens
ggaagaggcaaggag

SEQ ID NO: 1498722 - DNA, 15 bp, Homo sapiens
gggaagaggcaagga

SEQ ID NO: 1498723 - DNA, 15 bp, Homo sapiens
agggaagaggcaagg

SEQ ID NO: 1498724 - DNA, 15 bp, Homo sapiens
gagggaagaggcaag

SEQ ID NO: 1498725 - DNA, 15 bp, Homo sapiens
tgagggaagaggcaa

SEQ ID NO: 1498726 - DNA, 15 bp, Homo sapiens
gtgagggaagaggca

SEQ ID NO: 1498727 - DNA, 15 bp, Homo sapiens
ggtgagggaagaggc

SEQ ID NO: 1498728 - DNA, 15 bp, Homo sapiens
aggtgagggaagagg

SEQ ID NO: 1498729 - DNA, 15 bp, Homo sapiens
gaggtgagggaagag

SEQ ID NO: 1498730 - DNA, 15 bp, Homo sapiens
tgaggtgagggaaga

SEQ ID NO: 1498731 - DNA, 15 bp, Homo sapiens
ctgaggtgagggaag

SEQ ID NO: 1498732 - DNA, 15 bp, Homo sapiens
gctgaggtgagggaa

SEQ ID NO: 1498733 - DNA, 15 bp, Homo sapiens
ggctgaggtgaggga

SEQ ID NO: 1498734 - DNA, 15 bp, Homo sapiens
aggctgaggtgaggg

SEQ ID NO: 1498735 - DNA, 15 bp, Homo sapiens
gaggctgaggtgagg

SEQ ID NO: 1498736 - DNA, 15 bp, Homo sapiens
cggaggctgaggtga

SEQ ID NO: 1498737 - DNA, 15 bp, Homo sapiens
gcggaggctgaggtg

SEQ ID NO: 1498738 - DNA, 15 bp, Homo sapiens
agcggaggctgaggt

SEQ ID NO: 1498739 - DNA, 15 bp, Homo sapiens
gagcggaggctgagg

SEQ ID NO: 1498740 - DNA, 15 bp, Homo sapiens
ggagcggaggctgag

SEQ ID NO: 1498741 - DNA, 15 bp, Homo sapiens
gggagcggaggctga

SEQ ID NO: 1498742 - DNA, 15 bp, Homo sapiens
ggggagcggaggctg

SEQ ID NO: 1498743 - DNA, 15 bp, Homo sapiens
cggggagcggaggct

SEQ ID NO: 1498744 - DNA, 15 bp, Homo sapiens
gcggggagcggaggc

SEQ ID NO: 1498745 - DNA, 15 bp, Homo sapiens
ggcggggagcggagg

SEQ ID NO: 1498746 - DNA, 15 bp, Homo sapiens
gggcggggagcggag

SEQ ID NO: 1498747 - DNA, 15 bp, Homo sapiens
agggcggggagcgga

SEQ ID NO: 1498748 - DNA, 15 bp, Homo sapiens
gagggcggggagcgg

SEQ ID NO: 1498749 - DNA, 15 bp, Homo sapiens
agagggcggggagcg

SEQ ID NO: 1498750 - DNA, 15 bp, Homo sapiens
aagagggcggggagc

SEQ ID NO: 1498751 - DNA, 15 bp, Homo sapiens
gaagagggcggggag

SEQ ID NO: 1498752 - DNA, 15 bp, Homo sapiens
ggaagagggcgggga

SEQ ID NO: 1498753 - DNA, 15 bp, Homo sapiens
gggaagagggcgggg

SEQ ID NO: 1498754 - DNA, 15 bp, Homo sapiens
cgggaagagggcggg

SEQ ID NO: 1498755 - DNA, 15 bp, Homo sapiens
ccgggaagagggcgg

SEQ ID NO: 1498756 - DNA, 15 bp, Homo sapiens
gccgggaagagggcg

SEQ ID NO: 1498757 - DNA, 15 bp, Homo sapiens
ggccgggaagagggc

SEQ ID NO: 1498758 - DNA, 15 bp, Homo sapiens
gggccgggaagaggg

SEQ ID NO: 1498759 - DNA, 15 bp, Homo sapiens
tgggccgggaagagg

SEQ ID NO: 1498760 - DNA, 15 bp, Homo sapiens
ctgggccgggaagag

SEQ ID NO: 1498761 - DNA, 15 bp, Homo sapiens
cctgggccgggaaga

SEQ ID NO: 1498762 - DNA, 15 bp, Homo sapiens
ccctgggccgggaag

SEQ ID NO: 1498763 - DNA, 15 bp, Homo sapiens
gccctgggccgggaa

SEQ ID NO: 1498764 - DNA, 15 bp, Homo sapiens
cgccctgggccggga

SEQ ID NO: 1498765 - DNA, 15 bp, Homo sapiens
gcgccctgggccggg

SEQ ID NO: 1498766 - DNA, 15 bp, Homo sapiens
ggcgccctgggccgg

SEQ ID NO: 1498767 - DNA, 15 bp, Homo sapiens
cggcgccctgggccg

SEQ ID NO: 1498768 - DNA, 15 bp, Homo sapiens
ccggcgccctgggcc

SEQ ID NO: 1498769 - DNA, 15 bp, Homo sapiens
gccggcgccctgggc

SEQ ID NO: 1498770 - DNA, 15 bp, Homo sapiens
ggccggcgccctggg

SEQ ID NO: 1498771 - DNA, 15 bp, Homo sapiens
gggccggcgccctgg

SEQ ID NO: 1498772 - DNA, 15 bp, Homo sapiens
tgggccggcgccctg

SEQ ID NO: 1498773 - DNA, 15 bp, Homo sapiens
gtgggccggcgccct

SEQ ID NO: 1498774 - DNA, 15 bp, Homo sapiens
ggtgggccggcgccc

SEQ ID NO: 1498775 - DNA, 15 bp, Homo sapiens
gggtgggccggcgcc

SEQ ID NO: 1498776 - DNA, 15 bp, Homo sapiens
agggtgggccggcgc

SEQ ID NO: 1498777 - DNA, 15 bp, Homo sapiens
aagggtgggccggcg

SEQ ID NO: 1498778 - DNA, 15 bp, Homo sapiens
gaagggtgggccggc

SEQ ID NO: 1498779 - DNA, 15 bp, Homo sapiens
ggaagggtgggccgg

SEQ ID NO: 1498780 - DNA, 15 bp, Homo sapiens
gggaagggtgggccg

SEQ ID NO: 1498781 - DNA, 15 bp, Homo sapiens
agggaagggtgggcc

SEQ ID NO: 1498782 - DNA, 15 bp, Homo sapiens
gagggaagggtgggc

SEQ ID NO: 1498783 - DNA, 15 bp, Homo sapiens
ggagggaagggtggg

SEQ ID NO: 1498784 - DNA, 15 bp, Homo sapiens
cggagggaagggtgg

SEQ ID NO: 1498785 - DNA, 15 bp, Homo sapiens
gcggagggaagggtg

SEQ ID NO: 1498786 - DNA, 15 bp, Homo sapiens
ggcggagggaagggt

SEQ ID NO: 1498787 - DNA, 15 bp, Homo sapiens
cggcggagggaaggg

SEQ ID NO: 1498788 - DNA, 15 bp, Homo sapiens
gcggcggagggaagg

SEQ ID NO: 1498789 - DNA, 15 bp, Homo sapiens
ggcggcggagggaag

SEQ ID NO: 1498790 - DNA, 15 bp, Homo sapiens
gggcggcggagggaa

SEQ ID NO: 1498791 - DNA, 15 bp, Homo sapiens
ggggcggcggaggga

SEQ ID NO: 1498792 - DNA, 15 bp, Homo sapiens
gggggcggcggaggg

SEQ ID NO: 1498793 - DNA, 15 bp, Homo sapiens
ggggggcggcggagg

SEQ ID NO: 1498794 - DNA, 15 bp, Homo sapiens
cggggggcggcggag

SEQ ID NO: 1498795 - DNA, 15 bp, Homo sapiens
ccggggggcggcgga

SEQ ID NO: 1498796 - DNA, 15 bp, Homo sapiens
gccggggggcggcgg

SEQ ID NO: 1498797 - DNA, 15 bp, Homo sapiens
ggccggggggcggcg

SEQ ID NO: 1498798 - DNA, 15 bp, Homo sapiens
cggccggggggcggc

SEQ ID NO: 1498799 - DNA, 15 bp, Homo sapiens
gcggccggggggcgg

SEQ ID NO: 1498800 - DNA, 15 bp, Homo sapiens
cgcggccggggggcg

SEQ ID NO: 1498801 - DNA, 15 bp, Homo sapiens
ccgcggccggggggc

SEQ ID NO: 1498802 - DNA, 15 bp, Homo sapiens
cccgcggccgggggg

SEQ ID NO: 1498803 - DNA, 15 bp, Homo sapiens
ccccgcggccggggg

SEQ ID NO: 1498804 - DNA, 15 bp, Homo sapiens
tccccgcggccgggg

SEQ ID NO: 1498805 - DNA, 15 bp, Homo sapiens
ctccccgcggccggg

SEQ ID NO: 1498806 - DNA, 15 bp, Homo sapiens
cctccccgcggccgg

SEQ ID NO: 1498807 - DNA, 15 bp, Homo sapiens
tcctccccgcggccg

SEQ ID NO: 1498808 - DNA, 15 bp, Homo sapiens
gtcctccccgcggcc

SEQ ID NO: 1498809 - DNA, 15 bp, Homo sapiens
tgtcctccccgcggc

SEQ ID NO: 1498810 - DNA, 15 bp, Homo sapiens
atgtcctccccgcgg

SEQ ID NO: 1498811 - DNA, 15 bp, Homo sapiens
catgtcctccccgcg

SEQ ID NO: 1498812 - DNA, 15 bp, Homo sapiens
ccatgtcctccccgc

SEQ ID NO: 1498813 - DNA, 15 bp, Homo sapiens
gccatgtcctccccg

SEQ ID NO: 1498814 - DNA, 15 bp, Homo sapiens
ggccatgtcctcccc

SEQ ID NO: 1498815 - DNA, 15 bp, Homo sapiens
cggccatgtcctccc

SEQ ID NO: 1498816 - DNA, 15 bp, Homo sapiens
gcggccatgtcctcc

SEQ ID NO: 1498817 - DNA, 15 bp, Homo sapiens
cgcggccatgtcctc

SEQ ID NO: 1498818 - DNA, 15 bp, Homo sapiens
gcgcggccatgtcct

SEQ ID NO: 1498819 - DNA, 15 bp, Homo sapiens
tgcgcggccatgtcc

SEQ ID NO: 1498820 - DNA, 15 bp, Homo sapiens
gtgcgcggccatgtc

SEQ ID NO: 1498821 - DNA, 15 bp, Homo sapiens
tgtgcgcggccatgt

SEQ ID NO: 1498822 - DNA, 15 bp, Homo sapiens
ctgtgcgcggccatg

SEQ ID NO: 1498823 - DNA, 15 bp, Homo sapiens
cctgtgcgcggccat

SEQ ID NO: 1498824 - DNA, 15 bp, Homo sapiens
gcctgtgcgcggcca

SEQ ID NO: 1498825 - DNA, 15 bp, Homo sapiens
ggcctgtgcgcggcc

SEQ ID NO: 1498826 - DNA, 15 bp, Homo sapiens
cggcctgtgcgcggc

SEQ ID NO: 1498827 - DNA, 15 bp, Homo sapiens
ccggcctgtgcgcgg

SEQ ID NO: 1498828 - DNA, 15 bp, Homo sapiens
accggcctgtgcgcg

SEQ ID NO: 1498829 - DNA, 15 bp, Homo sapiens
caccggcctgtgcgc

SEQ ID NO: 1498830 - DNA, 15 bp, Homo sapiens
ccaccggcctgtgcg

SEQ ID NO: 1498831 - DNA, 15 bp, Homo sapiens
tccaccggcctgtgc

SEQ ID NO: 1498832 - DNA, 15 bp, Homo sapiens
ttccaccggcctgtg

SEQ ID NO: 1498833 - DNA, 15 bp, Homo sapiens
attccaccggcctgt

SEQ ID NO: 1498834 - DNA, 15 bp, Homo sapiens
cattccaccggcctg

SEQ ID NO: 1498835 - DNA, 15 bp, Homo sapiens
ccattccaccggcct

SEQ ID NO: 1498836 - DNA, 15 bp, Homo sapiens
cccattccaccggcc

SEQ ID NO: 1498837 - DNA, 15 bp, Homo sapiens
acccattccaccggc

SEQ ID NO: 1498838 - DNA, 15 bp, Homo sapiens
gacccattccaccgg

SEQ ID NO: 1498839 - DNA, 15 bp, Homo sapiens
ggacccattccaccg

SEQ ID NO: 1498840 - DNA, 15 bp, Homo sapiens
tggacccattccacc

SEQ ID NO: 1498841 - DNA, 15 bp, Homo sapiens
ctggacccattccac

SEQ ID NO: 1498842 - DNA, 15 bp, Homo sapiens
cctggacccattcca

SEQ ID NO: 1498843 - DNA, 15 bp, Homo sapiens
gcctggacccattcc

SEQ ID NO: 1498844 - DNA, 15 bp, Homo sapiens
ggcctggacccattc

SEQ ID NO: 1498845 - DNA, 15 bp, Homo sapiens
cggcctggacccatt

SEQ ID NO: 1498846 - DNA, 15 bp, Homo sapiens
acggcctggacccat

SEQ ID NO: 1498847 - DNA, 15 bp, Homo sapiens
cacggcctggaccca

SEQ ID NO: 1498848 - DNA, 15 bp, Homo sapiens
ccacggcctggaccc

SEQ ID NO: 1498849 - DNA, 15 bp, Homo sapiens
accacggcctggacc

SEQ ID NO: 1498850 - DNA, 15 bp, Homo sapiens
gaccacggcctggac

SEQ ID NO: 1498851 - DNA, 15 bp, Homo sapiens
tgaccacggcctgga

SEQ ID NO: 1498852 - DNA, 15 bp, Homo sapiens
ctgaccacggcctgg

SEQ ID NO: 1498853 - DNA, 15 bp, Homo sapiens
gctgaccacggcctg

SEQ ID NO: 1498854 - DNA, 15 bp, Homo sapiens
ggctgaccacggcct

SEQ ID NO: 1498855 - DNA, 15 bp, Homo sapiens
cggctgaccacggcc

SEQ ID NO: 1498856 - DNA, 15 bp, Homo sapiens
gcggctgaccacggc

SEQ ID NO: 1498857 - DNA, 15 bp, Homo sapiens
agcggctgaccacgg

SEQ ID NO: 1498858 - DNA, 15 bp, Homo sapiens
aagcggctgaccacg

SEQ ID NO: 1498859 - DNA, 15 bp, Homo sapiens
gaagcggctgaccac

SEQ ID NO: 1498860 - DNA, 15 bp, Homo sapiens
cgaagcggctgacca

SEQ ID NO: 1498861 - DNA, 15 bp, Homo sapiens
tcgaagcggctgacc

SEQ ID NO: 1498862 - DNA, 15 bp, Homo sapiens
gtcgaagcggctgac

SEQ ID NO: 1498863 - DNA, 15 bp, Homo sapiens
cgtcgaagcggctga

SEQ ID NO: 1498864 - DNA, 15 bp, Homo sapiens
tcgtcgaagcggctg

SEQ ID NO: 1498865 - DNA, 15 bp, Homo sapiens
ctcgtcgaagcggct

SEQ ID NO: 1498866 - DNA, 15 bp, Homo sapiens
gctcgtcgaagcggc

SEQ ID NO: 1498867 - DNA, 15 bp, Homo sapiens
tgctcgtcgaagcgg

SEQ ID NO: 1498868 - DNA, 15 bp, Homo sapiens
ctgctcgtcgaagcg

SEQ ID NO: 1498869 - DNA, 15 bp, Homo sapiens
cctgctcgtcgaagc

SEQ ID NO: 1498870 - DNA, 15 bp, Homo sapiens
acctgctcgtcgaag

SEQ ID NO: 1498871 - DNA, 15 bp, Homo sapiens
tacctgctcgtcgaa

SEQ ID NO: 1498872 - DNA, 15 bp, Homo sapiens
ttacctgctcgtcga

SEQ ID NO: 1498873 - DNA, 15 bp, Homo sapiens
gttacctgctcgtcg

SEQ ID NO: 1498874 - DNA, 15 bp, Homo sapiens
ggttacctgctcgtc

SEQ ID NO: 1498875 - DNA, 15 bp, Homo sapiens
cggttacctgctcgt

SEQ ID NO: 1498876 - DNA, 15 bp, Homo sapiens
ccggttacctgctcg

SEQ ID NO: 1498877 - DNA, 15 bp, Homo sapiens
gccggttacctgctc

SEQ ID NO: 1498878 - DNA, 15 bp, Homo sapiens
ggccggttacctgct

SEQ ID NO: 1498879 - DNA, 15 bp, Homo sapiens
gggccggttacctgc

SEQ ID NO: 1498880 - DNA, 15 bp, Homo sapiens
cgggccggttacctg

SEQ ID NO: 1498881 - DNA, 15 bp, Homo sapiens
acgggccggttacct

SEQ ID NO: 1498882 - DNA, 15 bp, Homo sapiens
cacgggccggttacc

SEQ ID NO: 1498883 - DNA, 15 bp, Homo sapiens
ccacgggccggttac

SEQ ID NO: 1498884 - DNA, 15 bp, Homo sapiens
gccacgggccggtta

SEQ ID NO: 1498885 - DNA, 15 bp, Homo sapiens
cgccacgggccggtt

SEQ ID NO: 1498886 - DNA, 15 bp, Homo sapiens
ccgccacgggccggt

SEQ ID NO: 1498887 - DNA, 15 bp, Homo sapiens
cccgccacgggccgg

SEQ ID NO: 1498888 - DNA, 15 bp, Homo sapiens
gcccgccacgggccg

SEQ ID NO: 1498889 - DNA, 15 bp, Homo sapiens
cgcccgccacgggcc

SEQ ID NO: 1498890 - DNA, 15 bp, Homo sapiens
ccgcccgccacgggc

SEQ ID NO: 1498891 - DNA, 15 bp, Homo sapiens
cccgcccgccacggg

SEQ ID NO: 1498892 - DNA, 15 bp, Homo sapiens
tcccgcccgccacgg

SEQ ID NO: 1498893 - DNA, 15 bp, Homo sapiens
ctcccgcccgccacg

SEQ ID NO: 1498894 - DNA, 15 bp, Homo sapiens
cctcccgcccgccac

SEQ ID NO: 1498895 - DNA, 15 bp, Homo sapiens
acctcccgcccgcca

SEQ ID NO: 1498896 - DNA, 15 bp, Homo sapiens
cacctcccgcccgcc

SEQ ID NO: 1498897 - DNA, 15 bp, Homo sapiens
ccacctcccgcccgc

SEQ ID NO: 1498898 - DNA, 15 bp, Homo sapiens
cccacctcccgcccg

SEQ ID NO: 1498899 - DNA, 15 bp, Homo sapiens
tcccacctcccgccc

SEQ ID NO: 1498900 - DNA, 15 bp, Homo sapiens
ctcccacctcccgcc

SEQ ID NO: 1498901 - DNA, 15 bp, Homo sapiens
gctcccacctcccgc

SEQ ID NO: 1498902 - DNA, 15 bp, Homo sapiens
cgctcccacctcccg

SEQ ID NO: 1498903 - DNA, 15 bp, Homo sapiens
ccgctcccacctccc

SEQ ID NO: 1498904 - DNA, 15 bp, Homo sapiens
tccgctcccacctcc

SEQ ID NO: 1498905 - DNA, 15 bp, Homo sapiens
ctccgctcccacctc

SEQ ID NO: 1498906 - DNA, 15 bp, Homo sapiens
actccgctcccacct

SEQ ID NO: 1498907 - DNA, 15 bp, Homo sapiens
cactccgctcccacc

SEQ ID NO: 1498908 - DNA, 15 bp, Homo sapiens
ccactccgctcccac

SEQ ID NO: 1498909 - DNA, 15 bp, Homo sapiens
cccactccgctccca

SEQ ID NO: 1498910 - DNA, 15 bp, Homo sapiens
ccccactccgctccc

SEQ ID NO: 1498911 - DNA, 15 bp, Homo sapiens
cccccactccgctcc

SEQ ID NO: 1498912 - DNA, 15 bp, Homo sapiens
acccccactccgctc

SEQ ID NO: 1498913 - DNA, 15 bp, Homo sapiens
cacccccactccgct

SEQ ID NO: 1498914 - DNA, 15 bp, Homo sapiens
ccacccccactccgc

SEQ ID NO: 1498915 - DNA, 15 bp, Homo sapiens
cccacccccactccg

SEQ ID NO: 1498916 - DNA, 15 bp, Homo sapiens
ccccacccccactcc

SEQ ID NO: 1498917 - DNA, 15 bp, Homo sapiens
tccccacccccactc

SEQ ID NO: 1498918 - DNA, 15 bp, Homo sapiens
gtccccacccccact

SEQ ID NO: 1498919 - DNA, 15 bp, Homo sapiens
tgtccccacccccac

SEQ ID NO: 1498920 - DNA, 15 bp, Homo sapiens
ctgtccccaccccca

SEQ ID NO: 1498921 - DNA, 15 bp, Homo sapiens
tctgtccccaccccc

SEQ ID NO: 1498922 - DNA, 15 bp, Homo sapiens
ctctgtccccacccc

SEQ ID NO: 1498923 - DNA, 15 bp, Homo sapiens
actctgtccccaccc

SEQ ID NO: 1498924 - DNA, 15 bp, Homo sapiens
tactctgtccccacc

SEQ ID NO: 1498925 - DNA, 15 bp, Homo sapiens
ctactctgtccccac

SEQ ID NO: 1498926 - DNA, 15 bp, Homo sapiens
cctactctgtcccca

SEQ ID NO: 1498927 - DNA, 15 bp, Homo sapiens
acctactctgtcccc

SEQ ID NO: 1498928 - DNA, 15 bp, Homo sapiens
cacctactctgtccc

SEQ ID NO: 1498929 - DNA, 15 bp, Homo sapiens
tcacctactctgtcc

SEQ ID NO: 1498930 - DNA, 15 bp, Homo sapiens
ctcacctactctgtc

SEQ ID NO: 1498931 - DNA, 15 bp, Homo sapiens
cctcacctactctgt

SEQ ID NO: 1498932 - DNA, 15 bp, Homo sapiens
ccctcacctactctg

SEQ ID NO: 1498933 - DNA, 15 bp, Homo sapiens
cccctcacctactct

SEQ ID NO: 1498934 - DNA, 15 bp, Homo sapiens
tcccctcacctactc

SEQ ID NO: 1498935 - DNA, 15 bp, Homo sapiens
ctcccctcacctact

SEQ ID NO: 1498936 - DNA, 15 bp, Homo sapiens
cctcccctcacctac

SEQ ID NO: 1498937 - DNA, 15 bp, Homo sapiens
acctcccctcaccta

SEQ ID NO: 1498938 - DNA, 15 bp, Homo sapiens
tacctcccctcacct

SEQ ID NO: 1498939 - DNA, 15 bp, Homo sapiens
ctacctcccctcacc

SEQ ID NO: 1498940 - DNA, 15 bp, Homo sapiens
cctacctcccctcac

SEQ ID NO: 1498941 - DNA, 15 bp, Homo sapiens
tcctacctcccctca

SEQ ID NO: 1498942 - DNA, 15 bp, Homo sapiens
ctcctacctcccctc

SEQ ID NO: 1498943 - DNA, 15 bp, Homo sapiens
gctcctacctcccct

SEQ ID NO: 1498944 - DNA, 15 bp, Homo sapiens
cgctcctacctcccc

SEQ ID NO: 1498945 - DNA, 15 bp, Homo sapiens
ccgctcctacctccc

SEQ ID NO: 1498946 - DNA, 15 bp, Homo sapiens
gccgctcctacctcc

SEQ ID NO: 1498947 - DNA, 15 bp, Homo sapiens
ggccgctcctacctc

SEQ ID NO: 1498948 - DNA, 15 bp, Homo sapiens
cggccgctcctacct

SEQ ID NO: 1498949 - DNA, 15 bp, Homo sapiens
gcggccgctcctacc

SEQ ID NO: 1498950 - DNA, 15 bp, Homo sapiens
ggcggccgctcctac

SEQ ID NO: 1498951 - DNA, 15 bp, Homo sapiens
aggcggccgctccta

SEQ ID NO: 1498952 - DNA, 15 bp, Homo sapiens
gaggcggccgctcct

SEQ ID NO: 1498953 - DNA, 15 bp, Homo sapiens
ggaggcggccgctcc

SEQ ID NO: 1498954 - DNA, 15 bp, Homo sapiens
gggaggcggccgctc

SEQ ID NO: 1498955 - DNA, 15 bp, Homo sapiens
ggggaggcggccgct

SEQ ID NO: 1498956 - DNA, 15 bp, Homo sapiens
gggggaggcggccgc

SEQ ID NO: 1498957 - DNA, 15 bp, Homo sapiens
cgggggaggcggccg

SEQ ID NO: 1498958 - DNA, 15 bp, Homo sapiens
gcgggggaggcggcc

SEQ ID NO: 1498959 - DNA, 15 bp, Homo sapiens
cgcgggggaggcggc

SEQ ID NO: 1498960 - DNA, 15 bp, Homo sapiens
ccgcgggggaggcgg

SEQ ID NO: 1498961 - DNA, 15 bp, Homo sapiens
gccgcgggggaggcg

SEQ ID NO: 1498962 - DNA, 15 bp, Homo sapiens
agccgcgggggaggc

SEQ ID NO: 1498963 - DNA, 15 bp, Homo sapiens
cagccgcgggggagg

SEQ ID NO: 1498964 - DNA, 15 bp, Homo sapiens
gcagccgcgggggag

SEQ ID NO: 1498965 - DNA, 15 bp, Homo sapiens
ggcagccgcggggga

SEQ ID NO: 1498966 - DNA, 15 bp, Homo sapiens
aggcagccgcggggg

SEQ ID NO: 1498967 - DNA, 15 bp, Homo sapiens
gaggcagccgcgggg

SEQ ID NO: 1498968 - DNA, 15 bp, Homo sapiens
tgaggcagccgcggg

SEQ ID NO: 1498969 - DNA, 15 bp, Homo sapiens
ctgaggcagccgcgg

SEQ ID NO: 1498970 - DNA, 15 bp, Homo sapiens
cctgaggcagccgcg

SEQ ID NO: 1498971 - DNA, 15 bp, Homo sapiens
gcctgaggcagccgc

SEQ ID NO: 1498972 - DNA, 15 bp, Homo sapiens
agcctgaggcagccg

SEQ ID NO: 1498973 - DNA, 15 bp, Homo sapiens
gagcctgaggcagcc

SEQ ID NO: 1498974 - DNA, 15 bp, Homo sapiens
agagcctgaggcagc

SEQ ID NO: 1498975 - DNA, 15 bp, Homo sapiens
cagagcctgaggcag

SEQ ID NO: 1498976 - DNA, 15 bp, Homo sapiens
ccagagcctgaggca

SEQ ID NO: 1498977 - DNA, 15 bp, Homo sapiens
tccagagcctgaggc

SEQ ID NO: 1498978 - DNA, 15 bp, Homo sapiens
ctccagagcctgagg

SEQ ID NO: 1498979 - DNA, 15 bp, Homo sapiens
cctccagagcctgag

SEQ ID NO: 1498980 - DNA, 15 bp, Homo sapiens
tcctccagagcctga

SEQ ID NO: 1498981 - DNA, 15 bp, Homo sapiens
ttcctccagagcctg

SEQ ID NO: 1498982 - DNA, 15 bp, Homo sapiens
tttcctccagagcct

SEQ ID NO: 1498983 - DNA, 15 bp, Homo sapiens
ctttcctccagagcc

SEQ ID NO: 1498984 - DNA, 15 bp, Homo sapiens
cctttcctccagagc

SEQ ID NO: 1498985 - DNA, 15 bp, Homo sapiens
tcctttcctccagag

SEQ ID NO: 1498986 - DNA, 15 bp, Homo sapiens
ttcctttcctccaga

SEQ ID NO: 1498987 - DNA, 15 bp, Homo sapiens
cttcctttcctccag

SEQ ID NO: 1498988 - DNA, 15 bp, Homo sapiens
ccttcctttcctcca

SEQ ID NO: 1498989 - DNA, 15 bp, Homo sapiens
cccttcctttcctcc

SEQ ID NO: 1498990 - DNA, 15 bp, Homo sapiens
tcccttcctttcctc

SEQ ID NO: 1498991 - DNA, 15 bp, Homo sapiens
ttcccttcctttcct

SEQ ID NO: 1498992 - DNA, 15 bp, Homo sapiens
cttcccttcctttcc

SEQ ID NO: 1498993 - DNA, 15 bp, Homo sapiens
ccttcccttcctttc

SEQ ID NO: 1498994 - DNA, 15 bp, Homo sapiens
cccttcccttccttt

SEQ ID NO: 1498995 - DNA, 15 bp, Homo sapiens
tcccttcccttcctt

SEQ ID NO: 1498996 - DNA, 15 bp, Homo sapiens
ttcccttcccttcct

SEQ ID NO: 1498997 - DNA, 15 bp, Homo sapiens
cttcccttcccttcc

SEQ ID NO: 1498998 - DNA, 15 bp, Homo sapiens
tcttcccttcccttc

SEQ ID NO: 1498999 - DNA, 15 bp, Homo sapiens
ctcttcccttccctt

SEQ ID NO: 1499000 - DNA, 15 bp, Homo sapiens
tctcttcccttccct

SEQ ID NO: 1499001 - DNA, 15 bp, Homo sapiens
ttctcttcccttccc

SEQ ID NO: 1499002 - DNA, 15 bp, Homo sapiens
cttctcttcccttcc

SEQ ID NO: 1499003 - DNA, 15 bp, Homo sapiens
ccttctcttcccttc

SEQ ID NO: 1499004 - DNA, 15 bp, Homo sapiens
cccttctcttccctt

SEQ ID NO: 1499005 - DNA, 15 bp, Homo sapiens
tcccttctcttccct

SEQ ID NO: 1499006 - DNA, 15 bp, Homo sapiens
ttcccttctcttccc

SEQ ID NO: 1499007 - DNA, 15 bp, Homo sapiens
cttcccttctcttcc

SEQ ID NO: 1499008 - DNA, 15 bp, Homo sapiens
ccttcccttctcttc

SEQ ID NO: 1499009 - DNA, 15 bp, Homo sapiens
cccttcccttctctt

SEQ ID NO: 1499010 - DNA, 15 bp, Homo sapiens
ccccttcccttctct

SEQ ID NO: 1499011 - DNA, 15 bp, Homo sapiens
cccccttcccttctc

SEQ ID NO: 1499012 - DNA, 15 bp, Homo sapiens
ccccccttcccttct

SEQ ID NO: 1499013 - DNA, 15 bp, Homo sapiens
tccccccttcccttc

SEQ ID NO: 1499014 - DNA, 15 bp, Homo sapiens
atccccccttccctt

SEQ ID NO: 1499015 - DNA, 15 bp, Homo sapiens
tatccccccttccct

SEQ ID NO: 1499016 - DNA, 15 bp, Homo sapiens
ttatccccccttccc

SEQ ID NO: 1499017 - DNA, 15 bp, Homo sapiens
cttatccccccttcc

SEQ ID NO: 1499018 - DNA, 15 bp, Homo sapiens
acttatccccccttc

SEQ ID NO: 1499019 - DNA, 15 bp, Homo sapiens
cacttatcccccctt

SEQ ID NO: 1499020 - DNA, 15 bp, Homo sapiens
ccacttatcccccct

SEQ ID NO: 1499021 - DNA, 15 bp, Homo sapiens
cccacttatcccccc

SEQ ID NO: 1499022 - DNA, 15 bp, Homo sapiens
ccccacttatccccc

SEQ ID NO: 1499023 - DNA, 15 bp, Homo sapiens
cccccacttatcccc

SEQ ID NO: 1499024 - DNA, 15 bp, Homo sapiens
acccccacttatccc

SEQ ID NO: 1499025 - DNA, 15 bp, Homo sapiens
cacccccacttatcc

SEQ ID NO: 1499026 - DNA, 15 bp, Homo sapiens
ccacccccacttatc

SEQ ID NO: 1499027 - DNA, 15 bp, Homo sapiens
ggccacccccactta

SEQ ID NO: 1499028 - DNA, 15 bp, Homo sapiens
tggccacccccactt

SEQ ID NO: 1499029 - DNA, 15 bp, Homo sapiens
ttggccacccccact

SEQ ID NO: 1499030 - DNA, 15 bp, Homo sapiens
cttggccacccccac

SEQ ID NO: 1499031 - DNA, 15 bp, Homo sapiens
ccttggccaccccca

SEQ ID NO: 1499032 - DNA, 15 bp, Homo sapiens
gccttggccaccccc

SEQ ID NO: 1499033 - DNA, 15 bp, Homo sapiens
cgccttggccacccc

SEQ ID NO: 1499034 - DNA, 15 bp, Homo sapiens
ccgccttggccaccc

SEQ ID NO: 1499035 - DNA, 15 bp, Homo sapiens
cccgccttggccacc

SEQ ID NO: 1499036 - DNA, 15 bp, Homo sapiens
tcccgccttggccac

SEQ ID NO: 1499037 - DNA, 15 bp, Homo sapiens
ctcccgccttggcca

SEQ ID NO: 1499038 - DNA, 15 bp, Homo sapiens
cctcccgccttggcc

SEQ ID NO: 1499039 - DNA, 15 bp, Homo sapiens
acctcccgccttggc

SEQ ID NO: 1499040 - DNA, 15 bp, Homo sapiens
cacctcccgccttgg

SEQ ID NO: 1499041 - DNA, 15 bp, Homo sapiens
tcacctcccgccttg

SEQ ID NO: 1499042 - DNA, 15 bp, Homo sapiens
ctcacctcccgcctt

SEQ ID NO: 1499043 - DNA, 15 bp, Homo sapiens
cctcacctcccgcct

SEQ ID NO: 1499044 - DNA, 15 bp, Homo sapiens
ccctcacctcccgcc

SEQ ID NO: 1499045 - DNA, 15 bp, Homo sapiens
cccctcacctcccgc

SEQ ID NO: 1499046 - DNA, 15 bp, Homo sapiens
acccctcacctcccg

SEQ ID NO: 1499047 - DNA, 15 bp, Homo sapiens
tacccctcacctccc

SEQ ID NO: 1499048 - DNA, 15 bp, Homo sapiens
ctacccctcacctcc

SEQ ID NO: 1499049 - DNA, 15 bp, Homo sapiens
cctacccctcacctc

SEQ ID NO: 1499050 - DNA, 15 bp, Homo sapiens
tcctacccctcacct

SEQ ID NO: 1499051 - DNA, 15 bp, Homo sapiens
ctcctacccctcacc

SEQ ID NO: 1499052 - DNA, 15 bp, Homo sapiens
cctcctacccctcac

SEQ ID NO: 1499053 - DNA, 15 bp, Homo sapiens
ccctcctacccctca

SEQ ID NO: 1499054 - DNA, 15 bp, Homo sapiens
cccctcctacccctc

SEQ ID NO: 1499055 - DNA, 15 bp, Homo sapiens
tcccctcctacccct

SEQ ID NO: 1499056 - DNA, 15 bp, Homo sapiens
gtcccctcctacccc

SEQ ID NO: 1499057 - DNA, 15 bp, Homo sapiens
tgtcccctcctaccc

SEQ ID NO: 1499058 - DNA, 15 bp, Homo sapiens
ctgtcccctcctacc

SEQ ID NO: 1499059 - DNA, 15 bp, Homo sapiens
gctgtcccctcctac

SEQ ID NO: 1499060 - DNA, 15 bp, Homo sapiens
agctgtcccctccta

SEQ ID NO: 1499061 - DNA, 15 bp, Homo sapiens
cagctgtcccctcct

SEQ ID NO: 1499062 - DNA, 15 bp, Homo sapiens
ccagctgtcccctcc

SEQ ID NO: 1499063 - DNA, 15 bp, Homo sapiens
cccagctgtcccctc

SEQ ID NO: 1499064 - DNA, 15 bp, Homo sapiens
tcccagctgtcccct

SEQ ID NO: 1499065 - DNA, 15 bp, Homo sapiens
ctcccagctgtcccc

SEQ ID NO: 1499066 - DNA, 15 bp, Homo sapiens
gctcccagctgtccc

SEQ ID NO: 1499067 - DNA, 15 bp, Homo sapiens
agctcccagctgtcc

SEQ ID NO: 1499068 - DNA, 15 bp, Homo sapiens
aagctcccagctgtc

SEQ ID NO: 1499069 - DNA, 15 bp, Homo sapiens
caagctcccagctgt

SEQ ID NO: 1499070 - DNA, 15 bp, Homo sapiens
ccaagctcccagctg

SEQ ID NO: 1499071 - DNA, 15 bp, Homo sapiens
cccaagctcccagct

SEQ ID NO: 1499072 - DNA, 15 bp, Homo sapiens
gcccaagctcccagc

SEQ ID NO: 1499073 - DNA, 15 bp, Homo sapiens
tgcccaagctcccag

SEQ ID NO: 1499074 - DNA, 15 bp, Homo sapiens
gtgcccaagctccca

SEQ ID NO: 1499075 - DNA, 15 bp, Homo sapiens
ggtgcccaagctccc

SEQ ID NO: 1499076 - DNA, 15 bp, Homo sapiens
gggtgcccaagctcc

SEQ ID NO: 1499077 - DNA, 15 bp, Homo sapiens
agggtgcccaagctc

SEQ ID NO: 1499078 - DNA, 15 bp, Homo sapiens
aagggtgcccaagct

SEQ ID NO: 1499079 - DNA, 15 bp, Homo sapiens
aaagggtgcccaagc

SEQ ID NO: 1499080 - DNA, 15 bp, Homo sapiens
gaaagggtgcccaag

SEQ ID NO: 1499081 - DNA, 15 bp, Homo sapiens
ggaaagggtgcccaa

SEQ ID NO: 1499082 - DNA, 15 bp, Homo sapiens
gggaaagggtgccca

SEQ ID NO: 1499083 - DNA, 15 bp, Homo sapiens
agggaaagggtgccc

SEQ ID NO: 1499084 - DNA, 15 bp, Homo sapiens
gagggaaagggtgcc

SEQ ID NO: 1499085 - DNA, 15 bp, Homo sapiens
ggagggaaagggtgc

SEQ ID NO: 1499086 - DNA, 15 bp, Homo sapiens
aggagggaaagggtg

SEQ ID NO: 1499087 - DNA, 15 bp, Homo sapiens
taggagggaaagggt

SEQ ID NO: 1499088 - DNA, 15 bp, Homo sapiens
ttaggagggaaaggg

SEQ ID NO: 1499089 - DNA, 15 bp, Homo sapiens
cttaggagggaaagg

SEQ ID NO: 1499090 - DNA, 15 bp, Homo sapiens
acttaggagggaaag

SEQ ID NO: 1499091 - DNA, 15 bp, Homo sapiens
gacttaggagggaaa

SEQ ID NO: 1499092 - DNA, 15 bp, Homo sapiens
cgacttaggagggaa

SEQ ID NO: 1499093 - DNA, 15 bp, Homo sapiens
ccgacttaggaggga

SEQ ID NO: 1499094 - DNA, 15 bp, Homo sapiens
cccgacttaggaggg

SEQ ID NO: 1499095 - DNA, 15 bp, Homo sapiens
ccccgacttaggagg

SEQ ID NO: 1499096 - DNA, 15 bp, Homo sapiens
cccccgacttaggag

SEQ ID NO: 1499097 - DNA, 15 bp, Homo sapiens
ccccccgacttagga

SEQ ID NO: 1499098 - DNA, 15 bp, Homo sapiens
accccccgacttagg

SEQ ID NO: 1499099 - DNA, 15 bp, Homo sapiens
caccccccgacttag

SEQ ID NO: 1499100 - DNA, 15 bp, Homo sapiens
ccaccccccgactta

SEQ ID NO: 1499101 - DNA, 15 bp, Homo sapiens
cccaccccccgactt

SEQ ID NO: 1499102 - DNA, 15 bp, Homo sapiens
ccccaccccccgact

SEQ ID NO: 1499103 - DNA, 15 bp, Homo sapiens
gccccaccccccgac

SEQ ID NO: 1499104 - DNA, 15 bp, Homo sapiens
ggccccaccccccga

SEQ ID NO: 1499105 - DNA, 15 bp, Homo sapiens
aggccccaccccccg

SEQ ID NO: 1499106 - DNA, 15 bp, Homo sapiens
aaggccccacccccc

SEQ ID NO: 1499107 - DNA, 15 bp, Homo sapiens
caaggccccaccccc

SEQ ID NO: 1499108 - DNA, 15 bp, Homo sapiens
acaaggccccacccc

SEQ ID NO: 1499109 - DNA, 15 bp, Homo sapiens
gacaaggccccaccc

SEQ ID NO: 1499110 - DNA, 15 bp, Homo sapiens
ggacaaggccccacc

SEQ ID NO: 1499111 - DNA, 15 bp, Homo sapiens
gggacaaggccccac

SEQ ID NO: 1499112 - DNA, 15 bp, Homo sapiens
agggacaaggcccca

SEQ ID NO: 1499113 - DNA, 15 bp, Homo sapiens
cagggacaaggcccc

SEQ ID NO: 1499114 - DNA, 15 bp, Homo sapiens
tcagggacaaggccc

SEQ ID NO: 1499115 - DNA, 15 bp, Homo sapiens
gtcagggacaaggcc

SEQ ID NO: 1499116 - DNA, 15 bp, Homo sapiens
ggtcagggacaaggc

SEQ ID NO: 1499117 - DNA, 15 bp, Homo sapiens
tggtcagggacaagg

SEQ ID NO: 1499118 - DNA, 15 bp, Homo sapiens
ctggtcagggacaag

SEQ ID NO: 1499119 - DNA, 15 bp, Homo sapiens
gctggtcagggacaa

SEQ ID NO: 1499120 - DNA, 15 bp, Homo sapiens
ggctggtcagggaca

SEQ ID NO: 1499121 - DNA, 15 bp, Homo sapiens
aggctggtcagggac

SEQ ID NO: 1499122 - DNA, 15 bp, Homo sapiens
gaggctggtcaggga

SEQ ID NO: 1499123 - DNA, 15 bp, Homo sapiens
ggaggctggtcaggg

SEQ ID NO: 1499124 - DNA, 15 bp, Homo sapiens
cggaggctggtcagg

SEQ ID NO: 1499125 - DNA, 15 bp, Homo sapiens
tcggaggctggtcag

SEQ ID NO: 1499126 - DNA, 15 bp, Homo sapiens
gtcggaggctggtca

SEQ ID NO: 1499127 - DNA, 15 bp, Homo sapiens
ggtcggaggctggtc

SEQ ID NO: 1499128 - DNA, 15 bp, Homo sapiens
gggtcggaggctggt

SEQ ID NO: 1499129 - DNA, 15 bp, Homo sapiens
agggtcggaggctgg

SEQ ID NO: 1499130 - DNA, 15 bp, Homo sapiens
gagggtcggaggctg

SEQ ID NO: 1499131 - DNA, 15 bp, Homo sapiens
ggagggtcggaggct

SEQ ID NO: 1499132 - DNA, 15 bp, Homo sapiens
tggagggtcggaggc

SEQ ID NO: 1499133 - DNA, 15 bp, Homo sapiens
atggagggtcggagg

SEQ ID NO: 1499134 - DNA, 15 bp, Homo sapiens
gatggagggtcggag

SEQ ID NO: 1499135 - DNA, 15 bp, Homo sapiens
ggatggagggtcgga

SEQ ID NO: 1499136 - DNA, 15 bp, Homo sapiens
gggatggagggtcgg

SEQ ID NO: 1499137 - DNA, 15 bp, Homo sapiens
ggggatggagggtcg

SEQ ID NO: 1499138 - DNA, 15 bp, Homo sapiens
aggggatggagggtc

SEQ ID NO: 1499139 - DNA, 15 bp, Homo sapiens
aaggggatggagggt

SEQ ID NO: 1499140 - DNA, 15 bp, Homo sapiens
aaaggggatggaggg

SEQ ID NO: 1499141 - DNA, 15 bp, Homo sapiens
taaaggggatggagg

SEQ ID NO: 1499142 - DNA, 15 bp, Homo sapiens
ataaaggggatggag

SEQ ID NO: 1499143 - DNA, 15 bp, Homo sapiens
gataaaggggatgga

SEQ ID NO: 1499144 - DNA, 15 bp, Homo sapiens
ggataaaggggatgg

SEQ ID NO: 1499145 - DNA, 15 bp, Homo sapiens
gggataaaggggatg

SEQ ID NO: 1499146 - DNA, 15 bp, Homo sapiens
tgggataaaggggat

SEQ ID NO: 1499147 - DNA, 15 bp, Homo sapiens
ctgggataaagggga

SEQ ID NO: 1499148 - DNA, 15 bp, Homo sapiens
gctgggataaagggg

SEQ ID NO: 1499149 - DNA, 15 bp, Homo sapiens
ggctgggataaaggg

SEQ ID NO: 1499150 - DNA, 15 bp, Homo sapiens
gggctgggataaagg

SEQ ID NO: 1499151 - DNA, 15 bp, Homo sapiens
agggctgggataaag

SEQ ID NO: 1499152 - DNA, 15 bp, Homo sapiens
aagggctgggataaa

SEQ ID NO: 1499153 - DNA, 15 bp, Homo sapiens
gaagggctgggataa

SEQ ID NO: 1499154 - DNA, 15 bp, Homo sapiens
ggaagggctgggata

SEQ ID NO: 1499155 - DNA, 15 bp, Homo sapiens
cggaagggctgggat

SEQ ID NO: 1499156 - DNA, 15 bp, Homo sapiens
gcggaagggctggga

SEQ ID NO: 1499157 - DNA, 15 bp, Homo sapiens
agcggaagggctggg

SEQ ID NO: 1499158 - DNA, 15 bp, Homo sapiens
aagcggaagggctgg

SEQ ID NO: 1499159 - DNA, 15 bp, Homo sapiens
caagcggaagggctg

SEQ ID NO: 1499160 - DNA, 15 bp, Homo sapiens
ccaagcggaagggct

SEQ ID NO: 1499161 - DNA, 15 bp, Homo sapiens
tccaagcggaagggc

SEQ ID NO: 1499162 - DNA, 15 bp, Homo sapiens
ttccaagcggaaggg

SEQ ID NO: 1499163 - DNA, 15 bp, Homo sapiens
tttccaagcggaagg

SEQ ID NO: 1499164 - DNA, 15 bp, Homo sapiens
atttccaagcggaag

SEQ ID NO: 1499165 - DNA, 15 bp, Homo sapiens
catttccaagcggaa

SEQ ID NO: 1499166 - DNA, 15 bp, Homo sapiens
ccatttccaagcgga

SEQ ID NO: 1499167 - DNA, 15 bp, Homo sapiens
cccatttccaagcgg

SEQ ID NO: 1499168 - DNA, 15 bp, Homo sapiens
ccccatttccaagcg

SEQ ID NO: 1499169 - DNA, 15 bp, Homo sapiens
tccccatttccaagc

SEQ ID NO: 1499170 - DNA, 15 bp, Homo sapiens
atccccatttccaag

SEQ ID NO: 1499171 - DNA, 15 bp, Homo sapiens
catccccatttccaa

SEQ ID NO: 1499172 - DNA, 15 bp, Homo sapiens
tcatccccatttcca

SEQ ID NO: 1499173 - DNA, 15 bp, Homo sapiens
ctcatccccatttcc

SEQ ID NO: 1499174 - DNA, 15 bp, Homo sapiens
actcatccccatttc

SEQ ID NO: 1499175 - DNA, 15 bp, Homo sapiens
cactcatccccattt

SEQ ID NO: 1499176 - DNA, 15 bp, Homo sapiens
tcactcatccccatt

SEQ ID NO: 1499177 - DNA, 15 bp, Homo sapiens
gtcactcatccccat

SEQ ID NO: 1499178 - DNA, 15 bp, Homo sapiens
ggtcactcatcccca

SEQ ID NO: 1499179 - DNA, 15 bp, Homo sapiens
aggtcactcatcccc

SEQ ID NO: 1499180 - DNA, 15 bp, Homo sapiens
caggtcactcatccc

SEQ ID NO: 1499181 - DNA, 15 bp, Homo sapiens
ccaggtcactcatcc

SEQ ID NO: 1499182 - DNA, 15 bp, Homo sapiens
cccaggtcactcatc

SEQ ID NO: 1499183 - DNA, 15 bp, Homo sapiens
ccccaggtcactcat

SEQ ID NO: 1499184 - DNA, 15 bp, Homo sapiens
cccccaggtcactca

SEQ ID NO: 1499185 - DNA, 15 bp, Homo sapiens
gcccccaggtcactc

SEQ ID NO: 1499186 - DNA, 15 bp, Homo sapiens
cgcccccaggtcact

SEQ ID NO: 1499187 - DNA, 15 bp, Homo sapiens
gcgcccccaggtcac

SEQ ID NO: 1499188 - DNA, 15 bp, Homo sapiens
ggcgcccccaggtca

SEQ ID NO: 1499189 - DNA, 15 bp, Homo sapiens
aggcgcccccaggtc

SEQ ID NO: 1499190 - DNA, 15 bp, Homo sapiens
aaggcgcccccaggt

SEQ ID NO: 1499191 - DNA, 15 bp, Homo sapiens
aaaggcgcccccagg

SEQ ID NO: 1499192 - DNA, 15 bp, Homo sapiens
taaaggcgcccccag

SEQ ID NO: 1499193 - DNA, 15 bp, Homo sapiens
ctaaaggcgccccca

SEQ ID NO: 1499194 - DNA, 15 bp, Homo sapiens
cctaaaggcgccccc

SEQ ID NO: 1499195 - DNA, 15 bp, Homo sapiens
ccctaaaggcgcccc

SEQ ID NO: 1499196 - DNA, 15 bp, Homo sapiens
cccctaaaggcgccc

SEQ ID NO: 1499197 - DNA, 15 bp, Homo sapiens
gcccctaaaggcgcc

SEQ ID NO: 1499198 - DNA, 15 bp, Homo sapiens
cgcccctaaaggcgc

SEQ ID NO: 1499199 - DNA, 15 bp, Homo sapiens
gcgcccctaaaggcg

SEQ ID NO: 1499200 - DNA, 15 bp, Homo sapiens
cgcgcccctaaaggc

SEQ ID NO: 1499201 - DNA, 15 bp, Homo sapiens
gcgcgcccctaaagg

SEQ ID NO: 1499202 - DNA, 15 bp, Homo sapiens
ggcgcgcccctaaag

SEQ ID NO: 1499203 - DNA, 15 bp, Homo sapiens
tggcgcgcccctaaa

SEQ ID NO: 1499204 - DNA, 15 bp, Homo sapiens
atggcgcgcccctaa

SEQ ID NO: 1499205 - DNA, 15 bp, Homo sapiens
gatggcgcgccccta

SEQ ID NO: 1499206 - DNA, 15 bp, Homo sapiens
agatggcgcgcccct

SEQ ID NO: 1499207 - DNA, 15 bp, Homo sapiens
cagatggcgcgcccc

SEQ ID NO: 1499208 - DNA, 15 bp, Homo sapiens
ccagatggcgcgccc

SEQ ID NO: 1499209 - DNA, 15 bp, Homo sapiens
tccagatggcgcgcc

SEQ ID NO: 1499210 - DNA, 15 bp, Homo sapiens
atccagatggcgcgc

SEQ ID NO: 1499211 - DNA, 15 bp, Homo sapiens
aatccagatggcgcg

SEQ ID NO: 1499212 - DNA, 15 bp, Homo sapiens
aaatccagatggcgc

SEQ ID NO: 1499213 - DNA, 15 bp, Homo sapiens
taaatccagatggcg

SEQ ID NO: 1499214 - DNA, 15 bp, Homo sapiens
ttaaatccagatggc

SEQ ID NO: 1499215 - DNA, 15 bp, Homo sapiens
attaaatccagatgg

SEQ ID NO: 1499216 - DNA, 15 bp, Homo sapiens
tattaaatccagatg

SEQ ID NO: 1499217 - DNA, 15 bp, Homo sapiens
ttattaaatccagat

SEQ ID NO: 1499218 - DNA, 15 bp, Homo sapiens
attattaaatccaga

SEQ ID NO: 1499219 - DNA, 15 bp, Homo sapiens
aattattaaatccag

SEQ ID NO: 1499220 - DNA, 15 bp, Homo sapiens
taattattaaatcca

SEQ ID NO: 1499221 - DNA, 15 bp, Homo sapiens
gtaattattaaatcc

SEQ ID NO: 1499222 - DNA, 15 bp, Homo sapiens
ggtaattattaaatc

SEQ ID NO: 1499223 - DNA, 15 bp, Homo sapiens
gggtaattattaaat

SEQ ID NO: 1499224 - DNA, 15 bp, Homo sapiens
ggggtaattattaaa

SEQ ID NO: 1499225 - DNA, 15 bp, Homo sapiens
gggggtaattattaa

SEQ ID NO: 1499226 - DNA, 15 bp, Homo sapiens
agggggtaattatta

SEQ ID NO: 1499227 - DNA, 15 bp, Homo sapiens
aagggggtaattatt

SEQ ID NO: 1499228 - DNA, 15 bp, Homo sapiens
taagggggtaattat

SEQ ID NO: 1499229 - DNA, 15 bp, Homo sapiens
gtaagggggtaatta

SEQ ID NO: 1499230 - DNA, 15 bp, Homo sapiens
agtaagggggtaatt

SEQ ID NO: 1499231 - DNA, 15 bp, Homo sapiens
aagtaagggggtaat

SEQ ID NO: 1499232 - DNA, 15 bp, Homo sapiens
aaagtaagggggtaa

SEQ ID NO: 1499233 - DNA, 15 bp, Homo sapiens
aaaagtaagggggta

SEQ ID NO: 1499234 - DNA, 15 bp, Homo sapiens
caaaagtaagggggt

SEQ ID NO: 1499235 - DNA, 15 bp, Homo sapiens
acaaaagtaaggggg

SEQ ID NO: 1499236 - DNA, 15 bp, Homo sapiens
aacaaaagtaagggg

SEQ ID NO: 1499237 - DNA, 15 bp, Homo sapiens
aaacaaaagtaaggg

SEQ ID NO: 1499238 - DNA, 15 bp, Homo sapiens
aaaacaaaagtaagg

SEQ ID NO: 1499239 - DNA, 15 bp, Homo sapiens
aaaaacaaaagtaag

SEQ ID NO: 1499240 - DNA, 15 bp, Homo sapiens
caaaaacaaaagtaa

SEQ ID NO: 1499241 - DNA, 15 bp, Homo sapiens
tcaaaaacaaaagta

SEQ ID NO: 1499242 - DNA, 15 bp, Homo sapiens
ctcaaaaacaaaagt

SEQ ID NO: 1499243 - DNA, 15 bp, Homo sapiens
gctcaaaaacaaaag

SEQ ID NO: 1499244 - DNA, 15 bp, Homo sapiens
tgctcaaaaacaaaa

SEQ ID NO: 1499245 - DNA, 15 bp, Homo sapiens
ctgctcaaaaacaaa

SEQ ID NO: 1499246 - DNA, 15 bp, Homo sapiens
tctgctcaaaaacaa

SEQ ID NO: 1499247 - DNA, 15 bp, Homo sapiens
ctctgctcaaaaaca

SEQ ID NO: 1499248 - DNA, 15 bp, Homo sapiens
cctctgctcaaaaac

SEQ ID NO: 1499249 - DNA, 15 bp, Homo sapiens
acctctgctcaaaaa

SEQ ID NO: 1499250 - DNA, 15 bp, Homo sapiens
cacctctgctcaaaa

SEQ ID NO: 1499251 - DNA, 15 bp, Homo sapiens
ccacctctgctcaaa

SEQ ID NO: 1499252 - DNA, 15 bp, Homo sapiens
cccacctctgctcaa

SEQ ID NO: 1499253 - DNA, 15 bp, Homo sapiens
acccacctctgctca

SEQ ID NO: 1499254 - DNA, 15 bp, Homo sapiens
tacccacctctgctc

SEQ ID NO: 1499255 - DNA, 15 bp, Homo sapiens
ttacccacctctgct

SEQ ID NO: 1499256 - DNA, 15 bp, Homo sapiens
gttacccacctctgc

SEQ ID NO: 1499257 - DNA, 15 bp, Homo sapiens
cgttacccacctctg

SEQ ID NO: 1499258 - DNA, 15 bp, Homo sapiens
tctaatcagtatgtg

SEQ ID NO: 1499259 - DNA, 15 bp, Homo sapiens
gtctaatcagtatgt

SEQ ID NO: 1499260 - DNA, 15 bp, Homo sapiens
tgtctaatcagtatg

SEQ ID NO: 1499261 - DNA, 15 bp, Homo sapiens
ttgtctaatcagtat

SEQ ID NO: 1499262 - DNA, 15 bp, Homo sapiens
tttgtctaatcagta

SEQ ID NO: 1499263 - DNA, 15 bp, Homo sapiens
atttgtctaatcagt

SEQ ID NO: 1499264 - DNA, 15 bp, Homo sapiens
tatttgtctaatcag

SEQ ID NO: 1499265 - DNA, 15 bp, Homo sapiens
ctatttgtctaatca

SEQ ID NO: 1499266 - DNA, 15 bp, Homo sapiens
tctatttgtctaatc

SEQ ID NO: 1499267 - DNA, 15 bp, Homo sapiens
atctatttgtctaat

SEQ ID NO: 1499268 - DNA, 15 bp, Homo sapiens
aatctatttgtctaa

SEQ ID NO: 1499269 - DNA, 15 bp, Homo sapiens
aaatctatttgtcta

SEQ ID NO: 1499270 - DNA, 15 bp, Homo sapiens
caaatctatttgtct

SEQ ID NO: 1499271 - DNA, 15 bp, Homo sapiens
gcaaatctatttgtc

SEQ ID NO: 1499272 - DNA, 15 bp, Homo sapiens
tgcaaatctatttgt

SEQ ID NO: 1499273 - DNA, 15 bp, Homo sapiens
ttgcaaatctatttg

SEQ ID NO: 1499274 - DNA, 15 bp, Homo sapiens
tttgcaaatctattt

SEQ ID NO: 1499275 - DNA, 15 bp, Homo sapiens
ttttgcaaatctatt

SEQ ID NO: 1499276 - DNA, 15 bp, Homo sapiens
gttttgcaaatctat

SEQ ID NO: 1499277 - DNA, 15 bp, Homo sapiens
agttttgcaaatcta

SEQ ID NO: 1499278 - DNA, 15 bp, Homo sapiens
cagttttgcaaatct

SEQ ID NO: 1499279 - DNA, 15 bp, Homo sapiens
tcagttttgcaaatc

SEQ ID NO: 1499280 - DNA, 15 bp, Homo sapiens
ttcagttttgcaaat

SEQ ID NO: 1499281 - DNA, 15 bp, Homo sapiens
cttcagttttgcaaa

SEQ ID NO: 1499282 - DNA, 15 bp, Homo sapiens
gcttcagttttgcaa

SEQ ID NO: 1499283 - DNA, 15 bp, Homo sapiens
agcttcagttttgca

SEQ ID NO: 1499284 - DNA, 15 bp, Homo sapiens
aagcttcagttttgc

SEQ ID NO: 1499285 - DNA, 15 bp, Homo sapiens
aaagcttcagttttg

SEQ ID NO: 1499286 - DNA, 15 bp, Homo sapiens
aaaagcttcagtttt

SEQ ID NO: 1499287 - DNA, 15 bp, Homo sapiens
aaaaagcttcagttt

SEQ ID NO: 1499288 - DNA, 15 bp, Homo sapiens
caaaaagcttcagtt

SEQ ID NO: 1499289 - DNA, 15 bp, Homo sapiens
ccaaaaagcttcagt

SEQ ID NO: 1499290 - DNA, 15 bp, Homo sapiens
tccaaaaagcttcag

SEQ ID NO: 1499291 - DNA, 15 bp, Homo sapiens
atccaaaaagcttca

SEQ ID NO: 1499292 - DNA, 15 bp, Homo sapiens
aatccaaaaagcttc

SEQ ID NO: 1499293 - DNA, 15 bp, Homo sapiens
aaatccaaaaagctt

SEQ ID NO: 1499294 - DNA, 15 bp, Homo sapiens
taaatccaaaaagct

SEQ ID NO: 1499295 - DNA, 15 bp, Homo sapiens
ttaaatccaaaaagc

SEQ ID NO: 1499296 - DNA, 15 bp, Homo sapiens
tttaaatccaaaaag

SEQ ID NO: 1499297 - DNA, 15 bp, Homo sapiens
ttttaaatccaaaaa

SEQ ID NO: 1499298 - DNA, 15 bp, Homo sapiens
ttttttaaatccaaa

SEQ ID NO: 1499299 - DNA, 15 bp, Homo sapiens
attttttaaatccaa

SEQ ID NO: 1499300 - DNA, 15 bp, Homo sapiens
tattttttaaatcca

SEQ ID NO: 1499301 - DNA, 15 bp, Homo sapiens
atattttttaaatcc

SEQ ID NO: 1499302 - DNA, 15 bp, Homo sapiens
gatattttttaaatc

SEQ ID NO: 1499303 - DNA, 15 bp, Homo sapiens
agatattttttaaat

SEQ ID NO: 1499304 - DNA, 15 bp, Homo sapiens
gagatattttttaaa

SEQ ID NO: 1499305 - DNA, 15 bp, Homo sapiens
ggagatattttttaa

SEQ ID NO: 1499306 - DNA, 15 bp, Homo sapiens
aggagatatttttta

SEQ ID NO: 1499307 - DNA, 15 bp, Homo sapiens
taggagatatttttt

SEQ ID NO: 1499308 - DNA, 15 bp, Homo sapiens
ctaggagatattttt

SEQ ID NO: 1499309 - DNA, 15 bp, Homo sapiens
gctaggagatatttt

SEQ ID NO: 1499310 - DNA, 15 bp, Homo sapiens
ggctaggagatattt

SEQ ID NO: 1499311 - DNA, 15 bp, Homo sapiens
aggctaggagatatt

SEQ ID NO: 1499312 - DNA, 15 bp, Homo sapiens
gaggctaggagatat

SEQ ID NO: 1499313 - DNA, 15 bp, Homo sapiens
tgaggctaggagata

SEQ ID NO: 1499314 - DNA, 15 bp, Homo sapiens
atgaggctaggagat

SEQ ID NO: 1499315 - DNA, 15 bp, Homo sapiens
aatgaggctaggaga

SEQ ID NO: 1499316 - DNA, 15 bp, Homo sapiens
gaatgaggctaggag

SEQ ID NO: 1499317 - DNA, 15 bp, Homo sapiens
agaatgaggctagga

SEQ ID NO: 1499318 - DNA, 15 bp, Homo sapiens
aagaatgaggctagg

SEQ ID NO: 1499319 - DNA, 15 bp, Homo sapiens
gaagaatgaggctag

SEQ ID NO: 1499320 - DNA, 15 bp, Homo sapiens
tgaagaatgaggcta

SEQ ID NO: 1499321 - DNA, 15 bp, Homo sapiens
ttgaagaatgaggct

SEQ ID NO: 1499322 - DNA, 15 bp, Homo sapiens
cttgaagaatgaggc

SEQ ID NO: 1499323 - DNA, 15 bp, Homo sapiens
gcttgaagaatgagg

SEQ ID NO: 1499324 - DNA, 15 bp, Homo sapiens
ggcttgaagaatgag

SEQ ID NO: 1499325 - DNA, 15 bp, Homo sapiens
aggcttgaagaatga

SEQ ID NO: 1499326 - DNA, 15 bp, Homo sapiens
caggcttgaagaatg

SEQ ID NO: 1499327 - DNA, 15 bp, Homo sapiens
ccaggcttgaagaat

SEQ ID NO: 1499328 - DNA, 15 bp, Homo sapiens
accaggcttgaagaa

SEQ ID NO: 1499329 - DNA, 15 bp, Homo sapiens
caccaggcttgaaga

SEQ ID NO: 1499330 - DNA, 15 bp, Homo sapiens
acaccaggcttgaag

SEQ ID NO: 1499331 - DNA, 15 bp, Homo sapiens
cacaccaggcttgaa

SEQ ID NO: 1499332 - DNA, 15 bp, Homo sapiens
acacaccaggcttga

SEQ ID NO: 1499333 - DNA, 15 bp, Homo sapiens
tacacaccaggcttg

SEQ ID NO: 1499334 - DNA, 15 bp, Homo sapiens
ttacacaccaggctt

SEQ ID NO: 1499335 - DNA, 15 bp, Homo sapiens
attacacaccaggct

SEQ ID NO: 1499336 - DNA, 15 bp, Homo sapiens
aattacacaccaggc

SEQ ID NO: 1499337 - DNA, 15 bp, Homo sapiens
aaattacacaccagg

SEQ ID NO: 1499338 - DNA, 15 bp, Homo sapiens
aaaattacacaccag

SEQ ID NO: 1499339 - DNA, 15 bp, Homo sapiens
aaaaattacacacca

SEQ ID NO: 1499340 - DNA, 15 bp, Homo sapiens
taaaaattacacacc

SEQ ID NO: 1499341 - DNA, 15 bp, Homo sapiens
ataaaaattacacac

SEQ ID NO: 1499342 - DNA, 15 bp, Homo sapiens
tataaaaattacaca

SEQ ID NO: 1499343 - DNA, 15 bp, Homo sapiens
ttataaaaattacac

SEQ ID NO: 1499344 - DNA, 15 bp, Homo sapiens
cttataaaaattaca

SEQ ID NO: 1499345 - DNA, 15 bp, Homo sapiens
ccttataaaaattac

SEQ ID NO: 1499346 - DNA, 15 bp, Homo sapiens
gccttataaaaatta

SEQ ID NO: 1499347 - DNA, 15 bp, Homo sapiens
ggccttataaaaatt

SEQ ID NO: 1499348 - DNA, 15 bp, Homo sapiens
aggccttataaaaat

SEQ ID NO: 1499349 - DNA, 15 bp, Homo sapiens
aaggccttataaaaa

SEQ ID NO: 1499350 - DNA, 15 bp, Homo sapiens
taaggccttataaaa

SEQ ID NO: 1499351 - DNA, 15 bp, Homo sapiens
ataaggccttataaa

SEQ ID NO: 1499352 - DNA, 15 bp, Homo sapiens
tataaggccttataa

SEQ ID NO: 1499353 - DNA, 15 bp, Homo sapiens
ctataaggccttata

SEQ ID NO: 1499354 - DNA, 15 bp, Homo sapiens
actataaggccttat

SEQ ID NO: 1499355 - DNA, 15 bp, Homo sapiens
tactataaggcctta

SEQ ID NO: 1499356 - DNA, 15 bp, Homo sapiens
ctactataaggcctt

SEQ ID NO: 1499357 - DNA, 15 bp, Homo sapiens
actactataaggcct

SEQ ID NO: 1499358 - DNA, 15 bp, Homo sapiens
aactactataaggcc

SEQ ID NO: 1499359 - DNA, 15 bp, Homo sapiens
caactactataaggc

SEQ ID NO: 1499360 - DNA, 15 bp, Homo sapiens
tcaactactataagg

SEQ ID NO: 1499361 - DNA, 15 bp, Homo sapiens
ttcaactactataag

SEQ ID NO: 1499362 - DNA, 15 bp, Homo sapiens
tttcaactactataa

SEQ ID NO: 1499363 - DNA, 15 bp, Homo sapiens
ttttcaactactata

SEQ ID NO: 1499364 - DNA, 15 bp, Homo sapiens
attttcaactactat

SEQ ID NO: 1499365 - DNA, 15 bp, Homo sapiens
cattttcaactacta

SEQ ID NO: 1499366 - DNA, 15 bp, Homo sapiens
tcattttcaactact

SEQ ID NO: 1499367 - DNA, 15 bp, Homo sapiens
ctcattttcaactac

SEQ ID NO: 1499368 - DNA, 15 bp, Homo sapiens
actcattttcaacta

SEQ ID NO: 1499369 - DNA, 15 bp, Homo sapiens
tactcattttcaact

SEQ ID NO: 1499370 - DNA, 15 bp, Homo sapiens
gtactcattttcaac

SEQ ID NO: 1499371 - DNA, 15 bp, Homo sapiens
agtactcattttcaa

SEQ ID NO: 1499372 - DNA, 15 bp, Homo sapiens
gagtactcattttca

SEQ ID NO: 1499373 - DNA, 15 bp, Homo sapiens
agagtactcattttc

SEQ ID NO: 1499374 - DNA, 15 bp, Homo sapiens
aagagtactcatttt

SEQ ID NO: 1499375 - DNA, 15 bp, Homo sapiens
aaagagtactcattt

SEQ ID NO: 1499376 - DNA, 15 bp, Homo sapiens
aaaagagtactcatt

SEQ ID NO: 1499377 - DNA, 15 bp, Homo sapiens
taaaagagtactcat

SEQ ID NO: 1499378 - DNA, 15 bp, Homo sapiens
ataaaagagtactca

SEQ ID NO: 1499379 - DNA, 15 bp, Homo sapiens
cataaaagagtactc

SEQ ID NO: 1499380 - DNA, 15 bp, Homo sapiens
ccataaaagagtact

SEQ ID NO: 1499381 - DNA, 15 bp, Homo sapiens
accataaaagagtac

SEQ ID NO: 1499382 - DNA, 15 bp, Homo sapiens
caccataaaagagta

SEQ ID NO: 1499383 - DNA, 15 bp, Homo sapiens
tcaccataaaagagt

SEQ ID NO: 1499384 - DNA, 15 bp, Homo sapiens
gtcaccataaaagag

SEQ ID NO: 1499385 - DNA, 15 bp, Homo sapiens
cgtcaccataaaaga

SEQ ID NO: 1499386 - DNA, 15 bp, Homo sapiens
tcgtcaccataaaag

SEQ ID NO: 1499387 - DNA, 15 bp, Homo sapiens
ttcgtcaccataaaa

SEQ ID NO: 1499388 - DNA, 15 bp, Homo sapiens
attcgtcaccataaa

SEQ ID NO: 1499389 - DNA, 15 bp, Homo sapiens
aattcgtcaccataa

SEQ ID NO: 1499390 - DNA, 15 bp, Homo sapiens
gaattcgtcaccata

SEQ ID NO: 1499391 - DNA, 15 bp, Homo sapiens
agaattcgtcaccat

SEQ ID NO: 1499392 - DNA, 15 bp, Homo sapiens
aagaattcgtcacca

SEQ ID NO: 1499393 - DNA, 15 bp, Homo sapiens
aaagaattcgtcacc

SEQ ID NO: 1499394 - DNA, 15 bp, Homo sapiens
taaagaattcgtcac

SEQ ID NO: 1499395 - DNA, 15 bp, Homo sapiens
ataaagaattcgtca

SEQ ID NO: 1499396 - DNA, 15 bp, Homo sapiens
cataaagaattcgtc

SEQ ID NO: 1499397 - DNA, 15 bp, Homo sapiens
ccataaagaattcgt

SEQ ID NO: 1499398 - DNA, 15 bp, Homo sapiens
accataaagaattcg

SEQ ID NO: 1499399 - DNA, 15 bp, Homo sapiens
caccataaagaattc

SEQ ID NO: 1499400 - DNA, 15 bp, Homo sapiens
tcaccataaagaatt

SEQ ID NO: 1499401 - DNA, 15 bp, Homo sapiens
ctcaccataaagaat

SEQ ID NO: 1499402 - DNA, 15 bp, Homo sapiens
actcaccataaagaa

SEQ ID NO: 1499403 - DNA, 15 bp, Homo sapiens
cactcaccataaaga

SEQ ID NO: 1499404 - DNA, 15 bp, Homo sapiens
tcactcaccataaag

SEQ ID NO: 1499405 - DNA, 15 bp, Homo sapiens
ctcactcaccataaa

SEQ ID NO: 1499406 - DNA, 15 bp, Homo sapiens
tctcactcaccataa

SEQ ID NO: 1499407 - DNA, 15 bp, Homo sapiens
ttctcactcaccata

SEQ ID NO: 1499408 - DNA, 15 bp, Homo sapiens
tttctcactcaccat

SEQ ID NO: 1499409 - DNA, 15 bp, Homo sapiens
atttctcactcacca

SEQ ID NO: 1499410 - DNA, 15 bp, Homo sapiens
tatttctcactcacc

SEQ ID NO: 1499411 - DNA, 15 bp, Homo sapiens
ttatttctcactcac

SEQ ID NO: 1499412 - DNA, 15 bp, Homo sapiens
attatttctcactca

SEQ ID NO: 1499413 - DNA, 15 bp, Homo sapiens
cattatttctcactc

SEQ ID NO: 1499414 - DNA, 15 bp, Homo sapiens
gcattatttctcact

SEQ ID NO: 1499415 - DNA, 15 bp, Homo sapiens
agcattatttctcac

SEQ ID NO: 1499416 - DNA, 15 bp, Homo sapiens
aagcattatttctca

SEQ ID NO: 1499417 - DNA, 15 bp, Homo sapiens
taagcattatttctc

SEQ ID NO: 1499418 - DNA, 15 bp, Homo sapiens
ataagcattatttct

SEQ ID NO: 1499419 - DNA, 15 bp, Homo sapiens
aataagcattatttc

SEQ ID NO: 1499420 - DNA, 15 bp, Homo sapiens
gaataagcattattt

SEQ ID NO: 1499421 - DNA, 15 bp, Homo sapiens
agaataagcattatt

SEQ ID NO: 1499422 - DNA, 15 bp, Homo sapiens
aagaataagcattat

SEQ ID NO: 1499423 - DNA, 15 bp, Homo sapiens
gaagaataagcatta

SEQ ID NO: 1499424 - DNA, 15 bp, Homo sapiens
ggaagaataagcatt

SEQ ID NO: 1499425 - DNA, 15 bp, Homo sapiens
tggaagaataagcat

SEQ ID NO: 1499426 - DNA, 15 bp, Homo sapiens
ttggaagaataagca

SEQ ID NO: 1499427 - DNA, 15 bp, Homo sapiens
attggaagaataagc

SEQ ID NO: 1499428 - DNA, 15 bp, Homo sapiens
aattggaagaataag

SEQ ID NO: 1499429 - DNA, 15 bp, Homo sapiens
aaattggaagaataa

SEQ ID NO: 1499430 - DNA, 15 bp, Homo sapiens
aaaattggaagaata

SEQ ID NO: 1499431 - DNA, 15 bp, Homo sapiens
taaaattggaagaat

SEQ ID NO: 1499432 - DNA, 15 bp, Homo sapiens
ctaaaattggaagaa

SEQ ID NO: 1499433 - DNA, 15 bp, Homo sapiens
actaaaattggaaga

SEQ ID NO: 1499434 - DNA, 15 bp, Homo sapiens
tactaaaattggaag

SEQ ID NO: 1499435 - DNA, 15 bp, Homo sapiens
atactaaaattggaa

SEQ ID NO: 1499436 - DNA, 15 bp, Homo sapiens
tatactaaaattgga

SEQ ID NO: 1499437 - DNA, 15 bp, Homo sapiens
atatactaaaattgg

SEQ ID NO: 1499438 - DNA, 15 bp, Homo sapiens
catatactaaaattg

SEQ ID NO: 1499439 - DNA, 15 bp, Homo sapiens
acatatactaaaatt

SEQ ID NO: 1499440 - DNA, 15 bp, Homo sapiens
cacatatactaaaat

SEQ ID NO: 1499441 - DNA, 15 bp, Homo sapiens
ccacatatactaaaa

SEQ ID NO: 1499442 - DNA, 15 bp, Homo sapiens
accacatatactaaa

SEQ ID NO: 1499443 - DNA, 15 bp, Homo sapiens
caccacatatactaa

SEQ ID NO: 1499444 - DNA, 15 bp, Homo sapiens
gcaccacatatacta

SEQ ID NO: 1499445 - DNA, 15 bp, Homo sapiens
agcaccacatatact

SEQ ID NO: 1499446 - DNA, 15 bp, Homo sapiens
cagcaccacatatac

SEQ ID NO: 1499447 - DNA, 15 bp, Homo sapiens
tcagcaccacatata

SEQ ID NO: 1499448 - DNA, 15 bp, Homo sapiens
ttcagcaccacatat

SEQ ID NO: 1499449 - DNA, 15 bp, Homo sapiens
attcagcaccacata

SEQ ID NO: 1499450 - DNA, 15 bp, Homo sapiens
gattcagcaccacat

SEQ ID NO: 1499451 - DNA, 15 bp, Homo sapiens
cgattcagcaccaca

SEQ ID NO: 1499452 - DNA, 15 bp, Homo sapiens
tcgattcagcaccac

SEQ ID NO: 1499453 - DNA, 15 bp, Homo sapiens
ctcgattcagcacca

SEQ ID NO: 1499454 - DNA, 15 bp, Homo sapiens
gctcgattcagcacc

SEQ ID NO: 1499455 - DNA, 15 bp, Homo sapiens
tgctcgattcagcac

SEQ ID NO: 1499456 - DNA, 15 bp, Homo sapiens
gtgctcgattcagca

SEQ ID NO: 1499457 - DNA, 15 bp, Homo sapiens
tgtgctcgattcagc

SEQ ID NO: 1499458 - DNA, 15 bp, Homo sapiens
ttgtgctcgattcag

SEQ ID NO: 1499459 - DNA, 15 bp, Homo sapiens
attgtgctcgattca

SEQ ID NO: 1499460 - DNA, 15 bp, Homo sapiens
tattgtgctcgattc

SEQ ID NO: 1499461 - DNA, 15 bp, Homo sapiens
ttattgtgctcgatt

SEQ ID NO: 1499462 - DNA, 15 bp, Homo sapiens
attattgtgctcgat

SEQ ID NO: 1499463 - DNA, 15 bp, Homo sapiens
cattattgtgctcga

SEQ ID NO: 1499464 - DNA, 15 bp, Homo sapiens
gcattattgtgctcg

SEQ ID NO: 1499465 - DNA, 15 bp, Homo sapiens
agcattattgtgctc

SEQ ID NO: 1499466 - DNA, 15 bp, Homo sapiens
aagcattattgtgct

SEQ ID NO: 1499467 - DNA, 15 bp, Homo sapiens
taagcattattgtgc

SEQ ID NO: 1499468 - DNA, 15 bp, Homo sapiens
ataagcattattgtg

SEQ ID NO: 1499469 - DNA, 15 bp, Homo sapiens
aataagcattattgt

SEQ ID NO: 1499470 - DNA, 15 bp, Homo sapiens
gaataagcattattg

SEQ ID NO: 1499471 - DNA, 15 bp, Homo sapiens
aaagaataagcatta

SEQ ID NO: 1499472 - DNA, 15 bp, Homo sapiens
caaagaataagcatt

SEQ ID NO: 1499473 - DNA, 15 bp, Homo sapiens
gcaaagaataagcat

SEQ ID NO: 1499474 - DNA, 15 bp, Homo sapiens
agcaaagaataagca

SEQ ID NO: 1499475 - DNA, 15 bp, Homo sapiens
aagcaaagaataagc

SEQ ID NO: 1499476 - DNA, 15 bp, Homo sapiens
gaagcaaagaataag

SEQ ID NO: 1499477 - DNA, 15 bp, Homo sapiens
cgaagcaaagaataa

SEQ ID NO: 1499478 - DNA, 15 bp, Homo sapiens
ccgaagcaaagaata

SEQ ID NO: 1499479 - DNA, 15 bp, Homo sapiens
tccgaagcaaagaat

SEQ ID NO: 1499480 - DNA, 15 bp, Homo sapiens
ttccgaagcaaagaa

SEQ ID NO: 1499481 - DNA, 15 bp, Homo sapiens
attccgaagcaaaga

SEQ ID NO: 1499482 - DNA, 15 bp, Homo sapiens
aattccgaagcaaag

SEQ ID NO: 1499483 - DNA, 15 bp, Homo sapiens
aaattccgaagcaaa

SEQ ID NO: 1499484 - DNA, 15 bp, Homo sapiens
aaaattccgaagcaa

SEQ ID NO: 1499485 - DNA, 15 bp, Homo sapiens
aaaaattccgaagca

SEQ ID NO: 1499486 - DNA, 15 bp, Homo sapiens
aaaaaattccgaagc

SEQ ID NO: 1499487 - DNA, 15 bp, Homo sapiens
taaaaaattccgaag

SEQ ID NO: 1499488 - DNA, 15 bp, Homo sapiens
ttaaaaaattccgaa

SEQ ID NO: 1499489 - DNA, 15 bp, Homo sapiens
attaaaaaattccga

SEQ ID NO: 1499490 - DNA, 15 bp, Homo sapiens
aattaaaaaattccg

SEQ ID NO: 1499491 - DNA, 15 bp, Homo sapiens
aaattaaaaaattcc

SEQ ID NO: 1499492 - DNA, 15 bp, Homo sapiens
taaattaaaaaattc

SEQ ID NO: 1499493 - DNA, 15 bp, Homo sapiens
ataaattaaaaaatt

SEQ ID NO: 1499494 - DNA, 15 bp, Homo sapiens
aataaattaaaaaat

SEQ ID NO: 1499495 - DNA, 15 bp, Homo sapiens
taataaattaaaaaa

SEQ ID NO: 1499496 - DNA, 15 bp, Homo sapiens
ataataaattaaaaa

SEQ ID NO: 1499497 - DNA, 15 bp, Homo sapiens
aataataaattaaaa

SEQ ID NO: 1499498 - DNA, 15 bp, Homo sapiens
taataataaattaaa

SEQ ID NO: 1499499 - DNA, 15 bp, Homo sapiens
ataataataaattaa

SEQ ID NO: 1499500 - DNA, 15 bp, Homo sapiens
aataataataaatta

SEQ ID NO: 1499501 - DNA, 15 bp, Homo sapiens
caataataataaatt

SEQ ID NO: 1499502 - DNA, 15 bp, Homo sapiens
acaataataataaat

SEQ ID NO: 1499503 - DNA, 15 bp, Homo sapiens
aacaataataataaa

SEQ ID NO: 1499504 - DNA, 15 bp, Homo sapiens
taacaataataataa

SEQ ID NO: 1499505 - DNA, 15 bp, Homo sapiens
ataacaataataata

SEQ ID NO: 1499506 - DNA, 15 bp, Homo sapiens
aaataacaataataa

SEQ ID NO: 1499507 - DNA, 15 bp, Homo sapiens
aaaataacaataata

SEQ ID NO: 1499508 - DNA, 15 bp, Homo sapiens
taaaataacaataat

SEQ ID NO: 1499509 - DNA, 15 bp, Homo sapiens
ttaaaataacaataa

SEQ ID NO: 1499510 - DNA, 15 bp, Homo sapiens
tttaaaataacaata

SEQ ID NO: 1499511 - DNA, 15 bp, Homo sapiens
atttaaaataacaat

SEQ ID NO: 1499512 - DNA, 15 bp, Homo sapiens
aatttaaaataacaa

SEQ ID NO: 1499513 - DNA, 15 bp, Homo sapiens
aaatttaaaataaca

SEQ ID NO: 1499514 - DNA, 15 bp, Homo sapiens
aaaatttaaaataac

SEQ ID NO: 1499515 - DNA, 15 bp, Homo sapiens
aaaaatttaaaataa

SEQ ID NO: 1499516 - DNA, 15 bp, Homo sapiens
taaaaatttaaaata

SEQ ID NO: 1499517 - DNA, 15 bp, Homo sapiens
ataaaaatttaaaat

SEQ ID NO: 1499518 - DNA, 15 bp, Homo sapiens
cgcgccactgcactc

SEQ ID NO: 1499519 - DNA, 15 bp, Homo sapiens
tcgcgccactgcact

SEQ ID NO: 1499520 - DNA, 15 bp, Homo sapiens
atcgcgccactgcac

SEQ ID NO: 1499521 - DNA, 15 bp, Homo sapiens
gatcgcgccactgca

SEQ ID NO: 1499522 - DNA, 15 bp, Homo sapiens
agatcgcgccactgc

SEQ ID NO: 1499523 - DNA, 15 bp, Homo sapiens
gagatcgcgccactg

SEQ ID NO: 1499524 - DNA, 15 bp, Homo sapiens
tgagatcgcgccact

SEQ ID NO: 1499525 - DNA, 15 bp, Homo sapiens
ctgagatcgcgccac

SEQ ID NO: 1499526 - DNA, 15 bp, Homo sapiens
gctgagatcgcgcca

SEQ ID NO: 1499527 - DNA, 15 bp, Homo sapiens
agctgagatcgcgcc

SEQ ID NO: 1499528 - DNA, 15 bp, Homo sapiens
gagctgagatcgcgc

SEQ ID NO: 1499529 - DNA, 15 bp, Homo sapiens
tgagctgagatcgcg

SEQ ID NO: 1499530 - DNA, 15 bp, Homo sapiens
cgttgcagtgagctg

SEQ ID NO: 1499531 - DNA, 15 bp, Homo sapiens
acgttgcagtgagct

SEQ ID NO: 1499532 - DNA, 15 bp, Homo sapiens
gacgttgcagtgagc

SEQ ID NO: 1499533 - DNA, 15 bp, Homo sapiens
agacgttgcagtgag

SEQ ID NO: 1499534 - DNA, 15 bp, Homo sapiens
cagacgttgcagtga

SEQ ID NO: 1499535 - DNA, 15 bp, Homo sapiens
gcagacgttgcagtg

SEQ ID NO: 1499536 - DNA, 15 bp, Homo sapiens
ggcagacgttgcagt

SEQ ID NO: 1499537 - DNA, 15 bp, Homo sapiens
aggcagacgttgcag

SEQ ID NO: 1499538 - DNA, 15 bp, Homo sapiens
gaggcagacgttgca

SEQ ID NO: 1499539 - DNA, 15 bp, Homo sapiens
ggaggcagacgttgc

SEQ ID NO: 1499540 - DNA, 15 bp, Homo sapiens
aggaggcagacgttg

SEQ ID NO: 1499541 - DNA, 15 bp, Homo sapiens
caggaggcagacgtt

SEQ ID NO: 1499542 - DNA, 15 bp, Homo sapiens
ccaggaggcagacgt

SEQ ID NO: 1499543 - DNA, 15 bp, Homo sapiens
cccaggaggcagacg

SEQ ID NO: 1499544 - DNA, 15 bp, Homo sapiens
acccaggaggcagac

SEQ ID NO: 1499545 - DNA, 15 bp, Homo sapiens
tgcgcctgtagtccc

SEQ ID NO: 1499546 - DNA, 15 bp, Homo sapiens
atgcgcctgtagtcc

SEQ ID NO: 1499547 - DNA, 15 bp, Homo sapiens
catgcgcctgtagtc

SEQ ID NO: 1499548 - DNA, 15 bp, Homo sapiens
gcatgcgcctgtagt

SEQ ID NO: 1499549 - DNA, 15 bp, Homo sapiens
ggcatgcgcctgtag

SEQ ID NO: 1499550 - DNA, 15 bp, Homo sapiens
tggcatgcgcctgta

SEQ ID NO: 1499551 - DNA, 15 bp, Homo sapiens
gtggcatgcgcctgt

SEQ ID NO: 1499552 - DNA, 15 bp, Homo sapiens
ggtggcatgcgcctg

SEQ ID NO: 1499553 - DNA, 15 bp, Homo sapiens
tggtggcatgcgcct

SEQ ID NO: 1499554 - DNA, 15 bp, Homo sapiens
gtggtggcatgcgcc

SEQ ID NO: 1499555 - DNA, 15 bp, Homo sapiens
cgtggtggcatgcgc

SEQ ID NO: 1499556 - DNA, 15 bp, Homo sapiens
gcgtggtggcatgcg

SEQ ID NO: 1499557 - DNA, 15 bp, Homo sapiens
ggcgtggtggcatgc

SEQ ID NO: 1499558 - DNA, 15 bp, Homo sapiens
gggcgtggtggcatg

SEQ ID NO: 1499559 - DNA, 15 bp, Homo sapiens
tgggcgtggtggcat

SEQ ID NO: 1499560 - DNA, 15 bp, Homo sapiens
caaaattagctgggc

SEQ ID NO: 1499561 - DNA, 15 bp, Homo sapiens
acaaaattagctggg

SEQ ID NO: 1499562 - DNA, 15 bp, Homo sapiens
tacaaaattagctgg

SEQ ID NO: 1499563 - DNA, 15 bp, Homo sapiens
atacaaaattagctg

SEQ ID NO: 1499564 - DNA, 15 bp, Homo sapiens
aatacaaaattagct

SEQ ID NO: 1499565 - DNA, 15 bp, Homo sapiens
gcacggtgaaaccct

SEQ ID NO: 1499566 - DNA, 15 bp, Homo sapiens
agcacggtgaaaccc

SEQ ID NO: 1499567 - DNA, 15 bp, Homo sapiens
tagcacggtgaaacc

SEQ ID NO: 1499568 - DNA, 15 bp, Homo sapiens
ctagcacggtgaaac

SEQ ID NO: 1499569 - DNA, 15 bp, Homo sapiens
gctagcacggtgaaa

SEQ ID NO: 1499570 - DNA, 15 bp, Homo sapiens
ggctagcacggtgaa

SEQ ID NO: 1499571 - DNA, 15 bp, Homo sapiens
tggctagcacggtga

SEQ ID NO: 1499572 - DNA, 15 bp, Homo sapiens
ctggctagcacggtg

SEQ ID NO: 1499573 - DNA, 15 bp, Homo sapiens
cctggctagcacggt

SEQ ID NO: 1499574 - DNA, 15 bp, Homo sapiens
tcctggctagcacgg

SEQ ID NO: 1499575 - DNA, 15 bp, Homo sapiens
atcctggctagcacg

SEQ ID NO: 1499576 - DNA, 15 bp, Homo sapiens
catcctggctagcac

SEQ ID NO: 1499577 - DNA, 15 bp, Homo sapiens
ccatcctggctagca

SEQ ID NO: 1499578 - DNA, 15 bp, Homo sapiens
cccatcctggctagc

SEQ ID NO: 1499579 - DNA, 15 bp, Homo sapiens
acccatcctggctag

SEQ ID NO: 1499580 - DNA, 15 bp, Homo sapiens
gacccatcctggcta

SEQ ID NO: 1499581 - DNA, 15 bp, Homo sapiens
agacccatcctggct

SEQ ID NO: 1499582 - DNA, 15 bp, Homo sapiens
cagacccatcctggc

SEQ ID NO: 1499583 - DNA, 15 bp, Homo sapiens
tcagacccatcctgg

SEQ ID NO: 1499584 - DNA, 15 bp, Homo sapiens
ttcagacccatcctg

SEQ ID NO: 1499585 - DNA, 15 bp, Homo sapiens
attcagacccatcct

SEQ ID NO: 1499586 - DNA, 15 bp, Homo sapiens
aattcagacccatcc

SEQ ID NO: 1499587 - DNA, 15 bp, Homo sapiens
aaattcagacccatc

SEQ ID NO: 1499588 - DNA, 15 bp, Homo sapiens
gaaattcagacccat

SEQ ID NO: 1499589 - DNA, 15 bp, Homo sapiens
agaaattcagaccca

SEQ ID NO: 1499590 - DNA, 15 bp, Homo sapiens
aagaaattcagaccc

SEQ ID NO: 1499591 - DNA, 15 bp, Homo sapiens
caagaaattcagacc

SEQ ID NO: 1499592 - DNA, 15 bp, Homo sapiens
tcaagaaattcagac

SEQ ID NO: 1499593 - DNA, 15 bp, Homo sapiens
atcaagaaattcaga

SEQ ID NO: 1499594 - DNA, 15 bp, Homo sapiens
catcaagaaattcag

SEQ ID NO: 1499595 - DNA, 15 bp, Homo sapiens
acatcaagaaattca

SEQ ID NO: 1499596 - DNA, 15 bp, Homo sapiens
gacatcaagaaattc

SEQ ID NO: 1499597 - DNA, 15 bp, Homo sapiens
cgacatcaagaaatt

SEQ ID NO: 1499598 - DNA, 15 bp, Homo sapiens
acgacatcaagaaat

SEQ ID NO: 1499599 - DNA, 15 bp, Homo sapiens
cacgacatcaagaaa

SEQ ID NO: 1499600 - DNA, 15 bp, Homo sapiens
tcacgacatcaagaa

SEQ ID NO: 1499601 - DNA, 15 bp, Homo sapiens
atcacgacatcaaga

SEQ ID NO: 1499602 - DNA, 15 bp, Homo sapiens
gatcacgacatcaag

SEQ ID NO: 1499603 - DNA, 15 bp, Homo sapiens
ggatcacgacatcaa

SEQ ID NO: 1499604 - DNA, 15 bp, Homo sapiens
tggatcacgacatca

SEQ ID NO: 1499605 - DNA, 15 bp, Homo sapiens
gtggatcacgacatc

SEQ ID NO: 1499606 - DNA, 15 bp, Homo sapiens
ggtggatcacgacat

SEQ ID NO: 1499607 - DNA, 15 bp, Homo sapiens
aggtggatcacgaca

SEQ ID NO: 1499608 - DNA, 15 bp, Homo sapiens
caggtggatcacgac

SEQ ID NO: 1499609 - DNA, 15 bp, Homo sapiens
tcaaggcaggtggat

SEQ ID NO: 1499610 - DNA, 15 bp, Homo sapiens
gtcaaggcaggtgga

SEQ ID NO: 1499611 - DNA, 15 bp, Homo sapiens
agtcaaggcaggtgg

SEQ ID NO: 1499612 - DNA, 15 bp, Homo sapiens
aagtcaaggcaggtg

SEQ ID NO: 1499613 - DNA, 15 bp, Homo sapiens
gaagtcaaggcaggt

SEQ ID NO: 1499614 - DNA, 15 bp, Homo sapiens
ggaagtcaaggcagg

SEQ ID NO: 1499615 - DNA, 15 bp, Homo sapiens
gggaagtcaaggcag

SEQ ID NO: 1499616 - DNA, 15 bp, Homo sapiens
tgggaagtcaaggca

SEQ ID NO: 1499617 - DNA, 15 bp, Homo sapiens
ttgggaagtcaaggc

SEQ ID NO: 1499618 - DNA, 15 bp, Homo sapiens
tttgggaagtcaagg

SEQ ID NO: 1499619 - DNA, 15 bp, Homo sapiens
ctttgggaagtcaag

SEQ ID NO: 1499620 - DNA, 15 bp, Homo sapiens
actttgggaagtcaa

SEQ ID NO: 1499621 - DNA, 15 bp, Homo sapiens
cactttgggaagtca

SEQ ID NO: 1499622 - DNA, 15 bp, Homo sapiens
gcactttgggaagtc

SEQ ID NO: 1499623 - DNA, 15 bp, Homo sapiens
agcactttgggaagt

SEQ ID NO: 1499624 - DNA, 15 bp, Homo sapiens
cgggcacggtggctc

SEQ ID NO: 1499625 - DNA, 15 bp, Homo sapiens
ccgggcacggtggct

SEQ ID NO: 1499626 - DNA, 15 bp, Homo sapiens
gccgggcacggtggc

SEQ ID NO: 1499627 - DNA, 15 bp, Homo sapiens
ggccgggcacggtgg

SEQ ID NO: 1499628 - DNA, 15 bp, Homo sapiens
gggccgggcacggtg

SEQ ID NO: 1499629 - DNA, 15 bp, Homo sapiens
cgggccgggcacggt

SEQ ID NO: 1499630 - DNA, 15 bp, Homo sapiens
ccgggccgggcacgg

SEQ ID NO: 1499631 - DNA, 15 bp, Homo sapiens
tccgggccgggcacg

SEQ ID NO: 1499632 - DNA, 15 bp, Homo sapiens
ttccgggccgggcac

SEQ ID NO: 1499633 - DNA, 15 bp, Homo sapiens
attccgggccgggca

SEQ ID NO: 1499634 - DNA, 15 bp, Homo sapiens
aattccgggccgggc

SEQ ID NO: 1499635 - DNA, 15 bp, Homo sapiens
gaattccgggccggg

SEQ ID NO: 1499636 - DNA, 15 bp, Homo sapiens
tgaattccgggccgg

SEQ ID NO: 1499637 - DNA, 15 bp, Homo sapiens
atgaattccgggccg

SEQ ID NO: 1499638 - DNA, 15 bp, Homo sapiens
gatgaattccgggcc

SEQ ID NO: 1499639 - DNA, 15 bp, Homo sapiens
ggatgaattccgggc

SEQ ID NO: 1499640 - DNA, 15 bp, Homo sapiens
aggatgaattccggg

SEQ ID NO: 1499641 - DNA, 15 bp, Homo sapiens
aaggatgaattccgg

SEQ ID NO: 1499642 - DNA, 15 bp, Homo sapiens
aaaggatgaattccg

SEQ ID NO: 1499643 - DNA, 15 bp, Homo sapiens
taaaggatgaattcc

SEQ ID NO: 1499644 - DNA, 15 bp, Homo sapiens
ctaaaggatgaattc

SEQ ID NO: 1499645 - DNA, 15 bp, Homo sapiens
tctaaaggatgaatt

SEQ ID NO: 1499646 - DNA, 15 bp, Homo sapiens
ttctaaaggatgaat

SEQ ID NO: 1499647 - DNA, 15 bp, Homo sapiens
tttctaaaggatgaa

SEQ ID NO: 1499648 - DNA, 15 bp, Homo sapiens
ctttctaaaggatga

SEQ ID NO: 1499649 - DNA, 15 bp, Homo sapiens
tctttctaaaggatg

SEQ ID NO: 1499650 - DNA, 15 bp, Homo sapiens
atctttctaaaggat

SEQ ID NO: 1499651 - DNA, 15 bp, Homo sapiens
aatctttctaaagga

SEQ ID NO: 1499652 - DNA, 15 bp, Homo sapiens
aaatctttctaaagg

SEQ ID NO: 1499653 - DNA, 15 bp, Homo sapiens
gaaatctttctaaag

SEQ ID NO: 1499654 - DNA, 15 bp, Homo sapiens
agaaatctttctaaa

SEQ ID NO: 1499655 - DNA, 15 bp, Homo sapiens
aagaaatctttctaa

SEQ ID NO: 1499656 - DNA, 15 bp, Homo sapiens
gaagaaatctttcta

SEQ ID NO: 1499657 - DNA, 15 bp, Homo sapiens
ggaagaaatctttct

SEQ ID NO: 1499658 - DNA, 15 bp, Homo sapiens
tggaagaaatctttc

SEQ ID NO: 1499659 - DNA, 15 bp, Homo sapiens
ctggaagaaatcttt

SEQ ID NO: 1499660 - DNA, 15 bp, Homo sapiens
gctggaagaaatctt

SEQ ID NO: 1499661 - DNA, 15 bp, Homo sapiens
agctggaagaaatct

SEQ ID NO: 1499662 - DNA, 15 bp, Homo sapiens
cagctggaagaaatc

SEQ ID NO: 1499663 - DNA, 15 bp, Homo sapiens
acagctggaagaaat

SEQ ID NO: 1499664 - DNA, 15 bp, Homo sapiens
aacagctggaagaaa

SEQ ID NO: 1499665 - DNA, 15 bp, Homo sapiens
gaacagctggaagaa

SEQ ID NO: 1499666 - DNA, 15 bp, Homo sapiens
ggaacagctggaaga

SEQ ID NO: 1499667 - DNA, 15 bp, Homo sapiens
aggaacagctggaag

SEQ ID NO: 1499668 - DNA, 15 bp, Homo sapiens
gaggaacagctggaa

SEQ ID NO: 1499669 - DNA, 15 bp, Homo sapiens
tgaggaacagctgga

SEQ ID NO: 1499670 - DNA, 15 bp, Homo sapiens
ctgaggaacagctgg

SEQ ID NO: 1499671 - DNA, 15 bp, Homo sapiens
actgaggaacagctg

SEQ ID NO: 1499672 - DNA, 15 bp, Homo sapiens
aactgaggaacagct

SEQ ID NO: 1499673 - DNA, 15 bp, Homo sapiens
gaactgaggaacagc

SEQ ID NO: 1499674 - DNA, 15 bp, Homo sapiens
agaactgaggaacag

SEQ ID NO: 1499675 - DNA, 15 bp, Homo sapiens
gagaactgaggaaca

SEQ ID NO: 1499676 - DNA, 15 bp, Homo sapiens
agagaactgaggaac

SEQ ID NO: 1499677 - DNA, 15 bp, Homo sapiens
cagagaactgaggaa

SEQ ID NO: 1499678 - DNA, 15 bp, Homo sapiens
gcagagaactgagga

SEQ ID NO: 1499679 - DNA, 15 bp, Homo sapiens
tgcagagaactgagg

SEQ ID NO: 1499680 - DNA, 15 bp, Homo sapiens
gtgcagagaactgag

SEQ ID NO: 1499681 - DNA, 15 bp, Homo sapiens
agtgcagagaactga

SEQ ID NO: 1499682 - DNA, 15 bp, Homo sapiens
gagtgcagagaactg

SEQ ID NO: 1499683 - DNA, 15 bp, Homo sapiens
ggagtgcagagaact

SEQ ID NO: 1499684 - DNA, 15 bp, Homo sapiens
gggagtgcagagaac

SEQ ID NO: 1499685 - DNA, 15 bp, Homo sapiens
agggagtgcagagaa

SEQ ID NO: 1499686 - DNA, 15 bp, Homo sapiens
aagggagtgcagaga

SEQ ID NO: 1499687 - DNA, 15 bp, Homo sapiens
taagggagtgcagag

SEQ ID NO: 1499688 - DNA, 15 bp, Homo sapiens
gtaagggagtgcaga

SEQ ID NO: 1499689 - DNA, 15 bp, Homo sapiens
tgtaagggagtgcag

SEQ ID NO: 1499690 - DNA, 15 bp, Homo sapiens
gtgtaagggagtgca

SEQ ID NO: 1499691 - DNA, 15 bp, Homo sapiens
agtgtaagggagtgc

SEQ ID NO: 1499692 - DNA, 15 bp, Homo sapiens
aagtgtaagggagtg

SEQ ID NO: 1499693 - DNA, 15 bp, Homo sapiens
aaagtgtaagggagt

SEQ ID NO: 1499694 - DNA, 15 bp, Homo sapiens
gaaagtgtaagggag

SEQ ID NO: 1499695 - DNA, 15 bp, Homo sapiens
ggaaagtgtaaggga

SEQ ID NO: 1499696 - DNA, 15 bp, Homo sapiens
tggaaagtgtaaggg

SEQ ID NO: 1499697 - DNA, 15 bp, Homo sapiens
gtggaaagtgtaagg

SEQ ID NO: 1499698 - DNA, 15 bp, Homo sapiens
ggtggaaagtgtaag

SEQ ID NO: 1499699 - DNA, 15 bp, Homo sapiens
aggtggaaagtgtaa

SEQ ID NO: 1499700 - DNA, 15 bp, Homo sapiens
aaggtggaaagtgta

SEQ ID NO: 1499701 - DNA, 15 bp, Homo sapiens
taaggtggaaagtgt

SEQ ID NO: 1499702 - DNA, 15 bp, Homo sapiens
ataaggtggaaagtg

SEQ ID NO: 1499703 - DNA, 15 bp, Homo sapiens
gataaggtggaaagt

SEQ ID NO: 1499704 - DNA, 15 bp, Homo sapiens
agataaggtggaaag

SEQ ID NO: 1499705 - DNA, 15 bp, Homo sapiens
cagataaggtggaaa

SEQ ID NO: 1499706 - DNA, 15 bp, Homo sapiens
acagataaggtggaa

SEQ ID NO: 1499707 - DNA, 15 bp, Homo sapiens
gacagataaggtgga

SEQ ID NO: 1499708 - DNA, 15 bp, Homo sapiens
agacagataaggtgg

SEQ ID NO: 1499709 - DNA, 15 bp, Homo sapiens
cagacagataaggtg

SEQ ID NO: 1499710 - DNA, 15 bp, Homo sapiens
ccagacagataaggt

SEQ ID NO: 1499711 - DNA, 15 bp, Homo sapiens
cccagacagataagg

SEQ ID NO: 1499712 - DNA, 15 bp, Homo sapiens
tcccagacagataag

SEQ ID NO: 1499713 - DNA, 15 bp, Homo sapiens
ttcccagacagataa

SEQ ID NO: 1499714 - DNA, 15 bp, Homo sapiens
gttcccagacagata

SEQ ID NO: 1499715 - DNA, 15 bp, Homo sapiens
agttcccagacagat

SEQ ID NO: 1499716 - DNA, 15 bp, Homo sapiens
tagttcccagacaga

SEQ ID NO: 1499717 - DNA, 15 bp, Homo sapiens
ttagttcccagacag

SEQ ID NO: 1499718 - DNA, 15 bp, Homo sapiens
attagttcccagaca

SEQ ID NO: 1499719 - DNA, 15 bp, Homo sapiens
aattagttcccagac

SEQ ID NO: 1499720 - DNA, 15 bp, Homo sapiens
aaattagttcccaga

SEQ ID NO: 1499721 - DNA, 15 bp, Homo sapiens
taaattagttcccag

SEQ ID NO: 1499722 - DNA, 15 bp, Homo sapiens
ctaaattagttccca

SEQ ID NO: 1499723 - DNA, 15 bp, Homo sapiens
actaaattagttccc

SEQ ID NO: 1499724 - DNA, 15 bp, Homo sapiens
gactaaattagttcc

SEQ ID NO: 1499725 - DNA, 15 bp, Homo sapiens
agactaaattagttc

SEQ ID NO: 1499726 - DNA, 15 bp, Homo sapiens
aagactaaattagtt

SEQ ID NO: 1499727 - DNA, 15 bp, Homo sapiens
aaagactaaattagt

SEQ ID NO: 1499728 - DNA, 15 bp, Homo sapiens
taaagactaaattag

SEQ ID NO: 1499729 - DNA, 15 bp, Homo sapiens
ataaagactaaatta

SEQ ID NO: 1499730 - DNA, 15 bp, Homo sapiens
cataaagactaaatt

SEQ ID NO: 1499731 - DNA, 15 bp, Homo sapiens
acataaagactaaat

SEQ ID NO: 1499732 - DNA, 15 bp, Homo sapiens
aacataaagactaaa

SEQ ID NO: 1499733 - DNA, 15 bp, Homo sapiens
caacataaagactaa

SEQ ID NO: 1499734 - DNA, 15 bp, Homo sapiens
ccaacataaagacta

SEQ ID NO: 1499735 - DNA, 15 bp, Homo sapiens
gccaacataaagact

SEQ ID NO: 1499736 - DNA, 15 bp, Homo sapiens
agccaacataaagac

SEQ ID NO: 1499737 - DNA, 15 bp, Homo sapiens
cagccaacataaaga

SEQ ID NO: 1499738 - DNA, 15 bp, Homo sapiens
gcagccaacataaag

SEQ ID NO: 1499739 - DNA, 15 bp, Homo sapiens
agcagccaacataaa

SEQ ID NO: 1499740 - DNA, 15 bp, Homo sapiens
aagcagccaacataa

SEQ ID NO: 1499741 - DNA, 15 bp, Homo sapiens
aaagcagccaacata

SEQ ID NO: 1499742 - DNA, 15 bp, Homo sapiens
gaaagcagccaacat

SEQ ID NO: 1499743 - DNA, 15 bp, Homo sapiens
agaaagcagccaaca

SEQ ID NO: 1499744 - DNA, 15 bp, Homo sapiens
aagaaagcagccaac

SEQ ID NO: 1499745 - DNA, 15 bp, Homo sapiens
aaagaaagcagccaa

SEQ ID NO: 1499746 - DNA, 15 bp, Homo sapiens
aaaagaaagcagcca

SEQ ID NO: 1499747 - DNA, 15 bp, Homo sapiens
gaaaagaaagcagcc

SEQ ID NO: 1499748 - DNA, 15 bp, Homo sapiens
tgaaaagaaagcagc

SEQ ID NO: 1499749 - DNA, 15 bp, Homo sapiens
gtgaaaagaaagcag

SEQ ID NO: 1499750 - DNA, 15 bp, Homo sapiens
agtgaaaagaaagca

SEQ ID NO: 1499751 - DNA, 15 bp, Homo sapiens
aagtgaaaagaaagc

SEQ ID NO: 1499752 - DNA, 15 bp, Homo sapiens
aaaagtgaaaagaaa

SEQ ID NO: 1499753 - DNA, 15 bp, Homo sapiens
gaaaagtgaaaagaa

SEQ ID NO: 1499754 - DNA, 15 bp, Homo sapiens
tgaaaagtgaaaaga

SEQ ID NO: 1499755 - DNA, 15 bp, Homo sapiens
ctgaaaagtgaaaag

SEQ ID NO: 1499756 - DNA, 15 bp, Homo sapiens
cctgaaaagtgaaaa

SEQ ID NO: 1499757 - DNA, 15 bp, Homo sapiens
gcctgaaaagtgaaa

SEQ ID NO: 1499758 - DNA, 15 bp, Homo sapiens
agcctgaaaagtgaa

SEQ ID NO: 1499759 - DNA, 15 bp, Homo sapiens
tagcctgaaaagtga

SEQ ID NO: 1499760 - DNA, 15 bp, Homo sapiens
ttagcctgaaaagtg

SEQ ID NO: 1499761 - DNA, 15 bp, Homo sapiens
cttagcctgaaaagt

SEQ ID NO: 1499762 - DNA, 15 bp, Homo sapiens
tcttagcctgaaaag

SEQ ID NO: 1499763 - DNA, 15 bp, Homo sapiens
atcttagcctgaaaa

SEQ ID NO: 1499764 - DNA, 15 bp, Homo sapiens
aatcttagcctgaaa

SEQ ID NO: 1499765 - DNA, 15 bp, Homo sapiens
aaatcttagcctgaa

SEQ ID NO: 1499766 - DNA, 15 bp, Homo sapiens
gaaatcttagcctga

SEQ ID NO: 1499767 - DNA, 15 bp, Homo sapiens
ggaaatcttagcctg

SEQ ID NO: 1499768 - DNA, 15 bp, Homo sapiens
aggaaatcttagcct

SEQ ID NO: 1499769 - DNA, 15 bp, Homo sapiens
aaggaaatcttagcc

SEQ ID NO: 1499770 - DNA, 15 bp, Homo sapiens
aaaggaaatcttagc

SEQ ID NO: 1499771 - DNA, 15 bp, Homo sapiens
gaaaggaaatcttag

SEQ ID NO: 1499772 - DNA, 15 bp, Homo sapiens
agaaaggaaatctta

SEQ ID NO: 1499773 - DNA, 15 bp, Homo sapiens
gagaaaggaaatctt

SEQ ID NO: 1499774 - DNA, 15 bp, Homo sapiens
ccaagagaaaggaaa

SEQ ID NO: 1499775 - DNA, 15 bp, Homo sapiens
tccaagagaaaggaa

SEQ ID NO: 1499776 - DNA, 15 bp, Homo sapiens
ttccaagagaaagga

SEQ ID NO: 1499777 - DNA, 15 bp, Homo sapiens
tttccaagagaaagg

SEQ ID NO: 1499778 - DNA, 15 bp, Homo sapiens
atttccaagagaaag

SEQ ID NO: 1499779 - DNA, 15 bp, Homo sapiens
gatttccaagagaaa

SEQ ID NO: 1499780 - DNA, 15 bp, Homo sapiens
tgatttccaagagaa

SEQ ID NO: 1499781 - DNA, 15 bp, Homo sapiens
ctgatttccaagaga

SEQ ID NO: 1499782 - DNA, 15 bp, Homo sapiens
tctgatttccaagag

SEQ ID NO: 1499783 - DNA, 15 bp, Homo sapiens
gtctgatttccaaga

SEQ ID NO: 1499784 - DNA, 15 bp, Homo sapiens
cgtctgatttccaag

SEQ ID NO: 1499785 - DNA, 15 bp, Homo sapiens
acgtctgatttccaa

SEQ ID NO: 1499786 - DNA, 15 bp, Homo sapiens
aacgtctgatttcca

SEQ ID NO: 1499787 - DNA, 15 bp, Homo sapiens
aaacgtctgatttcc

SEQ ID NO: 1499788 - DNA, 15 bp, Homo sapiens
taaacgtctgatttc

SEQ ID NO: 1499789 - DNA, 15 bp, Homo sapiens
gtaaacgtctgattt

SEQ ID NO: 1499790 - DNA, 15 bp, Homo sapiens
agtaaacgtctgatt

SEQ ID NO: 1499791 - DNA, 15 bp, Homo sapiens
aagtaaacgtctgat

SEQ ID NO: 1499792 - DNA, 15 bp, Homo sapiens
caagtaaacgtctga

SEQ ID NO: 1499793 - DNA, 15 bp, Homo sapiens
ccaagtaaacgtctg

SEQ ID NO: 1499794 - DNA, 15 bp, Homo sapiens
accaagtaaacgtct

SEQ ID NO: 1499795 - DNA, 15 bp, Homo sapiens
gaccaagtaaacgtc

SEQ ID NO: 1499796 - DNA, 15 bp, Homo sapiens
ggaccaagtaaacgt

SEQ ID NO: 1499797 - DNA, 15 bp, Homo sapiens
aggaccaagtaaacg

SEQ ID NO: 1499798 - DNA, 15 bp, Homo sapiens
caggaccaagtaaac

SEQ ID NO: 1499799 - DNA, 15 bp, Homo sapiens
gcaggaccaagtaaa

SEQ ID NO: 1499800 - DNA, 15 bp, Homo sapiens
tgcaggaccaagtaa

SEQ ID NO: 1499801 - DNA, 15 bp, Homo sapiens
ctgcaggaccaagta

SEQ ID NO: 1499802 - DNA, 15 bp, Homo sapiens
gctgcaggaccaagt

SEQ ID NO: 1499803 - DNA, 15 bp, Homo sapiens
agctgcaggaccaag

SEQ ID NO: 1499804 - DNA, 15 bp, Homo sapiens
gagctgcaggaccaa

SEQ ID NO: 1499805 - DNA, 15 bp, Homo sapiens
agagctgcaggacca

SEQ ID NO: 1499806 - DNA, 15 bp, Homo sapiens
gagagctgcaggacc

SEQ ID NO: 1499807 - DNA, 15 bp, Homo sapiens
agagagctgcaggac

SEQ ID NO: 1499808 - DNA, 15 bp, Homo sapiens
gagagagctgcagga

SEQ ID NO: 1499809 - DNA, 15 bp, Homo sapiens
agagagagctgcagg

SEQ ID NO: 1499810 - DNA, 15 bp, Homo sapiens
gagagagagctgcag

SEQ ID NO: 1499811 - DNA, 15 bp, Homo sapiens
agagagagagctgca

SEQ ID NO: 1499812 - DNA, 15 bp, Homo sapiens
cagagagagagctgc

SEQ ID NO: 1499813 - DNA, 15 bp, Homo sapiens
acagagagagagctg

SEQ ID NO: 1499814 - DNA, 15 bp, Homo sapiens
cacagagagagagct

SEQ ID NO: 1499815 - DNA, 15 bp, Homo sapiens
ccacagagagagagc

SEQ ID NO: 1499816 - DNA, 15 bp, Homo sapiens
tccacagagagagag

SEQ ID NO: 1499817 - DNA, 15 bp, Homo sapiens
gtccacagagagaga

SEQ ID NO: 1499818 - DNA, 15 bp, Homo sapiens
ggtccacagagagag

SEQ ID NO: 1499819 - DNA, 15 bp, Homo sapiens
tggtccacagagaga

SEQ ID NO: 1499820 - DNA, 15 bp, Homo sapiens
ctggtccacagagag

SEQ ID NO: 1499821 - DNA, 15 bp, Homo sapiens
actggtccacagaga

SEQ ID NO: 1499822 - DNA, 15 bp, Homo sapiens
gactggtccacagag

SEQ ID NO: 1499823 - DNA, 15 bp, Homo sapiens
agactggtccacaga

SEQ ID NO: 1499824 - DNA, 15 bp, Homo sapiens
aagactggtccacag

SEQ ID NO: 1499825 - DNA, 15 bp, Homo sapiens
aaagactggtccaca

SEQ ID NO: 1499826 - DNA, 15 bp, Homo sapiens
aaaagactggtccac

SEQ ID NO: 1499827 - DNA, 15 bp, Homo sapiens
aaaaagactggtcca

SEQ ID NO: 1499828 - DNA, 15 bp, Homo sapiens
aaaaaagactggtcc

SEQ ID NO: 1499829 - DNA, 15 bp, Homo sapiens
caaaaaagactggtc

SEQ ID NO: 1499830 - DNA, 15 bp, Homo sapiens
acaaaaaagactggt

SEQ ID NO: 1499831 - DNA, 15 bp, Homo sapiens
aacaaaaaagactgg

SEQ ID NO: 1499832 - DNA, 15 bp, Homo sapiens
caacaaaaaagactg

SEQ ID NO: 1499833 - DNA, 15 bp, Homo sapiens
acaacaaaaaagact

SEQ ID NO: 1499834 - DNA, 15 bp, Homo sapiens
aacaacaaaaaagac

SEQ ID NO: 1499835 - DNA, 15 bp, Homo sapiens
caacaacaaaaaaga

SEQ ID NO: 1499836 - DNA, 15 bp, Homo sapiens
acaacaacaaaaaag

SEQ ID NO: 1499837 - DNA, 15 bp, Homo sapiens
caacaacaacaacaa

SEQ ID NO: 1499838 - DNA, 15 bp, Homo sapiens
gcaacaacaacaaca

SEQ ID NO: 1499839 - DNA, 15 bp, Homo sapiens
ggcaacaacaacaac

SEQ ID NO: 1499840 - DNA, 15 bp, Homo sapiens
tggcaacaacaacaa

SEQ ID NO: 1499841 - DNA, 15 bp, Homo sapiens
ctggcaacaacaaca

SEQ ID NO: 1499842 - DNA, 15 bp, Homo sapiens
tctggcaacaacaac

SEQ ID NO: 1499843 - DNA, 15 bp, Homo sapiens
atctggcaacaacaa

SEQ ID NO: 1499844 - DNA, 15 bp, Homo sapiens
tatctggcaacaaca

SEQ ID NO: 1499845 - DNA, 15 bp, Homo sapiens
gtatctggcaacaac

SEQ ID NO: 1499846 - DNA, 15 bp, Homo sapiens
agtatctggcaacaa

SEQ ID NO: 1499847 - DNA, 15 bp, Homo sapiens
gagtatctggcaaca

SEQ ID NO: 1499848 - DNA, 15 bp, Homo sapiens
tgagtatctggcaac

SEQ ID NO: 1499849 - DNA, 15 bp, Homo sapiens
gtgagtatctggcaa

SEQ ID NO: 1499850 - DNA, 15 bp, Homo sapiens
ggtgagtatctggca

SEQ ID NO: 1499851 - DNA, 15 bp, Homo sapiens
cggtgagtatctggc

SEQ ID NO: 1499852 - DNA, 15 bp, Homo sapiens
gcggtgagtatctgg

SEQ ID NO: 1499853 - DNA, 15 bp, Homo sapiens
ggcggtgagtatctg

SEQ ID NO: 1499854 - DNA, 15 bp, Homo sapiens
aggcggtgagtatct

SEQ ID NO: 1499855 - DNA, 15 bp, Homo sapiens
gaggcggtgagtatc

SEQ ID NO: 1499856 - DNA, 15 bp, Homo sapiens
agaggcggtgagtat

SEQ ID NO: 1499857 - DNA, 15 bp, Homo sapiens
tagaggcggtgagta

SEQ ID NO: 1499858 - DNA, 15 bp, Homo sapiens
gtagaggcggtgagt

SEQ ID NO: 1499859 - DNA, 15 bp, Homo sapiens
agtagaggcggtgag

SEQ ID NO: 1499860 - DNA, 15 bp, Homo sapiens
cagtagaggcggtga

SEQ ID NO: 1499861 - DNA, 15 bp, Homo sapiens
acagtagaggcggtg

SEQ ID NO: 1499862 - DNA, 15 bp, Homo sapiens
aacagtagaggcggt

SEQ ID NO: 1499863 - DNA, 15 bp, Homo sapiens
aaacagtagaggcgg

SEQ ID NO: 1499864 - DNA, 15 bp, Homo sapiens
taaacagtagaggcg

SEQ ID NO: 1499865 - DNA, 15 bp, Homo sapiens
ataaacagtagaggc

SEQ ID NO: 1499866 - DNA, 15 bp, Homo sapiens
gataaacagtagagg

SEQ ID NO: 1499867 - DNA, 15 bp, Homo sapiens
ggataaacagtagag

SEQ ID NO: 1499868 - DNA, 15 bp, Homo sapiens
tggataaacagtaga

SEQ ID NO: 1499869 - DNA, 15 bp, Homo sapiens
gtggataaacagtag

SEQ ID NO: 1499870 - DNA, 15 bp, Homo sapiens
ggtggataaacagta

SEQ ID NO: 1499871 - DNA, 15 bp, Homo sapiens
gggtggataaacagt

SEQ ID NO: 1499872 - DNA, 15 bp, Homo sapiens
tgggtggataaacag

SEQ ID NO: 1499873 - DNA, 15 bp, Homo sapiens
atgggtggataaaca

SEQ ID NO: 1499874 - DNA, 15 bp, Homo sapiens
aatgggtggataaac

SEQ ID NO: 1499875 - DNA, 15 bp, Homo sapiens
aaatgggtggataaa

SEQ ID NO: 1499876 - DNA, 15 bp, Homo sapiens
gaaatgggtggataa

SEQ ID NO: 1499877 - DNA, 15 bp, Homo sapiens
ggaaatgggtggata

SEQ ID NO: 1499878 - DNA, 15 bp, Homo sapiens
aggaaatgggtggat

SEQ ID NO: 1499879 - DNA, 15 bp, Homo sapiens
aaggaaatgggtgga

SEQ ID NO: 1499880 - DNA, 15 bp, Homo sapiens
aaaggaaatgggtgg

SEQ ID NO: 1499881 - DNA, 15 bp, Homo sapiens
taaaggaaatgggtg

SEQ ID NO: 1499882 - DNA, 15 bp, Homo sapiens
ataaaggaaatgggt

SEQ ID NO: 1499883 - DNA, 15 bp, Homo sapiens
tataaaggaaatggg

SEQ ID NO: 1499884 - DNA, 15 bp, Homo sapiens
ttataaaggaaatgg

SEQ ID NO: 1499885 - DNA, 15 bp, Homo sapiens
gttataaaggaaatg

SEQ ID NO: 1499886 - DNA, 15 bp, Homo sapiens
agttataaaggaaat

SEQ ID NO: 1499887 - DNA, 15 bp, Homo sapiens
gagttataaaggaaa

SEQ ID NO: 1499888 - DNA, 15 bp, Homo sapiens
agagttataaaggaa

SEQ ID NO: 1499889 - DNA, 15 bp, Homo sapiens
cagagttataaagga

SEQ ID NO: 1499890 - DNA, 15 bp, Homo sapiens
tcagagttataaagg

SEQ ID NO: 1499891 - DNA, 15 bp, Homo sapiens
ttcagagttataaag

SEQ ID NO: 1499892 - DNA, 15 bp, Homo sapiens
tttcagagttataaa

SEQ ID NO: 1499893 - DNA, 15 bp, Homo sapiens
ttttcagagttataa

SEQ ID NO: 1499894 - DNA, 15 bp, Homo sapiens
cttttcagagttata

SEQ ID NO: 1499895 - DNA, 15 bp, Homo sapiens
acttttcagagttat

SEQ ID NO: 1499896 - DNA, 15 bp, Homo sapiens
tacttttcagagtta

SEQ ID NO: 1499897 - DNA, 15 bp, Homo sapiens
ctacttttcagagtt

SEQ ID NO: 1499898 - DNA, 15 bp, Homo sapiens
gctacttttcagagt

SEQ ID NO: 1499899 - DNA, 15 bp, Homo sapiens
agctacttttcagag

SEQ ID NO: 1499900 - DNA, 15 bp, Homo sapiens
gagctacttttcaga

SEQ ID NO: 1499901 - DNA, 15 bp, Homo sapiens
ggagctacttttcag

SEQ ID NO: 1499902 - DNA, 15 bp, Homo sapiens
aggagctacttttca

SEQ ID NO: 1499903 - DNA, 15 bp, Homo sapiens
caggagctacttttc

SEQ ID NO: 1499904 - DNA, 15 bp, Homo sapiens
gcaggagctactttt

SEQ ID NO: 1499905 - DNA, 15 bp, Homo sapiens
ggcaggagctacttt

SEQ ID NO: 1499906 - DNA, 15 bp, Homo sapiens
aggcaggagctactt

SEQ ID NO: 1499907 - DNA, 15 bp, Homo sapiens
gaggcaggagctact

SEQ ID NO: 1499908 - DNA, 15 bp, Homo sapiens
agaggcaggagctac

SEQ ID NO: 1499909 - DNA, 15 bp, Homo sapiens
cagaggcaggagcta

SEQ ID NO: 1499910 - DNA, 15 bp, Homo sapiens
gcagaggcaggagct

SEQ ID NO: 1499911 - DNA, 15 bp, Homo sapiens
agcagaggcaggagc

SEQ ID NO: 1499912 - DNA, 15 bp, Homo sapiens
aagcagaggcaggag

SEQ ID NO: 1499913 - DNA, 15 bp, Homo sapiens
caagcagaggcagga

SEQ ID NO: 1499914 - DNA, 15 bp, Homo sapiens
tcaagcagaggcagg

SEQ ID NO: 1499915 - DNA, 15 bp, Homo sapiens
atcaagcagaggcag

SEQ ID NO: 1499916 - DNA, 15 bp, Homo sapiens
aatcaagcagaggca

SEQ ID NO: 1499917 - DNA, 15 bp, Homo sapiens
caatcaagcagaggc

SEQ ID NO: 1499918 - DNA, 15 bp, Homo sapiens
gcaatcaagcagagg

SEQ ID NO: 1499919 - DNA, 15 bp, Homo sapiens
agcaatcaagcagag

SEQ ID NO: 1499920 - DNA, 15 bp, Homo sapiens
cagcaatcaagcaga

SEQ ID NO: 1499921 - DNA, 15 bp, Homo sapiens
acagcaatcaagcag

SEQ ID NO: 1499922 - DNA, 15 bp, Homo sapiens
aacagcaatcaagca

SEQ ID NO: 1499923 - DNA, 15 bp, Homo sapiens
aaacagcaatcaagc

SEQ ID NO: 1499924 - DNA, 15 bp, Homo sapiens
aaaacagcaatcaag

SEQ ID NO: 1499925 - DNA, 15 bp, Homo sapiens
gaaaacagcaatcaa

SEQ ID NO: 1499926 - DNA, 15 bp, Homo sapiens
agaaaacagcaatca

SEQ ID NO: 1499927 - DNA, 15 bp, Homo sapiens
aagaaaacagcaatc

SEQ ID NO: 1499928 - DNA, 15 bp, Homo sapiens
caagaaaacagcaat

SEQ ID NO: 1499929 - DNA, 15 bp, Homo sapiens
tcaagaaaacagcaa

SEQ ID NO: 1499930 - DNA, 15 bp, Homo sapiens
ttcaagaaaacagca

SEQ ID NO: 1499931 - DNA, 15 bp, Homo sapiens
tttcaagaaaacagc

SEQ ID NO: 1499932 - DNA, 15 bp, Homo sapiens
ctttcaagaaaacag

SEQ ID NO: 1499933 - DNA, 15 bp, Homo sapiens
actttcaagaaaaca

SEQ ID NO: 1499934 - DNA, 15 bp, Homo sapiens
cactttcaagaaaac

SEQ ID NO: 1499935 - DNA, 15 bp, Homo sapiens
tcactttcaagaaaa

SEQ ID NO: 1499936 - DNA, 15 bp, Homo sapiens
atcactttcaagaaa

SEQ ID NO: 1499937 - DNA, 15 bp, Homo sapiens
aatcactttcaagaa

SEQ ID NO: 1499938 - DNA, 15 bp, Homo sapiens
taatcactttcaaga

SEQ ID NO: 1499939 - DNA, 15 bp, Homo sapiens
gtaatcactttcaag

SEQ ID NO: 1499940 - DNA, 15 bp, Homo sapiens
agtaatcactttcaa

SEQ ID NO: 1499941 - DNA, 15 bp, Homo sapiens
aagtaatcactttca

SEQ ID NO: 1499942 - DNA, 15 bp, Homo sapiens
gaagtaatcactttc

SEQ ID NO: 1499943 - DNA, 15 bp, Homo sapiens
agaagtaatcacttt

SEQ ID NO: 1499944 - DNA, 15 bp, Homo sapiens
cagaagtaatcactt

SEQ ID NO: 1499945 - DNA, 15 bp, Homo sapiens
ccagaagtaatcact

SEQ ID NO: 1499946 - DNA, 15 bp, Homo sapiens
gccagaagtaatcac

SEQ ID NO: 1499947 - DNA, 15 bp, Homo sapiens
tgccagaagtaatca

SEQ ID NO: 1499948 - DNA, 15 bp, Homo sapiens
ttgccagaagtaatc

SEQ ID NO: 1499949 - DNA, 15 bp, Homo sapiens
tttgccagaagtaat

SEQ ID NO: 1499950 - DNA, 15 bp, Homo sapiens
ttttgccagaagtaa

SEQ ID NO: 1499951 - DNA, 15 bp, Homo sapiens
gttttgccagaagta

SEQ ID NO: 1499952 - DNA, 15 bp, Homo sapiens
tgttttgccagaagt

SEQ ID NO: 1499953 - DNA, 15 bp, Homo sapiens
atgttttgccagaag

SEQ ID NO: 1499954 - DNA, 15 bp, Homo sapiens
tatgttttgccagaa

SEQ ID NO: 1499955 - DNA, 15 bp, Homo sapiens
ctatgttttgccaga

SEQ ID NO: 1499956 - DNA, 15 bp, Homo sapiens
actatgttttgccag

SEQ ID NO: 1499957 - DNA, 15 bp, Homo sapiens
cactatgttttgcca

SEQ ID NO: 1499958 - DNA, 15 bp, Homo sapiens
ccactatgttttgcc

SEQ ID NO: 1499959 - DNA, 15 bp, Homo sapiens
accactatgttttgc

SEQ ID NO: 1499960 - DNA, 15 bp, Homo sapiens
gaccactatgttttg

SEQ ID NO: 1499961 - DNA, 15 bp, Homo sapiens
tgaccactatgtttt

SEQ ID NO: 1499962 - DNA, 15 bp, Homo sapiens
atgaccactatgttt

SEQ ID NO: 1499963 - DNA, 15 bp, Homo sapiens
aatgaccactatgtt

SEQ ID NO: 1499964 - DNA, 15 bp, Homo sapiens
caatgaccactatgt

SEQ ID NO: 1499965 - DNA, 15 bp, Homo sapiens
gcaatgaccactatg

SEQ ID NO: 1499966 - DNA, 15 bp, Homo sapiens
agcaatgaccactat

SEQ ID NO: 1499967 - DNA, 15 bp, Homo sapiens
aagcaatgaccacta

SEQ ID NO: 1499968 - DNA, 15 bp, Homo sapiens
taagcaatgaccact

SEQ ID NO: 1499969 - DNA, 15 bp, Homo sapiens
ctaagcaatgaccac

SEQ ID NO: 1499970 - DNA, 15 bp, Homo sapiens
actaagcaatgacca

SEQ ID NO: 1499971 - DNA, 15 bp, Homo sapiens
aactaagcaatgacc

SEQ ID NO: 1499972 - DNA, 15 bp, Homo sapiens
caactaagcaatgac

SEQ ID NO: 1499973 - DNA, 15 bp, Homo sapiens
acaactaagcaatga

SEQ ID NO: 1499974 - DNA, 15 bp, Homo sapiens
tacaactaagcaatg

SEQ ID NO: 1499975 - DNA, 15 bp, Homo sapiens
ttacaactaagcaat

SEQ ID NO: 1499976 - DNA, 15 bp, Homo sapiens
attacaactaagcaa

SEQ ID NO: 1499977 - DNA, 15 bp, Homo sapiens
cattacaactaagca

SEQ ID NO: 1499978 - DNA, 15 bp, Homo sapiens
gcattacaactaagc

SEQ ID NO: 1499979 - DNA, 15 bp, Homo sapiens
ggcattacaactaag

SEQ ID NO: 1499980 - DNA, 15 bp, Homo sapiens
tggcattacaactaa

SEQ ID NO: 1499981 - DNA, 15 bp, Homo sapiens
gtggcattacaacta

SEQ ID NO: 1499982 - DNA, 15 bp, Homo sapiens
agtggcattacaact

SEQ ID NO: 1499983 - DNA, 15 bp, Homo sapiens
cagtggcattacaac

SEQ ID NO: 1499984 - DNA, 15 bp, Homo sapiens
acagtggcattacaa

SEQ ID NO: 1499985 - DNA, 15 bp, Homo sapiens
cacagtggcattaca

SEQ ID NO: 1499986 - DNA, 15 bp, Homo sapiens
tcacagtggcattac

SEQ ID NO: 1499987 - DNA, 15 bp, Homo sapiens
atcacagtggcatta

SEQ ID NO: 1499988 - DNA, 15 bp, Homo sapiens
catcacagtggcatt

SEQ ID NO: 1499989 - DNA, 15 bp, Homo sapiens
acatcacagtggcat

SEQ ID NO: 1499990 - DNA, 15 bp, Homo sapiens
aacatcacagtggca

SEQ ID NO: 1499991 - DNA, 15 bp, Homo sapiens
gaacatcacagtggc

SEQ ID NO: 1499992 - DNA, 15 bp, Homo sapiens
ggaacatcacagtgg

SEQ ID NO: 1499993 - DNA, 15 bp, Homo sapiens
tggaacatcacagtg

SEQ ID NO: 1499994 - DNA, 15 bp, Homo sapiens
gtggaacatcacagt

SEQ ID NO: 1499995 - DNA, 15 bp, Homo sapiens
agtggaacatcacag

SEQ ID NO: 1499996 - DNA, 15 bp, Homo sapiens
gagtggaacatcaca

SEQ ID NO: 1499997 - DNA, 15 bp, Homo sapiens
ggagtggaacatcac

SEQ ID NO: 1499998 - DNA, 15 bp, Homo sapiens
gggagtggaacatca

SEQ ID NO: 1499999 - DNA, 15 bp, Homo sapiens
ggggagtggaacatc

SEQ ID NO: 1500000 - DNA, 15 bp, Homo sapiens
gggggagtggaacat

SEQ ID NO: 1500001 - DNA, 15 bp, Homo sapiens
ggggggagtggaaca

SEQ ID NO: 1500002 - DNA, 15 bp, Homo sapiens
cggggggagtggaac

SEQ ID NO: 1500003 - DNA, 15 bp, Homo sapiens
ccggggggagtggaa

SEQ ID NO: 1500004 - DNA, 15 bp, Homo sapiens
tccggggggagtgga

SEQ ID NO: 1500005 - DNA, 15 bp, Homo sapiens
ttccggggggagtgg

SEQ ID NO: 1500006 - DNA, 15 bp, Homo sapiens
tttccggggggagtg

SEQ ID NO: 1500007 - DNA, 15 bp, Homo sapiens
gtttccggggggagt

SEQ ID NO: 1500008 - DNA, 15 bp, Homo sapiens
ggtttccggggggag

SEQ ID NO: 1500009 - DNA, 15 bp, Homo sapiens
tggtttccgggggga

SEQ ID NO: 1500010 - DNA, 15 bp, Homo sapiens
ttggtttccgggggg

SEQ ID NO: 1500011 - DNA, 15 bp, Homo sapiens
attggtttccggggg

SEQ ID NO: 1500012 - DNA, 15 bp, Homo sapiens
gattggtttccgggg

SEQ ID NO: 1500013 - DNA, 15 bp, Homo sapiens
agattggtttccggg

SEQ ID NO: 1500014 - DNA, 15 bp, Homo sapiens
gagattggtttccgg

SEQ ID NO: 1500015 - DNA, 15 bp, Homo sapiens
agagattggtttccg

SEQ ID NO: 1500016 - DNA, 15 bp, Homo sapiens
aagagattggtttcc

SEQ ID NO: 1500017 - DNA, 15 bp, Homo sapiens
gaagagattggtttc

SEQ ID NO: 1500018 - DNA, 15 bp, Homo sapiens
ggaagagattggttt

SEQ ID NO: 1500019 - DNA, 15 bp, Homo sapiens
tggaagagattggtt

SEQ ID NO: 1500020 - DNA, 15 bp, Homo sapiens
ctggaagagattggt

SEQ ID NO: 1500021 - DNA, 15 bp, Homo sapiens
actggaagagattgg

SEQ ID NO: 1500022 - DNA, 15 bp, Homo sapiens
aactggaagagattg

SEQ ID NO: 1500023 - DNA, 15 bp, Homo sapiens
gaactggaagagatt

SEQ ID NO: 1500024 - DNA, 15 bp, Homo sapiens
ggaactggaagagat

SEQ ID NO: 1500025 - DNA, 15 bp, Homo sapiens
gggaactggaagaga

SEQ ID NO: 1500026 - DNA, 15 bp, Homo sapiens
tgggaactggaagag

SEQ ID NO: 1500027 - DNA, 15 bp, Homo sapiens
ttgggaactggaaga

SEQ ID NO: 1500028 - DNA, 15 bp, Homo sapiens
cttgggaactggaag

SEQ ID NO: 1500029 - DNA, 15 bp, Homo sapiens
tcttgggaactggaa

SEQ ID NO: 1500030 - DNA, 15 bp, Homo sapiens
gtcttgggaactgga

SEQ ID NO: 1500031 - DNA, 15 bp, Homo sapiens
tgtcttgggaactgg

SEQ ID NO: 1500032 - DNA, 15 bp, Homo sapiens
gtgtcttgggaactg

SEQ ID NO: 1500033 - DNA, 15 bp, Homo sapiens
tgtgtcttgggaact

SEQ ID NO: 1500034 - DNA, 15 bp, Homo sapiens
ttgtgtcttgggaac

SEQ ID NO: 1500035 - DNA, 15 bp, Homo sapiens
attgtgtcttgggaa

SEQ ID NO: 1500036 - DNA, 15 bp, Homo sapiens
tattgtgtcttggga

SEQ ID NO: 1500037 - DNA, 15 bp, Homo sapiens
gtattgtgtcttggg

SEQ ID NO: 1500038 - DNA, 15 bp, Homo sapiens
agtattgtgtcttgg

SEQ ID NO: 1500039 - DNA, 15 bp, Homo sapiens
aagtattgtgtcttg

SEQ ID NO: 1500040 - DNA, 15 bp, Homo sapiens
aaagtattgtgtctt

SEQ ID NO: 1500041 - DNA, 15 bp, Homo sapiens
aaaagtattgtgtct

SEQ ID NO: 1500042 - DNA, 15 bp, Homo sapiens
gaaaagtattgtgtc

SEQ ID NO: 1500043 - DNA, 15 bp, Homo sapiens
agaaaagtattgtgt

SEQ ID NO: 1500044 - DNA, 15 bp, Homo sapiens
tagaaaagtattgtg

SEQ ID NO: 1500045 - DNA, 15 bp, Homo sapiens
gtagaaaagtattgt

SEQ ID NO: 1500046 - DNA, 15 bp, Homo sapiens
agtagaaaagtattg

SEQ ID NO: 1500047 - DNA, 15 bp, Homo sapiens
cagtagaaaagtatt

SEQ ID NO: 1500048 - DNA, 15 bp, Homo sapiens
tcagtagaaaagtat

SEQ ID NO: 1500049 - DNA, 15 bp, Homo sapiens
ttcagtagaaaagta

SEQ ID NO: 1500050 - DNA, 15 bp, Homo sapiens
attcagtagaaaagt

SEQ ID NO: 1500051 - DNA, 15 bp, Homo sapiens
aattcagtagaaaag

SEQ ID NO: 1500052 - DNA, 15 bp, Homo sapiens
caattcagtagaaaa

SEQ ID NO: 1500053 - DNA, 15 bp, Homo sapiens
ccaattcagtagaaa

SEQ ID NO: 1500054 - DNA, 15 bp, Homo sapiens
tccaattcagtagaa

SEQ ID NO: 1500055 - DNA, 15 bp, Homo sapiens
ctccaattcagtaga

SEQ ID NO: 1500056 - DNA, 15 bp, Homo sapiens
actccaattcagtag

SEQ ID NO: 1500057 - DNA, 15 bp, Homo sapiens
aactccaattcagta

SEQ ID NO: 1500058 - DNA, 15 bp, Homo sapiens
gaactccaattcagt

SEQ ID NO: 1500059 - DNA, 15 bp, Homo sapiens
ggaactccaattcag

SEQ ID NO: 1500060 - DNA, 15 bp, Homo sapiens
aggaactccaattca

SEQ ID NO: 1500061 - DNA, 15 bp, Homo sapiens
aaggaactccaattc

SEQ ID NO: 1500062 - DNA, 15 bp, Homo sapiens
taaggaactccaatt

SEQ ID NO: 1500063 - DNA, 15 bp, Homo sapiens
ctaaggaactccaat

SEQ ID NO: 1500064 - DNA, 15 bp, Homo sapiens
gctaaggaactccaa

SEQ ID NO: 1500065 - DNA, 15 bp, Homo sapiens
cgctaaggaactcca

SEQ ID NO: 1500066 - DNA, 15 bp, Homo sapiens
ccgctaaggaactcc

SEQ ID NO: 1500067 - DNA, 15 bp, Homo sapiens
cccgctaaggaactc

SEQ ID NO: 1500068 - DNA, 15 bp, Homo sapiens
ccccgctaaggaact

SEQ ID NO: 1500069 - DNA, 15 bp, Homo sapiens
cccccgctaaggaac

SEQ ID NO: 1500070 - DNA, 15 bp, Homo sapiens
acccccgctaaggaa

SEQ ID NO: 1500071 - DNA, 15 bp, Homo sapiens
gacccccgctaagga

SEQ ID NO: 1500072 - DNA, 15 bp, Homo sapiens
agacccccgctaagg

SEQ ID NO: 1500073 - DNA, 15 bp, Homo sapiens
aagacccccgctaag

SEQ ID NO: 1500074 - DNA, 15 bp, Homo sapiens
taagacccccgctaa

SEQ ID NO: 1500075 - DNA, 15 bp, Homo sapiens
ctaagacccccgcta

SEQ ID NO: 1500076 - DNA, 15 bp, Homo sapiens
actaagacccccgct

SEQ ID NO: 1500077 - DNA, 15 bp, Homo sapiens
aactaagacccccgc

SEQ ID NO: 1500078 - DNA, 15 bp, Homo sapiens
aaactaagacccccg

SEQ ID NO: 1500079 - DNA, 15 bp, Homo sapiens
aaaactaagaccccc

SEQ ID NO: 1500080 - DNA, 15 bp, Homo sapiens
caaaactaagacccc

SEQ ID NO: 1500081 - DNA, 15 bp, Homo sapiens
acaaaactaagaccc

SEQ ID NO: 1500082 - DNA, 15 bp, Homo sapiens
aacaaaactaagacc

SEQ ID NO: 1500083 - DNA, 15 bp, Homo sapiens
gaacaaaactaagac

SEQ ID NO: 1500084 - DNA, 15 bp, Homo sapiens
agaacaaaactaaga

SEQ ID NO: 1500085 - DNA, 15 bp, Homo sapiens
cagaacaaaactaag

SEQ ID NO: 1500086 - DNA, 15 bp, Homo sapiens
gcagaacaaaactaa

SEQ ID NO: 1500087 - DNA, 15 bp, Homo sapiens
agcagaacaaaacta

SEQ ID NO: 1500088 - DNA, 15 bp, Homo sapiens
tagcagaacaaaact

SEQ ID NO: 1500089 - DNA, 15 bp, Homo sapiens
atagcagaacaaaac

SEQ ID NO: 1500090 - DNA, 15 bp, Homo sapiens
aatagcagaacaaaa

SEQ ID NO: 1500091 - DNA, 15 bp, Homo sapiens
gaatagcagaacaaa

SEQ ID NO: 1500092 - DNA, 15 bp, Homo sapiens
tgaatagcagaacaa

SEQ ID NO: 1500093 - DNA, 15 bp, Homo sapiens
ctgaatagcagaaca

SEQ ID NO: 1500094 - DNA, 15 bp, Homo sapiens
actgaatagcagaac

SEQ ID NO: 1500095 - DNA, 15 bp, Homo sapiens
cactgaatagcagaa

SEQ ID NO: 1500096 - DNA, 15 bp, Homo sapiens
gcactgaatagcaga

SEQ ID NO: 1500097 - DNA, 15 bp, Homo sapiens
ggcactgaatagcag

SEQ ID NO: 1500098 - DNA, 15 bp, Homo sapiens
aggcactgaatagca

SEQ ID NO: 1500099 - DNA, 15 bp, Homo sapiens
aaggcactgaatagc

SEQ ID NO: 1500100 - DNA, 15 bp, Homo sapiens
aaaggcactgaatag

SEQ ID NO: 1500101 - DNA, 15 bp, Homo sapiens
caaaggcactgaata

SEQ ID NO: 1500102 - DNA, 15 bp, Homo sapiens
acaaaggcactgaat

SEQ ID NO: 1500103 - DNA, 15 bp, Homo sapiens
gacaaaggcactgaa

SEQ ID NO: 1500104 - DNA, 15 bp, Homo sapiens
ggacaaaggcactga

SEQ ID NO: 1500105 - DNA, 15 bp, Homo sapiens
gggacaaaggcactg

SEQ ID NO: 1500106 - DNA, 15 bp, Homo sapiens
agggacaaaggcact

SEQ ID NO: 1500107 - DNA, 15 bp, Homo sapiens
tagggacaaaggcac

SEQ ID NO: 1500108 - DNA, 15 bp, Homo sapiens
atagggacaaaggca

SEQ ID NO: 1500109 - DNA, 15 bp, Homo sapiens
gatagggacaaaggc

SEQ ID NO: 1500110 - DNA, 15 bp, Homo sapiens
ggatagggacaaagg

SEQ ID NO: 1500111 - DNA, 15 bp, Homo sapiens
aggatagggacaaag

SEQ ID NO: 1500112 - DNA, 15 bp, Homo sapiens
taggatagggacaaa

SEQ ID NO: 1500113 - DNA, 15 bp, Homo sapiens
ctaggatagggacaa

SEQ ID NO: 1500114 - DNA, 15 bp, Homo sapiens
gctaggatagggaca

SEQ ID NO: 1500115 - DNA, 15 bp, Homo sapiens
ggctaggatagggac

SEQ ID NO: 1500116 - DNA, 15 bp, Homo sapiens
tggctaggataggga

SEQ ID NO: 1500117 - DNA, 15 bp, Homo sapiens
atggctaggataggg

SEQ ID NO: 1500118 - DNA, 15 bp, Homo sapiens
aatggctaggatagg

SEQ ID NO: 1500119 - DNA, 15 bp, Homo sapiens
taatggctaggatag

SEQ ID NO: 1500120 - DNA, 15 bp, Homo sapiens
ctaatggctaggata

SEQ ID NO: 1500121 - DNA, 15 bp, Homo sapiens
gctaatggctaggat

SEQ ID NO: 1500122 - DNA, 15 bp, Homo sapiens
agctaatggctagga

SEQ ID NO: 1500123 - DNA, 15 bp, Homo sapiens
aagctaatggctagg

SEQ ID NO: 1500124 - DNA, 15 bp, Homo sapiens
aaagctaatggctag

SEQ ID NO: 1500125 - DNA, 15 bp, Homo sapiens
gaaagctaatggcta

SEQ ID NO: 1500126 - DNA, 15 bp, Homo sapiens
ggaaagctaatggct

SEQ ID NO: 1500127 - DNA, 15 bp, Homo sapiens
aggaaagctaatggc

SEQ ID NO: 1500128 - DNA, 15 bp, Homo sapiens
taggaaagctaatgg

SEQ ID NO: 1500129 - DNA, 15 bp, Homo sapiens
ataggaaagctaatg

SEQ ID NO: 1500130 - DNA, 15 bp, Homo sapiens
tataggaaagctaat

SEQ ID NO: 1500131 - DNA, 15 bp, Homo sapiens
ctataggaaagctaa

SEQ ID NO: 1500132 - DNA, 15 bp, Homo sapiens
tctataggaaagcta

SEQ ID NO: 1500133 - DNA, 15 bp, Homo sapiens
atctataggaaagct

SEQ ID NO: 1500134 - DNA, 15 bp, Homo sapiens
gatctataggaaagc

SEQ ID NO: 1500135 - DNA, 15 bp, Homo sapiens
ggatctataggaaag

SEQ ID NO: 1500136 - DNA, 15 bp, Homo sapiens
aggatctataggaaa

SEQ ID NO: 1500137 - DNA, 15 bp, Homo sapiens
aaggatctataggaa

SEQ ID NO: 1500138 - DNA, 15 bp, Homo sapiens
caaggatctatagga

SEQ ID NO: 1500139 - DNA, 15 bp, Homo sapiens
tcaaggatctatagg

SEQ ID NO: 1500140 - DNA, 15 bp, Homo sapiens
atcaaggatctatag

SEQ ID NO: 1500141 - DNA, 15 bp, Homo sapiens
aatcaaggatctata

SEQ ID NO: 1500142 - DNA, 15 bp, Homo sapiens
aaatcaaggatctat

SEQ ID NO: 1500143 - DNA, 15 bp, Homo sapiens
gaaatcaaggatcta

SEQ ID NO: 1500144 - DNA, 15 bp, Homo sapiens
ggaaatcaaggatct

SEQ ID NO: 1500145 - DNA, 15 bp, Homo sapiens
aggaaatcaaggatc

SEQ ID NO: 1500146 - DNA, 15 bp, Homo sapiens
gaggaaatcaaggat

SEQ ID NO: 1500147 - DNA, 15 bp, Homo sapiens
tgaggaaatcaagga

SEQ ID NO: 1500148 - DNA, 15 bp, Homo sapiens
atgaggaaatcaagg

SEQ ID NO: 1500149 - DNA, 15 bp, Homo sapiens
gatgaggaaatcaag

SEQ ID NO: 1500150 - DNA, 15 bp, Homo sapiens
agatgaggaaatcaa

SEQ ID NO: 1500151 - DNA, 15 bp, Homo sapiens
cagatgaggaaatca

SEQ ID NO: 1500152 - DNA, 15 bp, Homo sapiens
acagatgaggaaatc

SEQ ID NO: 1500153 - DNA, 15 bp, Homo sapiens
aacagatgaggaaat

SEQ ID NO: 1500154 - DNA, 15 bp, Homo sapiens
caacagatgaggaaa

SEQ ID NO: 1500155 - DNA, 15 bp, Homo sapiens
tcaacagatgaggaa

SEQ ID NO: 1500156 - DNA, 15 bp, Homo sapiens
ttcaacagatgagga

SEQ ID NO: 1500157 - DNA, 15 bp, Homo sapiens
tttcaacagatgagg

SEQ ID NO: 1500158 - DNA, 15 bp, Homo sapiens
ttttcaacagatgag

SEQ ID NO: 1500159 - DNA, 15 bp, Homo sapiens
tttttcaacagatga

SEQ ID NO: 1500160 - DNA, 15 bp, Homo sapiens
ctttttcaacagatg

SEQ ID NO: 1500161 - DNA, 15 bp, Homo sapiens
tctttttcaacagat

SEQ ID NO: 1500162 - DNA, 15 bp, Homo sapiens
ttctttttcaacaga

SEQ ID NO: 1500163 - DNA, 15 bp, Homo sapiens
tttctttttcaacag

SEQ ID NO: 1500164 - DNA, 15 bp, Homo sapiens
atttctttttcaaca

SEQ ID NO: 1500165 - DNA, 15 bp, Homo sapiens
catttctttttcaac

SEQ ID NO: 1500166 - DNA, 15 bp, Homo sapiens
ccatttctttttcaa

SEQ ID NO: 1500167 - DNA, 15 bp, Homo sapiens
gccatttctttttca

SEQ ID NO: 1500168 - DNA, 15 bp, Homo sapiens
agccatttctttttc

SEQ ID NO: 1500169 - DNA, 15 bp, Homo sapiens
tagccatttcttttt

SEQ ID NO: 1500170 - DNA, 15 bp, Homo sapiens
ctagccatttctttt

SEQ ID NO: 1500171 - DNA, 15 bp, Homo sapiens
tctagccatttcttt

SEQ ID NO: 1500172 - DNA, 15 bp, Homo sapiens
ttctagccatttctt

SEQ ID NO: 1500173 - DNA, 15 bp, Homo sapiens
tttctagccatttct

SEQ ID NO: 1500174 - DNA, 15 bp, Homo sapiens
ttttctagccatttc

SEQ ID NO: 1500175 - DNA, 15 bp, Homo sapiens
gattttctagccatt

SEQ ID NO: 1500176 - DNA, 15 bp, Homo sapiens
agattttctagccat

SEQ ID NO: 1500177 - DNA, 15 bp, Homo sapiens
aagattttctagcca

SEQ ID NO: 1500178 - DNA, 15 bp, Homo sapiens
aaagattttctagcc

SEQ ID NO: 1500179 - DNA, 15 bp, Homo sapiens
aaaagattttctagc

SEQ ID NO: 1500180 - DNA, 15 bp, Homo sapiens
taaaagattttctag

SEQ ID NO: 1500181 - DNA, 15 bp, Homo sapiens
ctaaaagattttcta

SEQ ID NO: 1500182 - DNA, 15 bp, Homo sapiens
tctaaaagattttct

SEQ ID NO: 1500183 - DNA, 15 bp, Homo sapiens
atctaaaagattttc

SEQ ID NO: 1500184 - DNA, 15 bp, Homo sapiens
aatctaaaagatttt

SEQ ID NO: 1500185 - DNA, 15 bp, Homo sapiens
gaatctaaaagattt

SEQ ID NO: 1500186 - DNA, 15 bp, Homo sapiens
agaatctaaaagatt

SEQ ID NO: 1500187 - DNA, 15 bp, Homo sapiens
aagaatctaaaagat

SEQ ID NO: 1500188 - DNA, 15 bp, Homo sapiens
aaagaatctaaaaga

SEQ ID NO: 1500189 - DNA, 15 bp, Homo sapiens
gaaagaatctaaaag

SEQ ID NO: 1500190 - DNA, 15 bp, Homo sapiens
tgaaagaatctaaaa

SEQ ID NO: 1500191 - DNA, 15 bp, Homo sapiens
ttgaaagaatctaaa

SEQ ID NO: 1500192 - DNA, 15 bp, Homo sapiens
cttgaaagaatctaa

SEQ ID NO: 1500193 - DNA, 15 bp, Homo sapiens
acttgaaagaatcta

SEQ ID NO: 1500194 - DNA, 15 bp, Homo sapiens
aacttgaaagaatct

SEQ ID NO: 1500195 - DNA, 15 bp, Homo sapiens
aaacttgaaagaatc

SEQ ID NO: 1500196 - DNA, 15 bp, Homo sapiens
taaacttgaaagaat

SEQ ID NO: 1500197 - DNA, 15 bp, Homo sapiens
ttaaacttgaaagaa

SEQ ID NO: 1500198 - DNA, 15 bp, Homo sapiens
tttaaacttgaaaga

SEQ ID NO: 1500199 - DNA, 15 bp, Homo sapiens
atttaaacttgaaag

SEQ ID NO: 1500200 - DNA, 15 bp, Homo sapiens
tatttaaacttgaaa

SEQ ID NO: 1500201 - DNA, 15 bp, Homo sapiens
atatttaaacttgaa

SEQ ID NO: 1500202 - DNA, 15 bp, Homo sapiens
aatatttaaacttga

SEQ ID NO: 1500203 - DNA, 15 bp, Homo sapiens
gaatatttaaacttg

SEQ ID NO: 1500204 - DNA, 15 bp, Homo sapiens
cgaatatttaaactt

SEQ ID NO: 1500205 - DNA, 15 bp, Homo sapiens
tcgaatatttaaact

SEQ ID NO: 1500206 - DNA, 15 bp, Homo sapiens
atcgaatatttaaac

SEQ ID NO: 1500207 - DNA, 15 bp, Homo sapiens
catcgaatatttaaa

SEQ ID NO: 1500208 - DNA, 15 bp, Homo sapiens
tcatcgaatatttaa

SEQ ID NO: 1500209 - DNA, 15 bp, Homo sapiens
atcatcgaatattta

SEQ ID NO: 1500210 - DNA, 15 bp, Homo sapiens
aatcatcgaatattt

SEQ ID NO: 1500211 - DNA, 15 bp, Homo sapiens
aaatcatcgaatatt

SEQ ID NO: 1500212 - DNA, 15 bp, Homo sapiens
aaaatcatcgaatat

SEQ ID NO: 1500213 - DNA, 15 bp, Homo sapiens
taaaatcatcgaata

SEQ ID NO: 1500214 - DNA, 15 bp, Homo sapiens
ttaaaatcatcgaat

SEQ ID NO: 1500215 - DNA, 15 bp, Homo sapiens
attaaaatcatcgaa

SEQ ID NO: 1500216 - DNA, 15 bp, Homo sapiens
tattaaaatcatcga

SEQ ID NO: 1500217 - DNA, 15 bp, Homo sapiens
atattaaaatcatcg

SEQ ID NO: 1500218 - DNA, 15 bp, Homo sapiens
aatattaaaatcatc

SEQ ID NO: 1500219 - DNA, 15 bp, Homo sapiens
gaatattaaaatcat

SEQ ID NO: 1500220 - DNA, 15 bp, Homo sapiens
agaatattaaaatca

SEQ ID NO: 1500221 - DNA, 15 bp, Homo sapiens
tagaatattaaaatc

SEQ ID NO: 1500222 - DNA, 15 bp, Homo sapiens
ttagaatattaaaat

SEQ ID NO: 1500223 - DNA, 15 bp, Homo sapiens
gttagaatattaaaa

SEQ ID NO: 1500224 - DNA, 15 bp, Homo sapiens
tgttagaatattaaa

SEQ ID NO: 1500225 - DNA, 15 bp, Homo sapiens
ctgttagaatattaa

SEQ ID NO: 1500226 - DNA, 15 bp, Homo sapiens
gctgttagaatatta

SEQ ID NO: 1500227 - DNA, 15 bp, Homo sapiens
tgctgttagaatatt

SEQ ID NO: 1500228 - DNA, 15 bp, Homo sapiens
atgctgttagaatat

SEQ ID NO: 1500229 - DNA, 15 bp, Homo sapiens
catgctgttagaata

SEQ ID NO: 1500230 - DNA, 15 bp, Homo sapiens
acatgctgttagaat

SEQ ID NO: 1500231 - DNA, 15 bp, Homo sapiens
gacatgctgttagaa

SEQ ID NO: 1500232 - DNA, 15 bp, Homo sapiens
agacatgctgttaga

SEQ ID NO: 1500233 - DNA, 15 bp, Homo sapiens
gagacatgctgttag

SEQ ID NO: 1500234 - DNA, 15 bp, Homo sapiens
agagacatgctgtta

SEQ ID NO: 1500235 - DNA, 15 bp, Homo sapiens
cagagacatgctgtt

SEQ ID NO: 1500236 - DNA, 15 bp, Homo sapiens
acagagacatgctgt

SEQ ID NO: 1500237 - DNA, 15 bp, Homo sapiens
cacagagacatgctg

SEQ ID NO: 1500238 - DNA, 15 bp, Homo sapiens
tcacagagacatgct

SEQ ID NO: 1500239 - DNA, 15 bp, Homo sapiens
gtcacagagacatgc

SEQ ID NO: 1500240 - DNA, 15 bp, Homo sapiens
ggtcacagagacatg

SEQ ID NO: 1500241 - DNA, 15 bp, Homo sapiens
gggtcacagagacat

SEQ ID NO: 1500242 - DNA, 15 bp, Homo sapiens
tgggtcacagagaca

SEQ ID NO: 1500243 - DNA, 15 bp, Homo sapiens
ctgggtcacagagac

SEQ ID NO: 1500244 - DNA, 15 bp, Homo sapiens
gctgggtcacagaga

SEQ ID NO: 1500245 - DNA, 15 bp, Homo sapiens
tgctgggtcacagag

SEQ ID NO: 1500246 - DNA, 15 bp, Homo sapiens
ctgctgggtcacaga

SEQ ID NO: 1500247 - DNA, 15 bp, Homo sapiens
actgctgggtcacag

SEQ ID NO: 1500248 - DNA, 15 bp, Homo sapiens
gactgctgggtcaca

SEQ ID NO: 1500249 - DNA, 15 bp, Homo sapiens
agactgctgggtcac

SEQ ID NO: 1500250 - DNA, 15 bp, Homo sapiens
tagactgctgggtca

SEQ ID NO: 1500251 - DNA, 15 bp, Homo sapiens
atagactgctgggtc

SEQ ID NO: 1500252 - DNA, 15 bp, Homo sapiens
aatagactgctgggt

SEQ ID NO: 1500253 - DNA, 15 bp, Homo sapiens
caatagactgctggg

SEQ ID NO: 1500254 - DNA, 15 bp, Homo sapiens
ccaatagactgctgg

SEQ ID NO: 1500255 - DNA, 15 bp, Homo sapiens
cccaatagactgctg

SEQ ID NO: 1500256 - DNA, 15 bp, Homo sapiens
tcccaatagactgct

SEQ ID NO: 1500257 - DNA, 15 bp, Homo sapiens
ctcccaatagactgc

SEQ ID NO: 1500258 - DNA, 15 bp, Homo sapiens
gctcccaatagactg

SEQ ID NO: 1500259 - DNA, 15 bp, Homo sapiens
agctcccaatagact

SEQ ID NO: 1500260 - DNA, 15 bp, Homo sapiens
cagctcccaatagac

SEQ ID NO: 1500261 - DNA, 15 bp, Homo sapiens
tcagctcccaataga

SEQ ID NO: 1500262 - DNA, 15 bp, Homo sapiens
gtcagctcccaatag

SEQ ID NO: 1500263 - DNA, 15 bp, Homo sapiens
ggtcagctcccaata

SEQ ID NO: 1500264 - DNA, 15 bp, Homo sapiens
gggtcagctcccaat

SEQ ID NO: 1500265 - DNA, 15 bp, Homo sapiens
ggggtcagctcccaa

SEQ ID NO: 1500266 - DNA, 15 bp, Homo sapiens
tggggtcagctccca

SEQ ID NO: 1500267 - DNA, 15 bp, Homo sapiens
gtggggtcagctccc

SEQ ID NO: 1500268 - DNA, 15 bp, Homo sapiens
agtggggtcagctcc

SEQ ID NO: 1500269 - DNA, 15 bp, Homo sapiens
aagtggggtcagctc

SEQ ID NO: 1500270 - DNA, 15 bp, Homo sapiens
caagtggggtcagct

SEQ ID NO: 1500271 - DNA, 15 bp, Homo sapiens
tcaagtggggtcagc

SEQ ID NO: 1500272 - DNA, 15 bp, Homo sapiens
atcaagtggggtcag

SEQ ID NO: 1500273 - DNA, 15 bp, Homo sapiens
aatcaagtggggtca

SEQ ID NO: 1500274 - DNA, 15 bp, Homo sapiens
aaatcaagtggggtc

SEQ ID NO: 1500275 - DNA, 15 bp, Homo sapiens
taaatcaagtggggt

SEQ ID NO: 1500276 - DNA, 15 bp, Homo sapiens
gtaaatcaagtgggg

SEQ ID NO: 1500277 - DNA, 15 bp, Homo sapiens
ggtaaatcaagtggg

SEQ ID NO: 1500278 - DNA, 15 bp, Homo sapiens
tggtaaatcaagtgg

SEQ ID NO: 1500279 - DNA, 15 bp, Homo sapiens
ttggtaaatcaagtg

SEQ ID NO: 1500280 - DNA, 15 bp, Homo sapiens
tttggtaaatcaagt

SEQ ID NO: 1500281 - DNA, 15 bp, Homo sapiens
gtttggtaaatcaag

SEQ ID NO: 1500282 - DNA, 15 bp, Homo sapiens
agtttggtaaatcaa

SEQ ID NO: 1500283 - DNA, 15 bp, Homo sapiens
gagtttggtaaatca

SEQ ID NO: 1500284 - DNA, 15 bp, Homo sapiens
agagtttggtaaatc

SEQ ID NO: 1500285 - DNA, 15 bp, Homo sapiens
aagagtttggtaaat

SEQ ID NO: 1500286 - DNA, 15 bp, Homo sapiens
aaagagtttggtaaa

SEQ ID NO: 1500287 - DNA, 15 bp, Homo sapiens
gaaagagtttggtaa

SEQ ID NO: 1500288 - DNA, 15 bp, Homo sapiens
ggaaagagtttggta

SEQ ID NO: 1500289 - DNA, 15 bp, Homo sapiens
gggaaagagtttggt

SEQ ID NO: 1500290 - DNA, 15 bp, Homo sapiens
tgggaaagagtttgg

SEQ ID NO: 1500291 - DNA, 15 bp, Homo sapiens
atgggaaagagtttg

SEQ ID NO: 1500292 - DNA, 15 bp, Homo sapiens
aatgggaaagagttt

SEQ ID NO: 1500293 - DNA, 15 bp, Homo sapiens
taatgggaaagagtt

SEQ ID NO: 1500294 - DNA, 15 bp, Homo sapiens
ataatgggaaagagt

SEQ ID NO: 1500295 - DNA, 15 bp, Homo sapiens
cataatgggaaagag

SEQ ID NO: 1500296 - DNA, 15 bp, Homo sapiens
gcataatgggaaaga

SEQ ID NO: 1500297 - DNA, 15 bp, Homo sapiens
ggcataatgggaaag

SEQ ID NO: 1500298 - DNA, 15 bp, Homo sapiens
aggcataatgggaaa

SEQ ID NO: 1500299 - DNA, 15 bp, Homo sapiens
gaggcataatgggaa

SEQ ID NO: 1500300 - DNA, 15 bp, Homo sapiens
agaggcataatggga

SEQ ID NO: 1500301 - DNA, 15 bp, Homo sapiens
cagaggcataatggg

SEQ ID NO: 1500302 - DNA, 15 bp, Homo sapiens
gcagaggcataatgg

SEQ ID NO: 1500303 - DNA, 15 bp, Homo sapiens
tgcagaggcataatg

SEQ ID NO: 1500304 - DNA, 15 bp, Homo sapiens
atgcagaggcataat

SEQ ID NO: 1500305 - DNA, 15 bp, Homo sapiens
catgcagaggcataa

SEQ ID NO: 1500306 - DNA, 15 bp, Homo sapiens
gcatgcagaggcata

SEQ ID NO: 1500307 - DNA, 15 bp, Homo sapiens
tgcatgcagaggcat

SEQ ID NO: 1500308 - DNA, 15 bp, Homo sapiens
gtgcatgcagaggca

SEQ ID NO: 1500309 - DNA, 15 bp, Homo sapiens
ggtgcatgcagaggc

SEQ ID NO: 1500310 - DNA, 15 bp, Homo sapiens
aggtgcatgcagagg

SEQ ID NO: 1500311 - DNA, 15 bp, Homo sapiens
taggtgcatgcagag

SEQ ID NO: 1500312 - DNA, 15 bp, Homo sapiens
ataggtgcatgcaga

SEQ ID NO: 1500313 - DNA, 15 bp, Homo sapiens
cataggtgcatgcag

SEQ ID NO: 1500314 - DNA, 15 bp, Homo sapiens
acataggtgcatgca

SEQ ID NO: 1500315 - DNA, 15 bp, Homo sapiens
aacataggtgcatgc

SEQ ID NO: 1500316 - DNA, 15 bp, Homo sapiens
gaacataggtgcatg

SEQ ID NO: 1500317 - DNA, 15 bp, Homo sapiens
ggaacataggtgcat

SEQ ID NO: 1500318 - DNA, 15 bp, Homo sapiens
tggaacataggtgca

SEQ ID NO: 1500319 - DNA, 15 bp, Homo sapiens
ctggaacataggtgc

SEQ ID NO: 1500320 - DNA, 15 bp, Homo sapiens
cctggaacataggtg

SEQ ID NO: 1500321 - DNA, 15 bp, Homo sapiens
gcctggaacataggt

SEQ ID NO: 1500322 - DNA, 15 bp, Homo sapiens
tgcctggaacatagg

SEQ ID NO: 1500323 - DNA, 15 bp, Homo sapiens
ctgcctggaacatag

SEQ ID NO: 1500324 - DNA, 15 bp, Homo sapiens
acctgcctggaacat

SEQ ID NO: 1500325 - DNA, 15 bp, Homo sapiens
gacctgcctggaaca

SEQ ID NO: 1500326 - DNA, 15 bp, Homo sapiens
tgacctgcctggaac

SEQ ID NO: 1500327 - DNA, 15 bp, Homo sapiens
gtgacctgcctggaa

SEQ ID NO: 1500328 - DNA, 15 bp, Homo sapiens
ggtgacctgcctgga

SEQ ID NO: 1500329 - DNA, 15 bp, Homo sapiens
aggtgacctgcctgg

SEQ ID NO: 1500330 - DNA, 15 bp, Homo sapiens
gaggtgacctgcctg

SEQ ID NO: 1500331 - DNA, 15 bp, Homo sapiens
tgaggtgacctgcct

SEQ ID NO: 1500332 - DNA, 15 bp, Homo sapiens
ctgaggtgacctgcc

SEQ ID NO: 1500333 - DNA, 15 bp, Homo sapiens
actgaggtgacctgc

SEQ ID NO: 1500334 - DNA, 15 bp, Homo sapiens
gactgaggtgacctg

SEQ ID NO: 1500335 - DNA, 15 bp, Homo sapiens
gagactgaggtgacc

SEQ ID NO: 1500336 - DNA, 15 bp, Homo sapiens
agagactgaggtgac

SEQ ID NO: 1500337 - DNA, 15 bp, Homo sapiens
aagagactgaggtga

SEQ ID NO: 1500338 - DNA, 15 bp, Homo sapiens
gaagagactgaggtg

SEQ ID NO: 1500339 - DNA, 15 bp, Homo sapiens
agaagagactgaggt

SEQ ID NO: 1500340 - DNA, 15 bp, Homo sapiens
cagaagagactgagg

SEQ ID NO: 1500341 - DNA, 15 bp, Homo sapiens
acagaagagactgag

SEQ ID NO: 1500342 - DNA, 15 bp, Homo sapiens
cacagaagagactga

SEQ ID NO: 1500343 - DNA, 15 bp, Homo sapiens
acacagaagagactg

SEQ ID NO: 1500344 - DNA, 15 bp, Homo sapiens
cacacagaagagact

SEQ ID NO: 1500345 - DNA, 15 bp, Homo sapiens
acacacagaagagac

SEQ ID NO: 1500346 - DNA, 15 bp, Homo sapiens
tacacacagaagaga

SEQ ID NO: 1500347 - DNA, 15 bp, Homo sapiens
atacacacagaagag

SEQ ID NO: 1500348 - DNA, 15 bp, Homo sapiens
gatacacacagaaga

SEQ ID NO: 1500349 - DNA, 15 bp, Homo sapiens
tgatacacacagaag

SEQ ID NO: 1500350 - DNA, 15 bp, Homo sapiens
atgatacacacagaa

SEQ ID NO: 1500351 - DNA, 15 bp, Homo sapiens
catgatacacacaga

SEQ ID NO: 1500352 - DNA, 15 bp, Homo sapiens
gcatgatacacacag

SEQ ID NO: 1500353 - DNA, 15 bp, Homo sapiens
agcatgatacacaca

SEQ ID NO: 1500354 - DNA, 15 bp, Homo sapiens
aagcatgatacacac

SEQ ID NO: 1500355 - DNA, 15 bp, Homo sapiens
gaagcatgatacaca

SEQ ID NO: 1500356 - DNA, 15 bp, Homo sapiens
agaagcatgatacac

SEQ ID NO: 1500357 - DNA, 15 bp, Homo sapiens
aagaagcatgataca

SEQ ID NO: 1500358 - DNA, 15 bp, Homo sapiens
gaagaagcatgatac

SEQ ID NO: 1500359 - DNA, 15 bp, Homo sapiens
ggaagaagcatgata

SEQ ID NO: 1500360 - DNA, 15 bp, Homo sapiens
gggaagaagcatgat

SEQ ID NO: 1500361 - DNA, 15 bp, Homo sapiens
tgggaagaagcatga

SEQ ID NO: 1500362 - DNA, 15 bp, Homo sapiens
gtgggaagaagcatg

SEQ ID NO: 1500363 - DNA, 15 bp, Homo sapiens
agtgggaagaagcat

SEQ ID NO: 1500364 - DNA, 15 bp, Homo sapiens
aagtgggaagaagca

SEQ ID NO: 1500365 - DNA, 15 bp, Homo sapiens
gaagtgggaagaagc

SEQ ID NO: 1500366 - DNA, 15 bp, Homo sapiens
agaagtgggaagaag

SEQ ID NO: 1500367 - DNA, 15 bp, Homo sapiens
aagaagtgggaagaa

SEQ ID NO: 1500368 - DNA, 15 bp, Homo sapiens
caagaagtgggaaga

SEQ ID NO: 1500369 - DNA, 15 bp, Homo sapiens
ccaagaagtgggaag

SEQ ID NO: 1500370 - DNA, 15 bp, Homo sapiens
gccaagaagtgggaa

SEQ ID NO: 1500371 - DNA, 15 bp, Homo sapiens
ggccaagaagtggga

SEQ ID NO: 1500372 - DNA, 15 bp, Homo sapiens
aggccaagaagtggg

SEQ ID NO: 1500373 - DNA, 15 bp, Homo sapiens
aaggccaagaagtgg

SEQ ID NO: 1500374 - DNA, 15 bp, Homo sapiens
aaaggccaagaagtg

SEQ ID NO: 1500375 - DNA, 15 bp, Homo sapiens
taaaggccaagaagt

SEQ ID NO: 1500376 - DNA, 15 bp, Homo sapiens
ataaaggccaagaag

SEQ ID NO: 1500377 - DNA, 15 bp, Homo sapiens
aataaaggccaagaa

SEQ ID NO: 1500378 - DNA, 15 bp, Homo sapiens
aaataaaggccaaga

SEQ ID NO: 1500379 - DNA, 15 bp, Homo sapiens
gaaataaaggccaag

SEQ ID NO: 1500380 - DNA, 15 bp, Homo sapiens
agaaataaaggccaa

SEQ ID NO: 1500381 - DNA, 15 bp, Homo sapiens
cagaaataaaggcca

SEQ ID NO: 1500382 - DNA, 15 bp, Homo sapiens
gcagaaataaaggcc

SEQ ID NO: 1500383 - DNA, 15 bp, Homo sapiens
ggcagaaataaaggc

SEQ ID NO: 1500384 - DNA, 15 bp, Homo sapiens
tggcagaaataaagg

SEQ ID NO: 1500385 - DNA, 15 bp, Homo sapiens
ctggcagaaataaag

SEQ ID NO: 1500386 - DNA, 15 bp, Homo sapiens
actggcagaaataaa

SEQ ID NO: 1500387 - DNA, 15 bp, Homo sapiens
gactggcagaaataa

SEQ ID NO: 1500388 - DNA, 15 bp, Homo sapiens
agactggcagaaata

SEQ ID NO: 1500389 - DNA, 15 bp, Homo sapiens
gagactggcagaaat

SEQ ID NO: 1500390 - DNA, 15 bp, Homo sapiens
agagactggcagaaa

SEQ ID NO: 1500391 - DNA, 15 bp, Homo sapiens
cagagactggcagaa

SEQ ID NO: 1500392 - DNA, 15 bp, Homo sapiens
gcagagactggcaga

SEQ ID NO: 1500393 - DNA, 15 bp, Homo sapiens
ggcagagactggcag

SEQ ID NO: 1500394 - DNA, 15 bp, Homo sapiens
aggcagagactggca

SEQ ID NO: 1500395 - DNA, 15 bp, Homo sapiens
caggcagagactggc

SEQ ID NO: 1500396 - DNA, 15 bp, Homo sapiens
tcaggcagagactgg

SEQ ID NO: 1500397 - DNA, 15 bp, Homo sapiens
ttcaggcagagactg

SEQ ID NO: 1500398 - DNA, 15 bp, Homo sapiens
attcaggcagagact

SEQ ID NO: 1500399 - DNA, 15 bp, Homo sapiens
cattcaggcagagac

SEQ ID NO: 1500400 - DNA, 15 bp, Homo sapiens
gcattcaggcagaga

SEQ ID NO: 1500401 - DNA, 15 bp, Homo sapiens
agcattcaggcagag

SEQ ID NO: 1500402 - DNA, 15 bp, Homo sapiens
aagcattcaggcaga

SEQ ID NO: 1500403 - DNA, 15 bp, Homo sapiens
aaagcattcaggcag

SEQ ID NO: 1500404 - DNA, 15 bp, Homo sapiens
taaagcattcaggca

SEQ ID NO: 1500405 - DNA, 15 bp, Homo sapiens
ttaaagcattcaggc

SEQ ID NO: 1500406 - DNA, 15 bp, Homo sapiens
attaaagcattcagg

SEQ ID NO: 1500407 - DNA, 15 bp, Homo sapiens
aattaaagcattcag

SEQ ID NO: 1500408 - DNA, 15 bp, Homo sapiens
gaattaaagcattca

SEQ ID NO: 1500409 - DNA, 15 bp, Homo sapiens
ggaattaaagcattc

SEQ ID NO: 1500410 - DNA, 15 bp, Homo sapiens
aggaattaaagcatt

SEQ ID NO: 1500411 - DNA, 15 bp, Homo sapiens
gaggaattaaagcat

SEQ ID NO: 1500412 - DNA, 15 bp, Homo sapiens
ggaggaattaaagca

SEQ ID NO: 1500413 - DNA, 15 bp, Homo sapiens
aggaggaattaaagc

SEQ ID NO: 1500414 - DNA, 15 bp, Homo sapiens
aaggaggaattaaag

SEQ ID NO: 1500415 - DNA, 15 bp, Homo sapiens
aaaggaggaattaaa

SEQ ID NO: 1500416 - DNA, 15 bp, Homo sapiens
caaaggaggaattaa

SEQ ID NO: 1500417 - DNA, 15 bp, Homo sapiens
acaaaggaggaatta

SEQ ID NO: 1500418 - DNA, 15 bp, Homo sapiens
cacaaaggaggaatt

SEQ ID NO: 1500419 - DNA, 15 bp, Homo sapiens
gcacaaaggaggaat

SEQ ID NO: 1500420 - DNA, 15 bp, Homo sapiens
agcacaaaggaggaa

SEQ ID NO: 1500421 - DNA, 15 bp, Homo sapiens
aagcacaaaggagga

SEQ ID NO: 1500422 - DNA, 15 bp, Homo sapiens
aaagcacaaaggagg

SEQ ID NO: 1500423 - DNA, 15 bp, Homo sapiens
aaaagcacaaaggag

SEQ ID NO: 1500424 - DNA, 15 bp, Homo sapiens
gaaaagcacaaagga

SEQ ID NO: 1500425 - DNA, 15 bp, Homo sapiens
agaaaagcacaaagg

SEQ ID NO: 1500426 - DNA, 15 bp, Homo sapiens
tagaaaagcacaaag

SEQ ID NO: 1500427 - DNA, 15 bp, Homo sapiens
ttagaaaagcacaaa

SEQ ID NO: 1500428 - DNA, 15 bp, Homo sapiens
attagaaaagcacaa

SEQ ID NO: 1500429 - DNA, 15 bp, Homo sapiens
aattagaaaagcaca

SEQ ID NO: 1500430 - DNA, 15 bp, Homo sapiens
gaattagaaaagcac

SEQ ID NO: 1500431 - DNA, 15 bp, Homo sapiens
ggaattagaaaagca

SEQ ID NO: 1500432 - DNA, 15 bp, Homo sapiens
aggaattagaaaagc

SEQ ID NO: 1500433 - DNA, 15 bp, Homo sapiens
caggaattagaaaag

SEQ ID NO: 1500434 - DNA, 15 bp, Homo sapiens
acaggaattagaaaa

SEQ ID NO: 1500435 - DNA, 15 bp, Homo sapiens
gacaggaattagaaa

SEQ ID NO: 1500436 - DNA, 15 bp, Homo sapiens
ggacaggaattagaa

SEQ ID NO: 1500437 - DNA, 15 bp, Homo sapiens
tggacaggaattaga

SEQ ID NO: 1500438 - DNA, 15 bp, Homo sapiens
atggacaggaattag

SEQ ID NO: 1500439 - DNA, 15 bp, Homo sapiens
gatggacaggaatta

SEQ ID NO: 1500440 - DNA, 15 bp, Homo sapiens
ggatggacaggaatt

SEQ ID NO: 1500441 - DNA, 15 bp, Homo sapiens
aggatggacaggaat

SEQ ID NO: 1500442 - DNA, 15 bp, Homo sapiens
aaggatggacaggaa

SEQ ID NO: 1500443 - DNA, 15 bp, Homo sapiens
gaaggatggacagga

SEQ ID NO: 1500444 - DNA, 15 bp, Homo sapiens
tgaaggatggacagg

SEQ ID NO: 1500445 - DNA, 15 bp, Homo sapiens
ttgaaggatggacag

SEQ ID NO: 1500446 - DNA, 15 bp, Homo sapiens
attgaaggatggaca

SEQ ID NO: 1500447 - DNA, 15 bp, Homo sapiens
cattgaaggatggac

SEQ ID NO: 1500448 - DNA, 15 bp, Homo sapiens
acattgaaggatgga

SEQ ID NO: 1500449 - DNA, 15 bp, Homo sapiens
aacattgaaggatgg

SEQ ID NO: 1500450 - DNA, 15 bp, Homo sapiens
gaacattgaaggatg

SEQ ID NO: 1500451 - DNA, 15 bp, Homo sapiens
tgaacattgaaggat

SEQ ID NO: 1500452 - DNA, 15 bp, Homo sapiens
ctgaacattgaagga

SEQ ID NO: 1500453 - DNA, 15 bp, Homo sapiens
gctgaacattgaagg

SEQ ID NO: 1500454 - DNA, 15 bp, Homo sapiens
agctgaacattgaag

SEQ ID NO: 1500455 - DNA, 15 bp, Homo sapiens
gagctgaacattgaa

SEQ ID NO: 1500456 - DNA, 15 bp, Homo sapiens
tgagctgaacattga

SEQ ID NO: 1500457 - DNA, 15 bp, Homo sapiens
ctgagctgaacattg

SEQ ID NO: 1500458 - DNA, 15 bp, Homo sapiens
tctgagctgaacatt

SEQ ID NO: 1500459 - DNA, 15 bp, Homo sapiens
atctgagctgaacat

SEQ ID NO: 1500460 - DNA, 15 bp, Homo sapiens
aatctgagctgaaca

SEQ ID NO: 1500461 - DNA, 15 bp, Homo sapiens
aaatctgagctgaac

SEQ ID NO: 1500462 - DNA, 15 bp, Homo sapiens
gaaatctgagctgaa

SEQ ID NO: 1500463 - DNA, 15 bp, Homo sapiens
tgaaatctgagctga

SEQ ID NO: 1500464 - DNA, 15 bp, Homo sapiens
atgaaatctgagctg

SEQ ID NO: 1500465 - DNA, 15 bp, Homo sapiens
aatgaaatctgagct

SEQ ID NO: 1500466 - DNA, 15 bp, Homo sapiens
aaatgaaatctgagc

SEQ ID NO: 1500467 - DNA, 15 bp, Homo sapiens
aaaatgaaatctgag

SEQ ID NO: 1500468 - DNA, 15 bp, Homo sapiens
aaaaatgaaatctga

SEQ ID NO: 1500469 - DNA, 15 bp, Homo sapiens
aaaaaatgaaatctg

SEQ ID NO: 1500470 - DNA, 15 bp, Homo sapiens
aaaaaaatgaaatct

SEQ ID NO: 1500471 - DNA, 15 bp, Homo sapiens
aaaaaaaatgaaatc

SEQ ID NO: 1500472 - DNA, 15 bp, Homo sapiens
aaaaaaaaatgaaat

SEQ ID NO: 1500473 - DNA, 15 bp, Homo sapiens
aaaaaaaaaatgaaa

SEQ ID NO: 1500474 - DNA, 15 bp, Homo sapiens
aaaaaaaaaaatgaa

SEQ ID NO: 1500475 - DNA, 15 bp, Homo sapiens
aaaaaaaaaaaatga

SEQ ID NO: 1500476 - DNA, 15 bp, Homo sapiens
gaaaaaaaaaaaatg

SEQ ID NO: 1500477 - DNA, 15 bp, Homo sapiens
ggaaaaaaaaaaaat

SEQ ID NO: 1500478 - DNA, 15 bp, Homo sapiens
ggggaaaaaaaaaaa

SEQ ID NO: 1500479 - DNA, 15 bp, Homo sapiens
tggggaaaaaaaaaa

SEQ ID NO: 1500480 - DNA, 15 bp, Homo sapiens
atggggaaaaaaaaa

SEQ ID NO: 1500481 - DNA, 15 bp, Homo sapiens
catggggaaaaaaaa

SEQ ID NO: 1500482 - DNA, 15 bp, Homo sapiens
tcatggggaaaaaaa

SEQ ID NO: 1500483 - DNA, 15 bp, Homo sapiens
ctcatggggaaaaaa

SEQ ID NO: 1500484 - DNA, 15 bp, Homo sapiens
cctcatggggaaaaa

SEQ ID NO: 1500485 - DNA, 15 bp, Homo sapiens
acctcatggggaaaa

SEQ ID NO: 1500486 - DNA, 15 bp, Homo sapiens
aacctcatggggaaa

SEQ ID NO: 1500487 - DNA, 15 bp, Homo sapiens
caacctcatggggaa

SEQ ID NO: 1500488 - DNA, 15 bp, Homo sapiens
acaacctcatgggga

SEQ ID NO: 1500489 - DNA, 15 bp, Homo sapiens
aacaacctcatgggg

SEQ ID NO: 1500490 - DNA, 15 bp, Homo sapiens
aaacaacctcatggg

SEQ ID NO: 1500491 - DNA, 15 bp, Homo sapiens
gaaacaacctcatgg

SEQ ID NO: 1500492 - DNA, 15 bp, Homo sapiens
tgaaacaacctcatg

SEQ ID NO: 1500493 - DNA, 15 bp, Homo sapiens
ctgaaacaacctcat

SEQ ID NO: 1500494 - DNA, 15 bp, Homo sapiens
tctgaaacaacctca

SEQ ID NO: 1500495 - DNA, 15 bp, Homo sapiens
gtctgaaacaacctc

SEQ ID NO: 1500496 - DNA, 15 bp, Homo sapiens
agtctgaaacaacct

SEQ ID NO: 1500497 - DNA, 15 bp, Homo sapiens
tagtctgaaacaacc

SEQ ID NO: 1500498 - DNA, 15 bp, Homo sapiens
ttagtctgaaacaac

SEQ ID NO: 1500499 - DNA, 15 bp, Homo sapiens
tttagtctgaaacaa

SEQ ID NO: 1500500 - DNA, 15 bp, Homo sapiens
gtttagtctgaaaca

SEQ ID NO: 1500501 - DNA, 15 bp, Homo sapiens
agtttagtctgaaac

SEQ ID NO: 1500502 - DNA, 15 bp, Homo sapiens
gagtttagtctgaaa

SEQ ID NO: 1500503 - DNA, 15 bp, Homo sapiens
agagtttagtctgaa

SEQ ID NO: 1500504 - DNA, 15 bp, Homo sapiens
cagagtttagtctga

SEQ ID NO: 1500505 - DNA, 15 bp, Homo sapiens
gcagagtttagtctg

SEQ ID NO: 1500506 - DNA, 15 bp, Homo sapiens
agcagagtttagtct

SEQ ID NO: 1500507 - DNA, 15 bp, Homo sapiens
tagcagagtttagtc

SEQ ID NO: 1500508 - DNA, 15 bp, Homo sapiens
atagcagagtttagt

SEQ ID NO: 1500509 - DNA, 15 bp, Homo sapiens
gatagcagagtttag

SEQ ID NO: 1500510 - DNA, 15 bp, Homo sapiens
agatagcagagttta

SEQ ID NO: 1500511 - DNA, 15 bp, Homo sapiens
gagatagcagagttt

SEQ ID NO: 1500512 - DNA, 15 bp, Homo sapiens
tgagatagcagagtt

SEQ ID NO: 1500513 - DNA, 15 bp, Homo sapiens
gtgagatagcagagt

SEQ ID NO: 1500514 - DNA, 15 bp, Homo sapiens
agtgagatagcagag

SEQ ID NO: 1500515 - DNA, 15 bp, Homo sapiens
aagtgagatagcaga

SEQ ID NO: 1500516 - DNA, 15 bp, Homo sapiens
gaagtgagatagcag

SEQ ID NO: 1500517 - DNA, 15 bp, Homo sapiens
agaagtgagatagca

SEQ ID NO: 1500518 - DNA, 15 bp, Homo sapiens
aagaagtgagatagc

SEQ ID NO: 1500519 - DNA, 15 bp, Homo sapiens
caagaagtgagatag

SEQ ID NO: 1500520 - DNA, 15 bp, Homo sapiens
ccaagaagtgagata

SEQ ID NO: 1500521 - DNA, 15 bp, Homo sapiens
accaagaagtgagat

SEQ ID NO: 1500522 - DNA, 15 bp, Homo sapiens
taccaagaagtgaga

SEQ ID NO: 1500523 - DNA, 15 bp, Homo sapiens
ataccaagaagtgag

SEQ ID NO: 1500524 - DNA, 15 bp, Homo sapiens
gataccaagaagtga

SEQ ID NO: 1500525 - DNA, 15 bp, Homo sapiens
ggataccaagaagtg

SEQ ID NO: 1500526 - DNA, 15 bp, Homo sapiens
aggataccaagaagt

SEQ ID NO: 1500527 - DNA, 15 bp, Homo sapiens
aaggataccaagaag

SEQ ID NO: 1500528 - DNA, 15 bp, Homo sapiens
caaggataccaagaa

SEQ ID NO: 1500529 - DNA, 15 bp, Homo sapiens
acaaggataccaaga

SEQ ID NO: 1500530 - DNA, 15 bp, Homo sapiens
aacaaggataccaag

SEQ ID NO: 1500531 - DNA, 15 bp, Homo sapiens
taacaaggataccaa

SEQ ID NO: 1500532 - DNA, 15 bp, Homo sapiens
gtaacaaggatacca

SEQ ID NO: 1500533 - DNA, 15 bp, Homo sapiens
ggtaacaaggatacc

SEQ ID NO: 1500534 - DNA, 15 bp, Homo sapiens
aggtaacaaggatac

SEQ ID NO: 1500535 - DNA, 15 bp, Homo sapiens
caggtaacaaggata

SEQ ID NO: 1500536 - DNA, 15 bp, Homo sapiens
ccaggtaacaaggat

SEQ ID NO: 1500537 - DNA, 15 bp, Homo sapiens
tccaggtaacaagga

SEQ ID NO: 1500538 - DNA, 15 bp, Homo sapiens
ctccaggtaacaagg

SEQ ID NO: 1500539 - DNA, 15 bp, Homo sapiens
actccaggtaacaag

SEQ ID NO: 1500540 - DNA, 15 bp, Homo sapiens
aactccaggtaacaa

SEQ ID NO: 1500541 - DNA, 15 bp, Homo sapiens
aaactccaggtaaca

SEQ ID NO: 1500542 - DNA, 15 bp, Homo sapiens
aaaactccaggtaac

SEQ ID NO: 1500543 - DNA, 15 bp, Homo sapiens
taaaactccaggtaa

SEQ ID NO: 1500544 - DNA, 15 bp, Homo sapiens
gtaaaactccaggta

SEQ ID NO: 1500545 - DNA, 15 bp, Homo sapiens
tgtaaaactccaggt

SEQ ID NO: 1500546 - DNA, 15 bp, Homo sapiens
ctgtaaaactccagg

SEQ ID NO: 1500547 - DNA, 15 bp, Homo sapiens
tctgtaaaactccag

SEQ ID NO: 1500548 - DNA, 15 bp, Homo sapiens
ttctgtaaaactcca

SEQ ID NO: 1500549 - DNA, 15 bp, Homo sapiens
gttctgtaaaactcc

SEQ ID NO: 1500550 - DNA, 15 bp, Homo sapiens
ggttctgtaaaactc

SEQ ID NO: 1500551 - DNA, 15 bp, Homo sapiens
tggttctgtaaaact

SEQ ID NO: 1500552 - DNA, 15 bp, Homo sapiens
gtggttctgtaaaac

SEQ ID NO: 1500553 - DNA, 15 bp, Homo sapiens
tgtggttctgtaaaa

SEQ ID NO: 1500554 - DNA, 15 bp, Homo sapiens
gtgtggttctgtaaa

SEQ ID NO: 1500555 - DNA, 15 bp, Homo sapiens
tgtgtggttctgtaa

SEQ ID NO: 1500556 - DNA, 15 bp, Homo sapiens
ctgtgtggttctgta

SEQ ID NO: 1500557 - DNA, 15 bp, Homo sapiens
actgtgtggttctgt

SEQ ID NO: 1500558 - DNA, 15 bp, Homo sapiens
tactgtgtggttctg

SEQ ID NO: 1500559 - DNA, 15 bp, Homo sapiens
ttactgtgtggttct

SEQ ID NO: 1500560 - DNA, 15 bp, Homo sapiens
cttactgtgtggttc

SEQ ID NO: 1500561 - DNA, 15 bp, Homo sapiens
acttactgtgtggtt

SEQ ID NO: 1500562 - DNA, 15 bp, Homo sapiens
aacttactgtgtggt

SEQ ID NO: 1500563 - DNA, 15 bp, Homo sapiens
aaacttactgtgtgg

SEQ ID NO: 1500564 - DNA, 15 bp, Homo sapiens
aaaacttactgtgtg

SEQ ID NO: 1500565 - DNA, 15 bp, Homo sapiens
gaaaacttactgtgt

SEQ ID NO: 1500566 - DNA, 15 bp, Homo sapiens
agaaaacttactgtg

SEQ ID NO: 1500567 - DNA, 15 bp, Homo sapiens
aagaaaacttactgt

SEQ ID NO: 1500568 - DNA, 15 bp, Homo sapiens
gaagaaaacttactg

SEQ ID NO: 1500569 - DNA, 15 bp, Homo sapiens
ggaagaaaacttact

SEQ ID NO: 1500570 - DNA, 15 bp, Homo sapiens
aggaagaaaacttac

SEQ ID NO: 1500571 - DNA, 15 bp, Homo sapiens
aaggaagaaaactta

SEQ ID NO: 1500572 - DNA, 15 bp, Homo sapiens
aaaggaagaaaactt

SEQ ID NO: 1500573 - DNA, 15 bp, Homo sapiens
taaaggaagaaaact

SEQ ID NO: 1500574 - DNA, 15 bp, Homo sapiens
ctaaaggaagaaaac

SEQ ID NO: 1500575 - DNA, 15 bp, Homo sapiens
cctaaaggaagaaaa

SEQ ID NO: 1500576 - DNA, 15 bp, Homo sapiens
tcctaaaggaagaaa

SEQ ID NO: 1500577 - DNA, 15 bp, Homo sapiens
ctcctaaaggaagaa

SEQ ID NO: 1500578 - DNA, 15 bp, Homo sapiens
cctcctaaaggaaga

SEQ ID NO: 1500579 - DNA, 15 bp, Homo sapiens
tcctcctaaaggaag

SEQ ID NO: 1500580 - DNA, 15 bp, Homo sapiens
atcctcctaaaggaa

SEQ ID NO: 1500581 - DNA, 15 bp, Homo sapiens
aatcctcctaaagga

SEQ ID NO: 1500582 - DNA, 15 bp, Homo sapiens
caatcctcctaaagg

SEQ ID NO: 1500583 - DNA, 15 bp, Homo sapiens
acaatcctcctaaag

SEQ ID NO: 1500584 - DNA, 15 bp, Homo sapiens
aacaatcctcctaaa

SEQ ID NO: 1500585 - DNA, 15 bp, Homo sapiens
aaacaatcctcctaa

SEQ ID NO: 1500586 - DNA, 15 bp, Homo sapiens
caaacaatcctccta

SEQ ID NO: 1500587 - DNA, 15 bp, Homo sapiens
tcaaacaatcctcct

SEQ ID NO: 1500588 - DNA, 15 bp, Homo sapiens
ttcaaacaatcctcc

SEQ ID NO: 1500589 - DNA, 15 bp, Homo sapiens
gttcaaacaatcctc

SEQ ID NO: 1500590 - DNA, 15 bp, Homo sapiens
tgttcaaacaatcct

SEQ ID NO: 1500591 - DNA, 15 bp, Homo sapiens
gtgttcaaacaatcc

SEQ ID NO: 1500592 - DNA, 15 bp, Homo sapiens
tgtgttcaaacaatc

SEQ ID NO: 1500593 - DNA, 15 bp, Homo sapiens
ctgtgttcaaacaat

SEQ ID NO: 1500594 - DNA, 15 bp, Homo sapiens
gctgtgttcaaacaa

SEQ ID NO: 1500595 - DNA, 15 bp, Homo sapiens
agctgtgttcaaaca

SEQ ID NO: 1500596 - DNA, 15 bp, Homo sapiens
aagctgtgttcaaac

SEQ ID NO: 1500597 - DNA, 15 bp, Homo sapiens
caagctgtgttcaaa

SEQ ID NO: 1500598 - DNA, 15 bp, Homo sapiens
ccaagctgtgttcaa

SEQ ID NO: 1500599 - DNA, 15 bp, Homo sapiens
gccaagctgtgttca

SEQ ID NO: 1500600 - DNA, 15 bp, Homo sapiens
agccaagctgtgttc

SEQ ID NO: 1500601 - DNA, 15 bp, Homo sapiens
aagccaagctgtgtt

SEQ ID NO: 1500602 - DNA, 15 bp, Homo sapiens
aaagccaagctgtgt

SEQ ID NO: 1500603 - DNA, 15 bp, Homo sapiens
caaagccaagctgtg

SEQ ID NO: 1500604 - DNA, 15 bp, Homo sapiens
acaaagccaagctgt

SEQ ID NO: 1500605 - DNA, 15 bp, Homo sapiens
aacaaagccaagctg

SEQ ID NO: 1500606 - DNA, 15 bp, Homo sapiens
aaacaaagccaagct

SEQ ID NO: 1500607 - DNA, 15 bp, Homo sapiens
aaaacaaagccaagc

SEQ ID NO: 1500608 - DNA, 15 bp, Homo sapiens
gaaaacaaagccaag

SEQ ID NO: 1500609 - DNA, 15 bp, Homo sapiens
agaaaacaaagccaa

SEQ ID NO: 1500610 - DNA, 15 bp, Homo sapiens
aagaaaacaaagcca

SEQ ID NO: 1500611 - DNA, 15 bp, Homo sapiens
aaagaaaacaaagcc

SEQ ID NO: 1500612 - DNA, 15 bp, Homo sapiens
aaaagaaaacaaagc

SEQ ID NO: 1500613 - DNA, 15 bp, Homo sapiens
aaaaagaaaacaaag

SEQ ID NO: 1500614 - DNA, 15 bp, Homo sapiens
aaaaaagaaaacaaa

SEQ ID NO: 1500615 - DNA, 15 bp, Homo sapiens
aaaaaaagaaaacaa

SEQ ID NO: 1500616 - DNA, 15 bp, Homo sapiens
gaaaaaaagaaaaca

SEQ ID NO: 1500617 - DNA, 15 bp, Homo sapiens
agaaaaaaagaaaac

SEQ ID NO: 1500618 - DNA, 15 bp, Homo sapiens
aagaaaaaaagaaaa

SEQ ID NO: 1500619 - DNA, 15 bp, Homo sapiens
caagaaaaaaagaaa

SEQ ID NO: 1500620 - DNA, 15 bp, Homo sapiens
acaagaaaaaaagaa

SEQ ID NO: 1500621 - DNA, 15 bp, Homo sapiens
gacaagaaaaaaaga

SEQ ID NO: 1500622 - DNA, 15 bp, Homo sapiens
agacaagaaaaaaag

SEQ ID NO: 1500623 - DNA, 15 bp, Homo sapiens
aagacaagaaaaaaa

SEQ ID NO: 1500624 - DNA, 15 bp, Homo sapiens
aaagacaagaaaaaa

SEQ ID NO: 1500625 - DNA, 15 bp, Homo sapiens
aaaagacaagaaaaa

SEQ ID NO: 1500626 - DNA, 15 bp, Homo sapiens
aaaaagacaagaaaa

SEQ ID NO: 1500627 - DNA, 15 bp, Homo sapiens
taaaaagacaagaaa

SEQ ID NO: 1500628 - DNA, 15 bp, Homo sapiens
ataaaaagacaagaa

SEQ ID NO: 1500629 - DNA, 15 bp, Homo sapiens
gataaaaagacaaga

SEQ ID NO: 1500630 - DNA, 15 bp, Homo sapiens
tgataaaaagacaag

SEQ ID NO: 1500631 - DNA, 15 bp, Homo sapiens
ttgataaaaagacaa

SEQ ID NO: 1500632 - DNA, 15 bp, Homo sapiens
tttgataaaaagaca

SEQ ID NO: 1500633 - DNA, 15 bp, Homo sapiens
atttgataaaaagac

SEQ ID NO: 1500634 - DNA, 15 bp, Homo sapiens
catttgataaaaaga

SEQ ID NO: 1500635 - DNA, 15 bp, Homo sapiens
ccatttgataaaaag

SEQ ID NO: 1500636 - DNA, 15 bp, Homo sapiens
tccatttgataaaaa

SEQ ID NO: 1500637 - DNA, 15 bp, Homo sapiens
ctccatttgataaaa

SEQ ID NO: 1500638 - DNA, 15 bp, Homo sapiens
actccatttgataaa

SEQ ID NO: 1500639 - DNA, 15 bp, Homo sapiens
cactccatttgataa

SEQ ID NO: 1500640 - DNA, 15 bp, Homo sapiens
gcactccatttgata

SEQ ID NO: 1500641 - DNA, 15 bp, Homo sapiens
tgcactccatttgat

SEQ ID NO: 1500642 - DNA, 15 bp, Homo sapiens
atgcactccatttga

SEQ ID NO: 1500643 - DNA, 15 bp, Homo sapiens
tatgcactccatttg

SEQ ID NO: 1500644 - DNA, 15 bp, Homo sapiens
gtatgcactccattt

SEQ ID NO: 1500645 - DNA, 15 bp, Homo sapiens
agtatgcactccatt

SEQ ID NO: 1500646 - DNA, 15 bp, Homo sapiens
aagtatgcactccat

SEQ ID NO: 1500647 - DNA, 15 bp, Homo sapiens
aaagtatgcactcca

SEQ ID NO: 1500648 - DNA, 15 bp, Homo sapiens
gaaagtatgcactcc

SEQ ID NO: 1500649 - DNA, 15 bp, Homo sapiens
agaaagtatgcactc

SEQ ID NO: 1500650 - DNA, 15 bp, Homo sapiens
cagaaagtatgcact

SEQ ID NO: 1500651 - DNA, 15 bp, Homo sapiens
tcagaaagtatgcac

SEQ ID NO: 1500652 - DNA, 15 bp, Homo sapiens
ttcagaaagtatgca

SEQ ID NO: 1500653 - DNA, 15 bp, Homo sapiens
tttcagaaagtatgc

SEQ ID NO: 1500654 - DNA, 15 bp, Homo sapiens
ttttcagaaagtatg

SEQ ID NO: 1500655 - DNA, 15 bp, Homo sapiens
cttttcagaaagtat

SEQ ID NO: 1500656 - DNA, 15 bp, Homo sapiens
gcttttcagaaagta

SEQ ID NO: 1500657 - DNA, 15 bp, Homo sapiens
tgcttttcagaaagt

SEQ ID NO: 1500658 - DNA, 15 bp, Homo sapiens
ttgcttttcagaaag

SEQ ID NO: 1500659 - DNA, 15 bp, Homo sapiens
tttgcttttcagaaa

SEQ ID NO: 1500660 - DNA, 15 bp, Homo sapiens
ctttgcttttcagaa

SEQ ID NO: 1500661 - DNA, 15 bp, Homo sapiens
tctttgcttttcaga

SEQ ID NO: 1500662 - DNA, 15 bp, Homo sapiens
ttctttgcttttcag

SEQ ID NO: 1500663 - DNA, 15 bp, Homo sapiens
gttctttgcttttca

SEQ ID NO: 1500664 - DNA, 15 bp, Homo sapiens
cgttctttgcttttc

SEQ ID NO: 1500665 - DNA, 15 bp, Homo sapiens
gcgttctttgctttt

SEQ ID NO: 1500666 - DNA, 15 bp, Homo sapiens
agcgttctttgcttt

SEQ ID NO: 1500667 - DNA, 15 bp, Homo sapiens
tagcgttctttgctt

SEQ ID NO: 1500668 - DNA, 15 bp, Homo sapiens
atagcgttctttgct

SEQ ID NO: 1500669 - DNA, 15 bp, Homo sapiens
aatagcgttctttgc

SEQ ID NO: 1500670 - DNA, 15 bp, Homo sapiens
aaatagcgttctttg

SEQ ID NO: 1500671 - DNA, 15 bp, Homo sapiens
caaatagcgttcttt

SEQ ID NO: 1500672 - DNA, 15 bp, Homo sapiens
tcaaatagcgttctt

SEQ ID NO: 1500673 - DNA, 15 bp, Homo sapiens
ttcaaatagcgttct

SEQ ID NO: 1500674 - DNA, 15 bp, Homo sapiens
attcaaatagcgttc

SEQ ID NO: 1500675 - DNA, 15 bp, Homo sapiens
aattcaaatagcgtt

SEQ ID NO: 1500676 - DNA, 15 bp, Homo sapiens
gaattcaaatagcgt

SEQ ID NO: 1500677 - DNA, 15 bp, Homo sapiens
agaattcaaatagcg

SEQ ID NO: 1500678 - DNA, 15 bp, Homo sapiens
gagaattcaaatagc

SEQ ID NO: 1500679 - DNA, 15 bp, Homo sapiens
agagaattcaaatag

SEQ ID NO: 1500680 - DNA, 15 bp, Homo sapiens
aagagaattcaaata

SEQ ID NO: 1500681 - DNA, 15 bp, Homo sapiens
gaagagaattcaaat

SEQ ID NO: 1500682 - DNA, 15 bp, Homo sapiens
agaagagaattcaaa

SEQ ID NO: 1500683 - DNA, 15 bp, Homo sapiens
tagaagagaattcaa

SEQ ID NO: 1500684 - DNA, 15 bp, Homo sapiens
ctagaagagaattca

SEQ ID NO: 1500685 - DNA, 15 bp, Homo sapiens
actagaagagaattc

SEQ ID NO: 1500686 - DNA, 15 bp, Homo sapiens
gactagaagagaatt

SEQ ID NO: 1500687 - DNA, 15 bp, Homo sapiens
tgactagaagagaat

SEQ ID NO: 1500688 - DNA, 15 bp, Homo sapiens
gtgactagaagagaa

SEQ ID NO: 1500689 - DNA, 15 bp, Homo sapiens
ggtgactagaagaga

SEQ ID NO: 1500690 - DNA, 15 bp, Homo sapiens
gggtgactagaagag

SEQ ID NO: 1500691 - DNA, 15 bp, Homo sapiens
ggggtgactagaaga

SEQ ID NO: 1500692 - DNA, 15 bp, Homo sapiens
tggggtgactagaag

SEQ ID NO: 1500693 - DNA, 15 bp, Homo sapiens
ctggggtgactagaa

SEQ ID NO: 1500694 - DNA, 15 bp, Homo sapiens
actggggtgactaga

SEQ ID NO: 1500695 - DNA, 15 bp, Homo sapiens
cactggggtgactag

SEQ ID NO: 1500696 - DNA, 15 bp, Homo sapiens
gcactggggtgacta

SEQ ID NO: 1500697 - DNA, 15 bp, Homo sapiens
ggcactggggtgact

SEQ ID NO: 1500698 - DNA, 15 bp, Homo sapiens
gggcactggggtgac

SEQ ID NO: 1500699 - DNA, 15 bp, Homo sapiens
tgggcactggggtga

SEQ ID NO: 1500700 - DNA, 15 bp, Homo sapiens
ctgggcactggggtg

SEQ ID NO: 1500701 - DNA, 15 bp, Homo sapiens
gctgggcactggggt

SEQ ID NO: 1500702 - DNA, 15 bp, Homo sapiens
tgctgggcactgggg

SEQ ID NO: 1500703 - DNA, 15 bp, Homo sapiens
gtgctgggcactggg

SEQ ID NO: 1500704 - DNA, 15 bp, Homo sapiens
tgtgctgggcactgg

SEQ ID NO: 1500705 - DNA, 15 bp, Homo sapiens
ctgtgctgggcactg

SEQ ID NO: 1500706 - DNA, 15 bp, Homo sapiens
actgtgctgggcact

SEQ ID NO: 1500707 - DNA, 15 bp, Homo sapiens
gactgtgctgggcac

SEQ ID NO: 1500708 - DNA, 15 bp, Homo sapiens
agactgtgctgggca

SEQ ID NO: 1500709 - DNA, 15 bp, Homo sapiens
aagactgtgctgggc

SEQ ID NO: 1500710 - DNA, 15 bp, Homo sapiens
taagactgtgctggg

SEQ ID NO: 1500711 - DNA, 15 bp, Homo sapiens
ttaagactgtgctgg

SEQ ID NO: 1500712 - DNA, 15 bp, Homo sapiens
tttaagactgtgctg

SEQ ID NO: 1500713 - DNA, 15 bp, Homo sapiens
gtttaagactgtgct

SEQ ID NO: 1500714 - DNA, 15 bp, Homo sapiens
tgtttaagactgtgc

SEQ ID NO: 1500715 - DNA, 15 bp, Homo sapiens
gtgtttaagactgtg

SEQ ID NO: 1500716 - DNA, 15 bp, Homo sapiens
tgtgtttaagactgt

SEQ ID NO: 1500717 - DNA, 15 bp, Homo sapiens
gtgtgtttaagactg

SEQ ID NO: 1500718 - DNA, 15 bp, Homo sapiens
tgtgtgtttaagact

SEQ ID NO: 1500719 - DNA, 15 bp, Homo sapiens
ctgtgtgtttaagac

SEQ ID NO: 1500720 - DNA, 15 bp, Homo sapiens
tctgtgtgtttaaga

SEQ ID NO: 1500721 - DNA, 15 bp, Homo sapiens
ttctgtgtgtttaag

SEQ ID NO: 1500722 - DNA, 15 bp, Homo sapiens
gttctgtgtgtttaa

SEQ ID NO: 1500723 - DNA, 15 bp, Homo sapiens
tgttctgtgtgttta

SEQ ID NO: 1500724 - DNA, 15 bp, Homo sapiens
atgttctgtgtgttt

SEQ ID NO: 1500725 - DNA, 15 bp, Homo sapiens
aatgttctgtgtgtt

SEQ ID NO: 1500726 - DNA, 15 bp, Homo sapiens
caatgttctgtgtgt

SEQ ID NO: 1500727 - DNA, 15 bp, Homo sapiens
tcaatgttctgtgtg

SEQ ID NO: 1500728 - DNA, 15 bp, Homo sapiens
atcaatgttctgtgt

SEQ ID NO: 1500729 - DNA, 15 bp, Homo sapiens
catcaatgttctgtg

SEQ ID NO: 1500730 - DNA, 15 bp, Homo sapiens
ccatcaatgttctgt

SEQ ID NO: 1500731 - DNA, 15 bp, Homo sapiens
tccatcaatgttctg

SEQ ID NO: 1500732 - DNA, 15 bp, Homo sapiens
ttccatcaatgttct

SEQ ID NO: 1500733 - DNA, 15 bp, Homo sapiens
attccatcaatgttc

SEQ ID NO: 1500734 - DNA, 15 bp, Homo sapiens
cattccatcaatgtt

SEQ ID NO: 1500735 - DNA, 15 bp, Homo sapiens
acattccatcaatgt

SEQ ID NO: 1500736 - DNA, 15 bp, Homo sapiens
aacattccatcaatg

SEQ ID NO: 1500737 - DNA, 15 bp, Homo sapiens
aaacattccatcaat

SEQ ID NO: 1500738 - DNA, 15 bp, Homo sapiens
aaaacattccatcaa

SEQ ID NO: 1500739 - DNA, 15 bp, Homo sapiens
aaaaacattccatca

SEQ ID NO: 1500740 - DNA, 15 bp, Homo sapiens
gaaaaacattccatc

SEQ ID NO: 1500741 - DNA, 15 bp, Homo sapiens
tgaaaaacattccat

SEQ ID NO: 1500742 - DNA, 15 bp, Homo sapiens
atgaaaaacattcca

SEQ ID NO: 1500743 - DNA, 15 bp, Homo sapiens
tatgaaaaacattcc

SEQ ID NO: 1500744 - DNA, 15 bp, Homo sapiens
atatgaaaaacattc

SEQ ID NO: 1500745 - DNA, 15 bp, Homo sapiens
catatgaaaaacatt

SEQ ID NO: 1500746 - DNA, 15 bp, Homo sapiens
tcatatgaaaaacat

SEQ ID NO: 1500747 - DNA, 15 bp, Homo sapiens
atcatatgaaaaaca

SEQ ID NO: 1500748 - DNA, 15 bp, Homo sapiens
aatcatatgaaaaac

SEQ ID NO: 1500749 - DNA, 15 bp, Homo sapiens
gaatcatatgaaaaa

SEQ ID NO: 1500750 - DNA, 15 bp, Homo sapiens
ggaatcatatgaaaa

SEQ ID NO: 1500751 - DNA, 15 bp, Homo sapiens
aggaatcatatgaaa

SEQ ID NO: 1500752 - DNA, 15 bp, Homo sapiens
caggaatcatatgaa

SEQ ID NO: 1500753 - DNA, 15 bp, Homo sapiens
ccaggaatcatatga

SEQ ID NO: 1500754 - DNA, 15 bp, Homo sapiens
accaggaatcatatg

SEQ ID NO: 1500755 - DNA, 15 bp, Homo sapiens
aaccaggaatcatat

SEQ ID NO: 1500756 - DNA, 15 bp, Homo sapiens
caaccaggaatcata

SEQ ID NO: 1500757 - DNA, 15 bp, Homo sapiens
tcaaccaggaatcat

SEQ ID NO: 1500758 - DNA, 15 bp, Homo sapiens
ttcaaccaggaatca

SEQ ID NO: 1500759 - DNA, 15 bp, Homo sapiens
cttcaaccaggaatc

SEQ ID NO: 1500760 - DNA, 15 bp, Homo sapiens
ccttcaaccaggaat

SEQ ID NO: 1500761 - DNA, 15 bp, Homo sapiens
cccttcaaccaggaa

SEQ ID NO: 1500762 - DNA, 15 bp, Homo sapiens
acccttcaaccagga

SEQ ID NO: 1500763 - DNA, 15 bp, Homo sapiens
tacccttcaaccagg

SEQ ID NO: 1500764 - DNA, 15 bp, Homo sapiens
ctacccttcaaccag

SEQ ID NO: 1500765 - DNA, 15 bp, Homo sapiens
tctacccttcaacca

SEQ ID NO: 1500766 - DNA, 15 bp, Homo sapiens
gtctacccttcaacc

SEQ ID NO: 1500767 - DNA, 15 bp, Homo sapiens
agtctacccttcaac

SEQ ID NO: 1500768 - DNA, 15 bp, Homo sapiens
cagtctacccttcaa

SEQ ID NO: 1500769 - DNA, 15 bp, Homo sapiens
ccagtctacccttca

SEQ ID NO: 1500770 - DNA, 15 bp, Homo sapiens
gccagtctacccttc

SEQ ID NO: 1500771 - DNA, 15 bp, Homo sapiens
agccagtctaccctt

SEQ ID NO: 1500772 - DNA, 15 bp, Homo sapiens
tagccagtctaccct

SEQ ID NO: 1500773 - DNA, 15 bp, Homo sapiens
ttagccagtctaccc

SEQ ID NO: 1500774 - DNA, 15 bp, Homo sapiens
tttagccagtctacc

SEQ ID NO: 1500775 - DNA, 15 bp, Homo sapiens
atttagccagtctac

SEQ ID NO: 1500776 - DNA, 15 bp, Homo sapiens
tatttagccagtcta

SEQ ID NO: 1500777 - DNA, 15 bp, Homo sapiens
ttatttagccagtct

SEQ ID NO: 1500778 - DNA, 15 bp, Homo sapiens
tttatttagccagtc

SEQ ID NO: 1500779 - DNA, 15 bp, Homo sapiens
ttttatttagccagt

SEQ ID NO: 1500780 - DNA, 15 bp, Homo sapiens
tttttatttagccag

SEQ ID NO: 1500781 - DNA, 15 bp, Homo sapiens
ttttttatttagcca

SEQ ID NO: 1500782 - DNA, 15 bp, Homo sapiens
tttttttatttagcc

SEQ ID NO: 1500783 - DNA, 15 bp, Homo sapiens
ctttttttatttagc

SEQ ID NO: 1500784 - DNA, 15 bp, Homo sapiens
actttttttatttag

SEQ ID NO: 1500785 - DNA, 15 bp, Homo sapiens
cactttttttattta

SEQ ID NO: 1500786 - DNA, 15 bp, Homo sapiens
ccactttttttattt

SEQ ID NO: 1500787 - DNA, 15 bp, Homo sapiens
accactttttttatt

SEQ ID NO: 1500788 - DNA, 15 bp, Homo sapiens
taccactttttttat

SEQ ID NO: 1500789 - DNA, 15 bp, Homo sapiens
gtaccacttttttta

SEQ ID NO: 1500790 - DNA, 15 bp, Homo sapiens
agtaccacttttttt

SEQ ID NO: 1500791 - DNA, 15 bp, Homo sapiens
aagtaccactttttt

SEQ ID NO: 1500792 - DNA, 15 bp, Homo sapiens
aaagtaccacttttt

SEQ ID NO: 1500793 - DNA, 15 bp, Homo sapiens
aaaagtaccactttt

SEQ ID NO: 1500794 - DNA, 15 bp, Homo sapiens
caaaagtaccacttt

SEQ ID NO: 1500795 - DNA, 15 bp, Homo sapiens
ccaaaagtaccactt

SEQ ID NO: 1500796 - DNA, 15 bp, Homo sapiens
gccaaaagtaccact

SEQ ID NO: 1500797 - DNA, 15 bp, Homo sapiens
agccaaaagtaccac

SEQ ID NO: 1500798 - DNA, 15 bp, Homo sapiens
aagccaaaagtacca

SEQ ID NO: 1500799 - DNA, 15 bp, Homo sapiens
aaagccaaaagtacc

SEQ ID NO: 1500800 - DNA, 15 bp, Homo sapiens
caaagccaaaagtac

SEQ ID NO: 1500801 - DNA, 15 bp, Homo sapiens
acaaagccaaaagta

SEQ ID NO: 1500802 - DNA, 15 bp, Homo sapiens
aacaaagccaaaagt

SEQ ID NO: 1500803 - DNA, 15 bp, Homo sapiens
aaacaaagccaaaag

SEQ ID NO: 1500804 - DNA, 15 bp, Homo sapiens
aaaacaaagccaaaa

SEQ ID NO: 1500805 - DNA, 15 bp, Homo sapiens
taaaacaaagccaaa

SEQ ID NO: 1500806 - DNA, 15 bp, Homo sapiens
gtaaaacaaagccaa

SEQ ID NO: 1500807 - DNA, 15 bp, Homo sapiens
agtaaaacaaagcca

SEQ ID NO: 1500808 - DNA, 15 bp, Homo sapiens
cagtaaaacaaagcc

SEQ ID NO: 1500809 - DNA, 15 bp, Homo sapiens
tcagtaaaacaaagc

SEQ ID NO: 1500810 - DNA, 15 bp, Homo sapiens
ttcagtaaaacaaag

SEQ ID NO: 1500811 - DNA, 15 bp, Homo sapiens
attcagtaaaacaaa

SEQ ID NO: 1500812 - DNA, 15 bp, Homo sapiens
aattcagtaaaacaa

SEQ ID NO: 1500813 - DNA, 15 bp, Homo sapiens
aaattcagtaaaaca

SEQ ID NO: 1500814 - DNA, 15 bp, Homo sapiens
aaaattcagtaaaac

SEQ ID NO: 1500815 - DNA, 15 bp, Homo sapiens
taaaattcagtaaaa

SEQ ID NO: 1500816 - DNA, 15 bp, Homo sapiens
gtaaaattcagtaaa

SEQ ID NO: 1500817 - DNA, 15 bp, Homo sapiens
agtaaaattcagtaa

SEQ ID NO: 1500818 - DNA, 15 bp, Homo sapiens
aagtaaaattcagta

SEQ ID NO: 1500819 - DNA, 15 bp, Homo sapiens
gaagtaaaattcagt

SEQ ID NO: 1500820 - DNA, 15 bp, Homo sapiens
ggaagtaaaattcag

SEQ ID NO: 1500821 - DNA, 15 bp, Homo sapiens
tggaagtaaaattca

SEQ ID NO: 1500822 - DNA, 15 bp, Homo sapiens
atggaagtaaaattc

SEQ ID NO: 1500823 - DNA, 15 bp, Homo sapiens
catggaagtaaaatt

SEQ ID NO: 1500824 - DNA, 15 bp, Homo sapiens
acatggaagtaaaat

SEQ ID NO: 1500825 - DNA, 15 bp, Homo sapiens
aacatggaagtaaaa

SEQ ID NO: 1500826 - DNA, 15 bp, Homo sapiens
aaacatggaagtaaa

SEQ ID NO: 1500827 - DNA, 15 bp, Homo sapiens
caaacatggaagtaa

SEQ ID NO: 1500828 - DNA, 15 bp, Homo sapiens
gcaaacatggaagta

SEQ ID NO: 1500829 - DNA, 15 bp, Homo sapiens
tgcaaacatggaagt

SEQ ID NO: 1500830 - DNA, 15 bp, Homo sapiens
ttgcaaacatggaag

SEQ ID NO: 1500831 - DNA, 15 bp, Homo sapiens
attgcaaacatggaa

SEQ ID NO: 1500832 - DNA, 15 bp, Homo sapiens
tattgcaaacatgga

SEQ ID NO: 1500833 - DNA, 15 bp, Homo sapiens
ctattgcaaacatgg

SEQ ID NO: 1500834 - DNA, 15 bp, Homo sapiens
gctattgcaaacatg

SEQ ID NO: 1500835 - DNA, 15 bp, Homo sapiens
ggctattgcaaacat

SEQ ID NO: 1500836 - DNA, 15 bp, Homo sapiens
aggctattgcaaaca

SEQ ID NO: 1500837 - DNA, 15 bp, Homo sapiens
taggctattgcaaac

SEQ ID NO: 1500838 - DNA, 15 bp, Homo sapiens
ctaggctattgcaaa

SEQ ID NO: 1500839 - DNA, 15 bp, Homo sapiens
cctaggctattgcaa

SEQ ID NO: 1500840 - DNA, 15 bp, Homo sapiens
acctaggctattgca

SEQ ID NO: 1500841 - DNA, 15 bp, Homo sapiens
gacctaggctattgc

SEQ ID NO: 1500842 - DNA, 15 bp, Homo sapiens
agacctaggctattg

SEQ ID NO: 1500843 - DNA, 15 bp, Homo sapiens
cagacctaggctatt

SEQ ID NO: 1500844 - DNA, 15 bp, Homo sapiens
tcagacctaggctat

SEQ ID NO: 1500845 - DNA, 15 bp, Homo sapiens
atcagacctaggcta

SEQ ID NO: 1500846 - DNA, 15 bp, Homo sapiens
tatcagacctaggct

SEQ ID NO: 1500847 - DNA, 15 bp, Homo sapiens
ttatcagacctaggc

SEQ ID NO: 1500848 - DNA, 15 bp, Homo sapiens
cttatcagacctagg

SEQ ID NO: 1500849 - DNA, 15 bp, Homo sapiens
acttatcagacctag

SEQ ID NO: 1500850 - DNA, 15 bp, Homo sapiens
cacttatcagaccta

SEQ ID NO: 1500851 - DNA, 15 bp, Homo sapiens
tcacttatcagacct

SEQ ID NO: 1500852 - DNA, 15 bp, Homo sapiens
atcacttatcagacc

SEQ ID NO: 1500853 - DNA, 15 bp, Homo sapiens
tatcacttatcagac

SEQ ID NO: 1500854 - DNA, 15 bp, Homo sapiens
atatcacttatcaga

SEQ ID NO: 1500855 - DNA, 15 bp, Homo sapiens
aatatcacttatcag

SEQ ID NO: 1500856 - DNA, 15 bp, Homo sapiens
aaatatcacttatca

SEQ ID NO: 1500857 - DNA, 15 bp, Homo sapiens
aaaatatcacttatc

SEQ ID NO: 1500858 - DNA, 15 bp, Homo sapiens
taaaatatcacttat

SEQ ID NO: 1500859 - DNA, 15 bp, Homo sapiens
ttaaaatatcactta

SEQ ID NO: 1500860 - DNA, 15 bp, Homo sapiens
gttaaaatatcactt

SEQ ID NO: 1500861 - DNA, 15 bp, Homo sapiens
agttaaaatatcact

SEQ ID NO: 1500862 - DNA, 15 bp, Homo sapiens
tagttaaaatatcac

SEQ ID NO: 1500863 - DNA, 15 bp, Homo sapiens
ctagttaaaatatca

SEQ ID NO: 1500864 - DNA, 15 bp, Homo sapiens
cctagttaaaatatc

SEQ ID NO: 1500865 - DNA, 15 bp, Homo sapiens
tcctagttaaaatat

SEQ ID NO: 1500866 - DNA, 15 bp, Homo sapiens
ttcctagttaaaata

SEQ ID NO: 1500867 - DNA, 15 bp, Homo sapiens
attcctagttaaaat

SEQ ID NO: 1500868 - DNA, 15 bp, Homo sapiens
cattcctagttaaaa

SEQ ID NO: 1500869 - DNA, 15 bp, Homo sapiens
tcattcctagttaaa

SEQ ID NO: 1500870 - DNA, 15 bp, Homo sapiens
ctcattcctagttaa

SEQ ID NO: 1500871 - DNA, 15 bp, Homo sapiens
actcattcctagtta

SEQ ID NO: 1500872 - DNA, 15 bp, Homo sapiens
tactcattcctagtt

SEQ ID NO: 1500873 - DNA, 15 bp, Homo sapiens
ttactcattcctagt

SEQ ID NO: 1500874 - DNA, 15 bp, Homo sapiens
cttactcattcctag

SEQ ID NO: 1500875 - DNA, 15 bp, Homo sapiens
tcttactcattccta

SEQ ID NO: 1500876 - DNA, 15 bp, Homo sapiens
ttcttactcattcct

SEQ ID NO: 1500877 - DNA, 15 bp, Homo sapiens
tttcttactcattcc

SEQ ID NO: 1500878 - DNA, 15 bp, Homo sapiens
ttttcttactcattc

SEQ ID NO: 1500879 - DNA, 15 bp, Homo sapiens
attttcttactcatt

SEQ ID NO: 1500880 - DNA, 15 bp, Homo sapiens
aattttcttactcat

SEQ ID NO: 1500881 - DNA, 15 bp, Homo sapiens
taattttcttactca

SEQ ID NO: 1500882 - DNA, 15 bp, Homo sapiens
ctaattttcttactc

SEQ ID NO: 1500883 - DNA, 15 bp, Homo sapiens
gctaattttcttact

SEQ ID NO: 1500884 - DNA, 15 bp, Homo sapiens
tgctaattttcttac

SEQ ID NO: 1500885 - DNA, 15 bp, Homo sapiens
atgctaattttctta

SEQ ID NO: 1500886 - DNA, 15 bp, Homo sapiens
tatgctaattttctt

SEQ ID NO: 1500887 - DNA, 15 bp, Homo sapiens
ttatgctaattttct

SEQ ID NO: 1500888 - DNA, 15 bp, Homo sapiens
tttatgctaattttc

SEQ ID NO: 1500889 - DNA, 15 bp, Homo sapiens
ctttatgctaatttt

SEQ ID NO: 1500890 - DNA, 15 bp, Homo sapiens
tctttatgctaattt

SEQ ID NO: 1500891 - DNA, 15 bp, Homo sapiens
ttctttatgctaatt

SEQ ID NO: 1500892 - DNA, 15 bp, Homo sapiens
cttctttatgctaat

SEQ ID NO: 1500893 - DNA, 15 bp, Homo sapiens
ccttctttatgctaa

SEQ ID NO: 1500894 - DNA, 15 bp, Homo sapiens
tccttctttatgcta

SEQ ID NO: 1500895 - DNA, 15 bp, Homo sapiens
ttccttctttatgct

SEQ ID NO: 1500896 - DNA, 15 bp, Homo sapiens
attccttctttatgc

SEQ ID NO: 1500897 - DNA, 15 bp, Homo sapiens
aattccttctttatg

SEQ ID NO: 1500898 - DNA, 15 bp, Homo sapiens
aaattccttctttat

SEQ ID NO: 1500899 - DNA, 15 bp, Homo sapiens
taaattccttcttta

SEQ ID NO: 1500900 - DNA, 15 bp, Homo sapiens
ataaattccttcttt

SEQ ID NO: 1500901 - DNA, 15 bp, Homo sapiens
tataaattccttctt

SEQ ID NO: 1500902 - DNA, 15 bp, Homo sapiens
gtataaattccttct

SEQ ID NO: 1500903 - DNA, 15 bp, Homo sapiens
tgtataaattccttc

SEQ ID NO: 1500904 - DNA, 15 bp, Homo sapiens
atgtataaattcctt

SEQ ID NO: 1500905 - DNA, 15 bp, Homo sapiens
tatgtataaattcct

SEQ ID NO: 1500906 - DNA, 15 bp, Homo sapiens
atatgtataaattcc

SEQ ID NO: 1500907 - DNA, 15 bp, Homo sapiens
aatatgtataaattc

SEQ ID NO: 1500908 - DNA, 15 bp, Homo sapiens
aaatatgtataaatt

SEQ ID NO: 1500909 - DNA, 15 bp, Homo sapiens
taaatatgtataaat

SEQ ID NO: 1500910 - DNA, 15 bp, Homo sapiens
ataaatatgtataaa

SEQ ID NO: 1500911 - DNA, 15 bp, Homo sapiens
tataaatatgtataa

SEQ ID NO: 1500912 - DNA, 15 bp, Homo sapiens
atataaatatgtata

SEQ ID NO: 1500913 - DNA, 15 bp, Homo sapiens
aatataaatatgtat

SEQ ID NO: 1500914 - DNA, 15 bp, Homo sapiens
aaatataaatatgta

SEQ ID NO: 1500915 - DNA, 15 bp, Homo sapiens
gaaatataaatatgt

SEQ ID NO: 1500916 - DNA, 15 bp, Homo sapiens
ggaaatataaatatg

SEQ ID NO: 1500917 - DNA, 15 bp, Homo sapiens
aggaaatataaatat

SEQ ID NO: 1500918 - DNA, 15 bp, Homo sapiens
gaggaaatataaata

SEQ ID NO: 1500919 - DNA, 15 bp, Homo sapiens
ggaggaaatataaat

SEQ ID NO: 1500920 - DNA, 15 bp, Homo sapiens
gggaggaaatataaa

SEQ ID NO: 1500921 - DNA, 15 bp, Homo sapiens
tgggaggaaatataa

SEQ ID NO: 1500922 - DNA, 15 bp, Homo sapiens
atgggaggaaatata

SEQ ID NO: 1500923 - DNA, 15 bp, Homo sapiens
tatgggaggaaatat

SEQ ID NO: 1500924 - DNA, 15 bp, Homo sapiens
ctatgggaggaaata

SEQ ID NO: 1500925 - DNA, 15 bp, Homo sapiens
tctatgggaggaaat

SEQ ID NO: 1500926 - DNA, 15 bp, Homo sapiens
ctctatgggaggaaa

SEQ ID NO: 1500927 - DNA, 15 bp, Homo sapiens
gctctatgggaggaa

SEQ ID NO: 1500928 - DNA, 15 bp, Homo sapiens
tgctctatgggagga

SEQ ID NO: 1500929 - DNA, 15 bp, Homo sapiens
ttgctctatgggagg

SEQ ID NO: 1500930 - DNA, 15 bp, Homo sapiens
tttgctctatgggag

SEQ ID NO: 1500931 - DNA, 15 bp, Homo sapiens
gtttgctctatggga

SEQ ID NO: 1500932 - DNA, 15 bp, Homo sapiens
tgtttgctctatggg

SEQ ID NO: 1500933 - DNA, 15 bp, Homo sapiens
atgtttgctctatgg

SEQ ID NO: 1500934 - DNA, 15 bp, Homo sapiens
catgtttgctctatg

SEQ ID NO: 1500935 - DNA, 15 bp, Homo sapiens
acatgtttgctctat

SEQ ID NO: 1500936 - DNA, 15 bp, Homo sapiens
aacatgtttgctcta

SEQ ID NO: 1500937 - DNA, 15 bp, Homo sapiens
aaacatgtttgctct

SEQ ID NO: 1500938 - DNA, 15 bp, Homo sapiens
aaaacatgtttgctc

SEQ ID NO: 1500939 - DNA, 15 bp, Homo sapiens
aaaaacatgtttgct

SEQ ID NO: 1500940 - DNA, 15 bp, Homo sapiens
aaaaaacatgtttgc

SEQ ID NO: 1500941 - DNA, 15 bp, Homo sapiens
caaaaaacatgtttg

SEQ ID NO: 1500942 - DNA, 15 bp, Homo sapiens
tcaaaaaacatgttt

SEQ ID NO: 1500943 - DNA, 15 bp, Homo sapiens
ttcaaaaaacatgtt

SEQ ID NO: 1500944 - DNA, 15 bp, Homo sapiens
attcaaaaaacatgt

SEQ ID NO: 1500945 - DNA, 15 bp, Homo sapiens
gattcaaaaaacatg

SEQ ID NO: 1500946 - DNA, 15 bp, Homo sapiens
tgattcaaaaaacat

SEQ ID NO: 1500947 - DNA, 15 bp, Homo sapiens
ctgattcaaaaaaca

SEQ ID NO: 1500948 - DNA, 15 bp, Homo sapiens
cctgattcaaaaaac

SEQ ID NO: 1500949 - DNA, 15 bp, Homo sapiens
acctgattcaaaaaa

SEQ ID NO: 1500950 - DNA, 15 bp, Homo sapiens
aacctgattcaaaaa

SEQ ID NO: 1500951 - DNA, 15 bp, Homo sapiens
aaacctgattcaaaa

SEQ ID NO: 1500952 - DNA, 15 bp, Homo sapiens
gaaacctgattcaaa

SEQ ID NO: 1500953 - DNA, 15 bp, Homo sapiens
tgaaacctgattcaa

SEQ ID NO: 1500954 - DNA, 15 bp, Homo sapiens
ctgaaacctgattca

SEQ ID NO: 1500955 - DNA, 15 bp, Homo sapiens
tctgaaacctgattc

SEQ ID NO: 1500956 - DNA, 15 bp, Homo sapiens
atctgaaacctgatt

SEQ ID NO: 1500957 - DNA, 15 bp, Homo sapiens
gatctgaaacctgat

SEQ ID NO: 1500958 - DNA, 15 bp, Homo sapiens
agatctgaaacctga

SEQ ID NO: 1500959 - DNA, 15 bp, Homo sapiens
cagatctgaaacctg

SEQ ID NO: 1500960 - DNA, 15 bp, Homo sapiens
tcagatctgaaacct

SEQ ID NO: 1500961 - DNA, 15 bp, Homo sapiens
atcagatctgaaacc

SEQ ID NO: 1500962 - DNA, 15 bp, Homo sapiens
gatcagatctgaaac

SEQ ID NO: 1500963 - DNA, 15 bp, Homo sapiens
tgatcagatctgaaa

SEQ ID NO: 1500964 - DNA, 15 bp, Homo sapiens
ttgatcagatctgaa

SEQ ID NO: 1500965 - DNA, 15 bp, Homo sapiens
gttgatcagatctga

SEQ ID NO: 1500966 - DNA, 15 bp, Homo sapiens
agttgatcagatctg

SEQ ID NO: 1500967 - DNA, 15 bp, Homo sapiens
tagttgatcagatct

SEQ ID NO: 1500968 - DNA, 15 bp, Homo sapiens
gtagttgatcagatc

SEQ ID NO: 1500969 - DNA, 15 bp, Homo sapiens
agtagttgatcagat

SEQ ID NO: 1500970 - DNA, 15 bp, Homo sapiens
aagtagttgatcaga

SEQ ID NO: 1500971 - DNA, 15 bp, Homo sapiens
aaagtagttgatcag

SEQ ID NO: 1500972 - DNA, 15 bp, Homo sapiens
aaaagtagttgatca

SEQ ID NO: 1500973 - DNA, 15 bp, Homo sapiens
caaaagtagttgatc

SEQ ID NO: 1500974 - DNA, 15 bp, Homo sapiens
acaaaagtagttgat

SEQ ID NO: 1500975 - DNA, 15 bp, Homo sapiens
tacaaaagtagttga

SEQ ID NO: 1500976 - DNA, 15 bp, Homo sapiens
ttacaaaagtagttg

SEQ ID NO: 1500977 - DNA, 15 bp, Homo sapiens
attacaaaagtagtt

SEQ ID NO: 1500978 - DNA, 15 bp, Homo sapiens
aattacaaaagtagt

SEQ ID NO: 1500979 - DNA, 15 bp, Homo sapiens
aaattacaaaagtag

SEQ ID NO: 1500980 - DNA, 15 bp, Homo sapiens
aaaattacaaaagta

SEQ ID NO: 1500981 - DNA, 15 bp, Homo sapiens
caaaattacaaaagt

SEQ ID NO: 1500982 - DNA, 15 bp, Homo sapiens
ccaaaattacaaaag

SEQ ID NO: 1500983 - DNA, 15 bp, Homo sapiens
tccaaaattacaaaa

SEQ ID NO: 1500984 - DNA, 15 bp, Homo sapiens
atccaaaattacaaa

SEQ ID NO: 1500985 - DNA, 15 bp, Homo sapiens
aatccaaaattacaa

SEQ ID NO: 1500986 - DNA, 15 bp, Homo sapiens
aaatccaaaattaca

SEQ ID NO: 1500987 - DNA, 15 bp, Homo sapiens
caaatccaaaattac

SEQ ID NO: 1500988 - DNA, 15 bp, Homo sapiens
acaaatccaaaatta

SEQ ID NO: 1500989 - DNA, 15 bp, Homo sapiens
gacaaatccaaaatt

SEQ ID NO: 1500990 - DNA, 15 bp, Homo sapiens
tgacaaatccaaaat

SEQ ID NO: 1500991 - DNA, 15 bp, Homo sapiens
gtgacaaatccaaaa

SEQ ID NO: 1500992 - DNA, 15 bp, Homo sapiens
agtgacaaatccaaa

SEQ ID NO: 1500993 - DNA, 15 bp, Homo sapiens
aagtgacaaatccaa

SEQ ID NO: 1500994 - DNA, 15 bp, Homo sapiens
taagtgacaaatcca

SEQ ID NO: 1500995 - DNA, 15 bp, Homo sapiens
gtaagtgacaaatcc

SEQ ID NO: 1500996 - DNA, 15 bp, Homo sapiens
agtaagtgacaaatc

SEQ ID NO: 1500997 - DNA, 15 bp, Homo sapiens
cagtaagtgacaaat

SEQ ID NO: 1500998 - DNA, 15 bp, Homo sapiens
acagtaagtgacaaa

SEQ ID NO: 1500999 - DNA, 15 bp, Homo sapiens
aacagtaagtgacaa

SEQ ID NO: 1501000 - DNA, 15 bp, Homo sapiens
taacagtaagtgaca

SEQ ID NO: 1501001 - DNA, 15 bp, Homo sapiens
ctaacagtaagtgac

SEQ ID NO: 1501002 - DNA, 15 bp, Homo sapiens
cctaacagtaagtga

SEQ ID NO: 1501003 - DNA, 15 bp, Homo sapiens
tcctaacagtaagtg

SEQ ID NO: 1501004 - DNA, 15 bp, Homo sapiens
atcctaacagtaagt

SEQ ID NO: 1501005 - DNA, 15 bp, Homo sapiens
tatcctaacagtaag

SEQ ID NO: 1501006 - DNA, 15 bp, Homo sapiens
atatcctaacagtaa

SEQ ID NO: 1501007 - DNA, 15 bp, Homo sapiens
aatatcctaacagta

SEQ ID NO: 1501008 - DNA, 15 bp, Homo sapiens
aaatatcctaacagt

SEQ ID NO: 1501009 - DNA, 15 bp, Homo sapiens
aaaatatcctaacag

SEQ ID NO: 1501010 - DNA, 15 bp, Homo sapiens
caaaatatcctaaca

SEQ ID NO: 1501011 - DNA, 15 bp, Homo sapiens
aaggcagcagaatcg

SEQ ID NO: 1501012 - DNA, 15 bp, Homo sapiens
caaggcagcagaatc

SEQ ID NO: 1501013 - DNA, 15 bp, Homo sapiens
ccaaggcagcagaat

SEQ ID NO: 1501014 - DNA, 15 bp, Homo sapiens
gccaaggcagcagaa

SEQ ID NO: 1501015 - DNA, 15 bp, Homo sapiens
ggccaaggcagcaga

SEQ ID NO: 1501016 - DNA, 15 bp, Homo sapiens
aggccaaggcagcag

SEQ ID NO: 1501017 - DNA, 15 bp, Homo sapiens
gaggccaaggcagca

SEQ ID NO: 1501018 - DNA, 15 bp, Homo sapiens
ggaggccaaggcagc

SEQ ID NO: 1501019 - DNA, 15 bp, Homo sapiens
agggaggccaaggca

SEQ ID NO: 1501020 - DNA, 15 bp, Homo sapiens
tagggaggccaaggc

SEQ ID NO: 1501021 - DNA, 15 bp, Homo sapiens
ctagggaggccaagg

SEQ ID NO: 1501022 - DNA, 15 bp, Homo sapiens
actagggaggccaag

SEQ ID NO: 1501023 - DNA, 15 bp, Homo sapiens
tactagggaggccaa

SEQ ID NO: 1501024 - DNA, 15 bp, Homo sapiens
ctactagggaggcca

SEQ ID NO: 1501025 - DNA, 15 bp, Homo sapiens
gctactagggaggcc

SEQ ID NO: 1501026 - DNA, 15 bp, Homo sapiens
agctactagggaggc

SEQ ID NO: 1501027 - DNA, 15 bp, Homo sapiens
cagctactagggagg

SEQ ID NO: 1501028 - DNA, 15 bp, Homo sapiens
ccagctactagggag

SEQ ID NO: 1501029 - DNA, 15 bp, Homo sapiens
cccagctactaggga

SEQ ID NO: 1501030 - DNA, 15 bp, Homo sapiens
tcccagctactaggg

SEQ ID NO: 1501031 - DNA, 15 bp, Homo sapiens
gtcccagctactagg

SEQ ID NO: 1501032 - DNA, 15 bp, Homo sapiens
agtcccagctactag

SEQ ID NO: 1501033 - DNA, 15 bp, Homo sapiens
tagtcccagctacta

SEQ ID NO: 1501034 - DNA, 15 bp, Homo sapiens
agtagtcccagctac

SEQ ID NO: 1501035 - DNA, 15 bp, Homo sapiens
cagtagtcccagcta

SEQ ID NO: 1501036 - DNA, 15 bp, Homo sapiens
ccagtagtcccagct

SEQ ID NO: 1501037 - DNA, 15 bp, Homo sapiens
gccagtagtcccagc

SEQ ID NO: 1501038 - DNA, 15 bp, Homo sapiens
tgccagtagtcccag

SEQ ID NO: 1501039 - DNA, 15 bp, Homo sapiens
gtgccagtagtccca

SEQ ID NO: 1501040 - DNA, 15 bp, Homo sapiens
ggtgccagtagtccc

SEQ ID NO: 1501041 - DNA, 15 bp, Homo sapiens
aggtgccagtagtcc

SEQ ID NO: 1501042 - DNA, 15 bp, Homo sapiens
caggtgccagtagtc

SEQ ID NO: 1501043 - DNA, 15 bp, Homo sapiens
gcaggtgccagtagt

SEQ ID NO: 1501044 - DNA, 15 bp, Homo sapiens
ggcaggtgccagtag

SEQ ID NO: 1501045 - DNA, 15 bp, Homo sapiens
tggcaggtgccagta

SEQ ID NO: 1501046 - DNA, 15 bp, Homo sapiens
gtggcaggtgccagt

SEQ ID NO: 1501047 - DNA, 15 bp, Homo sapiens
ggtggcaggtgccag

SEQ ID NO: 1501048 - DNA, 15 bp, Homo sapiens
tggtggcaggtgcca

SEQ ID NO: 1501049 - DNA, 15 bp, Homo sapiens
acatggtggcaggtg

SEQ ID NO: 1501050 - DNA, 15 bp, Homo sapiens
gacatggtggcaggt

SEQ ID NO: 1501051 - DNA, 15 bp, Homo sapiens
agacatggtggcagg

SEQ ID NO: 1501052 - DNA, 15 bp, Homo sapiens
cagacatggtggcag

SEQ ID NO: 1501053 - DNA, 15 bp, Homo sapiens
ccaacattttgggag

SEQ ID NO: 1501054 - DNA, 15 bp, Homo sapiens
cccaacattttggga

SEQ ID NO: 1501055 - DNA, 15 bp, Homo sapiens
tcccaacattttggg

SEQ ID NO: 1501056 - DNA, 15 bp, Homo sapiens
atcccaacattttgg

SEQ ID NO: 1501057 - DNA, 15 bp, Homo sapiens
aatcccaacattttg

SEQ ID NO: 1501058 - DNA, 15 bp, Homo sapiens
taatcccaacatttt

SEQ ID NO: 1501059 - DNA, 15 bp, Homo sapiens
gtaatcccaacattt

SEQ ID NO: 1501060 - DNA, 15 bp, Homo sapiens
tgtaatcccaacatt

SEQ ID NO: 1501061 - DNA, 15 bp, Homo sapiens
ctgtaatcccaacat

SEQ ID NO: 1501062 - DNA, 15 bp, Homo sapiens
cgcagtggctcatgc

SEQ ID NO: 1501063 - DNA, 15 bp, Homo sapiens
acgcagtggctcatg

SEQ ID NO: 1501064 - DNA, 15 bp, Homo sapiens
gacgcagtggctcat

SEQ ID NO: 1501065 - DNA, 15 bp, Homo sapiens
agacgcagtggctca

SEQ ID NO: 1501066 - DNA, 15 bp, Homo sapiens
cagacgcagtggctc

SEQ ID NO: 1501067 - DNA, 15 bp, Homo sapiens
ccagacgcagtggct

SEQ ID NO: 1501068 - DNA, 15 bp, Homo sapiens
gccagacgcagtggc

SEQ ID NO: 1501069 - DNA, 15 bp, Homo sapiens
ggccagacgcagtgg

SEQ ID NO: 1501070 - DNA, 15 bp, Homo sapiens
aggccagacgcagtg

SEQ ID NO: 1501071 - DNA, 15 bp, Homo sapiens
aaggccagacgcagt

SEQ ID NO: 1501072 - DNA, 15 bp, Homo sapiens
taaggccagacgcag

SEQ ID NO: 1501073 - DNA, 15 bp, Homo sapiens
ataaggccagacgca

SEQ ID NO: 1501074 - DNA, 15 bp, Homo sapiens
aataaggccagacgc

SEQ ID NO: 1501075 - DNA, 15 bp, Homo sapiens
aaataaggccagacg

SEQ ID NO: 1501076 - DNA, 15 bp, Homo sapiens
gaaataaggccagac

SEQ ID NO: 1501077 - DNA, 15 bp, Homo sapiens
tgaaataaggccaga

SEQ ID NO: 1501078 - DNA, 15 bp, Homo sapiens
atgaaataaggccag

SEQ ID NO: 1501079 - DNA, 15 bp, Homo sapiens
catgaaataaggcca

SEQ ID NO: 1501080 - DNA, 15 bp, Homo sapiens
acatgaaataaggcc

SEQ ID NO: 1501081 - DNA, 15 bp, Homo sapiens
gacatgaaataaggc

SEQ ID NO: 1501082 - DNA, 15 bp, Homo sapiens
agacatgaaataagg

SEQ ID NO: 1501083 - DNA, 15 bp, Homo sapiens
gagacatgaaataag

SEQ ID NO: 1501084 - DNA, 15 bp, Homo sapiens
agagacatgaaataa

SEQ ID NO: 1501085 - DNA, 15 bp, Homo sapiens
aagagacatgaaata

SEQ ID NO: 1501086 - DNA, 15 bp, Homo sapiens
aaagagacatgaaat

SEQ ID NO: 1501087 - DNA, 15 bp, Homo sapiens
aaaagagacatgaaa

SEQ ID NO: 1501088 - DNA, 15 bp, Homo sapiens
aaaaagagacatgaa

SEQ ID NO: 1501089 - DNA, 15 bp, Homo sapiens
caaaaagagacatga

SEQ ID NO: 1501090 - DNA, 15 bp, Homo sapiens
tcaaaaagagacatg

SEQ ID NO: 1501091 - DNA, 15 bp, Homo sapiens
atcaaaaagagacat

SEQ ID NO: 1501092 - DNA, 15 bp, Homo sapiens
tatcaaaaagagaca

SEQ ID NO: 1501093 - DNA, 15 bp, Homo sapiens
ctatcaaaaagagac

SEQ ID NO: 1501094 - DNA, 15 bp, Homo sapiens
actatcaaaaagaga

SEQ ID NO: 1501095 - DNA, 15 bp, Homo sapiens
tactatcaaaaagag

SEQ ID NO: 1501096 - DNA, 15 bp, Homo sapiens
ctactatcaaaaaga

SEQ ID NO: 1501097 - DNA, 15 bp, Homo sapiens
gctactatcaaaaag

SEQ ID NO: 1501098 - DNA, 15 bp, Homo sapiens
ggctactatcaaaaa

SEQ ID NO: 1501099 - DNA, 15 bp, Homo sapiens
tggctactatcaaaa

SEQ ID NO: 1501100 - DNA, 15 bp, Homo sapiens
atggctactatcaaa

SEQ ID NO: 1501101 - DNA, 15 bp, Homo sapiens
gatggctactatcaa

SEQ ID NO: 1501102 - DNA, 15 bp, Homo sapiens
ggatggctactatca

SEQ ID NO: 1501103 - DNA, 15 bp, Homo sapiens
aggatggctactatc

SEQ ID NO: 1501104 - DNA, 15 bp, Homo sapiens
taggatggctactat

SEQ ID NO: 1501105 - DNA, 15 bp, Homo sapiens
ttaggatggctacta

SEQ ID NO: 1501106 - DNA, 15 bp, Homo sapiens
attaggatggctact

SEQ ID NO: 1501107 - DNA, 15 bp, Homo sapiens
cattaggatggctac

SEQ ID NO: 1501108 - DNA, 15 bp, Homo sapiens
tcattaggatggcta

SEQ ID NO: 1501109 - DNA, 15 bp, Homo sapiens
ctcattaggatggct

SEQ ID NO: 1501110 - DNA, 15 bp, Homo sapiens
actcattaggatggc

SEQ ID NO: 1501111 - DNA, 15 bp, Homo sapiens
cactcattaggatgg

SEQ ID NO: 1501112 - DNA, 15 bp, Homo sapiens
acactcattaggatg

SEQ ID NO: 1501113 - DNA, 15 bp, Homo sapiens
aacactcattaggat

SEQ ID NO: 1501114 - DNA, 15 bp, Homo sapiens
taacactcattagga

SEQ ID NO: 1501115 - DNA, 15 bp, Homo sapiens
ctaacactcattagg

SEQ ID NO: 1501116 - DNA, 15 bp, Homo sapiens
cctaacactcattag

SEQ ID NO: 1501117 - DNA, 15 bp, Homo sapiens
acctaacactcatta

SEQ ID NO: 1501118 - DNA, 15 bp, Homo sapiens
cacctaacactcatt

SEQ ID NO: 1501119 - DNA, 15 bp, Homo sapiens
ccacctaacactcat

SEQ ID NO: 1501120 - DNA, 15 bp, Homo sapiens
accacctaacactca

SEQ ID NO: 1501121 - DNA, 15 bp, Homo sapiens
aaccacctaacactc

SEQ ID NO: 1501122 - DNA, 15 bp, Homo sapiens
aaaccacctaacact

SEQ ID NO: 1501123 - DNA, 15 bp, Homo sapiens
aaaaccacctaacac

SEQ ID NO: 1501124 - DNA, 15 bp, Homo sapiens
taaaaccacctaaca

SEQ ID NO: 1501125 - DNA, 15 bp, Homo sapiens
ataaaaccacctaac

SEQ ID NO: 1501126 - DNA, 15 bp, Homo sapiens
cataaaaccacctaa

SEQ ID NO: 1501127 - DNA, 15 bp, Homo sapiens
tcataaaaccaccta

SEQ ID NO: 1501128 - DNA, 15 bp, Homo sapiens
gtcataaaaccacct

SEQ ID NO: 1501129 - DNA, 15 bp, Homo sapiens
agtcataaaaccacc

SEQ ID NO: 1501130 - DNA, 15 bp, Homo sapiens
aagtcataaaaccac

SEQ ID NO: 1501131 - DNA, 15 bp, Homo sapiens
aaagtcataaaacca

SEQ ID NO: 1501132 - DNA, 15 bp, Homo sapiens
aaaagtcataaaacc

SEQ ID NO: 1501133 - DNA, 15 bp, Homo sapiens
aaaaagtcataaaac

SEQ ID NO: 1501134 - DNA, 15 bp, Homo sapiens
caaaaagtcataaaa

SEQ ID NO: 1501135 - DNA, 15 bp, Homo sapiens
ccaaaaagtcataaa

SEQ ID NO: 1501136 - DNA, 15 bp, Homo sapiens
accaaaaagtcataa

SEQ ID NO: 1501137 - DNA, 15 bp, Homo sapiens
aaccaaaaagtcata

SEQ ID NO: 1501138 - DNA, 15 bp, Homo sapiens
aaaccaaaaagtcat

SEQ ID NO: 1501139 - DNA, 15 bp, Homo sapiens
aaaaccaaaaagtca

SEQ ID NO: 1501140 - DNA, 15 bp, Homo sapiens
aaaaaccaaaaagtc

SEQ ID NO: 1501141 - DNA, 15 bp, Homo sapiens
aaaaaaccaaaaagt

SEQ ID NO: 1501142 - DNA, 15 bp, Homo sapiens
aaaaaaaccaaaaag

SEQ ID NO: 1501143 - DNA, 15 bp, Homo sapiens
aaaaaaaaccaaaaa

SEQ ID NO: 1501144 - DNA, 15 bp, Homo sapiens
aaaaaaaaaccaaaa

SEQ ID NO: 1501145 - DNA, 15 bp, Homo sapiens
taaaaaaaaaccaaa

SEQ ID NO: 1501146 - DNA, 15 bp, Homo sapiens
ttaaaaaaaaaccaa

SEQ ID NO: 1501147 - DNA, 15 bp, Homo sapiens
attaaaaaaaaacca

SEQ ID NO: 1501148 - DNA, 15 bp, Homo sapiens
tattaaaaaaaaacc

SEQ ID NO: 1501149 - DNA, 15 bp, Homo sapiens
ctattaaaaaaaaac

SEQ ID NO: 1501150 - DNA, 15 bp, Homo sapiens
tctattaaaaaaaaa

SEQ ID NO: 1501151 - DNA, 15 bp, Homo sapiens
ctctattaaaaaaaa

SEQ ID NO: 1501152 - DNA, 15 bp, Homo sapiens
cctctattaaaaaaa

SEQ ID NO: 1501153 - DNA, 15 bp, Homo sapiens
acctctattaaaaaa

SEQ ID NO: 1501154 - DNA, 15 bp, Homo sapiens
aacctctattaaaaa

SEQ ID NO: 1501155 - DNA, 15 bp, Homo sapiens
aaacctctattaaaa

SEQ ID NO: 1501156 - DNA, 15 bp, Homo sapiens
aaaacctctattaaa

SEQ ID NO: 1501157 - DNA, 15 bp, Homo sapiens
aaaaacctctattaa

SEQ ID NO: 1501158 - DNA, 15 bp, Homo sapiens
caaaaacctctatta

SEQ ID NO: 1501159 - DNA, 15 bp, Homo sapiens
gcaaaaacctctatt

SEQ ID NO: 1501160 - DNA, 15 bp, Homo sapiens
agcaaaaacctctat

SEQ ID NO: 1501161 - DNA, 15 bp, Homo sapiens
gagcaaaaacctcta

SEQ ID NO: 1501162 - DNA, 15 bp, Homo sapiens
agagcaaaaacctct

SEQ ID NO: 1501163 - DNA, 15 bp, Homo sapiens
cagagcaaaaacctc

SEQ ID NO: 1501164 - DNA, 15 bp, Homo sapiens
acagagcaaaaacct

SEQ ID NO: 1501165 - DNA, 15 bp, Homo sapiens
gacagagcaaaaacc

SEQ ID NO: 1501166 - DNA, 15 bp, Homo sapiens
tgacagagcaaaaac

SEQ ID NO: 1501167 - DNA, 15 bp, Homo sapiens
atgacagagcaaaaa

SEQ ID NO: 1501168 - DNA, 15 bp, Homo sapiens
catgacagagcaaaa

SEQ ID NO: 1501169 - DNA, 15 bp, Homo sapiens
gcatgacagagcaaa

SEQ ID NO: 1501170 - DNA, 15 bp, Homo sapiens
tgcatgacagagcaa

SEQ ID NO: 1501171 - DNA, 15 bp, Homo sapiens
ctgcatgacagagca

SEQ ID NO: 1501172 - DNA, 15 bp, Homo sapiens
tctgcatgacagagc

SEQ ID NO: 1501173 - DNA, 15 bp, Homo sapiens
gtctgcatgacagag

SEQ ID NO: 1501174 - DNA, 15 bp, Homo sapiens
agtctgcatgacaga

SEQ ID NO: 1501175 - DNA, 15 bp, Homo sapiens
tagtctgcatgacag

SEQ ID NO: 1501176 - DNA, 15 bp, Homo sapiens
ctagtctgcatgaca

SEQ ID NO: 1501177 - DNA, 15 bp, Homo sapiens
tctagtctgcatgac

SEQ ID NO: 1501178 - DNA, 15 bp, Homo sapiens
ctctagtctgcatga

SEQ ID NO: 1501179 - DNA, 15 bp, Homo sapiens
actctagtctgcatg

SEQ ID NO: 1501180 - DNA, 15 bp, Homo sapiens
tactctagtctgcat

SEQ ID NO: 1501181 - DNA, 15 bp, Homo sapiens
gtactctagtctgca

SEQ ID NO: 1501182 - DNA, 15 bp, Homo sapiens
tgtactctagtctgc

SEQ ID NO: 1501183 - DNA, 15 bp, Homo sapiens
ctgtactctagtctg

SEQ ID NO: 1501184 - DNA, 15 bp, Homo sapiens
actgtactctagtct

SEQ ID NO: 1501185 - DNA, 15 bp, Homo sapiens
tactgtactctagtc

SEQ ID NO: 1501186 - DNA, 15 bp, Homo sapiens
atactgtactctagt

SEQ ID NO: 1501187 - DNA, 15 bp, Homo sapiens
gatactgtactctag

SEQ ID NO: 1501188 - DNA, 15 bp, Homo sapiens
tgatactgtactcta

SEQ ID NO: 1501189 - DNA, 15 bp, Homo sapiens
atgatactgtactct

SEQ ID NO: 1501190 - DNA, 15 bp, Homo sapiens
catgatactgtactc

SEQ ID NO: 1501191 - DNA, 15 bp, Homo sapiens
tcatgatactgtact

SEQ ID NO: 1501192 - DNA, 15 bp, Homo sapiens
ctcatgatactgtac

SEQ ID NO: 1501193 - DNA, 15 bp, Homo sapiens
gctcatgatactgta

SEQ ID NO: 1501194 - DNA, 15 bp, Homo sapiens
tgctcatgatactgt

SEQ ID NO: 1501195 - DNA, 15 bp, Homo sapiens
atgctcatgatactg

SEQ ID NO: 1501196 - DNA, 15 bp, Homo sapiens
tatgctcatgatact

SEQ ID NO: 1501197 - DNA, 15 bp, Homo sapiens
ctatgctcatgatac

SEQ ID NO: 1501198 - DNA, 15 bp, Homo sapiens
gctatgctcatgata

SEQ ID NO: 1501199 - DNA, 15 bp, Homo sapiens
agctatgctcatgat

SEQ ID NO: 1501200 - DNA, 15 bp, Homo sapiens
gagctatgctcatga

SEQ ID NO: 1501201 - DNA, 15 bp, Homo sapiens
tgagctatgctcatg

SEQ ID NO: 1501202 - DNA, 15 bp, Homo sapiens
gtgagctatgctcat

SEQ ID NO: 1501203 - DNA, 15 bp, Homo sapiens
agtgagctatgctca

SEQ ID NO: 1501204 - DNA, 15 bp, Homo sapiens
cagtgagctatgctc

SEQ ID NO: 1501205 - DNA, 15 bp, Homo sapiens
gcagtgagctatgct

SEQ ID NO: 1501206 - DNA, 15 bp, Homo sapiens
tgcagtgagctatgc

SEQ ID NO: 1501207 - DNA, 15 bp, Homo sapiens
atgcagtgagctatg

SEQ ID NO: 1501208 - DNA, 15 bp, Homo sapiens
gatgcagtgagctat

SEQ ID NO: 1501209 - DNA, 15 bp, Homo sapiens
agatgcagtgagcta

SEQ ID NO: 1501210 - DNA, 15 bp, Homo sapiens
aagatgcagtgagct

SEQ ID NO: 1501211 - DNA, 15 bp, Homo sapiens
gaagatgcagtgagc

SEQ ID NO: 1501212 - DNA, 15 bp, Homo sapiens
cgaagatgcagtgag

SEQ ID NO: 1501213 - DNA, 15 bp, Homo sapiens
tcgaagatgcagtga

SEQ ID NO: 1501214 - DNA, 15 bp, Homo sapiens
ttcgaagatgcagtg

SEQ ID NO: 1501215 - DNA, 15 bp, Homo sapiens
gttcgaagatgcagt

SEQ ID NO: 1501216 - DNA, 15 bp, Homo sapiens
agttcgaagatgcag

SEQ ID NO: 1501217 - DNA, 15 bp, Homo sapiens
gagttcgaagatgca

SEQ ID NO: 1501218 - DNA, 15 bp, Homo sapiens
agagttcgaagatgc

SEQ ID NO: 1501219 - DNA, 15 bp, Homo sapiens
aagagttcgaagatg

SEQ ID NO: 1501220 - DNA, 15 bp, Homo sapiens
caagagttcgaagat

SEQ ID NO: 1501221 - DNA, 15 bp, Homo sapiens
ccaagagttcgaaga

SEQ ID NO: 1501222 - DNA, 15 bp, Homo sapiens
tccaagagttcgaag

SEQ ID NO: 1501223 - DNA, 15 bp, Homo sapiens
gtccaagagttcgaa

SEQ ID NO: 1501224 - DNA, 15 bp, Homo sapiens
agtccaagagttcga

SEQ ID NO: 1501225 - DNA, 15 bp, Homo sapiens
gagtccaagagttcg

SEQ ID NO: 1501226 - DNA, 15 bp, Homo sapiens
tgagtccaagagttc

SEQ ID NO: 1501227 - DNA, 15 bp, Homo sapiens
ttgagtccaagagtt

SEQ ID NO: 1501228 - DNA, 15 bp, Homo sapiens
cttgagtccaagagt

SEQ ID NO: 1501229 - DNA, 15 bp, Homo sapiens
tgcttgagtccaaga

SEQ ID NO: 1501230 - DNA, 15 bp, Homo sapiens
ttgcttgagtccaag

SEQ ID NO: 1501231 - DNA, 15 bp, Homo sapiens
attgcttgagtccaa

SEQ ID NO: 1501232 - DNA, 15 bp, Homo sapiens
gattgcttgagtcca

SEQ ID NO: 1501233 - DNA, 15 bp, Homo sapiens
agattgcttgagtcc

SEQ ID NO: 1501234 - DNA, 15 bp, Homo sapiens
aagattgcttgagtc

SEQ ID NO: 1501235 - DNA, 15 bp, Homo sapiens
gaagattgcttgagt

SEQ ID NO: 1501236 - DNA, 15 bp, Homo sapiens
caggaagattgcttg

SEQ ID NO: 1501237 - DNA, 15 bp, Homo sapiens
gcaggaagattgctt

SEQ ID NO: 1501238 - DNA, 15 bp, Homo sapiens
ggcaggaagattgct

SEQ ID NO: 1501239 - DNA, 15 bp, Homo sapiens
aggcaggaagattgc

SEQ ID NO: 1501240 - DNA, 15 bp, Homo sapiens
aaggcaggaagattg

SEQ ID NO: 1501241 - DNA, 15 bp, Homo sapiens
ggctaaggcaggaag

SEQ ID NO: 1501242 - DNA, 15 bp, Homo sapiens
aggctaaggcaggaa

SEQ ID NO: 1501243 - DNA, 15 bp, Homo sapiens
ggggaggctaaggca

SEQ ID NO: 1501244 - DNA, 15 bp, Homo sapiens
tggggaggctaaggc

SEQ ID NO: 1501245 - DNA, 15 bp, Homo sapiens
ttggggaggctaagg

SEQ ID NO: 1501246 - DNA, 15 bp, Homo sapiens
tttggggaggctaag

SEQ ID NO: 1501247 - DNA, 15 bp, Homo sapiens
ctttggggaggctaa

SEQ ID NO: 1501248 - DNA, 15 bp, Homo sapiens
actttggggaggcta

SEQ ID NO: 1501249 - DNA, 15 bp, Homo sapiens
cactttggggaggct

SEQ ID NO: 1501250 - DNA, 15 bp, Homo sapiens
gcactttggggaggc

SEQ ID NO: 1501251 - DNA, 15 bp, Homo sapiens
agcactttggggagg

SEQ ID NO: 1501252 - DNA, 15 bp, Homo sapiens
cagcactttggggag

SEQ ID NO: 1501253 - DNA, 15 bp, Homo sapiens
ccagcactttgggga

SEQ ID NO: 1501254 - DNA, 15 bp, Homo sapiens
cccagcactttgggg

SEQ ID NO: 1501255 - DNA, 15 bp, Homo sapiens
ccacttataatccca

SEQ ID NO: 1501256 - DNA, 15 bp, Homo sapiens
tccacttataatccc

SEQ ID NO: 1501257 - DNA, 15 bp, Homo sapiens
ttccacttataatcc

SEQ ID NO: 1501258 - DNA, 15 bp, Homo sapiens
cttccacttataatc

SEQ ID NO: 1501259 - DNA, 15 bp, Homo sapiens
gcttccacttataat

SEQ ID NO: 1501260 - DNA, 15 bp, Homo sapiens
ggcttccacttataa

SEQ ID NO: 1501261 - DNA, 15 bp, Homo sapiens
tggcttccacttata

SEQ ID NO: 1501262 - DNA, 15 bp, Homo sapiens
gtggcttccacttat

SEQ ID NO: 1501263 - DNA, 15 bp, Homo sapiens
agtggcttccactta

SEQ ID NO: 1501264 - DNA, 15 bp, Homo sapiens
cagtggcttccactt

SEQ ID NO: 1501265 - DNA, 15 bp, Homo sapiens
acagtggcttccact

SEQ ID NO: 1501266 - DNA, 15 bp, Homo sapiens
tacagtggcttccac

SEQ ID NO: 1501267 - DNA, 15 bp, Homo sapiens
gtacagtggcttcca

SEQ ID NO: 1501268 - DNA, 15 bp, Homo sapiens
ggtacagtggcttcc

SEQ ID NO: 1501269 - DNA, 15 bp, Homo sapiens
aggtacagtggcttc

SEQ ID NO: 1501270 - DNA, 15 bp, Homo sapiens
taggtacagtggctt

SEQ ID NO: 1501271 - DNA, 15 bp, Homo sapiens
ctaggtacagtggct

SEQ ID NO: 1501272 - DNA, 15 bp, Homo sapiens
gctaggtacagtggc

SEQ ID NO: 1501273 - DNA, 15 bp, Homo sapiens
tgctaggtacagtgg

SEQ ID NO: 1501274 - DNA, 15 bp, Homo sapiens
gtgctaggtacagtg

SEQ ID NO: 1501275 - DNA, 15 bp, Homo sapiens
cgtgctaggtacagt

SEQ ID NO: 1501276 - DNA, 15 bp, Homo sapiens
acgtgctaggtacag

SEQ ID NO: 1501277 - DNA, 15 bp, Homo sapiens
aacgtgctaggtaca

SEQ ID NO: 1501278 - DNA, 15 bp, Homo sapiens
aaacgtgctaggtac

SEQ ID NO: 1501279 - DNA, 15 bp, Homo sapiens
aaaacgtgctaggta

SEQ ID NO: 1501280 - DNA, 15 bp, Homo sapiens
gaaaacgtgctaggt

SEQ ID NO: 1501281 - DNA, 15 bp, Homo sapiens
agaaaacgtgctagg

SEQ ID NO: 1501282 - DNA, 15 bp, Homo sapiens
cagaaaacgtgctag

SEQ ID NO: 1501283 - DNA, 15 bp, Homo sapiens
tcagaaaacgtgcta

SEQ ID NO: 1501284 - DNA, 15 bp, Homo sapiens
gtcagaaaacgtgct

SEQ ID NO: 1501285 - DNA, 15 bp, Homo sapiens
agtcagaaaacgtgc

SEQ ID NO: 1501286 - DNA, 15 bp, Homo sapiens
aagtcagaaaacgtg

SEQ ID NO: 1501287 - DNA, 15 bp, Homo sapiens
aaagtcagaaaacgt

SEQ ID NO: 1501288 - DNA, 15 bp, Homo sapiens
aaaagtcagaaaacg

SEQ ID NO: 1501289 - DNA, 15 bp, Homo sapiens
taaaagtcagaaaac

SEQ ID NO: 1501290 - DNA, 15 bp, Homo sapiens
ctaaaagtcagaaaa

SEQ ID NO: 1501291 - DNA, 15 bp, Homo sapiens
tctaaaagtcagaaa

SEQ ID NO: 1501292 - DNA, 15 bp, Homo sapiens
ctctaaaagtcagaa

SEQ ID NO: 1501293 - DNA, 15 bp, Homo sapiens
actctaaaagtcaga

SEQ ID NO: 1501294 - DNA, 15 bp, Homo sapiens
aactctaaaagtcag

SEQ ID NO: 1501295 - DNA, 15 bp, Homo sapiens
taactctaaaagtca

SEQ ID NO: 1501296 - DNA, 15 bp, Homo sapiens
ataactctaaaagtc

SEQ ID NO: 1501297 - DNA, 15 bp, Homo sapiens
tataactctaaaagt

SEQ ID NO: 1501298 - DNA, 15 bp, Homo sapiens
atataactctaaaag

SEQ ID NO: 1501299 - DNA, 15 bp, Homo sapiens
aatataactctaaaa

SEQ ID NO: 1501300 - DNA, 15 bp, Homo sapiens
aaatataactctaaa

SEQ ID NO: 1501301 - DNA, 15 bp, Homo sapiens
taaatataactctaa

SEQ ID NO: 1501302 - DNA, 15 bp, Homo sapiens
ttaaatataactcta

SEQ ID NO: 1501303 - DNA, 15 bp, Homo sapiens
cttaaatataactct

SEQ ID NO: 1501304 - DNA, 15 bp, Homo sapiens
gcttaaatataactc

SEQ ID NO: 1501305 - DNA, 15 bp, Homo sapiens
agcttaaatataact

SEQ ID NO: 1501306 - DNA, 15 bp, Homo sapiens
gagcttaaatataac

SEQ ID NO: 1501307 - DNA, 15 bp, Homo sapiens
tgagcttaaatataa

SEQ ID NO: 1501308 - DNA, 15 bp, Homo sapiens
atgagcttaaatata

SEQ ID NO: 1501309 - DNA, 15 bp, Homo sapiens
gatgagcttaaatat

SEQ ID NO: 1501310 - DNA, 15 bp, Homo sapiens
tgatgagcttaaata

SEQ ID NO: 1501311 - DNA, 15 bp, Homo sapiens
ctgatgagcttaaat

SEQ ID NO: 1501312 - DNA, 15 bp, Homo sapiens
actgatgagcttaaa

SEQ ID NO: 1501313 - DNA, 15 bp, Homo sapiens
aactgatgagcttaa

SEQ ID NO: 1501314 - DNA, 15 bp, Homo sapiens
aaactgatgagctta

SEQ ID NO: 1501315 - DNA, 15 bp, Homo sapiens
aaaactgatgagctt

SEQ ID NO: 1501316 - DNA, 15 bp, Homo sapiens
caaaactgatgagct

SEQ ID NO: 1501317 - DNA, 15 bp, Homo sapiens
tcaaaactgatgagc

SEQ ID NO: 1501318 - DNA, 15 bp, Homo sapiens
ttcaaaactgatgag

SEQ ID NO: 1501319 - DNA, 15 bp, Homo sapiens
attcaaaactgatga

SEQ ID NO: 1501320 - DNA, 15 bp, Homo sapiens
tattcaaaactgatg

SEQ ID NO: 1501321 - DNA, 15 bp, Homo sapiens
atattcaaaactgat

SEQ ID NO: 1501322 - DNA, 15 bp, Homo sapiens
aatattcaaaactga

SEQ ID NO: 1501323 - DNA, 15 bp, Homo sapiens
aaatattcaaaactg

SEQ ID NO: 1501324 - DNA, 15 bp, Homo sapiens
gaaatattcaaaact

SEQ ID NO: 1501325 - DNA, 15 bp, Homo sapiens
tgaaatattcaaaac

SEQ ID NO: 1501326 - DNA, 15 bp, Homo sapiens
atgaaatattcaaaa

SEQ ID NO: 1501327 - DNA, 15 bp, Homo sapiens
aatgaaatattcaaa

SEQ ID NO: 1501328 - DNA, 15 bp, Homo sapiens
aaatgaaatattcaa

SEQ ID NO: 1501329 - DNA, 15 bp, Homo sapiens
caaatgaaatattca

SEQ ID NO: 1501330 - DNA, 15 bp, Homo sapiens
tcaaatgaaatattc

SEQ ID NO: 1501331 - DNA, 15 bp, Homo sapiens
atcaaatgaaatatt

SEQ ID NO: 1501332 - DNA, 15 bp, Homo sapiens
aatcaaatgaaatat

SEQ ID NO: 1501333 - DNA, 15 bp, Homo sapiens
caatcaaatgaaata

SEQ ID NO: 1501334 - DNA, 15 bp, Homo sapiens
acaatcaaatgaaat

SEQ ID NO: 1501335 - DNA, 15 bp, Homo sapiens
tacaatcaaatgaaa

SEQ ID NO: 1501336 - DNA, 15 bp, Homo sapiens
ttacaatcaaatgaa

SEQ ID NO: 1501337 - DNA, 15 bp, Homo sapiens
cttacaatcaaatga

SEQ ID NO: 1501338 - DNA, 15 bp, Homo sapiens
acttacaatcaaatg

SEQ ID NO: 1501339 - DNA, 15 bp, Homo sapiens
tacttacaatcaaat

SEQ ID NO: 1501340 - DNA, 15 bp, Homo sapiens
atacttacaatcaaa

SEQ ID NO: 1501341 - DNA, 15 bp, Homo sapiens
aatacttacaatcaa

SEQ ID NO: 1501342 - DNA, 15 bp, Homo sapiens
gaatacttacaatca

SEQ ID NO: 1501343 - DNA, 15 bp, Homo sapiens
tgaatacttacaatc

SEQ ID NO: 1501344 - DNA, 15 bp, Homo sapiens
ttgaatacttacaat

SEQ ID NO: 1501345 - DNA, 15 bp, Homo sapiens
tttgaatacttacaa

SEQ ID NO: 1501346 - DNA, 15 bp, Homo sapiens
ctttgaatacttaca

SEQ ID NO: 1501347 - DNA, 15 bp, Homo sapiens
actttgaatacttac

SEQ ID NO: 1501348 - DNA, 15 bp, Homo sapiens
aactttgaatactta

SEQ ID NO: 1501349 - DNA, 15 bp, Homo sapiens
taactttgaatactt

SEQ ID NO: 1501350 - DNA, 15 bp, Homo sapiens
ataactttgaatact

SEQ ID NO: 1501351 - DNA, 15 bp, Homo sapiens
tataactttgaatac

SEQ ID NO: 1501352 - DNA, 15 bp, Homo sapiens
ttataactttgaata

SEQ ID NO: 1501353 - DNA, 15 bp, Homo sapiens
tttataactttgaat

SEQ ID NO: 1501354 - DNA, 15 bp, Homo sapiens
atttataactttgaa

SEQ ID NO: 1501355 - DNA, 15 bp, Homo sapiens
aatttataactttga

SEQ ID NO: 1501356 - DNA, 15 bp, Homo sapiens
aaatttataactttg

SEQ ID NO: 1501357 - DNA, 15 bp, Homo sapiens
taaatttataacttt

SEQ ID NO: 1501358 - DNA, 15 bp, Homo sapiens
ataaatttataactt

SEQ ID NO: 1501359 - DNA, 15 bp, Homo sapiens
aataaatttataact

SEQ ID NO: 1501360 - DNA, 15 bp, Homo sapiens
taataaatttataac

SEQ ID NO: 1501361 - DNA, 15 bp, Homo sapiens
ttaataaatttataa

SEQ ID NO: 1501362 - DNA, 15 bp, Homo sapiens
tttaataaatttata

SEQ ID NO: 1501363 - DNA, 15 bp, Homo sapiens
atttaataaatttat

SEQ ID NO: 1501364 - DNA, 15 bp, Homo sapiens
catttaataaattta

SEQ ID NO: 1501365 - DNA, 15 bp, Homo sapiens
gcatttaataaattt

SEQ ID NO: 1501366 - DNA, 15 bp, Homo sapiens
agcatttaataaatt

SEQ ID NO: 1501367 - DNA, 15 bp, Homo sapiens
cagcatttaataaat

SEQ ID NO: 1501368 - DNA, 15 bp, Homo sapiens
gcagcatttaataaa

SEQ ID NO: 1501369 - DNA, 15 bp, Homo sapiens
agcagcatttaataa

SEQ ID NO: 1501370 - DNA, 15 bp, Homo sapiens
aagcagcatttaata

SEQ ID NO: 1501371 - DNA, 15 bp, Homo sapiens
aaagcagcatttaat

SEQ ID NO: 1501372 - DNA, 15 bp, Homo sapiens
taaagcagcatttaa

SEQ ID NO: 1501373 - DNA, 15 bp, Homo sapiens
ttaaagcagcattta

SEQ ID NO: 1501374 - DNA, 15 bp, Homo sapiens
attaaagcagcattt

SEQ ID NO: 1501375 - DNA, 15 bp, Homo sapiens
aattaaagcagcatt

SEQ ID NO: 1501376 - DNA, 15 bp, Homo sapiens
caattaaagcagcat

SEQ ID NO: 1501377 - DNA, 15 bp, Homo sapiens
acaattaaagcagca

SEQ ID NO: 1501378 - DNA, 15 bp, Homo sapiens
tacaattaaagcagc

SEQ ID NO: 1501379 - DNA, 15 bp, Homo sapiens
atacaattaaagcag

SEQ ID NO: 1501380 - DNA, 15 bp, Homo sapiens
gatacaattaaagca

SEQ ID NO: 1501381 - DNA, 15 bp, Homo sapiens
ggatacaattaaagc

SEQ ID NO: 1501382 - DNA, 15 bp, Homo sapiens
aggatacaattaaag

SEQ ID NO: 1501383 - DNA, 15 bp, Homo sapiens
taggatacaattaaa

SEQ ID NO: 1501384 - DNA, 15 bp, Homo sapiens
gtaggatacaattaa

SEQ ID NO: 1501385 - DNA, 15 bp, Homo sapiens
tgtaggatacaatta

SEQ ID NO: 1501386 - DNA, 15 bp, Homo sapiens
ttgtaggatacaatt

SEQ ID NO: 1501387 - DNA, 15 bp, Homo sapiens
cttgtaggatacaat

SEQ ID NO: 1501388 - DNA, 15 bp, Homo sapiens
acttgtaggatacaa

SEQ ID NO: 1501389 - DNA, 15 bp, Homo sapiens
aacttgtaggataca

SEQ ID NO: 1501390 - DNA, 15 bp, Homo sapiens
aaacttgtaggatac

SEQ ID NO: 1501391 - DNA, 15 bp, Homo sapiens
gaaacttgtaggata

SEQ ID NO: 1501392 - DNA, 15 bp, Homo sapiens
tgaaacttgtaggat

SEQ ID NO: 1501393 - DNA, 15 bp, Homo sapiens
ttgaaacttgtagga

SEQ ID NO: 1501394 - DNA, 15 bp, Homo sapiens
attgaaacttgtagg

SEQ ID NO: 1501395 - DNA, 15 bp, Homo sapiens
tattgaaacttgtag

SEQ ID NO: 1501396 - DNA, 15 bp, Homo sapiens
ttattgaaacttgta

SEQ ID NO: 1501397 - DNA, 15 bp, Homo sapiens
attattgaaacttgt

SEQ ID NO: 1501398 - DNA, 15 bp, Homo sapiens
aattattgaaacttg

SEQ ID NO: 1501399 - DNA, 15 bp, Homo sapiens
caattattgaaactt

SEQ ID NO: 1501400 - DNA, 15 bp, Homo sapiens
ccaattattgaaact

SEQ ID NO: 1501401 - DNA, 15 bp, Homo sapiens
gccaattattgaaac

SEQ ID NO: 1501402 - DNA, 15 bp, Homo sapiens
agccaattattgaaa

SEQ ID NO: 1501403 - DNA, 15 bp, Homo sapiens
aagccaattattgaa

SEQ ID NO: 1501404 - DNA, 15 bp, Homo sapiens
aaagccaattattga

SEQ ID NO: 1501405 - DNA, 15 bp, Homo sapiens
aaaagccaattattg

SEQ ID NO: 1501406 - DNA, 15 bp, Homo sapiens
aaaaagccaattatt

SEQ ID NO: 1501407 - DNA, 15 bp, Homo sapiens
taaaaagccaattat

SEQ ID NO: 1501408 - DNA, 15 bp, Homo sapiens
ataaaaagccaatta

SEQ ID NO: 1501409 - DNA, 15 bp, Homo sapiens
aataaaaagccaatt

SEQ ID NO: 1501410 - DNA, 15 bp, Homo sapiens
aaataaaaagccaat

SEQ ID NO: 1501411 - DNA, 15 bp, Homo sapiens
aaaataaaaagccaa

SEQ ID NO: 1501412 - DNA, 15 bp, Homo sapiens
aaaaataaaaagcca

SEQ ID NO: 1501413 - DNA, 15 bp, Homo sapiens
gaaaaataaaaagcc

SEQ ID NO: 1501414 - DNA, 15 bp, Homo sapiens
tgaaaaataaaaagc

SEQ ID NO: 1501415 - DNA, 15 bp, Homo sapiens
ttgaaaaataaaaag

SEQ ID NO: 1501416 - DNA, 15 bp, Homo sapiens
attgaaaaataaaaa

SEQ ID NO: 1501417 - DNA, 15 bp, Homo sapiens
aattgaaaaataaaa

SEQ ID NO: 1501418 - DNA, 15 bp, Homo sapiens
aaattgaaaaataaa

SEQ ID NO: 1501419 - DNA, 15 bp, Homo sapiens
gaaattgaaaaataa

SEQ ID NO: 1501420 - DNA, 15 bp, Homo sapiens
tgaaattgaaaaata

SEQ ID NO: 1501421 - DNA, 15 bp, Homo sapiens
atgaaattgaaaaat

SEQ ID NO: 1501422 - DNA, 15 bp, Homo sapiens
tatgaaattgaaaaa

SEQ ID NO: 1501423 - DNA, 15 bp, Homo sapiens
atatgaaattgaaaa

SEQ ID NO: 1501424 - DNA, 15 bp, Homo sapiens
aatatgaaattgaaa

SEQ ID NO: 1501425 - DNA, 15 bp, Homo sapiens
aaatatgaaattgaa

SEQ ID NO: 1501426 - DNA, 15 bp, Homo sapiens
gaaatatgaaattga

SEQ ID NO: 1501427 - DNA, 15 bp, Homo sapiens
ggaaatatgaaattg

SEQ ID NO: 1501428 - DNA, 15 bp, Homo sapiens
tggaaatatgaaatt

SEQ ID NO: 1501429 - DNA, 15 bp, Homo sapiens
atggaaatatgaaat

SEQ ID NO: 1501430 - DNA, 15 bp, Homo sapiens
tatggaaatatgaaa

SEQ ID NO: 1501431 - DNA, 15 bp, Homo sapiens
atatggaaatatgaa

SEQ ID NO: 1501432 - DNA, 15 bp, Homo sapiens
tatatggaaatatga

SEQ ID NO: 1501433 - DNA, 15 bp, Homo sapiens
ttatatggaaatatg

SEQ ID NO: 1501434 - DNA, 15 bp, Homo sapiens
attatatggaaatat

SEQ ID NO: 1501435 - DNA, 15 bp, Homo sapiens
cattatatggaaata

SEQ ID NO: 1501436 - DNA, 15 bp, Homo sapiens
acattatatggaaat

SEQ ID NO: 1501437 - DNA, 15 bp, Homo sapiens
aacattatatggaaa

SEQ ID NO: 1501438 - DNA, 15 bp, Homo sapiens
aaacattatatggaa

SEQ ID NO: 1501439 - DNA, 15 bp, Homo sapiens
aaaacattatatgga

SEQ ID NO: 1501440 - DNA, 15 bp, Homo sapiens
gaaaacattatatgg

SEQ ID NO: 1501441 - DNA, 15 bp, Homo sapiens
tgaaaacattatatg

SEQ ID NO: 1501442 - DNA, 15 bp, Homo sapiens
ttgaaaacattatat

SEQ ID NO: 1501443 - DNA, 15 bp, Homo sapiens
attgaaaacattata

SEQ ID NO: 1501444 - DNA, 15 bp, Homo sapiens
aattgaaaacattat

SEQ ID NO: 1501445 - DNA, 15 bp, Homo sapiens
taattgaaaacatta

SEQ ID NO: 1501446 - DNA, 15 bp, Homo sapiens
ataattgaaaacatt

SEQ ID NO: 1501447 - DNA, 15 bp, Homo sapiens
cataattgaaaacat

SEQ ID NO: 1501448 - DNA, 15 bp, Homo sapiens
tcataattgaaaaca

SEQ ID NO: 1501449 - DNA, 15 bp, Homo sapiens
atcataattgaaaac

SEQ ID NO: 1501450 - DNA, 15 bp, Homo sapiens
aatcataattgaaaa

SEQ ID NO: 1501451 - DNA, 15 bp, Homo sapiens
aaatcataattgaaa

SEQ ID NO: 1501452 - DNA, 15 bp, Homo sapiens
gaaatcataattgaa

SEQ ID NO: 1501453 - DNA, 15 bp, Homo sapiens
agaaatcataattga

SEQ ID NO: 1501454 - DNA, 15 bp, Homo sapiens
gagaaatcataattg

SEQ ID NO: 1501455 - DNA, 15 bp, Homo sapiens
ggagaaatcataatt

SEQ ID NO: 1501456 - DNA, 15 bp, Homo sapiens
aggagaaatcataat

SEQ ID NO: 1501457 - DNA, 15 bp, Homo sapiens
aaggagaaatcataa

SEQ ID NO: 1501458 - DNA, 15 bp, Homo sapiens
aaaggagaaatcata

SEQ ID NO: 1501459 - DNA, 15 bp, Homo sapiens
gaaaggagaaatcat

SEQ ID NO: 1501460 - DNA, 15 bp, Homo sapiens
tgaaaggagaaatca

SEQ ID NO: 1501461 - DNA, 15 bp, Homo sapiens
gtgaaaggagaaatc

SEQ ID NO: 1501462 - DNA, 15 bp, Homo sapiens
ggtgaaaggagaaat

SEQ ID NO: 1501463 - DNA, 15 bp, Homo sapiens
aggtgaaaggagaaa

SEQ ID NO: 1501464 - DNA, 15 bp, Homo sapiens
taggtgaaaggagaa

SEQ ID NO: 1501465 - DNA, 15 bp, Homo sapiens
ctaggtgaaaggaga

SEQ ID NO: 1501466 - DNA, 15 bp, Homo sapiens
tctaggtgaaaggag

SEQ ID NO: 1501467 - DNA, 15 bp, Homo sapiens
ctctaggtgaaagga

SEQ ID NO: 1501468 - DNA, 15 bp, Homo sapiens
actctaggtgaaagg

SEQ ID NO: 1501469 - DNA, 15 bp, Homo sapiens
cactctaggtgaaag

SEQ ID NO: 1501470 - DNA, 15 bp, Homo sapiens
acactctaggtgaaa

SEQ ID NO: 1501471 - DNA, 15 bp, Homo sapiens
aacactctaggtgaa

SEQ ID NO: 1501472 - DNA, 15 bp, Homo sapiens
aaacactctaggtga

SEQ ID NO: 1501473 - DNA, 15 bp, Homo sapiens
gaaacactctaggtg

SEQ ID NO: 1501474 - DNA, 15 bp, Homo sapiens
tgaaacactctaggt

SEQ ID NO: 1501475 - DNA, 15 bp, Homo sapiens
atgaaacactctagg

SEQ ID NO: 1501476 - DNA, 15 bp, Homo sapiens
tatgaaacactctag

SEQ ID NO: 1501477 - DNA, 15 bp, Homo sapiens
atatgaaacactcta

SEQ ID NO: 1501478 - DNA, 15 bp, Homo sapiens
catatgaaacactct

SEQ ID NO: 1501479 - DNA, 15 bp, Homo sapiens
tcatatgaaacactc

SEQ ID NO: 1501480 - DNA, 15 bp, Homo sapiens
ttcatatgaaacact

SEQ ID NO: 1501481 - DNA, 15 bp, Homo sapiens
attcatatgaaacac

SEQ ID NO: 1501482 - DNA, 15 bp, Homo sapiens
tattcatatgaaaca

SEQ ID NO: 1501483 - DNA, 15 bp, Homo sapiens
atattcatatgaaac

SEQ ID NO: 1501484 - DNA, 15 bp, Homo sapiens
catattcatatgaaa

SEQ ID NO: 1501485 - DNA, 15 bp, Homo sapiens
tcatattcatatgaa

SEQ ID NO: 1501486 - DNA, 15 bp, Homo sapiens
ttcatattcatatga

SEQ ID NO: 1501487 - DNA, 15 bp, Homo sapiens
tttcatattcatatg

SEQ ID NO: 1501488 - DNA, 15 bp, Homo sapiens
gtttcatattcatat

SEQ ID NO: 1501489 - DNA, 15 bp, Homo sapiens
tgtttcatattcata

SEQ ID NO: 1501490 - DNA, 15 bp, Homo sapiens
atgtttcatattcat

SEQ ID NO: 1501491 - DNA, 15 bp, Homo sapiens
catgtttcatattca

SEQ ID NO: 1501492 - DNA, 15 bp, Homo sapiens
acatgtttcatattc

SEQ ID NO: 1501493 - DNA, 15 bp, Homo sapiens
aacatgtttcatatt

SEQ ID NO: 1501494 - DNA, 15 bp, Homo sapiens
taacatgtttcatat

SEQ ID NO: 1501495 - DNA, 15 bp, Homo sapiens
ataacatgtttcata

SEQ ID NO: 1501496 - DNA, 15 bp, Homo sapiens
cataacatgtttcat

SEQ ID NO: 1501497 - DNA, 15 bp, Homo sapiens
ccataacatgtttca

SEQ ID NO: 1501498 - DNA, 15 bp, Homo sapiens
accataacatgtttc

SEQ ID NO: 1501499 - DNA, 15 bp, Homo sapiens
aaccataacatgttt

SEQ ID NO: 1501500 - DNA, 15 bp, Homo sapiens
aaaccataacatgtt

SEQ ID NO: 1501501 - DNA, 15 bp, Homo sapiens
taaaccataacatgt

SEQ ID NO: 1501502 - DNA, 15 bp, Homo sapiens
ataaaccataacatg

SEQ ID NO: 1501503 - DNA, 15 bp, Homo sapiens
tataaaccataacat

SEQ ID NO: 1501504 - DNA, 15 bp, Homo sapiens
atataaaccataaca

SEQ ID NO: 1501505 - DNA, 15 bp, Homo sapiens
catataaaccataac

SEQ ID NO: 1501506 - DNA, 15 bp, Homo sapiens
acatataaaccataa

SEQ ID NO: 1501507 - DNA, 15 bp, Homo sapiens
aacatataaaccata

SEQ ID NO: 1501508 - DNA, 15 bp, Homo sapiens
taacatataaaccat

SEQ ID NO: 1501509 - DNA, 15 bp, Homo sapiens
gtaacatataaacca

SEQ ID NO: 1501510 - DNA, 15 bp, Homo sapiens
ggtaacatataaacc

SEQ ID NO: 1501511 - DNA, 15 bp, Homo sapiens
tggtaacatataaac

SEQ ID NO: 1501512 - DNA, 15 bp, Homo sapiens
ctggtaacatataaa

SEQ ID NO: 1501513 - DNA, 15 bp, Homo sapiens
actggtaacatataa

SEQ ID NO: 1501514 - DNA, 15 bp, Homo sapiens
tactggtaacatata

SEQ ID NO: 1501515 - DNA, 15 bp, Homo sapiens
ttactggtaacatat

SEQ ID NO: 1501516 - DNA, 15 bp, Homo sapiens
attactggtaacata

SEQ ID NO: 1501517 - DNA, 15 bp, Homo sapiens
aattactggtaacat

SEQ ID NO: 1501518 - DNA, 15 bp, Homo sapiens
aaattactggtaaca

SEQ ID NO: 1501519 - DNA, 15 bp, Homo sapiens
gaaattactggtaac

SEQ ID NO: 1501520 - DNA, 15 bp, Homo sapiens
tgaaattactggtaa

SEQ ID NO: 1501521 - DNA, 15 bp, Homo sapiens
ttgaaattactggta

SEQ ID NO: 1501522 - DNA, 15 bp, Homo sapiens
tttgaaattactggt

SEQ ID NO: 1501523 - DNA, 15 bp, Homo sapiens
atttgaaattactgg

SEQ ID NO: 1501524 - DNA, 15 bp, Homo sapiens
aatttgaaattactg

SEQ ID NO: 1501525 - DNA, 15 bp, Homo sapiens
aaatttgaaattact

SEQ ID NO: 1501526 - DNA, 15 bp, Homo sapiens
caaatttgaaattac

SEQ ID NO: 1501527 - DNA, 15 bp, Homo sapiens
tcaaatttgaaatta

SEQ ID NO: 1501528 - DNA, 15 bp, Homo sapiens
ttcaaatttgaaatt

SEQ ID NO: 1501529 - DNA, 15 bp, Homo sapiens
gttcaaatttgaaat

SEQ ID NO: 1501530 - DNA, 15 bp, Homo sapiens
agttcaaatttgaaa

SEQ ID NO: 1501531 - DNA, 15 bp, Homo sapiens
aagttcaaatttgaa

SEQ ID NO: 1501532 - DNA, 15 bp, Homo sapiens
taagttcaaatttga

SEQ ID NO: 1501533 - DNA, 15 bp, Homo sapiens
ctaagttcaaatttg

SEQ ID NO: 1501534 - DNA, 15 bp, Homo sapiens
gctaagttcaaattt

SEQ ID NO: 1501535 - DNA, 15 bp, Homo sapiens
agctaagttcaaatt

SEQ ID NO: 1501536 - DNA, 15 bp, Homo sapiens
aagctaagttcaaat

SEQ ID NO: 1501537 - DNA, 15 bp, Homo sapiens
aaagctaagttcaaa

SEQ ID NO: 1501538 - DNA, 15 bp, Homo sapiens
taaagctaagttcaa

SEQ ID NO: 1501539 - DNA, 15 bp, Homo sapiens
ataaagctaagttca

SEQ ID NO: 1501540 - DNA, 15 bp, Homo sapiens
cataaagctaagttc

SEQ ID NO: 1501541 - DNA, 15 bp, Homo sapiens
tcataaagctaagtt

SEQ ID NO: 1501542 - DNA, 15 bp, Homo sapiens
gtcataaagctaagt

SEQ ID NO: 1501543 - DNA, 15 bp, Homo sapiens
ggtcataaagctaag

SEQ ID NO: 1501544 - DNA, 15 bp, Homo sapiens
aggtcataaagctaa

SEQ ID NO: 1501545 - DNA, 15 bp, Homo sapiens
aaggtcataaagcta

SEQ ID NO: 1501546 - DNA, 15 bp, Homo sapiens
caaggtcataaagct

SEQ ID NO: 1501547 - DNA, 15 bp, Homo sapiens
tcaaggtcataaagc

SEQ ID NO: 1501548 - DNA, 15 bp, Homo sapiens
ttcaaggtcataaag

SEQ ID NO: 1501549 - DNA, 15 bp, Homo sapiens
gttcaaggtcataaa

SEQ ID NO: 1501550 - DNA, 15 bp, Homo sapiens
tgttcaaggtcataa

SEQ ID NO: 1501551 - DNA, 15 bp, Homo sapiens
atgttcaaggtcata

SEQ ID NO: 1501552 - DNA, 15 bp, Homo sapiens
tatgttcaaggtcat

SEQ ID NO: 1501553 - DNA, 15 bp, Homo sapiens
atatgttcaaggtca

SEQ ID NO: 1501554 - DNA, 15 bp, Homo sapiens
aatatgttcaaggtc

SEQ ID NO: 1501555 - DNA, 15 bp, Homo sapiens
aaatatgttcaaggt

SEQ ID NO: 1501556 - DNA, 15 bp, Homo sapiens
taaatatgttcaagg

SEQ ID NO: 1501557 - DNA, 15 bp, Homo sapiens
ataaatatgttcaag

SEQ ID NO: 1501558 - DNA, 15 bp, Homo sapiens
aataaatatgttcaa

SEQ ID NO: 1501559 - DNA, 15 bp, Homo sapiens
taataaatatgttca

SEQ ID NO: 1501560 - DNA, 15 bp, Homo sapiens
ctaataaatatgttc

SEQ ID NO: 1501561 - DNA, 15 bp, Homo sapiens
actaataaatatgtt

SEQ ID NO: 1501562 - DNA, 15 bp, Homo sapiens
aactaataaatatgt

SEQ ID NO: 1501563 - DNA, 15 bp, Homo sapiens
taactaataaatatg

SEQ ID NO: 1501564 - DNA, 15 bp, Homo sapiens
ataactaataaatat

SEQ ID NO: 1501565 - DNA, 15 bp, Homo sapiens
aataactaataaata

SEQ ID NO: 1501566 - DNA, 15 bp, Homo sapiens
aaataactaataaat

SEQ ID NO: 1501567 - DNA, 15 bp, Homo sapiens
taaataactaataaa

SEQ ID NO: 1501568 - DNA, 15 bp, Homo sapiens
ataaataactaataa

SEQ ID NO: 1501569 - DNA, 15 bp, Homo sapiens
aataaataactaata

SEQ ID NO: 1501570 - DNA, 15 bp, Homo sapiens
caataaataactaat

SEQ ID NO: 1501571 - DNA, 15 bp, Homo sapiens
acaataaataactaa

SEQ ID NO: 1501572 - DNA, 15 bp, Homo sapiens
aacaataaataacta

SEQ ID NO: 1501573 - DNA, 15 bp, Homo sapiens
taacaataaataact

SEQ ID NO: 1501574 - DNA, 15 bp, Homo sapiens
ataacaataaataac

SEQ ID NO: 1501575 - DNA, 15 bp, Homo sapiens
cataacaataaataa

SEQ ID NO: 1501576 - DNA, 15 bp, Homo sapiens
acataacaataaata

SEQ ID NO: 1501577 - DNA, 15 bp, Homo sapiens
aacataacaataaat

SEQ ID NO: 1501578 - DNA, 15 bp, Homo sapiens
taacataacaataaa

SEQ ID NO: 1501579 - DNA, 15 bp, Homo sapiens
ataacataacaataa

SEQ ID NO: 1501580 - DNA, 15 bp, Homo sapiens
tataacataacaata

SEQ ID NO: 1501581 - DNA, 15 bp, Homo sapiens
ttataacataacaat

SEQ ID NO: 1501582 - DNA, 15 bp, Homo sapiens
tttataacataacaa

SEQ ID NO: 1501583 - DNA, 15 bp, Homo sapiens
atttataacataaca

SEQ ID NO: 1501584 - DNA, 15 bp, Homo sapiens
aatttataacataac

SEQ ID NO: 1501585 - DNA, 15 bp, Homo sapiens
taatttataacataa

SEQ ID NO: 1501586 - DNA, 15 bp, Homo sapiens
ataatttataacata

SEQ ID NO: 1501587 - DNA, 15 bp, Homo sapiens
aataatttataacat

SEQ ID NO: 1501588 - DNA, 15 bp, Homo sapiens
gaataatttataaca

SEQ ID NO: 1501589 - DNA, 15 bp, Homo sapiens
ggaataatttataac

SEQ ID NO: 1501590 - DNA, 15 bp, Homo sapiens
gggaataatttataa

SEQ ID NO: 1501591 - DNA, 15 bp, Homo sapiens
tgggaataatttata

SEQ ID NO: 1501592 - DNA, 15 bp, Homo sapiens
ttgggaataatttat

SEQ ID NO: 1501593 - DNA, 15 bp, Homo sapiens
tttgggaataattta

SEQ ID NO: 1501594 - DNA, 15 bp, Homo sapiens
atttgggaataattt

SEQ ID NO: 1501595 - DNA, 15 bp, Homo sapiens
catttgggaataatt

SEQ ID NO: 1501596 - DNA, 15 bp, Homo sapiens
acatttgggaataat

SEQ ID NO: 1501597 - DNA, 15 bp, Homo sapiens
tacatttgggaataa

SEQ ID NO: 1501598 - DNA, 15 bp, Homo sapiens
ctacatttgggaata

SEQ ID NO: 1501599 - DNA, 15 bp, Homo sapiens
gctacatttgggaat

SEQ ID NO: 1501600 - DNA, 15 bp, Homo sapiens
ggctacatttgggaa

SEQ ID NO: 1501601 - DNA, 15 bp, Homo sapiens
cggctacatttggga

SEQ ID NO: 1501602 - DNA, 15 bp, Homo sapiens
acggctacatttggg

SEQ ID NO: 1501603 - DNA, 15 bp, Homo sapiens
aacggctacatttgg

SEQ ID NO: 1501604 - DNA, 15 bp, Homo sapiens
aaacggctacatttg

SEQ ID NO: 1501605 - DNA, 15 bp, Homo sapiens
aaaacggctacattt

SEQ ID NO: 1501606 - DNA, 15 bp, Homo sapiens
caaaacggctacatt

SEQ ID NO: 1501607 - DNA, 15 bp, Homo sapiens
acaaaacggctacat

SEQ ID NO: 1501608 - DNA, 15 bp, Homo sapiens
tacaaaacggctaca

SEQ ID NO: 1501609 - DNA, 15 bp, Homo sapiens
gtacaaaacggctac

SEQ ID NO: 1501610 - DNA, 15 bp, Homo sapiens
tgtacaaaacggcta

SEQ ID NO: 1501611 - DNA, 15 bp, Homo sapiens
ttgtacaaaacggct

SEQ ID NO: 1501612 - DNA, 15 bp, Homo sapiens
gttgtacaaaacggc

SEQ ID NO: 1501613 - DNA, 15 bp, Homo sapiens
tgttgtacaaaacgg

SEQ ID NO: 1501614 - DNA, 15 bp, Homo sapiens
ttgttgtacaaaacg

SEQ ID NO: 1501615 - DNA, 15 bp, Homo sapiens
tttgttgtacaaaac

SEQ ID NO: 1501616 - DNA, 15 bp, Homo sapiens
gtttgttgtacaaaa

SEQ ID NO: 1501617 - DNA, 15 bp, Homo sapiens
tgtttgttgtacaaa

SEQ ID NO: 1501618 - DNA, 15 bp, Homo sapiens
atgtttgttgtacaa

SEQ ID NO: 1501619 - DNA, 15 bp, Homo sapiens
aatgtttgttgtaca

SEQ ID NO: 1501620 - DNA, 15 bp, Homo sapiens
aaatgtttgttgtac

SEQ ID NO: 1501621 - DNA, 15 bp, Homo sapiens
taaatgtttgttgta

SEQ ID NO: 1501622 - DNA, 15 bp, Homo sapiens
ataaatgtttgttgt

SEQ ID NO: 1501623 - DNA, 15 bp, Homo sapiens
taataaatgtttgtt

SEQ ID NO: 1501624 - DNA, 15 bp, Homo sapiens
ataataaatgtttgt

SEQ ID NO: 1501625 - DNA, 15 bp, Homo sapiens
gataataaatgtttg

SEQ ID NO: 1501626 - DNA, 15 bp, Homo sapiens
tgataataaatgttt

SEQ ID NO: 1501627 - DNA, 15 bp, Homo sapiens
gtgataataaatgtt

SEQ ID NO: 1501628 - DNA, 15 bp, Homo sapiens
tgtgataataaatgt

SEQ ID NO: 1501629 - DNA, 15 bp, Homo sapiens
atgtgataataaatg

SEQ ID NO: 1501630 - DNA, 15 bp, Homo sapiens
tatgtgataataaat

SEQ ID NO: 1501631 - DNA, 15 bp, Homo sapiens
ttatgtgataataaa

SEQ ID NO: 1501632 - DNA, 15 bp, Homo sapiens
tttatgtgataataa

SEQ ID NO: 1501633 - DNA, 15 bp, Homo sapiens
ctttatgtgataata

SEQ ID NO: 1501634 - DNA, 15 bp, Homo sapiens
actttatgtgataat

SEQ ID NO: 1501635 - DNA, 15 bp, Homo sapiens
aactttatgtgataa

SEQ ID NO: 1501636 - DNA, 15 bp, Homo sapiens
aaactttatgtgata

SEQ ID NO: 1501637 - DNA, 15 bp, Homo sapiens
gaaactttatgtgat

SEQ ID NO: 1501638 - DNA, 15 bp, Homo sapiens
agaaactttatgtga

SEQ ID NO: 1501639 - DNA, 15 bp, Homo sapiens
cagaaactttatgtg

SEQ ID NO: 1501640 - DNA, 15 bp, Homo sapiens
acagaaactttatgt

SEQ ID NO: 1501641 - DNA, 15 bp, Homo sapiens
gacagaaactttatg

SEQ ID NO: 1501642 - DNA, 15 bp, Homo sapiens
ggacagaaactttat

SEQ ID NO: 1501643 - DNA, 15 bp, Homo sapiens
tggacagaaacttta

SEQ ID NO: 1501644 - DNA, 15 bp, Homo sapiens
atggacagaaacttt

SEQ ID NO: 1501645 - DNA, 15 bp, Homo sapiens
gatggacagaaactt

SEQ ID NO: 1501646 - DNA, 15 bp, Homo sapiens
agatggacagaaact

SEQ ID NO: 1501647 - DNA, 15 bp, Homo sapiens
cagatggacagaaac

SEQ ID NO: 1501648 - DNA, 15 bp, Homo sapiens
tcagatggacagaaa

SEQ ID NO: 1501649 - DNA, 15 bp, Homo sapiens
ttcagatggacagaa

SEQ ID NO: 1501650 - DNA, 15 bp, Homo sapiens
tttcagatggacaga

SEQ ID NO: 1501651 - DNA, 15 bp, Homo sapiens
atttcagatggacag

SEQ ID NO: 1501652 - DNA, 15 bp, Homo sapiens
gatttcagatggaca

SEQ ID NO: 1501653 - DNA, 15 bp, Homo sapiens
ggatttcagatggac

SEQ ID NO: 1501654 - DNA, 15 bp, Homo sapiens
tggatttcagatgga

SEQ ID NO: 1501655 - DNA, 15 bp, Homo sapiens
atggatttcagatgg

SEQ ID NO: 1501656 - DNA, 15 bp, Homo sapiens
aatggatttcagatg

SEQ ID NO: 1501657 - DNA, 15 bp, Homo sapiens
taatggatttcagat

SEQ ID NO: 1501658 - DNA, 15 bp, Homo sapiens
ctaatggatttcaga

SEQ ID NO: 1501659 - DNA, 15 bp, Homo sapiens
actaatggatttcag

SEQ ID NO: 1501660 - DNA, 15 bp, Homo sapiens
cactaatggatttca

SEQ ID NO: 1501661 - DNA, 15 bp, Homo sapiens
ccactaatggatttc

SEQ ID NO: 1501662 - DNA, 15 bp, Homo sapiens
gccactaatggattt

SEQ ID NO: 1501663 - DNA, 15 bp, Homo sapiens
agccactaatggatt

SEQ ID NO: 1501664 - DNA, 15 bp, Homo sapiens
cagccactaatggat

SEQ ID NO: 1501665 - DNA, 15 bp, Homo sapiens
tcagccactaatgga

SEQ ID NO: 1501666 - DNA, 15 bp, Homo sapiens
ttcagccactaatgg

SEQ ID NO: 1501667 - DNA, 15 bp, Homo sapiens
gttcagccactaatg

SEQ ID NO: 1501668 - DNA, 15 bp, Homo sapiens
agttcagccactaat

SEQ ID NO: 1501669 - DNA, 15 bp, Homo sapiens
cagttcagccactaa

SEQ ID NO: 1501670 - DNA, 15 bp, Homo sapiens
tcagttcagccacta

SEQ ID NO: 1501671 - DNA, 15 bp, Homo sapiens
ctcagttcagccact

SEQ ID NO: 1501672 - DNA, 15 bp, Homo sapiens
actcagttcagccac

SEQ ID NO: 1501673 - DNA, 15 bp, Homo sapiens
cactcagttcagcca

SEQ ID NO: 1501674 - DNA, 15 bp, Homo sapiens
acactcagttcagcc

SEQ ID NO: 1501675 - DNA, 15 bp, Homo sapiens
aacactcagttcagc

SEQ ID NO: 1501676 - DNA, 15 bp, Homo sapiens
aaacactcagttcag

SEQ ID NO: 1501677 - DNA, 15 bp, Homo sapiens
gaaacactcagttca

SEQ ID NO: 1501678 - DNA, 15 bp, Homo sapiens
agaaacactcagttc

SEQ ID NO: 1501679 - DNA, 15 bp, Homo sapiens
cagaaacactcagtt

SEQ ID NO: 1501680 - DNA, 15 bp, Homo sapiens
ccagaaacactcagt

SEQ ID NO: 1501681 - DNA, 15 bp, Homo sapiens
gccagaaacactcag

SEQ ID NO: 1501682 - DNA, 15 bp, Homo sapiens
agccagaaacactca

SEQ ID NO: 1501683 - DNA, 15 bp, Homo sapiens
gagccagaaacactc

SEQ ID NO: 1501684 - DNA, 15 bp, Homo sapiens
tgagccagaaacact

SEQ ID NO: 1501685 - DNA, 15 bp, Homo sapiens
ctgagccagaaacac

SEQ ID NO: 1501686 - DNA, 15 bp, Homo sapiens
tctgagccagaaaca

SEQ ID NO: 1501687 - DNA, 15 bp, Homo sapiens
ctctgagccagaaac

SEQ ID NO: 1501688 - DNA, 15 bp, Homo sapiens
actctgagccagaaa

SEQ ID NO: 1501689 - DNA, 15 bp, Homo sapiens
gactctgagccagaa

SEQ ID NO: 1501690 - DNA, 15 bp, Homo sapiens
agactctgagccaga

SEQ ID NO: 1501691 - DNA, 15 bp, Homo sapiens
aagactctgagccag

SEQ ID NO: 1501692 - DNA, 15 bp, Homo sapiens
aaagactctgagcca

SEQ ID NO: 1501693 - DNA, 15 bp, Homo sapiens
gaaagactctgagcc

SEQ ID NO: 1501694 - DNA, 15 bp, Homo sapiens
tgaaagactctgagc

SEQ ID NO: 1501695 - DNA, 15 bp, Homo sapiens
atgaaagactctgag

SEQ ID NO: 1501696 - DNA, 15 bp, Homo sapiens
catgaaagactctga

SEQ ID NO: 1501697 - DNA, 15 bp, Homo sapiens
tcatgaaagactctg

SEQ ID NO: 1501698 - DNA, 15 bp, Homo sapiens
ttcatgaaagactct

SEQ ID NO: 1501699 - DNA, 15 bp, Homo sapiens
cttcatgaaagactc

SEQ ID NO: 1501700 - DNA, 15 bp, Homo sapiens
gcttcatgaaagact

SEQ ID NO: 1501701 - DNA, 15 bp, Homo sapiens
agcttcatgaaagac

SEQ ID NO: 1501702 - DNA, 15 bp, Homo sapiens
cagcttcatgaaaga

SEQ ID NO: 1501703 - DNA, 15 bp, Homo sapiens
gcagcttcatgaaag

SEQ ID NO: 1501704 - DNA, 15 bp, Homo sapiens
tgcagcttcatgaaa

SEQ ID NO: 1501705 - DNA, 15 bp, Homo sapiens
ctgcagcttcatgaa

SEQ ID NO: 1501706 - DNA, 15 bp, Homo sapiens
actgcagcttcatga

SEQ ID NO: 1501707 - DNA, 15 bp, Homo sapiens
cactgcagcttcatg

SEQ ID NO: 1501708 - DNA, 15 bp, Homo sapiens
tcactgcagcttcat

SEQ ID NO: 1501709 - DNA, 15 bp, Homo sapiens
gtcactgcagcttca

SEQ ID NO: 1501710 - DNA, 15 bp, Homo sapiens
tgtcactgcagcttc

SEQ ID NO: 1501711 - DNA, 15 bp, Homo sapiens
ctgtcactgcagctt

SEQ ID NO: 1501712 - DNA, 15 bp, Homo sapiens
actgtcactgcagct

SEQ ID NO: 1501713 - DNA, 15 bp, Homo sapiens
gactgtcactgcagc

SEQ ID NO: 1501714 - DNA, 15 bp, Homo sapiens
agactgtcactgcag

SEQ ID NO: 1501715 - DNA, 15 bp, Homo sapiens
aagactgtcactgca

SEQ ID NO: 1501716 - DNA, 15 bp, Homo sapiens
caagactgtcactgc

SEQ ID NO: 1501717 - DNA, 15 bp, Homo sapiens
ccaagactgtcactg

SEQ ID NO: 1501718 - DNA, 15 bp, Homo sapiens
gccaagactgtcact

SEQ ID NO: 1501719 - DNA, 15 bp, Homo sapiens
agccaagactgtcac

SEQ ID NO: 1501720 - DNA, 15 bp, Homo sapiens
cagccaagactgtca

SEQ ID NO: 1501721 - DNA, 15 bp, Homo sapiens
ccagccaagactgtc

SEQ ID NO: 1501722 - DNA, 15 bp, Homo sapiens
cccagccaagactgt

SEQ ID NO: 1501723 - DNA, 15 bp, Homo sapiens
acccagccaagactg

SEQ ID NO: 1501724 - DNA, 15 bp, Homo sapiens
gacccagccaagact

SEQ ID NO: 1501725 - DNA, 15 bp, Homo sapiens
agacccagccaagac

SEQ ID NO: 1501726 - DNA, 15 bp, Homo sapiens
cagacccagccaaga

SEQ ID NO: 1501727 - DNA, 15 bp, Homo sapiens
acagacccagccaag

SEQ ID NO: 1501728 - DNA, 15 bp, Homo sapiens
tacagacccagccaa

SEQ ID NO: 1501729 - DNA, 15 bp, Homo sapiens
ctacagacccagcca

SEQ ID NO: 1501730 - DNA, 15 bp, Homo sapiens
actacagacccagcc

SEQ ID NO: 1501731 - DNA, 15 bp, Homo sapiens
tactacagacccagc

SEQ ID NO: 1501732 - DNA, 15 bp, Homo sapiens
ttactacagacccag

SEQ ID NO: 1501733 - DNA, 15 bp, Homo sapiens
attactacagaccca

SEQ ID NO: 1501734 - DNA, 15 bp, Homo sapiens
gattactacagaccc

SEQ ID NO: 1501735 - DNA, 15 bp, Homo sapiens
agattactacagacc

SEQ ID NO: 1501736 - DNA, 15 bp, Homo sapiens
cagattactacagac

SEQ ID NO: 1501737 - DNA, 15 bp, Homo sapiens
tcagattactacaga

SEQ ID NO: 1501738 - DNA, 15 bp, Homo sapiens
ttcagattactacag

SEQ ID NO: 1501739 - DNA, 15 bp, Homo sapiens
cttcagattactaca

SEQ ID NO: 1501740 - DNA, 15 bp, Homo sapiens
ccttcagattactac

SEQ ID NO: 1501741 - DNA, 15 bp, Homo sapiens
gccttcagattacta

SEQ ID NO: 1501742 - DNA, 15 bp, Homo sapiens
agccttcagattact

SEQ ID NO: 1501743 - DNA, 15 bp, Homo sapiens
aagccttcagattac

SEQ ID NO: 1501744 - DNA, 15 bp, Homo sapiens
caagccttcagatta

SEQ ID NO: 1501745 - DNA, 15 bp, Homo sapiens
tcaagccttcagatt

SEQ ID NO: 1501746 - DNA, 15 bp, Homo sapiens
gtcaagccttcagat

SEQ ID NO: 1501747 - DNA, 15 bp, Homo sapiens
agtcaagccttcaga

SEQ ID NO: 1501748 - DNA, 15 bp, Homo sapiens
cagtcaagccttcag

SEQ ID NO: 1501749 - DNA, 15 bp, Homo sapiens
ccagtcaagccttca

SEQ ID NO: 1501750 - DNA, 15 bp, Homo sapiens
cccagtcaagccttc

SEQ ID NO: 1501751 - DNA, 15 bp, Homo sapiens
ccccagtcaagcctt

SEQ ID NO: 1501752 - DNA, 15 bp, Homo sapiens
cccccagtcaagcct

SEQ ID NO: 1501753 - DNA, 15 bp, Homo sapiens
acccccagtcaagcc

SEQ ID NO: 1501754 - DNA, 15 bp, Homo sapiens
tacccccagtcaagc

SEQ ID NO: 1501755 - DNA, 15 bp, Homo sapiens
ctacccccagtcaag

SEQ ID NO: 1501756 - DNA, 15 bp, Homo sapiens
tctacccccagtcaa

SEQ ID NO: 1501757 - DNA, 15 bp, Homo sapiens
ctctacccccagtca

SEQ ID NO: 1501758 - DNA, 15 bp, Homo sapiens
gctctacccccagtc

SEQ ID NO: 1501759 - DNA, 15 bp, Homo sapiens
tgctctacccccagt

SEQ ID NO: 1501760 - DNA, 15 bp, Homo sapiens
atgctctacccccag

SEQ ID NO: 1501761 - DNA, 15 bp, Homo sapiens
aatgctctaccccca

SEQ ID NO: 1501762 - DNA, 15 bp, Homo sapiens
aaatgctctaccccc

SEQ ID NO: 1501763 - DNA, 15 bp, Homo sapiens
caaatgctctacccc

SEQ ID NO: 1501764 - DNA, 15 bp, Homo sapiens
gcaaatgctctaccc

SEQ ID NO: 1501765 - DNA, 15 bp, Homo sapiens
agcaaatgctctacc

SEQ ID NO: 1501766 - DNA, 15 bp, Homo sapiens
aagcaaatgctctac

SEQ ID NO: 1501767 - DNA, 15 bp, Homo sapiens
gaagcaaatgctcta

SEQ ID NO: 1501768 - DNA, 15 bp, Homo sapiens
ggaagcaaatgctct

SEQ ID NO: 1501769 - DNA, 15 bp, Homo sapiens
tggaagcaaatgctc

SEQ ID NO: 1501770 - DNA, 15 bp, Homo sapiens
ttggaagcaaatgct

SEQ ID NO: 1501771 - DNA, 15 bp, Homo sapiens
cttggaagcaaatgc

SEQ ID NO: 1501772 - DNA, 15 bp, Homo sapiens
acttggaagcaaatg

SEQ ID NO: 1501773 - DNA, 15 bp, Homo sapiens
tacttggaagcaaat

SEQ ID NO: 1501774 - DNA, 15 bp, Homo sapiens
ttacttggaagcaaa

SEQ ID NO: 1501775 - DNA, 15 bp, Homo sapiens
tttacttggaagcaa

SEQ ID NO: 1501776 - DNA, 15 bp, Homo sapiens
atttacttggaagca

SEQ ID NO: 1501777 - DNA, 15 bp, Homo sapiens
aatttacttggaagc

SEQ ID NO: 1501778 - DNA, 15 bp, Homo sapiens
gaatttacttggaag

SEQ ID NO: 1501779 - DNA, 15 bp, Homo sapiens
tgaatttacttggaa

SEQ ID NO: 1501780 - DNA, 15 bp, Homo sapiens
gtgaatttacttgga

SEQ ID NO: 1501781 - DNA, 15 bp, Homo sapiens
agtgaatttacttgg

SEQ ID NO: 1501782 - DNA, 15 bp, Homo sapiens
aagtgaatttacttg

SEQ ID NO: 1501783 - DNA, 15 bp, Homo sapiens
taagtgaatttactt

SEQ ID NO: 1501784 - DNA, 15 bp, Homo sapiens
gtaagtgaatttact

SEQ ID NO: 1501785 - DNA, 15 bp, Homo sapiens
tgtaagtgaatttac

SEQ ID NO: 1501786 - DNA, 15 bp, Homo sapiens
atgtaagtgaattta

SEQ ID NO: 1501787 - DNA, 15 bp, Homo sapiens
tatgtaagtgaattt

SEQ ID NO: 1501788 - DNA, 15 bp, Homo sapiens
ctatgtaagtgaatt

SEQ ID NO: 1501789 - DNA, 15 bp, Homo sapiens
gctatgtaagtgaat

SEQ ID NO: 1501790 - DNA, 15 bp, Homo sapiens
agctatgtaagtgaa

SEQ ID NO: 1501791 - DNA, 15 bp, Homo sapiens
aagctatgtaagtga

SEQ ID NO: 1501792 - DNA, 15 bp, Homo sapiens
aaagctatgtaagtg

SEQ ID NO: 1501793 - DNA, 15 bp, Homo sapiens
aaaagctatgtaagt

SEQ ID NO: 1501794 - DNA, 15 bp, Homo sapiens
caaaagctatgtaag

SEQ ID NO: 1501795 - DNA, 15 bp, Homo sapiens
ccaaaagctatgtaa

SEQ ID NO: 1501796 - DNA, 15 bp, Homo sapiens
gccaaaagctatgta

SEQ ID NO: 1501797 - DNA, 15 bp, Homo sapiens
tgccaaaagctatgt

SEQ ID NO: 1501798 - DNA, 15 bp, Homo sapiens
ctgccaaaagctatg

SEQ ID NO: 1501799 - DNA, 15 bp, Homo sapiens
cctgccaaaagctat

SEQ ID NO: 1501800 - DNA, 15 bp, Homo sapiens
tcctgccaaaagcta

SEQ ID NO: 1501801 - DNA, 15 bp, Homo sapiens
ctcctgccaaaagct

SEQ ID NO: 1501802 - DNA, 15 bp, Homo sapiens
cctcctgccaaaagc

SEQ ID NO: 1501803 - DNA, 15 bp, Homo sapiens
gcctcctgccaaaag

SEQ ID NO: 1501804 - DNA, 15 bp, Homo sapiens
ggcctcctgccaaaa

SEQ ID NO: 1501805 - DNA, 15 bp, Homo sapiens
aggcctcctgccaaa

SEQ ID NO: 1501806 - DNA, 15 bp, Homo sapiens
gaggcctcctgccaa

SEQ ID NO: 1501807 - DNA, 15 bp, Homo sapiens
tgaggcctcctgcca

SEQ ID NO: 1501808 - DNA, 15 bp, Homo sapiens
ctgaggcctcctgcc

SEQ ID NO: 1501809 - DNA, 15 bp, Homo sapiens
actgaggcctcctgc

SEQ ID NO: 1501810 - DNA, 15 bp, Homo sapiens
aactgaggcctcctg

SEQ ID NO: 1501811 - DNA, 15 bp, Homo sapiens
gaactgaggcctcct

SEQ ID NO: 1501812 - DNA, 15 bp, Homo sapiens
agaactgaggcctcc

SEQ ID NO: 1501813 - DNA, 15 bp, Homo sapiens
aagaactgaggcctc

SEQ ID NO: 1501814 - DNA, 15 bp, Homo sapiens
aaagaactgaggcct

SEQ ID NO: 1501815 - DNA, 15 bp, Homo sapiens
caaagaactgaggcc

SEQ ID NO: 1501816 - DNA, 15 bp, Homo sapiens
gcaaagaactgaggc

SEQ ID NO: 1501817 - DNA, 15 bp, Homo sapiens
agcaaagaactgagg

SEQ ID NO: 1501818 - DNA, 15 bp, Homo sapiens
cagcaaagaactgag

SEQ ID NO: 1501819 - DNA, 15 bp, Homo sapiens
ccagcaaagaactga

SEQ ID NO: 1501820 - DNA, 15 bp, Homo sapiens
gccagcaaagaactg

SEQ ID NO: 1501821 - DNA, 15 bp, Homo sapiens
ggccagcaaagaact

SEQ ID NO: 1501822 - DNA, 15 bp, Homo sapiens
tggccagcaaagaac

SEQ ID NO: 1501823 - DNA, 15 bp, Homo sapiens
atggccagcaaagaa

SEQ ID NO: 1501824 - DNA, 15 bp, Homo sapiens
aatggccagcaaaga

SEQ ID NO: 1501825 - DNA, 15 bp, Homo sapiens
aaatggccagcaaag

SEQ ID NO: 1501826 - DNA, 15 bp, Homo sapiens
caaatggccagcaaa

SEQ ID NO: 1501827 - DNA, 15 bp, Homo sapiens
acaaatggccagcaa

SEQ ID NO: 1501828 - DNA, 15 bp, Homo sapiens
tacaaatggccagca

SEQ ID NO: 1501829 - DNA, 15 bp, Homo sapiens
ttacaaatggccagc

SEQ ID NO: 1501830 - DNA, 15 bp, Homo sapiens
cttacaaatggccag

SEQ ID NO: 1501831 - DNA, 15 bp, Homo sapiens
tcttacaaatggcca

SEQ ID NO: 1501832 - DNA, 15 bp, Homo sapiens
ctcttacaaatggcc

SEQ ID NO: 1501833 - DNA, 15 bp, Homo sapiens
cctcttacaaatggc

SEQ ID NO: 1501834 - DNA, 15 bp, Homo sapiens
acctcttacaaatgg

SEQ ID NO: 1501835 - DNA, 15 bp, Homo sapiens
gacctcttacaaatg

SEQ ID NO: 1501836 - DNA, 15 bp, Homo sapiens
agacctcttacaaat

SEQ ID NO: 1501837 - DNA, 15 bp, Homo sapiens
gagacctcttacaaa

SEQ ID NO: 1501838 - DNA, 15 bp, Homo sapiens
tgagacctcttacaa

SEQ ID NO: 1501839 - DNA, 15 bp, Homo sapiens
ctgagacctcttaca

SEQ ID NO: 1501840 - DNA, 15 bp, Homo sapiens
actgagacctcttac

SEQ ID NO: 1501841 - DNA, 15 bp, Homo sapiens
aactgagacctctta

SEQ ID NO: 1501842 - DNA, 15 bp, Homo sapiens
gaactgagacctctt

SEQ ID NO: 1501843 - DNA, 15 bp, Homo sapiens
ggaactgagacctct

SEQ ID NO: 1501844 - DNA, 15 bp, Homo sapiens
aggaactgagacctc

SEQ ID NO: 1501845 - DNA, 15 bp, Homo sapiens
aaggaactgagacct

SEQ ID NO: 1501846 - DNA, 15 bp, Homo sapiens
aaaggaactgagacc

SEQ ID NO: 1501847 - DNA, 15 bp, Homo sapiens
gaaaggaactgagac

SEQ ID NO: 1501848 - DNA, 15 bp, Homo sapiens
agaaaggaactgaga

SEQ ID NO: 1501849 - DNA, 15 bp, Homo sapiens
tagaaaggaactgag

SEQ ID NO: 1501850 - DNA, 15 bp, Homo sapiens
gtagaaaggaactga

SEQ ID NO: 1501851 - DNA, 15 bp, Homo sapiens
agtagaaaggaactg

SEQ ID NO: 1501852 - DNA, 15 bp, Homo sapiens
aagtagaaaggaact

SEQ ID NO: 1501853 - DNA, 15 bp, Homo sapiens
caagtagaaaggaac

SEQ ID NO: 1501854 - DNA, 15 bp, Homo sapiens
ccaagtagaaaggaa

SEQ ID NO: 1501855 - DNA, 15 bp, Homo sapiens
cccaagtagaaagga

SEQ ID NO: 1501856 - DNA, 15 bp, Homo sapiens
gcccaagtagaaagg

SEQ ID NO: 1501857 - DNA, 15 bp, Homo sapiens
agcccaagtagaaag

SEQ ID NO: 1501858 - DNA, 15 bp, Homo sapiens
aagcccaagtagaaa

SEQ ID NO: 1501859 - DNA, 15 bp, Homo sapiens
gaagcccaagtagaa

SEQ ID NO: 1501860 - DNA, 15 bp, Homo sapiens
agaagcccaagtaga

SEQ ID NO: 1501861 - DNA, 15 bp, Homo sapiens
gagaagcccaagtag

SEQ ID NO: 1501862 - DNA, 15 bp, Homo sapiens
ggagaagcccaagta

SEQ ID NO: 1501863 - DNA, 15 bp, Homo sapiens
tggagaagcccaagt

SEQ ID NO: 1501864 - DNA, 15 bp, Homo sapiens
atggagaagcccaag

SEQ ID NO: 1501865 - DNA, 15 bp, Homo sapiens
gatggagaagcccaa

SEQ ID NO: 1501866 - DNA, 15 bp, Homo sapiens
agatggagaagccca

SEQ ID NO: 1501867 - DNA, 15 bp, Homo sapiens
cagatggagaagccc

SEQ ID NO: 1501868 - DNA, 15 bp, Homo sapiens
ccagatggagaagcc

SEQ ID NO: 1501869 - DNA, 15 bp, Homo sapiens
gccagatggagaagc

SEQ ID NO: 1501870 - DNA, 15 bp, Homo sapiens
agccagatggagaag

SEQ ID NO: 1501871 - DNA, 15 bp, Homo sapiens
cagccagatggagaa

SEQ ID NO: 1501872 - DNA, 15 bp, Homo sapiens
gcagccagatggaga

SEQ ID NO: 1501873 - DNA, 15 bp, Homo sapiens
agcagccagatggag

SEQ ID NO: 1501874 - DNA, 15 bp, Homo sapiens
aagcagccagatgga

SEQ ID NO: 1501875 - DNA, 15 bp, Homo sapiens
caagcagccagatgg

SEQ ID NO: 1501876 - DNA, 15 bp, Homo sapiens
acaagcagccagatg

SEQ ID NO: 1501877 - DNA, 15 bp, Homo sapiens
tacaagcagccagat

SEQ ID NO: 1501878 - DNA, 15 bp, Homo sapiens
ttacaagcagccaga

SEQ ID NO: 1501879 - DNA, 15 bp, Homo sapiens
attacaagcagccag

SEQ ID NO: 1501880 - DNA, 15 bp, Homo sapiens
cattacaagcagcca

SEQ ID NO: 1501881 - DNA, 15 bp, Homo sapiens
acattacaagcagcc

SEQ ID NO: 1501882 - DNA, 15 bp, Homo sapiens
cacattacaagcagc

SEQ ID NO: 1501883 - DNA, 15 bp, Homo sapiens
ccacattacaagcag

SEQ ID NO: 1501884 - DNA, 15 bp, Homo sapiens
gccacattacaagca

SEQ ID NO: 1501885 - DNA, 15 bp, Homo sapiens
tgccacattacaagc

SEQ ID NO: 1501886 - DNA, 15 bp, Homo sapiens
ctgccacattacaag

SEQ ID NO: 1501887 - DNA, 15 bp, Homo sapiens
gctgccacattacaa

SEQ ID NO: 1501888 - DNA, 15 bp, Homo sapiens
agctgccacattaca

SEQ ID NO: 1501889 - DNA, 15 bp, Homo sapiens
cagctgccacattac

SEQ ID NO: 1501890 - DNA, 15 bp, Homo sapiens
tcagctgccacatta

SEQ ID NO: 1501891 - DNA, 15 bp, Homo sapiens
gtcagctgccacatt

SEQ ID NO: 1501892 - DNA, 15 bp, Homo sapiens
cgtcagctgccacat

SEQ ID NO: 1501893 - DNA, 15 bp, Homo sapiens
acgtcagctgccaca

SEQ ID NO: 1501894 - DNA, 15 bp, Homo sapiens
gacgtcagctgccac

SEQ ID NO: 1501895 - DNA, 15 bp, Homo sapiens
agacgtcagctgcca

SEQ ID NO: 1501896 - DNA, 15 bp, Homo sapiens
gagacgtcagctgcc

SEQ ID NO: 1501897 - DNA, 15 bp, Homo sapiens
ggagacgtcagctgc

SEQ ID NO: 1501898 - DNA, 15 bp, Homo sapiens
gggagacgtcagctg

SEQ ID NO: 1501899 - DNA, 15 bp, Homo sapiens
tgggagacgtcagct

SEQ ID NO: 1501900 - DNA, 15 bp, Homo sapiens
ctgggagacgtcagc

SEQ ID NO: 1501901 - DNA, 15 bp, Homo sapiens
tctgggagacgtcag

SEQ ID NO: 1501902 - DNA, 15 bp, Homo sapiens
ctctgggagacgtca

SEQ ID NO: 1501903 - DNA, 15 bp, Homo sapiens
actctgggagacgtc

SEQ ID NO: 1501904 - DNA, 15 bp, Homo sapiens
cactctgggagacgt

SEQ ID NO: 1501905 - DNA, 15 bp, Homo sapiens
tcactctgggagacg

SEQ ID NO: 1501906 - DNA, 15 bp, Homo sapiens
ctcactctgggagac

SEQ ID NO: 1501907 - DNA, 15 bp, Homo sapiens
actcactctgggaga

SEQ ID NO: 1501908 - DNA, 15 bp, Homo sapiens
cactcactctgggag

SEQ ID NO: 1501909 - DNA, 15 bp, Homo sapiens
tcactcactctggga

SEQ ID NO: 1501910 - DNA, 15 bp, Homo sapiens
atcactcactctggg

SEQ ID NO: 1501911 - DNA, 15 bp, Homo sapiens
gatcactcactctgg

SEQ ID NO: 1501912 - DNA, 15 bp, Homo sapiens
agatcactcactctg

SEQ ID NO: 1501913 - DNA, 15 bp, Homo sapiens
cagatcactcactct

SEQ ID NO: 1501914 - DNA, 15 bp, Homo sapiens
tcagatcactcactc

SEQ ID NO: 1501915 - DNA, 15 bp, Homo sapiens
ctcagatcactcact

SEQ ID NO: 1501916 - DNA, 15 bp, Homo sapiens
tctcagatcactcac

SEQ ID NO: 1501917 - DNA, 15 bp, Homo sapiens
ctctcagatcactca

SEQ ID NO: 1501918 - DNA, 15 bp, Homo sapiens
tctctcagatcactc

SEQ ID NO: 1501919 - DNA, 15 bp, Homo sapiens
ttctctcagatcact

SEQ ID NO: 1501920 - DNA, 15 bp, Homo sapiens
attctctcagatcac

SEQ ID NO: 1501921 - DNA, 15 bp, Homo sapiens
gattctctcagatca

SEQ ID NO: 1501922 - DNA, 15 bp, Homo sapiens
tgattctctcagatc

SEQ ID NO: 1501923 - DNA, 15 bp, Homo sapiens
ttgattctctcagat

SEQ ID NO: 1501924 - DNA, 15 bp, Homo sapiens
tttgattctctcaga

SEQ ID NO: 1501925 - DNA, 15 bp, Homo sapiens
ttttgattctctcag

SEQ ID NO: 1501926 - DNA, 15 bp, Homo sapiens
cttttgattctctca

SEQ ID NO: 1501927 - DNA, 15 bp, Homo sapiens
gcttttgattctctc

SEQ ID NO: 1501928 - DNA, 15 bp, Homo sapiens
ggcttttgattctct

SEQ ID NO: 1501929 - DNA, 15 bp, Homo sapiens
tggcttttgattctc

SEQ ID NO: 1501930 - DNA, 15 bp, Homo sapiens
gtggcttttgattct

SEQ ID NO: 1501931 - DNA, 15 bp, Homo sapiens
tgtggcttttgattc

SEQ ID NO: 1501932 - DNA, 15 bp, Homo sapiens
atgtggcttttgatt

SEQ ID NO: 1501933 - DNA, 15 bp, Homo sapiens
aatgtggcttttgat

SEQ ID NO: 1501934 - DNA, 15 bp, Homo sapiens
gaatgtggcttttga

SEQ ID NO: 1501935 - DNA, 15 bp, Homo sapiens
agaatgtggcttttg

SEQ ID NO: 1501936 - DNA, 15 bp, Homo sapiens
aagaatgtggctttt

SEQ ID NO: 1501937 - DNA, 15 bp, Homo sapiens
aaagaatgtggcttt

SEQ ID NO: 1501938 - DNA, 15 bp, Homo sapiens
gaaagaatgtggctt

SEQ ID NO: 1501939 - DNA, 15 bp, Homo sapiens
tgaaagaatgtggct

SEQ ID NO: 1501940 - DNA, 15 bp, Homo sapiens
atgaaagaatgtggc

SEQ ID NO: 1501941 - DNA, 15 bp, Homo sapiens
catgaaagaatgtgg

SEQ ID NO: 1501942 - DNA, 15 bp, Homo sapiens
tcatgaaagaatgtg

SEQ ID NO: 1501943 - DNA, 15 bp, Homo sapiens
atcatgaaagaatgt

SEQ ID NO: 1501944 - DNA, 15 bp, Homo sapiens
gatcatgaaagaatg

SEQ ID NO: 1501945 - DNA, 15 bp, Homo sapiens
ggatcatgaaagaat

SEQ ID NO: 1501946 - DNA, 15 bp, Homo sapiens
aggatcatgaaagaa

SEQ ID NO: 1501947 - DNA, 15 bp, Homo sapiens
aaggatcatgaaaga

SEQ ID NO: 1501948 - DNA, 15 bp, Homo sapiens
taaggatcatgaaag

SEQ ID NO: 1501949 - DNA, 15 bp, Homo sapiens
ctaaggatcatgaaa

SEQ ID NO: 1501950 - DNA, 15 bp, Homo sapiens
tctaaggatcatgaa

SEQ ID NO: 1501951 - DNA, 15 bp, Homo sapiens
ttctaaggatcatga

SEQ ID NO: 1501952 - DNA, 15 bp, Homo sapiens
cttctaaggatcatg

SEQ ID NO: 1501953 - DNA, 15 bp, Homo sapiens
acttctaaggatcat

SEQ ID NO: 1501954 - DNA, 15 bp, Homo sapiens
aacttctaaggatca

SEQ ID NO: 1501955 - DNA, 15 bp, Homo sapiens
taacttctaaggatc

SEQ ID NO: 1501956 - DNA, 15 bp, Homo sapiens
gtaacttctaaggat

SEQ ID NO: 1501957 - DNA, 15 bp, Homo sapiens
tgtaacttctaagga

SEQ ID NO: 1501958 - DNA, 15 bp, Homo sapiens
atgtaacttctaagg

SEQ ID NO: 1501959 - DNA, 15 bp, Homo sapiens
tatgtaacttctaag

SEQ ID NO: 1501960 - DNA, 15 bp, Homo sapiens
gtatgtaacttctaa

SEQ ID NO: 1501961 - DNA, 15 bp, Homo sapiens
ggtatgtaacttcta

SEQ ID NO: 1501962 - DNA, 15 bp, Homo sapiens
aggtatgtaacttct

SEQ ID NO: 1501963 - DNA, 15 bp, Homo sapiens
aaggtatgtaacttc

SEQ ID NO: 1501964 - DNA, 15 bp, Homo sapiens
gaaggtatgtaactt

SEQ ID NO: 1501965 - DNA, 15 bp, Homo sapiens
ggaaggtatgtaact

SEQ ID NO: 1501966 - DNA, 15 bp, Homo sapiens
aggaaggtatgtaac

SEQ ID NO: 1501967 - DNA, 15 bp, Homo sapiens
caggaaggtatgtaa

SEQ ID NO: 1501968 - DNA, 15 bp, Homo sapiens
gcaggaaggtatgta

SEQ ID NO: 1501969 - DNA, 15 bp, Homo sapiens
agcaggaaggtatgt

SEQ ID NO: 1501970 - DNA, 15 bp, Homo sapiens
aagcaggaaggtatg

SEQ ID NO: 1501971 - DNA, 15 bp, Homo sapiens
caagcaggaaggtat

SEQ ID NO: 1501972 - DNA, 15 bp, Homo sapiens
gcaagcaggaaggta

SEQ ID NO: 1501973 - DNA, 15 bp, Homo sapiens
ggcaagcaggaaggt

SEQ ID NO: 1501974 - DNA, 15 bp, Homo sapiens
cggcaagcaggaagg

SEQ ID NO: 1501975 - DNA, 15 bp, Homo sapiens
acggcaagcaggaag

SEQ ID NO: 1501976 - DNA, 15 bp, Homo sapiens
tacggcaagcaggaa

SEQ ID NO: 1501977 - DNA, 15 bp, Homo sapiens
atacggcaagcagga

SEQ ID NO: 1501978 - DNA, 15 bp, Homo sapiens
tatacggcaagcagg

SEQ ID NO: 1501979 - DNA, 15 bp, Homo sapiens
ttatacggcaagcag

SEQ ID NO: 1501980 - DNA, 15 bp, Homo sapiens
attatacggcaagca

SEQ ID NO: 1501981 - DNA, 15 bp, Homo sapiens
tattatacggcaagc

SEQ ID NO: 1501982 - DNA, 15 bp, Homo sapiens
atattatacggcaag

SEQ ID NO: 1501983 - DNA, 15 bp, Homo sapiens
aatattatacggcaa

SEQ ID NO: 1501984 - DNA, 15 bp, Homo sapiens
caatattatacggca

SEQ ID NO: 1501985 - DNA, 15 bp, Homo sapiens
ccaatattatacggc

SEQ ID NO: 1501986 - DNA, 15 bp, Homo sapiens
accaatattatacgg

SEQ ID NO: 1501987 - DNA, 15 bp, Homo sapiens
aaccaatattatacg

SEQ ID NO: 1501988 - DNA, 15 bp, Homo sapiens
taaccaatattatac

SEQ ID NO: 1501989 - DNA, 15 bp, Homo sapiens
ataaccaatattata

SEQ ID NO: 1501990 - DNA, 15 bp, Homo sapiens
cataaccaatattat

SEQ ID NO: 1501991 - DNA, 15 bp, Homo sapiens
gcataaccaatatta

SEQ ID NO: 1501992 - DNA, 15 bp, Homo sapiens
tgcataaccaatatt

SEQ ID NO: 1501993 - DNA, 15 bp, Homo sapiens
ctgcataaccaatat

SEQ ID NO: 1501994 - DNA, 15 bp, Homo sapiens
tctgcataaccaata

SEQ ID NO: 1501995 - DNA, 15 bp, Homo sapiens
ttctgcataaccaat

SEQ ID NO: 1501996 - DNA, 15 bp, Homo sapiens
gttctgcataaccaa

SEQ ID NO: 1501997 - DNA, 15 bp, Homo sapiens
tgttctgcataacca

SEQ ID NO: 1501998 - DNA, 15 bp, Homo sapiens
ttgttctgcataacc

SEQ ID NO: 1501999 - DNA, 15 bp, Homo sapiens
gttgttctgcataac

SEQ ID NO: 1502000 - DNA, 15 bp, Homo sapiens
ggttgttctgcataa

SEQ ID NO: 1502001 - DNA, 15 bp, Homo sapiens
gggttgttctgcata

SEQ ID NO: 1502002 - DNA, 15 bp, Homo sapiens
cgggttgttctgcat

SEQ ID NO: 1502003 - DNA, 15 bp, Homo sapiens
tcgggttgttctgca

SEQ ID NO: 1502004 - DNA, 15 bp, Homo sapiens
ttcgggttgttctgc

SEQ ID NO: 1502005 - DNA, 15 bp, Homo sapiens
attcgggttgttctg

SEQ ID NO: 1502006 - DNA, 15 bp, Homo sapiens
tattcgggttgttct

SEQ ID NO: 1502007 - DNA, 15 bp, Homo sapiens
gtattcgggttgttc

SEQ ID NO: 1502008 - DNA, 15 bp, Homo sapiens
ggtattcgggttgtt

SEQ ID NO: 1502009 - DNA, 15 bp, Homo sapiens
tggtattcgggttgt

SEQ ID NO: 1502010 - DNA, 15 bp, Homo sapiens
ctggtattcgggttg

SEQ ID NO: 1502011 - DNA, 15 bp, Homo sapiens
tctggtattcgggtt

SEQ ID NO: 1502012 - DNA, 15 bp, Homo sapiens
atctggtattcgggt

SEQ ID NO: 1502013 - DNA, 15 bp, Homo sapiens
catctggtattcggg

SEQ ID NO: 1502014 - DNA, 15 bp, Homo sapiens
tcatctggtattcgg

SEQ ID NO: 1502015 - DNA, 15 bp, Homo sapiens
ctcatctggtattcg

SEQ ID NO: 1502016 - DNA, 15 bp, Homo sapiens
tctcatctggtattc

SEQ ID NO: 1502017 - DNA, 15 bp, Homo sapiens
ctctcatctggtatt

SEQ ID NO: 1502018 - DNA, 15 bp, Homo sapiens
tctctcatctggtat

SEQ ID NO: 1502019 - DNA, 15 bp, Homo sapiens
ctctctcatctggta

SEQ ID NO: 1502020 - DNA, 15 bp, Homo sapiens
cctctctcatctggt

SEQ ID NO: 1502021 - DNA, 15 bp, Homo sapiens
tcctctctcatctgg

SEQ ID NO: 1502022 - DNA, 15 bp, Homo sapiens
atcctctctcatctg

SEQ ID NO: 1502023 - DNA, 15 bp, Homo sapiens
catcctctctcatct

SEQ ID NO: 1502024 - DNA, 15 bp, Homo sapiens
tcatcctctctcatc

SEQ ID NO: 1502025 - DNA, 15 bp, Homo sapiens
gtcatcctctctcat

SEQ ID NO: 1502026 - DNA, 15 bp, Homo sapiens
tgtcatcctctctca

SEQ ID NO: 1502027 - DNA, 15 bp, Homo sapiens
gtgtcatcctctctc

SEQ ID NO: 1502028 - DNA, 15 bp, Homo sapiens
tgtgtcatcctctct

SEQ ID NO: 1502029 - DNA, 15 bp, Homo sapiens
gtgtgtcatcctctc

SEQ ID NO: 1502030 - DNA, 15 bp, Homo sapiens
cgtgtgtcatcctct

SEQ ID NO: 1502031 - DNA, 15 bp, Homo sapiens
ccgtgtgtcatcctc

SEQ ID NO: 1502032 - DNA, 15 bp, Homo sapiens
cccgtgtgtcatcct

SEQ ID NO: 1502033 - DNA, 15 bp, Homo sapiens
acccgtgtgtcatcc

SEQ ID NO: 1502034 - DNA, 15 bp, Homo sapiens
cacccgtgtgtcatc

SEQ ID NO: 1502035 - DNA, 15 bp, Homo sapiens
acacccgtgtgtcat

SEQ ID NO: 1502036 - DNA, 15 bp, Homo sapiens
cacacccgtgtgtca

SEQ ID NO: 1502037 - DNA, 15 bp, Homo sapiens
ccacacccgtgtgtc

SEQ ID NO: 1502038 - DNA, 15 bp, Homo sapiens
tccacacccgtgtgt

SEQ ID NO: 1502039 - DNA, 15 bp, Homo sapiens
atccacacccgtgtg

SEQ ID NO: 1502040 - DNA, 15 bp, Homo sapiens
tatccacacccgtgt

SEQ ID NO: 1502041 - DNA, 15 bp, Homo sapiens
atatccacacccgtg

SEQ ID NO: 1502042 - DNA, 15 bp, Homo sapiens
gatatccacacccgt

SEQ ID NO: 1502043 - DNA, 15 bp, Homo sapiens
tgatatccacacccg

SEQ ID NO: 1502044 - DNA, 15 bp, Homo sapiens
ctgatatccacaccc

SEQ ID NO: 1502045 - DNA, 15 bp, Homo sapiens
tctgatatccacacc

SEQ ID NO: 1502046 - DNA, 15 bp, Homo sapiens
ttctgatatccacac

SEQ ID NO: 1502047 - DNA, 15 bp, Homo sapiens
attctgatatccaca

SEQ ID NO: 1502048 - DNA, 15 bp, Homo sapiens
cattctgatatccac

SEQ ID NO: 1502049 - DNA, 15 bp, Homo sapiens
acattctgatatcca

SEQ ID NO: 1502050 - DNA, 15 bp, Homo sapiens
tacattctgatatcc

SEQ ID NO: 1502051 - DNA, 15 bp, Homo sapiens
ctacattctgatatc

SEQ ID NO: 1502052 - DNA, 15 bp, Homo sapiens
cctacattctgatat

SEQ ID NO: 1502053 - DNA, 15 bp, Homo sapiens
tcctacattctgata

SEQ ID NO: 1502054 - DNA, 15 bp, Homo sapiens
ttcctacattctgat

SEQ ID NO: 1502055 - DNA, 15 bp, Homo sapiens
attcctacattctga

SEQ ID NO: 1502056 - DNA, 15 bp, Homo sapiens
tattcctacattctg

SEQ ID NO: 1502057 - DNA, 15 bp, Homo sapiens
gtattcctacattct

SEQ ID NO: 1502058 - DNA, 15 bp, Homo sapiens
agtattcctacattc

SEQ ID NO: 1502059 - DNA, 15 bp, Homo sapiens
aagtattcctacatt

SEQ ID NO: 1502060 - DNA, 15 bp, Homo sapiens
caagtattcctacat

SEQ ID NO: 1502061 - DNA, 15 bp, Homo sapiens
gcaagtattcctaca

SEQ ID NO: 1502062 - DNA, 15 bp, Homo sapiens
tgcaagtattcctac

SEQ ID NO: 1502063 - DNA, 15 bp, Homo sapiens
ctgcaagtattccta

SEQ ID NO: 1502064 - DNA, 15 bp, Homo sapiens
tctgcaagtattcct

SEQ ID NO: 1502065 - DNA, 15 bp, Homo sapiens
gtctgcaagtattcc

SEQ ID NO: 1502066 - DNA, 15 bp, Homo sapiens
ggtctgcaagtattc

SEQ ID NO: 1502067 - DNA, 15 bp, Homo sapiens
tggtctgcaagtatt

SEQ ID NO: 1502068 - DNA, 15 bp, Homo sapiens
atggtctgcaagtat

SEQ ID NO: 1502069 - DNA, 15 bp, Homo sapiens
gatggtctgcaagta

SEQ ID NO: 1502070 - DNA, 15 bp, Homo sapiens
agatggtctgcaagt

SEQ ID NO: 1502071 - DNA, 15 bp, Homo sapiens
aagatggtctgcaag

SEQ ID NO: 1502072 - DNA, 15 bp, Homo sapiens
caagatggtctgcaa

SEQ ID NO: 1502073 - DNA, 15 bp, Homo sapiens
ccaagatggtctgca

SEQ ID NO: 1502074 - DNA, 15 bp, Homo sapiens
tccaagatggtctgc

SEQ ID NO: 1502075 - DNA, 15 bp, Homo sapiens
ctccaagatggtctg

SEQ ID NO: 1502076 - DNA, 15 bp, Homo sapiens
actccaagatggtct

SEQ ID NO: 1502077 - DNA, 15 bp, Homo sapiens
gactccaagatggtc

SEQ ID NO: 1502078 - DNA, 15 bp, Homo sapiens
agactccaagatggt

SEQ ID NO: 1502079 - DNA, 15 bp, Homo sapiens
cagactccaagatgg

SEQ ID NO: 1502080 - DNA, 15 bp, Homo sapiens
ccagactccaagatg

SEQ ID NO: 1502081 - DNA, 15 bp, Homo sapiens
gccagactccaagat

SEQ ID NO: 1502082 - DNA, 15 bp, Homo sapiens
agccagactccaaga

SEQ ID NO: 1502083 - DNA, 15 bp, Homo sapiens
tagccagactccaag

SEQ ID NO: 1502084 - DNA, 15 bp, Homo sapiens
gtagccagactccaa

SEQ ID NO: 1502085 - DNA, 15 bp, Homo sapiens
ggtagccagactcca

SEQ ID NO: 1502086 - DNA, 15 bp, Homo sapiens
tggtagccagactcc

SEQ ID NO: 1502087 - DNA, 15 bp, Homo sapiens
atggtagccagactc

SEQ ID NO: 1502088 - DNA, 15 bp, Homo sapiens
tatggtagccagact

SEQ ID NO: 1502089 - DNA, 15 bp, Homo sapiens
ttatggtagccagac

SEQ ID NO: 1502090 - DNA, 15 bp, Homo sapiens
cttatggtagccaga

SEQ ID NO: 1502091 - DNA, 15 bp, Homo sapiens
gcttatggtagccag

SEQ ID NO: 1502092 - DNA, 15 bp, Homo sapiens
tgcttatggtagcca

SEQ ID NO: 1502093 - DNA, 15 bp, Homo sapiens
atgcttatggtagcc

SEQ ID NO: 1502094 - DNA, 15 bp, Homo sapiens
tatgcttatggtagc

SEQ ID NO: 1502095 - DNA, 15 bp, Homo sapiens
gtatgcttatggtag

SEQ ID NO: 1502096 - DNA, 15 bp, Homo sapiens
tgtatgcttatggta

SEQ ID NO: 1502097 - DNA, 15 bp, Homo sapiens
ctgtatgcttatggt

SEQ ID NO: 1502098 - DNA, 15 bp, Homo sapiens
actgtatgcttatgg

SEQ ID NO: 1502099 - DNA, 15 bp, Homo sapiens
gactgtatgcttatg

SEQ ID NO: 1502100 - DNA, 15 bp, Homo sapiens
ggactgtatgcttat

SEQ ID NO: 1502101 - DNA, 15 bp, Homo sapiens
tggactgtatgctta

SEQ ID NO: 1502102 - DNA, 15 bp, Homo sapiens
atggactgtatgctt

SEQ ID NO: 1502103 - DNA, 15 bp, Homo sapiens
aatggactgtatgct

SEQ ID NO: 1502104 - DNA, 15 bp, Homo sapiens
aaatggactgtatgc

SEQ ID NO: 1502105 - DNA, 15 bp, Homo sapiens
aaaatggactgtatg

SEQ ID NO: 1502106 - DNA, 15 bp, Homo sapiens
aaaaatggactgtat

SEQ ID NO: 1502107 - DNA, 15 bp, Homo sapiens
taaaaatggactgta

SEQ ID NO: 1502108 - DNA, 15 bp, Homo sapiens
ataaaaatggactgt

SEQ ID NO: 1502109 - DNA, 15 bp, Homo sapiens
tataaaaatggactg

SEQ ID NO: 1502110 - DNA, 15 bp, Homo sapiens
ttataaaaatggact

SEQ ID NO: 1502111 - DNA, 15 bp, Homo sapiens
tttataaaaatggac

SEQ ID NO: 1502112 - DNA, 15 bp, Homo sapiens
ctttataaaaatgga

SEQ ID NO: 1502113 - DNA, 15 bp, Homo sapiens
actttataaaaatgg

SEQ ID NO: 1502114 - DNA, 15 bp, Homo sapiens
aactttataaaaatg

SEQ ID NO: 1502115 - DNA, 15 bp, Homo sapiens
aaactttataaaaat

SEQ ID NO: 1502116 - DNA, 15 bp, Homo sapiens
aaaactttataaaaa

SEQ ID NO: 1502117 - DNA, 15 bp, Homo sapiens
gaaaactttataaaa

SEQ ID NO: 1502118 - DNA, 15 bp, Homo sapiens
tgaaaactttataaa

SEQ ID NO: 1502119 - DNA, 15 bp, Homo sapiens
atgaaaactttataa

SEQ ID NO: 1502120 - DNA, 15 bp, Homo sapiens
catgaaaactttata

SEQ ID NO: 1502121 - DNA, 15 bp, Homo sapiens
acatgaaaactttat

SEQ ID NO: 1502122 - DNA, 15 bp, Homo sapiens
gacatgaaaacttta

SEQ ID NO: 1502123 - DNA, 15 bp, Homo sapiens
agacatgaaaacttt

SEQ ID NO: 1502124 - DNA, 15 bp, Homo sapiens
aagacatgaaaactt

SEQ ID NO: 1502125 - DNA, 15 bp, Homo sapiens
gaagacatgaaaact

SEQ ID NO: 1502126 - DNA, 15 bp, Homo sapiens
agaagacatgaaaac

SEQ ID NO: 1502127 - DNA, 15 bp, Homo sapiens
aagaagacatgaaaa

SEQ ID NO: 1502128 - DNA, 15 bp, Homo sapiens
caagaagacatgaaa

SEQ ID NO: 1502129 - DNA, 15 bp, Homo sapiens
tcaagaagacatgaa

SEQ ID NO: 1502130 - DNA, 15 bp, Homo sapiens
ttcaagaagacatga

SEQ ID NO: 1502131 - DNA, 15 bp, Homo sapiens
tttcaagaagacatg

SEQ ID NO: 1502132 - DNA, 15 bp, Homo sapiens
attttcaagaagaca

SEQ ID NO: 1502133 - DNA, 15 bp, Homo sapiens
cattttcaagaagac

SEQ ID NO: 1502134 - DNA, 15 bp, Homo sapiens
tcattttcaagaaga

SEQ ID NO: 1502135 - DNA, 15 bp, Homo sapiens
atcattttcaagaag

SEQ ID NO: 1502136 - DNA, 15 bp, Homo sapiens
tatcattttcaagaa

SEQ ID NO: 1502137 - DNA, 15 bp, Homo sapiens
atatcattttcaaga

SEQ ID NO: 1502138 - DNA, 15 bp, Homo sapiens
catatcattttcaag

SEQ ID NO: 1502139 - DNA, 15 bp, Homo sapiens
acatatcattttcaa

SEQ ID NO: 1502140 - DNA, 15 bp, Homo sapiens
tacatatcattttca

SEQ ID NO: 1502141 - DNA, 15 bp, Homo sapiens
ctacatatcattttc

SEQ ID NO: 1502142 - DNA, 15 bp, Homo sapiens
actacatatcatttt

SEQ ID NO: 1502143 - DNA, 15 bp, Homo sapiens
gactacatatcattt

SEQ ID NO: 1502144 - DNA, 15 bp, Homo sapiens
ggactacatatcatt

SEQ ID NO: 1502145 - DNA, 15 bp, Homo sapiens
gggactacatatcat

SEQ ID NO: 1502146 - DNA, 15 bp, Homo sapiens
tgggactacatatca

SEQ ID NO: 1502147 - DNA, 15 bp, Homo sapiens
ttgggactacatatc

SEQ ID NO: 1502148 - DNA, 15 bp, Homo sapiens
cttgggactacatat

SEQ ID NO: 1502149 - DNA, 15 bp, Homo sapiens
acttgggactacata

SEQ ID NO: 1502150 - DNA, 15 bp, Homo sapiens
aacttgggactacat

SEQ ID NO: 1502151 - DNA, 15 bp, Homo sapiens
gaacttgggactaca

SEQ ID NO: 1502152 - DNA, 15 bp, Homo sapiens
agaacttgggactac

SEQ ID NO: 1502153 - DNA, 15 bp, Homo sapiens
aagaacttgggacta

SEQ ID NO: 1502154 - DNA, 15 bp, Homo sapiens
caagaacttgggact

SEQ ID NO: 1502155 - DNA, 15 bp, Homo sapiens
tcaagaacttgggac

SEQ ID NO: 1502156 - DNA, 15 bp, Homo sapiens
ctcaagaacttggga

SEQ ID NO: 1502157 - DNA, 15 bp, Homo sapiens
actcaagaacttggg

SEQ ID NO: 1502158 - DNA, 15 bp, Homo sapiens
cactcaagaacttgg

SEQ ID NO: 1502159 - DNA, 15 bp, Homo sapiens
acactcaagaacttg

SEQ ID NO: 1502160 - DNA, 15 bp, Homo sapiens
cacactcaagaactt

SEQ ID NO: 1502161 - DNA, 15 bp, Homo sapiens
tcacactcaagaact

SEQ ID NO: 1502162 - DNA, 15 bp, Homo sapiens
atcacactcaagaac

SEQ ID NO: 1502163 - DNA, 15 bp, Homo sapiens
aatcacactcaagaa

SEQ ID NO: 1502164 - DNA, 15 bp, Homo sapiens
aaatcacactcaaga

SEQ ID NO: 1502165 - DNA, 15 bp, Homo sapiens
aaaatcacactcaag

SEQ ID NO: 1502166 - DNA, 15 bp, Homo sapiens
aaaaatcacactcaa

SEQ ID NO: 1502167 - DNA, 15 bp, Homo sapiens
taaaaatcacactca

SEQ ID NO: 1502168 - DNA, 15 bp, Homo sapiens
gtaaaaatcacactc

SEQ ID NO: 1502169 - DNA, 15 bp, Homo sapiens
tgtaaaaatcacact

SEQ ID NO: 1502170 - DNA, 15 bp, Homo sapiens
atgtaaaaatcacac

SEQ ID NO: 1502171 - DNA, 15 bp, Homo sapiens
tatgtaaaaatcaca

SEQ ID NO: 1502172 - DNA, 15 bp, Homo sapiens
ctatgtaaaaatcac

SEQ ID NO: 1502173 - DNA, 15 bp, Homo sapiens
cctatgtaaaaatca

SEQ ID NO: 1502174 - DNA, 15 bp, Homo sapiens
tcctatgtaaaaatc

SEQ ID NO: 1502175 - DNA, 15 bp, Homo sapiens
ctcctatgtaaaaat

SEQ ID NO: 1502176 - DNA, 15 bp, Homo sapiens
actcctatgtaaaaa

SEQ ID NO: 1502177 - DNA, 15 bp, Homo sapiens
aactcctatgtaaaa

SEQ ID NO: 1502178 - DNA, 15 bp, Homo sapiens
aaactcctatgtaaa

SEQ ID NO: 1502179 - DNA, 15 bp, Homo sapiens
caaactcctatgtaa

SEQ ID NO: 1502180 - DNA, 15 bp, Homo sapiens
tcaaactcctatgta

SEQ ID NO: 1502181 - DNA, 15 bp, Homo sapiens
atcaaactcctatgt

SEQ ID NO: 1502182 - DNA, 15 bp, Homo sapiens
gatcaaactcctatg

SEQ ID NO: 1502183 - DNA, 15 bp, Homo sapiens
tgatcaaactcctat

SEQ ID NO: 1502184 - DNA, 15 bp, Homo sapiens
ttgatcaaactccta

SEQ ID NO: 1502185 - DNA, 15 bp, Homo sapiens
cttgatcaaactcct

SEQ ID NO: 1502186 - DNA, 15 bp, Homo sapiens
acttgatcaaactcc

SEQ ID NO: 1502187 - DNA, 15 bp, Homo sapiens
aacttgatcaaactc

SEQ ID NO: 1502188 - DNA, 15 bp, Homo sapiens
aaacttgatcaaact

SEQ ID NO: 1502189 - DNA, 15 bp, Homo sapiens
taaacttgatcaaac

SEQ ID NO: 1502190 - DNA, 15 bp, Homo sapiens
ataaacttgatcaaa

SEQ ID NO: 1502191 - DNA, 15 bp, Homo sapiens
aataaacttgatcaa

SEQ ID NO: 1502192 - DNA, 15 bp, Homo sapiens
taataaacttgatca

SEQ ID NO: 1502193 - DNA, 15 bp, Homo sapiens
ttaataaacttgatc

SEQ ID NO: 1502194 - DNA, 15 bp, Homo sapiens
cttaataaacttgat

SEQ ID NO: 1502195 - DNA, 15 bp, Homo sapiens
gcttaataaacttga

SEQ ID NO: 1502196 - DNA, 15 bp, Homo sapiens
tgcttaataaacttg

SEQ ID NO: 1502197 - DNA, 15 bp, Homo sapiens
ctgcttaataaactt

SEQ ID NO: 1502198 - DNA, 15 bp, Homo sapiens
actgcttaataaact

SEQ ID NO: 1502199 - DNA, 15 bp, Homo sapiens
aactgcttaataaac

SEQ ID NO: 1502200 - DNA, 15 bp, Homo sapiens
gaactgcttaataaa

SEQ ID NO: 1502201 - DNA, 15 bp, Homo sapiens
tgaactgcttaataa

SEQ ID NO: 1502202 - DNA, 15 bp, Homo sapiens
ttgaactgcttaata

SEQ ID NO: 1502203 - DNA, 15 bp, Homo sapiens
gttgaactgcttaat

SEQ ID NO: 1502204 - DNA, 15 bp, Homo sapiens
agttgaactgcttaa

SEQ ID NO: 1502205 - DNA, 15 bp, Homo sapiens
gagttgaactgctta

SEQ ID NO: 1502206 - DNA, 15 bp, Homo sapiens
agagttgaactgctt

SEQ ID NO: 1502207 - DNA, 15 bp, Homo sapiens
aagagttgaactgct

SEQ ID NO: 1502208 - DNA, 15 bp, Homo sapiens
gaagagttgaactgc

SEQ ID NO: 1502209 - DNA, 15 bp, Homo sapiens
agaagagttgaactg

SEQ ID NO: 1502210 - DNA, 15 bp, Homo sapiens
tagaagagttgaact

SEQ ID NO: 1502211 - DNA, 15 bp, Homo sapiens
ttagaagagttgaac

SEQ ID NO: 1502212 - DNA, 15 bp, Homo sapiens
tttagaagagttgaa

SEQ ID NO: 1502213 - DNA, 15 bp, Homo sapiens
atttagaagagttga

SEQ ID NO: 1502214 - DNA, 15 bp, Homo sapiens
aatttagaagagttg

SEQ ID NO: 1502215 - DNA, 15 bp, Homo sapiens
gaatttagaagagtt

SEQ ID NO: 1502216 - DNA, 15 bp, Homo sapiens
agaatttagaagagt

SEQ ID NO: 1502217 - DNA, 15 bp, Homo sapiens
cagaatttagaagag

SEQ ID NO: 1502218 - DNA, 15 bp, Homo sapiens
tcagaatttagaaga

SEQ ID NO: 1502219 - DNA, 15 bp, Homo sapiens
atcagaatttagaag

SEQ ID NO: 1502220 - DNA, 15 bp, Homo sapiens
aatcagaatttagaa

SEQ ID NO: 1502221 - DNA, 15 bp, Homo sapiens
gaatcagaatttaga

SEQ ID NO: 1502222 - DNA, 15 bp, Homo sapiens
agaatcagaatttag

SEQ ID NO: 1502223 - DNA, 15 bp, Homo sapiens
aagaatcagaattta

SEQ ID NO: 1502224 - DNA, 15 bp, Homo sapiens
aaagaatcagaattt

SEQ ID NO: 1502225 - DNA, 15 bp, Homo sapiens
aaaagaatcagaatt

SEQ ID NO: 1502226 - DNA, 15 bp, Homo sapiens
aaaaagaatcagaat

SEQ ID NO: 1502227 - DNA, 15 bp, Homo sapiens
aaaaaagaatcagaa

SEQ ID NO: 1502228 - DNA, 15 bp, Homo sapiens
caaaaaagaatcaga

SEQ ID NO: 1502229 - DNA, 15 bp, Homo sapiens
acaaaaaagaatcag

SEQ ID NO: 1502230 - DNA, 15 bp, Homo sapiens
gacaaaaaagaatca

SEQ ID NO: 1502231 - DNA, 15 bp, Homo sapiens
agacaaaaaagaatc

SEQ ID NO: 1502232 - DNA, 15 bp, Homo sapiens
cagacaaaaaagaat

SEQ ID NO: 1502233 - DNA, 15 bp, Homo sapiens
gcagacaaaaaagaa

SEQ ID NO: 1502234 - DNA, 15 bp, Homo sapiens
agcagacaaaaaaga

SEQ ID NO: 1502235 - DNA, 15 bp, Homo sapiens
tagcagacaaaaaag

SEQ ID NO: 1502236 - DNA, 15 bp, Homo sapiens
ctagcagacaaaaaa

SEQ ID NO: 1502237 - DNA, 15 bp, Homo sapiens
tctagcagacaaaaa

SEQ ID NO: 1502238 - DNA, 15 bp, Homo sapiens
atctagcagacaaaa

SEQ ID NO: 1502239 - DNA, 15 bp, Homo sapiens
gatctagcagacaaa

SEQ ID NO: 1502240 - DNA, 15 bp, Homo sapiens
agatctagcagacaa

SEQ ID NO: 1502241 - DNA, 15 bp, Homo sapiens
aagatctagcagaca

SEQ ID NO: 1502242 - DNA, 15 bp, Homo sapiens
taagatctagcagac

SEQ ID NO: 1502243 - DNA, 15 bp, Homo sapiens
gtaagatctagcaga

SEQ ID NO: 1502244 - DNA, 15 bp, Homo sapiens
agtaagatctagcag

SEQ ID NO: 1502245 - DNA, 15 bp, Homo sapiens
tagtaagatctagca

SEQ ID NO: 1502246 - DNA, 15 bp, Homo sapiens
gtagtaagatctagc

SEQ ID NO: 1502247 - DNA, 15 bp, Homo sapiens
agtagtaagatctag

SEQ ID NO: 1502248 - DNA, 15 bp, Homo sapiens
cagtagtaagatcta

SEQ ID NO: 1502249 - DNA, 15 bp, Homo sapiens
tcagtagtaagatct

SEQ ID NO: 1502250 - DNA, 15 bp, Homo sapiens
ctcagtagtaagatc

SEQ ID NO: 1502251 - DNA, 15 bp, Homo sapiens
tctcagtagtaagat

SEQ ID NO: 1502252 - DNA, 15 bp, Homo sapiens
ttctcagtagtaaga

SEQ ID NO: 1502253 - DNA, 15 bp, Homo sapiens
tttctcagtagtaag

SEQ ID NO: 1502254 - DNA, 15 bp, Homo sapiens
ctttctcagtagtaa

SEQ ID NO: 1502255 - DNA, 15 bp, Homo sapiens
cctttctcagtagta

SEQ ID NO: 1502256 - DNA, 15 bp, Homo sapiens
acctttctcagtagt

SEQ ID NO: 1502257 - DNA, 15 bp, Homo sapiens
tacctttctcagtag

SEQ ID NO: 1502258 - DNA, 15 bp, Homo sapiens
ttacctttctcagta

SEQ ID NO: 1502259 - DNA, 15 bp, Homo sapiens
cttacctttctcagt

SEQ ID NO: 1502260 - DNA, 15 bp, Homo sapiens
acttacctttctcag

SEQ ID NO: 1502261 - DNA, 15 bp, Homo sapiens
aacttacctttctca

SEQ ID NO: 1502262 - DNA, 15 bp, Homo sapiens
taacttacctttctc

SEQ ID NO: 1502263 - DNA, 15 bp, Homo sapiens
ctaacttacctttct

SEQ ID NO: 1502264 - DNA, 15 bp, Homo sapiens
cctaacttacctttc

SEQ ID NO: 1502265 - DNA, 15 bp, Homo sapiens
tcctaacttaccttt

SEQ ID NO: 1502266 - DNA, 15 bp, Homo sapiens
ttcctaacttacctt

SEQ ID NO: 1502267 - DNA, 15 bp, Homo sapiens
tttcctaacttacct

SEQ ID NO: 1502268 - DNA, 15 bp, Homo sapiens
atttcctaacttacc

SEQ ID NO: 1502269 - DNA, 15 bp, Homo sapiens
gatttcctaacttac

SEQ ID NO: 1502270 - DNA, 15 bp, Homo sapiens
agatttcctaactta

SEQ ID NO: 1502271 - DNA, 15 bp, Homo sapiens
aagatttcctaactt

SEQ ID NO: 1502272 - DNA, 15 bp, Homo sapiens
aaagatttcctaact

SEQ ID NO: 1502273 - DNA, 15 bp, Homo sapiens
gaaagatttcctaac

SEQ ID NO: 1502274 - DNA, 15 bp, Homo sapiens
tgaaagatttcctaa

SEQ ID NO: 1502275 - DNA, 15 bp, Homo sapiens
gtgaaagatttccta

SEQ ID NO: 1502276 - DNA, 15 bp, Homo sapiens
agtgaaagatttcct

SEQ ID NO: 1502277 - DNA, 15 bp, Homo sapiens
cagtgaaagatttcc

SEQ ID NO: 1502278 - DNA, 15 bp, Homo sapiens
tcagtgaaagatttc

SEQ ID NO: 1502279 - DNA, 15 bp, Homo sapiens
ttcagtgaaagattt

SEQ ID NO: 1502280 - DNA, 15 bp, Homo sapiens
attcagtgaaagatt

SEQ ID NO: 1502281 - DNA, 15 bp, Homo sapiens
aattcagtgaaagat

SEQ ID NO: 1502282 - DNA, 15 bp, Homo sapiens
taattcagtgaaaga

SEQ ID NO: 1502283 - DNA, 15 bp, Homo sapiens
ctaattcagtgaaag

SEQ ID NO: 1502284 - DNA, 15 bp, Homo sapiens
actaattcagtgaaa

SEQ ID NO: 1502285 - DNA, 15 bp, Homo sapiens
tactaattcagtgaa

SEQ ID NO: 1502286 - DNA, 15 bp, Homo sapiens
atactaattcagtga

SEQ ID NO: 1502287 - DNA, 15 bp, Homo sapiens
catactaattcagtg

SEQ ID NO: 1502288 - DNA, 15 bp, Homo sapiens
acatactaattcagt

SEQ ID NO: 1502289 - DNA, 15 bp, Homo sapiens
aacatactaattcag

SEQ ID NO: 1502290 - DNA, 15 bp, Homo sapiens
aaacatactaattca

SEQ ID NO: 1502291 - DNA, 15 bp, Homo sapiens
taaacatactaattc

SEQ ID NO: 1502292 - DNA, 15 bp, Homo sapiens
ataaacatactaatt

SEQ ID NO: 1502293 - DNA, 15 bp, Homo sapiens
cataaacatactaat

SEQ ID NO: 1502294 - DNA, 15 bp, Homo sapiens
gcataaacatactaa

SEQ ID NO: 1502295 - DNA, 15 bp, Homo sapiens
agcataaacatacta

SEQ ID NO: 1502296 - DNA, 15 bp, Homo sapiens
aagcataaacatact

SEQ ID NO: 1502297 - DNA, 15 bp, Homo sapiens
aaagcataaacatac

SEQ ID NO: 1502298 - DNA, 15 bp, Homo sapiens
aaaagcataaacata

SEQ ID NO: 1502299 - DNA, 15 bp, Homo sapiens
aaaaagcataaacat

SEQ ID NO: 1502300 - DNA, 15 bp, Homo sapiens
aaaaaagcataaaca

SEQ ID NO: 1502301 - DNA, 15 bp, Homo sapiens
gaaaaaagcataaac

SEQ ID NO: 1502302 - DNA, 15 bp, Homo sapiens
agaaaaaagcataaa

SEQ ID NO: 1502303 - DNA, 15 bp, Homo sapiens
aagaaaaaagcataa

SEQ ID NO: 1502304 - DNA, 15 bp, Homo sapiens
caagaaaaaagcata

SEQ ID NO: 1502305 - DNA, 15 bp, Homo sapiens
gcaagaaaaaagcat

SEQ ID NO: 1502306 - DNA, 15 bp, Homo sapiens
tgcaagaaaaaagca

SEQ ID NO: 1502307 - DNA, 15 bp, Homo sapiens
ctgcaagaaaaaagc

SEQ ID NO: 1502308 - DNA, 15 bp, Homo sapiens
tctgcaagaaaaaag

SEQ ID NO: 1502309 - DNA, 15 bp, Homo sapiens
atctgcaagaaaaaa

SEQ ID NO: 1502310 - DNA, 15 bp, Homo sapiens
catctgcaagaaaaa

SEQ ID NO: 1502311 - DNA, 15 bp, Homo sapiens
acatctgcaagaaaa

SEQ ID NO: 1502312 - DNA, 15 bp, Homo sapiens
cacatctgcaagaaa

SEQ ID NO: 1502313 - DNA, 15 bp, Homo sapiens
acacatctgcaagaa

SEQ ID NO: 1502314 - DNA, 15 bp, Homo sapiens
gacacatctgcaaga

SEQ ID NO: 1502315 - DNA, 15 bp, Homo sapiens
tgacacatctgcaag

SEQ ID NO: 1502316 - DNA, 15 bp, Homo sapiens
ctgacacatctgcaa

SEQ ID NO: 1502317 - DNA, 15 bp, Homo sapiens
actgacacatctgca

SEQ ID NO: 1502318 - DNA, 15 bp, Homo sapiens
aactgacacatctgc

SEQ ID NO: 1502319 - DNA, 15 bp, Homo sapiens
aaactgacacatctg

SEQ ID NO: 1502320 - DNA, 15 bp, Homo sapiens
aaaactgacacatct

SEQ ID NO: 1502321 - DNA, 15 bp, Homo sapiens
caaaactgacacatc

SEQ ID NO: 1502322 - DNA, 15 bp, Homo sapiens
acaaaactgacacat

SEQ ID NO: 1502323 - DNA, 15 bp, Homo sapiens
cacaaaactgacaca

SEQ ID NO: 1502324 - DNA, 15 bp, Homo sapiens
acacaaaactgacac

SEQ ID NO: 1502325 - DNA, 15 bp, Homo sapiens
cacacaaaactgaca

SEQ ID NO: 1502326 - DNA, 15 bp, Homo sapiens
acacacaaaactgac

SEQ ID NO: 1502327 - DNA, 15 bp, Homo sapiens
cacacacaaaactga

SEQ ID NO: 1502328 - DNA, 15 bp, Homo sapiens
acacacacaaaactg

SEQ ID NO: 1502329 - DNA, 15 bp, Homo sapiens
cacacacacaaaact

SEQ ID NO: 1502330 - DNA, 15 bp, Homo sapiens
acacacacacaaaac

SEQ ID NO: 1502331 - DNA, 15 bp, Homo sapiens
aacacacacacaaaa

SEQ ID NO: 1502332 - DNA, 15 bp, Homo sapiens
taacacacacacaaa

SEQ ID NO: 1502333 - DNA, 15 bp, Homo sapiens
ataacacacacacaa

SEQ ID NO: 1502334 - DNA, 15 bp, Homo sapiens
aataacacacacaca

SEQ ID NO: 1502335 - DNA, 15 bp, Homo sapiens
taataacacacacac

SEQ ID NO: 1502336 - DNA, 15 bp, Homo sapiens
ctaataacacacaca

SEQ ID NO: 1502337 - DNA, 15 bp, Homo sapiens
cctaataacacacac

SEQ ID NO: 1502338 - DNA, 15 bp, Homo sapiens
acctaataacacaca

SEQ ID NO: 1502339 - DNA, 15 bp, Homo sapiens
cacctaataacacac

SEQ ID NO: 1502340 - DNA, 15 bp, Homo sapiens
gcacctaataacaca

SEQ ID NO: 1502341 - DNA, 15 bp, Homo sapiens
tgcacctaataacac

SEQ ID NO: 1502342 - DNA, 15 bp, Homo sapiens
atgcacctaataaca

SEQ ID NO: 1502343 - DNA, 15 bp, Homo sapiens
tatgcacctaataac

SEQ ID NO: 1502344 - DNA, 15 bp, Homo sapiens
ctatgcacctaataa

SEQ ID NO: 1502345 - DNA, 15 bp, Homo sapiens
tctatgcacctaata

SEQ ID NO: 1502346 - DNA, 15 bp, Homo sapiens
ctctatgcacctaat

SEQ ID NO: 1502347 - DNA, 15 bp, Homo sapiens
cctctatgcacctaa

SEQ ID NO: 1502348 - DNA, 15 bp, Homo sapiens
gcctctatgcaccta

SEQ ID NO: 1502349 - DNA, 15 bp, Homo sapiens
agcctctatgcacct

SEQ ID NO: 1502350 - DNA, 15 bp, Homo sapiens
aagcctctatgcacc

SEQ ID NO: 1502351 - DNA, 15 bp, Homo sapiens
taagcctctatgcac

SEQ ID NO: 1502352 - DNA, 15 bp, Homo sapiens
gtaagcctctatgca

SEQ ID NO: 1502353 - DNA, 15 bp, Homo sapiens
tgtaagcctctatgc

SEQ ID NO: 1502354 - DNA, 15 bp, Homo sapiens
ttgtaagcctctatg

SEQ ID NO: 1502355 - DNA, 15 bp, Homo sapiens
attgtaagcctctat

SEQ ID NO: 1502356 - DNA, 15 bp, Homo sapiens
tattgtaagcctcta

SEQ ID NO: 1502357 - DNA, 15 bp, Homo sapiens
atattgtaagcctct

SEQ ID NO: 1502358 - DNA, 15 bp, Homo sapiens
gatattgtaagcctc

SEQ ID NO: 1502359 - DNA, 15 bp, Homo sapiens
agatattgtaagcct

SEQ ID NO: 1502360 - DNA, 15 bp, Homo sapiens
aagatattgtaagcc

SEQ ID NO: 1502361 - DNA, 15 bp, Homo sapiens
taagatattgtaagc

SEQ ID NO: 1502362 - DNA, 15 bp, Homo sapiens
gtaagatattgtaag

SEQ ID NO: 1502363 - DNA, 15 bp, Homo sapiens
tgtaagatattgtaa

SEQ ID NO: 1502364 - DNA, 15 bp, Homo sapiens
ctgtaagatattgta

SEQ ID NO: 1502365 - DNA, 15 bp, Homo sapiens
actgtaagatattgt

SEQ ID NO: 1502366 - DNA, 15 bp, Homo sapiens
aactgtaagatattg

SEQ ID NO: 1502367 - DNA, 15 bp, Homo sapiens
caactgtaagatatt

SEQ ID NO: 1502368 - DNA, 15 bp, Homo sapiens
tcaactgtaagatat

SEQ ID NO: 1502369 - DNA, 15 bp, Homo sapiens
atcaactgtaagata

SEQ ID NO: 1502370 - DNA, 15 bp, Homo sapiens
aatcaactgtaagat

SEQ ID NO: 1502371 - DNA, 15 bp, Homo sapiens
aaatcaactgtaaga

SEQ ID NO: 1502372 - DNA, 15 bp, Homo sapiens
caaatcaactgtaag

SEQ ID NO: 1502373 - DNA, 15 bp, Homo sapiens
tcaaatcaactgtaa

SEQ ID NO: 1502374 - DNA, 15 bp, Homo sapiens
ctcaaatcaactgta

SEQ ID NO: 1502375 - DNA, 15 bp, Homo sapiens
actcaaatcaactgt

SEQ ID NO: 1502376 - DNA, 15 bp, Homo sapiens
gactcaaatcaactg

SEQ ID NO: 1502377 - DNA, 15 bp, Homo sapiens
ggactcaaatcaact

SEQ ID NO: 1502378 - DNA, 15 bp, Homo sapiens
aggactcaaatcaac

SEQ ID NO: 1502379 - DNA, 15 bp, Homo sapiens
caggactcaaatcaa

SEQ ID NO: 1502380 - DNA, 15 bp, Homo sapiens
acaggactcaaatca

SEQ ID NO: 1502381 - DNA, 15 bp, Homo sapiens
tacaggactcaaatc

SEQ ID NO: 1502382 - DNA, 15 bp, Homo sapiens
atacaggactcaaat

SEQ ID NO: 1502383 - DNA, 15 bp, Homo sapiens
gatacaggactcaaa

SEQ ID NO: 1502384 - DNA, 15 bp, Homo sapiens
tgatacaggactcaa

SEQ ID NO: 1502385 - DNA, 15 bp, Homo sapiens
atgatacaggactca

SEQ ID NO: 1502386 - DNA, 15 bp, Homo sapiens
gatgatacaggactc

SEQ ID NO: 1502387 - DNA, 15 bp, Homo sapiens
tgatgatacaggact

SEQ ID NO: 1502388 - DNA, 15 bp, Homo sapiens
atgatgatacaggac

SEQ ID NO: 1502389 - DNA, 15 bp, Homo sapiens
catgatgatacagga

SEQ ID NO: 1502390 - DNA, 15 bp, Homo sapiens
acatgatgatacagg

SEQ ID NO: 1502391 - DNA, 15 bp, Homo sapiens
tacatgatgatacag

SEQ ID NO: 1502392 - DNA, 15 bp, Homo sapiens
ctacatgatgataca

SEQ ID NO: 1502393 - DNA, 15 bp, Homo sapiens
actacatgatgatac

SEQ ID NO: 1502394 - DNA, 15 bp, Homo sapiens
cactacatgatgata

SEQ ID NO: 1502395 - DNA, 15 bp, Homo sapiens
gcactacatgatgat

SEQ ID NO: 1502396 - DNA, 15 bp, Homo sapiens
ggcactacatgatga

SEQ ID NO: 1502397 - DNA, 15 bp, Homo sapiens
gggcactacatgatg

SEQ ID NO: 1502398 - DNA, 15 bp, Homo sapiens
ggggcactacatgat

SEQ ID NO: 1502399 - DNA, 15 bp, Homo sapiens
aggggcactacatga

SEQ ID NO: 1502400 - DNA, 15 bp, Homo sapiens
gaggggcactacatg

SEQ ID NO: 1502401 - DNA, 15 bp, Homo sapiens
agaggggcactacat

SEQ ID NO: 1502402 - DNA, 15 bp, Homo sapiens
aagaggggcactaca

SEQ ID NO: 1502403 - DNA, 15 bp, Homo sapiens
caagaggggcactac

SEQ ID NO: 1502404 - DNA, 15 bp, Homo sapiens
tcaagaggggcacta

SEQ ID NO: 1502405 - DNA, 15 bp, Homo sapiens
atcaagaggggcact

SEQ ID NO: 1502406 - DNA, 15 bp, Homo sapiens
gatcaagaggggcac

SEQ ID NO: 1502407 - DNA, 15 bp, Homo sapiens
agatcaagaggggca

SEQ ID NO: 1502408 - DNA, 15 bp, Homo sapiens
gagatcaagaggggc

SEQ ID NO: 1502409 - DNA, 15 bp, Homo sapiens
agagatcaagagggg

SEQ ID NO: 1502410 - DNA, 15 bp, Homo sapiens
tagagatcaagaggg

SEQ ID NO: 1502411 - DNA, 15 bp, Homo sapiens
ctagagatcaagagg

SEQ ID NO: 1502412 - DNA, 15 bp, Homo sapiens
actagagatcaagag

SEQ ID NO: 1502413 - DNA, 15 bp, Homo sapiens
gactagagatcaaga

SEQ ID NO: 1502414 - DNA, 15 bp, Homo sapiens
ggactagagatcaag

SEQ ID NO: 1502415 - DNA, 15 bp, Homo sapiens
aggactagagatcaa

SEQ ID NO: 1502416 - DNA, 15 bp, Homo sapiens
aaggactagagatca

SEQ ID NO: 1502417 - DNA, 15 bp, Homo sapiens
aaaggactagagatc

SEQ ID NO: 1502418 - DNA, 15 bp, Homo sapiens
aaaaggactagagat

SEQ ID NO: 1502419 - DNA, 15 bp, Homo sapiens
aaaaaggactagaga

SEQ ID NO: 1502420 - DNA, 15 bp, Homo sapiens
taaaaaggactagag

SEQ ID NO: 1502421 - DNA, 15 bp, Homo sapiens
ataaaaaggactaga

SEQ ID NO: 1502422 - DNA, 15 bp, Homo sapiens
gataaaaaggactag

SEQ ID NO: 1502423 - DNA, 15 bp, Homo sapiens
agataaaaaggacta

SEQ ID NO: 1502424 - DNA, 15 bp, Homo sapiens
aagataaaaaggact

SEQ ID NO: 1502425 - DNA, 15 bp, Homo sapiens
taagataaaaaggac

SEQ ID NO: 1502426 - DNA, 15 bp, Homo sapiens
ctaagataaaaagga

SEQ ID NO: 1502427 - DNA, 15 bp, Homo sapiens
actaagataaaaagg

SEQ ID NO: 1502428 - DNA, 15 bp, Homo sapiens
gactaagataaaaag

SEQ ID NO: 1502429 - DNA, 15 bp, Homo sapiens
ggactaagataaaaa

SEQ ID NO: 1502430 - DNA, 15 bp, Homo sapiens
tggactaagataaaa

SEQ ID NO: 1502431 - DNA, 15 bp, Homo sapiens
gtggactaagataaa

SEQ ID NO: 1502432 - DNA, 15 bp, Homo sapiens
agtggactaagataa

SEQ ID NO: 1502433 - DNA, 15 bp, Homo sapiens
gagtggactaagata

SEQ ID NO: 1502434 - DNA, 15 bp, Homo sapiens
ggagtggactaagat

SEQ ID NO: 1502435 - DNA, 15 bp, Homo sapiens
tggagtggactaaga

SEQ ID NO: 1502436 - DNA, 15 bp, Homo sapiens
ctggagtggactaag

SEQ ID NO: 1502437 - DNA, 15 bp, Homo sapiens
actggagtggactaa

SEQ ID NO: 1502438 - DNA, 15 bp, Homo sapiens
aactggagtggacta

SEQ ID NO: 1502439 - DNA, 15 bp, Homo sapiens
aaactggagtggact

SEQ ID NO: 1502440 - DNA, 15 bp, Homo sapiens
aaaactggagtggac

SEQ ID NO: 1502441 - DNA, 15 bp, Homo sapiens
gaaaactggagtgga

SEQ ID NO: 1502442 - DNA, 15 bp, Homo sapiens
agaaaactggagtgg

SEQ ID NO: 1502443 - DNA, 15 bp, Homo sapiens
gagaaaactggagtg

SEQ ID NO: 1502444 - DNA, 15 bp, Homo sapiens
agagaaaactggagt

SEQ ID NO: 1502445 - DNA, 15 bp, Homo sapiens
aagagaaaactggag

SEQ ID NO: 1502446 - DNA, 15 bp, Homo sapiens
caagagaaaactgga

SEQ ID NO: 1502447 - DNA, 15 bp, Homo sapiens
acaagagaaaactgg

SEQ ID NO: 1502448 - DNA, 15 bp, Homo sapiens
aacaagagaaaactg

SEQ ID NO: 1502449 - DNA, 15 bp, Homo sapiens
aaacaagagaaaact

SEQ ID NO: 1502450 - DNA, 15 bp, Homo sapiens
gaaacaagagaaaac

SEQ ID NO: 1502451 - DNA, 15 bp, Homo sapiens
agaaacaagagaaaa

SEQ ID NO: 1502452 - DNA, 15 bp, Homo sapiens
tagaaacaagagaaa

SEQ ID NO: 1502453 - DNA, 15 bp, Homo sapiens
atagaaacaagagaa

SEQ ID NO: 1502454 - DNA, 15 bp, Homo sapiens
aatagaaacaagaga

SEQ ID NO: 1502455 - DNA, 15 bp, Homo sapiens
aaatagaaacaagag

SEQ ID NO: 1502456 - DNA, 15 bp, Homo sapiens
caaatagaaacaaga

SEQ ID NO: 1502457 - DNA, 15 bp, Homo sapiens
gcaaatagaaacaag

SEQ ID NO: 1502458 - DNA, 15 bp, Homo sapiens
ggcaaatagaaacaa

SEQ ID NO: 1502459 - DNA, 15 bp, Homo sapiens
aggcaaatagaaaca

SEQ ID NO: 1502460 - DNA, 15 bp, Homo sapiens
caggcaaatagaaac

SEQ ID NO: 1502461 - DNA, 15 bp, Homo sapiens
tcaggcaaatagaaa

SEQ ID NO: 1502462 - DNA, 15 bp, Homo sapiens
atcaggcaaatagaa

SEQ ID NO: 1502463 - DNA, 15 bp, Homo sapiens
tatcaggcaaataga

SEQ ID NO: 1502464 - DNA, 15 bp, Homo sapiens
ctatcaggcaaatag

SEQ ID NO: 1502465 - DNA, 15 bp, Homo sapiens
tctatcaggcaaata

SEQ ID NO: 1502466 - DNA, 15 bp, Homo sapiens
atctatcaggcaaat

SEQ ID NO: 1502467 - DNA, 15 bp, Homo sapiens
gatctatcaggcaaa

SEQ ID NO: 1502468 - DNA, 15 bp, Homo sapiens
agatctatcaggcaa

SEQ ID NO: 1502469 - DNA, 15 bp, Homo sapiens
aagatctatcaggca

SEQ ID NO: 1502470 - DNA, 15 bp, Homo sapiens
aaagatctatcaggc

SEQ ID NO: 1502471 - DNA, 15 bp, Homo sapiens
aaaagatctatcagg

SEQ ID NO: 1502472 - DNA, 15 bp, Homo sapiens
aaaaagatctatcag

SEQ ID NO: 1502473 - DNA, 15 bp, Homo sapiens
gaaaaagatctatca

SEQ ID NO: 1502474 - DNA, 15 bp, Homo sapiens
ggaaaaagatctatc

SEQ ID NO: 1502475 - DNA, 15 bp, Homo sapiens
tggaaaaagatctat

SEQ ID NO: 1502476 - DNA, 15 bp, Homo sapiens
atggaaaaagatcta

SEQ ID NO: 1502477 - DNA, 15 bp, Homo sapiens
aatggaaaaagatct

SEQ ID NO: 1502478 - DNA, 15 bp, Homo sapiens
aaatggaaaaagatc

SEQ ID NO: 1502479 - DNA, 15 bp, Homo sapiens
gaaatggaaaaagat

SEQ ID NO: 1502480 - DNA, 15 bp, Homo sapiens
agaaatggaaaaaga

SEQ ID NO: 1502481 - DNA, 15 bp, Homo sapiens
aagaaatggaaaaag

SEQ ID NO: 1502482 - DNA, 15 bp, Homo sapiens
taagaaatggaaaaa

SEQ ID NO: 1502483 - DNA, 15 bp, Homo sapiens
ttaagaaatggaaaa

SEQ ID NO: 1502484 - DNA, 15 bp, Homo sapiens
gttaagaaatggaaa

SEQ ID NO: 1502485 - DNA, 15 bp, Homo sapiens
agttaagaaatggaa

SEQ ID NO: 1502486 - DNA, 15 bp, Homo sapiens
tagttaagaaatgga

SEQ ID NO: 1502487 - DNA, 15 bp, Homo sapiens
atagttaagaaatgg

SEQ ID NO: 1502488 - DNA, 15 bp, Homo sapiens
gatagttaagaaatg

SEQ ID NO: 1502489 - DNA, 15 bp, Homo sapiens
tgatagttaagaaat

SEQ ID NO: 1502490 - DNA, 15 bp, Homo sapiens
ttgatagttaagaaa

SEQ ID NO: 1502491 - DNA, 15 bp, Homo sapiens
attgatagttaagaa

SEQ ID NO: 1502492 - DNA, 15 bp, Homo sapiens
tattgatagttaaga

SEQ ID NO: 1502493 - DNA, 15 bp, Homo sapiens
atattgatagttaag

SEQ ID NO: 1502494 - DNA, 15 bp, Homo sapiens
aatattgatagttaa

SEQ ID NO: 1502495 - DNA, 15 bp, Homo sapiens
aaatattgatagtta

SEQ ID NO: 1502496 - DNA, 15 bp, Homo sapiens
gaaatattgatagtt

SEQ ID NO: 1502497 - DNA, 15 bp, Homo sapiens
agaaatattgatagt

SEQ ID NO: 1502498 - DNA, 15 bp, Homo sapiens
cagaaatattgatag

SEQ ID NO: 1502499 - DNA, 15 bp, Homo sapiens
acagaaatattgata

SEQ ID NO: 1502500 - DNA, 15 bp, Homo sapiens
cacagaaatattgat

SEQ ID NO: 1502501 - DNA, 15 bp, Homo sapiens
gcacagaaatattga

SEQ ID NO: 1502502 - DNA, 15 bp, Homo sapiens
ggcacagaaatattg

SEQ ID NO: 1502503 - DNA, 15 bp, Homo sapiens
aggcacagaaatatt

SEQ ID NO: 1502504 - DNA, 15 bp, Homo sapiens
caggcacagaaatat

SEQ ID NO: 1502505 - DNA, 15 bp, Homo sapiens
acaggcacagaaata

SEQ ID NO: 1502506 - DNA, 15 bp, Homo sapiens
tacaggcacagaaat

SEQ ID NO: 1502507 - DNA, 15 bp, Homo sapiens
atacaggcacagaaa

SEQ ID NO: 1502508 - DNA, 15 bp, Homo sapiens
catacaggcacagaa

SEQ ID NO: 1502509 - DNA, 15 bp, Homo sapiens
gcatacaggcacaga

SEQ ID NO: 1502510 - DNA, 15 bp, Homo sapiens
agcatacaggcacag

SEQ ID NO: 1502511 - DNA, 15 bp, Homo sapiens
aagcatacaggcaca

SEQ ID NO: 1502512 - DNA, 15 bp, Homo sapiens
aaagcatacaggcac

SEQ ID NO: 1502513 - DNA, 15 bp, Homo sapiens
taaagcatacaggca

SEQ ID NO: 1502514 - DNA, 15 bp, Homo sapiens
ataaagcatacaggc

SEQ ID NO: 1502515 - DNA, 15 bp, Homo sapiens
cataaagcatacagg

SEQ ID NO: 1502516 - DNA, 15 bp, Homo sapiens
acataaagcatacag

SEQ ID NO: 1502517 - DNA, 15 bp, Homo sapiens
aacataaagcataca

SEQ ID NO: 1502518 - DNA, 15 bp, Homo sapiens
aaacataaagcatac

SEQ ID NO: 1502519 - DNA, 15 bp, Homo sapiens
caaacataaagcata

SEQ ID NO: 1502520 - DNA, 15 bp, Homo sapiens
acaaacataaagcat

SEQ ID NO: 1502521 - DNA, 15 bp, Homo sapiens
gacaaacataaagca

SEQ ID NO: 1502522 - DNA, 15 bp, Homo sapiens
agacaaacataaagc

SEQ ID NO: 1502523 - DNA, 15 bp, Homo sapiens
gagacaaacataaag

SEQ ID NO: 1502524 - DNA, 15 bp, Homo sapiens
agagacaaacataaa

SEQ ID NO: 1502525 - DNA, 15 bp, Homo sapiens
aagagacaaacataa

SEQ ID NO: 1502526 - DNA, 15 bp, Homo sapiens
taagagacaaacata

SEQ ID NO: 1502527 - DNA, 15 bp, Homo sapiens
ataagagacaaacat

SEQ ID NO: 1502528 - DNA, 15 bp, Homo sapiens
tataagagacaaaca

SEQ ID NO: 1502529 - DNA, 15 bp, Homo sapiens
ttataagagacaaac

SEQ ID NO: 1502530 - DNA, 15 bp, Homo sapiens
gtttataagagacaa

SEQ ID NO: 1502531 - DNA, 15 bp, Homo sapiens
tgtttataagagaca

SEQ ID NO: 1502532 - DNA, 15 bp, Homo sapiens
ctgtttataagagac

SEQ ID NO: 1502533 - DNA, 15 bp, Homo sapiens
actgtttataagaga

SEQ ID NO: 1502534 - DNA, 15 bp, Homo sapiens
aactgtttataagag

SEQ ID NO: 1502535 - DNA, 15 bp, Homo sapiens
gaactgtttataaga

SEQ ID NO: 1502536 - DNA, 15 bp, Homo sapiens
tgaactgtttataag

SEQ ID NO: 1502537 - DNA, 15 bp, Homo sapiens
atgaactgtttataa

SEQ ID NO: 1502538 - DNA, 15 bp, Homo sapiens
catgaactgtttata

SEQ ID NO: 1502539 - DNA, 15 bp, Homo sapiens
ccatgaactgtttat

SEQ ID NO: 1502540 - DNA, 15 bp, Homo sapiens
cccatgaactgttta

SEQ ID NO: 1502541 - DNA, 15 bp, Homo sapiens
tcccatgaactgttt

SEQ ID NO: 1502542 - DNA, 15 bp, Homo sapiens
ttcccatgaactgtt

SEQ ID NO: 1502543 - DNA, 15 bp, Homo sapiens
tttcccatgaactgt

SEQ ID NO: 1502544 - DNA, 15 bp, Homo sapiens
gtttcccatgaactg

SEQ ID NO: 1502545 - DNA, 15 bp, Homo sapiens
ggtttcccatgaact

SEQ ID NO: 1502546 - DNA, 15 bp, Homo sapiens
tggtttcccatgaac

SEQ ID NO: 1502547 - DNA, 15 bp, Homo sapiens
ctggtttcccatgaa

SEQ ID NO: 1502548 - DNA, 15 bp, Homo sapiens
actggtttcccatga

SEQ ID NO: 1502549 - DNA, 15 bp, Homo sapiens
gactggtttcccatg

SEQ ID NO: 1502550 - DNA, 15 bp, Homo sapiens
agactggtttcccat

SEQ ID NO: 1502551 - DNA, 15 bp, Homo sapiens
cagactggtttccca

SEQ ID NO: 1502552 - DNA, 15 bp, Homo sapiens
tcagactggtttccc

SEQ ID NO: 1502553 - DNA, 15 bp, Homo sapiens
atcagactggtttcc

SEQ ID NO: 1502554 - DNA, 15 bp, Homo sapiens
catcagactggtttc

SEQ ID NO: 1502555 - DNA, 15 bp, Homo sapiens
ccatcagactggttt

SEQ ID NO: 1502556 - DNA, 15 bp, Homo sapiens
accatcagactggtt

SEQ ID NO: 1502557 - DNA, 15 bp, Homo sapiens
aaccatcagactggt

SEQ ID NO: 1502558 - DNA, 15 bp, Homo sapiens
aaaccatcagactgg

SEQ ID NO: 1502559 - DNA, 15 bp, Homo sapiens
aaaaccatcagactg

SEQ ID NO: 1502560 - DNA, 15 bp, Homo sapiens
aaaaaccatcagact

SEQ ID NO: 1502561 - DNA, 15 bp, Homo sapiens
aaaaaaccatcagac

SEQ ID NO: 1502562 - DNA, 15 bp, Homo sapiens
aaaaaaaccatcaga

SEQ ID NO: 1502563 - DNA, 15 bp, Homo sapiens
aaaaaaaaccatcag

SEQ ID NO: 1502564 - DNA, 15 bp, Homo sapiens
aaaaaaaaaccatca

SEQ ID NO: 1502565 - DNA, 15 bp, Homo sapiens
gaaaaaaaaaccatc

SEQ ID NO: 1502566 - DNA, 15 bp, Homo sapiens
agaaaaaaaaaccat

SEQ ID NO: 1502567 - DNA, 15 bp, Homo sapiens
aagaaaaaaaaacca

SEQ ID NO: 1502568 - DNA, 15 bp, Homo sapiens
gaagaaaaaaaaacc

SEQ ID NO: 1502569 - DNA, 15 bp, Homo sapiens
agaagaaaaaaaaac

SEQ ID NO: 1502570 - DNA, 15 bp, Homo sapiens
gcagaagaaaaaaaa

SEQ ID NO: 1502571 - DNA, 15 bp, Homo sapiens
ggcagaagaaaaaaa

SEQ ID NO: 1502572 - DNA, 15 bp, Homo sapiens
aggcagaagaaaaaa

SEQ ID NO: 1502573 - DNA, 15 bp, Homo sapiens
caggcagaagaaaaa

SEQ ID NO: 1502574 - DNA, 15 bp, Homo sapiens
ccaggcagaagaaaa

SEQ ID NO: 1502575 - DNA, 15 bp, Homo sapiens
tccaggcagaagaaa

SEQ ID NO: 1502576 - DNA, 15 bp, Homo sapiens
ctccaggcagaagaa

SEQ ID NO: 1502577 - DNA, 15 bp, Homo sapiens
tctccaggcagaaga

SEQ ID NO: 1502578 - DNA, 15 bp, Homo sapiens
ctctccaggcagaag

SEQ ID NO: 1502579 - DNA, 15 bp, Homo sapiens
actctccaggcagaa

SEQ ID NO: 1502580 - DNA, 15 bp, Homo sapiens
aactctccaggcaga

SEQ ID NO: 1502581 - DNA, 15 bp, Homo sapiens
aaactctccaggcag

SEQ ID NO: 1502582 - DNA, 15 bp, Homo sapiens
taaactctccaggca

SEQ ID NO: 1502583 - DNA, 15 bp, Homo sapiens
ctaaactctccaggc

SEQ ID NO: 1502584 - DNA, 15 bp, Homo sapiens
actaaactctccagg

SEQ ID NO: 1502585 - DNA, 15 bp, Homo sapiens
aactaaactctccag

SEQ ID NO: 1502586 - DNA, 15 bp, Homo sapiens
gaactaaactctcca

SEQ ID NO: 1502587 - DNA, 15 bp, Homo sapiens
tgaactaaactctcc

SEQ ID NO: 1502588 - DNA, 15 bp, Homo sapiens
atgaactaaactctc

SEQ ID NO: 1502589 - DNA, 15 bp, Homo sapiens
aatgaactaaactct

SEQ ID NO: 1502590 - DNA, 15 bp, Homo sapiens
aaatgaactaaactc

SEQ ID NO: 1502591 - DNA, 15 bp, Homo sapiens
taaatgaactaaact

SEQ ID NO: 1502592 - DNA, 15 bp, Homo sapiens
gtaaatgaactaaac

SEQ ID NO: 1502593 - DNA, 15 bp, Homo sapiens
tgtaaatgaactaaa

SEQ ID NO: 1502594 - DNA, 15 bp, Homo sapiens
atgtaaatgaactaa

SEQ ID NO: 1502595 - DNA, 15 bp, Homo sapiens
aatgtaaatgaacta

SEQ ID NO: 1502596 - DNA, 15 bp, Homo sapiens
gaatgtaaatgaact

SEQ ID NO: 1502597 - DNA, 15 bp, Homo sapiens
tgaatgtaaatgaac

SEQ ID NO: 1502598 - DNA, 15 bp, Homo sapiens
atgaatgtaaatgaa

SEQ ID NO: 1502599 - DNA, 15 bp, Homo sapiens
aatgaatgtaaatga

SEQ ID NO: 1502600 - DNA, 15 bp, Homo sapiens
caatgaatgtaaatg

SEQ ID NO: 1502601 - DNA, 15 bp, Homo sapiens
acaatgaatgtaaat

SEQ ID NO: 1502602 - DNA, 15 bp, Homo sapiens
cacaatgaatgtaaa

SEQ ID NO: 1502603 - DNA, 15 bp, Homo sapiens
tcacaatgaatgtaa

SEQ ID NO: 1502604 - DNA, 15 bp, Homo sapiens
atcacaatgaatgta

SEQ ID NO: 1502605 - DNA, 15 bp, Homo sapiens
catcacaatgaatgt

SEQ ID NO: 1502606 - DNA, 15 bp, Homo sapiens
tcatcacaatgaatg

SEQ ID NO: 1502607 - DNA, 15 bp, Homo sapiens
gtcatcacaatgaat

SEQ ID NO: 1502608 - DNA, 15 bp, Homo sapiens
agtcatcacaatgaa

SEQ ID NO: 1502609 - DNA, 15 bp, Homo sapiens
cagtcatcacaatga

SEQ ID NO: 1502610 - DNA, 15 bp, Homo sapiens
tcagtcatcacaatg

SEQ ID NO: 1502611 - DNA, 15 bp, Homo sapiens
gtcagtcatcacaat

SEQ ID NO: 1502612 - DNA, 15 bp, Homo sapiens
tgtcagtcatcacaa

SEQ ID NO: 1502613 - DNA, 15 bp, Homo sapiens
atgtcagtcatcaca

SEQ ID NO: 1502614 - DNA, 15 bp, Homo sapiens
gatgtcagtcatcac

SEQ ID NO: 1502615 - DNA, 15 bp, Homo sapiens
agatgtcagtcatca

SEQ ID NO: 1502616 - DNA, 15 bp, Homo sapiens
aagatgtcagtcatc

SEQ ID NO: 1502617 - DNA, 15 bp, Homo sapiens
aaagatgtcagtcat

SEQ ID NO: 1502618 - DNA, 15 bp, Homo sapiens
caaagatgtcagtca

SEQ ID NO: 1502619 - DNA, 15 bp, Homo sapiens
ccaaagatgtcagtc

SEQ ID NO: 1502620 - DNA, 15 bp, Homo sapiens
tccaaagatgtcagt

SEQ ID NO: 1502621 - DNA, 15 bp, Homo sapiens
atccaaagatgtcag

SEQ ID NO: 1502622 - DNA, 15 bp, Homo sapiens
aatccaaagatgtca

SEQ ID NO: 1502623 - DNA, 15 bp, Homo sapiens
gaatccaaagatgtc

SEQ ID NO: 1502624 - DNA, 15 bp, Homo sapiens
ggaatccaaagatgt

SEQ ID NO: 1502625 - DNA, 15 bp, Homo sapiens
aggaatccaaagatg

SEQ ID NO: 1502626 - DNA, 15 bp, Homo sapiens
aaggaatccaaagat

SEQ ID NO: 1502627 - DNA, 15 bp, Homo sapiens
aaaggaatccaaaga

SEQ ID NO: 1502628 - DNA, 15 bp, Homo sapiens
gaaaggaatccaaag

SEQ ID NO: 1502629 - DNA, 15 bp, Homo sapiens
agaaaggaatccaaa

SEQ ID NO: 1502630 - DNA, 15 bp, Homo sapiens
cagaaaggaatccaa

SEQ ID NO: 1502631 - DNA, 15 bp, Homo sapiens
gcagaaaggaatcca

SEQ ID NO: 1502632 - DNA, 15 bp, Homo sapiens
ggcagaaaggaatcc

SEQ ID NO: 1502633 - DNA, 15 bp, Homo sapiens
tggcagaaaggaatc

SEQ ID NO: 1502634 - DNA, 15 bp, Homo sapiens
atggcagaaaggaat

SEQ ID NO: 1502635 - DNA, 15 bp, Homo sapiens
aatggcagaaaggaa

SEQ ID NO: 1502636 - DNA, 15 bp, Homo sapiens
aaatggcagaaagga

SEQ ID NO: 1502637 - DNA, 15 bp, Homo sapiens
aaaatggcagaaagg

SEQ ID NO: 1502638 - DNA, 15 bp, Homo sapiens
gaaaatggcagaaag

SEQ ID NO: 1502639 - DNA, 15 bp, Homo sapiens
agaaaatggcagaaa

SEQ ID NO: 1502640 - DNA, 15 bp, Homo sapiens
aagaaaatggcagaa

SEQ ID NO: 1502641 - DNA, 15 bp, Homo sapiens
aaagaaaatggcaga

SEQ ID NO: 1502642 - DNA, 15 bp, Homo sapiens
aaaagaaaatggcag

SEQ ID NO: 1502643 - DNA, 15 bp, Homo sapiens
aaaaagaaaatggca

SEQ ID NO: 1502644 - DNA, 15 bp, Homo sapiens
taaaaagaaaatggc

SEQ ID NO: 1502645 - DNA, 15 bp, Homo sapiens
ttaaaaagaaaatgg

SEQ ID NO: 1502646 - DNA, 15 bp, Homo sapiens
tttaaaaagaaaatg

SEQ ID NO: 1502647 - DNA, 15 bp, Homo sapiens
ttttaaaaagaaaat

SEQ ID NO: 1502648 - DNA, 15 bp, Homo sapiens
taaattttaaaaaga

SEQ ID NO: 1502649 - DNA, 15 bp, Homo sapiens
ttaaattttaaaaag

SEQ ID NO: 1502650 - DNA, 15 bp, Homo sapiens
attaaattttaaaaa

SEQ ID NO: 1502651 - DNA, 15 bp, Homo sapiens
gattaaattttaaaa

SEQ ID NO: 1502652 - DNA, 15 bp, Homo sapiens
agattaaattttaaa

SEQ ID NO: 1502653 - DNA, 15 bp, Homo sapiens
tagattaaattttaa

SEQ ID NO: 1502654 - DNA, 15 bp, Homo sapiens
ttagattaaatttta

SEQ ID NO: 1502655 - DNA, 15 bp, Homo sapiens
attagattaaatttt

SEQ ID NO: 1502656 - DNA, 15 bp, Homo sapiens
aattagattaaattt

SEQ ID NO: 1502657 - DNA, 15 bp, Homo sapiens
taattagattaaatt

SEQ ID NO: 1502658 - DNA, 15 bp, Homo sapiens
ataattagattaaat

SEQ ID NO: 1502659 - DNA, 15 bp, Homo sapiens
aataattagattaaa

SEQ ID NO: 1502660 - DNA, 15 bp, Homo sapiens
taataattagattaa

SEQ ID NO: 1502661 - DNA, 15 bp, Homo sapiens
ataataattagatta

SEQ ID NO: 1502662 - DNA, 15 bp, Homo sapiens
aataataattagatt

SEQ ID NO: 1502663 - DNA, 15 bp, Homo sapiens
taataataattagat

SEQ ID NO: 1502664 - DNA, 15 bp, Homo sapiens
gtaataataattaga

SEQ ID NO: 1502665 - DNA, 15 bp, Homo sapiens
agtaataataattag

SEQ ID NO: 1502666 - DNA, 15 bp, Homo sapiens
aagtaataataatta

SEQ ID NO: 1502667 - DNA, 15 bp, Homo sapiens
aaagtaataataatt

SEQ ID NO: 1502668 - DNA, 15 bp, Homo sapiens
aaaagtaataataat

SEQ ID NO: 1502669 - DNA, 15 bp, Homo sapiens
aaaaagtaataataa

SEQ ID NO: 1502670 - DNA, 15 bp, Homo sapiens
aaaaaagtaataata

SEQ ID NO: 1502671 - DNA, 15 bp, Homo sapiens
caaaaaagtaataat

SEQ ID NO: 1502672 - DNA, 15 bp, Homo sapiens
tcaaaaaagtaataa

SEQ ID NO: 1502673 - DNA, 15 bp, Homo sapiens
ttcaaaaaagtaata

SEQ ID NO: 1502674 - DNA, 15 bp, Homo sapiens
tttcaaaaaagtaat

SEQ ID NO: 1502675 - DNA, 15 bp, Homo sapiens
gtttcaaaaaagtaa

SEQ ID NO: 1502676 - DNA, 15 bp, Homo sapiens
tgtttcaaaaaagta

SEQ ID NO: 1502677 - DNA, 15 bp, Homo sapiens
ctgtttcaaaaaagt

SEQ ID NO: 1502678 - DNA, 15 bp, Homo sapiens
cctgtttcaaaaaag

SEQ ID NO: 1502679 - DNA, 15 bp, Homo sapiens
ccctgtttcaaaaaa

SEQ ID NO: 1502680 - DNA, 15 bp, Homo sapiens
cccctgtttcaaaaa

SEQ ID NO: 1502681 - DNA, 15 bp, Homo sapiens
acccctgtttcaaaa

SEQ ID NO: 1502682 - DNA, 15 bp, Homo sapiens
gacccctgtttcaaa

SEQ ID NO: 1502683 - DNA, 15 bp, Homo sapiens
agacccctgtttcaa

SEQ ID NO: 1502684 - DNA, 15 bp, Homo sapiens
aagacccctgtttca

SEQ ID NO: 1502685 - DNA, 15 bp, Homo sapiens
aaagacccctgtttc

SEQ ID NO: 1502686 - DNA, 15 bp, Homo sapiens
gaaagacccctgttt

SEQ ID NO: 1502687 - DNA, 15 bp, Homo sapiens
agaaagacccctgtt

SEQ ID NO: 1502688 - DNA, 15 bp, Homo sapiens
gagaaagacccctgt

SEQ ID NO: 1502689 - DNA, 15 bp, Homo sapiens
agagaaagacccctg

SEQ ID NO: 1502690 - DNA, 15 bp, Homo sapiens
cagagaaagacccct

SEQ ID NO: 1502691 - DNA, 15 bp, Homo sapiens
acagagaaagacccc

SEQ ID NO: 1502692 - DNA, 15 bp, Homo sapiens
aacagagaaagaccc

SEQ ID NO: 1502693 - DNA, 15 bp, Homo sapiens
caacagagaaagacc

SEQ ID NO: 1502694 - DNA, 15 bp, Homo sapiens
gcaacagagaaagac

SEQ ID NO: 1502695 - DNA, 15 bp, Homo sapiens
ggcaacagagaaaga

SEQ ID NO: 1502696 - DNA, 15 bp, Homo sapiens
gggcaacagagaaag

SEQ ID NO: 1502697 - DNA, 15 bp, Homo sapiens
agggcaacagagaaa

SEQ ID NO: 1502698 - DNA, 15 bp, Homo sapiens
tagggcaacagagaa

SEQ ID NO: 1502699 - DNA, 15 bp, Homo sapiens
ttagggcaacagaga

SEQ ID NO: 1502700 - DNA, 15 bp, Homo sapiens
gttagggcaacagag

SEQ ID NO: 1502701 - DNA, 15 bp, Homo sapiens
agttagggcaacaga

SEQ ID NO: 1502702 - DNA, 15 bp, Homo sapiens
aagttagggcaacag

SEQ ID NO: 1502703 - DNA, 15 bp, Homo sapiens
caagttagggcaaca

SEQ ID NO: 1502704 - DNA, 15 bp, Homo sapiens
tcaagttagggcaac

SEQ ID NO: 1502705 - DNA, 15 bp, Homo sapiens
ctcaagttagggcaa

SEQ ID NO: 1502706 - DNA, 15 bp, Homo sapiens
actcaagttagggca

SEQ ID NO: 1502707 - DNA, 15 bp, Homo sapiens
gactcaagttagggc

SEQ ID NO: 1502708 - DNA, 15 bp, Homo sapiens
ggactcaagttaggg

SEQ ID NO: 1502709 - DNA, 15 bp, Homo sapiens
tggactcaagttagg

SEQ ID NO: 1502710 - DNA, 15 bp, Homo sapiens
ctggactcaagttag

SEQ ID NO: 1502711 - DNA, 15 bp, Homo sapiens
actggactcaagtta

SEQ ID NO: 1502712 - DNA, 15 bp, Homo sapiens
cactggactcaagtt

SEQ ID NO: 1502713 - DNA, 15 bp, Homo sapiens
ccactggactcaagt

SEQ ID NO: 1502714 - DNA, 15 bp, Homo sapiens
accactggactcaag

SEQ ID NO: 1502715 - DNA, 15 bp, Homo sapiens
caccactggactcaa

SEQ ID NO: 1502716 - DNA, 15 bp, Homo sapiens
acaccactggactca

SEQ ID NO: 1502717 - DNA, 15 bp, Homo sapiens
tgatcacaccactgg

SEQ ID NO: 1502718 - DNA, 15 bp, Homo sapiens
catgatcacaccact

SEQ ID NO: 1502719 - DNA, 15 bp, Homo sapiens
ccatgatcacaccac

SEQ ID NO: 1502720 - DNA, 15 bp, Homo sapiens
gccatgatcacacca

SEQ ID NO: 1502721 - DNA, 15 bp, Homo sapiens
agtgagccatgatca

SEQ ID NO: 1502722 - DNA, 15 bp, Homo sapiens
cagtgagccatgatc

SEQ ID NO: 1502723 - DNA, 15 bp, Homo sapiens
gcagtgagccatgat

SEQ ID NO: 1502724 - DNA, 15 bp, Homo sapiens
tgcagtgagccatga

SEQ ID NO: 1502725 - DNA, 15 bp, Homo sapiens
ttgcagtgagccatg

SEQ ID NO: 1502726 - DNA, 15 bp, Homo sapiens
gttgcagtgagccat

SEQ ID NO: 1502727 - DNA, 15 bp, Homo sapiens
acagaggttgcagtg

SEQ ID NO: 1502728 - DNA, 15 bp, Homo sapiens
gacagaggttgcagt

SEQ ID NO: 1502729 - DNA, 15 bp, Homo sapiens
agacagaggttgcag

SEQ ID NO: 1502730 - DNA, 15 bp, Homo sapiens
gagacagaggttgca

SEQ ID NO: 1502731 - DNA, 15 bp, Homo sapiens
ggagacagaggttgc

SEQ ID NO: 1502732 - DNA, 15 bp, Homo sapiens
aggagacagaggttg

SEQ ID NO: 1502733 - DNA, 15 bp, Homo sapiens
caggagacagaggtt

SEQ ID NO: 1502734 - DNA, 15 bp, Homo sapiens
ccaggagacagaggt

SEQ ID NO: 1502735 - DNA, 15 bp, Homo sapiens
cccaggagacagagg

SEQ ID NO: 1502736 - DNA, 15 bp, Homo sapiens
gcccaggagacagag

SEQ ID NO: 1502737 - DNA, 15 bp, Homo sapiens
agcccaggagacaga

SEQ ID NO: 1502738 - DNA, 15 bp, Homo sapiens
gagcccaggagacag

SEQ ID NO: 1502739 - DNA, 15 bp, Homo sapiens
tgagcccaggagaca

SEQ ID NO: 1502740 - DNA, 15 bp, Homo sapiens
ttgagcccaggagac

SEQ ID NO: 1502741 - DNA, 15 bp, Homo sapiens
cttgagcccaggaga

SEQ ID NO: 1502742 - DNA, 15 bp, Homo sapiens
ctgggaggatcactt

SEQ ID NO: 1502743 - DNA, 15 bp, Homo sapiens
gctgggaggatcact

SEQ ID NO: 1502744 - DNA, 15 bp, Homo sapiens
agctgggaggatcac

SEQ ID NO: 1502745 - DNA, 15 bp, Homo sapiens
gagctgggaggatca

SEQ ID NO: 1502746 - DNA, 15 bp, Homo sapiens
tgagctgggaggatc

SEQ ID NO: 1502747 - DNA, 15 bp, Homo sapiens
ctgagctgggaggat

SEQ ID NO: 1502748 - DNA, 15 bp, Homo sapiens
gctgagctgggagga

SEQ ID NO: 1502749 - DNA, 15 bp, Homo sapiens
ggctgagctgggagg

SEQ ID NO: 1502750 - DNA, 15 bp, Homo sapiens
aggctgagctgggag

SEQ ID NO: 1502751 - DNA, 15 bp, Homo sapiens
gaggctgagctggga

SEQ ID NO: 1502752 - DNA, 15 bp, Homo sapiens
ggaggctgagctggg

SEQ ID NO: 1502753 - DNA, 15 bp, Homo sapiens
aggaggctgagctgg

SEQ ID NO: 1502754 - DNA, 15 bp, Homo sapiens
taggaggctgagctg

SEQ ID NO: 1502755 - DNA, 15 bp, Homo sapiens
ttaggaggctgagct

SEQ ID NO: 1502756 - DNA, 15 bp, Homo sapiens
cttaggaggctgagc

SEQ ID NO: 1502757 - DNA, 15 bp, Homo sapiens
tccagctacttagga

SEQ ID NO: 1502758 - DNA, 15 bp, Homo sapiens
ttccagctacttagg

SEQ ID NO: 1502759 - DNA, 15 bp, Homo sapiens
gttccagctacttag

SEQ ID NO: 1502760 - DNA, 15 bp, Homo sapiens
agttccagctactta

SEQ ID NO: 1502761 - DNA, 15 bp, Homo sapiens
atagttccagctact

SEQ ID NO: 1502762 - DNA, 15 bp, Homo sapiens
tatagttccagctac

SEQ ID NO: 1502763 - DNA, 15 bp, Homo sapiens
ctatagttccagcta

SEQ ID NO: 1502764 - DNA, 15 bp, Homo sapiens
cctatagttccagct

SEQ ID NO: 1502765 - DNA, 15 bp, Homo sapiens
gcctatagttccagc

SEQ ID NO: 1502766 - DNA, 15 bp, Homo sapiens
tgcctatagttccag

SEQ ID NO: 1502767 - DNA, 15 bp, Homo sapiens
atgcctatagttcca

SEQ ID NO: 1502768 - DNA, 15 bp, Homo sapiens
catgcctatagttcc

SEQ ID NO: 1502769 - DNA, 15 bp, Homo sapiens
acatgcctatagttc

SEQ ID NO: 1502770 - DNA, 15 bp, Homo sapiens
cacatgcctatagtt

SEQ ID NO: 1502771 - DNA, 15 bp, Homo sapiens
gcacatgcctatagt

SEQ ID NO: 1502772 - DNA, 15 bp, Homo sapiens
ggcacatgcctatag

SEQ ID NO: 1502773 - DNA, 15 bp, Homo sapiens
atggcacatgcctat

SEQ ID NO: 1502774 - DNA, 15 bp, Homo sapiens
gatggcacatgccta

SEQ ID NO: 1502775 - DNA, 15 bp, Homo sapiens
agatggcacatgcct

SEQ ID NO: 1502776 - DNA, 15 bp, Homo sapiens
aagatggcacatgcc

SEQ ID NO: 1502777 - DNA, 15 bp, Homo sapiens
caagatggcacatgc

SEQ ID NO: 1502778 - DNA, 15 bp, Homo sapiens
acaagatggcacatg

SEQ ID NO: 1502779 - DNA, 15 bp, Homo sapiens
gacaagatggcacat

SEQ ID NO: 1502780 - DNA, 15 bp, Homo sapiens
agacaagatggcaca

SEQ ID NO: 1502781 - DNA, 15 bp, Homo sapiens
tagacaagatggcac

SEQ ID NO: 1502782 - DNA, 15 bp, Homo sapiens
ctagacaagatggca

SEQ ID NO: 1502783 - DNA, 15 bp, Homo sapiens
tctagacaagatggc

SEQ ID NO: 1502784 - DNA, 15 bp, Homo sapiens
atctagacaagatgg

SEQ ID NO: 1502785 - DNA, 15 bp, Homo sapiens
tatctagacaagatg

SEQ ID NO: 1502786 - DNA, 15 bp, Homo sapiens
ttatctagacaagat

SEQ ID NO: 1502787 - DNA, 15 bp, Homo sapiens
attatctagacaaga

SEQ ID NO: 1502788 - DNA, 15 bp, Homo sapiens
aattatctagacaag

SEQ ID NO: 1502789 - DNA, 15 bp, Homo sapiens
taattatctagacaa

SEQ ID NO: 1502790 - DNA, 15 bp, Homo sapiens
ttaattatctagaca

SEQ ID NO: 1502791 - DNA, 15 bp, Homo sapiens
tttaattatctagac

SEQ ID NO: 1502792 - DNA, 15 bp, Homo sapiens
ttttaattatctaga

SEQ ID NO: 1502793 - DNA, 15 bp, Homo sapiens
tttttaattatctag

SEQ ID NO: 1502794 - DNA, 15 bp, Homo sapiens
ttttttaattatcta

SEQ ID NO: 1502795 - DNA, 15 bp, Homo sapiens
gttttttaattatct

SEQ ID NO: 1502796 - DNA, 15 bp, Homo sapiens
tgttttttaattatc

SEQ ID NO: 1502797 - DNA, 15 bp, Homo sapiens
atgttttttaattat

SEQ ID NO: 1502798 - DNA, 15 bp, Homo sapiens
aatgttttttaatta

SEQ ID NO: 1502799 - DNA, 15 bp, Homo sapiens
aaatgttttttaatt

SEQ ID NO: 1502800 - DNA, 15 bp, Homo sapiens
aaaatgttttttaat

SEQ ID NO: 1502801 - DNA, 15 bp, Homo sapiens
aaaaatgttttttaa

SEQ ID NO: 1502802 - DNA, 15 bp, Homo sapiens
aaaaaatgtttttta

SEQ ID NO: 1502803 - DNA, 15 bp, Homo sapiens
aaaaaaatgtttttt

SEQ ID NO: 1502804 - DNA, 15 bp, Homo sapiens
aaaaaaaatgttttt

SEQ ID NO: 1502805 - DNA, 15 bp, Homo sapiens
aaaaaaaaatgtttt

SEQ ID NO: 1502806 - DNA, 15 bp, Homo sapiens
aaaaaaaaaatgttt

SEQ ID NO: 1502807 - DNA, 15 bp, Homo sapiens
aaaaaaaaaaatgtt

SEQ ID NO: 1502808 - DNA, 15 bp, Homo sapiens
aaaaaaaaaaaatgt

SEQ ID NO: 1502809 - DNA, 15 bp, Homo sapiens
caaaaaaaaaaaatg

SEQ ID NO: 1502810 - DNA, 15 bp, Homo sapiens
cctacaaaaaaaaaa

SEQ ID NO: 1502811 - DNA, 15 bp, Homo sapiens
ccctacaaaaaaaaa

SEQ ID NO: 1502812 - DNA, 15 bp, Homo sapiens
tccctacaaaaaaaa

SEQ ID NO: 1502813 - DNA, 15 bp, Homo sapiens
gtccctacaaaaaaa

SEQ ID NO: 1502814 - DNA, 15 bp, Homo sapiens
tgtccctacaaaaaa

SEQ ID NO: 1502815 - DNA, 15 bp, Homo sapiens
ctgtccctacaaaaa

SEQ ID NO: 1502816 - DNA, 15 bp, Homo sapiens
gctgtccctacaaaa

SEQ ID NO: 1502817 - DNA, 15 bp, Homo sapiens
tgctgtccctacaaa

SEQ ID NO: 1502818 - DNA, 15 bp, Homo sapiens
atgctgtccctacaa

SEQ ID NO: 1502819 - DNA, 15 bp, Homo sapiens
gatgctgtccctaca

SEQ ID NO: 1502820 - DNA, 15 bp, Homo sapiens
agatgctgtccctac

SEQ ID NO: 1502821 - DNA, 15 bp, Homo sapiens
aagatgctgtcccta

SEQ ID NO: 1502822 - DNA, 15 bp, Homo sapiens
taagatgctgtccct

SEQ ID NO: 1502823 - DNA, 15 bp, Homo sapiens
gtaagatgctgtccc

SEQ ID NO: 1502824 - DNA, 15 bp, Homo sapiens
agtaagatgctgtcc

SEQ ID NO: 1502825 - DNA, 15 bp, Homo sapiens
cagtaagatgctgtc

SEQ ID NO: 1502826 - DNA, 15 bp, Homo sapiens
acagtaagatgctgt

SEQ ID NO: 1502827 - DNA, 15 bp, Homo sapiens
cacagtaagatgctg

SEQ ID NO: 1502828 - DNA, 15 bp, Homo sapiens
acacagtaagatgct

SEQ ID NO: 1502829 - DNA, 15 bp, Homo sapiens
aacacagtaagatgc

SEQ ID NO: 1502830 - DNA, 15 bp, Homo sapiens
aaacacagtaagatg

SEQ ID NO: 1502831 - DNA, 15 bp, Homo sapiens
gaaacacagtaagat

SEQ ID NO: 1502832 - DNA, 15 bp, Homo sapiens
ggaaacacagtaaga

SEQ ID NO: 1502833 - DNA, 15 bp, Homo sapiens
gggaaacacagtaag

SEQ ID NO: 1502834 - DNA, 15 bp, Homo sapiens
tgggaaacacagtaa

SEQ ID NO: 1502835 - DNA, 15 bp, Homo sapiens
ctgggaaacacagta

SEQ ID NO: 1502836 - DNA, 15 bp, Homo sapiens
cctgggaaacacagt

SEQ ID NO: 1502837 - DNA, 15 bp, Homo sapiens
ccctgggaaacacag

SEQ ID NO: 1502838 - DNA, 15 bp, Homo sapiens
cccctgggaaacaca

SEQ ID NO: 1502839 - DNA, 15 bp, Homo sapiens
gcccctgggaaacac

SEQ ID NO: 1502840 - DNA, 15 bp, Homo sapiens
agcccctgggaaaca

SEQ ID NO: 1502841 - DNA, 15 bp, Homo sapiens
tagcccctgggaaac

SEQ ID NO: 1502842 - DNA, 15 bp, Homo sapiens
ctagcccctgggaaa

SEQ ID NO: 1502843 - DNA, 15 bp, Homo sapiens
actagcccctgggaa

SEQ ID NO: 1502844 - DNA, 15 bp, Homo sapiens
gactagcccctggga

SEQ ID NO: 1502845 - DNA, 15 bp, Homo sapiens
agactagcccctggg

SEQ ID NO: 1502846 - DNA, 15 bp, Homo sapiens
aagactagcccctgg

SEQ ID NO: 1502847 - DNA, 15 bp, Homo sapiens
caagactagcccctg

SEQ ID NO: 1502848 - DNA, 15 bp, Homo sapiens
tcaagactagcccct

SEQ ID NO: 1502849 - DNA, 15 bp, Homo sapiens
ttcaagactagcccc

SEQ ID NO: 1502850 - DNA, 15 bp, Homo sapiens
gttcaagactagccc

SEQ ID NO: 1502851 - DNA, 15 bp, Homo sapiens
gcttgagctcaggag

SEQ ID NO: 1502852 - DNA, 15 bp, Homo sapiens
cgcttgagctcagga

SEQ ID NO: 1502853 - DNA, 15 bp, Homo sapiens
tcgcttgagctcagg

SEQ ID NO: 1502854 - DNA, 15 bp, Homo sapiens
atcgcttgagctcag

SEQ ID NO: 1502855 - DNA, 15 bp, Homo sapiens
gatcgcttgagctca

SEQ ID NO: 1502856 - DNA, 15 bp, Homo sapiens
ggatcgcttgagctc

SEQ ID NO: 1502857 - DNA, 15 bp, Homo sapiens
tggatcgcttgagct

SEQ ID NO: 1502858 - DNA, 15 bp, Homo sapiens
gtggatcgcttgagc

SEQ ID NO: 1502859 - DNA, 15 bp, Homo sapiens
ggtggatcgcttgag

SEQ ID NO: 1502860 - DNA, 15 bp, Homo sapiens
aggtggatcgcttga

SEQ ID NO: 1502861 - DNA, 15 bp, Homo sapiens
caggtggatcgcttg

SEQ ID NO: 1502862 - DNA, 15 bp, Homo sapiens
gcaggtggatcgctt

SEQ ID NO: 1502863 - DNA, 15 bp, Homo sapiens
ggcaggtggatcgct

SEQ ID NO: 1502864 - DNA, 15 bp, Homo sapiens
acaacactttgggaa

SEQ ID NO: 1502865 - DNA, 15 bp, Homo sapiens
cacaacactttggga

SEQ ID NO: 1502866 - DNA, 15 bp, Homo sapiens
tcacaacactttggg

SEQ ID NO: 1502867 - DNA, 15 bp, Homo sapiens
atcacaacactttgg

SEQ ID NO: 1502868 - DNA, 15 bp, Homo sapiens
aatcacaacactttg

SEQ ID NO: 1502869 - DNA, 15 bp, Homo sapiens
taatcacaacacttt

SEQ ID NO: 1502870 - DNA, 15 bp, Homo sapiens
gtaatcacaacactt

SEQ ID NO: 1502871 - DNA, 15 bp, Homo sapiens
tgtaatcacaacact

SEQ ID NO: 1502872 - DNA, 15 bp, Homo sapiens
ctgtaatcacaacac

SEQ ID NO: 1502873 - DNA, 15 bp, Homo sapiens
cctgtaatcacaaca

SEQ ID NO: 1502874 - DNA, 15 bp, Homo sapiens
acctgtaatcacaac

SEQ ID NO: 1502875 - DNA, 15 bp, Homo sapiens
cacctgtaatcacaa

SEQ ID NO: 1502876 - DNA, 15 bp, Homo sapiens
acacctgtaatcaca

SEQ ID NO: 1502877 - DNA, 15 bp, Homo sapiens
cacacctgtaatcac

SEQ ID NO: 1502878 - DNA, 15 bp, Homo sapiens
ttcacacctgtaatc

SEQ ID NO: 1502879 - DNA, 15 bp, Homo sapiens
gttcacacctgtaat

SEQ ID NO: 1502880 - DNA, 15 bp, Homo sapiens
ggttcacacctgtaa

SEQ ID NO: 1502881 - DNA, 15 bp, Homo sapiens
tggttcacacctgta

SEQ ID NO: 1502882 - DNA, 15 bp, Homo sapiens
gtggttcacacctgt

SEQ ID NO: 1502883 - DNA, 15 bp, Homo sapiens
ggtggttcacacctg

SEQ ID NO: 1502884 - DNA, 15 bp, Homo sapiens
tggtggttcacacct

SEQ ID NO: 1502885 - DNA, 15 bp, Homo sapiens
gtggtggttcacacc

SEQ ID NO: 1502886 - DNA, 15 bp, Homo sapiens
ggtggtggttcacac

SEQ ID NO: 1502887 - DNA, 15 bp, Homo sapiens
gggtggtggttcaca

SEQ ID NO: 1502888 - DNA, 15 bp, Homo sapiens
ggggtggtggttcac

SEQ ID NO: 1502889 - DNA, 15 bp, Homo sapiens
gggggtggtggttca

SEQ ID NO: 1502890 - DNA, 15 bp, Homo sapiens
tgggggtggtggttc

SEQ ID NO: 1502891 - DNA, 15 bp, Homo sapiens
ctgggggtggtggtt

SEQ ID NO: 1502892 - DNA, 15 bp, Homo sapiens
gctgggggtggtggt

SEQ ID NO: 1502893 - DNA, 15 bp, Homo sapiens
gagctgggggtggtg

SEQ ID NO: 1502894 - DNA, 15 bp, Homo sapiens
agagctgggggtggt

SEQ ID NO: 1502895 - DNA, 15 bp, Homo sapiens
cagagctgggggtgg

SEQ ID NO: 1502896 - DNA, 15 bp, Homo sapiens
gcagagctgggggtg

SEQ ID NO: 1502897 - DNA, 15 bp, Homo sapiens
ggcagagctgggggt

SEQ ID NO: 1502898 - DNA, 15 bp, Homo sapiens
tggcagagctggggg

SEQ ID NO: 1502899 - DNA, 15 bp, Homo sapiens
atggcagagctgggg

SEQ ID NO: 1502900 - DNA, 15 bp, Homo sapiens
aatggcagagctggg

SEQ ID NO: 1502901 - DNA, 15 bp, Homo sapiens
aaatggcagagctgg

SEQ ID NO: 1502902 - DNA, 15 bp, Homo sapiens
aaaatggcagagctg

SEQ ID NO: 1502903 - DNA, 15 bp, Homo sapiens
gaaaatggcagagct

SEQ ID NO: 1502904 - DNA, 15 bp, Homo sapiens
agaaaatggcagagc

SEQ ID NO: 1502905 - DNA, 15 bp, Homo sapiens
aagaaaatggcagag

SEQ ID NO: 1502906 - DNA, 15 bp, Homo sapiens
taagaaaatggcaga

SEQ ID NO: 1502907 - DNA, 15 bp, Homo sapiens
ataagaaaatggcag

SEQ ID NO: 1502908 - DNA, 15 bp, Homo sapiens
cataagaaaatggca

SEQ ID NO: 1502909 - DNA, 15 bp, Homo sapiens
acataagaaaatggc

SEQ ID NO: 1502910 - DNA, 15 bp, Homo sapiens
cacataagaaaatgg

SEQ ID NO: 1502911 - DNA, 15 bp, Homo sapiens
gcacataagaaaatg

SEQ ID NO: 1502912 - DNA, 15 bp, Homo sapiens
ggcacataagaaaat

SEQ ID NO: 1502913 - DNA, 15 bp, Homo sapiens
aggcacataagaaaa

SEQ ID NO: 1502914 - DNA, 15 bp, Homo sapiens
aaggcacataagaaa

SEQ ID NO: 1502915 - DNA, 15 bp, Homo sapiens
aaaggcacataagaa

SEQ ID NO: 1502916 - DNA, 15 bp, Homo sapiens
aaaaggcacataaga

SEQ ID NO: 1502917 - DNA, 15 bp, Homo sapiens
taaaaggcacataag

SEQ ID NO: 1502918 - DNA, 15 bp, Homo sapiens
ataaaaggcacataa

SEQ ID NO: 1502919 - DNA, 15 bp, Homo sapiens
aataaaaggcacata

SEQ ID NO: 1502920 - DNA, 15 bp, Homo sapiens
gaataaaaggcacat

SEQ ID NO: 1502921 - DNA, 15 bp, Homo sapiens
tgaataaaaggcaca

SEQ ID NO: 1502922 - DNA, 15 bp, Homo sapiens
ttgaataaaaggcac

SEQ ID NO: 1502923 - DNA, 15 bp, Homo sapiens
gttgaataaaaggca

SEQ ID NO: 1502924 - DNA, 15 bp, Homo sapiens
agttgaataaaaggc

SEQ ID NO: 1502925 - DNA, 15 bp, Homo sapiens
cagttgaataaaagg

SEQ ID NO: 1502926 - DNA, 15 bp, Homo sapiens
acagttgaataaaag

SEQ ID NO: 1502927 - DNA, 15 bp, Homo sapiens
aacagttgaataaaa

SEQ ID NO: 1502928 - DNA, 15 bp, Homo sapiens
aaacagttgaataaa

SEQ ID NO: 1502929 - DNA, 15 bp, Homo sapiens
gaaacagttgaataa

SEQ ID NO: 1502930 - DNA, 15 bp, Homo sapiens
tgaaacagttgaata

SEQ ID NO: 1502931 - DNA, 15 bp, Homo sapiens
atgaaacagttgaat

SEQ ID NO: 1502932 - DNA, 15 bp, Homo sapiens
aatgaaacagttgaa

SEQ ID NO: 1502933 - DNA, 15 bp, Homo sapiens
aaatgaaacagttga

SEQ ID NO: 1502934 - DNA, 15 bp, Homo sapiens
aaaatgaaacagttg

SEQ ID NO: 1502935 - DNA, 15 bp, Homo sapiens
aaaaatgaaacagtt

SEQ ID NO: 1502936 - DNA, 15 bp, Homo sapiens
aaaaaatgaaacagt

SEQ ID NO: 1502937 - DNA, 15 bp, Homo sapiens
aaaaaaatgaaacag

SEQ ID NO: 1502938 - DNA, 15 bp, Homo sapiens
taaaaaaatgaaaca

SEQ ID NO: 1502939 - DNA, 15 bp, Homo sapiens
gtaaaaaaatgaaac

SEQ ID NO: 1502940 - DNA, 15 bp, Homo sapiens
ggtaaaaaaatgaaa

SEQ ID NO: 1502941 - DNA, 15 bp, Homo sapiens
gggtaaaaaaatgaa

SEQ ID NO: 1502942 - DNA, 15 bp, Homo sapiens
ggggtaaaaaaatga

SEQ ID NO: 1502943 - DNA, 15 bp, Homo sapiens
aggggtaaaaaaatg

SEQ ID NO: 1502944 - DNA, 15 bp, Homo sapiens
aaggggtaaaaaaat

SEQ ID NO: 1502945 - DNA, 15 bp, Homo sapiens
caaggggtaaaaaaa

SEQ ID NO: 1502946 - DNA, 15 bp, Homo sapiens
tcaaggggtaaaaaa

SEQ ID NO: 1502947 - DNA, 15 bp, Homo sapiens
ctcaaggggtaaaaa

SEQ ID NO: 1502948 - DNA, 15 bp, Homo sapiens
actcaaggggtaaaa

SEQ ID NO: 1502949 - DNA, 15 bp, Homo sapiens
gactcaaggggtaaa

SEQ ID NO: 1502950 - DNA, 15 bp, Homo sapiens
agactcaaggggtaa

SEQ ID NO: 1502951 - DNA, 15 bp, Homo sapiens
gagactcaaggggta

SEQ ID NO: 1502952 - DNA, 15 bp, Homo sapiens
tgagactcaaggggt

SEQ ID NO: 1502953 - DNA, 15 bp, Homo sapiens
ctgagactcaagggg

SEQ ID NO: 1502954 - DNA, 15 bp, Homo sapiens
tctgagactcaaggg

SEQ ID NO: 1502955 - DNA, 15 bp, Homo sapiens
ttctgagactcaagg

SEQ ID NO: 1502956 - DNA, 15 bp, Homo sapiens
attctgagactcaag

SEQ ID NO: 1502957 - DNA, 15 bp, Homo sapiens
aattctgagactcaa

SEQ ID NO: 1502958 - DNA, 15 bp, Homo sapiens
aaattctgagactca

SEQ ID NO: 1502959 - DNA, 15 bp, Homo sapiens
taaattctgagactc

SEQ ID NO: 1502960 - DNA, 15 bp, Homo sapiens
gtaaattctgagact

SEQ ID NO: 1502961 - DNA, 15 bp, Homo sapiens
ggtaaattctgagac

SEQ ID NO: 1502962 - DNA, 15 bp, Homo sapiens
aggtaaattctgaga

SEQ ID NO: 1502963 - DNA, 15 bp, Homo sapiens
gaggtaaattctgag

SEQ ID NO: 1502964 - DNA, 15 bp, Homo sapiens
agaggtaaattctga

SEQ ID NO: 1502965 - DNA, 15 bp, Homo sapiens
cagaggtaaattctg

SEQ ID NO: 1502966 - DNA, 15 bp, Homo sapiens
ccagaggtaaattct

SEQ ID NO: 1502967 - DNA, 15 bp, Homo sapiens
cccagaggtaaattc

SEQ ID NO: 1502968 - DNA, 15 bp, Homo sapiens
acccagaggtaaatt

SEQ ID NO: 1502969 - DNA, 15 bp, Homo sapiens
aacccagaggtaaat

SEQ ID NO: 1502970 - DNA, 15 bp, Homo sapiens
gaacccagaggtaaa

SEQ ID NO: 1502971 - DNA, 15 bp, Homo sapiens
tgaacccagaggtaa

SEQ ID NO: 1502972 - DNA, 15 bp, Homo sapiens
atgaacccagaggta

SEQ ID NO: 1502973 - DNA, 15 bp, Homo sapiens
aatgaacccagaggt

SEQ ID NO: 1502974 - DNA, 15 bp, Homo sapiens
aaatgaacccagagg

SEQ ID NO: 1502975 - DNA, 15 bp, Homo sapiens
aaaatgaacccagag

SEQ ID NO: 1502976 - DNA, 15 bp, Homo sapiens
taaaatgaacccaga

SEQ ID NO: 1502977 - DNA, 15 bp, Homo sapiens
gtaaaatgaacccag

SEQ ID NO: 1502978 - DNA, 15 bp, Homo sapiens
agtaaaatgaaccca

SEQ ID NO: 1502979 - DNA, 15 bp, Homo sapiens
aagtaaaatgaaccc

SEQ ID NO: 1502980 - DNA, 15 bp, Homo sapiens
gaagtaaaatgaacc

SEQ ID NO: 1502981 - DNA, 15 bp, Homo sapiens
agaagtaaaatgaac

SEQ ID NO: 1502982 - DNA, 15 bp, Homo sapiens
cagaagtaaaatgaa

SEQ ID NO: 1502983 - DNA, 15 bp, Homo sapiens
gcagaagtaaaatga

SEQ ID NO: 1502984 - DNA, 15 bp, Homo sapiens
agcagaagtaaaatg

SEQ ID NO: 1502985 - DNA, 15 bp, Homo sapiens
aagcagaagtaaaat

SEQ ID NO: 1502986 - DNA, 15 bp, Homo sapiens
caagcagaagtaaaa

SEQ ID NO: 1502987 - DNA, 15 bp, Homo sapiens
tcaagcagaagtaaa

SEQ ID NO: 1502988 - DNA, 15 bp, Homo sapiens
ttcaagcagaagtaa

SEQ ID NO: 1502989 - DNA, 15 bp, Homo sapiens
cttcaagcagaagta

SEQ ID NO: 1502990 - DNA, 15 bp, Homo sapiens
gcttcaagcagaagt

SEQ ID NO: 1502991 - DNA, 15 bp, Homo sapiens
tgcttcaagcagaag

SEQ ID NO: 1502992 - DNA, 15 bp, Homo sapiens
atgcttcaagcagaa

SEQ ID NO: 1502993 - DNA, 15 bp, Homo sapiens
tatgcttcaagcaga

SEQ ID NO: 1502994 - DNA, 15 bp, Homo sapiens
atatgcttcaagcag

SEQ ID NO: 1502995 - DNA, 15 bp, Homo sapiens
aatatgcttcaagca

SEQ ID NO: 1502996 - DNA, 15 bp, Homo sapiens
gaatatgcttcaagc

SEQ ID NO: 1502997 - DNA, 15 bp, Homo sapiens
agaatatgcttcaag

SEQ ID NO: 1502998 - DNA, 15 bp, Homo sapiens
aagaatatgcttcaa

SEQ ID NO: 1502999 - DNA, 15 bp, Homo sapiens
aaagaatatgcttca

SEQ ID NO: 1503000 - DNA, 15 bp, Homo sapiens
taaagaatatgcttc

SEQ ID NO: 1503001 - DNA, 15 bp, Homo sapiens
ctaaagaatatgctt

SEQ ID NO: 1503002 - DNA, 15 bp, Homo sapiens
tctaaagaatatgct

SEQ ID NO: 1503003 - DNA, 15 bp, Homo sapiens
ttctaaagaatatgc

SEQ ID NO: 1503004 - DNA, 15 bp, Homo sapiens
attctaaagaatatg

SEQ ID NO: 1503005 - DNA, 15 bp, Homo sapiens
aattctaaagaatat

SEQ ID NO: 1503006 - DNA, 15 bp, Homo sapiens
aaattctaaagaata

SEQ ID NO: 1503007 - DNA, 15 bp, Homo sapiens
gaaattctaaagaat

SEQ ID NO: 1503008 - DNA, 15 bp, Homo sapiens
agaaattctaaagaa

SEQ ID NO: 1503009 - DNA, 15 bp, Homo sapiens
aagaaattctaaaga

SEQ ID NO: 1503010 - DNA, 15 bp, Homo sapiens
aaagaaattctaaag

SEQ ID NO: 1503011 - DNA, 15 bp, Homo sapiens
aaaagaaattctaaa

SEQ ID NO: 1503012 - DNA, 15 bp, Homo sapiens
caaaagaaattctaa

SEQ ID NO: 1503013 - DNA, 15 bp, Homo sapiens
tcaaaagaaattcta

SEQ ID NO: 1503014 - DNA, 15 bp, Homo sapiens
atcaaaagaaattct

SEQ ID NO: 1503015 - DNA, 15 bp, Homo sapiens
catcaaaagaaattc

SEQ ID NO: 1503016 - DNA, 15 bp, Homo sapiens
tcatcaaaagaaatt

SEQ ID NO: 1503017 - DNA, 15 bp, Homo sapiens
ctcatcaaaagaaat

SEQ ID NO: 1503018 - DNA, 15 bp, Homo sapiens
cctcatcaaaagaaa

SEQ ID NO: 1503019 - DNA, 15 bp, Homo sapiens
ccctcatcaaaagaa

SEQ ID NO: 1503020 - DNA, 15 bp, Homo sapiens
accctcatcaaaaga

SEQ ID NO: 1503021 - DNA, 15 bp, Homo sapiens
gaccctcatcaaaag

SEQ ID NO: 1503022 - DNA, 15 bp, Homo sapiens
agaccctcatcaaaa

SEQ ID NO: 1503023 - DNA, 15 bp, Homo sapiens
cagaccctcatcaaa

SEQ ID NO: 1503024 - DNA, 15 bp, Homo sapiens
acagaccctcatcaa

SEQ ID NO: 1503025 - DNA, 15 bp, Homo sapiens
aacagaccctcatca

SEQ ID NO: 1503026 - DNA, 15 bp, Homo sapiens
caacagaccctcatc

SEQ ID NO: 1503027 - DNA, 15 bp, Homo sapiens
gcaacagaccctcat

SEQ ID NO: 1503028 - DNA, 15 bp, Homo sapiens
tgcaacagaccctca

SEQ ID NO: 1503029 - DNA, 15 bp, Homo sapiens
ctgcaacagaccctc

SEQ ID NO: 1503030 - DNA, 15 bp, Homo sapiens
actgcaacagaccct

SEQ ID NO: 1503031 - DNA, 15 bp, Homo sapiens
tactgcaacagaccc

SEQ ID NO: 1503032 - DNA, 15 bp, Homo sapiens
ttactgcaacagacc

SEQ ID NO: 1503033 - DNA, 15 bp, Homo sapiens
attactgcaacagac

SEQ ID NO: 1503034 - DNA, 15 bp, Homo sapiens
aattactgcaacaga

SEQ ID NO: 1503035 - DNA, 15 bp, Homo sapiens
caattactgcaacag

SEQ ID NO: 1503036 - DNA, 15 bp, Homo sapiens
gcaattactgcaaca

SEQ ID NO: 1503037 - DNA, 15 bp, Homo sapiens
agcaattactgcaac

SEQ ID NO: 1503038 - DNA, 15 bp, Homo sapiens
gagcaattactgcaa

SEQ ID NO: 1503039 - DNA, 15 bp, Homo sapiens
agagcaattactgca

SEQ ID NO: 1503040 - DNA, 15 bp, Homo sapiens
aagagcaattactgc

SEQ ID NO: 1503041 - DNA, 15 bp, Homo sapiens
taagagcaattactg

SEQ ID NO: 1503042 - DNA, 15 bp, Homo sapiens
gtaagagcaattact

SEQ ID NO: 1503043 - DNA, 15 bp, Homo sapiens
agtaagagcaattac

SEQ ID NO: 1503044 - DNA, 15 bp, Homo sapiens
aagtaagagcaatta

SEQ ID NO: 1503045 - DNA, 15 bp, Homo sapiens
aaagtaagagcaatt

SEQ ID NO: 1503046 - DNA, 15 bp, Homo sapiens
gaaagtaagagcaat

SEQ ID NO: 1503047 - DNA, 15 bp, Homo sapiens
ggaaagtaagagcaa

SEQ ID NO: 1503048 - DNA, 15 bp, Homo sapiens
aggaaagtaagagca

SEQ ID NO: 1503049 - DNA, 15 bp, Homo sapiens
aaggaaagtaagagc

SEQ ID NO: 1503050 - DNA, 15 bp, Homo sapiens
aaaggaaagtaagag

SEQ ID NO: 1503051 - DNA, 15 bp, Homo sapiens
gaaaggaaagtaaga

SEQ ID NO: 1503052 - DNA, 15 bp, Homo sapiens
agaaaggaaagtaag

SEQ ID NO: 1503053 - DNA, 15 bp, Homo sapiens
aagaaaggaaagtaa

SEQ ID NO: 1503054 - DNA, 15 bp, Homo sapiens
aaagaaaggaaagta

SEQ ID NO: 1503055 - DNA, 15 bp, Homo sapiens
caaagaaaggaaagt

SEQ ID NO: 1503056 - DNA, 15 bp, Homo sapiens
tcaaagaaaggaaag

SEQ ID NO: 1503057 - DNA, 15 bp, Homo sapiens
ttcaaagaaaggaaa

SEQ ID NO: 1503058 - DNA, 15 bp, Homo sapiens
tttcaaagaaaggaa

SEQ ID NO: 1503059 - DNA, 15 bp, Homo sapiens
ttttcaaagaaagga

SEQ ID NO: 1503060 - DNA, 15 bp, Homo sapiens
attttcaaagaaagg

SEQ ID NO: 1503061 - DNA, 15 bp, Homo sapiens
tattttcaaagaaag

SEQ ID NO: 1503062 - DNA, 15 bp, Homo sapiens
gtattttcaaagaaa

SEQ ID NO: 1503063 - DNA, 15 bp, Homo sapiens
tgtattttcaaagaa

SEQ ID NO: 1503064 - DNA, 15 bp, Homo sapiens
ctgtattttcaaaga

SEQ ID NO: 1503065 - DNA, 15 bp, Homo sapiens
cctgtattttcaaag

SEQ ID NO: 1503066 - DNA, 15 bp, Homo sapiens
ccctgtattttcaaa

SEQ ID NO: 1503067 - DNA, 15 bp, Homo sapiens
gccctgtattttcaa

SEQ ID NO: 1503068 - DNA, 15 bp, Homo sapiens
ggccctgtattttca

SEQ ID NO: 1503069 - DNA, 15 bp, Homo sapiens
tggccctgtattttc

SEQ ID NO: 1503070 - DNA, 15 bp, Homo sapiens
ctggccctgtatttt

SEQ ID NO: 1503071 - DNA, 15 bp, Homo sapiens
gctggccctgtattt

SEQ ID NO: 1503072 - DNA, 15 bp, Homo sapiens
cgctggccctgtatt

SEQ ID NO: 1503073 - DNA, 15 bp, Homo sapiens
gcgctggccctgtat

SEQ ID NO: 1503074 - DNA, 15 bp, Homo sapiens
cgcgctggccctgta

SEQ ID NO: 1503075 - DNA, 15 bp, Homo sapiens
ccgcgctggccctgt

SEQ ID NO: 1503076 - DNA, 15 bp, Homo sapiens
accgcgctggccctg

SEQ ID NO: 1503077 - DNA, 15 bp, Homo sapiens
caccgcgctggccct

SEQ ID NO: 1503078 - DNA, 15 bp, Homo sapiens
ccaccgcgctggccc

SEQ ID NO: 1503079 - DNA, 15 bp, Homo sapiens
gccaccgcgctggcc

SEQ ID NO: 1503080 - DNA, 15 bp, Homo sapiens
agccaccgcgctggc

SEQ ID NO: 1503081 - DNA, 15 bp, Homo sapiens
gagccaccgcgctgg

SEQ ID NO: 1503082 - DNA, 15 bp, Homo sapiens
tgagccaccgcgctg

SEQ ID NO: 1503083 - DNA, 15 bp, Homo sapiens
gtgagccaccgcgct

SEQ ID NO: 1503084 - DNA, 15 bp, Homo sapiens
cggattacaggcgtg

SEQ ID NO: 1503085 - DNA, 15 bp, Homo sapiens
tcggattacaggcgt

SEQ ID NO: 1503086 - DNA, 15 bp, Homo sapiens
ttcggattacaggcg

SEQ ID NO: 1503087 - DNA, 15 bp, Homo sapiens
gttcggattacaggc

SEQ ID NO: 1503088 - DNA, 15 bp, Homo sapiens
tgttcggattacagg

SEQ ID NO: 1503089 - DNA, 15 bp, Homo sapiens
gtgttcggattacag

SEQ ID NO: 1503090 - DNA, 15 bp, Homo sapiens
agtgttcggattaca

SEQ ID NO: 1503091 - DNA, 15 bp, Homo sapiens
aagtgttcggattac

SEQ ID NO: 1503092 - DNA, 15 bp, Homo sapiens
aaagtgttcggatta

SEQ ID NO: 1503093 - DNA, 15 bp, Homo sapiens
caaagtgttcggatt

SEQ ID NO: 1503094 - DNA, 15 bp, Homo sapiens
ccaaagtgttcggat

SEQ ID NO: 1503095 - DNA, 15 bp, Homo sapiens
cccaaagtgttcgga

SEQ ID NO: 1503096 - DNA, 15 bp, Homo sapiens
tcccaaagtgttcgg

SEQ ID NO: 1503097 - DNA, 15 bp, Homo sapiens
ctcccaaagtgttcg

SEQ ID NO: 1503098 - DNA, 15 bp, Homo sapiens
cctcccaaagtgttc

SEQ ID NO: 1503099 - DNA, 15 bp, Homo sapiens
gcctcccaaagtgtt

SEQ ID NO: 1503100 - DNA, 15 bp, Homo sapiens
ggcctcccaaagtgt

SEQ ID NO: 1503101 - DNA, 15 bp, Homo sapiens
ccttgtgatccgccc

SEQ ID NO: 1503102 - DNA, 15 bp, Homo sapiens
accttgtgatccgcc

SEQ ID NO: 1503103 - DNA, 15 bp, Homo sapiens
gaccttgtgatccgc

SEQ ID NO: 1503104 - DNA, 15 bp, Homo sapiens
tgaccttgtgatccg

SEQ ID NO: 1503105 - DNA, 15 bp, Homo sapiens
cgttagccaggatgg

SEQ ID NO: 1503106 - DNA, 15 bp, Homo sapiens
gcgttagccaggatg

SEQ ID NO: 1503107 - DNA, 15 bp, Homo sapiens
cgcgttagccaggat

SEQ ID NO: 1503108 - DNA, 15 bp, Homo sapiens
ccgcgttagccagga

SEQ ID NO: 1503109 - DNA, 15 bp, Homo sapiens
accgcgttagccagg

SEQ ID NO: 1503110 - DNA, 15 bp, Homo sapiens
caccgcgttagccag

SEQ ID NO: 1503111 - DNA, 15 bp, Homo sapiens
tcaccgcgttagcca

SEQ ID NO: 1503112 - DNA, 15 bp, Homo sapiens
ttcaccgcgttagcc

SEQ ID NO: 1503113 - DNA, 15 bp, Homo sapiens
tttcaccgcgttagc

SEQ ID NO: 1503114 - DNA, 15 bp, Homo sapiens
gtttcaccgcgttag

SEQ ID NO: 1503115 - DNA, 15 bp, Homo sapiens
ggtttcaccgcgtta

SEQ ID NO: 1503116 - DNA, 15 bp, Homo sapiens
gggtttcaccgcgtt

SEQ ID NO: 1503117 - DNA, 15 bp, Homo sapiens
ggggtttcaccgcgt

SEQ ID NO: 1503118 - DNA, 15 bp, Homo sapiens
gggggtttcaccgcg

SEQ ID NO: 1503119 - DNA, 15 bp, Homo sapiens
tgggggtttcaccgc

SEQ ID NO: 1503120 - DNA, 15 bp, Homo sapiens
atgggggtttcaccg

SEQ ID NO: 1503121 - DNA, 15 bp, Homo sapiens
gatgggggtttcacc

SEQ ID NO: 1503122 - DNA, 15 bp, Homo sapiens
agatgggggtttcac

SEQ ID NO: 1503123 - DNA, 15 bp, Homo sapiens
gagatgggggtttca

SEQ ID NO: 1503124 - DNA, 15 bp, Homo sapiens
agagatgggggtttc

SEQ ID NO: 1503125 - DNA, 15 bp, Homo sapiens
tagagatgggggttt

SEQ ID NO: 1503126 - DNA, 15 bp, Homo sapiens
gtagagatgggggtt

SEQ ID NO: 1503127 - DNA, 15 bp, Homo sapiens
agtagagatgggggt

SEQ ID NO: 1503128 - DNA, 15 bp, Homo sapiens
tagtagagatggggg

SEQ ID NO: 1503129 - DNA, 15 bp, Homo sapiens
tattttttgtatttt

SEQ ID NO: 1503130 - DNA, 15 bp, Homo sapiens
ctattttttgtattt

SEQ ID NO: 1503131 - DNA, 15 bp, Homo sapiens
gctattttttgtatt

SEQ ID NO: 1503132 - DNA, 15 bp, Homo sapiens
ggctattttttgtat

SEQ ID NO: 1503133 - DNA, 15 bp, Homo sapiens
tggctattttttgta

SEQ ID NO: 1503134 - DNA, 15 bp, Homo sapiens
ctggctattttttgt

SEQ ID NO: 1503135 - DNA, 15 bp, Homo sapiens
cctggctattttttg

SEQ ID NO: 1503136 - DNA, 15 bp, Homo sapiens
acctggctatttttt

SEQ ID NO: 1503137 - DNA, 15 bp, Homo sapiens
cacctggctattttt

SEQ ID NO: 1503138 - DNA, 15 bp, Homo sapiens
acacctggctatttt

SEQ ID NO: 1503139 - DNA, 15 bp, Homo sapiens
cacacctggctattt

SEQ ID NO: 1503140 - DNA, 15 bp, Homo sapiens
ccacacctggctatt

SEQ ID NO: 1503141 - DNA, 15 bp, Homo sapiens
accacacctggctat

SEQ ID NO: 1503142 - DNA, 15 bp, Homo sapiens
gcccaccaccacacc

SEQ ID NO: 1503143 - DNA, 15 bp, Homo sapiens
cgcccaccaccacac

SEQ ID NO: 1503144 - DNA, 15 bp, Homo sapiens
acgcccaccaccaca

SEQ ID NO: 1503145 - DNA, 15 bp, Homo sapiens
gacgcccaccaccac

SEQ ID NO: 1503146 - DNA, 15 bp, Homo sapiens
agacgcccaccacca

SEQ ID NO: 1503147 - DNA, 15 bp, Homo sapiens
cagacgcccaccacc

SEQ ID NO: 1503148 - DNA, 15 bp, Homo sapiens
acagacgcccaccac

SEQ ID NO: 1503149 - DNA, 15 bp, Homo sapiens
tacagacgcccacca

SEQ ID NO: 1503150 - DNA, 15 bp, Homo sapiens
ctacagacgcccacc

SEQ ID NO: 1503151 - DNA, 15 bp, Homo sapiens
actacagacgcccac

SEQ ID NO: 1503152 - DNA, 15 bp, Homo sapiens
gactacagacgccca

SEQ ID NO: 1503153 - DNA, 15 bp, Homo sapiens
ggactacagacgccc

SEQ ID NO: 1503154 - DNA, 15 bp, Homo sapiens
gggactacagacgcc

SEQ ID NO: 1503155 - DNA, 15 bp, Homo sapiens
tgggactacagacgc

SEQ ID NO: 1503156 - DNA, 15 bp, Homo sapiens
ctgggactacagacg

SEQ ID NO: 1503157 - DNA, 15 bp, Homo sapiens
gctgggactacagac

SEQ ID NO: 1503158 - DNA, 15 bp, Homo sapiens
actgagtagctggga

SEQ ID NO: 1503159 - DNA, 15 bp, Homo sapiens
tactgagtagctggg

SEQ ID NO: 1503160 - DNA, 15 bp, Homo sapiens
ctactgagtagctgg

SEQ ID NO: 1503161 - DNA, 15 bp, Homo sapiens
cctactgagtagctg

SEQ ID NO: 1503162 - DNA, 15 bp, Homo sapiens
acctactgagtagct

SEQ ID NO: 1503163 - DNA, 15 bp, Homo sapiens
aacctactgagtagc

SEQ ID NO: 1503164 - DNA, 15 bp, Homo sapiens
caacctactgagtag

SEQ ID NO: 1503165 - DNA, 15 bp, Homo sapiens
tcaacctactgagta

SEQ ID NO: 1503166 - DNA, 15 bp, Homo sapiens
ctcaacctactgagt

SEQ ID NO: 1503167 - DNA, 15 bp, Homo sapiens
cctcaacctactgag

SEQ ID NO: 1503168 - DNA, 15 bp, Homo sapiens
gcctcaacctactga

SEQ ID NO: 1503169 - DNA, 15 bp, Homo sapiens
tgcctcaacctactg

SEQ ID NO: 1503170 - DNA, 15 bp, Homo sapiens
ctgcctcaacctact

SEQ ID NO: 1503171 - DNA, 15 bp, Homo sapiens
cctgcctcaacctac

SEQ ID NO: 1503172 - DNA, 15 bp, Homo sapiens
tcctgcctcaaccta

SEQ ID NO: 1503173 - DNA, 15 bp, Homo sapiens
tcattctcctgcctc

SEQ ID NO: 1503174 - DNA, 15 bp, Homo sapiens
gtcattctcctgcct

SEQ ID NO: 1503175 - DNA, 15 bp, Homo sapiens
cgtcattctcctgcc

SEQ ID NO: 1503176 - DNA, 15 bp, Homo sapiens
acgtcattctcctgc

SEQ ID NO: 1503177 - DNA, 15 bp, Homo sapiens
ggttcacgtcattct

SEQ ID NO: 1503178 - DNA, 15 bp, Homo sapiens
aggttcacgtcattc

SEQ ID NO: 1503179 - DNA, 15 bp, Homo sapiens
caggttcacgtcatt

SEQ ID NO: 1503180 - DNA, 15 bp, Homo sapiens
ccaggttcacgtcat

SEQ ID NO: 1503181 - DNA, 15 bp, Homo sapiens
cccaggttcacgtca

SEQ ID NO: 1503182 - DNA, 15 bp, Homo sapiens
tcccaggttcacgtc

SEQ ID NO: 1503183 - DNA, 15 bp, Homo sapiens
ctcccaggttcacgt

SEQ ID NO: 1503184 - DNA, 15 bp, Homo sapiens
acaatctcagctcac

SEQ ID NO: 1503185 - DNA, 15 bp, Homo sapiens
cacaatctcagctca

SEQ ID NO: 1503186 - DNA, 15 bp, Homo sapiens
gcacaatctcagctc

SEQ ID NO: 1503187 - DNA, 15 bp, Homo sapiens
ggcacaatctcagct

SEQ ID NO: 1503188 - DNA, 15 bp, Homo sapiens
tggcacaatctcagc

SEQ ID NO: 1503189 - DNA, 15 bp, Homo sapiens
gtggcacaatctcag

SEQ ID NO: 1503190 - DNA, 15 bp, Homo sapiens
agtggcacaatctca

SEQ ID NO: 1503191 - DNA, 15 bp, Homo sapiens
cagtggcacaatctc

SEQ ID NO: 1503192 - DNA, 15 bp, Homo sapiens
tgctctttcacccag

SEQ ID NO: 1503193 - DNA, 15 bp, Homo sapiens
ttgctctttcaccca

SEQ ID NO: 1503194 - DNA, 15 bp, Homo sapiens
cttgctctttcaccc

SEQ ID NO: 1503195 - DNA, 15 bp, Homo sapiens
tcttgctctttcacc

SEQ ID NO: 1503196 - DNA, 15 bp, Homo sapiens
gtcttgctctttcac

SEQ ID NO: 1503197 - DNA, 15 bp, Homo sapiens
agtcttgctctttca

SEQ ID NO: 1503198 - DNA, 15 bp, Homo sapiens
gagtcttgctctttc

SEQ ID NO: 1503199 - DNA, 15 bp, Homo sapiens
agagtcttgctcttt

SEQ ID NO: 1503200 - DNA, 15 bp, Homo sapiens
cagagtcttgctctt

SEQ ID NO: 1503201 - DNA, 15 bp, Homo sapiens
tctttcctttttttt

SEQ ID NO: 1503202 - DNA, 15 bp, Homo sapiens
ttctttccttttttt

SEQ ID NO: 1503203 - DNA, 15 bp, Homo sapiens
tttctttcctttttt

SEQ ID NO: 1503204 - DNA, 15 bp, Homo sapiens
ttttctttccttttt

SEQ ID NO: 1503205 - DNA, 15 bp, Homo sapiens
attttctttcctttt

SEQ ID NO: 1503206 - DNA, 15 bp, Homo sapiens
tattttctttccttt

SEQ ID NO: 1503207 - DNA, 15 bp, Homo sapiens
gtattttctttcctt

SEQ ID NO: 1503208 - DNA, 15 bp, Homo sapiens
tgtattttctttcct

SEQ ID NO: 1503209 - DNA, 15 bp, Homo sapiens
ctgtattttctttcc

SEQ ID NO: 1503210 - DNA, 15 bp, Homo sapiens
actgtattttctttc

SEQ ID NO: 1503211 - DNA, 15 bp, Homo sapiens
tactgtattttcttt

SEQ ID NO: 1503212 - DNA, 15 bp, Homo sapiens
ctactgtattttctt

SEQ ID NO: 1503213 - DNA, 15 bp, Homo sapiens
actactgtattttct

SEQ ID NO: 1503214 - DNA, 15 bp, Homo sapiens
gactactgtattttc

SEQ ID NO: 1503215 - DNA, 15 bp, Homo sapiens
agactactgtatttt

SEQ ID NO: 1503216 - DNA, 15 bp, Homo sapiens
gagactactgtattt

SEQ ID NO: 1503217 - DNA, 15 bp, Homo sapiens
ggagactactgtatt

SEQ ID NO: 1503218 - DNA, 15 bp, Homo sapiens
gggagactactgtat

SEQ ID NO: 1503219 - DNA, 15 bp, Homo sapiens
ggggagactactgta

SEQ ID NO: 1503220 - DNA, 15 bp, Homo sapiens
cggggagactactgt

SEQ ID NO: 1503221 - DNA, 15 bp, Homo sapiens
gcggggagactactg

SEQ ID NO: 1503222 - DNA, 15 bp, Homo sapiens
agcggggagactact

SEQ ID NO: 1503223 - DNA, 15 bp, Homo sapiens
gagcggggagactac

SEQ ID NO: 1503224 - DNA, 15 bp, Homo sapiens
ggagcggggagacta

SEQ ID NO: 1503225 - DNA, 15 bp, Homo sapiens
gggagcggggagact

SEQ ID NO: 1503226 - DNA, 15 bp, Homo sapiens
ggggagcggggagac

SEQ ID NO: 1503227 - DNA, 15 bp, Homo sapiens
gggggagcggggaga

SEQ ID NO: 1503228 - DNA, 15 bp, Homo sapiens
ggggggagcggggag

SEQ ID NO: 1503229 - DNA, 15 bp, Homo sapiens
tggggggagcgggga

SEQ ID NO: 1503230 - DNA, 15 bp, Homo sapiens
gtggggggagcgggg

SEQ ID NO: 1503231 - DNA, 15 bp, Homo sapiens
tgtggggggagcggg

SEQ ID NO: 1503232 - DNA, 15 bp, Homo sapiens
ttgtggggggagcgg

SEQ ID NO: 1503233 - DNA, 15 bp, Homo sapiens
gttgtggggggagcg

SEQ ID NO: 1503234 - DNA, 15 bp, Homo sapiens
ggttgtggggggagc

SEQ ID NO: 1503235 - DNA, 15 bp, Homo sapiens
tggttgtggggggag

SEQ ID NO: 1503236 - DNA, 15 bp, Homo sapiens
gtggttgtgggggga

SEQ ID NO: 1503237 - DNA, 15 bp, Homo sapiens
agtggttgtgggggg

SEQ ID NO: 1503238 - DNA, 15 bp, Homo sapiens
aagtggttgtggggg

SEQ ID NO: 1503239 - DNA, 15 bp, Homo sapiens
taagtggttgtgggg

SEQ ID NO: 1503240 - DNA, 15 bp, Homo sapiens
ataagtggttgtggg

SEQ ID NO: 1503241 - DNA, 15 bp, Homo sapiens
gataagtggttgtgg

SEQ ID NO: 1503242 - DNA, 15 bp, Homo sapiens
tgataagtggttgtg

SEQ ID NO: 1503243 - DNA, 15 bp, Homo sapiens
ctgataagtggttgt

SEQ ID NO: 1503244 - DNA, 15 bp, Homo sapiens
gctgataagtggttg

SEQ ID NO: 1503245 - DNA, 15 bp, Homo sapiens
tgctgataagtggtt

SEQ ID NO: 1503246 - DNA, 15 bp, Homo sapiens
ctgctgataagtggt

SEQ ID NO: 1503247 - DNA, 15 bp, Homo sapiens
actgctgataagtgg

SEQ ID NO: 1503248 - DNA, 15 bp, Homo sapiens
aactgctgataagtg

SEQ ID NO: 1503249 - DNA, 15 bp, Homo sapiens
aaactgctgataagt

SEQ ID NO: 1503250 - DNA, 15 bp, Homo sapiens
aaaactgctgataag

SEQ ID NO: 1503251 - DNA, 15 bp, Homo sapiens
caaaactgctgataa

SEQ ID NO: 1503252 - DNA, 15 bp, Homo sapiens
gcaaaactgctgata

SEQ ID NO: 1503253 - DNA, 15 bp, Homo sapiens
agcaaaactgctgat

SEQ ID NO: 1503254 - DNA, 15 bp, Homo sapiens
aagcaaaactgctga

SEQ ID NO: 1503255 - DNA, 15 bp, Homo sapiens
aaagcaaaactgctg

SEQ ID NO: 1503256 - DNA, 15 bp, Homo sapiens
gaaagcaaaactgct

SEQ ID NO: 1503257 - DNA, 15 bp, Homo sapiens
agaaagcaaaactgc

SEQ ID NO: 1503258 - DNA, 15 bp, Homo sapiens
tagaaagcaaaactg

SEQ ID NO: 1503259 - DNA, 15 bp, Homo sapiens
atagaaagcaaaact

SEQ ID NO: 1503260 - DNA, 15 bp, Homo sapiens
catagaaagcaaaac

SEQ ID NO: 1503261 - DNA, 15 bp, Homo sapiens
ccatagaaagcaaaa

SEQ ID NO: 1503262 - DNA, 15 bp, Homo sapiens
accatagaaagcaaa

SEQ ID NO: 1503263 - DNA, 15 bp, Homo sapiens
aaccatagaaagcaa

SEQ ID NO: 1503264 - DNA, 15 bp, Homo sapiens
aaaccatagaaagca

SEQ ID NO: 1503265 - DNA, 15 bp, Homo sapiens
caaaccatagaaagc

SEQ ID NO: 1503266 - DNA, 15 bp, Homo sapiens
acaaaccatagaaag

SEQ ID NO: 1503267 - DNA, 15 bp, Homo sapiens
aacaaaccatagaaa

SEQ ID NO: 1503268 - DNA, 15 bp, Homo sapiens
caacaaaccatagaa

SEQ ID NO: 1503269 - DNA, 15 bp, Homo sapiens
gcaacaaaccataga

SEQ ID NO: 1503270 - DNA, 15 bp, Homo sapiens
ggcaacaaaccatag

SEQ ID NO: 1503271 - DNA, 15 bp, Homo sapiens
gggcaacaaaccata

SEQ ID NO: 1503272 - DNA, 15 bp, Homo sapiens
tgggcaacaaaccat

SEQ ID NO: 1503273 - DNA, 15 bp, Homo sapiens
gtgggcaacaaacca

SEQ ID NO: 1503274 - DNA, 15 bp, Homo sapiens
tgtgggcaacaaacc

SEQ ID NO: 1503275 - DNA, 15 bp, Homo sapiens
ctgtgggcaacaaac

SEQ ID NO: 1503276 - DNA, 15 bp, Homo sapiens
actgtgggcaacaaa

SEQ ID NO: 1503277 - DNA, 15 bp, Homo sapiens
gactgtgggcaacaa

SEQ ID NO: 1503278 - DNA, 15 bp, Homo sapiens
tgactgtgggcaaca

SEQ ID NO: 1503279 - DNA, 15 bp, Homo sapiens
ttgactgtgggcaac

SEQ ID NO: 1503280 - DNA, 15 bp, Homo sapiens
gttgactgtgggcaa

SEQ ID NO: 1503281 - DNA, 15 bp, Homo sapiens
agttgactgtgggca

SEQ ID NO: 1503282 - DNA, 15 bp, Homo sapiens
cagttgactgtgggc

SEQ ID NO: 1503283 - DNA, 15 bp, Homo sapiens
gcagttgactgtggg

SEQ ID NO: 1503284 - DNA, 15 bp, Homo sapiens
tgcagttgactgtgg

SEQ ID NO: 1503285 - DNA, 15 bp, Homo sapiens
ctgcagttgactgtg

SEQ ID NO: 1503286 - DNA, 15 bp, Homo sapiens
actgcagttgactgt

SEQ ID NO: 1503287 - DNA, 15 bp, Homo sapiens
gactgcagttgactg

SEQ ID NO: 1503288 - DNA, 15 bp, Homo sapiens
agactgcagttgact

SEQ ID NO: 1503289 - DNA, 15 bp, Homo sapiens
cagactgcagttgac

SEQ ID NO: 1503290 - DNA, 15 bp, Homo sapiens
tcagactgcagttga

SEQ ID NO: 1503291 - DNA, 15 bp, Homo sapiens
ttcagactgcagttg

SEQ ID NO: 1503292 - DNA, 15 bp, Homo sapiens
tttcagactgcagtt

SEQ ID NO: 1503293 - DNA, 15 bp, Homo sapiens
ttttcagactgcagt

SEQ ID NO: 1503294 - DNA, 15 bp, Homo sapiens
attttcagactgcag

SEQ ID NO: 1503295 - DNA, 15 bp, Homo sapiens
cattttcagactgca

SEQ ID NO: 1503296 - DNA, 15 bp, Homo sapiens
acattttcagactgc

SEQ ID NO: 1503297 - DNA, 15 bp, Homo sapiens
aacattttcagactg

SEQ ID NO: 1503298 - DNA, 15 bp, Homo sapiens
taacattttcagact

SEQ ID NO: 1503299 - DNA, 15 bp, Homo sapiens
ttaacattttcagac

SEQ ID NO: 1503300 - DNA, 15 bp, Homo sapiens
catttaacattttca

SEQ ID NO: 1503301 - DNA, 15 bp, Homo sapiens
ccatttaacattttc

SEQ ID NO: 1503302 - DNA, 15 bp, Homo sapiens
tccatttaacatttt

SEQ ID NO: 1503303 - DNA, 15 bp, Homo sapiens
ttccatttaacattt

SEQ ID NO: 1503304 - DNA, 15 bp, Homo sapiens
tttccatttaacatt

SEQ ID NO: 1503305 - DNA, 15 bp, Homo sapiens
ttttccatttaacat

SEQ ID NO: 1503306 - DNA, 15 bp, Homo sapiens
attttccatttaaca

SEQ ID NO: 1503307 - DNA, 15 bp, Homo sapiens
aattttccatttaac

SEQ ID NO: 1503308 - DNA, 15 bp, Homo sapiens
gaattttccatttaa

SEQ ID NO: 1503309 - DNA, 15 bp, Homo sapiens
ggaattttccattta

SEQ ID NO: 1503310 - DNA, 15 bp, Homo sapiens
tggaattttccattt

SEQ ID NO: 1503311 - DNA, 15 bp, Homo sapiens
ctggaattttccatt

SEQ ID NO: 1503312 - DNA, 15 bp, Homo sapiens
tctggaattttccat

SEQ ID NO: 1503313 - DNA, 15 bp, Homo sapiens
ttctggaattttcca

SEQ ID NO: 1503314 - DNA, 15 bp, Homo sapiens
tttctggaattttcc

SEQ ID NO: 1503315 - DNA, 15 bp, Homo sapiens
atttctggaattttc

SEQ ID NO: 1503316 - DNA, 15 bp, Homo sapiens
tatttctggaatttt

SEQ ID NO: 1503317 - DNA, 15 bp, Homo sapiens
ttatttctggaattt

SEQ ID NO: 1503318 - DNA, 15 bp, Homo sapiens
tttatttctggaatt

SEQ ID NO: 1503319 - DNA, 15 bp, Homo sapiens
gtttatttctggaat

SEQ ID NO: 1503320 - DNA, 15 bp, Homo sapiens
taaacttatgaattg

SEQ ID NO: 1503321 - DNA, 15 bp, Homo sapiens
ttaaacttatgaatt

SEQ ID NO: 1503322 - DNA, 15 bp, Homo sapiens
tttaaacttatgaat

SEQ ID NO: 1503323 - DNA, 15 bp, Homo sapiens
ttttaaacttatgaa

SEQ ID NO: 1503324 - DNA, 15 bp, Homo sapiens
attttaaacttatga

SEQ ID NO: 1503325 - DNA, 15 bp, Homo sapiens
aattttaaacttatg

SEQ ID NO: 1503326 - DNA, 15 bp, Homo sapiens
caattttaaacttat

SEQ ID NO: 1503327 - DNA, 15 bp, Homo sapiens
gcaattttaaactta

SEQ ID NO: 1503328 - DNA, 15 bp, Homo sapiens
tgcaattttaaactt

SEQ ID NO: 1503329 - DNA, 15 bp, Homo sapiens
atgcaattttaaact

SEQ ID NO: 1503330 - DNA, 15 bp, Homo sapiens
catgcaattttaaac

SEQ ID NO: 1503331 - DNA, 15 bp, Homo sapiens
gcatgcaattttaaa

SEQ ID NO: 1503332 - DNA, 15 bp, Homo sapiens
agcatgcaattttaa

SEQ ID NO: 1503333 - DNA, 15 bp, Homo sapiens
cagcatgcaatttta

SEQ ID NO: 1503334 - DNA, 15 bp, Homo sapiens
acagcatgcaatttt

SEQ ID NO: 1503335 - DNA, 15 bp, Homo sapiens
aacagcatgcaattt

SEQ ID NO: 1503336 - DNA, 15 bp, Homo sapiens
aaacagcatgcaatt

SEQ ID NO: 1503337 - DNA, 15 bp, Homo sapiens
aaaacagcatgcaat

SEQ ID NO: 1503338 - DNA, 15 bp, Homo sapiens
caaaacagcatgcaa

SEQ ID NO: 1503339 - DNA, 15 bp, Homo sapiens
tcaaaacagcatgca

SEQ ID NO: 1503340 - DNA, 15 bp, Homo sapiens
ctcaaaacagcatgc

SEQ ID NO: 1503341 - DNA, 15 bp, Homo sapiens
actcaaaacagcatg

SEQ ID NO: 1503342 - DNA, 15 bp, Homo sapiens
tactcaaaacagcat

SEQ ID NO: 1503343 - DNA, 15 bp, Homo sapiens
ctactcaaaacagca

SEQ ID NO: 1503344 - DNA, 15 bp, Homo sapiens
actactcaaaacagc

SEQ ID NO: 1503345 - DNA, 15 bp, Homo sapiens
cactactcaaaacag

SEQ ID NO: 1503346 - DNA, 15 bp, Homo sapiens
acactactcaaaaca

SEQ ID NO: 1503347 - DNA, 15 bp, Homo sapiens
cacactactcaaaac

SEQ ID NO: 1503348 - DNA, 15 bp, Homo sapiens
tcacactactcaaaa

SEQ ID NO: 1503349 - DNA, 15 bp, Homo sapiens
atcacactactcaaa

SEQ ID NO: 1503350 - DNA, 15 bp, Homo sapiens
catcacactactcaa

SEQ ID NO: 1503351 - DNA, 15 bp, Homo sapiens
tcatcacactactca

SEQ ID NO: 1503352 - DNA, 15 bp, Homo sapiens
ttcatcacactactc

SEQ ID NO: 1503353 - DNA, 15 bp, Homo sapiens
tttcatcacactact

SEQ ID NO: 1503354 - DNA, 15 bp, Homo sapiens
atttcatcacactac

SEQ ID NO: 1503355 - DNA, 15 bp, Homo sapiens
gatttcatcacacta

SEQ ID NO: 1503356 - DNA, 15 bp, Homo sapiens
agatttcatcacact

SEQ ID NO: 1503357 - DNA, 15 bp, Homo sapiens
gagatttcatcacac

SEQ ID NO: 1503358 - DNA, 15 bp, Homo sapiens
tgagatttcatcaca

SEQ ID NO: 1503359 - DNA, 15 bp, Homo sapiens
gtgagatttcatcac

SEQ ID NO: 1503360 - DNA, 15 bp, Homo sapiens
tgtgagatttcatca

SEQ ID NO: 1503361 - DNA, 15 bp, Homo sapiens
gtgtgagatttcatc

SEQ ID NO: 1503362 - DNA, 15 bp, Homo sapiens
tgtgtgagatttcat

SEQ ID NO: 1503363 - DNA, 15 bp, Homo sapiens
ctgtgtgagatttca

SEQ ID NO: 1503364 - DNA, 15 bp, Homo sapiens
actgtgtgagatttc

SEQ ID NO: 1503365 - DNA, 15 bp, Homo sapiens
gactgtgtgagattt

SEQ ID NO: 1503366 - DNA, 15 bp, Homo sapiens
ggactgtgtgagatt

SEQ ID NO: 1503367 - DNA, 15 bp, Homo sapiens
aggactgtgtgagat

SEQ ID NO: 1503368 - DNA, 15 bp, Homo sapiens
caggactgtgtgaga

SEQ ID NO: 1503369 - DNA, 15 bp, Homo sapiens
gcaggactgtgtgag

SEQ ID NO: 1503370 - DNA, 15 bp, Homo sapiens
agcaggactgtgtga

SEQ ID NO: 1503371 - DNA, 15 bp, Homo sapiens
aagcaggactgtgtg

SEQ ID NO: 1503372 - DNA, 15 bp, Homo sapiens
gaagcaggactgtgt

SEQ ID NO: 1503373 - DNA, 15 bp, Homo sapiens
cgaagcaggactgtg

SEQ ID NO: 1503374 - DNA, 15 bp, Homo sapiens
acgaagcaggactgt

SEQ ID NO: 1503375 - DNA, 15 bp, Homo sapiens
gacgaagcaggactg

SEQ ID NO: 1503376 - DNA, 15 bp, Homo sapiens
agacgaagcaggact

SEQ ID NO: 1503377 - DNA, 15 bp, Homo sapiens
aagacgaagcaggac

SEQ ID NO: 1503378 - DNA, 15 bp, Homo sapiens
taagacgaagcagga

SEQ ID NO: 1503379 - DNA, 15 bp, Homo sapiens
gtaagacgaagcagg

SEQ ID NO: 1503380 - DNA, 15 bp, Homo sapiens
agtaagacgaagcag

SEQ ID NO: 1503381 - DNA, 15 bp, Homo sapiens
aagtaagacgaagca

SEQ ID NO: 1503382 - DNA, 15 bp, Homo sapiens
caagtaagacgaagc

SEQ ID NO: 1503383 - DNA, 15 bp, Homo sapiens
ccaagtaagacgaag

SEQ ID NO: 1503384 - DNA, 15 bp, Homo sapiens
cccaagtaagacgaa

SEQ ID NO: 1503385 - DNA, 15 bp, Homo sapiens
tcccaagtaagacga

SEQ ID NO: 1503386 - DNA, 15 bp, Homo sapiens
atcccaagtaagacg

SEQ ID NO: 1503387 - DNA, 15 bp, Homo sapiens
catcccaagtaagac

SEQ ID NO: 1503388 - DNA, 15 bp, Homo sapiens
gcatcccaagtaaga

SEQ ID NO: 1503389 - DNA, 15 bp, Homo sapiens
tgcatcccaagtaag

SEQ ID NO: 1503390 - DNA, 15 bp, Homo sapiens
ttgcatcccaagtaa

SEQ ID NO: 1503391 - DNA, 15 bp, Homo sapiens
tttgcatcccaagta

SEQ ID NO: 1503392 - DNA, 15 bp, Homo sapiens
atttgcatcccaagt

SEQ ID NO: 1503393 - DNA, 15 bp, Homo sapiens
gatttgcatcccaag

SEQ ID NO: 1503394 - DNA, 15 bp, Homo sapiens
tgatttgcatcccaa

SEQ ID NO: 1503395 - DNA, 15 bp, Homo sapiens
atgatttgcatccca

SEQ ID NO: 1503396 - DNA, 15 bp, Homo sapiens
gatgatttgcatccc

SEQ ID NO: 1503397 - DNA, 15 bp, Homo sapiens
ggatgatttgcatcc

SEQ ID NO: 1503398 - DNA, 15 bp, Homo sapiens
gggatgatttgcatc

SEQ ID NO: 1503399 - DNA, 15 bp, Homo sapiens
agggatgatttgcat

SEQ ID NO: 1503400 - DNA, 15 bp, Homo sapiens
aagggatgatttgca

SEQ ID NO: 1503401 - DNA, 15 bp, Homo sapiens
aaagggatgatttgc

SEQ ID NO: 1503402 - DNA, 15 bp, Homo sapiens
caaagggatgatttg

SEQ ID NO: 1503403 - DNA, 15 bp, Homo sapiens
acaaagggatgattt

SEQ ID NO: 1503404 - DNA, 15 bp, Homo sapiens
gacaaagggatgatt

SEQ ID NO: 1503405 - DNA, 15 bp, Homo sapiens
ggacaaagggatgat

SEQ ID NO: 1503406 - DNA, 15 bp, Homo sapiens
tggacaaagggatga

SEQ ID NO: 1503407 - DNA, 15 bp, Homo sapiens
ctggacaaagggatg

SEQ ID NO: 1503408 - DNA, 15 bp, Homo sapiens
actggacaaagggat

SEQ ID NO: 1503409 - DNA, 15 bp, Homo sapiens
cactggacaaaggga

SEQ ID NO: 1503410 - DNA, 15 bp, Homo sapiens
acactggacaaaggg

SEQ ID NO: 1503411 - DNA, 15 bp, Homo sapiens
gatacactggacaaa

SEQ ID NO: 1503412 - DNA, 15 bp, Homo sapiens
ggatacactggacaa

SEQ ID NO: 1503413 - DNA, 15 bp, Homo sapiens
tggatacactggaca

SEQ ID NO: 1503414 - DNA, 15 bp, Homo sapiens
gtggatacactggac

SEQ ID NO: 1503415 - DNA, 15 bp, Homo sapiens
tgtggatacactgga

SEQ ID NO: 1503416 - DNA, 15 bp, Homo sapiens
gtgtggatacactgg

SEQ ID NO: 1503417 - DNA, 15 bp, Homo sapiens
agtgtggatacactg

SEQ ID NO: 1503418 - DNA, 15 bp, Homo sapiens
cagtgtggatacact

SEQ ID NO: 1503419 - DNA, 15 bp, Homo sapiens
acagtgtggatacac

SEQ ID NO: 1503420 - DNA, 15 bp, Homo sapiens
cacagtgtggataca

SEQ ID NO: 1503421 - DNA, 15 bp, Homo sapiens
acacagtgtggatac

SEQ ID NO: 1503422 - DNA, 15 bp, Homo sapiens
tacacagtgtggata

SEQ ID NO: 1503423 - DNA, 15 bp, Homo sapiens
atacacagtgtggat

SEQ ID NO: 1503424 - DNA, 15 bp, Homo sapiens
catacacagtgtgga

SEQ ID NO: 1503425 - DNA, 15 bp, Homo sapiens
ccatacacagtgtgg

SEQ ID NO: 1503426 - DNA, 15 bp, Homo sapiens
accatacacagtgtg

SEQ ID NO: 1503427 - DNA, 15 bp, Homo sapiens
taccatacacagtgt

SEQ ID NO: 1503428 - DNA, 15 bp, Homo sapiens
gtaccatacacagtg

SEQ ID NO: 1503429 - DNA, 15 bp, Homo sapiens
ggtaccatacacagt

SEQ ID NO: 1503430 - DNA, 15 bp, Homo sapiens
aggtaccatacacag

SEQ ID NO: 1503431 - DNA, 15 bp, Homo sapiens
caggtaccatacaca

SEQ ID NO: 1503432 - DNA, 15 bp, Homo sapiens
gcaggtaccatacac

SEQ ID NO: 1503433 - DNA, 15 bp, Homo sapiens
ggcaggtaccataca

SEQ ID NO: 1503434 - DNA, 15 bp, Homo sapiens
aggcaggtaccatac

SEQ ID NO: 1503435 - DNA, 15 bp, Homo sapiens
caggcaggtaccata

SEQ ID NO: 1503436 - DNA, 15 bp, Homo sapiens
acaggcaggtaccat

SEQ ID NO: 1503437 - DNA, 15 bp, Homo sapiens
aacaggcaggtacca

SEQ ID NO: 1503438 - DNA, 15 bp, Homo sapiens
taacaggcaggtacc

SEQ ID NO: 1503439 - DNA, 15 bp, Homo sapiens
ctaacaggcaggtac

SEQ ID NO: 1503440 - DNA, 15 bp, Homo sapiens
actaacaggcaggta

SEQ ID NO: 1503441 - DNA, 15 bp, Homo sapiens
gactaacaggcaggt

SEQ ID NO: 1503442 - DNA, 15 bp, Homo sapiens
tgactaacaggcagg

SEQ ID NO: 1503443 - DNA, 15 bp, Homo sapiens
gtgactaacaggcag

SEQ ID NO: 1503444 - DNA, 15 bp, Homo sapiens
agtgactaacaggca

SEQ ID NO: 1503445 - DNA, 15 bp, Homo sapiens
aagtgactaacaggc

SEQ ID NO: 1503446 - DNA, 15 bp, Homo sapiens
taagtgactaacagg

SEQ ID NO: 1503447 - DNA, 15 bp, Homo sapiens
ctaagtgactaacag

SEQ ID NO: 1503448 - DNA, 15 bp, Homo sapiens
actaagtgactaaca

SEQ ID NO: 1503449 - DNA, 15 bp, Homo sapiens
tactaagtgactaac

SEQ ID NO: 1503450 - DNA, 15 bp, Homo sapiens
ctactaagtgactaa

SEQ ID NO: 1503451 - DNA, 15 bp, Homo sapiens
gctactaagtgacta

SEQ ID NO: 1503452 - DNA, 15 bp, Homo sapiens
ggctactaagtgact

SEQ ID NO: 1503453 - DNA, 15 bp, Homo sapiens
tggctactaagtgac

SEQ ID NO: 1503454 - DNA, 15 bp, Homo sapiens
atggctactaagtga

SEQ ID NO: 1503455 - DNA, 15 bp, Homo sapiens
gatggctactaagtg

SEQ ID NO: 1503456 - DNA, 15 bp, Homo sapiens
agatggctactaagt

SEQ ID NO: 1503457 - DNA, 15 bp, Homo sapiens
gagatggctactaag

SEQ ID NO: 1503458 - DNA, 15 bp, Homo sapiens
tgagatggctactaa

SEQ ID NO: 1503459 - DNA, 15 bp, Homo sapiens
atgagatggctacta

SEQ ID NO: 1503460 - DNA, 15 bp, Homo sapiens
aatgagatggctact

SEQ ID NO: 1503461 - DNA, 15 bp, Homo sapiens
aaatgagatggctac

SEQ ID NO: 1503462 - DNA, 15 bp, Homo sapiens
taaatgagatggcta

SEQ ID NO: 1503463 - DNA, 15 bp, Homo sapiens
ataaatgagatggct

SEQ ID NO: 1503464 - DNA, 15 bp, Homo sapiens
gataaatgagatggc

SEQ ID NO: 1503465 - DNA, 15 bp, Homo sapiens
tgataaatgagatgg

SEQ ID NO: 1503466 - DNA, 15 bp, Homo sapiens
ctgataaatgagatg

SEQ ID NO: 1503467 - DNA, 15 bp, Homo sapiens
tctgataaatgagat

SEQ ID NO: 1503468 - DNA, 15 bp, Homo sapiens
atctgataaatgaga

SEQ ID NO: 1503469 - DNA, 15 bp, Homo sapiens
aatctgataaatgag

SEQ ID NO: 1503470 - DNA, 15 bp, Homo sapiens
caatctgataaatga

SEQ ID NO: 1503471 - DNA, 15 bp, Homo sapiens
tcaatctgataaatg

SEQ ID NO: 1503472 - DNA, 15 bp, Homo sapiens
gtcaatctgataaat

SEQ ID NO: 1503473 - DNA, 15 bp, Homo sapiens
agtcaatctgataaa

SEQ ID NO: 1503474 - DNA, 15 bp, Homo sapiens
cagtcaatctgataa

SEQ ID NO: 1503475 - DNA, 15 bp, Homo sapiens
acagtcaatctgata

SEQ ID NO: 1503476 - DNA, 15 bp, Homo sapiens
gacagtcaatctgat

SEQ ID NO: 1503477 - DNA, 15 bp, Homo sapiens
tgacagtcaatctga

SEQ ID NO: 1503478 - DNA, 15 bp, Homo sapiens
atgacagtcaatctg

SEQ ID NO: 1503479 - DNA, 15 bp, Homo sapiens
catgacagtcaatct

SEQ ID NO: 1503480 - DNA, 15 bp, Homo sapiens
tcatgacagtcaatc

SEQ ID NO: 1503481 - DNA, 15 bp, Homo sapiens
atcatgacagtcaat

SEQ ID NO: 1503482 - DNA, 15 bp, Homo sapiens
tatcatgacagtcaa

SEQ ID NO: 1503483 - DNA, 15 bp, Homo sapiens
atatcatgacagtca

SEQ ID NO: 1503484 - DNA, 15 bp, Homo sapiens
aatatcatgacagtc

SEQ ID NO: 1503485 - DNA, 15 bp, Homo sapiens
caatatcatgacagt

SEQ ID NO: 1503486 - DNA, 15 bp, Homo sapiens
acaatatcatgacag

SEQ ID NO: 1503487 - DNA, 15 bp, Homo sapiens
tacaatatcatgaca

SEQ ID NO: 1503488 - DNA, 15 bp, Homo sapiens
ctacaatatcatgac

SEQ ID NO: 1503489 - DNA, 15 bp, Homo sapiens
actacaatatcatga

SEQ ID NO: 1503490 - DNA, 15 bp, Homo sapiens
cactacaatatcatg

SEQ ID NO: 1503491 - DNA, 15 bp, Homo sapiens
gcactacaatatcat

SEQ ID NO: 1503492 - DNA, 15 bp, Homo sapiens
agcactacaatatca

SEQ ID NO: 1503493 - DNA, 15 bp, Homo sapiens
cagcactacaatatc

SEQ ID NO: 1503494 - DNA, 15 bp, Homo sapiens
acagcactacaatat

SEQ ID NO: 1503495 - DNA, 15 bp, Homo sapiens
cacagcactacaata

SEQ ID NO: 1503496 - DNA, 15 bp, Homo sapiens
acacagcactacaat

SEQ ID NO: 1503497 - DNA, 15 bp, Homo sapiens
aacacagcactacaa

SEQ ID NO: 1503498 - DNA, 15 bp, Homo sapiens
gaacacagcactaca

SEQ ID NO: 1503499 - DNA, 15 bp, Homo sapiens
tgaacacagcactac

SEQ ID NO: 1503500 - DNA, 15 bp, Homo sapiens
ctgaacacagcacta

SEQ ID NO: 1503501 - DNA, 15 bp, Homo sapiens
actgaacacagcact

SEQ ID NO: 1503502 - DNA, 15 bp, Homo sapiens
aactgaacacagcac

SEQ ID NO: 1503503 - DNA, 15 bp, Homo sapiens
taactgaacacagca

SEQ ID NO: 1503504 - DNA, 15 bp, Homo sapiens
ttaactgaacacagc

SEQ ID NO: 1503505 - DNA, 15 bp, Homo sapiens
gttaactgaacacag

SEQ ID NO: 1503506 - DNA, 15 bp, Homo sapiens
ggttaactgaacaca

SEQ ID NO: 1503507 - DNA, 15 bp, Homo sapiens
gggttaactgaacac

SEQ ID NO: 1503508 - DNA, 15 bp, Homo sapiens
agggttaactgaaca

SEQ ID NO: 1503509 - DNA, 15 bp, Homo sapiens
aagggttaactgaac

SEQ ID NO: 1503510 - DNA, 15 bp, Homo sapiens
taagggttaactgaa

SEQ ID NO: 1503511 - DNA, 15 bp, Homo sapiens
ataagggttaactga

SEQ ID NO: 1503512 - DNA, 15 bp, Homo sapiens
aataagggttaactg

SEQ ID NO: 1503513 - DNA, 15 bp, Homo sapiens
aaataagggttaact

SEQ ID NO: 1503514 - DNA, 15 bp, Homo sapiens
aaaataagggttaac

SEQ ID NO: 1503515 - DNA, 15 bp, Homo sapiens
taaaataagggttaa

SEQ ID NO: 1503516 - DNA, 15 bp, Homo sapiens
ataaaataagggtta

SEQ ID NO: 1503517 - DNA, 15 bp, Homo sapiens
tataaaataagggtt

SEQ ID NO: 1503518 - DNA, 15 bp, Homo sapiens
atataaaataagggt

SEQ ID NO: 1503519 - DNA, 15 bp, Homo sapiens
tatataaaataaggg

SEQ ID NO: 1503520 - DNA, 15 bp, Homo sapiens
ctatataaaataagg

SEQ ID NO: 1503521 - DNA, 15 bp, Homo sapiens
actatataaaataag

SEQ ID NO: 1503522 - DNA, 15 bp, Homo sapiens
tactatataaaataa

SEQ ID NO: 1503523 - DNA, 15 bp, Homo sapiens
ttactatataaaata

SEQ ID NO: 1503524 - DNA, 15 bp, Homo sapiens
attactatataaaat

SEQ ID NO: 1503525 - DNA, 15 bp, Homo sapiens
cattactatataaaa

SEQ ID NO: 1503526 - DNA, 15 bp, Homo sapiens
ccattactatataaa

SEQ ID NO: 1503527 - DNA, 15 bp, Homo sapiens
gccattactatataa

SEQ ID NO: 1503528 - DNA, 15 bp, Homo sapiens
ggccattactatata

SEQ ID NO: 1503529 - DNA, 15 bp, Homo sapiens
gggccattactatat

SEQ ID NO: 1503530 - DNA, 15 bp, Homo sapiens
ggggccattactata

SEQ ID NO: 1503531 - DNA, 15 bp, Homo sapiens
tggggccattactat

SEQ ID NO: 1503532 - DNA, 15 bp, Homo sapiens
ttggggccattacta

SEQ ID NO: 1503533 - DNA, 15 bp, Homo sapiens
cttggggccattact

SEQ ID NO: 1503534 - DNA, 15 bp, Homo sapiens
ccttggggccattac

SEQ ID NO: 1503535 - DNA, 15 bp, Homo sapiens
tccttggggccatta

SEQ ID NO: 1503536 - DNA, 15 bp, Homo sapiens
ctccttggggccatt

SEQ ID NO: 1503537 - DNA, 15 bp, Homo sapiens
cctccttggggccat

SEQ ID NO: 1503538 - DNA, 15 bp, Homo sapiens
tcctccttggggcca

SEQ ID NO: 1503539 - DNA, 15 bp, Homo sapiens
ctcctccttggggcc

SEQ ID NO: 1503540 - DNA, 15 bp, Homo sapiens
cctcctccttggggc

SEQ ID NO: 1503541 - DNA, 15 bp, Homo sapiens
tcctcctccttgggg

SEQ ID NO: 1503542 - DNA, 15 bp, Homo sapiens
ctcctcctccttggg

SEQ ID NO: 1503543 - DNA, 15 bp, Homo sapiens
gctcctcctccttgg

SEQ ID NO: 1503544 - DNA, 15 bp, Homo sapiens
tgctcctcctccttg

SEQ ID NO: 1503545 - DNA, 15 bp, Homo sapiens
ctgctcctcctcctt

SEQ ID NO: 1503546 - DNA, 15 bp, Homo sapiens
actgctcctcctcct

SEQ ID NO: 1503547 - DNA, 15 bp, Homo sapiens
cactgctcctcctcc

SEQ ID NO: 1503548 - DNA, 15 bp, Homo sapiens
tcactgctcctcctc

SEQ ID NO: 1503549 - DNA, 15 bp, Homo sapiens
gtcactgctcctcct

SEQ ID NO: 1503550 - DNA, 15 bp, Homo sapiens
cgtcactgctcctcc

SEQ ID NO: 1503551 - DNA, 15 bp, Homo sapiens
gcgtcactgctcctc

SEQ ID NO: 1503552 - DNA, 15 bp, Homo sapiens
agcgtcactgctcct

SEQ ID NO: 1503553 - DNA, 15 bp, Homo sapiens
cagcgtcactgctcc

SEQ ID NO: 1503554 - DNA, 15 bp, Homo sapiens
ccagcgtcactgctc

SEQ ID NO: 1503555 - DNA, 15 bp, Homo sapiens
tccagcgtcactgct

SEQ ID NO: 1503556 - DNA, 15 bp, Homo sapiens
ttccagcgtcactgc

SEQ ID NO: 1503557 - DNA, 15 bp, Homo sapiens
attccagcgtcactg

SEQ ID NO: 1503558 - DNA, 15 bp, Homo sapiens
tattccagcgtcact

SEQ ID NO: 1503559 - DNA, 15 bp, Homo sapiens
atattccagcgtcac

SEQ ID NO: 1503560 - DNA, 15 bp, Homo sapiens
aatattccagcgtca

SEQ ID NO: 1503561 - DNA, 15 bp, Homo sapiens
caatattccagcgtc

SEQ ID NO: 1503562 - DNA, 15 bp, Homo sapiens
acaatattccagcgt

SEQ ID NO: 1503563 - DNA, 15 bp, Homo sapiens
aacaatattccagcg

SEQ ID NO: 1503564 - DNA, 15 bp, Homo sapiens
taacaatattccagc

SEQ ID NO: 1503565 - DNA, 15 bp, Homo sapiens
ataacaatattccag

SEQ ID NO: 1503566 - DNA, 15 bp, Homo sapiens
tataacaatattcca

SEQ ID NO: 1503567 - DNA, 15 bp, Homo sapiens
ttataacaatattcc

SEQ ID NO: 1503568 - DNA, 15 bp, Homo sapiens
attataacaatattc

SEQ ID NO: 1503569 - DNA, 15 bp, Homo sapiens
aattataacaatatt

SEQ ID NO: 1503570 - DNA, 15 bp, Homo sapiens
caattataacaatat

SEQ ID NO: 1503571 - DNA, 15 bp, Homo sapiens
acaattataacaata

SEQ ID NO: 1503572 - DNA, 15 bp, Homo sapiens
aacaattataacaat

SEQ ID NO: 1503573 - DNA, 15 bp, Homo sapiens
gaacaattataacaa

SEQ ID NO: 1503574 - DNA, 15 bp, Homo sapiens
agaacaattataaca

SEQ ID NO: 1503575 - DNA, 15 bp, Homo sapiens
aagaacaattataac

SEQ ID NO: 1503576 - DNA, 15 bp, Homo sapiens
aaagaacaattataa

SEQ ID NO: 1503577 - DNA, 15 bp, Homo sapiens
aaaagaacaattata

SEQ ID NO: 1503578 - DNA, 15 bp, Homo sapiens
aaaaagaacaattat

SEQ ID NO: 1503579 - DNA, 15 bp, Homo sapiens
aaaaaagaacaatta

SEQ ID NO: 1503580 - DNA, 15 bp, Homo sapiens
aaaaaaagaacaatt

SEQ ID NO: 1503581 - DNA, 15 bp, Homo sapiens
taaaaaaagaacaat

SEQ ID NO: 1503582 - DNA, 15 bp, Homo sapiens
ttaaaaaaagaacaa

SEQ ID NO: 1503583 - DNA, 15 bp, Homo sapiens
tttaaaaaaagaaca

SEQ ID NO: 1503584 - DNA, 15 bp, Homo sapiens
ttttaaaaaaagaac

SEQ ID NO: 1503585 - DNA, 15 bp, Homo sapiens
attttaaaaaaagaa

SEQ ID NO: 1503586 - DNA, 15 bp, Homo sapiens
aattttaaaaaaaga

SEQ ID NO: 1503587 - DNA, 15 bp, Homo sapiens
taattttaaaaaaag

SEQ ID NO: 1503588 - DNA, 15 bp, Homo sapiens
ctaattttaaaaaaa

SEQ ID NO: 1503589 - DNA, 15 bp, Homo sapiens
actaattttaaaaaa

SEQ ID NO: 1503590 - DNA, 15 bp, Homo sapiens
aactaattttaaaaa

SEQ ID NO: 1503591 - DNA, 15 bp, Homo sapiens
taactaattttaaaa

SEQ ID NO: 1503592 - DNA, 15 bp, Homo sapiens
ataactaattttaaa

SEQ ID NO: 1503593 - DNA, 15 bp, Homo sapiens
aataactaattttaa

SEQ ID NO: 1503594 - DNA, 15 bp, Homo sapiens
taataactaatttta

SEQ ID NO: 1503595 - DNA, 15 bp, Homo sapiens
ataataactaatttt

SEQ ID NO: 1503596 - DNA, 15 bp, Homo sapiens
aataataactaattt

SEQ ID NO: 1503597 - DNA, 15 bp, Homo sapiens
caataataactaatt

SEQ ID NO: 1503598 - DNA, 15 bp, Homo sapiens
acaataataactaat

SEQ ID NO: 1503599 - DNA, 15 bp, Homo sapiens
gacaataataactaa

SEQ ID NO: 1503600 - DNA, 15 bp, Homo sapiens
cgacaataataacta

SEQ ID NO: 1503601 - DNA, 15 bp, Homo sapiens
tcgacaataataact

SEQ ID NO: 1503602 - DNA, 15 bp, Homo sapiens
atcgacaataataac

SEQ ID NO: 1503603 - DNA, 15 bp, Homo sapiens
gatcgacaataataa

SEQ ID NO: 1503604 - DNA, 15 bp, Homo sapiens
agatcgacaataata

SEQ ID NO: 1503605 - DNA, 15 bp, Homo sapiens
gagatcgacaataat

SEQ ID NO: 1503606 - DNA, 15 bp, Homo sapiens
agagatcgacaataa

SEQ ID NO: 1503607 - DNA, 15 bp, Homo sapiens
aagagatcgacaata

SEQ ID NO: 1503608 - DNA, 15 bp, Homo sapiens
taagagatcgacaat

SEQ ID NO: 1503609 - DNA, 15 bp, Homo sapiens
gtaagagatcgacaa

SEQ ID NO: 1503610 - DNA, 15 bp, Homo sapiens
agtaagagatcgaca

SEQ ID NO: 1503611 - DNA, 15 bp, Homo sapiens
cagtaagagatcgac

SEQ ID NO: 1503612 - DNA, 15 bp, Homo sapiens
acagtaagagatcga

SEQ ID NO: 1503613 - DNA, 15 bp, Homo sapiens
cacagtaagagatcg

SEQ ID NO: 1503614 - DNA, 15 bp, Homo sapiens
acacagtaagagatc

SEQ ID NO: 1503615 - DNA, 15 bp, Homo sapiens
gacacagtaagagat

SEQ ID NO: 1503616 - DNA, 15 bp, Homo sapiens
agacacagtaagaga

SEQ ID NO: 1503617 - DNA, 15 bp, Homo sapiens
aagacacagtaagag

SEQ ID NO: 1503618 - DNA, 15 bp, Homo sapiens
taagacacagtaaga

SEQ ID NO: 1503619 - DNA, 15 bp, Homo sapiens
ataagacacagtaag

SEQ ID NO: 1503620 - DNA, 15 bp, Homo sapiens
tataagacacagtaa

SEQ ID NO: 1503621 - DNA, 15 bp, Homo sapiens
ttataagacacagta

SEQ ID NO: 1503622 - DNA, 15 bp, Homo sapiens
tttataagacacagt

SEQ ID NO: 1503623 - DNA, 15 bp, Homo sapiens
atttataagacacag

SEQ ID NO: 1503624 - DNA, 15 bp, Homo sapiens
aatttataagacaca

SEQ ID NO: 1503625 - DNA, 15 bp, Homo sapiens
taatttataagacac

SEQ ID NO: 1503626 - DNA, 15 bp, Homo sapiens
ttaatttataagaca

SEQ ID NO: 1503627 - DNA, 15 bp, Homo sapiens
tttaatttataagac

SEQ ID NO: 1503628 - DNA, 15 bp, Homo sapiens
gtttaatttataaga

SEQ ID NO: 1503629 - DNA, 15 bp, Homo sapiens
agtttaatttataag

SEQ ID NO: 1503630 - DNA, 15 bp, Homo sapiens
aagtttaatttataa

SEQ ID NO: 1503631 - DNA, 15 bp, Homo sapiens
aaagtttaatttata

SEQ ID NO: 1503632 - DNA, 15 bp, Homo sapiens
aaaagtttaatttat

SEQ ID NO: 1503633 - DNA, 15 bp, Homo sapiens
aaaaagtttaattta

SEQ ID NO: 1503634 - DNA, 15 bp, Homo sapiens
aaaaaagtttaattt

SEQ ID NO: 1503635 - DNA, 15 bp, Homo sapiens
taaaaaagtttaatt

SEQ ID NO: 1503636 - DNA, 15 bp, Homo sapiens
ataaaaaagtttaat

SEQ ID NO: 1503637 - DNA, 15 bp, Homo sapiens
tataaaaaagtttaa

SEQ ID NO: 1503638 - DNA, 15 bp, Homo sapiens
ctataaaaaagttta

SEQ ID NO: 1503639 - DNA, 15 bp, Homo sapiens
cctataaaaaagttt

SEQ ID NO: 1503640 - DNA, 15 bp, Homo sapiens
gcctataaaaaagtt

SEQ ID NO: 1503641 - DNA, 15 bp, Homo sapiens
tgcctataaaaaagt

SEQ ID NO: 1503642 - DNA, 15 bp, Homo sapiens
atgcctataaaaaag

SEQ ID NO: 1503643 - DNA, 15 bp, Homo sapiens
catgcctataaaaaa

SEQ ID NO: 1503644 - DNA, 15 bp, Homo sapiens
acatgcctataaaaa

SEQ ID NO: 1503645 - DNA, 15 bp, Homo sapiens
tacatgcctataaaa

SEQ ID NO: 1503646 - DNA, 15 bp, Homo sapiens
atacatgcctataaa

SEQ ID NO: 1503647 - DNA, 15 bp, Homo sapiens
catacatgcctataa

SEQ ID NO: 1503648 - DNA, 15 bp, Homo sapiens
acatacatgcctata

SEQ ID NO: 1503649 - DNA, 15 bp, Homo sapiens
cacatacatgcctat

SEQ ID NO: 1503650 - DNA, 15 bp, Homo sapiens
acacatacatgccta

SEQ ID NO: 1503651 - DNA, 15 bp, Homo sapiens
tacacatacatgcct

SEQ ID NO: 1503652 - DNA, 15 bp, Homo sapiens
ctacacatacatgcc

SEQ ID NO: 1503653 - DNA, 15 bp, Homo sapiens
cctacacatacatgc

SEQ ID NO: 1503654 - DNA, 15 bp, Homo sapiens
tcctacacatacatg

SEQ ID NO: 1503655 - DNA, 15 bp, Homo sapiens
ttcctacacatacat

SEQ ID NO: 1503656 - DNA, 15 bp, Homo sapiens
tttcctacacataca

SEQ ID NO: 1503657 - DNA, 15 bp, Homo sapiens
ttttcctacacatac

SEQ ID NO: 1503658 - DNA, 15 bp, Homo sapiens
tttttcctacacata

SEQ ID NO: 1503659 - DNA, 15 bp, Homo sapiens
ttttttcctacacat

SEQ ID NO: 1503660 - DNA, 15 bp, Homo sapiens
tttttttcctacaca

SEQ ID NO: 1503661 - DNA, 15 bp, Homo sapiens
gtttttttcctacac

SEQ ID NO: 1503662 - DNA, 15 bp, Homo sapiens
tgtttttttcctaca

SEQ ID NO: 1503663 - DNA, 15 bp, Homo sapiens
atgtttttttcctac

SEQ ID NO: 1503664 - DNA, 15 bp, Homo sapiens
tatgtttttttccta

SEQ ID NO: 1503665 - DNA, 15 bp, Homo sapiens
ctatgtttttttcct

SEQ ID NO: 1503666 - DNA, 15 bp, Homo sapiens
actatgtttttttcc

SEQ ID NO: 1503667 - DNA, 15 bp, Homo sapiens
tactatgtttttttc

SEQ ID NO: 1503668 - DNA, 15 bp, Homo sapiens
atactatgttttttt

SEQ ID NO: 1503669 - DNA, 15 bp, Homo sapiens
tatactatgtttttt

SEQ ID NO: 1503670 - DNA, 15 bp, Homo sapiens
atatactatgttttt

SEQ ID NO: 1503671 - DNA, 15 bp, Homo sapiens
tatatactatgtttt

SEQ ID NO: 1503672 - DNA, 15 bp, Homo sapiens
atatatactatgttt

SEQ ID NO: 1503673 - DNA, 15 bp, Homo sapiens
tatatatactatgtt

SEQ ID NO: 1503674 - DNA, 15 bp, Homo sapiens
atatatatactatgt

SEQ ID NO: 1503675 - DNA, 15 bp, Homo sapiens
tatatatatactatg

SEQ ID NO: 1503676 - DNA, 15 bp, Homo sapiens
ctatatatatactat

SEQ ID NO: 1503677 - DNA, 15 bp, Homo sapiens
cctatatatatacta

SEQ ID NO: 1503678 - DNA, 15 bp, Homo sapiens
ccctatatatatact

SEQ ID NO: 1503679 - DNA, 15 bp, Homo sapiens
accctatatatatac

SEQ ID NO: 1503680 - DNA, 15 bp, Homo sapiens
aaccctatatatata

SEQ ID NO: 1503681 - DNA, 15 bp, Homo sapiens
gaaccctatatatat

SEQ ID NO: 1503682 - DNA, 15 bp, Homo sapiens
tgaaccctatatata

SEQ ID NO: 1503683 - DNA, 15 bp, Homo sapiens
ctgaaccctatatat

SEQ ID NO: 1503684 - DNA, 15 bp, Homo sapiens
actgaaccctatata

SEQ ID NO: 1503685 - DNA, 15 bp, Homo sapiens
tactgaaccctatat

SEQ ID NO: 1503686 - DNA, 15 bp, Homo sapiens
gtactgaaccctata

SEQ ID NO: 1503687 - DNA, 15 bp, Homo sapiens
agtactgaaccctat

SEQ ID NO: 1503688 - DNA, 15 bp, Homo sapiens
tagtactgaacccta

SEQ ID NO: 1503689 - DNA, 15 bp, Homo sapiens
agggatagtactgaa

SEQ ID NO: 1503690 - DNA, 15 bp, Homo sapiens
cagggatagtactga

SEQ ID NO: 1503691 - DNA, 15 bp, Homo sapiens
ccagggatagtactg

SEQ ID NO: 1503692 - DNA, 15 bp, Homo sapiens
tccagggatagtact

SEQ ID NO: 1503693 - DNA, 15 bp, Homo sapiens
atccagggatagtac

SEQ ID NO: 1503694 - DNA, 15 bp, Homo sapiens
aatccagggatagta

SEQ ID NO: 1503695 - DNA, 15 bp, Homo sapiens
gaatccagggatagt

SEQ ID NO: 1503696 - DNA, 15 bp, Homo sapiens
tgaatccagggatag

SEQ ID NO: 1503697 - DNA, 15 bp, Homo sapiens
ctgaatccagggata

SEQ ID NO: 1503698 - DNA, 15 bp, Homo sapiens
cctgaatccagggat

SEQ ID NO: 1503699 - DNA, 15 bp, Homo sapiens
gcctgaatccaggga

SEQ ID NO: 1503700 - DNA, 15 bp, Homo sapiens
tgcctgaatccaggg

SEQ ID NO: 1503701 - DNA, 15 bp, Homo sapiens
atgcctgaatccagg

SEQ ID NO: 1503702 - DNA, 15 bp, Homo sapiens
gatgcctgaatccag

SEQ ID NO: 1503703 - DNA, 15 bp, Homo sapiens
ggatgcctgaatcca

SEQ ID NO: 1503704 - DNA, 15 bp, Homo sapiens
tggatgcctgaatcc

SEQ ID NO: 1503705 - DNA, 15 bp, Homo sapiens
gtggatgcctgaatc

SEQ ID NO: 1503706 - DNA, 15 bp, Homo sapiens
agtggatgcctgaat

SEQ ID NO: 1503707 - DNA, 15 bp, Homo sapiens
gccccagtggatgcc

SEQ ID NO: 1503708 - DNA, 15 bp, Homo sapiens
agccccagtggatgc

SEQ ID NO: 1503709 - DNA, 15 bp, Homo sapiens
gagccccagtggatg

SEQ ID NO: 1503710 - DNA, 15 bp, Homo sapiens
agagccccagtggat

SEQ ID NO: 1503711 - DNA, 15 bp, Homo sapiens
aagagccccagtgga

SEQ ID NO: 1503712 - DNA, 15 bp, Homo sapiens
caagagccccagtgg

SEQ ID NO: 1503713 - DNA, 15 bp, Homo sapiens
ccaagagccccagtg

SEQ ID NO: 1503714 - DNA, 15 bp, Homo sapiens
tccaagagccccagt

SEQ ID NO: 1503715 - DNA, 15 bp, Homo sapiens
ttccaagagccccag

SEQ ID NO: 1503716 - DNA, 15 bp, Homo sapiens
gttccaagagcccca

SEQ ID NO: 1503717 - DNA, 15 bp, Homo sapiens
agttccaagagcccc

SEQ ID NO: 1503718 - DNA, 15 bp, Homo sapiens
aagttccaagagccc

SEQ ID NO: 1503719 - DNA, 15 bp, Homo sapiens
taagttccaagagcc

SEQ ID NO: 1503720 - DNA, 15 bp, Homo sapiens
ataagttccaagagc

SEQ ID NO: 1503721 - DNA, 15 bp, Homo sapiens
cataagttccaagag

SEQ ID NO: 1503722 - DNA, 15 bp, Homo sapiens
gcataagttccaaga

SEQ ID NO: 1503723 - DNA, 15 bp, Homo sapiens
ggcataagttccaag

SEQ ID NO: 1503724 - DNA, 15 bp, Homo sapiens
gggcataagttccaa

SEQ ID NO: 1503725 - DNA, 15 bp, Homo sapiens
ggggcataagttcca

SEQ ID NO: 1503726 - DNA, 15 bp, Homo sapiens
tggggcataagttcc

SEQ ID NO: 1503727 - DNA, 15 bp, Homo sapiens
atggggcataagttc

SEQ ID NO: 1503728 - DNA, 15 bp, Homo sapiens
catggggcataagtt

SEQ ID NO: 1503729 - DNA, 15 bp, Homo sapiens
ccatggggcataagt

SEQ ID NO: 1503730 - DNA, 15 bp, Homo sapiens
tccatggggcataag

SEQ ID NO: 1503731 - DNA, 15 bp, Homo sapiens
atccatggggcataa

SEQ ID NO: 1503732 - DNA, 15 bp, Homo sapiens
tatccatggggcata

SEQ ID NO: 1503733 - DNA, 15 bp, Homo sapiens
ttatccatggggcat

SEQ ID NO: 1503734 - DNA, 15 bp, Homo sapiens
cttatccatggggca

SEQ ID NO: 1503735 - DNA, 15 bp, Homo sapiens
ccttatccatggggc

SEQ ID NO: 1503736 - DNA, 15 bp, Homo sapiens
cccttatccatgggg

SEQ ID NO: 1503737 - DNA, 15 bp, Homo sapiens
ccccttatccatggg

SEQ ID NO: 1503738 - DNA, 15 bp, Homo sapiens
tccccttatccatgg

SEQ ID NO: 1503739 - DNA, 15 bp, Homo sapiens
ctccccttatccatg

SEQ ID NO: 1503740 - DNA, 15 bp, Homo sapiens
tctccccttatccat

SEQ ID NO: 1503741 - DNA, 15 bp, Homo sapiens
gtctccccttatcca

SEQ ID NO: 1503742 - DNA, 15 bp, Homo sapiens
agtctccccttatcc

SEQ ID NO: 1503743 - DNA, 15 bp, Homo sapiens
tagtctccccttatc

SEQ ID NO: 1503744 - DNA, 15 bp, Homo sapiens
gtagtctccccttat

SEQ ID NO: 1503745 - DNA, 15 bp, Homo sapiens
agtagtctcccctta

SEQ ID NO: 1503746 - DNA, 15 bp, Homo sapiens
cagtagtctcccctt

SEQ ID NO: 1503747 - DNA, 15 bp, Homo sapiens
acagtagtctcccct

SEQ ID NO: 1503748 - DNA, 15 bp, Homo sapiens
tacagtagtctcccc

SEQ ID NO: 1503749 - DNA, 15 bp, Homo sapiens
atacagtagtctccc

SEQ ID NO: 1503750 - DNA, 15 bp, Homo sapiens
gatacagtagtctcc

SEQ ID NO: 1503751 - DNA, 15 bp, Homo sapiens
agatacagtagtctc

SEQ ID NO: 1503752 - DNA, 15 bp, Homo sapiens
aagatacagtagtct

SEQ ID NO: 1503753 - DNA, 15 bp, Homo sapiens
aaagatacagtagtc

SEQ ID NO: 1503754 - DNA, 15 bp, Homo sapiens
taaagatacagtagt

SEQ ID NO: 1503755 - DNA, 15 bp, Homo sapiens
ataaagatacagtag

SEQ ID NO: 1503756 - DNA, 15 bp, Homo sapiens
aataaagatacagta

SEQ ID NO: 1503757 - DNA, 15 bp, Homo sapiens
aaataaagatacagt

SEQ ID NO: 1503758 - DNA, 15 bp, Homo sapiens
gaaataaagatacag

SEQ ID NO: 1503759 - DNA, 15 bp, Homo sapiens
agaaataaagataca

SEQ ID NO: 1503760 - DNA, 15 bp, Homo sapiens
gagaaataaagatac

SEQ ID NO: 1503761 - DNA, 15 bp, Homo sapiens
ggagaaataaagata

SEQ ID NO: 1503762 - DNA, 15 bp, Homo sapiens
gggagaaataaagat

SEQ ID NO: 1503763 - DNA, 15 bp, Homo sapiens
agggagaaataaaga

SEQ ID NO: 1503764 - DNA, 15 bp, Homo sapiens
taagggagaaataaa

SEQ ID NO: 1503765 - DNA, 15 bp, Homo sapiens
ataagggagaaataa

SEQ ID NO: 1503766 - DNA, 15 bp, Homo sapiens
aataagggagaaata

SEQ ID NO: 1503767 - DNA, 15 bp, Homo sapiens
gaataagggagaaat

SEQ ID NO: 1503768 - DNA, 15 bp, Homo sapiens
agaataagggagaaa

SEQ ID NO: 1503769 - DNA, 15 bp, Homo sapiens
aagaataagggagaa

SEQ ID NO: 1503770 - DNA, 15 bp, Homo sapiens
caagaataagggaga

SEQ ID NO: 1503771 - DNA, 15 bp, Homo sapiens
tcaagaataagggag

SEQ ID NO: 1503772 - DNA, 15 bp, Homo sapiens
ttcaagaataaggga

SEQ ID NO: 1503773 - DNA, 15 bp, Homo sapiens
attcaagaataaggg

SEQ ID NO: 1503774 - DNA, 15 bp, Homo sapiens
cattcaagaataagg

SEQ ID NO: 1503775 - DNA, 15 bp, Homo sapiens
tcattcaagaataag

SEQ ID NO: 1503776 - DNA, 15 bp, Homo sapiens
atcattcaagaataa

SEQ ID NO: 1503777 - DNA, 15 bp, Homo sapiens
tatcattcaagaata

SEQ ID NO: 1503778 - DNA, 15 bp, Homo sapiens
ctatcattcaagaat

SEQ ID NO: 1503779 - DNA, 15 bp, Homo sapiens
actatcattcaagaa

SEQ ID NO: 1503780 - DNA, 15 bp, Homo sapiens
aactatcattcaaga

SEQ ID NO: 1503781 - DNA, 15 bp, Homo sapiens
aaactatcattcaag

SEQ ID NO: 1503782 - DNA, 15 bp, Homo sapiens
aaaactatcattcaa

SEQ ID NO: 1503783 - DNA, 15 bp, Homo sapiens
caaaactatcattca

SEQ ID NO: 1503784 - DNA, 15 bp, Homo sapiens
gcaaaactatcattc

SEQ ID NO: 1503785 - DNA, 15 bp, Homo sapiens
agcaaaactatcatt

SEQ ID NO: 1503786 - DNA, 15 bp, Homo sapiens
cagcaaaactatcat

SEQ ID NO: 1503787 - DNA, 15 bp, Homo sapiens
ccagcaaaactatca

SEQ ID NO: 1503788 - DNA, 15 bp, Homo sapiens
tccagcaaaactatc

SEQ ID NO: 1503789 - DNA, 15 bp, Homo sapiens
atccagcaaaactat

SEQ ID NO: 1503790 - DNA, 15 bp, Homo sapiens
tatccagcaaaacta

SEQ ID NO: 1503791 - DNA, 15 bp, Homo sapiens
atatccagcaaaact

SEQ ID NO: 1503792 - DNA, 15 bp, Homo sapiens
tatatccagcaaaac

SEQ ID NO: 1503793 - DNA, 15 bp, Homo sapiens
atatatccagcaaaa

SEQ ID NO: 1503794 - DNA, 15 bp, Homo sapiens
tatatatccagcaaa

SEQ ID NO: 1503795 - DNA, 15 bp, Homo sapiens
ctatatatccagcaa

SEQ ID NO: 1503796 - DNA, 15 bp, Homo sapiens
tctatatatccagca

SEQ ID NO: 1503797 - DNA, 15 bp, Homo sapiens
ttctatatatccagc

SEQ ID NO: 1503798 - DNA, 15 bp, Homo sapiens
attctatatatccag

SEQ ID NO: 1503799 - DNA, 15 bp, Homo sapiens
aattctatatatcca

SEQ ID NO: 1503800 - DNA, 15 bp, Homo sapiens
gaattctatatatcc

SEQ ID NO: 1503801 - DNA, 15 bp, Homo sapiens
agaattctatatatc

SEQ ID NO: 1503802 - DNA, 15 bp, Homo sapiens
cagaattctatatat

SEQ ID NO: 1503803 - DNA, 15 bp, Homo sapiens
ccagaattctatata

SEQ ID NO: 1503804 - DNA, 15 bp, Homo sapiens
tccagaattctatat

SEQ ID NO: 1503805 - DNA, 15 bp, Homo sapiens
gtccagaattctata

SEQ ID NO: 1503806 - DNA, 15 bp, Homo sapiens
tgtccagaattctat

SEQ ID NO: 1503807 - DNA, 15 bp, Homo sapiens
ctgtccagaattcta

SEQ ID NO: 1503808 - DNA, 15 bp, Homo sapiens
actgtccagaattct

SEQ ID NO: 1503809 - DNA, 15 bp, Homo sapiens
aactgtccagaattc

SEQ ID NO: 1503810 - DNA, 15 bp, Homo sapiens
taactgtccagaatt

SEQ ID NO: 1503811 - DNA, 15 bp, Homo sapiens
ataactgtccagaat

SEQ ID NO: 1503812 - DNA, 15 bp, Homo sapiens
cataactgtccagaa

SEQ ID NO: 1503813 - DNA, 15 bp, Homo sapiens
acataactgtccaga

SEQ ID NO: 1503814 - DNA, 15 bp, Homo sapiens
aacataactgtccag

SEQ ID NO: 1503815 - DNA, 15 bp, Homo sapiens
aaacataactgtcca

SEQ ID NO: 1503816 - DNA, 15 bp, Homo sapiens
gaaacataactgtcc

SEQ ID NO: 1503817 - DNA, 15 bp, Homo sapiens
ggaaacataactgtc

SEQ ID NO: 1503818 - DNA, 15 bp, Homo sapiens
gggaaacataactgt

SEQ ID NO: 1503819 - DNA, 15 bp, Homo sapiens
agggaaacataactg

SEQ ID NO: 1503820 - DNA, 15 bp, Homo sapiens
gagggaaacataact

SEQ ID NO: 1503821 - DNA, 15 bp, Homo sapiens
tgagggaaacataac

SEQ ID NO: 1503822 - DNA, 15 bp, Homo sapiens
ctgagggaaacataa

SEQ ID NO: 1503823 - DNA, 15 bp, Homo sapiens
actgagggaaacata

SEQ ID NO: 1503824 - DNA, 15 bp, Homo sapiens
tactgagggaaacat

SEQ ID NO: 1503825 - DNA, 15 bp, Homo sapiens
atactgagggaaaca

SEQ ID NO: 1503826 - DNA, 15 bp, Homo sapiens
catactgagggaaac

SEQ ID NO: 1503827 - DNA, 15 bp, Homo sapiens
acatactgagggaaa

SEQ ID NO: 1503828 - DNA, 15 bp, Homo sapiens
aacatactgagggaa

SEQ ID NO: 1503829 - DNA, 15 bp, Homo sapiens
taacatactgaggga

SEQ ID NO: 1503830 - DNA, 15 bp, Homo sapiens
ttaacatactgaggg

SEQ ID NO: 1503831 - DNA, 15 bp, Homo sapiens
tttaacatactgagg

SEQ ID NO: 1503832 - DNA, 15 bp, Homo sapiens
ctttaacatactgag

SEQ ID NO: 1503833 - DNA, 15 bp, Homo sapiens
tctttaacatactga

SEQ ID NO: 1503834 - DNA, 15 bp, Homo sapiens
atctttaacatactg

SEQ ID NO: 1503835 - DNA, 15 bp, Homo sapiens
tatctttaacatact

SEQ ID NO: 1503836 - DNA, 15 bp, Homo sapiens
gtatctttaacatac

SEQ ID NO: 1503837 - DNA, 15 bp, Homo sapiens
agtatctttaacata

SEQ ID NO: 1503838 - DNA, 15 bp, Homo sapiens
tagtatctttaacat

SEQ ID NO: 1503839 - DNA, 15 bp, Homo sapiens
atagtatctttaaca

SEQ ID NO: 1503840 - DNA, 15 bp, Homo sapiens
aatagtatctttaac

SEQ ID NO: 1503841 - DNA, 15 bp, Homo sapiens
aaatagtatctttaa

SEQ ID NO: 1503842 - DNA, 15 bp, Homo sapiens
gaaatagtatcttta

SEQ ID NO: 1503843 - DNA, 15 bp, Homo sapiens
tgaaatagtatcttt

SEQ ID NO: 1503844 - DNA, 15 bp, Homo sapiens
gtgaaatagtatctt

SEQ ID NO: 1503845 - DNA, 15 bp, Homo sapiens
agtgaaatagtatct

SEQ ID NO: 1503846 - DNA, 15 bp, Homo sapiens
tagtgaaatagtatc

SEQ ID NO: 1503847 - DNA, 15 bp, Homo sapiens
atagtgaaatagtat

SEQ ID NO: 1503848 - DNA, 15 bp, Homo sapiens
gatagtgaaatagta

SEQ ID NO: 1503849 - DNA, 15 bp, Homo sapiens
agatagtgaaatagt

SEQ ID NO: 1503850 - DNA, 15 bp, Homo sapiens
cagatagtgaaatag

SEQ ID NO: 1503851 - DNA, 15 bp, Homo sapiens
acagatagtgaaata

SEQ ID NO: 1503852 - DNA, 15 bp, Homo sapiens
gacagatagtgaaat

SEQ ID NO: 1503853 - DNA, 15 bp, Homo sapiens
agacagatagtgaaa

SEQ ID NO: 1503854 - DNA, 15 bp, Homo sapiens
cagacagatagtgaa

SEQ ID NO: 1503855 - DNA, 15 bp, Homo sapiens
gcagacagatagtga

SEQ ID NO: 1503856 - DNA, 15 bp, Homo sapiens
agcagacagatagtg

SEQ ID NO: 1503857 - DNA, 15 bp, Homo sapiens
tagcagacagatagt

SEQ ID NO: 1503858 - DNA, 15 bp, Homo sapiens
atagcagacagatag

SEQ ID NO: 1503859 - DNA, 15 bp, Homo sapiens
gatagcagacagata

SEQ ID NO: 1503860 - DNA, 15 bp, Homo sapiens
tgatagcagacagat

SEQ ID NO: 1503861 - DNA, 15 bp, Homo sapiens
atgatagcagacaga

SEQ ID NO: 1503862 - DNA, 15 bp, Homo sapiens
tatgatagcagacag

SEQ ID NO: 1503863 - DNA, 15 bp, Homo sapiens
ctatgatagcagaca

SEQ ID NO: 1503864 - DNA, 15 bp, Homo sapiens
gctatgatagcagac

SEQ ID NO: 1503865 - DNA, 15 bp, Homo sapiens
ggctatgatagcaga

SEQ ID NO: 1503866 - DNA, 15 bp, Homo sapiens
tggctatgatagcag

SEQ ID NO: 1503867 - DNA, 15 bp, Homo sapiens
atggctatgatagca

SEQ ID NO: 1503868 - DNA, 15 bp, Homo sapiens
aatggctatgatagc

SEQ ID NO: 1503869 - DNA, 15 bp, Homo sapiens
caatggctatgatag

SEQ ID NO: 1503870 - DNA, 15 bp, Homo sapiens
tcaatggctatgata

SEQ ID NO: 1503871 - DNA, 15 bp, Homo sapiens
ctcaatggctatgat

SEQ ID NO: 1503872 - DNA, 15 bp, Homo sapiens
tctcaatggctatga

SEQ ID NO: 1503873 - DNA, 15 bp, Homo sapiens
ttctcaatggctatg

SEQ ID NO: 1503874 - DNA, 15 bp, Homo sapiens
attctcaatggctat

SEQ ID NO: 1503875 - DNA, 15 bp, Homo sapiens
aattctcaatggcta

SEQ ID NO: 1503876 - DNA, 15 bp, Homo sapiens
gaattctcaatggct

SEQ ID NO: 1503877 - DNA, 15 bp, Homo sapiens
tgaattctcaatggc

SEQ ID NO: 1503878 - DNA, 15 bp, Homo sapiens
ctgaattctcaatgg

SEQ ID NO: 1503879 - DNA, 15 bp, Homo sapiens
actgaattctcaatg

SEQ ID NO: 1503880 - DNA, 15 bp, Homo sapiens
aactgaattctcaat

SEQ ID NO: 1503881 - DNA, 15 bp, Homo sapiens
caactgaattctcaa

SEQ ID NO: 1503882 - DNA, 15 bp, Homo sapiens
tcaactgaattctca

SEQ ID NO: 1503883 - DNA, 15 bp, Homo sapiens
gtcaactgaattctc

SEQ ID NO: 1503884 - DNA, 15 bp, Homo sapiens
tgtcaactgaattct

SEQ ID NO: 1503885 - DNA, 15 bp, Homo sapiens
atgtcaactgaattc

SEQ ID NO: 1503886 - DNA, 15 bp, Homo sapiens
tatgtcaactgaatt

SEQ ID NO: 1503887 - DNA, 15 bp, Homo sapiens
ttatgtcaactgaat

SEQ ID NO: 1503888 - DNA, 15 bp, Homo sapiens
attatgtcaactgaa

SEQ ID NO: 1503889 - DNA, 15 bp, Homo sapiens
aattatgtcaactga

SEQ ID NO: 1503890 - DNA, 15 bp, Homo sapiens
caattatgtcaactg

SEQ ID NO: 1503891 - DNA, 15 bp, Homo sapiens
gcaattatgtcaact

SEQ ID NO: 1503892 - DNA, 15 bp, Homo sapiens
ggcaattatgtcaac

SEQ ID NO: 1503893 - DNA, 15 bp, Homo sapiens
aggcaattatgtcaa

SEQ ID NO: 1503894 - DNA, 15 bp, Homo sapiens
aaggcaattatgtca

SEQ ID NO: 1503895 - DNA, 15 bp, Homo sapiens
aaaggcaattatgtc

SEQ ID NO: 1503896 - DNA, 15 bp, Homo sapiens
taaaggcaattatgt

SEQ ID NO: 1503897 - DNA, 15 bp, Homo sapiens
ataaaggcaattatg

SEQ ID NO: 1503898 - DNA, 15 bp, Homo sapiens
aataaaggcaattat

SEQ ID NO: 1503899 - DNA, 15 bp, Homo sapiens
aaataaaggcaatta

SEQ ID NO: 1503900 - DNA, 15 bp, Homo sapiens
aaaataaaggcaatt

SEQ ID NO: 1503901 - DNA, 15 bp, Homo sapiens
taaaataaaggcaat

SEQ ID NO: 1503902 - DNA, 15 bp, Homo sapiens
ataaaataaaggcaa

SEQ ID NO: 1503903 - DNA, 15 bp, Homo sapiens
tataaaataaaggca

SEQ ID NO: 1503904 - DNA, 15 bp, Homo sapiens
ctataaaataaaggc

SEQ ID NO: 1503905 - DNA, 15 bp, Homo sapiens
cctataaaataaagg

SEQ ID NO: 1503906 - DNA, 15 bp, Homo sapiens
acctataaaataaag

SEQ ID NO: 1503907 - DNA, 15 bp, Homo sapiens
cacctataaaataaa

SEQ ID NO: 1503908 - DNA, 15 bp, Homo sapiens
tcacctataaaataa

SEQ ID NO: 1503909 - DNA, 15 bp, Homo sapiens
gtcacctataaaata

SEQ ID NO: 1503910 - DNA, 15 bp, Homo sapiens
tgtcacctataaaat

SEQ ID NO: 1503911 - DNA, 15 bp, Homo sapiens
atgtcacctataaaa

SEQ ID NO: 1503912 - DNA, 15 bp, Homo sapiens
aatgtcacctataaa

SEQ ID NO: 1503913 - DNA, 15 bp, Homo sapiens
aaatgtcacctataa

SEQ ID NO: 1503914 - DNA, 15 bp, Homo sapiens
aaaatgtcacctata

SEQ ID NO: 1503915 - DNA, 15 bp, Homo sapiens
gaaaatgtcacctat

SEQ ID NO: 1503916 - DNA, 15 bp, Homo sapiens
agaaaatgtcaccta

SEQ ID NO: 1503917 - DNA, 15 bp, Homo sapiens
gagaaaatgtcacct

SEQ ID NO: 1503918 - DNA, 15 bp, Homo sapiens
agagaaaatgtcacc

SEQ ID NO: 1503919 - DNA, 15 bp, Homo sapiens
gagagaaaatgtcac

SEQ ID NO: 1503920 - DNA, 15 bp, Homo sapiens
ggagagaaaatgtca

SEQ ID NO: 1503921 - DNA, 15 bp, Homo sapiens
tggagagaaaatgtc

SEQ ID NO: 1503922 - DNA, 15 bp, Homo sapiens
ctggagagaaaatgt

SEQ ID NO: 1503923 - DNA, 15 bp, Homo sapiens
actggagagaaaatg

SEQ ID NO: 1503924 - DNA, 15 bp, Homo sapiens
aactggagagaaaat

SEQ ID NO: 1503925 - DNA, 15 bp, Homo sapiens
caactggagagaaaa

SEQ ID NO: 1503926 - DNA, 15 bp, Homo sapiens
acaactggagagaaa

SEQ ID NO: 1503927 - DNA, 15 bp, Homo sapiens
aacaactggagagaa

SEQ ID NO: 1503928 - DNA, 15 bp, Homo sapiens
aaacaactggagaga

SEQ ID NO: 1503929 - DNA, 15 bp, Homo sapiens
aaaacaactggagag

SEQ ID NO: 1503930 - DNA, 15 bp, Homo sapiens
aaaaacaactggaga

SEQ ID NO: 1503931 - DNA, 15 bp, Homo sapiens
aaaaaacaactggag

SEQ ID NO: 1503932 - DNA, 15 bp, Homo sapiens
aaaaaaacaactgga

SEQ ID NO: 1503933 - DNA, 15 bp, Homo sapiens
taaaaaaacaactgg

SEQ ID NO: 1503934 - DNA, 15 bp, Homo sapiens
ctaaaaaaacaactg

SEQ ID NO: 1503935 - DNA, 15 bp, Homo sapiens
cctaaaaaaacaact

SEQ ID NO: 1503936 - DNA, 15 bp, Homo sapiens
acctaaaaaaacaac

SEQ ID NO: 1503937 - DNA, 15 bp, Homo sapiens
gacctaaaaaaacaa

SEQ ID NO: 1503938 - DNA, 15 bp, Homo sapiens
agacctaaaaaaaca

SEQ ID NO: 1503939 - DNA, 15 bp, Homo sapiens
gagacctaaaaaaac

SEQ ID NO: 1503940 - DNA, 15 bp, Homo sapiens
ggagacctaaaaaaa

SEQ ID NO: 1503941 - DNA, 15 bp, Homo sapiens
aggagacctaaaaaa

SEQ ID NO: 1503942 - DNA, 15 bp, Homo sapiens
aaggagacctaaaaa

SEQ ID NO: 1503943 - DNA, 15 bp, Homo sapiens
aaaggagacctaaaa

SEQ ID NO: 1503944 - DNA, 15 bp, Homo sapiens
aaaaggagacctaaa

SEQ ID NO: 1503945 - DNA, 15 bp, Homo sapiens
aaaaaggagacctaa

SEQ ID NO: 1503946 - DNA, 15 bp, Homo sapiens
caaaaaggagaccta

SEQ ID NO: 1503947 - DNA, 15 bp, Homo sapiens
acaaaaaggagacct

SEQ ID NO: 1503948 - DNA, 15 bp, Homo sapiens
aacaaaaaggagacc

SEQ ID NO: 1503949 - DNA, 15 bp, Homo sapiens
caacaaaaaggagac

SEQ ID NO: 1503950 - DNA, 15 bp, Homo sapiens
acaacaaaaaggaga

SEQ ID NO: 1503951 - DNA, 15 bp, Homo sapiens
aacaacaaaaaggag

SEQ ID NO: 1503952 - DNA, 15 bp, Homo sapiens
aaacaacaaaaagga

SEQ ID NO: 1503953 - DNA, 15 bp, Homo sapiens
caaacaacaaaaagg

SEQ ID NO: 1503954 - DNA, 15 bp, Homo sapiens
acaaacaacaaaaag

SEQ ID NO: 1503955 - DNA, 15 bp, Homo sapiens
gaacaaacaacaaaa

SEQ ID NO: 1503956 - DNA, 15 bp, Homo sapiens
agaacaaacaacaaa

SEQ ID NO: 1503957 - DNA, 15 bp, Homo sapiens
cagaacaaacaacaa

SEQ ID NO: 1503958 - DNA, 15 bp, Homo sapiens
acagaacaaacaaca

SEQ ID NO: 1503959 - DNA, 15 bp, Homo sapiens
tacagaacaaacaac

SEQ ID NO: 1503960 - DNA, 15 bp, Homo sapiens
ctacagaacaaacaa

SEQ ID NO: 1503961 - DNA, 15 bp, Homo sapiens
actacagaacaaaca

SEQ ID NO: 1503962 - DNA, 15 bp, Homo sapiens
aactacagaacaaac

SEQ ID NO: 1503963 - DNA, 15 bp, Homo sapiens
aaactacagaacaaa

SEQ ID NO: 1503964 - DNA, 15 bp, Homo sapiens
gaaactacagaacaa

SEQ ID NO: 1503965 - DNA, 15 bp, Homo sapiens
tgaaactacagaaca

SEQ ID NO: 1503966 - DNA, 15 bp, Homo sapiens
gtgaaactacagaac

SEQ ID NO: 1503967 - DNA, 15 bp, Homo sapiens
ggtgaaactacagaa

SEQ ID NO: 1503968 - DNA, 15 bp, Homo sapiens
tggtgaaactacaga

SEQ ID NO: 1503969 - DNA, 15 bp, Homo sapiens
ttggtgaaactacag

SEQ ID NO: 1503970 - DNA, 15 bp, Homo sapiens
tttggtgaaactaca

SEQ ID NO: 1503971 - DNA, 15 bp, Homo sapiens
ttttggtgaaactac

SEQ ID NO: 1503972 - DNA, 15 bp, Homo sapiens
attttggtgaaacta

SEQ ID NO: 1503973 - DNA, 15 bp, Homo sapiens
cattttggtgaaact

SEQ ID NO: 1503974 - DNA, 15 bp, Homo sapiens
acattttggtgaaac

SEQ ID NO: 1503975 - DNA, 15 bp, Homo sapiens
aacattttggtgaaa

SEQ ID NO: 1503976 - DNA, 15 bp, Homo sapiens
aaacattttggtgaa

SEQ ID NO: 1503977 - DNA, 15 bp, Homo sapiens
caaacattttggtga

SEQ ID NO: 1503978 - DNA, 15 bp, Homo sapiens
acaaacattttggtg

SEQ ID NO: 1503979 - DNA, 15 bp, Homo sapiens
tacaaacattttggt

SEQ ID NO: 1503980 - DNA, 15 bp, Homo sapiens
ctacaaacattttgg

SEQ ID NO: 1503981 - DNA, 15 bp, Homo sapiens
cctacaaacattttg

SEQ ID NO: 1503982 - DNA, 15 bp, Homo sapiens
acctacaaacatttt

SEQ ID NO: 1503983 - DNA, 15 bp, Homo sapiens
tacctacaaacattt

SEQ ID NO: 1503984 - DNA, 15 bp, Homo sapiens
atacctacaaacatt

SEQ ID NO: 1503985 - DNA, 15 bp, Homo sapiens
catatacctacaaac

SEQ ID NO: 1503986 - DNA, 15 bp, Homo sapiens
ccatatacctacaaa

SEQ ID NO: 1503987 - DNA, 15 bp, Homo sapiens
tccatatacctacaa

SEQ ID NO: 1503988 - DNA, 15 bp, Homo sapiens
atccatatacctaca

SEQ ID NO: 1503989 - DNA, 15 bp, Homo sapiens
gatccatatacctac

SEQ ID NO: 1503990 - DNA, 15 bp, Homo sapiens
agatccatataccta

SEQ ID NO: 1503991 - DNA, 15 bp, Homo sapiens
gagatccatatacct

SEQ ID NO: 1503992 - DNA, 15 bp, Homo sapiens
agagatccatatacc

SEQ ID NO: 1503993 - DNA, 15 bp, Homo sapiens
tagagatccatatac

SEQ ID NO: 1503994 - DNA, 15 bp, Homo sapiens
atagagatccatata

SEQ ID NO: 1503995 - DNA, 15 bp, Homo sapiens
aatagagatccatat

SEQ ID NO: 1503996 - DNA, 15 bp, Homo sapiens
gaatagagatccata

SEQ ID NO: 1503997 - DNA, 15 bp, Homo sapiens
agaatagagatccat

SEQ ID NO: 1503998 - DNA, 15 bp, Homo sapiens
cagaatagagatcca

SEQ ID NO: 1503999 - DNA, 15 bp, Homo sapiens
gcagaatagagatcc

SEQ ID NO: 1504000 - DNA, 15 bp, Homo sapiens
agcagaatagagatc

SEQ ID NO: 1504001 - DNA, 15 bp, Homo sapiens
aagcagaatagagat

SEQ ID NO: 1504002 - DNA, 15 bp, Homo sapiens
aaagcagaatagaga

SEQ ID NO: 1504003 - DNA, 15 bp, Homo sapiens
caaagcagaatagag

SEQ ID NO: 1504004 - DNA, 15 bp, Homo sapiens
tcaaagcagaataga

SEQ ID NO: 1504005 - DNA, 15 bp, Homo sapiens
ctcaaagcagaatag

SEQ ID NO: 1504006 - DNA, 15 bp, Homo sapiens
actcaaagcagaata

SEQ ID NO: 1504007 - DNA, 15 bp, Homo sapiens
aactcaaagcagaat

SEQ ID NO: 1504008 - DNA, 15 bp, Homo sapiens
aaactcaaagcagaa

SEQ ID NO: 1504009 - DNA, 15 bp, Homo sapiens
aaaactcaaagcaga

SEQ ID NO: 1504010 - DNA, 15 bp, Homo sapiens
aaaaactcaaagcag

SEQ ID NO: 1504011 - DNA, 15 bp, Homo sapiens
caaaaactcaaagca

SEQ ID NO: 1504012 - DNA, 15 bp, Homo sapiens
ccaaaaactcaaagc

SEQ ID NO: 1504013 - DNA, 15 bp, Homo sapiens
tccaaaaactcaaag

SEQ ID NO: 1504014 - DNA, 15 bp, Homo sapiens
gtccaaaaactcaaa

SEQ ID NO: 1504015 - DNA, 15 bp, Homo sapiens
agtccaaaaactcaa

SEQ ID NO: 1504016 - DNA, 15 bp, Homo sapiens
aagtccaaaaactca

SEQ ID NO: 1504017 - DNA, 15 bp, Homo sapiens
gaagtccaaaaactc

SEQ ID NO: 1504018 - DNA, 15 bp, Homo sapiens
agaagtccaaaaact

SEQ ID NO: 1504019 - DNA, 15 bp, Homo sapiens
aagaagtccaaaaac

SEQ ID NO: 1504020 - DNA, 15 bp, Homo sapiens
caagaagtccaaaaa

SEQ ID NO: 1504021 - DNA, 15 bp, Homo sapiens
ccaagaagtccaaaa

SEQ ID NO: 1504022 - DNA, 15 bp, Homo sapiens
cccaagaagtccaaa

SEQ ID NO: 1504023 - DNA, 15 bp, Homo sapiens
tcccaagaagtccaa

SEQ ID NO: 1504024 - DNA, 15 bp, Homo sapiens
ctcccaagaagtcca

SEQ ID NO: 1504025 - DNA, 15 bp, Homo sapiens
actcccaagaagtcc

SEQ ID NO: 1504026 - DNA, 15 bp, Homo sapiens
cactcccaagaagtc

SEQ ID NO: 1504027 - DNA, 15 bp, Homo sapiens
tcactcccaagaagt

SEQ ID NO: 1504028 - DNA, 15 bp, Homo sapiens
gtcactcccaagaag

SEQ ID NO: 1504029 - DNA, 15 bp, Homo sapiens
tgtcactcccaagaa

SEQ ID NO: 1504030 - DNA, 15 bp, Homo sapiens
atgtcactcccaaga

SEQ ID NO: 1504031 - DNA, 15 bp, Homo sapiens
aatgtcactcccaag

SEQ ID NO: 1504032 - DNA, 15 bp, Homo sapiens
aaatgtcactcccaa

SEQ ID NO: 1504033 - DNA, 15 bp, Homo sapiens
caaatgtcactccca

SEQ ID NO: 1504034 - DNA, 15 bp, Homo sapiens
acaaatgtcactccc

SEQ ID NO: 1504035 - DNA, 15 bp, Homo sapiens
aacaaatgtcactcc

SEQ ID NO: 1504036 - DNA, 15 bp, Homo sapiens
caacaaatgtcactc

SEQ ID NO: 1504037 - DNA, 15 bp, Homo sapiens
acaacaaatgtcact

SEQ ID NO: 1504038 - DNA, 15 bp, Homo sapiens
aacaacaaatgtcac

SEQ ID NO: 1504039 - DNA, 15 bp, Homo sapiens
caacaacaaatgtca

SEQ ID NO: 1504040 - DNA, 15 bp, Homo sapiens
acaacaacaaatgtc

SEQ ID NO: 1504041 - DNA, 15 bp, Homo sapiens
gacaacaacaaatgt

SEQ ID NO: 1504042 - DNA, 15 bp, Homo sapiens
agacaacaacaaatg

SEQ ID NO: 1504043 - DNA, 15 bp, Homo sapiens
tagacaacaacaaat

SEQ ID NO: 1504044 - DNA, 15 bp, Homo sapiens
ttagacaacaacaaa

SEQ ID NO: 1504045 - DNA, 15 bp, Homo sapiens
gttagacaacaacaa

SEQ ID NO: 1504046 - DNA, 15 bp, Homo sapiens
tgttagacaacaaca

SEQ ID NO: 1504047 - DNA, 15 bp, Homo sapiens
ctgttagacaacaac

SEQ ID NO: 1504048 - DNA, 15 bp, Homo sapiens
actgttagacaacaa

SEQ ID NO: 1504049 - DNA, 15 bp, Homo sapiens
aactgttagacaaca

SEQ ID NO: 1504050 - DNA, 15 bp, Homo sapiens
gaactgttagacaac

SEQ ID NO: 1504051 - DNA, 15 bp, Homo sapiens
agaactgttagacaa

SEQ ID NO: 1504052 - DNA, 15 bp, Homo sapiens
tagaactgttagaca

SEQ ID NO: 1504053 - DNA, 15 bp, Homo sapiens
ttagaactgttagac

SEQ ID NO: 1504054 - DNA, 15 bp, Homo sapiens
tttagaactgttaga

SEQ ID NO: 1504055 - DNA, 15 bp, Homo sapiens
ttttagaactgttag

SEQ ID NO: 1504056 - DNA, 15 bp, Homo sapiens
tttttagaactgtta

SEQ ID NO: 1504057 - DNA, 15 bp, Homo sapiens
ctttttagaactgtt

SEQ ID NO: 1504058 - DNA, 15 bp, Homo sapiens
gctttttagaactgt

SEQ ID NO: 1504059 - DNA, 15 bp, Homo sapiens
ggctttttagaactg

SEQ ID NO: 1504060 - DNA, 15 bp, Homo sapiens
tggctttttagaact

SEQ ID NO: 1504061 - DNA, 15 bp, Homo sapiens
atggctttttagaac

SEQ ID NO: 1504062 - DNA, 15 bp, Homo sapiens
aatggctttttagaa

SEQ ID NO: 1504063 - DNA, 15 bp, Homo sapiens
taatggctttttaga

SEQ ID NO: 1504064 - DNA, 15 bp, Homo sapiens
gtaatggctttttag

SEQ ID NO: 1504065 - DNA, 15 bp, Homo sapiens
ggtaatggcttttta

SEQ ID NO: 1504066 - DNA, 15 bp, Homo sapiens
aggtaatggcttttt

SEQ ID NO: 1504067 - DNA, 15 bp, Homo sapiens
aaggtaatggctttt

SEQ ID NO: 1504068 - DNA, 15 bp, Homo sapiens
gaaggtaatggcttt

SEQ ID NO: 1504069 - DNA, 15 bp, Homo sapiens
agaaggtaatggctt

SEQ ID NO: 1504070 - DNA, 15 bp, Homo sapiens
gagaaggtaatggct

SEQ ID NO: 1504071 - DNA, 15 bp, Homo sapiens
tgagaaggtaatggc

SEQ ID NO: 1504072 - DNA, 15 bp, Homo sapiens
ttgagaaggtaatgg

SEQ ID NO: 1504073 - DNA, 15 bp, Homo sapiens
tttgagaaggtaatg

SEQ ID NO: 1504074 - DNA, 15 bp, Homo sapiens
atttgagaaggtaat

SEQ ID NO: 1504075 - DNA, 15 bp, Homo sapiens
tatttgagaaggtaa

SEQ ID NO: 1504076 - DNA, 15 bp, Homo sapiens
atatttgagaaggta

SEQ ID NO: 1504077 - DNA, 15 bp, Homo sapiens
aatatttgagaaggt

SEQ ID NO: 1504078 - DNA, 15 bp, Homo sapiens
caatatttgagaagg

SEQ ID NO: 1504079 - DNA, 15 bp, Homo sapiens
acaatatttgagaag

SEQ ID NO: 1504080 - DNA, 15 bp, Homo sapiens
aacaatatttgagaa

SEQ ID NO: 1504081 - DNA, 15 bp, Homo sapiens
aaacaatatttgaga

SEQ ID NO: 1504082 - DNA, 15 bp, Homo sapiens
gaaacaatatttgag

SEQ ID NO: 1504083 - DNA, 15 bp, Homo sapiens
agaaacaatatttga

SEQ ID NO: 1504084 - DNA, 15 bp, Homo sapiens
aagaaacaatatttg

SEQ ID NO: 1504085 - DNA, 15 bp, Homo sapiens
aaagaaacaatattt

SEQ ID NO: 1504086 - DNA, 15 bp, Homo sapiens
aaaagaaacaatatt

SEQ ID NO: 1504087 - DNA, 15 bp, Homo sapiens
gaaaagaaacaatat

SEQ ID NO: 1504088 - DNA, 15 bp, Homo sapiens
agaaaagaaacaata

SEQ ID NO: 1504089 - DNA, 15 bp, Homo sapiens
cagaaaagaaacaat

SEQ ID NO: 1504090 - DNA, 15 bp, Homo sapiens
acagaaaagaaacaa

SEQ ID NO: 1504091 - DNA, 15 bp, Homo sapiens
tacagaaaagaaaca

SEQ ID NO: 1504092 - DNA, 15 bp, Homo sapiens
atacagaaaagaaac

SEQ ID NO: 1504093 - DNA, 15 bp, Homo sapiens
aatacagaaaagaaa

SEQ ID NO: 1504094 - DNA, 15 bp, Homo sapiens
aaatacagaaaagaa

SEQ ID NO: 1504095 - DNA, 15 bp, Homo sapiens
gaaatacagaaaaga

SEQ ID NO: 1504096 - DNA, 15 bp, Homo sapiens
agaaatacagaaaag

SEQ ID NO: 1504097 - DNA, 15 bp, Homo sapiens
tagaaatacagaaaa

SEQ ID NO: 1504098 - DNA, 15 bp, Homo sapiens
atagaaatacagaaa

SEQ ID NO: 1504099 - DNA, 15 bp, Homo sapiens
aatagaaatacagaa

SEQ ID NO: 1504100 - DNA, 15 bp, Homo sapiens
taatagaaatacaga

SEQ ID NO: 1504101 - DNA, 15 bp, Homo sapiens
ctaatagaaatacag

SEQ ID NO: 1504102 - DNA, 15 bp, Homo sapiens
actaatagaaataca

SEQ ID NO: 1504103 - DNA, 15 bp, Homo sapiens
aactaatagaaatac

SEQ ID NO: 1504104 - DNA, 15 bp, Homo sapiens
aaactaatagaaata

SEQ ID NO: 1504105 - DNA, 15 bp, Homo sapiens
aaaactaatagaaat

SEQ ID NO: 1504106 - DNA, 15 bp, Homo sapiens
gaaaactaatagaaa

SEQ ID NO: 1504107 - DNA, 15 bp, Homo sapiens
agaaaactaatagaa

SEQ ID NO: 1504108 - DNA, 15 bp, Homo sapiens
aagaaaactaataga

SEQ ID NO: 1504109 - DNA, 15 bp, Homo sapiens
gaagaaaactaatag

SEQ ID NO: 1504110 - DNA, 15 bp, Homo sapiens
agaagaaaactaata

SEQ ID NO: 1504111 - DNA, 15 bp, Homo sapiens
cagaagaaaactaat

SEQ ID NO: 1504112 - DNA, 15 bp, Homo sapiens
ccagaagaaaactaa

SEQ ID NO: 1504113 - DNA, 15 bp, Homo sapiens
tccagaagaaaacta

SEQ ID NO: 1504114 - DNA, 15 bp, Homo sapiens
ttccagaagaaaact

SEQ ID NO: 1504115 - DNA, 15 bp, Homo sapiens
gttccagaagaaaac

SEQ ID NO: 1504116 - DNA, 15 bp, Homo sapiens
agttccagaagaaaa

SEQ ID NO: 1504117 - DNA, 15 bp, Homo sapiens
tagttccagaagaaa

SEQ ID NO: 1504118 - DNA, 15 bp, Homo sapiens
gtagttccagaagaa

SEQ ID NO: 1504119 - DNA, 15 bp, Homo sapiens
tgtagttccagaaga

SEQ ID NO: 1504120 - DNA, 15 bp, Homo sapiens
ttgtagttccagaag

SEQ ID NO: 1504121 - DNA, 15 bp, Homo sapiens
attgtagttccagaa

SEQ ID NO: 1504122 - DNA, 15 bp, Homo sapiens
aattgtagttccaga

SEQ ID NO: 1504123 - DNA, 15 bp, Homo sapiens
taattgtagttccag

SEQ ID NO: 1504124 - DNA, 15 bp, Homo sapiens
ctaattgtagttcca

SEQ ID NO: 1504125 - DNA, 15 bp, Homo sapiens
tctaattgtagttcc

SEQ ID NO: 1504126 - DNA, 15 bp, Homo sapiens
atctaattgtagttc

SEQ ID NO: 1504127 - DNA, 15 bp, Homo sapiens
catctaattgtagtt

SEQ ID NO: 1504128 - DNA, 15 bp, Homo sapiens
acatctaattgtagt

SEQ ID NO: 1504129 - DNA, 15 bp, Homo sapiens
tacatctaattgtag

SEQ ID NO: 1504130 - DNA, 15 bp, Homo sapiens
atacatctaattgta

SEQ ID NO: 1504131 - DNA, 15 bp, Homo sapiens
catacatctaattgt

SEQ ID NO: 1504132 - DNA, 15 bp, Homo sapiens
acatacatctaattg

SEQ ID NO: 1504133 - DNA, 15 bp, Homo sapiens
tacatacatctaatt

SEQ ID NO: 1504134 - DNA, 15 bp, Homo sapiens
ttacatacatctaat

SEQ ID NO: 1504135 - DNA, 15 bp, Homo sapiens
attacatacatctaa

SEQ ID NO: 1504136 - DNA, 15 bp, Homo sapiens
tattacatacatcta

SEQ ID NO: 1504137 - DNA, 15 bp, Homo sapiens
atattacatacatct

SEQ ID NO: 1504138 - DNA, 15 bp, Homo sapiens
aatattacatacatc

SEQ ID NO: 1504139 - DNA, 15 bp, Homo sapiens
caatattacatacat

SEQ ID NO: 1504140 - DNA, 15 bp, Homo sapiens
acaatattacataca

SEQ ID NO: 1504141 - DNA, 15 bp, Homo sapiens
aacaatattacatac

SEQ ID NO: 1504142 - DNA, 15 bp, Homo sapiens
aaacaatattacata

SEQ ID NO: 1504143 - DNA, 15 bp, Homo sapiens
caaacaatattacat

SEQ ID NO: 1504144 - DNA, 15 bp, Homo sapiens
tcaaacaatattaca

SEQ ID NO: 1504145 - DNA, 15 bp, Homo sapiens
ctcaaacaatattac

SEQ ID NO: 1504146 - DNA, 15 bp, Homo sapiens
cctcaaacaatatta

SEQ ID NO: 1504147 - DNA, 15 bp, Homo sapiens
gcctcaaacaatatt

SEQ ID NO: 1504148 - DNA, 15 bp, Homo sapiens
agcctcaaacaatat

SEQ ID NO: 1504149 - DNA, 15 bp, Homo sapiens
cagcctcaaacaata

SEQ ID NO: 1504150 - DNA, 15 bp, Homo sapiens
tcagcctcaaacaat

SEQ ID NO: 1504151 - DNA, 15 bp, Homo sapiens
ctcagcctcaaacaa

SEQ ID NO: 1504152 - DNA, 15 bp, Homo sapiens
gctcagcctcaaaca

SEQ ID NO: 1504153 - DNA, 15 bp, Homo sapiens
ggctcagcctcaaac

SEQ ID NO: 1504154 - DNA, 15 bp, Homo sapiens
tggctcagcctcaaa

SEQ ID NO: 1504155 - DNA, 15 bp, Homo sapiens
ttggctcagcctcaa

SEQ ID NO: 1504156 - DNA, 15 bp, Homo sapiens
cttggctcagcctca

SEQ ID NO: 1504157 - DNA, 15 bp, Homo sapiens
acttggctcagcctc

SEQ ID NO: 1504158 - DNA, 15 bp, Homo sapiens
tacttggctcagcct

SEQ ID NO: 1504159 - DNA, 15 bp, Homo sapiens
ctacttggctcagcc

SEQ ID NO: 1504160 - DNA, 15 bp, Homo sapiens
actacttggctcagc

SEQ ID NO: 1504161 - DNA, 15 bp, Homo sapiens
cactacttggctcag

SEQ ID NO: 1504162 - DNA, 15 bp, Homo sapiens
acactacttggctca

SEQ ID NO: 1504163 - DNA, 15 bp, Homo sapiens
tacactacttggctc

SEQ ID NO: 1504164 - DNA, 15 bp, Homo sapiens
gtacactacttggct

SEQ ID NO: 1504165 - DNA, 15 bp, Homo sapiens
agtacactacttggc

SEQ ID NO: 1504166 - DNA, 15 bp, Homo sapiens
cagtacactacttgg

SEQ ID NO: 1504167 - DNA, 15 bp, Homo sapiens
acagtacactacttg

SEQ ID NO: 1504168 - DNA, 15 bp, Homo sapiens
cacagtacactactt

SEQ ID NO: 1504169 - DNA, 15 bp, Homo sapiens
tcacagtacactact

SEQ ID NO: 1504170 - DNA, 15 bp, Homo sapiens
atcacagtacactac

SEQ ID NO: 1504171 - DNA, 15 bp, Homo sapiens
aatcacagtacacta

SEQ ID NO: 1504172 - DNA, 15 bp, Homo sapiens
taatcacagtacact

SEQ ID NO: 1504173 - DNA, 15 bp, Homo sapiens
ttaatcacagtacac

SEQ ID NO: 1504174 - DNA, 15 bp, Homo sapiens
cttaatcacagtaca

SEQ ID NO: 1504175 - DNA, 15 bp, Homo sapiens
acttaatcacagtac

SEQ ID NO: 1504176 - DNA, 15 bp, Homo sapiens
aacttaatcacagta

SEQ ID NO: 1504177 - DNA, 15 bp, Homo sapiens
aaacttaatcacagt

SEQ ID NO: 1504178 - DNA, 15 bp, Homo sapiens
taaacttaatcacag

SEQ ID NO: 1504179 - DNA, 15 bp, Homo sapiens
gtaaacttaatcaca

SEQ ID NO: 1504180 - DNA, 15 bp, Homo sapiens
agtaaacttaatcac

SEQ ID NO: 1504181 - DNA, 15 bp, Homo sapiens
aagtaaacttaatca

SEQ ID NO: 1504182 - DNA, 15 bp, Homo sapiens
aaagtaaacttaatc

SEQ ID NO: 1504183 - DNA, 15 bp, Homo sapiens
gaaagtaaacttaat

SEQ ID NO: 1504184 - DNA, 15 bp, Homo sapiens
agaaagtaaacttaa

SEQ ID NO: 1504185 - DNA, 15 bp, Homo sapiens
cagaaagtaaactta

SEQ ID NO: 1504186 - DNA, 15 bp, Homo sapiens
ccagaaagtaaactt

SEQ ID NO: 1504187 - DNA, 15 bp, Homo sapiens
accagaaagtaaact

SEQ ID NO: 1504188 - DNA, 15 bp, Homo sapiens
taccagaaagtaaac

SEQ ID NO: 1504189 - DNA, 15 bp, Homo sapiens
gtaccagaaagtaaa

SEQ ID NO: 1504190 - DNA, 15 bp, Homo sapiens
tgtaccagaaagtaa

SEQ ID NO: 1504191 - DNA, 15 bp, Homo sapiens
ttgtaccagaaagta

SEQ ID NO: 1504192 - DNA, 15 bp, Homo sapiens
gttgtaccagaaagt

SEQ ID NO: 1504193 - DNA, 15 bp, Homo sapiens
agttgtaccagaaag

SEQ ID NO: 1504194 - DNA, 15 bp, Homo sapiens
aagttgtaccagaaa

SEQ ID NO: 1504195 - DNA, 15 bp, Homo sapiens
aaagttgtaccagaa

SEQ ID NO: 1504196 - DNA, 15 bp, Homo sapiens
aaaagttgtaccaga

SEQ ID NO: 1504197 - DNA, 15 bp, Homo sapiens
aaaaagttgtaccag

SEQ ID NO: 1504198 - DNA, 15 bp, Homo sapiens
caaaaagttgtacca

SEQ ID NO: 1504199 - DNA, 15 bp, Homo sapiens
acaaaaagttgtacc

SEQ ID NO: 1504200 - DNA, 15 bp, Homo sapiens
cacaaaaagttgtac

SEQ ID NO: 1504201 - DNA, 15 bp, Homo sapiens
acacaaaaagttgta

SEQ ID NO: 1504202 - DNA, 15 bp, Homo sapiens
gacacaaaaagttgt

SEQ ID NO: 1504203 - DNA, 15 bp, Homo sapiens
agacacaaaaagttg

SEQ ID NO: 1504204 - DNA, 15 bp, Homo sapiens
gagacacaaaaagtt

SEQ ID NO: 1504205 - DNA, 15 bp, Homo sapiens
ggagacacaaaaagt

SEQ ID NO: 1504206 - DNA, 15 bp, Homo sapiens
aggagacacaaaaag

SEQ ID NO: 1504207 - DNA, 15 bp, Homo sapiens
taggagacacaaaaa

SEQ ID NO: 1504208 - DNA, 15 bp, Homo sapiens
ttaggagacacaaaa

SEQ ID NO: 1504209 - DNA, 15 bp, Homo sapiens
tttaggagacacaaa

SEQ ID NO: 1504210 - DNA, 15 bp, Homo sapiens
atttaggagacacaa

SEQ ID NO: 1504211 - DNA, 15 bp, Homo sapiens
catttaggagacaca

SEQ ID NO: 1504212 - DNA, 15 bp, Homo sapiens
acatttaggagacac

SEQ ID NO: 1504213 - DNA, 15 bp, Homo sapiens
tacatttaggagaca

SEQ ID NO: 1504214 - DNA, 15 bp, Homo sapiens
ttacatttaggagac

SEQ ID NO: 1504215 - DNA, 15 bp, Homo sapiens
attacatttaggaga

SEQ ID NO: 1504216 - DNA, 15 bp, Homo sapiens
cattacatttaggag

SEQ ID NO: 1504217 - DNA, 15 bp, Homo sapiens
acattacatttagga

SEQ ID NO: 1504218 - DNA, 15 bp, Homo sapiens
gacattacatttagg

SEQ ID NO: 1504219 - DNA, 15 bp, Homo sapiens
agacattacatttag

SEQ ID NO: 1504220 - DNA, 15 bp, Homo sapiens
gagacattacattta

SEQ ID NO: 1504221 - DNA, 15 bp, Homo sapiens
tgagacattacattt

SEQ ID NO: 1504222 - DNA, 15 bp, Homo sapiens
atgagacattacatt

SEQ ID NO: 1504223 - DNA, 15 bp, Homo sapiens
aatgagacattacat

SEQ ID NO: 1504224 - DNA, 15 bp, Homo sapiens
aaatgagacattaca

SEQ ID NO: 1504225 - DNA, 15 bp, Homo sapiens
taaatgagacattac

SEQ ID NO: 1504226 - DNA, 15 bp, Homo sapiens
ctaaatgagacatta

SEQ ID NO: 1504227 - DNA, 15 bp, Homo sapiens
gctaaatgagacatt

SEQ ID NO: 1504228 - DNA, 15 bp, Homo sapiens
ggctaaatgagacat

SEQ ID NO: 1504229 - DNA, 15 bp, Homo sapiens
aggctaaatgagaca

SEQ ID NO: 1504230 - DNA, 15 bp, Homo sapiens
gaggctaaatgagac

SEQ ID NO: 1504231 - DNA, 15 bp, Homo sapiens
tgaggctaaatgaga

SEQ ID NO: 1504232 - DNA, 15 bp, Homo sapiens
atgaggctaaatgag

SEQ ID NO: 1504233 - DNA, 15 bp, Homo sapiens
aatgaggctaaatga

SEQ ID NO: 1504234 - DNA, 15 bp, Homo sapiens
aaatgaggctaaatg

SEQ ID NO: 1504235 - DNA, 15 bp, Homo sapiens
aaaatgaggctaaat

SEQ ID NO: 1504236 - DNA, 15 bp, Homo sapiens
aaaaatgaggctaaa

SEQ ID NO: 1504237 - DNA, 15 bp, Homo sapiens
aaaaaatgaggctaa

SEQ ID NO: 1504238 - DNA, 15 bp, Homo sapiens
aaaaaaatgaggcta

SEQ ID NO: 1504239 - DNA, 15 bp, Homo sapiens
gaaaaaaatgaggct

SEQ ID NO: 1504240 - DNA, 15 bp, Homo sapiens
tgaaaaaaatgaggc

SEQ ID NO: 1504241 - DNA, 15 bp, Homo sapiens
atgaaaaaaatgagg

SEQ ID NO: 1504242 - DNA, 15 bp, Homo sapiens
aatgaaaaaaatgag

SEQ ID NO: 1504243 - DNA, 15 bp, Homo sapiens
aaatgaaaaaaatga

SEQ ID NO: 1504244 - DNA, 15 bp, Homo sapiens
caaatgaaaaaaatg

SEQ ID NO: 1504245 - DNA, 15 bp, Homo sapiens
gcaaatgaaaaaaat

SEQ ID NO: 1504246 - DNA, 15 bp, Homo sapiens
agcaaatgaaaaaaa

SEQ ID NO: 1504247 - DNA, 15 bp, Homo sapiens
aagcaaatgaaaaaa

SEQ ID NO: 1504248 - DNA, 15 bp, Homo sapiens
gaagcaaatgaaaaa

SEQ ID NO: 1504249 - DNA, 15 bp, Homo sapiens
tgaagcaaatgaaaa

SEQ ID NO: 1504250 - DNA, 15 bp, Homo sapiens
ctgaagcaaatgaaa

SEQ ID NO: 1504251 - DNA, 15 bp, Homo sapiens
actgaagcaaatgaa

SEQ ID NO: 1504252 - DNA, 15 bp, Homo sapiens
aactgaagcaaatga

SEQ ID NO: 1504253 - DNA, 15 bp, Homo sapiens
aaactgaagcaaatg

SEQ ID NO: 1504254 - DNA, 15 bp, Homo sapiens
aaaactgaagcaaat

SEQ ID NO: 1504255 - DNA, 15 bp, Homo sapiens
aaaaactgaagcaaa

SEQ ID NO: 1504256 - DNA, 15 bp, Homo sapiens
taaaaactgaagcaa

SEQ ID NO: 1504257 - DNA, 15 bp, Homo sapiens
ataaaaactgaagca

SEQ ID NO: 1504258 - DNA, 15 bp, Homo sapiens
cataaaaactgaagc

SEQ ID NO: 1504259 - DNA, 15 bp, Homo sapiens
acataaaaactgaag

SEQ ID NO: 1504260 - DNA, 15 bp, Homo sapiens
tacataaaaactgaa

SEQ ID NO: 1504261 - DNA, 15 bp, Homo sapiens
ctacataaaaactga

SEQ ID NO: 1504262 - DNA, 15 bp, Homo sapiens
gctacataaaaactg

SEQ ID NO: 1504263 - DNA, 15 bp, Homo sapiens
agctacataaaaact

SEQ ID NO: 1504264 - DNA, 15 bp, Homo sapiens
tagctacataaaaac

SEQ ID NO: 1504265 - DNA, 15 bp, Homo sapiens
atagctacataaaaa

SEQ ID NO: 1504266 - DNA, 15 bp, Homo sapiens
aatagctacataaaa

SEQ ID NO: 1504267 - DNA, 15 bp, Homo sapiens
caatagctacataaa

SEQ ID NO: 1504268 - DNA, 15 bp, Homo sapiens
acaatagctacataa

SEQ ID NO: 1504269 - DNA, 15 bp, Homo sapiens
aacaatagctacata

SEQ ID NO: 1504270 - DNA, 15 bp, Homo sapiens
taacaatagctacat

SEQ ID NO: 1504271 - DNA, 15 bp, Homo sapiens
ataacaatagctaca

SEQ ID NO: 1504272 - DNA, 15 bp, Homo sapiens
aataacaatagctac

SEQ ID NO: 1504273 - DNA, 15 bp, Homo sapiens
aaataacaatagcta

SEQ ID NO: 1504274 - DNA, 15 bp, Homo sapiens
gaaataacaatagct

SEQ ID NO: 1504275 - DNA, 15 bp, Homo sapiens
agaaataacaatagc

SEQ ID NO: 1504276 - DNA, 15 bp, Homo sapiens
aagaaataacaatag

SEQ ID NO: 1504277 - DNA, 15 bp, Homo sapiens
aaagaaataacaata

SEQ ID NO: 1504278 - DNA, 15 bp, Homo sapiens
gaaagaaataacaat

SEQ ID NO: 1504279 - DNA, 15 bp, Homo sapiens
ggaaagaaataacaa

SEQ ID NO: 1504280 - DNA, 15 bp, Homo sapiens
tggaaagaaataaca

SEQ ID NO: 1504281 - DNA, 15 bp, Homo sapiens
atggaaagaaataac

SEQ ID NO: 1504282 - DNA, 15 bp, Homo sapiens
gatggaaagaaataa

SEQ ID NO: 1504283 - DNA, 15 bp, Homo sapiens
tgatggaaagaaata

SEQ ID NO: 1504284 - DNA, 15 bp, Homo sapiens
atgatggaaagaaat

SEQ ID NO: 1504285 - DNA, 15 bp, Homo sapiens
aatgatggaaagaaa

SEQ ID NO: 1504286 - DNA, 15 bp, Homo sapiens
taatgatggaaagaa

SEQ ID NO: 1504287 - DNA, 15 bp, Homo sapiens
ttaatgatggaaaga

SEQ ID NO: 1504288 - DNA, 15 bp, Homo sapiens
gttaatgatggaaag

SEQ ID NO: 1504289 - DNA, 15 bp, Homo sapiens
tgttaatgatggaaa

SEQ ID NO: 1504290 - DNA, 15 bp, Homo sapiens
gtgttaatgatggaa

SEQ ID NO: 1504291 - DNA, 15 bp, Homo sapiens
cgtgttaatgatgga

SEQ ID NO: 1504292 - DNA, 15 bp, Homo sapiens
acgtgttaatgatgg

SEQ ID NO: 1504293 - DNA, 15 bp, Homo sapiens
aacgtgttaatgatg

SEQ ID NO: 1504294 - DNA, 15 bp, Homo sapiens
gaacgtgttaatgat

SEQ ID NO: 1504295 - DNA, 15 bp, Homo sapiens
agaacgtgttaatga

SEQ ID NO: 1504296 - DNA, 15 bp, Homo sapiens
gagaacgtgttaatg

SEQ ID NO: 1504297 - DNA, 15 bp, Homo sapiens
tgagaacgtgttaat

SEQ ID NO: 1504298 - DNA, 15 bp, Homo sapiens
ctgagaacgtgttaa

SEQ ID NO: 1504299 - DNA, 15 bp, Homo sapiens
actgagaacgtgtta

SEQ ID NO: 1504300 - DNA, 15 bp, Homo sapiens
tactgagaacgtgtt

SEQ ID NO: 1504301 - DNA, 15 bp, Homo sapiens
gtactgagaacgtgt

SEQ ID NO: 1504302 - DNA, 15 bp, Homo sapiens
tgtactgagaacgtg

SEQ ID NO: 1504303 - DNA, 15 bp, Homo sapiens
ctgtactgagaacgt

SEQ ID NO: 1504304 - DNA, 15 bp, Homo sapiens
actgtactgagaacg

SEQ ID NO: 1504305 - DNA, 15 bp, Homo sapiens
aactgtactgagaac

SEQ ID NO: 1504306 - DNA, 15 bp, Homo sapiens
aaactgtactgagaa

SEQ ID NO: 1504307 - DNA, 15 bp, Homo sapiens
aaaactgtactgaga

SEQ ID NO: 1504308 - DNA, 15 bp, Homo sapiens
aaaaactgtactgag

SEQ ID NO: 1504309 - DNA, 15 bp, Homo sapiens
gaaaaactgtactga

SEQ ID NO: 1504310 - DNA, 15 bp, Homo sapiens
tgaaaaactgtactg

SEQ ID NO: 1504311 - DNA, 15 bp, Homo sapiens
gtgaaaaactgtact

SEQ ID NO: 1504312 - DNA, 15 bp, Homo sapiens
tgtgaaaaactgtac

SEQ ID NO: 1504313 - DNA, 15 bp, Homo sapiens
atgtgaaaaactgta

SEQ ID NO: 1504314 - DNA, 15 bp, Homo sapiens
tatgtgaaaaactgt

SEQ ID NO: 1504315 - DNA, 15 bp, Homo sapiens
ctatgtgaaaaactg

SEQ ID NO: 1504316 - DNA, 15 bp, Homo sapiens
cctatgtgaaaaact

SEQ ID NO: 1504317 - DNA, 15 bp, Homo sapiens
ccctatgtgaaaaac

SEQ ID NO: 1504318 - DNA, 15 bp, Homo sapiens
accctatgtgaaaaa

SEQ ID NO: 1504319 - DNA, 15 bp, Homo sapiens
gaccctatgtgaaaa

SEQ ID NO: 1504320 - DNA, 15 bp, Homo sapiens
tgaccctatgtgaaa

SEQ ID NO: 1504321 - DNA, 15 bp, Homo sapiens
ttgaccctatgtgaa

SEQ ID NO: 1504322 - DNA, 15 bp, Homo sapiens
tttgaccctatgtga

SEQ ID NO: 1504323 - DNA, 15 bp, Homo sapiens
gtttgaccctatgtg

SEQ ID NO: 1504324 - DNA, 15 bp, Homo sapiens
ggtttgaccctatgt

SEQ ID NO: 1504325 - DNA, 15 bp, Homo sapiens
aggtttgaccctatg

SEQ ID NO: 1504326 - DNA, 15 bp, Homo sapiens
caggtttgaccctat

SEQ ID NO: 1504327 - DNA, 15 bp, Homo sapiens
acaggtttgacccta

SEQ ID NO: 1504328 - DNA, 15 bp, Homo sapiens
aacaggtttgaccct

SEQ ID NO: 1504329 - DNA, 15 bp, Homo sapiens
taacaggtttgaccc

SEQ ID NO: 1504330 - DNA, 15 bp, Homo sapiens
ttaacaggtttgacc

SEQ ID NO: 1504331 - DNA, 15 bp, Homo sapiens
attaacaggtttgac

SEQ ID NO: 1504332 - DNA, 15 bp, Homo sapiens
gattaacaggtttga

SEQ ID NO: 1504333 - DNA, 15 bp, Homo sapiens
agattaacaggtttg

SEQ ID NO: 1504334 - DNA, 15 bp, Homo sapiens
cagattaacaggttt

SEQ ID NO: 1504335 - DNA, 15 bp, Homo sapiens
acagattaacaggtt

SEQ ID NO: 1504336 - DNA, 15 bp, Homo sapiens
aacagattaacaggt

SEQ ID NO: 1504337 - DNA, 15 bp, Homo sapiens
gaacagattaacagg

SEQ ID NO: 1504338 - DNA, 15 bp, Homo sapiens
tgaacagattaacag

SEQ ID NO: 1504339 - DNA, 15 bp, Homo sapiens
ctgaacagattaaca

SEQ ID NO: 1504340 - DNA, 15 bp, Homo sapiens
actgaacagattaac

SEQ ID NO: 1504341 - DNA, 15 bp, Homo sapiens
cactgaacagattaa

SEQ ID NO: 1504342 - DNA, 15 bp, Homo sapiens
acactgaacagatta

SEQ ID NO: 1504343 - DNA, 15 bp, Homo sapiens
cacactgaacagatt

SEQ ID NO: 1504344 - DNA, 15 bp, Homo sapiens
tcacactgaacagat

SEQ ID NO: 1504345 - DNA, 15 bp, Homo sapiens
gtcacactgaacaga

SEQ ID NO: 1504346 - DNA, 15 bp, Homo sapiens
ggtcacactgaacag

SEQ ID NO: 1504347 - DNA, 15 bp, Homo sapiens
tggtcacactgaaca

SEQ ID NO: 1504348 - DNA, 15 bp, Homo sapiens
atggtcacactgaac

SEQ ID NO: 1504349 - DNA, 15 bp, Homo sapiens
aatggtcacactgaa

SEQ ID NO: 1504350 - DNA, 15 bp, Homo sapiens
aaatggtcacactga

SEQ ID NO: 1504351 - DNA, 15 bp, Homo sapiens
aaaatggtcacactg

SEQ ID NO: 1504352 - DNA, 15 bp, Homo sapiens
gaaaatggtcacact

SEQ ID NO: 1504353 - DNA, 15 bp, Homo sapiens
ggaaaatggtcacac

SEQ ID NO: 1504354 - DNA, 15 bp, Homo sapiens
aggaaaatggtcaca

SEQ ID NO: 1504355 - DNA, 15 bp, Homo sapiens
aaggaaaatggtcac

SEQ ID NO: 1504356 - DNA, 15 bp, Homo sapiens
caaggaaaatggtca

SEQ ID NO: 1504357 - DNA, 15 bp, Homo sapiens
tcaaggaaaatggtc

SEQ ID NO: 1504358 - DNA, 15 bp, Homo sapiens
ctcaaggaaaatggt

SEQ ID NO: 1504359 - DNA, 15 bp, Homo sapiens
cctcaaggaaaatgg

SEQ ID NO: 1504360 - DNA, 15 bp, Homo sapiens
tcctcaaggaaaatg

SEQ ID NO: 1504361 - DNA, 15 bp, Homo sapiens
atcctcaaggaaaat

SEQ ID NO: 1504362 - DNA, 15 bp, Homo sapiens
aatcctcaaggaaaa

SEQ ID NO: 1504363 - DNA, 15 bp, Homo sapiens
aaatcctcaaggaaa

SEQ ID NO: 1504364 - DNA, 15 bp, Homo sapiens
gaaatcctcaaggaa

SEQ ID NO: 1504365 - DNA, 15 bp, Homo sapiens
ggaaatcctcaagga

SEQ ID NO: 1504366 - DNA, 15 bp, Homo sapiens
aggaaatcctcaagg

SEQ ID NO: 1504367 - DNA, 15 bp, Homo sapiens
gaggaaatcctcaag

SEQ ID NO: 1504368 - DNA, 15 bp, Homo sapiens
ggaggaaatcctcaa

SEQ ID NO: 1504369 - DNA, 15 bp, Homo sapiens
gggaggaaatcctca

SEQ ID NO: 1504370 - DNA, 15 bp, Homo sapiens
tgggaggaaatcctc

SEQ ID NO: 1504371 - DNA, 15 bp, Homo sapiens
atgggaggaaatcct

SEQ ID NO: 1504372 - DNA, 15 bp, Homo sapiens
catgggaggaaatcc

SEQ ID NO: 1504373 - DNA, 15 bp, Homo sapiens
gcatgggaggaaatc

SEQ ID NO: 1504374 - DNA, 15 bp, Homo sapiens
agcatgggaggaaat

SEQ ID NO: 1504375 - DNA, 15 bp, Homo sapiens
tagcatgggaggaaa

SEQ ID NO: 1504376 - DNA, 15 bp, Homo sapiens
ctagcatgggaggaa

SEQ ID NO: 1504377 - DNA, 15 bp, Homo sapiens
actagcatgggagga

SEQ ID NO: 1504378 - DNA, 15 bp, Homo sapiens
cactagcatgggagg

SEQ ID NO: 1504379 - DNA, 15 bp, Homo sapiens
acactagcatgggag

SEQ ID NO: 1504380 - DNA, 15 bp, Homo sapiens
aacactagcatggga

SEQ ID NO: 1504381 - DNA, 15 bp, Homo sapiens
aaacactagcatggg

SEQ ID NO: 1504382 - DNA, 15 bp, Homo sapiens
taaacactagcatgg

SEQ ID NO: 1504383 - DNA, 15 bp, Homo sapiens
ctaaacactagcatg

SEQ ID NO: 1504384 - DNA, 15 bp, Homo sapiens
tctaaacactagcat

SEQ ID NO: 1504385 - DNA, 15 bp, Homo sapiens
ttctaaacactagca

SEQ ID NO: 1504386 - DNA, 15 bp, Homo sapiens
attctaaacactagc

SEQ ID NO: 1504387 - DNA, 15 bp, Homo sapiens
aattctaaacactag

SEQ ID NO: 1504388 - DNA, 15 bp, Homo sapiens
caattctaaacacta

SEQ ID NO: 1504389 - DNA, 15 bp, Homo sapiens
ccaattctaaacact

SEQ ID NO: 1504390 - DNA, 15 bp, Homo sapiens
gccaattctaaacac

SEQ ID NO: 1504391 - DNA, 15 bp, Homo sapiens
agccaattctaaaca

SEQ ID NO: 1504392 - DNA, 15 bp, Homo sapiens
cagccaattctaaac

SEQ ID NO: 1504393 - DNA, 15 bp, Homo sapiens
gcagccaattctaaa

SEQ ID NO: 1504394 - DNA, 15 bp, Homo sapiens
agcagccaattctaa

SEQ ID NO: 1504395 - DNA, 15 bp, Homo sapiens
aagcagccaattcta

SEQ ID NO: 1504396 - DNA, 15 bp, Homo sapiens
caagcagccaattct

SEQ ID NO: 1504397 - DNA, 15 bp, Homo sapiens
gcaagcagccaattc

SEQ ID NO: 1504398 - DNA, 15 bp, Homo sapiens
agcaagcagccaatt

SEQ ID NO: 1504399 - DNA, 15 bp, Homo sapiens
tagcaagcagccaat

SEQ ID NO: 1504400 - DNA, 15 bp, Homo sapiens
atagcaagcagccaa

SEQ ID NO: 1504401 - DNA, 15 bp, Homo sapiens
tatagcaagcagcca

SEQ ID NO: 1504402 - DNA, 15 bp, Homo sapiens
gtatagcaagcagcc

SEQ ID NO: 1504403 - DNA, 15 bp, Homo sapiens
ggtatagcaagcagc

SEQ ID NO: 1504404 - DNA, 15 bp, Homo sapiens
tggtatagcaagcag

SEQ ID NO: 1504405 - DNA, 15 bp, Homo sapiens
ctggtatagcaagca

SEQ ID NO: 1504406 - DNA, 15 bp, Homo sapiens
cctggtatagcaagc

SEQ ID NO: 1504407 - DNA, 15 bp, Homo sapiens
acctggtatagcaag

SEQ ID NO: 1504408 - DNA, 15 bp, Homo sapiens
cacctggtatagcaa

SEQ ID NO: 1504409 - DNA, 15 bp, Homo sapiens
acacctggtatagca

SEQ ID NO: 1504410 - DNA, 15 bp, Homo sapiens
cacacctggtatagc

SEQ ID NO: 1504411 - DNA, 15 bp, Homo sapiens
gcacacctggtatag

SEQ ID NO: 1504412 - DNA, 15 bp, Homo sapiens
tgcacacctggtata

SEQ ID NO: 1504413 - DNA, 15 bp, Homo sapiens
ctgcacacctggtat

SEQ ID NO: 1504414 - DNA, 15 bp, Homo sapiens
gctgcacacctggta

SEQ ID NO: 1504415 - DNA, 15 bp, Homo sapiens
agctgcacacctggt

SEQ ID NO: 1504416 - DNA, 15 bp, Homo sapiens
tagctgcacacctgg

SEQ ID NO: 1504417 - DNA, 15 bp, Homo sapiens
atagctgcacacctg

SEQ ID NO: 1504418 - DNA, 15 bp, Homo sapiens
gatagctgcacacct

SEQ ID NO: 1504419 - DNA, 15 bp, Homo sapiens
tgatagctgcacacc

SEQ ID NO: 1504420 - DNA, 15 bp, Homo sapiens
atgatagctgcacac

SEQ ID NO: 1504421 - DNA, 15 bp, Homo sapiens
gatgatagctgcaca

SEQ ID NO: 1504422 - DNA, 15 bp, Homo sapiens
ggatgatagctgcac

SEQ ID NO: 1504423 - DNA, 15 bp, Homo sapiens
aggatgatagctgca

SEQ ID NO: 1504424 - DNA, 15 bp, Homo sapiens
caggatgatagctgc

SEQ ID NO: 1504425 - DNA, 15 bp, Homo sapiens
acaggatgatagctg

SEQ ID NO: 1504426 - DNA, 15 bp, Homo sapiens
cacaggatgatagct

SEQ ID NO: 1504427 - DNA, 15 bp, Homo sapiens
acacaggatgatagc

SEQ ID NO: 1504428 - DNA, 15 bp, Homo sapiens
aacacaggatgatag

SEQ ID NO: 1504429 - DNA, 15 bp, Homo sapiens
gaacacaggatgata

SEQ ID NO: 1504430 - DNA, 15 bp, Homo sapiens
agaacacaggatgat

SEQ ID NO: 1504431 - DNA, 15 bp, Homo sapiens
gagaacacaggatga

SEQ ID NO: 1504432 - DNA, 15 bp, Homo sapiens
ggagaacacaggatg

SEQ ID NO: 1504433 - DNA, 15 bp, Homo sapiens
gggagaacacaggat

SEQ ID NO: 1504434 - DNA, 15 bp, Homo sapiens
agggagaacacagga

SEQ ID NO: 1504435 - DNA, 15 bp, Homo sapiens
aagggagaacacagg

SEQ ID NO: 1504436 - DNA, 15 bp, Homo sapiens
gaagggagaacacag

SEQ ID NO: 1504437 - DNA, 15 bp, Homo sapiens
tgaagggagaacaca

SEQ ID NO: 1504438 - DNA, 15 bp, Homo sapiens
ctgaagggagaacac

SEQ ID NO: 1504439 - DNA, 15 bp, Homo sapiens
gctgaagggagaaca

SEQ ID NO: 1504440 - DNA, 15 bp, Homo sapiens
tgctgaagggagaac

SEQ ID NO: 1504441 - DNA, 15 bp, Homo sapiens
atgctgaagggagaa

SEQ ID NO: 1504442 - DNA, 15 bp, Homo sapiens
gatgctgaagggaga

SEQ ID NO: 1504443 - DNA, 15 bp, Homo sapiens
tgatgctgaagggag

SEQ ID NO: 1504444 - DNA, 15 bp, Homo sapiens
atgatgctgaaggga

SEQ ID NO: 1504445 - DNA, 15 bp, Homo sapiens
aatgatgctgaaggg

SEQ ID NO: 1504446 - DNA, 15 bp, Homo sapiens
aaatgatgctgaagg

SEQ ID NO: 1504447 - DNA, 15 bp, Homo sapiens
aaaatgatgctgaag

SEQ ID NO: 1504448 - DNA, 15 bp, Homo sapiens
caaaatgatgctgaa

SEQ ID NO: 1504449 - DNA, 15 bp, Homo sapiens
ccaaaatgatgctga

SEQ ID NO: 1504450 - DNA, 15 bp, Homo sapiens
tccaaaatgatgctg

SEQ ID NO: 1504451 - DNA, 15 bp, Homo sapiens
ttccaaaatgatgct

SEQ ID NO: 1504452 - DNA, 15 bp, Homo sapiens
tttccaaaatgatgc

SEQ ID NO: 1504453 - DNA, 15 bp, Homo sapiens
atttccaaaatgatg

SEQ ID NO: 1504454 - DNA, 15 bp, Homo sapiens
aatttccaaaatgat

SEQ ID NO: 1504455 - DNA, 15 bp, Homo sapiens
gaatttccaaaatga

SEQ ID NO: 1504456 - DNA, 15 bp, Homo sapiens
ggaatttccaaaatg

SEQ ID NO: 1504457 - DNA, 15 bp, Homo sapiens
aggaatttccaaaat

SEQ ID NO: 1504458 - DNA, 15 bp, Homo sapiens
taggaatttccaaaa

SEQ ID NO: 1504459 - DNA, 15 bp, Homo sapiens
ataggaatttccaaa

SEQ ID NO: 1504460 - DNA, 15 bp, Homo sapiens
aataggaatttccaa

SEQ ID NO: 1504461 - DNA, 15 bp, Homo sapiens
caataggaatttcca

SEQ ID NO: 1504462 - DNA, 15 bp, Homo sapiens
gcaataggaatttcc

SEQ ID NO: 1504463 - DNA, 15 bp, Homo sapiens
agcaataggaatttc

SEQ ID NO: 1504464 - DNA, 15 bp, Homo sapiens
aagcaataggaattt

SEQ ID NO: 1504465 - DNA, 15 bp, Homo sapiens
caagcaataggaatt

SEQ ID NO: 1504466 - DNA, 15 bp, Homo sapiens
acaagcaataggaat

SEQ ID NO: 1504467 - DNA, 15 bp, Homo sapiens
gacaagcaataggaa

SEQ ID NO: 1504468 - DNA, 15 bp, Homo sapiens
agacaagcaatagga

SEQ ID NO: 1504469 - DNA, 15 bp, Homo sapiens
gagacaagcaatagg

SEQ ID NO: 1504470 - DNA, 15 bp, Homo sapiens
ggagacaagcaatag

SEQ ID NO: 1504471 - DNA, 15 bp, Homo sapiens
aggagacaagcaata

SEQ ID NO: 1504472 - DNA, 15 bp, Homo sapiens
caggagacaagcaat

SEQ ID NO: 1504473 - DNA, 15 bp, Homo sapiens
acaggagacaagcaa

SEQ ID NO: 1504474 - DNA, 15 bp, Homo sapiens
cacaggagacaagca

SEQ ID NO: 1504475 - DNA, 15 bp, Homo sapiens
acacaggagacaagc

SEQ ID NO: 1504476 - DNA, 15 bp, Homo sapiens
aacacaggagacaag

SEQ ID NO: 1504477 - DNA, 15 bp, Homo sapiens
caacacaggagacaa

SEQ ID NO: 1504478 - DNA, 15 bp, Homo sapiens
tcaacacaggagaca

SEQ ID NO: 1504479 - DNA, 15 bp, Homo sapiens
atcaacacaggagac

SEQ ID NO: 1504480 - DNA, 15 bp, Homo sapiens
aatcaacacaggaga

SEQ ID NO: 1504481 - DNA, 15 bp, Homo sapiens
gaatcaacacaggag

SEQ ID NO: 1504482 - DNA, 15 bp, Homo sapiens
ggaatcaacacagga

SEQ ID NO: 1504483 - DNA, 15 bp, Homo sapiens
gggaatcaacacagg

SEQ ID NO: 1504484 - DNA, 15 bp, Homo sapiens
agggaatcaacacag

SEQ ID NO: 1504485 - DNA, 15 bp, Homo sapiens
aagggaatcaacaca

SEQ ID NO: 1504486 - DNA, 15 bp, Homo sapiens
caagggaatcaacac

SEQ ID NO: 1504487 - DNA, 15 bp, Homo sapiens
acaagggaatcaaca

SEQ ID NO: 1504488 - DNA, 15 bp, Homo sapiens
aacaagggaatcaac

SEQ ID NO: 1504489 - DNA, 15 bp, Homo sapiens
aaacaagggaatcaa

SEQ ID NO: 1504490 - DNA, 15 bp, Homo sapiens
aaaacaagggaatca

SEQ ID NO: 1504491 - DNA, 15 bp, Homo sapiens
caaaacaagggaatc

SEQ ID NO: 1504492 - DNA, 15 bp, Homo sapiens
acaaaacaagggaat

SEQ ID NO: 1504493 - DNA, 15 bp, Homo sapiens
cacaaaacaagggaa

SEQ ID NO: 1504494 - DNA, 15 bp, Homo sapiens
ccacaaaacaaggga

SEQ ID NO: 1504495 - DNA, 15 bp, Homo sapiens
tccacaaaacaaggg

SEQ ID NO: 1504496 - DNA, 15 bp, Homo sapiens
atccacaaaacaagg

SEQ ID NO: 1504497 - DNA, 15 bp, Homo sapiens
gatccacaaaacaag

SEQ ID NO: 1504498 - DNA, 15 bp, Homo sapiens
agatccacaaaacaa

SEQ ID NO: 1504499 - DNA, 15 bp, Homo sapiens
gagatccacaaaaca

SEQ ID NO: 1504500 - DNA, 15 bp, Homo sapiens
tgagatccacaaaac

SEQ ID NO: 1504501 - DNA, 15 bp, Homo sapiens
atgagatccacaaaa

SEQ ID NO: 1504502 - DNA, 15 bp, Homo sapiens
aatgagatccacaaa

SEQ ID NO: 1504503 - DNA, 15 bp, Homo sapiens
gaatgagatccacaa

SEQ ID NO: 1504504 - DNA, 15 bp, Homo sapiens
tgaatgagatccaca

SEQ ID NO: 1504505 - DNA, 15 bp, Homo sapiens
atgaatgagatccac

SEQ ID NO: 1504506 - DNA, 15 bp, Homo sapiens
aatgaatgagatcca

SEQ ID NO: 1504507 - DNA, 15 bp, Homo sapiens
aaatgaatgagatcc

SEQ ID NO: 1504508 - DNA, 15 bp, Homo sapiens
taaatgaatgagatc

SEQ ID NO: 1504509 - DNA, 15 bp, Homo sapiens
gtaaatgaatgagat

SEQ ID NO: 1504510 - DNA, 15 bp, Homo sapiens
tgtaaatgaatgaga

SEQ ID NO: 1504511 - DNA, 15 bp, Homo sapiens
ttgtaaatgaatgag

SEQ ID NO: 1504512 - DNA, 15 bp, Homo sapiens
gttgtaaatgaatga

SEQ ID NO: 1504513 - DNA, 15 bp, Homo sapiens
tgttgtaaatgaatg

SEQ ID NO: 1504514 - DNA, 15 bp, Homo sapiens
gtgttgtaaatgaat

SEQ ID NO: 1504515 - DNA, 15 bp, Homo sapiens
tgtgttgtaaatgaa

SEQ ID NO: 1504516 - DNA, 15 bp, Homo sapiens
gtgtgttgtaaatga

SEQ ID NO: 1504517 - DNA, 15 bp, Homo sapiens
ggtgtgttgtaaatg

SEQ ID NO: 1504518 - DNA, 15 bp, Homo sapiens
aggtgtgttgtaaat

SEQ ID NO: 1504519 - DNA, 15 bp, Homo sapiens
aaggtgtgttgtaaa

SEQ ID NO: 1504520 - DNA, 15 bp, Homo sapiens
gaaggtgtgttgtaa

SEQ ID NO: 1504521 - DNA, 15 bp, Homo sapiens
ggaaggtgtgttgta

SEQ ID NO: 1504522 - DNA, 15 bp, Homo sapiens
tggaaggtgtgttgt

SEQ ID NO: 1504523 - DNA, 15 bp, Homo sapiens
gtggaaggtgtgttg

SEQ ID NO: 1504524 - DNA, 15 bp, Homo sapiens
agtggaaggtgtgtt

SEQ ID NO: 1504525 - DNA, 15 bp, Homo sapiens
tagtggaaggtgtgt

SEQ ID NO: 1504526 - DNA, 15 bp, Homo sapiens
ctagtggaaggtgtg

SEQ ID NO: 1504527 - DNA, 15 bp, Homo sapiens
gctagtggaaggtgt

SEQ ID NO: 1504528 - DNA, 15 bp, Homo sapiens
agctagtggaaggtg

SEQ ID NO: 1504529 - DNA, 15 bp, Homo sapiens
aagctagtggaaggt

SEQ ID NO: 1504530 - DNA, 15 bp, Homo sapiens
caagctagtggaagg

SEQ ID NO: 1504531 - DNA, 15 bp, Homo sapiens
gcaagctagtggaag

SEQ ID NO: 1504532 - DNA, 15 bp, Homo sapiens
agcaagctagtggaa

SEQ ID NO: 1504533 - DNA, 15 bp, Homo sapiens
cagcaagctagtgga

SEQ ID NO: 1504534 - DNA, 15 bp, Homo sapiens
ccagcaagctagtgg

SEQ ID NO: 1504535 - DNA, 15 bp, Homo sapiens
tccagcaagctagtg

SEQ ID NO: 1504536 - DNA, 15 bp, Homo sapiens
ttccagcaagctagt

SEQ ID NO: 1504537 - DNA, 15 bp, Homo sapiens
tttccagcaagctag

SEQ ID NO: 1504538 - DNA, 15 bp, Homo sapiens
ttttccagcaagcta

SEQ ID NO: 1504539 - DNA, 15 bp, Homo sapiens
tttttccagcaagct

SEQ ID NO: 1504540 - DNA, 15 bp, Homo sapiens
ttttttccagcaagc

SEQ ID NO: 1504541 - DNA, 15 bp, Homo sapiens
tttttttccagcaag

SEQ ID NO: 1504542 - DNA, 15 bp, Homo sapiens
ttttttttccagcaa

SEQ ID NO: 1504543 - DNA, 15 bp, Homo sapiens
tttttttttccagca

SEQ ID NO: 1504544 - DNA, 15 bp, Homo sapiens
gtacttttttttttt

SEQ ID NO: 1504545 - DNA, 15 bp, Homo sapiens
tgtactttttttttt

SEQ ID NO: 1504546 - DNA, 15 bp, Homo sapiens
ttgtacttttttttt

SEQ ID NO: 1504547 - DNA, 15 bp, Homo sapiens
tttgtactttttttt

SEQ ID NO: 1504548 - DNA, 15 bp, Homo sapiens
ctttgtacttttttt

SEQ ID NO: 1504549 - DNA, 15 bp, Homo sapiens
cctttgtactttttt

SEQ ID NO: 1504550 - DNA, 15 bp, Homo sapiens
tcctttgtacttttt

SEQ ID NO: 1504551 - DNA, 15 bp, Homo sapiens
ctcctttgtactttt

SEQ ID NO: 1504552 - DNA, 15 bp, Homo sapiens
tctcctttgtacttt

SEQ ID NO: 1504553 - DNA, 15 bp, Homo sapiens
atctcctttgtactt

SEQ ID NO: 1504554 - DNA, 15 bp, Homo sapiens
tatctcctttgtact

SEQ ID NO: 1504555 - DNA, 15 bp, Homo sapiens
ttatctcctttgtac

SEQ ID NO: 1504556 - DNA, 15 bp, Homo sapiens
tttatctcctttgta

SEQ ID NO: 1504557 - DNA, 15 bp, Homo sapiens
atttatctcctttgt

SEQ ID NO: 1504558 - DNA, 15 bp, Homo sapiens
aatttatctcctttg

SEQ ID NO: 1504559 - DNA, 15 bp, Homo sapiens
aaatttatctccttt

SEQ ID NO: 1504560 - DNA, 15 bp, Homo sapiens
aaaatttatctcctt

SEQ ID NO: 1504561 - DNA, 15 bp, Homo sapiens
caaaatttatctcct

SEQ ID NO: 1504562 - DNA, 15 bp, Homo sapiens
tcaaaatttatctcc

SEQ ID NO: 1504563 - DNA, 15 bp, Homo sapiens
ctcaaaatttatctc

SEQ ID NO: 1504564 - DNA, 15 bp, Homo sapiens
tctcaaaatttatct

SEQ ID NO: 1504565 - DNA, 15 bp, Homo sapiens
gtctcaaaatttatc

SEQ ID NO: 1504566 - DNA, 15 bp, Homo sapiens
ggtctcaaaatttat

SEQ ID NO: 1504567 - DNA, 15 bp, Homo sapiens
aggtctcaaaattta

SEQ ID NO: 1504568 - DNA, 15 bp, Homo sapiens
aaggtctcaaaattt

SEQ ID NO: 1504569 - DNA, 15 bp, Homo sapiens
caaggtctcaaaatt

SEQ ID NO: 1504570 - DNA, 15 bp, Homo sapiens
tcaaggtctcaaaat

SEQ ID NO: 1504571 - DNA, 15 bp, Homo sapiens
ttcaaggtctcaaaa

SEQ ID NO: 1504572 - DNA, 15 bp, Homo sapiens
attcaaggtctcaaa

SEQ ID NO: 1504573 - DNA, 15 bp, Homo sapiens
cattcaaggtctcaa

SEQ ID NO: 1504574 - DNA, 15 bp, Homo sapiens
acattcaaggtctca

SEQ ID NO: 1504575 - DNA, 15 bp, Homo sapiens
aacattcaaggtctc

SEQ ID NO: 1504576 - DNA, 15 bp, Homo sapiens
aaacattcaaggtct

SEQ ID NO: 1504577 - DNA, 15 bp, Homo sapiens
caaacattcaaggtc

SEQ ID NO: 1504578 - DNA, 15 bp, Homo sapiens
tcaaacattcaaggt

SEQ ID NO: 1504579 - DNA, 15 bp, Homo sapiens
ctcaaacattcaagg

SEQ ID NO: 1504580 - DNA, 15 bp, Homo sapiens
tctcaaacattcaag

SEQ ID NO: 1504581 - DNA, 15 bp, Homo sapiens
ttctcaaacattcaa

SEQ ID NO: 1504582 - DNA, 15 bp, Homo sapiens
attctcaaacattca

SEQ ID NO: 1504583 - DNA, 15 bp, Homo sapiens
cattctcaaacattc

SEQ ID NO: 1504584 - DNA, 15 bp, Homo sapiens
acattctcaaacatt

SEQ ID NO: 1504585 - DNA, 15 bp, Homo sapiens
gacattctcaaacat

SEQ ID NO: 1504586 - DNA, 15 bp, Homo sapiens
agacattctcaaaca

SEQ ID NO: 1504587 - DNA, 15 bp, Homo sapiens
aagacattctcaaac

SEQ ID NO: 1504588 - DNA, 15 bp, Homo sapiens
aaagacattctcaaa

SEQ ID NO: 1504589 - DNA, 15 bp, Homo sapiens
taaagacattctcaa

SEQ ID NO: 1504590 - DNA, 15 bp, Homo sapiens
ataaagacattctca

SEQ ID NO: 1504591 - DNA, 15 bp, Homo sapiens
aataaagacattctc

SEQ ID NO: 1504592 - DNA, 15 bp, Homo sapiens
gaataaagacattct

SEQ ID NO: 1504593 - DNA, 15 bp, Homo sapiens
agaataaagacattc

SEQ ID NO: 1504594 - DNA, 15 bp, Homo sapiens
tagaataaagacatt

SEQ ID NO: 1504595 - DNA, 15 bp, Homo sapiens
gtagaataaagacat

SEQ ID NO: 1504596 - DNA, 15 bp, Homo sapiens
ggtagaataaagaca

SEQ ID NO: 1504597 - DNA, 15 bp, Homo sapiens
aggtagaataaagac

SEQ ID NO: 1504598 - DNA, 15 bp, Homo sapiens
aaggtagaataaaga

SEQ ID NO: 1504599 - DNA, 15 bp, Homo sapiens
aaaggtagaataaag

SEQ ID NO: 1504600 - DNA, 15 bp, Homo sapiens
aaaaggtagaataaa

SEQ ID NO: 1504601 - DNA, 15 bp, Homo sapiens
aaaaaggtagaataa

SEQ ID NO: 1504602 - DNA, 15 bp, Homo sapiens
aaaaaaggtagaata

SEQ ID NO: 1504603 - DNA, 15 bp, Homo sapiens
caaaaaaggtagaat

SEQ ID NO: 1504604 - DNA, 15 bp, Homo sapiens
tcaaaaaaggtagaa

SEQ ID NO: 1504605 - DNA, 15 bp, Homo sapiens
ttcaaaaaaggtaga

SEQ ID NO: 1504606 - DNA, 15 bp, Homo sapiens
tttcaaaaaaggtag

SEQ ID NO: 1504607 - DNA, 15 bp, Homo sapiens
ttttcaaaaaaggta

SEQ ID NO: 1504608 - DNA, 15 bp, Homo sapiens
tttttcaaaaaaggt

SEQ ID NO: 1504609 - DNA, 15 bp, Homo sapiens
ttttttcaaaaaagg

SEQ ID NO: 1504610 - DNA, 15 bp, Homo sapiens
tttttttcaaaaaag

SEQ ID NO: 1504611 - DNA, 15 bp, Homo sapiens
ttttttttcaaaaaa

SEQ ID NO: 1504612 - DNA, 15 bp, Homo sapiens
atttttttttcaaaa

SEQ ID NO: 1504613 - DNA, 15 bp, Homo sapiens
aatttttttttcaaa

SEQ ID NO: 1504614 - DNA, 15 bp, Homo sapiens
caatttttttttcaa

SEQ ID NO: 1504615 - DNA, 15 bp, Homo sapiens
tcaatttttttttca

SEQ ID NO: 1504616 - DNA, 15 bp, Homo sapiens
atcaatttttttttc

SEQ ID NO: 1504617 - DNA, 15 bp, Homo sapiens
tatcaattttttttt

SEQ ID NO: 1504618 - DNA, 15 bp, Homo sapiens
ttatcaatttttttt

SEQ ID NO: 1504619 - DNA, 15 bp, Homo sapiens
attatcaattttttt

SEQ ID NO: 1504620 - DNA, 15 bp, Homo sapiens
aattatcaatttttt

SEQ ID NO: 1504621 - DNA, 15 bp, Homo sapiens
aaattatcaattttt

SEQ ID NO: 1504622 - DNA, 15 bp, Homo sapiens
caaattatcaatttt

SEQ ID NO: 1504623 - DNA, 15 bp, Homo sapiens
acaaattatcaattt

SEQ ID NO: 1504624 - DNA, 15 bp, Homo sapiens
gacaaattatcaatt

SEQ ID NO: 1504625 - DNA, 15 bp, Homo sapiens
agacaaattatcaat

SEQ ID NO: 1504626 - DNA, 15 bp, Homo sapiens
tagacaaattatcaa

SEQ ID NO: 1504627 - DNA, 15 bp, Homo sapiens
ctagacaaattatca

SEQ ID NO: 1504628 - DNA, 15 bp, Homo sapiens
cctagacaaattatc

SEQ ID NO: 1504629 - DNA, 15 bp, Homo sapiens
acctagacaaattat

SEQ ID NO: 1504630 - DNA, 15 bp, Homo sapiens
gacctagacaaatta

SEQ ID NO: 1504631 - DNA, 15 bp, Homo sapiens
agacctagacaaatt

SEQ ID NO: 1504632 - DNA, 15 bp, Homo sapiens
aagacctagacaaat

SEQ ID NO: 1504633 - DNA, 15 bp, Homo sapiens
taagacctagacaaa

SEQ ID NO: 1504634 - DNA, 15 bp, Homo sapiens
aggtaagaataaggt

SEQ ID NO: 1504635 - DNA, 15 bp, Homo sapiens
gaggtaagaataagg

SEQ ID NO: 1504636 - DNA, 15 bp, Homo sapiens
agaggtaagaataag

SEQ ID NO: 1504637 - DNA, 15 bp, Homo sapiens
gagaggtaagaataa

SEQ ID NO: 1504638 - DNA, 15 bp, Homo sapiens
tgagaggtaagaata

SEQ ID NO: 1504639 - DNA, 15 bp, Homo sapiens
ttgagaggtaagaat

SEQ ID NO: 1504640 - DNA, 15 bp, Homo sapiens
tttgagaggtaagaa

SEQ ID NO: 1504641 - DNA, 15 bp, Homo sapiens
atttgagaggtaaga

SEQ ID NO: 1504642 - DNA, 15 bp, Homo sapiens
tatttgagaggtaag

SEQ ID NO: 1504643 - DNA, 15 bp, Homo sapiens
gtatttgagaggtaa

SEQ ID NO: 1504644 - DNA, 15 bp, Homo sapiens
tgtatttgagaggta

SEQ ID NO: 1504645 - DNA, 15 bp, Homo sapiens
ttgtatttgagaggt

SEQ ID NO: 1504646 - DNA, 15 bp, Homo sapiens
attgtatttgagagg

SEQ ID NO: 1504647 - DNA, 15 bp, Homo sapiens
cattgtatttgagag

SEQ ID NO: 1504648 - DNA, 15 bp, Homo sapiens
tcattgtatttgaga

SEQ ID NO: 1504649 - DNA, 15 bp, Homo sapiens
gtcattgtatttgag

SEQ ID NO: 1504650 - DNA, 15 bp, Homo sapiens
ggtcattgtatttga

SEQ ID NO: 1504651 - DNA, 15 bp, Homo sapiens
aggtcattgtatttg

SEQ ID NO: 1504652 - DNA, 15 bp, Homo sapiens
gaggtcattgtattt

SEQ ID NO: 1504653 - DNA, 15 bp, Homo sapiens
tgaggtcattgtatt

SEQ ID NO: 1504654 - DNA, 15 bp, Homo sapiens
atgaggtcattgtat

SEQ ID NO: 1504655 - DNA, 15 bp, Homo sapiens
tatgaggtcattgta

SEQ ID NO: 1504656 - DNA, 15 bp, Homo sapiens
atatgaggtcattgt

SEQ ID NO: 1504657 - DNA, 15 bp, Homo sapiens
aatatgaggtcattg

SEQ ID NO: 1504658 - DNA, 15 bp, Homo sapiens
aaatatgaggtcatt

SEQ ID NO: 1504659 - DNA, 15 bp, Homo sapiens
aaaatatgaggtcat

SEQ ID NO: 1504660 - DNA, 15 bp, Homo sapiens
taaaatatgaggtca

SEQ ID NO: 1504661 - DNA, 15 bp, Homo sapiens
ttaaaatatgaggtc

SEQ ID NO: 1504662 - DNA, 15 bp, Homo sapiens
tttaaaatatgaggt

SEQ ID NO: 1504663 - DNA, 15 bp, Homo sapiens
atttaaaatatgagg

SEQ ID NO: 1504664 - DNA, 15 bp, Homo sapiens
aatttaaaatatgag

SEQ ID NO: 1504665 - DNA, 15 bp, Homo sapiens
aaatttaaaatatga

SEQ ID NO: 1504666 - DNA, 15 bp, Homo sapiens
aaaatttaaaatatg

SEQ ID NO: 1504667 - DNA, 15 bp, Homo sapiens
caaaatttaaaatat

SEQ ID NO: 1504668 - DNA, 15 bp, Homo sapiens
gcaaaatttaaaata

SEQ ID NO: 1504669 - DNA, 15 bp, Homo sapiens
agcaaaatttaaaat

SEQ ID NO: 1504670 - DNA, 15 bp, Homo sapiens
gagcaaaatttaaaa

SEQ ID NO: 1504671 - DNA, 15 bp, Homo sapiens
tgagcaaaatttaaa

SEQ ID NO: 1504672 - DNA, 15 bp, Homo sapiens
ttgagcaaaatttaa

SEQ ID NO: 1504673 - DNA, 15 bp, Homo sapiens
cttgagcaaaattta

SEQ ID NO: 1504674 - DNA, 15 bp, Homo sapiens
ccttgagcaaaattt

SEQ ID NO: 1504675 - DNA, 15 bp, Homo sapiens
accttgagcaaaatt

SEQ ID NO: 1504676 - DNA, 15 bp, Homo sapiens
aaccttgagcaaaat

SEQ ID NO: 1504677 - DNA, 15 bp, Homo sapiens
aaaccttgagcaaaa

SEQ ID NO: 1504678 - DNA, 15 bp, Homo sapiens
aaaaccttgagcaaa

SEQ ID NO: 1504679 - DNA, 15 bp, Homo sapiens
aaaaaccttgagcaa

SEQ ID NO: 1504680 - DNA, 15 bp, Homo sapiens
aaaaaaccttgagca

SEQ ID NO: 1504681 - DNA, 15 bp, Homo sapiens
gaaaaaaccttgagc

SEQ ID NO: 1504682 - DNA, 15 bp, Homo sapiens
ggaaaaaaccttgag

SEQ ID NO: 1504683 - DNA, 15 bp, Homo sapiens
aggaaaaaaccttga

SEQ ID NO: 1504684 - DNA, 15 bp, Homo sapiens
gaggaaaaaaccttg

SEQ ID NO: 1504685 - DNA, 15 bp, Homo sapiens
ggaggaaaaaacctt

SEQ ID NO: 1504686 - DNA, 15 bp, Homo sapiens
aggaggaaaaaacct

SEQ ID NO: 1504687 - DNA, 15 bp, Homo sapiens
gaggaggaaaaaacc

SEQ ID NO: 1504688 - DNA, 15 bp, Homo sapiens
tgaggaggaaaaaac

SEQ ID NO: 1504689 - DNA, 15 bp, Homo sapiens
atgaggaggaaaaaa

SEQ ID NO: 1504690 - DNA, 15 bp, Homo sapiens
aatgaggaggaaaaa

SEQ ID NO: 1504691 - DNA, 15 bp, Homo sapiens
gaatgaggaggaaaa

SEQ ID NO: 1504692 - DNA, 15 bp, Homo sapiens
agaatgaggaggaaa

SEQ ID NO: 1504693 - DNA, 15 bp, Homo sapiens
tagaatgaggaggaa

SEQ ID NO: 1504694 - DNA, 15 bp, Homo sapiens
ctagaatgaggagga

SEQ ID NO: 1504695 - DNA, 15 bp, Homo sapiens
cctagaatgaggagg

SEQ ID NO: 1504696 - DNA, 15 bp, Homo sapiens
gcctagaatgaggag

SEQ ID NO: 1504697 - DNA, 15 bp, Homo sapiens
tgcctagaatgagga

SEQ ID NO: 1504698 - DNA, 15 bp, Homo sapiens
atgcctagaatgagg

SEQ ID NO: 1504699 - DNA, 15 bp, Homo sapiens
tatgcctagaatgag

SEQ ID NO: 1504700 - DNA, 15 bp, Homo sapiens
ttatgcctagaatga

SEQ ID NO: 1504701 - DNA, 15 bp, Homo sapiens
attatgcctagaatg

SEQ ID NO: 1504702 - DNA, 15 bp, Homo sapiens
aattatgcctagaat

SEQ ID NO: 1504703 - DNA, 15 bp, Homo sapiens
taattatgcctagaa

SEQ ID NO: 1504704 - DNA, 15 bp, Homo sapiens
ataattatgcctaga

SEQ ID NO: 1504705 - DNA, 15 bp, Homo sapiens
aataattatgcctag

SEQ ID NO: 1504706 - DNA, 15 bp, Homo sapiens
aaataattatgccta

SEQ ID NO: 1504707 - DNA, 15 bp, Homo sapiens
aaaataattatgcct

SEQ ID NO: 1504708 - DNA, 15 bp, Homo sapiens
gaaaataattatgcc

SEQ ID NO: 1504709 - DNA, 15 bp, Homo sapiens
agaaaataattatgc

SEQ ID NO: 1504710 - DNA, 15 bp, Homo sapiens
aagaaaataattatg

SEQ ID NO: 1504711 - DNA, 15 bp, Homo sapiens
taagaaaataattat

SEQ ID NO: 1504712 - DNA, 15 bp, Homo sapiens
ataagaaaataatta

SEQ ID NO: 1504713 - DNA, 15 bp, Homo sapiens
tataagaaaataatt

SEQ ID NO: 1504714 - DNA, 15 bp, Homo sapiens
atataagaaaataat

SEQ ID NO: 1504715 - DNA, 15 bp, Homo sapiens
catataagaaaataa

SEQ ID NO: 1504716 - DNA, 15 bp, Homo sapiens
acatataagaaaata

SEQ ID NO: 1504717 - DNA, 15 bp, Homo sapiens
cacatataagaaaat

SEQ ID NO: 1504718 - DNA, 15 bp, Homo sapiens
acacatataagaaaa

SEQ ID NO: 1504719 - DNA, 15 bp, Homo sapiens
aacacatataagaaa

SEQ ID NO: 1504720 - DNA, 15 bp, Homo sapiens
aaacacatataagaa

SEQ ID NO: 1504721 - DNA, 15 bp, Homo sapiens
gaaacacatataaga

SEQ ID NO: 1504722 - DNA, 15 bp, Homo sapiens
tgaaacacatataag

SEQ ID NO: 1504723 - DNA, 15 bp, Homo sapiens
ctgaaacacatataa

SEQ ID NO: 1504724 - DNA, 15 bp, Homo sapiens
actgaaacacatata

SEQ ID NO: 1504725 - DNA, 15 bp, Homo sapiens
tactgaaacacatat

SEQ ID NO: 1504726 - DNA, 15 bp, Homo sapiens
atactgaaacacata

SEQ ID NO: 1504727 - DNA, 15 bp, Homo sapiens
aatactgaaacacat

SEQ ID NO: 1504728 - DNA, 15 bp, Homo sapiens
taatactgaaacaca

SEQ ID NO: 1504729 - DNA, 15 bp, Homo sapiens
gtaatactgaaacac

SEQ ID NO: 1504730 - DNA, 15 bp, Homo sapiens
agtaatactgaaaca

SEQ ID NO: 1504731 - DNA, 15 bp, Homo sapiens
aagtaatactgaaac

SEQ ID NO: 1504732 - DNA, 15 bp, Homo sapiens
aaagtaatactgaaa

SEQ ID NO: 1504733 - DNA, 15 bp, Homo sapiens
aaaagtaatactgaa

SEQ ID NO: 1504734 - DNA, 15 bp, Homo sapiens
aaaaagtaatactga

SEQ ID NO: 1504735 - DNA, 15 bp, Homo sapiens
aaaaaagtaatactg

SEQ ID NO: 1504736 - DNA, 15 bp, Homo sapiens
aaaaaaagtaatact

SEQ ID NO: 1504737 - DNA, 15 bp, Homo sapiens
caaaaaaagtaatac

SEQ ID NO: 1504738 - DNA, 15 bp, Homo sapiens
acaaaaaaagtaata

SEQ ID NO: 1504739 - DNA, 15 bp, Homo sapiens
cacaaaaaaagtaat

SEQ ID NO: 1504740 - DNA, 15 bp, Homo sapiens
tcacaaaaaaagtaa

SEQ ID NO: 1504741 - DNA, 15 bp, Homo sapiens
ttcacaaaaaaagta

SEQ ID NO: 1504742 - DNA, 15 bp, Homo sapiens
tttcacaaaaaaagt

SEQ ID NO: 1504743 - DNA, 15 bp, Homo sapiens
ttttcacaaaaaaag

SEQ ID NO: 1504744 - DNA, 15 bp, Homo sapiens
tttttcacaaaaaaa

SEQ ID NO: 1504745 - DNA, 15 bp, Homo sapiens
atttttcacaaaaaa

SEQ ID NO: 1504746 - DNA, 15 bp, Homo sapiens
tatttttcacaaaaa

SEQ ID NO: 1504747 - DNA, 15 bp, Homo sapiens
atatttttcacaaaa

SEQ ID NO: 1504748 - DNA, 15 bp, Homo sapiens
catatttttcacaaa

SEQ ID NO: 1504749 - DNA, 15 bp, Homo sapiens
ccatatttttcacaa

SEQ ID NO: 1504750 - DNA, 15 bp, Homo sapiens
accatatttttcaca

SEQ ID NO: 1504751 - DNA, 15 bp, Homo sapiens
aaccatatttttcac

SEQ ID NO: 1504752 - DNA, 15 bp, Homo sapiens
taaccatatttttca

SEQ ID NO: 1504753 - DNA, 15 bp, Homo sapiens
gtaaccatatttttc

SEQ ID NO: 1504754 - DNA, 15 bp, Homo sapiens
tgtaaccatattttt

SEQ ID NO: 1504755 - DNA, 15 bp, Homo sapiens
ttgtaaccatatttt

SEQ ID NO: 1504756 - DNA, 15 bp, Homo sapiens
tttgtaaccatattt

SEQ ID NO: 1504757 - DNA, 15 bp, Homo sapiens
atttgtaaccatatt

SEQ ID NO: 1504758 - DNA, 15 bp, Homo sapiens
catttgtaaccatat

SEQ ID NO: 1504759 - DNA, 15 bp, Homo sapiens
acatttgtaaccata

SEQ ID NO: 1504760 - DNA, 15 bp, Homo sapiens
cacatttgtaaccat

SEQ ID NO: 1504761 - DNA, 15 bp, Homo sapiens
ccacatttgtaacca

SEQ ID NO: 1504762 - DNA, 15 bp, Homo sapiens
accacatttgtaacc

SEQ ID NO: 1504763 - DNA, 15 bp, Homo sapiens
gaccacatttgtaac

SEQ ID NO: 1504764 - DNA, 15 bp, Homo sapiens
agaccacatttgtaa

SEQ ID NO: 1504765 - DNA, 15 bp, Homo sapiens
tagaccacatttgta

SEQ ID NO: 1504766 - DNA, 15 bp, Homo sapiens
ttagaccacatttgt

SEQ ID NO: 1504767 - DNA, 15 bp, Homo sapiens
attagaccacatttg

SEQ ID NO: 1504768 - DNA, 15 bp, Homo sapiens
aattagaccacattt

SEQ ID NO: 1504769 - DNA, 15 bp, Homo sapiens
aaattagaccacatt

SEQ ID NO: 1504770 - DNA, 15 bp, Homo sapiens
gaaattagaccacat

SEQ ID NO: 1504771 - DNA, 15 bp, Homo sapiens
tgaaattagaccaca

SEQ ID NO: 1504772 - DNA, 15 bp, Homo sapiens
atgaaattagaccac

SEQ ID NO: 1504773 - DNA, 15 bp, Homo sapiens
aaatgaaattagacc

SEQ ID NO: 1504774 - DNA, 15 bp, Homo sapiens
aaaatgaaattagac

SEQ ID NO: 1504775 - DNA, 15 bp, Homo sapiens
caaaatgaaattaga

SEQ ID NO: 1504776 - DNA, 15 bp, Homo sapiens
gcaaaatgaaattag

SEQ ID NO: 1504777 - DNA, 15 bp, Homo sapiens
tgcaaaatgaaatta

SEQ ID NO: 1504778 - DNA, 15 bp, Homo sapiens
gtgcaaaatgaaatt

SEQ ID NO: 1504779 - DNA, 15 bp, Homo sapiens
agtgcaaaatgaaat

SEQ ID NO: 1504780 - DNA, 15 bp, Homo sapiens
aagtgcaaaatgaaa

SEQ ID NO: 1504781 - DNA, 15 bp, Homo sapiens
aaagtgcaaaatgaa

SEQ ID NO: 1504782 - DNA, 15 bp, Homo sapiens
taaagtgcaaaatga

SEQ ID NO: 1504783 - DNA, 15 bp, Homo sapiens
ttaaagtgcaaaatg

SEQ ID NO: 1504784 - DNA, 15 bp, Homo sapiens
tttaaagtgcaaaat

SEQ ID NO: 1504785 - DNA, 15 bp, Homo sapiens
ttttaaagtgcaaaa

SEQ ID NO: 1504786 - DNA, 15 bp, Homo sapiens
tttttaaagtgcaaa

SEQ ID NO: 1504787 - DNA, 15 bp, Homo sapiens
atttttaaagtgcaa

SEQ ID NO: 1504788 - DNA, 15 bp, Homo sapiens
aatttttaaagtgca

SEQ ID NO: 1504789 - DNA, 15 bp, Homo sapiens
taatttttaaagtgc

SEQ ID NO: 1504790 - DNA, 15 bp, Homo sapiens
ataatttttaaagtg

SEQ ID NO: 1504791 - DNA, 15 bp, Homo sapiens
aataatttttaaagt

SEQ ID NO: 1504792 - DNA, 15 bp, Homo sapiens
taataatttttaaag

SEQ ID NO: 1504793 - DNA, 15 bp, Homo sapiens
ttaataatttttaaa

SEQ ID NO: 1504794 - DNA, 15 bp, Homo sapiens
attaataatttttaa

SEQ ID NO: 1504795 - DNA, 15 bp, Homo sapiens
cattaataattttta

SEQ ID NO: 1504796 - DNA, 15 bp, Homo sapiens
tcattaataattttt

SEQ ID NO: 1504797 - DNA, 15 bp, Homo sapiens
ctcattaataatttt

SEQ ID NO: 1504798 - DNA, 15 bp, Homo sapiens
cctcattaataattt

SEQ ID NO: 1504799 - DNA, 15 bp, Homo sapiens
gcctcattaataatt

SEQ ID NO: 1504800 - DNA, 15 bp, Homo sapiens
ggcctcattaataat

SEQ ID NO: 1504801 - DNA, 15 bp, Homo sapiens
cggcctcattaataa

SEQ ID NO: 1504802 - DNA, 15 bp, Homo sapiens
ccggcctcattaata

SEQ ID NO: 1504803 - DNA, 15 bp, Homo sapiens
tccggcctcattaat

SEQ ID NO: 1504804 - DNA, 15 bp, Homo sapiens
ttccggcctcattaa

SEQ ID NO: 1504805 - DNA, 15 bp, Homo sapiens
tttccggcctcatta

SEQ ID NO: 1504806 - DNA, 15 bp, Homo sapiens
atttccggcctcatt

SEQ ID NO: 1504807 - DNA, 15 bp, Homo sapiens
catttccggcctcat

SEQ ID NO: 1504808 - DNA, 15 bp, Homo sapiens
tcatttccggcctca

SEQ ID NO: 1504809 - DNA, 15 bp, Homo sapiens
ctcatttccggcctc

SEQ ID NO: 1504810 - DNA, 15 bp, Homo sapiens
cctcatttccggcct

SEQ ID NO: 1504811 - DNA, 15 bp, Homo sapiens
gcctcatttccggcc

SEQ ID NO: 1504812 - DNA, 15 bp, Homo sapiens
ggcctcatttccggc

SEQ ID NO: 1504813 - DNA, 15 bp, Homo sapiens
cggcctcatttccgg

SEQ ID NO: 1504814 - DNA, 15 bp, Homo sapiens
ccggcctcatttccg

SEQ ID NO: 1504815 - DNA, 15 bp, Homo sapiens
cccggcctcatttcc

SEQ ID NO: 1504816 - DNA, 15 bp, Homo sapiens
gcccggcctcatttc

SEQ ID NO: 1504817 - DNA, 15 bp, Homo sapiens
agtgcccggcctcat

SEQ ID NO: 1504818 - DNA, 15 bp, Homo sapiens
cagtgcccggcctca

SEQ ID NO: 1504819 - DNA, 15 bp, Homo sapiens
acagtgcccggcctc

SEQ ID NO: 1504820 - DNA, 15 bp, Homo sapiens
cacagtgcccggcct

SEQ ID NO: 1504821 - DNA, 15 bp, Homo sapiens
ccacagtgcccggcc

SEQ ID NO: 1504822 - DNA, 15 bp, Homo sapiens
gccacagtgcccggc

SEQ ID NO: 1504823 - DNA, 15 bp, Homo sapiens
agccacagtgcccgg

SEQ ID NO: 1504824 - DNA, 15 bp, Homo sapiens
gagccacagtgcccg

SEQ ID NO: 1504825 - DNA, 15 bp, Homo sapiens
tgagccacagtgccc

SEQ ID NO: 1504826 - DNA, 15 bp, Homo sapiens
atgagccacagtgcc

SEQ ID NO: 1504827 - DNA, 15 bp, Homo sapiens
catgagccacagtgc

SEQ ID NO: 1504828 - DNA, 15 bp, Homo sapiens
gcatgagccacagtg

SEQ ID NO: 1504829 - DNA, 15 bp, Homo sapiens
ggcatgagccacagt

SEQ ID NO: 1504830 - DNA, 15 bp, Homo sapiens
aggcatgagccacag

SEQ ID NO: 1504831 - DNA, 15 bp, Homo sapiens
caggcatgagccaca

SEQ ID NO: 1504832 - DNA, 15 bp, Homo sapiens
tgcccaccttggcct

SEQ ID NO: 1504833 - DNA, 15 bp, Homo sapiens
ctgcccaccttggcc

SEQ ID NO: 1504834 - DNA, 15 bp, Homo sapiens
tctgcccaccttggc

SEQ ID NO: 1504835 - DNA, 15 bp, Homo sapiens
atctgcccaccttgg

SEQ ID NO: 1504836 - DNA, 15 bp, Homo sapiens
gatctgcccaccttg

SEQ ID NO: 1504837 - DNA, 15 bp, Homo sapiens
tgatctgcccacctt

SEQ ID NO: 1504838 - DNA, 15 bp, Homo sapiens
atggtctcgaactcc

SEQ ID NO: 1504839 - DNA, 15 bp, Homo sapiens
gatggtctcgaactc

SEQ ID NO: 1504840 - DNA, 15 bp, Homo sapiens
ggatggtctcgaact

SEQ ID NO: 1504841 - DNA, 15 bp, Homo sapiens
aggatggtctcgaac

SEQ ID NO: 1504842 - DNA, 15 bp, Homo sapiens
caggatggtctcgaa

SEQ ID NO: 1504843 - DNA, 15 bp, Homo sapiens
cccaggatggtctcg

SEQ ID NO: 1504844 - DNA, 15 bp, Homo sapiens
acccaggatggtctc

SEQ ID NO: 1504845 - DNA, 15 bp, Homo sapiens
tacccaggatggtct

SEQ ID NO: 1504846 - DNA, 15 bp, Homo sapiens
ttacccaggatggtc

SEQ ID NO: 1504847 - DNA, 15 bp, Homo sapiens
gttacccaggatggt

SEQ ID NO: 1504848 - DNA, 15 bp, Homo sapiens
tgttacccaggatgg

SEQ ID NO: 1504849 - DNA, 15 bp, Homo sapiens
gtgttacccaggatg

SEQ ID NO: 1504850 - DNA, 15 bp, Homo sapiens
tgtgttacccaggat

SEQ ID NO: 1504851 - DNA, 15 bp, Homo sapiens
ctgtgttacccagga

SEQ ID NO: 1504852 - DNA, 15 bp, Homo sapiens
actgtgttacccagg

SEQ ID NO: 1504853 - DNA, 15 bp, Homo sapiens
cactgtgttacccag

SEQ ID NO: 1504854 - DNA, 15 bp, Homo sapiens
tcactgtgttaccca

SEQ ID NO: 1504855 - DNA, 15 bp, Homo sapiens
ttcactgtgttaccc

SEQ ID NO: 1504856 - DNA, 15 bp, Homo sapiens
tttcactgtgttacc

SEQ ID NO: 1504857 - DNA, 15 bp, Homo sapiens
gtttcactgtgttac

SEQ ID NO: 1504858 - DNA, 15 bp, Homo sapiens
agggtttcactgtgt

SEQ ID NO: 1504859 - DNA, 15 bp, Homo sapiens
cagggtttcactgtg

SEQ ID NO: 1504860 - DNA, 15 bp, Homo sapiens
acagggtttcactgt

SEQ ID NO: 1504861 - DNA, 15 bp, Homo sapiens
gacagggtttcactg

SEQ ID NO: 1504862 - DNA, 15 bp, Homo sapiens
cggttaattttttgt

SEQ ID NO: 1504863 - DNA, 15 bp, Homo sapiens
ccggttaattttttg

SEQ ID NO: 1504864 - DNA, 15 bp, Homo sapiens
cccggttaatttttt

SEQ ID NO: 1504865 - DNA, 15 bp, Homo sapiens
acccggttaattttt

SEQ ID NO: 1504866 - DNA, 15 bp, Homo sapiens
cacccggttaatttt

SEQ ID NO: 1504867 - DNA, 15 bp, Homo sapiens
acacccggttaattt

SEQ ID NO: 1504868 - DNA, 15 bp, Homo sapiens
cacacccggttaatt

SEQ ID NO: 1504869 - DNA, 15 bp, Homo sapiens
ccacacccggttaat

SEQ ID NO: 1504870 - DNA, 15 bp, Homo sapiens
accacacccggttaa

SEQ ID NO: 1504871 - DNA, 15 bp, Homo sapiens
caccacacccggtta

SEQ ID NO: 1504872 - DNA, 15 bp, Homo sapiens
ccaccacacccggtt

SEQ ID NO: 1504873 - DNA, 15 bp, Homo sapiens
gccaccacacccggt

SEQ ID NO: 1504874 - DNA, 15 bp, Homo sapiens
ctgccaccacacccg

SEQ ID NO: 1504875 - DNA, 15 bp, Homo sapiens
cgcctgccaccacac

SEQ ID NO: 1504876 - DNA, 15 bp, Homo sapiens
gcgcctgccaccaca

SEQ ID NO: 1504877 - DNA, 15 bp, Homo sapiens
ctacaggcgcctgcc

SEQ ID NO: 1504878 - DNA, 15 bp, Homo sapiens
cgggttcatgccatt

SEQ ID NO: 1504879 - DNA, 15 bp, Homo sapiens
ccgggttcatgccat

SEQ ID NO: 1504880 - DNA, 15 bp, Homo sapiens
cccgggttcatgcca

SEQ ID NO: 1504881 - DNA, 15 bp, Homo sapiens
tcccgggttcatgcc

SEQ ID NO: 1504882 - DNA, 15 bp, Homo sapiens
ctcccgggttcatgc

SEQ ID NO: 1504883 - DNA, 15 bp, Homo sapiens
cctcccgggttcatg

SEQ ID NO: 1504884 - DNA, 15 bp, Homo sapiens
gcctcccgggttcat

SEQ ID NO: 1504885 - DNA, 15 bp, Homo sapiens
ttcactgcaagctcc

SEQ ID NO: 1504886 - DNA, 15 bp, Homo sapiens
gttcactgcaagctc

SEQ ID NO: 1504887 - DNA, 15 bp, Homo sapiens
ggttcactgcaagct

SEQ ID NO: 1504888 - DNA, 15 bp, Homo sapiens
cggttcactgcaagc

SEQ ID NO: 1504889 - DNA, 15 bp, Homo sapiens
tcggttcactgcaag

SEQ ID NO: 1504890 - DNA, 15 bp, Homo sapiens
acagtggcgcgatct

SEQ ID NO: 1504891 - DNA, 15 bp, Homo sapiens
tacagtggcgcgatc

SEQ ID NO: 1504892 - DNA, 15 bp, Homo sapiens
gtacagtggcgcgat

SEQ ID NO: 1504893 - DNA, 15 bp, Homo sapiens
agtacagtggcgcga

SEQ ID NO: 1504894 - DNA, 15 bp, Homo sapiens
gagtacagtggcgcg

SEQ ID NO: 1504895 - DNA, 15 bp, Homo sapiens
ggagtacagtggcgc

SEQ ID NO: 1504896 - DNA, 15 bp, Homo sapiens
tctatcgcccaggct

SEQ ID NO: 1504897 - DNA, 15 bp, Homo sapiens
ctctatcgcccaggc

SEQ ID NO: 1504898 - DNA, 15 bp, Homo sapiens
gctctatcgcccagg

SEQ ID NO: 1504899 - DNA, 15 bp, Homo sapiens
cgctctatcgcccag

SEQ ID NO: 1504900 - DNA, 15 bp, Homo sapiens
tcgctctatcgccca

SEQ ID NO: 1504901 - DNA, 15 bp, Homo sapiens
ctcgctctatcgccc

SEQ ID NO: 1504902 - DNA, 15 bp, Homo sapiens
tctcgctctatcgcc

SEQ ID NO: 1504903 - DNA, 15 bp, Homo sapiens
gtctcgctctatcgc

SEQ ID NO: 1504904 - DNA, 15 bp, Homo sapiens
agtctcgctctatcg

SEQ ID NO: 1504905 - DNA, 15 bp, Homo sapiens
gagtctcgctctatc

SEQ ID NO: 1504906 - DNA, 15 bp, Homo sapiens
agagtctcgctctat

SEQ ID NO: 1504907 - DNA, 15 bp, Homo sapiens
cagagtctcgctcta

SEQ ID NO: 1504908 - DNA, 15 bp, Homo sapiens
aataatttttttttt

SEQ ID NO: 1504909 - DNA, 15 bp, Homo sapiens
taataattttttttt

SEQ ID NO: 1504910 - DNA, 15 bp, Homo sapiens
ttaataatttttttt

SEQ ID NO: 1504911 - DNA, 15 bp, Homo sapiens
attaataattttttt

SEQ ID NO: 1504912 - DNA, 15 bp, Homo sapiens
cattaataatttttt

SEQ ID NO: 1504913 - DNA, 15 bp, Homo sapiens
tctcattaataattt

SEQ ID NO: 1504914 - DNA, 15 bp, Homo sapiens
atctcattaataatt

SEQ ID NO: 1504915 - DNA, 15 bp, Homo sapiens
catctcattaataat

SEQ ID NO: 1504916 - DNA, 15 bp, Homo sapiens
ccatctcattaataa

SEQ ID NO: 1504917 - DNA, 15 bp, Homo sapiens
accatctcattaata

SEQ ID NO: 1504918 - DNA, 15 bp, Homo sapiens
gaccatctcattaat

SEQ ID NO: 1504919 - DNA, 15 bp, Homo sapiens
tgaccatctcattaa

SEQ ID NO: 1504920 - DNA, 15 bp, Homo sapiens
atgaccatctcatta

SEQ ID NO: 1504921 - DNA, 15 bp, Homo sapiens
tatgaccatctcatt

SEQ ID NO: 1504922 - DNA, 15 bp, Homo sapiens
atatgaccatctcat

SEQ ID NO: 1504923 - DNA, 15 bp, Homo sapiens
aatatgaccatctca

SEQ ID NO: 1504924 - DNA, 15 bp, Homo sapiens
aaatatgaccatctc

SEQ ID NO: 1504925 - DNA, 15 bp, Homo sapiens
aaaatatgaccatct

SEQ ID NO: 1504926 - DNA, 15 bp, Homo sapiens
aaaaatatgaccatc

SEQ ID NO: 1504927 - DNA, 15 bp, Homo sapiens
taaaaatatgaccat

SEQ ID NO: 1504928 - DNA, 15 bp, Homo sapiens
ataaaaatatgacca

SEQ ID NO: 1504929 - DNA, 15 bp, Homo sapiens
cataaaaatatgacc

SEQ ID NO: 1504930 - DNA, 15 bp, Homo sapiens
acataaaaatatgac

SEQ ID NO: 1504931 - DNA, 15 bp, Homo sapiens
aacataaaaatatga

SEQ ID NO: 1504932 - DNA, 15 bp, Homo sapiens
taacataaaaatatg

SEQ ID NO: 1504933 - DNA, 15 bp, Homo sapiens
ataacataaaaatat

SEQ ID NO: 1504934 - DNA, 15 bp, Homo sapiens
aataacataaaaata

SEQ ID NO: 1504935 - DNA, 15 bp, Homo sapiens
aaataacataaaaat

SEQ ID NO: 1504936 - DNA, 15 bp, Homo sapiens
taaataacataaaaa

SEQ ID NO: 1504937 - DNA, 15 bp, Homo sapiens
gtaaataacataaaa

SEQ ID NO: 1504938 - DNA, 15 bp, Homo sapiens
agtaaataacataaa

SEQ ID NO: 1504939 - DNA, 15 bp, Homo sapiens
cagtaaataacataa

SEQ ID NO: 1504940 - DNA, 15 bp, Homo sapiens
tcagtaaataacata

SEQ ID NO: 1504941 - DNA, 15 bp, Homo sapiens
atcagtaaataacat

SEQ ID NO: 1504942 - DNA, 15 bp, Homo sapiens
gatcagtaaataaca

SEQ ID NO: 1504943 - DNA, 15 bp, Homo sapiens
tgatcagtaaataac

SEQ ID NO: 1504944 - DNA, 15 bp, Homo sapiens
gtgatcagtaaataa

SEQ ID NO: 1504945 - DNA, 15 bp, Homo sapiens
agtgatcagtaaata

SEQ ID NO: 1504946 - DNA, 15 bp, Homo sapiens
aagtgatcagtaaat

SEQ ID NO: 1504947 - DNA, 15 bp, Homo sapiens
taagtgatcagtaaa

SEQ ID NO: 1504948 - DNA, 15 bp, Homo sapiens
gtaagtgatcagtaa

SEQ ID NO: 1504949 - DNA, 15 bp, Homo sapiens
ggtaagtgatcagta

SEQ ID NO: 1504950 - DNA, 15 bp, Homo sapiens
aggtaagtgatcagt

SEQ ID NO: 1504951 - DNA, 15 bp, Homo sapiens
aaggtaagtgatcag

SEQ ID NO: 1504952 - DNA, 15 bp, Homo sapiens
aaaggtaagtgatca

SEQ ID NO: 1504953 - DNA, 15 bp, Homo sapiens
caaaggtaagtgatc

SEQ ID NO: 1504954 - DNA, 15 bp, Homo sapiens
tcaaaggtaagtgat

SEQ ID NO: 1504955 - DNA, 15 bp, Homo sapiens
ttcaaaggtaagtga

SEQ ID NO: 1504956 - DNA, 15 bp, Homo sapiens
attcaaaggtaagtg

SEQ ID NO: 1504957 - DNA, 15 bp, Homo sapiens
aattcaaaggtaagt

SEQ ID NO: 1504958 - DNA, 15 bp, Homo sapiens
caattcaaaggtaag

SEQ ID NO: 1504959 - DNA, 15 bp, Homo sapiens
gcaattcaaaggtaa

SEQ ID NO: 1504960 - DNA, 15 bp, Homo sapiens
ggcaattcaaaggta

SEQ ID NO: 1504961 - DNA, 15 bp, Homo sapiens
gggcaattcaaaggt

SEQ ID NO: 1504962 - DNA, 15 bp, Homo sapiens
ggggcaattcaaagg

SEQ ID NO: 1504963 - DNA, 15 bp, Homo sapiens
aggggcaattcaaag

SEQ ID NO: 1504964 - DNA, 15 bp, Homo sapiens
aaggggcaattcaaa

SEQ ID NO: 1504965 - DNA, 15 bp, Homo sapiens
caaggggcaattcaa

SEQ ID NO: 1504966 - DNA, 15 bp, Homo sapiens
acaaggggcaattca

SEQ ID NO: 1504967 - DNA, 15 bp, Homo sapiens
aacaaggggcaattc

SEQ ID NO: 1504968 - DNA, 15 bp, Homo sapiens
aaacaaggggcaatt

SEQ ID NO: 1504969 - DNA, 15 bp, Homo sapiens
gaaacaaggggcaat

SEQ ID NO: 1504970 - DNA, 15 bp, Homo sapiens
agaaacaaggggcaa

SEQ ID NO: 1504971 - DNA, 15 bp, Homo sapiens
aagaaacaaggggca

SEQ ID NO: 1504972 - DNA, 15 bp, Homo sapiens
caagaaacaaggggc

SEQ ID NO: 1504973 - DNA, 15 bp, Homo sapiens
tcaagaaacaagggg

SEQ ID NO: 1504974 - DNA, 15 bp, Homo sapiens
ttcaagaaacaaggg

SEQ ID NO: 1504975 - DNA, 15 bp, Homo sapiens
cttcaagaaacaagg

SEQ ID NO: 1504976 - DNA, 15 bp, Homo sapiens
acttcaagaaacaag

SEQ ID NO: 1504977 - DNA, 15 bp, Homo sapiens
aaaacttcaagaaac

SEQ ID NO: 1504978 - DNA, 15 bp, Homo sapiens
aaaaacttcaagaaa

SEQ ID NO: 1504979 - DNA, 15 bp, Homo sapiens
gaaaaacttcaagaa

SEQ ID NO: 1504980 - DNA, 15 bp, Homo sapiens
ggaaaaacttcaaga

SEQ ID NO: 1504981 - DNA, 15 bp, Homo sapiens
tggaaaaacttcaag

SEQ ID NO: 1504982 - DNA, 15 bp, Homo sapiens
ttggaaaaacttcaa

SEQ ID NO: 1504983 - DNA, 15 bp, Homo sapiens
attggaaaaacttca

SEQ ID NO: 1504984 - DNA, 15 bp, Homo sapiens
tattggaaaaacttc

SEQ ID NO: 1504985 - DNA, 15 bp, Homo sapiens
ttattggaaaaactt

SEQ ID NO: 1504986 - DNA, 15 bp, Homo sapiens
tttattggaaaaact

SEQ ID NO: 1504987 - DNA, 15 bp, Homo sapiens
atttattggaaaaac

SEQ ID NO: 1504988 - DNA, 15 bp, Homo sapiens
tatttattggaaaaa

SEQ ID NO: 1504989 - DNA, 15 bp, Homo sapiens
atatttattggaaaa

SEQ ID NO: 1504990 - DNA, 15 bp, Homo sapiens
aatatttattggaaa

SEQ ID NO: 1504991 - DNA, 15 bp, Homo sapiens
gaatatttattggaa

SEQ ID NO: 1504992 - DNA, 15 bp, Homo sapiens
agaatatttattgga

SEQ ID NO: 1504993 - DNA, 15 bp, Homo sapiens
aagaatatttattgg

SEQ ID NO: 1504994 - DNA, 15 bp, Homo sapiens
taagaatatttattg

SEQ ID NO: 1504995 - DNA, 15 bp, Homo sapiens
ataagaatatttatt

SEQ ID NO: 1504996 - DNA, 15 bp, Homo sapiens
aataagaatatttat

SEQ ID NO: 1504997 - DNA, 15 bp, Homo sapiens
taataagaatattta

SEQ ID NO: 1504998 - DNA, 15 bp, Homo sapiens
ttaataagaatattt

SEQ ID NO: 1504999 - DNA, 15 bp, Homo sapiens
attaataagaatatt

SEQ ID NO: 1505000 - DNA, 15 bp, Homo sapiens
tattaataagaatat

SEQ ID NO: 1505001 - DNA, 15 bp, Homo sapiens
ctattaataagaata

SEQ ID NO: 1505002 - DNA, 15 bp, Homo sapiens
cctattaataagaat

SEQ ID NO: 1505003 - DNA, 15 bp, Homo sapiens
gcctattaataagaa

SEQ ID NO: 1505004 - DNA, 15 bp, Homo sapiens
tgcctattaataaga

SEQ ID NO: 1505005 - DNA, 15 bp, Homo sapiens
ttgcctattaataag

SEQ ID NO: 1505006 - DNA, 15 bp, Homo sapiens
cttgcctattaataa

SEQ ID NO: 1505007 - DNA, 15 bp, Homo sapiens
tcttgcctattaata

SEQ ID NO: 1505008 - DNA, 15 bp, Homo sapiens
gtcttgcctattaat

SEQ ID NO: 1505009 - DNA, 15 bp, Homo sapiens
tgtcttgcctattaa

SEQ ID NO: 1505010 - DNA, 15 bp, Homo sapiens
ttgtcttgcctatta

SEQ ID NO: 1505011 - DNA, 15 bp, Homo sapiens
gttgtcttgcctatt

SEQ ID NO: 1505012 - DNA, 15 bp, Homo sapiens
ggttgtcttgcctat

SEQ ID NO: 1505013 - DNA, 15 bp, Homo sapiens
aggttgtcttgccta

SEQ ID NO: 1505014 - DNA, 15 bp, Homo sapiens
caggttgtcttgcct

SEQ ID NO: 1505015 - DNA, 15 bp, Homo sapiens
tcaggttgtcttgcc

SEQ ID NO: 1505016 - DNA, 15 bp, Homo sapiens
atcaggttgtcttgc

SEQ ID NO: 1505017 - DNA, 15 bp, Homo sapiens
gatcaggttgtcttg

SEQ ID NO: 1505018 - DNA, 15 bp, Homo sapiens
agatcaggttgtctt

SEQ ID NO: 1505019 - DNA, 15 bp, Homo sapiens
cagatcaggttgtct

SEQ ID NO: 1505020 - DNA, 15 bp, Homo sapiens
acagatcaggttgtc

SEQ ID NO: 1505021 - DNA, 15 bp, Homo sapiens
aacagatcaggttgt

SEQ ID NO: 1505022 - DNA, 15 bp, Homo sapiens
taacagatcaggttg

SEQ ID NO: 1505023 - DNA, 15 bp, Homo sapiens
ctaacagatcaggtt

SEQ ID NO: 1505024 - DNA, 15 bp, Homo sapiens
actaacagatcaggt

SEQ ID NO: 1505025 - DNA, 15 bp, Homo sapiens
aactaacagatcagg

SEQ ID NO: 1505026 - DNA, 15 bp, Homo sapiens
taactaacagatcag

SEQ ID NO: 1505027 - DNA, 15 bp, Homo sapiens
ataactaacagatca

SEQ ID NO: 1505028 - DNA, 15 bp, Homo sapiens
cataactaacagatc

SEQ ID NO: 1505029 - DNA, 15 bp, Homo sapiens
acataactaacagat

SEQ ID NO: 1505030 - DNA, 15 bp, Homo sapiens
tacataactaacaga

SEQ ID NO: 1505031 - DNA, 15 bp, Homo sapiens
ttacataactaacag

SEQ ID NO: 1505032 - DNA, 15 bp, Homo sapiens
tttacataactaaca

SEQ ID NO: 1505033 - DNA, 15 bp, Homo sapiens
gtttacataactaac

SEQ ID NO: 1505034 - DNA, 15 bp, Homo sapiens
agtttacataactaa

SEQ ID NO: 1505035 - DNA, 15 bp, Homo sapiens
aagtttacataacta

SEQ ID NO: 1505036 - DNA, 15 bp, Homo sapiens
aaagtttacataact

SEQ ID NO: 1505037 - DNA, 15 bp, Homo sapiens
aaaagtttacataac

SEQ ID NO: 1505038 - DNA, 15 bp, Homo sapiens
aaaaagtttacataa

SEQ ID NO: 1505039 - DNA, 15 bp, Homo sapiens
caaaaagtttacata

SEQ ID NO: 1505040 - DNA, 15 bp, Homo sapiens
ccaaaaagtttacat

SEQ ID NO: 1505041 - DNA, 15 bp, Homo sapiens
accaaaaagtttaca

SEQ ID NO: 1505042 - DNA, 15 bp, Homo sapiens
taccaaaaagtttac

SEQ ID NO: 1505043 - DNA, 15 bp, Homo sapiens
ctaccaaaaagttta

SEQ ID NO: 1505044 - DNA, 15 bp, Homo sapiens
gctaccaaaaagttt

SEQ ID NO: 1505045 - DNA, 15 bp, Homo sapiens
agctaccaaaaagtt

SEQ ID NO: 1505046 - DNA, 15 bp, Homo sapiens
tagctaccaaaaagt

SEQ ID NO: 1505047 - DNA, 15 bp, Homo sapiens
ttagctaccaaaaag

SEQ ID NO: 1505048 - DNA, 15 bp, Homo sapiens
attagctaccaaaaa

SEQ ID NO: 1505049 - DNA, 15 bp, Homo sapiens
aattagctaccaaaa

SEQ ID NO: 1505050 - DNA, 15 bp, Homo sapiens
caattagctaccaaa

SEQ ID NO: 1505051 - DNA, 15 bp, Homo sapiens
acaattagctaccaa

SEQ ID NO: 1505052 - DNA, 15 bp, Homo sapiens
tacaattagctacca

SEQ ID NO: 1505053 - DNA, 15 bp, Homo sapiens
atacaattagctacc

SEQ ID NO: 1505054 - DNA, 15 bp, Homo sapiens
catacaattagctac

SEQ ID NO: 1505055 - DNA, 15 bp, Homo sapiens
acatacaattagcta

SEQ ID NO: 1505056 - DNA, 15 bp, Homo sapiens
cacatacaattagct

SEQ ID NO: 1505057 - DNA, 15 bp, Homo sapiens
gcacatacaattagc

SEQ ID NO: 1505058 - DNA, 15 bp, Homo sapiens
tgcacatacaattag

SEQ ID NO: 1505059 - DNA, 15 bp, Homo sapiens
atgcacatacaatta

SEQ ID NO: 1505060 - DNA, 15 bp, Homo sapiens
aatgcacatacaatt

SEQ ID NO: 1505061 - DNA, 15 bp, Homo sapiens
gaatgcacatacaat

SEQ ID NO: 1505062 - DNA, 15 bp, Homo sapiens
agaatgcacatacaa

SEQ ID NO: 1505063 - DNA, 15 bp, Homo sapiens
aagaatgcacataca

SEQ ID NO: 1505064 - DNA, 15 bp, Homo sapiens
aaagaatgcacatac

SEQ ID NO: 1505065 - DNA, 15 bp, Homo sapiens
aaaagaatgcacata

SEQ ID NO: 1505066 - DNA, 15 bp, Homo sapiens
taaaagaatgcacat

SEQ ID NO: 1505067 - DNA, 15 bp, Homo sapiens
gtaaaagaatgcaca

SEQ ID NO: 1505068 - DNA, 15 bp, Homo sapiens
ggtaaaagaatgcac

SEQ ID NO: 1505069 - DNA, 15 bp, Homo sapiens
aggtaaaagaatgca

SEQ ID NO: 1505070 - DNA, 15 bp, Homo sapiens
gaggtaaaagaatgc

SEQ ID NO: 1505071 - DNA, 15 bp, Homo sapiens
ggaggtaaaagaatg

SEQ ID NO: 1505072 - DNA, 15 bp, Homo sapiens
gggaggtaaaagaat

SEQ ID NO: 1505073 - DNA, 15 bp, Homo sapiens
cgggaggtaaaagaa

SEQ ID NO: 1505074 - DNA, 15 bp, Homo sapiens
acgggaggtaaaaga

SEQ ID NO: 1505075 - DNA, 15 bp, Homo sapiens
aacgggaggtaaaag

SEQ ID NO: 1505076 - DNA, 15 bp, Homo sapiens
aaacgggaggtaaaa

SEQ ID NO: 1505077 - DNA, 15 bp, Homo sapiens
caaacgggaggtaaa

SEQ ID NO: 1505078 - DNA, 15 bp, Homo sapiens
acaaacgggaggtaa

SEQ ID NO: 1505079 - DNA, 15 bp, Homo sapiens
aacaaacgggaggta

SEQ ID NO: 1505080 - DNA, 15 bp, Homo sapiens
aaacaaacgggaggt

SEQ ID NO: 1505081 - DNA, 15 bp, Homo sapiens
gaaacaaacgggagg

SEQ ID NO: 1505082 - DNA, 15 bp, Homo sapiens
agaaacaaacgggag

SEQ ID NO: 1505083 - DNA, 15 bp, Homo sapiens
aagaaacaaacggga

SEQ ID NO: 1505084 - DNA, 15 bp, Homo sapiens
aaagaaacaaacggg

SEQ ID NO: 1505085 - DNA, 15 bp, Homo sapiens
taaagaaacaaacgg

SEQ ID NO: 1505086 - DNA, 15 bp, Homo sapiens
ataaagaaacaaacg

SEQ ID NO: 1505087 - DNA, 15 bp, Homo sapiens
aataaagaaacaaac

SEQ ID NO: 1505088 - DNA, 15 bp, Homo sapiens
taataaagaaacaaa

SEQ ID NO: 1505089 - DNA, 15 bp, Homo sapiens
ctaataaagaaacaa

SEQ ID NO: 1505090 - DNA, 15 bp, Homo sapiens
gctaataaagaaaca

SEQ ID NO: 1505091 - DNA, 15 bp, Homo sapiens
tgctaataaagaaac

SEQ ID NO: 1505092 - DNA, 15 bp, Homo sapiens
ctgctaataaagaaa

SEQ ID NO: 1505093 - DNA, 15 bp, Homo sapiens
actgctaataaagaa

SEQ ID NO: 1505094 - DNA, 15 bp, Homo sapiens
gacactgctaataaa

SEQ ID NO: 1505095 - DNA, 15 bp, Homo sapiens
agacactgctaataa

SEQ ID NO: 1505096 - DNA, 15 bp, Homo sapiens
aagacactgctaata

SEQ ID NO: 1505097 - DNA, 15 bp, Homo sapiens
aaagacactgctaat

SEQ ID NO: 1505098 - DNA, 15 bp, Homo sapiens
aaaagacactgctaa

SEQ ID NO: 1505099 - DNA, 15 bp, Homo sapiens
aaaaagacactgcta

SEQ ID NO: 1505100 - DNA, 15 bp, Homo sapiens
caaaaagacactgct

SEQ ID NO: 1505101 - DNA, 15 bp, Homo sapiens
acaaaaagacactgc

SEQ ID NO: 1505102 - DNA, 15 bp, Homo sapiens
aacaaaaagacactg

SEQ ID NO: 1505103 - DNA, 15 bp, Homo sapiens
taacaaaaagacact

SEQ ID NO: 1505104 - DNA, 15 bp, Homo sapiens
ataacaaaaagacac

SEQ ID NO: 1505105 - DNA, 15 bp, Homo sapiens
tataacaaaaagaca

SEQ ID NO: 1505106 - DNA, 15 bp, Homo sapiens
ctataacaaaaagac

SEQ ID NO: 1505107 - DNA, 15 bp, Homo sapiens
tctataacaaaaaga

SEQ ID NO: 1505108 - DNA, 15 bp, Homo sapiens
ttctataacaaaaag

SEQ ID NO: 1505109 - DNA, 15 bp, Homo sapiens
attctataacaaaaa

SEQ ID NO: 1505110 - DNA, 15 bp, Homo sapiens
aattctataacaaaa

SEQ ID NO: 1505111 - DNA, 15 bp, Homo sapiens
aaattctataacaaa

SEQ ID NO: 1505112 - DNA, 15 bp, Homo sapiens
taaattctataacaa

SEQ ID NO: 1505113 - DNA, 15 bp, Homo sapiens
ataaattctataaca

SEQ ID NO: 1505114 - DNA, 15 bp, Homo sapiens
tataaattctataac

SEQ ID NO: 1505115 - DNA, 15 bp, Homo sapiens
gtataaattctataa

SEQ ID NO: 1505116 - DNA, 15 bp, Homo sapiens
tgtataaattctata

SEQ ID NO: 1505117 - DNA, 15 bp, Homo sapiens
atgtataaattctat

SEQ ID NO: 1505118 - DNA, 15 bp, Homo sapiens
aatgtataaattcta

SEQ ID NO: 1505119 - DNA, 15 bp, Homo sapiens
aaatgtataaattct

SEQ ID NO: 1505120 - DNA, 15 bp, Homo sapiens
aaaatgtataaattc

SEQ ID NO: 1505121 - DNA, 15 bp, Homo sapiens
gaaaatgtataaatt

SEQ ID NO: 1505122 - DNA, 15 bp, Homo sapiens
agaaaatgtataaat

SEQ ID NO: 1505123 - DNA, 15 bp, Homo sapiens
aagaaaatgtataaa

SEQ ID NO: 1505124 - DNA, 15 bp, Homo sapiens
caagaaaatgtataa

SEQ ID NO: 1505125 - DNA, 15 bp, Homo sapiens
acaagaaaatgtata

SEQ ID NO: 1505126 - DNA, 15 bp, Homo sapiens
tacaagaaaatgtat

SEQ ID NO: 1505127 - DNA, 15 bp, Homo sapiens
ttacaagaaaatgta

SEQ ID NO: 1505128 - DNA, 15 bp, Homo sapiens
cttacaagaaaatgt

SEQ ID NO: 1505129 - DNA, 15 bp, Homo sapiens
gcttacaagaaaatg

SEQ ID NO: 1505130 - DNA, 15 bp, Homo sapiens
tgcttacaagaaaat

SEQ ID NO: 1505131 - DNA, 15 bp, Homo sapiens
ttgcttacaagaaaa

SEQ ID NO: 1505132 - DNA, 15 bp, Homo sapiens
tttgcttacaagaaa

SEQ ID NO: 1505133 - DNA, 15 bp, Homo sapiens
atttgcttacaagaa

SEQ ID NO: 1505134 - DNA, 15 bp, Homo sapiens
tatttgcttacaaga

SEQ ID NO: 1505135 - DNA, 15 bp, Homo sapiens
atatttgcttacaag

SEQ ID NO: 1505136 - DNA, 15 bp, Homo sapiens
gatatttgcttacaa

SEQ ID NO: 1505137 - DNA, 15 bp, Homo sapiens
tgatatttgcttaca

SEQ ID NO: 1505138 - DNA, 15 bp, Homo sapiens
ctgatatttgcttac

SEQ ID NO: 1505139 - DNA, 15 bp, Homo sapiens
actgatatttgctta

SEQ ID NO: 1505140 - DNA, 15 bp, Homo sapiens
cactgatatttgctt

SEQ ID NO: 1505141 - DNA, 15 bp, Homo sapiens
acactgatatttgct

SEQ ID NO: 1505142 - DNA, 15 bp, Homo sapiens
aacactgatatttgc

SEQ ID NO: 1505143 - DNA, 15 bp, Homo sapiens
aaacactgatatttg

SEQ ID NO: 1505144 - DNA, 15 bp, Homo sapiens
aaaacactgatattt

SEQ ID NO: 1505145 - DNA, 15 bp, Homo sapiens
aaaaacactgatatt

SEQ ID NO: 1505146 - DNA, 15 bp, Homo sapiens
taaaaacactgatat

SEQ ID NO: 1505147 - DNA, 15 bp, Homo sapiens
ataaaaacactgata

SEQ ID NO: 1505148 - DNA, 15 bp, Homo sapiens
aataaaaacactgat

SEQ ID NO: 1505149 - DNA, 15 bp, Homo sapiens
taataaaaacactga

SEQ ID NO: 1505150 - DNA, 15 bp, Homo sapiens
ataataaaaacactg

SEQ ID NO: 1505151 - DNA, 15 bp, Homo sapiens
tataataaaaacact

SEQ ID NO: 1505152 - DNA, 15 bp, Homo sapiens
ctataataaaaacac

SEQ ID NO: 1505153 - DNA, 15 bp, Homo sapiens
cctataataaaaaca

SEQ ID NO: 1505154 - DNA, 15 bp, Homo sapiens
acctataataaaaac

SEQ ID NO: 1505155 - DNA, 15 bp, Homo sapiens
cacctataataaaaa

SEQ ID NO: 1505156 - DNA, 15 bp, Homo sapiens
gcacctataataaaa

SEQ ID NO: 1505157 - DNA, 15 bp, Homo sapiens
agcacctataataaa

SEQ ID NO: 1505158 - DNA, 15 bp, Homo sapiens
cagcacctataataa

SEQ ID NO: 1505159 - DNA, 15 bp, Homo sapiens
acagcacctataata

SEQ ID NO: 1505160 - DNA, 15 bp, Homo sapiens
tacagcacctataat

SEQ ID NO: 1505161 - DNA, 15 bp, Homo sapiens
atacagcacctataa

SEQ ID NO: 1505162 - DNA, 15 bp, Homo sapiens
catacagcacctata

SEQ ID NO: 1505163 - DNA, 15 bp, Homo sapiens
acatacagcacctat

SEQ ID NO: 1505164 - DNA, 15 bp, Homo sapiens
aacatacagcaccta

SEQ ID NO: 1505165 - DNA, 15 bp, Homo sapiens
aaacatacagcacct

SEQ ID NO: 1505166 - DNA, 15 bp, Homo sapiens
caaacatacagcacc

SEQ ID NO: 1505167 - DNA, 15 bp, Homo sapiens
acaaacatacagcac

SEQ ID NO: 1505168 - DNA, 15 bp, Homo sapiens
gacaaacatacagca

SEQ ID NO: 1505169 - DNA, 15 bp, Homo sapiens
agacaaacatacagc

SEQ ID NO: 1505170 - DNA, 15 bp, Homo sapiens
aagacaaacatacag

SEQ ID NO: 1505171 - DNA, 15 bp, Homo sapiens
caagacaaacataca

SEQ ID NO: 1505172 - DNA, 15 bp, Homo sapiens
gcaagacaaacatac

SEQ ID NO: 1505173 - DNA, 15 bp, Homo sapiens
agcaagacaaacata

SEQ ID NO: 1505174 - DNA, 15 bp, Homo sapiens
aagcaagacaaacat

SEQ ID NO: 1505175 - DNA, 15 bp, Homo sapiens
taagcaagacaaaca

SEQ ID NO: 1505176 - DNA, 15 bp, Homo sapiens
ctaagcaagacaaac

SEQ ID NO: 1505177 - DNA, 15 bp, Homo sapiens
cctaagcaagacaaa

SEQ ID NO: 1505178 - DNA, 15 bp, Homo sapiens
tcctaagcaagacaa

SEQ ID NO: 1505179 - DNA, 15 bp, Homo sapiens
ttcctaagcaagaca

SEQ ID NO: 1505180 - DNA, 15 bp, Homo sapiens
tttcctaagcaagac

SEQ ID NO: 1505181 - DNA, 15 bp, Homo sapiens
ttttcctaagcaaga

SEQ ID NO: 1505182 - DNA, 15 bp, Homo sapiens
attttcctaagcaag

SEQ ID NO: 1505183 - DNA, 15 bp, Homo sapiens
gattttcctaagcaa

SEQ ID NO: 1505184 - DNA, 15 bp, Homo sapiens
agattttcctaagca

SEQ ID NO: 1505185 - DNA, 15 bp, Homo sapiens
aagattttcctaagc

SEQ ID NO: 1505186 - DNA, 15 bp, Homo sapiens
aaagattttcctaag

SEQ ID NO: 1505187 - DNA, 15 bp, Homo sapiens
taaagattttcctaa

SEQ ID NO: 1505188 - DNA, 15 bp, Homo sapiens
ataaagattttccta

SEQ ID NO: 1505189 - DNA, 15 bp, Homo sapiens
aataaagattttcct

SEQ ID NO: 1505190 - DNA, 15 bp, Homo sapiens
taataaagattttcc

SEQ ID NO: 1505191 - DNA, 15 bp, Homo sapiens
gtaataaagattttc

SEQ ID NO: 1505192 - DNA, 15 bp, Homo sapiens
agtaataaagatttt

SEQ ID NO: 1505193 - DNA, 15 bp, Homo sapiens
gagtaataaagattt

SEQ ID NO: 1505194 - DNA, 15 bp, Homo sapiens
ggagtaataaagatt

SEQ ID NO: 1505195 - DNA, 15 bp, Homo sapiens
tggagtaataaagat

SEQ ID NO: 1505196 - DNA, 15 bp, Homo sapiens
ttggagtaataaaga

SEQ ID NO: 1505197 - DNA, 15 bp, Homo sapiens
attggagtaataaag

SEQ ID NO: 1505198 - DNA, 15 bp, Homo sapiens
tattggagtaataaa

SEQ ID NO: 1505199 - DNA, 15 bp, Homo sapiens
atattggagtaataa

SEQ ID NO: 1505200 - DNA, 15 bp, Homo sapiens
aatattggagtaata

SEQ ID NO: 1505201 - DNA, 15 bp, Homo sapiens
taatattggagtaat

SEQ ID NO: 1505202 - DNA, 15 bp, Homo sapiens
ataatattggagtaa

SEQ ID NO: 1505203 - DNA, 15 bp, Homo sapiens
aataatattggagta

SEQ ID NO: 1505204 - DNA, 15 bp, Homo sapiens
taataatattggagt

SEQ ID NO: 1505205 - DNA, 15 bp, Homo sapiens
ttaataatattggag

SEQ ID NO: 1505206 - DNA, 15 bp, Homo sapiens
tttaataatattgga

SEQ ID NO: 1505207 - DNA, 15 bp, Homo sapiens
atttaataatattgg

SEQ ID NO: 1505208 - DNA, 15 bp, Homo sapiens
aatttaataatattg

SEQ ID NO: 1505209 - DNA, 15 bp, Homo sapiens
taatttaataatatt

SEQ ID NO: 1505210 - DNA, 15 bp, Homo sapiens
ataatttaataatat

SEQ ID NO: 1505211 - DNA, 15 bp, Homo sapiens
aataatttaataata

SEQ ID NO: 1505212 - DNA, 15 bp, Homo sapiens
gaataatttaataat

SEQ ID NO: 1505213 - DNA, 15 bp, Homo sapiens
agaataatttaataa

SEQ ID NO: 1505214 - DNA, 15 bp, Homo sapiens
aagaataatttaata

SEQ ID NO: 1505215 - DNA, 15 bp, Homo sapiens
aaagaataatttaat

SEQ ID NO: 1505216 - DNA, 15 bp, Homo sapiens
taaagaataatttaa

SEQ ID NO: 1505217 - DNA, 15 bp, Homo sapiens
ctaaagaataattta

SEQ ID NO: 1505218 - DNA, 15 bp, Homo sapiens
actaaagaataattt

SEQ ID NO: 1505219 - DNA, 15 bp, Homo sapiens
tactaaagaataatt

SEQ ID NO: 1505220 - DNA, 15 bp, Homo sapiens
atactaaagaataat

SEQ ID NO: 1505221 - DNA, 15 bp, Homo sapiens
aatactaaagaataa

SEQ ID NO: 1505222 - DNA, 15 bp, Homo sapiens
aaatactaaagaata

SEQ ID NO: 1505223 - DNA, 15 bp, Homo sapiens
caaatactaaagaat

SEQ ID NO: 1505224 - DNA, 15 bp, Homo sapiens
acaaatactaaagaa

SEQ ID NO: 1505225 - DNA, 15 bp, Homo sapiens
gacaaatactaaaga

SEQ ID NO: 1505226 - DNA, 15 bp, Homo sapiens
ggacaaatactaaag

SEQ ID NO: 1505227 - DNA, 15 bp, Homo sapiens
aggacaaatactaaa

SEQ ID NO: 1505228 - DNA, 15 bp, Homo sapiens
taggacaaatactaa

SEQ ID NO: 1505229 - DNA, 15 bp, Homo sapiens
ttaggacaaatacta

SEQ ID NO: 1505230 - DNA, 15 bp, Homo sapiens
attaggacaaatact

SEQ ID NO: 1505231 - DNA, 15 bp, Homo sapiens
tattaggacaaatac

SEQ ID NO: 1505232 - DNA, 15 bp, Homo sapiens
ctattaggacaaata

SEQ ID NO: 1505233 - DNA, 15 bp, Homo sapiens
gctattaggacaaat

SEQ ID NO: 1505234 - DNA, 15 bp, Homo sapiens
agctattaggacaaa

SEQ ID NO: 1505235 - DNA, 15 bp, Homo sapiens
aagctattaggacaa

SEQ ID NO: 1505236 - DNA, 15 bp, Homo sapiens
aaagctattaggaca

SEQ ID NO: 1505237 - DNA, 15 bp, Homo sapiens
taaagctattaggac

SEQ ID NO: 1505238 - DNA, 15 bp, Homo sapiens
ataaagctattagga

SEQ ID NO: 1505239 - DNA, 15 bp, Homo sapiens
cataaagctattagg

SEQ ID NO: 1505240 - DNA, 15 bp, Homo sapiens
ccataaagctattag

SEQ ID NO: 1505241 - DNA, 15 bp, Homo sapiens
gccataaagctatta

SEQ ID NO: 1505242 - DNA, 15 bp, Homo sapiens
agccataaagctatt

SEQ ID NO: 1505243 - DNA, 15 bp, Homo sapiens
aagccataaagctat

SEQ ID NO: 1505244 - DNA, 15 bp, Homo sapiens
aaagccataaagcta

SEQ ID NO: 1505245 - DNA, 15 bp, Homo sapiens
caaagccataaagct

SEQ ID NO: 1505246 - DNA, 15 bp, Homo sapiens
acaaagccataaagc

SEQ ID NO: 1505247 - DNA, 15 bp, Homo sapiens
aacaaagccataaag

SEQ ID NO: 1505248 - DNA, 15 bp, Homo sapiens
aaacaaagccataaa

SEQ ID NO: 1505249 - DNA, 15 bp, Homo sapiens
aaaacaaagccataa

SEQ ID NO: 1505250 - DNA, 15 bp, Homo sapiens
aaaaacaaagccata

SEQ ID NO: 1505251 - DNA, 15 bp, Homo sapiens
aaaaaacaaagccat

SEQ ID NO: 1505252 - DNA, 15 bp, Homo sapiens
aaaaaaacaaagcca

SEQ ID NO: 1505253 - DNA, 15 bp, Homo sapiens
aaaaaaaacaaagcc

SEQ ID NO: 1505254 - DNA, 15 bp, Homo sapiens
taaaaaaaacaaagc

SEQ ID NO: 1505255 - DNA, 15 bp, Homo sapiens
ttaaaaaaaacaaag

SEQ ID NO: 1505256 - DNA, 15 bp, Homo sapiens
tttaaaaaaaacaaa

SEQ ID NO: 1505257 - DNA, 15 bp, Homo sapiens
atttaaaaaaaacaa

SEQ ID NO: 1505258 - DNA, 15 bp, Homo sapiens
gatttaaaaaaaaca

SEQ ID NO: 1505259 - DNA, 15 bp, Homo sapiens
tgatttaaaaaaaac

SEQ ID NO: 1505260 - DNA, 15 bp, Homo sapiens
gtgatttaaaaaaaa

SEQ ID NO: 1505261 - DNA, 15 bp, Homo sapiens
tgtgatttaaaaaaa

SEQ ID NO: 1505262 - DNA, 15 bp, Homo sapiens
gtgtgatttaaaaaa

SEQ ID NO: 1505263 - DNA, 15 bp, Homo sapiens
tgtgtgatttaaaaa

SEQ ID NO: 1505264 - DNA, 15 bp, Homo sapiens
gtgtgtgatttaaaa

SEQ ID NO: 1505265 - DNA, 15 bp, Homo sapiens
tgtgtgtgatttaaa

SEQ ID NO: 1505266 - DNA, 15 bp, Homo sapiens
gtgtgtgtgatttaa

SEQ ID NO: 1505267 - DNA, 15 bp, Homo sapiens
gtgtgtgtgtgattt

SEQ ID NO: 1505268 - DNA, 15 bp, Homo sapiens
tgtgtgtgtgtgatt

SEQ ID NO: 1505269 - DNA, 15 bp, Homo sapiens
tgtgagtgtgtgtgt

SEQ ID NO: 1505270 - DNA, 15 bp, Homo sapiens
gtgtgagtgtgtgtg

SEQ ID NO: 1505271 - DNA, 15 bp, Homo sapiens
tgtgtgagtgtgtgt

SEQ ID NO: 1505272 - DNA, 15 bp, Homo sapiens
gtgtgtgagtgtgtg

SEQ ID NO: 1505273 - DNA, 15 bp, Homo sapiens
tgtgtgtgagtgtgt

SEQ ID NO: 1505274 - DNA, 15 bp, Homo sapiens
cgtgtgtgtgtgtga

SEQ ID NO: 1505275 - DNA, 15 bp, Homo sapiens
tccgtgtgtgtgtgt

SEQ ID NO: 1505276 - DNA, 15 bp, Homo sapiens
gtccgtgtgtgtgtg

SEQ ID NO: 1505277 - DNA, 15 bp, Homo sapiens
tgtccgtgtgtgtgt

SEQ ID NO: 1505278 - DNA, 15 bp, Homo sapiens
gtgtccgtgtgtgtg

SEQ ID NO: 1505279 - DNA, 15 bp, Homo sapiens
tgtgtccgtgtgtgt

SEQ ID NO: 1505280 - DNA, 15 bp, Homo sapiens
tgtgtgtgtccgtgt

SEQ ID NO: 1505281 - DNA, 15 bp, Homo sapiens
agtgtgtgtgtccgt

SEQ ID NO: 1505282 - DNA, 15 bp, Homo sapiens
gagtgtgtgtgtccg

SEQ ID NO: 1505283 - DNA, 15 bp, Homo sapiens
agagtgtgtgtgtcc

SEQ ID NO: 1505284 - DNA, 15 bp, Homo sapiens
aagagtgtgtgtgtc

SEQ ID NO: 1505285 - DNA, 15 bp, Homo sapiens
aaagagtgtgtgtgt

SEQ ID NO: 1505286 - DNA, 15 bp, Homo sapiens
caaagagtgtgtgtg

SEQ ID NO: 1505287 - DNA, 15 bp, Homo sapiens
tcaaagagtgtgtgt

SEQ ID NO: 1505288 - DNA, 15 bp, Homo sapiens
ctcaaagagtgtgtg

SEQ ID NO: 1505289 - DNA, 15 bp, Homo sapiens
tctcaaagagtgtgt

SEQ ID NO: 1505290 - DNA, 15 bp, Homo sapiens
gtctcaaagagtgtg

SEQ ID NO: 1505291 - DNA, 15 bp, Homo sapiens
cgtctcaaagagtgt

SEQ ID NO: 1505292 - DNA, 15 bp, Homo sapiens
ccgtctcaaagagtg

SEQ ID NO: 1505293 - DNA, 15 bp, Homo sapiens
cccgtctcaaagagt

SEQ ID NO: 1505294 - DNA, 15 bp, Homo sapiens
acccgtctcaaagag

SEQ ID NO: 1505295 - DNA, 15 bp, Homo sapiens
gacccgtctcaaaga

SEQ ID NO: 1505296 - DNA, 15 bp, Homo sapiens
agacccgtctcaaag

SEQ ID NO: 1505297 - DNA, 15 bp, Homo sapiens
aagacccgtctcaaa

SEQ ID NO: 1505298 - DNA, 15 bp, Homo sapiens
caagacccgtctcaa

SEQ ID NO: 1505299 - DNA, 15 bp, Homo sapiens
acaagacccgtctca

SEQ ID NO: 1505300 - DNA, 15 bp, Homo sapiens
aacaagacccgtctc

SEQ ID NO: 1505301 - DNA, 15 bp, Homo sapiens
gaacaagacccgtct

SEQ ID NO: 1505302 - DNA, 15 bp, Homo sapiens
agaacaagacccgtc

SEQ ID NO: 1505303 - DNA, 15 bp, Homo sapiens
tagaacaagacccgt

SEQ ID NO: 1505304 - DNA, 15 bp, Homo sapiens
atagaacaagacccg

SEQ ID NO: 1505305 - DNA, 15 bp, Homo sapiens
gatagaacaagaccc

SEQ ID NO: 1505306 - DNA, 15 bp, Homo sapiens
tgatagaacaagacc

SEQ ID NO: 1505307 - DNA, 15 bp, Homo sapiens
gggtgatagaacaag

SEQ ID NO: 1505308 - DNA, 15 bp, Homo sapiens
tgggtgatagaacaa

SEQ ID NO: 1505309 - DNA, 15 bp, Homo sapiens
ttgggtgatagaaca

SEQ ID NO: 1505310 - DNA, 15 bp, Homo sapiens
cttgggtgatagaac

SEQ ID NO: 1505311 - DNA, 15 bp, Homo sapiens
gcttgggtgatagaa

SEQ ID NO: 1505312 - DNA, 15 bp, Homo sapiens
agcttgggtgataga

SEQ ID NO: 1505313 - DNA, 15 bp, Homo sapiens
cagcttgggtgatag

SEQ ID NO: 1505314 - DNA, 15 bp, Homo sapiens
ccagcttgggtgata

SEQ ID NO: 1505315 - DNA, 15 bp, Homo sapiens
tccagcttgggtgat

SEQ ID NO: 1505316 - DNA, 15 bp, Homo sapiens
agcactccagcttgg

SEQ ID NO: 1505317 - DNA, 15 bp, Homo sapiens
cagcactccagcttg

SEQ ID NO: 1505318 - DNA, 15 bp, Homo sapiens
acagcactccagctt

SEQ ID NO: 1505319 - DNA, 15 bp, Homo sapiens
cacagcactccagct

SEQ ID NO: 1505320 - DNA, 15 bp, Homo sapiens
ccacagcactccagc

SEQ ID NO: 1505321 - DNA, 15 bp, Homo sapiens
gccacagcactccag

SEQ ID NO: 1505322 - DNA, 15 bp, Homo sapiens
cgccacagcactcca

SEQ ID NO: 1505323 - DNA, 15 bp, Homo sapiens
gcgccacagcactcc

SEQ ID NO: 1505324 - DNA, 15 bp, Homo sapiens
tgcgccacagcactc

SEQ ID NO: 1505325 - DNA, 15 bp, Homo sapiens
ttgcgccacagcact

SEQ ID NO: 1505326 - DNA, 15 bp, Homo sapiens
attgcgccacagcac

SEQ ID NO: 1505327 - DNA, 15 bp, Homo sapiens
aattgcgccacagca

SEQ ID NO: 1505328 - DNA, 15 bp, Homo sapiens
taattgcgccacagc

SEQ ID NO: 1505329 - DNA, 15 bp, Homo sapiens
ataattgcgccacag

SEQ ID NO: 1505330 - DNA, 15 bp, Homo sapiens
cataattgcgccaca

SEQ ID NO: 1505331 - DNA, 15 bp, Homo sapiens
ccataattgcgccac

SEQ ID NO: 1505332 - DNA, 15 bp, Homo sapiens
gccataattgcgcca

SEQ ID NO: 1505333 - DNA, 15 bp, Homo sapiens
agccataattgcgcc

SEQ ID NO: 1505334 - DNA, 15 bp, Homo sapiens
gagccataattgcgc

SEQ ID NO: 1505335 - DNA, 15 bp, Homo sapiens
tgagccataattgcg

SEQ ID NO: 1505336 - DNA, 15 bp, Homo sapiens
gtgagccataattgc

SEQ ID NO: 1505337 - DNA, 15 bp, Homo sapiens
agtgagccataattg

SEQ ID NO: 1505338 - DNA, 15 bp, Homo sapiens
gcagtgagccataat

SEQ ID NO: 1505339 - DNA, 15 bp, Homo sapiens
tgcagtgagccataa

SEQ ID NO: 1505340 - DNA, 15 bp, Homo sapiens
ctgcagtgagccata

SEQ ID NO: 1505341 - DNA, 15 bp, Homo sapiens
tcttgagcccaggag

SEQ ID NO: 1505342 - DNA, 15 bp, Homo sapiens
atcttgagcccagga

SEQ ID NO: 1505343 - DNA, 15 bp, Homo sapiens
tatcttgagcccagg

SEQ ID NO: 1505344 - DNA, 15 bp, Homo sapiens
atatcttgagcccag

SEQ ID NO: 1505345 - DNA, 15 bp, Homo sapiens
gatatcttgagccca

SEQ ID NO: 1505346 - DNA, 15 bp, Homo sapiens
ggatatcttgagccc

SEQ ID NO: 1505347 - DNA, 15 bp, Homo sapiens
aggatatcttgagcc

SEQ ID NO: 1505348 - DNA, 15 bp, Homo sapiens
gaggatatcttgagc

SEQ ID NO: 1505349 - DNA, 15 bp, Homo sapiens
ggaggatatcttgag

SEQ ID NO: 1505350 - DNA, 15 bp, Homo sapiens
gggaggatatcttga

SEQ ID NO: 1505351 - DNA, 15 bp, Homo sapiens
tgggaggatatcttg

SEQ ID NO: 1505352 - DNA, 15 bp, Homo sapiens
gtgggaggatatctt

SEQ ID NO: 1505353 - DNA, 15 bp, Homo sapiens
ggtgggaggatatct

SEQ ID NO: 1505354 - DNA, 15 bp, Homo sapiens
aggtgggaggatatc

SEQ ID NO: 1505355 - DNA, 15 bp, Homo sapiens
gaggtgggaggatat

SEQ ID NO: 1505356 - DNA, 15 bp, Homo sapiens
gtggtggtatgcacc

SEQ ID NO: 1505357 - DNA, 15 bp, Homo sapiens
ggtggtggtatgcac

SEQ ID NO: 1505358 - DNA, 15 bp, Homo sapiens
gggtggtggtatgca

SEQ ID NO: 1505359 - DNA, 15 bp, Homo sapiens
ggggtggtggtatgc

SEQ ID NO: 1505360 - DNA, 15 bp, Homo sapiens
gggggtggtggtatg

SEQ ID NO: 1505361 - DNA, 15 bp, Homo sapiens
tgggggtggtggtat

SEQ ID NO: 1505362 - DNA, 15 bp, Homo sapiens
ctgggggtggtggta

SEQ ID NO: 1505363 - DNA, 15 bp, Homo sapiens
ttagctgggggtggt

SEQ ID NO: 1505364 - DNA, 15 bp, Homo sapiens
attagctgggggtgg

SEQ ID NO: 1505365 - DNA, 15 bp, Homo sapiens
aattagctgggggtg

SEQ ID NO: 1505366 - DNA, 15 bp, Homo sapiens
aaattagctgggggt

SEQ ID NO: 1505367 - DNA, 15 bp, Homo sapiens
aaaattagctggggg

SEQ ID NO: 1505368 - DNA, 15 bp, Homo sapiens
aaaaattagctgggg

SEQ ID NO: 1505369 - DNA, 15 bp, Homo sapiens
ttaaaaattagctgg

SEQ ID NO: 1505370 - DNA, 15 bp, Homo sapiens
tttaaaaattagctg

SEQ ID NO: 1505371 - DNA, 15 bp, Homo sapiens
catttaaaaattagc

SEQ ID NO: 1505372 - DNA, 15 bp, Homo sapiens
acatttaaaaattag

SEQ ID NO: 1505373 - DNA, 15 bp, Homo sapiens
aacatttaaaaatta

SEQ ID NO: 1505374 - DNA, 15 bp, Homo sapiens
aaacatttaaaaatt

SEQ ID NO: 1505375 - DNA, 15 bp, Homo sapiens
aaaacatttaaaaat

SEQ ID NO: 1505376 - DNA, 15 bp, Homo sapiens
aaaaacatttaaaaa

SEQ ID NO: 1505377 - DNA, 15 bp, Homo sapiens
aaaaaacatttaaaa

SEQ ID NO: 1505378 - DNA, 15 bp, Homo sapiens
aaaaaaacatttaaa

SEQ ID NO: 1505379 - DNA, 15 bp, Homo sapiens
aaaaaaaacatttaa

SEQ ID NO: 1505380 - DNA, 15 bp, Homo sapiens
caaaaaaaacattta

SEQ ID NO: 1505381 - DNA, 15 bp, Homo sapiens
acaaaaaaaacattt

SEQ ID NO: 1505382 - DNA, 15 bp, Homo sapiens
tacaaaaaaaacatt

SEQ ID NO: 1505383 - DNA, 15 bp, Homo sapiens
ctacaaaaaaaacat

SEQ ID NO: 1505384 - DNA, 15 bp, Homo sapiens
tctacaaaaaaaaca

SEQ ID NO: 1505385 - DNA, 15 bp, Homo sapiens
ttctacaaaaaaaac

SEQ ID NO: 1505386 - DNA, 15 bp, Homo sapiens
tttctacaaaaaaaa

SEQ ID NO: 1505387 - DNA, 15 bp, Homo sapiens
gtttctacaaaaaaa

SEQ ID NO: 1505388 - DNA, 15 bp, Homo sapiens
tgtttctacaaaaaa

SEQ ID NO: 1505389 - DNA, 15 bp, Homo sapiens
ctgtttctacaaaaa

SEQ ID NO: 1505390 - DNA, 15 bp, Homo sapiens
cctgtttctacaaaa

SEQ ID NO: 1505391 - DNA, 15 bp, Homo sapiens
ccctgtttctacaaa

SEQ ID NO: 1505392 - DNA, 15 bp, Homo sapiens
accctgtttctacaa

SEQ ID NO: 1505393 - DNA, 15 bp, Homo sapiens
gaccctgtttctaca

SEQ ID NO: 1505394 - DNA, 15 bp, Homo sapiens
agaccctgtttctac

SEQ ID NO: 1505395 - DNA, 15 bp, Homo sapiens
gagaccctgtttcta

SEQ ID NO: 1505396 - DNA, 15 bp, Homo sapiens
tgagaccctgtttct

SEQ ID NO: 1505397 - DNA, 15 bp, Homo sapiens
gtgagaccctgtttc

SEQ ID NO: 1505398 - DNA, 15 bp, Homo sapiens
agtgagaccctgttt

SEQ ID NO: 1505399 - DNA, 15 bp, Homo sapiens
aagtgagaccctgtt

SEQ ID NO: 1505400 - DNA, 15 bp, Homo sapiens
aaagtgagaccctgt

SEQ ID NO: 1505401 - DNA, 15 bp, Homo sapiens
caaagtgagaccctg

SEQ ID NO: 1505402 - DNA, 15 bp, Homo sapiens
acaaagtgagaccct

SEQ ID NO: 1505403 - DNA, 15 bp, Homo sapiens
aacaaagtgagaccc

SEQ ID NO: 1505404 - DNA, 15 bp, Homo sapiens
caacaaagtgagacc

SEQ ID NO: 1505405 - DNA, 15 bp, Homo sapiens
gcaacaaagtgagac

SEQ ID NO: 1505406 - DNA, 15 bp, Homo sapiens
ggcaacaaagtgaga

SEQ ID NO: 1505407 - DNA, 15 bp, Homo sapiens
gggcaacaaagtgag

SEQ ID NO: 1505408 - DNA, 15 bp, Homo sapiens
tgggcaacaaagtga

SEQ ID NO: 1505409 - DNA, 15 bp, Homo sapiens
ctgggcaacaaagtg

SEQ ID NO: 1505410 - DNA, 15 bp, Homo sapiens
cctgggcaacaaagt

SEQ ID NO: 1505411 - DNA, 15 bp, Homo sapiens
gcctgggcaacaaag

SEQ ID NO: 1505412 - DNA, 15 bp, Homo sapiens
agcctgggcaacaaa

SEQ ID NO: 1505413 - DNA, 15 bp, Homo sapiens
ccaggagtttcagac

SEQ ID NO: 1505414 - DNA, 15 bp, Homo sapiens
gcccaggagtttcag

SEQ ID NO: 1505415 - DNA, 15 bp, Homo sapiens
agcccaggagtttca

SEQ ID NO: 1505416 - DNA, 15 bp, Homo sapiens
gagcccaggagtttc

SEQ ID NO: 1505417 - DNA, 15 bp, Homo sapiens
ccacttgagcccagg

SEQ ID NO: 1505418 - DNA, 15 bp, Homo sapiens
accacttgagcccag

SEQ ID NO: 1505419 - DNA, 15 bp, Homo sapiens
gaccacttgagccca

SEQ ID NO: 1505420 - DNA, 15 bp, Homo sapiens
tgaccacttgagccc

SEQ ID NO: 1505421 - DNA, 15 bp, Homo sapiens
atgaccacttgagcc

SEQ ID NO: 1505422 - DNA, 15 bp, Homo sapiens
gatgaccacttgagc

SEQ ID NO: 1505423 - DNA, 15 bp, Homo sapiens
ggatgaccacttgag

SEQ ID NO: 1505424 - DNA, 15 bp, Homo sapiens
aggatgaccacttga

SEQ ID NO: 1505425 - DNA, 15 bp, Homo sapiens
aaggatgaccacttg

SEQ ID NO: 1505426 - DNA, 15 bp, Homo sapiens
gaaggatgaccactt

SEQ ID NO: 1505427 - DNA, 15 bp, Homo sapiens
ggaaggatgaccact

SEQ ID NO: 1505428 - DNA, 15 bp, Homo sapiens
aggaaggatgaccac

SEQ ID NO: 1505429 - DNA, 15 bp, Homo sapiens
gaggaaggatgacca

SEQ ID NO: 1505430 - DNA, 15 bp, Homo sapiens
tgaggaaggatgacc

SEQ ID NO: 1505431 - DNA, 15 bp, Homo sapiens
ctgaggaaggatgac

SEQ ID NO: 1505432 - DNA, 15 bp, Homo sapiens
gctgaggaaggatga

SEQ ID NO: 1505433 - DNA, 15 bp, Homo sapiens
ggctgaggaaggatg

SEQ ID NO: 1505434 - DNA, 15 bp, Homo sapiens
aggctgaggaaggat

SEQ ID NO: 1505435 - DNA, 15 bp, Homo sapiens
gaggctgaggaagga

SEQ ID NO: 1505436 - DNA, 15 bp, Homo sapiens
ggaggctgaggaagg

SEQ ID NO: 1505437 - DNA, 15 bp, Homo sapiens
gggaggctgaggaag

SEQ ID NO: 1505438 - DNA, 15 bp, Homo sapiens
ggggaggctgaggaa

SEQ ID NO: 1505439 - DNA, 15 bp, Homo sapiens
tggggaggctgagga

SEQ ID NO: 1505440 - DNA, 15 bp, Homo sapiens
ttggggaggctgagg

SEQ ID NO: 1505441 - DNA, 15 bp, Homo sapiens
tttggggaggctgag

SEQ ID NO: 1505442 - DNA, 15 bp, Homo sapiens
ctttggggaggctga

SEQ ID NO: 1505443 - DNA, 15 bp, Homo sapiens
actttggggaggctg

SEQ ID NO: 1505444 - DNA, 15 bp, Homo sapiens
accagcactttgggg

SEQ ID NO: 1505445 - DNA, 15 bp, Homo sapiens
aaccagcactttggg

SEQ ID NO: 1505446 - DNA, 15 bp, Homo sapiens
aaaccagcactttgg

SEQ ID NO: 1505447 - DNA, 15 bp, Homo sapiens
aaaaccagcactttg

SEQ ID NO: 1505448 - DNA, 15 bp, Homo sapiens
taaaaccagcacttt

SEQ ID NO: 1505449 - DNA, 15 bp, Homo sapiens
gtaaaaccagcactt

SEQ ID NO: 1505450 - DNA, 15 bp, Homo sapiens
tgtaaaaccagcact

SEQ ID NO: 1505451 - DNA, 15 bp, Homo sapiens
ctgtaaaaccagcac

SEQ ID NO: 1505452 - DNA, 15 bp, Homo sapiens
cctgtaaaaccagca

SEQ ID NO: 1505453 - DNA, 15 bp, Homo sapiens
gcctgtaaaaccagc

SEQ ID NO: 1505454 - DNA, 15 bp, Homo sapiens
tgcctgtaaaaccag

SEQ ID NO: 1505455 - DNA, 15 bp, Homo sapiens
atgcctgtaaaacca

SEQ ID NO: 1505456 - DNA, 15 bp, Homo sapiens
catgcctgtaaaacc

SEQ ID NO: 1505457 - DNA, 15 bp, Homo sapiens
tcatgcctgtaaaac

SEQ ID NO: 1505458 - DNA, 15 bp, Homo sapiens
ctcatgcctgtaaaa

SEQ ID NO: 1505459 - DNA, 15 bp, Homo sapiens
tgccaggtgtggtgg

SEQ ID NO: 1505460 - DNA, 15 bp, Homo sapiens
ctgccaggtgtggtg

SEQ ID NO: 1505461 - DNA, 15 bp, Homo sapiens
gctgccaggtgtggt

SEQ ID NO: 1505462 - DNA, 15 bp, Homo sapiens
tgctgccaggtgtgg

SEQ ID NO: 1505463 - DNA, 15 bp, Homo sapiens
gtgctgccaggtgtg

SEQ ID NO: 1505464 - DNA, 15 bp, Homo sapiens
ggtgctgccaggtgt

SEQ ID NO: 1505465 - DNA, 15 bp, Homo sapiens
gggtgctgccaggtg

SEQ ID NO: 1505466 - DNA, 15 bp, Homo sapiens
tgggtgctgccaggt

SEQ ID NO: 1505467 - DNA, 15 bp, Homo sapiens
atgggtgctgccagg

SEQ ID NO: 1505468 - DNA, 15 bp, Homo sapiens
tatgggtgctgccag

SEQ ID NO: 1505469 - DNA, 15 bp, Homo sapiens
atatgggtgctgcca

SEQ ID NO: 1505470 - DNA, 15 bp, Homo sapiens
tatatgggtgctgcc

SEQ ID NO: 1505471 - DNA, 15 bp, Homo sapiens
atatatgggtgctgc

SEQ ID NO: 1505472 - DNA, 15 bp, Homo sapiens
aatatatgggtgctg

SEQ ID NO: 1505473 - DNA, 15 bp, Homo sapiens
aaatatatgggtgct

SEQ ID NO: 1505474 - DNA, 15 bp, Homo sapiens
aaaatatatgggtgc

SEQ ID NO: 1505475 - DNA, 15 bp, Homo sapiens
taaaatatatgggtg

SEQ ID NO: 1505476 - DNA, 15 bp, Homo sapiens
ttaaaatatatgggt

SEQ ID NO: 1505477 - DNA, 15 bp, Homo sapiens
ttttaaaatatatgg

SEQ ID NO: 1505478 - DNA, 15 bp, Homo sapiens
attttaaaatatatg

SEQ ID NO: 1505479 - DNA, 15 bp, Homo sapiens
aattttaaaatatat

SEQ ID NO: 1505480 - DNA, 15 bp, Homo sapiens
aaattttaaaatata

SEQ ID NO: 1505481 - DNA, 15 bp, Homo sapiens
taaattttaaaatat

SEQ ID NO: 1505482 - DNA, 15 bp, Homo sapiens
ctaaattttaaaata

SEQ ID NO: 1505483 - DNA, 15 bp, Homo sapiens
actaaattttaaaat

SEQ ID NO: 1505484 - DNA, 15 bp, Homo sapiens
tactaaattttaaaa

SEQ ID NO: 1505485 - DNA, 15 bp, Homo sapiens
atactaaattttaaa

SEQ ID NO: 1505486 - DNA, 15 bp, Homo sapiens
catactaaattttaa

SEQ ID NO: 1505487 - DNA, 15 bp, Homo sapiens
tcatactaaatttta

SEQ ID NO: 1505488 - DNA, 15 bp, Homo sapiens
ttcatactaaatttt

SEQ ID NO: 1505489 - DNA, 15 bp, Homo sapiens
attcatactaaattt

SEQ ID NO: 1505490 - DNA, 15 bp, Homo sapiens
aattcatactaaatt

SEQ ID NO: 1505491 - DNA, 15 bp, Homo sapiens
taattcatactaaat

SEQ ID NO: 1505492 - DNA, 15 bp, Homo sapiens
ctaattcatactaaa

SEQ ID NO: 1505493 - DNA, 15 bp, Homo sapiens
actaattcatactaa

SEQ ID NO: 1505494 - DNA, 15 bp, Homo sapiens
gactaattcatacta

SEQ ID NO: 1505495 - DNA, 15 bp, Homo sapiens
agactaattcatact

SEQ ID NO: 1505496 - DNA, 15 bp, Homo sapiens
aagactaattcatac

SEQ ID NO: 1505497 - DNA, 15 bp, Homo sapiens
aaagactaattcata

SEQ ID NO: 1505498 - DNA, 15 bp, Homo sapiens
aaaagactaattcat

SEQ ID NO: 1505499 - DNA, 15 bp, Homo sapiens
gaaaagactaattca

SEQ ID NO: 1505500 - DNA, 15 bp, Homo sapiens
agaaaagactaattc

SEQ ID NO: 1505501 - DNA, 15 bp, Homo sapiens
aagaaaagactaatt

SEQ ID NO: 1505502 - DNA, 15 bp, Homo sapiens
aaagaaaagactaat

SEQ ID NO: 1505503 - DNA, 15 bp, Homo sapiens
aaaagaaaagactaa

SEQ ID NO: 1505504 - DNA, 15 bp, Homo sapiens
aaaaagaaaagacta

SEQ ID NO: 1505505 - DNA, 15 bp, Homo sapiens
caaaaagaaaagact

SEQ ID NO: 1505506 - DNA, 15 bp, Homo sapiens
tcaaaaagaaaagac

SEQ ID NO: 1505507 - DNA, 15 bp, Homo sapiens
atcaaaaagaaaaga

SEQ ID NO: 1505508 - DNA, 15 bp, Homo sapiens
catcaaaaagaaaag

SEQ ID NO: 1505509 - DNA, 15 bp, Homo sapiens
acatcaaaaagaaaa

SEQ ID NO: 1505510 - DNA, 15 bp, Homo sapiens
cacatcaaaaagaaa

SEQ ID NO: 1505511 - DNA, 15 bp, Homo sapiens
ccacatcaaaaagaa

SEQ ID NO: 1505512 - DNA, 15 bp, Homo sapiens
gccacatcaaaaaga

SEQ ID NO: 1505513 - DNA, 15 bp, Homo sapiens
tgccacatcaaaaag

SEQ ID NO: 1505514 - DNA, 15 bp, Homo sapiens
atgccacatcaaaaa

SEQ ID NO: 1505515 - DNA, 15 bp, Homo sapiens
tatgccacatcaaaa

SEQ ID NO: 1505516 - DNA, 15 bp, Homo sapiens
ttatgccacatcaaa

SEQ ID NO: 1505517 - DNA, 15 bp, Homo sapiens
attatgccacatcaa

SEQ ID NO: 1505518 - DNA, 15 bp, Homo sapiens
aattatgccacatca

SEQ ID NO: 1505519 - DNA, 15 bp, Homo sapiens
caattatgccacatc

SEQ ID NO: 1505520 - DNA, 15 bp, Homo sapiens
acaattatgccacat

SEQ ID NO: 1505521 - DNA, 15 bp, Homo sapiens
tacaattatgccaca

SEQ ID NO: 1505522 - DNA, 15 bp, Homo sapiens
atacaattatgccac

SEQ ID NO: 1505523 - DNA, 15 bp, Homo sapiens
aatacaattatgcca

SEQ ID NO: 1505524 - DNA, 15 bp, Homo sapiens
caatacaattatgcc

SEQ ID NO: 1505525 - DNA, 15 bp, Homo sapiens
tcaatacaattatgc

SEQ ID NO: 1505526 - DNA, 15 bp, Homo sapiens
gtcaatacaattatg

SEQ ID NO: 1505527 - DNA, 15 bp, Homo sapiens
agtcaatacaattat

SEQ ID NO: 1505528 - DNA, 15 bp, Homo sapiens
tagtcaatacaatta

SEQ ID NO: 1505529 - DNA, 15 bp, Homo sapiens
ttagtcaatacaatt

SEQ ID NO: 1505530 - DNA, 15 bp, Homo sapiens
attagtcaatacaat

SEQ ID NO: 1505531 - DNA, 15 bp, Homo sapiens
gattagtcaatacaa

SEQ ID NO: 1505532 - DNA, 15 bp, Homo sapiens
ggattagtcaataca

SEQ ID NO: 1505533 - DNA, 15 bp, Homo sapiens
tggattagtcaatac

SEQ ID NO: 1505534 - DNA, 15 bp, Homo sapiens
atggattagtcaata

SEQ ID NO: 1505535 - DNA, 15 bp, Homo sapiens
aatggattagtcaat

SEQ ID NO: 1505536 - DNA, 15 bp, Homo sapiens
gaatggattagtcaa

SEQ ID NO: 1505537 - DNA, 15 bp, Homo sapiens
agaatggattagtca

SEQ ID NO: 1505538 - DNA, 15 bp, Homo sapiens
aagaatggattagtc

SEQ ID NO: 1505539 - DNA, 15 bp, Homo sapiens
aaagaatggattagt

SEQ ID NO: 1505540 - DNA, 15 bp, Homo sapiens
taaagaatggattag

SEQ ID NO: 1505541 - DNA, 15 bp, Homo sapiens
gtaaagaatggatta

SEQ ID NO: 1505542 - DNA, 15 bp, Homo sapiens
ggtaaagaatggatt

SEQ ID NO: 1505543 - DNA, 15 bp, Homo sapiens
tggtaaagaatggat

SEQ ID NO: 1505544 - DNA, 15 bp, Homo sapiens
atggtaaagaatgga

SEQ ID NO: 1505545 - DNA, 15 bp, Homo sapiens
aatggtaaagaatgg

SEQ ID NO: 1505546 - DNA, 15 bp, Homo sapiens
caatggtaaagaatg

SEQ ID NO: 1505547 - DNA, 15 bp, Homo sapiens
tcaatggtaaagaat

SEQ ID NO: 1505548 - DNA, 15 bp, Homo sapiens
atcaatggtaaagaa

SEQ ID NO: 1505549 - DNA, 15 bp, Homo sapiens
aatcaatggtaaaga

SEQ ID NO: 1505550 - DNA, 15 bp, Homo sapiens
aaatcaatggtaaag

SEQ ID NO: 1505551 - DNA, 15 bp, Homo sapiens
caaatcaatggtaaa

SEQ ID NO: 1505552 - DNA, 15 bp, Homo sapiens
tcaaatcaatggtaa

SEQ ID NO: 1505553 - DNA, 15 bp, Homo sapiens
ttcaaatcaatggta

SEQ ID NO: 1505554 - DNA, 15 bp, Homo sapiens
tttcaaatcaatggt

SEQ ID NO: 1505555 - DNA, 15 bp, Homo sapiens
atttcaaatcaatgg

SEQ ID NO: 1505556 - DNA, 15 bp, Homo sapiens
tatttcaaatcaatg

SEQ ID NO: 1505557 - DNA, 15 bp, Homo sapiens
gtatttcaaatcaat

SEQ ID NO: 1505558 - DNA, 15 bp, Homo sapiens
ggtatttcaaatcaa

SEQ ID NO: 1505559 - DNA, 15 bp, Homo sapiens
tggtatttcaaatca

SEQ ID NO: 1505560 - DNA, 15 bp, Homo sapiens
gtggtatttcaaatc

SEQ ID NO: 1505561 - DNA, 15 bp, Homo sapiens
ggtggtatttcaaat

SEQ ID NO: 1505562 - DNA, 15 bp, Homo sapiens
aggtggtatttcaaa

SEQ ID NO: 1505563 - DNA, 15 bp, Homo sapiens
aaggtggtatttcaa

SEQ ID NO: 1505564 - DNA, 15 bp, Homo sapiens
aaaggtggtatttca

SEQ ID NO: 1505565 - DNA, 15 bp, Homo sapiens
taaaggtggtatttc

SEQ ID NO: 1505566 - DNA, 15 bp, Homo sapiens
ataaaggtggtattt

SEQ ID NO: 1505567 - DNA, 15 bp, Homo sapiens
aataaaggtggtatt

SEQ ID NO: 1505568 - DNA, 15 bp, Homo sapiens
taataaaggtggtat

SEQ ID NO: 1505569 - DNA, 15 bp, Homo sapiens
ataataaaggtggta

SEQ ID NO: 1505570 - DNA, 15 bp, Homo sapiens
tataataaaggtggt

SEQ ID NO: 1505571 - DNA, 15 bp, Homo sapiens
atataataaaggtgg

SEQ ID NO: 1505572 - DNA, 15 bp, Homo sapiens
aatataataaaggtg

SEQ ID NO: 1505573 - DNA, 15 bp, Homo sapiens
taatataataaaggt

SEQ ID NO: 1505574 - DNA, 15 bp, Homo sapiens
ttaatataataaagg

SEQ ID NO: 1505575 - DNA, 15 bp, Homo sapiens
tttaatataataaag

SEQ ID NO: 1505576 - DNA, 15 bp, Homo sapiens
atttaatataataaa

SEQ ID NO: 1505577 - DNA, 15 bp, Homo sapiens
aatttaatataataa

SEQ ID NO: 1505578 - DNA, 15 bp, Homo sapiens
aaatttaatataata

SEQ ID NO: 1505579 - DNA, 15 bp, Homo sapiens
caaatttaatataat

SEQ ID NO: 1505580 - DNA, 15 bp, Homo sapiens
acaaatttaatataa

SEQ ID NO: 1505581 - DNA, 15 bp, Homo sapiens
cacaaatttaatata

SEQ ID NO: 1505582 - DNA, 15 bp, Homo sapiens
acacaaatttaatat

SEQ ID NO: 1505583 - DNA, 15 bp, Homo sapiens
cacacaaatttaata

SEQ ID NO: 1505584 - DNA, 15 bp, Homo sapiens
acacacaaatttaat

SEQ ID NO: 1505585 - DNA, 15 bp, Homo sapiens
cacacacaaatttaa

SEQ ID NO: 1505586 - DNA, 15 bp, Homo sapiens
tcacacacaaattta

SEQ ID NO: 1505587 - DNA, 15 bp, Homo sapiens
ttcacacacaaattt

SEQ ID NO: 1505588 - DNA, 15 bp, Homo sapiens
attcacacacaaatt

SEQ ID NO: 1505589 - DNA, 15 bp, Homo sapiens
tattcacacacaaat

SEQ ID NO: 1505590 - DNA, 15 bp, Homo sapiens
atattcacacacaaa

SEQ ID NO: 1505591 - DNA, 15 bp, Homo sapiens
catattcacacacaa

SEQ ID NO: 1505592 - DNA, 15 bp, Homo sapiens
tcatattcacacaca

SEQ ID NO: 1505593 - DNA, 15 bp, Homo sapiens
ttcatattcacacac

SEQ ID NO: 1505594 - DNA, 15 bp, Homo sapiens
attcatattcacaca

SEQ ID NO: 1505595 - DNA, 15 bp, Homo sapiens
tattcatattcacac

SEQ ID NO: 1505596 - DNA, 15 bp, Homo sapiens
atattcatattcaca

SEQ ID NO: 1505597 - DNA, 15 bp, Homo sapiens
gatattcatattcac

SEQ ID NO: 1505598 - DNA, 15 bp, Homo sapiens
agatattcatattca

SEQ ID NO: 1505599 - DNA, 15 bp, Homo sapiens
aagatattcatattc

SEQ ID NO: 1505600 - DNA, 15 bp, Homo sapiens
aaagatattcatatt

SEQ ID NO: 1505601 - DNA, 15 bp, Homo sapiens
aaaagatattcatat

SEQ ID NO: 1505602 - DNA, 15 bp, Homo sapiens
gaaaagatattcata

SEQ ID NO: 1505603 - DNA, 15 bp, Homo sapiens
agaaaagatattcat

SEQ ID NO: 1505604 - DNA, 15 bp, Homo sapiens
cagaaaagatattca

SEQ ID NO: 1505605 - DNA, 15 bp, Homo sapiens
acagaaaagatattc

SEQ ID NO: 1505606 - DNA, 15 bp, Homo sapiens
cacagaaaagatatt

SEQ ID NO: 1505607 - DNA, 15 bp, Homo sapiens
tcacagaaaagatat

SEQ ID NO: 1505608 - DNA, 15 bp, Homo sapiens
atcacagaaaagata

SEQ ID NO: 1505609 - DNA, 15 bp, Homo sapiens
aatcacagaaaagat

SEQ ID NO: 1505610 - DNA, 15 bp, Homo sapiens
caatcacagaaaaga

SEQ ID NO: 1505611 - DNA, 15 bp, Homo sapiens
gcaatcacagaaaag

SEQ ID NO: 1505612 - DNA, 15 bp, Homo sapiens
tgcaatcacagaaaa

SEQ ID NO: 1505613 - DNA, 15 bp, Homo sapiens
ttgcaatcacagaaa

SEQ ID NO: 1505614 - DNA, 15 bp, Homo sapiens
attgcaatcacagaa

SEQ ID NO: 1505615 - DNA, 15 bp, Homo sapiens
aattgcaatcacaga

SEQ ID NO: 1505616 - DNA, 15 bp, Homo sapiens
taattgcaatcacag

SEQ ID NO: 1505617 - DNA, 15 bp, Homo sapiens
ttaattgcaatcaca

SEQ ID NO: 1505618 - DNA, 15 bp, Homo sapiens
attaattgcaatcac

SEQ ID NO: 1505619 - DNA, 15 bp, Homo sapiens
aattaattgcaatca

SEQ ID NO: 1505620 - DNA, 15 bp, Homo sapiens
aaattaattgcaatc

SEQ ID NO: 1505621 - DNA, 15 bp, Homo sapiens
caaattaattgcaat

SEQ ID NO: 1505622 - DNA, 15 bp, Homo sapiens
acaaattaattgcaa

SEQ ID NO: 1505623 - DNA, 15 bp, Homo sapiens
tacaaattaattgca

SEQ ID NO: 1505624 - DNA, 15 bp, Homo sapiens
gtacaaattaattgc

SEQ ID NO: 1505625 - DNA, 15 bp, Homo sapiens
agtacaaattaattg

SEQ ID NO: 1505626 - DNA, 15 bp, Homo sapiens
aagtacaaattaatt

SEQ ID NO: 1505627 - DNA, 15 bp, Homo sapiens
caagtacaaattaat

SEQ ID NO: 1505628 - DNA, 15 bp, Homo sapiens
acaagtacaaattaa

SEQ ID NO: 1505629 - DNA, 15 bp, Homo sapiens
tacaagtacaaatta

SEQ ID NO: 1505630 - DNA, 15 bp, Homo sapiens
gtacaagtacaaatt

SEQ ID NO: 1505631 - DNA, 15 bp, Homo sapiens
tgtacaagtacaaat

SEQ ID NO: 1505632 - DNA, 15 bp, Homo sapiens
ctgtacaagtacaaa

SEQ ID NO: 1505633 - DNA, 15 bp, Homo sapiens
tctgtacaagtacaa

SEQ ID NO: 1505634 - DNA, 15 bp, Homo sapiens
atctgtacaagtaca

SEQ ID NO: 1505635 - DNA, 15 bp, Homo sapiens
aatctgtacaagtac

SEQ ID NO: 1505636 - DNA, 15 bp, Homo sapiens
caatctgtacaagta

SEQ ID NO: 1505637 - DNA, 15 bp, Homo sapiens
acaatctgtacaagt

SEQ ID NO: 1505638 - DNA, 15 bp, Homo sapiens
cacaatctgtacaag

SEQ ID NO: 1505639 - DNA, 15 bp, Homo sapiens
gcacaatctgtacaa

SEQ ID NO: 1505640 - DNA, 15 bp, Homo sapiens
agcacaatctgtaca

SEQ ID NO: 1505641 - DNA, 15 bp, Homo sapiens
cagcacaatctgtac

SEQ ID NO: 1505642 - DNA, 15 bp, Homo sapiens
acagcacaatctgta

SEQ ID NO: 1505643 - DNA, 15 bp, Homo sapiens
tacagcacaatctgt

SEQ ID NO: 1505644 - DNA, 15 bp, Homo sapiens
ttacagcacaatctg

SEQ ID NO: 1505645 - DNA, 15 bp, Homo sapiens
cttacagcacaatct

SEQ ID NO: 1505646 - DNA, 15 bp, Homo sapiens
tcttacagcacaatc

SEQ ID NO: 1505647 - DNA, 15 bp, Homo sapiens
ctcttacagcacaat

SEQ ID NO: 1505648 - DNA, 15 bp, Homo sapiens
gctcttacagcacaa

SEQ ID NO: 1505649 - DNA, 15 bp, Homo sapiens
agctcttacagcaca

SEQ ID NO: 1505650 - DNA, 15 bp, Homo sapiens
aagctcttacagcac

SEQ ID NO: 1505651 - DNA, 15 bp, Homo sapiens
taagctcttacagca

SEQ ID NO: 1505652 - DNA, 15 bp, Homo sapiens
ttaagctcttacagc

SEQ ID NO: 1505653 - DNA, 15 bp, Homo sapiens
gttaagctcttacag

SEQ ID NO: 1505654 - DNA, 15 bp, Homo sapiens
tgttaagctcttaca

SEQ ID NO: 1505655 - DNA, 15 bp, Homo sapiens
ctgttaagctcttac

SEQ ID NO: 1505656 - DNA, 15 bp, Homo sapiens
actgttaagctctta

SEQ ID NO: 1505657 - DNA, 15 bp, Homo sapiens
tactgttaagctctt

SEQ ID NO: 1505658 - DNA, 15 bp, Homo sapiens
atactgttaagctct

SEQ ID NO: 1505659 - DNA, 15 bp, Homo sapiens
tatactgttaagctc

SEQ ID NO: 1505660 - DNA, 15 bp, Homo sapiens
atatactgttaagct

SEQ ID NO: 1505661 - DNA, 15 bp, Homo sapiens
aatatactgttaagc

SEQ ID NO: 1505662 - DNA, 15 bp, Homo sapiens
aaatatactgttaag

SEQ ID NO: 1505663 - DNA, 15 bp, Homo sapiens
gaaatatactgttaa

SEQ ID NO: 1505664 - DNA, 15 bp, Homo sapiens
tgaaatatactgtta

SEQ ID NO: 1505665 - DNA, 15 bp, Homo sapiens
ctgaaatatactgtt

SEQ ID NO: 1505666 - DNA, 15 bp, Homo sapiens
actgaaatatactgt

SEQ ID NO: 1505667 - DNA, 15 bp, Homo sapiens
tactgaaatatactg

SEQ ID NO: 1505668 - DNA, 15 bp, Homo sapiens
gtactgaaatatact

SEQ ID NO: 1505669 - DNA, 15 bp, Homo sapiens
agtactgaaatatac

SEQ ID NO: 1505670 - DNA, 15 bp, Homo sapiens
aagtactgaaatata

SEQ ID NO: 1505671 - DNA, 15 bp, Homo sapiens
caagtactgaaatat

SEQ ID NO: 1505672 - DNA, 15 bp, Homo sapiens
ccaagtactgaaata

SEQ ID NO: 1505673 - DNA, 15 bp, Homo sapiens
accaagtactgaaat

SEQ ID NO: 1505674 - DNA, 15 bp, Homo sapiens
gaccaagtactgaaa

SEQ ID NO: 1505675 - DNA, 15 bp, Homo sapiens
tgaccaagtactgaa

SEQ ID NO: 1505676 - DNA, 15 bp, Homo sapiens
atgaccaagtactga

SEQ ID NO: 1505677 - DNA, 15 bp, Homo sapiens
catgaccaagtactg

SEQ ID NO: 1505678 - DNA, 15 bp, Homo sapiens
acatgaccaagtact

SEQ ID NO: 1505679 - DNA, 15 bp, Homo sapiens
gacatgaccaagtac

SEQ ID NO: 1505680 - DNA, 15 bp, Homo sapiens
agacatgaccaagta

SEQ ID NO: 1505681 - DNA, 15 bp, Homo sapiens
gagacatgaccaagt

SEQ ID NO: 1505682 - DNA, 15 bp, Homo sapiens
agagacatgaccaag

SEQ ID NO: 1505683 - DNA, 15 bp, Homo sapiens
aagagacatgaccaa

SEQ ID NO: 1505684 - DNA, 15 bp, Homo sapiens
caagagacatgacca

SEQ ID NO: 1505685 - DNA, 15 bp, Homo sapiens
acaagagacatgacc

SEQ ID NO: 1505686 - DNA, 15 bp, Homo sapiens
aacaagagacatgac

SEQ ID NO: 1505687 - DNA, 15 bp, Homo sapiens
gaacaagagacatga

SEQ ID NO: 1505688 - DNA, 15 bp, Homo sapiens
agaacaagagacatg

SEQ ID NO: 1505689 - DNA, 15 bp, Homo sapiens
aagaacaagagacat

SEQ ID NO: 1505690 - DNA, 15 bp, Homo sapiens
caagaacaagagaca

SEQ ID NO: 1505691 - DNA, 15 bp, Homo sapiens
acaagaacaagagac

SEQ ID NO: 1505692 - DNA, 15 bp, Homo sapiens
aacaagaacaagaga

SEQ ID NO: 1505693 - DNA, 15 bp, Homo sapiens
aaacaagaacaagag

SEQ ID NO: 1505694 - DNA, 15 bp, Homo sapiens
aaaacaagaacaaga

SEQ ID NO: 1505695 - DNA, 15 bp, Homo sapiens
aaaaacaagaacaag

SEQ ID NO: 1505696 - DNA, 15 bp, Homo sapiens
gaaaaacaagaacaa

SEQ ID NO: 1505697 - DNA, 15 bp, Homo sapiens
agaaaaacaagaaca

SEQ ID NO: 1505698 - DNA, 15 bp, Homo sapiens
aagaaaaacaagaac

SEQ ID NO: 1505699 - DNA, 15 bp, Homo sapiens
aaagaaaaacaagaa

SEQ ID NO: 1505700 - DNA, 15 bp, Homo sapiens
aaaagaaaaacaaga

SEQ ID NO: 1505701 - DNA, 15 bp, Homo sapiens
gaaaagaaaaacaag

SEQ ID NO: 1505702 - DNA, 15 bp, Homo sapiens
agaaaagaaaaacaa

SEQ ID NO: 1505703 - DNA, 15 bp, Homo sapiens
aagaaaagaaaaaca

SEQ ID NO: 1505704 - DNA, 15 bp, Homo sapiens
aaagaaaagaaaaac

SEQ ID NO: 1505705 - DNA, 15 bp, Homo sapiens
caaaaaaaagaaaag

SEQ ID NO: 1505706 - DNA, 15 bp, Homo sapiens
acaaaaaaaagaaaa

SEQ ID NO: 1505707 - DNA, 15 bp, Homo sapiens
aacaaaaaaaagaaa

SEQ ID NO: 1505708 - DNA, 15 bp, Homo sapiens
aaacaaaaaaaagaa

SEQ ID NO: 1505709 - DNA, 15 bp, Homo sapiens
aaaacaaaaaaaaga

SEQ ID NO: 1505710 - DNA, 15 bp, Homo sapiens
caaaacaaaaaaaag

SEQ ID NO: 1505711 - DNA, 15 bp, Homo sapiens
acaaaacaaaaaaaa

SEQ ID NO: 1505712 - DNA, 15 bp, Homo sapiens
aacaaaacaaaaaaa

SEQ ID NO: 1505713 - DNA, 15 bp, Homo sapiens
aaaaaacaaaacaaa

SEQ ID NO: 1505714 - DNA, 15 bp, Homo sapiens
caaaaaacaaaacaa

SEQ ID NO: 1505715 - DNA, 15 bp, Homo sapiens
tcaaaaaacaaaaca

SEQ ID NO: 1505716 - DNA, 15 bp, Homo sapiens
ctcaaaaaacaaaac

SEQ ID NO: 1505717 - DNA, 15 bp, Homo sapiens
tctctgtctcaaaaa

SEQ ID NO: 1505718 - DNA, 15 bp, Homo sapiens
gtctctgtctcaaaa

SEQ ID NO: 1505719 - DNA, 15 bp, Homo sapiens
agtctctgtctcaaa

SEQ ID NO: 1505720 - DNA, 15 bp, Homo sapiens
gagtctctgtctcaa

SEQ ID NO: 1505721 - DNA, 15 bp, Homo sapiens
cgagtctctgtctca

SEQ ID NO: 1505722 - DNA, 15 bp, Homo sapiens
gcgagtctctgtctc

SEQ ID NO: 1505723 - DNA, 15 bp, Homo sapiens
agcgagtctctgtct

SEQ ID NO: 1505724 - DNA, 15 bp, Homo sapiens
gagcgagtctctgtc

SEQ ID NO: 1505725 - DNA, 15 bp, Homo sapiens
agagcgagtctctgt

SEQ ID NO: 1505726 - DNA, 15 bp, Homo sapiens
cagagcgagtctctg

SEQ ID NO: 1505727 - DNA, 15 bp, Homo sapiens
acagagcgagtctct

SEQ ID NO: 1505728 - DNA, 15 bp, Homo sapiens
aacagagcgagtctc

SEQ ID NO: 1505729 - DNA, 15 bp, Homo sapiens
caacagagcgagtct

SEQ ID NO: 1505730 - DNA, 15 bp, Homo sapiens
gcaacagagcgagtc

SEQ ID NO: 1505731 - DNA, 15 bp, Homo sapiens
ggcaacagagcgagt

SEQ ID NO: 1505732 - DNA, 15 bp, Homo sapiens
ctgcgccactgcact

SEQ ID NO: 1505733 - DNA, 15 bp, Homo sapiens
actgcgccactgcac

SEQ ID NO: 1505734 - DNA, 15 bp, Homo sapiens
gactgcgccactgca

SEQ ID NO: 1505735 - DNA, 15 bp, Homo sapiens
agactgcgccactgc

SEQ ID NO: 1505736 - DNA, 15 bp, Homo sapiens
gagactgcgccactg

SEQ ID NO: 1505737 - DNA, 15 bp, Homo sapiens
cgagactgcgccact

SEQ ID NO: 1505738 - DNA, 15 bp, Homo sapiens
ccgagactgcgccac

SEQ ID NO: 1505739 - DNA, 15 bp, Homo sapiens
gccgagactgcgcca

SEQ ID NO: 1505740 - DNA, 15 bp, Homo sapiens
agccgagactgcgcc

SEQ ID NO: 1505741 - DNA, 15 bp, Homo sapiens
gagccgagactgcgc

SEQ ID NO: 1505742 - DNA, 15 bp, Homo sapiens
tgagccgagactgcg

SEQ ID NO: 1505743 - DNA, 15 bp, Homo sapiens
gtgagccgagactgc

SEQ ID NO: 1505744 - DNA, 15 bp, Homo sapiens
agtgagccgagactg

SEQ ID NO: 1505745 - DNA, 15 bp, Homo sapiens
cagtgagccgagact

SEQ ID NO: 1505746 - DNA, 15 bp, Homo sapiens
gcagtgagccgagac

SEQ ID NO: 1505747 - DNA, 15 bp, Homo sapiens
aggaggcagagcttg

SEQ ID NO: 1505748 - DNA, 15 bp, Homo sapiens
caggaggcagagctt

SEQ ID NO: 1505749 - DNA, 15 bp, Homo sapiens
ccaggaggcagagct

SEQ ID NO: 1505750 - DNA, 15 bp, Homo sapiens
cccaggaggcagagc

SEQ ID NO: 1505751 - DNA, 15 bp, Homo sapiens
cgggagaatggcatg

SEQ ID NO: 1505752 - DNA, 15 bp, Homo sapiens
gcgggagaatggcat

SEQ ID NO: 1505753 - DNA, 15 bp, Homo sapiens
ggcgggagaatggca

SEQ ID NO: 1505754 - DNA, 15 bp, Homo sapiens
aggcgggagaatggc

SEQ ID NO: 1505755 - DNA, 15 bp, Homo sapiens
gaggcgggagaatgg

SEQ ID NO: 1505756 - DNA, 15 bp, Homo sapiens
tgaggcgggagaatg

SEQ ID NO: 1505757 - DNA, 15 bp, Homo sapiens
cgtggcaggcgcctg

SEQ ID NO: 1505758 - DNA, 15 bp, Homo sapiens
tcgtggcaggcgcct

SEQ ID NO: 1505759 - DNA, 15 bp, Homo sapiens
gtcgtggcaggcgcc

SEQ ID NO: 1505760 - DNA, 15 bp, Homo sapiens
cgtcgtggcaggcgc

SEQ ID NO: 1505761 - DNA, 15 bp, Homo sapiens
gcgtcgtggcaggcg

SEQ ID NO: 1505762 - DNA, 15 bp, Homo sapiens
ggcgtcgtggcaggc

SEQ ID NO: 1505763 - DNA, 15 bp, Homo sapiens
gggcgtcgtggcagg

SEQ ID NO: 1505764 - DNA, 15 bp, Homo sapiens
tgggcgtcgtggcag

SEQ ID NO: 1505765 - DNA, 15 bp, Homo sapiens
ctgggcgtcgtggca

SEQ ID NO: 1505766 - DNA, 15 bp, Homo sapiens
gctgggcgtcgtggc

SEQ ID NO: 1505767 - DNA, 15 bp, Homo sapiens
agctgggcgtcgtgg

SEQ ID NO: 1505768 - DNA, 15 bp, Homo sapiens
tagctgggcgtcgtg

SEQ ID NO: 1505769 - DNA, 15 bp, Homo sapiens
ttagctgggcgtcgt

SEQ ID NO: 1505770 - DNA, 15 bp, Homo sapiens
attagctgggcgtcg

SEQ ID NO: 1505771 - DNA, 15 bp, Homo sapiens
aattagctgggcgtc

SEQ ID NO: 1505772 - DNA, 15 bp, Homo sapiens
aacaaaaattagctg

SEQ ID NO: 1505773 - DNA, 15 bp, Homo sapiens
caacaaaaattagct

SEQ ID NO: 1505774 - DNA, 15 bp, Homo sapiens
acaacaaaaattagc

SEQ ID NO: 1505775 - DNA, 15 bp, Homo sapiens
tacaacaaaaattag

SEQ ID NO: 1505776 - DNA, 15 bp, Homo sapiens
atacaacaaaaatta

SEQ ID NO: 1505777 - DNA, 15 bp, Homo sapiens
aatacaacaaaaatt

SEQ ID NO: 1505778 - DNA, 15 bp, Homo sapiens
aaatacaacaaaaat

SEQ ID NO: 1505779 - DNA, 15 bp, Homo sapiens
aaaatacaacaaaaa

SEQ ID NO: 1505780 - DNA, 15 bp, Homo sapiens
aaaaatacaacaaaa

SEQ ID NO: 1505781 - DNA, 15 bp, Homo sapiens
taaaaatacaacaaa

SEQ ID NO: 1505782 - DNA, 15 bp, Homo sapiens
ctaaaaatacaacaa

SEQ ID NO: 1505783 - DNA, 15 bp, Homo sapiens
tacggtgaaaccctg

SEQ ID NO: 1505784 - DNA, 15 bp, Homo sapiens
atacggtgaaaccct

SEQ ID NO: 1505785 - DNA, 15 bp, Homo sapiens
aatacggtgaaaccc

SEQ ID NO: 1505786 - DNA, 15 bp, Homo sapiens
taatacggtgaaacc

SEQ ID NO: 1505787 - DNA, 15 bp, Homo sapiens
ctaatacggtgaaac

SEQ ID NO: 1505788 - DNA, 15 bp, Homo sapiens
actaatacggtgaaa

SEQ ID NO: 1505789 - DNA, 15 bp, Homo sapiens
gactaatacggtgaa

SEQ ID NO: 1505790 - DNA, 15 bp, Homo sapiens
tgactaatacggtga

SEQ ID NO: 1505791 - DNA, 15 bp, Homo sapiens
ctgactaatacggtg

SEQ ID NO: 1505792 - DNA, 15 bp, Homo sapiens
cctgactaatacggt

SEQ ID NO: 1505793 - DNA, 15 bp, Homo sapiens
tcctgactaatacgg

SEQ ID NO: 1505794 - DNA, 15 bp, Homo sapiens
atcctgactaatacg

SEQ ID NO: 1505795 - DNA, 15 bp, Homo sapiens
catcctgactaatac

SEQ ID NO: 1505796 - DNA, 15 bp, Homo sapiens
tcatcctgactaata

SEQ ID NO: 1505797 - DNA, 15 bp, Homo sapiens
atcatcctgactaat

SEQ ID NO: 1505798 - DNA, 15 bp, Homo sapiens
gatcatcctgactaa

SEQ ID NO: 1505799 - DNA, 15 bp, Homo sapiens
agatcatcctgacta

SEQ ID NO: 1505800 - DNA, 15 bp, Homo sapiens
aagatcatcctgact

SEQ ID NO: 1505801 - DNA, 15 bp, Homo sapiens
caagatcatcctgac

SEQ ID NO: 1505802 - DNA, 15 bp, Homo sapiens
tcaagatcatcctga

SEQ ID NO: 1505803 - DNA, 15 bp, Homo sapiens
atcaagatcatcctg

SEQ ID NO: 1505804 - DNA, 15 bp, Homo sapiens
gatcaagatcatcct

SEQ ID NO: 1505805 - DNA, 15 bp, Homo sapiens
agatcaagatcatcc

SEQ ID NO: 1505806 - DNA, 15 bp, Homo sapiens
gagatcaagatcatc

SEQ ID NO: 1505807 - DNA, 15 bp, Homo sapiens
ggagatcaagatcat

SEQ ID NO: 1505808 - DNA, 15 bp, Homo sapiens
aggagatcaagatca

SEQ ID NO: 1505809 - DNA, 15 bp, Homo sapiens
caggagatcaagatc

SEQ ID NO: 1505810 - DNA, 15 bp, Homo sapiens
tcaggagatcaagat

SEQ ID NO: 1505811 - DNA, 15 bp, Homo sapiens
cgcagtggctcaagc

SEQ ID NO: 1505812 - DNA, 15 bp, Homo sapiens
gcgcagtggctcaag

SEQ ID NO: 1505813 - DNA, 15 bp, Homo sapiens
ggcgcagtggctcaa

SEQ ID NO: 1505814 - DNA, 15 bp, Homo sapiens
aggccaggcgcagtg

SEQ ID NO: 1505815 - DNA, 15 bp, Homo sapiens
aaggccaggcgcagt

SEQ ID NO: 1505816 - DNA, 15 bp, Homo sapiens
caaggccaggcgcag

SEQ ID NO: 1505817 - DNA, 15 bp, Homo sapiens
acaaggccaggcgca

SEQ ID NO: 1505818 - DNA, 15 bp, Homo sapiens
aacaaggccaggcgc

SEQ ID NO: 1505819 - DNA, 15 bp, Homo sapiens
gaacaaggccaggcg

SEQ ID NO: 1505820 - DNA, 15 bp, Homo sapiens
agaacaaggccaggc

SEQ ID NO: 1505821 - DNA, 15 bp, Homo sapiens
aagaacaaggccagg

SEQ ID NO: 1505822 - DNA, 15 bp, Homo sapiens
caagaacaaggccag

SEQ ID NO: 1505823 - DNA, 15 bp, Homo sapiens
acaagaacaaggcca

SEQ ID NO: 1505824 - DNA, 15 bp, Homo sapiens
aacaagaacaaggcc

SEQ ID NO: 1505825 - DNA, 15 bp, Homo sapiens
aaacaagaacaaggc

SEQ ID NO: 1505826 - DNA, 15 bp, Homo sapiens
aaaacaagaacaagg

SEQ ID NO: 1505827 - DNA, 15 bp, Homo sapiens
tgaaaaacaagaaca

SEQ ID NO: 1505828 - DNA, 15 bp, Homo sapiens
ttgaaaaacaagaac

SEQ ID NO: 1505829 - DNA, 15 bp, Homo sapiens
tttgaaaaacaagaa

SEQ ID NO: 1505830 - DNA, 15 bp, Homo sapiens
ttttgaaaaacaaga

SEQ ID NO: 1505831 - DNA, 15 bp, Homo sapiens
tttttgaaaaacaag

SEQ ID NO: 1505832 - DNA, 15 bp, Homo sapiens
atttttgaaaaacaa

SEQ ID NO: 1505833 - DNA, 15 bp, Homo sapiens
aatttttgaaaaaca

SEQ ID NO: 1505834 - DNA, 15 bp, Homo sapiens
aaatttttgaaaaac

SEQ ID NO: 1505835 - DNA, 15 bp, Homo sapiens
gaaatttttgaaaaa

SEQ ID NO: 1505836 - DNA, 15 bp, Homo sapiens
agaaatttttgaaaa

SEQ ID NO: 1505837 - DNA, 15 bp, Homo sapiens
aagaaatttttgaaa

SEQ ID NO: 1505838 - DNA, 15 bp, Homo sapiens
aaagaaatttttgaa

SEQ ID NO: 1505839 - DNA, 15 bp, Homo sapiens
caaagaaatttttga

SEQ ID NO: 1505840 - DNA, 15 bp, Homo sapiens
ccaaagaaatttttg

SEQ ID NO: 1505841 - DNA, 15 bp, Homo sapiens
accaaagaaattttt

SEQ ID NO: 1505842 - DNA, 15 bp, Homo sapiens
taccaaagaaatttt

SEQ ID NO: 1505843 - DNA, 15 bp, Homo sapiens
ataccaaagaaattt

SEQ ID NO: 1505844 - DNA, 15 bp, Homo sapiens
aataccaaagaaatt

SEQ ID NO: 1505845 - DNA, 15 bp, Homo sapiens
gaataccaaagaaat

SEQ ID NO: 1505846 - DNA, 15 bp, Homo sapiens
agaataccaaagaaa

SEQ ID NO: 1505847 - DNA, 15 bp, Homo sapiens
gagaataccaaagaa

SEQ ID NO: 1505848 - DNA, 15 bp, Homo sapiens
tgagaataccaaaga

SEQ ID NO: 1505849 - DNA, 15 bp, Homo sapiens
gtgagaataccaaag

SEQ ID NO: 1505850 - DNA, 15 bp, Homo sapiens
tgtgagaataccaaa

SEQ ID NO: 1505851 - DNA, 15 bp, Homo sapiens
cttgtgagaatacca

SEQ ID NO: 1505852 - DNA, 15 bp, Homo sapiens
acttgtgagaatacc

SEQ ID NO: 1505853 - DNA, 15 bp, Homo sapiens
aacttgtgagaatac

SEQ ID NO: 1505854 - DNA, 15 bp, Homo sapiens
aaacttgtgagaata

SEQ ID NO: 1505855 - DNA, 15 bp, Homo sapiens
taaacttgtgagaat

SEQ ID NO: 1505856 - DNA, 15 bp, Homo sapiens
ataaacttgtgagaa

SEQ ID NO: 1505857 - DNA, 15 bp, Homo sapiens
aataaacttgtgaga

SEQ ID NO: 1505858 - DNA, 15 bp, Homo sapiens
gaataaacttgtgag

SEQ ID NO: 1505859 - DNA, 15 bp, Homo sapiens
agaataaacttgtga

SEQ ID NO: 1505860 - DNA, 15 bp, Homo sapiens
aagaataaacttgtg

SEQ ID NO: 1505861 - DNA, 15 bp, Homo sapiens
gaagaataaacttgt

SEQ ID NO: 1505862 - DNA, 15 bp, Homo sapiens
ggaagaataaacttg

SEQ ID NO: 1505863 - DNA, 15 bp, Homo sapiens
tggaagaataaactt

SEQ ID NO: 1505864 - DNA, 15 bp, Homo sapiens
ttggaagaataaact

SEQ ID NO: 1505865 - DNA, 15 bp, Homo sapiens
tttggaagaataaac

SEQ ID NO: 1505866 - DNA, 15 bp, Homo sapiens
atttggaagaataaa

SEQ ID NO: 1505867 - DNA, 15 bp, Homo sapiens
aatttggaagaataa

SEQ ID NO: 1505868 - DNA, 15 bp, Homo sapiens
taatttggaagaata

SEQ ID NO: 1505869 - DNA, 15 bp, Homo sapiens
ttaatttggaagaat

SEQ ID NO: 1505870 - DNA, 15 bp, Homo sapiens
gttaatttggaagaa

SEQ ID NO: 1505871 - DNA, 15 bp, Homo sapiens
agttaatttggaaga

SEQ ID NO: 1505872 - DNA, 15 bp, Homo sapiens
aagttaatttggaag

SEQ ID NO: 1505873 - DNA, 15 bp, Homo sapiens
gaagttaatttggaa

SEQ ID NO: 1505874 - DNA, 15 bp, Homo sapiens
tgaagttaatttgga

SEQ ID NO: 1505875 - DNA, 15 bp, Homo sapiens
ctgaagttaatttgg

SEQ ID NO: 1505876 - DNA, 15 bp, Homo sapiens
tctgaagttaatttg

SEQ ID NO: 1505877 - DNA, 15 bp, Homo sapiens
ttctgaagttaattt

SEQ ID NO: 1505878 - DNA, 15 bp, Homo sapiens
attctgaagttaatt

SEQ ID NO: 1505879 - DNA, 15 bp, Homo sapiens
gattctgaagttaat

SEQ ID NO: 1505880 - DNA, 15 bp, Homo sapiens
tgattctgaagttaa

SEQ ID NO: 1505881 - DNA, 15 bp, Homo sapiens
ctgattctgaagtta

SEQ ID NO: 1505882 - DNA, 15 bp, Homo sapiens
gctgattctgaagtt

SEQ ID NO: 1505883 - DNA, 15 bp, Homo sapiens
agctgattctgaagt

SEQ ID NO: 1505884 - DNA, 15 bp, Homo sapiens
aagctgattctgaag

SEQ ID NO: 1505885 - DNA, 15 bp, Homo sapiens
taagctgattctgaa

SEQ ID NO: 1505886 - DNA, 15 bp, Homo sapiens
gtaagctgattctga

SEQ ID NO: 1505887 - DNA, 15 bp, Homo sapiens
ggtaagctgattctg

SEQ ID NO: 1505888 - DNA, 15 bp, Homo sapiens
tggtaagctgattct

SEQ ID NO: 1505889 - DNA, 15 bp, Homo sapiens
atggtaagctgattc

SEQ ID NO: 1505890 - DNA, 15 bp, Homo sapiens
aatggtaagctgatt

SEQ ID NO: 1505891 - DNA, 15 bp, Homo sapiens
aaatggtaagctgat

SEQ ID NO: 1505892 - DNA, 15 bp, Homo sapiens
aaaatggtaagctga

SEQ ID NO: 1505893 - DNA, 15 bp, Homo sapiens
taaaatggtaagctg

SEQ ID NO: 1505894 - DNA, 15 bp, Homo sapiens
ttaaaatggtaagct

SEQ ID NO: 1505895 - DNA, 15 bp, Homo sapiens
tttaaaatggtaagc

SEQ ID NO: 1505896 - DNA, 15 bp, Homo sapiens
atttaaaatggtaag

SEQ ID NO: 1505897 - DNA, 15 bp, Homo sapiens
tatttaaaatggtaa

SEQ ID NO: 1505898 - DNA, 15 bp, Homo sapiens
ttatttaaaatggta

SEQ ID NO: 1505899 - DNA, 15 bp, Homo sapiens
cttatttaaaatggt

SEQ ID NO: 1505900 - DNA, 15 bp, Homo sapiens
gcttatttaaaatgg

SEQ ID NO: 1505901 - DNA, 15 bp, Homo sapiens
tgcttatttaaaatg

SEQ ID NO: 1505902 - DNA, 15 bp, Homo sapiens
gtgcttatttaaaat

SEQ ID NO: 1505903 - DNA, 15 bp, Homo sapiens
ggtgcttatttaaaa

SEQ ID NO: 1505904 - DNA, 15 bp, Homo sapiens
gggtgcttatttaaa

SEQ ID NO: 1505905 - DNA, 15 bp, Homo sapiens
ggggtgcttatttaa

SEQ ID NO: 1505906 - DNA, 15 bp, Homo sapiens
gggggtgcttattta

SEQ ID NO: 1505907 - DNA, 15 bp, Homo sapiens
ggggggtgcttattt

SEQ ID NO: 1505908 - DNA, 15 bp, Homo sapiens
aggggggtgcttatt

SEQ ID NO: 1505909 - DNA, 15 bp, Homo sapiens
aaggggggtgcttat

SEQ ID NO: 1505910 - DNA, 15 bp, Homo sapiens
gaaggggggtgctta

SEQ ID NO: 1505911 - DNA, 15 bp, Homo sapiens
agaaggggggtgctt

SEQ ID NO: 1505912 - DNA, 15 bp, Homo sapiens
tagaaggggggtgct

SEQ ID NO: 1505913 - DNA, 15 bp, Homo sapiens
ttagaaggggggtgc

SEQ ID NO: 1505914 - DNA, 15 bp, Homo sapiens
tttagaaggggggtg

SEQ ID NO: 1505915 - DNA, 15 bp, Homo sapiens
atttagaaggggggt

SEQ ID NO: 1505916 - DNA, 15 bp, Homo sapiens
gatttagaagggggg

SEQ ID NO: 1505917 - DNA, 15 bp, Homo sapiens
agatttagaaggggg

SEQ ID NO: 1505918 - DNA, 15 bp, Homo sapiens
tagatttagaagggg

SEQ ID NO: 1505919 - DNA, 15 bp, Homo sapiens
atagatttagaaggg

SEQ ID NO: 1505920 - DNA, 15 bp, Homo sapiens
aatagatttagaagg

SEQ ID NO: 1505921 - DNA, 15 bp, Homo sapiens
taatagatttagaag

SEQ ID NO: 1505922 - DNA, 15 bp, Homo sapiens
ataatagatttagaa

SEQ ID NO: 1505923 - DNA, 15 bp, Homo sapiens
tataatagatttaga

SEQ ID NO: 1505924 - DNA, 15 bp, Homo sapiens
ttataatagatttag

SEQ ID NO: 1505925 - DNA, 15 bp, Homo sapiens
gttataatagattta

SEQ ID NO: 1505926 - DNA, 15 bp, Homo sapiens
tgttataatagattt

SEQ ID NO: 1505927 - DNA, 15 bp, Homo sapiens
atgttataatagatt

SEQ ID NO: 1505928 - DNA, 15 bp, Homo sapiens
gatgttataatagat

SEQ ID NO: 1505929 - DNA, 15 bp, Homo sapiens
agatgttataataga

SEQ ID NO: 1505930 - DNA, 15 bp, Homo sapiens
gagatgttataatag

SEQ ID NO: 1505931 - DNA, 15 bp, Homo sapiens
tgagatgttataata

SEQ ID NO: 1505932 - DNA, 15 bp, Homo sapiens
gtgagatgttataat

SEQ ID NO: 1505933 - DNA, 15 bp, Homo sapiens
agtgagatgttataa

SEQ ID NO: 1505934 - DNA, 15 bp, Homo sapiens
tagtgagatgttata

SEQ ID NO: 1505935 - DNA, 15 bp, Homo sapiens
gtagtgagatgttat

SEQ ID NO: 1505936 - DNA, 15 bp, Homo sapiens
agtagtgagatgtta

SEQ ID NO: 1505937 - DNA, 15 bp, Homo sapiens
aagtagtgagatgtt

SEQ ID NO: 1505938 - DNA, 15 bp, Homo sapiens
aaagtagtgagatgt

SEQ ID NO: 1505939 - DNA, 15 bp, Homo sapiens
gaaagtagtgagatg

SEQ ID NO: 1505940 - DNA, 15 bp, Homo sapiens
agaaagtagtgagat

SEQ ID NO: 1505941 - DNA, 15 bp, Homo sapiens
gagaaagtagtgaga

SEQ ID NO: 1505942 - DNA, 15 bp, Homo sapiens
agagaaagtagtgag

SEQ ID NO: 1505943 - DNA, 15 bp, Homo sapiens
aagagaaagtagtga

SEQ ID NO: 1505944 - DNA, 15 bp, Homo sapiens
gaagagaaagtagtg

SEQ ID NO: 1505945 - DNA, 15 bp, Homo sapiens
agaagagaaagtagt

SEQ ID NO: 1505946 - DNA, 15 bp, Homo sapiens
tagaagagaaagtag

SEQ ID NO: 1505947 - DNA, 15 bp, Homo sapiens
atagaagagaaagta

SEQ ID NO: 1505948 - DNA, 15 bp, Homo sapiens
aatagaagagaaagt

SEQ ID NO: 1505949 - DNA, 15 bp, Homo sapiens
gaatagaagagaaag

SEQ ID NO: 1505950 - DNA, 15 bp, Homo sapiens
tgaatagaagagaaa

SEQ ID NO: 1505951 - DNA, 15 bp, Homo sapiens
atgaatagaagagaa

SEQ ID NO: 1505952 - DNA, 15 bp, Homo sapiens
tatgaatagaagaga

SEQ ID NO: 1505953 - DNA, 15 bp, Homo sapiens
atatgaatagaagag

SEQ ID NO: 1505954 - DNA, 15 bp, Homo sapiens
aatatgaatagaaga

SEQ ID NO: 1505955 - DNA, 15 bp, Homo sapiens
taatatgaatagaag

SEQ ID NO: 1505956 - DNA, 15 bp, Homo sapiens
ctaatatgaatagaa

SEQ ID NO: 1505957 - DNA, 15 bp, Homo sapiens
gctaatatgaataga

SEQ ID NO: 1505958 - DNA, 15 bp, Homo sapiens
agctaatatgaatag

SEQ ID NO: 1505959 - DNA, 15 bp, Homo sapiens
aagctaatatgaata

SEQ ID NO: 1505960 - DNA, 15 bp, Homo sapiens
taagctaatatgaat

SEQ ID NO: 1505961 - DNA, 15 bp, Homo sapiens
ttaagctaatatgaa

SEQ ID NO: 1505962 - DNA, 15 bp, Homo sapiens
gttaagctaatatga

SEQ ID NO: 1505963 - DNA, 15 bp, Homo sapiens
agttaagctaatatg

SEQ ID NO: 1505964 - DNA, 15 bp, Homo sapiens
aagttaagctaatat

SEQ ID NO: 1505965 - DNA, 15 bp, Homo sapiens
taagttaagctaata

SEQ ID NO: 1505966 - DNA, 15 bp, Homo sapiens
ttaagttaagctaat

SEQ ID NO: 1505967 - DNA, 15 bp, Homo sapiens
cttaagttaagctaa

SEQ ID NO: 1505968 - DNA, 15 bp, Homo sapiens
gcttaagttaagcta

SEQ ID NO: 1505969 - DNA, 15 bp, Homo sapiens
agcttaagttaagct

SEQ ID NO: 1505970 - DNA, 15 bp, Homo sapiens
tagcttaagttaagc

SEQ ID NO: 1505971 - DNA, 15 bp, Homo sapiens
gtagcttaagttaag

SEQ ID NO: 1505972 - DNA, 15 bp, Homo sapiens
ggtagcttaagttaa

SEQ ID NO: 1505973 - DNA, 15 bp, Homo sapiens
tggtagcttaagtta

SEQ ID NO: 1505974 - DNA, 15 bp, Homo sapiens
atggtagcttaagtt

SEQ ID NO: 1505975 - DNA, 15 bp, Homo sapiens
gatggtagcttaagt

SEQ ID NO: 1505976 - DNA, 15 bp, Homo sapiens
ggatggtagcttaag

SEQ ID NO: 1505977 - DNA, 15 bp, Homo sapiens
aggatggtagcttaa

SEQ ID NO: 1505978 - DNA, 15 bp, Homo sapiens
gaggatggtagctta

SEQ ID NO: 1505979 - DNA, 15 bp, Homo sapiens
agaggatggtagctt

SEQ ID NO: 1505980 - DNA, 15 bp, Homo sapiens
gagaggatggtagct

SEQ ID NO: 1505981 - DNA, 15 bp, Homo sapiens
agagaggatggtagc

SEQ ID NO: 1505982 - DNA, 15 bp, Homo sapiens
aagagaggatggtag

SEQ ID NO: 1505983 - DNA, 15 bp, Homo sapiens
caagagaggatggta

SEQ ID NO: 1505984 - DNA, 15 bp, Homo sapiens
tcaagagaggatggt

SEQ ID NO: 1505985 - DNA, 15 bp, Homo sapiens
ctcaagagaggatgg

SEQ ID NO: 1505986 - DNA, 15 bp, Homo sapiens
actcaagagaggatg

SEQ ID NO: 1505987 - DNA, 15 bp, Homo sapiens
tactcaagagaggat

SEQ ID NO: 1505988 - DNA, 15 bp, Homo sapiens
ttactcaagagagga

SEQ ID NO: 1505989 - DNA, 15 bp, Homo sapiens
cttactcaagagagg

SEQ ID NO: 1505990 - DNA, 15 bp, Homo sapiens
tcttactcaagagag

SEQ ID NO: 1505991 - DNA, 15 bp, Homo sapiens
gtcttactcaagaga

SEQ ID NO: 1505992 - DNA, 15 bp, Homo sapiens
agtcttactcaagag

SEQ ID NO: 1505993 - DNA, 15 bp, Homo sapiens
cagtcttactcaaga

SEQ ID NO: 1505994 - DNA, 15 bp, Homo sapiens
acagtcttactcaag

SEQ ID NO: 1505995 - DNA, 15 bp, Homo sapiens
aacagtcttactcaa

SEQ ID NO: 1505996 - DNA, 15 bp, Homo sapiens
aaacagtcttactca

SEQ ID NO: 1505997 - DNA, 15 bp, Homo sapiens
aaaacagtcttactc

SEQ ID NO: 1505998 - DNA, 15 bp, Homo sapiens
gaaaacagtcttact

SEQ ID NO: 1505999 - DNA, 15 bp, Homo sapiens
agaaaacagtcttac

SEQ ID NO: 1506000 - DNA, 15 bp, Homo sapiens
tagaaaacagtctta

SEQ ID NO: 1506001 - DNA, 15 bp, Homo sapiens
ttagaaaacagtctt

SEQ ID NO: 1506002 - DNA, 15 bp, Homo sapiens
gttagaaaacagtct

SEQ ID NO: 1506003 - DNA, 15 bp, Homo sapiens
tgttagaaaacagtc

SEQ ID NO: 1506004 - DNA, 15 bp, Homo sapiens
atgttagaaaacagt

SEQ ID NO: 1506005 - DNA, 15 bp, Homo sapiens
tatgttagaaaacag

SEQ ID NO: 1506006 - DNA, 15 bp, Homo sapiens
gtatgttagaaaaca

SEQ ID NO: 1506007 - DNA, 15 bp, Homo sapiens
tgtatgttagaaaac

SEQ ID NO: 1506008 - DNA, 15 bp, Homo sapiens
ctgtatgttagaaaa

SEQ ID NO: 1506009 - DNA, 15 bp, Homo sapiens
gctgtatgttagaaa

SEQ ID NO: 1506010 - DNA, 15 bp, Homo sapiens
tgctgtatgttagaa

SEQ ID NO: 1506011 - DNA, 15 bp, Homo sapiens
ttgctgtatgttaga

SEQ ID NO: 1506012 - DNA, 15 bp, Homo sapiens
gttgctgtatgttag

SEQ ID NO: 1506013 - DNA, 15 bp, Homo sapiens
tgttgctgtatgtta

SEQ ID NO: 1506014 - DNA, 15 bp, Homo sapiens
ttgttgctgtatgtt

SEQ ID NO: 1506015 - DNA, 15 bp, Homo sapiens
cttgttgctgtatgt

SEQ ID NO: 1506016 - DNA, 15 bp, Homo sapiens
tcttgttgctgtatg

SEQ ID NO: 1506017 - DNA, 15 bp, Homo sapiens
ctcttgttgctgtat

SEQ ID NO: 1506018 - DNA, 15 bp, Homo sapiens
cctcttgttgctgta

SEQ ID NO: 1506019 - DNA, 15 bp, Homo sapiens
ccctcttgttgctgt

SEQ ID NO: 1506020 - DNA, 15 bp, Homo sapiens
accctcttgttgctg

SEQ ID NO: 1506021 - DNA, 15 bp, Homo sapiens
aaccctcttgttgct

SEQ ID NO: 1506022 - DNA, 15 bp, Homo sapiens
gaaccctcttgttgc

SEQ ID NO: 1506023 - DNA, 15 bp, Homo sapiens
agaaccctcttgttg

SEQ ID NO: 1506024 - DNA, 15 bp, Homo sapiens
aagaaccctcttgtt

SEQ ID NO: 1506025 - DNA, 15 bp, Homo sapiens
aaagaaccctcttgt

SEQ ID NO: 1506026 - DNA, 15 bp, Homo sapiens
aaaagaaccctcttg

SEQ ID NO: 1506027 - DNA, 15 bp, Homo sapiens
aaaaagaaccctctt

SEQ ID NO: 1506028 - DNA, 15 bp, Homo sapiens
taaaaagaaccctct

SEQ ID NO: 1506029 - DNA, 15 bp, Homo sapiens
ttaaaaagaaccctc

SEQ ID NO: 1506030 - DNA, 15 bp, Homo sapiens
tttaaaaagaaccct

SEQ ID NO: 1506031 - DNA, 15 bp, Homo sapiens
ttttaaaaagaaccc

SEQ ID NO: 1506032 - DNA, 15 bp, Homo sapiens
gttttaaaaagaacc

SEQ ID NO: 1506033 - DNA, 15 bp, Homo sapiens
tgttttaaaaagaac

SEQ ID NO: 1506034 - DNA, 15 bp, Homo sapiens
atgttttaaaaagaa

SEQ ID NO: 1506035 - DNA, 15 bp, Homo sapiens
tatgttttaaaaaga

SEQ ID NO: 1506036 - DNA, 15 bp, Homo sapiens
ttatgttttaaaaag

SEQ ID NO: 1506037 - DNA, 15 bp, Homo sapiens
tttatgttttaaaaa

SEQ ID NO: 1506038 - DNA, 15 bp, Homo sapiens
atttatgttttaaaa

SEQ ID NO: 1506039 - DNA, 15 bp, Homo sapiens
gatttatgttttaaa

SEQ ID NO: 1506040 - DNA, 15 bp, Homo sapiens
tgatttatgttttaa

SEQ ID NO: 1506041 - DNA, 15 bp, Homo sapiens
ctgatttatgtttta

SEQ ID NO: 1506042 - DNA, 15 bp, Homo sapiens
tctgatttatgtttt

SEQ ID NO: 1506043 - DNA, 15 bp, Homo sapiens
atctgatttatgttt

SEQ ID NO: 1506044 - DNA, 15 bp, Homo sapiens
aatctgatttatgtt

SEQ ID NO: 1506045 - DNA, 15 bp, Homo sapiens
taatctgatttatgt

SEQ ID NO: 1506046 - DNA, 15 bp, Homo sapiens
ataatctgatttatg

SEQ ID NO: 1506047 - DNA, 15 bp, Homo sapiens
cataatctgatttat

SEQ ID NO: 1506048 - DNA, 15 bp, Homo sapiens
acataatctgattta

SEQ ID NO: 1506049 - DNA, 15 bp, Homo sapiens
gacataatctgattt

SEQ ID NO: 1506050 - DNA, 15 bp, Homo sapiens
tgacataatctgatt

SEQ ID NO: 1506051 - DNA, 15 bp, Homo sapiens
atgacataatctgat

SEQ ID NO: 1506052 - DNA, 15 bp, Homo sapiens
aatgacataatctga

SEQ ID NO: 1506053 - DNA, 15 bp, Homo sapiens
gaatgacataatctg

SEQ ID NO: 1506054 - DNA, 15 bp, Homo sapiens
ggaatgacataatct

SEQ ID NO: 1506055 - DNA, 15 bp, Homo sapiens
aggaatgacataatc

SEQ ID NO: 1506056 - DNA, 15 bp, Homo sapiens
aaggaatgacataat

SEQ ID NO: 1506057 - DNA, 15 bp, Homo sapiens
aaaggaatgacataa

SEQ ID NO: 1506058 - DNA, 15 bp, Homo sapiens
caaaggaatgacata

SEQ ID NO: 1506059 - DNA, 15 bp, Homo sapiens
gcaaaggaatgacat

SEQ ID NO: 1506060 - DNA, 15 bp, Homo sapiens
agcaaaggaatgaca

SEQ ID NO: 1506061 - DNA, 15 bp, Homo sapiens
aagcaaaggaatgac

SEQ ID NO: 1506062 - DNA, 15 bp, Homo sapiens
taagcaaaggaatga

SEQ ID NO: 1506063 - DNA, 15 bp, Homo sapiens
ttaagcaaaggaatg

SEQ ID NO: 1506064 - DNA, 15 bp, Homo sapiens
tttaagcaaaggaat

SEQ ID NO: 1506065 - DNA, 15 bp, Homo sapiens
atttaagcaaaggaa

SEQ ID NO: 1506066 - DNA, 15 bp, Homo sapiens
aatttaagcaaagga

SEQ ID NO: 1506067 - DNA, 15 bp, Homo sapiens
gaatttaagcaaagg

SEQ ID NO: 1506068 - DNA, 15 bp, Homo sapiens
cgaatttaagcaaag

SEQ ID NO: 1506069 - DNA, 15 bp, Homo sapiens
acgaatttaagcaaa

SEQ ID NO: 1506070 - DNA, 15 bp, Homo sapiens
aacgaatttaagcaa

SEQ ID NO: 1506071 - DNA, 15 bp, Homo sapiens
gaacgaatttaagca

SEQ ID NO: 1506072 - DNA, 15 bp, Homo sapiens
tgaacgaatttaagc

SEQ ID NO: 1506073 - DNA, 15 bp, Homo sapiens
ctgaacgaatttaag

SEQ ID NO: 1506074 - DNA, 15 bp, Homo sapiens
actgaacgaatttaa

SEQ ID NO: 1506075 - DNA, 15 bp, Homo sapiens
cactgaacgaattta

SEQ ID NO: 1506076 - DNA, 15 bp, Homo sapiens
gcactgaacgaattt

SEQ ID NO: 1506077 - DNA, 15 bp, Homo sapiens
ggcactgaacgaatt

SEQ ID NO: 1506078 - DNA, 15 bp, Homo sapiens
aggcactgaacgaat

SEQ ID NO: 1506079 - DNA, 15 bp, Homo sapiens
aaggcactgaacgaa

SEQ ID NO: 1506080 - DNA, 15 bp, Homo sapiens
aaaggcactgaacga

SEQ ID NO: 1506081 - DNA, 15 bp, Homo sapiens
aaaaggcactgaacg

SEQ ID NO: 1506082 - DNA, 15 bp, Homo sapiens
aaaaaggcactgaac

SEQ ID NO: 1506083 - DNA, 15 bp, Homo sapiens
gaaaaaggcactgaa

SEQ ID NO: 1506084 - DNA, 15 bp, Homo sapiens
ggaaaaaggcactga

SEQ ID NO: 1506085 - DNA, 15 bp, Homo sapiens
gggaaaaaggcactg

SEQ ID NO: 1506086 - DNA, 15 bp, Homo sapiens
ggggaaaaaggcact

SEQ ID NO: 1506087 - DNA, 15 bp, Homo sapiens
aggggaaaaaggcac

SEQ ID NO: 1506088 - DNA, 15 bp, Homo sapiens
caggggaaaaaggca

SEQ ID NO: 1506089 - DNA, 15 bp, Homo sapiens
acaggggaaaaaggc

SEQ ID NO: 1506090 - DNA, 15 bp, Homo sapiens
gacaggggaaaaagg

SEQ ID NO: 1506091 - DNA, 15 bp, Homo sapiens
agacaggggaaaaag

SEQ ID NO: 1506092 - DNA, 15 bp, Homo sapiens
aagacaggggaaaaa

SEQ ID NO: 1506093 - DNA, 15 bp, Homo sapiens
aaagacaggggaaaa

SEQ ID NO: 1506094 - DNA, 15 bp, Homo sapiens
aaaagacaggggaaa

SEQ ID NO: 1506095 - DNA, 15 bp, Homo sapiens
caaaagacaggggaa

SEQ ID NO: 1506096 - DNA, 15 bp, Homo sapiens
ccaaaagacagggga

SEQ ID NO: 1506097 - DNA, 15 bp, Homo sapiens
accaaaagacagggg

SEQ ID NO: 1506098 - DNA, 15 bp, Homo sapiens
aaccaaaagacaggg

SEQ ID NO: 1506099 - DNA, 15 bp, Homo sapiens
taaccaaaagacagg

SEQ ID NO: 1506100 - DNA, 15 bp, Homo sapiens
ataaccaaaagacag

SEQ ID NO: 1506101 - DNA, 15 bp, Homo sapiens
gataaccaaaagaca

SEQ ID NO: 1506102 - DNA, 15 bp, Homo sapiens
agataaccaaaagac

SEQ ID NO: 1506103 - DNA, 15 bp, Homo sapiens
tagataaccaaaaga

SEQ ID NO: 1506104 - DNA, 15 bp, Homo sapiens
atagataaccaaaag

SEQ ID NO: 1506105 - DNA, 15 bp, Homo sapiens
aatagataaccaaaa

SEQ ID NO: 1506106 - DNA, 15 bp, Homo sapiens
caatagataaccaaa

SEQ ID NO: 1506107 - DNA, 15 bp, Homo sapiens
gcaatagataaccaa

SEQ ID NO: 1506108 - DNA, 15 bp, Homo sapiens
agcaatagataacca

SEQ ID NO: 1506109 - DNA, 15 bp, Homo sapiens
cagcaatagataacc

SEQ ID NO: 1506110 - DNA, 15 bp, Homo sapiens
acagcaatagataac

SEQ ID NO: 1506111 - DNA, 15 bp, Homo sapiens
tacagcaatagataa

SEQ ID NO: 1506112 - DNA, 15 bp, Homo sapiens
atacagcaatagata

SEQ ID NO: 1506113 - DNA, 15 bp, Homo sapiens
tatacagcaatagat

SEQ ID NO: 1506114 - DNA, 15 bp, Homo sapiens
ttatacagcaataga

SEQ ID NO: 1506115 - DNA, 15 bp, Homo sapiens
attatacagcaatag

SEQ ID NO: 1506116 - DNA, 15 bp, Homo sapiens
tattatacagcaata

SEQ ID NO: 1506117 - DNA, 15 bp, Homo sapiens
ttattatacagcaat

SEQ ID NO: 1506118 - DNA, 15 bp, Homo sapiens
cttattatacagcaa

SEQ ID NO: 1506119 - DNA, 15 bp, Homo sapiens
gcttattatacagca

SEQ ID NO: 1506120 - DNA, 15 bp, Homo sapiens
agcttattatacagc

SEQ ID NO: 1506121 - DNA, 15 bp, Homo sapiens
tagcttattatacag

SEQ ID NO: 1506122 - DNA, 15 bp, Homo sapiens
gtagcttattataca

SEQ ID NO: 1506123 - DNA, 15 bp, Homo sapiens
agtagcttattatac

SEQ ID NO: 1506124 - DNA, 15 bp, Homo sapiens
gagtagcttattata

SEQ ID NO: 1506125 - DNA, 15 bp, Homo sapiens
ggagtagcttattat

SEQ ID NO: 1506126 - DNA, 15 bp, Homo sapiens
tggagtagcttatta

SEQ ID NO: 1506127 - DNA, 15 bp, Homo sapiens
ttggagtagcttatt

SEQ ID NO: 1506128 - DNA, 15 bp, Homo sapiens
tttggagtagcttat

SEQ ID NO: 1506129 - DNA, 15 bp, Homo sapiens
ctttggagtagctta

SEQ ID NO: 1506130 - DNA, 15 bp, Homo sapiens
gctttggagtagctt

SEQ ID NO: 1506131 - DNA, 15 bp, Homo sapiens
ggctttggagtagct

SEQ ID NO: 1506132 - DNA, 15 bp, Homo sapiens
aggctttggagtagc

SEQ ID NO: 1506133 - DNA, 15 bp, Homo sapiens
aaggctttggagtag

SEQ ID NO: 1506134 - DNA, 15 bp, Homo sapiens
caaggctttggagta

SEQ ID NO: 1506135 - DNA, 15 bp, Homo sapiens
acaaggctttggagt

SEQ ID NO: 1506136 - DNA, 15 bp, Homo sapiens
tacaaggctttggag

SEQ ID NO: 1506137 - DNA, 15 bp, Homo sapiens
ctacaaggctttgga

SEQ ID NO: 1506138 - DNA, 15 bp, Homo sapiens
gctacaaggctttgg

SEQ ID NO: 1506139 - DNA, 15 bp, Homo sapiens
ggctacaaggctttg

SEQ ID NO: 1506140 - DNA, 15 bp, Homo sapiens
aggctacaaggcttt

SEQ ID NO: 1506141 - DNA, 15 bp, Homo sapiens
taggctacaaggctt

SEQ ID NO: 1506142 - DNA, 15 bp, Homo sapiens
ttaggctacaaggct

SEQ ID NO: 1506143 - DNA, 15 bp, Homo sapiens
ttttaggctacaagg

SEQ ID NO: 1506144 - DNA, 15 bp, Homo sapiens
tttttaggctacaag

SEQ ID NO: 1506145 - DNA, 15 bp, Homo sapiens
gtttttaggctacaa

SEQ ID NO: 1506146 - DNA, 15 bp, Homo sapiens
tgtttttaggctaca

SEQ ID NO: 1506147 - DNA, 15 bp, Homo sapiens
ttgtttttaggctac

SEQ ID NO: 1506148 - DNA, 15 bp, Homo sapiens
gttgtttttaggcta

SEQ ID NO: 1506149 - DNA, 15 bp, Homo sapiens
ggttgtttttaggct

SEQ ID NO: 1506150 - DNA, 15 bp, Homo sapiens
tggttgtttttaggc

SEQ ID NO: 1506151 - DNA, 15 bp, Homo sapiens
atggttgtttttagg

SEQ ID NO: 1506152 - DNA, 15 bp, Homo sapiens
aatggttgtttttag

SEQ ID NO: 1506153 - DNA, 15 bp, Homo sapiens
aaatggttgttttta

SEQ ID NO: 1506154 - DNA, 15 bp, Homo sapiens
aaaatggttgttttt

SEQ ID NO: 1506155 - DNA, 15 bp, Homo sapiens
taaaatggttgtttt

SEQ ID NO: 1506156 - DNA, 15 bp, Homo sapiens
ataaaatggttgttt

SEQ ID NO: 1506157 - DNA, 15 bp, Homo sapiens
aataaaatggttgtt

SEQ ID NO: 1506158 - DNA, 15 bp, Homo sapiens
caataaaatggttgt

SEQ ID NO: 1506159 - DNA, 15 bp, Homo sapiens
acaataaaatggttg

SEQ ID NO: 1506160 - DNA, 15 bp, Homo sapiens
cacaataaaatggtt

SEQ ID NO: 1506161 - DNA, 15 bp, Homo sapiens
gcacaataaaatggt

SEQ ID NO: 1506162 - DNA, 15 bp, Homo sapiens
agcacaataaaatgg

SEQ ID NO: 1506163 - DNA, 15 bp, Homo sapiens
gagcacaataaaatg

SEQ ID NO: 1506164 - DNA, 15 bp, Homo sapiens
tgagcacaataaaat

SEQ ID NO: 1506165 - DNA, 15 bp, Homo sapiens
gtgagcacaataaaa

SEQ ID NO: 1506166 - DNA, 15 bp, Homo sapiens
tgtgagcacaataaa

SEQ ID NO: 1506167 - DNA, 15 bp, Homo sapiens
ttgtgagcacaataa

SEQ ID NO: 1506168 - DNA, 15 bp, Homo sapiens
attgtgagcacaata

SEQ ID NO: 1506169 - DNA, 15 bp, Homo sapiens
aattgtgagcacaat

SEQ ID NO: 1506170 - DNA, 15 bp, Homo sapiens
aaattgtgagcacaa

SEQ ID NO: 1506171 - DNA, 15 bp, Homo sapiens
aaaattgtgagcaca

SEQ ID NO: 1506172 - DNA, 15 bp, Homo sapiens
aaaaattgtgagcac

SEQ ID NO: 1506173 - DNA, 15 bp, Homo sapiens
caaaaattgtgagca

SEQ ID NO: 1506174 - DNA, 15 bp, Homo sapiens
ccaaaaattgtgagc

SEQ ID NO: 1506175 - DNA, 15 bp, Homo sapiens
cccaaaaattgtgag

SEQ ID NO: 1506176 - DNA, 15 bp, Homo sapiens
ccccaaaaattgtga

SEQ ID NO: 1506177 - DNA, 15 bp, Homo sapiens
cccccaaaaattgtg

SEQ ID NO: 1506178 - DNA, 15 bp, Homo sapiens
acccccaaaaattgt

SEQ ID NO: 1506179 - DNA, 15 bp, Homo sapiens
gacccccaaaaattg

SEQ ID NO: 1506180 - DNA, 15 bp, Homo sapiens
tgacccccaaaaatt

SEQ ID NO: 1506181 - DNA, 15 bp, Homo sapiens
ctgacccccaaaaat

SEQ ID NO: 1506182 - DNA, 15 bp, Homo sapiens
cctgacccccaaaaa

SEQ ID NO: 1506183 - DNA, 15 bp, Homo sapiens
tcctgacccccaaaa

SEQ ID NO: 1506184 - DNA, 15 bp, Homo sapiens
ttcctgacccccaaa

SEQ ID NO: 1506185 - DNA, 15 bp, Homo sapiens
attcctgacccccaa

SEQ ID NO: 1506186 - DNA, 15 bp, Homo sapiens
aattcctgaccccca

SEQ ID NO: 1506187 - DNA, 15 bp, Homo sapiens
gaattcctgaccccc

SEQ ID NO: 1506188 - DNA, 15 bp, Homo sapiens
tgaattcctgacccc

SEQ ID NO: 1506189 - DNA, 15 bp, Homo sapiens
atgaattcctgaccc

SEQ ID NO: 1506190 - DNA, 15 bp, Homo sapiens
catgaattcctgacc

SEQ ID NO: 1506191 - DNA, 15 bp, Homo sapiens
tcatgaattcctgac

SEQ ID NO: 1506192 - DNA, 15 bp, Homo sapiens
gtcatgaattcctga

SEQ ID NO: 1506193 - DNA, 15 bp, Homo sapiens
tgtcatgaattcctg

SEQ ID NO: 1506194 - DNA, 15 bp, Homo sapiens
ctgtcatgaattcct

SEQ ID NO: 1506195 - DNA, 15 bp, Homo sapiens
cctgtcatgaattcc

SEQ ID NO: 1506196 - DNA, 15 bp, Homo sapiens
acctgtcatgaattc

SEQ ID NO: 1506197 - DNA, 15 bp, Homo sapiens
aacctgtcatgaatt

SEQ ID NO: 1506198 - DNA, 15 bp, Homo sapiens
gaacctgtcatgaat

SEQ ID NO: 1506199 - DNA, 15 bp, Homo sapiens
tgaacctgtcatgaa

SEQ ID NO: 1506200 - DNA, 15 bp, Homo sapiens
ctgaacctgtcatga

SEQ ID NO: 1506201 - DNA, 15 bp, Homo sapiens
gctgaacctgtcatg

SEQ ID NO: 1506202 - DNA, 15 bp, Homo sapiens
agctgaacctgtcat

SEQ ID NO: 1506203 - DNA, 15 bp, Homo sapiens
cagctgaacctgtca

SEQ ID NO: 1506204 - DNA, 15 bp, Homo sapiens
ccagctgaacctgtc

SEQ ID NO: 1506205 - DNA, 15 bp, Homo sapiens
cccagctgaacctgt

SEQ ID NO: 1506206 - DNA, 15 bp, Homo sapiens
gcccagctgaacctg

SEQ ID NO: 1506207 - DNA, 15 bp, Homo sapiens
tgcccagctgaacct

SEQ ID NO: 1506208 - DNA, 15 bp, Homo sapiens
ctgcccagctgaacc

SEQ ID NO: 1506209 - DNA, 15 bp, Homo sapiens
actgcccagctgaac

SEQ ID NO: 1506210 - DNA, 15 bp, Homo sapiens
aactgcccagctgaa

SEQ ID NO: 1506211 - DNA, 15 bp, Homo sapiens
gaactgcccagctga

SEQ ID NO: 1506212 - DNA, 15 bp, Homo sapiens
agaactgcccagctg

SEQ ID NO: 1506213 - DNA, 15 bp, Homo sapiens
aagaactgcccagct

SEQ ID NO: 1506214 - DNA, 15 bp, Homo sapiens
gaagaactgcccagc

SEQ ID NO: 1506215 - DNA, 15 bp, Homo sapiens
agaagaactgcccag

SEQ ID NO: 1506216 - DNA, 15 bp, Homo sapiens
cagaagaactgccca

SEQ ID NO: 1506217 - DNA, 15 bp, Homo sapiens
acagaagaactgccc

SEQ ID NO: 1506218 - DNA, 15 bp, Homo sapiens
aacagaagaactgcc

SEQ ID NO: 1506219 - DNA, 15 bp, Homo sapiens
gaacagaagaactgc

SEQ ID NO: 1506220 - DNA, 15 bp, Homo sapiens
ggaacagaagaactg

SEQ ID NO: 1506221 - DNA, 15 bp, Homo sapiens
tggaacagaagaact

SEQ ID NO: 1506222 - DNA, 15 bp, Homo sapiens
atggaacagaagaac

SEQ ID NO: 1506223 - DNA, 15 bp, Homo sapiens
tatggaacagaagaa

SEQ ID NO: 1506224 - DNA, 15 bp, Homo sapiens
atatggaacagaaga

SEQ ID NO: 1506225 - DNA, 15 bp, Homo sapiens
aatatggaacagaag

SEQ ID NO: 1506226 - DNA, 15 bp, Homo sapiens
caatatggaacagaa

SEQ ID NO: 1506227 - DNA, 15 bp, Homo sapiens
acaatatggaacaga

SEQ ID NO: 1506228 - DNA, 15 bp, Homo sapiens
cacaatatggaacag

SEQ ID NO: 1506229 - DNA, 15 bp, Homo sapiens
acacaatatggaaca

SEQ ID NO: 1506230 - DNA, 15 bp, Homo sapiens
aacacaatatggaac

SEQ ID NO: 1506231 - DNA, 15 bp, Homo sapiens
caacacaatatggaa

SEQ ID NO: 1506232 - DNA, 15 bp, Homo sapiens
gcaacacaatatgga

SEQ ID NO: 1506233 - DNA, 15 bp, Homo sapiens
agcaacacaatatgg

SEQ ID NO: 1506234 - DNA, 15 bp, Homo sapiens
cagcaacacaatatg

SEQ ID NO: 1506235 - DNA, 15 bp, Homo sapiens
tcagcaacacaatat

SEQ ID NO: 1506236 - DNA, 15 bp, Homo sapiens
gtcagcaacacaata

SEQ ID NO: 1506237 - DNA, 15 bp, Homo sapiens
tgtcagcaacacaat

SEQ ID NO: 1506238 - DNA, 15 bp, Homo sapiens
gtgtcagcaacacaa

SEQ ID NO: 1506239 - DNA, 15 bp, Homo sapiens
agtgtcagcaacaca

SEQ ID NO: 1506240 - DNA, 15 bp, Homo sapiens
cagtgtcagcaacac

SEQ ID NO: 1506241 - DNA, 15 bp, Homo sapiens
ccagtgtcagcaaca

SEQ ID NO: 1506242 - DNA, 15 bp, Homo sapiens
tccagtgtcagcaac

SEQ ID NO: 1506243 - DNA, 15 bp, Homo sapiens
ctccagtgtcagcaa

SEQ ID NO: 1506244 - DNA, 15 bp, Homo sapiens
tctccagtgtcagca

SEQ ID NO: 1506245 - DNA, 15 bp, Homo sapiens
ttctccagtgtcagc

SEQ ID NO: 1506246 - DNA, 15 bp, Homo sapiens
attctccagtgtcag

SEQ ID NO: 1506247 - DNA, 15 bp, Homo sapiens
gattctccagtgtca

SEQ ID NO: 1506248 - DNA, 15 bp, Homo sapiens
ggattctccagtgtc

SEQ ID NO: 1506249 - DNA, 15 bp, Homo sapiens
gggattctccagtgt

SEQ ID NO: 1506250 - DNA, 15 bp, Homo sapiens
agggattctccagtg

SEQ ID NO: 1506251 - DNA, 15 bp, Homo sapiens
aagggattctccagt

SEQ ID NO: 1506252 - DNA, 15 bp, Homo sapiens
gaagggattctccag

SEQ ID NO: 1506253 - DNA, 15 bp, Homo sapiens
ggaagggattctcca

SEQ ID NO: 1506254 - DNA, 15 bp, Homo sapiens
tggaagggattctcc

SEQ ID NO: 1506255 - DNA, 15 bp, Homo sapiens
atggaagggattctc

SEQ ID NO: 1506256 - DNA, 15 bp, Homo sapiens
aatggaagggattct

SEQ ID NO: 1506257 - DNA, 15 bp, Homo sapiens
taatggaagggattc

SEQ ID NO: 1506258 - DNA, 15 bp, Homo sapiens
ataatggaagggatt

SEQ ID NO: 1506259 - DNA, 15 bp, Homo sapiens
cataatggaagggat

SEQ ID NO: 1506260 - DNA, 15 bp, Homo sapiens
ccataatggaaggga

SEQ ID NO: 1506261 - DNA, 15 bp, Homo sapiens
gccataatggaaggg

SEQ ID NO: 1506262 - DNA, 15 bp, Homo sapiens
agccataatggaagg

SEQ ID NO: 1506263 - DNA, 15 bp, Homo sapiens
aagccataatggaag

SEQ ID NO: 1506264 - DNA, 15 bp, Homo sapiens
gaagccataatggaa

SEQ ID NO: 1506265 - DNA, 15 bp, Homo sapiens
agaagccataatgga

SEQ ID NO: 1506266 - DNA, 15 bp, Homo sapiens
aagaagccataatgg

SEQ ID NO: 1506267 - DNA, 15 bp, Homo sapiens
gaagaagccataatg

SEQ ID NO: 1506268 - DNA, 15 bp, Homo sapiens
tgaagaagccataat

SEQ ID NO: 1506269 - DNA, 15 bp, Homo sapiens
ctgaagaagccataa

SEQ ID NO: 1506270 - DNA, 15 bp, Homo sapiens
actgaagaagccata

SEQ ID NO: 1506271 - DNA, 15 bp, Homo sapiens
gactgaagaagccat

SEQ ID NO: 1506272 - DNA, 15 bp, Homo sapiens
tgactgaagaagcca

SEQ ID NO: 1506273 - DNA, 15 bp, Homo sapiens
gtgactgaagaagcc

SEQ ID NO: 1506274 - DNA, 15 bp, Homo sapiens
tgtgactgaagaagc

SEQ ID NO: 1506275 - DNA, 15 bp, Homo sapiens
atgtgactgaagaag

SEQ ID NO: 1506276 - DNA, 15 bp, Homo sapiens
catgtgactgaagaa

SEQ ID NO: 1506277 - DNA, 15 bp, Homo sapiens
acatgtgactgaaga

SEQ ID NO: 1506278 - DNA, 15 bp, Homo sapiens
gacatgtgactgaag

SEQ ID NO: 1506279 - DNA, 15 bp, Homo sapiens
agacatgtgactgaa

SEQ ID NO: 1506280 - DNA, 15 bp, Homo sapiens
cagacatgtgactga

SEQ ID NO: 1506281 - DNA, 15 bp, Homo sapiens
ccagacatgtgactg

SEQ ID NO: 1506282 - DNA, 15 bp, Homo sapiens
gccagacatgtgact

SEQ ID NO: 1506283 - DNA, 15 bp, Homo sapiens
agccagacatgtgac

SEQ ID NO: 1506284 - DNA, 15 bp, Homo sapiens
gagccagacatgtga

SEQ ID NO: 1506285 - DNA, 15 bp, Homo sapiens
ggagccagacatgtg

SEQ ID NO: 1506286 - DNA, 15 bp, Homo sapiens
aggagccagacatgt

SEQ ID NO: 1506287 - DNA, 15 bp, Homo sapiens
gaggagccagacatg

SEQ ID NO: 1506288 - DNA, 15 bp, Homo sapiens
tgaggagccagacat

SEQ ID NO: 1506289 - DNA, 15 bp, Homo sapiens
ctgaggagccagaca

SEQ ID NO: 1506290 - DNA, 15 bp, Homo sapiens
actgaggagccagac

SEQ ID NO: 1506291 - DNA, 15 bp, Homo sapiens
cactgaggagccaga

SEQ ID NO: 1506292 - DNA, 15 bp, Homo sapiens
acactgaggagccag

SEQ ID NO: 1506293 - DNA, 15 bp, Homo sapiens
aacactgaggagcca

SEQ ID NO: 1506294 - DNA, 15 bp, Homo sapiens
aaacactgaggagcc

SEQ ID NO: 1506295 - DNA, 15 bp, Homo sapiens
gaaacactgaggagc

SEQ ID NO: 1506296 - DNA, 15 bp, Homo sapiens
agaaacactgaggag

SEQ ID NO: 1506297 - DNA, 15 bp, Homo sapiens
aagaaacactgagga

SEQ ID NO: 1506298 - DNA, 15 bp, Homo sapiens
caagaaacactgagg

SEQ ID NO: 1506299 - DNA, 15 bp, Homo sapiens
ccaagaaacactgag

SEQ ID NO: 1506300 - DNA, 15 bp, Homo sapiens
gccaagaaacactga

SEQ ID NO: 1506301 - DNA, 15 bp, Homo sapiens
ggccaagaaacactg

SEQ ID NO: 1506302 - DNA, 15 bp, Homo sapiens
aggccaagaaacact

SEQ ID NO: 1506303 - DNA, 15 bp, Homo sapiens
gaggccaagaaacac

SEQ ID NO: 1506304 - DNA, 15 bp, Homo sapiens
agaggccaagaaaca

SEQ ID NO: 1506305 - DNA, 15 bp, Homo sapiens
gagaggccaagaaac

SEQ ID NO: 1506306 - DNA, 15 bp, Homo sapiens
agagaggccaagaaa

SEQ ID NO: 1506307 - DNA, 15 bp, Homo sapiens
gagagaggccaagaa

SEQ ID NO: 1506308 - DNA, 15 bp, Homo sapiens
agagagaggccaaga

SEQ ID NO: 1506309 - DNA, 15 bp, Homo sapiens
gagagagaggccaag

SEQ ID NO: 1506310 - DNA, 15 bp, Homo sapiens
ggagagagaggccaa

SEQ ID NO: 1506311 - DNA, 15 bp, Homo sapiens
tggagagagaggcca

SEQ ID NO: 1506312 - DNA, 15 bp, Homo sapiens
gtggagagagaggcc

SEQ ID NO: 1506313 - DNA, 15 bp, Homo sapiens
tgtggagagagaggc

SEQ ID NO: 1506314 - DNA, 15 bp, Homo sapiens
ttgtggagagagagg

SEQ ID NO: 1506315 - DNA, 15 bp, Homo sapiens
attgtggagagagag

SEQ ID NO: 1506316 - DNA, 15 bp, Homo sapiens
cattgtggagagaga

SEQ ID NO: 1506317 - DNA, 15 bp, Homo sapiens
ccattgtggagagag

SEQ ID NO: 1506318 - DNA, 15 bp, Homo sapiens
gccattgtggagaga

SEQ ID NO: 1506319 - DNA, 15 bp, Homo sapiens
cgccattgtggagag

SEQ ID NO: 1506320 - DNA, 15 bp, Homo sapiens
acgccattgtggaga

SEQ ID NO: 1506321 - DNA, 15 bp, Homo sapiens
gacgccattgtggag

SEQ ID NO: 1506322 - DNA, 15 bp, Homo sapiens
ggacgccattgtgga

SEQ ID NO: 1506323 - DNA, 15 bp, Homo sapiens
gggacgccattgtgg

SEQ ID NO: 1506324 - DNA, 15 bp, Homo sapiens
tgggacgccattgtg

SEQ ID NO: 1506325 - DNA, 15 bp, Homo sapiens
atgggacgccattgt

SEQ ID NO: 1506326 - DNA, 15 bp, Homo sapiens
aatgggacgccattg

SEQ ID NO: 1506327 - DNA, 15 bp, Homo sapiens
gaatgggacgccatt

SEQ ID NO: 1506328 - DNA, 15 bp, Homo sapiens
agaatgggacgccat

SEQ ID NO: 1506329 - DNA, 15 bp, Homo sapiens
aagaatgggacgcca

SEQ ID NO: 1506330 - DNA, 15 bp, Homo sapiens
gaagaatgggacgcc

SEQ ID NO: 1506331 - DNA, 15 bp, Homo sapiens
tgaagaatgggacgc

SEQ ID NO: 1506332 - DNA, 15 bp, Homo sapiens
ctgaagaatgggacg

SEQ ID NO: 1506333 - DNA, 15 bp, Homo sapiens
tctgaagaatgggac

SEQ ID NO: 1506334 - DNA, 15 bp, Homo sapiens
ttctgaagaatggga

SEQ ID NO: 1506335 - DNA, 15 bp, Homo sapiens
attctgaagaatggg

SEQ ID NO: 1506336 - DNA, 15 bp, Homo sapiens
gattctgaagaatgg

SEQ ID NO: 1506337 - DNA, 15 bp, Homo sapiens
agattctgaagaatg

SEQ ID NO: 1506338 - DNA, 15 bp, Homo sapiens
gagattctgaagaat

SEQ ID NO: 1506339 - DNA, 15 bp, Homo sapiens
agagattctgaagaa

SEQ ID NO: 1506340 - DNA, 15 bp, Homo sapiens
cagagattctgaaga

SEQ ID NO: 1506341 - DNA, 15 bp, Homo sapiens
gcagagattctgaag

SEQ ID NO: 1506342 - DNA, 15 bp, Homo sapiens
tgcagagattctgaa

SEQ ID NO: 1506343 - DNA, 15 bp, Homo sapiens
atgcagagattctga

SEQ ID NO: 1506344 - DNA, 15 bp, Homo sapiens
catgcagagattctg

SEQ ID NO: 1506345 - DNA, 15 bp, Homo sapiens
acatgcagagattct

SEQ ID NO: 1506346 - DNA, 15 bp, Homo sapiens
cacatgcagagattc

SEQ ID NO: 1506347 - DNA, 15 bp, Homo sapiens
ccacatgcagagatt

SEQ ID NO: 1506348 - DNA, 15 bp, Homo sapiens
gccacatgcagagat

SEQ ID NO: 1506349 - DNA, 15 bp, Homo sapiens
ggccacatgcagaga

SEQ ID NO: 1506350 - DNA, 15 bp, Homo sapiens
aggccacatgcagag

SEQ ID NO: 1506351 - DNA, 15 bp, Homo sapiens
gaggccacatgcaga

SEQ ID NO: 1506352 - DNA, 15 bp, Homo sapiens
cgaggccacatgcag

SEQ ID NO: 1506353 - DNA, 15 bp, Homo sapiens
ccgaggccacatgca

SEQ ID NO: 1506354 - DNA, 15 bp, Homo sapiens
gccgaggccacatgc

SEQ ID NO: 1506355 - DNA, 15 bp, Homo sapiens
agccgaggccacatg

SEQ ID NO: 1506356 - DNA, 15 bp, Homo sapiens
aagccgaggccacat

SEQ ID NO: 1506357 - DNA, 15 bp, Homo sapiens
gaagccgaggccaca

SEQ ID NO: 1506358 - DNA, 15 bp, Homo sapiens
agaagccgaggccac

SEQ ID NO: 1506359 - DNA, 15 bp, Homo sapiens
gagaagccgaggcca

SEQ ID NO: 1506360 - DNA, 15 bp, Homo sapiens
tgagaagccgaggcc

SEQ ID NO: 1506361 - DNA, 15 bp, Homo sapiens
gtgagaagccgaggc

SEQ ID NO: 1506362 - DNA, 15 bp, Homo sapiens
tgtgagaagccgagg

SEQ ID NO: 1506363 - DNA, 15 bp, Homo sapiens
ctgtgagaagccgag

SEQ ID NO: 1506364 - DNA, 15 bp, Homo sapiens
gctgtgagaagccga

SEQ ID NO: 1506365 - DNA, 15 bp, Homo sapiens
tgctgtgagaagccg

SEQ ID NO: 1506366 - DNA, 15 bp, Homo sapiens
atgctgtgagaagcc

SEQ ID NO: 1506367 - DNA, 15 bp, Homo sapiens
catgctgtgagaagc

SEQ ID NO: 1506368 - DNA, 15 bp, Homo sapiens
gcatgctgtgagaag

SEQ ID NO: 1506369 - DNA, 15 bp, Homo sapiens
agcatgctgtgagaa

SEQ ID NO: 1506370 - DNA, 15 bp, Homo sapiens
cagcatgctgtgaga

SEQ ID NO: 1506371 - DNA, 15 bp, Homo sapiens
tcagcatgctgtgag

SEQ ID NO: 1506372 - DNA, 15 bp, Homo sapiens
atcagcatgctgtga

SEQ ID NO: 1506373 - DNA, 15 bp, Homo sapiens
gatcagcatgctgtg

SEQ ID NO: 1506374 - DNA, 15 bp, Homo sapiens
agatcagcatgctgt

SEQ ID NO: 1506375 - DNA, 15 bp, Homo sapiens
gagatcagcatgctg

SEQ ID NO: 1506376 - DNA, 15 bp, Homo sapiens
tgagatcagcatgct

SEQ ID NO: 1506377 - DNA, 15 bp, Homo sapiens
ctgagatcagcatgc

SEQ ID NO: 1506378 - DNA, 15 bp, Homo sapiens
tctgagatcagcatg

SEQ ID NO: 1506379 - DNA, 15 bp, Homo sapiens
ctctgagatcagcat

SEQ ID NO: 1506380 - DNA, 15 bp, Homo sapiens
actctgagatcagca

SEQ ID NO: 1506381 - DNA, 15 bp, Homo sapiens
tactctgagatcagc

SEQ ID NO: 1506382 - DNA, 15 bp, Homo sapiens
ctactctgagatcag

SEQ ID NO: 1506383 - DNA, 15 bp, Homo sapiens
actactctgagatca

SEQ ID NO: 1506384 - DNA, 15 bp, Homo sapiens
gactactctgagatc

SEQ ID NO: 1506385 - DNA, 15 bp, Homo sapiens
ggactactctgagat

SEQ ID NO: 1506386 - DNA, 15 bp, Homo sapiens
gggactactctgaga

SEQ ID NO: 1506387 - DNA, 15 bp, Homo sapiens
tgggactactctgag

SEQ ID NO: 1506388 - DNA, 15 bp, Homo sapiens
atgggactactctga

SEQ ID NO: 1506389 - DNA, 15 bp, Homo sapiens
aatgggactactctg

SEQ ID NO: 1506390 - DNA, 15 bp, Homo sapiens
aaatgggactactct

SEQ ID NO: 1506391 - DNA, 15 bp, Homo sapiens
aaaatgggactactc

SEQ ID NO: 1506392 - DNA, 15 bp, Homo sapiens
aaaaatgggactact

SEQ ID NO: 1506393 - DNA, 15 bp, Homo sapiens
aaaaaatgggactac

SEQ ID NO: 1506394 - DNA, 15 bp, Homo sapiens
taaaaaatgggacta

SEQ ID NO: 1506395 - DNA, 15 bp, Homo sapiens
gtaaaaaatgggact

SEQ ID NO: 1506396 - DNA, 15 bp, Homo sapiens
tgtaaaaaatgggac

SEQ ID NO: 1506397 - DNA, 15 bp, Homo sapiens
atgtaaaaaatggga

SEQ ID NO: 1506398 - DNA, 15 bp, Homo sapiens
catgtaaaaaatggg

SEQ ID NO: 1506399 - DNA, 15 bp, Homo sapiens
tcatgtaaaaaatgg

SEQ ID NO: 1506400 - DNA, 15 bp, Homo sapiens
gtcatgtaaaaaatg

SEQ ID NO: 1506401 - DNA, 15 bp, Homo sapiens
tgtcatgtaaaaaat

SEQ ID NO: 1506402 - DNA, 15 bp, Homo sapiens
ttgtcatgtaaaaaa

SEQ ID NO: 1506403 - DNA, 15 bp, Homo sapiens
gttgtcatgtaaaaa

SEQ ID NO: 1506404 - DNA, 15 bp, Homo sapiens
agttgtcatgtaaaa

SEQ ID NO: 1506405 - DNA, 15 bp, Homo sapiens
cagttgtcatgtaaa

SEQ ID NO: 1506406 - DNA, 15 bp, Homo sapiens
ccagttgtcatgtaa

SEQ ID NO: 1506407 - DNA, 15 bp, Homo sapiens
gccagttgtcatgta

SEQ ID NO: 1506408 - DNA, 15 bp, Homo sapiens
agccagttgtcatgt

SEQ ID NO: 1506409 - DNA, 15 bp, Homo sapiens
aagccagttgtcatg

SEQ ID NO: 1506410 - DNA, 15 bp, Homo sapiens
gaagccagttgtcat

SEQ ID NO: 1506411 - DNA, 15 bp, Homo sapiens
agaagccagttgtca

SEQ ID NO: 1506412 - DNA, 15 bp, Homo sapiens
tagaagccagttgtc

SEQ ID NO: 1506413 - DNA, 15 bp, Homo sapiens
ctagaagccagttgt

SEQ ID NO: 1506414 - DNA, 15 bp, Homo sapiens
cctagaagccagttg

SEQ ID NO: 1506415 - DNA, 15 bp, Homo sapiens
tcctagaagccagtt

SEQ ID NO: 1506416 - DNA, 15 bp, Homo sapiens
ttcctagaagccagt

SEQ ID NO: 1506417 - DNA, 15 bp, Homo sapiens
cttcctagaagccag

SEQ ID NO: 1506418 - DNA, 15 bp, Homo sapiens
tcttcctagaagcca

SEQ ID NO: 1506419 - DNA, 15 bp, Homo sapiens
ctcttcctagaagcc

SEQ ID NO: 1506420 - DNA, 15 bp, Homo sapiens
cctcttcctagaagc

SEQ ID NO: 1506421 - DNA, 15 bp, Homo sapiens
ccctcttcctagaag

SEQ ID NO: 1506422 - DNA, 15 bp, Homo sapiens
tccctcttcctagaa

SEQ ID NO: 1506423 - DNA, 15 bp, Homo sapiens
ttccctcttcctaga

SEQ ID NO: 1506424 - DNA, 15 bp, Homo sapiens
tttccctcttcctag

SEQ ID NO: 1506425 - DNA, 15 bp, Homo sapiens
atttccctcttccta

SEQ ID NO: 1506426 - DNA, 15 bp, Homo sapiens
tatttccctcttcct

SEQ ID NO: 1506427 - DNA, 15 bp, Homo sapiens
ttatttccctcttcc

SEQ ID NO: 1506428 - DNA, 15 bp, Homo sapiens
tttatttccctcttc

SEQ ID NO: 1506429 - DNA, 15 bp, Homo sapiens
tttttatttccctct

SEQ ID NO: 1506430 - DNA, 15 bp, Homo sapiens
gtttttatttccctc

SEQ ID NO: 1506431 - DNA, 15 bp, Homo sapiens
agtttttatttccct

SEQ ID NO: 1506432 - DNA, 15 bp, Homo sapiens
cagtttttatttccc

SEQ ID NO: 1506433 - DNA, 15 bp, Homo sapiens
acagtttttatttcc

SEQ ID NO: 1506434 - DNA, 15 bp, Homo sapiens
gacagtttttatttc

SEQ ID NO: 1506435 - DNA, 15 bp, Homo sapiens
tgacagtttttattt

SEQ ID NO: 1506436 - DNA, 15 bp, Homo sapiens
ctgacagtttttatt

SEQ ID NO: 1506437 - DNA, 15 bp, Homo sapiens
tctgacagtttttat

SEQ ID NO: 1506438 - DNA, 15 bp, Homo sapiens
gtctgacagttttta

SEQ ID NO: 1506439 - DNA, 15 bp, Homo sapiens
ggtctgacagttttt

SEQ ID NO: 1506440 - DNA, 15 bp, Homo sapiens
tggtctgacagtttt

SEQ ID NO: 1506441 - DNA, 15 bp, Homo sapiens
ttggtctgacagttt

SEQ ID NO: 1506442 - DNA, 15 bp, Homo sapiens
attggtctgacagtt

SEQ ID NO: 1506443 - DNA, 15 bp, Homo sapiens
aattggtctgacagt

SEQ ID NO: 1506444 - DNA, 15 bp, Homo sapiens
taattggtctgacag

SEQ ID NO: 1506445 - DNA, 15 bp, Homo sapiens
ttaattggtctgaca

SEQ ID NO: 1506446 - DNA, 15 bp, Homo sapiens
cttaattggtctgac

SEQ ID NO: 1506447 - DNA, 15 bp, Homo sapiens
ccttaattggtctga

SEQ ID NO: 1506448 - DNA, 15 bp, Homo sapiens
tccttaattggtctg

SEQ ID NO: 1506449 - DNA, 15 bp, Homo sapiens
gtccttaattggtct

SEQ ID NO: 1506450 - DNA, 15 bp, Homo sapiens
agtccttaattggtc

SEQ ID NO: 1506451 - DNA, 15 bp, Homo sapiens
tagtccttaattggt

SEQ ID NO: 1506452 - DNA, 15 bp, Homo sapiens
atagtccttaattgg

SEQ ID NO: 1506453 - DNA, 15 bp, Homo sapiens
catagtccttaattg

SEQ ID NO: 1506454 - DNA, 15 bp, Homo sapiens
ccatagtccttaatt

SEQ ID NO: 1506455 - DNA, 15 bp, Homo sapiens
gccatagtccttaat

SEQ ID NO: 1506456 - DNA, 15 bp, Homo sapiens
ggccatagtccttaa

SEQ ID NO: 1506457 - DNA, 15 bp, Homo sapiens
aggccatagtcctta

SEQ ID NO: 1506458 - DNA, 15 bp, Homo sapiens
caggccatagtcctt

SEQ ID NO: 1506459 - DNA, 15 bp, Homo sapiens
ccaggccatagtcct

SEQ ID NO: 1506460 - DNA, 15 bp, Homo sapiens
tccaggccatagtcc

SEQ ID NO: 1506461 - DNA, 15 bp, Homo sapiens
ttccaggccatagtc

SEQ ID NO: 1506462 - DNA, 15 bp, Homo sapiens
gttccaggccatagt

SEQ ID NO: 1506463 - DNA, 15 bp, Homo sapiens
agttccaggccatag

SEQ ID NO: 1506464 - DNA, 15 bp, Homo sapiens
tagttccaggccata

SEQ ID NO: 1506465 - DNA, 15 bp, Homo sapiens
gtagttccaggccat

SEQ ID NO: 1506466 - DNA, 15 bp, Homo sapiens
tgtagttccaggcca

SEQ ID NO: 1506467 - DNA, 15 bp, Homo sapiens
gtgtagttccaggcc

SEQ ID NO: 1506468 - DNA, 15 bp, Homo sapiens
tgtgtagttccaggc

SEQ ID NO: 1506469 - DNA, 15 bp, Homo sapiens
ctgtgtagttccagg

SEQ ID NO: 1506470 - DNA, 15 bp, Homo sapiens
actgtgtagttccag

SEQ ID NO: 1506471 - DNA, 15 bp, Homo sapiens
cactgtgtagttcca

SEQ ID NO: 1506472 - DNA, 15 bp, Homo sapiens
acactgtgtagttcc

SEQ ID NO: 1506473 - DNA, 15 bp, Homo sapiens
cacactgtgtagttc

SEQ ID NO: 1506474 - DNA, 15 bp, Homo sapiens
gcacactgtgtagtt

SEQ ID NO: 1506475 - DNA, 15 bp, Homo sapiens
ggcacactgtgtagt

SEQ ID NO: 1506476 - DNA, 15 bp, Homo sapiens
aggcacactgtgtag

SEQ ID NO: 1506477 - DNA, 15 bp, Homo sapiens
aaggcacactgtgta

SEQ ID NO: 1506478 - DNA, 15 bp, Homo sapiens
aaaggcacactgtgt

SEQ ID NO: 1506479 - DNA, 15 bp, Homo sapiens
taaaggcacactgtg

SEQ ID NO: 1506480 - DNA, 15 bp, Homo sapiens
ttaaaggcacactgt

SEQ ID NO: 1506481 - DNA, 15 bp, Homo sapiens
cttaaaggcacactg

SEQ ID NO: 1506482 - DNA, 15 bp, Homo sapiens
gcttaaaggcacact

SEQ ID NO: 1506483 - DNA, 15 bp, Homo sapiens
ggcttaaaggcacac

SEQ ID NO: 1506484 - DNA, 15 bp, Homo sapiens
cggcttaaaggcaca

SEQ ID NO: 1506485 - DNA, 15 bp, Homo sapiens
acggcttaaaggcac

SEQ ID NO: 1506486 - DNA, 15 bp, Homo sapiens
tacggcttaaaggca

SEQ ID NO: 1506487 - DNA, 15 bp, Homo sapiens
atacggcttaaaggc

SEQ ID NO: 1506488 - DNA, 15 bp, Homo sapiens
aatacggcttaaagg

SEQ ID NO: 1506489 - DNA, 15 bp, Homo sapiens
aaatacggcttaaag

SEQ ID NO: 1506490 - DNA, 15 bp, Homo sapiens
aaaatacggcttaaa

SEQ ID NO: 1506491 - DNA, 15 bp, Homo sapiens
taaaatacggcttaa

SEQ ID NO: 1506492 - DNA, 15 bp, Homo sapiens
ataaaatacggctta

SEQ ID NO: 1506493 - DNA, 15 bp, Homo sapiens
aataaaatacggctt

SEQ ID NO: 1506494 - DNA, 15 bp, Homo sapiens
caataaaatacggct

SEQ ID NO: 1506495 - DNA, 15 bp, Homo sapiens
ccaataaaatacggc

SEQ ID NO: 1506496 - DNA, 15 bp, Homo sapiens
accaataaaatacgg

SEQ ID NO: 1506497 - DNA, 15 bp, Homo sapiens
gaccaataaaatacg

SEQ ID NO: 1506498 - DNA, 15 bp, Homo sapiens
tgaccaataaaatac

SEQ ID NO: 1506499 - DNA, 15 bp, Homo sapiens
ctgaccaataaaata

SEQ ID NO: 1506500 - DNA, 15 bp, Homo sapiens
tctgaccaataaaat

SEQ ID NO: 1506501 - DNA, 15 bp, Homo sapiens
ttctgaccaataaaa

SEQ ID NO: 1506502 - DNA, 15 bp, Homo sapiens
attctgaccaataaa

SEQ ID NO: 1506503 - DNA, 15 bp, Homo sapiens
tattctgaccaataa

SEQ ID NO: 1506504 - DNA, 15 bp, Homo sapiens
ctattctgaccaata

SEQ ID NO: 1506505 - DNA, 15 bp, Homo sapiens
actattctgaccaat

SEQ ID NO: 1506506 - DNA, 15 bp, Homo sapiens
gactattctgaccaa

SEQ ID NO: 1506507 - DNA, 15 bp, Homo sapiens
tgactattctgacca

SEQ ID NO: 1506508 - DNA, 15 bp, Homo sapiens
gtgactattctgacc

SEQ ID NO: 1506509 - DNA, 15 bp, Homo sapiens
agtgactattctgac

SEQ ID NO: 1506510 - DNA, 15 bp, Homo sapiens
cagtgactattctga

SEQ ID NO: 1506511 - DNA, 15 bp, Homo sapiens
ccagtgactattctg

SEQ ID NO: 1506512 - DNA, 15 bp, Homo sapiens
tccagtgactattct

SEQ ID NO: 1506513 - DNA, 15 bp, Homo sapiens
gtccagtgactattc

SEQ ID NO: 1506514 - DNA, 15 bp, Homo sapiens
ggtccagtgactatt

SEQ ID NO: 1506515 - DNA, 15 bp, Homo sapiens
aggtccagtgactat

SEQ ID NO: 1506516 - DNA, 15 bp, Homo sapiens
caggtccagtgacta

SEQ ID NO: 1506517 - DNA, 15 bp, Homo sapiens
gcaggtccagtgact

SEQ ID NO: 1506518 - DNA, 15 bp, Homo sapiens
agcaggtccagtgac

SEQ ID NO: 1506519 - DNA, 15 bp, Homo sapiens
tagcaggtccagtga

SEQ ID NO: 1506520 - DNA, 15 bp, Homo sapiens
ctagcaggtccagtg

SEQ ID NO: 1506521 - DNA, 15 bp, Homo sapiens
tctagcaggtccagt

SEQ ID NO: 1506522 - DNA, 15 bp, Homo sapiens
atctagcaggtccag

SEQ ID NO: 1506523 - DNA, 15 bp, Homo sapiens
catctagcaggtcca

SEQ ID NO: 1506524 - DNA, 15 bp, Homo sapiens
tcatctagcaggtcc

SEQ ID NO: 1506525 - DNA, 15 bp, Homo sapiens
ttcatctagcaggtc

SEQ ID NO: 1506526 - DNA, 15 bp, Homo sapiens
tttcatctagcaggt

SEQ ID NO: 1506527 - DNA, 15 bp, Homo sapiens
ctttcatctagcagg

SEQ ID NO: 1506528 - DNA, 15 bp, Homo sapiens
cctttcatctagcag

SEQ ID NO: 1506529 - DNA, 15 bp, Homo sapiens
tcctttcatctagca

SEQ ID NO: 1506530 - DNA, 15 bp, Homo sapiens
ctcctttcatctagc

SEQ ID NO: 1506531 - DNA, 15 bp, Homo sapiens
cctcctttcatctag

SEQ ID NO: 1506532 - DNA, 15 bp, Homo sapiens
acctcctttcatcta

SEQ ID NO: 1506533 - DNA, 15 bp, Homo sapiens
tacctcctttcatct

SEQ ID NO: 1506534 - DNA, 15 bp, Homo sapiens
ctacctcctttcatc

SEQ ID NO: 1506535 - DNA, 15 bp, Homo sapiens
tctacctcctttcat

SEQ ID NO: 1506536 - DNA, 15 bp, Homo sapiens
ttctacctcctttca

SEQ ID NO: 1506537 - DNA, 15 bp, Homo sapiens
tttctacctcctttc

SEQ ID NO: 1506538 - DNA, 15 bp, Homo sapiens
ttttctacctccttt

SEQ ID NO: 1506539 - DNA, 15 bp, Homo sapiens
tttttctacctcctt

SEQ ID NO: 1506540 - DNA, 15 bp, Homo sapiens
atttttctacctcct

SEQ ID NO: 1506541 - DNA, 15 bp, Homo sapiens
tatttttctacctcc

SEQ ID NO: 1506542 - DNA, 15 bp, Homo sapiens
ttatttttctacctc

SEQ ID NO: 1506543 - DNA, 15 bp, Homo sapiens
tttatttttctacct

SEQ ID NO: 1506544 - DNA, 15 bp, Homo sapiens
atttatttttctacc

SEQ ID NO: 1506545 - DNA, 15 bp, Homo sapiens
aatttatttttctac

SEQ ID NO: 1506546 - DNA, 15 bp, Homo sapiens
aaatttatttttcta

SEQ ID NO: 1506547 - DNA, 15 bp, Homo sapiens
agaaatttatttttc

SEQ ID NO: 1506548 - DNA, 15 bp, Homo sapiens
aagaaatttattttt

SEQ ID NO: 1506549 - DNA, 15 bp, Homo sapiens
aaagaaatttatttt

SEQ ID NO: 1506550 - DNA, 15 bp, Homo sapiens
aaaagaaatttattt

SEQ ID NO: 1506551 - DNA, 15 bp, Homo sapiens
gaaaagaaatttatt

SEQ ID NO: 1506552 - DNA, 15 bp, Homo sapiens
ggaaaagaaatttat

SEQ ID NO: 1506553 - DNA, 15 bp, Homo sapiens
aggaaaagaaattta

SEQ ID NO: 1506554 - DNA, 15 bp, Homo sapiens
taggaaaagaaattt

SEQ ID NO: 1506555 - DNA, 15 bp, Homo sapiens
ttaggaaaagaaatt

SEQ ID NO: 1506556 - DNA, 15 bp, Homo sapiens
attaggaaaagaaat

SEQ ID NO: 1506557 - DNA, 15 bp, Homo sapiens
cattaggaaaagaaa

SEQ ID NO: 1506558 - DNA, 15 bp, Homo sapiens
tcattaggaaaagaa

SEQ ID NO: 1506559 - DNA, 15 bp, Homo sapiens
ctcattaggaaaaga

SEQ ID NO: 1506560 - DNA, 15 bp, Homo sapiens
cctcattaggaaaag

SEQ ID NO: 1506561 - DNA, 15 bp, Homo sapiens
ccctcattaggaaaa

SEQ ID NO: 1506562 - DNA, 15 bp, Homo sapiens
tccctcattaggaaa

SEQ ID NO: 1506563 - DNA, 15 bp, Homo sapiens
ctccctcattaggaa

SEQ ID NO: 1506564 - DNA, 15 bp, Homo sapiens
actccctcattagga

SEQ ID NO: 1506565 - DNA, 15 bp, Homo sapiens
cactccctcattagg

SEQ ID NO: 1506566 - DNA, 15 bp, Homo sapiens
ccactccctcattag

SEQ ID NO: 1506567 - DNA, 15 bp, Homo sapiens
gccactccctcatta

SEQ ID NO: 1506568 - DNA, 15 bp, Homo sapiens
tgccactccctcatt

SEQ ID NO: 1506569 - DNA, 15 bp, Homo sapiens
ttgccactccctcat

SEQ ID NO: 1506570 - DNA, 15 bp, Homo sapiens
tttgccactccctca

SEQ ID NO: 1506571 - DNA, 15 bp, Homo sapiens
ttttgccactccctc

SEQ ID NO: 1506572 - DNA, 15 bp, Homo sapiens
attttgccactccct

SEQ ID NO: 1506573 - DNA, 15 bp, Homo sapiens
gattttgccactccc

SEQ ID NO: 1506574 - DNA, 15 bp, Homo sapiens
agattttgccactcc

SEQ ID NO: 1506575 - DNA, 15 bp, Homo sapiens
aagattttgccactc

SEQ ID NO: 1506576 - DNA, 15 bp, Homo sapiens
taagattttgccact

SEQ ID NO: 1506577 - DNA, 15 bp, Homo sapiens
ataagattttgccac

SEQ ID NO: 1506578 - DNA, 15 bp, Homo sapiens
aataagattttgcca

SEQ ID NO: 1506579 - DNA, 15 bp, Homo sapiens
caataagattttgcc

SEQ ID NO: 1506580 - DNA, 15 bp, Homo sapiens
gcaataagattttgc

SEQ ID NO: 1506581 - DNA, 15 bp, Homo sapiens
cgcaataagattttg

SEQ ID NO: 1506582 - DNA, 15 bp, Homo sapiens
ccgcaataagatttt

SEQ ID NO: 1506583 - DNA, 15 bp, Homo sapiens
cccgcaataagattt

SEQ ID NO: 1506584 - DNA, 15 bp, Homo sapiens
tcccgcaataagatt

SEQ ID NO: 1506585 - DNA, 15 bp, Homo sapiens
ttcccgcaataagat

SEQ ID NO: 1506586 - DNA, 15 bp, Homo sapiens
tttcccgcaataaga

SEQ ID NO: 1506587 - DNA, 15 bp, Homo sapiens
ctttcccgcaataag

SEQ ID NO: 1506588 - DNA, 15 bp, Homo sapiens
gctttcccgcaataa

SEQ ID NO: 1506589 - DNA, 15 bp, Homo sapiens
tgctttcccgcaata

SEQ ID NO: 1506590 - DNA, 15 bp, Homo sapiens
atgctttcccgcaat

SEQ ID NO: 1506591 - DNA, 15 bp, Homo sapiens
catgctttcccgcaa

SEQ ID NO: 1506592 - DNA, 15 bp, Homo sapiens
acatgctttcccgca

SEQ ID NO: 1506593 - DNA, 15 bp, Homo sapiens
cacatgctttcccgc

SEQ ID NO: 1506594 - DNA, 15 bp, Homo sapiens
ccacatgctttcccg

SEQ ID NO: 1506595 - DNA, 15 bp, Homo sapiens
cccacatgctttccc

SEQ ID NO: 1506596 - DNA, 15 bp, Homo sapiens
tcccacatgctttcc

SEQ ID NO: 1506597 - DNA, 15 bp, Homo sapiens
atcccacatgctttc

SEQ ID NO: 1506598 - DNA, 15 bp, Homo sapiens
catcccacatgcttt

SEQ ID NO: 1506599 - DNA, 15 bp, Homo sapiens
tcatcccacatgctt

SEQ ID NO: 1506600 - DNA, 15 bp, Homo sapiens
ctcatcccacatgct

SEQ ID NO: 1506601 - DNA, 15 bp, Homo sapiens
tctcatcccacatgc

SEQ ID NO: 1506602 - DNA, 15 bp, Homo sapiens
ctctcatcccacatg

SEQ ID NO: 1506603 - DNA, 15 bp, Homo sapiens
tctctcatcccacat

SEQ ID NO: 1506604 - DNA, 15 bp, Homo sapiens
atctctcatcccaca

SEQ ID NO: 1506605 - DNA, 15 bp, Homo sapiens
tatctctcatcccac

SEQ ID NO: 1506606 - DNA, 15 bp, Homo sapiens
gtatctctcatccca

SEQ ID NO: 1506607 - DNA, 15 bp, Homo sapiens
agtatctctcatccc

SEQ ID NO: 1506608 - DNA, 15 bp, Homo sapiens
aagtatctctcatcc

SEQ ID NO: 1506609 - DNA, 15 bp, Homo sapiens
caagtatctctcatc

SEQ ID NO: 1506610 - DNA, 15 bp, Homo sapiens
tcaagtatctctcat

SEQ ID NO: 1506611 - DNA, 15 bp, Homo sapiens
gtcaagtatctctca

SEQ ID NO: 1506612 - DNA, 15 bp, Homo sapiens
tgtcaagtatctctc

SEQ ID NO: 1506613 - DNA, 15 bp, Homo sapiens
ctgtcaagtatctct

SEQ ID NO: 1506614 - DNA, 15 bp, Homo sapiens
actgtcaagtatctc

SEQ ID NO: 1506615 - DNA, 15 bp, Homo sapiens
aactgtcaagtatct

SEQ ID NO: 1506616 - DNA, 15 bp, Homo sapiens
caactgtcaagtatc

SEQ ID NO: 1506617 - DNA, 15 bp, Homo sapiens
ccaactgtcaagtat

SEQ ID NO: 1506618 - DNA, 15 bp, Homo sapiens
tccaactgtcaagta

SEQ ID NO: 1506619 - DNA, 15 bp, Homo sapiens
ttccaactgtcaagt

SEQ ID NO: 1506620 - DNA, 15 bp, Homo sapiens
tttccaactgtcaag

SEQ ID NO: 1506621 - DNA, 15 bp, Homo sapiens
ttttccaactgtcaa

SEQ ID NO: 1506622 - DNA, 15 bp, Homo sapiens
attttccaactgtca

SEQ ID NO: 1506623 - DNA, 15 bp, Homo sapiens
tattttccaactgtc

SEQ ID NO: 1506624 - DNA, 15 bp, Homo sapiens
atattttccaactgt

SEQ ID NO: 1506625 - DNA, 15 bp, Homo sapiens
tatattttccaactg

SEQ ID NO: 1506626 - DNA, 15 bp, Homo sapiens
ttatattttccaact

SEQ ID NO: 1506627 - DNA, 15 bp, Homo sapiens
attatattttccaac

SEQ ID NO: 1506628 - DNA, 15 bp, Homo sapiens
gattatattttccaa

SEQ ID NO: 1506629 - DNA, 15 bp, Homo sapiens
ggattatattttcca

SEQ ID NO: 1506630 - DNA, 15 bp, Homo sapiens
cggattatattttcc

SEQ ID NO: 1506631 - DNA, 15 bp, Homo sapiens
acggattatattttc

SEQ ID NO: 1506632 - DNA, 15 bp, Homo sapiens
cacggattatatttt

SEQ ID NO: 1506633 - DNA, 15 bp, Homo sapiens
tcacggattatattt

SEQ ID NO: 1506634 - DNA, 15 bp, Homo sapiens
gtcacggattatatt

SEQ ID NO: 1506635 - DNA, 15 bp, Homo sapiens
tgtcacggattatat

SEQ ID NO: 1506636 - DNA, 15 bp, Homo sapiens
atgtcacggattata

SEQ ID NO: 1506637 - DNA, 15 bp, Homo sapiens
gatgtcacggattat

SEQ ID NO: 1506638 - DNA, 15 bp, Homo sapiens
cgatgtcacggatta

SEQ ID NO: 1506639 - DNA, 15 bp, Homo sapiens
acgatgtcacggatt

SEQ ID NO: 1506640 - DNA, 15 bp, Homo sapiens
gacgatgtcacggat

SEQ ID NO: 1506641 - DNA, 15 bp, Homo sapiens
tgacgatgtcacgga

SEQ ID NO: 1506642 - DNA, 15 bp, Homo sapiens
ttgacgatgtcacgg

SEQ ID NO: 1506643 - DNA, 15 bp, Homo sapiens
tttgacgatgtcacg

SEQ ID NO: 1506644 - DNA, 15 bp, Homo sapiens
atttgacgatgtcac

SEQ ID NO: 1506645 - DNA, 15 bp, Homo sapiens
aatttgacgatgtca

SEQ ID NO: 1506646 - DNA, 15 bp, Homo sapiens
gaatttgacgatgtc

SEQ ID NO: 1506647 - DNA, 15 bp, Homo sapiens
tgaatttgacgatgt

SEQ ID NO: 1506648 - DNA, 15 bp, Homo sapiens
ttgaatttgacgatg

SEQ ID NO: 1506649 - DNA, 15 bp, Homo sapiens
tttgaatttgacgat

SEQ ID NO: 1506650 - DNA, 15 bp, Homo sapiens
ttttgaatttgacga

SEQ ID NO: 1506651 - DNA, 15 bp, Homo sapiens
attttgaatttgacg

SEQ ID NO: 1506652 - DNA, 15 bp, Homo sapiens
tattttgaatttgac

SEQ ID NO: 1506653 - DNA, 15 bp, Homo sapiens
ttattttgaatttga

SEQ ID NO: 1506654 - DNA, 15 bp, Homo sapiens
tttattttgaatttg

SEQ ID NO: 1506655 - DNA, 15 bp, Homo sapiens
atttattttgaattt

SEQ ID NO: 1506656 - DNA, 15 bp, Homo sapiens
aatttattttgaatt

SEQ ID NO: 1506657 - DNA, 15 bp, Homo sapiens
gaatttattttgaat

SEQ ID NO: 1506658 - DNA, 15 bp, Homo sapiens
tgaatttattttgaa

SEQ ID NO: 1506659 - DNA, 15 bp, Homo sapiens
ctgaatttattttga

SEQ ID NO: 1506660 - DNA, 15 bp, Homo sapiens
tctgaatttattttg

SEQ ID NO: 1506661 - DNA, 15 bp, Homo sapiens
ctctgaatttatttt

SEQ ID NO: 1506662 - DNA, 15 bp, Homo sapiens
actctgaatttattt

SEQ ID NO: 1506663 - DNA, 15 bp, Homo sapiens
aactctgaatttatt

SEQ ID NO: 1506664 - DNA, 15 bp, Homo sapiens
gaactctgaatttat

SEQ ID NO: 1506665 - DNA, 15 bp, Homo sapiens
agaactctgaattta

SEQ ID NO: 1506666 - DNA, 15 bp, Homo sapiens
aagaactctgaattt

SEQ ID NO: 1506667 - DNA, 15 bp, Homo sapiens
taagaactctgaatt

SEQ ID NO: 1506668 - DNA, 15 bp, Homo sapiens
ttaagaactctgaat

SEQ ID NO: 1506669 - DNA, 15 bp, Homo sapiens
tttaagaactctgaa

SEQ ID NO: 1506670 - DNA, 15 bp, Homo sapiens
ttttaagaactctga

SEQ ID NO: 1506671 - DNA, 15 bp, Homo sapiens
attttaagaactctg

SEQ ID NO: 1506672 - DNA, 15 bp, Homo sapiens
cattttaagaactct

SEQ ID NO: 1506673 - DNA, 15 bp, Homo sapiens
ccattttaagaactc

SEQ ID NO: 1506674 - DNA, 15 bp, Homo sapiens
gccattttaagaact

SEQ ID NO: 1506675 - DNA, 15 bp, Homo sapiens
ggccattttaagaac

SEQ ID NO: 1506676 - DNA, 15 bp, Homo sapiens
aggccattttaagaa

SEQ ID NO: 1506677 - DNA, 15 bp, Homo sapiens
taggccattttaaga

SEQ ID NO: 1506678 - DNA, 15 bp, Homo sapiens
ataggccattttaag

SEQ ID NO: 1506679 - DNA, 15 bp, Homo sapiens
tataggccattttaa

SEQ ID NO: 1506680 - DNA, 15 bp, Homo sapiens
ttataggccatttta

SEQ ID NO: 1506681 - DNA, 15 bp, Homo sapiens
cttataggccatttt

SEQ ID NO: 1506682 - DNA, 15 bp, Homo sapiens
ccttataggccattt

SEQ ID NO: 1506683 - DNA, 15 bp, Homo sapiens
gccttataggccatt

SEQ ID NO: 1506684 - DNA, 15 bp, Homo sapiens
agccttataggccat

SEQ ID NO: 1506685 - DNA, 15 bp, Homo sapiens
aagccttataggcca

SEQ ID NO: 1506686 - DNA, 15 bp, Homo sapiens
aaagccttataggcc

SEQ ID NO: 1506687 - DNA, 15 bp, Homo sapiens
aaaagccttataggc

SEQ ID NO: 1506688 - DNA, 15 bp, Homo sapiens
gaaaagccttatagg

SEQ ID NO: 1506689 - DNA, 15 bp, Homo sapiens
tgaaaagccttatag

SEQ ID NO: 1506690 - DNA, 15 bp, Homo sapiens
atgaaaagccttata

SEQ ID NO: 1506691 - DNA, 15 bp, Homo sapiens
catgaaaagccttat

SEQ ID NO: 1506692 - DNA, 15 bp, Homo sapiens
tcatgaaaagcctta

SEQ ID NO: 1506693 - DNA, 15 bp, Homo sapiens
atcatgaaaagcctt

SEQ ID NO: 1506694 - DNA, 15 bp, Homo sapiens
gatcatgaaaagcct

SEQ ID NO: 1506695 - DNA, 15 bp, Homo sapiens
agatcatgaaaagcc

SEQ ID NO: 1506696 - DNA, 15 bp, Homo sapiens
cagatcatgaaaagc

SEQ ID NO: 1506697 - DNA, 15 bp, Homo sapiens
tcagatcatgaaaag

SEQ ID NO: 1506698 - DNA, 15 bp, Homo sapiens
gtcagatcatgaaaa

SEQ ID NO: 1506699 - DNA, 15 bp, Homo sapiens
agtcagatcatgaaa

SEQ ID NO: 1506700 - DNA, 15 bp, Homo sapiens
gagtcagatcatgaa

SEQ ID NO: 1506701 - DNA, 15 bp, Homo sapiens
ggagtcagatcatga

SEQ ID NO: 1506702 - DNA, 15 bp, Homo sapiens
aggagtcagatcatg

SEQ ID NO: 1506703 - DNA, 15 bp, Homo sapiens
caggagtcagatcat

SEQ ID NO: 1506704 - DNA, 15 bp, Homo sapiens
gcaggagtcagatca

SEQ ID NO: 1506705 - DNA, 15 bp, Homo sapiens
agcaggagtcagatc

SEQ ID NO: 1506706 - DNA, 15 bp, Homo sapiens
aagcaggagtcagat

SEQ ID NO: 1506707 - DNA, 15 bp, Homo sapiens
gaagcaggagtcaga

SEQ ID NO: 1506708 - DNA, 15 bp, Homo sapiens
agaagcaggagtcag

SEQ ID NO: 1506709 - DNA, 15 bp, Homo sapiens
aagaagcaggagtca

SEQ ID NO: 1506710 - DNA, 15 bp, Homo sapiens
caagaagcaggagtc

SEQ ID NO: 1506711 - DNA, 15 bp, Homo sapiens
tcaagaagcaggagt

SEQ ID NO: 1506712 - DNA, 15 bp, Homo sapiens
ttcaagaagcaggag

SEQ ID NO: 1506713 - DNA, 15 bp, Homo sapiens
attcaagaagcagga

SEQ ID NO: 1506714 - DNA, 15 bp, Homo sapiens
gattcaagaagcagg

SEQ ID NO: 1506715 - DNA, 15 bp, Homo sapiens
agattcaagaagcag

SEQ ID NO: 1506716 - DNA, 15 bp, Homo sapiens
gagattcaagaagca

SEQ ID NO: 1506717 - DNA, 15 bp, Homo sapiens
agagattcaagaagc

SEQ ID NO: 1506718 - DNA, 15 bp, Homo sapiens
cagagattcaagaag

SEQ ID NO: 1506719 - DNA, 15 bp, Homo sapiens
tcagagattcaagaa

SEQ ID NO: 1506720 - DNA, 15 bp, Homo sapiens
gtcagagattcaaga

SEQ ID NO: 1506721 - DNA, 15 bp, Homo sapiens
ggtcagagattcaag

SEQ ID NO: 1506722 - DNA, 15 bp, Homo sapiens
cggtcagagattcaa

SEQ ID NO: 1506723 - DNA, 15 bp, Homo sapiens
gcggtcagagattca

SEQ ID NO: 1506724 - DNA, 15 bp, Homo sapiens
tgcggtcagagattc

SEQ ID NO: 1506725 - DNA, 15 bp, Homo sapiens
atgcggtcagagatt

SEQ ID NO: 1506726 - DNA, 15 bp, Homo sapiens
gatgcggtcagagat

SEQ ID NO: 1506727 - DNA, 15 bp, Homo sapiens
ggatgcggtcagaga

SEQ ID NO: 1506728 - DNA, 15 bp, Homo sapiens
gggatgcggtcagag

SEQ ID NO: 1506729 - DNA, 15 bp, Homo sapiens
ggggatgcggtcaga

SEQ ID NO: 1506730 - DNA, 15 bp, Homo sapiens
aggggatgcggtcag

SEQ ID NO: 1506731 - DNA, 15 bp, Homo sapiens
taggggatgcggtca

SEQ ID NO: 1506732 - DNA, 15 bp, Homo sapiens
ctaggggatgcggtc

SEQ ID NO: 1506733 - DNA, 15 bp, Homo sapiens
tctaggggatgcggt

SEQ ID NO: 1506734 - DNA, 15 bp, Homo sapiens
atctaggggatgcgg

SEQ ID NO: 1506735 - DNA, 15 bp, Homo sapiens
aatctaggggatgcg

SEQ ID NO: 1506736 - DNA, 15 bp, Homo sapiens
aaatctaggggatgc

SEQ ID NO: 1506737 - DNA, 15 bp, Homo sapiens
aaaatctaggggatg

SEQ ID NO: 1506738 - DNA, 15 bp, Homo sapiens
gaaaatctaggggat

SEQ ID NO: 1506739 - DNA, 15 bp, Homo sapiens
ggaaaatctagggga

SEQ ID NO: 1506740 - DNA, 15 bp, Homo sapiens
aggaaaatctagggg

SEQ ID NO: 1506741 - DNA, 15 bp, Homo sapiens
gaggaaaatctaggg

SEQ ID NO: 1506742 - DNA, 15 bp, Homo sapiens
agaggaaaatctagg

SEQ ID NO: 1506743 - DNA, 15 bp, Homo sapiens
aagaggaaaatctag

SEQ ID NO: 1506744 - DNA, 15 bp, Homo sapiens
gaagaggaaaatcta

SEQ ID NO: 1506745 - DNA, 15 bp, Homo sapiens
cgaagaggaaaatct

SEQ ID NO: 1506746 - DNA, 15 bp, Homo sapiens
acgaagaggaaaatc

SEQ ID NO: 1506747 - DNA, 15 bp, Homo sapiens
aacgaagaggaaaat

SEQ ID NO: 1506748 - DNA, 15 bp, Homo sapiens
gaacgaagaggaaaa

SEQ ID NO: 1506749 - DNA, 15 bp, Homo sapiens
ggaacgaagaggaaa

SEQ ID NO: 1506750 - DNA, 15 bp, Homo sapiens
gggaacgaagaggaa

SEQ ID NO: 1506751 - DNA, 15 bp, Homo sapiens
agggaacgaagagga

SEQ ID NO: 1506752 - DNA, 15 bp, Homo sapiens
aagggaacgaagagg

SEQ ID NO: 1506753 - DNA, 15 bp, Homo sapiens
aaagggaacgaagag

SEQ ID NO: 1506754 - DNA, 15 bp, Homo sapiens
caaagggaacgaaga

SEQ ID NO: 1506755 - DNA, 15 bp, Homo sapiens
ccaaagggaacgaag

SEQ ID NO: 1506756 - DNA, 15 bp, Homo sapiens
cccaaagggaacgaa

SEQ ID NO: 1506757 - DNA, 15 bp, Homo sapiens
acccaaagggaacga

SEQ ID NO: 1506758 - DNA, 15 bp, Homo sapiens
aacccaaagggaacg

SEQ ID NO: 1506759 - DNA, 15 bp, Homo sapiens
taacccaaagggaac

SEQ ID NO: 1506760 - DNA, 15 bp, Homo sapiens
ttaacccaaagggaa

SEQ ID NO: 1506761 - DNA, 15 bp, Homo sapiens
gttaacccaaaggga

SEQ ID NO: 1506762 - DNA, 15 bp, Homo sapiens
ggttaacccaaaggg

SEQ ID NO: 1506763 - DNA, 15 bp, Homo sapiens
tggttaacccaaagg

SEQ ID NO: 1506764 - DNA, 15 bp, Homo sapiens
gtggttaacccaaag

SEQ ID NO: 1506765 - DNA, 15 bp, Homo sapiens
tgtggttaacccaaa

SEQ ID NO: 1506766 - DNA, 15 bp, Homo sapiens
atgtggttaacccaa

SEQ ID NO: 1506767 - DNA, 15 bp, Homo sapiens
aatgtggttaaccca

SEQ ID NO: 1506768 - DNA, 15 bp, Homo sapiens
caatgtggttaaccc

SEQ ID NO: 1506769 - DNA, 15 bp, Homo sapiens
ccaatgtggttaacc

SEQ ID NO: 1506770 - DNA, 15 bp, Homo sapiens
gccaatgtggttaac

SEQ ID NO: 1506771 - DNA, 15 bp, Homo sapiens
ggccaatgtggttaa

SEQ ID NO: 1506772 - DNA, 15 bp, Homo sapiens
gggccaatgtggtta

SEQ ID NO: 1506773 - DNA, 15 bp, Homo sapiens
agggccaatgtggtt

SEQ ID NO: 1506774 - DNA, 15 bp, Homo sapiens
gagggccaatgtggt

SEQ ID NO: 1506775 - DNA, 15 bp, Homo sapiens
agagggccaatgtgg

SEQ ID NO: 1506776 - DNA, 15 bp, Homo sapiens
aagagggccaatgtg

SEQ ID NO: 1506777 - DNA, 15 bp, Homo sapiens
caagagggccaatgt

SEQ ID NO: 1506778 - DNA, 15 bp, Homo sapiens
gcaagagggccaatg

SEQ ID NO: 1506779 - DNA, 15 bp, Homo sapiens
agcaagagggccaat

SEQ ID NO: 1506780 - DNA, 15 bp, Homo sapiens
tagcaagagggccaa

SEQ ID NO: 1506781 - DNA, 15 bp, Homo sapiens
ctagcaagagggcca

SEQ ID NO: 1506782 - DNA, 15 bp, Homo sapiens
cctagcaagagggcc

SEQ ID NO: 1506783 - DNA, 15 bp, Homo sapiens
gcctagcaagagggc

SEQ ID NO: 1506784 - DNA, 15 bp, Homo sapiens
agcctagcaagaggg

SEQ ID NO: 1506785 - DNA, 15 bp, Homo sapiens
aagcctagcaagagg

SEQ ID NO: 1506786 - DNA, 15 bp, Homo sapiens
aaagcctagcaagag

SEQ ID NO: 1506787 - DNA, 15 bp, Homo sapiens
caaagcctagcaaga

SEQ ID NO: 1506788 - DNA, 15 bp, Homo sapiens
tcaaagcctagcaag

SEQ ID NO: 1506789 - DNA, 15 bp, Homo sapiens
ttcaaagcctagcaa

SEQ ID NO: 1506790 - DNA, 15 bp, Homo sapiens
gttcaaagcctagca

SEQ ID NO: 1506791 - DNA, 15 bp, Homo sapiens
tgttcaaagcctagc

SEQ ID NO: 1506792 - DNA, 15 bp, Homo sapiens
atgttcaaagcctag

SEQ ID NO: 1506793 - DNA, 15 bp, Homo sapiens
catgttcaaagccta

SEQ ID NO: 1506794 - DNA, 15 bp, Homo sapiens
gcatgttcaaagcct

SEQ ID NO: 1506795 - DNA, 15 bp, Homo sapiens
ggcatgttcaaagcc

SEQ ID NO: 1506796 - DNA, 15 bp, Homo sapiens
tggcatgttcaaagc

SEQ ID NO: 1506797 - DNA, 15 bp, Homo sapiens
gtggcatgttcaaag

SEQ ID NO: 1506798 - DNA, 15 bp, Homo sapiens
tgtggcatgttcaaa

SEQ ID NO: 1506799 - DNA, 15 bp, Homo sapiens
gtgtggcatgttcaa

SEQ ID NO: 1506800 - DNA, 15 bp, Homo sapiens
ggtgtggcatgttca

SEQ ID NO: 1506801 - DNA, 15 bp, Homo sapiens
gggtgtggcatgttc

SEQ ID NO: 1506802 - DNA, 15 bp, Homo sapiens
tgggtgtggcatgtt

SEQ ID NO: 1506803 - DNA, 15 bp, Homo sapiens
ttgggtgtggcatgt

SEQ ID NO: 1506804 - DNA, 15 bp, Homo sapiens
gttgggtgtggcatg

SEQ ID NO: 1506805 - DNA, 15 bp, Homo sapiens
tgttgggtgtggcat

SEQ ID NO: 1506806 - DNA, 15 bp, Homo sapiens
atgttgggtgtggca

SEQ ID NO: 1506807 - DNA, 15 bp, Homo sapiens
gatgttgggtgtggc

SEQ ID NO: 1506808 - DNA, 15 bp, Homo sapiens
tgatgttgggtgtgg

SEQ ID NO: 1506809 - DNA, 15 bp, Homo sapiens
ctgatgttgggtgtg

SEQ ID NO: 1506810 - DNA, 15 bp, Homo sapiens
tctgatgttgggtgt

SEQ ID NO: 1506811 - DNA, 15 bp, Homo sapiens
atctgatgttgggtg

SEQ ID NO: 1506812 - DNA, 15 bp, Homo sapiens
gatctgatgttgggt

SEQ ID NO: 1506813 - DNA, 15 bp, Homo sapiens
ggatctgatgttggg

SEQ ID NO: 1506814 - DNA, 15 bp, Homo sapiens
tggatctgatgttgg

SEQ ID NO: 1506815 - DNA, 15 bp, Homo sapiens
atggatctgatgttg

SEQ ID NO: 1506816 - DNA, 15 bp, Homo sapiens
aatggatctgatgtt

SEQ ID NO: 1506817 - DNA, 15 bp, Homo sapiens
aaatggatctgatgt

SEQ ID NO: 1506818 - DNA, 15 bp, Homo sapiens
aaaatggatctgatg

SEQ ID NO: 1506819 - DNA, 15 bp, Homo sapiens
taaaatggatctgat

SEQ ID NO: 1506820 - DNA, 15 bp, Homo sapiens
gtaaaatggatctga

SEQ ID NO: 1506821 - DNA, 15 bp, Homo sapiens
agtaaaatggatctg

SEQ ID NO: 1506822 - DNA, 15 bp, Homo sapiens
aagtaaaatggatct

SEQ ID NO: 1506823 - DNA, 15 bp, Homo sapiens
caagtaaaatggatc

SEQ ID NO: 1506824 - DNA, 15 bp, Homo sapiens
gcaagtaaaatggat

SEQ ID NO: 1506825 - DNA, 15 bp, Homo sapiens
tgcaagtaaaatgga

SEQ ID NO: 1506826 - DNA, 15 bp, Homo sapiens
ttgcaagtaaaatgg

SEQ ID NO: 1506827 - DNA, 15 bp, Homo sapiens
gttgcaagtaaaatg

SEQ ID NO: 1506828 - DNA, 15 bp, Homo sapiens
agttgcaagtaaaat

SEQ ID NO: 1506829 - DNA, 15 bp, Homo sapiens
tagttgcaagtaaaa

SEQ ID NO: 1506830 - DNA, 15 bp, Homo sapiens
gtagttgcaagtaaa

SEQ ID NO: 1506831 - DNA, 15 bp, Homo sapiens
agtagttgcaagtaa

SEQ ID NO: 1506832 - DNA, 15 bp, Homo sapiens
cagtagttgcaagta

SEQ ID NO: 1506833 - DNA, 15 bp, Homo sapiens
gcagtagttgcaagt

SEQ ID NO: 1506834 - DNA, 15 bp, Homo sapiens
ggcagtagttgcaag

SEQ ID NO: 1506835 - DNA, 15 bp, Homo sapiens
cggcagtagttgcaa

SEQ ID NO: 1506836 - DNA, 15 bp, Homo sapiens
acggcagtagttgca

SEQ ID NO: 1506837 - DNA, 15 bp, Homo sapiens
cacggcagtagttgc

SEQ ID NO: 1506838 - DNA, 15 bp, Homo sapiens
tcacggcagtagttg

SEQ ID NO: 1506839 - DNA, 15 bp, Homo sapiens
ttcacggcagtagtt

SEQ ID NO: 1506840 - DNA, 15 bp, Homo sapiens
attcacggcagtagt

SEQ ID NO: 1506841 - DNA, 15 bp, Homo sapiens
cattcacggcagtag

SEQ ID NO: 1506842 - DNA, 15 bp, Homo sapiens
gcattcacggcagta

SEQ ID NO: 1506843 - DNA, 15 bp, Homo sapiens
agcattcacggcagt

SEQ ID NO: 1506844 - DNA, 15 bp, Homo sapiens
gagcattcacggcag

SEQ ID NO: 1506845 - DNA, 15 bp, Homo sapiens
agagcattcacggca

SEQ ID NO: 1506846 - DNA, 15 bp, Homo sapiens
aagagcattcacggc

SEQ ID NO: 1506847 - DNA, 15 bp, Homo sapiens
gaagagcattcacgg

SEQ ID NO: 1506848 - DNA, 15 bp, Homo sapiens
agaagagcattcacg

SEQ ID NO: 1506849 - DNA, 15 bp, Homo sapiens
aagaagagcattcac

SEQ ID NO: 1506850 - DNA, 15 bp, Homo sapiens
aaagaagagcattca

SEQ ID NO: 1506851 - DNA, 15 bp, Homo sapiens
taaagaagagcattc

SEQ ID NO: 1506852 - DNA, 15 bp, Homo sapiens
ctaaagaagagcatt

SEQ ID NO: 1506853 - DNA, 15 bp, Homo sapiens
tctaaagaagagcat

SEQ ID NO: 1506854 - DNA, 15 bp, Homo sapiens
atctaaagaagagca

SEQ ID NO: 1506855 - DNA, 15 bp, Homo sapiens
gatctaaagaagagc

SEQ ID NO: 1506856 - DNA, 15 bp, Homo sapiens
agatctaaagaagag

SEQ ID NO: 1506857 - DNA, 15 bp, Homo sapiens
aagatctaaagaaga

SEQ ID NO: 1506858 - DNA, 15 bp, Homo sapiens
aaagatctaaagaag

SEQ ID NO: 1506859 - DNA, 15 bp, Homo sapiens
caaagatctaaagaa

SEQ ID NO: 1506860 - DNA, 15 bp, Homo sapiens
gcaaagatctaaaga

SEQ ID NO: 1506861 - DNA, 15 bp, Homo sapiens
tgcaaagatctaaag

SEQ ID NO: 1506862 - DNA, 15 bp, Homo sapiens
atgcaaagatctaaa

SEQ ID NO: 1506863 - DNA, 15 bp, Homo sapiens
catgcaaagatctaa

SEQ ID NO: 1506864 - DNA, 15 bp, Homo sapiens
ccatgcaaagatcta

SEQ ID NO: 1506865 - DNA, 15 bp, Homo sapiens
cccatgcaaagatct

SEQ ID NO: 1506866 - DNA, 15 bp, Homo sapiens
acccatgcaaagatc

SEQ ID NO: 1506867 - DNA, 15 bp, Homo sapiens
gacccatgcaaagat

SEQ ID NO: 1506868 - DNA, 15 bp, Homo sapiens
agacccatgcaaaga

SEQ ID NO: 1506869 - DNA, 15 bp, Homo sapiens
aagacccatgcaaag

SEQ ID NO: 1506870 - DNA, 15 bp, Homo sapiens
gaagacccatgcaaa

SEQ ID NO: 1506871 - DNA, 15 bp, Homo sapiens
ggaagacccatgcaa

SEQ ID NO: 1506872 - DNA, 15 bp, Homo sapiens
gggaagacccatgca

SEQ ID NO: 1506873 - DNA, 15 bp, Homo sapiens
cgggaagacccatgc

SEQ ID NO: 1506874 - DNA, 15 bp, Homo sapiens
acgggaagacccatg

SEQ ID NO: 1506875 - DNA, 15 bp, Homo sapiens
aacgggaagacccat

SEQ ID NO: 1506876 - DNA, 15 bp, Homo sapiens
gaacgggaagaccca

SEQ ID NO: 1506877 - DNA, 15 bp, Homo sapiens
agaacgggaagaccc

SEQ ID NO: 1506878 - DNA, 15 bp, Homo sapiens
gagaacgggaagacc

SEQ ID NO: 1506879 - DNA, 15 bp, Homo sapiens
tgagaacgggaagac

SEQ ID NO: 1506880 - DNA, 15 bp, Homo sapiens
atgagaacgggaaga

SEQ ID NO: 1506881 - DNA, 15 bp, Homo sapiens
aatgagaacgggaag

SEQ ID NO: 1506882 - DNA, 15 bp, Homo sapiens
gaatgagaacgggaa

SEQ ID NO: 1506883 - DNA, 15 bp, Homo sapiens
tgaatgagaacggga

SEQ ID NO: 1506884 - DNA, 15 bp, Homo sapiens
atgaatgagaacggg

SEQ ID NO: 1506885 - DNA, 15 bp, Homo sapiens
aatgaatgagaacgg

SEQ ID NO: 1506886 - DNA, 15 bp, Homo sapiens
gaatgaatgagaacg

SEQ ID NO: 1506887 - DNA, 15 bp, Homo sapiens
tgaatgaatgagaac

SEQ ID NO: 1506888 - DNA, 15 bp, Homo sapiens
atgaatgaatgagaa

SEQ ID NO: 1506889 - DNA, 15 bp, Homo sapiens
aatgaatgaatgaga

SEQ ID NO: 1506890 - DNA, 15 bp, Homo sapiens
aaatgaatgaatgaa

SEQ ID NO: 1506891 - DNA, 15 bp, Homo sapiens
aaaatgaatgaatga

SEQ ID NO: 1506892 - DNA, 15 bp, Homo sapiens
caaaatgaatgaatg

SEQ ID NO: 1506893 - DNA, 15 bp, Homo sapiens
tcaaaatgaatgaat

SEQ ID NO: 1506894 - DNA, 15 bp, Homo sapiens
ctcaaaatgaatgaa

SEQ ID NO: 1506895 - DNA, 15 bp, Homo sapiens
tctcaaaatgaatga

SEQ ID NO: 1506896 - DNA, 15 bp, Homo sapiens
gtctcaaaatgaatg

SEQ ID NO: 1506897 - DNA, 15 bp, Homo sapiens
tgtctcaaaatgaat

SEQ ID NO: 1506898 - DNA, 15 bp, Homo sapiens
ctgtctcaaaatgaa

SEQ ID NO: 1506899 - DNA, 15 bp, Homo sapiens
cctgtctcaaaatga

SEQ ID NO: 1506900 - DNA, 15 bp, Homo sapiens
ccctgtctcaaaatg

SEQ ID NO: 1506901 - DNA, 15 bp, Homo sapiens
cagatcgtgccactg

SEQ ID NO: 1506902 - DNA, 15 bp, Homo sapiens
ccagatcgtgccact

SEQ ID NO: 1506903 - DNA, 15 bp, Homo sapiens
cccagatcgtgccac

SEQ ID NO: 1506904 - DNA, 15 bp, Homo sapiens
gcccagatcgtgcca

SEQ ID NO: 1506905 - DNA, 15 bp, Homo sapiens
agcccagatcgtgcc

SEQ ID NO: 1506906 - DNA, 15 bp, Homo sapiens
gagcccagatcgtgc

SEQ ID NO: 1506907 - DNA, 15 bp, Homo sapiens
tgagcccagatcgtg

SEQ ID NO: 1506908 - DNA, 15 bp, Homo sapiens
ttgagcccagatcgt

SEQ ID NO: 1506909 - DNA, 15 bp, Homo sapiens
attgagcccagatcg

SEQ ID NO: 1506910 - DNA, 15 bp, Homo sapiens
cattgagcccagatc

SEQ ID NO: 1506911 - DNA, 15 bp, Homo sapiens
gcattgagcccagat

SEQ ID NO: 1506912 - DNA, 15 bp, Homo sapiens
tgcattgagcccaga

SEQ ID NO: 1506913 - DNA, 15 bp, Homo sapiens
ttgcattgagcccag

SEQ ID NO: 1506914 - DNA, 15 bp, Homo sapiens
gttgcattgagccca

SEQ ID NO: 1506915 - DNA, 15 bp, Homo sapiens
ggttgcattgagccc

SEQ ID NO: 1506916 - DNA, 15 bp, Homo sapiens
aggttgcattgagcc

SEQ ID NO: 1506917 - DNA, 15 bp, Homo sapiens
gaggttgcattgagc

SEQ ID NO: 1506918 - DNA, 15 bp, Homo sapiens
ggaggttgcattgag

SEQ ID NO: 1506919 - DNA, 15 bp, Homo sapiens
cggaggttgcattga

SEQ ID NO: 1506920 - DNA, 15 bp, Homo sapiens
gcggaggttgcattg

SEQ ID NO: 1506921 - DNA, 15 bp, Homo sapiens
ggcggaggttgcatt

SEQ ID NO: 1506922 - DNA, 15 bp, Homo sapiens
aggcggaggttgcat

SEQ ID NO: 1506923 - DNA, 15 bp, Homo sapiens
gtgggagaattgctt

SEQ ID NO: 1506924 - DNA, 15 bp, Homo sapiens
ggtgggagaattgct

SEQ ID NO: 1506925 - DNA, 15 bp, Homo sapiens
aggtgggagaattgc

SEQ ID NO: 1506926 - DNA, 15 bp, Homo sapiens
gaggtgggagaattg

SEQ ID NO: 1506927 - DNA, 15 bp, Homo sapiens
tgaggtgggagaatt

SEQ ID NO: 1506928 - DNA, 15 bp, Homo sapiens
caggaggctgaggtg

SEQ ID NO: 1506929 - DNA, 15 bp, Homo sapiens
tcaggaggctgaggt

SEQ ID NO: 1506930 - DNA, 15 bp, Homo sapiens
tgcagtcccagctac

SEQ ID NO: 1506931 - DNA, 15 bp, Homo sapiens
gtgcagtcccagcta

SEQ ID NO: 1506932 - DNA, 15 bp, Homo sapiens
cgtgcagtcccagct

SEQ ID NO: 1506933 - DNA, 15 bp, Homo sapiens
gcgtgcagtcccagc

SEQ ID NO: 1506934 - DNA, 15 bp, Homo sapiens
tgcgtgcagtcccag

SEQ ID NO: 1506935 - DNA, 15 bp, Homo sapiens
atgcgtgcagtccca

SEQ ID NO: 1506936 - DNA, 15 bp, Homo sapiens
catgcgtgcagtccc

SEQ ID NO: 1506937 - DNA, 15 bp, Homo sapiens
acatgcgtgcagtcc

SEQ ID NO: 1506938 - DNA, 15 bp, Homo sapiens
tacatgcgtgcagtc

SEQ ID NO: 1506939 - DNA, 15 bp, Homo sapiens
gtacatgcgtgcagt

SEQ ID NO: 1506940 - DNA, 15 bp, Homo sapiens
ggtacatgcgtgcag

SEQ ID NO: 1506941 - DNA, 15 bp, Homo sapiens
tggtacatgcgtgca

SEQ ID NO: 1506942 - DNA, 15 bp, Homo sapiens
gtggtacatgcgtgc

SEQ ID NO: 1506943 - DNA, 15 bp, Homo sapiens
ggtggtacatgcgtg

SEQ ID NO: 1506944 - DNA, 15 bp, Homo sapiens
tggtggtacatgcgt

SEQ ID NO: 1506945 - DNA, 15 bp, Homo sapiens
atggtggtacatgcg

SEQ ID NO: 1506946 - DNA, 15 bp, Homo sapiens
catggtggtacatgc

SEQ ID NO: 1506947 - DNA, 15 bp, Homo sapiens
gcatggtggtacatg

SEQ ID NO: 1506948 - DNA, 15 bp, Homo sapiens
ggcatggtggtacat

SEQ ID NO: 1506949 - DNA, 15 bp, Homo sapiens
aggcatggtggtaca

SEQ ID NO: 1506950 - DNA, 15 bp, Homo sapiens
caggcatggtggtac

SEQ ID NO: 1506951 - DNA, 15 bp, Homo sapiens
cccaaaaatacaaaa

SEQ ID NO: 1506952 - DNA, 15 bp, Homo sapiens
acccaaaaatacaaa

SEQ ID NO: 1506953 - DNA, 15 bp, Homo sapiens
aacccaaaaatacaa

SEQ ID NO: 1506954 - DNA, 15 bp, Homo sapiens
aaacccaaaaataca

SEQ ID NO: 1506955 - DNA, 15 bp, Homo sapiens
gaaacccaaaaatac

SEQ ID NO: 1506956 - DNA, 15 bp, Homo sapiens
tgaaacccaaaaata

SEQ ID NO: 1506957 - DNA, 15 bp, Homo sapiens
gtgaaacccaaaaat

SEQ ID NO: 1506958 - DNA, 15 bp, Homo sapiens
cgtgaaacccaaaaa

SEQ ID NO: 1506959 - DNA, 15 bp, Homo sapiens
tcgtgaaacccaaaa

SEQ ID NO: 1506960 - DNA, 15 bp, Homo sapiens
ctcgtgaaacccaaa

SEQ ID NO: 1506961 - DNA, 15 bp, Homo sapiens
cctcgtgaaacccaa

SEQ ID NO: 1506962 - DNA, 15 bp, Homo sapiens
acctcgtgaaaccca

SEQ ID NO: 1506963 - DNA, 15 bp, Homo sapiens
aacctcgtgaaaccc

SEQ ID NO: 1506964 - DNA, 15 bp, Homo sapiens
aaacctcgtgaaacc

SEQ ID NO: 1506965 - DNA, 15 bp, Homo sapiens
gaaacctcgtgaaac

SEQ ID NO: 1506966 - DNA, 15 bp, Homo sapiens
ggaaacctcgtgaaa

SEQ ID NO: 1506967 - DNA, 15 bp, Homo sapiens
gggaaacctcgtgaa

SEQ ID NO: 1506968 - DNA, 15 bp, Homo sapiens
ggggaaacctcgtga

SEQ ID NO: 1506969 - DNA, 15 bp, Homo sapiens
tggggaaacctcgtg

SEQ ID NO: 1506970 - DNA, 15 bp, Homo sapiens
atggggaaacctcgt

SEQ ID NO: 1506971 - DNA, 15 bp, Homo sapiens
aatggggaaacctcg

SEQ ID NO: 1506972 - DNA, 15 bp, Homo sapiens
aaatggggaaacctc

SEQ ID NO: 1506973 - DNA, 15 bp, Homo sapiens
caaatggggaaacct

SEQ ID NO: 1506974 - DNA, 15 bp, Homo sapiens
ccaaatggggaaacc

SEQ ID NO: 1506975 - DNA, 15 bp, Homo sapiens
gccaaatggggaaac

SEQ ID NO: 1506976 - DNA, 15 bp, Homo sapiens
ggccaaatggggaaa

SEQ ID NO: 1506977 - DNA, 15 bp, Homo sapiens
tggccaaatggggaa

SEQ ID NO: 1506978 - DNA, 15 bp, Homo sapiens
ctggccaaatgggga

SEQ ID NO: 1506979 - DNA, 15 bp, Homo sapiens
cctggccaaatgggg

SEQ ID NO: 1506980 - DNA, 15 bp, Homo sapiens
gcctggccaaatggg

SEQ ID NO: 1506981 - DNA, 15 bp, Homo sapiens
agcctggccaaatgg

SEQ ID NO: 1506982 - DNA, 15 bp, Homo sapiens
cagcctggccaaatg

SEQ ID NO: 1506983 - DNA, 15 bp, Homo sapiens
ccagcctggccaaat

SEQ ID NO: 1506984 - DNA, 15 bp, Homo sapiens
gtcaggaatttgaga

SEQ ID NO: 1506985 - DNA, 15 bp, Homo sapiens
ggtcaggaatttgag

SEQ ID NO: 1506986 - DNA, 15 bp, Homo sapiens
aggtcaggaatttga

SEQ ID NO: 1506987 - DNA, 15 bp, Homo sapiens
gaggtcaggaatttg

SEQ ID NO: 1506988 - DNA, 15 bp, Homo sapiens
tgaggtcaggaattt

SEQ ID NO: 1506989 - DNA, 15 bp, Homo sapiens
atgaggtcaggaatt

SEQ ID NO: 1506990 - DNA, 15 bp, Homo sapiens
catgaggtcaggaat

SEQ ID NO: 1506991 - DNA, 15 bp, Homo sapiens
acatgaggtcaggaa

SEQ ID NO: 1506992 - DNA, 15 bp, Homo sapiens
cacatgaggtcagga

SEQ ID NO: 1506993 - DNA, 15 bp, Homo sapiens
tcacatgaggtcagg

SEQ ID NO: 1506994 - DNA, 15 bp, Homo sapiens
atcacatgaggtcag

SEQ ID NO: 1506995 - DNA, 15 bp, Homo sapiens
gatcacatgaggtca

SEQ ID NO: 1506996 - DNA, 15 bp, Homo sapiens
ggatcacatgaggtc

SEQ ID NO: 1506997 - DNA, 15 bp, Homo sapiens
cggatcacatgaggt

SEQ ID NO: 1506998 - DNA, 15 bp, Homo sapiens
gcggatcacatgagg

SEQ ID NO: 1506999 - DNA, 15 bp, Homo sapiens
ggcggatcacatgag

SEQ ID NO: 1507000 - DNA, 15 bp, Homo sapiens
gggcggatcacatga

SEQ ID NO: 1507001 - DNA, 15 bp, Homo sapiens
cgggcggatcacatg

SEQ ID NO: 1507002 - DNA, 15 bp, Homo sapiens
acctctaatcccagc

SEQ ID NO: 1507003 - DNA, 15 bp, Homo sapiens
cacctctaatcccag

SEQ ID NO: 1507004 - DNA, 15 bp, Homo sapiens
acacctctaatccca

SEQ ID NO: 1507005 - DNA, 15 bp, Homo sapiens
cacacctctaatccc

SEQ ID NO: 1507006 - DNA, 15 bp, Homo sapiens
tcacacctctaatcc

SEQ ID NO: 1507007 - DNA, 15 bp, Homo sapiens
ttcacacctctaatc

SEQ ID NO: 1507008 - DNA, 15 bp, Homo sapiens
gttcacacctctaat

SEQ ID NO: 1507009 - DNA, 15 bp, Homo sapiens
ggttcacacctctaa

SEQ ID NO: 1507010 - DNA, 15 bp, Homo sapiens
tggttcacacctcta

SEQ ID NO: 1507011 - DNA, 15 bp, Homo sapiens
gtggttcacacctct

SEQ ID NO: 1507012 - DNA, 15 bp, Homo sapiens
agtggttcacacctc

SEQ ID NO: 1507013 - DNA, 15 bp, Homo sapiens
tagtggttcacacct

SEQ ID NO: 1507014 - DNA, 15 bp, Homo sapiens
ttagtggttcacacc

SEQ ID NO: 1507015 - DNA, 15 bp, Homo sapiens
attagtggttcacac

SEQ ID NO: 1507016 - DNA, 15 bp, Homo sapiens
gattagtggttcaca

SEQ ID NO: 1507017 - DNA, 15 bp, Homo sapiens
ggattagtggttcac

SEQ ID NO: 1507018 - DNA, 15 bp, Homo sapiens
gggattagtggttca

SEQ ID NO: 1507019 - DNA, 15 bp, Homo sapiens
tgggattagtggttc

SEQ ID NO: 1507020 - DNA, 15 bp, Homo sapiens
atgggattagtggtt

SEQ ID NO: 1507021 - DNA, 15 bp, Homo sapiens
catgggattagtggt

SEQ ID NO: 1507022 - DNA, 15 bp, Homo sapiens
ccatgggattagtgg

SEQ ID NO: 1507023 - DNA, 15 bp, Homo sapiens
gccatgggattagtg

SEQ ID NO: 1507024 - DNA, 15 bp, Homo sapiens
agccatgggattagt

SEQ ID NO: 1507025 - DNA, 15 bp, Homo sapiens
cagccatgggattag

SEQ ID NO: 1507026 - DNA, 15 bp, Homo sapiens
ccagccatgggatta

SEQ ID NO: 1507027 - DNA, 15 bp, Homo sapiens
accagccatgggatt

SEQ ID NO: 1507028 - DNA, 15 bp, Homo sapiens
gaccagccatgggat

SEQ ID NO: 1507029 - DNA, 15 bp, Homo sapiens
agaccagccatggga

SEQ ID NO: 1507030 - DNA, 15 bp, Homo sapiens
aagaccagccatggg

SEQ ID NO: 1507031 - DNA, 15 bp, Homo sapiens
gaagaccagccatgg

SEQ ID NO: 1507032 - DNA, 15 bp, Homo sapiens
ggaagaccagccatg

SEQ ID NO: 1507033 - DNA, 15 bp, Homo sapiens
gggaagaccagccat

SEQ ID NO: 1507034 - DNA, 15 bp, Homo sapiens
tgggaagaccagcca

SEQ ID NO: 1507035 - DNA, 15 bp, Homo sapiens
atgggaagaccagcc

SEQ ID NO: 1507036 - DNA, 15 bp, Homo sapiens
aatgggaagaccagc

SEQ ID NO: 1507037 - DNA, 15 bp, Homo sapiens
aaatgggaagaccag

SEQ ID NO: 1507038 - DNA, 15 bp, Homo sapiens
aaaatgggaagacca

SEQ ID NO: 1507039 - DNA, 15 bp, Homo sapiens
aaaaatgggaagacc

SEQ ID NO: 1507040 - DNA, 15 bp, Homo sapiens
aaaaaatgggaagac

SEQ ID NO: 1507041 - DNA, 15 bp, Homo sapiens
aaaaaaatgggaaga

SEQ ID NO: 1507042 - DNA, 15 bp, Homo sapiens
taaaaaaatgggaag

SEQ ID NO: 1507043 - DNA, 15 bp, Homo sapiens
gtaaaaaaatgggaa

SEQ ID NO: 1507044 - DNA, 15 bp, Homo sapiens
agtaaaaaaatggga

SEQ ID NO: 1507045 - DNA, 15 bp, Homo sapiens
aagtaaaaaaatggg

SEQ ID NO: 1507046 - DNA, 15 bp, Homo sapiens
gaagtaaaaaaatgg

SEQ ID NO: 1507047 - DNA, 15 bp, Homo sapiens
tgaagtaaaaaaatg

SEQ ID NO: 1507048 - DNA, 15 bp, Homo sapiens
atgaagtaaaaaaat

SEQ ID NO: 1507049 - DNA, 15 bp, Homo sapiens
aatgaagtaaaaaaa

SEQ ID NO: 1507050 - DNA, 15 bp, Homo sapiens
aaatgaagtaaaaaa

SEQ ID NO: 1507051 - DNA, 15 bp, Homo sapiens
taaatgaagtaaaaa

SEQ ID NO: 1507052 - DNA, 15 bp, Homo sapiens
ctaaatgaagtaaaa

SEQ ID NO: 1507053 - DNA, 15 bp, Homo sapiens
cctaaatgaagtaaa

SEQ ID NO: 1507054 - DNA, 15 bp, Homo sapiens
acctaaatgaagtaa

SEQ ID NO: 1507055 - DNA, 15 bp, Homo sapiens
gacctaaatgaagta

SEQ ID NO: 1507056 - DNA, 15 bp, Homo sapiens
agacctaaatgaagt

SEQ ID NO: 1507057 - DNA, 15 bp, Homo sapiens
gagacctaaatgaag

SEQ ID NO: 1507058 - DNA, 15 bp, Homo sapiens
agagacctaaatgaa

SEQ ID NO: 1507059 - DNA, 15 bp, Homo sapiens
cagagacctaaatga

SEQ ID NO: 1507060 - DNA, 15 bp, Homo sapiens
gcagagacctaaatg

SEQ ID NO: 1507061 - DNA, 15 bp, Homo sapiens
agcagagacctaaat

SEQ ID NO: 1507062 - DNA, 15 bp, Homo sapiens
gagcagagacctaaa

SEQ ID NO: 1507063 - DNA, 15 bp, Homo sapiens
tgagcagagacctaa

SEQ ID NO: 1507064 - DNA, 15 bp, Homo sapiens
ttgagcagagaccta

SEQ ID NO: 1507065 - DNA, 15 bp, Homo sapiens
tttgagcagagacct

SEQ ID NO: 1507066 - DNA, 15 bp, Homo sapiens
atttgagcagagacc

SEQ ID NO: 1507067 - DNA, 15 bp, Homo sapiens
catttgagcagagac

SEQ ID NO: 1507068 - DNA, 15 bp, Homo sapiens
acatttgagcagaga

SEQ ID NO: 1507069 - DNA, 15 bp, Homo sapiens
gacatttgagcagag

SEQ ID NO: 1507070 - DNA, 15 bp, Homo sapiens
tgacatttgagcaga

SEQ ID NO: 1507071 - DNA, 15 bp, Homo sapiens
gtgacatttgagcag

SEQ ID NO: 1507072 - DNA, 15 bp, Homo sapiens
tgtgacatttgagca

SEQ ID NO: 1507073 - DNA, 15 bp, Homo sapiens
atgtgacatttgagc

SEQ ID NO: 1507074 - DNA, 15 bp, Homo sapiens
gatgtgacatttgag

SEQ ID NO: 1507075 - DNA, 15 bp, Homo sapiens
agatgtgacatttga

SEQ ID NO: 1507076 - DNA, 15 bp, Homo sapiens
aagatgtgacatttg

SEQ ID NO: 1507077 - DNA, 15 bp, Homo sapiens
gaagatgtgacattt

SEQ ID NO: 1507078 - DNA, 15 bp, Homo sapiens
tgaagatgtgacatt

SEQ ID NO: 1507079 - DNA, 15 bp, Homo sapiens
ctgaagatgtgacat

SEQ ID NO: 1507080 - DNA, 15 bp, Homo sapiens
tctgaagatgtgaca

SEQ ID NO: 1507081 - DNA, 15 bp, Homo sapiens
ctctgaagatgtgac

SEQ ID NO: 1507082 - DNA, 15 bp, Homo sapiens
tctctgaagatgtga

SEQ ID NO: 1507083 - DNA, 15 bp, Homo sapiens
ctctctgaagatgtg

SEQ ID NO: 1507084 - DNA, 15 bp, Homo sapiens
gctctctgaagatgt

SEQ ID NO: 1507085 - DNA, 15 bp, Homo sapiens
agctctctgaagatg

SEQ ID NO: 1507086 - DNA, 15 bp, Homo sapiens
aagctctctgaagat

SEQ ID NO: 1507087 - DNA, 15 bp, Homo sapiens
gaagctctctgaaga

SEQ ID NO: 1507088 - DNA, 15 bp, Homo sapiens
ggaagctctctgaag

SEQ ID NO: 1507089 - DNA, 15 bp, Homo sapiens
gggaagctctctgaa

SEQ ID NO: 1507090 - DNA, 15 bp, Homo sapiens
ggggaagctctctga

SEQ ID NO: 1507091 - DNA, 15 bp, Homo sapiens
aggggaagctctctg

SEQ ID NO: 1507092 - DNA, 15 bp, Homo sapiens
caggggaagctctct

SEQ ID NO: 1507093 - DNA, 15 bp, Homo sapiens
tcaggggaagctctc

SEQ ID NO: 1507094 - DNA, 15 bp, Homo sapiens
ttcaggggaagctct

SEQ ID NO: 1507095 - DNA, 15 bp, Homo sapiens
gttcaggggaagctc

SEQ ID NO: 1507096 - DNA, 15 bp, Homo sapiens
tgttcaggggaagct

SEQ ID NO: 1507097 - DNA, 15 bp, Homo sapiens
gtgttcaggggaagc

SEQ ID NO: 1507098 - DNA, 15 bp, Homo sapiens
ggtgttcaggggaag

SEQ ID NO: 1507099 - DNA, 15 bp, Homo sapiens
aggtgttcaggggaa

SEQ ID NO: 1507100 - DNA, 15 bp, Homo sapiens
aaggtgttcagggga

SEQ ID NO: 1507101 - DNA, 15 bp, Homo sapiens
taaggtgttcagggg

SEQ ID NO: 1507102 - DNA, 15 bp, Homo sapiens
ataaggtgttcaggg

SEQ ID NO: 1507103 - DNA, 15 bp, Homo sapiens
gataaggtgttcagg

SEQ ID NO: 1507104 - DNA, 15 bp, Homo sapiens
agataaggtgttcag

SEQ ID NO: 1507105 - DNA, 15 bp, Homo sapiens
cagataaggtgttca

SEQ ID NO: 1507106 - DNA, 15 bp, Homo sapiens
tcagataaggtgttc

SEQ ID NO: 1507107 - DNA, 15 bp, Homo sapiens
atcagataaggtgtt

SEQ ID NO: 1507108 - DNA, 15 bp, Homo sapiens
tatcagataaggtgt

SEQ ID NO: 1507109 - DNA, 15 bp, Homo sapiens
ttatcagataaggtg

SEQ ID NO: 1507110 - DNA, 15 bp, Homo sapiens
tttatcagataaggt

SEQ ID NO: 1507111 - DNA, 15 bp, Homo sapiens
atttatcagataagg

SEQ ID NO: 1507112 - DNA, 15 bp, Homo sapiens
aatttatcagataag

SEQ ID NO: 1507113 - DNA, 15 bp, Homo sapiens
gaatttatcagataa

SEQ ID NO: 1507114 - DNA, 15 bp, Homo sapiens
agaatttatcagata

SEQ ID NO: 1507115 - DNA, 15 bp, Homo sapiens
aagaatttatcagat

SEQ ID NO: 1507116 - DNA, 15 bp, Homo sapiens
caagaatttatcaga

SEQ ID NO: 1507117 - DNA, 15 bp, Homo sapiens
ccaagaatttatcag

SEQ ID NO: 1507118 - DNA, 15 bp, Homo sapiens
accaagaatttatca

SEQ ID NO: 1507119 - DNA, 15 bp, Homo sapiens
aaccaagaatttatc

SEQ ID NO: 1507120 - DNA, 15 bp, Homo sapiens
taaccaagaatttat

SEQ ID NO: 1507121 - DNA, 15 bp, Homo sapiens
gtaaccaagaattta

SEQ ID NO: 1507122 - DNA, 15 bp, Homo sapiens
agtaaccaagaattt

SEQ ID NO: 1507123 - DNA, 15 bp, Homo sapiens
aagtaaccaagaatt

SEQ ID NO: 1507124 - DNA, 15 bp, Homo sapiens
taagtaaccaagaat

SEQ ID NO: 1507125 - DNA, 15 bp, Homo sapiens
ctaagtaaccaagaa

SEQ ID NO: 1507126 - DNA, 15 bp, Homo sapiens
tctaagtaaccaaga

SEQ ID NO: 1507127 - DNA, 15 bp, Homo sapiens
ttctaagtaaccaag

SEQ ID NO: 1507128 - DNA, 15 bp, Homo sapiens
gttctaagtaaccaa

SEQ ID NO: 1507129 - DNA, 15 bp, Homo sapiens
agttctaagtaacca

SEQ ID NO: 1507130 - DNA, 15 bp, Homo sapiens
gagttctaagtaacc

SEQ ID NO: 1507131 - DNA, 15 bp, Homo sapiens
ggagttctaagtaac

SEQ ID NO: 1507132 - DNA, 15 bp, Homo sapiens
aggagttctaagtaa

SEQ ID NO: 1507133 - DNA, 15 bp, Homo sapiens
aaggagttctaagta

SEQ ID NO: 1507134 - DNA, 15 bp, Homo sapiens
taaggagttctaagt

SEQ ID NO: 1507135 - DNA, 15 bp, Homo sapiens
ttaaggagttctaag

SEQ ID NO: 1507136 - DNA, 15 bp, Homo sapiens
attaaggagttctaa

SEQ ID NO: 1507137 - DNA, 15 bp, Homo sapiens
gattaaggagttcta

SEQ ID NO: 1507138 - DNA, 15 bp, Homo sapiens
agattaaggagttct

SEQ ID NO: 1507139 - DNA, 15 bp, Homo sapiens
aagattaaggagttc

SEQ ID NO: 1507140 - DNA, 15 bp, Homo sapiens
caagattaaggagtt

SEQ ID NO: 1507141 - DNA, 15 bp, Homo sapiens
tcaagattaaggagt

SEQ ID NO: 1507142 - DNA, 15 bp, Homo sapiens
atcaagattaaggag

SEQ ID NO: 1507143 - DNA, 15 bp, Homo sapiens
aatcaagattaagga

SEQ ID NO: 1507144 - DNA, 15 bp, Homo sapiens
aaatcaagattaagg

SEQ ID NO: 1507145 - DNA, 15 bp, Homo sapiens
aaaatcaagattaag

SEQ ID NO: 1507146 - DNA, 15 bp, Homo sapiens
aaaaatcaagattaa

SEQ ID NO: 1507147 - DNA, 15 bp, Homo sapiens
aaaaaatcaagatta

SEQ ID NO: 1507148 - DNA, 15 bp, Homo sapiens
aaaaaaatcaagatt

SEQ ID NO: 1507149 - DNA, 15 bp, Homo sapiens
aaaaaaaatcaagat

SEQ ID NO: 1507150 - DNA, 15 bp, Homo sapiens
aaaaaaaaatcaaga

SEQ ID NO: 1507151 - DNA, 15 bp, Homo sapiens
gaaaaaaaaatcaag

SEQ ID NO: 1507152 - DNA, 15 bp, Homo sapiens
ggaaaaaaaaatcaa

SEQ ID NO: 1507153 - DNA, 15 bp, Homo sapiens
aggaaaaaaaaatca

SEQ ID NO: 1507154 - DNA, 15 bp, Homo sapiens
aaggaaaaaaaaatc

SEQ ID NO: 1507155 - DNA, 15 bp, Homo sapiens
aaaggaaaaaaaaat

SEQ ID NO: 1507156 - DNA, 15 bp, Homo sapiens
gaaaaggaaaaaaaa

SEQ ID NO: 1507157 - DNA, 15 bp, Homo sapiens
tgaaaaggaaaaaaa

SEQ ID NO: 1507158 - DNA, 15 bp, Homo sapiens
atgaaaaggaaaaaa

SEQ ID NO: 1507159 - DNA, 15 bp, Homo sapiens
tatgaaaaggaaaaa

SEQ ID NO: 1507160 - DNA, 15 bp, Homo sapiens
ctatgaaaaggaaaa

SEQ ID NO: 1507161 - DNA, 15 bp, Homo sapiens
tctatgaaaaggaaa

SEQ ID NO: 1507162 - DNA, 15 bp, Homo sapiens
ttctatgaaaaggaa

SEQ ID NO: 1507163 - DNA, 15 bp, Homo sapiens
attctatgaaaagga

SEQ ID NO: 1507164 - DNA, 15 bp, Homo sapiens
aattctatgaaaagg

SEQ ID NO: 1507165 - DNA, 15 bp, Homo sapiens
aaattctatgaaaag

SEQ ID NO: 1507166 - DNA, 15 bp, Homo sapiens
caaattctatgaaaa

SEQ ID NO: 1507167 - DNA, 15 bp, Homo sapiens
ccaaattctatgaaa

SEQ ID NO: 1507168 - DNA, 15 bp, Homo sapiens
accaaattctatgaa

SEQ ID NO: 1507169 - DNA, 15 bp, Homo sapiens
caccaaattctatga

SEQ ID NO: 1507170 - DNA, 15 bp, Homo sapiens
gcaccaaattctatg

SEQ ID NO: 1507171 - DNA, 15 bp, Homo sapiens
agcaccaaattctat

SEQ ID NO: 1507172 - DNA, 15 bp, Homo sapiens
cagcaccaaattcta

SEQ ID NO: 1507173 - DNA, 15 bp, Homo sapiens
acagcaccaaattct

SEQ ID NO: 1507174 - DNA, 15 bp, Homo sapiens
aacagcaccaaattc

SEQ ID NO: 1507175 - DNA, 15 bp, Homo sapiens
taacagcaccaaatt

SEQ ID NO: 1507176 - DNA, 15 bp, Homo sapiens
ctaacagcaccaaat

SEQ ID NO: 1507177 - DNA, 15 bp, Homo sapiens
actaacagcaccaaa

SEQ ID NO: 1507178 - DNA, 15 bp, Homo sapiens
tactaacagcaccaa

SEQ ID NO: 1507179 - DNA, 15 bp, Homo sapiens
ctactaacagcacca

SEQ ID NO: 1507180 - DNA, 15 bp, Homo sapiens
cctactaacagcacc

SEQ ID NO: 1507181 - DNA, 15 bp, Homo sapiens
tcctactaacagcac

SEQ ID NO: 1507182 - DNA, 15 bp, Homo sapiens
ctcctactaacagca

SEQ ID NO: 1507183 - DNA, 15 bp, Homo sapiens
gctcctactaacagc

SEQ ID NO: 1507184 - DNA, 15 bp, Homo sapiens
ggctcctactaacag

SEQ ID NO: 1507185 - DNA, 15 bp, Homo sapiens
aggctcctactaaca

SEQ ID NO: 1507186 - DNA, 15 bp, Homo sapiens
caggctcctactaac

SEQ ID NO: 1507187 - DNA, 15 bp, Homo sapiens
ccaggctcctactaa

SEQ ID NO: 1507188 - DNA, 15 bp, Homo sapiens
cccaggctcctacta

SEQ ID NO: 1507189 - DNA, 15 bp, Homo sapiens
ccccaggctcctact

SEQ ID NO: 1507190 - DNA, 15 bp, Homo sapiens
cccccaggctcctac

SEQ ID NO: 1507191 - DNA, 15 bp, Homo sapiens
ccccccaggctccta

SEQ ID NO: 1507192 - DNA, 15 bp, Homo sapiens
gccccccaggctcct

SEQ ID NO: 1507193 - DNA, 15 bp, Homo sapiens
ggccccccaggctcc

SEQ ID NO: 1507194 - DNA, 15 bp, Homo sapiens
aggccccccaggctc

SEQ ID NO: 1507195 - DNA, 15 bp, Homo sapiens
taggccccccaggct

SEQ ID NO: 1507196 - DNA, 15 bp, Homo sapiens
ttaggccccccaggc

SEQ ID NO: 1507197 - DNA, 15 bp, Homo sapiens
cttaggccccccagg

SEQ ID NO: 1507198 - DNA, 15 bp, Homo sapiens
acttaggccccccag

SEQ ID NO: 1507199 - DNA, 15 bp, Homo sapiens
tacttaggcccccca

SEQ ID NO: 1507200 - DNA, 15 bp, Homo sapiens
gtacttaggcccccc

SEQ ID NO: 1507201 - DNA, 15 bp, Homo sapiens
ggtacttaggccccc

SEQ ID NO: 1507202 - DNA, 15 bp, Homo sapiens
tggtacttaggcccc

SEQ ID NO: 1507203 - DNA, 15 bp, Homo sapiens
gtggtacttaggccc

SEQ ID NO: 1507204 - DNA, 15 bp, Homo sapiens
agtggtacttaggcc

SEQ ID NO: 1507205 - DNA, 15 bp, Homo sapiens
aagtggtacttaggc

SEQ ID NO: 1507206 - DNA, 15 bp, Homo sapiens
aaagtggtacttagg

SEQ ID NO: 1507207 - DNA, 15 bp, Homo sapiens
aaaagtggtacttag

SEQ ID NO: 1507208 - DNA, 15 bp, Homo sapiens
gaaaagtggtactta

SEQ ID NO: 1507209 - DNA, 15 bp, Homo sapiens
agaaaagtggtactt

SEQ ID NO: 1507210 - DNA, 15 bp, Homo sapiens
aagaaaagtggtact

SEQ ID NO: 1507211 - DNA, 15 bp, Homo sapiens
gaagaaaagtggtac

SEQ ID NO: 1507212 - DNA, 15 bp, Homo sapiens
ggaagaaaagtggta

SEQ ID NO: 1507213 - DNA, 15 bp, Homo sapiens
aggaagaaaagtggt

SEQ ID NO: 1507214 - DNA, 15 bp, Homo sapiens
aaggaagaaaagtgg

SEQ ID NO: 1507215 - DNA, 15 bp, Homo sapiens
gaaggaagaaaagtg

SEQ ID NO: 1507216 - DNA, 15 bp, Homo sapiens
ggaaggaagaaaagt

SEQ ID NO: 1507217 - DNA, 15 bp, Homo sapiens
gggaaggaagaaaag

SEQ ID NO: 1507218 - DNA, 15 bp, Homo sapiens
agggaaggaagaaaa

SEQ ID NO: 1507219 - DNA, 15 bp, Homo sapiens
cagggaaggaagaaa

SEQ ID NO: 1507220 - DNA, 15 bp, Homo sapiens
gcagggaaggaagaa

SEQ ID NO: 1507221 - DNA, 15 bp, Homo sapiens
ggcagggaaggaaga

SEQ ID NO: 1507222 - DNA, 15 bp, Homo sapiens
aggcagggaaggaag

SEQ ID NO: 1507223 - DNA, 15 bp, Homo sapiens
caggcagggaaggaa

SEQ ID NO: 1507224 - DNA, 15 bp, Homo sapiens
gccaggcagggaagg

SEQ ID NO: 1507225 - DNA, 15 bp, Homo sapiens
agccaggcagggaag

SEQ ID NO: 1507226 - DNA, 15 bp, Homo sapiens
aagccaggcagggaa

SEQ ID NO: 1507227 - DNA, 15 bp, Homo sapiens
gaagccaggcaggga

SEQ ID NO: 1507228 - DNA, 15 bp, Homo sapiens
agaagccaggcaggg

SEQ ID NO: 1507229 - DNA, 15 bp, Homo sapiens
cagaagccaggcagg

SEQ ID NO: 1507230 - DNA, 15 bp, Homo sapiens
tcagaagccaggcag

SEQ ID NO: 1507231 - DNA, 15 bp, Homo sapiens
ctcagaagccaggca

SEQ ID NO: 1507232 - DNA, 15 bp, Homo sapiens
gctcagaagccaggc

SEQ ID NO: 1507233 - DNA, 15 bp, Homo sapiens
tgctcagaagccagg

SEQ ID NO: 1507234 - DNA, 15 bp, Homo sapiens
ttgctcagaagccag

SEQ ID NO: 1507235 - DNA, 15 bp, Homo sapiens
cttgctcagaagcca

SEQ ID NO: 1507236 - DNA, 15 bp, Homo sapiens
acttgctcagaagcc

SEQ ID NO: 1507237 - DNA, 15 bp, Homo sapiens
aacttgctcagaagc

SEQ ID NO: 1507238 - DNA, 15 bp, Homo sapiens
caacttgctcagaag

SEQ ID NO: 1507239 - DNA, 15 bp, Homo sapiens
tcaacttgctcagaa

SEQ ID NO: 1507240 - DNA, 15 bp, Homo sapiens
ctcaacttgctcaga

SEQ ID NO: 1507241 - DNA, 15 bp, Homo sapiens
tctcaacttgctcag

SEQ ID NO: 1507242 - DNA, 15 bp, Homo sapiens
ttctcaacttgctca

SEQ ID NO: 1507243 - DNA, 15 bp, Homo sapiens
tttctcaacttgctc

SEQ ID NO: 1507244 - DNA, 15 bp, Homo sapiens
atttctcaacttgct

SEQ ID NO: 1507245 - DNA, 15 bp, Homo sapiens
catttctcaacttgc

SEQ ID NO: 1507246 - DNA, 15 bp, Homo sapiens
tcatttctcaacttg

SEQ ID NO: 1507247 - DNA, 15 bp, Homo sapiens
ctcatttctcaactt

SEQ ID NO: 1507248 - DNA, 15 bp, Homo sapiens
actcatttctcaact

SEQ ID NO: 1507249 - DNA, 15 bp, Homo sapiens
tactcatttctcaac

SEQ ID NO: 1507250 - DNA, 15 bp, Homo sapiens
ttactcatttctcaa

SEQ ID NO: 1507251 - DNA, 15 bp, Homo sapiens
tttactcatttctca

SEQ ID NO: 1507252 - DNA, 15 bp, Homo sapiens
ctttactcatttctc

SEQ ID NO: 1507253 - DNA, 15 bp, Homo sapiens
cctttactcatttct

SEQ ID NO: 1507254 - DNA, 15 bp, Homo sapiens
acctttactcatttc

SEQ ID NO: 1507255 - DNA, 15 bp, Homo sapiens
cacctttactcattt

SEQ ID NO: 1507256 - DNA, 15 bp, Homo sapiens
ccacctttactcatt

SEQ ID NO: 1507257 - DNA, 15 bp, Homo sapiens
tccacctttactcat

SEQ ID NO: 1507258 - DNA, 15 bp, Homo sapiens
ctccacctttactca

SEQ ID NO: 1507259 - DNA, 15 bp, Homo sapiens
cctccacctttactc

SEQ ID NO: 1507260 - DNA, 15 bp, Homo sapiens
gcctccacctttact

SEQ ID NO: 1507261 - DNA, 15 bp, Homo sapiens
ggcctccacctttac

SEQ ID NO: 1507262 - DNA, 15 bp, Homo sapiens
tggcctccaccttta

SEQ ID NO: 1507263 - DNA, 15 bp, Homo sapiens
ttggcctccaccttt

SEQ ID NO: 1507264 - DNA, 15 bp, Homo sapiens
tttggcctccacctt

SEQ ID NO: 1507265 - DNA, 15 bp, Homo sapiens
ttttggcctccacct

SEQ ID NO: 1507266 - DNA, 15 bp, Homo sapiens
attttggcctccacc

SEQ ID NO: 1507267 - DNA, 15 bp, Homo sapiens
tattttggcctccac

SEQ ID NO: 1507268 - DNA, 15 bp, Homo sapiens
atattttggcctcca

SEQ ID NO: 1507269 - DNA, 15 bp, Homo sapiens
tatattttggcctcc

SEQ ID NO: 1507270 - DNA, 15 bp, Homo sapiens
atatattttggcctc

SEQ ID NO: 1507271 - DNA, 15 bp, Homo sapiens
aatatattttggcct

SEQ ID NO: 1507272 - DNA, 15 bp, Homo sapiens
aaatatattttggcc

SEQ ID NO: 1507273 - DNA, 15 bp, Homo sapiens
aaaatatattttggc

SEQ ID NO: 1507274 - DNA, 15 bp, Homo sapiens
taaaatatattttgg

SEQ ID NO: 1507275 - DNA, 15 bp, Homo sapiens
ttaaaatatattttg

SEQ ID NO: 1507276 - DNA, 15 bp, Homo sapiens
tttaaaatatatttt

SEQ ID NO: 1507277 - DNA, 15 bp, Homo sapiens
ttttaaaatatattt

SEQ ID NO: 1507278 - DNA, 15 bp, Homo sapiens
tttttaaaatatatt

SEQ ID NO: 1507279 - DNA, 15 bp, Homo sapiens
atttttaaaatatat

SEQ ID NO: 1507280 - DNA, 15 bp, Homo sapiens
aatttttaaaatata

SEQ ID NO: 1507281 - DNA, 15 bp, Homo sapiens
gaatttttaaaatat

SEQ ID NO: 1507282 - DNA, 15 bp, Homo sapiens
agaatttttaaaata

SEQ ID NO: 1507283 - DNA, 15 bp, Homo sapiens
aagaatttttaaaat

SEQ ID NO: 1507284 - DNA, 15 bp, Homo sapiens
gaagaatttttaaaa

SEQ ID NO: 1507285 - DNA, 15 bp, Homo sapiens
agaagaatttttaaa

SEQ ID NO: 1507286 - DNA, 15 bp, Homo sapiens
cagaagaatttttaa

SEQ ID NO: 1507287 - DNA, 15 bp, Homo sapiens
tcagaagaattttta

SEQ ID NO: 1507288 - DNA, 15 bp, Homo sapiens
gtcagaagaattttt

SEQ ID NO: 1507289 - DNA, 15 bp, Homo sapiens
agtcagaagaatttt

SEQ ID NO: 1507290 - DNA, 15 bp, Homo sapiens
tagtcagaagaattt

SEQ ID NO: 1507291 - DNA, 15 bp, Homo sapiens
ttagtcagaagaatt

SEQ ID NO: 1507292 - DNA, 15 bp, Homo sapiens
tttagtcagaagaat

SEQ ID NO: 1507293 - DNA, 15 bp, Homo sapiens
ctttagtcagaagaa

SEQ ID NO: 1507294 - DNA, 15 bp, Homo sapiens
cctttagtcagaaga

SEQ ID NO: 1507295 - DNA, 15 bp, Homo sapiens
ccctttagtcagaag

SEQ ID NO: 1507296 - DNA, 15 bp, Homo sapiens
tccctttagtcagaa

SEQ ID NO: 1507297 - DNA, 15 bp, Homo sapiens
ctccctttagtcaga

SEQ ID NO: 1507298 - DNA, 15 bp, Homo sapiens
tctccctttagtcag

SEQ ID NO: 1507299 - DNA, 15 bp, Homo sapiens
atctccctttagtca

SEQ ID NO: 1507300 - DNA, 15 bp, Homo sapiens
catctccctttagtc

SEQ ID NO: 1507301 - DNA, 15 bp, Homo sapiens
tcatctccctttagt

SEQ ID NO: 1507302 - DNA, 15 bp, Homo sapiens
ttcatctccctttag

SEQ ID NO: 1507303 - DNA, 15 bp, Homo sapiens
cttcatctcccttta

SEQ ID NO: 1507304 - DNA, 15 bp, Homo sapiens
acttcatctcccttt

SEQ ID NO: 1507305 - DNA, 15 bp, Homo sapiens
tacttcatctccctt

SEQ ID NO: 1507306 - DNA, 15 bp, Homo sapiens
ttacttcatctccct

SEQ ID NO: 1507307 - DNA, 15 bp, Homo sapiens
tttacttcatctccc

SEQ ID NO: 1507308 - DNA, 15 bp, Homo sapiens
ctttacttcatctcc

SEQ ID NO: 1507309 - DNA, 15 bp, Homo sapiens
cctttacttcatctc

SEQ ID NO: 1507310 - DNA, 15 bp, Homo sapiens
ccctttacttcatct

SEQ ID NO: 1507311 - DNA, 15 bp, Homo sapiens
tccctttacttcatc

SEQ ID NO: 1507312 - DNA, 15 bp, Homo sapiens
ttccctttacttcat

SEQ ID NO: 1507313 - DNA, 15 bp, Homo sapiens
gttccctttacttca

SEQ ID NO: 1507314 - DNA, 15 bp, Homo sapiens
tgttccctttacttc

SEQ ID NO: 1507315 - DNA, 15 bp, Homo sapiens
ttgttccctttactt

SEQ ID NO: 1507316 - DNA, 15 bp, Homo sapiens
tttgttccctttact

SEQ ID NO: 1507317 - DNA, 15 bp, Homo sapiens
ttttgttccctttac

SEQ ID NO: 1507318 - DNA, 15 bp, Homo sapiens
cttttgttcccttta

SEQ ID NO: 1507319 - DNA, 15 bp, Homo sapiens
tcttttgttcccttt

SEQ ID NO: 1507320 - DNA, 15 bp, Homo sapiens
ttcttttgttccctt

SEQ ID NO: 1507321 - DNA, 15 bp, Homo sapiens
cttcttttgttccct

SEQ ID NO: 1507322 - DNA, 15 bp, Homo sapiens
acttcttttgttccc

SEQ ID NO: 1507323 - DNA, 15 bp, Homo sapiens
tacttcttttgttcc

SEQ ID NO: 1507324 - DNA, 15 bp, Homo sapiens
atacttcttttgttc

SEQ ID NO: 1507325 - DNA, 15 bp, Homo sapiens
gatacttcttttgtt

SEQ ID NO: 1507326 - DNA, 15 bp, Homo sapiens
tgatacttcttttgt

SEQ ID NO: 1507327 - DNA, 15 bp, Homo sapiens
atgatacttcttttg

SEQ ID NO: 1507328 - DNA, 15 bp, Homo sapiens
catgatacttctttt

SEQ ID NO: 1507329 - DNA, 15 bp, Homo sapiens
tcatgatacttcttt

SEQ ID NO: 1507330 - DNA, 15 bp, Homo sapiens
ttcatgatacttctt

SEQ ID NO: 1507331 - DNA, 15 bp, Homo sapiens
cttcatgatacttct

SEQ ID NO: 1507332 - DNA, 15 bp, Homo sapiens
tcttcatgatacttc

SEQ ID NO: 1507333 - DNA, 15 bp, Homo sapiens
atcttcatgatactt

SEQ ID NO: 1507334 - DNA, 15 bp, Homo sapiens
aatcttcatgatact

SEQ ID NO: 1507335 - DNA, 15 bp, Homo sapiens
gaatcttcatgatac

SEQ ID NO: 1507336 - DNA, 15 bp, Homo sapiens
agaatcttcatgata

SEQ ID NO: 1507337 - DNA, 15 bp, Homo sapiens
gagaatcttcatgat

SEQ ID NO: 1507338 - DNA, 15 bp, Homo sapiens
tgagaatcttcatga

SEQ ID NO: 1507339 - DNA, 15 bp, Homo sapiens
ctgagaatcttcatg

SEQ ID NO: 1507340 - DNA, 15 bp, Homo sapiens
tctgagaatcttcat

SEQ ID NO: 1507341 - DNA, 15 bp, Homo sapiens
atctgagaatcttca

SEQ ID NO: 1507342 - DNA, 15 bp, Homo sapiens
catctgagaatcttc

SEQ ID NO: 1507343 - DNA, 15 bp, Homo sapiens
acatctgagaatctt

SEQ ID NO: 1507344 - DNA, 15 bp, Homo sapiens
gacatctgagaatct

SEQ ID NO: 1507345 - DNA, 15 bp, Homo sapiens
ggacatctgagaatc

SEQ ID NO: 1507346 - DNA, 15 bp, Homo sapiens
cggacatctgagaat

SEQ ID NO: 1507347 - DNA, 15 bp, Homo sapiens
tcggacatctgagaa

SEQ ID NO: 1507348 - DNA, 15 bp, Homo sapiens
gtcggacatctgaga

SEQ ID NO: 1507349 - DNA, 15 bp, Homo sapiens
tgtcggacatctgag

SEQ ID NO: 1507350 - DNA, 15 bp, Homo sapiens
atgtcggacatctga

SEQ ID NO: 1507351 - DNA, 15 bp, Homo sapiens
catgtcggacatctg

SEQ ID NO: 1507352 - DNA, 15 bp, Homo sapiens
ccatgtcggacatct

SEQ ID NO: 1507353 - DNA, 15 bp, Homo sapiens
cccatgtcggacatc

SEQ ID NO: 1507354 - DNA, 15 bp, Homo sapiens
tcccatgtcggacat

SEQ ID NO: 1507355 - DNA, 15 bp, Homo sapiens
ttcccatgtcggaca

SEQ ID NO: 1507356 - DNA, 15 bp, Homo sapiens
tttcccatgtcggac

SEQ ID NO: 1507357 - DNA, 15 bp, Homo sapiens
gtttcccatgtcgga

SEQ ID NO: 1507358 - DNA, 15 bp, Homo sapiens
agtttcccatgtcgg

SEQ ID NO: 1507359 - DNA, 15 bp, Homo sapiens
cagtttcccatgtcg

SEQ ID NO: 1507360 - DNA, 15 bp, Homo sapiens
ccagtttcccatgtc

SEQ ID NO: 1507361 - DNA, 15 bp, Homo sapiens
cccagtttcccatgt

SEQ ID NO: 1507362 - DNA, 15 bp, Homo sapiens
acccagtttcccatg

SEQ ID NO: 1507363 - DNA, 15 bp, Homo sapiens
tacccagtttcccat

SEQ ID NO: 1507364 - DNA, 15 bp, Homo sapiens
ctacccagtttccca

SEQ ID NO: 1507365 - DNA, 15 bp, Homo sapiens
tctacccagtttccc

SEQ ID NO: 1507366 - DNA, 15 bp, Homo sapiens
atctacccagtttcc

SEQ ID NO: 1507367 - DNA, 15 bp, Homo sapiens
aatctacccagtttc

SEQ ID NO: 1507368 - DNA, 15 bp, Homo sapiens
caatctacccagttt

SEQ ID NO: 1507369 - DNA, 15 bp, Homo sapiens
acaatctacccagtt

SEQ ID NO: 1507370 - DNA, 15 bp, Homo sapiens
cacaatctacccagt

SEQ ID NO: 1507371 - DNA, 15 bp, Homo sapiens
ccacaatctacccag

SEQ ID NO: 1507372 - DNA, 15 bp, Homo sapiens
accacaatctaccca

SEQ ID NO: 1507373 - DNA, 15 bp, Homo sapiens
taccacaatctaccc

SEQ ID NO: 1507374 - DNA, 15 bp, Homo sapiens
gtaccacaatctacc

SEQ ID NO: 1507375 - DNA, 15 bp, Homo sapiens
agtaccacaatctac

SEQ ID NO: 1507376 - DNA, 15 bp, Homo sapiens
tagtaccacaatcta

SEQ ID NO: 1507377 - DNA, 15 bp, Homo sapiens
atagtaccacaatct

SEQ ID NO: 1507378 - DNA, 15 bp, Homo sapiens
aatagtaccacaatc

SEQ ID NO: 1507379 - DNA, 15 bp, Homo sapiens
aaatagtaccacaat

SEQ ID NO: 1507380 - DNA, 15 bp, Homo sapiens
taaatagtaccacaa

SEQ ID NO: 1507381 - DNA, 15 bp, Homo sapiens
gtaaatagtaccaca

SEQ ID NO: 1507382 - DNA, 15 bp, Homo sapiens
ggtaaatagtaccac

SEQ ID NO: 1507383 - DNA, 15 bp, Homo sapiens
tggtaaatagtacca

SEQ ID NO: 1507384 - DNA, 15 bp, Homo sapiens
ttggtaaatagtacc

SEQ ID NO: 1507385 - DNA, 15 bp, Homo sapiens
cttggtaaatagtac

SEQ ID NO: 1507386 - DNA, 15 bp, Homo sapiens
tcttggtaaatagta

SEQ ID NO: 1507387 - DNA, 15 bp, Homo sapiens
gtcttggtaaatagt

SEQ ID NO: 1507388 - DNA, 15 bp, Homo sapiens
tgtcttggtaaatag

SEQ ID NO: 1507389 - DNA, 15 bp, Homo sapiens
ctgtcttggtaaata

SEQ ID NO: 1507390 - DNA, 15 bp, Homo sapiens
cctgtcttggtaaat

SEQ ID NO: 1507391 - DNA, 15 bp, Homo sapiens
tcctgtcttggtaaa

SEQ ID NO: 1507392 - DNA, 15 bp, Homo sapiens
ttcctgtcttggtaa

SEQ ID NO: 1507393 - DNA, 15 bp, Homo sapiens
tttcctgtcttggta

SEQ ID NO: 1507394 - DNA, 15 bp, Homo sapiens
gtttcctgtcttggt

SEQ ID NO: 1507395 - DNA, 15 bp, Homo sapiens
tgtttcctgtcttgg

SEQ ID NO: 1507396 - DNA, 15 bp, Homo sapiens
atgtttcctgtcttg

SEQ ID NO: 1507397 - DNA, 15 bp, Homo sapiens
catgtttcctgtctt

SEQ ID NO: 1507398 - DNA, 15 bp, Homo sapiens
ccatgtttcctgtct

SEQ ID NO: 1507399 - DNA, 15 bp, Homo sapiens
accatgtttcctgtc

SEQ ID NO: 1507400 - DNA, 15 bp, Homo sapiens
taccatgtttcctgt

SEQ ID NO: 1507401 - DNA, 15 bp, Homo sapiens
ctaccatgtttcctg

SEQ ID NO: 1507402 - DNA, 15 bp, Homo sapiens
cctaccatgtttcct

SEQ ID NO: 1507403 - DNA, 15 bp, Homo sapiens
tcctaccatgtttcc

SEQ ID NO: 1507404 - DNA, 15 bp, Homo sapiens
ttcctaccatgtttc

SEQ ID NO: 1507405 - DNA, 15 bp, Homo sapiens
cttcctaccatgttt

SEQ ID NO: 1507406 - DNA, 15 bp, Homo sapiens
tcttcctaccatgtt

SEQ ID NO: 1507407 - DNA, 15 bp, Homo sapiens
atcttcctaccatgt

SEQ ID NO: 1507408 - DNA, 15 bp, Homo sapiens
aatcttcctaccatg

SEQ ID NO: 1507409 - DNA, 15 bp, Homo sapiens
taatcttcctaccat

SEQ ID NO: 1507410 - DNA, 15 bp, Homo sapiens
ataatcttcctacca

SEQ ID NO: 1507411 - DNA, 15 bp, Homo sapiens
cataatcttcctacc

SEQ ID NO: 1507412 - DNA, 15 bp, Homo sapiens
tcataatcttcctac

SEQ ID NO: 1507413 - DNA, 15 bp, Homo sapiens
ttcataatcttccta

SEQ ID NO: 1507414 - DNA, 15 bp, Homo sapiens
attcataatcttcct

SEQ ID NO: 1507415 - DNA, 15 bp, Homo sapiens
aattcataatcttcc

SEQ ID NO: 1507416 - DNA, 15 bp, Homo sapiens
taattcataatcttc

SEQ ID NO: 1507417 - DNA, 15 bp, Homo sapiens
ttaattcataatctt

SEQ ID NO: 1507418 - DNA, 15 bp, Homo sapiens
cttaattcataatct

SEQ ID NO: 1507419 - DNA, 15 bp, Homo sapiens
gcttaattcataatc

SEQ ID NO: 1507420 - DNA, 15 bp, Homo sapiens
agcttaattcataat

SEQ ID NO: 1507421 - DNA, 15 bp, Homo sapiens
aagcttaattcataa

SEQ ID NO: 1507422 - DNA, 15 bp, Homo sapiens
aaagcttaattcata

SEQ ID NO: 1507423 - DNA, 15 bp, Homo sapiens
caaagcttaattcat

SEQ ID NO: 1507424 - DNA, 15 bp, Homo sapiens
ccaaagcttaattca

SEQ ID NO: 1507425 - DNA, 15 bp, Homo sapiens
tccaaagcttaattc

SEQ ID NO: 1507426 - DNA, 15 bp, Homo sapiens
ttccaaagcttaatt

SEQ ID NO: 1507427 - DNA, 15 bp, Homo sapiens
tttccaaagcttaat

SEQ ID NO: 1507428 - DNA, 15 bp, Homo sapiens
atttccaaagcttaa

SEQ ID NO: 1507429 - DNA, 15 bp, Homo sapiens
catttccaaagctta

SEQ ID NO: 1507430 - DNA, 15 bp, Homo sapiens
acatttccaaagctt

SEQ ID NO: 1507431 - DNA, 15 bp, Homo sapiens
aacatttccaaagct

SEQ ID NO: 1507432 - DNA, 15 bp, Homo sapiens
caacatttccaaagc

SEQ ID NO: 1507433 - DNA, 15 bp, Homo sapiens
tcaacatttccaaag

SEQ ID NO: 1507434 - DNA, 15 bp, Homo sapiens
ctcaacatttccaaa

SEQ ID NO: 1507435 - DNA, 15 bp, Homo sapiens
actcaacatttccaa

SEQ ID NO: 1507436 - DNA, 15 bp, Homo sapiens
aactcaacatttcca

SEQ ID NO: 1507437 - DNA, 15 bp, Homo sapiens
aaactcaacatttcc

SEQ ID NO: 1507438 - DNA, 15 bp, Homo sapiens
caaactcaacatttc

SEQ ID NO: 1507439 - DNA, 15 bp, Homo sapiens
tcaaactcaacattt

SEQ ID NO: 1507440 - DNA, 15 bp, Homo sapiens
ttcaaactcaacatt

SEQ ID NO: 1507441 - DNA, 15 bp, Homo sapiens
cttcaaactcaacat

SEQ ID NO: 1507442 - DNA, 15 bp, Homo sapiens
acttcaaactcaaca

SEQ ID NO: 1507443 - DNA, 15 bp, Homo sapiens
cacttcaaactcaac

SEQ ID NO: 1507444 - DNA, 15 bp, Homo sapiens
gcacttcaaactcaa

SEQ ID NO: 1507445 - DNA, 15 bp, Homo sapiens
ggcacttcaaactca

SEQ ID NO: 1507446 - DNA, 15 bp, Homo sapiens
aggcacttcaaactc

SEQ ID NO: 1507447 - DNA, 15 bp, Homo sapiens
taggcacttcaaact

SEQ ID NO: 1507448 - DNA, 15 bp, Homo sapiens
gtaggcacttcaaac

SEQ ID NO: 1507449 - DNA, 15 bp, Homo sapiens
tgtaggcacttcaaa

SEQ ID NO: 1507450 - DNA, 15 bp, Homo sapiens
ttgtaggcacttcaa

SEQ ID NO: 1507451 - DNA, 15 bp, Homo sapiens
cttgtaggcacttca

SEQ ID NO: 1507452 - DNA, 15 bp, Homo sapiens
acttgtaggcacttc

SEQ ID NO: 1507453 - DNA, 15 bp, Homo sapiens
aacttgtaggcactt

SEQ ID NO: 1507454 - DNA, 15 bp, Homo sapiens
taacttgtaggcact

SEQ ID NO: 1507455 - DNA, 15 bp, Homo sapiens
ataacttgtaggcac

SEQ ID NO: 1507456 - DNA, 15 bp, Homo sapiens
gataacttgtaggca

SEQ ID NO: 1507457 - DNA, 15 bp, Homo sapiens
ggataacttgtaggc

SEQ ID NO: 1507458 - DNA, 15 bp, Homo sapiens
tggataacttgtagg

SEQ ID NO: 1507459 - DNA, 15 bp, Homo sapiens
atggataacttgtag

SEQ ID NO: 1507460 - DNA, 15 bp, Homo sapiens
catggataacttgta

SEQ ID NO: 1507461 - DNA, 15 bp, Homo sapiens
acatggataacttgt

SEQ ID NO: 1507462 - DNA, 15 bp, Homo sapiens
cacatggataacttg

SEQ ID NO: 1507463 - DNA, 15 bp, Homo sapiens
ccacatggataactt

SEQ ID NO: 1507464 - DNA, 15 bp, Homo sapiens
tccacatggataact

SEQ ID NO: 1507465 - DNA, 15 bp, Homo sapiens
ctccacatggataac

SEQ ID NO: 1507466 - DNA, 15 bp, Homo sapiens
tctccacatggataa

SEQ ID NO: 1507467 - DNA, 15 bp, Homo sapiens
ttctccacatggata

SEQ ID NO: 1507468 - DNA, 15 bp, Homo sapiens
tttctccacatggat

SEQ ID NO: 1507469 - DNA, 15 bp, Homo sapiens
gtttctccacatgga

SEQ ID NO: 1507470 - DNA, 15 bp, Homo sapiens
ggtttctccacatgg

SEQ ID NO: 1507471 - DNA, 15 bp, Homo sapiens
tggtttctccacatg

SEQ ID NO: 1507472 - DNA, 15 bp, Homo sapiens
ttggtttctccacat

SEQ ID NO: 1507473 - DNA, 15 bp, Homo sapiens
tttggtttctccaca

SEQ ID NO: 1507474 - DNA, 15 bp, Homo sapiens
atttggtttctccac

SEQ ID NO: 1507475 - DNA, 15 bp, Homo sapiens
catttggtttctcca

SEQ ID NO: 1507476 - DNA, 15 bp, Homo sapiens
ccatttggtttctcc

SEQ ID NO: 1507477 - DNA, 15 bp, Homo sapiens
tccatttggtttctc

SEQ ID NO: 1507478 - DNA, 15 bp, Homo sapiens
gtccatttggtttct

SEQ ID NO: 1507479 - DNA, 15 bp, Homo sapiens
tgtccatttggtttc

SEQ ID NO: 1507480 - DNA, 15 bp, Homo sapiens
atgtccatttggttt

SEQ ID NO: 1507481 - DNA, 15 bp, Homo sapiens
aatgtccatttggtt

SEQ ID NO: 1507482 - DNA, 15 bp, Homo sapiens
aaatgtccatttggt

SEQ ID NO: 1507483 - DNA, 15 bp, Homo sapiens
caaatgtccatttgg

SEQ ID NO: 1507484 - DNA, 15 bp, Homo sapiens
ccaaatgtccatttg

SEQ ID NO: 1507485 - DNA, 15 bp, Homo sapiens
tccaaatgtccattt

SEQ ID NO: 1507486 - DNA, 15 bp, Homo sapiens
atccaaatgtccatt

SEQ ID NO: 1507487 - DNA, 15 bp, Homo sapiens
tatccaaatgtccat

SEQ ID NO: 1507488 - DNA, 15 bp, Homo sapiens
ttatccaaatgtcca

SEQ ID NO: 1507489 - DNA, 15 bp, Homo sapiens
gttatccaaatgtcc

SEQ ID NO: 1507490 - DNA, 15 bp, Homo sapiens
tgttatccaaatgtc

SEQ ID NO: 1507491 - DNA, 15 bp, Homo sapiens
gtgttatccaaatgt

SEQ ID NO: 1507492 - DNA, 15 bp, Homo sapiens
tgtgttatccaaatg

SEQ ID NO: 1507493 - DNA, 15 bp, Homo sapiens
atgtgttatccaaat

SEQ ID NO: 1507494 - DNA, 15 bp, Homo sapiens
gatgtgttatccaaa

SEQ ID NO: 1507495 - DNA, 15 bp, Homo sapiens
agatgtgttatccaa

SEQ ID NO: 1507496 - DNA, 15 bp, Homo sapiens
cagatgtgttatcca

SEQ ID NO: 1507497 - DNA, 15 bp, Homo sapiens
tcagatgtgttatcc

SEQ ID NO: 1507498 - DNA, 15 bp, Homo sapiens
ttcagatgtgttatc

SEQ ID NO: 1507499 - DNA, 15 bp, Homo sapiens
cttcagatgtgttat

SEQ ID NO: 1507500 - DNA, 15 bp, Homo sapiens
gcttcagatgtgtta

SEQ ID NO: 1507501 - DNA, 15 bp, Homo sapiens
agcttcagatgtgtt

SEQ ID NO: 1507502 - DNA, 15 bp, Homo sapiens
gagcttcagatgtgt

SEQ ID NO: 1507503 - DNA, 15 bp, Homo sapiens
tgagcttcagatgtg

SEQ ID NO: 1507504 - DNA, 15 bp, Homo sapiens
ctgagcttcagatgt

SEQ ID NO: 1507505 - DNA, 15 bp, Homo sapiens
cctgagcttcagatg

SEQ ID NO: 1507506 - DNA, 15 bp, Homo sapiens
tcctgagcttcagat

SEQ ID NO: 1507507 - DNA, 15 bp, Homo sapiens
ctcctgagcttcaga

SEQ ID NO: 1507508 - DNA, 15 bp, Homo sapiens
tctcctgagcttcag

SEQ ID NO: 1507509 - DNA, 15 bp, Homo sapiens
ctctcctgagcttca

SEQ ID NO: 1507510 - DNA, 15 bp, Homo sapiens
tctctcctgagcttc

SEQ ID NO: 1507511 - DNA, 15 bp, Homo sapiens
ttctctcctgagctt

SEQ ID NO: 1507512 - DNA, 15 bp, Homo sapiens
cttctctcctgagct

SEQ ID NO: 1507513 - DNA, 15 bp, Homo sapiens
acttctctcctgagc

SEQ ID NO: 1507514 - DNA, 15 bp, Homo sapiens
aacttctctcctgag

SEQ ID NO: 1507515 - DNA, 15 bp, Homo sapiens
aaacttctctcctga

SEQ ID NO: 1507516 - DNA, 15 bp, Homo sapiens
gaaacttctctcctg

SEQ ID NO: 1507517 - DNA, 15 bp, Homo sapiens
ggaaacttctctcct

SEQ ID NO: 1507518 - DNA, 15 bp, Homo sapiens
tggaaacttctctcc

SEQ ID NO: 1507519 - DNA, 15 bp, Homo sapiens
atggaaacttctctc

SEQ ID NO: 1507520 - DNA, 15 bp, Homo sapiens
aatggaaacttctct

SEQ ID NO: 1507521 - DNA, 15 bp, Homo sapiens
taatggaaacttctc

SEQ ID NO: 1507522 - DNA, 15 bp, Homo sapiens
gtaatggaaacttct

SEQ ID NO: 1507523 - DNA, 15 bp, Homo sapiens
tgtaatggaaacttc

SEQ ID NO: 1507524 - DNA, 15 bp, Homo sapiens
ctgtaatggaaactt

SEQ ID NO: 1507525 - DNA, 15 bp, Homo sapiens
tctgtaatggaaact

SEQ ID NO: 1507526 - DNA, 15 bp, Homo sapiens
atctgtaatggaaac

SEQ ID NO: 1507527 - DNA, 15 bp, Homo sapiens
aatctgtaatggaaa

SEQ ID NO: 1507528 - DNA, 15 bp, Homo sapiens
gaatctgtaatggaa

SEQ ID NO: 1507529 - DNA, 15 bp, Homo sapiens
tgaatctgtaatgga

SEQ ID NO: 1507530 - DNA, 15 bp, Homo sapiens
ctgaatctgtaatgg

SEQ ID NO: 1507531 - DNA, 15 bp, Homo sapiens
cctgaatctgtaatg

SEQ ID NO: 1507532 - DNA, 15 bp, Homo sapiens
acctgaatctgtaat

SEQ ID NO: 1507533 - DNA, 15 bp, Homo sapiens
aacctgaatctgtaa

SEQ ID NO: 1507534 - DNA, 15 bp, Homo sapiens
aaacctgaatctgta

SEQ ID NO: 1507535 - DNA, 15 bp, Homo sapiens
caaacctgaatctgt

SEQ ID NO: 1507536 - DNA, 15 bp, Homo sapiens
ccaaacctgaatctg

SEQ ID NO: 1507537 - DNA, 15 bp, Homo sapiens
accaaacctgaatct

SEQ ID NO: 1507538 - DNA, 15 bp, Homo sapiens
taccaaacctgaatc

SEQ ID NO: 1507539 - DNA, 15 bp, Homo sapiens
ctaccaaacctgaat

SEQ ID NO: 1507540 - DNA, 15 bp, Homo sapiens
actaccaaacctgaa

SEQ ID NO: 1507541 - DNA, 15 bp, Homo sapiens
aactaccaaacctga

SEQ ID NO: 1507542 - DNA, 15 bp, Homo sapiens
caactaccaaacctg

SEQ ID NO: 1507543 - DNA, 15 bp, Homo sapiens
acaactaccaaacct

SEQ ID NO: 1507544 - DNA, 15 bp, Homo sapiens
aacaactaccaaacc

SEQ ID NO: 1507545 - DNA, 15 bp, Homo sapiens
gaacaactaccaaac

SEQ ID NO: 1507546 - DNA, 15 bp, Homo sapiens
agaacaactaccaaa

SEQ ID NO: 1507547 - DNA, 15 bp, Homo sapiens
tagaacaactaccaa

SEQ ID NO: 1507548 - DNA, 15 bp, Homo sapiens
ctagaacaactacca

SEQ ID NO: 1507549 - DNA, 15 bp, Homo sapiens
actagaacaactacc

SEQ ID NO: 1507550 - DNA, 15 bp, Homo sapiens
aactagaacaactac

SEQ ID NO: 1507551 - DNA, 15 bp, Homo sapiens
aaactagaacaacta

SEQ ID NO: 1507552 - DNA, 15 bp, Homo sapiens
aaaactagaacaact

SEQ ID NO: 1507553 - DNA, 15 bp, Homo sapiens
gaaaactagaacaac

SEQ ID NO: 1507554 - DNA, 15 bp, Homo sapiens
agaaaactagaacaa

SEQ ID NO: 1507555 - DNA, 15 bp, Homo sapiens
tagaaaactagaaca

SEQ ID NO: 1507556 - DNA, 15 bp, Homo sapiens
atagaaaactagaac

SEQ ID NO: 1507557 - DNA, 15 bp, Homo sapiens
aatagaaaactagaa

SEQ ID NO: 1507558 - DNA, 15 bp, Homo sapiens
caatagaaaactaga

SEQ ID NO: 1507559 - DNA, 15 bp, Homo sapiens
gcaatagaaaactag

SEQ ID NO: 1507560 - DNA, 15 bp, Homo sapiens
agcaatagaaaacta

SEQ ID NO: 1507561 - DNA, 15 bp, Homo sapiens
cagcaatagaaaact

SEQ ID NO: 1507562 - DNA, 15 bp, Homo sapiens
acagcaatagaaaac

SEQ ID NO: 1507563 - DNA, 15 bp, Homo sapiens
cacagcaatagaaaa

SEQ ID NO: 1507564 - DNA, 15 bp, Homo sapiens
acacagcaatagaaa

SEQ ID NO: 1507565 - DNA, 15 bp, Homo sapiens
tacacagcaatagaa

SEQ ID NO: 1507566 - DNA, 15 bp, Homo sapiens
ttacacagcaataga

SEQ ID NO: 1507567 - DNA, 15 bp, Homo sapiens
gttacacagcaatag

SEQ ID NO: 1507568 - DNA, 15 bp, Homo sapiens
tgttacacagcaata

SEQ ID NO: 1507569 - DNA, 15 bp, Homo sapiens
ttgttacacagcaat

SEQ ID NO: 1507570 - DNA, 15 bp, Homo sapiens
tttgttacacagcaa

SEQ ID NO: 1507571 - DNA, 15 bp, Homo sapiens
gtttgttacacagca

SEQ ID NO: 1507572 - DNA, 15 bp, Homo sapiens
agtttgttacacagc

SEQ ID NO: 1507573 - DNA, 15 bp, Homo sapiens
tagtttgttacacag

SEQ ID NO: 1507574 - DNA, 15 bp, Homo sapiens
gtagtttgttacaca

SEQ ID NO: 1507575 - DNA, 15 bp, Homo sapiens
ggtagtttgttacac

SEQ ID NO: 1507576 - DNA, 15 bp, Homo sapiens
tggtagtttgttaca

SEQ ID NO: 1507577 - DNA, 15 bp, Homo sapiens
gtggtagtttgttac

SEQ ID NO: 1507578 - DNA, 15 bp, Homo sapiens
tgtggtagtttgtta

SEQ ID NO: 1507579 - DNA, 15 bp, Homo sapiens
ttgtggtagtttgtt

SEQ ID NO: 1507580 - DNA, 15 bp, Homo sapiens
tttgtggtagtttgt

SEQ ID NO: 1507581 - DNA, 15 bp, Homo sapiens
gtttgtggtagtttg

SEQ ID NO: 1507582 - DNA, 15 bp, Homo sapiens
tgtttgtggtagttt

SEQ ID NO: 1507583 - DNA, 15 bp, Homo sapiens
ctgtttgtggtagtt

SEQ ID NO: 1507584 - DNA, 15 bp, Homo sapiens
actgtttgtggtagt

SEQ ID NO: 1507585 - DNA, 15 bp, Homo sapiens
tactgtttgtggtag

SEQ ID NO: 1507586 - DNA, 15 bp, Homo sapiens
ctactgtttgtggta

SEQ ID NO: 1507587 - DNA, 15 bp, Homo sapiens
gctactgtttgtggt

SEQ ID NO: 1507588 - DNA, 15 bp, Homo sapiens
ggctactgtttgtgg

SEQ ID NO: 1507589 - DNA, 15 bp, Homo sapiens
aggctactgtttgtg

SEQ ID NO: 1507590 - DNA, 15 bp, Homo sapiens
taggctactgtttgt

SEQ ID NO: 1507591 - DNA, 15 bp, Homo sapiens
ttaggctactgtttg

SEQ ID NO: 1507592 - DNA, 15 bp, Homo sapiens
tttaggctactgttt

SEQ ID NO: 1507593 - DNA, 15 bp, Homo sapiens
ttttaggctactgtt

SEQ ID NO: 1507594 - DNA, 15 bp, Homo sapiens
gttttaggctactgt

SEQ ID NO: 1507595 - DNA, 15 bp, Homo sapiens
tgttttaggctactg

SEQ ID NO: 1507596 - DNA, 15 bp, Homo sapiens
gtgttttaggctact

SEQ ID NO: 1507597 - DNA, 15 bp, Homo sapiens
tgtgttttaggctac

SEQ ID NO: 1507598 - DNA, 15 bp, Homo sapiens
gtgtgttttaggcta

SEQ ID NO: 1507599 - DNA, 15 bp, Homo sapiens
tgtgtgttttaggct

SEQ ID NO: 1507600 - DNA, 15 bp, Homo sapiens
ttgtgtgttttaggc

SEQ ID NO: 1507601 - DNA, 15 bp, Homo sapiens
tttgtgtgttttagg

SEQ ID NO: 1507602 - DNA, 15 bp, Homo sapiens
ttttgtgtgttttag

SEQ ID NO: 1507603 - DNA, 15 bp, Homo sapiens
attttgtgtgtttta

SEQ ID NO: 1507604 - DNA, 15 bp, Homo sapiens
aattttgtgtgtttt

SEQ ID NO: 1507605 - DNA, 15 bp, Homo sapiens
taattttgtgtgttt

SEQ ID NO: 1507606 - DNA, 15 bp, Homo sapiens
gtaattttgtgtgtt

SEQ ID NO: 1507607 - DNA, 15 bp, Homo sapiens
agtaattttgtgtgt

SEQ ID NO: 1507608 - DNA, 15 bp, Homo sapiens
tagtaattttgtgtg

SEQ ID NO: 1507609 - DNA, 15 bp, Homo sapiens
atagtaattttgtgt

SEQ ID NO: 1507610 - DNA, 15 bp, Homo sapiens
gatagtaattttgtg

SEQ ID NO: 1507611 - DNA, 15 bp, Homo sapiens
agatagtaattttgt

SEQ ID NO: 1507612 - DNA, 15 bp, Homo sapiens
aagatagtaattttg

SEQ ID NO: 1507613 - DNA, 15 bp, Homo sapiens
taagatagtaatttt

SEQ ID NO: 1507614 - DNA, 15 bp, Homo sapiens
gtaagatagtaattt

SEQ ID NO: 1507615 - DNA, 15 bp, Homo sapiens
tgtaagatagtaatt

SEQ ID NO: 1507616 - DNA, 15 bp, Homo sapiens
ttgtaagatagtaat

SEQ ID NO: 1507617 - DNA, 15 bp, Homo sapiens
attgtaagatagtaa

SEQ ID NO: 1507618 - DNA, 15 bp, Homo sapiens
aattgtaagatagta

SEQ ID NO: 1507619 - DNA, 15 bp, Homo sapiens
aaattgtaagatagt

SEQ ID NO: 1507620 - DNA, 15 bp, Homo sapiens
gaaattgtaagatag

SEQ ID NO: 1507621 - DNA, 15 bp, Homo sapiens
agaaattgtaagata

SEQ ID NO: 1507622 - DNA, 15 bp, Homo sapiens
cagaaattgtaagat

SEQ ID NO: 1507623 - DNA, 15 bp, Homo sapiens
acagaaattgtaaga

SEQ ID NO: 1507624 - DNA, 15 bp, Homo sapiens
cacagaaattgtaag

SEQ ID NO: 1507625 - DNA, 15 bp, Homo sapiens
ccacagaaattgtaa

SEQ ID NO: 1507626 - DNA, 15 bp, Homo sapiens
cccacagaaattgta

SEQ ID NO: 1507627 - DNA, 15 bp, Homo sapiens
acccacagaaattgt

SEQ ID NO: 1507628 - DNA, 15 bp, Homo sapiens
gacccacagaaattg

SEQ ID NO: 1507629 - DNA, 15 bp, Homo sapiens
cgacccacagaaatt

SEQ ID NO: 1507630 - DNA, 15 bp, Homo sapiens
ccgacccacagaaat

SEQ ID NO: 1507631 - DNA, 15 bp, Homo sapiens
tccgacccacagaaa

SEQ ID NO: 1507632 - DNA, 15 bp, Homo sapiens
ctccgacccacagaa

SEQ ID NO: 1507633 - DNA, 15 bp, Homo sapiens
actccgacccacaga

SEQ ID NO: 1507634 - DNA, 15 bp, Homo sapiens
gactccgacccacag

SEQ ID NO: 1507635 - DNA, 15 bp, Homo sapiens
tgactccgacccaca

SEQ ID NO: 1507636 - DNA, 15 bp, Homo sapiens
ttgactccgacccac

SEQ ID NO: 1507637 - DNA, 15 bp, Homo sapiens
cttgactccgaccca

SEQ ID NO: 1507638 - DNA, 15 bp, Homo sapiens
ccttgactccgaccc

SEQ ID NO: 1507639 - DNA, 15 bp, Homo sapiens
gccttgactccgacc

SEQ ID NO: 1507640 - DNA, 15 bp, Homo sapiens
tgccttgactccgac

SEQ ID NO: 1507641 - DNA, 15 bp, Homo sapiens
atgccttgactccga

SEQ ID NO: 1507642 - DNA, 15 bp, Homo sapiens
aatgccttgactccg

SEQ ID NO: 1507643 - DNA, 15 bp, Homo sapiens
caatgccttgactcc

SEQ ID NO: 1507644 - DNA, 15 bp, Homo sapiens
gcaatgccttgactc

SEQ ID NO: 1507645 - DNA, 15 bp, Homo sapiens
agcaatgccttgact

SEQ ID NO: 1507646 - DNA, 15 bp, Homo sapiens
aagcaatgccttgac

SEQ ID NO: 1507647 - DNA, 15 bp, Homo sapiens
taagcaatgccttga

SEQ ID NO: 1507648 - DNA, 15 bp, Homo sapiens
ctaagcaatgccttg

SEQ ID NO: 1507649 - DNA, 15 bp, Homo sapiens
gctaagcaatgcctt

SEQ ID NO: 1507650 - DNA, 15 bp, Homo sapiens
agctaagcaatgcct

SEQ ID NO: 1507651 - DNA, 15 bp, Homo sapiens
cagctaagcaatgcc

SEQ ID NO: 1507652 - DNA, 15 bp, Homo sapiens
acagctaagcaatgc

SEQ ID NO: 1507653 - DNA, 15 bp, Homo sapiens
cacagctaagcaatg

SEQ ID NO: 1507654 - DNA, 15 bp, Homo sapiens
acacagctaagcaat

SEQ ID NO: 1507655 - DNA, 15 bp, Homo sapiens
aacacagctaagcaa

SEQ ID NO: 1507656 - DNA, 15 bp, Homo sapiens
gaacacagctaagca

SEQ ID NO: 1507657 - DNA, 15 bp, Homo sapiens
agaacacagctaagc

SEQ ID NO: 1507658 - DNA, 15 bp, Homo sapiens
gagaacacagctaag

SEQ ID NO: 1507659 - DNA, 15 bp, Homo sapiens
agagaacacagctaa

SEQ ID NO: 1507660 - DNA, 15 bp, Homo sapiens
cagagaacacagcta

SEQ ID NO: 1507661 - DNA, 15 bp, Homo sapiens
gcagagaacacagct

SEQ ID NO: 1507662 - DNA, 15 bp, Homo sapiens
agcagagaacacagc

SEQ ID NO: 1507663 - DNA, 15 bp, Homo sapiens
gagcagagaacacag

SEQ ID NO: 1507664 - DNA, 15 bp, Homo sapiens
tgagcagagaacaca

SEQ ID NO: 1507665 - DNA, 15 bp, Homo sapiens
ctgagcagagaacac

SEQ ID NO: 1507666 - DNA, 15 bp, Homo sapiens
cctgagcagagaaca

SEQ ID NO: 1507667 - DNA, 15 bp, Homo sapiens
acctgagcagagaac

SEQ ID NO: 1507668 - DNA, 15 bp, Homo sapiens
aacctgagcagagaa

SEQ ID NO: 1507669 - DNA, 15 bp, Homo sapiens
gaacctgagcagaga

SEQ ID NO: 1507670 - DNA, 15 bp, Homo sapiens
agaacctgagcagag

SEQ ID NO: 1507671 - DNA, 15 bp, Homo sapiens
gagaacctgagcaga

SEQ ID NO: 1507672 - DNA, 15 bp, Homo sapiens
tgagaacctgagcag

SEQ ID NO: 1507673 - DNA, 15 bp, Homo sapiens
atgagaacctgagca

SEQ ID NO: 1507674 - DNA, 15 bp, Homo sapiens
gatgagaacctgagc

SEQ ID NO: 1507675 - DNA, 15 bp, Homo sapiens
tgatgagaacctgag

SEQ ID NO: 1507676 - DNA, 15 bp, Homo sapiens
ctgatgagaacctga

SEQ ID NO: 1507677 - DNA, 15 bp, Homo sapiens
gctgatgagaacctg

SEQ ID NO: 1507678 - DNA, 15 bp, Homo sapiens
ggctgatgagaacct

SEQ ID NO: 1507679 - DNA, 15 bp, Homo sapiens
aggctgatgagaacc

SEQ ID NO: 1507680 - DNA, 15 bp, Homo sapiens
caggctgatgagaac

SEQ ID NO: 1507681 - DNA, 15 bp, Homo sapiens
tcaggctgatgagaa

SEQ ID NO: 1507682 - DNA, 15 bp, Homo sapiens
ttcaggctgatgaga

SEQ ID NO: 1507683 - DNA, 15 bp, Homo sapiens
tttcaggctgatgag

SEQ ID NO: 1507684 - DNA, 15 bp, Homo sapiens
atttcaggctgatga

SEQ ID NO: 1507685 - DNA, 15 bp, Homo sapiens
gatttcaggctgatg

SEQ ID NO: 1507686 - DNA, 15 bp, Homo sapiens
tgatttcaggctgat

SEQ ID NO: 1507687 - DNA, 15 bp, Homo sapiens
ttgatttcaggctga

SEQ ID NO: 1507688 - DNA, 15 bp, Homo sapiens
cttgatttcaggctg

SEQ ID NO: 1507689 - DNA, 15 bp, Homo sapiens
ccttgatttcaggct

SEQ ID NO: 1507690 - DNA, 15 bp, Homo sapiens
accttgatttcaggc

SEQ ID NO: 1507691 - DNA, 15 bp, Homo sapiens
aaccttgatttcagg

SEQ ID NO: 1507692 - DNA, 15 bp, Homo sapiens
aaaccttgatttcag

SEQ ID NO: 1507693 - DNA, 15 bp, Homo sapiens
aaaaccttgatttca

SEQ ID NO: 1507694 - DNA, 15 bp, Homo sapiens
caaaaccttgatttc

SEQ ID NO: 1507695 - DNA, 15 bp, Homo sapiens
ccaaaaccttgattt

SEQ ID NO: 1507696 - DNA, 15 bp, Homo sapiens
accaaaaccttgatt

SEQ ID NO: 1507697 - DNA, 15 bp, Homo sapiens
aaccaaaaccttgat

SEQ ID NO: 1507698 - DNA, 15 bp, Homo sapiens
caaccaaaaccttga

SEQ ID NO: 1507699 - DNA, 15 bp, Homo sapiens
ccaaccaaaaccttg

SEQ ID NO: 1507700 - DNA, 15 bp, Homo sapiens
cccaaccaaaacctt

SEQ ID NO: 1507701 - DNA, 15 bp, Homo sapiens
ccccaaccaaaacct

SEQ ID NO: 1507702 - DNA, 15 bp, Homo sapiens
gccccaaccaaaacc

SEQ ID NO: 1507703 - DNA, 15 bp, Homo sapiens
ggccccaaccaaaac

SEQ ID NO: 1507704 - DNA, 15 bp, Homo sapiens
aggccccaaccaaaa

SEQ ID NO: 1507705 - DNA, 15 bp, Homo sapiens
gaggccccaaccaaa

SEQ ID NO: 1507706 - DNA, 15 bp, Homo sapiens
tgaggccccaaccaa

SEQ ID NO: 1507707 - DNA, 15 bp, Homo sapiens
ctgaggccccaacca

SEQ ID NO: 1507708 - DNA, 15 bp, Homo sapiens
actgaggccccaacc

SEQ ID NO: 1507709 - DNA, 15 bp, Homo sapiens
gactgaggccccaac

SEQ ID NO: 1507710 - DNA, 15 bp, Homo sapiens
agactgaggccccaa

SEQ ID NO: 1507711 - DNA, 15 bp, Homo sapiens
aagactgaggcccca

SEQ ID NO: 1507712 - DNA, 15 bp, Homo sapiens
taagactgaggcccc

SEQ ID NO: 1507713 - DNA, 15 bp, Homo sapiens
ataagactgaggccc

SEQ ID NO: 1507714 - DNA, 15 bp, Homo sapiens
gataagactgaggcc

SEQ ID NO: 1507715 - DNA, 15 bp, Homo sapiens
agataagactgaggc

SEQ ID NO: 1507716 - DNA, 15 bp, Homo sapiens
cagataagactgagg

SEQ ID NO: 1507717 - DNA, 15 bp, Homo sapiens
tcagataagactgag

SEQ ID NO: 1507718 - DNA, 15 bp, Homo sapiens
ctcagataagactga

SEQ ID NO: 1507719 - DNA, 15 bp, Homo sapiens
cctcagataagactg

SEQ ID NO: 1507720 - DNA, 15 bp, Homo sapiens
gcctcagataagact

SEQ ID NO: 1507721 - DNA, 15 bp, Homo sapiens
agcctcagataagac

SEQ ID NO: 1507722 - DNA, 15 bp, Homo sapiens
aagcctcagataaga

SEQ ID NO: 1507723 - DNA, 15 bp, Homo sapiens
caagcctcagataag

SEQ ID NO: 1507724 - DNA, 15 bp, Homo sapiens
ccaagcctcagataa

SEQ ID NO: 1507725 - DNA, 15 bp, Homo sapiens
ccccaagcctcagat

SEQ ID NO: 1507726 - DNA, 15 bp, Homo sapiens
accccaagcctcaga

SEQ ID NO: 1507727 - DNA, 15 bp, Homo sapiens
aaccccaagcctcag

SEQ ID NO: 1507728 - DNA, 15 bp, Homo sapiens
gaaccccaagcctca

SEQ ID NO: 1507729 - DNA, 15 bp, Homo sapiens
agaaccccaagcctc

SEQ ID NO: 1507730 - DNA, 15 bp, Homo sapiens
gagaaccccaagcct

SEQ ID NO: 1507731 - DNA, 15 bp, Homo sapiens
agagaaccccaagcc

SEQ ID NO: 1507732 - DNA, 15 bp, Homo sapiens
aagagaaccccaagc

SEQ ID NO: 1507733 - DNA, 15 bp, Homo sapiens
gaagagaaccccaag

SEQ ID NO: 1507734 - DNA, 15 bp, Homo sapiens
ggaagagaaccccaa

SEQ ID NO: 1507735 - DNA, 15 bp, Homo sapiens
tggaagagaacccca

SEQ ID NO: 1507736 - DNA, 15 bp, Homo sapiens
ctggaagagaacccc

SEQ ID NO: 1507737 - DNA, 15 bp, Homo sapiens
cctggaagagaaccc

SEQ ID NO: 1507738 - DNA, 15 bp, Homo sapiens
gcctggaagagaacc

SEQ ID NO: 1507739 - DNA, 15 bp, Homo sapiens
agcctggaagagaac

SEQ ID NO: 1507740 - DNA, 15 bp, Homo sapiens
gagcctggaagagaa

SEQ ID NO: 1507741 - DNA, 15 bp, Homo sapiens
tgagcctggaagaga

SEQ ID NO: 1507742 - DNA, 15 bp, Homo sapiens
atgagcctggaagag

SEQ ID NO: 1507743 - DNA, 15 bp, Homo sapiens
aatgagcctggaaga

SEQ ID NO: 1507744 - DNA, 15 bp, Homo sapiens
caatgagcctggaag

SEQ ID NO: 1507745 - DNA, 15 bp, Homo sapiens
ccaatgagcctggaa

SEQ ID NO: 1507746 - DNA, 15 bp, Homo sapiens
accaatgagcctgga

SEQ ID NO: 1507747 - DNA, 15 bp, Homo sapiens
aaccaatgagcctgg

SEQ ID NO: 1507748 - DNA, 15 bp, Homo sapiens
caaccaatgagcctg

SEQ ID NO: 1507749 - DNA, 15 bp, Homo sapiens
acaaccaatgagcct

SEQ ID NO: 1507750 - DNA, 15 bp, Homo sapiens
aacaaccaatgagcc

SEQ ID NO: 1507751 - DNA, 15 bp, Homo sapiens
caacaaccaatgagc

SEQ ID NO: 1507752 - DNA, 15 bp, Homo sapiens
ccaacaaccaatgag

SEQ ID NO: 1507753 - DNA, 15 bp, Homo sapiens
gccaacaaccaatga

SEQ ID NO: 1507754 - DNA, 15 bp, Homo sapiens
tgccaacaaccaatg

SEQ ID NO: 1507755 - DNA, 15 bp, Homo sapiens
ctgccaacaaccaat

SEQ ID NO: 1507756 - DNA, 15 bp, Homo sapiens
tctgccaacaaccaa

SEQ ID NO: 1507757 - DNA, 15 bp, Homo sapiens
gtctgccaacaacca

SEQ ID NO: 1507758 - DNA, 15 bp, Homo sapiens
cgtctgccaacaacc

SEQ ID NO: 1507759 - DNA, 15 bp, Homo sapiens
ccgtctgccaacaac

SEQ ID NO: 1507760 - DNA, 15 bp, Homo sapiens
accgtctgccaacaa

SEQ ID NO: 1507761 - DNA, 15 bp, Homo sapiens
aaccgtctgccaaca

SEQ ID NO: 1507762 - DNA, 15 bp, Homo sapiens
gaaccgtctgccaac

SEQ ID NO: 1507763 - DNA, 15 bp, Homo sapiens
tgaaccgtctgccaa

SEQ ID NO: 1507764 - DNA, 15 bp, Homo sapiens
ctgaaccgtctgcca

SEQ ID NO: 1507765 - DNA, 15 bp, Homo sapiens
cctgaaccgtctgcc

SEQ ID NO: 1507766 - DNA, 15 bp, Homo sapiens
tcctgaaccgtctgc

SEQ ID NO: 1507767 - DNA, 15 bp, Homo sapiens
ttcctgaaccgtctg

SEQ ID NO: 1507768 - DNA, 15 bp, Homo sapiens
attcctgaaccgtct

SEQ ID NO: 1507769 - DNA, 15 bp, Homo sapiens
gattcctgaaccgtc

SEQ ID NO: 1507770 - DNA, 15 bp, Homo sapiens
agattcctgaaccgt

SEQ ID NO: 1507771 - DNA, 15 bp, Homo sapiens
cagattcctgaaccg

SEQ ID NO: 1507772 - DNA, 15 bp, Homo sapiens
ccagattcctgaacc

SEQ ID NO: 1507773 - DNA, 15 bp, Homo sapiens
cccagattcctgaac

SEQ ID NO: 1507774 - DNA, 15 bp, Homo sapiens
ccccagattcctgaa

SEQ ID NO: 1507775 - DNA, 15 bp, Homo sapiens
tccccagattcctga

SEQ ID NO: 1507776 - DNA, 15 bp, Homo sapiens
ctccccagattcctg

SEQ ID NO: 1507777 - DNA, 15 bp, Homo sapiens
tctccccagattcct

SEQ ID NO: 1507778 - DNA, 15 bp, Homo sapiens
gtctccccagattcc

SEQ ID NO: 1507779 - DNA, 15 bp, Homo sapiens
tgtctccccagattc

SEQ ID NO: 1507780 - DNA, 15 bp, Homo sapiens
ttgtctccccagatt

SEQ ID NO: 1507781 - DNA, 15 bp, Homo sapiens
cttgtctccccagat

SEQ ID NO: 1507782 - DNA, 15 bp, Homo sapiens
tcttgtctccccaga

SEQ ID NO: 1507783 - DNA, 15 bp, Homo sapiens
atcttgtctccccag

SEQ ID NO: 1507784 - DNA, 15 bp, Homo sapiens
aatcttgtctcccca

SEQ ID NO: 1507785 - DNA, 15 bp, Homo sapiens
aaatcttgtctcccc

SEQ ID NO: 1507786 - DNA, 15 bp, Homo sapiens
aaaatcttgtctccc

SEQ ID NO: 1507787 - DNA, 15 bp, Homo sapiens
aaaaatcttgtctcc

SEQ ID NO: 1507788 - DNA, 15 bp, Homo sapiens
caaaaatcttgtctc

SEQ ID NO: 1507789 - DNA, 15 bp, Homo sapiens
ccaaaaatcttgtct

SEQ ID NO: 1507790 - DNA, 15 bp, Homo sapiens
cccaaaaatcttgtc

SEQ ID NO: 1507791 - DNA, 15 bp, Homo sapiens
tcccaaaaatcttgt

SEQ ID NO: 1507792 - DNA, 15 bp, Homo sapiens
ctcccaaaaatcttg

SEQ ID NO: 1507793 - DNA, 15 bp, Homo sapiens
gctcccaaaaatctt

SEQ ID NO: 1507794 - DNA, 15 bp, Homo sapiens
cgctcccaaaaatct

SEQ ID NO: 1507795 - DNA, 15 bp, Homo sapiens
gcgctcccaaaaatc

SEQ ID NO: 1507796 - DNA, 15 bp, Homo sapiens
ggcgctcccaaaaat

SEQ ID NO: 1507797 - DNA, 15 bp, Homo sapiens
tggcgctcccaaaaa

SEQ ID NO: 1507798 - DNA, 15 bp, Homo sapiens
ttggcgctcccaaaa

SEQ ID NO: 1507799 - DNA, 15 bp, Homo sapiens
gttggcgctcccaaa

SEQ ID NO: 1507800 - DNA, 15 bp, Homo sapiens
ggttggcgctcccaa

SEQ ID NO: 1507801 - DNA, 15 bp, Homo sapiens
gggttggcgctccca

SEQ ID NO: 1507802 - DNA, 15 bp, Homo sapiens
tgggttggcgctccc

SEQ ID NO: 1507803 - DNA, 15 bp, Homo sapiens
ctgggttggcgctcc

SEQ ID NO: 1507804 - DNA, 15 bp, Homo sapiens
tctgggttggcgctc

SEQ ID NO: 1507805 - DNA, 15 bp, Homo sapiens
atctgggttggcgct

SEQ ID NO: 1507806 - DNA, 15 bp, Homo sapiens
catctgggttggcgc

SEQ ID NO: 1507807 - DNA, 15 bp, Homo sapiens
acatctgggttggcg

SEQ ID NO: 1507808 - DNA, 15 bp, Homo sapiens
aacatctgggttggc

SEQ ID NO: 1507809 - DNA, 15 bp, Homo sapiens
aaacatctgggttgg

SEQ ID NO: 1507810 - DNA, 15 bp, Homo sapiens
gaaacatctgggttg

SEQ ID NO: 1507811 - DNA, 15 bp, Homo sapiens
ggaaacatctgggtt

SEQ ID NO: 1507812 - DNA, 15 bp, Homo sapiens
tggaaacatctgggt

SEQ ID NO: 1507813 - DNA, 15 bp, Homo sapiens
atggaaacatctggg

SEQ ID NO: 1507814 - DNA, 15 bp, Homo sapiens
aatggaaacatctgg

SEQ ID NO: 1507815 - DNA, 15 bp, Homo sapiens
gaatggaaacatctg

SEQ ID NO: 1507816 - DNA, 15 bp, Homo sapiens
ggaatggaaacatct

SEQ ID NO: 1507817 - DNA, 15 bp, Homo sapiens
tggaatggaaacatc

SEQ ID NO: 1507818 - DNA, 15 bp, Homo sapiens
atggaatggaaacat

SEQ ID NO: 1507819 - DNA, 15 bp, Homo sapiens
catggaatggaaaca

SEQ ID NO: 1507820 - DNA, 15 bp, Homo sapiens
acatggaatggaaac

SEQ ID NO: 1507821 - DNA, 15 bp, Homo sapiens
cacatggaatggaaa

SEQ ID NO: 1507822 - DNA, 15 bp, Homo sapiens
acacatggaatggaa

SEQ ID NO: 1507823 - DNA, 15 bp, Homo sapiens
gacacatggaatgga

SEQ ID NO: 1507824 - DNA, 15 bp, Homo sapiens
tgacacatggaatgg

SEQ ID NO: 1507825 - DNA, 15 bp, Homo sapiens
ctgacacatggaatg

SEQ ID NO: 1507826 - DNA, 15 bp, Homo sapiens
tctgacacatggaat

SEQ ID NO: 1507827 - DNA, 15 bp, Homo sapiens
ctctgacacatggaa

SEQ ID NO: 1507828 - DNA, 15 bp, Homo sapiens
actctgacacatgga

SEQ ID NO: 1507829 - DNA, 15 bp, Homo sapiens
gactctgacacatgg

SEQ ID NO: 1507830 - DNA, 15 bp, Homo sapiens
agactctgacacatg

SEQ ID NO: 1507831 - DNA, 15 bp, Homo sapiens
aagactctgacacat

SEQ ID NO: 1507832 - DNA, 15 bp, Homo sapiens
caagactctgacaca

SEQ ID NO: 1507833 - DNA, 15 bp, Homo sapiens
acaagactctgacac

SEQ ID NO: 1507834 - DNA, 15 bp, Homo sapiens
aacaagactctgaca

SEQ ID NO: 1507835 - DNA, 15 bp, Homo sapiens
gaacaagactctgac

SEQ ID NO: 1507836 - DNA, 15 bp, Homo sapiens
agaacaagactctga

SEQ ID NO: 1507837 - DNA, 15 bp, Homo sapiens
aagaacaagactctg

SEQ ID NO: 1507838 - DNA, 15 bp, Homo sapiens
aaagaacaagactct

SEQ ID NO: 1507839 - DNA, 15 bp, Homo sapiens
gaaagaacaagactc

SEQ ID NO: 1507840 - DNA, 15 bp, Homo sapiens
ggaaagaacaagact

SEQ ID NO: 1507841 - DNA, 15 bp, Homo sapiens
aggaaagaacaagac

SEQ ID NO: 1507842 - DNA, 15 bp, Homo sapiens
taggaaagaacaaga

SEQ ID NO: 1507843 - DNA, 15 bp, Homo sapiens
ctaggaaagaacaag

SEQ ID NO: 1507844 - DNA, 15 bp, Homo sapiens
gctaggaaagaacaa

SEQ ID NO: 1507845 - DNA, 15 bp, Homo sapiens
ggctaggaaagaaca

SEQ ID NO: 1507846 - DNA, 15 bp, Homo sapiens
tggctaggaaagaac

SEQ ID NO: 1507847 - DNA, 15 bp, Homo sapiens
ctggctaggaaagaa

SEQ ID NO: 1507848 - DNA, 15 bp, Homo sapiens
cctggctaggaaaga

SEQ ID NO: 1507849 - DNA, 15 bp, Homo sapiens
gcctggctaggaaag

SEQ ID NO: 1507850 - DNA, 15 bp, Homo sapiens
ggcctggctaggaaa

SEQ ID NO: 1507851 - DNA, 15 bp, Homo sapiens
gggcctggctaggaa

SEQ ID NO: 1507852 - DNA, 15 bp, Homo sapiens
ggggcctggctagga

SEQ ID NO: 1507853 - DNA, 15 bp, Homo sapiens
aggggcctggctagg

SEQ ID NO: 1507854 - DNA, 15 bp, Homo sapiens
caggggcctggctag

SEQ ID NO: 1507855 - DNA, 15 bp, Homo sapiens
tcaggggcctggcta

SEQ ID NO: 1507856 - DNA, 15 bp, Homo sapiens
atcaggggcctggct

SEQ ID NO: 1507857 - DNA, 15 bp, Homo sapiens
gatcaggggcctggc

SEQ ID NO: 1507858 - DNA, 15 bp, Homo sapiens
agatcaggggcctgg

SEQ ID NO: 1507859 - DNA, 15 bp, Homo sapiens
cagatcaggggcctg

SEQ ID NO: 1507860 - DNA, 15 bp, Homo sapiens
ccagatcaggggcct

SEQ ID NO: 1507861 - DNA, 15 bp, Homo sapiens
tccagatcaggggcc

SEQ ID NO: 1507862 - DNA, 15 bp, Homo sapiens
gtccagatcaggggc

SEQ ID NO: 1507863 - DNA, 15 bp, Homo sapiens
cgtccagatcagggg

SEQ ID NO: 1507864 - DNA, 15 bp, Homo sapiens
acgtccagatcaggg

SEQ ID NO: 1507865 - DNA, 15 bp, Homo sapiens
tacgtccagatcagg

SEQ ID NO: 1507866 - DNA, 15 bp, Homo sapiens
ctacgtccagatcag

SEQ ID NO: 1507867 - DNA, 15 bp, Homo sapiens
cctacgtccagatca

SEQ ID NO: 1507868 - DNA, 15 bp, Homo sapiens
tcctacgtccagatc

SEQ ID NO: 1507869 - DNA, 15 bp, Homo sapiens
ctcctacgtccagat

SEQ ID NO: 1507870 - DNA, 15 bp, Homo sapiens
tctcctacgtccaga

SEQ ID NO: 1507871 - DNA, 15 bp, Homo sapiens
gtctcctacgtccag

SEQ ID NO: 1507872 - DNA, 15 bp, Homo sapiens
ggtctcctacgtcca

SEQ ID NO: 1507873 - DNA, 15 bp, Homo sapiens
aggtctcctacgtcc

SEQ ID NO: 1507874 - DNA, 15 bp, Homo sapiens
caggtctcctacgtc

SEQ ID NO: 1507875 - DNA, 15 bp, Homo sapiens
gcaggtctcctacgt

SEQ ID NO: 1507876 - DNA, 15 bp, Homo sapiens
agcaggtctcctacg

SEQ ID NO: 1507877 - DNA, 15 bp, Homo sapiens
cagcaggtctcctac

SEQ ID NO: 1507878 - DNA, 15 bp, Homo sapiens
gcagcaggtctccta

SEQ ID NO: 1507879 - DNA, 15 bp, Homo sapiens
ggcagcaggtctcct

SEQ ID NO: 1507880 - DNA, 15 bp, Homo sapiens
aggcagcaggtctcc

SEQ ID NO: 1507881 - DNA, 15 bp, Homo sapiens
aaggcagcaggtctc

SEQ ID NO: 1507882 - DNA, 15 bp, Homo sapiens
aaaggcagcaggtct

SEQ ID NO: 1507883 - DNA, 15 bp, Homo sapiens
caaaggcagcaggtc

SEQ ID NO: 1507884 - DNA, 15 bp, Homo sapiens
ccaaaggcagcaggt

SEQ ID NO: 1507885 - DNA, 15 bp, Homo sapiens
cccaaaggcagcagg

SEQ ID NO: 1507886 - DNA, 15 bp, Homo sapiens
tcccaaaggcagcag

SEQ ID NO: 1507887 - DNA, 15 bp, Homo sapiens
ctcccaaaggcagca

SEQ ID NO: 1507888 - DNA, 15 bp, Homo sapiens
actcccaaaggcagc

SEQ ID NO: 1507889 - DNA, 15 bp, Homo sapiens
aactcccaaaggcag

SEQ ID NO: 1507890 - DNA, 15 bp, Homo sapiens
gaactcccaaaggca

SEQ ID NO: 1507891 - DNA, 15 bp, Homo sapiens
tgaactcccaaaggc

SEQ ID NO: 1507892 - DNA, 15 bp, Homo sapiens
ttgaactcccaaagg

SEQ ID NO: 1507893 - DNA, 15 bp, Homo sapiens
gttgaactcccaaag

SEQ ID NO: 1507894 - DNA, 15 bp, Homo sapiens
ggttgaactcccaaa

SEQ ID NO: 1507895 - DNA, 15 bp, Homo sapiens
aggttgaactcccaa

SEQ ID NO: 1507896 - DNA, 15 bp, Homo sapiens
aaggttgaactccca

SEQ ID NO: 1507897 - DNA, 15 bp, Homo sapiens
aaaggttgaactccc

SEQ ID NO: 1507898 - DNA, 15 bp, Homo sapiens
caaaggttgaactcc

SEQ ID NO: 1507899 - DNA, 15 bp, Homo sapiens
tcaaaggttgaactc

SEQ ID NO: 1507900 - DNA, 15 bp, Homo sapiens
ttcaaaggttgaact

SEQ ID NO: 1507901 - DNA, 15 bp, Homo sapiens
cttcaaaggttgaac

SEQ ID NO: 1507902 - DNA, 15 bp, Homo sapiens
gcttcaaaggttgaa

SEQ ID NO: 1507903 - DNA, 15 bp, Homo sapiens
ggcttcaaaggttga

SEQ ID NO: 1507904 - DNA, 15 bp, Homo sapiens
gggcttcaaaggttg

SEQ ID NO: 1507905 - DNA, 15 bp, Homo sapiens
tgggcttcaaaggtt

SEQ ID NO: 1507906 - DNA, 15 bp, Homo sapiens
ttgggcttcaaaggt

SEQ ID NO: 1507907 - DNA, 15 bp, Homo sapiens
gttgggcttcaaagg

SEQ ID NO: 1507908 - DNA, 15 bp, Homo sapiens
tgttgggcttcaaag

SEQ ID NO: 1507909 - DNA, 15 bp, Homo sapiens
gtgttgggcttcaaa

SEQ ID NO: 1507910 - DNA, 15 bp, Homo sapiens
tgtgttgggcttcaa

SEQ ID NO: 1507911 - DNA, 15 bp, Homo sapiens
atgtgttgggcttca

SEQ ID NO: 1507912 - DNA, 15 bp, Homo sapiens
tatgtgttgggcttc

SEQ ID NO: 1507913 - DNA, 15 bp, Homo sapiens
gtatgtgttgggctt

SEQ ID NO: 1507914 - DNA, 15 bp, Homo sapiens
tgtatgtgttgggct

SEQ ID NO: 1507915 - DNA, 15 bp, Homo sapiens
ctgtatgtgttgggc

SEQ ID NO: 1507916 - DNA, 15 bp, Homo sapiens
tctgtatgtgttggg

SEQ ID NO: 1507917 - DNA, 15 bp, Homo sapiens
atctgtatgtgttgg

SEQ ID NO: 1507918 - DNA, 15 bp, Homo sapiens
aatctgtatgtgttg

SEQ ID NO: 1507919 - DNA, 15 bp, Homo sapiens
aaatctgtatgtgtt

SEQ ID NO: 1507920 - DNA, 15 bp, Homo sapiens
taaatctgtatgtgt

SEQ ID NO: 1507921 - DNA, 15 bp, Homo sapiens
ctaaatctgtatgtg

SEQ ID NO: 1507922 - DNA, 15 bp, Homo sapiens
tctaaatctgtatgt

SEQ ID NO: 1507923 - DNA, 15 bp, Homo sapiens
atctaaatctgtatg

SEQ ID NO: 1507924 - DNA, 15 bp, Homo sapiens
tatctaaatctgtat

SEQ ID NO: 1507925 - DNA, 15 bp, Homo sapiens
atatctaaatctgta

SEQ ID NO: 1507926 - DNA, 15 bp, Homo sapiens
gatatctaaatctgt

SEQ ID NO: 1507927 - DNA, 15 bp, Homo sapiens
agatatctaaatctg

SEQ ID NO: 1507928 - DNA, 15 bp, Homo sapiens
tagatatctaaatct

SEQ ID NO: 1507929 - DNA, 15 bp, Homo sapiens
ttagatatctaaatc

SEQ ID NO: 1507930 - DNA, 15 bp, Homo sapiens
attagatatctaaat

SEQ ID NO: 1507931 - DNA, 15 bp, Homo sapiens
gattagatatctaaa

SEQ ID NO: 1507932 - DNA, 15 bp, Homo sapiens
agattagatatctaa

SEQ ID NO: 1507933 - DNA, 15 bp, Homo sapiens
cagattagatatcta

SEQ ID NO: 1507934 - DNA, 15 bp, Homo sapiens
acagattagatatct

SEQ ID NO: 1507935 - DNA, 15 bp, Homo sapiens
gacagattagatatc

SEQ ID NO: 1507936 - DNA, 15 bp, Homo sapiens
agacagattagatat

SEQ ID NO: 1507937 - DNA, 15 bp, Homo sapiens
cagacagattagata

SEQ ID NO: 1507938 - DNA, 15 bp, Homo sapiens
acagacagattagat

SEQ ID NO: 1507939 - DNA, 15 bp, Homo sapiens
gacagacagattaga

SEQ ID NO: 1507940 - DNA, 15 bp, Homo sapiens
ggacagacagattag

SEQ ID NO: 1507941 - DNA, 15 bp, Homo sapiens
tggacagacagatta

SEQ ID NO: 1507942 - DNA, 15 bp, Homo sapiens
atggacagacagatt

SEQ ID NO: 1507943 - DNA, 15 bp, Homo sapiens
gatggacagacagat

SEQ ID NO: 1507944 - DNA, 15 bp, Homo sapiens
ggatggacagacaga

SEQ ID NO: 1507945 - DNA, 15 bp, Homo sapiens
tggatggacagacag

SEQ ID NO: 1507946 - DNA, 15 bp, Homo sapiens
atggatggacagaca

SEQ ID NO: 1507947 - DNA, 15 bp, Homo sapiens
gatggatggacagac

SEQ ID NO: 1507948 - DNA, 15 bp, Homo sapiens
ggatggatggacaga

SEQ ID NO: 1507949 - DNA, 15 bp, Homo sapiens
tggatggatggacag

SEQ ID NO: 1507950 - DNA, 15 bp, Homo sapiens
atggatggatggaca

SEQ ID NO: 1507951 - DNA, 15 bp, Homo sapiens
gatggatggatggac

SEQ ID NO: 1507952 - DNA, 15 bp, Homo sapiens
ggatggatggatgga

SEQ ID NO: 1507953 - DNA, 15 bp, Homo sapiens
tggatggatggatgg

SEQ ID NO: 1507954 - DNA, 15 bp, Homo sapiens
atggatggatggatg

SEQ ID NO: 1507955 - DNA, 15 bp, Homo sapiens
gatggatggatggat

SEQ ID NO: 1507956 - DNA, 15 bp, Homo sapiens
ttggatggatggatg

SEQ ID NO: 1507957 - DNA, 15 bp, Homo sapiens
attggatggatggat

SEQ ID NO: 1507958 - DNA, 15 bp, Homo sapiens
gattggatggatgga

SEQ ID NO: 1507959 - DNA, 15 bp, Homo sapiens
agattggatggatgg

SEQ ID NO: 1507960 - DNA, 15 bp, Homo sapiens
cagattggatggatg

SEQ ID NO: 1507961 - DNA, 15 bp, Homo sapiens
acagattggatggat

SEQ ID NO: 1507962 - DNA, 15 bp, Homo sapiens
tacagattggatgga

SEQ ID NO: 1507963 - DNA, 15 bp, Homo sapiens
atacagattggatgg

SEQ ID NO: 1507964 - DNA, 15 bp, Homo sapiens
tatacagattggatg

SEQ ID NO: 1507965 - DNA, 15 bp, Homo sapiens
atatacagattggat

SEQ ID NO: 1507966 - DNA, 15 bp, Homo sapiens
gatatacagattgga

SEQ ID NO: 1507967 - DNA, 15 bp, Homo sapiens
agatatacagattgg

SEQ ID NO: 1507968 - DNA, 15 bp, Homo sapiens
gagatatacagattg

SEQ ID NO: 1507969 - DNA, 15 bp, Homo sapiens
agagatatacagatt

SEQ ID NO: 1507970 - DNA, 15 bp, Homo sapiens
cagagatatacagat

SEQ ID NO: 1507971 - DNA, 15 bp, Homo sapiens
tcagagatatacaga

SEQ ID NO: 1507972 - DNA, 15 bp, Homo sapiens
ctcagagatatacag

SEQ ID NO: 1507973 - DNA, 15 bp, Homo sapiens
tctcagagatataca

SEQ ID NO: 1507974 - DNA, 15 bp, Homo sapiens
atctcagagatatac

SEQ ID NO: 1507975 - DNA, 15 bp, Homo sapiens
tatctcagagatata

SEQ ID NO: 1507976 - DNA, 15 bp, Homo sapiens
atatctcagagatat

SEQ ID NO: 1507977 - DNA, 15 bp, Homo sapiens
tatatctcagagata

SEQ ID NO: 1507978 - DNA, 15 bp, Homo sapiens
atatatctcagagat

SEQ ID NO: 1507979 - DNA, 15 bp, Homo sapiens
tatatatctcagaga

SEQ ID NO: 1507980 - DNA, 15 bp, Homo sapiens
ttatatatctcagag

SEQ ID NO: 1507981 - DNA, 15 bp, Homo sapiens
cttatatatctcaga

SEQ ID NO: 1507982 - DNA, 15 bp, Homo sapiens
acttatatatctcag

SEQ ID NO: 1507983 - DNA, 15 bp, Homo sapiens
cacttatatatctca

SEQ ID NO: 1507984 - DNA, 15 bp, Homo sapiens
acacttatatatctc

SEQ ID NO: 1507985 - DNA, 15 bp, Homo sapiens
tacacttatatatct

SEQ ID NO: 1507986 - DNA, 15 bp, Homo sapiens
ttacacttatatatc

SEQ ID NO: 1507987 - DNA, 15 bp, Homo sapiens
attacacttatatat

SEQ ID NO: 1507988 - DNA, 15 bp, Homo sapiens
tattacacttatata

SEQ ID NO: 1507989 - DNA, 15 bp, Homo sapiens
ttattacacttatat

SEQ ID NO: 1507990 - DNA, 15 bp, Homo sapiens
tttattacacttata

SEQ ID NO: 1507991 - DNA, 15 bp, Homo sapiens
atttattacacttat

SEQ ID NO: 1507992 - DNA, 15 bp, Homo sapiens
catttattacactta

SEQ ID NO: 1507993 - DNA, 15 bp, Homo sapiens
ccatttattacactt

SEQ ID NO: 1507994 - DNA, 15 bp, Homo sapiens
cccatttattacact

SEQ ID NO: 1507995 - DNA, 15 bp, Homo sapiens
gcccatttattacac

SEQ ID NO: 1507996 - DNA, 15 bp, Homo sapiens
cgcccatttattaca

SEQ ID NO: 1507997 - DNA, 15 bp, Homo sapiens
tcgcccatttattac

SEQ ID NO: 1507998 - DNA, 15 bp, Homo sapiens
atcgcccatttatta

SEQ ID NO: 1507999 - DNA, 15 bp, Homo sapiens
tatcgcccatttatt

SEQ ID NO: 1508000 - DNA, 15 bp, Homo sapiens
ttatcgcccatttat

SEQ ID NO: 1508001 - DNA, 15 bp, Homo sapiens
attatcgcccattta

SEQ ID NO: 1508002 - DNA, 15 bp, Homo sapiens
gattatcgcccattt

SEQ ID NO: 1508003 - DNA, 15 bp, Homo sapiens
tgattatcgcccatt

SEQ ID NO: 1508004 - DNA, 15 bp, Homo sapiens
ttgattatcgcccat

SEQ ID NO: 1508005 - DNA, 15 bp, Homo sapiens
cttgattatcgccca

SEQ ID NO: 1508006 - DNA, 15 bp, Homo sapiens
acttgattatcgccc

SEQ ID NO: 1508007 - DNA, 15 bp, Homo sapiens
cacttgattatcgcc

SEQ ID NO: 1508008 - DNA, 15 bp, Homo sapiens
gcacttgattatcgc

SEQ ID NO: 1508009 - DNA, 15 bp, Homo sapiens
agcacttgattatcg

SEQ ID NO: 1508010 - DNA, 15 bp, Homo sapiens
cagcacttgattatc

SEQ ID NO: 1508011 - DNA, 15 bp, Homo sapiens
ccagcacttgattat

SEQ ID NO: 1508012 - DNA, 15 bp, Homo sapiens
accagcacttgatta

SEQ ID NO: 1508013 - DNA, 15 bp, Homo sapiens
aaccagcacttgatt

SEQ ID NO: 1508014 - DNA, 15 bp, Homo sapiens
aaaccagcacttgat

SEQ ID NO: 1508015 - DNA, 15 bp, Homo sapiens
aaaaccagcacttga

SEQ ID NO: 1508016 - DNA, 15 bp, Homo sapiens
caaaaccagcacttg

SEQ ID NO: 1508017 - DNA, 15 bp, Homo sapiens
ccaaaaccagcactt

SEQ ID NO: 1508018 - DNA, 15 bp, Homo sapiens
accaaaaccagcact

SEQ ID NO: 1508019 - DNA, 15 bp, Homo sapiens
gaccaaaaccagcac

SEQ ID NO: 1508020 - DNA, 15 bp, Homo sapiens
ggaccaaaaccagca

SEQ ID NO: 1508021 - DNA, 15 bp, Homo sapiens
aggaccaaaaccagc

SEQ ID NO: 1508022 - DNA, 15 bp, Homo sapiens
aaggaccaaaaccag

SEQ ID NO: 1508023 - DNA, 15 bp, Homo sapiens
taaggaccaaaacca

SEQ ID NO: 1508024 - DNA, 15 bp, Homo sapiens
ctaaggaccaaaacc

SEQ ID NO: 1508025 - DNA, 15 bp, Homo sapiens
cctaaggaccaaaac

SEQ ID NO: 1508026 - DNA, 15 bp, Homo sapiens
acctaaggaccaaaa

SEQ ID NO: 1508027 - DNA, 15 bp, Homo sapiens
aacctaaggaccaaa

SEQ ID NO: 1508028 - DNA, 15 bp, Homo sapiens
aaacctaaggaccaa

SEQ ID NO: 1508029 - DNA, 15 bp, Homo sapiens
gaaacctaaggacca

SEQ ID NO: 1508030 - DNA, 15 bp, Homo sapiens
agaaacctaaggacc

SEQ ID NO: 1508031 - DNA, 15 bp, Homo sapiens
gagaaacctaaggac

SEQ ID NO: 1508032 - DNA, 15 bp, Homo sapiens
agagaaacctaagga

SEQ ID NO: 1508033 - DNA, 15 bp, Homo sapiens
cagagaaacctaagg

SEQ ID NO: 1508034 - DNA, 15 bp, Homo sapiens
gcagagaaacctaag

SEQ ID NO: 1508035 - DNA, 15 bp, Homo sapiens
ggcagagaaacctaa

SEQ ID NO: 1508036 - DNA, 15 bp, Homo sapiens
gggcagagaaaccta

SEQ ID NO: 1508037 - DNA, 15 bp, Homo sapiens
agggcagagaaacct

SEQ ID NO: 1508038 - DNA, 15 bp, Homo sapiens
gagggcagagaaacc

SEQ ID NO: 1508039 - DNA, 15 bp, Homo sapiens
ggagggcagagaaac

SEQ ID NO: 1508040 - DNA, 15 bp, Homo sapiens
aggagggcagagaaa

SEQ ID NO: 1508041 - DNA, 15 bp, Homo sapiens
caggagggcagagaa

SEQ ID NO: 1508042 - DNA, 15 bp, Homo sapiens
gcaggagggcagaga

SEQ ID NO: 1508043 - DNA, 15 bp, Homo sapiens
agcaggagggcagag

SEQ ID NO: 1508044 - DNA, 15 bp, Homo sapiens
cagcaggagggcaga

SEQ ID NO: 1508045 - DNA, 15 bp, Homo sapiens
gcagcaggagggcag

SEQ ID NO: 1508046 - DNA, 15 bp, Homo sapiens
tgcagcaggagggca

SEQ ID NO: 1508047 - DNA, 15 bp, Homo sapiens
ctgcagcaggagggc

SEQ ID NO: 1508048 - DNA, 15 bp, Homo sapiens
cctgcagcaggaggg

SEQ ID NO: 1508049 - DNA, 15 bp, Homo sapiens
tcctgcagcaggagg

SEQ ID NO: 1508050 - DNA, 15 bp, Homo sapiens
ctcctgcagcaggag

SEQ ID NO: 1508051 - DNA, 15 bp, Homo sapiens
tctcctgcagcagga

SEQ ID NO: 1508052 - DNA, 15 bp, Homo sapiens
ctctcctgcagcagg

SEQ ID NO: 1508053 - DNA, 15 bp, Homo sapiens
cctctcctgcagcag

SEQ ID NO: 1508054 - DNA, 15 bp, Homo sapiens
tcctctcctgcagca

SEQ ID NO: 1508055 - DNA, 15 bp, Homo sapiens
ctcctctcctgcagc

SEQ ID NO: 1508056 - DNA, 15 bp, Homo sapiens
tctcctctcctgcag

SEQ ID NO: 1508057 - DNA, 15 bp, Homo sapiens
ttctcctctcctgca

SEQ ID NO: 1508058 - DNA, 15 bp, Homo sapiens
attctcctctcctgc

SEQ ID NO: 1508059 - DNA, 15 bp, Homo sapiens
gattctcctctcctg

SEQ ID NO: 1508060 - DNA, 15 bp, Homo sapiens
agattctcctctcct

SEQ ID NO: 1508061 - DNA, 15 bp, Homo sapiens
gagattctcctctcc

SEQ ID NO: 1508062 - DNA, 15 bp, Homo sapiens
agagattctcctctc

SEQ ID NO: 1508063 - DNA, 15 bp, Homo sapiens
cagagattctcctct

SEQ ID NO: 1508064 - DNA, 15 bp, Homo sapiens
acagagattctcctc

SEQ ID NO: 1508065 - DNA, 15 bp, Homo sapiens
cacagagattctcct

SEQ ID NO: 1508066 - DNA, 15 bp, Homo sapiens
acacagagattctcc

SEQ ID NO: 1508067 - DNA, 15 bp, Homo sapiens
aacacagagattctc

SEQ ID NO: 1508068 - DNA, 15 bp, Homo sapiens
aaacacagagattct

SEQ ID NO: 1508069 - DNA, 15 bp, Homo sapiens
aaaacacagagattc

SEQ ID NO: 1508070 - DNA, 15 bp, Homo sapiens
gaaaacacagagatt

SEQ ID NO: 1508071 - DNA, 15 bp, Homo sapiens
tgaaaacacagagat

SEQ ID NO: 1508072 - DNA, 15 bp, Homo sapiens
ctgaaaacacagaga

SEQ ID NO: 1508073 - DNA, 15 bp, Homo sapiens
tctgaaaacacagag

SEQ ID NO: 1508074 - DNA, 15 bp, Homo sapiens
ctctgaaaacacaga

SEQ ID NO: 1508075 - DNA, 15 bp, Homo sapiens
tctctgaaaacacag

SEQ ID NO: 1508076 - DNA, 15 bp, Homo sapiens
ctctctgaaaacaca

SEQ ID NO: 1508077 - DNA, 15 bp, Homo sapiens
cctctctgaaaacac

SEQ ID NO: 1508078 - DNA, 15 bp, Homo sapiens
acctctctgaaaaca

SEQ ID NO: 1508079 - DNA, 15 bp, Homo sapiens
aacctctctgaaaac

SEQ ID NO: 1508080 - DNA, 15 bp, Homo sapiens
gaacctctctgaaaa

SEQ ID NO: 1508081 - DNA, 15 bp, Homo sapiens
agaacctctctgaaa

SEQ ID NO: 1508082 - DNA, 15 bp, Homo sapiens
gagaacctctctgaa

SEQ ID NO: 1508083 - DNA, 15 bp, Homo sapiens
agagaacctctctga

SEQ ID NO: 1508084 - DNA, 15 bp, Homo sapiens
cagagaacctctctg

SEQ ID NO: 1508085 - DNA, 15 bp, Homo sapiens
ccagagaacctctct

SEQ ID NO: 1508086 - DNA, 15 bp, Homo sapiens
gccagagaacctctc

SEQ ID NO: 1508087 - DNA, 15 bp, Homo sapiens
agccagagaacctct

SEQ ID NO: 1508088 - DNA, 15 bp, Homo sapiens
aagccagagaacctc

SEQ ID NO: 1508089 - DNA, 15 bp, Homo sapiens
aaagccagagaacct

SEQ ID NO: 1508090 - DNA, 15 bp, Homo sapiens
gaaagccagagaacc

SEQ ID NO: 1508091 - DNA, 15 bp, Homo sapiens
tgaaagccagagaac

SEQ ID NO: 1508092 - DNA, 15 bp, Homo sapiens
ttgaaagccagagaa

SEQ ID NO: 1508093 - DNA, 15 bp, Homo sapiens
tttgaaagccagaga

SEQ ID NO: 1508094 - DNA, 15 bp, Homo sapiens
gtttgaaagccagag

SEQ ID NO: 1508095 - DNA, 15 bp, Homo sapiens
agtttgaaagccaga

SEQ ID NO: 1508096 - DNA, 15 bp, Homo sapiens
aagtttgaaagccag

SEQ ID NO: 1508097 - DNA, 15 bp, Homo sapiens
taagtttgaaagcca

SEQ ID NO: 1508098 - DNA, 15 bp, Homo sapiens
ctaagtttgaaagcc

SEQ ID NO: 1508099 - DNA, 15 bp, Homo sapiens
actaagtttgaaagc

SEQ ID NO: 1508100 - DNA, 15 bp, Homo sapiens
aactaagtttgaaag

SEQ ID NO: 1508101 - DNA, 15 bp, Homo sapiens
aaactaagtttgaaa

SEQ ID NO: 1508102 - DNA, 15 bp, Homo sapiens
aaaactaagtttgaa

SEQ ID NO: 1508103 - DNA, 15 bp, Homo sapiens
gaaaactaagtttga

SEQ ID NO: 1508104 - DNA, 15 bp, Homo sapiens
tgaaaactaagtttg

SEQ ID NO: 1508105 - DNA, 15 bp, Homo sapiens
ttgaaaactaagttt

SEQ ID NO: 1508106 - DNA, 15 bp, Homo sapiens
attgaaaactaagtt

SEQ ID NO: 1508107 - DNA, 15 bp, Homo sapiens
aattgaaaactaagt

SEQ ID NO: 1508108 - DNA, 15 bp, Homo sapiens
caattgaaaactaag

SEQ ID NO: 1508109 - DNA, 15 bp, Homo sapiens
ccaattgaaaactaa

SEQ ID NO: 1508110 - DNA, 15 bp, Homo sapiens
tccaattgaaaacta

SEQ ID NO: 1508111 - DNA, 15 bp, Homo sapiens
ttccaattgaaaact

SEQ ID NO: 1508112 - DNA, 15 bp, Homo sapiens
cttccaattgaaaac

SEQ ID NO: 1508113 - DNA, 15 bp, Homo sapiens
acttccaattgaaaa

SEQ ID NO: 1508114 - DNA, 15 bp, Homo sapiens
aacttccaattgaaa

SEQ ID NO: 1508115 - DNA, 15 bp, Homo sapiens
taacttccaattgaa

SEQ ID NO: 1508116 - DNA, 15 bp, Homo sapiens
ttaacttccaattga

SEQ ID NO: 1508117 - DNA, 15 bp, Homo sapiens
attaacttccaattg

SEQ ID NO: 1508118 - DNA, 15 bp, Homo sapiens
gattaacttccaatt

SEQ ID NO: 1508119 - DNA, 15 bp, Homo sapiens
tgattaacttccaat

SEQ ID NO: 1508120 - DNA, 15 bp, Homo sapiens
ctgattaacttccaa

SEQ ID NO: 1508121 - DNA, 15 bp, Homo sapiens
gctgattaacttcca

SEQ ID NO: 1508122 - DNA, 15 bp, Homo sapiens
agctgattaacttcc

SEQ ID NO: 1508123 - DNA, 15 bp, Homo sapiens
aagctgattaacttc

SEQ ID NO: 1508124 - DNA, 15 bp, Homo sapiens
aaagctgattaactt

SEQ ID NO: 1508125 - DNA, 15 bp, Homo sapiens
aaaagctgattaact

SEQ ID NO: 1508126 - DNA, 15 bp, Homo sapiens
aaaaagctgattaac

SEQ ID NO: 1508127 - DNA, 15 bp, Homo sapiens
aaaaaagctgattaa

SEQ ID NO: 1508128 - DNA, 15 bp, Homo sapiens
caaaaaagctgatta

SEQ ID NO: 1508129 - DNA, 15 bp, Homo sapiens
acaaaaaagctgatt

SEQ ID NO: 1508130 - DNA, 15 bp, Homo sapiens
aacaaaaaagctgat

SEQ ID NO: 1508131 - DNA, 15 bp, Homo sapiens
aaacaaaaaagctga

SEQ ID NO: 1508132 - DNA, 15 bp, Homo sapiens
aaaacaaaaaagctg

SEQ ID NO: 1508133 - DNA, 15 bp, Homo sapiens
aaaaacaaaaaagct

SEQ ID NO: 1508134 - DNA, 15 bp, Homo sapiens
taaaaacaaaaaagc

SEQ ID NO: 1508135 - DNA, 15 bp, Homo sapiens
ataaaaacaaaaaag

SEQ ID NO: 1508136 - DNA, 15 bp, Homo sapiens
gataaaaacaaaaaa

SEQ ID NO: 1508137 - DNA, 15 bp, Homo sapiens
agataaaaacaaaaa

SEQ ID NO: 1508138 - DNA, 15 bp, Homo sapiens
aagataaaaacaaaa

SEQ ID NO: 1508139 - DNA, 15 bp, Homo sapiens
aaagataaaaacaaa

SEQ ID NO: 1508140 - DNA, 15 bp, Homo sapiens
aaaagataaaaacaa

SEQ ID NO: 1508141 - DNA, 15 bp, Homo sapiens
aaaaagataaaaaca

SEQ ID NO: 1508142 - DNA, 15 bp, Homo sapiens
aaaaaagataaaaac

SEQ ID NO: 1508143 - DNA, 15 bp, Homo sapiens
gaaaaaagataaaaa

SEQ ID NO: 1508144 - DNA, 15 bp, Homo sapiens
agaaaaaagataaaa

SEQ ID NO: 1508145 - DNA, 15 bp, Homo sapiens
aagaaaaaagataaa

SEQ ID NO: 1508146 - DNA, 15 bp, Homo sapiens
aaagaaaaaagataa

SEQ ID NO: 1508147 - DNA, 15 bp, Homo sapiens
caaagaaaaaagata

SEQ ID NO: 1508148 - DNA, 15 bp, Homo sapiens
tcaaagaaaaaagat

SEQ ID NO: 1508149 - DNA, 15 bp, Homo sapiens
ttcaaagaaaaaaga

SEQ ID NO: 1508150 - DNA, 15 bp, Homo sapiens
tttcaaagaaaaaag

SEQ ID NO: 1508151 - DNA, 15 bp, Homo sapiens
atttcaaagaaaaaa

SEQ ID NO: 1508152 - DNA, 15 bp, Homo sapiens
gatttcaaagaaaaa

SEQ ID NO: 1508153 - DNA, 15 bp, Homo sapiens
tgatttcaaagaaaa

SEQ ID NO: 1508154 - DNA, 15 bp, Homo sapiens
ttgatttcaaagaaa

SEQ ID NO: 1508155 - DNA, 15 bp, Homo sapiens
gttgatttcaaagaa

SEQ ID NO: 1508156 - DNA, 15 bp, Homo sapiens
tgttgatttcaaaga

SEQ ID NO: 1508157 - DNA, 15 bp, Homo sapiens
atgttgatttcaaag

SEQ ID NO: 1508158 - DNA, 15 bp, Homo sapiens
gatgttgatttcaaa

SEQ ID NO: 1508159 - DNA, 15 bp, Homo sapiens
agatgttgatttcaa

SEQ ID NO: 1508160 - DNA, 15 bp, Homo sapiens
cagatgttgatttca

SEQ ID NO: 1508161 - DNA, 15 bp, Homo sapiens
ccagatgttgatttc

SEQ ID NO: 1508162 - DNA, 15 bp, Homo sapiens
cccagatgttgattt

SEQ ID NO: 1508163 - DNA, 15 bp, Homo sapiens
tcccagatgttgatt

SEQ ID NO: 1508164 - DNA, 15 bp, Homo sapiens
ctcccagatgttgat

SEQ ID NO: 1508165 - DNA, 15 bp, Homo sapiens
actcccagatgttga

SEQ ID NO: 1508166 - DNA, 15 bp, Homo sapiens
cactcccagatgttg

SEQ ID NO: 1508167 - DNA, 15 bp, Homo sapiens
tcactcccagatgtt

SEQ ID NO: 1508168 - DNA, 15 bp, Homo sapiens
ctcactcccagatgt

SEQ ID NO: 1508169 - DNA, 15 bp, Homo sapiens
cctcactcccagatg

SEQ ID NO: 1508170 - DNA, 15 bp, Homo sapiens
tcctcactcccagat

SEQ ID NO: 1508171 - DNA, 15 bp, Homo sapiens
ctcctcactcccaga

SEQ ID NO: 1508172 - DNA, 15 bp, Homo sapiens
gctcctcactcccag

SEQ ID NO: 1508173 - DNA, 15 bp, Homo sapiens
tgctcctcactccca

SEQ ID NO: 1508174 - DNA, 15 bp, Homo sapiens
gtgctcctcactccc

SEQ ID NO: 1508175 - DNA, 15 bp, Homo sapiens
agtgctcctcactcc

SEQ ID NO: 1508176 - DNA, 15 bp, Homo sapiens
cagtgctcctcactc

SEQ ID NO: 1508177 - DNA, 15 bp, Homo sapiens
ccagtgctcctcact

SEQ ID NO: 1508178 - DNA, 15 bp, Homo sapiens
cccagtgctcctcac

SEQ ID NO: 1508179 - DNA, 15 bp, Homo sapiens
gcccagtgctcctca

SEQ ID NO: 1508180 - DNA, 15 bp, Homo sapiens
tgcccagtgctcctc

SEQ ID NO: 1508181 - DNA, 15 bp, Homo sapiens
ttgcccagtgctcct

SEQ ID NO: 1508182 - DNA, 15 bp, Homo sapiens
tttgcccagtgctcc

SEQ ID NO: 1508183 - DNA, 15 bp, Homo sapiens
atttgcccagtgctc

SEQ ID NO: 1508184 - DNA, 15 bp, Homo sapiens
catttgcccagtgct

SEQ ID NO: 1508185 - DNA, 15 bp, Homo sapiens
gcatttgcccagtgc

SEQ ID NO: 1508186 - DNA, 15 bp, Homo sapiens
tgcatttgcccagtg

SEQ ID NO: 1508187 - DNA, 15 bp, Homo sapiens
ctgcatttgcccagt

SEQ ID NO: 1508188 - DNA, 15 bp, Homo sapiens
actgcatttgcccag

SEQ ID NO: 1508189 - DNA, 15 bp, Homo sapiens
cactgcatttgccca

SEQ ID NO: 1508190 - DNA, 15 bp, Homo sapiens
gcactgcatttgccc

SEQ ID NO: 1508191 - DNA, 15 bp, Homo sapiens
tgcactgcatttgcc

SEQ ID NO: 1508192 - DNA, 15 bp, Homo sapiens
ctgcactgcatttgc

SEQ ID NO: 1508193 - DNA, 15 bp, Homo sapiens
cctgcactgcatttg

SEQ ID NO: 1508194 - DNA, 15 bp, Homo sapiens
gcctgcactgcattt

SEQ ID NO: 1508195 - DNA, 15 bp, Homo sapiens
ggcctgcactgcatt

SEQ ID NO: 1508196 - DNA, 15 bp, Homo sapiens
gggcctgcactgcat

SEQ ID NO: 1508197 - DNA, 15 bp, Homo sapiens
tgggcctgcactgca

SEQ ID NO: 1508198 - DNA, 15 bp, Homo sapiens
ctgggcctgcactgc

SEQ ID NO: 1508199 - DNA, 15 bp, Homo sapiens
gctgggcctgcactg

SEQ ID NO: 1508200 - DNA, 15 bp, Homo sapiens
tgctgggcctgcact

SEQ ID NO: 1508201 - DNA, 15 bp, Homo sapiens
gtgctgggcctgcac

SEQ ID NO: 1508202 - DNA, 15 bp, Homo sapiens
ggtgctgggcctgca

SEQ ID NO: 1508203 - DNA, 15 bp, Homo sapiens
tggtgctgggcctgc

SEQ ID NO: 1508204 - DNA, 15 bp, Homo sapiens
ctggtgctgggcctg

SEQ ID NO: 1508205 - DNA, 15 bp, Homo sapiens
gctggtgctgggcct

SEQ ID NO: 1508206 - DNA, 15 bp, Homo sapiens
agctggtgctgggcc

SEQ ID NO: 1508207 - DNA, 15 bp, Homo sapiens
aagctggtgctgggc

SEQ ID NO: 1508208 - DNA, 15 bp, Homo sapiens
aaagctggtgctggg

SEQ ID NO: 1508209 - DNA, 15 bp, Homo sapiens
caaagctggtgctgg

SEQ ID NO: 1508210 - DNA, 15 bp, Homo sapiens
ccaaagctggtgctg

SEQ ID NO: 1508211 - DNA, 15 bp, Homo sapiens
gccaaagctggtgct

SEQ ID NO: 1508212 - DNA, 15 bp, Homo sapiens
ggccaaagctggtgc

SEQ ID NO: 1508213 - DNA, 15 bp, Homo sapiens
tggccaaagctggtg

SEQ ID NO: 1508214 - DNA, 15 bp, Homo sapiens
ttggccaaagctggt

SEQ ID NO: 1508215 - DNA, 15 bp, Homo sapiens
gttggccaaagctgg

SEQ ID NO: 1508216 - DNA, 15 bp, Homo sapiens
ggttggccaaagctg

SEQ ID NO: 1508217 - DNA, 15 bp, Homo sapiens
gggttggccaaagct

SEQ ID NO: 1508218 - DNA, 15 bp, Homo sapiens
ggggttggccaaagc

SEQ ID NO: 1508219 - DNA, 15 bp, Homo sapiens
gggggttggccaaag

SEQ ID NO: 1508220 - DNA, 15 bp, Homo sapiens
tgggggttggccaaa

SEQ ID NO: 1508221 - DNA, 15 bp, Homo sapiens
gtgggggttggccaa

SEQ ID NO: 1508222 - DNA, 15 bp, Homo sapiens
cgtgggggttggcca

SEQ ID NO: 1508223 - DNA, 15 bp, Homo sapiens
ccgtgggggttggcc

SEQ ID NO: 1508224 - DNA, 15 bp, Homo sapiens
cccgtgggggttggc

SEQ ID NO: 1508225 - DNA, 15 bp, Homo sapiens
ccccgtgggggttgg

SEQ ID NO: 1508226 - DNA, 15 bp, Homo sapiens
tccccgtgggggttg

SEQ ID NO: 1508227 - DNA, 15 bp, Homo sapiens
ctccccgtgggggtt

SEQ ID NO: 1508228 - DNA, 15 bp, Homo sapiens
gctccccgtgggggt

SEQ ID NO: 1508229 - DNA, 15 bp, Homo sapiens
ggctccccgtggggg

SEQ ID NO: 1508230 - DNA, 15 bp, Homo sapiens
aggctccccgtgggg

SEQ ID NO: 1508231 - DNA, 15 bp, Homo sapiens
caggctccccgtggg

SEQ ID NO: 1508232 - DNA, 15 bp, Homo sapiens
ccaggctccccgtgg

SEQ ID NO: 1508233 - DNA, 15 bp, Homo sapiens
tccaggctccccgtg

SEQ ID NO: 1508234 - DNA, 15 bp, Homo sapiens
ctccaggctccccgt

SEQ ID NO: 1508235 - DNA, 15 bp, Homo sapiens
gctccaggctccccg

SEQ ID NO: 1508236 - DNA, 15 bp, Homo sapiens
cgctccaggctcccc

SEQ ID NO: 1508237 - DNA, 15 bp, Homo sapiens
tcgctccaggctccc

SEQ ID NO: 1508238 - DNA, 15 bp, Homo sapiens
ctcgctccaggctcc

SEQ ID NO: 1508239 - DNA, 15 bp, Homo sapiens
tctcgctccaggctc

SEQ ID NO: 1508240 - DNA, 15 bp, Homo sapiens
ttctcgctccaggct

SEQ ID NO: 1508241 - DNA, 15 bp, Homo sapiens
attctcgctccaggc

SEQ ID NO: 1508242 - DNA, 15 bp, Homo sapiens
cattctcgctccagg

SEQ ID NO: 1508243 - DNA, 15 bp, Homo sapiens
ccattctcgctccag

SEQ ID NO: 1508244 - DNA, 15 bp, Homo sapiens
cccattctcgctcca

SEQ ID NO: 1508245 - DNA, 15 bp, Homo sapiens
tcccattctcgctcc

SEQ ID NO: 1508246 - DNA, 15 bp, Homo sapiens
ctcccattctcgctc

SEQ ID NO: 1508247 - DNA, 15 bp, Homo sapiens
gctcccattctcgct

SEQ ID NO: 1508248 - DNA, 15 bp, Homo sapiens
ggctcccattctcgc

SEQ ID NO: 1508249 - DNA, 15 bp, Homo sapiens
aggctcccattctcg

SEQ ID NO: 1508250 - DNA, 15 bp, Homo sapiens
caggctcccattctc

SEQ ID NO: 1508251 - DNA, 15 bp, Homo sapiens
ccaggctcccattct

SEQ ID NO: 1508252 - DNA, 15 bp, Homo sapiens
cccaggctcccattc

SEQ ID NO: 1508253 - DNA, 15 bp, Homo sapiens
tcccaggctcccatt

SEQ ID NO: 1508254 - DNA, 15 bp, Homo sapiens
gtcccaggctcccat

SEQ ID NO: 1508255 - DNA, 15 bp, Homo sapiens
tgtcccaggctccca

SEQ ID NO: 1508256 - DNA, 15 bp, Homo sapiens
ttgtcccaggctccc

SEQ ID NO: 1508257 - DNA, 15 bp, Homo sapiens
cttgtcccaggctcc

SEQ ID NO: 1508258 - DNA, 15 bp, Homo sapiens
tcttgtcccaggctc

SEQ ID NO: 1508259 - DNA, 15 bp, Homo sapiens
ttcttgtcccaggct

SEQ ID NO: 1508260 - DNA, 15 bp, Homo sapiens
attcttgtcccaggc

SEQ ID NO: 1508261 - DNA, 15 bp, Homo sapiens
cattcttgtcccagg

SEQ ID NO: 1508262 - DNA, 15 bp, Homo sapiens
ccattcttgtcccag

SEQ ID NO: 1508263 - DNA, 15 bp, Homo sapiens
gccattcttgtccca

SEQ ID NO: 1508264 - DNA, 15 bp, Homo sapiens
agccattcttgtccc

SEQ ID NO: 1508265 - DNA, 15 bp, Homo sapiens
gagccattcttgtcc

SEQ ID NO: 1508266 - DNA, 15 bp, Homo sapiens
agagccattcttgtc

SEQ ID NO: 1508267 - DNA, 15 bp, Homo sapiens
aagagccattcttgt

SEQ ID NO: 1508268 - DNA, 15 bp, Homo sapiens
gaagagccattcttg

SEQ ID NO: 1508269 - DNA, 15 bp, Homo sapiens
agaagagccattctt

SEQ ID NO: 1508270 - DNA, 15 bp, Homo sapiens
cagaagagccattct

SEQ ID NO: 1508271 - DNA, 15 bp, Homo sapiens
tcagaagagccattc

SEQ ID NO: 1508272 - DNA, 15 bp, Homo sapiens
ctcagaagagccatt

SEQ ID NO: 1508273 - DNA, 15 bp, Homo sapiens
actcagaagagccat

SEQ ID NO: 1508274 - DNA, 15 bp, Homo sapiens
aactcagaagagcca

SEQ ID NO: 1508275 - DNA, 15 bp, Homo sapiens
caactcagaagagcc

SEQ ID NO: 1508276 - DNA, 15 bp, Homo sapiens
gcaactcagaagagc

SEQ ID NO: 1508277 - DNA, 15 bp, Homo sapiens
ggcaactcagaagag

SEQ ID NO: 1508278 - DNA, 15 bp, Homo sapiens
gggcaactcagaaga

SEQ ID NO: 1508279 - DNA, 15 bp, Homo sapiens
tgggcaactcagaag

SEQ ID NO: 1508280 - DNA, 15 bp, Homo sapiens
ctgggcaactcagaa

SEQ ID NO: 1508281 - DNA, 15 bp, Homo sapiens
tctgggcaactcaga

SEQ ID NO: 1508282 - DNA, 15 bp, Homo sapiens
ttctgggcaactcag

SEQ ID NO: 1508283 - DNA, 15 bp, Homo sapiens
attctgggcaactca

SEQ ID NO: 1508284 - DNA, 15 bp, Homo sapiens
aattctgggcaactc

SEQ ID NO: 1508285 - DNA, 15 bp, Homo sapiens
caattctgggcaact

SEQ ID NO: 1508286 - DNA, 15 bp, Homo sapiens
gcaattctgggcaac

SEQ ID NO: 1508287 - DNA, 15 bp, Homo sapiens
cgcaattctgggcaa

SEQ ID NO: 1508288 - DNA, 15 bp, Homo sapiens
ccgcaattctgggca

SEQ ID NO: 1508289 - DNA, 15 bp, Homo sapiens
accgcaattctgggc

SEQ ID NO: 1508290 - DNA, 15 bp, Homo sapiens
caccgcaattctggg

SEQ ID NO: 1508291 - DNA, 15 bp, Homo sapiens
ccaccgcaattctgg

SEQ ID NO: 1508292 - DNA, 15 bp, Homo sapiens
gccaccgcaattctg

SEQ ID NO: 1508293 - DNA, 15 bp, Homo sapiens
agccaccgcaattct

SEQ ID NO: 1508294 - DNA, 15 bp, Homo sapiens
cagccaccgcaattc

SEQ ID NO: 1508295 - DNA, 15 bp, Homo sapiens
tcagccaccgcaatt

SEQ ID NO: 1508296 - DNA, 15 bp, Homo sapiens
atcagccaccgcaat

SEQ ID NO: 1508297 - DNA, 15 bp, Homo sapiens
catcagccaccgcaa

SEQ ID NO: 1508298 - DNA, 15 bp, Homo sapiens
acatcagccaccgca

SEQ ID NO: 1508299 - DNA, 15 bp, Homo sapiens
cacatcagccaccgc

SEQ ID NO: 1508300 - DNA, 15 bp, Homo sapiens
acacatcagccaccg

SEQ ID NO: 1508301 - DNA, 15 bp, Homo sapiens
gacacatcagccacc

SEQ ID NO: 1508302 - DNA, 15 bp, Homo sapiens
ggacacatcagccac

SEQ ID NO: 1508303 - DNA, 15 bp, Homo sapiens
tggacacatcagcca

SEQ ID NO: 1508304 - DNA, 15 bp, Homo sapiens
ctggacacatcagcc

SEQ ID NO: 1508305 - DNA, 15 bp, Homo sapiens
cctggacacatcagc

SEQ ID NO: 1508306 - DNA, 15 bp, Homo sapiens
gcctggacacatcag

SEQ ID NO: 1508307 - DNA, 15 bp, Homo sapiens
ggcctggacacatca

SEQ ID NO: 1508308 - DNA, 15 bp, Homo sapiens
aggcctggacacatc

SEQ ID NO: 1508309 - DNA, 15 bp, Homo sapiens
aaggcctggacacat

SEQ ID NO: 1508310 - DNA, 15 bp, Homo sapiens
gaaggcctggacaca

SEQ ID NO: 1508311 - DNA, 15 bp, Homo sapiens
tgaaggcctggacac

SEQ ID NO: 1508312 - DNA, 15 bp, Homo sapiens
atgaaggcctggaca

SEQ ID NO: 1508313 - DNA, 15 bp, Homo sapiens
tatgaaggcctggac

SEQ ID NO: 1508314 - DNA, 15 bp, Homo sapiens
atatgaaggcctgga

SEQ ID NO: 1508315 - DNA, 15 bp, Homo sapiens
aatatgaaggcctgg

SEQ ID NO: 1508316 - DNA, 15 bp, Homo sapiens
caatatgaaggcctg

SEQ ID NO: 1508317 - DNA, 15 bp, Homo sapiens
gcaatatgaaggcct

SEQ ID NO: 1508318 - DNA, 15 bp, Homo sapiens
ggcaatatgaaggcc

SEQ ID NO: 1508319 - DNA, 15 bp, Homo sapiens
tggcaatatgaaggc

SEQ ID NO: 1508320 - DNA, 15 bp, Homo sapiens
atggcaatatgaagg

SEQ ID NO: 1508321 - DNA, 15 bp, Homo sapiens
tatggcaatatgaag

SEQ ID NO: 1508322 - DNA, 15 bp, Homo sapiens
atatggcaatatgaa

SEQ ID NO: 1508323 - DNA, 15 bp, Homo sapiens
gatatggcaatatga

SEQ ID NO: 1508324 - DNA, 15 bp, Homo sapiens
tgatatggcaatatg

SEQ ID NO: 1508325 - DNA, 15 bp, Homo sapiens
ttgatatggcaatat

SEQ ID NO: 1508326 - DNA, 15 bp, Homo sapiens
attgatatggcaata

SEQ ID NO: 1508327 - DNA, 15 bp, Homo sapiens
aattgatatggcaat

SEQ ID NO: 1508328 - DNA, 15 bp, Homo sapiens
taattgatatggcaa

SEQ ID NO: 1508329 - DNA, 15 bp, Homo sapiens
ctaattgatatggca

SEQ ID NO: 1508330 - DNA, 15 bp, Homo sapiens
actaattgatatggc

SEQ ID NO: 1508331 - DNA, 15 bp, Homo sapiens
gactaattgatatgg

SEQ ID NO: 1508332 - DNA, 15 bp, Homo sapiens
tgactaattgatatg

SEQ ID NO: 1508333 - DNA, 15 bp, Homo sapiens
atgactaattgatat

SEQ ID NO: 1508334 - DNA, 15 bp, Homo sapiens
aatgactaattgata

SEQ ID NO: 1508335 - DNA, 15 bp, Homo sapiens
aaatgactaattgat

SEQ ID NO: 1508336 - DNA, 15 bp, Homo sapiens
caaatgactaattga

SEQ ID NO: 1508337 - DNA, 15 bp, Homo sapiens
tcaaatgactaattg

SEQ ID NO: 1508338 - DNA, 15 bp, Homo sapiens
atcaaatgactaatt

SEQ ID NO: 1508339 - DNA, 15 bp, Homo sapiens
catcaaatgactaat

SEQ ID NO: 1508340 - DNA, 15 bp, Homo sapiens
acatcaaatgactaa

SEQ ID NO: 1508341 - DNA, 15 bp, Homo sapiens
cacatcaaatgacta

SEQ ID NO: 1508342 - DNA, 15 bp, Homo sapiens
ccacatcaaatgact

SEQ ID NO: 1508343 - DNA, 15 bp, Homo sapiens
cccacatcaaatgac

SEQ ID NO: 1508344 - DNA, 15 bp, Homo sapiens
acccacatcaaatga

SEQ ID NO: 1508345 - DNA, 15 bp, Homo sapiens
aacccacatcaaatg

SEQ ID NO: 1508346 - DNA, 15 bp, Homo sapiens
taacccacatcaaat

SEQ ID NO: 1508347 - DNA, 15 bp, Homo sapiens
ataacccacatcaaa

SEQ ID NO: 1508348 - DNA, 15 bp, Homo sapiens
gataacccacatcaa

SEQ ID NO: 1508349 - DNA, 15 bp, Homo sapiens
agataacccacatca

SEQ ID NO: 1508350 - DNA, 15 bp, Homo sapiens
aagataacccacatc

SEQ ID NO: 1508351 - DNA, 15 bp, Homo sapiens
caagataacccacat

SEQ ID NO: 1508352 - DNA, 15 bp, Homo sapiens
ccaagataacccaca

SEQ ID NO: 1508353 - DNA, 15 bp, Homo sapiens
cccaagataacccac

SEQ ID NO: 1508354 - DNA, 15 bp, Homo sapiens
tcccaagataaccca

SEQ ID NO: 1508355 - DNA, 15 bp, Homo sapiens
ttcccaagataaccc

SEQ ID NO: 1508356 - DNA, 15 bp, Homo sapiens
cttcccaagataacc

SEQ ID NO: 1508357 - DNA, 15 bp, Homo sapiens
ccttcccaagataac

SEQ ID NO: 1508358 - DNA, 15 bp, Homo sapiens
tccttcccaagataa

SEQ ID NO: 1508359 - DNA, 15 bp, Homo sapiens
atccttcccaagata

SEQ ID NO: 1508360 - DNA, 15 bp, Homo sapiens
tatccttcccaagat

SEQ ID NO: 1508361 - DNA, 15 bp, Homo sapiens
atatccttcccaaga

SEQ ID NO: 1508362 - DNA, 15 bp, Homo sapiens
catatccttcccaag

SEQ ID NO: 1508363 - DNA, 15 bp, Homo sapiens
tcatatccttcccaa

SEQ ID NO: 1508364 - DNA, 15 bp, Homo sapiens
gtcatatccttccca

SEQ ID NO: 1508365 - DNA, 15 bp, Homo sapiens
ggtcatatccttccc

SEQ ID NO: 1508366 - DNA, 15 bp, Homo sapiens
aggtcatatccttcc

SEQ ID NO: 1508367 - DNA, 15 bp, Homo sapiens
aaggtcatatccttc

SEQ ID NO: 1508368 - DNA, 15 bp, Homo sapiens
caaggtcatatcctt

SEQ ID NO: 1508369 - DNA, 15 bp, Homo sapiens
tcaaggtcatatcct

SEQ ID NO: 1508370 - DNA, 15 bp, Homo sapiens
ttcaaggtcatatcc

SEQ ID NO: 1508371 - DNA, 15 bp, Homo sapiens
gttcaaggtcatatc

SEQ ID NO: 1508372 - DNA, 15 bp, Homo sapiens
tgttcaaggtcatat

SEQ ID NO: 1508373 - DNA, 15 bp, Homo sapiens
ctgttcaaggtcata

SEQ ID NO: 1508374 - DNA, 15 bp, Homo sapiens
cctgttcaaggtcat

SEQ ID NO: 1508375 - DNA, 15 bp, Homo sapiens
ccctgttcaaggtca

SEQ ID NO: 1508376 - DNA, 15 bp, Homo sapiens
accctgttcaaggtc

SEQ ID NO: 1508377 - DNA, 15 bp, Homo sapiens
aaccctgttcaaggt

SEQ ID NO: 1508378 - DNA, 15 bp, Homo sapiens
caaccctgttcaagg

SEQ ID NO: 1508379 - DNA, 15 bp, Homo sapiens
acaaccctgttcaag

SEQ ID NO: 1508380 - DNA, 15 bp, Homo sapiens
aacaaccctgttcaa

SEQ ID NO: 1508381 - DNA, 15 bp, Homo sapiens
gaacaaccctgttca

SEQ ID NO: 1508382 - DNA, 15 bp, Homo sapiens
ggaacaaccctgttc

SEQ ID NO: 1508383 - DNA, 15 bp, Homo sapiens
aggaacaaccctgtt

SEQ ID NO: 1508384 - DNA, 15 bp, Homo sapiens
aaggaacaaccctgt

SEQ ID NO: 1508385 - DNA, 15 bp, Homo sapiens
caaggaacaaccctg

SEQ ID NO: 1508386 - DNA, 15 bp, Homo sapiens
acaaggaacaaccct

SEQ ID NO: 1508387 - DNA, 15 bp, Homo sapiens
tacaaggaacaaccc

SEQ ID NO: 1508388 - DNA, 15 bp, Homo sapiens
ctacaaggaacaacc

SEQ ID NO: 1508389 - DNA, 15 bp, Homo sapiens
cctacaaggaacaac

SEQ ID NO: 1508390 - DNA, 15 bp, Homo sapiens
acctacaaggaacaa

SEQ ID NO: 1508391 - DNA, 15 bp, Homo sapiens
cacctacaaggaaca

SEQ ID NO: 1508392 - DNA, 15 bp, Homo sapiens
tcacctacaaggaac

SEQ ID NO: 1508393 - DNA, 15 bp, Homo sapiens
ctcacctacaaggaa

SEQ ID NO: 1508394 - DNA, 15 bp, Homo sapiens
cctcacctacaagga

SEQ ID NO: 1508395 - DNA, 15 bp, Homo sapiens
gcctcacctacaagg

SEQ ID NO: 1508396 - DNA, 15 bp, Homo sapiens
tgcctcacctacaag

SEQ ID NO: 1508397 - DNA, 15 bp, Homo sapiens
ttgcctcacctacaa

SEQ ID NO: 1508398 - DNA, 15 bp, Homo sapiens
attgcctcacctaca

SEQ ID NO: 1508399 - DNA, 15 bp, Homo sapiens
gattgcctcacctac

SEQ ID NO: 1508400 - DNA, 15 bp, Homo sapiens
ggattgcctcaccta

SEQ ID NO: 1508401 - DNA, 15 bp, Homo sapiens
gggattgcctcacct

SEQ ID NO: 1508402 - DNA, 15 bp, Homo sapiens
agggattgcctcacc

SEQ ID NO: 1508403 - DNA, 15 bp, Homo sapiens
cagggattgcctcac

SEQ ID NO: 1508404 - DNA, 15 bp, Homo sapiens
tcagggattgcctca

SEQ ID NO: 1508405 - DNA, 15 bp, Homo sapiens
ttcagggattgcctc

SEQ ID NO: 1508406 - DNA, 15 bp, Homo sapiens
cttcagggattgcct

SEQ ID NO: 1508407 - DNA, 15 bp, Homo sapiens
ccttcagggattgcc

SEQ ID NO: 1508408 - DNA, 15 bp, Homo sapiens
cccttcagggattgc

SEQ ID NO: 1508409 - DNA, 15 bp, Homo sapiens
ccccttcagggattg

SEQ ID NO: 1508410 - DNA, 15 bp, Homo sapiens
gccccttcagggatt

SEQ ID NO: 1508411 - DNA, 15 bp, Homo sapiens
agccccttcagggat

SEQ ID NO: 1508412 - DNA, 15 bp, Homo sapiens
cagccccttcaggga

SEQ ID NO: 1508413 - DNA, 15 bp, Homo sapiens
tcagccccttcaggg

SEQ ID NO: 1508414 - DNA, 15 bp, Homo sapiens
gtcagccccttcagg

SEQ ID NO: 1508415 - DNA, 15 bp, Homo sapiens
agtcagccccttcag

SEQ ID NO: 1508416 - DNA, 15 bp, Homo sapiens
cagtcagccccttca

SEQ ID NO: 1508417 - DNA, 15 bp, Homo sapiens
tcagtcagccccttc

SEQ ID NO: 1508418 - DNA, 15 bp, Homo sapiens
gtcagtcagcccctt

SEQ ID NO: 1508419 - DNA, 15 bp, Homo sapiens
tgtcagtcagcccct

SEQ ID NO: 1508420 - DNA, 15 bp, Homo sapiens
ctgtcagtcagcccc

SEQ ID NO: 1508421 - DNA, 15 bp, Homo sapiens
gctgtcagtcagccc

SEQ ID NO: 1508422 - DNA, 15 bp, Homo sapiens
tgctgtcagtcagcc

SEQ ID NO: 1508423 - DNA, 15 bp, Homo sapiens
gtgctgtcagtcagc

SEQ ID NO: 1508424 - DNA, 15 bp, Homo sapiens
agtgctgtcagtcag

SEQ ID NO: 1508425 - DNA, 15 bp, Homo sapiens
gagtgctgtcagtca

SEQ ID NO: 1508426 - DNA, 15 bp, Homo sapiens
ggagtgctgtcagtc

SEQ ID NO: 1508427 - DNA, 15 bp, Homo sapiens
gggagtgctgtcagt

SEQ ID NO: 1508428 - DNA, 15 bp, Homo sapiens
tgggagtgctgtcag

SEQ ID NO: 1508429 - DNA, 15 bp, Homo sapiens
ctgggagtgctgtca

SEQ ID NO: 1508430 - DNA, 15 bp, Homo sapiens
gctgggagtgctgtc

SEQ ID NO: 1508431 - DNA, 15 bp, Homo sapiens
tgctgggagtgctgt

SEQ ID NO: 1508432 - DNA, 15 bp, Homo sapiens
atgctgggagtgctg

SEQ ID NO: 1508433 - DNA, 15 bp, Homo sapiens
aatgctgggagtgct

SEQ ID NO: 1508434 - DNA, 15 bp, Homo sapiens
aaatgctgggagtgc

SEQ ID NO: 1508435 - DNA, 15 bp, Homo sapiens
taaatgctgggagtg

SEQ ID NO: 1508436 - DNA, 15 bp, Homo sapiens
ttaaatgctgggagt

SEQ ID NO: 1508437 - DNA, 15 bp, Homo sapiens
cttaaatgctgggag

SEQ ID NO: 1508438 - DNA, 15 bp, Homo sapiens
ccttaaatgctggga

SEQ ID NO: 1508439 - DNA, 15 bp, Homo sapiens
accttaaatgctggg

SEQ ID NO: 1508440 - DNA, 15 bp, Homo sapiens
taccttaaatgctgg

SEQ ID NO: 1508441 - DNA, 15 bp, Homo sapiens
ttaccttaaatgctg

SEQ ID NO: 1508442 - DNA, 15 bp, Homo sapiens
cttaccttaaatgct

SEQ ID NO: 1508443 - DNA, 15 bp, Homo sapiens
acttaccttaaatgc

SEQ ID NO: 1508444 - DNA, 15 bp, Homo sapiens
gacttaccttaaatg

SEQ ID NO: 1508445 - DNA, 15 bp, Homo sapiens
ggacttaccttaaat

SEQ ID NO: 1508446 - DNA, 15 bp, Homo sapiens
aggacttaccttaaa

SEQ ID NO: 1508447 - DNA, 15 bp, Homo sapiens
aaggacttaccttaa

SEQ ID NO: 1508448 - DNA, 15 bp, Homo sapiens
aaaggacttacctta

SEQ ID NO: 1508449 - DNA, 15 bp, Homo sapiens
aaaaggacttacctt

SEQ ID NO: 1508450 - DNA, 15 bp, Homo sapiens
aaaaaggacttacct

SEQ ID NO: 1508451 - DNA, 15 bp, Homo sapiens
aaaaaaggacttacc

SEQ ID NO: 1508452 - DNA, 15 bp, Homo sapiens
caaaaaaggacttac

SEQ ID NO: 1508453 - DNA, 15 bp, Homo sapiens
tcaaaaaaggactta

SEQ ID NO: 1508454 - DNA, 15 bp, Homo sapiens
ttcaaaaaaggactt

SEQ ID NO: 1508455 - DNA, 15 bp, Homo sapiens
cttcaaaaaaggact

SEQ ID NO: 1508456 - DNA, 15 bp, Homo sapiens
ccttcaaaaaaggac

SEQ ID NO: 1508457 - DNA, 15 bp, Homo sapiens
tccttcaaaaaagga

SEQ ID NO: 1508458 - DNA, 15 bp, Homo sapiens
ctccttcaaaaaagg

SEQ ID NO: 1508459 - DNA, 15 bp, Homo sapiens
cctccttcaaaaaag

SEQ ID NO: 1508460 - DNA, 15 bp, Homo sapiens
tcctccttcaaaaaa

SEQ ID NO: 1508461 - DNA, 15 bp, Homo sapiens
ttcctccttcaaaaa

SEQ ID NO: 1508462 - DNA, 15 bp, Homo sapiens
gttcctccttcaaaa

SEQ ID NO: 1508463 - DNA, 15 bp, Homo sapiens
agttcctccttcaaa

SEQ ID NO: 1508464 - DNA, 15 bp, Homo sapiens
cagttcctccttcaa

SEQ ID NO: 1508465 - DNA, 15 bp, Homo sapiens
ccagttcctccttca

SEQ ID NO: 1508466 - DNA, 15 bp, Homo sapiens
cccagttcctccttc

SEQ ID NO: 1508467 - DNA, 15 bp, Homo sapiens
acccagttcctcctt

SEQ ID NO: 1508468 - DNA, 15 bp, Homo sapiens
tacccagttcctcct

SEQ ID NO: 1508469 - DNA, 15 bp, Homo sapiens
ctacccagttcctcc

SEQ ID NO: 1508470 - DNA, 15 bp, Homo sapiens
gctacccagttcctc

SEQ ID NO: 1508471 - DNA, 15 bp, Homo sapiens
tgctacccagttcct

SEQ ID NO: 1508472 - DNA, 15 bp, Homo sapiens
gtgctacccagttcc

SEQ ID NO: 1508473 - DNA, 15 bp, Homo sapiens
ggtgctacccagttc

SEQ ID NO: 1508474 - DNA, 15 bp, Homo sapiens
aggtgctacccagtt

SEQ ID NO: 1508475 - DNA, 15 bp, Homo sapiens
gaggtgctacccagt

SEQ ID NO: 1508476 - DNA, 15 bp, Homo sapiens
tgaggtgctacccag

SEQ ID NO: 1508477 - DNA, 15 bp, Homo sapiens
ctgaggtgctaccca

SEQ ID NO: 1508478 - DNA, 15 bp, Homo sapiens
actgaggtgctaccc

SEQ ID NO: 1508479 - DNA, 15 bp, Homo sapiens
cactgaggtgctacc

SEQ ID NO: 1508480 - DNA, 15 bp, Homo sapiens
acactgaggtgctac

SEQ ID NO: 1508481 - DNA, 15 bp, Homo sapiens
gacactgaggtgcta

SEQ ID NO: 1508482 - DNA, 15 bp, Homo sapiens
agacactgaggtgct

SEQ ID NO: 1508483 - DNA, 15 bp, Homo sapiens
tagacactgaggtgc

SEQ ID NO: 1508484 - DNA, 15 bp, Homo sapiens
gtagacactgaggtg

SEQ ID NO: 1508485 - DNA, 15 bp, Homo sapiens
ggtagacactgaggt

SEQ ID NO: 1508486 - DNA, 15 bp, Homo sapiens
tggtagacactgagg

SEQ ID NO: 1508487 - DNA, 15 bp, Homo sapiens
gtggtagacactgag

SEQ ID NO: 1508488 - DNA, 15 bp, Homo sapiens
cgtggtagacactga

SEQ ID NO: 1508489 - DNA, 15 bp, Homo sapiens
tcgtggtagacactg

SEQ ID NO: 1508490 - DNA, 15 bp, Homo sapiens
atcgtggtagacact

SEQ ID NO: 1508491 - DNA, 15 bp, Homo sapiens
aatcgtggtagacac

SEQ ID NO: 1508492 - DNA, 15 bp, Homo sapiens
aaatcgtggtagaca

SEQ ID NO: 1508493 - DNA, 15 bp, Homo sapiens
gaaatcgtggtagac

SEQ ID NO: 1508494 - DNA, 15 bp, Homo sapiens
agaaatcgtggtaga

SEQ ID NO: 1508495 - DNA, 15 bp, Homo sapiens
gagaaatcgtggtag

SEQ ID NO: 1508496 - DNA, 15 bp, Homo sapiens
agagaaatcgtggta

SEQ ID NO: 1508497 - DNA, 15 bp, Homo sapiens
cagagaaatcgtggt

SEQ ID NO: 1508498 - DNA, 15 bp, Homo sapiens
acagagaaatcgtgg

SEQ ID NO: 1508499 - DNA, 15 bp, Homo sapiens
tacagagaaatcgtg

SEQ ID NO: 1508500 - DNA, 15 bp, Homo sapiens
atacagagaaatcgt

SEQ ID NO: 1508501 - DNA, 15 bp, Homo sapiens
gatacagagaaatcg

SEQ ID NO: 1508502 - DNA, 15 bp, Homo sapiens
ggatacagagaaatc

SEQ ID NO: 1508503 - DNA, 15 bp, Homo sapiens
tggatacagagaaat

SEQ ID NO: 1508504 - DNA, 15 bp, Homo sapiens
gtggatacagagaaa

SEQ ID NO: 1508505 - DNA, 15 bp, Homo sapiens
ggtggatacagagaa

SEQ ID NO: 1508506 - DNA, 15 bp, Homo sapiens
tggtggatacagaga

SEQ ID NO: 1508507 - DNA, 15 bp, Homo sapiens
ttggtggatacagag

SEQ ID NO: 1508508 - DNA, 15 bp, Homo sapiens
tttggtggatacaga

SEQ ID NO: 1508509 - DNA, 15 bp, Homo sapiens
atttggtggatacag

SEQ ID NO: 1508510 - DNA, 15 bp, Homo sapiens
catttggtggataca

SEQ ID NO: 1508511 - DNA, 15 bp, Homo sapiens
ccatttggtggatac

SEQ ID NO: 1508512 - DNA, 15 bp, Homo sapiens
gccatttggtggata

SEQ ID NO: 1508513 - DNA, 15 bp, Homo sapiens
ggccatttggtggat

SEQ ID NO: 1508514 - DNA, 15 bp, Homo sapiens
tggccatttggtgga

SEQ ID NO: 1508515 - DNA, 15 bp, Homo sapiens
ttggccatttggtgg

SEQ ID NO: 1508516 - DNA, 15 bp, Homo sapiens
attggccatttggtg

SEQ ID NO: 1508517 - DNA, 15 bp, Homo sapiens
aattggccatttggt

SEQ ID NO: 1508518 - DNA, 15 bp, Homo sapiens
aaattggccatttgg

SEQ ID NO: 1508519 - DNA, 15 bp, Homo sapiens
caaattggccatttg

SEQ ID NO: 1508520 - DNA, 15 bp, Homo sapiens
acaaattggccattt

SEQ ID NO: 1508521 - DNA, 15 bp, Homo sapiens
aacaaattggccatt

SEQ ID NO: 1508522 - DNA, 15 bp, Homo sapiens
aaacaaattggccat

SEQ ID NO: 1508523 - DNA, 15 bp, Homo sapiens
aaaacaaattggcca

SEQ ID NO: 1508524 - DNA, 15 bp, Homo sapiens
aaaaacaaattggcc

SEQ ID NO: 1508525 - DNA, 15 bp, Homo sapiens
caaaaacaaattggc

SEQ ID NO: 1508526 - DNA, 15 bp, Homo sapiens
acaaaaacaaattgg

SEQ ID NO: 1508527 - DNA, 15 bp, Homo sapiens
aacaaaaacaaattg

SEQ ID NO: 1508528 - DNA, 15 bp, Homo sapiens
aaacaaaaacaaatt

SEQ ID NO: 1508529 - DNA, 15 bp, Homo sapiens
aaaacaaaaacaaat

SEQ ID NO: 1508530 - DNA, 15 bp, Homo sapiens
taaaaaacaaaaaca

SEQ ID NO: 1508531 - DNA, 15 bp, Homo sapiens
ataaaaaacaaaaac

SEQ ID NO: 1508532 - DNA, 15 bp, Homo sapiens
taataaaaaacaaaa

SEQ ID NO: 1508533 - DNA, 15 bp, Homo sapiens
ataataaaaaacaaa

SEQ ID NO: 1508534 - DNA, 15 bp, Homo sapiens
gataataaaaaacaa

SEQ ID NO: 1508535 - DNA, 15 bp, Homo sapiens
tgataataaaaaaca

SEQ ID NO: 1508536 - DNA, 15 bp, Homo sapiens
atgataataaaaaac

SEQ ID NO: 1508537 - DNA, 15 bp, Homo sapiens
aatgataataaaaaa

SEQ ID NO: 1508538 - DNA, 15 bp, Homo sapiens
taatgataataaaaa

SEQ ID NO: 1508539 - DNA, 15 bp, Homo sapiens
ataatgataataaaa

SEQ ID NO: 1508540 - DNA, 15 bp, Homo sapiens
aataatgataataaa

SEQ ID NO: 1508541 - DNA, 15 bp, Homo sapiens
gaataatgataataa

SEQ ID NO: 1508542 - DNA, 15 bp, Homo sapiens
tgaataatgataata

SEQ ID NO: 1508543 - DNA, 15 bp, Homo sapiens
atgaataatgataat

SEQ ID NO: 1508544 - DNA, 15 bp, Homo sapiens
aatgaataatgataa

SEQ ID NO: 1508545 - DNA, 15 bp, Homo sapiens
gaatgaataatgata

SEQ ID NO: 1508546 - DNA, 15 bp, Homo sapiens
tgaatgaataatgat

SEQ ID NO: 1508547 - DNA, 15 bp, Homo sapiens
atgaatgaataatga

SEQ ID NO: 1508548 - DNA, 15 bp, Homo sapiens
catgaatgaataatg

SEQ ID NO: 1508549 - DNA, 15 bp, Homo sapiens
ccatgaatgaataat

SEQ ID NO: 1508550 - DNA, 15 bp, Homo sapiens
tccatgaatgaataa

SEQ ID NO: 1508551 - DNA, 15 bp, Homo sapiens
atccatgaatgaata

SEQ ID NO: 1508552 - DNA, 15 bp, Homo sapiens
aatccatgaatgaat

SEQ ID NO: 1508553 - DNA, 15 bp, Homo sapiens
aaatccatgaatgaa

SEQ ID NO: 1508554 - DNA, 15 bp, Homo sapiens
taaatccatgaatga

SEQ ID NO: 1508555 - DNA, 15 bp, Homo sapiens
ttaaatccatgaatg

SEQ ID NO: 1508556 - DNA, 15 bp, Homo sapiens
tttaaatccatgaat

SEQ ID NO: 1508557 - DNA, 15 bp, Homo sapiens
gtttaaatccatgaa

SEQ ID NO: 1508558 - DNA, 15 bp, Homo sapiens
tgtttaaatccatga

SEQ ID NO: 1508559 - DNA, 15 bp, Homo sapiens
atgtttaaatccatg

SEQ ID NO: 1508560 - DNA, 15 bp, Homo sapiens
tatgtttaaatccat

SEQ ID NO: 1508561 - DNA, 15 bp, Homo sapiens
atatgtttaaatcca

SEQ ID NO: 1508562 - DNA, 15 bp, Homo sapiens
tatatgtttaaatcc

SEQ ID NO: 1508563 - DNA, 15 bp, Homo sapiens
atatatgtttaaatc

SEQ ID NO: 1508564 - DNA, 15 bp, Homo sapiens
aatatatgtttaaat

SEQ ID NO: 1508565 - DNA, 15 bp, Homo sapiens
aaatatatgtttaaa

SEQ ID NO: 1508566 - DNA, 15 bp, Homo sapiens
taaatatatgtttaa

SEQ ID NO: 1508567 - DNA, 15 bp, Homo sapiens
ctaaatatatgttta

SEQ ID NO: 1508568 - DNA, 15 bp, Homo sapiens
gctaaatatatgttt

SEQ ID NO: 1508569 - DNA, 15 bp, Homo sapiens
tgctaaatatatgtt

SEQ ID NO: 1508570 - DNA, 15 bp, Homo sapiens
ttgctaaatatatgt

SEQ ID NO: 1508571 - DNA, 15 bp, Homo sapiens
tttgctaaatatatg

SEQ ID NO: 1508572 - DNA, 15 bp, Homo sapiens
gtttgctaaatatat

SEQ ID NO: 1508573 - DNA, 15 bp, Homo sapiens
agtttgctaaatata

SEQ ID NO: 1508574 - DNA, 15 bp, Homo sapiens
aagtttgctaaatat

SEQ ID NO: 1508575 - DNA, 15 bp, Homo sapiens
aaagtttgctaaata

SEQ ID NO: 1508576 - DNA, 15 bp, Homo sapiens
gaaagtttgctaaat

SEQ ID NO: 1508577 - DNA, 15 bp, Homo sapiens
agaaagtttgctaaa

SEQ ID NO: 1508578 - DNA, 15 bp, Homo sapiens
cagaaagtttgctaa

SEQ ID NO: 1508579 - DNA, 15 bp, Homo sapiens
acagaaagtttgcta

SEQ ID NO: 1508580 - DNA, 15 bp, Homo sapiens
aacagaaagtttgct

SEQ ID NO: 1508581 - DNA, 15 bp, Homo sapiens
taacagaaagtttgc

SEQ ID NO: 1508582 - DNA, 15 bp, Homo sapiens
ttaacagaaagtttg

SEQ ID NO: 1508583 - DNA, 15 bp, Homo sapiens
tttaacagaaagttt

SEQ ID NO: 1508584 - DNA, 15 bp, Homo sapiens
atttaacagaaagtt

SEQ ID NO: 1508585 - DNA, 15 bp, Homo sapiens
aatttaacagaaagt

SEQ ID NO: 1508586 - DNA, 15 bp, Homo sapiens
taatttaacagaaag

SEQ ID NO: 1508587 - DNA, 15 bp, Homo sapiens
ataatttaacagaaa

SEQ ID NO: 1508588 - DNA, 15 bp, Homo sapiens
cataatttaacagaa

SEQ ID NO: 1508589 - DNA, 15 bp, Homo sapiens
acataatttaacaga

SEQ ID NO: 1508590 - DNA, 15 bp, Homo sapiens
cacataatttaacag

SEQ ID NO: 1508591 - DNA, 15 bp, Homo sapiens
acacataatttaaca

SEQ ID NO: 1508592 - DNA, 15 bp, Homo sapiens
tacacataatttaac

SEQ ID NO: 1508593 - DNA, 15 bp, Homo sapiens
atacacataatttaa

SEQ ID NO: 1508594 - DNA, 15 bp, Homo sapiens
tatacacataattta

SEQ ID NO: 1508595 - DNA, 15 bp, Homo sapiens
ctatacacataattt

SEQ ID NO: 1508596 - DNA, 15 bp, Homo sapiens
tctatacacataatt

SEQ ID NO: 1508597 - DNA, 15 bp, Homo sapiens
ttctatacacataat

SEQ ID NO: 1508598 - DNA, 15 bp, Homo sapiens
tttctatacacataa

SEQ ID NO: 1508599 - DNA, 15 bp, Homo sapiens
ttttctatacacata

SEQ ID NO: 1508600 - DNA, 15 bp, Homo sapiens
cttttctatacacat

SEQ ID NO: 1508601 - DNA, 15 bp, Homo sapiens
ccttttctatacaca

SEQ ID NO: 1508602 - DNA, 15 bp, Homo sapiens
cccttttctatacac

SEQ ID NO: 1508603 - DNA, 15 bp, Homo sapiens
gcccttttctataca

SEQ ID NO: 1508604 - DNA, 15 bp, Homo sapiens
tgcccttttctatac

SEQ ID NO: 1508605 - DNA, 15 bp, Homo sapiens
gtgcccttttctata

SEQ ID NO: 1508606 - DNA, 15 bp, Homo sapiens
tgtgcccttttctat

SEQ ID NO: 1508607 - DNA, 15 bp, Homo sapiens
ttgtgcccttttcta

SEQ ID NO: 1508608 - DNA, 15 bp, Homo sapiens
tttgtgcccttttct

SEQ ID NO: 1508609 - DNA, 15 bp, Homo sapiens
atttgtgcccttttc

SEQ ID NO: 1508610 - DNA, 15 bp, Homo sapiens
aatttgtgccctttt

SEQ ID NO: 1508611 - DNA, 15 bp, Homo sapiens
caatttgtgcccttt

SEQ ID NO: 1508612 - DNA, 15 bp, Homo sapiens
acaatttgtgccctt

SEQ ID NO: 1508613 - DNA, 15 bp, Homo sapiens
tacaatttgtgccct

SEQ ID NO: 1508614 - DNA, 15 bp, Homo sapiens
ttacaatttgtgccc

SEQ ID NO: 1508615 - DNA, 15 bp, Homo sapiens
tttacaatttgtgcc

SEQ ID NO: 1508616 - DNA, 15 bp, Homo sapiens
atttacaatttgtgc

SEQ ID NO: 1508617 - DNA, 15 bp, Homo sapiens
tatttacaatttgtg

SEQ ID NO: 1508618 - DNA, 15 bp, Homo sapiens
atatttacaatttgt

SEQ ID NO: 1508619 - DNA, 15 bp, Homo sapiens
tatatttacaatttg

SEQ ID NO: 1508620 - DNA, 15 bp, Homo sapiens
gtatatttacaattt

SEQ ID NO: 1508621 - DNA, 15 bp, Homo sapiens
tgtatatttacaatt

SEQ ID NO: 1508622 - DNA, 15 bp, Homo sapiens
ctgtatatttacaat

SEQ ID NO: 1508623 - DNA, 15 bp, Homo sapiens
gctgtatatttacaa

SEQ ID NO: 1508624 - DNA, 15 bp, Homo sapiens
agctgtatatttaca

SEQ ID NO: 1508625 - DNA, 15 bp, Homo sapiens
gagctgtatatttac

SEQ ID NO: 1508626 - DNA, 15 bp, Homo sapiens
tgagctgtatattta

SEQ ID NO: 1508627 - DNA, 15 bp, Homo sapiens
ctgagctgtatattt

SEQ ID NO: 1508628 - DNA, 15 bp, Homo sapiens
actgagctgtatatt

SEQ ID NO: 1508629 - DNA, 15 bp, Homo sapiens
aactgagctgtatat

SEQ ID NO: 1508630 - DNA, 15 bp, Homo sapiens
taactgagctgtata

SEQ ID NO: 1508631 - DNA, 15 bp, Homo sapiens
ttaactgagctgtat

SEQ ID NO: 1508632 - DNA, 15 bp, Homo sapiens
tttaactgagctgta

SEQ ID NO: 1508633 - DNA, 15 bp, Homo sapiens
atttaactgagctgt

SEQ ID NO: 1508634 - DNA, 15 bp, Homo sapiens
catttaactgagctg

SEQ ID NO: 1508635 - DNA, 15 bp, Homo sapiens
acatttaactgagct

SEQ ID NO: 1508636 - DNA, 15 bp, Homo sapiens
aacatttaactgagc

SEQ ID NO: 1508637 - DNA, 15 bp, Homo sapiens
gaacatttaactgag

SEQ ID NO: 1508638 - DNA, 15 bp, Homo sapiens
tgaacatttaactga

SEQ ID NO: 1508639 - DNA, 15 bp, Homo sapiens
gtgaacatttaactg

SEQ ID NO: 1508640 - DNA, 15 bp, Homo sapiens
tgtgaacatttaact

SEQ ID NO: 1508641 - DNA, 15 bp, Homo sapiens
ttgtgaacatttaac

SEQ ID NO: 1508642 - DNA, 15 bp, Homo sapiens
tttgtgaacatttaa

SEQ ID NO: 1508643 - DNA, 15 bp, Homo sapiens
ctttgtgaacattta

SEQ ID NO: 1508644 - DNA, 15 bp, Homo sapiens
actttgtgaacattt

SEQ ID NO: 1508645 - DNA, 15 bp, Homo sapiens
tactttgtgaacatt

SEQ ID NO: 1508646 - DNA, 15 bp, Homo sapiens
ttactttgtgaacat

SEQ ID NO: 1508647 - DNA, 15 bp, Homo sapiens
tttactttgtgaaca

SEQ ID NO: 1508648 - DNA, 15 bp, Homo sapiens
gtttactttgtgaac

SEQ ID NO: 1508649 - DNA, 15 bp, Homo sapiens
tgtttactttgtgaa

SEQ ID NO: 1508650 - DNA, 15 bp, Homo sapiens
gtgtttactttgtga

SEQ ID NO: 1508651 - DNA, 15 bp, Homo sapiens
tgtgtttactttgtg

SEQ ID NO: 1508652 - DNA, 15 bp, Homo sapiens
gtgtgtttactttgt

SEQ ID NO: 1508653 - DNA, 15 bp, Homo sapiens
ggtgtgtttactttg

SEQ ID NO: 1508654 - DNA, 15 bp, Homo sapiens
tggtgtgtttacttt

SEQ ID NO: 1508655 - DNA, 15 bp, Homo sapiens
ctggtgtgtttactt

SEQ ID NO: 1508656 - DNA, 15 bp, Homo sapiens
actggtgtgtttact

SEQ ID NO: 1508657 - DNA, 15 bp, Homo sapiens
cactggtgtgtttac

SEQ ID NO: 1508658 - DNA, 15 bp, Homo sapiens
acactggtgtgttta

SEQ ID NO: 1508659 - DNA, 15 bp, Homo sapiens
tacactggtgtgttt

SEQ ID NO: 1508660 - DNA, 15 bp, Homo sapiens
ttacactggtgtgtt

SEQ ID NO: 1508661 - DNA, 15 bp, Homo sapiens
gttacactggtgtgt

SEQ ID NO: 1508662 - DNA, 15 bp, Homo sapiens
ggttacactggtgtg

SEQ ID NO: 1508663 - DNA, 15 bp, Homo sapiens
tggttacactggtgt

SEQ ID NO: 1508664 - DNA, 15 bp, Homo sapiens
ctggttacactggtg

SEQ ID NO: 1508665 - DNA, 15 bp, Homo sapiens
actggttacactggt

SEQ ID NO: 1508666 - DNA, 15 bp, Homo sapiens
tactggttacactgg

SEQ ID NO: 1508667 - DNA, 15 bp, Homo sapiens
atactggttacactg

SEQ ID NO: 1508668 - DNA, 15 bp, Homo sapiens
gatactggttacact

SEQ ID NO: 1508669 - DNA, 15 bp, Homo sapiens
ggatactggttacac

SEQ ID NO: 1508670 - DNA, 15 bp, Homo sapiens
tggatactggttaca

SEQ ID NO: 1508671 - DNA, 15 bp, Homo sapiens
ctggatactggttac

SEQ ID NO: 1508672 - DNA, 15 bp, Homo sapiens
tctggatactggtta

SEQ ID NO: 1508673 - DNA, 15 bp, Homo sapiens
atctggatactggtt

SEQ ID NO: 1508674 - DNA, 15 bp, Homo sapiens
gatctggatactggt

SEQ ID NO: 1508675 - DNA, 15 bp, Homo sapiens
tgatctggatactgg

SEQ ID NO: 1508676 - DNA, 15 bp, Homo sapiens
ttgatctggatactg

SEQ ID NO: 1508677 - DNA, 15 bp, Homo sapiens
cttgatctggatact

SEQ ID NO: 1508678 - DNA, 15 bp, Homo sapiens
tcttgatctggatac

SEQ ID NO: 1508679 - DNA, 15 bp, Homo sapiens
ttcttgatctggata

SEQ ID NO: 1508680 - DNA, 15 bp, Homo sapiens
tttcttgatctggat

SEQ ID NO: 1508681 - DNA, 15 bp, Homo sapiens
atttcttgatctgga

SEQ ID NO: 1508682 - DNA, 15 bp, Homo sapiens
tatttcttgatctgg

SEQ ID NO: 1508683 - DNA, 15 bp, Homo sapiens
ttatttcttgatctg

SEQ ID NO: 1508684 - DNA, 15 bp, Homo sapiens
tttatttcttgatct

SEQ ID NO: 1508685 - DNA, 15 bp, Homo sapiens
ttttatttcttgatc

SEQ ID NO: 1508686 - DNA, 15 bp, Homo sapiens
gttttatttcttgat

SEQ ID NO: 1508687 - DNA, 15 bp, Homo sapiens
tgttttatttcttga

SEQ ID NO: 1508688 - DNA, 15 bp, Homo sapiens
ttgttttatttcttg

SEQ ID NO: 1508689 - DNA, 15 bp, Homo sapiens
attgttttatttctt

SEQ ID NO: 1508690 - DNA, 15 bp, Homo sapiens
tattgttttatttct

SEQ ID NO: 1508691 - DNA, 15 bp, Homo sapiens
gtattgttttatttc

SEQ ID NO: 1508692 - DNA, 15 bp, Homo sapiens
agtattgttttattt

SEQ ID NO: 1508693 - DNA, 15 bp, Homo sapiens
cagtattgttttatt

SEQ ID NO: 1508694 - DNA, 15 bp, Homo sapiens
acagtattgttttat

SEQ ID NO: 1508695 - DNA, 15 bp, Homo sapiens
cacagtattgtttta

SEQ ID NO: 1508696 - DNA, 15 bp, Homo sapiens
tcacagtattgtttt

SEQ ID NO: 1508697 - DNA, 15 bp, Homo sapiens
ttcacagtattgttt

SEQ ID NO: 1508698 - DNA, 15 bp, Homo sapiens
attcacagtattgtt

SEQ ID NO: 1508699 - DNA, 15 bp, Homo sapiens
gattcacagtattgt

SEQ ID NO: 1508700 - DNA, 15 bp, Homo sapiens
agattcacagtattg

SEQ ID NO: 1508701 - DNA, 15 bp, Homo sapiens
tagattcacagtatt

SEQ ID NO: 1508702 - DNA, 15 bp, Homo sapiens
ctagattcacagtat

SEQ ID NO: 1508703 - DNA, 15 bp, Homo sapiens
cctagattcacagta

SEQ ID NO: 1508704 - DNA, 15 bp, Homo sapiens
tcctagattcacagt

SEQ ID NO: 1508705 - DNA, 15 bp, Homo sapiens
ctcctagattcacag

SEQ ID NO: 1508706 - DNA, 15 bp, Homo sapiens
actcctagattcaca

SEQ ID NO: 1508707 - DNA, 15 bp, Homo sapiens
gactcctagattcac

SEQ ID NO: 1508708 - DNA, 15 bp, Homo sapiens
ggactcctagattca

SEQ ID NO: 1508709 - DNA, 15 bp, Homo sapiens
aggactcctagattc

SEQ ID NO: 1508710 - DNA, 15 bp, Homo sapiens
gaggactcctagatt

SEQ ID NO: 1508711 - DNA, 15 bp, Homo sapiens
ggaggactcctagat

SEQ ID NO: 1508712 - DNA, 15 bp, Homo sapiens
aggaggactcctaga

SEQ ID NO: 1508713 - DNA, 15 bp, Homo sapiens
gaggaggactcctag

SEQ ID NO: 1508714 - DNA, 15 bp, Homo sapiens
cgaggaggactccta

SEQ ID NO: 1508715 - DNA, 15 bp, Homo sapiens
acgaggaggactcct

SEQ ID NO: 1508716 - DNA, 15 bp, Homo sapiens
cacgaggaggactcc

SEQ ID NO: 1508717 - DNA, 15 bp, Homo sapiens
acacgaggaggactc

SEQ ID NO: 1508718 - DNA, 15 bp, Homo sapiens
aacacgaggaggact

SEQ ID NO: 1508719 - DNA, 15 bp, Homo sapiens
aaacacgaggaggac

SEQ ID NO: 1508720 - DNA, 15 bp, Homo sapiens
gaaacacgaggagga

SEQ ID NO: 1508721 - DNA, 15 bp, Homo sapiens
ggaaacacgaggagg

SEQ ID NO: 1508722 - DNA, 15 bp, Homo sapiens
aggaaacacgaggag

SEQ ID NO: 1508723 - DNA, 15 bp, Homo sapiens
aaggaaacacgagga

SEQ ID NO: 1508724 - DNA, 15 bp, Homo sapiens
aaaggaaacacgagg

SEQ ID NO: 1508725 - DNA, 15 bp, Homo sapiens
gaaaggaaacacgag

SEQ ID NO: 1508726 - DNA, 15 bp, Homo sapiens
tgaaaggaaacacga

SEQ ID NO: 1508727 - DNA, 15 bp, Homo sapiens
ctgaaaggaaacacg

SEQ ID NO: 1508728 - DNA, 15 bp, Homo sapiens
actgaaaggaaacac

SEQ ID NO: 1508729 - DNA, 15 bp, Homo sapiens
gactgaaaggaaaca

SEQ ID NO: 1508730 - DNA, 15 bp, Homo sapiens
tgactgaaaggaaac

SEQ ID NO: 1508731 - DNA, 15 bp, Homo sapiens
gtgactgaaaggaaa

SEQ ID NO: 1508732 - DNA, 15 bp, Homo sapiens
agtgactgaaaggaa

SEQ ID NO: 1508733 - DNA, 15 bp, Homo sapiens
cagtgactgaaagga

SEQ ID NO: 1508734 - DNA, 15 bp, Homo sapiens
acagtgactgaaagg

SEQ ID NO: 1508735 - DNA, 15 bp, Homo sapiens
aacagtgactgaaag

SEQ ID NO: 1508736 - DNA, 15 bp, Homo sapiens
aaacagtgactgaaa

SEQ ID NO: 1508737 - DNA, 15 bp, Homo sapiens
aaaacagtgactgaa

SEQ ID NO: 1508738 - DNA, 15 bp, Homo sapiens
gaaaacagtgactga

SEQ ID NO: 1508739 - DNA, 15 bp, Homo sapiens
ggaaaacagtgactg

SEQ ID NO: 1508740 - DNA, 15 bp, Homo sapiens
tggaaaacagtgact

SEQ ID NO: 1508741 - DNA, 15 bp, Homo sapiens
ctggaaaacagtgac

SEQ ID NO: 1508742 - DNA, 15 bp, Homo sapiens
cctggaaaacagtga

SEQ ID NO: 1508743 - DNA, 15 bp, Homo sapiens
ccctggaaaacagtg

SEQ ID NO: 1508744 - DNA, 15 bp, Homo sapiens
tccctggaaaacagt

SEQ ID NO: 1508745 - DNA, 15 bp, Homo sapiens
atccctggaaaacag

SEQ ID NO: 1508746 - DNA, 15 bp, Homo sapiens
gatccctggaaaaca

SEQ ID NO: 1508747 - DNA, 15 bp, Homo sapiens
agatccctggaaaac

SEQ ID NO: 1508748 - DNA, 15 bp, Homo sapiens
tagatccctggaaaa

SEQ ID NO: 1508749 - DNA, 15 bp, Homo sapiens
atagatccctggaaa

SEQ ID NO: 1508750 - DNA, 15 bp, Homo sapiens
gatagatccctggaa

SEQ ID NO: 1508751 - DNA, 15 bp, Homo sapiens
ggatagatccctgga

SEQ ID NO: 1508752 - DNA, 15 bp, Homo sapiens
aggatagatccctgg

SEQ ID NO: 1508753 - DNA, 15 bp, Homo sapiens
caggatagatccctg

SEQ ID NO: 1508754 - DNA, 15 bp, Homo sapiens
tcaggatagatccct

SEQ ID NO: 1508755 - DNA, 15 bp, Homo sapiens
gtcaggatagatccc

SEQ ID NO: 1508756 - DNA, 15 bp, Homo sapiens
agtcaggatagatcc

SEQ ID NO: 1508757 - DNA, 15 bp, Homo sapiens
aagtcaggatagatc

SEQ ID NO: 1508758 - DNA, 15 bp, Homo sapiens
gaagtcaggatagat

SEQ ID NO: 1508759 - DNA, 15 bp, Homo sapiens
agaagtcaggataga

SEQ ID NO: 1508760 - DNA, 15 bp, Homo sapiens
tagaagtcaggatag

SEQ ID NO: 1508761 - DNA, 15 bp, Homo sapiens
ttagaagtcaggata

SEQ ID NO: 1508762 - DNA, 15 bp, Homo sapiens
tttagaagtcaggat

SEQ ID NO: 1508763 - DNA, 15 bp, Homo sapiens
ttttagaagtcagga

SEQ ID NO: 1508764 - DNA, 15 bp, Homo sapiens
attttagaagtcagg

SEQ ID NO: 1508765 - DNA, 15 bp, Homo sapiens
gattttagaagtcag

SEQ ID NO: 1508766 - DNA, 15 bp, Homo sapiens
tgattttagaagtca

SEQ ID NO: 1508767 - DNA, 15 bp, Homo sapiens
atgattttagaagtc

SEQ ID NO: 1508768 - DNA, 15 bp, Homo sapiens
catgattttagaagt

SEQ ID NO: 1508769 - DNA, 15 bp, Homo sapiens
ccatgattttagaag

SEQ ID NO: 1508770 - DNA, 15 bp, Homo sapiens
cccatgattttagaa

SEQ ID NO: 1508771 - DNA, 15 bp, Homo sapiens
acccatgattttaga

SEQ ID NO: 1508772 - DNA, 15 bp, Homo sapiens
aacccatgattttag

SEQ ID NO: 1508773 - DNA, 15 bp, Homo sapiens
caacccatgatttta

SEQ ID NO: 1508774 - DNA, 15 bp, Homo sapiens
tcaacccatgatttt

SEQ ID NO: 1508775 - DNA, 15 bp, Homo sapiens
ttcaacccatgattt

SEQ ID NO: 1508776 - DNA, 15 bp, Homo sapiens
attcaacccatgatt

SEQ ID NO: 1508777 - DNA, 15 bp, Homo sapiens
aattcaacccatgat

SEQ ID NO: 1508778 - DNA, 15 bp, Homo sapiens
aaattcaacccatga

SEQ ID NO: 1508779 - DNA, 15 bp, Homo sapiens
taaattcaacccatg

SEQ ID NO: 1508780 - DNA, 15 bp, Homo sapiens
ctaaattcaacccat

SEQ ID NO: 1508781 - DNA, 15 bp, Homo sapiens
gctaaattcaaccca

SEQ ID NO: 1508782 - DNA, 15 bp, Homo sapiens
tgctaaattcaaccc

SEQ ID NO: 1508783 - DNA, 15 bp, Homo sapiens
atgctaaattcaacc

SEQ ID NO: 1508784 - DNA, 15 bp, Homo sapiens
catgctaaattcaac

SEQ ID NO: 1508785 - DNA, 15 bp, Homo sapiens
ccatgctaaattcaa

SEQ ID NO: 1508786 - DNA, 15 bp, Homo sapiens
accatgctaaattca

SEQ ID NO: 1508787 - DNA, 15 bp, Homo sapiens
aaccatgctaaattc

SEQ ID NO: 1508788 - DNA, 15 bp, Homo sapiens
aaaccatgctaaatt

SEQ ID NO: 1508789 - DNA, 15 bp, Homo sapiens
aaaaccatgctaaat

SEQ ID NO: 1508790 - DNA, 15 bp, Homo sapiens
caaaaccatgctaaa

SEQ ID NO: 1508791 - DNA, 15 bp, Homo sapiens
tcaaaaccatgctaa

SEQ ID NO: 1508792 - DNA, 15 bp, Homo sapiens
ttcaaaaccatgcta

SEQ ID NO: 1508793 - DNA, 15 bp, Homo sapiens
tttcaaaaccatgct

SEQ ID NO: 1508794 - DNA, 15 bp, Homo sapiens
atttcaaaaccatgc

SEQ ID NO: 1508795 - DNA, 15 bp, Homo sapiens
aatttcaaaaccatg

SEQ ID NO: 1508796 - DNA, 15 bp, Homo sapiens
aaatttcaaaaccat

SEQ ID NO: 1508797 - DNA, 15 bp, Homo sapiens
taaatttcaaaacca

SEQ ID NO: 1508798 - DNA, 15 bp, Homo sapiens
ataaatttcaaaacc

SEQ ID NO: 1508799 - DNA, 15 bp, Homo sapiens
cataaatttcaaaac

SEQ ID NO: 1508800 - DNA, 15 bp, Homo sapiens
acataaatttcaaaa

SEQ ID NO: 1508801 - DNA, 15 bp, Homo sapiens
tacataaatttcaaa

SEQ ID NO: 1508802 - DNA, 15 bp, Homo sapiens
ttacataaatttcaa

SEQ ID NO: 1508803 - DNA, 15 bp, Homo sapiens
gttacataaatttca

SEQ ID NO: 1508804 - DNA, 15 bp, Homo sapiens
tgttacataaatttc

SEQ ID NO: 1508805 - DNA, 15 bp, Homo sapiens
atgttacataaattt

SEQ ID NO: 1508806 - DNA, 15 bp, Homo sapiens
gatgttacataaatt

SEQ ID NO: 1508807 - DNA, 15 bp, Homo sapiens
tgatgttacataaat

SEQ ID NO: 1508808 - DNA, 15 bp, Homo sapiens
atgatgttacataaa

SEQ ID NO: 1508809 - DNA, 15 bp, Homo sapiens
tatgatgttacataa

SEQ ID NO: 1508810 - DNA, 15 bp, Homo sapiens
gtatgatgttacata

SEQ ID NO: 1508811 - DNA, 15 bp, Homo sapiens
tgtatgatgttacat

SEQ ID NO: 1508812 - DNA, 15 bp, Homo sapiens
ttgtatgatgttaca

SEQ ID NO: 1508813 - DNA, 15 bp, Homo sapiens
attgtatgatgttac

SEQ ID NO: 1508814 - DNA, 15 bp, Homo sapiens
tattgtatgatgtta

SEQ ID NO: 1508815 - DNA, 15 bp, Homo sapiens
atattgtatgatgtt

SEQ ID NO: 1508816 - DNA, 15 bp, Homo sapiens
catattgtatgatgt

SEQ ID NO: 1508817 - DNA, 15 bp, Homo sapiens
acatattgtatgatg

SEQ ID NO: 1508818 - DNA, 15 bp, Homo sapiens
gacatattgtatgat

SEQ ID NO: 1508819 - DNA, 15 bp, Homo sapiens
agacatattgtatga

SEQ ID NO: 1508820 - DNA, 15 bp, Homo sapiens
aagacatattgtatg

SEQ ID NO: 1508821 - DNA, 15 bp, Homo sapiens
caagacatattgtat

SEQ ID NO: 1508822 - DNA, 15 bp, Homo sapiens
acaagacatattgta

SEQ ID NO: 1508823 - DNA, 15 bp, Homo sapiens
aacaagacatattgt

SEQ ID NO: 1508824 - DNA, 15 bp, Homo sapiens
gaacaagacatattg

SEQ ID NO: 1508825 - DNA, 15 bp, Homo sapiens
agaacaagacatatt

SEQ ID NO: 1508826 - DNA, 15 bp, Homo sapiens
cagaacaagacatat

SEQ ID NO: 1508827 - DNA, 15 bp, Homo sapiens
tcagaacaagacata

SEQ ID NO: 1508828 - DNA, 15 bp, Homo sapiens
gtcagaacaagacat

SEQ ID NO: 1508829 - DNA, 15 bp, Homo sapiens
agtcagaacaagaca

SEQ ID NO: 1508830 - DNA, 15 bp, Homo sapiens
aagtcagaacaagac

SEQ ID NO: 1508831 - DNA, 15 bp, Homo sapiens
gaagtcagaacaaga

SEQ ID NO: 1508832 - DNA, 15 bp, Homo sapiens
agaagtcagaacaag

SEQ ID NO: 1508833 - DNA, 15 bp, Homo sapiens
cagaagtcagaacaa

SEQ ID NO: 1508834 - DNA, 15 bp, Homo sapiens
acagaagtcagaaca

SEQ ID NO: 1508835 - DNA, 15 bp, Homo sapiens
gacagaagtcagaac

SEQ ID NO: 1508836 - DNA, 15 bp, Homo sapiens
agacagaagtcagaa

SEQ ID NO: 1508837 - DNA, 15 bp, Homo sapiens
cagacagaagtcaga

SEQ ID NO: 1508838 - DNA, 15 bp, Homo sapiens
acagacagaagtcag

SEQ ID NO: 1508839 - DNA, 15 bp, Homo sapiens
gacagacagaagtca

SEQ ID NO: 1508840 - DNA, 15 bp, Homo sapiens
tgacagacagaagtc

SEQ ID NO: 1508841 - DNA, 15 bp, Homo sapiens
ctgacagacagaagt

SEQ ID NO: 1508842 - DNA, 15 bp, Homo sapiens
actgacagacagaag

SEQ ID NO: 1508843 - DNA, 15 bp, Homo sapiens
tactgacagacagaa

SEQ ID NO: 1508844 - DNA, 15 bp, Homo sapiens
atactgacagacaga

SEQ ID NO: 1508845 - DNA, 15 bp, Homo sapiens
aatactgacagacag

SEQ ID NO: 1508846 - DNA, 15 bp, Homo sapiens
caatactgacagaca

SEQ ID NO: 1508847 - DNA, 15 bp, Homo sapiens
acaatactgacagac

SEQ ID NO: 1508848 - DNA, 15 bp, Homo sapiens
tacaatactgacaga

SEQ ID NO: 1508849 - DNA, 15 bp, Homo sapiens
atacaatactgacag

SEQ ID NO: 1508850 - DNA, 15 bp, Homo sapiens
aatacaatactgaca

SEQ ID NO: 1508851 - DNA, 15 bp, Homo sapiens
aaatacaatactgac

SEQ ID NO: 1508852 - DNA, 15 bp, Homo sapiens
caaatacaatactga

SEQ ID NO: 1508853 - DNA, 15 bp, Homo sapiens
acaaatacaatactg

SEQ ID NO: 1508854 - DNA, 15 bp, Homo sapiens
cacaaatacaatact

SEQ ID NO: 1508855 - DNA, 15 bp, Homo sapiens
tcacaaatacaatac

SEQ ID NO: 1508856 - DNA, 15 bp, Homo sapiens
ttcacaaatacaata

SEQ ID NO: 1508857 - DNA, 15 bp, Homo sapiens
tttcacaaatacaat

SEQ ID NO: 1508858 - DNA, 15 bp, Homo sapiens
atttcacaaatacaa

SEQ ID NO: 1508859 - DNA, 15 bp, Homo sapiens
aatttcacaaataca

SEQ ID NO: 1508860 - DNA, 15 bp, Homo sapiens
taatttcacaaatac

SEQ ID NO: 1508861 - DNA, 15 bp, Homo sapiens
ttaatttcacaaata

SEQ ID NO: 1508862 - DNA, 15 bp, Homo sapiens
cttaatttcacaaat

SEQ ID NO: 1508863 - DNA, 15 bp, Homo sapiens
gcttaatttcacaaa

SEQ ID NO: 1508864 - DNA, 15 bp, Homo sapiens
agcttaatttcacaa

SEQ ID NO: 1508865 - DNA, 15 bp, Homo sapiens
gagcttaatttcaca

SEQ ID NO: 1508866 - DNA, 15 bp, Homo sapiens
tgagcttaatttcac

SEQ ID NO: 1508867 - DNA, 15 bp, Homo sapiens
gtgagcttaatttca

SEQ ID NO: 1508868 - DNA, 15 bp, Homo sapiens
tgtgagcttaatttc

SEQ ID NO: 1508869 - DNA, 15 bp, Homo sapiens
ttgtgagcttaattt

SEQ ID NO: 1508870 - DNA, 15 bp, Homo sapiens
attgtgagcttaatt

SEQ ID NO: 1508871 - DNA, 15 bp, Homo sapiens
aattgtgagcttaat

SEQ ID NO: 1508872 - DNA, 15 bp, Homo sapiens
caattgtgagcttaa

SEQ ID NO: 1508873 - DNA, 15 bp, Homo sapiens
acaattgtgagctta

SEQ ID NO: 1508874 - DNA, 15 bp, Homo sapiens
tacaattgtgagctt

SEQ ID NO: 1508875 - DNA, 15 bp, Homo sapiens
ttacaattgtgagct

SEQ ID NO: 1508876 - DNA, 15 bp, Homo sapiens
cttacaattgtgagc

SEQ ID NO: 1508877 - DNA, 15 bp, Homo sapiens
acttacaattgtgag

SEQ ID NO: 1508878 - DNA, 15 bp, Homo sapiens
gacttacaattgtga

SEQ ID NO: 1508879 - DNA, 15 bp, Homo sapiens
tgacttacaattgtg

SEQ ID NO: 1508880 - DNA, 15 bp, Homo sapiens
atgacttacaattgt

SEQ ID NO: 1508881 - DNA, 15 bp, Homo sapiens
aatgacttacaattg

SEQ ID NO: 1508882 - DNA, 15 bp, Homo sapiens
gaatgacttacaatt

SEQ ID NO: 1508883 - DNA, 15 bp, Homo sapiens
agaatgacttacaat

SEQ ID NO: 1508884 - DNA, 15 bp, Homo sapiens
gagaatgacttacaa

SEQ ID NO: 1508885 - DNA, 15 bp, Homo sapiens
agagaatgacttaca

SEQ ID NO: 1508886 - DNA, 15 bp, Homo sapiens
aagagaatgacttac

SEQ ID NO: 1508887 - DNA, 15 bp, Homo sapiens
caagagaatgactta

SEQ ID NO: 1508888 - DNA, 15 bp, Homo sapiens
gcaagagaatgactt

SEQ ID NO: 1508889 - DNA, 15 bp, Homo sapiens
agcaagagaatgact

SEQ ID NO: 1508890 - DNA, 15 bp, Homo sapiens
cagcaagagaatgac

SEQ ID NO: 1508891 - DNA, 15 bp, Homo sapiens
acagcaagagaatga

SEQ ID NO: 1508892 - DNA, 15 bp, Homo sapiens
tacagcaagagaatg

SEQ ID NO: 1508893 - DNA, 15 bp, Homo sapiens
atacagcaagagaat

SEQ ID NO: 1508894 - DNA, 15 bp, Homo sapiens
tatacagcaagagaa

SEQ ID NO: 1508895 - DNA, 15 bp, Homo sapiens
atatacagcaagaga

SEQ ID NO: 1508896 - DNA, 15 bp, Homo sapiens
aatatacagcaagag

SEQ ID NO: 1508897 - DNA, 15 bp, Homo sapiens
aaatatacagcaaga

SEQ ID NO: 1508898 - DNA, 15 bp, Homo sapiens
aaaatatacagcaag

SEQ ID NO: 1508899 - DNA, 15 bp, Homo sapiens
aaaaatatacagcaa

SEQ ID NO: 1508900 - DNA, 15 bp, Homo sapiens
aaaaaatatacagca

SEQ ID NO: 1508901 - DNA, 15 bp, Homo sapiens
gaaaaaatatacagc

SEQ ID NO: 1508902 - DNA, 15 bp, Homo sapiens
tgaaaaaatatacag

SEQ ID NO: 1508903 - DNA, 15 bp, Homo sapiens
atgaaaaaatataca

SEQ ID NO: 1508904 - DNA, 15 bp, Homo sapiens
catgaaaaaatatac

SEQ ID NO: 1508905 - DNA, 15 bp, Homo sapiens
ccatgaaaaaatata

SEQ ID NO: 1508906 - DNA, 15 bp, Homo sapiens
accatgaaaaaatat

SEQ ID NO: 1508907 - DNA, 15 bp, Homo sapiens
taccatgaaaaaata

SEQ ID NO: 1508908 - DNA, 15 bp, Homo sapiens
ataccatgaaaaaat

SEQ ID NO: 1508909 - DNA, 15 bp, Homo sapiens
cataccatgaaaaaa

SEQ ID NO: 1508910 - DNA, 15 bp, Homo sapiens
tcataccatgaaaaa

SEQ ID NO: 1508911 - DNA, 15 bp, Homo sapiens
gtcataccatgaaaa

SEQ ID NO: 1508912 - DNA, 15 bp, Homo sapiens
agtcataccatgaaa

SEQ ID NO: 1508913 - DNA, 15 bp, Homo sapiens
tagtcataccatgaa

SEQ ID NO: 1508914 - DNA, 15 bp, Homo sapiens
atagtcataccatga

SEQ ID NO: 1508915 - DNA, 15 bp, Homo sapiens
tatagtcataccatg

SEQ ID NO: 1508916 - DNA, 15 bp, Homo sapiens
gtatagtcataccat

SEQ ID NO: 1508917 - DNA, 15 bp, Homo sapiens
ggtatagtcatacca

SEQ ID NO: 1508918 - DNA, 15 bp, Homo sapiens
tggtatagtcatacc

SEQ ID NO: 1508919 - DNA, 15 bp, Homo sapiens
ctggtatagtcatac

SEQ ID NO: 1508920 - DNA, 15 bp, Homo sapiens
actggtatagtcata

SEQ ID NO: 1508921 - DNA, 15 bp, Homo sapiens
aactggtatagtcat

SEQ ID NO: 1508922 - DNA, 15 bp, Homo sapiens
aaactggtatagtca

SEQ ID NO: 1508923 - DNA, 15 bp, Homo sapiens
aaaactggtatagtc

SEQ ID NO: 1508924 - DNA, 15 bp, Homo sapiens
aaaaactggtatagt

SEQ ID NO: 1508925 - DNA, 15 bp, Homo sapiens
taaaaactggtatag

SEQ ID NO: 1508926 - DNA, 15 bp, Homo sapiens
ttaaaaactggtata

SEQ ID NO: 1508927 - DNA, 15 bp, Homo sapiens
tttaaaaactggtat

SEQ ID NO: 1508928 - DNA, 15 bp, Homo sapiens
ttttaaaaactggta

SEQ ID NO: 1508929 - DNA, 15 bp, Homo sapiens
tttttaaaaactggt

SEQ ID NO: 1508930 - DNA, 15 bp, Homo sapiens
gtttttaaaaactgg

SEQ ID NO: 1508931 - DNA, 15 bp, Homo sapiens
ggtttttaaaaactg

SEQ ID NO: 1508932 - DNA, 15 bp, Homo sapiens
tggtttttaaaaact

SEQ ID NO: 1508933 - DNA, 15 bp, Homo sapiens
atggtttttaaaaac

SEQ ID NO: 1508934 - DNA, 15 bp, Homo sapiens
aatggtttttaaaaa

SEQ ID NO: 1508935 - DNA, 15 bp, Homo sapiens
aaatggtttttaaaa

SEQ ID NO: 1508936 - DNA, 15 bp, Homo sapiens
gaaatggtttttaaa

SEQ ID NO: 1508937 - DNA, 15 bp, Homo sapiens
agaaatggtttttaa

SEQ ID NO: 1508938 - DNA, 15 bp, Homo sapiens
cagaaatggttttta

SEQ ID NO: 1508939 - DNA, 15 bp, Homo sapiens
gcagaaatggttttt

SEQ ID NO: 1508940 - DNA, 15 bp, Homo sapiens
agcagaaatggtttt

SEQ ID NO: 1508941 - DNA, 15 bp, Homo sapiens
tagcagaaatggttt

SEQ ID NO: 1508942 - DNA, 15 bp, Homo sapiens
atagcagaaatggtt

SEQ ID NO: 1508943 - DNA, 15 bp, Homo sapiens
aatagcagaaatggt

SEQ ID NO: 1508944 - DNA, 15 bp, Homo sapiens
taatagcagaaatgg

SEQ ID NO: 1508945 - DNA, 15 bp, Homo sapiens
ttaatagcagaaatg

SEQ ID NO: 1508946 - DNA, 15 bp, Homo sapiens
gttaatagcagaaat

SEQ ID NO: 1508947 - DNA, 15 bp, Homo sapiens
tgttaatagcagaaa

SEQ ID NO: 1508948 - DNA, 15 bp, Homo sapiens
atgttaatagcagaa

SEQ ID NO: 1508949 - DNA, 15 bp, Homo sapiens
aatgttaatagcaga

SEQ ID NO: 1508950 - DNA, 15 bp, Homo sapiens
aaatgttaatagcag

SEQ ID NO: 1508951 - DNA, 15 bp, Homo sapiens
caaatgttaatagca

SEQ ID NO: 1508952 - DNA, 15 bp, Homo sapiens
ccaaatgttaatagc

SEQ ID NO: 1508953 - DNA, 15 bp, Homo sapiens
tccaaatgttaatag

SEQ ID NO: 1508954 - DNA, 15 bp, Homo sapiens
atccaaatgttaata

SEQ ID NO: 1508955 - DNA, 15 bp, Homo sapiens
aatccaaatgttaat

SEQ ID NO: 1508956 - DNA, 15 bp, Homo sapiens
caatccaaatgttaa

SEQ ID NO: 1508957 - DNA, 15 bp, Homo sapiens
acaatccaaatgtta

SEQ ID NO: 1508958 - DNA, 15 bp, Homo sapiens
aacaatccaaatgtt

SEQ ID NO: 1508959 - DNA, 15 bp, Homo sapiens
tggaacaatccaaat

SEQ ID NO: 1508960 - DNA, 15 bp, Homo sapiens
ctggaacaatccaaa

SEQ ID NO: 1508961 - DNA, 15 bp, Homo sapiens
actggaacaatccaa

SEQ ID NO: 1508962 - DNA, 15 bp, Homo sapiens
aactggaacaatcca

SEQ ID NO: 1508963 - DNA, 15 bp, Homo sapiens
caactggaacaatcc

SEQ ID NO: 1508964 - DNA, 15 bp, Homo sapiens
acaactggaacaatc

SEQ ID NO: 1508965 - DNA, 15 bp, Homo sapiens
aacaactggaacaat

SEQ ID NO: 1508966 - DNA, 15 bp, Homo sapiens
caacaactggaacaa

SEQ ID NO: 1508967 - DNA, 15 bp, Homo sapiens
ccaacaactggaaca

SEQ ID NO: 1508968 - DNA, 15 bp, Homo sapiens
cccaacaactggaac

SEQ ID NO: 1508969 - DNA, 15 bp, Homo sapiens
tcccaacaactggaa

SEQ ID NO: 1508970 - DNA, 15 bp, Homo sapiens
ttcccaacaactgga

SEQ ID NO: 1508971 - DNA, 15 bp, Homo sapiens
attcccaacaactgg

SEQ ID NO: 1508972 - DNA, 15 bp, Homo sapiens
aattcccaacaactg

SEQ ID NO: 1508973 - DNA, 15 bp, Homo sapiens
taattcccaacaact

SEQ ID NO: 1508974 - DNA, 15 bp, Homo sapiens
ataattcccaacaac

SEQ ID NO: 1508975 - DNA, 15 bp, Homo sapiens
tataattcccaacaa

SEQ ID NO: 1508976 - DNA, 15 bp, Homo sapiens
ttataattcccaaca

SEQ ID NO: 1508977 - DNA, 15 bp, Homo sapiens
tttataattcccaac

SEQ ID NO: 1508978 - DNA, 15 bp, Homo sapiens
ttttataattcccaa

SEQ ID NO: 1508979 - DNA, 15 bp, Homo sapiens
gttttataattccca

SEQ ID NO: 1508980 - DNA, 15 bp, Homo sapiens
tgttttataattccc

SEQ ID NO: 1508981 - DNA, 15 bp, Homo sapiens
atgttttataattcc

SEQ ID NO: 1508982 - DNA, 15 bp, Homo sapiens
catgttttataattc

SEQ ID NO: 1508983 - DNA, 15 bp, Homo sapiens
gcatgttttataatt

SEQ ID NO: 1508984 - DNA, 15 bp, Homo sapiens
agcatgttttataat

SEQ ID NO: 1508985 - DNA, 15 bp, Homo sapiens
cagcatgttttataa

SEQ ID NO: 1508986 - DNA, 15 bp, Homo sapiens
gcagcatgttttata

SEQ ID NO: 1508987 - DNA, 15 bp, Homo sapiens
agcagcatgttttat

SEQ ID NO: 1508988 - DNA, 15 bp, Homo sapiens
cagcagcatgtttta

SEQ ID NO: 1508989 - DNA, 15 bp, Homo sapiens
acagcagcatgtttt

SEQ ID NO: 1508990 - DNA, 15 bp, Homo sapiens
tacagcagcatgttt

SEQ ID NO: 1508991 - DNA, 15 bp, Homo sapiens
ttacagcagcatgtt

SEQ ID NO: 1508992 - DNA, 15 bp, Homo sapiens
tttacagcagcatgt

SEQ ID NO: 1508993 - DNA, 15 bp, Homo sapiens
ttttacagcagcatg

SEQ ID NO: 1508994 - DNA, 15 bp, Homo sapiens
gttttacagcagcat

SEQ ID NO: 1508995 - DNA, 15 bp, Homo sapiens
tgttttacagcagca

SEQ ID NO: 1508996 - DNA, 15 bp, Homo sapiens
atgttttacagcagc

SEQ ID NO: 1508997 - DNA, 15 bp, Homo sapiens
aatgttttacagcag

SEQ ID NO: 1508998 - DNA, 15 bp, Homo sapiens
caatgttttacagca

SEQ ID NO: 1508999 - DNA, 15 bp, Homo sapiens
acaatgttttacagc

SEQ ID NO: 1509000 - DNA, 15 bp, Homo sapiens
aacaatgttttacag

SEQ ID NO: 1509001 - DNA, 15 bp, Homo sapiens
caacaatgttttaca

SEQ ID NO: 1509002 - DNA, 15 bp, Homo sapiens
acaacaatgttttac

SEQ ID NO: 1509003 - DNA, 15 bp, Homo sapiens
cacaacaatgtttta

SEQ ID NO: 1509004 - DNA, 15 bp, Homo sapiens
gcacaacaatgtttt

SEQ ID NO: 1509005 - DNA, 15 bp, Homo sapiens
tgcacaacaatgttt

SEQ ID NO: 1509006 - DNA, 15 bp, Homo sapiens
atgcacaacaatgtt

SEQ ID NO: 1509007 - DNA, 15 bp, Homo sapiens
catgcacaacaatgt

SEQ ID NO: 1509008 - DNA, 15 bp, Homo sapiens
acatgcacaacaatg

SEQ ID NO: 1509009 - DNA, 15 bp, Homo sapiens
gacatgcacaacaat

SEQ ID NO: 1509010 - DNA, 15 bp, Homo sapiens
agacatgcacaacaa

SEQ ID NO: 1509011 - DNA, 15 bp, Homo sapiens
aagacatgcacaaca

SEQ ID NO: 1509012 - DNA, 15 bp, Homo sapiens
aaagacatgcacaac

SEQ ID NO: 1509013 - DNA, 15 bp, Homo sapiens
aaaagacatgcacaa

SEQ ID NO: 1509014 - DNA, 15 bp, Homo sapiens
caaaagacatgcaca

SEQ ID NO: 1509015 - DNA, 15 bp, Homo sapiens
ccaaaagacatgcac

SEQ ID NO: 1509016 - DNA, 15 bp, Homo sapiens
accaaaagacatgca

SEQ ID NO: 1509017 - DNA, 15 bp, Homo sapiens
caccaaaagacatgc

SEQ ID NO: 1509018 - DNA, 15 bp, Homo sapiens
tcaccaaaagacatg

SEQ ID NO: 1509019 - DNA, 15 bp, Homo sapiens
ttcaccaaaagacat

SEQ ID NO: 1509020 - DNA, 15 bp, Homo sapiens
gttcaccaaaagaca

SEQ ID NO: 1509021 - DNA, 15 bp, Homo sapiens
tgttcaccaaaagac

SEQ ID NO: 1509022 - DNA, 15 bp, Homo sapiens
atgttcaccaaaaga

SEQ ID NO: 1509023 - DNA, 15 bp, Homo sapiens
tatgttcaccaaaag

SEQ ID NO: 1509024 - DNA, 15 bp, Homo sapiens
atatgttcaccaaaa

SEQ ID NO: 1509025 - DNA, 15 bp, Homo sapiens
tatatgttcaccaaa

SEQ ID NO: 1509026 - DNA, 15 bp, Homo sapiens
atatatgttcaccaa

SEQ ID NO: 1509027 - DNA, 15 bp, Homo sapiens
tatatatgttcacca

SEQ ID NO: 1509028 - DNA, 15 bp, Homo sapiens
gtatatatgttcacc

SEQ ID NO: 1509029 - DNA, 15 bp, Homo sapiens
tgtatatatgttcac

SEQ ID NO: 1509030 - DNA, 15 bp, Homo sapiens
atgtatatatgttca

SEQ ID NO: 1509031 - DNA, 15 bp, Homo sapiens
aatgtatatatgttc

SEQ ID NO: 1509032 - DNA, 15 bp, Homo sapiens
aaatgtatatatgtt

SEQ ID NO: 1509033 - DNA, 15 bp, Homo sapiens
gaaatgtatatatgt

SEQ ID NO: 1509034 - DNA, 15 bp, Homo sapiens
agaaatgtatatatg

SEQ ID NO: 1509035 - DNA, 15 bp, Homo sapiens
cagaaatgtatatat

SEQ ID NO: 1509036 - DNA, 15 bp, Homo sapiens
acagaaatgtatata

SEQ ID NO: 1509037 - DNA, 15 bp, Homo sapiens
aacagaaatgtatat

SEQ ID NO: 1509038 - DNA, 15 bp, Homo sapiens
caacagaaatgtata

SEQ ID NO: 1509039 - DNA, 15 bp, Homo sapiens
ccaacagaaatgtat

SEQ ID NO: 1509040 - DNA, 15 bp, Homo sapiens
cccaacagaaatgta

SEQ ID NO: 1509041 - DNA, 15 bp, Homo sapiens
acccaacagaaatgt

SEQ ID NO: 1509042 - DNA, 15 bp, Homo sapiens
tacccaacagaaatg

SEQ ID NO: 1509043 - DNA, 15 bp, Homo sapiens
atacccaacagaaat

SEQ ID NO: 1509044 - DNA, 15 bp, Homo sapiens
tatacccaacagaaa

SEQ ID NO: 1509045 - DNA, 15 bp, Homo sapiens
atatacccaacagaa

SEQ ID NO: 1509046 - DNA, 15 bp, Homo sapiens
tatatacccaacaga

SEQ ID NO: 1509047 - DNA, 15 bp, Homo sapiens
atatatacccaacag

SEQ ID NO: 1509048 - DNA, 15 bp, Homo sapiens
gatatatacccaaca

SEQ ID NO: 1509049 - DNA, 15 bp, Homo sapiens
agatatatacccaac

SEQ ID NO: 1509050 - DNA, 15 bp, Homo sapiens
tagatatatacccaa

SEQ ID NO: 1509051 - DNA, 15 bp, Homo sapiens
ctagatatataccca

SEQ ID NO: 1509052 - DNA, 15 bp, Homo sapiens
actagatatataccc

SEQ ID NO: 1509053 - DNA, 15 bp, Homo sapiens
cactagatatatacc

SEQ ID NO: 1509054 - DNA, 15 bp, Homo sapiens
tcactagatatatac

SEQ ID NO: 1509055 - DNA, 15 bp, Homo sapiens
ttcactagatatata

SEQ ID NO: 1509056 - DNA, 15 bp, Homo sapiens
tttcactagatatat

SEQ ID NO: 1509057 - DNA, 15 bp, Homo sapiens
atttcactagatata

SEQ ID NO: 1509058 - DNA, 15 bp, Homo sapiens
aatttcactagatat

SEQ ID NO: 1509059 - DNA, 15 bp, Homo sapiens
caatttcactagata

SEQ ID NO: 1509060 - DNA, 15 bp, Homo sapiens
gcaatttcactagat

SEQ ID NO: 1509061 - DNA, 15 bp, Homo sapiens
agcaatttcactaga

SEQ ID NO: 1509062 - DNA, 15 bp, Homo sapiens
cagcaatttcactag

SEQ ID NO: 1509063 - DNA, 15 bp, Homo sapiens
tcagcaatttcacta

SEQ ID NO: 1509064 - DNA, 15 bp, Homo sapiens
ttcagcaatttcact

SEQ ID NO: 1509065 - DNA, 15 bp, Homo sapiens
attcagcaatttcac

SEQ ID NO: 1509066 - DNA, 15 bp, Homo sapiens
cattcagcaatttca

SEQ ID NO: 1509067 - DNA, 15 bp, Homo sapiens
acattcagcaatttc

SEQ ID NO: 1509068 - DNA, 15 bp, Homo sapiens
cacattcagcaattt

SEQ ID NO: 1509069 - DNA, 15 bp, Homo sapiens
acacattcagcaatt

SEQ ID NO: 1509070 - DNA, 15 bp, Homo sapiens
cacacattcagcaat

SEQ ID NO: 1509071 - DNA, 15 bp, Homo sapiens
acacacattcagcaa

SEQ ID NO: 1509072 - DNA, 15 bp, Homo sapiens
cacacacattcagca

SEQ ID NO: 1509073 - DNA, 15 bp, Homo sapiens
acacacacattcagc

SEQ ID NO: 1509074 - DNA, 15 bp, Homo sapiens
cacacacacattcag

SEQ ID NO: 1509075 - DNA, 15 bp, Homo sapiens
acacacacacattca

SEQ ID NO: 1509076 - DNA, 15 bp, Homo sapiens
cacacacacacattc

SEQ ID NO: 1509077 - DNA, 15 bp, Homo sapiens
acacacacacacatt

SEQ ID NO: 1509078 - DNA, 15 bp, Homo sapiens
ctgaacacacacaca

SEQ ID NO: 1509079 - DNA, 15 bp, Homo sapiens
actgaacacacacac

SEQ ID NO: 1509080 - DNA, 15 bp, Homo sapiens
aactgaacacacaca

SEQ ID NO: 1509081 - DNA, 15 bp, Homo sapiens
aaactgaacacacac

SEQ ID NO: 1509082 - DNA, 15 bp, Homo sapiens
aaaactgaacacaca

SEQ ID NO: 1509083 - DNA, 15 bp, Homo sapiens
taaaactgaacacac

SEQ ID NO: 1509084 - DNA, 15 bp, Homo sapiens
ctaaaactgaacaca

SEQ ID NO: 1509085 - DNA, 15 bp, Homo sapiens
gctaaaactgaacac

SEQ ID NO: 1509086 - DNA, 15 bp, Homo sapiens
tgctaaaactgaaca

SEQ ID NO: 1509087 - DNA, 15 bp, Homo sapiens
ctgctaaaactgaac

SEQ ID NO: 1509088 - DNA, 15 bp, Homo sapiens
tctgctaaaactgaa

SEQ ID NO: 1509089 - DNA, 15 bp, Homo sapiens
atctgctaaaactga

SEQ ID NO: 1509090 - DNA, 15 bp, Homo sapiens
tatctgctaaaactg

SEQ ID NO: 1509091 - DNA, 15 bp, Homo sapiens
ttatctgctaaaact

SEQ ID NO: 1509092 - DNA, 15 bp, Homo sapiens
attatctgctaaaac

SEQ ID NO: 1509093 - DNA, 15 bp, Homo sapiens
cattatctgctaaaa

SEQ ID NO: 1509094 - DNA, 15 bp, Homo sapiens
gcattatctgctaaa

SEQ ID NO: 1509095 - DNA, 15 bp, Homo sapiens
ggcattatctgctaa

SEQ ID NO: 1509096 - DNA, 15 bp, Homo sapiens
tggcattatctgcta

SEQ ID NO: 1509097 - DNA, 15 bp, Homo sapiens
ctggcattatctgct

SEQ ID NO: 1509098 - DNA, 15 bp, Homo sapiens
actggcattatctgc

SEQ ID NO: 1509099 - DNA, 15 bp, Homo sapiens
aactggcattatctg

SEQ ID NO: 1509100 - DNA, 15 bp, Homo sapiens
aaactggcattatct

SEQ ID NO: 1509101 - DNA, 15 bp, Homo sapiens
gaaactggcattatc

SEQ ID NO: 1509102 - DNA, 15 bp, Homo sapiens
ggaaactggcattat

SEQ ID NO: 1509103 - DNA, 15 bp, Homo sapiens
tggaaactggcatta

SEQ ID NO: 1509104 - DNA, 15 bp, Homo sapiens
ttggaaactggcatt

SEQ ID NO: 1509105 - DNA, 15 bp, Homo sapiens
cttggaaactggcat

SEQ ID NO: 1509106 - DNA, 15 bp, Homo sapiens
ccttggaaactggca

SEQ ID NO: 1509107 - DNA, 15 bp, Homo sapiens
accttggaaactggc

SEQ ID NO: 1509108 - DNA, 15 bp, Homo sapiens
taccttggaaactgg

SEQ ID NO: 1509109 - DNA, 15 bp, Homo sapiens
ttaccttggaaactg

SEQ ID NO: 1509110 - DNA, 15 bp, Homo sapiens
cttaccttggaaact

SEQ ID NO: 1509111 - DNA, 15 bp, Homo sapiens
acttaccttggaaac

SEQ ID NO: 1509112 - DNA, 15 bp, Homo sapiens
tacttaccttggaaa

SEQ ID NO: 1509113 - DNA, 15 bp, Homo sapiens
gtacttaccttggaa

SEQ ID NO: 1509114 - DNA, 15 bp, Homo sapiens
agtacttaccttgga

SEQ ID NO: 1509115 - DNA, 15 bp, Homo sapiens
cagtacttaccttgg

SEQ ID NO: 1509116 - DNA, 15 bp, Homo sapiens
tcagtacttaccttg

SEQ ID NO: 1509117 - DNA, 15 bp, Homo sapiens
ctcagtacttacctt

SEQ ID NO: 1509118 - DNA, 15 bp, Homo sapiens
actcagtacttacct

SEQ ID NO: 1509119 - DNA, 15 bp, Homo sapiens
aactcagtacttacc

SEQ ID NO: 1509120 - DNA, 15 bp, Homo sapiens
taactcagtacttac

SEQ ID NO: 1509121 - DNA, 15 bp, Homo sapiens
gtaactcagtactta

SEQ ID NO: 1509122 - DNA, 15 bp, Homo sapiens
tgtaactcagtactt

SEQ ID NO: 1509123 - DNA, 15 bp, Homo sapiens
atgtaactcagtact

SEQ ID NO: 1509124 - DNA, 15 bp, Homo sapiens
catgtaactcagtac

SEQ ID NO: 1509125 - DNA, 15 bp, Homo sapiens
gcatgtaactcagta

SEQ ID NO: 1509126 - DNA, 15 bp, Homo sapiens
ggcatgtaactcagt

SEQ ID NO: 1509127 - DNA, 15 bp, Homo sapiens
aggcatgtaactcag

SEQ ID NO: 1509128 - DNA, 15 bp, Homo sapiens
taggcatgtaactca

SEQ ID NO: 1509129 - DNA, 15 bp, Homo sapiens
gtaggcatgtaactc

SEQ ID NO: 1509130 - DNA, 15 bp, Homo sapiens
agtaggcatgtaact

SEQ ID NO: 1509131 - DNA, 15 bp, Homo sapiens
tagtaggcatgtaac

SEQ ID NO: 1509132 - DNA, 15 bp, Homo sapiens
ctagtaggcatgtaa

SEQ ID NO: 1509133 - DNA, 15 bp, Homo sapiens
actagtaggcatgta

SEQ ID NO: 1509134 - DNA, 15 bp, Homo sapiens
tactagtaggcatgt

SEQ ID NO: 1509135 - DNA, 15 bp, Homo sapiens
ctactagtaggcatg

SEQ ID NO: 1509136 - DNA, 15 bp, Homo sapiens
gctactagtaggcat

SEQ ID NO: 1509137 - DNA, 15 bp, Homo sapiens
agctactagtaggca

SEQ ID NO: 1509138 - DNA, 15 bp, Homo sapiens
gagctactagtaggc

SEQ ID NO: 1509139 - DNA, 15 bp, Homo sapiens
ggagctactagtagg

SEQ ID NO: 1509140 - DNA, 15 bp, Homo sapiens
aggagctactagtag

SEQ ID NO: 1509141 - DNA, 15 bp, Homo sapiens
taggagctactagta

SEQ ID NO: 1509142 - DNA, 15 bp, Homo sapiens
ttaggagctactagt

SEQ ID NO: 1509143 - DNA, 15 bp, Homo sapiens
cttaggagctactag

SEQ ID NO: 1509144 - DNA, 15 bp, Homo sapiens
tcttaggagctacta

SEQ ID NO: 1509145 - DNA, 15 bp, Homo sapiens
atcttaggagctact

SEQ ID NO: 1509146 - DNA, 15 bp, Homo sapiens
aatcttaggagctac

SEQ ID NO: 1509147 - DNA, 15 bp, Homo sapiens
aaatcttaggagcta

SEQ ID NO: 1509148 - DNA, 15 bp, Homo sapiens
gaaatcttaggagct

SEQ ID NO: 1509149 - DNA, 15 bp, Homo sapiens
ggaaatcttaggagc

SEQ ID NO: 1509150 - DNA, 15 bp, Homo sapiens
tggaaatcttaggag

SEQ ID NO: 1509151 - DNA, 15 bp, Homo sapiens
ctggaaatcttagga

SEQ ID NO: 1509152 - DNA, 15 bp, Homo sapiens
actggaaatcttagg

SEQ ID NO: 1509153 - DNA, 15 bp, Homo sapiens
aactggaaatcttag

SEQ ID NO: 1509154 - DNA, 15 bp, Homo sapiens
caactggaaatctta

SEQ ID NO: 1509155 - DNA, 15 bp, Homo sapiens
gcaactggaaatctt

SEQ ID NO: 1509156 - DNA, 15 bp, Homo sapiens
agcaactggaaatct

SEQ ID NO: 1509157 - DNA, 15 bp, Homo sapiens
cagcaactggaaatc

SEQ ID NO: 1509158 - DNA, 15 bp, Homo sapiens
acagcaactggaaat

SEQ ID NO: 1509159 - DNA, 15 bp, Homo sapiens
tacagcaactggaaa

SEQ ID NO: 1509160 - DNA, 15 bp, Homo sapiens
ttacagcaactggaa

SEQ ID NO: 1509161 - DNA, 15 bp, Homo sapiens
attacagcaactgga

SEQ ID NO: 1509162 - DNA, 15 bp, Homo sapiens
aattacagcaactgg

SEQ ID NO: 1509163 - DNA, 15 bp, Homo sapiens
aaattacagcaactg

SEQ ID NO: 1509164 - DNA, 15 bp, Homo sapiens
caaattacagcaact

SEQ ID NO: 1509165 - DNA, 15 bp, Homo sapiens
gcaaattacagcaac

SEQ ID NO: 1509166 - DNA, 15 bp, Homo sapiens
agcaaattacagcaa

SEQ ID NO: 1509167 - DNA, 15 bp, Homo sapiens
gagcaaattacagca

SEQ ID NO: 1509168 - DNA, 15 bp, Homo sapiens
ggagcaaattacagc

SEQ ID NO: 1509169 - DNA, 15 bp, Homo sapiens
aggagcaaattacag

SEQ ID NO: 1509170 - DNA, 15 bp, Homo sapiens
caggagcaaattaca

SEQ ID NO: 1509171 - DNA, 15 bp, Homo sapiens
acaggagcaaattac

SEQ ID NO: 1509172 - DNA, 15 bp, Homo sapiens
aacaggagcaaatta

SEQ ID NO: 1509173 - DNA, 15 bp, Homo sapiens
aaacaggagcaaatt

SEQ ID NO: 1509174 - DNA, 15 bp, Homo sapiens
caaacaggagcaaat

SEQ ID NO: 1509175 - DNA, 15 bp, Homo sapiens
acaaacaggagcaaa

SEQ ID NO: 1509176 - DNA, 15 bp, Homo sapiens
tacaaacaggagcaa

SEQ ID NO: 1509177 - DNA, 15 bp, Homo sapiens
ctacaaacaggagca

SEQ ID NO: 1509178 - DNA, 15 bp, Homo sapiens
tctacaaacaggagc

SEQ ID NO: 1509179 - DNA, 15 bp, Homo sapiens
ttctacaaacaggag

SEQ ID NO: 1509180 - DNA, 15 bp, Homo sapiens
cttctacaaacagga

SEQ ID NO: 1509181 - DNA, 15 bp, Homo sapiens
tcttctacaaacagg

SEQ ID NO: 1509182 - DNA, 15 bp, Homo sapiens
gtcttctacaaacag

SEQ ID NO: 1509183 - DNA, 15 bp, Homo sapiens
tgtcttctacaaaca

SEQ ID NO: 1509184 - DNA, 15 bp, Homo sapiens
gtgtcttctacaaac

SEQ ID NO: 1509185 - DNA, 15 bp, Homo sapiens
tgtgtcttctacaaa

SEQ ID NO: 1509186 - DNA, 15 bp, Homo sapiens
ctgtgtcttctacaa

SEQ ID NO: 1509187 - DNA, 15 bp, Homo sapiens
gctgtgtcttctaca

SEQ ID NO: 1509188 - DNA, 15 bp, Homo sapiens
ggctgtgtcttctac

SEQ ID NO: 1509189 - DNA, 15 bp, Homo sapiens
aggctgtgtcttcta

SEQ ID NO: 1509190 - DNA, 15 bp, Homo sapiens
aaggctgtgtcttct

SEQ ID NO: 1509191 - DNA, 15 bp, Homo sapiens
gaaggctgtgtcttc

SEQ ID NO: 1509192 - DNA, 15 bp, Homo sapiens
cgaaggctgtgtctt

SEQ ID NO: 1509193 - DNA, 15 bp, Homo sapiens
tcgaaggctgtgtct

SEQ ID NO: 1509194 - DNA, 15 bp, Homo sapiens
ctcgaaggctgtgtc

SEQ ID NO: 1509195 - DNA, 15 bp, Homo sapiens
cctcgaaggctgtgt

SEQ ID NO: 1509196 - DNA, 15 bp, Homo sapiens
ccctcgaaggctgtg

SEQ ID NO: 1509197 - DNA, 15 bp, Homo sapiens
gccctcgaaggctgt

SEQ ID NO: 1509198 - DNA, 15 bp, Homo sapiens
agccctcgaaggctg

SEQ ID NO: 1509199 - DNA, 15 bp, Homo sapiens
aagccctcgaaggct

SEQ ID NO: 1509200 - DNA, 15 bp, Homo sapiens
taagccctcgaaggc

SEQ ID NO: 1509201 - DNA, 15 bp, Homo sapiens
ataagccctcgaagg

SEQ ID NO: 1509202 - DNA, 15 bp, Homo sapiens
gataagccctcgaag

SEQ ID NO: 1509203 - DNA, 15 bp, Homo sapiens
tgataagccctcgaa

SEQ ID NO: 1509204 - DNA, 15 bp, Homo sapiens
gtgataagccctcga

SEQ ID NO: 1509205 - DNA, 15 bp, Homo sapiens
agtgataagccctcg

SEQ ID NO: 1509206 - DNA, 15 bp, Homo sapiens
cagtgataagccctc

SEQ ID NO: 1509207 - DNA, 15 bp, Homo sapiens
tcagtgataagccct

SEQ ID NO: 1509208 - DNA, 15 bp, Homo sapiens
ctcagtgataagccc

SEQ ID NO: 1509209 - DNA, 15 bp, Homo sapiens
tctcagtgataagcc

SEQ ID NO: 1509210 - DNA, 15 bp, Homo sapiens
ttctcagtgataagc

SEQ ID NO: 1509211 - DNA, 15 bp, Homo sapiens
gttctcagtgataag

SEQ ID NO: 1509212 - DNA, 15 bp, Homo sapiens
agttctcagtgataa

SEQ ID NO: 1509213 - DNA, 15 bp, Homo sapiens
cagttctcagtgata

SEQ ID NO: 1509214 - DNA, 15 bp, Homo sapiens
acagttctcagtgat

SEQ ID NO: 1509215 - DNA, 15 bp, Homo sapiens
tacagttctcagtga

SEQ ID NO: 1509216 - DNA, 15 bp, Homo sapiens
atacagttctcagtg

SEQ ID NO: 1509217 - DNA, 15 bp, Homo sapiens
aatacagttctcagt

SEQ ID NO: 1509218 - DNA, 15 bp, Homo sapiens
aaatacagttctcag

SEQ ID NO: 1509219 - DNA, 15 bp, Homo sapiens
taaatacagttctca

SEQ ID NO: 1509220 - DNA, 15 bp, Homo sapiens
gtaaatacagttctc

SEQ ID NO: 1509221 - DNA, 15 bp, Homo sapiens
agtaaatacagttct

SEQ ID NO: 1509222 - DNA, 15 bp, Homo sapiens
tagtaaatacagttc

SEQ ID NO: 1509223 - DNA, 15 bp, Homo sapiens
ttagtaaatacagtt

SEQ ID NO: 1509224 - DNA, 15 bp, Homo sapiens
cttagtaaatacagt

SEQ ID NO: 1509225 - DNA, 15 bp, Homo sapiens
ccttagtaaatacag

SEQ ID NO: 1509226 - DNA, 15 bp, Homo sapiens
accttagtaaataca

SEQ ID NO: 1509227 - DNA, 15 bp, Homo sapiens
gaccttagtaaatac

SEQ ID NO: 1509228 - DNA, 15 bp, Homo sapiens
agaccttagtaaata

SEQ ID NO: 1509229 - DNA, 15 bp, Homo sapiens
gagaccttagtaaat

SEQ ID NO: 1509230 - DNA, 15 bp, Homo sapiens
ggagaccttagtaaa

SEQ ID NO: 1509231 - DNA, 15 bp, Homo sapiens
tggagaccttagtaa

SEQ ID NO: 1509232 - DNA, 15 bp, Homo sapiens
gtggagaccttagta

SEQ ID NO: 1509233 - DNA, 15 bp, Homo sapiens
agtggagaccttagt

SEQ ID NO: 1509234 - DNA, 15 bp, Homo sapiens
tagtggagaccttag

SEQ ID NO: 1509235 - DNA, 15 bp, Homo sapiens
ctagtggagacctta

SEQ ID NO: 1509236 - DNA, 15 bp, Homo sapiens
gctagtggagacctt

SEQ ID NO: 1509237 - DNA, 15 bp, Homo sapiens
tgctagtggagacct

SEQ ID NO: 1509238 - DNA, 15 bp, Homo sapiens
ctgctagtggagacc

SEQ ID NO: 1509239 - DNA, 15 bp, Homo sapiens
tctgctagtggagac

SEQ ID NO: 1509240 - DNA, 15 bp, Homo sapiens
atctgctagtggaga

SEQ ID NO: 1509241 - DNA, 15 bp, Homo sapiens
aatctgctagtggag

SEQ ID NO: 1509242 - DNA, 15 bp, Homo sapiens
gaatctgctagtgga

SEQ ID NO: 1509243 - DNA, 15 bp, Homo sapiens
agaatctgctagtgg

SEQ ID NO: 1509244 - DNA, 15 bp, Homo sapiens
cagaatctgctagtg

SEQ ID NO: 1509245 - DNA, 15 bp, Homo sapiens
tcagaatctgctagt

SEQ ID NO: 1509246 - DNA, 15 bp, Homo sapiens
ttcagaatctgctag

SEQ ID NO: 1509247 - DNA, 15 bp, Homo sapiens
gttcagaatctgcta

SEQ ID NO: 1509248 - DNA, 15 bp, Homo sapiens
agttcagaatctgct

SEQ ID NO: 1509249 - DNA, 15 bp, Homo sapiens
gagttcagaatctgc

SEQ ID NO: 1509250 - DNA, 15 bp, Homo sapiens
agagttcagaatctg

SEQ ID NO: 1509251 - DNA, 15 bp, Homo sapiens
aagagttcagaatct

SEQ ID NO: 1509252 - DNA, 15 bp, Homo sapiens
aaagagttcagaatc

SEQ ID NO: 1509253 - DNA, 15 bp, Homo sapiens
aaaagagttcagaat

SEQ ID NO: 1509254 - DNA, 15 bp, Homo sapiens
caaaagagttcagaa

SEQ ID NO: 1509255 - DNA, 15 bp, Homo sapiens
acaaaagagttcaga

SEQ ID NO: 1509256 - DNA, 15 bp, Homo sapiens
gacaaaagagttcag

SEQ ID NO: 1509257 - DNA, 15 bp, Homo sapiens
ggacaaaagagttca

SEQ ID NO: 1509258 - DNA, 15 bp, Homo sapiens
aggacaaaagagttc

SEQ ID NO: 1509259 - DNA, 15 bp, Homo sapiens
gaggacaaaagagtt

SEQ ID NO: 1509260 - DNA, 15 bp, Homo sapiens
agaggacaaaagagt

SEQ ID NO: 1509261 - DNA, 15 bp, Homo sapiens
gagaggacaaaagag

SEQ ID NO: 1509262 - DNA, 15 bp, Homo sapiens
cgagaggacaaaaga

SEQ ID NO: 1509263 - DNA, 15 bp, Homo sapiens
tcgagaggacaaaag

SEQ ID NO: 1509264 - DNA, 15 bp, Homo sapiens
ttcgagaggacaaaa

SEQ ID NO: 1509265 - DNA, 15 bp, Homo sapiens
cttcgagaggacaaa

SEQ ID NO: 1509266 - DNA, 15 bp, Homo sapiens
gcttcgagaggacaa

SEQ ID NO: 1509267 - DNA, 15 bp, Homo sapiens
agcttcgagaggaca

SEQ ID NO: 1509268 - DNA, 15 bp, Homo sapiens
cagcttcgagaggac

SEQ ID NO: 1509269 - DNA, 15 bp, Homo sapiens
gcagcttcgagagga

SEQ ID NO: 1509270 - DNA, 15 bp, Homo sapiens
tgcagcttcgagagg

SEQ ID NO: 1509271 - DNA, 15 bp, Homo sapiens
ttgcagcttcgagag

SEQ ID NO: 1509272 - DNA, 15 bp, Homo sapiens
cttgcagcttcgaga

SEQ ID NO: 1509273 - DNA, 15 bp, Homo sapiens
ccttgcagcttcgag

SEQ ID NO: 1509274 - DNA, 15 bp, Homo sapiens
gccttgcagcttcga

SEQ ID NO: 1509275 - DNA, 15 bp, Homo sapiens
agccttgcagcttcg

SEQ ID NO: 1509276 - DNA, 15 bp, Homo sapiens
aagccttgcagcttc

SEQ ID NO: 1509277 - DNA, 15 bp, Homo sapiens
aaagccttgcagctt

SEQ ID NO: 1509278 - DNA, 15 bp, Homo sapiens
gaaagccttgcagct

SEQ ID NO: 1509279 - DNA, 15 bp, Homo sapiens
tgaaagccttgcagc

SEQ ID NO: 1509280 - DNA, 15 bp, Homo sapiens
ttgaaagccttgcag

SEQ ID NO: 1509281 - DNA, 15 bp, Homo sapiens
tttgaaagccttgca

SEQ ID NO: 1509282 - DNA, 15 bp, Homo sapiens
atttgaaagccttgc

SEQ ID NO: 1509283 - DNA, 15 bp, Homo sapiens
aatttgaaagccttg

SEQ ID NO: 1509284 - DNA, 15 bp, Homo sapiens
gaatttgaaagcctt

SEQ ID NO: 1509285 - DNA, 15 bp, Homo sapiens
agaatttgaaagcct

SEQ ID NO: 1509286 - DNA, 15 bp, Homo sapiens
cagaatttgaaagcc

SEQ ID NO: 1509287 - DNA, 15 bp, Homo sapiens
gcagaatttgaaagc

SEQ ID NO: 1509288 - DNA, 15 bp, Homo sapiens
agcagaatttgaaag

SEQ ID NO: 1509289 - DNA, 15 bp, Homo sapiens
aagcagaatttgaaa

SEQ ID NO: 1509290 - DNA, 15 bp, Homo sapiens
aaagcagaatttgaa

SEQ ID NO: 1509291 - DNA, 15 bp, Homo sapiens
caaagcagaatttga

SEQ ID NO: 1509292 - DNA, 15 bp, Homo sapiens
gcaaagcagaatttg

SEQ ID NO: 1509293 - DNA, 15 bp, Homo sapiens
agcaaagcagaattt

SEQ ID NO: 1509294 - DNA, 15 bp, Homo sapiens
aagcaaagcagaatt

SEQ ID NO: 1509295 - DNA, 15 bp, Homo sapiens
aaagcaaagcagaat

SEQ ID NO: 1509296 - DNA, 15 bp, Homo sapiens
aaaagcaaagcagaa

SEQ ID NO: 1509297 - DNA, 15 bp, Homo sapiens
gaaaagcaaagcaga

SEQ ID NO: 1509298 - DNA, 15 bp, Homo sapiens
tgaaaagcaaagcag

SEQ ID NO: 1509299 - DNA, 15 bp, Homo sapiens
ctgaaaagcaaagca

SEQ ID NO: 1509300 - DNA, 15 bp, Homo sapiens
tctgaaaagcaaagc

SEQ ID NO: 1509301 - DNA, 15 bp, Homo sapiens
cttctgaaaagcaaa

SEQ ID NO: 1509302 - DNA, 15 bp, Homo sapiens
acttctgaaaagcaa

SEQ ID NO: 1509303 - DNA, 15 bp, Homo sapiens
aacttctgaaaagca

SEQ ID NO: 1509304 - DNA, 15 bp, Homo sapiens
aaacttctgaaaagc

SEQ ID NO: 1509305 - DNA, 15 bp, Homo sapiens
aaaacttctgaaaag

SEQ ID NO: 1509306 - DNA, 15 bp, Homo sapiens
taaaaacttctgaaa

SEQ ID NO: 1509307 - DNA, 15 bp, Homo sapiens
ctaaaaacttctgaa

SEQ ID NO: 1509308 - DNA, 15 bp, Homo sapiens
actaaaaacttctga

SEQ ID NO: 1509309 - DNA, 15 bp, Homo sapiens
aactaaaaacttctg

SEQ ID NO: 1509310 - DNA, 15 bp, Homo sapiens
aaactaaaaacttct

SEQ ID NO: 1509311 - DNA, 15 bp, Homo sapiens
taaactaaaaacttc

SEQ ID NO: 1509312 - DNA, 15 bp, Homo sapiens
ctaaactaaaaactt

SEQ ID NO: 1509313 - DNA, 15 bp, Homo sapiens
gctaaactaaaaact

SEQ ID NO: 1509314 - DNA, 15 bp, Homo sapiens
ggctaaactaaaaac

SEQ ID NO: 1509315 - DNA, 15 bp, Homo sapiens
aggctaaactaaaaa

SEQ ID NO: 1509316 - DNA, 15 bp, Homo sapiens
aaggctaaactaaaa

SEQ ID NO: 1509317 - DNA, 15 bp, Homo sapiens
aaaggctaaactaaa

SEQ ID NO: 1509318 - DNA, 15 bp, Homo sapiens
aaaaggctaaactaa

SEQ ID NO: 1509319 - DNA, 15 bp, Homo sapiens
aaaaaggctaaacta

SEQ ID NO: 1509320 - DNA, 15 bp, Homo sapiens
taaaaaggctaaact

SEQ ID NO: 1509321 - DNA, 15 bp, Homo sapiens
gtaaaaaggctaaac

SEQ ID NO: 1509322 - DNA, 15 bp, Homo sapiens
ggtaaaaaggctaaa

SEQ ID NO: 1509323 - DNA, 15 bp, Homo sapiens
gggtaaaaaggctaa

SEQ ID NO: 1509324 - DNA, 15 bp, Homo sapiens
agggtaaaaaggcta

SEQ ID NO: 1509325 - DNA, 15 bp, Homo sapiens
gagggtaaaaaggct

SEQ ID NO: 1509326 - DNA, 15 bp, Homo sapiens
agagggtaaaaaggc

SEQ ID NO: 1509327 - DNA, 15 bp, Homo sapiens
aagagggtaaaaagg

SEQ ID NO: 1509328 - DNA, 15 bp, Homo sapiens
gaagagggtaaaaag

SEQ ID NO: 1509329 - DNA, 15 bp, Homo sapiens
ggaagagggtaaaaa

SEQ ID NO: 1509330 - DNA, 15 bp, Homo sapiens
tggaagagggtaaaa

SEQ ID NO: 1509331 - DNA, 15 bp, Homo sapiens
gtggaagagggtaaa

SEQ ID NO: 1509332 - DNA, 15 bp, Homo sapiens
agtggaagagggtaa

SEQ ID NO: 1509333 - DNA, 15 bp, Homo sapiens
gagtggaagagggta

SEQ ID NO: 1509334 - DNA, 15 bp, Homo sapiens
tgagtggaagagggt

SEQ ID NO: 1509335 - DNA, 15 bp, Homo sapiens
gtgagtggaagaggg

SEQ ID NO: 1509336 - DNA, 15 bp, Homo sapiens
agtgagtggaagagg

SEQ ID NO: 1509337 - DNA, 15 bp, Homo sapiens
cagtgagtggaagag

SEQ ID NO: 1509338 - DNA, 15 bp, Homo sapiens
tcagtgagtggaaga

SEQ ID NO: 1509339 - DNA, 15 bp, Homo sapiens
ctcagtgagtggaag

SEQ ID NO: 1509340 - DNA, 15 bp, Homo sapiens
cctcagtgagtggaa

SEQ ID NO: 1509341 - DNA, 15 bp, Homo sapiens
gcctcagtgagtgga

SEQ ID NO: 1509342 - DNA, 15 bp, Homo sapiens
tgcctcagtgagtgg

SEQ ID NO: 1509343 - DNA, 15 bp, Homo sapiens
atgcctcagtgagtg

SEQ ID NO: 1509344 - DNA, 15 bp, Homo sapiens
aatgcctcagtgagt

SEQ ID NO: 1509345 - DNA, 15 bp, Homo sapiens
aaatgcctcagtgag

SEQ ID NO: 1509346 - DNA, 15 bp, Homo sapiens
caaatgcctcagtga

SEQ ID NO: 1509347 - DNA, 15 bp, Homo sapiens
tcaaatgcctcagtg

SEQ ID NO: 1509348 - DNA, 15 bp, Homo sapiens
ctcaaatgcctcagt

SEQ ID NO: 1509349 - DNA, 15 bp, Homo sapiens
tctcaaatgcctcag

SEQ ID NO: 1509350 - DNA, 15 bp, Homo sapiens
atctcaaatgcctca

SEQ ID NO: 1509351 - DNA, 15 bp, Homo sapiens
aatctcaaatgcctc

SEQ ID NO: 1509352 - DNA, 15 bp, Homo sapiens
gaatctcaaatgcct

SEQ ID NO: 1509353 - DNA, 15 bp, Homo sapiens
ggaatctcaaatgcc

SEQ ID NO: 1509354 - DNA, 15 bp, Homo sapiens
gggaatctcaaatgc

SEQ ID NO: 1509355 - DNA, 15 bp, Homo sapiens
agggaatctcaaatg

SEQ ID NO: 1509356 - DNA, 15 bp, Homo sapiens
gagggaatctcaaat

SEQ ID NO: 1509357 - DNA, 15 bp, Homo sapiens
tgagggaatctcaaa

SEQ ID NO: 1509358 - DNA, 15 bp, Homo sapiens
gtgagggaatctcaa

SEQ ID NO: 1509359 - DNA, 15 bp, Homo sapiens
cgtgagggaatctca

SEQ ID NO: 1509360 - DNA, 15 bp, Homo sapiens
acgtgagggaatctc

SEQ ID NO: 1509361 - DNA, 15 bp, Homo sapiens
gacgtgagggaatct

SEQ ID NO: 1509362 - DNA, 15 bp, Homo sapiens
agacgtgagggaatc

SEQ ID NO: 1509363 - DNA, 15 bp, Homo sapiens
aagacgtgagggaat

SEQ ID NO: 1509364 - DNA, 15 bp, Homo sapiens
gaagacgtgagggaa

SEQ ID NO: 1509365 - DNA, 15 bp, Homo sapiens
tgaagacgtgaggga

SEQ ID NO: 1509366 - DNA, 15 bp, Homo sapiens
ctgaagacgtgaggg

SEQ ID NO: 1509367 - DNA, 15 bp, Homo sapiens
actgaagacgtgagg

SEQ ID NO: 1509368 - DNA, 15 bp, Homo sapiens
aactgaagacgtgag

SEQ ID NO: 1509369 - DNA, 15 bp, Homo sapiens
aaactgaagacgtga

SEQ ID NO: 1509370 - DNA, 15 bp, Homo sapiens
aaaactgaagacgtg

SEQ ID NO: 1509371 - DNA, 15 bp, Homo sapiens
caaaactgaagacgt

SEQ ID NO: 1509372 - DNA, 15 bp, Homo sapiens
gcaaaactgaagacg

SEQ ID NO: 1509373 - DNA, 15 bp, Homo sapiens
ggcaaaactgaagac

SEQ ID NO: 1509374 - DNA, 15 bp, Homo sapiens
tggcaaaactgaaga

SEQ ID NO: 1509375 - DNA, 15 bp, Homo sapiens
ttggcaaaactgaag

SEQ ID NO: 1509376 - DNA, 15 bp, Homo sapiens
attggcaaaactgaa

SEQ ID NO: 1509377 - DNA, 15 bp, Homo sapiens
gattggcaaaactga

SEQ ID NO: 1509378 - DNA, 15 bp, Homo sapiens
agattggcaaaactg

SEQ ID NO: 1509379 - DNA, 15 bp, Homo sapiens
tagattggcaaaact

SEQ ID NO: 1509380 - DNA, 15 bp, Homo sapiens
ctagattggcaaaac

SEQ ID NO: 1509381 - DNA, 15 bp, Homo sapiens
gctagattggcaaaa

SEQ ID NO: 1509382 - DNA, 15 bp, Homo sapiens
ggctagattggcaaa

SEQ ID NO: 1509383 - DNA, 15 bp, Homo sapiens
gggctagattggcaa

SEQ ID NO: 1509384 - DNA, 15 bp, Homo sapiens
agggctagattggca

SEQ ID NO: 1509385 - DNA, 15 bp, Homo sapiens
gagggctagattggc

SEQ ID NO: 1509386 - DNA, 15 bp, Homo sapiens
tgagggctagattgg

SEQ ID NO: 1509387 - DNA, 15 bp, Homo sapiens
ctgagggctagattg

SEQ ID NO: 1509388 - DNA, 15 bp, Homo sapiens
actgagggctagatt

SEQ ID NO: 1509389 - DNA, 15 bp, Homo sapiens
cactgagggctagat

SEQ ID NO: 1509390 - DNA, 15 bp, Homo sapiens
tcactgagggctaga

SEQ ID NO: 1509391 - DNA, 15 bp, Homo sapiens
ttcactgagggctag

SEQ ID NO: 1509392 - DNA, 15 bp, Homo sapiens
gttcactgagggcta

SEQ ID NO: 1509393 - DNA, 15 bp, Homo sapiens
tgttcactgagggct

SEQ ID NO: 1509394 - DNA, 15 bp, Homo sapiens
gtgttcactgagggc

SEQ ID NO: 1509395 - DNA, 15 bp, Homo sapiens
ggtgttcactgaggg

SEQ ID NO: 1509396 - DNA, 15 bp, Homo sapiens
tggtgttcactgagg

SEQ ID NO: 1509397 - DNA, 15 bp, Homo sapiens
ctggtgttcactgag

SEQ ID NO: 1509398 - DNA, 15 bp, Homo sapiens
tctggtgttcactga

SEQ ID NO: 1509399 - DNA, 15 bp, Homo sapiens
ttctggtgttcactg

SEQ ID NO: 1509400 - DNA, 15 bp, Homo sapiens
attctggtgttcact

SEQ ID NO: 1509401 - DNA, 15 bp, Homo sapiens
gattctggtgttcac

SEQ ID NO: 1509402 - DNA, 15 bp, Homo sapiens
agattctggtgttca

SEQ ID NO: 1509403 - DNA, 15 bp, Homo sapiens
gagattctggtgttc

SEQ ID NO: 1509404 - DNA, 15 bp, Homo sapiens
agagattctggtgtt

SEQ ID NO: 1509405 - DNA, 15 bp, Homo sapiens
cagagattctggtgt

SEQ ID NO: 1509406 - DNA, 15 bp, Homo sapiens
tcagagattctggtg

SEQ ID NO: 1509407 - DNA, 15 bp, Homo sapiens
atcagagattctggt

SEQ ID NO: 1509408 - DNA, 15 bp, Homo sapiens
catcagagattctgg

SEQ ID NO: 1509409 - DNA, 15 bp, Homo sapiens
ccatcagagattctg

SEQ ID NO: 1509410 - DNA, 15 bp, Homo sapiens
accatcagagattct

SEQ ID NO: 1509411 - DNA, 15 bp, Homo sapiens
aaccatcagagattc

SEQ ID NO: 1509412 - DNA, 15 bp, Homo sapiens
aaaccatcagagatt

SEQ ID NO: 1509413 - DNA, 15 bp, Homo sapiens
gaaaccatcagagat

SEQ ID NO: 1509414 - DNA, 15 bp, Homo sapiens
agaaaccatcagaga

SEQ ID NO: 1509415 - DNA, 15 bp, Homo sapiens
aagaaaccatcagag

SEQ ID NO: 1509416 - DNA, 15 bp, Homo sapiens
gaagaaaccatcaga

SEQ ID NO: 1509417 - DNA, 15 bp, Homo sapiens
agaagaaaccatcag

SEQ ID NO: 1509418 - DNA, 15 bp, Homo sapiens
aagaagaaaccatca

SEQ ID NO: 1509419 - DNA, 15 bp, Homo sapiens
gaagaagaaaccatc

SEQ ID NO: 1509420 - DNA, 15 bp, Homo sapiens
ggaagaagaaaccat

SEQ ID NO: 1509421 - DNA, 15 bp, Homo sapiens
tggaagaagaaacca

SEQ ID NO: 1509422 - DNA, 15 bp, Homo sapiens
atggaagaagaaacc

SEQ ID NO: 1509423 - DNA, 15 bp, Homo sapiens
aatggaagaagaaac

SEQ ID NO: 1509424 - DNA, 15 bp, Homo sapiens
taatggaagaagaaa

SEQ ID NO: 1509425 - DNA, 15 bp, Homo sapiens
ctaatggaagaagaa

SEQ ID NO: 1509426 - DNA, 15 bp, Homo sapiens
tctaatggaagaaga

SEQ ID NO: 1509427 - DNA, 15 bp, Homo sapiens
ctctaatggaagaag

SEQ ID NO: 1509428 - DNA, 15 bp, Homo sapiens
cctctaatggaagaa

SEQ ID NO: 1509429 - DNA, 15 bp, Homo sapiens
acctctaatggaaga

SEQ ID NO: 1509430 - DNA, 15 bp, Homo sapiens
tacctctaatggaag

SEQ ID NO: 1509431 - DNA, 15 bp, Homo sapiens
gtacctctaatggaa

SEQ ID NO: 1509432 - DNA, 15 bp, Homo sapiens
tgtacctctaatgga

SEQ ID NO: 1509433 - DNA, 15 bp, Homo sapiens
atgtacctctaatgg

SEQ ID NO: 1509434 - DNA, 15 bp, Homo sapiens
aatgtacctctaatg

SEQ ID NO: 1509435 - DNA, 15 bp, Homo sapiens
caatgtacctctaat

SEQ ID NO: 1509436 - DNA, 15 bp, Homo sapiens
gcaatgtacctctaa

SEQ ID NO: 1509437 - DNA, 15 bp, Homo sapiens
ggcaatgtacctcta

SEQ ID NO: 1509438 - DNA, 15 bp, Homo sapiens
aggcaatgtacctct

SEQ ID NO: 1509439 - DNA, 15 bp, Homo sapiens
caggcaatgtacctc

SEQ ID NO: 1509440 - DNA, 15 bp, Homo sapiens
ccaggcaatgtacct

SEQ ID NO: 1509441 - DNA, 15 bp, Homo sapiens
cccaggcaatgtacc

SEQ ID NO: 1509442 - DNA, 15 bp, Homo sapiens
tcccaggcaatgtac

SEQ ID NO: 1509443 - DNA, 15 bp, Homo sapiens
ttcccaggcaatgta

SEQ ID NO: 1509444 - DNA, 15 bp, Homo sapiens
tttcccaggcaatgt

SEQ ID NO: 1509445 - DNA, 15 bp, Homo sapiens
ttttcccaggcaatg

SEQ ID NO: 1509446 - DNA, 15 bp, Homo sapiens
tttttcccaggcaat

SEQ ID NO: 1509447 - DNA, 15 bp, Homo sapiens
ttttttcccaggcaa

SEQ ID NO: 1509448 - DNA, 15 bp, Homo sapiens
cttttttcccaggca

SEQ ID NO: 1509449 - DNA, 15 bp, Homo sapiens
gcttttttcccaggc

SEQ ID NO: 1509450 - DNA, 15 bp, Homo sapiens
ggcttttttcccagg

SEQ ID NO: 1509451 - DNA, 15 bp, Homo sapiens
aggcttttttcccag

SEQ ID NO: 1509452 - DNA, 15 bp, Homo sapiens
aaggcttttttccca

SEQ ID NO: 1509453 - DNA, 15 bp, Homo sapiens
taaggcttttttccc

SEQ ID NO: 1509454 - DNA, 15 bp, Homo sapiens
ataaggcttttttcc

SEQ ID NO: 1509455 - DNA, 15 bp, Homo sapiens
aataaggcttttttc

SEQ ID NO: 1509456 - DNA, 15 bp, Homo sapiens
aaataaggctttttt

SEQ ID NO: 1509457 - DNA, 15 bp, Homo sapiens
gaaataaggcttttt

SEQ ID NO: 1509458 - DNA, 15 bp, Homo sapiens
agaaataaggctttt

SEQ ID NO: 1509459 - DNA, 15 bp, Homo sapiens
gagaaataaggcttt

SEQ ID NO: 1509460 - DNA, 15 bp, Homo sapiens
tgagaaataaggctt

SEQ ID NO: 1509461 - DNA, 15 bp, Homo sapiens
ttgagaaataaggct

SEQ ID NO: 1509462 - DNA, 15 bp, Homo sapiens
attgagaaataaggc

SEQ ID NO: 1509463 - DNA, 15 bp, Homo sapiens
gattgagaaataagg

SEQ ID NO: 1509464 - DNA, 15 bp, Homo sapiens
agattgagaaataag

SEQ ID NO: 1509465 - DNA, 15 bp, Homo sapiens
cagattgagaaataa

SEQ ID NO: 1509466 - DNA, 15 bp, Homo sapiens
acagattgagaaata

SEQ ID NO: 1509467 - DNA, 15 bp, Homo sapiens
aacagattgagaaat

SEQ ID NO: 1509468 - DNA, 15 bp, Homo sapiens
aaacagattgagaaa

SEQ ID NO: 1509469 - DNA, 15 bp, Homo sapiens
aaaacagattgagaa

SEQ ID NO: 1509470 - DNA, 15 bp, Homo sapiens
gaaaacagattgaga

SEQ ID NO: 1509471 - DNA, 15 bp, Homo sapiens
ggaaaacagattgag

SEQ ID NO: 1509472 - DNA, 15 bp, Homo sapiens
aggaaaacagattga

SEQ ID NO: 1509473 - DNA, 15 bp, Homo sapiens
caggaaaacagattg

SEQ ID NO: 1509474 - DNA, 15 bp, Homo sapiens
tcaggaaaacagatt

SEQ ID NO: 1509475 - DNA, 15 bp, Homo sapiens
gtcaggaaaacagat

SEQ ID NO: 1509476 - DNA, 15 bp, Homo sapiens
ggtcaggaaaacaga

SEQ ID NO: 1509477 - DNA, 15 bp, Homo sapiens
tggtcaggaaaacag

SEQ ID NO: 1509478 - DNA, 15 bp, Homo sapiens
ctggtcaggaaaaca

SEQ ID NO: 1509479 - DNA, 15 bp, Homo sapiens
tctggtcaggaaaac

SEQ ID NO: 1509480 - DNA, 15 bp, Homo sapiens
ttctggtcaggaaaa

SEQ ID NO: 1509481 - DNA, 15 bp, Homo sapiens
attctggtcaggaaa

SEQ ID NO: 1509482 - DNA, 15 bp, Homo sapiens
gattctggtcaggaa

SEQ ID NO: 1509483 - DNA, 15 bp, Homo sapiens
agattctggtcagga

SEQ ID NO: 1509484 - DNA, 15 bp, Homo sapiens
cagattctggtcagg

SEQ ID NO: 1509485 - DNA, 15 bp, Homo sapiens
gcagattctggtcag

SEQ ID NO: 1509486 - DNA, 15 bp, Homo sapiens
tgcagattctggtca

SEQ ID NO: 1509487 - DNA, 15 bp, Homo sapiens
ttgcagattctggtc

SEQ ID NO: 1509488 - DNA, 15 bp, Homo sapiens
tttgcagattctggt

SEQ ID NO: 1509489 - DNA, 15 bp, Homo sapiens
atttgcagattctgg

SEQ ID NO: 1509490 - DNA, 15 bp, Homo sapiens
catttgcagattctg

SEQ ID NO: 1509491 - DNA, 15 bp, Homo sapiens
gcatttgcagattct

SEQ ID NO: 1509492 - DNA, 15 bp, Homo sapiens
ggcatttgcagattc

SEQ ID NO: 1509493 - DNA, 15 bp, Homo sapiens
gggcatttgcagatt

SEQ ID NO: 1509494 - DNA, 15 bp, Homo sapiens
ggggcatttgcagat

SEQ ID NO: 1509495 - DNA, 15 bp, Homo sapiens
tggggcatttgcaga

SEQ ID NO: 1509496 - DNA, 15 bp, Homo sapiens
ctggggcatttgcag

SEQ ID NO: 1509497 - DNA, 15 bp, Homo sapiens
cctggggcatttgca

SEQ ID NO: 1509498 - DNA, 15 bp, Homo sapiens
ccctggggcatttgc

SEQ ID NO: 1509499 - DNA, 15 bp, Homo sapiens
cccctggggcatttg

SEQ ID NO: 1509500 - DNA, 15 bp, Homo sapiens
tcccctggggcattt

SEQ ID NO: 1509501 - DNA, 15 bp, Homo sapiens
ttcccctggggcatt

SEQ ID NO: 1509502 - DNA, 15 bp, Homo sapiens
tttcccctggggcat

SEQ ID NO: 1509503 - DNA, 15 bp, Homo sapiens
ttttcccctggggca

SEQ ID NO: 1509504 - DNA, 15 bp, Homo sapiens
cttttcccctggggc

SEQ ID NO: 1509505 - DNA, 15 bp, Homo sapiens
gcttttcccctgggg

SEQ ID NO: 1509506 - DNA, 15 bp, Homo sapiens
tgcttttcccctggg

SEQ ID NO: 1509507 - DNA, 15 bp, Homo sapiens
ctgcttttcccctgg

SEQ ID NO: 1509508 - DNA, 15 bp, Homo sapiens
gctgcttttcccctg

SEQ ID NO: 1509509 - DNA, 15 bp, Homo sapiens
agctgcttttcccct

SEQ ID NO: 1509510 - DNA, 15 bp, Homo sapiens
cagctgcttttcccc

SEQ ID NO: 1509511 - DNA, 15 bp, Homo sapiens
gcagctgcttttccc

SEQ ID NO: 1509512 - DNA, 15 bp, Homo sapiens
tgcagctgcttttcc

SEQ ID NO: 1509513 - DNA, 15 bp, Homo sapiens
ctgcagctgcttttc

SEQ ID NO: 1509514 - DNA, 15 bp, Homo sapiens
tctgcagctgctttt

SEQ ID NO: 1509515 - DNA, 15 bp, Homo sapiens
ttctgcagctgcttt

SEQ ID NO: 1509516 - DNA, 15 bp, Homo sapiens
cttctgcagctgctt

SEQ ID NO: 1509517 - DNA, 15 bp, Homo sapiens
tcttctgcagctgct

SEQ ID NO: 1509518 - DNA, 15 bp, Homo sapiens
atcttctgcagctgc

SEQ ID NO: 1509519 - DNA, 15 bp, Homo sapiens
gatcttctgcagctg

SEQ ID NO: 1509520 - DNA, 15 bp, Homo sapiens
ggatcttctgcagct

SEQ ID NO: 1509521 - DNA, 15 bp, Homo sapiens
gggatcttctgcagc

SEQ ID NO: 1509522 - DNA, 15 bp, Homo sapiens
ggggatcttctgcag

SEQ ID NO: 1509523 - DNA, 15 bp, Homo sapiens
aggggatcttctgca

SEQ ID NO: 1509524 - DNA, 15 bp, Homo sapiens
aaggggatcttctgc

SEQ ID NO: 1509525 - DNA, 15 bp, Homo sapiens
taaggggatcttctg

SEQ ID NO: 1509526 - DNA, 15 bp, Homo sapiens
gtaaggggatcttct

SEQ ID NO: 1509527 - DNA, 15 bp, Homo sapiens
ggtaaggggatcttc

SEQ ID NO: 1509528 - DNA, 15 bp, Homo sapiens
aggtaaggggatctt

SEQ ID NO: 1509529 - DNA, 15 bp, Homo sapiens
gaggtaaggggatct

SEQ ID NO: 1509530 - DNA, 15 bp, Homo sapiens
tgaggtaaggggatc

SEQ ID NO: 1509531 - DNA, 15 bp, Homo sapiens
atgaggtaaggggat

SEQ ID NO: 1509532 - DNA, 15 bp, Homo sapiens
aatgaggtaagggga

SEQ ID NO: 1509533 - DNA, 15 bp, Homo sapiens
taatgaggtaagggg

SEQ ID NO: 1509534 - DNA, 15 bp, Homo sapiens
ataatgaggtaaggg

SEQ ID NO: 1509535 - DNA, 15 bp, Homo sapiens
tataatgaggtaagg

SEQ ID NO: 1509536 - DNA, 15 bp, Homo sapiens
ctataatgaggtaag

SEQ ID NO: 1509537 - DNA, 15 bp, Homo sapiens
gctataatgaggtaa

SEQ ID NO: 1509538 - DNA, 15 bp, Homo sapiens
agctataatgaggta

SEQ ID NO: 1509539 - DNA, 15 bp, Homo sapiens
gagctataatgaggt

SEQ ID NO: 1509540 - DNA, 15 bp, Homo sapiens
tgagctataatgagg

SEQ ID NO: 1509541 - DNA, 15 bp, Homo sapiens
gtgagctataatgag

SEQ ID NO: 1509542 - DNA, 15 bp, Homo sapiens
agtgagctataatga

SEQ ID NO: 1509543 - DNA, 15 bp, Homo sapiens
gagtgagctataatg

SEQ ID NO: 1509544 - DNA, 15 bp, Homo sapiens
agagtgagctataat

SEQ ID NO: 1509545 - DNA, 15 bp, Homo sapiens
aagagtgagctataa

SEQ ID NO: 1509546 - DNA, 15 bp, Homo sapiens
aaagagtgagctata

SEQ ID NO: 1509547 - DNA, 15 bp, Homo sapiens
aaaagagtgagctat

SEQ ID NO: 1509548 - DNA, 15 bp, Homo sapiens
aaaaagagtgagcta

SEQ ID NO: 1509549 - DNA, 15 bp, Homo sapiens
caaaaagagtgagct

SEQ ID NO: 1509550 - DNA, 15 bp, Homo sapiens
ccaaaaagagtgagc

SEQ ID NO: 1509551 - DNA, 15 bp, Homo sapiens
tccaaaaagagtgag

SEQ ID NO: 1509552 - DNA, 15 bp, Homo sapiens
ttccaaaaagagtga

SEQ ID NO: 1509553 - DNA, 15 bp, Homo sapiens
attccaaaaagagtg

SEQ ID NO: 1509554 - DNA, 15 bp, Homo sapiens
gattccaaaaagagt

SEQ ID NO: 1509555 - DNA, 15 bp, Homo sapiens
agattccaaaaagag

SEQ ID NO: 1509556 - DNA, 15 bp, Homo sapiens
aagattccaaaaaga

SEQ ID NO: 1509557 - DNA, 15 bp, Homo sapiens
taagattccaaaaag

SEQ ID NO: 1509558 - DNA, 15 bp, Homo sapiens
ctaagattccaaaaa

SEQ ID NO: 1509559 - DNA, 15 bp, Homo sapiens
actaagattccaaaa

SEQ ID NO: 1509560 - DNA, 15 bp, Homo sapiens
cactaagattccaaa

SEQ ID NO: 1509561 - DNA, 15 bp, Homo sapiens
acactaagattccaa

SEQ ID NO: 1509562 - DNA, 15 bp, Homo sapiens
aacactaagattcca

SEQ ID NO: 1509563 - DNA, 15 bp, Homo sapiens
caacactaagattcc

SEQ ID NO: 1509564 - DNA, 15 bp, Homo sapiens
gcaacactaagattc

SEQ ID NO: 1509565 - DNA, 15 bp, Homo sapiens
agcaacactaagatt

SEQ ID NO: 1509566 - DNA, 15 bp, Homo sapiens
tagcaacactaagat

SEQ ID NO: 1509567 - DNA, 15 bp, Homo sapiens
ttagcaacactaaga

SEQ ID NO: 1509568 - DNA, 15 bp, Homo sapiens
attagcaacactaag

SEQ ID NO: 1509569 - DNA, 15 bp, Homo sapiens
gattagcaacactaa

SEQ ID NO: 1509570 - DNA, 15 bp, Homo sapiens
ggattagcaacacta

SEQ ID NO: 1509571 - DNA, 15 bp, Homo sapiens
gggattagcaacact

SEQ ID NO: 1509572 - DNA, 15 bp, Homo sapiens
agggattagcaacac

SEQ ID NO: 1509573 - DNA, 15 bp, Homo sapiens
tagggattagcaaca

SEQ ID NO: 1509574 - DNA, 15 bp, Homo sapiens
atagggattagcaac

SEQ ID NO: 1509575 - DNA, 15 bp, Homo sapiens
aatagggattagcaa

SEQ ID NO: 1509576 - DNA, 15 bp, Homo sapiens
gaatagggattagca

SEQ ID NO: 1509577 - DNA, 15 bp, Homo sapiens
ggaatagggattagc

SEQ ID NO: 1509578 - DNA, 15 bp, Homo sapiens
aggaatagggattag

SEQ ID NO: 1509579 - DNA, 15 bp, Homo sapiens
aaggaatagggatta

SEQ ID NO: 1509580 - DNA, 15 bp, Homo sapiens
gaaggaatagggatt

SEQ ID NO: 1509581 - DNA, 15 bp, Homo sapiens
tgaaggaatagggat

SEQ ID NO: 1509582 - DNA, 15 bp, Homo sapiens
ctgaaggaataggga

SEQ ID NO: 1509583 - DNA, 15 bp, Homo sapiens
actgaaggaataggg

SEQ ID NO: 1509584 - DNA, 15 bp, Homo sapiens
tactgaaggaatagg

SEQ ID NO: 1509585 - DNA, 15 bp, Homo sapiens
ctactgaaggaatag

SEQ ID NO: 1509586 - DNA, 15 bp, Homo sapiens
gctactgaaggaata

SEQ ID NO: 1509587 - DNA, 15 bp, Homo sapiens
agctactgaaggaat

SEQ ID NO: 1509588 - DNA, 15 bp, Homo sapiens
gagctactgaaggaa

SEQ ID NO: 1509589 - DNA, 15 bp, Homo sapiens
agagctactgaagga

SEQ ID NO: 1509590 - DNA, 15 bp, Homo sapiens
gagagctactgaagg

SEQ ID NO: 1509591 - DNA, 15 bp, Homo sapiens
agagagctactgaag

SEQ ID NO: 1509592 - DNA, 15 bp, Homo sapiens
cagagagctactgaa

SEQ ID NO: 1509593 - DNA, 15 bp, Homo sapiens
tcagagagctactga

SEQ ID NO: 1509594 - DNA, 15 bp, Homo sapiens
ttcagagagctactg

SEQ ID NO: 1509595 - DNA, 15 bp, Homo sapiens
attcagagagctact

SEQ ID NO: 1509596 - DNA, 15 bp, Homo sapiens
aattcagagagctac

SEQ ID NO: 1509597 - DNA, 15 bp, Homo sapiens
gaattcagagagcta

SEQ ID NO: 1509598 - DNA, 15 bp, Homo sapiens
agaattcagagagct

SEQ ID NO: 1509599 - DNA, 15 bp, Homo sapiens
aagaattcagagagc

SEQ ID NO: 1509600 - DNA, 15 bp, Homo sapiens
gaagaattcagagag

SEQ ID NO: 1509601 - DNA, 15 bp, Homo sapiens
tgaagaattcagaga

SEQ ID NO: 1509602 - DNA, 15 bp, Homo sapiens
ttgaagaattcagag

SEQ ID NO: 1509603 - DNA, 15 bp, Homo sapiens
tttgaagaattcaga

SEQ ID NO: 1509604 - DNA, 15 bp, Homo sapiens
gtttgaagaattcag

SEQ ID NO: 1509605 - DNA, 15 bp, Homo sapiens
tgtttgaagaattca

SEQ ID NO: 1509606 - DNA, 15 bp, Homo sapiens
ctgtttgaagaattc

SEQ ID NO: 1509607 - DNA, 15 bp, Homo sapiens
cctgtttgaagaatt

SEQ ID NO: 1509608 - DNA, 15 bp, Homo sapiens
acctgtttgaagaat

SEQ ID NO: 1509609 - DNA, 15 bp, Homo sapiens
cacctgtttgaagaa

SEQ ID NO: 1509610 - DNA, 15 bp, Homo sapiens
tcacctgtttgaaga

SEQ ID NO: 1509611 - DNA, 15 bp, Homo sapiens
atcacctgtttgaag

SEQ ID NO: 1509612 - DNA, 15 bp, Homo sapiens
aatcacctgtttgaa

SEQ ID NO: 1509613 - DNA, 15 bp, Homo sapiens
aaatcacctgtttga

SEQ ID NO: 1509614 - DNA, 15 bp, Homo sapiens
aaaatcacctgtttg

SEQ ID NO: 1509615 - DNA, 15 bp, Homo sapiens
aaaaatcacctgttt

SEQ ID NO: 1509616 - DNA, 15 bp, Homo sapiens
taaaaatcacctgtt

SEQ ID NO: 1509617 - DNA, 15 bp, Homo sapiens
ataaaaatcacctgt

SEQ ID NO: 1509618 - DNA, 15 bp, Homo sapiens
tataaaaatcacctg

SEQ ID NO: 1509619 - DNA, 15 bp, Homo sapiens
atataaaaatcacct

SEQ ID NO: 1509620 - DNA, 15 bp, Homo sapiens
aatataaaaatcacc

SEQ ID NO: 1509621 - DNA, 15 bp, Homo sapiens
aaatataaaaatcac

SEQ ID NO: 1509622 - DNA, 15 bp, Homo sapiens
gaaatataaaaatca

SEQ ID NO: 1509623 - DNA, 15 bp, Homo sapiens
tgaaatataaaaatc

SEQ ID NO: 1509624 - DNA, 15 bp, Homo sapiens
atgaaatataaaaat

SEQ ID NO: 1509625 - DNA, 15 bp, Homo sapiens
gatgaaatataaaaa

SEQ ID NO: 1509626 - DNA, 15 bp, Homo sapiens
agatgaaatataaaa

SEQ ID NO: 1509627 - DNA, 15 bp, Homo sapiens
aagatgaaatataaa

SEQ ID NO: 1509628 - DNA, 15 bp, Homo sapiens
aaagatgaaatataa

SEQ ID NO: 1509629 - DNA, 15 bp, Homo sapiens
aaaagatgaaatata

SEQ ID NO: 1509630 - DNA, 15 bp, Homo sapiens
caaaagatgaaatat

SEQ ID NO: 1509631 - DNA, 15 bp, Homo sapiens
acaaaagatgaaata

SEQ ID NO: 1509632 - DNA, 15 bp, Homo sapiens
aacaaaagatgaaat

SEQ ID NO: 1509633 - DNA, 15 bp, Homo sapiens
taacaaaagatgaaa

SEQ ID NO: 1509634 - DNA, 15 bp, Homo sapiens
ctaacaaaagatgaa

SEQ ID NO: 1509635 - DNA, 15 bp, Homo sapiens
tctaacaaaagatga

SEQ ID NO: 1509636 - DNA, 15 bp, Homo sapiens
ttctaacaaaagatg

SEQ ID NO: 1509637 - DNA, 15 bp, Homo sapiens
tttctaacaaaagat

SEQ ID NO: 1509638 - DNA, 15 bp, Homo sapiens
atttctaacaaaaga

SEQ ID NO: 1509639 - DNA, 15 bp, Homo sapiens
aatttctaacaaaag

SEQ ID NO: 1509640 - DNA, 15 bp, Homo sapiens
taatttctaacaaaa

SEQ ID NO: 1509641 - DNA, 15 bp, Homo sapiens
ttaatttctaacaaa

SEQ ID NO: 1509642 - DNA, 15 bp, Homo sapiens
cttaatttctaacaa

SEQ ID NO: 1509643 - DNA, 15 bp, Homo sapiens
acttaatttctaaca

SEQ ID NO: 1509644 - DNA, 15 bp, Homo sapiens
aacttaatttctaac

SEQ ID NO: 1509645 - DNA, 15 bp, Homo sapiens
aaacttaatttctaa

SEQ ID NO: 1509646 - DNA, 15 bp, Homo sapiens
caaacttaatttcta

SEQ ID NO: 1509647 - DNA, 15 bp, Homo sapiens
acaaacttaatttct

SEQ ID NO: 1509648 - DNA, 15 bp, Homo sapiens
cacaaacttaatttc

SEQ ID NO: 1509649 - DNA, 15 bp, Homo sapiens
ccacaaacttaattt

SEQ ID NO: 1509650 - DNA, 15 bp, Homo sapiens
accacaaacttaatt

SEQ ID NO: 1509651 - DNA, 15 bp, Homo sapiens
caccacaaacttaat

SEQ ID NO: 1509652 - DNA, 15 bp, Homo sapiens
ccaccacaaacttaa

SEQ ID NO: 1509653 - DNA, 15 bp, Homo sapiens
cccaccacaaactta

SEQ ID NO: 1509654 - DNA, 15 bp, Homo sapiens
tcccaccacaaactt

SEQ ID NO: 1509655 - DNA, 15 bp, Homo sapiens
ctcccaccacaaact

SEQ ID NO: 1509656 - DNA, 15 bp, Homo sapiens
gctcccaccacaaac

SEQ ID NO: 1509657 - DNA, 15 bp, Homo sapiens
agctcccaccacaaa

SEQ ID NO: 1509658 - DNA, 15 bp, Homo sapiens
tagctcccaccacaa

SEQ ID NO: 1509659 - DNA, 15 bp, Homo sapiens
atagctcccaccaca

SEQ ID NO: 1509660 - DNA, 15 bp, Homo sapiens
aatagctcccaccac

SEQ ID NO: 1509661 - DNA, 15 bp, Homo sapiens
caatagctcccacca

SEQ ID NO: 1509662 - DNA, 15 bp, Homo sapiens
acaatagctcccacc

SEQ ID NO: 1509663 - DNA, 15 bp, Homo sapiens
aacaatagctcccac

SEQ ID NO: 1509664 - DNA, 15 bp, Homo sapiens
aaacaatagctccca

SEQ ID NO: 1509665 - DNA, 15 bp, Homo sapiens
aaaacaatagctccc

SEQ ID NO: 1509666 - DNA, 15 bp, Homo sapiens
caaaacaatagctcc

SEQ ID NO: 1509667 - DNA, 15 bp, Homo sapiens
gcaaaacaatagctc

SEQ ID NO: 1509668 - DNA, 15 bp, Homo sapiens
tgcaaaacaatagct

SEQ ID NO: 1509669 - DNA, 15 bp, Homo sapiens
ctgcaaaacaatagc

SEQ ID NO: 1509670 - DNA, 15 bp, Homo sapiens
actgcaaaacaatag

SEQ ID NO: 1509671 - DNA, 15 bp, Homo sapiens
tactgcaaaacaata

SEQ ID NO: 1509672 - DNA, 15 bp, Homo sapiens
ttactgcaaaacaat

SEQ ID NO: 1509673 - DNA, 15 bp, Homo sapiens
tttactgcaaaacaa

SEQ ID NO: 1509674 - DNA, 15 bp, Homo sapiens
atttactgcaaaaca

SEQ ID NO: 1509675 - DNA, 15 bp, Homo sapiens
aatttactgcaaaac

SEQ ID NO: 1509676 - DNA, 15 bp, Homo sapiens
taatttactgcaaaa

SEQ ID NO: 1509677 - DNA, 15 bp, Homo sapiens
ataatttactgcaaa

SEQ ID NO: 1509678 - DNA, 15 bp, Homo sapiens
aataatttactgcaa

SEQ ID NO: 1509679 - DNA, 15 bp, Homo sapiens
gaataatttactgca

SEQ ID NO: 1509680 - DNA, 15 bp, Homo sapiens
agaataatttactgc

SEQ ID NO: 1509681 - DNA, 15 bp, Homo sapiens
tagaataatttactg

SEQ ID NO: 1509682 - DNA, 15 bp, Homo sapiens
atagaataatttact

SEQ ID NO: 1509683 - DNA, 15 bp, Homo sapiens
gatagaataatttac

SEQ ID NO: 1509684 - DNA, 15 bp, Homo sapiens
ggatagaataattta

SEQ ID NO: 1509685 - DNA, 15 bp, Homo sapiens
aggatagaataattt

SEQ ID NO: 1509686 - DNA, 15 bp, Homo sapiens
taggatagaataatt

SEQ ID NO: 1509687 - DNA, 15 bp, Homo sapiens
gtaggatagaataat

SEQ ID NO: 1509688 - DNA, 15 bp, Homo sapiens
tgtaggatagaataa

SEQ ID NO: 1509689 - DNA, 15 bp, Homo sapiens
atgtaggatagaata

SEQ ID NO: 1509690 - DNA, 15 bp, Homo sapiens
catgtaggatagaat

SEQ ID NO: 1509691 - DNA, 15 bp, Homo sapiens
ccatgtaggatagaa

SEQ ID NO: 1509692 - DNA, 15 bp, Homo sapiens
tccatgtaggataga

SEQ ID NO: 1509693 - DNA, 15 bp, Homo sapiens
ttccatgtaggatag

SEQ ID NO: 1509694 - DNA, 15 bp, Homo sapiens
tttccatgtaggata

SEQ ID NO: 1509695 - DNA, 15 bp, Homo sapiens
gtttccatgtaggat

SEQ ID NO: 1509696 - DNA, 15 bp, Homo sapiens
tgtttccatgtagga

SEQ ID NO: 1509697 - DNA, 15 bp, Homo sapiens
ctgtttccatgtagg

SEQ ID NO: 1509698 - DNA, 15 bp, Homo sapiens
actgtttccatgtag

SEQ ID NO: 1509699 - DNA, 15 bp, Homo sapiens
tactgtttccatgta

SEQ ID NO: 1509700 - DNA, 15 bp, Homo sapiens
ctactgtttccatgt

SEQ ID NO: 1509701 - DNA, 15 bp, Homo sapiens
actactgtttccatg

SEQ ID NO: 1509702 - DNA, 15 bp, Homo sapiens
tactactgtttccat

SEQ ID NO: 1509703 - DNA, 15 bp, Homo sapiens
atactactgtttcca

SEQ ID NO: 1509704 - DNA, 15 bp, Homo sapiens
catactactgtttcc

SEQ ID NO: 1509705 - DNA, 15 bp, Homo sapiens
ccatactactgtttc

SEQ ID NO: 1509706 - DNA, 15 bp, Homo sapiens
tccatactactgttt

SEQ ID NO: 1509707 - DNA, 15 bp, Homo sapiens
atccatactactgtt

SEQ ID NO: 1509708 - DNA, 15 bp, Homo sapiens
aatccatactactgt

SEQ ID NO: 1509709 - DNA, 15 bp, Homo sapiens
aaatccatactactg

SEQ ID NO: 1509710 - DNA, 15 bp, Homo sapiens
taaatccatactact

SEQ ID NO: 1509711 - DNA, 15 bp, Homo sapiens
ttaaatccatactac

SEQ ID NO: 1509712 - DNA, 15 bp, Homo sapiens
tttaaatccatacta

SEQ ID NO: 1509713 - DNA, 15 bp, Homo sapiens
atttaaatccatact

SEQ ID NO: 1509714 - DNA, 15 bp, Homo sapiens
tatttaaatccatac

SEQ ID NO: 1509715 - DNA, 15 bp, Homo sapiens
atatttaaatccata

SEQ ID NO: 1509716 - DNA, 15 bp, Homo sapiens
tatatttaaatccat

SEQ ID NO: 1509717 - DNA, 15 bp, Homo sapiens
atatatttaaatcca

SEQ ID NO: 1509718 - DNA, 15 bp, Homo sapiens
aatatatttaaatcc

SEQ ID NO: 1509719 - DNA, 15 bp, Homo sapiens
aaatatatttaaatc

SEQ ID NO: 1509720 - DNA, 15 bp, Homo sapiens
taaatatatttaaat

SEQ ID NO: 1509721 - DNA, 15 bp, Homo sapiens
ttaaatatatttaaa

SEQ ID NO: 1509722 - DNA, 15 bp, Homo sapiens
attaaatatatttaa

SEQ ID NO: 1509723 - DNA, 15 bp, Homo sapiens
tattaaatatattta

SEQ ID NO: 1509724 - DNA, 15 bp, Homo sapiens
atattaaatatattt

SEQ ID NO: 1509725 - DNA, 15 bp, Homo sapiens
catattaaatatatt

SEQ ID NO: 1509726 - DNA, 15 bp, Homo sapiens
acatattaaatatat

SEQ ID NO: 1509727 - DNA, 15 bp, Homo sapiens
aacatattaaatata

SEQ ID NO: 1509728 - DNA, 15 bp, Homo sapiens
aaacatattaaatat

SEQ ID NO: 1509729 - DNA, 15 bp, Homo sapiens
gaaacatattaaata

SEQ ID NO: 1509730 - DNA, 15 bp, Homo sapiens
tgaaacatattaaat

SEQ ID NO: 1509731 - DNA, 15 bp, Homo sapiens
ttgaaacatattaaa

SEQ ID NO: 1509732 - DNA, 15 bp, Homo sapiens
attgaaacatattaa

SEQ ID NO: 1509733 - DNA, 15 bp, Homo sapiens
tattgaaacatatta

SEQ ID NO: 1509734 - DNA, 15 bp, Homo sapiens
ttattgaaacatatt

SEQ ID NO: 1509735 - DNA, 15 bp, Homo sapiens
tttattgaaacatat

SEQ ID NO: 1509736 - DNA, 15 bp, Homo sapiens
atttattgaaacata

SEQ ID NO: 1509737 - DNA, 15 bp, Homo sapiens
aatttattgaaacat

SEQ ID NO: 1509738 - DNA, 15 bp, Homo sapiens
caatttattgaaaca

SEQ ID NO: 1509739 - DNA, 15 bp, Homo sapiens
gcaatttattgaaac

SEQ ID NO: 1509740 - DNA, 15 bp, Homo sapiens
ggcaatttattgaaa

SEQ ID NO: 1509741 - DNA, 15 bp, Homo sapiens
tggcaatttattgaa

SEQ ID NO: 1509742 - DNA, 15 bp, Homo sapiens
atggcaatttattga

SEQ ID NO: 1509743 - DNA, 15 bp, Homo sapiens
gatggcaatttattg

SEQ ID NO: 1509744 - DNA, 15 bp, Homo sapiens
ggatggcaatttatt

SEQ ID NO: 1509745 - DNA, 15 bp, Homo sapiens
aggatggcaatttat

SEQ ID NO: 1509746 - DNA, 15 bp, Homo sapiens
aaggatggcaattta

SEQ ID NO: 1509747 - DNA, 15 bp, Homo sapiens
taaggatggcaattt

SEQ ID NO: 1509748 - DNA, 15 bp, Homo sapiens
ttaaggatggcaatt

SEQ ID NO: 1509749 - DNA, 15 bp, Homo sapiens
cttaaggatggcaat

SEQ ID NO: 1509750 - DNA, 15 bp, Homo sapiens
acttaaggatggcaa

SEQ ID NO: 1509751 - DNA, 15 bp, Homo sapiens
cacttaaggatggca

SEQ ID NO: 1509752 - DNA, 15 bp, Homo sapiens
acacttaaggatggc

SEQ ID NO: 1509753 - DNA, 15 bp, Homo sapiens
aacacttaaggatgg

SEQ ID NO: 1509754 - DNA, 15 bp, Homo sapiens
gaacacttaaggatg

SEQ ID NO: 1509755 - DNA, 15 bp, Homo sapiens
tgaacacttaaggat

SEQ ID NO: 1509756 - DNA, 15 bp, Homo sapiens
ttgaacacttaagga

SEQ ID NO: 1509757 - DNA, 15 bp, Homo sapiens
tttgaacacttaagg

SEQ ID NO: 1509758 - DNA, 15 bp, Homo sapiens
atttgaacacttaag

SEQ ID NO: 1509759 - DNA, 15 bp, Homo sapiens
aatttgaacacttaa

SEQ ID NO: 1509760 - DNA, 15 bp, Homo sapiens
taatttgaacactta

SEQ ID NO: 1509761 - DNA, 15 bp, Homo sapiens
ataatttgaacactt

SEQ ID NO: 1509762 - DNA, 15 bp, Homo sapiens
aataatttgaacact

SEQ ID NO: 1509763 - DNA, 15 bp, Homo sapiens
taataatttgaacac

SEQ ID NO: 1509764 - DNA, 15 bp, Homo sapiens
gtaataatttgaaca

SEQ ID NO: 1509765 - DNA, 15 bp, Homo sapiens
tgtaataatttgaac

SEQ ID NO: 1509766 - DNA, 15 bp, Homo sapiens
gtgtaataatttgaa

SEQ ID NO: 1509767 - DNA, 15 bp, Homo sapiens
agtgtaataatttga

SEQ ID NO: 1509768 - DNA, 15 bp, Homo sapiens
aagtgtaataatttg

SEQ ID NO: 1509769 - DNA, 15 bp, Homo sapiens
aaagtgtaataattt

SEQ ID NO: 1509770 - DNA, 15 bp, Homo sapiens
aaaagtgtaataatt

SEQ ID NO: 1509771 - DNA, 15 bp, Homo sapiens
caaaagtgtaataat

SEQ ID NO: 1509772 - DNA, 15 bp, Homo sapiens
ccaaaagtgtaataa

SEQ ID NO: 1509773 - DNA, 15 bp, Homo sapiens
gccaaaagtgtaata

SEQ ID NO: 1509774 - DNA, 15 bp, Homo sapiens
ggccaaaagtgtaat

SEQ ID NO: 1509775 - DNA, 15 bp, Homo sapiens
tggccaaaagtgtaa

SEQ ID NO: 1509776 - DNA, 15 bp, Homo sapiens
ctggccaaaagtgta

SEQ ID NO: 1509777 - DNA, 15 bp, Homo sapiens
actggccaaaagtgt

SEQ ID NO: 1509778 - DNA, 15 bp, Homo sapiens
cactggccaaaagtg

SEQ ID NO: 1509779 - DNA, 15 bp, Homo sapiens
ccactggccaaaagt

SEQ ID NO: 1509780 - DNA, 15 bp, Homo sapiens
cccactggccaaaag

SEQ ID NO: 1509781 - DNA, 15 bp, Homo sapiens
ccccactggccaaaa

SEQ ID NO: 1509782 - DNA, 15 bp, Homo sapiens
cccccactggccaaa

SEQ ID NO: 1509783 - DNA, 15 bp, Homo sapiens
gcccccactggccaa

SEQ ID NO: 1509784 - DNA, 15 bp, Homo sapiens
ggcccccactggcca

SEQ ID NO: 1509785 - DNA, 15 bp, Homo sapiens
aggcccccactggcc

SEQ ID NO: 1509786 - DNA, 15 bp, Homo sapiens
gaggcccccactggc

SEQ ID NO: 1509787 - DNA, 15 bp, Homo sapiens
agaggcccccactgg

SEQ ID NO: 1509788 - DNA, 15 bp, Homo sapiens
aagaggcccccactg

SEQ ID NO: 1509789 - DNA, 15 bp, Homo sapiens
aaagaggcccccact

SEQ ID NO: 1509790 - DNA, 15 bp, Homo sapiens
taaagaggcccccac

SEQ ID NO: 1509791 - DNA, 15 bp, Homo sapiens
ttaaagaggccccca

SEQ ID NO: 1509792 - DNA, 15 bp, Homo sapiens
tttaaagaggccccc

SEQ ID NO: 1509793 - DNA, 15 bp, Homo sapiens
ttttaaagaggcccc

SEQ ID NO: 1509794 - DNA, 15 bp, Homo sapiens
attttaaagaggccc

SEQ ID NO: 1509795 - DNA, 15 bp, Homo sapiens
aattttaaagaggcc

SEQ ID NO: 1509796 - DNA, 15 bp, Homo sapiens
gaattttaaagaggc

SEQ ID NO: 1509797 - DNA, 15 bp, Homo sapiens
tgaattttaaagagg

SEQ ID NO: 1509798 - DNA, 15 bp, Homo sapiens
atgaattttaaagag

SEQ ID NO: 1509799 - DNA, 15 bp, Homo sapiens
aatgaattttaaaga

SEQ ID NO: 1509800 - DNA, 15 bp, Homo sapiens
gaatgaattttaaag

SEQ ID NO: 1509801 - DNA, 15 bp, Homo sapiens
ggaatgaattttaaa

SEQ ID NO: 1509802 - DNA, 15 bp, Homo sapiens
aggaatgaattttaa

SEQ ID NO: 1509803 - DNA, 15 bp, Homo sapiens
taggaatgaatttta

SEQ ID NO: 1509804 - DNA, 15 bp, Homo sapiens
ttaggaatgaatttt

SEQ ID NO: 1509805 - DNA, 15 bp, Homo sapiens
gttaggaatgaattt

SEQ ID NO: 1509806 - DNA, 15 bp, Homo sapiens
ggttaggaatgaatt

SEQ ID NO: 1509807 - DNA, 15 bp, Homo sapiens
tggttaggaatgaat

SEQ ID NO: 1509808 - DNA, 15 bp, Homo sapiens
atggttaggaatgaa

SEQ ID NO: 1509809 - DNA, 15 bp, Homo sapiens
aatggttaggaatga

SEQ ID NO: 1509810 - DNA, 15 bp, Homo sapiens
aaatggttaggaatg

SEQ ID NO: 1509811 - DNA, 15 bp, Homo sapiens
aaaatggttaggaat

SEQ ID NO: 1509812 - DNA, 15 bp, Homo sapiens
aaaaatggttaggaa

SEQ ID NO: 1509813 - DNA, 15 bp, Homo sapiens
caaaaatggttagga

SEQ ID NO: 1509814 - DNA, 15 bp, Homo sapiens
ccaaaaatggttagg

SEQ ID NO: 1509815 - DNA, 15 bp, Homo sapiens
gccaaaaatggttag

SEQ ID NO: 1509816 - DNA, 15 bp, Homo sapiens
agccaaaaatggtta

SEQ ID NO: 1509817 - DNA, 15 bp, Homo sapiens
aagccaaaaatggtt

SEQ ID NO: 1509818 - DNA, 15 bp, Homo sapiens
caagccaaaaatggt

SEQ ID NO: 1509819 - DNA, 15 bp, Homo sapiens
tcaagccaaaaatgg

SEQ ID NO: 1509820 - DNA, 15 bp, Homo sapiens
gtcaagccaaaaatg

SEQ ID NO: 1509821 - DNA, 15 bp, Homo sapiens
ggtcaagccaaaaat

SEQ ID NO: 1509822 - DNA, 15 bp, Homo sapiens
cggtcaagccaaaaa

SEQ ID NO: 1509823 - DNA, 15 bp, Homo sapiens
acggtcaagccaaaa

SEQ ID NO: 1509824 - DNA, 15 bp, Homo sapiens
aacggtcaagccaaa

SEQ ID NO: 1509825 - DNA, 15 bp, Homo sapiens
taacggtcaagccaa

SEQ ID NO: 1509826 - DNA, 15 bp, Homo sapiens
ataacggtcaagcca

SEQ ID NO: 1509827 - DNA, 15 bp, Homo sapiens
aataacggtcaagcc

SEQ ID NO: 1509828 - DNA, 15 bp, Homo sapiens
taataacggtcaagc

SEQ ID NO: 1509829 - DNA, 15 bp, Homo sapiens
ctaataacggtcaag

SEQ ID NO: 1509830 - DNA, 15 bp, Homo sapiens
actaataacggtcaa

SEQ ID NO: 1509831 - DNA, 15 bp, Homo sapiens
gactaataacggtca

SEQ ID NO: 1509832 - DNA, 15 bp, Homo sapiens
tgactaataacggtc

SEQ ID NO: 1509833 - DNA, 15 bp, Homo sapiens
ctgactaataacggt

SEQ ID NO: 1509834 - DNA, 15 bp, Homo sapiens
aatggattcctccaa

SEQ ID NO: 1509835 - DNA, 15 bp, Homo sapiens
taatggattcctcca

SEQ ID NO: 1509836 - DNA, 15 bp, Homo sapiens
ataatggattcctcc

SEQ ID NO: 1509837 - DNA, 15 bp, Homo sapiens
tataatggattcctc

SEQ ID NO: 1509838 - DNA, 15 bp, Homo sapiens
gtataatggattcct

SEQ ID NO: 1509839 - DNA, 15 bp, Homo sapiens
agtataatggattcc

SEQ ID NO: 1509840 - DNA, 15 bp, Homo sapiens
tagtataatggattc

SEQ ID NO: 1509841 - DNA, 15 bp, Homo sapiens
atagtataatggatt

SEQ ID NO: 1509842 - DNA, 15 bp, Homo sapiens
gatagtataatggat

SEQ ID NO: 1509843 - DNA, 15 bp, Homo sapiens
tgatagtataatgga

SEQ ID NO: 1509844 - DNA, 15 bp, Homo sapiens
ctgatagtataatgg

SEQ ID NO: 1509845 - DNA, 15 bp, Homo sapiens
tctgatagtataatg

SEQ ID NO: 1509846 - DNA, 15 bp, Homo sapiens
gtctgatagtataat

SEQ ID NO: 1509847 - DNA, 15 bp, Homo sapiens
agtctgatagtataa

SEQ ID NO: 1509848 - DNA, 15 bp, Homo sapiens
tagtctgatagtata

SEQ ID NO: 1509849 - DNA, 15 bp, Homo sapiens
ttagtctgatagtat

SEQ ID NO: 1509850 - DNA, 15 bp, Homo sapiens
tttagtctgatagta

SEQ ID NO: 1509851 - DNA, 15 bp, Homo sapiens
ttttagtctgatagt

SEQ ID NO: 1509852 - DNA, 15 bp, Homo sapiens
tttttagtctgatag

SEQ ID NO: 1509853 - DNA, 15 bp, Homo sapiens
atttttagtctgata

SEQ ID NO: 1509854 - DNA, 15 bp, Homo sapiens
aatttttagtctgat

SEQ ID NO: 1509855 - DNA, 15 bp, Homo sapiens
caatttttagtctga

SEQ ID NO: 1509856 - DNA, 15 bp, Homo sapiens
tcaatttttagtctg

SEQ ID NO: 1509857 - DNA, 15 bp, Homo sapiens
atcaatttttagtct

SEQ ID NO: 1509858 - DNA, 15 bp, Homo sapiens
gatcaatttttagtc

SEQ ID NO: 1509859 - DNA, 15 bp, Homo sapiens
tgatcaatttttagt

SEQ ID NO: 1509860 - DNA, 15 bp, Homo sapiens
atgatcaatttttag

SEQ ID NO: 1509861 - DNA, 15 bp, Homo sapiens
aatgatcaattttta

SEQ ID NO: 1509862 - DNA, 15 bp, Homo sapiens
aaatgatcaattttt

SEQ ID NO: 1509863 - DNA, 15 bp, Homo sapiens
caaatgatcaatttt

SEQ ID NO: 1509864 - DNA, 15 bp, Homo sapiens
acaaatgatcaattt

SEQ ID NO: 1509865 - DNA, 15 bp, Homo sapiens
tacaaatgatcaatt

SEQ ID NO: 1509866 - DNA, 15 bp, Homo sapiens
ctacaaatgatcaat

SEQ ID NO: 1509867 - DNA, 15 bp, Homo sapiens
tctacaaatgatcaa

SEQ ID NO: 1509868 - DNA, 15 bp, Homo sapiens
ttctacaaatgatca

SEQ ID NO: 1509869 - DNA, 15 bp, Homo sapiens
tttctacaaatgatc

SEQ ID NO: 1509870 - DNA, 15 bp, Homo sapiens
gtttctacaaatgat

SEQ ID NO: 1509871 - DNA, 15 bp, Homo sapiens
agtttctacaaatga

SEQ ID NO: 1509872 - DNA, 15 bp, Homo sapiens
tagtttctacaaatg

SEQ ID NO: 1509873 - DNA, 15 bp, Homo sapiens
ctagtttctacaaat

SEQ ID NO: 1509874 - DNA, 15 bp, Homo sapiens
tctagtttctacaaa

SEQ ID NO: 1509875 - DNA, 15 bp, Homo sapiens
atctagtttctacaa

SEQ ID NO: 1509876 - DNA, 15 bp, Homo sapiens
aatctagtttctaca

SEQ ID NO: 1509877 - DNA, 15 bp, Homo sapiens
taatctagtttctac

SEQ ID NO: 1509878 - DNA, 15 bp, Homo sapiens
ttaatctagtttcta

SEQ ID NO: 1509879 - DNA, 15 bp, Homo sapiens
tttaatctagtttct

SEQ ID NO: 1509880 - DNA, 15 bp, Homo sapiens
atttaatctagtttc

SEQ ID NO: 1509881 - DNA, 15 bp, Homo sapiens
tatttaatctagttt

SEQ ID NO: 1509882 - DNA, 15 bp, Homo sapiens
ttatttaatctagtt

SEQ ID NO: 1509883 - DNA, 15 bp, Homo sapiens
tttatttaatctagt

SEQ ID NO: 1509884 - DNA, 15 bp, Homo sapiens
ctttatttaatctag

SEQ ID NO: 1509885 - DNA, 15 bp, Homo sapiens
actttatttaatcta

SEQ ID NO: 1509886 - DNA, 15 bp, Homo sapiens
tactttatttaatct

SEQ ID NO: 1509887 - DNA, 15 bp, Homo sapiens
ctactttatttaatc

SEQ ID NO: 1509888 - DNA, 15 bp, Homo sapiens
cctactttatttaat

SEQ ID NO: 1509889 - DNA, 15 bp, Homo sapiens
tcctactttatttaa

SEQ ID NO: 1509890 - DNA, 15 bp, Homo sapiens
ctcctactttattta

SEQ ID NO: 1509891 - DNA, 15 bp, Homo sapiens
actcctactttattt

SEQ ID NO: 1509892 - DNA, 15 bp, Homo sapiens
aactcctactttatt

SEQ ID NO: 1509893 - DNA, 15 bp, Homo sapiens
caactcctactttat

SEQ ID NO: 1509894 - DNA, 15 bp, Homo sapiens
tcaactcctacttta

SEQ ID NO: 1509895 - DNA, 15 bp, Homo sapiens
ctcaactcctacttt

SEQ ID NO: 1509896 - DNA, 15 bp, Homo sapiens
cctcaactcctactt

SEQ ID NO: 1509897 - DNA, 15 bp, Homo sapiens
ccctcaactcctact

SEQ ID NO: 1509898 - DNA, 15 bp, Homo sapiens
tccctcaactcctac

SEQ ID NO: 1509899 - DNA, 15 bp, Homo sapiens
ttccctcaactccta

SEQ ID NO: 1509900 - DNA, 15 bp, Homo sapiens
tttccctcaactcct

SEQ ID NO: 1509901 - DNA, 15 bp, Homo sapiens
ttttccctcaactcc

SEQ ID NO: 1509902 - DNA, 15 bp, Homo sapiens
tttttccctcaactc

SEQ ID NO: 1509903 - DNA, 15 bp, Homo sapiens
atttttccctcaact

SEQ ID NO: 1509904 - DNA, 15 bp, Homo sapiens
catttttccctcaac

SEQ ID NO: 1509905 - DNA, 15 bp, Homo sapiens
acatttttccctcaa

SEQ ID NO: 1509906 - DNA, 15 bp, Homo sapiens
tacatttttccctca

SEQ ID NO: 1509907 - DNA, 15 bp, Homo sapiens
ttacatttttccctc

SEQ ID NO: 1509908 - DNA, 15 bp, Homo sapiens
tttacatttttccct

SEQ ID NO: 1509909 - DNA, 15 bp, Homo sapiens
gtttacatttttccc

SEQ ID NO: 1509910 - DNA, 15 bp, Homo sapiens
tgtttacatttttcc

SEQ ID NO: 1509911 - DNA, 15 bp, Homo sapiens
ttgtttacatttttc

SEQ ID NO: 1509912 - DNA, 15 bp, Homo sapiens
gttgtttacattttt

SEQ ID NO: 1509913 - DNA, 15 bp, Homo sapiens
ggttgtttacatttt

SEQ ID NO: 1509914 - DNA, 15 bp, Homo sapiens
tggttgtttacattt

SEQ ID NO: 1509915 - DNA, 15 bp, Homo sapiens
atggttgtttacatt

SEQ ID NO: 1509916 - DNA, 15 bp, Homo sapiens
tatggttgtttacat

SEQ ID NO: 1509917 - DNA, 15 bp, Homo sapiens
gtatggttgtttaca

SEQ ID NO: 1509918 - DNA, 15 bp, Homo sapiens
agtatggttgtttac

SEQ ID NO: 1509919 - DNA, 15 bp, Homo sapiens
cagtatggttgttta

SEQ ID NO: 1509920 - DNA, 15 bp, Homo sapiens
acagtatggttgttt

SEQ ID NO: 1509921 - DNA, 15 bp, Homo sapiens
gacagtatggttgtt

SEQ ID NO: 1509922 - DNA, 15 bp, Homo sapiens
ggacagtatggttgt

SEQ ID NO: 1509923 - DNA, 15 bp, Homo sapiens
gggacagtatggttg

SEQ ID NO: 1509924 - DNA, 15 bp, Homo sapiens
tgggacagtatggtt

SEQ ID NO: 1509925 - DNA, 15 bp, Homo sapiens
ttgggacagtatggt

SEQ ID NO: 1509926 - DNA, 15 bp, Homo sapiens
tttgggacagtatgg

SEQ ID NO: 1509927 - DNA, 15 bp, Homo sapiens
ttttgggacagtatg

SEQ ID NO: 1509928 - DNA, 15 bp, Homo sapiens
tttttgggacagtat

SEQ ID NO: 1509929 - DNA, 15 bp, Homo sapiens
ttttttgggacagta

SEQ ID NO: 1509930 - DNA, 15 bp, Homo sapiens
cttttttgggacagt

SEQ ID NO: 1509931 - DNA, 15 bp, Homo sapiens
gcttttttgggacag

SEQ ID NO: 1509932 - DNA, 15 bp, Homo sapiens
tgcttttttgggaca

SEQ ID NO: 1509933 - DNA, 15 bp, Homo sapiens
atgcttttttgggac

SEQ ID NO: 1509934 - DNA, 15 bp, Homo sapiens
aatgcttttttggga

SEQ ID NO: 1509935 - DNA, 15 bp, Homo sapiens
aaatgcttttttggg

SEQ ID NO: 1509936 - DNA, 15 bp, Homo sapiens
gaaatgcttttttgg

SEQ ID NO: 1509937 - DNA, 15 bp, Homo sapiens
agaaatgcttttttg

SEQ ID NO: 1509938 - DNA, 15 bp, Homo sapiens
aagaaatgctttttt

SEQ ID NO: 1509939 - DNA, 15 bp, Homo sapiens
gaagaaatgcttttt

SEQ ID NO: 1509940 - DNA, 15 bp, Homo sapiens
ggaagaaatgctttt

SEQ ID NO: 1509941 - DNA, 15 bp, Homo sapiens
gggaagaaatgcttt

SEQ ID NO: 1509942 - DNA, 15 bp, Homo sapiens
agggaagaaatgctt

SEQ ID NO: 1509943 - DNA, 15 bp, Homo sapiens
gagggaagaaatgct

SEQ ID NO: 1509944 - DNA, 15 bp, Homo sapiens
ggagggaagaaatgc

SEQ ID NO: 1509945 - DNA, 15 bp, Homo sapiens
gggagggaagaaatg

SEQ ID NO: 1509946 - DNA, 15 bp, Homo sapiens
tgggagggaagaaat

SEQ ID NO: 1509947 - DNA, 15 bp, Homo sapiens
ctgggagggaagaaa

SEQ ID NO: 1509948 - DNA, 15 bp, Homo sapiens
actgggagggaagaa

SEQ ID NO: 1509949 - DNA, 15 bp, Homo sapiens
aactgggagggaaga

SEQ ID NO: 1509950 - DNA, 15 bp, Homo sapiens
aaactgggagggaag

SEQ ID NO: 1509951 - DNA, 15 bp, Homo sapiens
aaaactgggagggaa

SEQ ID NO: 1509952 - DNA, 15 bp, Homo sapiens
caaaactgggaggga

SEQ ID NO: 1509953 - DNA, 15 bp, Homo sapiens
ccaaaactgggaggg

SEQ ID NO: 1509954 - DNA, 15 bp, Homo sapiens
cccaaaactgggagg

SEQ ID NO: 1509955 - DNA, 15 bp, Homo sapiens
tcccaaaactgggag

SEQ ID NO: 1509956 - DNA, 15 bp, Homo sapiens
atcccaaaactggga

SEQ ID NO: 1509957 - DNA, 15 bp, Homo sapiens
aatcccaaaactggg

SEQ ID NO: 1509958 - DNA, 15 bp, Homo sapiens
gaatcccaaaactgg

SEQ ID NO: 1509959 - DNA, 15 bp, Homo sapiens
ggaatcccaaaactg

SEQ ID NO: 1509960 - DNA, 15 bp, Homo sapiens
aggaatcccaaaact

SEQ ID NO: 1509961 - DNA, 15 bp, Homo sapiens
gaggaatcccaaaac

SEQ ID NO: 1509962 - DNA, 15 bp, Homo sapiens
ggaggaatcccaaaa

SEQ ID NO: 1509963 - DNA, 15 bp, Homo sapiens
gggaggaatcccaaa

SEQ ID NO: 1509964 - DNA, 15 bp, Homo sapiens
agggaggaatcccaa

SEQ ID NO: 1509965 - DNA, 15 bp, Homo sapiens
cagggaggaatccca

SEQ ID NO: 1509966 - DNA, 15 bp, Homo sapiens
tcagggaggaatccc

SEQ ID NO: 1509967 - DNA, 15 bp, Homo sapiens
ttcagggaggaatcc

SEQ ID NO: 1509968 - DNA, 15 bp, Homo sapiens
attcagggaggaatc

SEQ ID NO: 1509969 - DNA, 15 bp, Homo sapiens
cattcagggaggaat

SEQ ID NO: 1509970 - DNA, 15 bp, Homo sapiens
ccattcagggaggaa

SEQ ID NO: 1509971 - DNA, 15 bp, Homo sapiens
tccattcagggagga

SEQ ID NO: 1509972 - DNA, 15 bp, Homo sapiens
ctccattcagggagg

SEQ ID NO: 1509973 - DNA, 15 bp, Homo sapiens
actccattcagggag

SEQ ID NO: 1509974 - DNA, 15 bp, Homo sapiens
aactccattcaggga

SEQ ID NO: 1509975 - DNA, 15 bp, Homo sapiens
gaactccattcaggg

SEQ ID NO: 1509976 - DNA, 15 bp, Homo sapiens
tgaactccattcagg

SEQ ID NO: 1509977 - DNA, 15 bp, Homo sapiens
ctgaactccattcag

SEQ ID NO: 1509978 - DNA, 15 bp, Homo sapiens
actgaactccattca

SEQ ID NO: 1509979 - DNA, 15 bp, Homo sapiens
tactgaactccattc

SEQ ID NO: 1509980 - DNA, 15 bp, Homo sapiens
atactgaactccatt

SEQ ID NO: 1509981 - DNA, 15 bp, Homo sapiens
aatactgaactccat

SEQ ID NO: 1509982 - DNA, 15 bp, Homo sapiens
gaatactgaactcca

SEQ ID NO: 1509983 - DNA, 15 bp, Homo sapiens
tgaatactgaactcc

SEQ ID NO: 1509984 - DNA, 15 bp, Homo sapiens
ttgaatactgaactc

SEQ ID NO: 1509985 - DNA, 15 bp, Homo sapiens
tttgaatactgaact

SEQ ID NO: 1509986 - DNA, 15 bp, Homo sapiens
ttttgaatactgaac

SEQ ID NO: 1509987 - DNA, 15 bp, Homo sapiens
attttgaatactgaa

SEQ ID NO: 1509988 - DNA, 15 bp, Homo sapiens
cattttgaatactga

SEQ ID NO: 1509989 - DNA, 15 bp, Homo sapiens
acattttgaatactg

SEQ ID NO: 1509990 - DNA, 15 bp, Homo sapiens
cacattttgaatact

SEQ ID NO: 1509991 - DNA, 15 bp, Homo sapiens
acacattttgaatac

SEQ ID NO: 1509992 - DNA, 15 bp, Homo sapiens
tacacattttgaata

SEQ ID NO: 1509993 - DNA, 15 bp, Homo sapiens
atacacattttgaat

SEQ ID NO: 1509994 - DNA, 15 bp, Homo sapiens
gatacacattttgaa

SEQ ID NO: 1509995 - DNA, 15 bp, Homo sapiens
tgatacacattttga

SEQ ID NO: 1509996 - DNA, 15 bp, Homo sapiens
atgatacacattttg

SEQ ID NO: 1509997 - DNA, 15 bp, Homo sapiens
tatgatacacatttt

SEQ ID NO: 1509998 - DNA, 15 bp, Homo sapiens
ttatgatacacattt

SEQ ID NO: 1509999 - DNA, 15 bp, Homo sapiens
cttatgatacacatt

SEQ ID NO: 1510000 - DNA, 15 bp, Homo sapiens
acttatgatacacat

SEQ ID NO: 1510001 - DNA, 15 bp, Homo sapiens
aacttatgatacaca

SEQ ID NO: 1510002 - DNA, 15 bp, Homo sapiens
caacttatgatacac

SEQ ID NO: 1510003 - DNA, 15 bp, Homo sapiens
ccaacttatgataca

SEQ ID NO: 1510004 - DNA, 15 bp, Homo sapiens
accaacttatgatac

SEQ ID NO: 1510005 - DNA, 15 bp, Homo sapiens
aaccaacttatgata

SEQ ID NO: 1510006 - DNA, 15 bp, Homo sapiens
aaaccaacttatgat

SEQ ID NO: 1510007 - DNA, 15 bp, Homo sapiens
aaaaccaacttatga

SEQ ID NO: 1510008 - DNA, 15 bp, Homo sapiens
taaaaccaacttatg

SEQ ID NO: 1510009 - DNA, 15 bp, Homo sapiens
ataaaaccaacttat

SEQ ID NO: 1510010 - DNA, 15 bp, Homo sapiens
tataaaaccaactta

SEQ ID NO: 1510011 - DNA, 15 bp, Homo sapiens
atataaaaccaactt

SEQ ID NO: 1510012 - DNA, 15 bp, Homo sapiens
aatataaaaccaact

SEQ ID NO: 1510013 - DNA, 15 bp, Homo sapiens
aaatataaaaccaac

SEQ ID NO: 1510014 - DNA, 15 bp, Homo sapiens
aaaatataaaaccaa

SEQ ID NO: 1510015 - DNA, 15 bp, Homo sapiens
taaaatataaaacca

SEQ ID NO: 1510016 - DNA, 15 bp, Homo sapiens
gtaaaatataaaacc

SEQ ID NO: 1510017 - DNA, 15 bp, Homo sapiens
agtaaaatataaaac

SEQ ID NO: 1510018 - DNA, 15 bp, Homo sapiens
tagtaaaatataaaa

SEQ ID NO: 1510019 - DNA, 15 bp, Homo sapiens
atagtaaaatataaa

SEQ ID NO: 1510020 - DNA, 15 bp, Homo sapiens
gatagtaaaatataa

SEQ ID NO: 1510021 - DNA, 15 bp, Homo sapiens
ggatagtaaaatata

SEQ ID NO: 1510022 - DNA, 15 bp, Homo sapiens
cggatagtaaaatat

SEQ ID NO: 1510023 - DNA, 15 bp, Homo sapiens
ccggatagtaaaata

SEQ ID NO: 1510024 - DNA, 15 bp, Homo sapiens
gccggatagtaaaat

SEQ ID NO: 1510025 - DNA, 15 bp, Homo sapiens
cgccggatagtaaaa

SEQ ID NO: 1510026 - DNA, 15 bp, Homo sapiens
tcgccggatagtaaa

SEQ ID NO: 1510027 - DNA, 15 bp, Homo sapiens
ttcgccggatagtaa

SEQ ID NO: 1510028 - DNA, 15 bp, Homo sapiens
gttcgccggatagta

SEQ ID NO: 1510029 - DNA, 15 bp, Homo sapiens
tgttcgccggatagt

SEQ ID NO: 1510030 - DNA, 15 bp, Homo sapiens
ctgttcgccggatag

SEQ ID NO: 1510031 - DNA, 15 bp, Homo sapiens
cctgttcgccggata

SEQ ID NO: 1510032 - DNA, 15 bp, Homo sapiens
tcctgttcgccggat

SEQ ID NO: 1510033 - DNA, 15 bp, Homo sapiens
atcctgttcgccgga

SEQ ID NO: 1510034 - DNA, 15 bp, Homo sapiens
aatcctgttcgccgg

SEQ ID NO: 1510035 - DNA, 15 bp, Homo sapiens
aaatcctgttcgccg

SEQ ID NO: 1510036 - DNA, 15 bp, Homo sapiens
caaatcctgttcgcc

SEQ ID NO: 1510037 - DNA, 15 bp, Homo sapiens
acaaatcctgttcgc

SEQ ID NO: 1510038 - DNA, 15 bp, Homo sapiens
tacaaatcctgttcg

SEQ ID NO: 1510039 - DNA, 15 bp, Homo sapiens
ttacaaatcctgttc

SEQ ID NO: 1510040 - DNA, 15 bp, Homo sapiens
attacaaatcctgtt

SEQ ID NO: 1510041 - DNA, 15 bp, Homo sapiens
gattacaaatcctgt

SEQ ID NO: 1510042 - DNA, 15 bp, Homo sapiens
ggattacaaatcctg

SEQ ID NO: 1510043 - DNA, 15 bp, Homo sapiens
tggattacaaatcct

SEQ ID NO: 1510044 - DNA, 15 bp, Homo sapiens
gtggattacaaatcc

SEQ ID NO: 1510045 - DNA, 15 bp, Homo sapiens
tgtggattacaaatc

SEQ ID NO: 1510046 - DNA, 15 bp, Homo sapiens
ctgtggattacaaat

SEQ ID NO: 1510047 - DNA, 15 bp, Homo sapiens
actgtggattacaaa

SEQ ID NO: 1510048 - DNA, 15 bp, Homo sapiens
aactgtggattacaa

SEQ ID NO: 1510049 - DNA, 15 bp, Homo sapiens
aaactgtggattaca

SEQ ID NO: 1510050 - DNA, 15 bp, Homo sapiens
caaactgtggattac

SEQ ID NO: 1510051 - DNA, 15 bp, Homo sapiens
ccaaactgtggatta

SEQ ID NO: 1510052 - DNA, 15 bp, Homo sapiens
cccaaactgtggatt

SEQ ID NO: 1510053 - DNA, 15 bp, Homo sapiens
acccaaactgtggat

SEQ ID NO: 1510054 - DNA, 15 bp, Homo sapiens
aacccaaactgtgga

SEQ ID NO: 1510055 - DNA, 15 bp, Homo sapiens
taacccaaactgtgg

SEQ ID NO: 1510056 - DNA, 15 bp, Homo sapiens
ttaacccaaactgtg

SEQ ID NO: 1510057 - DNA, 15 bp, Homo sapiens
cttaacccaaactgt

SEQ ID NO: 1510058 - DNA, 15 bp, Homo sapiens
ccttaacccaaactg

SEQ ID NO: 1510059 - DNA, 15 bp, Homo sapiens
accttaacccaaact

SEQ ID NO: 1510060 - DNA, 15 bp, Homo sapiens
taccttaacccaaac

SEQ ID NO: 1510061 - DNA, 15 bp, Homo sapiens
ttaccttaacccaaa

SEQ ID NO: 1510062 - DNA, 15 bp, Homo sapiens
attaccttaacccaa

SEQ ID NO: 1510063 - DNA, 15 bp, Homo sapiens
tattaccttaaccca

SEQ ID NO: 1510064 - DNA, 15 bp, Homo sapiens
atattaccttaaccc

SEQ ID NO: 1510065 - DNA, 15 bp, Homo sapiens
tatattaccttaacc

SEQ ID NO: 1510066 - DNA, 15 bp, Homo sapiens
ttatattaccttaac

SEQ ID NO: 1510067 - DNA, 15 bp, Homo sapiens
gttatattaccttaa

SEQ ID NO: 1510068 - DNA, 15 bp, Homo sapiens
agttatattacctta

SEQ ID NO: 1510069 - DNA, 15 bp, Homo sapiens
gagttatattacctt

SEQ ID NO: 1510070 - DNA, 15 bp, Homo sapiens
cgagttatattacct

SEQ ID NO: 1510071 - DNA, 15 bp, Homo sapiens
tcgagttatattacc

SEQ ID NO: 1510072 - DNA, 15 bp, Homo sapiens
atcgagttatattac

SEQ ID NO: 1510073 - DNA, 15 bp, Homo sapiens
catcgagttatatta

SEQ ID NO: 1510074 - DNA, 15 bp, Homo sapiens
gcatcgagttatatt

SEQ ID NO: 1510075 - DNA, 15 bp, Homo sapiens
agcatcgagttatat

SEQ ID NO: 1510076 - DNA, 15 bp, Homo sapiens
tagcatcgagttata

SEQ ID NO: 1510077 - DNA, 15 bp, Homo sapiens
atagcatcgagttat

SEQ ID NO: 1510078 - DNA, 15 bp, Homo sapiens
aatagcatcgagtta

SEQ ID NO: 1510079 - DNA, 15 bp, Homo sapiens
gaatagcatcgagtt

SEQ ID NO: 1510080 - DNA, 15 bp, Homo sapiens
tgaatagcatcgagt

SEQ ID NO: 1510081 - DNA, 15 bp, Homo sapiens
ttgaatagcatcgag

SEQ ID NO: 1510082 - DNA, 15 bp, Homo sapiens
tttgaatagcatcga

SEQ ID NO: 1510083 - DNA, 15 bp, Homo sapiens
ttttgaatagcatcg

SEQ ID NO: 1510084 - DNA, 15 bp, Homo sapiens
attttgaatagcatc

SEQ ID NO: 1510085 - DNA, 15 bp, Homo sapiens
tattttgaatagcat

SEQ ID NO: 1510086 - DNA, 15 bp, Homo sapiens
atattttgaatagca

SEQ ID NO: 1510087 - DNA, 15 bp, Homo sapiens
aatattttgaatagc

SEQ ID NO: 1510088 - DNA, 15 bp, Homo sapiens
gaatattttgaatag

SEQ ID NO: 1510089 - DNA, 15 bp, Homo sapiens
cagaatattttgaat

SEQ ID NO: 1510090 - DNA, 15 bp, Homo sapiens
tcagaatattttgaa

SEQ ID NO: 1510091 - DNA, 15 bp, Homo sapiens
ctcagaatattttga

SEQ ID NO: 1510092 - DNA, 15 bp, Homo sapiens
tctcagaatattttg

SEQ ID NO: 1510093 - DNA, 15 bp, Homo sapiens
ttctcagaatatttt

SEQ ID NO: 1510094 - DNA, 15 bp, Homo sapiens
attctcagaatattt

SEQ ID NO: 1510095 - DNA, 15 bp, Homo sapiens
aattctcagaatatt

SEQ ID NO: 1510096 - DNA, 15 bp, Homo sapiens
gaattctcagaatat

SEQ ID NO: 1510097 - DNA, 15 bp, Homo sapiens
ggaattctcagaata

SEQ ID NO: 1510098 - DNA, 15 bp, Homo sapiens
tggaattctcagaat

SEQ ID NO: 1510099 - DNA, 15 bp, Homo sapiens
ttggaattctcagaa

SEQ ID NO: 1510100 - DNA, 15 bp, Homo sapiens
cttggaattctcaga

SEQ ID NO: 1510101 - DNA, 15 bp, Homo sapiens
acttggaattctcag

SEQ ID NO: 1510102 - DNA, 15 bp, Homo sapiens
cacttggaattctca

SEQ ID NO: 1510103 - DNA, 15 bp, Homo sapiens
tcacttggaattctc

SEQ ID NO: 1510104 - DNA, 15 bp, Homo sapiens
ttcacttggaattct

SEQ ID NO: 1510105 - DNA, 15 bp, Homo sapiens
cttcacttggaattc

SEQ ID NO: 1510106 - DNA, 15 bp, Homo sapiens
tcttcacttggaatt

SEQ ID NO: 1510107 - DNA, 15 bp, Homo sapiens
ttcttcacttggaat

SEQ ID NO: 1510108 - DNA, 15 bp, Homo sapiens
tttcttcacttggaa

SEQ ID NO: 1510109 - DNA, 15 bp, Homo sapiens
atttcttcacttgga

SEQ ID NO: 1510110 - DNA, 15 bp, Homo sapiens
aatttcttcacttgg

SEQ ID NO: 1510111 - DNA, 15 bp, Homo sapiens
taatttcttcacttg

SEQ ID NO: 1510112 - DNA, 15 bp, Homo sapiens
ttaatttcttcactt

SEQ ID NO: 1510113 - DNA, 15 bp, Homo sapiens
tttaatttcttcact

SEQ ID NO: 1510114 - DNA, 15 bp, Homo sapiens
ttttaatttcttcac

SEQ ID NO: 1510115 - DNA, 15 bp, Homo sapiens
attttaatttcttca

SEQ ID NO: 1510116 - DNA, 15 bp, Homo sapiens
cattttaatttcttc

SEQ ID NO: 1510117 - DNA, 15 bp, Homo sapiens
acattttaatttctt

SEQ ID NO: 1510118 - DNA, 15 bp, Homo sapiens
gacattttaatttct

SEQ ID NO: 1510119 - DNA, 15 bp, Homo sapiens
cgacattttaatttc

SEQ ID NO: 1510120 - DNA, 15 bp, Homo sapiens
tcgacattttaattt

SEQ ID NO: 1510121 - DNA, 15 bp, Homo sapiens
ctcgacattttaatt

SEQ ID NO: 1510122 - DNA, 15 bp, Homo sapiens
tctcgacattttaat

SEQ ID NO: 1510123 - DNA, 15 bp, Homo sapiens
gtctcgacattttaa

SEQ ID NO: 1510124 - DNA, 15 bp, Homo sapiens
agtctcgacatttta

SEQ ID NO: 1510125 - DNA, 15 bp, Homo sapiens
aagtctcgacatttt

SEQ ID NO: 1510126 - DNA, 15 bp, Homo sapiens
gaagtctcgacattt

SEQ ID NO: 1510127 - DNA, 15 bp, Homo sapiens
tgaagtctcgacatt

SEQ ID NO: 1510128 - DNA, 15 bp, Homo sapiens
ttgaagtctcgacat

SEQ ID NO: 1510129 - DNA, 15 bp, Homo sapiens
attgaagtctcgaca

SEQ ID NO: 1510130 - DNA, 15 bp, Homo sapiens
aattgaagtctcgac

SEQ ID NO: 1510131 - DNA, 15 bp, Homo sapiens
taattgaagtctcga

SEQ ID NO: 1510132 - DNA, 15 bp, Homo sapiens
ctaattgaagtctcg

SEQ ID NO: 1510133 - DNA, 15 bp, Homo sapiens
gctaattgaagtctc

SEQ ID NO: 1510134 - DNA, 15 bp, Homo sapiens
agctaattgaagtct

SEQ ID NO: 1510135 - DNA, 15 bp, Homo sapiens
aagctaattgaagtc

SEQ ID NO: 1510136 - DNA, 15 bp, Homo sapiens
taagctaattgaagt

SEQ ID NO: 1510137 - DNA, 15 bp, Homo sapiens
ctaagctaattgaag

SEQ ID NO: 1510138 - DNA, 15 bp, Homo sapiens
actaagctaattgaa

SEQ ID NO: 1510139 - DNA, 15 bp, Homo sapiens
aactaagctaattga

SEQ ID NO: 1510140 - DNA, 15 bp, Homo sapiens
aaactaagctaattg

SEQ ID NO: 1510141 - DNA, 15 bp, Homo sapiens
aaaactaagctaatt

SEQ ID NO: 1510142 - DNA, 15 bp, Homo sapiens
caaaactaagctaat

SEQ ID NO: 1510143 - DNA, 15 bp, Homo sapiens
tcaaaactaagctaa

SEQ ID NO: 1510144 - DNA, 15 bp, Homo sapiens
ttcaaaactaagcta

SEQ ID NO: 1510145 - DNA, 15 bp, Homo sapiens
attcaaaactaagct

SEQ ID NO: 1510146 - DNA, 15 bp, Homo sapiens
tattcaaaactaagc

SEQ ID NO: 1510147 - DNA, 15 bp, Homo sapiens
ttattcaaaactaag

SEQ ID NO: 1510148 - DNA, 15 bp, Homo sapiens
cttattcaaaactaa

SEQ ID NO: 1510149 - DNA, 15 bp, Homo sapiens
tcttattcaaaacta

SEQ ID NO: 1510150 - DNA, 15 bp, Homo sapiens
ttcttattcaaaact

SEQ ID NO: 1510151 - DNA, 15 bp, Homo sapiens
tttcttattcaaaac

SEQ ID NO: 1510152 - DNA, 15 bp, Homo sapiens
ttttcttattcaaaa

SEQ ID NO: 1510153 - DNA, 15 bp, Homo sapiens
tttttcttattcaaa

SEQ ID NO: 1510154 - DNA, 15 bp, Homo sapiens
ttttttcttattcaa

SEQ ID NO: 1510155 - DNA, 15 bp, Homo sapiens
attttttcttattca

SEQ ID NO: 1510156 - DNA, 15 bp, Homo sapiens
gattttttcttattc

SEQ ID NO: 1510157 - DNA, 15 bp, Homo sapiens
agattttttcttatt

SEQ ID NO: 1510158 - DNA, 15 bp, Homo sapiens
cagattttttcttat

SEQ ID NO: 1510159 - DNA, 15 bp, Homo sapiens
ccagattttttctta

SEQ ID NO: 1510160 - DNA, 15 bp, Homo sapiens
cccagattttttctt

SEQ ID NO: 1510161 - DNA, 15 bp, Homo sapiens
tcccagattttttct

SEQ ID NO: 1510162 - DNA, 15 bp, Homo sapiens
gtcccagattttttc

SEQ ID NO: 1510163 - DNA, 15 bp, Homo sapiens
agtcccagatttttt

SEQ ID NO: 1510164 - DNA, 15 bp, Homo sapiens
cagtcccagattttt

SEQ ID NO: 1510165 - DNA, 15 bp, Homo sapiens
tcagtcccagatttt

SEQ ID NO: 1510166 - DNA, 15 bp, Homo sapiens
ttcagtcccagattt

SEQ ID NO: 1510167 - DNA, 15 bp, Homo sapiens
tttcagtcccagatt

SEQ ID NO: 1510168 - DNA, 15 bp, Homo sapiens
atttcagtcccagat

SEQ ID NO: 1510169 - DNA, 15 bp, Homo sapiens
catttcagtcccaga

SEQ ID NO: 1510170 - DNA, 15 bp, Homo sapiens
acatttcagtcccag

SEQ ID NO: 1510171 - DNA, 15 bp, Homo sapiens
cacatttcagtccca

SEQ ID NO: 1510172 - DNA, 15 bp, Homo sapiens
tcacatttcagtccc

SEQ ID NO: 1510173 - DNA, 15 bp, Homo sapiens
ctcacatttcagtcc

SEQ ID NO: 1510174 - DNA, 15 bp, Homo sapiens
tctcacatttcagtc

SEQ ID NO: 1510175 - DNA, 15 bp, Homo sapiens
ctctcacatttcagt

SEQ ID NO: 1510176 - DNA, 15 bp, Homo sapiens
tctctcacatttcag

SEQ ID NO: 1510177 - DNA, 15 bp, Homo sapiens
atctctcacatttca

SEQ ID NO: 1510178 - DNA, 15 bp, Homo sapiens
catctctcacatttc

SEQ ID NO: 1510179 - DNA, 15 bp, Homo sapiens
acatctctcacattt

SEQ ID NO: 1510180 - DNA, 15 bp, Homo sapiens
cacatctctcacatt

SEQ ID NO: 1510181 - DNA, 15 bp, Homo sapiens
tcacatctctcacat

SEQ ID NO: 1510182 - DNA, 15 bp, Homo sapiens
ctcacatctctcaca

SEQ ID NO: 1510183 - DNA, 15 bp, Homo sapiens
cctcacatctctcac

SEQ ID NO: 1510184 - DNA, 15 bp, Homo sapiens
gcctcacatctctca

SEQ ID NO: 1510185 - DNA, 15 bp, Homo sapiens
agcctcacatctctc

SEQ ID NO: 1510186 - DNA, 15 bp, Homo sapiens
tagcctcacatctct

SEQ ID NO: 1510187 - DNA, 15 bp, Homo sapiens
atagcctcacatctc

SEQ ID NO: 1510188 - DNA, 15 bp, Homo sapiens
aatagcctcacatct

SEQ ID NO: 1510189 - DNA, 15 bp, Homo sapiens
gaatagcctcacatc

SEQ ID NO: 1510190 - DNA, 15 bp, Homo sapiens
tgaatagcctcacat

SEQ ID NO: 1510191 - DNA, 15 bp, Homo sapiens
ttgaatagcctcaca

SEQ ID NO: 1510192 - DNA, 15 bp, Homo sapiens
attgaatagcctcac

SEQ ID NO: 1510193 - DNA, 15 bp, Homo sapiens
gattgaatagcctca

SEQ ID NO: 1510194 - DNA, 15 bp, Homo sapiens
ggattgaatagcctc

SEQ ID NO: 1510195 - DNA, 15 bp, Homo sapiens
gggattgaatagcct

SEQ ID NO: 1510196 - DNA, 15 bp, Homo sapiens
agggattgaatagcc

SEQ ID NO: 1510197 - DNA, 15 bp, Homo sapiens
gagggattgaatagc

SEQ ID NO: 1510198 - DNA, 15 bp, Homo sapiens
agagggattgaatag

SEQ ID NO: 1510199 - DNA, 15 bp, Homo sapiens
aagagggattgaata

SEQ ID NO: 1510200 - DNA, 15 bp, Homo sapiens
taagagggattgaat

SEQ ID NO: 1510201 - DNA, 15 bp, Homo sapiens
ataagagggattgaa

SEQ ID NO: 1510202 - DNA, 15 bp, Homo sapiens
gataagagggattga

SEQ ID NO: 1510203 - DNA, 15 bp, Homo sapiens
agataagagggattg

SEQ ID NO: 1510204 - DNA, 15 bp, Homo sapiens
tagataagagggatt

SEQ ID NO: 1510205 - DNA, 15 bp, Homo sapiens
gtagataagagggat

SEQ ID NO: 1510206 - DNA, 15 bp, Homo sapiens
tgtagataagaggga

SEQ ID NO: 1510207 - DNA, 15 bp, Homo sapiens
ttgtagataagaggg

SEQ ID NO: 1510208 - DNA, 15 bp, Homo sapiens
attgtagataagagg

SEQ ID NO: 1510209 - DNA, 15 bp, Homo sapiens
aattgtagataagag

SEQ ID NO: 1510210 - DNA, 15 bp, Homo sapiens
aaattgtagataaga

SEQ ID NO: 1510211 - DNA, 15 bp, Homo sapiens
caaattgtagataag

SEQ ID NO: 1510212 - DNA, 15 bp, Homo sapiens
tcaaattgtagataa

SEQ ID NO: 1510213 - DNA, 15 bp, Homo sapiens
ttcaaattgtagata

SEQ ID NO: 1510214 - DNA, 15 bp, Homo sapiens
attcaaattgtagat

SEQ ID NO: 1510215 - DNA, 15 bp, Homo sapiens
cattcaaattgtaga

SEQ ID NO: 1510216 - DNA, 15 bp, Homo sapiens
acattcaaattgtag

SEQ ID NO: 1510217 - DNA, 15 bp, Homo sapiens
tacattcaaattgta

SEQ ID NO: 1510218 - DNA, 15 bp, Homo sapiens
atacattcaaattgt

SEQ ID NO: 1510219 - DNA, 15 bp, Homo sapiens
aatacattcaaattg

SEQ ID NO: 1510220 - DNA, 15 bp, Homo sapiens
taatacattcaaatt

SEQ ID NO: 1510221 - DNA, 15 bp, Homo sapiens
ataatacattcaaat

SEQ ID NO: 1510222 - DNA, 15 bp, Homo sapiens
aataatacattcaaa

SEQ ID NO: 1510223 - DNA, 15 bp, Homo sapiens
gaataatacattcaa

SEQ ID NO: 1510224 - DNA, 15 bp, Homo sapiens
agaataatacattca

SEQ ID NO: 1510225 - DNA, 15 bp, Homo sapiens
aagaataatacattc

SEQ ID NO: 1510226 - DNA, 15 bp, Homo sapiens
gaagaataatacatt

SEQ ID NO: 1510227 - DNA, 15 bp, Homo sapiens
ggaagaataatacat

SEQ ID NO: 1510228 - DNA, 15 bp, Homo sapiens
tggaagaataataca

SEQ ID NO: 1510229 - DNA, 15 bp, Homo sapiens
ctggaagaataatac

SEQ ID NO: 1510230 - DNA, 15 bp, Homo sapiens
tctggaagaataata

SEQ ID NO: 1510231 - DNA, 15 bp, Homo sapiens
atctggaagaataat

SEQ ID NO: 1510232 - DNA, 15 bp, Homo sapiens
aatctggaagaataa

SEQ ID NO: 1510233 - DNA, 15 bp, Homo sapiens
aaatctggaagaata

SEQ ID NO: 1510234 - DNA, 15 bp, Homo sapiens
aaaatctggaagaat

SEQ ID NO: 1510235 - DNA, 15 bp, Homo sapiens
aaaaatctggaagaa

SEQ ID NO: 1510236 - DNA, 15 bp, Homo sapiens
aaaaaatctggaaga

SEQ ID NO: 1510237 - DNA, 15 bp, Homo sapiens
taaaaaatctggaag

SEQ ID NO: 1510238 - DNA, 15 bp, Homo sapiens
ttaaaaaatctggaa

SEQ ID NO: 1510239 - DNA, 15 bp, Homo sapiens
tttaaaaaatctgga

SEQ ID NO: 1510240 - DNA, 15 bp, Homo sapiens
atttaaaaaatctgg

SEQ ID NO: 1510241 - DNA, 15 bp, Homo sapiens
tatttaaaaaatctg

SEQ ID NO: 1510242 - DNA, 15 bp, Homo sapiens
ttatttaaaaaatct

SEQ ID NO: 1510243 - DNA, 15 bp, Homo sapiens
tttatttaaaaaatc

SEQ ID NO: 1510244 - DNA, 15 bp, Homo sapiens
gtttatttaaaaaat

SEQ ID NO: 1510245 - DNA, 15 bp, Homo sapiens
tgtttatttaaaaaa

SEQ ID NO: 1510246 - DNA, 15 bp, Homo sapiens
atgtttatttaaaaa

SEQ ID NO: 1510247 - DNA, 15 bp, Homo sapiens
gatgtttatttaaaa

SEQ ID NO: 1510248 - DNA, 15 bp, Homo sapiens
agatgtttatttaaa

SEQ ID NO: 1510249 - DNA, 15 bp, Homo sapiens
cagatgtttatttaa

SEQ ID NO: 1510250 - DNA, 15 bp, Homo sapiens
ccagatgtttattta

SEQ ID NO: 1510251 - DNA, 15 bp, Homo sapiens
tccagatgtttattt

SEQ ID NO: 1510252 - DNA, 15 bp, Homo sapiens
ctccagatgtttatt

SEQ ID NO: 1510253 - DNA, 15 bp, Homo sapiens
actccagatgtttat

SEQ ID NO: 1510254 - DNA, 15 bp, Homo sapiens
tactccagatgttta

SEQ ID NO: 1510255 - DNA, 15 bp, Homo sapiens
atactccagatgttt

SEQ ID NO: 1510256 - DNA, 15 bp, Homo sapiens
aatactccagatgtt

SEQ ID NO: 1510257 - DNA, 15 bp, Homo sapiens
taatactccagatgt

SEQ ID NO: 1510258 - DNA, 15 bp, Homo sapiens
ataatactccagatg

SEQ ID NO: 1510259 - DNA, 15 bp, Homo sapiens
tataatactccagat

SEQ ID NO: 1510260 - DNA, 15 bp, Homo sapiens
ttataatactccaga

SEQ ID NO: 1510261 - DNA, 15 bp, Homo sapiens
tttataatactccag

SEQ ID NO: 1510262 - DNA, 15 bp, Homo sapiens
atttataatactcca

SEQ ID NO: 1510263 - DNA, 15 bp, Homo sapiens
aatttataatactcc

SEQ ID NO: 1510264 - DNA, 15 bp, Homo sapiens
taatttataatactc

SEQ ID NO: 1510265 - DNA, 15 bp, Homo sapiens
ctaatttataatact

SEQ ID NO: 1510266 - DNA, 15 bp, Homo sapiens
tctaatttataatac

SEQ ID NO: 1510267 - DNA, 15 bp, Homo sapiens
ttctaatttataata

SEQ ID NO: 1510268 - DNA, 15 bp, Homo sapiens
cttctaatttataat

SEQ ID NO: 1510269 - DNA, 15 bp, Homo sapiens
gcttctaatttataa

SEQ ID NO: 1510270 - DNA, 15 bp, Homo sapiens
ggcttctaatttata

SEQ ID NO: 1510271 - DNA, 15 bp, Homo sapiens
aggcttctaatttat

SEQ ID NO: 1510272 - DNA, 15 bp, Homo sapiens
taggcttctaattta

SEQ ID NO: 1510273 - DNA, 15 bp, Homo sapiens
gtaggcttctaattt

SEQ ID NO: 1510274 - DNA, 15 bp, Homo sapiens
tgtaggcttctaatt

SEQ ID NO: 1510275 - DNA, 15 bp, Homo sapiens
atgtaggcttctaat

SEQ ID NO: 1510276 - DNA, 15 bp, Homo sapiens
aatgtaggcttctaa

SEQ ID NO: 1510277 - DNA, 15 bp, Homo sapiens
aaatgtaggcttcta

SEQ ID NO: 1510278 - DNA, 15 bp, Homo sapiens
aaaatgtaggcttct

SEQ ID NO: 1510279 - DNA, 15 bp, Homo sapiens
agaaaattccttctc

SEQ ID NO: 1510280 - DNA, 15 bp, Homo sapiens
cagaaaattccttct

SEQ ID NO: 1510281 - DNA, 15 bp, Homo sapiens
acagaaaattccttc

SEQ ID NO: 1510282 - DNA, 15 bp, Homo sapiens
aacagaaaattcctt

SEQ ID NO: 1510283 - DNA, 15 bp, Homo sapiens
taacagaaaattcct

SEQ ID NO: 1510284 - DNA, 15 bp, Homo sapiens
ctaacagaaaattcc

SEQ ID NO: 1510285 - DNA, 15 bp, Homo sapiens
cctaacagaaaattc

SEQ ID NO: 1510286 - DNA, 15 bp, Homo sapiens
gcctaacagaaaatt

SEQ ID NO: 1510287 - DNA, 15 bp, Homo sapiens
ggcctaacagaaaat

SEQ ID NO: 1510288 - DNA, 15 bp, Homo sapiens
tggcctaacagaaaa

SEQ ID NO: 1510289 - DNA, 15 bp, Homo sapiens
ctggcctaacagaaa

SEQ ID NO: 1510290 - DNA, 15 bp, Homo sapiens
tctggcctaacagaa

SEQ ID NO: 1510291 - DNA, 15 bp, Homo sapiens
atctggcctaacaga

SEQ ID NO: 1510292 - DNA, 15 bp, Homo sapiens
gatctggcctaacag

SEQ ID NO: 1510293 - DNA, 15 bp, Homo sapiens
agatctggcctaaca

SEQ ID NO: 1510294 - DNA, 15 bp, Homo sapiens
gagatctggcctaac

SEQ ID NO: 1510295 - DNA, 15 bp, Homo sapiens
tgagatctggcctaa

SEQ ID NO: 1510296 - DNA, 15 bp, Homo sapiens
gtgagatctggccta

SEQ ID NO: 1510297 - DNA, 15 bp, Homo sapiens
ggtgagatctggcct

SEQ ID NO: 1510298 - DNA, 15 bp, Homo sapiens
aggtgagatctggcc

SEQ ID NO: 1510299 - DNA, 15 bp, Homo sapiens
taggtgagatctggc

SEQ ID NO: 1510300 - DNA, 15 bp, Homo sapiens
gtaggtgagatctgg

SEQ ID NO: 1510301 - DNA, 15 bp, Homo sapiens
ggtaggtgagatctg

SEQ ID NO: 1510302 - DNA, 15 bp, Homo sapiens
tggtaggtgagatct

SEQ ID NO: 1510303 - DNA, 15 bp, Homo sapiens
gtggtaggtgagatc

SEQ ID NO: 1510304 - DNA, 15 bp, Homo sapiens
tgtggtaggtgagat

SEQ ID NO: 1510305 - DNA, 15 bp, Homo sapiens
atgtggtaggtgaga

SEQ ID NO: 1510306 - DNA, 15 bp, Homo sapiens
aatgtggtaggtgag

SEQ ID NO: 1510307 - DNA, 15 bp, Homo sapiens
taatgtggtaggtga

SEQ ID NO: 1510308 - DNA, 15 bp, Homo sapiens
ataatgtggtaggtg

SEQ ID NO: 1510309 - DNA, 15 bp, Homo sapiens
aataatgtggtaggt

SEQ ID NO: 1510310 - DNA, 15 bp, Homo sapiens
caataatgtggtagg

SEQ ID NO: 1510311 - DNA, 15 bp, Homo sapiens
acaataatgtggtag

SEQ ID NO: 1510312 - DNA, 15 bp, Homo sapiens
tacaataatgtggta

SEQ ID NO: 1510313 - DNA, 15 bp, Homo sapiens
ttacaataatgtggt

SEQ ID NO: 1510314 - DNA, 15 bp, Homo sapiens
attacaataatgtgg

SEQ ID NO: 1510315 - DNA, 15 bp, Homo sapiens
gattacaataatgtg

SEQ ID NO: 1510316 - DNA, 15 bp, Homo sapiens
ggattacaataatgt

SEQ ID NO: 1510317 - DNA, 15 bp, Homo sapiens
aggattacaataatg

SEQ ID NO: 1510318 - DNA, 15 bp, Homo sapiens
aaggattacaataat

SEQ ID NO: 1510319 - DNA, 15 bp, Homo sapiens
caaggattacaataa

SEQ ID NO: 1510320 - DNA, 15 bp, Homo sapiens
ccaaggattacaata

SEQ ID NO: 1510321 - DNA, 15 bp, Homo sapiens
tccaaggattacaat

SEQ ID NO: 1510322 - DNA, 15 bp, Homo sapiens
atccaaggattacaa

SEQ ID NO: 1510323 - DNA, 15 bp, Homo sapiens
gatccaaggattaca

SEQ ID NO: 1510324 - DNA, 15 bp, Homo sapiens
tgatccaaggattac

SEQ ID NO: 1510325 - DNA, 15 bp, Homo sapiens
ctgatccaaggatta

SEQ ID NO: 1510326 - DNA, 15 bp, Homo sapiens
cctgatccaaggatt

SEQ ID NO: 1510327 - DNA, 15 bp, Homo sapiens
gcctgatccaaggat

SEQ ID NO: 1510328 - DNA, 15 bp, Homo sapiens
tgcctgatccaagga

SEQ ID NO: 1510329 - DNA, 15 bp, Homo sapiens
ttgcctgatccaagg

SEQ ID NO: 1510330 - DNA, 15 bp, Homo sapiens
cttgcctgatccaag

SEQ ID NO: 1510331 - DNA, 15 bp, Homo sapiens
tcttgcctgatccaa

SEQ ID NO: 1510332 - DNA, 15 bp, Homo sapiens
ttcttgcctgatcca

SEQ ID NO: 1510333 - DNA, 15 bp, Homo sapiens
attcttgcctgatcc

SEQ ID NO: 1510334 - DNA, 15 bp, Homo sapiens
aattcttgcctgatc

SEQ ID NO: 1510335 - DNA, 15 bp, Homo sapiens
taattcttgcctgat

SEQ ID NO: 1510336 - DNA, 15 bp, Homo sapiens
ctaattcttgcctga

SEQ ID NO: 1510337 - DNA, 15 bp, Homo sapiens
tctaattcttgcctg

SEQ ID NO: 1510338 - DNA, 15 bp, Homo sapiens
ctctaattcttgcct

SEQ ID NO: 1510339 - DNA, 15 bp, Homo sapiens
tctctaattcttgcc

SEQ ID NO: 1510340 - DNA, 15 bp, Homo sapiens
ctctctaattcttgc

SEQ ID NO: 1510341 - DNA, 15 bp, Homo sapiens
gctctctaattcttg

SEQ ID NO: 1510342 - DNA, 15 bp, Homo sapiens
agctctctaattctt

SEQ ID NO: 1510343 - DNA, 15 bp, Homo sapiens
tagctctctaattct

SEQ ID NO: 1510344 - DNA, 15 bp, Homo sapiens
atagctctctaattc

SEQ ID NO: 1510345 - DNA, 15 bp, Homo sapiens
catagctctctaatt

SEQ ID NO: 1510346 - DNA, 15 bp, Homo sapiens
tcatagctctctaat

SEQ ID NO: 1510347 - DNA, 15 bp, Homo sapiens
ctcatagctctctaa

SEQ ID NO: 1510348 - DNA, 15 bp, Homo sapiens
gctcatagctctcta

SEQ ID NO: 1510349 - DNA, 15 bp, Homo sapiens
ggctcatagctctct

SEQ ID NO: 1510350 - DNA, 15 bp, Homo sapiens
tggctcatagctctc

SEQ ID NO: 1510351 - DNA, 15 bp, Homo sapiens
atggctcatagctct

SEQ ID NO: 1510352 - DNA, 15 bp, Homo sapiens
catggctcatagctc

SEQ ID NO: 1510353 - DNA, 15 bp, Homo sapiens
tcatggctcatagct

SEQ ID NO: 1510354 - DNA, 15 bp, Homo sapiens
atcatggctcatagc

SEQ ID NO: 1510355 - DNA, 15 bp, Homo sapiens
gatcatggctcatag

SEQ ID NO: 1510356 - DNA, 15 bp, Homo sapiens
ggatcatggctcata

SEQ ID NO: 1510357 - DNA, 15 bp, Homo sapiens
aggatcatggctcat

SEQ ID NO: 1510358 - DNA, 15 bp, Homo sapiens
caggatcatggctca

SEQ ID NO: 1510359 - DNA, 15 bp, Homo sapiens
ccaggatcatggctc

SEQ ID NO: 1510360 - DNA, 15 bp, Homo sapiens
gccaggatcatggct

SEQ ID NO: 1510361 - DNA, 15 bp, Homo sapiens
ggccaggatcatggc

SEQ ID NO: 1510362 - DNA, 15 bp, Homo sapiens
aggccaggatcatgg

SEQ ID NO: 1510363 - DNA, 15 bp, Homo sapiens
aaggccaggatcatg

SEQ ID NO: 1510364 - DNA, 15 bp, Homo sapiens
aaaggccaggatcat

SEQ ID NO: 1510365 - DNA, 15 bp, Homo sapiens
caaaggccaggatca

SEQ ID NO: 1510366 - DNA, 15 bp, Homo sapiens
acaaaggccaggatc

SEQ ID NO: 1510367 - DNA, 15 bp, Homo sapiens
aacaaaggccaggat

SEQ ID NO: 1510368 - DNA, 15 bp, Homo sapiens
caacaaaggccagga

SEQ ID NO: 1510369 - DNA, 15 bp, Homo sapiens
acaacaaaggccagg

SEQ ID NO: 1510370 - DNA, 15 bp, Homo sapiens
aacaacaaaggccag

SEQ ID NO: 1510371 - DNA, 15 bp, Homo sapiens
taacaacaaaggcca

SEQ ID NO: 1510372 - DNA, 15 bp, Homo sapiens
gtaacaacaaaggcc

SEQ ID NO: 1510373 - DNA, 15 bp, Homo sapiens
agtaacaacaaaggc

SEQ ID NO: 1510374 - DNA, 15 bp, Homo sapiens
cagtaacaacaaagg

SEQ ID NO: 1510375 - DNA, 15 bp, Homo sapiens
gcagtaacaacaaag

SEQ ID NO: 1510376 - DNA, 15 bp, Homo sapiens
agcagtaacaacaaa

SEQ ID NO: 1510377 - DNA, 15 bp, Homo sapiens
aagcagtaacaacaa

SEQ ID NO: 1510378 - DNA, 15 bp, Homo sapiens
caagcagtaacaaca

SEQ ID NO: 1510379 - DNA, 15 bp, Homo sapiens
tcaagcagtaacaac

SEQ ID NO: 1510380 - DNA, 15 bp, Homo sapiens
ctcaagcagtaacaa

SEQ ID NO: 1510381 - DNA, 15 bp, Homo sapiens
cctcaagcagtaaca

SEQ ID NO: 1510382 - DNA, 15 bp, Homo sapiens
tcctcaagcagtaac

SEQ ID NO: 1510383 - DNA, 15 bp, Homo sapiens
atcctcaagcagtaa

SEQ ID NO: 1510384 - DNA, 15 bp, Homo sapiens
aatcctcaagcagta

SEQ ID NO: 1510385 - DNA, 15 bp, Homo sapiens
caatcctcaagcagt

SEQ ID NO: 1510386 - DNA, 15 bp, Homo sapiens
tcaatcctcaagcag

SEQ ID NO: 1510387 - DNA, 15 bp, Homo sapiens
ctcaatcctcaagca

SEQ ID NO: 1510388 - DNA, 15 bp, Homo sapiens
cctcaatcctcaagc

SEQ ID NO: 1510389 - DNA, 15 bp, Homo sapiens
gcctcaatcctcaag

SEQ ID NO: 1510390 - DNA, 15 bp, Homo sapiens
tgcctcaatcctcaa

SEQ ID NO: 1510391 - DNA, 15 bp, Homo sapiens
atgcctcaatcctca

SEQ ID NO: 1510392 - DNA, 15 bp, Homo sapiens
gatgcctcaatcctc

SEQ ID NO: 1510393 - DNA, 15 bp, Homo sapiens
agatgcctcaatcct

SEQ ID NO: 1510394 - DNA, 15 bp, Homo sapiens
aagatgcctcaatcc

SEQ ID NO: 1510395 - DNA, 15 bp, Homo sapiens
aaagatgcctcaatc

SEQ ID NO: 1510396 - DNA, 15 bp, Homo sapiens
aaaagatgcctcaat

SEQ ID NO: 1510397 - DNA, 15 bp, Homo sapiens
aaaaagatgcctcaa

SEQ ID NO: 1510398 - DNA, 15 bp, Homo sapiens
taaaaagatgcctca

SEQ ID NO: 1510399 - DNA, 15 bp, Homo sapiens
ataaaaagatgcctc

SEQ ID NO: 1510400 - DNA, 15 bp, Homo sapiens
cataaaaagatgcct

SEQ ID NO: 1510401 - DNA, 15 bp, Homo sapiens
ccataaaaagatgcc

SEQ ID NO: 1510402 - DNA, 15 bp, Homo sapiens
gccataaaaagatgc

SEQ ID NO: 1510403 - DNA, 15 bp, Homo sapiens
agccataaaaagatg

SEQ ID NO: 1510404 - DNA, 15 bp, Homo sapiens
tagccataaaaagat

SEQ ID NO: 1510405 - DNA, 15 bp, Homo sapiens
gtagccataaaaaga

SEQ ID NO: 1510406 - DNA, 15 bp, Homo sapiens
ggtagccataaaaag

SEQ ID NO: 1510407 - DNA, 15 bp, Homo sapiens
gggtagccataaaaa

SEQ ID NO: 1510408 - DNA, 15 bp, Homo sapiens
ggggtagccataaaa

SEQ ID NO: 1510409 - DNA, 15 bp, Homo sapiens
aggggtagccataaa

SEQ ID NO: 1510410 - DNA, 15 bp, Homo sapiens
taggggtagccataa

SEQ ID NO: 1510411 - DNA, 15 bp, Homo sapiens
ataggggtagccata

SEQ ID NO: 1510412 - DNA, 15 bp, Homo sapiens
aataggggtagccat

SEQ ID NO: 1510413 - DNA, 15 bp, Homo sapiens
taataggggtagcca

SEQ ID NO: 1510414 - DNA, 15 bp, Homo sapiens
ataataggggtagcc

SEQ ID NO: 1510415 - DNA, 15 bp, Homo sapiens
gataataggggtagc

SEQ ID NO: 1510416 - DNA, 15 bp, Homo sapiens
agataataggggtag

SEQ ID NO: 1510417 - DNA, 15 bp, Homo sapiens
tagataataggggta

SEQ ID NO: 1510418 - DNA, 15 bp, Homo sapiens
atagataataggggt

SEQ ID NO: 1510419 - DNA, 15 bp, Homo sapiens
tatagataatagggg

SEQ ID NO: 1510420 - DNA, 15 bp, Homo sapiens
ttatagataataggg

SEQ ID NO: 1510421 - DNA, 15 bp, Homo sapiens
tttatagataatagg

SEQ ID NO: 1510422 - DNA, 15 bp, Homo sapiens
atttatagataatag

SEQ ID NO: 1510423 - DNA, 15 bp, Homo sapiens
aatttatagataata

SEQ ID NO: 1510424 - DNA, 15 bp, Homo sapiens
aaatttatagataat

SEQ ID NO: 1510425 - DNA, 15 bp, Homo sapiens
gaaatttatagataa

SEQ ID NO: 1510426 - DNA, 15 bp, Homo sapiens
agaaatttatagata

SEQ ID NO: 1510427 - DNA, 15 bp, Homo sapiens
aagaaatttatagat

SEQ ID NO: 1510428 - DNA, 15 bp, Homo sapiens
gaagaaatttataga

SEQ ID NO: 1510429 - DNA, 15 bp, Homo sapiens
agaagaaatttatag

SEQ ID NO: 1510430 - DNA, 15 bp, Homo sapiens
aagaagaaatttata

SEQ ID NO: 1510431 - DNA, 15 bp, Homo sapiens
ataagaagaaattta

SEQ ID NO: 1510432 - DNA, 15 bp, Homo sapiens
gataagaagaaattt

SEQ ID NO: 1510433 - DNA, 15 bp, Homo sapiens
tgataagaagaaatt

SEQ ID NO: 1510434 - DNA, 15 bp, Homo sapiens
atgataagaagaaat

SEQ ID NO: 1510435 - DNA, 15 bp, Homo sapiens
catgataagaagaaa

SEQ ID NO: 1510436 - DNA, 15 bp, Homo sapiens
acatgataagaagaa

SEQ ID NO: 1510437 - DNA, 15 bp, Homo sapiens
cacatgataagaaga

SEQ ID NO: 1510438 - DNA, 15 bp, Homo sapiens
tcacatgataagaag

SEQ ID NO: 1510439 - DNA, 15 bp, Homo sapiens
atcacatgataagaa

SEQ ID NO: 1510440 - DNA, 15 bp, Homo sapiens
aatcacatgataaga

SEQ ID NO: 1510441 - DNA, 15 bp, Homo sapiens
taatcacatgataag

SEQ ID NO: 1510442 - DNA, 15 bp, Homo sapiens
ttaatcacatgataa

SEQ ID NO: 1510443 - DNA, 15 bp, Homo sapiens
tttaatcacatgata

SEQ ID NO: 1510444 - DNA, 15 bp, Homo sapiens
gtttaatcacatgat

SEQ ID NO: 1510445 - DNA, 15 bp, Homo sapiens
tgtttaatcacatga

SEQ ID NO: 1510446 - DNA, 15 bp, Homo sapiens
ctgtttaatcacatg

SEQ ID NO: 1510447 - DNA, 15 bp, Homo sapiens
actgtttaatcacat

SEQ ID NO: 1510448 - DNA, 15 bp, Homo sapiens
cactgtttaatcaca

SEQ ID NO: 1510449 - DNA, 15 bp, Homo sapiens
tcactgtttaatcac

SEQ ID NO: 1510450 - DNA, 15 bp, Homo sapiens
atcactgtttaatca

SEQ ID NO: 1510451 - DNA, 15 bp, Homo sapiens
aatcactgtttaatc

SEQ ID NO: 1510452 - DNA, 15 bp, Homo sapiens
aaatcactgtttaat

SEQ ID NO: 1510453 - DNA, 15 bp, Homo sapiens
taaatcactgtttaa

SEQ ID NO: 1510454 - DNA, 15 bp, Homo sapiens
gtaaatcactgttta

SEQ ID NO: 1510455 - DNA, 15 bp, Homo sapiens
ggtaaatcactgttt

SEQ ID NO: 1510456 - DNA, 15 bp, Homo sapiens
tggtaaatcactgtt

SEQ ID NO: 1510457 - DNA, 15 bp, Homo sapiens
atggtaaatcactgt

SEQ ID NO: 1510458 - DNA, 15 bp, Homo sapiens
aatggtaaatcactg

SEQ ID NO: 1510459 - DNA, 15 bp, Homo sapiens
taatggtaaatcact

SEQ ID NO: 1510460 - DNA, 15 bp, Homo sapiens
ctaatggtaaatcac

SEQ ID NO: 1510461 - DNA, 15 bp, Homo sapiens
tctaatggtaaatca

SEQ ID NO: 1510462 - DNA, 15 bp, Homo sapiens
atctaatggtaaatc

SEQ ID NO: 1510463 - DNA, 15 bp, Homo sapiens
gatctaatggtaaat

SEQ ID NO: 1510464 - DNA, 15 bp, Homo sapiens
tgatctaatggtaaa

SEQ ID NO: 1510465 - DNA, 15 bp, Homo sapiens
atgatctaatggtaa

SEQ ID NO: 1510466 - DNA, 15 bp, Homo sapiens
aatgatctaatggta

SEQ ID NO: 1510467 - DNA, 15 bp, Homo sapiens
aaatgatctaatggt

SEQ ID NO: 1510468 - DNA, 15 bp, Homo sapiens
aaaatgatctaatgg

SEQ ID NO: 1510469 - DNA, 15 bp, Homo sapiens
aaaaatgatctaatg

SEQ ID NO: 1510470 - DNA, 15 bp, Homo sapiens
aaaaaatgatctaat

SEQ ID NO: 1510471 - DNA, 15 bp, Homo sapiens
gaaaaaatgatctaa

SEQ ID NO: 1510472 - DNA, 15 bp, Homo sapiens
agaaaaaatgatcta

SEQ ID NO: 1510473 - DNA, 15 bp, Homo sapiens
aagaaaaaatgatct

SEQ ID NO: 1510474 - DNA, 15 bp, Homo sapiens
caagaaaaaatgatc

SEQ ID NO: 1510475 - DNA, 15 bp, Homo sapiens
tcaagaaaaaatgat

SEQ ID NO: 1510476 - DNA, 15 bp, Homo sapiens
ctcaagaaaaaatga

SEQ ID NO: 1510477 - DNA, 15 bp, Homo sapiens
actcaagaaaaaatg

SEQ ID NO: 1510478 - DNA, 15 bp, Homo sapiens
cactcaagaaaaaat

SEQ ID NO: 1510479 - DNA, 15 bp, Homo sapiens
acactcaagaaaaaa

SEQ ID NO: 1510480 - DNA, 15 bp, Homo sapiens
tacactcaagaaaaa

SEQ ID NO: 1510481 - DNA, 15 bp, Homo sapiens
gtacactcaagaaaa

SEQ ID NO: 1510482 - DNA, 15 bp, Homo sapiens
ggtacactcaagaaa

SEQ ID NO: 1510483 - DNA, 15 bp, Homo sapiens
gggtacactcaagaa

SEQ ID NO: 1510484 - DNA, 15 bp, Homo sapiens
ggggtacactcaaga

SEQ ID NO: 1510485 - DNA, 15 bp, Homo sapiens
tggggtacactcaag

SEQ ID NO: 1510486 - DNA, 15 bp, Homo sapiens
ttggggtacactcaa

SEQ ID NO: 1510487 - DNA, 15 bp, Homo sapiens
tttggggtacactca

SEQ ID NO: 1510488 - DNA, 15 bp, Homo sapiens
gtttggggtacactc

SEQ ID NO: 1510489 - DNA, 15 bp, Homo sapiens
agtttggggtacact

SEQ ID NO: 1510490 - DNA, 15 bp, Homo sapiens
cagtttggggtacac

SEQ ID NO: 1510491 - DNA, 15 bp, Homo sapiens
acagtttggggtaca

SEQ ID NO: 1510492 - DNA, 15 bp, Homo sapiens
aacagtttggggtac

SEQ ID NO: 1510493 - DNA, 15 bp, Homo sapiens
aaacagtttggggta

SEQ ID NO: 1510494 - DNA, 15 bp, Homo sapiens
aaaacagtttggggt

SEQ ID NO: 1510495 - DNA, 15 bp, Homo sapiens
taaaacagtttgggg

SEQ ID NO: 1510496 - DNA, 15 bp, Homo sapiens
gtaaaacagtttggg

SEQ ID NO: 1510497 - DNA, 15 bp, Homo sapiens
agtaaaacagtttgg

SEQ ID NO: 1510498 - DNA, 15 bp, Homo sapiens
tagtaaaacagtttg

SEQ ID NO: 1510499 - DNA, 15 bp, Homo sapiens
gtagtaaaacagttt

SEQ ID NO: 1510500 - DNA, 15 bp, Homo sapiens
tgtagtaaaacagtt

SEQ ID NO: 1510501 - DNA, 15 bp, Homo sapiens
ctgtagtaaaacagt

SEQ ID NO: 1510502 - DNA, 15 bp, Homo sapiens
tctgtagtaaaacag

SEQ ID NO: 1510503 - DNA, 15 bp, Homo sapiens
ctctgtagtaaaaca

SEQ ID NO: 1510504 - DNA, 15 bp, Homo sapiens
tctctgtagtaaaac

SEQ ID NO: 1510505 - DNA, 15 bp, Homo sapiens
ctctctgtagtaaaa

SEQ ID NO: 1510506 - DNA, 15 bp, Homo sapiens
actctctgtagtaaa

SEQ ID NO: 1510507 - DNA, 15 bp, Homo sapiens
aactctctgtagtaa

SEQ ID NO: 1510508 - DNA, 15 bp, Homo sapiens
ataactctctgtagt

SEQ ID NO: 1510509 - DNA, 15 bp, Homo sapiens
tataactctctgtag

SEQ ID NO: 1510510 - DNA, 15 bp, Homo sapiens
ttataactctctgta

SEQ ID NO: 1510511 - DNA, 15 bp, Homo sapiens
tttataactctctgt

SEQ ID NO: 1510512 - DNA, 15 bp, Homo sapiens
ctttataactctctg

SEQ ID NO: 1510513 - DNA, 15 bp, Homo sapiens
cctttataactctct

SEQ ID NO: 1510514 - DNA, 15 bp, Homo sapiens
tcctttataactctc

SEQ ID NO: 1510515 - DNA, 15 bp, Homo sapiens
atcctttataactct

SEQ ID NO: 1510516 - DNA, 15 bp, Homo sapiens
catcctttataactc

SEQ ID NO: 1510517 - DNA, 15 bp, Homo sapiens
acatcctttataact

SEQ ID NO: 1510518 - DNA, 15 bp, Homo sapiens
gacatcctttataac

SEQ ID NO: 1510519 - DNA, 15 bp, Homo sapiens
tgacatcctttataa

SEQ ID NO: 1510520 - DNA, 15 bp, Homo sapiens
atgacatcctttata

SEQ ID NO: 1510521 - DNA, 15 bp, Homo sapiens
aatgacatcctttat

SEQ ID NO: 1510522 - DNA, 15 bp, Homo sapiens
aaatgacatccttta

SEQ ID NO: 1510523 - DNA, 15 bp, Homo sapiens
taaatgacatccttt

SEQ ID NO: 1510524 - DNA, 15 bp, Homo sapiens
ctaaatgacatcctt

SEQ ID NO: 1510525 - DNA, 15 bp, Homo sapiens
cctaaatgacatcct

SEQ ID NO: 1510526 - DNA, 15 bp, Homo sapiens
acctaaatgacatcc

SEQ ID NO: 1510527 - DNA, 15 bp, Homo sapiens
tacctaaatgacatc

SEQ ID NO: 1510528 - DNA, 15 bp, Homo sapiens
ttacctaaatgacat

SEQ ID NO: 1510529 - DNA, 15 bp, Homo sapiens
attacctaaatgaca

SEQ ID NO: 1510530 - DNA, 15 bp, Homo sapiens
tattacctaaatgac

SEQ ID NO: 1510531 - DNA, 15 bp, Homo sapiens
ctattacctaaatga

SEQ ID NO: 1510532 - DNA, 15 bp, Homo sapiens
tctattacctaaatg

SEQ ID NO: 1510533 - DNA, 15 bp, Homo sapiens
atctattacctaaat

SEQ ID NO: 1510534 - DNA, 15 bp, Homo sapiens
tatctattacctaaa

SEQ ID NO: 1510535 - DNA, 15 bp, Homo sapiens
ctatctattacctaa

SEQ ID NO: 1510536 - DNA, 15 bp, Homo sapiens
tctatctattaccta

SEQ ID NO: 1510537 - DNA, 15 bp, Homo sapiens
ttctatctattacct

SEQ ID NO: 1510538 - DNA, 15 bp, Homo sapiens
tttctatctattacc

SEQ ID NO: 1510539 - DNA, 15 bp, Homo sapiens
atttctatctattac

SEQ ID NO: 1510540 - DNA, 15 bp, Homo sapiens
aatttctatctatta

SEQ ID NO: 1510541 - DNA, 15 bp, Homo sapiens
aaatttctatctatt

SEQ ID NO: 1510542 - DNA, 15 bp, Homo sapiens
gaaatttctatctat

SEQ ID NO: 1510543 - DNA, 15 bp, Homo sapiens
tgaaatttctatcta

SEQ ID NO: 1510544 - DNA, 15 bp, Homo sapiens
ctgaaatttctatct

SEQ ID NO: 1510545 - DNA, 15 bp, Homo sapiens
gctgaaatttctatc

SEQ ID NO: 1510546 - DNA, 15 bp, Homo sapiens
ggctgaaatttctat

SEQ ID NO: 1510547 - DNA, 15 bp, Homo sapiens
gggctgaaatttcta

SEQ ID NO: 1510548 - DNA, 15 bp, Homo sapiens
agggctgaaatttct

SEQ ID NO: 1510549 - DNA, 15 bp, Homo sapiens
gagggctgaaatttc

SEQ ID NO: 1510550 - DNA, 15 bp, Homo sapiens
tgagggctgaaattt

SEQ ID NO: 1510551 - DNA, 15 bp, Homo sapiens
atgagggctgaaatt

SEQ ID NO: 1510552 - DNA, 15 bp, Homo sapiens
gatgagggctgaaat

SEQ ID NO: 1510553 - DNA, 15 bp, Homo sapiens
ggatgagggctgaaa

SEQ ID NO: 1510554 - DNA, 15 bp, Homo sapiens
aggatgagggctgaa

SEQ ID NO: 1510555 - DNA, 15 bp, Homo sapiens
aaggatgagggctga

SEQ ID NO: 1510556 - DNA, 15 bp, Homo sapiens
caaggatgagggctg

SEQ ID NO: 1510557 - DNA, 15 bp, Homo sapiens
acaaggatgagggct

SEQ ID NO: 1510558 - DNA, 15 bp, Homo sapiens
cacaaggatgagggc

SEQ ID NO: 1510559 - DNA, 15 bp, Homo sapiens
tcacaaggatgaggg

SEQ ID NO: 1510560 - DNA, 15 bp, Homo sapiens
gtcacaaggatgagg

SEQ ID NO: 1510561 - DNA, 15 bp, Homo sapiens
ggtcacaaggatgag

SEQ ID NO: 1510562 - DNA, 15 bp, Homo sapiens
gggtcacaaggatga

SEQ ID NO: 1510563 - DNA, 15 bp, Homo sapiens
agggtcacaaggatg

SEQ ID NO: 1510564 - DNA, 15 bp, Homo sapiens
tagggtcacaaggat

SEQ ID NO: 1510565 - DNA, 15 bp, Homo sapiens
ctagggtcacaagga

SEQ ID NO: 1510566 - DNA, 15 bp, Homo sapiens
gctagggtcacaagg

SEQ ID NO: 1510567 - DNA, 15 bp, Homo sapiens
agctagggtcacaag

SEQ ID NO: 1510568 - DNA, 15 bp, Homo sapiens
aagctagggtcacaa

SEQ ID NO: 1510569 - DNA, 15 bp, Homo sapiens
aaagctagggtcaca

SEQ ID NO: 1510570 - DNA, 15 bp, Homo sapiens
caaagctagggtcac

SEQ ID NO: 1510571 - DNA, 15 bp, Homo sapiens
acaaagctagggtca

SEQ ID NO: 1510572 - DNA, 15 bp, Homo sapiens
tacaaagctagggtc

SEQ ID NO: 1510573 - DNA, 15 bp, Homo sapiens
atacaaagctagggt

SEQ ID NO: 1510574 - DNA, 15 bp, Homo sapiens
catacaaagctaggg

SEQ ID NO: 1510575 - DNA, 15 bp, Homo sapiens
acatacaaagctagg

SEQ ID NO: 1510576 - DNA, 15 bp, Homo sapiens
tacatacaaagctag

SEQ ID NO: 1510577 - DNA, 15 bp, Homo sapiens
ttacatacaaagcta

SEQ ID NO: 1510578 - DNA, 15 bp, Homo sapiens
tttacatacaaagct

SEQ ID NO: 1510579 - DNA, 15 bp, Homo sapiens
atttacatacaaagc

SEQ ID NO: 1510580 - DNA, 15 bp, Homo sapiens
gatttacatacaaag

SEQ ID NO: 1510581 - DNA, 15 bp, Homo sapiens
agatttacatacaaa

SEQ ID NO: 1510582 - DNA, 15 bp, Homo sapiens
cagatttacatacaa

SEQ ID NO: 1510583 - DNA, 15 bp, Homo sapiens
ccagatttacataca

SEQ ID NO: 1510584 - DNA, 15 bp, Homo sapiens
gccagatttacatac

SEQ ID NO: 1510585 - DNA, 15 bp, Homo sapiens
agccagatttacata

SEQ ID NO: 1510586 - DNA, 15 bp, Homo sapiens
gagccagatttacat

SEQ ID NO: 1510587 - DNA, 15 bp, Homo sapiens
tgagccagatttaca

SEQ ID NO: 1510588 - DNA, 15 bp, Homo sapiens
atgagccagatttac

SEQ ID NO: 1510589 - DNA, 15 bp, Homo sapiens
gatgagccagattta

SEQ ID NO: 1510590 - DNA, 15 bp, Homo sapiens
agatgagccagattt

SEQ ID NO: 1510591 - DNA, 15 bp, Homo sapiens
gagatgagccagatt

SEQ ID NO: 1510592 - DNA, 15 bp, Homo sapiens
agagatgagccagat

SEQ ID NO: 1510593 - DNA, 15 bp, Homo sapiens
cagagatgagccaga

SEQ ID NO: 1510594 - DNA, 15 bp, Homo sapiens
ccagagatgagccag

SEQ ID NO: 1510595 - DNA, 15 bp, Homo sapiens
cccagagatgagcca

SEQ ID NO: 1510596 - DNA, 15 bp, Homo sapiens
acccagagatgagcc

SEQ ID NO: 1510597 - DNA, 15 bp, Homo sapiens
aacccagagatgagc

SEQ ID NO: 1510598 - DNA, 15 bp, Homo sapiens
gaacccagagatgag

SEQ ID NO: 1510599 - DNA, 15 bp, Homo sapiens
agaacccagagatga

SEQ ID NO: 1510600 - DNA, 15 bp, Homo sapiens
cagaacccagagatg

SEQ ID NO: 1510601 - DNA, 15 bp, Homo sapiens
tcagaacccagagat

SEQ ID NO: 1510602 - DNA, 15 bp, Homo sapiens
ttcagaacccagaga

SEQ ID NO: 1510603 - DNA, 15 bp, Homo sapiens
attcagaacccagag

SEQ ID NO: 1510604 - DNA, 15 bp, Homo sapiens
cattcagaacccaga

SEQ ID NO: 1510605 - DNA, 15 bp, Homo sapiens
gcattcagaacccag

SEQ ID NO: 1510606 - DNA, 15 bp, Homo sapiens
ggcattcagaaccca

SEQ ID NO: 1510607 - DNA, 15 bp, Homo sapiens
gggcattcagaaccc

SEQ ID NO: 1510608 - DNA, 15 bp, Homo sapiens
tgggcattcagaacc

SEQ ID NO: 1510609 - DNA, 15 bp, Homo sapiens
ttgggcattcagaac

SEQ ID NO: 1510610 - DNA, 15 bp, Homo sapiens
attgggcattcagaa

SEQ ID NO: 1510611 - DNA, 15 bp, Homo sapiens
aattgggcattcaga

SEQ ID NO: 1510612 - DNA, 15 bp, Homo sapiens
gaattgggcattcag

SEQ ID NO: 1510613 - DNA, 15 bp, Homo sapiens
ggaattgggcattca

SEQ ID NO: 1510614 - DNA, 15 bp, Homo sapiens
aggaattgggcattc

SEQ ID NO: 1510615 - DNA, 15 bp, Homo sapiens
aaggaattgggcatt

SEQ ID NO: 1510616 - DNA, 15 bp, Homo sapiens
aaaggaattgggcat

SEQ ID NO: 1510617 - DNA, 15 bp, Homo sapiens
aaaaggaattgggca

SEQ ID NO: 1510618 - DNA, 15 bp, Homo sapiens
gaaaaggaattgggc

SEQ ID NO: 1510619 - DNA, 15 bp, Homo sapiens
agaaaaggaattggg

SEQ ID NO: 1510620 - DNA, 15 bp, Homo sapiens
aagaaaaggaattgg

SEQ ID NO: 1510621 - DNA, 15 bp, Homo sapiens
gaagaaaaggaattg

SEQ ID NO: 1510622 - DNA, 15 bp, Homo sapiens
ggaagaaaaggaatt

SEQ ID NO: 1510623 - DNA, 15 bp, Homo sapiens
aggaagaaaaggaat

SEQ ID NO: 1510624 - DNA, 15 bp, Homo sapiens
caggaagaaaaggaa

SEQ ID NO: 1510625 - DNA, 15 bp, Homo sapiens
ccaggaagaaaagga

SEQ ID NO: 1510626 - DNA, 15 bp, Homo sapiens
accaggaagaaaagg

SEQ ID NO: 1510627 - DNA, 15 bp, Homo sapiens
aaccaggaagaaaag

SEQ ID NO: 1510628 - DNA, 15 bp, Homo sapiens
aaaccaggaagaaaa

SEQ ID NO: 1510629 - DNA, 15 bp, Homo sapiens
gaaaccaggaagaaa

SEQ ID NO: 1510630 - DNA, 15 bp, Homo sapiens
agaaaccaggaagaa

SEQ ID NO: 1510631 - DNA, 15 bp, Homo sapiens
gagaaaccaggaaga

SEQ ID NO: 1510632 - DNA, 15 bp, Homo sapiens
tgagaaaccaggaag

SEQ ID NO: 1510633 - DNA, 15 bp, Homo sapiens
ttgagaaaccaggaa

SEQ ID NO: 1510634 - DNA, 15 bp, Homo sapiens
tttgagaaaccagga

SEQ ID NO: 1510635 - DNA, 15 bp, Homo sapiens
ttttgagaaaccagg

SEQ ID NO: 1510636 - DNA, 15 bp, Homo sapiens
tttttgagaaaccag

SEQ ID NO: 1510637 - DNA, 15 bp, Homo sapiens
atttttgagaaacca

SEQ ID NO: 1510638 - DNA, 15 bp, Homo sapiens
gatttttgagaaacc

SEQ ID NO: 1510639 - DNA, 15 bp, Homo sapiens
ggatttttgagaaac

SEQ ID NO: 1510640 - DNA, 15 bp, Homo sapiens
aggatttttgagaaa

SEQ ID NO: 1510641 - DNA, 15 bp, Homo sapiens
taggatttttgagaa

SEQ ID NO: 1510642 - DNA, 15 bp, Homo sapiens
ataggatttttgaga

SEQ ID NO: 1510643 - DNA, 15 bp, Homo sapiens
tataggatttttgag

SEQ ID NO: 1510644 - DNA, 15 bp, Homo sapiens
ctataggatttttga

SEQ ID NO: 1510645 - DNA, 15 bp, Homo sapiens
actataggatttttg

SEQ ID NO: 1510646 - DNA, 15 bp, Homo sapiens
gactataggattttt

SEQ ID NO: 1510647 - DNA, 15 bp, Homo sapiens
agactataggatttt

SEQ ID NO: 1510648 - DNA, 15 bp, Homo sapiens
aagactataggattt

SEQ ID NO: 1510649 - DNA, 15 bp, Homo sapiens
aaagactataggatt

SEQ ID NO: 1510650 - DNA, 15 bp, Homo sapiens
gaaagactataggat

SEQ ID NO: 1510651 - DNA, 15 bp, Homo sapiens
agaaagactatagga

SEQ ID NO: 1510652 - DNA, 15 bp, Homo sapiens
cagaaagactatagg

SEQ ID NO: 1510653 - DNA, 15 bp, Homo sapiens
acagaaagactatag

SEQ ID NO: 1510654 - DNA, 15 bp, Homo sapiens
aacagaaagactata

SEQ ID NO: 1510655 - DNA, 15 bp, Homo sapiens
aaacagaaagactat

SEQ ID NO: 1510656 - DNA, 15 bp, Homo sapiens
aaaacagaaagacta

SEQ ID NO: 1510657 - DNA, 15 bp, Homo sapiens
aaaaacagaaagact

SEQ ID NO: 1510658 - DNA, 15 bp, Homo sapiens
caaaaacagaaagac

SEQ ID NO: 1510659 - DNA, 15 bp, Homo sapiens
acaaaaacagaaaga

SEQ ID NO: 1510660 - DNA, 15 bp, Homo sapiens
aacaaaaacagaaag

SEQ ID NO: 1510661 - DNA, 15 bp, Homo sapiens
caacaaaaacagaaa

SEQ ID NO: 1510662 - DNA, 15 bp, Homo sapiens
acaacaaaaacagaa

SEQ ID NO: 1510663 - DNA, 15 bp, Homo sapiens
cacaacaaaaacaga

SEQ ID NO: 1510664 - DNA, 15 bp, Homo sapiens
acacaacaaaaacag

SEQ ID NO: 1510665 - DNA, 15 bp, Homo sapiens
gacacaacaaaaaca

SEQ ID NO: 1510666 - DNA, 15 bp, Homo sapiens
agacacaacaaaaac

SEQ ID NO: 1510667 - DNA, 15 bp, Homo sapiens
gagacacaacaaaaa

SEQ ID NO: 1510668 - DNA, 15 bp, Homo sapiens
agagacacaacaaaa

SEQ ID NO: 1510669 - DNA, 15 bp, Homo sapiens
cagagacacaacaaa

SEQ ID NO: 1510670 - DNA, 15 bp, Homo sapiens
gcagagacacaacaa

SEQ ID NO: 1510671 - DNA, 15 bp, Homo sapiens
ggcagagacacaaca

SEQ ID NO: 1510672 - DNA, 15 bp, Homo sapiens
aggcagagacacaac

SEQ ID NO: 1510673 - DNA, 15 bp, Homo sapiens
taggcagagacacaa

SEQ ID NO: 1510674 - DNA, 15 bp, Homo sapiens
ctaggcagagacaca

SEQ ID NO: 1510675 - DNA, 15 bp, Homo sapiens
actaggcagagacac

SEQ ID NO: 1510676 - DNA, 15 bp, Homo sapiens
tactaggcagagaca

SEQ ID NO: 1510677 - DNA, 15 bp, Homo sapiens
atactaggcagagac

SEQ ID NO: 1510678 - DNA, 15 bp, Homo sapiens
tatactaggcagaga

SEQ ID NO: 1510679 - DNA, 15 bp, Homo sapiens
atatactaggcagag

SEQ ID NO: 1510680 - DNA, 15 bp, Homo sapiens
tatatactaggcaga

SEQ ID NO: 1510681 - DNA, 15 bp, Homo sapiens
atatatactaggcag

SEQ ID NO: 1510682 - DNA, 15 bp, Homo sapiens
aatatatactaggca

SEQ ID NO: 1510683 - DNA, 15 bp, Homo sapiens
gaatatatactaggc

SEQ ID NO: 1510684 - DNA, 15 bp, Homo sapiens
tgaatatatactagg

SEQ ID NO: 1510685 - DNA, 15 bp, Homo sapiens
ctgaatatatactag

SEQ ID NO: 1510686 - DNA, 15 bp, Homo sapiens
actgaatatatacta

SEQ ID NO: 1510687 - DNA, 15 bp, Homo sapiens
tactgaatatatact

SEQ ID NO: 1510688 - DNA, 15 bp, Homo sapiens
atactgaatatatac

SEQ ID NO: 1510689 - DNA, 15 bp, Homo sapiens
aatactgaatatata

SEQ ID NO: 1510690 - DNA, 15 bp, Homo sapiens
gaatactgaatatat

SEQ ID NO: 1510691 - DNA, 15 bp, Homo sapiens
cgaatactgaatata

SEQ ID NO: 1510692 - DNA, 15 bp, Homo sapiens
gcgaatactgaatat

SEQ ID NO: 1510693 - DNA, 15 bp, Homo sapiens
agcgaatactgaata

SEQ ID NO: 1510694 - DNA, 15 bp, Homo sapiens
cagcgaatactgaat

SEQ ID NO: 1510695 - DNA, 15 bp, Homo sapiens
tcagcgaatactgaa

SEQ ID NO: 1510696 - DNA, 15 bp, Homo sapiens
ctcagcgaatactga

SEQ ID NO: 1510697 - DNA, 15 bp, Homo sapiens
actcagcgaatactg

SEQ ID NO: 1510698 - DNA, 15 bp, Homo sapiens
aactcagcgaatact

SEQ ID NO: 1510699 - DNA, 15 bp, Homo sapiens
gaactcagcgaatac

SEQ ID NO: 1510700 - DNA, 15 bp, Homo sapiens
ggaactcagcgaata

SEQ ID NO: 1510701 - DNA, 15 bp, Homo sapiens
gggaactcagcgaat

SEQ ID NO: 1510702 - DNA, 15 bp, Homo sapiens
ggggaactcagcgaa

SEQ ID NO: 1510703 - DNA, 15 bp, Homo sapiens
cggggaactcagcga

SEQ ID NO: 1510704 - DNA, 15 bp, Homo sapiens
tcggggaactcagcg

SEQ ID NO: 1510705 - DNA, 15 bp, Homo sapiens
gtcggggaactcagc

SEQ ID NO: 1510706 - DNA, 15 bp, Homo sapiens
agtcggggaactcag

SEQ ID NO: 1510707 - DNA, 15 bp, Homo sapiens
cagtcggggaactca

SEQ ID NO: 1510708 - DNA, 15 bp, Homo sapiens
acagtcggggaactc

SEQ ID NO: 1510709 - DNA, 15 bp, Homo sapiens
tacagtcggggaact

SEQ ID NO: 1510710 - DNA, 15 bp, Homo sapiens
atacagtcggggaac

SEQ ID NO: 1510711 - DNA, 15 bp, Homo sapiens
catacagtcggggaa

SEQ ID NO: 1510712 - DNA, 15 bp, Homo sapiens
tcatacagtcgggga

SEQ ID NO: 1510713 - DNA, 15 bp, Homo sapiens
ctcatacagtcgggg

SEQ ID NO: 1510714 - DNA, 15 bp, Homo sapiens
tctcatacagtcggg

SEQ ID NO: 1510715 - DNA, 15 bp, Homo sapiens
ttctcatacagtcgg

SEQ ID NO: 1510716 - DNA, 15 bp, Homo sapiens
cttctcatacagtcg

SEQ ID NO: 1510717 - DNA, 15 bp, Homo sapiens
tcttctcatacagtc

SEQ ID NO: 1510718 - DNA, 15 bp, Homo sapiens
ctcttctcatacagt

SEQ ID NO: 1510719 - DNA, 15 bp, Homo sapiens
tctcttctcatacag

SEQ ID NO: 1510720 - DNA, 15 bp, Homo sapiens
ctctcttctcataca

SEQ ID NO: 1510721 - DNA, 15 bp, Homo sapiens
actctcttctcatac

SEQ ID NO: 1510722 - DNA, 15 bp, Homo sapiens
tactctcttctcata

SEQ ID NO: 1510723 - DNA, 15 bp, Homo sapiens
ctactctcttctcat

SEQ ID NO: 1510724 - DNA, 15 bp, Homo sapiens
gttctactctcttct

SEQ ID NO: 1510725 - DNA, 15 bp, Homo sapiens
agttctactctcttc

SEQ ID NO: 1510726 - DNA, 15 bp, Homo sapiens
gagttctactctctt

SEQ ID NO: 1510727 - DNA, 15 bp, Homo sapiens
agagttctactctct

SEQ ID NO: 1510728 - DNA, 15 bp, Homo sapiens
aagagttctactctc

SEQ ID NO: 1510729 - DNA, 15 bp, Homo sapiens
gaagagttctactct

SEQ ID NO: 1510730 - DNA, 15 bp, Homo sapiens
agaagagttctactc

SEQ ID NO: 1510731 - DNA, 15 bp, Homo sapiens
cagaagagttctact

SEQ ID NO: 1510732 - DNA, 15 bp, Homo sapiens
tcagaagagttctac

SEQ ID NO: 1510733 - DNA, 15 bp, Homo sapiens
atcagaagagttcta

SEQ ID NO: 1510734 - DNA, 15 bp, Homo sapiens
gatcagaagagttct

SEQ ID NO: 1510735 - DNA, 15 bp, Homo sapiens
tgatcagaagagttc

SEQ ID NO: 1510736 - DNA, 15 bp, Homo sapiens
atgatcagaagagtt

SEQ ID NO: 1510737 - DNA, 15 bp, Homo sapiens
gatgatcagaagagt

SEQ ID NO: 1510738 - DNA, 15 bp, Homo sapiens
tgatgatcagaagag

SEQ ID NO: 1510739 - DNA, 15 bp, Homo sapiens
ttgatgatcagaaga

SEQ ID NO: 1510740 - DNA, 15 bp, Homo sapiens
attgatgatcagaag

SEQ ID NO: 1510741 - DNA, 15 bp, Homo sapiens
gattgatgatcagaa

SEQ ID NO: 1510742 - DNA, 15 bp, Homo sapiens
agattgatgatcaga

SEQ ID NO: 1510743 - DNA, 15 bp, Homo sapiens
aagattgatgatcag

SEQ ID NO: 1510744 - DNA, 15 bp, Homo sapiens
taagattgatgatca

SEQ ID NO: 1510745 - DNA, 15 bp, Homo sapiens
ataagattgatgatc

SEQ ID NO: 1510746 - DNA, 15 bp, Homo sapiens
aataagattgatgat

SEQ ID NO: 1510747 - DNA, 15 bp, Homo sapiens
aaataagattgatga

SEQ ID NO: 1510748 - DNA, 15 bp, Homo sapiens
gaaataagattgatg

SEQ ID NO: 1510749 - DNA, 15 bp, Homo sapiens
agaaataagattgat

SEQ ID NO: 1510750 - DNA, 15 bp, Homo sapiens
cagaaataagattga

SEQ ID NO: 1510751 - DNA, 15 bp, Homo sapiens
gcagaaataagattg

SEQ ID NO: 1510752 - DNA, 15 bp, Homo sapiens
agcagaaataagatt

SEQ ID NO: 1510753 - DNA, 15 bp, Homo sapiens
gagcagaaataagat

SEQ ID NO: 1510754 - DNA, 15 bp, Homo sapiens
agagcagaaataaga

SEQ ID NO: 1510755 - DNA, 15 bp, Homo sapiens
cagagcagaaataag

SEQ ID NO: 1510756 - DNA, 15 bp, Homo sapiens
acagagcagaaataa

SEQ ID NO: 1510757 - DNA, 15 bp, Homo sapiens
cacagagcagaaata

SEQ ID NO: 1510758 - DNA, 15 bp, Homo sapiens
gcacagagcagaaat

SEQ ID NO: 1510759 - DNA, 15 bp, Homo sapiens
tgcacagagcagaaa

SEQ ID NO: 1510760 - DNA, 15 bp, Homo sapiens
ttgcacagagcagaa

SEQ ID NO: 1510761 - DNA, 15 bp, Homo sapiens
tttgcacagagcaga

SEQ ID NO: 1510762 - DNA, 15 bp, Homo sapiens
atttgcacagagcag

SEQ ID NO: 1510763 - DNA, 15 bp, Homo sapiens
catttgcacagagca

SEQ ID NO: 1510764 - DNA, 15 bp, Homo sapiens
gcatttgcacagagc

SEQ ID NO: 1510765 - DNA, 15 bp, Homo sapiens
agcatttgcacagag

SEQ ID NO: 1510766 - DNA, 15 bp, Homo sapiens
aagcatttgcacaga

SEQ ID NO: 1510767 - DNA, 15 bp, Homo sapiens
caagcatttgcacag

SEQ ID NO: 1510768 - DNA, 15 bp, Homo sapiens
acaagcatttgcaca

SEQ ID NO: 1510769 - DNA, 15 bp, Homo sapiens
tacaagcatttgcac

SEQ ID NO: 1510770 - DNA, 15 bp, Homo sapiens
gtacaagcatttgca

SEQ ID NO: 1510771 - DNA, 15 bp, Homo sapiens
tgtacaagcatttgc

SEQ ID NO: 1510772 - DNA, 15 bp, Homo sapiens
ttgtacaagcatttg

SEQ ID NO: 1510773 - DNA, 15 bp, Homo sapiens
tttgtacaagcattt

SEQ ID NO: 1510774 - DNA, 15 bp, Homo sapiens
atttgtacaagcatt

SEQ ID NO: 1510775 - DNA, 15 bp, Homo sapiens
gatttgtacaagcat

SEQ ID NO: 1510776 - DNA, 15 bp, Homo sapiens
tgatttgtacaagca

SEQ ID NO: 1510777 - DNA, 15 bp, Homo sapiens
ttgatttgtacaagc

SEQ ID NO: 1510778 - DNA, 15 bp, Homo sapiens
tttgatttgtacaag

SEQ ID NO: 1510779 - DNA, 15 bp, Homo sapiens
gtttgatttgtacaa

SEQ ID NO: 1510780 - DNA, 15 bp, Homo sapiens
agtttgatttgtaca

SEQ ID NO: 1510781 - DNA, 15 bp, Homo sapiens
tagtttgatttgtac

SEQ ID NO: 1510782 - DNA, 15 bp, Homo sapiens
ttagtttgatttgta

SEQ ID NO: 1510783 - DNA, 15 bp, Homo sapiens
tttagtttgatttgt

SEQ ID NO: 1510784 - DNA, 15 bp, Homo sapiens
atttagtttgatttg

SEQ ID NO: 1510785 - DNA, 15 bp, Homo sapiens
aatttagtttgattt

SEQ ID NO: 1510786 - DNA, 15 bp, Homo sapiens
gaatttagtttgatt

SEQ ID NO: 1510787 - DNA, 15 bp, Homo sapiens
agaatttagtttgat

SEQ ID NO: 1510788 - DNA, 15 bp, Homo sapiens
aagaatttagtttga

SEQ ID NO: 1510789 - DNA, 15 bp, Homo sapiens
aaagaatttagtttg

SEQ ID NO: 1510790 - DNA, 15 bp, Homo sapiens
caaagaatttagttt

SEQ ID NO: 1510791 - DNA, 15 bp, Homo sapiens
gcaaagaatttagtt

SEQ ID NO: 1510792 - DNA, 15 bp, Homo sapiens
agcaaagaatttagt

SEQ ID NO: 1510793 - DNA, 15 bp, Homo sapiens
cagcaaagaatttag

SEQ ID NO: 1510794 - DNA, 15 bp, Homo sapiens
acagcaaagaattta

SEQ ID NO: 1510795 - DNA, 15 bp, Homo sapiens
gacagcaaagaattt

SEQ ID NO: 1510796 - DNA, 15 bp, Homo sapiens
tgacagcaaagaatt

SEQ ID NO: 1510797 - DNA, 15 bp, Homo sapiens
atgacagcaaagaat

SEQ ID NO: 1510798 - DNA, 15 bp, Homo sapiens
gatgacagcaaagaa

SEQ ID NO: 1510799 - DNA, 15 bp, Homo sapiens
agatgacagcaaaga

SEQ ID NO: 1510800 - DNA, 15 bp, Homo sapiens
aagatgacagcaaag

SEQ ID NO: 1510801 - DNA, 15 bp, Homo sapiens
gaagatgacagcaaa

SEQ ID NO: 1510802 - DNA, 15 bp, Homo sapiens
agaagatgacagcaa

SEQ ID NO: 1510803 - DNA, 15 bp, Homo sapiens
cagaagatgacagca

SEQ ID NO: 1510804 - DNA, 15 bp, Homo sapiens
acagaagatgacagc

SEQ ID NO: 1510805 - DNA, 15 bp, Homo sapiens
aacagaagatgacag

SEQ ID NO: 1510806 - DNA, 15 bp, Homo sapiens
aaacagaagatgaca

SEQ ID NO: 1510807 - DNA, 15 bp, Homo sapiens
gaaacagaagatgac

SEQ ID NO: 1510808 - DNA, 15 bp, Homo sapiens
agaaacagaagatga

SEQ ID NO: 1510809 - DNA, 15 bp, Homo sapiens
cagaaacagaagatg

SEQ ID NO: 1510810 - DNA, 15 bp, Homo sapiens
gcagaaacagaagat

SEQ ID NO: 1510811 - DNA, 15 bp, Homo sapiens
agcagaaacagaaga

SEQ ID NO: 1510812 - DNA, 15 bp, Homo sapiens
gagcagaaacagaag

SEQ ID NO: 1510813 - DNA, 15 bp, Homo sapiens
agagcagaaacagaa

SEQ ID NO: 1510814 - DNA, 15 bp, Homo sapiens
gagagcagaaacaga

SEQ ID NO: 1510815 - DNA, 15 bp, Homo sapiens
agagagcagaaacag

SEQ ID NO: 1510816 - DNA, 15 bp, Homo sapiens
aagagagcagaaaca

SEQ ID NO: 1510817 - DNA, 15 bp, Homo sapiens
aaagagagcagaaac

SEQ ID NO: 1510818 - DNA, 15 bp, Homo sapiens
gaaagagagcagaaa

SEQ ID NO: 1510819 - DNA, 15 bp, Homo sapiens
tgaaagagagcagaa

SEQ ID NO: 1510820 - DNA, 15 bp, Homo sapiens
atgaaagagagcaga

SEQ ID NO: 1510821 - DNA, 15 bp, Homo sapiens
aatgaaagagagcag

SEQ ID NO: 1510822 - DNA, 15 bp, Homo sapiens
aaatgaaagagagca

SEQ ID NO: 1510823 - DNA, 15 bp, Homo sapiens
aaaatgaaagagagc

SEQ ID NO: 1510824 - DNA, 15 bp, Homo sapiens
caaaatgaaagagag

SEQ ID NO: 1510825 - DNA, 15 bp, Homo sapiens
acaaaatgaaagaga

SEQ ID NO: 1510826 - DNA, 15 bp, Homo sapiens
cacaaaatgaaagag

SEQ ID NO: 1510827 - DNA, 15 bp, Homo sapiens
tcacaaaatgaaaga

SEQ ID NO: 1510828 - DNA, 15 bp, Homo sapiens
atcacaaaatgaaag

SEQ ID NO: 1510829 - DNA, 15 bp, Homo sapiens
catcacaaaatgaaa

SEQ ID NO: 1510830 - DNA, 15 bp, Homo sapiens
acatcacaaaatgaa

SEQ ID NO: 1510831 - DNA, 15 bp, Homo sapiens
tacatcacaaaatga

SEQ ID NO: 1510832 - DNA, 15 bp, Homo sapiens
ttacatcacaaaatg

SEQ ID NO: 1510833 - DNA, 15 bp, Homo sapiens
attacatcacaaaat

SEQ ID NO: 1510834 - DNA, 15 bp, Homo sapiens
aattacatcacaaaa

SEQ ID NO: 1510835 - DNA, 15 bp, Homo sapiens
aaattacatcacaaa

SEQ ID NO: 1510836 - DNA, 15 bp, Homo sapiens
caaattacatcacaa

SEQ ID NO: 1510837 - DNA, 15 bp, Homo sapiens
tcaaattacatcaca

SEQ ID NO: 1510838 - DNA, 15 bp, Homo sapiens
ctcaaattacatcac

SEQ ID NO: 1510839 - DNA, 15 bp, Homo sapiens
gctcaaattacatca

SEQ ID NO: 1510840 - DNA, 15 bp, Homo sapiens
agctcaaattacatc

SEQ ID NO: 1510841 - DNA, 15 bp, Homo sapiens
cagctcaaattacat

SEQ ID NO: 1510842 - DNA, 15 bp, Homo sapiens
tcagctcaaattaca

SEQ ID NO: 1510843 - DNA, 15 bp, Homo sapiens
ttcagctcaaattac

SEQ ID NO: 1510844 - DNA, 15 bp, Homo sapiens
attcagctcaaatta

SEQ ID NO: 1510845 - DNA, 15 bp, Homo sapiens
gattcagctcaaatt

SEQ ID NO: 1510846 - DNA, 15 bp, Homo sapiens
agattcagctcaaat

SEQ ID NO: 1510847 - DNA, 15 bp, Homo sapiens
aagattcagctcaaa

SEQ ID NO: 1510848 - DNA, 15 bp, Homo sapiens
caagattcagctcaa

SEQ ID NO: 1510849 - DNA, 15 bp, Homo sapiens
ccaagattcagctca

SEQ ID NO: 1510850 - DNA, 15 bp, Homo sapiens
tccaagattcagctc

SEQ ID NO: 1510851 - DNA, 15 bp, Homo sapiens
ctccaagattcagct

SEQ ID NO: 1510852 - DNA, 15 bp, Homo sapiens
tctccaagattcagc

SEQ ID NO: 1510853 - DNA, 15 bp, Homo sapiens
atctccaagattcag

SEQ ID NO: 1510854 - DNA, 15 bp, Homo sapiens
aatctccaagattca

SEQ ID NO: 1510855 - DNA, 15 bp, Homo sapiens
aaatctccaagattc

SEQ ID NO: 1510856 - DNA, 15 bp, Homo sapiens
aaaatctccaagatt

SEQ ID NO: 1510857 - DNA, 15 bp, Homo sapiens
caaaatctccaagat

SEQ ID NO: 1510858 - DNA, 15 bp, Homo sapiens
acaaaatctccaaga

SEQ ID NO: 1510859 - DNA, 15 bp, Homo sapiens
gacaaaatctccaag

SEQ ID NO: 1510860 - DNA, 15 bp, Homo sapiens
agacaaaatctccaa

SEQ ID NO: 1510861 - DNA, 15 bp, Homo sapiens
gagacaaaatctcca

SEQ ID NO: 1510862 - DNA, 15 bp, Homo sapiens
ggagacaaaatctcc

SEQ ID NO: 1510863 - DNA, 15 bp, Homo sapiens
aggagacaaaatctc

SEQ ID NO: 1510864 - DNA, 15 bp, Homo sapiens
taggagacaaaatct

SEQ ID NO: 1510865 - DNA, 15 bp, Homo sapiens
ctaggagacaaaatc

SEQ ID NO: 1510866 - DNA, 15 bp, Homo sapiens
actaggagacaaaat

SEQ ID NO: 1510867 - DNA, 15 bp, Homo sapiens
tactaggagacaaaa

SEQ ID NO: 1510868 - DNA, 15 bp, Homo sapiens
ttactaggagacaaa

SEQ ID NO: 1510869 - DNA, 15 bp, Homo sapiens
tttactaggagacaa

SEQ ID NO: 1510870 - DNA, 15 bp, Homo sapiens
ctttactaggagaca

SEQ ID NO: 1510871 - DNA, 15 bp, Homo sapiens
gctttactaggagac

SEQ ID NO: 1510872 - DNA, 15 bp, Homo sapiens
cgctttactaggaga

SEQ ID NO: 1510873 - DNA, 15 bp, Homo sapiens
acgctttactaggag

SEQ ID NO: 1510874 - DNA, 15 bp, Homo sapiens
tacgctttactagga

SEQ ID NO: 1510875 - DNA, 15 bp, Homo sapiens
ctacgctttactagg

SEQ ID NO: 1510876 - DNA, 15 bp, Homo sapiens
cctacgctttactag

SEQ ID NO: 1510877 - DNA, 15 bp, Homo sapiens
gcctacgctttacta

SEQ ID NO: 1510878 - DNA, 15 bp, Homo sapiens
ggcctacgctttact

SEQ ID NO: 1510879 - DNA, 15 bp, Homo sapiens
aggcctacgctttac

SEQ ID NO: 1510880 - DNA, 15 bp, Homo sapiens
gaggcctacgcttta

SEQ ID NO: 1510881 - DNA, 15 bp, Homo sapiens
agaggcctacgcttt

SEQ ID NO: 1510882 - DNA, 15 bp, Homo sapiens
gagaggcctacgctt

SEQ ID NO: 1510883 - DNA, 15 bp, Homo sapiens
agagaggcctacgct

SEQ ID NO: 1510884 - DNA, 15 bp, Homo sapiens
aagagaggcctacgc

SEQ ID NO: 1510885 - DNA, 15 bp, Homo sapiens
taagagaggcctacg

SEQ ID NO: 1510886 - DNA, 15 bp, Homo sapiens
ttaagagaggcctac

SEQ ID NO: 1510887 - DNA, 15 bp, Homo sapiens
attaagagaggccta

SEQ ID NO: 1510888 - DNA, 15 bp, Homo sapiens
tattaagagaggcct

SEQ ID NO: 1510889 - DNA, 15 bp, Homo sapiens
ctattaagagaggcc

SEQ ID NO: 1510890 - DNA, 15 bp, Homo sapiens
gctattaagagaggc

SEQ ID NO: 1510891 - DNA, 15 bp, Homo sapiens
agctattaagagagg

SEQ ID NO: 1510892 - DNA, 15 bp, Homo sapiens
aagctattaagagag

SEQ ID NO: 1510893 - DNA, 15 bp, Homo sapiens
aaagctattaagaga

SEQ ID NO: 1510894 - DNA, 15 bp, Homo sapiens
aaaagctattaagag

SEQ ID NO: 1510895 - DNA, 15 bp, Homo sapiens
taaaagctattaaga

SEQ ID NO: 1510896 - DNA, 15 bp, Homo sapiens
gtaaaagctattaag

SEQ ID NO: 1510897 - DNA, 15 bp, Homo sapiens
ggtaaaagctattaa

SEQ ID NO: 1510898 - DNA, 15 bp, Homo sapiens
cggtaaaagctatta

SEQ ID NO: 1510899 - DNA, 15 bp, Homo sapiens
ccggtaaaagctatt

SEQ ID NO: 1510900 - DNA, 15 bp, Homo sapiens
accggtaaaagctat

SEQ ID NO: 1510901 - DNA, 15 bp, Homo sapiens
aaccggtaaaagcta

SEQ ID NO: 1510902 - DNA, 15 bp, Homo sapiens
taaccggtaaaagct

SEQ ID NO: 1510903 - DNA, 15 bp, Homo sapiens
ttaaccggtaaaagc

SEQ ID NO: 1510904 - DNA, 15 bp, Homo sapiens
attaaccggtaaaag

SEQ ID NO: 1510905 - DNA, 15 bp, Homo sapiens
gattaaccggtaaaa

SEQ ID NO: 1510906 - DNA, 15 bp, Homo sapiens
ggattaaccggtaaa

SEQ ID NO: 1510907 - DNA, 15 bp, Homo sapiens
aggattaaccggtaa

SEQ ID NO: 1510908 - DNA, 15 bp, Homo sapiens
aaggattaaccggta

SEQ ID NO: 1510909 - DNA, 15 bp, Homo sapiens
caaggattaaccggt

SEQ ID NO: 1510910 - DNA, 15 bp, Homo sapiens
ccaaggattaaccgg

SEQ ID NO: 1510911 - DNA, 15 bp, Homo sapiens
tccaaggattaaccg

SEQ ID NO: 1510912 - DNA, 15 bp, Homo sapiens
ttccaaggattaacc

SEQ ID NO: 1510913 - DNA, 15 bp, Homo sapiens
attccaaggattaac

SEQ ID NO: 1510914 - DNA, 15 bp, Homo sapiens
aattccaaggattaa

SEQ ID NO: 1510915 - DNA, 15 bp, Homo sapiens
taattccaaggatta

SEQ ID NO: 1510916 - DNA, 15 bp, Homo sapiens
ttaattccaaggatt

SEQ ID NO: 1510917 - DNA, 15 bp, Homo sapiens
gttaattccaaggat

SEQ ID NO: 1510918 - DNA, 15 bp, Homo sapiens
tgttaattccaagga

SEQ ID NO: 1510919 - DNA, 15 bp, Homo sapiens
ctgttaattccaagg

SEQ ID NO: 1510920 - DNA, 15 bp, Homo sapiens
gctgttaattccaag

SEQ ID NO: 1510921 - DNA, 15 bp, Homo sapiens
agctgttaattccaa

SEQ ID NO: 1510922 - DNA, 15 bp, Homo sapiens
tagctgttaattcca

SEQ ID NO: 1510923 - DNA, 15 bp, Homo sapiens
atagctgttaattcc

SEQ ID NO: 1510924 - DNA, 15 bp, Homo sapiens
gatagctgttaattc

SEQ ID NO: 1510925 - DNA, 15 bp, Homo sapiens
tgatagctgttaatt

SEQ ID NO: 1510926 - DNA, 15 bp, Homo sapiens
atgatagctgttaat

SEQ ID NO: 1510927 - DNA, 15 bp, Homo sapiens
tatgatagctgttaa

SEQ ID NO: 1510928 - DNA, 15 bp, Homo sapiens
ctatgatagctgtta

SEQ ID NO: 1510929 - DNA, 15 bp, Homo sapiens
tctatgatagctgtt

SEQ ID NO: 1510930 - DNA, 15 bp, Homo sapiens
gtctatgatagctgt

SEQ ID NO: 1510931 - DNA, 15 bp, Homo sapiens
tgtctatgatagctg

SEQ ID NO: 1510932 - DNA, 15 bp, Homo sapiens
atgtctatgatagct

SEQ ID NO: 1510933 - DNA, 15 bp, Homo sapiens
aatgtctatgatagc

SEQ ID NO: 1510934 - DNA, 15 bp, Homo sapiens
caatgtctatgatag

SEQ ID NO: 1510935 - DNA, 15 bp, Homo sapiens
acaatgtctatgata

SEQ ID NO: 1510936 - DNA, 15 bp, Homo sapiens
tacaatgtctatgat

SEQ ID NO: 1510937 - DNA, 15 bp, Homo sapiens
atacaatgtctatga

SEQ ID NO: 1510938 - DNA, 15 bp, Homo sapiens
tatacaatgtctatg

SEQ ID NO: 1510939 - DNA, 15 bp, Homo sapiens
atatacaatgtctat

SEQ ID NO: 1510940 - DNA, 15 bp, Homo sapiens
tatatacaatgtcta

SEQ ID NO: 1510941 - DNA, 15 bp, Homo sapiens
ctatatacaatgtct

SEQ ID NO: 1510942 - DNA, 15 bp, Homo sapiens
actatatacaatgtc

SEQ ID NO: 1510943 - DNA, 15 bp, Homo sapiens
gactatatacaatgt

SEQ ID NO: 1510944 - DNA, 15 bp, Homo sapiens
tgactatatacaatg

SEQ ID NO: 1510945 - DNA, 15 bp, Homo sapiens
atgactatatacaat

SEQ ID NO: 1510946 - DNA, 15 bp, Homo sapiens
gatgactatatacaa

SEQ ID NO: 1510947 - DNA, 15 bp, Homo sapiens
agatgactatataca

SEQ ID NO: 1510948 - DNA, 15 bp, Homo sapiens
tagatgactatatac

SEQ ID NO: 1510949 - DNA, 15 bp, Homo sapiens
atagatgactatata

SEQ ID NO: 1510950 - DNA, 15 bp, Homo sapiens
gatagatgactatat

SEQ ID NO: 1510951 - DNA, 15 bp, Homo sapiens
tgatagatgactata

SEQ ID NO: 1510952 - DNA, 15 bp, Homo sapiens
atgatagatgactat

SEQ ID NO: 1510953 - DNA, 15 bp, Homo sapiens
tatgatagatgacta

SEQ ID NO: 1510954 - DNA, 15 bp, Homo sapiens
ttatgatagatgact

SEQ ID NO: 1510955 - DNA, 15 bp, Homo sapiens
tttatgatagatgac

SEQ ID NO: 1510956 - DNA, 15 bp, Homo sapiens
gtttatgatagatga

SEQ ID NO: 1510957 - DNA, 15 bp, Homo sapiens
tgtttatgatagatg

SEQ ID NO: 1510958 - DNA, 15 bp, Homo sapiens
ttgtttatgatagat

SEQ ID NO: 1510959 - DNA, 15 bp, Homo sapiens
attgtttatgataga

SEQ ID NO: 1510960 - DNA, 15 bp, Homo sapiens
cattgtttatgatag

SEQ ID NO: 1510961 - DNA, 15 bp, Homo sapiens
acattgtttatgata

SEQ ID NO: 1510962 - DNA, 15 bp, Homo sapiens
tacattgtttatgat

SEQ ID NO: 1510963 - DNA, 15 bp, Homo sapiens
gtacattgtttatga

SEQ ID NO: 1510964 - DNA, 15 bp, Homo sapiens
tgtacattgtttatg

SEQ ID NO: 1510965 - DNA, 15 bp, Homo sapiens
gtgtacattgtttat

SEQ ID NO: 1510966 - DNA, 15 bp, Homo sapiens
agtgtacattgttta

SEQ ID NO: 1510967 - DNA, 15 bp, Homo sapiens
cagtgtacattgttt

SEQ ID NO: 1510968 - DNA, 15 bp, Homo sapiens
acagtgtacattgtt

SEQ ID NO: 1510969 - DNA, 15 bp, Homo sapiens
aacagtgtacattgt

SEQ ID NO: 1510970 - DNA, 15 bp, Homo sapiens
taacagtgtacattg

SEQ ID NO: 1510971 - DNA, 15 bp, Homo sapiens
ttaacagtgtacatt

SEQ ID NO: 1510972 - DNA, 15 bp, Homo sapiens
tttaacagtgtacat

SEQ ID NO: 1510973 - DNA, 15 bp, Homo sapiens
atttaacagtgtaca

SEQ ID NO: 1510974 - DNA, 15 bp, Homo sapiens
gatttaacagtgtac

SEQ ID NO: 1510975 - DNA, 15 bp, Homo sapiens
agatttaacagtgta

SEQ ID NO: 1510976 - DNA, 15 bp, Homo sapiens
gagatttaacagtgt

SEQ ID NO: 1510977 - DNA, 15 bp, Homo sapiens
tgagatttaacagtg

SEQ ID NO: 1510978 - DNA, 15 bp, Homo sapiens
ctgagatttaacagt

SEQ ID NO: 1510979 - DNA, 15 bp, Homo sapiens
cctgagatttaacag

SEQ ID NO: 1510980 - DNA, 15 bp, Homo sapiens
tcctgagatttaaca

SEQ ID NO: 1510981 - DNA, 15 bp, Homo sapiens
atcctgagatttaac

SEQ ID NO: 1510982 - DNA, 15 bp, Homo sapiens
tatcctgagatttaa

SEQ ID NO: 1510983 - DNA, 15 bp, Homo sapiens
ttatcctgagattta

SEQ ID NO: 1510984 - DNA, 15 bp, Homo sapiens
tttatcctgagattt

SEQ ID NO: 1510985 - DNA, 15 bp, Homo sapiens
atttatcctgagatt

SEQ ID NO: 1510986 - DNA, 15 bp, Homo sapiens
tatttatcctgagat

SEQ ID NO: 1510987 - DNA, 15 bp, Homo sapiens
atatttatcctgaga

SEQ ID NO: 1510988 - DNA, 15 bp, Homo sapiens
aatatttatcctgag

SEQ ID NO: 1510989 - DNA, 15 bp, Homo sapiens
taatatttatcctga

SEQ ID NO: 1510990 - DNA, 15 bp, Homo sapiens
ttaatatttatcctg

SEQ ID NO: 1510991 - DNA, 15 bp, Homo sapiens
attaatatttatcct

SEQ ID NO: 1510992 - DNA, 15 bp, Homo sapiens
gattaatatttatcc

SEQ ID NO: 1510993 - DNA, 15 bp, Homo sapiens
tgattaatatttatc

SEQ ID NO: 1510994 - DNA, 15 bp, Homo sapiens
ctgattaatatttat

SEQ ID NO: 1510995 - DNA, 15 bp, Homo sapiens
actgattaatattta

SEQ ID NO: 1510996 - DNA, 15 bp, Homo sapiens
gactgattaatattt

SEQ ID NO: 1510997 - DNA, 15 bp, Homo sapiens
tgactgattaatatt

SEQ ID NO: 1510998 - DNA, 15 bp, Homo sapiens
atgactgattaatat

SEQ ID NO: 1510999 - DNA, 15 bp, Homo sapiens
gatgactgattaata

SEQ ID NO: 1511000 - DNA, 15 bp, Homo sapiens
tgatgactgattaat

SEQ ID NO: 1511001 - DNA, 15 bp, Homo sapiens
atgatgactgattaa

SEQ ID NO: 1511002 - DNA, 15 bp, Homo sapiens
aatgatgactgatta

SEQ ID NO: 1511003 - DNA, 15 bp, Homo sapiens
aaatgatgactgatt

SEQ ID NO: 1511004 - DNA, 15 bp, Homo sapiens
caaatgatgactgat

SEQ ID NO: 1511005 - DNA, 15 bp, Homo sapiens
gcaaatgatgactga

SEQ ID NO: 1511006 - DNA, 15 bp, Homo sapiens
ggcaaatgatgactg

SEQ ID NO: 1511007 - DNA, 15 bp, Homo sapiens
aggcaaatgatgact

SEQ ID NO: 1511008 - DNA, 15 bp, Homo sapiens
aaggcaaatgatgac

SEQ ID NO: 1511009 - DNA, 15 bp, Homo sapiens
taaggcaaatgatga

SEQ ID NO: 1511010 - DNA, 15 bp, Homo sapiens
ttaaggcaaatgatg

SEQ ID NO: 1511011 - DNA, 15 bp, Homo sapiens
attaaggcaaatgat

SEQ ID NO: 1511012 - DNA, 15 bp, Homo sapiens
aattaaggcaaatga

SEQ ID NO: 1511013 - DNA, 15 bp, Homo sapiens
aaattaaggcaaatg

SEQ ID NO: 1511014 - DNA, 15 bp, Homo sapiens
taaattaaggcaaat

SEQ ID NO: 1511015 - DNA, 15 bp, Homo sapiens
ctaaattaaggcaaa

SEQ ID NO: 1511016 - DNA, 15 bp, Homo sapiens
gctaaattaaggcaa

SEQ ID NO: 1511017 - DNA, 15 bp, Homo sapiens
tgctaaattaaggca

SEQ ID NO: 1511018 - DNA, 15 bp, Homo sapiens
ttgctaaattaaggc

SEQ ID NO: 1511019 - DNA, 15 bp, Homo sapiens
cttgctaaattaagg

SEQ ID NO: 1511020 - DNA, 15 bp, Homo sapiens
acttgctaaattaag

SEQ ID NO: 1511021 - DNA, 15 bp, Homo sapiens
cacttgctaaattaa

SEQ ID NO: 1511022 - DNA, 15 bp, Homo sapiens
ccacttgctaaatta

SEQ ID NO: 1511023 - DNA, 15 bp, Homo sapiens
accacttgctaaatt

SEQ ID NO: 1511024 - DNA, 15 bp, Homo sapiens
aaccacttgctaaat

SEQ ID NO: 1511025 - DNA, 15 bp, Homo sapiens
caaccacttgctaaa

SEQ ID NO: 1511026 - DNA, 15 bp, Homo sapiens
acaaccacttgctaa

SEQ ID NO: 1511027 - DNA, 15 bp, Homo sapiens
gacaaccacttgcta

SEQ ID NO: 1511028 - DNA, 15 bp, Homo sapiens
tgacaaccacttgct

SEQ ID NO: 1511029 - DNA, 15 bp, Homo sapiens
ttgacaaccacttgc

SEQ ID NO: 1511030 - DNA, 15 bp, Homo sapiens
gttgacaaccacttg

SEQ ID NO: 1511031 - DNA, 15 bp, Homo sapiens
agttgacaaccactt

SEQ ID NO: 1511032 - DNA, 15 bp, Homo sapiens
aagttgacaaccact

SEQ ID NO: 1511033 - DNA, 15 bp, Homo sapiens
aaagttgacaaccac

SEQ ID NO: 1511034 - DNA, 15 bp, Homo sapiens
caaagttgacaacca

SEQ ID NO: 1511035 - DNA, 15 bp, Homo sapiens
ccaaagttgacaacc

SEQ ID NO: 1511036 - DNA, 15 bp, Homo sapiens
cccaaagttgacaac

SEQ ID NO: 1511037 - DNA, 15 bp, Homo sapiens
acccaaagttgacaa

SEQ ID NO: 1511038 - DNA, 15 bp, Homo sapiens
aacccaaagttgaca

SEQ ID NO: 1511039 - DNA, 15 bp, Homo sapiens
aaacccaaagttgac

SEQ ID NO: 1511040 - DNA, 15 bp, Homo sapiens
taaacccaaagttga

SEQ ID NO: 1511041 - DNA, 15 bp, Homo sapiens
gtaaacccaaagttg

SEQ ID NO: 1511042 - DNA, 15 bp, Homo sapiens
tgtaaacccaaagtt

SEQ ID NO: 1511043 - DNA, 15 bp, Homo sapiens
atgtaaacccaaagt

SEQ ID NO: 1511044 - DNA, 15 bp, Homo sapiens
aatgtaaacccaaag

SEQ ID NO: 1511045 - DNA, 15 bp, Homo sapiens
aaatgtaaacccaaa

SEQ ID NO: 1511046 - DNA, 15 bp, Homo sapiens
aaaatgtaaacccaa

SEQ ID NO: 1511047 - DNA, 15 bp, Homo sapiens
aaaaatgtaaaccca

SEQ ID NO: 1511048 - DNA, 15 bp, Homo sapiens
caaaaatgtaaaccc

SEQ ID NO: 1511049 - DNA, 15 bp, Homo sapiens
gcaaaaatgtaaacc

SEQ ID NO: 1511050 - DNA, 15 bp, Homo sapiens
agcaaaaatgtaaac

SEQ ID NO: 1511051 - DNA, 15 bp, Homo sapiens
tagcaaaaatgtaaa

SEQ ID NO: 1511052 - DNA, 15 bp, Homo sapiens
gtagcaaaaatgtaa

SEQ ID NO: 1511053 - DNA, 15 bp, Homo sapiens
agtagcaaaaatgta

SEQ ID NO: 1511054 - DNA, 15 bp, Homo sapiens
gagtagcaaaaatgt

SEQ ID NO: 1511055 - DNA, 15 bp, Homo sapiens
agagtagcaaaaatg

SEQ ID NO: 1511056 - DNA, 15 bp, Homo sapiens
aagagtagcaaaaat

SEQ ID NO: 1511057 - DNA, 15 bp, Homo sapiens
aaagagtagcaaaaa

SEQ ID NO: 1511058 - DNA, 15 bp, Homo sapiens
taaagagtagcaaaa

SEQ ID NO: 1511059 - DNA, 15 bp, Homo sapiens
ctaaagagtagcaaa

SEQ ID NO: 1511060 - DNA, 15 bp, Homo sapiens
gctaaagagtagcaa

SEQ ID NO: 1511061 - DNA, 15 bp, Homo sapiens
agctaaagagtagca

SEQ ID NO: 1511062 - DNA, 15 bp, Homo sapiens
aagctaaagagtagc

SEQ ID NO: 1511063 - DNA, 15 bp, Homo sapiens
gaagctaaagagtag

SEQ ID NO: 1511064 - DNA, 15 bp, Homo sapiens
ggaagctaaagagta

SEQ ID NO: 1511065 - DNA, 15 bp, Homo sapiens
aggaagctaaagagt

SEQ ID NO: 1511066 - DNA, 15 bp, Homo sapiens
taggaagctaaagag

SEQ ID NO: 1511067 - DNA, 15 bp, Homo sapiens
gtaggaagctaaaga

SEQ ID NO: 1511068 - DNA, 15 bp, Homo sapiens
ggtaggaagctaaag

SEQ ID NO: 1511069 - DNA, 15 bp, Homo sapiens
aggtaggaagctaaa

SEQ ID NO: 1511070 - DNA, 15 bp, Homo sapiens
taggtaggaagctaa

SEQ ID NO: 1511071 - DNA, 15 bp, Homo sapiens
ttaggtaggaagcta

SEQ ID NO: 1511072 - DNA, 15 bp, Homo sapiens
cttaggtaggaagct

SEQ ID NO: 1511073 - DNA, 15 bp, Homo sapiens
tcttaggtaggaagc

SEQ ID NO: 1511074 - DNA, 15 bp, Homo sapiens
ttcttaggtaggaag

SEQ ID NO: 1511075 - DNA, 15 bp, Homo sapiens
attcttaggtaggaa

SEQ ID NO: 1511076 - DNA, 15 bp, Homo sapiens
tattcttaggtagga

SEQ ID NO: 1511077 - DNA, 15 bp, Homo sapiens
ttattcttaggtagg

SEQ ID NO: 1511078 - DNA, 15 bp, Homo sapiens
tttattcttaggtag

SEQ ID NO: 1511079 - DNA, 15 bp, Homo sapiens
ttttattcttaggta

SEQ ID NO: 1511080 - DNA, 15 bp, Homo sapiens
tttttattcttaggt

SEQ ID NO: 1511081 - DNA, 15 bp, Homo sapiens
atttttattcttagg

SEQ ID NO: 1511082 - DNA, 15 bp, Homo sapiens
catttttattcttag

SEQ ID NO: 1511083 - DNA, 15 bp, Homo sapiens
ccatttttattctta

SEQ ID NO: 1511084 - DNA, 15 bp, Homo sapiens
cccatttttattctt

SEQ ID NO: 1511085 - DNA, 15 bp, Homo sapiens
tcccatttttattct

SEQ ID NO: 1511086 - DNA, 15 bp, Homo sapiens
atcccatttttattc

SEQ ID NO: 1511087 - DNA, 15 bp, Homo sapiens
aatcccatttttatt

SEQ ID NO: 1511088 - DNA, 15 bp, Homo sapiens
caatcccatttttat

SEQ ID NO: 1511089 - DNA, 15 bp, Homo sapiens
acaatcccattttta

SEQ ID NO: 1511090 - DNA, 15 bp, Homo sapiens
aacaatcccattttt

SEQ ID NO: 1511091 - DNA, 15 bp, Homo sapiens
aaacaatcccatttt

SEQ ID NO: 1511092 - DNA, 15 bp, Homo sapiens
caaacaatcccattt

SEQ ID NO: 1511093 - DNA, 15 bp, Homo sapiens
gcaaacaatcccatt

SEQ ID NO: 1511094 - DNA, 15 bp, Homo sapiens
tgcaaacaatcccat

SEQ ID NO: 1511095 - DNA, 15 bp, Homo sapiens
gtgcaaacaatccca

SEQ ID NO: 1511096 - DNA, 15 bp, Homo sapiens
agtgcaaacaatccc

SEQ ID NO: 1511097 - DNA, 15 bp, Homo sapiens
tagtgcaaacaatcc

SEQ ID NO: 1511098 - DNA, 15 bp, Homo sapiens
ttagtgcaaacaatc

SEQ ID NO: 1511099 - DNA, 15 bp, Homo sapiens
gttagtgcaaacaat

SEQ ID NO: 1511100 - DNA, 15 bp, Homo sapiens
ggttagtgcaaacaa

SEQ ID NO: 1511101 - DNA, 15 bp, Homo sapiens
aggttagtgcaaaca

SEQ ID NO: 1511102 - DNA, 15 bp, Homo sapiens
caggttagtgcaaac

SEQ ID NO: 1511103 - DNA, 15 bp, Homo sapiens
tcaggttagtgcaaa

SEQ ID NO: 1511104 - DNA, 15 bp, Homo sapiens
atcaggttagtgcaa

SEQ ID NO: 1511105 - DNA, 15 bp, Homo sapiens
aatcaggttagtgca

SEQ ID NO: 1511106 - DNA, 15 bp, Homo sapiens
aaatcaggttagtgc

SEQ ID NO: 1511107 - DNA, 15 bp, Homo sapiens
aaaatcaggttagtg

SEQ ID NO: 1511108 - DNA, 15 bp, Homo sapiens
caaaatcaggttagt

SEQ ID NO: 1511109 - DNA, 15 bp, Homo sapiens
acaaaatcaggttag

SEQ ID NO: 1511110 - DNA, 15 bp, Homo sapiens
aacaaaatcaggtta

SEQ ID NO: 1511111 - DNA, 15 bp, Homo sapiens
aaacaaaatcaggtt

SEQ ID NO: 1511112 - DNA, 15 bp, Homo sapiens
aaaacaaaatcaggt

SEQ ID NO: 1511113 - DNA, 15 bp, Homo sapiens
caaaacaaaatcagg

SEQ ID NO: 1511114 - DNA, 15 bp, Homo sapiens
acaaaacaaaatcag

SEQ ID NO: 1511115 - DNA, 15 bp, Homo sapiens
aacaaaacaaaatca

SEQ ID NO: 1511116 - DNA, 15 bp, Homo sapiens
gaacaaaacaaaatc

SEQ ID NO: 1511117 - DNA, 15 bp, Homo sapiens
agaacaaaacaaaat

SEQ ID NO: 1511118 - DNA, 15 bp, Homo sapiens
gagaacaaaacaaaa

SEQ ID NO: 1511119 - DNA, 15 bp, Homo sapiens
tgagaacaaaacaaa

SEQ ID NO: 1511120 - DNA, 15 bp, Homo sapiens
ctgagaacaaaacaa

SEQ ID NO: 1511121 - DNA, 15 bp, Homo sapiens
cctgagaacaaaaca

SEQ ID NO: 1511122 - DNA, 15 bp, Homo sapiens
tcctgagaacaaaac

SEQ ID NO: 1511123 - DNA, 15 bp, Homo sapiens
atcctgagaacaaaa

SEQ ID NO: 1511124 - DNA, 15 bp, Homo sapiens
catcctgagaacaaa

SEQ ID NO: 1511125 - DNA, 15 bp, Homo sapiens
tcatcctgagaacaa

SEQ ID NO: 1511126 - DNA, 15 bp, Homo sapiens
ttcatcctgagaaca

SEQ ID NO: 1511127 - DNA, 15 bp, Homo sapiens
gttcatcctgagaac

SEQ ID NO: 1511128 - DNA, 15 bp, Homo sapiens
agttcatcctgagaa

SEQ ID NO: 1511129 - DNA, 15 bp, Homo sapiens
tagttcatcctgaga

SEQ ID NO: 1511130 - DNA, 15 bp, Homo sapiens
ctagttcatcctgag

SEQ ID NO: 1511131 - DNA, 15 bp, Homo sapiens
gctagttcatcctga

SEQ ID NO: 1511132 - DNA, 15 bp, Homo sapiens
agctagttcatcctg

SEQ ID NO: 1511133 - DNA, 15 bp, Homo sapiens
gagctagttcatcct

SEQ ID NO: 1511134 - DNA, 15 bp, Homo sapiens
cgagctagttcatcc

SEQ ID NO: 1511135 - DNA, 15 bp, Homo sapiens
tcgagctagttcatc

SEQ ID NO: 1511136 - DNA, 15 bp, Homo sapiens
ctcgagctagttcat

SEQ ID NO: 1511137 - DNA, 15 bp, Homo sapiens
actcgagctagttca

SEQ ID NO: 1511138 - DNA, 15 bp, Homo sapiens
aactcgagctagttc

SEQ ID NO: 1511139 - DNA, 15 bp, Homo sapiens
gaactcgagctagtt

SEQ ID NO: 1511140 - DNA, 15 bp, Homo sapiens
agaactcgagctagt

SEQ ID NO: 1511141 - DNA, 15 bp, Homo sapiens
cagaactcgagctag

SEQ ID NO: 1511142 - DNA, 15 bp, Homo sapiens
ccagaactcgagcta

SEQ ID NO: 1511143 - DNA, 15 bp, Homo sapiens
accagaactcgagct

SEQ ID NO: 1511144 - DNA, 15 bp, Homo sapiens
aaccagaactcgagc

SEQ ID NO: 1511145 - DNA, 15 bp, Homo sapiens
taaccagaactcgag

SEQ ID NO: 1511146 - DNA, 15 bp, Homo sapiens
gtaaccagaactcga

SEQ ID NO: 1511147 - DNA, 15 bp, Homo sapiens
agtaaccagaactcg

SEQ ID NO: 1511148 - DNA, 15 bp, Homo sapiens
gagtaaccagaactc

SEQ ID NO: 1511149 - DNA, 15 bp, Homo sapiens
agagtaaccagaact

SEQ ID NO: 1511150 - DNA, 15 bp, Homo sapiens
cagagtaaccagaac

SEQ ID NO: 1511151 - DNA, 15 bp, Homo sapiens
acagagtaaccagaa

SEQ ID NO: 1511152 - DNA, 15 bp, Homo sapiens
aacagagtaaccaga

SEQ ID NO: 1511153 - DNA, 15 bp, Homo sapiens
aaacagagtaaccag

SEQ ID NO: 1511154 - DNA, 15 bp, Homo sapiens
caaacagagtaacca

SEQ ID NO: 1511155 - DNA, 15 bp, Homo sapiens
tcaaacagagtaacc

SEQ ID NO: 1511156 - DNA, 15 bp, Homo sapiens
atcaaacagagtaac

SEQ ID NO: 1511157 - DNA, 15 bp, Homo sapiens
aatcaaacagagtaa

SEQ ID NO: 1511158 - DNA, 15 bp, Homo sapiens
gaatcaaacagagta

SEQ ID NO: 1511159 - DNA, 15 bp, Homo sapiens
agaatcaaacagagt

SEQ ID NO: 1511160 - DNA, 15 bp, Homo sapiens
gagaatcaaacagag

SEQ ID NO: 1511161 - DNA, 15 bp, Homo sapiens
cgagaatcaaacaga

SEQ ID NO: 1511162 - DNA, 15 bp, Homo sapiens
ccgagaatcaaacag

SEQ ID NO: 1511163 - DNA, 15 bp, Homo sapiens
gccgagaatcaaaca

SEQ ID NO: 1511164 - DNA, 15 bp, Homo sapiens
tgccgagaatcaaac

SEQ ID NO: 1511165 - DNA, 15 bp, Homo sapiens
atgccgagaatcaaa

SEQ ID NO: 1511166 - DNA, 15 bp, Homo sapiens
aatgccgagaatcaa

SEQ ID NO: 1511167 - DNA, 15 bp, Homo sapiens
aaatgccgagaatca

SEQ ID NO: 1511168 - DNA, 15 bp, Homo sapiens
taaatgccgagaatc

SEQ ID NO: 1511169 - DNA, 15 bp, Homo sapiens
gtaaatgccgagaat

SEQ ID NO: 1511170 - DNA, 15 bp, Homo sapiens
agtaaatgccgagaa

SEQ ID NO: 1511171 - DNA, 15 bp, Homo sapiens
gagtaaatgccgaga

SEQ ID NO: 1511172 - DNA, 15 bp, Homo sapiens
agagtaaatgccgag

SEQ ID NO: 1511173 - DNA, 15 bp, Homo sapiens
tagagtaaatgccga

SEQ ID NO: 1511174 - DNA, 15 bp, Homo sapiens
gtagagtaaatgccg

SEQ ID NO: 1511175 - DNA, 15 bp, Homo sapiens
ggtagagtaaatgcc

SEQ ID NO: 1511176 - DNA, 15 bp, Homo sapiens
tggtagagtaaatgc

SEQ ID NO: 1511177 - DNA, 15 bp, Homo sapiens
ttggtagagtaaatg

SEQ ID NO: 1511178 - DNA, 15 bp, Homo sapiens
gttggtagagtaaat

SEQ ID NO: 1511179 - DNA, 15 bp, Homo sapiens
agttggtagagtaaa

SEQ ID NO: 1511180 - DNA, 15 bp, Homo sapiens
cagttggtagagtaa

SEQ ID NO: 1511181 - DNA, 15 bp, Homo sapiens
gcagttggtagagta

SEQ ID NO: 1511182 - DNA, 15 bp, Homo sapiens
agcagttggtagagt

SEQ ID NO: 1511183 - DNA, 15 bp, Homo sapiens
gagcagttggtagag

SEQ ID NO: 1511184 - DNA, 15 bp, Homo sapiens
agagcagttggtaga

SEQ ID NO: 1511185 - DNA, 15 bp, Homo sapiens
cagagcagttggtag

SEQ ID NO: 1511186 - DNA, 15 bp, Homo sapiens
ccagagcagttggta

SEQ ID NO: 1511187 - DNA, 15 bp, Homo sapiens
tccagagcagttggt

SEQ ID NO: 1511188 - DNA, 15 bp, Homo sapiens
ttccagagcagttgg

SEQ ID NO: 1511189 - DNA, 15 bp, Homo sapiens
gttccagagcagttg

SEQ ID NO: 1511190 - DNA, 15 bp, Homo sapiens
tgttccagagcagtt

SEQ ID NO: 1511191 - DNA, 15 bp, Homo sapiens
atgttccagagcagt

SEQ ID NO: 1511192 - DNA, 15 bp, Homo sapiens
catgttccagagcag

SEQ ID NO: 1511193 - DNA, 15 bp, Homo sapiens
acatgttccagagca

SEQ ID NO: 1511194 - DNA, 15 bp, Homo sapiens
aacatgttccagagc

SEQ ID NO: 1511195 - DNA, 15 bp, Homo sapiens
aaacatgttccagag

SEQ ID NO: 1511196 - DNA, 15 bp, Homo sapiens
aaaacatgttccaga

SEQ ID NO: 1511197 - DNA, 15 bp, Homo sapiens
gaaaacatgttccag

SEQ ID NO: 1511198 - DNA, 15 bp, Homo sapiens
agaaaacatgttcca

SEQ ID NO: 1511199 - DNA, 15 bp, Homo sapiens
tagaaaacatgttcc

SEQ ID NO: 1511200 - DNA, 15 bp, Homo sapiens
ttagaaaacatgttc

SEQ ID NO: 1511201 - DNA, 15 bp, Homo sapiens
tttagaaaacatgtt

SEQ ID NO: 1511202 - DNA, 15 bp, Homo sapiens
ctttagaaaacatgt

SEQ ID NO: 1511203 - DNA, 15 bp, Homo sapiens
tctttagaaaacatg

SEQ ID NO: 1511204 - DNA, 15 bp, Homo sapiens
ttctttagaaaacat

SEQ ID NO: 1511205 - DNA, 15 bp, Homo sapiens
cttctttagaaaaca

SEQ ID NO: 1511206 - DNA, 15 bp, Homo sapiens
acttctttagaaaac

SEQ ID NO: 1511207 - DNA, 15 bp, Homo sapiens
tacttctttagaaaa

SEQ ID NO: 1511208 - DNA, 15 bp, Homo sapiens
ctacttctttagaaa

SEQ ID NO: 1511209 - DNA, 15 bp, Homo sapiens
tctacttctttagaa

SEQ ID NO: 1511210 - DNA, 15 bp, Homo sapiens
ttctacttctttaga

SEQ ID NO: 1511211 - DNA, 15 bp, Homo sapiens
attctacttctttag

SEQ ID NO: 1511212 - DNA, 15 bp, Homo sapiens
aattctacttcttta

SEQ ID NO: 1511213 - DNA, 15 bp, Homo sapiens
caattctacttcttt

SEQ ID NO: 1511214 - DNA, 15 bp, Homo sapiens
ccaattctacttctt

SEQ ID NO: 1511215 - DNA, 15 bp, Homo sapiens
gccaattctacttct

SEQ ID NO: 1511216 - DNA, 15 bp, Homo sapiens
tgccaattctacttc

SEQ ID NO: 1511217 - DNA, 15 bp, Homo sapiens
ctgccaattctactt

SEQ ID NO: 1511218 - DNA, 15 bp, Homo sapiens
tctgccaattctact

SEQ ID NO: 1511219 - DNA, 15 bp, Homo sapiens
gtctgccaattctac

SEQ ID NO: 1511220 - DNA, 15 bp, Homo sapiens
agtctgccaattcta

SEQ ID NO: 1511221 - DNA, 15 bp, Homo sapiens
gagtctgccaattct

SEQ ID NO: 1511222 - DNA, 15 bp, Homo sapiens
ggagtctgccaattc

SEQ ID NO: 1511223 - DNA, 15 bp, Homo sapiens
tggagtctgccaatt

SEQ ID NO: 1511224 - DNA, 15 bp, Homo sapiens
atggagtctgccaat

SEQ ID NO: 1511225 - DNA, 15 bp, Homo sapiens
catggagtctgccaa

SEQ ID NO: 1511226 - DNA, 15 bp, Homo sapiens
gcatggagtctgcca

SEQ ID NO: 1511227 - DNA, 15 bp, Homo sapiens
tgcatggagtctgcc

SEQ ID NO: 1511228 - DNA, 15 bp, Homo sapiens
ctgcatggagtctgc

SEQ ID NO: 1511229 - DNA, 15 bp, Homo sapiens
tctgcatggagtctg

SEQ ID NO: 1511230 - DNA, 15 bp, Homo sapiens
gtctgcatggagtct

SEQ ID NO: 1511231 - DNA, 15 bp, Homo sapiens
agtctgcatggagtc

SEQ ID NO: 1511232 - DNA, 15 bp, Homo sapiens
gagtctgcatggagt

SEQ ID NO: 1511233 - DNA, 15 bp, Homo sapiens
agagtctgcatggag

SEQ ID NO: 1511234 - DNA, 15 bp, Homo sapiens
gagagtctgcatgga

SEQ ID NO: 1511235 - DNA, 15 bp, Homo sapiens
agagagtctgcatgg

SEQ ID NO: 1511236 - DNA, 15 bp, Homo sapiens
aagagagtctgcatg

SEQ ID NO: 1511237 - DNA, 15 bp, Homo sapiens
gaagagagtctgcat

SEQ ID NO: 1511238 - DNA, 15 bp, Homo sapiens
ggaagagagtctgca

SEQ ID NO: 1511239 - DNA, 15 bp, Homo sapiens
cggaagagagtctgc

SEQ ID NO: 1511240 - DNA, 15 bp, Homo sapiens
tcggaagagagtctg

SEQ ID NO: 1511241 - DNA, 15 bp, Homo sapiens
ctcggaagagagtct

SEQ ID NO: 1511242 - DNA, 15 bp, Homo sapiens
cctcggaagagagtc

SEQ ID NO: 1511243 - DNA, 15 bp, Homo sapiens
gcctcggaagagagt

SEQ ID NO: 1511244 - DNA, 15 bp, Homo sapiens
tgcctcggaagagag

SEQ ID NO: 1511245 - DNA, 15 bp, Homo sapiens
ttgcctcggaagaga

SEQ ID NO: 1511246 - DNA, 15 bp, Homo sapiens
gttgcctcggaagag

SEQ ID NO: 1511247 - DNA, 15 bp, Homo sapiens
tgttgcctcggaaga

SEQ ID NO: 1511248 - DNA, 15 bp, Homo sapiens
ctgttgcctcggaag

SEQ ID NO: 1511249 - DNA, 15 bp, Homo sapiens
gctgttgcctcggaa

SEQ ID NO: 1511250 - DNA, 15 bp, Homo sapiens
agctgttgcctcgga

SEQ ID NO: 1511251 - DNA, 15 bp, Homo sapiens
aagctgttgcctcgg

SEQ ID NO: 1511252 - DNA, 15 bp, Homo sapiens
caagctgttgcctcg

SEQ ID NO: 1511253 - DNA, 15 bp, Homo sapiens
ccaagctgttgcctc

SEQ ID NO: 1511254 - DNA, 15 bp, Homo sapiens
gccaagctgttgcct

SEQ ID NO: 1511255 - DNA, 15 bp, Homo sapiens
ggccaagctgttgcc

SEQ ID NO: 1511256 - DNA, 15 bp, Homo sapiens
tggccaagctgttgc

SEQ ID NO: 1511257 - DNA, 15 bp, Homo sapiens
ctggccaagctgttg

SEQ ID NO: 1511258 - DNA, 15 bp, Homo sapiens
actggccaagctgtt

SEQ ID NO: 1511259 - DNA, 15 bp, Homo sapiens
tactggccaagctgt

SEQ ID NO: 1511260 - DNA, 15 bp, Homo sapiens
ttactggccaagctg

SEQ ID NO: 1511261 - DNA, 15 bp, Homo sapiens
tttactggccaagct

SEQ ID NO: 1511262 - DNA, 15 bp, Homo sapiens
ttttactggccaagc

SEQ ID NO: 1511263 - DNA, 15 bp, Homo sapiens
attttactggccaag

SEQ ID NO: 1511264 - DNA, 15 bp, Homo sapiens
tattttactggccaa

SEQ ID NO: 1511265 - DNA, 15 bp, Homo sapiens
ttattttactggcca

SEQ ID NO: 1511266 - DNA, 15 bp, Homo sapiens
attattttactggcc

SEQ ID NO: 1511267 - DNA, 15 bp, Homo sapiens
cattattttactggc

SEQ ID NO: 1511268 - DNA, 15 bp, Homo sapiens
tcattattttactgg

SEQ ID NO: 1511269 - DNA, 15 bp, Homo sapiens
gtcattattttactg

SEQ ID NO: 1511270 - DNA, 15 bp, Homo sapiens
tgtcattattttact

SEQ ID NO: 1511271 - DNA, 15 bp, Homo sapiens
atgtcattattttac

SEQ ID NO: 1511272 - DNA, 15 bp, Homo sapiens
aatgtcattatttta

SEQ ID NO: 1511273 - DNA, 15 bp, Homo sapiens
gaatgtcattatttt

SEQ ID NO: 1511274 - DNA, 15 bp, Homo sapiens
agaatgtcattattt

SEQ ID NO: 1511275 - DNA, 15 bp, Homo sapiens
cagaatgtcattatt

SEQ ID NO: 1511276 - DNA, 15 bp, Homo sapiens
acagaatgtcattat

SEQ ID NO: 1511277 - DNA, 15 bp, Homo sapiens
aacagaatgtcatta

SEQ ID NO: 1511278 - DNA, 15 bp, Homo sapiens
aaacagaatgtcatt

SEQ ID NO: 1511279 - DNA, 15 bp, Homo sapiens
gaaacagaatgtcat

SEQ ID NO: 1511280 - DNA, 15 bp, Homo sapiens
tgaaacagaatgtca

SEQ ID NO: 1511281 - DNA, 15 bp, Homo sapiens
ttgaaacagaatgtc

SEQ ID NO: 1511282 - DNA, 15 bp, Homo sapiens
cttgaaacagaatgt

SEQ ID NO: 1511283 - DNA, 15 bp, Homo sapiens
ccttgaaacagaatg

SEQ ID NO: 1511284 - DNA, 15 bp, Homo sapiens
accttgaaacagaat

SEQ ID NO: 1511285 - DNA, 15 bp, Homo sapiens
aaccttgaaacagaa

SEQ ID NO: 1511286 - DNA, 15 bp, Homo sapiens
aaaccttgaaacaga

SEQ ID NO: 1511287 - DNA, 15 bp, Homo sapiens
caaaccttgaaacag

SEQ ID NO: 1511288 - DNA, 15 bp, Homo sapiens
acaaaccttgaaaca

SEQ ID NO: 1511289 - DNA, 15 bp, Homo sapiens
tacaaaccttgaaac

SEQ ID NO: 1511290 - DNA, 15 bp, Homo sapiens
atacaaaccttgaaa

SEQ ID NO: 1511291 - DNA, 15 bp, Homo sapiens
gatacaaaccttgaa

SEQ ID NO: 1511292 - DNA, 15 bp, Homo sapiens
tgatacaaaccttga

SEQ ID NO: 1511293 - DNA, 15 bp, Homo sapiens
atgatacaaaccttg

SEQ ID NO: 1511294 - DNA, 15 bp, Homo sapiens
aatgatacaaacctt

SEQ ID NO: 1511295 - DNA, 15 bp, Homo sapiens
gaatgatacaaacct

SEQ ID NO: 1511296 - DNA, 15 bp, Homo sapiens
tgaatgatacaaacc

SEQ ID NO: 1511297 - DNA, 15 bp, Homo sapiens
atgaatgatacaaac

SEQ ID NO: 1511298 - DNA, 15 bp, Homo sapiens
aatgaatgatacaaa

SEQ ID NO: 1511299 - DNA, 15 bp, Homo sapiens
aaatgaatgatacaa

SEQ ID NO: 1511300 - DNA, 15 bp, Homo sapiens
aaaatgaatgataca

SEQ ID NO: 1511301 - DNA, 15 bp, Homo sapiens
caaaatgaatgatac

SEQ ID NO: 1511302 - DNA, 15 bp, Homo sapiens
acaaaatgaatgata

SEQ ID NO: 1511303 - DNA, 15 bp, Homo sapiens
cacaaaatgaatgat

SEQ ID NO: 1511304 - DNA, 15 bp, Homo sapiens
acacaaaatgaatga

SEQ ID NO: 1511305 - DNA, 15 bp, Homo sapiens
cacacaaaatgaatg

SEQ ID NO: 1511306 - DNA, 15 bp, Homo sapiens
acacacaaaatgaat

SEQ ID NO: 1511307 - DNA, 15 bp, Homo sapiens
tacacacaaaatgaa

SEQ ID NO: 1511308 - DNA, 15 bp, Homo sapiens
atacacacaaaatga

SEQ ID NO: 1511309 - DNA, 15 bp, Homo sapiens
catacacacaaaatg

SEQ ID NO: 1511310 - DNA, 15 bp, Homo sapiens
acatacacacaaaat

SEQ ID NO: 1511311 - DNA, 15 bp, Homo sapiens
cacatacacacaaaa

SEQ ID NO: 1511312 - DNA, 15 bp, Homo sapiens
acacatacacacaaa

SEQ ID NO: 1511313 - DNA, 15 bp, Homo sapiens
cacacatacacacaa

SEQ ID NO: 1511314 - DNA, 15 bp, Homo sapiens
gcacacacatacaca

SEQ ID NO: 1511315 - DNA, 15 bp, Homo sapiens
agcacacacatacac

SEQ ID NO: 1511316 - DNA, 15 bp, Homo sapiens
cagcacacacataca

SEQ ID NO: 1511317 - DNA, 15 bp, Homo sapiens
tcagcacacacatac

SEQ ID NO: 1511318 - DNA, 15 bp, Homo sapiens
ctcagcacacacata

SEQ ID NO: 1511319 - DNA, 15 bp, Homo sapiens
cctcagcacacacat

SEQ ID NO: 1511320 - DNA, 15 bp, Homo sapiens
acctcagcacacaca

SEQ ID NO: 1511321 - DNA, 15 bp, Homo sapiens
tacctcagcacacac

SEQ ID NO: 1511322 - DNA, 15 bp, Homo sapiens
atacctcagcacaca

SEQ ID NO: 1511323 - DNA, 15 bp, Homo sapiens
catacctcagcacac

SEQ ID NO: 1511324 - DNA, 15 bp, Homo sapiens
acatacctcagcaca

SEQ ID NO: 1511325 - DNA, 15 bp, Homo sapiens
gacatacctcagcac

SEQ ID NO: 1511326 - DNA, 15 bp, Homo sapiens
tgacatacctcagca

SEQ ID NO: 1511327 - DNA, 15 bp, Homo sapiens
ttgacatacctcagc

SEQ ID NO: 1511328 - DNA, 15 bp, Homo sapiens
cttgacatacctcag

SEQ ID NO: 1511329 - DNA, 15 bp, Homo sapiens
acttgacatacctca

SEQ ID NO: 1511330 - DNA, 15 bp, Homo sapiens
tacttgacatacctc

SEQ ID NO: 1511331 - DNA, 15 bp, Homo sapiens
ttacttgacatacct

SEQ ID NO: 1511332 - DNA, 15 bp, Homo sapiens
attacttgacatacc

SEQ ID NO: 1511333 - DNA, 15 bp, Homo sapiens
cattacttgacatac

SEQ ID NO: 1511334 - DNA, 15 bp, Homo sapiens
tcattacttgacata

SEQ ID NO: 1511335 - DNA, 15 bp, Homo sapiens
atcattacttgacat

SEQ ID NO: 1511336 - DNA, 15 bp, Homo sapiens
aatcattacttgaca

SEQ ID NO: 1511337 - DNA, 15 bp, Homo sapiens
taatcattacttgac

SEQ ID NO: 1511338 - DNA, 15 bp, Homo sapiens
ataatcattacttga

SEQ ID NO: 1511339 - DNA, 15 bp, Homo sapiens
cataatcattacttg

SEQ ID NO: 1511340 - DNA, 15 bp, Homo sapiens
acataatcattactt

SEQ ID NO: 1511341 - DNA, 15 bp, Homo sapiens
tacataatcattact

SEQ ID NO: 1511342 - DNA, 15 bp, Homo sapiens
gtacataatcattac

SEQ ID NO: 1511343 - DNA, 15 bp, Homo sapiens
tgtacataatcatta

SEQ ID NO: 1511344 - DNA, 15 bp, Homo sapiens
ctgtacataatcatt

SEQ ID NO: 1511345 - DNA, 15 bp, Homo sapiens
tctgtacataatcat

SEQ ID NO: 1511346 - DNA, 15 bp, Homo sapiens
ttctgtacataatca

SEQ ID NO: 1511347 - DNA, 15 bp, Homo sapiens
attctgtacataatc

SEQ ID NO: 1511348 - DNA, 15 bp, Homo sapiens
cattctgtacataat

SEQ ID NO: 1511349 - DNA, 15 bp, Homo sapiens
acattctgtacataa

SEQ ID NO: 1511350 - DNA, 15 bp, Homo sapiens
cacattctgtacata

SEQ ID NO: 1511351 - DNA, 15 bp, Homo sapiens
gcacattctgtacat

SEQ ID NO: 1511352 - DNA, 15 bp, Homo sapiens
tgcacattctgtaca

SEQ ID NO: 1511353 - DNA, 15 bp, Homo sapiens
ctgcacattctgtac

SEQ ID NO: 1511354 - DNA, 15 bp, Homo sapiens
cctgcacattctgta

SEQ ID NO: 1511355 - DNA, 15 bp, Homo sapiens
ccctgcacattctgt

SEQ ID NO: 1511356 - DNA, 15 bp, Homo sapiens
gccctgcacattctg

SEQ ID NO: 1511357 - DNA, 15 bp, Homo sapiens
agccctgcacattct

SEQ ID NO: 1511358 - DNA, 15 bp, Homo sapiens
cagccctgcacattc

SEQ ID NO: 1511359 - DNA, 15 bp, Homo sapiens
tcagccctgcacatt

SEQ ID NO: 1511360 - DNA, 15 bp, Homo sapiens
atcagccctgcacat

SEQ ID NO: 1511361 - DNA, 15 bp, Homo sapiens
aatcagccctgcaca

SEQ ID NO: 1511362 - DNA, 15 bp, Homo sapiens
caatcagccctgcac

SEQ ID NO: 1511363 - DNA, 15 bp, Homo sapiens
acaatcagccctgca

SEQ ID NO: 1511364 - DNA, 15 bp, Homo sapiens
gacaatcagccctgc

SEQ ID NO: 1511365 - DNA, 15 bp, Homo sapiens
agacaatcagccctg

SEQ ID NO: 1511366 - DNA, 15 bp, Homo sapiens
aagacaatcagccct

SEQ ID NO: 1511367 - DNA, 15 bp, Homo sapiens
gaagacaatcagccc

SEQ ID NO: 1511368 - DNA, 15 bp, Homo sapiens
agaagacaatcagcc

SEQ ID NO: 1511369 - DNA, 15 bp, Homo sapiens
aagaagacaatcagc

SEQ ID NO: 1511370 - DNA, 15 bp, Homo sapiens
aaagaagacaatcag

SEQ ID NO: 1511371 - DNA, 15 bp, Homo sapiens
aaaagaagacaatca

SEQ ID NO: 1511372 - DNA, 15 bp, Homo sapiens
taaaagaagacaatc

SEQ ID NO: 1511373 - DNA, 15 bp, Homo sapiens
ttaaaagaagacaat

SEQ ID NO: 1511374 - DNA, 15 bp, Homo sapiens
cttaaaagaagacaa

SEQ ID NO: 1511375 - DNA, 15 bp, Homo sapiens
ccttaaaagaagaca

SEQ ID NO: 1511376 - DNA, 15 bp, Homo sapiens
accttaaaagaagac

SEQ ID NO: 1511377 - DNA, 15 bp, Homo sapiens
taccttaaaagaaga

SEQ ID NO: 1511378 - DNA, 15 bp, Homo sapiens
ttaccttaaaagaag

SEQ ID NO: 1511379 - DNA, 15 bp, Homo sapiens
tttaccttaaaagaa

SEQ ID NO: 1511380 - DNA, 15 bp, Homo sapiens
ttttaccttaaaaga

SEQ ID NO: 1511381 - DNA, 15 bp, Homo sapiens
attttaccttaaaag

SEQ ID NO: 1511382 - DNA, 15 bp, Homo sapiens
tattttaccttaaaa

SEQ ID NO: 1511383 - DNA, 15 bp, Homo sapiens
atattttaccttaaa

SEQ ID NO: 1511384 - DNA, 15 bp, Homo sapiens
tatattttaccttaa

SEQ ID NO: 1511385 - DNA, 15 bp, Homo sapiens
atatattttacctta

SEQ ID NO: 1511386 - DNA, 15 bp, Homo sapiens
catatattttacctt

SEQ ID NO: 1511387 - DNA, 15 bp, Homo sapiens
ccatatattttacct

SEQ ID NO: 1511388 - DNA, 15 bp, Homo sapiens
tccatatattttacc

SEQ ID NO: 1511389 - DNA, 15 bp, Homo sapiens
ctccatatattttac

SEQ ID NO: 1511390 - DNA, 15 bp, Homo sapiens
gctccatatatttta

SEQ ID NO: 1511391 - DNA, 15 bp, Homo sapiens
tgctccatatatttt

SEQ ID NO: 1511392 - DNA, 15 bp, Homo sapiens
ctgctccatatattt

SEQ ID NO: 1511393 - DNA, 15 bp, Homo sapiens
cctgctccatatatt

SEQ ID NO: 1511394 - DNA, 15 bp, Homo sapiens
acctgctccatatat

SEQ ID NO: 1511395 - DNA, 15 bp, Homo sapiens
tacctgctccatata

SEQ ID NO: 1511396 - DNA, 15 bp, Homo sapiens
atacctgctccatat

SEQ ID NO: 1511397 - DNA, 15 bp, Homo sapiens
tatacctgctccata

SEQ ID NO: 1511398 - DNA, 15 bp, Homo sapiens
ttatacctgctccat

SEQ ID NO: 1511399 - DNA, 15 bp, Homo sapiens
attatacctgctcca

SEQ ID NO: 1511400 - DNA, 15 bp, Homo sapiens
tattatacctgctcc

SEQ ID NO: 1511401 - DNA, 15 bp, Homo sapiens
ttattatacctgctc

SEQ ID NO: 1511402 - DNA, 15 bp, Homo sapiens
tttattatacctgct

SEQ ID NO: 1511403 - DNA, 15 bp, Homo sapiens
gtttattatacctgc

SEQ ID NO: 1511404 - DNA, 15 bp, Homo sapiens
agtttattatacctg

SEQ ID NO: 1511405 - DNA, 15 bp, Homo sapiens
gagtttattatacct

SEQ ID NO: 1511406 - DNA, 15 bp, Homo sapiens
ggagtttattatacc

SEQ ID NO: 1511407 - DNA, 15 bp, Homo sapiens
aggagtttattatac

SEQ ID NO: 1511408 - DNA, 15 bp, Homo sapiens
taggagtttattata

SEQ ID NO: 1511409 - DNA, 15 bp, Homo sapiens
ataggagtttattat

SEQ ID NO: 1511410 - DNA, 15 bp, Homo sapiens
aataggagtttatta

SEQ ID NO: 1511411 - DNA, 15 bp, Homo sapiens
gaataggagtttatt

SEQ ID NO: 1511412 - DNA, 15 bp, Homo sapiens
cgaataggagtttat

SEQ ID NO: 1511413 - DNA, 15 bp, Homo sapiens
acgaataggagttta

SEQ ID NO: 1511414 - DNA, 15 bp, Homo sapiens
cacgaataggagttt

SEQ ID NO: 1511415 - DNA, 15 bp, Homo sapiens
gcacgaataggagtt

SEQ ID NO: 1511416 - DNA, 15 bp, Homo sapiens
tgcacgaataggagt

SEQ ID NO: 1511417 - DNA, 15 bp, Homo sapiens
atgcacgaataggag

SEQ ID NO: 1511418 - DNA, 15 bp, Homo sapiens
aatgcacgaatagga

SEQ ID NO: 1511419 - DNA, 15 bp, Homo sapiens
aaatgcacgaatagg

SEQ ID NO: 1511420 - DNA, 15 bp, Homo sapiens
gaaatgcacgaatag

SEQ ID NO: 1511421 - DNA, 15 bp, Homo sapiens
agaaatgcacgaata

SEQ ID NO: 1511422 - DNA, 15 bp, Homo sapiens
cagaaatgcacgaat

SEQ ID NO: 1511423 - DNA, 15 bp, Homo sapiens
acagaaatgcacgaa

SEQ ID NO: 1511424 - DNA, 15 bp, Homo sapiens
tacagaaatgcacga

SEQ ID NO: 1511425 - DNA, 15 bp, Homo sapiens
ctacagaaatgcacg

SEQ ID NO: 1511426 - DNA, 15 bp, Homo sapiens
cctacagaaatgcac

SEQ ID NO: 1511427 - DNA, 15 bp, Homo sapiens
acctacagaaatgca

SEQ ID NO: 1511428 - DNA, 15 bp, Homo sapiens
tacctacagaaatgc

SEQ ID NO: 1511429 - DNA, 15 bp, Homo sapiens
atacctacagaaatg

SEQ ID NO: 1511430 - DNA, 15 bp, Homo sapiens
tatacctacagaaat

SEQ ID NO: 1511431 - DNA, 15 bp, Homo sapiens
atatacctacagaaa

SEQ ID NO: 1511432 - DNA, 15 bp, Homo sapiens
catatacctacagaa

SEQ ID NO: 1511433 - DNA, 15 bp, Homo sapiens
ccatatacctacaga

SEQ ID NO: 1511434 - DNA, 15 bp, Homo sapiens
accatatacctacag

SEQ ID NO: 1511435 - DNA, 15 bp, Homo sapiens
caccatatacctaca

SEQ ID NO: 1511436 - DNA, 15 bp, Homo sapiens
gcaccatatacctac

SEQ ID NO: 1511437 - DNA, 15 bp, Homo sapiens
agcaccatataccta

SEQ ID NO: 1511438 - DNA, 15 bp, Homo sapiens
tagcaccatatacct

SEQ ID NO: 1511439 - DNA, 15 bp, Homo sapiens
gtagcaccatatacc

SEQ ID NO: 1511440 - DNA, 15 bp, Homo sapiens
ggtagcaccatatac

SEQ ID NO: 1511441 - DNA, 15 bp, Homo sapiens
aggtagcaccatata

SEQ ID NO: 1511442 - DNA, 15 bp, Homo sapiens
taggtagcaccatat

SEQ ID NO: 1511443 - DNA, 15 bp, Homo sapiens
ataggtagcaccata

SEQ ID NO: 1511444 - DNA, 15 bp, Homo sapiens
gataggtagcaccat

SEQ ID NO: 1511445 - DNA, 15 bp, Homo sapiens
agataggtagcacca

SEQ ID NO: 1511446 - DNA, 15 bp, Homo sapiens
tagataggtagcacc

SEQ ID NO: 1511447 - DNA, 15 bp, Homo sapiens
gtagataggtagcac

SEQ ID NO: 1511448 - DNA, 15 bp, Homo sapiens
tgtagataggtagca

SEQ ID NO: 1511449 - DNA, 15 bp, Homo sapiens
ttgtagataggtagc

SEQ ID NO: 1511450 - DNA, 15 bp, Homo sapiens
tttgtagataggtag

SEQ ID NO: 1511451 - DNA, 15 bp, Homo sapiens
ttttgtagataggta

SEQ ID NO: 1511452 - DNA, 15 bp, Homo sapiens
tttttgtagataggt

SEQ ID NO: 1511453 - DNA, 15 bp, Homo sapiens
gtttttgtagatagg

SEQ ID NO: 1511454 - DNA, 15 bp, Homo sapiens
agtttttgtagatag

SEQ ID NO: 1511455 - DNA, 15 bp, Homo sapiens
gagtttttgtagata

SEQ ID NO: 1511456 - DNA, 15 bp, Homo sapiens
ggagtttttgtagat

SEQ ID NO: 1511457 - DNA, 15 bp, Homo sapiens
aggagtttttgtaga

SEQ ID NO: 1511458 - DNA, 15 bp, Homo sapiens
caggagtttttgtag

SEQ ID NO: 1511459 - DNA, 15 bp, Homo sapiens
ccaggagtttttgta

SEQ ID NO: 1511460 - DNA, 15 bp, Homo sapiens
tccaggagtttttgt

SEQ ID NO: 1511461 - DNA, 15 bp, Homo sapiens
atccaggagtttttg

SEQ ID NO: 1511462 - DNA, 15 bp, Homo sapiens
gatccaggagttttt

SEQ ID NO: 1511463 - DNA, 15 bp, Homo sapiens
ggatccaggagtttt

SEQ ID NO: 1511464 - DNA, 15 bp, Homo sapiens
aggatccaggagttt

SEQ ID NO: 1511465 - DNA, 15 bp, Homo sapiens
aaggatccaggagtt

SEQ ID NO: 1511466 - DNA, 15 bp, Homo sapiens
aaaggatccaggagt

SEQ ID NO: 1511467 - DNA, 15 bp, Homo sapiens
taaaggatccaggag

SEQ ID NO: 1511468 - DNA, 15 bp, Homo sapiens
ataaaggatccagga

SEQ ID NO: 1511469 - DNA, 15 bp, Homo sapiens
aataaaggatccagg

SEQ ID NO: 1511470 - DNA, 15 bp, Homo sapiens
taataaaggatccag

SEQ ID NO: 1511471 - DNA, 15 bp, Homo sapiens
gtaataaaggatcca

SEQ ID NO: 1511472 - DNA, 15 bp, Homo sapiens
cgtaataaaggatcc

SEQ ID NO: 1511473 - DNA, 15 bp, Homo sapiens
tcgtaataaaggatc

SEQ ID NO: 1511474 - DNA, 15 bp, Homo sapiens
ttcgtaataaaggat

SEQ ID NO: 1511475 - DNA, 15 bp, Homo sapiens
attcgtaataaagga

SEQ ID NO: 1511476 - DNA, 15 bp, Homo sapiens
aattcgtaataaagg

SEQ ID NO: 1511477 - DNA, 15 bp, Homo sapiens
caattcgtaataaag

SEQ ID NO: 1511478 - DNA, 15 bp, Homo sapiens
acaattcgtaataaa

SEQ ID NO: 1511479 - DNA, 15 bp, Homo sapiens
cacaattcgtaataa

SEQ ID NO: 1511480 - DNA, 15 bp, Homo sapiens
tcacaattcgtaata

SEQ ID NO: 1511481 - DNA, 15 bp, Homo sapiens
atcacaattcgtaat

SEQ ID NO: 1511482 - DNA, 15 bp, Homo sapiens
gatcacaattcgtaa

SEQ ID NO: 1511483 - DNA, 15 bp, Homo sapiens
tgatcacaattcgta

SEQ ID NO: 1511484 - DNA, 15 bp, Homo sapiens
gtgatcacaattcgt

SEQ ID NO: 1511485 - DNA, 15 bp, Homo sapiens
tgtgatcacaattcg

SEQ ID NO: 1511486 - DNA, 15 bp, Homo sapiens
atgtgatcacaattc

SEQ ID NO: 1511487 - DNA, 15 bp, Homo sapiens
gatgtgatcacaatt

SEQ ID NO: 1511488 - DNA, 15 bp, Homo sapiens
ggatgtgatcacaat

SEQ ID NO: 1511489 - DNA, 15 bp, Homo sapiens
aggatgtgatcacaa

SEQ ID NO: 1511490 - DNA, 15 bp, Homo sapiens
gaggatgtgatcaca

SEQ ID NO: 1511491 - DNA, 15 bp, Homo sapiens
agaggatgtgatcac

SEQ ID NO: 1511492 - DNA, 15 bp, Homo sapiens
cagaggatgtgatca

SEQ ID NO: 1511493 - DNA, 15 bp, Homo sapiens
tcagaggatgtgatc

SEQ ID NO: 1511494 - DNA, 15 bp, Homo sapiens
atcagaggatgtgat

SEQ ID NO: 1511495 - DNA, 15 bp, Homo sapiens
aatcagaggatgtga

SEQ ID NO: 1511496 - DNA, 15 bp, Homo sapiens
caatcagaggatgtg

SEQ ID NO: 1511497 - DNA, 15 bp, Homo sapiens
ccaatcagaggatgt

SEQ ID NO: 1511498 - DNA, 15 bp, Homo sapiens
gccaatcagaggatg

SEQ ID NO: 1511499 - DNA, 15 bp, Homo sapiens
tgccaatcagaggat

SEQ ID NO: 1511500 - DNA, 15 bp, Homo sapiens
ttgccaatcagagga

SEQ ID NO: 1511501 - DNA, 15 bp, Homo sapiens
gttgccaatcagagg

SEQ ID NO: 1511502 - DNA, 15 bp, Homo sapiens
tgttgccaatcagag

SEQ ID NO: 1511503 - DNA, 15 bp, Homo sapiens
atgttgccaatcaga

SEQ ID NO: 1511504 - DNA, 15 bp, Homo sapiens
catgttgccaatcag

SEQ ID NO: 1511505 - DNA, 15 bp, Homo sapiens
acatgttgccaatca

SEQ ID NO: 1511506 - DNA, 15 bp, Homo sapiens
aacatgttgccaatc

SEQ ID NO: 1511507 - DNA, 15 bp, Homo sapiens
taacatgttgccaat

SEQ ID NO: 1511508 - DNA, 15 bp, Homo sapiens
ctaacatgttgccaa

SEQ ID NO: 1511509 - DNA, 15 bp, Homo sapiens
gctaacatgttgcca

SEQ ID NO: 1511510 - DNA, 15 bp, Homo sapiens
agctaacatgttgcc

SEQ ID NO: 1511511 - DNA, 15 bp, Homo sapiens
aagctaacatgttgc

SEQ ID NO: 1511512 - DNA, 15 bp, Homo sapiens
aaagctaacatgttg

SEQ ID NO: 1511513 - DNA, 15 bp, Homo sapiens
caaagctaacatgtt

SEQ ID NO: 1511514 - DNA, 15 bp, Homo sapiens
tcaaagctaacatgt

SEQ ID NO: 1511515 - DNA, 15 bp, Homo sapiens
ttcaaagctaacatg

SEQ ID NO: 1511516 - DNA, 15 bp, Homo sapiens
cttcaaagctaacat

SEQ ID NO: 1511517 - DNA, 15 bp, Homo sapiens
acttcaaagctaaca

SEQ ID NO: 1511518 - DNA, 15 bp, Homo sapiens
cacttcaaagctaac

SEQ ID NO: 1511519 - DNA, 15 bp, Homo sapiens
ccacttcaaagctaa

SEQ ID NO: 1511520 - DNA, 15 bp, Homo sapiens
tccacttcaaagcta

SEQ ID NO: 1511521 - DNA, 15 bp, Homo sapiens
atccacttcaaagct

SEQ ID NO: 1511522 - DNA, 15 bp, Homo sapiens
gatccacttcaaagc

SEQ ID NO: 1511523 - DNA, 15 bp, Homo sapiens
ggatccacttcaaag

SEQ ID NO: 1511524 - DNA, 15 bp, Homo sapiens
aggatccacttcaaa

SEQ ID NO: 1511525 - DNA, 15 bp, Homo sapiens
taggatccacttcaa

SEQ ID NO: 1511526 - DNA, 15 bp, Homo sapiens
gtaggatccacttca

SEQ ID NO: 1511527 - DNA, 15 bp, Homo sapiens
ggtaggatccacttc

SEQ ID NO: 1511528 - DNA, 15 bp, Homo sapiens
tggtaggatccactt

SEQ ID NO: 1511529 - DNA, 15 bp, Homo sapiens
ctggtaggatccact

SEQ ID NO: 1511530 - DNA, 15 bp, Homo sapiens
cctggtaggatccac

SEQ ID NO: 1511531 - DNA, 15 bp, Homo sapiens
acctggtaggatcca

SEQ ID NO: 1511532 - DNA, 15 bp, Homo sapiens
aacctggtaggatcc

SEQ ID NO: 1511533 - DNA, 15 bp, Homo sapiens
aaacctggtaggatc

SEQ ID NO: 1511534 - DNA, 15 bp, Homo sapiens
caaacctggtaggat

SEQ ID NO: 1511535 - DNA, 15 bp, Homo sapiens
acaaacctggtagga

SEQ ID NO: 1511536 - DNA, 15 bp, Homo sapiens
gacaaacctggtagg

SEQ ID NO: 1511537 - DNA, 15 bp, Homo sapiens
tgacaaacctggtag

SEQ ID NO: 1511538 - DNA, 15 bp, Homo sapiens
atgacaaacctggta

SEQ ID NO: 1511539 - DNA, 15 bp, Homo sapiens
gatgacaaacctggt

SEQ ID NO: 1511540 - DNA, 15 bp, Homo sapiens
agatgacaaacctgg

SEQ ID NO: 1511541 - DNA, 15 bp, Homo sapiens
aagatgacaaacctg

SEQ ID NO: 1511542 - DNA, 15 bp, Homo sapiens
aaagatgacaaacct

SEQ ID NO: 1511543 - DNA, 15 bp, Homo sapiens
aaaagatgacaaacc

SEQ ID NO: 1511544 - DNA, 15 bp, Homo sapiens
gaaaagatgacaaac

SEQ ID NO: 1511545 - DNA, 15 bp, Homo sapiens
tgaaaagatgacaaa

SEQ ID NO: 1511546 - DNA, 15 bp, Homo sapiens
gtgaaaagatgacaa

SEQ ID NO: 1511547 - DNA, 15 bp, Homo sapiens
tgtgaaaagatgaca

SEQ ID NO: 1511548 - DNA, 15 bp, Homo sapiens
atgtgaaaagatgac

SEQ ID NO: 1511549 - DNA, 15 bp, Homo sapiens
tatgtgaaaagatga

SEQ ID NO: 1511550 - DNA, 15 bp, Homo sapiens
ctatgtgaaaagatg

SEQ ID NO: 1511551 - DNA, 15 bp, Homo sapiens
tctatgtgaaaagat

SEQ ID NO: 1511552 - DNA, 15 bp, Homo sapiens
ttctatgtgaaaaga

SEQ ID NO: 1511553 - DNA, 15 bp, Homo sapiens
gttctatgtgaaaag

SEQ ID NO: 1511554 - DNA, 15 bp, Homo sapiens
ggttctatgtgaaaa

SEQ ID NO: 1511555 - DNA, 15 bp, Homo sapiens
cggttctatgtgaaa

SEQ ID NO: 1511556 - DNA, 15 bp, Homo sapiens
gcggttctatgtgaa

SEQ ID NO: 1511557 - DNA, 15 bp, Homo sapiens
agcggttctatgtga

SEQ ID NO: 1511558 - DNA, 15 bp, Homo sapiens
cagcggttctatgtg

SEQ ID NO: 1511559 - DNA, 15 bp, Homo sapiens
acagcggttctatgt

SEQ ID NO: 1511560 - DNA, 15 bp, Homo sapiens
aacagcggttctatg

SEQ ID NO: 1511561 - DNA, 15 bp, Homo sapiens
aaacagcggttctat

SEQ ID NO: 1511562 - DNA, 15 bp, Homo sapiens
aaaacagcggttcta

SEQ ID NO: 1511563 - DNA, 15 bp, Homo sapiens
aaaaacagcggttct

SEQ ID NO: 1511564 - DNA, 15 bp, Homo sapiens
aaaaaacagcggttc

SEQ ID NO: 1511565 - DNA, 15 bp, Homo sapiens
caaaaaacagcggtt

SEQ ID NO: 1511566 - DNA, 15 bp, Homo sapiens
acaaaaaacagcggt

SEQ ID NO: 1511567 - DNA, 15 bp, Homo sapiens
aacaaaaaacagcgg

SEQ ID NO: 1511568 - DNA, 15 bp, Homo sapiens
aaacaaaaaacagcg

SEQ ID NO: 1511569 - DNA, 15 bp, Homo sapiens
aaaacaaaaaacagc

SEQ ID NO: 1511570 - DNA, 15 bp, Homo sapiens
aaaaacaaaaaacag

SEQ ID NO: 1511571 - DNA, 15 bp, Homo sapiens
caaaaaaaaaaaaac

SEQ ID NO: 1511572 - DNA, 15 bp, Homo sapiens
caaacaaaaaaaaaa

SEQ ID NO: 1511573 - DNA, 15 bp, Homo sapiens
acaaacaaaaaaaaa

SEQ ID NO: 1511574 - DNA, 15 bp, Homo sapiens
taaaacaaacaaaca

SEQ ID NO: 1511575 - DNA, 15 bp, Homo sapiens
gtaaaacaaacaaac

SEQ ID NO: 1511576 - DNA, 15 bp, Homo sapiens
agtaaaacaaacaaa

SEQ ID NO: 1511577 - DNA, 15 bp, Homo sapiens
tagtaaaacaaacaa

SEQ ID NO: 1511578 - DNA, 15 bp, Homo sapiens
gttagtaaaacaaac

SEQ ID NO: 1511579 - DNA, 15 bp, Homo sapiens
tgttagtaaaacaaa

SEQ ID NO: 1511580 - DNA, 15 bp, Homo sapiens
gtgttagtaaaacaa

SEQ ID NO: 1511581 - DNA, 15 bp, Homo sapiens
agtgttagtaaaaca

SEQ ID NO: 1511582 - DNA, 15 bp, Homo sapiens
cagtgttagtaaaac

SEQ ID NO: 1511583 - DNA, 15 bp, Homo sapiens
gcagtgttagtaaaa

SEQ ID NO: 1511584 - DNA, 15 bp, Homo sapiens
tgcagtgttagtaaa

SEQ ID NO: 1511585 - DNA, 15 bp, Homo sapiens
atgcagtgttagtaa

SEQ ID NO: 1511586 - DNA, 15 bp, Homo sapiens
catgcagtgttagta

SEQ ID NO: 1511587 - DNA, 15 bp, Homo sapiens
tcatgcagtgttagt

SEQ ID NO: 1511588 - DNA, 15 bp, Homo sapiens
ttcatgcagtgttag

SEQ ID NO: 1511589 - DNA, 15 bp, Homo sapiens
cttcatgcagtgtta

SEQ ID NO: 1511590 - DNA, 15 bp, Homo sapiens
gcttcatgcagtgtt

SEQ ID NO: 1511591 - DNA, 15 bp, Homo sapiens
tgcttcatgcagtgt

SEQ ID NO: 1511592 - DNA, 15 bp, Homo sapiens
ttgcttcatgcagtg

SEQ ID NO: 1511593 - DNA, 15 bp, Homo sapiens
cttgcttcatgcagt

SEQ ID NO: 1511594 - DNA, 15 bp, Homo sapiens
ccttgcttcatgcag

SEQ ID NO: 1511595 - DNA, 15 bp, Homo sapiens
gccttgcttcatgca

SEQ ID NO: 1511596 - DNA, 15 bp, Homo sapiens
tgccttgcttcatgc

SEQ ID NO: 1511597 - DNA, 15 bp, Homo sapiens
gtgccttgcttcatg

SEQ ID NO: 1511598 - DNA, 15 bp, Homo sapiens
ggtgccttgcttcat

SEQ ID NO: 1511599 - DNA, 15 bp, Homo sapiens
aggtgccttgcttca

SEQ ID NO: 1511600 - DNA, 15 bp, Homo sapiens
aaggtgccttgcttc

SEQ ID NO: 1511601 - DNA, 15 bp, Homo sapiens
gaaggtgccttgctt

SEQ ID NO: 1511602 - DNA, 15 bp, Homo sapiens
agaaggtgccttgct

SEQ ID NO: 1511603 - DNA, 15 bp, Homo sapiens
gagaaggtgccttgc

SEQ ID NO: 1511604 - DNA, 15 bp, Homo sapiens
ggagaaggtgccttg

SEQ ID NO: 1511605 - DNA, 15 bp, Homo sapiens
gggagaaggtgcctt

SEQ ID NO: 1511606 - DNA, 15 bp, Homo sapiens
ggggagaaggtgcct

SEQ ID NO: 1511607 - DNA, 15 bp, Homo sapiens
aggggagaaggtgcc

SEQ ID NO: 1511608 - DNA, 15 bp, Homo sapiens
aaggggagaaggtgc

SEQ ID NO: 1511609 - DNA, 15 bp, Homo sapiens
caaggggagaaggtg

SEQ ID NO: 1511610 - DNA, 15 bp, Homo sapiens
tcaaggggagaaggt

SEQ ID NO: 1511611 - DNA, 15 bp, Homo sapiens
atcaaggggagaagg

SEQ ID NO: 1511612 - DNA, 15 bp, Homo sapiens
gatcaaggggagaag

SEQ ID NO: 1511613 - DNA, 15 bp, Homo sapiens
tgatcaaggggagaa

SEQ ID NO: 1511614 - DNA, 15 bp, Homo sapiens
atgatcaaggggaga

SEQ ID NO: 1511615 - DNA, 15 bp, Homo sapiens
aatgatcaaggggag

SEQ ID NO: 1511616 - DNA, 15 bp, Homo sapiens
taatgatcaagggga

SEQ ID NO: 1511617 - DNA, 15 bp, Homo sapiens
ttaatgatcaagggg

SEQ ID NO: 1511618 - DNA, 15 bp, Homo sapiens
tttaatgatcaaggg

SEQ ID NO: 1511619 - DNA, 15 bp, Homo sapiens
ttttaatgatcaagg

SEQ ID NO: 1511620 - DNA, 15 bp, Homo sapiens
attttaatgatcaag

SEQ ID NO: 1511621 - DNA, 15 bp, Homo sapiens
aattttaatgatcaa

SEQ ID NO: 1511622 - DNA, 15 bp, Homo sapiens
taattttaatgatca

SEQ ID NO: 1511623 - DNA, 15 bp, Homo sapiens
ctaattttaatgatc

SEQ ID NO: 1511624 - DNA, 15 bp, Homo sapiens
actaattttaatgat

SEQ ID NO: 1511625 - DNA, 15 bp, Homo sapiens
aactaattttaatga

SEQ ID NO: 1511626 - DNA, 15 bp, Homo sapiens
aaactaattttaatg

SEQ ID NO: 1511627 - DNA, 15 bp, Homo sapiens
aaaactaattttaat

SEQ ID NO: 1511628 - DNA, 15 bp, Homo sapiens
aaaaactaattttaa

SEQ ID NO: 1511629 - DNA, 15 bp, Homo sapiens
taaaaactaatttta

SEQ ID NO: 1511630 - DNA, 15 bp, Homo sapiens
ttaaaaactaatttt

SEQ ID NO: 1511631 - DNA, 15 bp, Homo sapiens
attaaaaactaattt

SEQ ID NO: 1511632 - DNA, 15 bp, Homo sapiens
aattaaaaactaatt

SEQ ID NO: 1511633 - DNA, 15 bp, Homo sapiens
taattaaaaactaat

SEQ ID NO: 1511634 - DNA, 15 bp, Homo sapiens
ataattaaaaactaa

SEQ ID NO: 1511635 - DNA, 15 bp, Homo sapiens
tataattaaaaacta

SEQ ID NO: 1511636 - DNA, 15 bp, Homo sapiens
ttataattaaaaact

SEQ ID NO: 1511637 - DNA, 15 bp, Homo sapiens
tttataattaaaaac

SEQ ID NO: 1511638 - DNA, 15 bp, Homo sapiens
ttttataattaaaaa

SEQ ID NO: 1511639 - DNA, 15 bp, Homo sapiens
cttttataattaaaa

SEQ ID NO: 1511640 - DNA, 15 bp, Homo sapiens
acttttataattaaa

SEQ ID NO: 1511641 - DNA, 15 bp, Homo sapiens
aacttttataattaa

SEQ ID NO: 1511642 - DNA, 15 bp, Homo sapiens
taacttttataatta

SEQ ID NO: 1511643 - DNA, 15 bp, Homo sapiens
ataacttttataatt

SEQ ID NO: 1511644 - DNA, 15 bp, Homo sapiens
tataacttttataat

SEQ ID NO: 1511645 - DNA, 15 bp, Homo sapiens
atataacttttataa

SEQ ID NO: 1511646 - DNA, 15 bp, Homo sapiens
tatataacttttata

SEQ ID NO: 1511647 - DNA, 15 bp, Homo sapiens
gtatataacttttat

SEQ ID NO: 1511648 - DNA, 15 bp, Homo sapiens
tgtatataactttta

SEQ ID NO: 1511649 - DNA, 15 bp, Homo sapiens
ttgtatataactttt

SEQ ID NO: 1511650 - DNA, 15 bp, Homo sapiens
tttgtatataacttt

SEQ ID NO: 1511651 - DNA, 15 bp, Homo sapiens
atttgtatataactt

SEQ ID NO: 1511652 - DNA, 15 bp, Homo sapiens
tatttgtatataact

SEQ ID NO: 1511653 - DNA, 15 bp, Homo sapiens
gtatttgtatataac

SEQ ID NO: 1511654 - DNA, 15 bp, Homo sapiens
tgtatttgtatataa

SEQ ID NO: 1511655 - DNA, 15 bp, Homo sapiens
gtgtatttgtatata

SEQ ID NO: 1511656 - DNA, 15 bp, Homo sapiens
cgtgtatttgtatat

SEQ ID NO: 1511657 - DNA, 15 bp, Homo sapiens
acgtgtatttgtata

SEQ ID NO: 1511658 - DNA, 15 bp, Homo sapiens
aacgtgtatttgtat

SEQ ID NO: 1511659 - DNA, 15 bp, Homo sapiens
aaacgtgtatttgta

SEQ ID NO: 1511660 - DNA, 15 bp, Homo sapiens
gaaacgtgtatttgt

SEQ ID NO: 1511661 - DNA, 15 bp, Homo sapiens
agaaacgtgtatttg

SEQ ID NO: 1511662 - DNA, 15 bp, Homo sapiens
aagaaacgtgtattt

SEQ ID NO: 1511663 - DNA, 15 bp, Homo sapiens
aaagaaacgtgtatt

SEQ ID NO: 1511664 - DNA, 15 bp, Homo sapiens
taaagaaacgtgtat

SEQ ID NO: 1511665 - DNA, 15 bp, Homo sapiens
ttaaagaaacgtgta

SEQ ID NO: 1511666 - DNA, 15 bp, Homo sapiens
attaaagaaacgtgt

SEQ ID NO: 1511667 - DNA, 15 bp, Homo sapiens
cattaaagaaacgtg

SEQ ID NO: 1511668 - DNA, 15 bp, Homo sapiens
tcattaaagaaacgt

SEQ ID NO: 1511669 - DNA, 15 bp, Homo sapiens
atcattaaagaaacg

SEQ ID NO: 1511670 - DNA, 15 bp, Homo sapiens
tatcattaaagaaac

SEQ ID NO: 1511671 - DNA, 15 bp, Homo sapiens
atatcattaaagaaa

SEQ ID NO: 1511672 - DNA, 15 bp, Homo sapiens
gatatcattaaagaa

SEQ ID NO: 1511673 - DNA, 15 bp, Homo sapiens
agatatcattaaaga

SEQ ID NO: 1511674 - DNA, 15 bp, Homo sapiens
cagatatcattaaag

SEQ ID NO: 1511675 - DNA, 15 bp, Homo sapiens
acagatatcattaaa

SEQ ID NO: 1511676 - DNA, 15 bp, Homo sapiens
tacagatatcattaa

SEQ ID NO: 1511677 - DNA, 15 bp, Homo sapiens
ttacagatatcatta

SEQ ID NO: 1511678 - DNA, 15 bp, Homo sapiens
attacagatatcatt

SEQ ID NO: 1511679 - DNA, 15 bp, Homo sapiens
aattacagatatcat

SEQ ID NO: 1511680 - DNA, 15 bp, Homo sapiens
aaattacagatatca

SEQ ID NO: 1511681 - DNA, 15 bp, Homo sapiens
aaaattacagatatc

SEQ ID NO: 1511682 - DNA, 15 bp, Homo sapiens
aaaaattacagatat

SEQ ID NO: 1511683 - DNA, 15 bp, Homo sapiens
aaaaaattacagata

SEQ ID NO: 1511684 - DNA, 15 bp, Homo sapiens
aaaaaaattacagat

SEQ ID NO: 1511685 - DNA, 15 bp, Homo sapiens
aaaaaaaattacaga

SEQ ID NO: 1511686 - DNA, 15 bp, Homo sapiens
aaaaaaaaattacag

SEQ ID NO: 1511687 - DNA, 15 bp, Homo sapiens
taaaaaaaaattaca

SEQ ID NO: 1511688 - DNA, 15 bp, Homo sapiens
ttaaaaaaaaattac

SEQ ID NO: 1511689 - DNA, 15 bp, Homo sapiens
ccttaaaaaaaaatt

SEQ ID NO: 1511690 - DNA, 15 bp, Homo sapiens
accttaaaaaaaaat

SEQ ID NO: 1511691 - DNA, 15 bp, Homo sapiens
taccttaaaaaaaaa

SEQ ID NO: 1511692 - DNA, 15 bp, Homo sapiens
ataccttaaaaaaaa

SEQ ID NO: 1511693 - DNA, 15 bp, Homo sapiens
gataccttaaaaaaa

SEQ ID NO: 1511694 - DNA, 15 bp, Homo sapiens
ggataccttaaaaaa

SEQ ID NO: 1511695 - DNA, 15 bp, Homo sapiens
aggataccttaaaaa

SEQ ID NO: 1511696 - DNA, 15 bp, Homo sapiens
aaggataccttaaaa

SEQ ID NO: 1511697 - DNA, 15 bp, Homo sapiens
aaaggataccttaaa

SEQ ID NO: 1511698 - DNA, 15 bp, Homo sapiens
aaaaggataccttaa

SEQ ID NO: 1511699 - DNA, 15 bp, Homo sapiens
taaaaggatacctta

SEQ ID NO: 1511700 - DNA, 15 bp, Homo sapiens
ataaaaggatacctt

SEQ ID NO: 1511701 - DNA, 15 bp, Homo sapiens
aataaaaggatacct

SEQ ID NO: 1511702 - DNA, 15 bp, Homo sapiens
aaataaaaggatacc

SEQ ID NO: 1511703 - DNA, 15 bp, Homo sapiens
caaataaaaggatac

SEQ ID NO: 1511704 - DNA, 15 bp, Homo sapiens
gcaaataaaaggata

SEQ ID NO: 1511705 - DNA, 15 bp, Homo sapiens
ggcaaataaaaggat

SEQ ID NO: 1511706 - DNA, 15 bp, Homo sapiens
aggcaaataaaagga

SEQ ID NO: 1511707 - DNA, 15 bp, Homo sapiens
aaggcaaataaaagg

SEQ ID NO: 1511708 - DNA, 15 bp, Homo sapiens
taaggcaaataaaag

SEQ ID NO: 1511709 - DNA, 15 bp, Homo sapiens
ctaaggcaaataaaa

SEQ ID NO: 1511710 - DNA, 15 bp, Homo sapiens
tctaaggcaaataaa

SEQ ID NO: 1511711 - DNA, 15 bp, Homo sapiens
atctaaggcaaataa

SEQ ID NO: 1511712 - DNA, 15 bp, Homo sapiens
gatctaaggcaaata

SEQ ID NO: 1511713 - DNA, 15 bp, Homo sapiens
ggatctaaggcaaat

SEQ ID NO: 1511714 - DNA, 15 bp, Homo sapiens
tggatctaaggcaaa

SEQ ID NO: 1511715 - DNA, 15 bp, Homo sapiens
ctggatctaaggcaa

SEQ ID NO: 1511716 - DNA, 15 bp, Homo sapiens
cctggatctaaggca

SEQ ID NO: 1511717 - DNA, 15 bp, Homo sapiens
ccctggatctaaggc

SEQ ID NO: 1511718 - DNA, 15 bp, Homo sapiens
tccctggatctaagg

SEQ ID NO: 1511719 - DNA, 15 bp, Homo sapiens
gtccctggatctaag

SEQ ID NO: 1511720 - DNA, 15 bp, Homo sapiens
tgtccctggatctaa

SEQ ID NO: 1511721 - DNA, 15 bp, Homo sapiens
ttgtccctggatcta

SEQ ID NO: 1511722 - DNA, 15 bp, Homo sapiens
tttgtccctggatct

SEQ ID NO: 1511723 - DNA, 15 bp, Homo sapiens
gtttgtccctggatc

SEQ ID NO: 1511724 - DNA, 15 bp, Homo sapiens
agtttgtccctggat

SEQ ID NO: 1511725 - DNA, 15 bp, Homo sapiens
tagtttgtccctgga

SEQ ID NO: 1511726 - DNA, 15 bp, Homo sapiens
ctagtttgtccctgg

SEQ ID NO: 1511727 - DNA, 15 bp, Homo sapiens
tctagtttgtccctg

SEQ ID NO: 1511728 - DNA, 15 bp, Homo sapiens
ctctagtttgtccct

SEQ ID NO: 1511729 - DNA, 15 bp, Homo sapiens
tctctagtttgtccc

SEQ ID NO: 1511730 - DNA, 15 bp, Homo sapiens
ttctctagtttgtcc

SEQ ID NO: 1511731 - DNA, 15 bp, Homo sapiens
tttctctagtttgtc

SEQ ID NO: 1511732 - DNA, 15 bp, Homo sapiens
ctttctctagtttgt

SEQ ID NO: 1511733 - DNA, 15 bp, Homo sapiens
cctttctctagtttg

SEQ ID NO: 1511734 - DNA, 15 bp, Homo sapiens
acctttctctagttt

SEQ ID NO: 1511735 - DNA, 15 bp, Homo sapiens
cacctttctctagtt

SEQ ID NO: 1511736 - DNA, 15 bp, Homo sapiens
acacctttctctagt

SEQ ID NO: 1511737 - DNA, 15 bp, Homo sapiens
gacacctttctctag

SEQ ID NO: 1511738 - DNA, 15 bp, Homo sapiens
agacacctttctcta

SEQ ID NO: 1511739 - DNA, 15 bp, Homo sapiens
aagacacctttctct

SEQ ID NO: 1511740 - DNA, 15 bp, Homo sapiens
aaagacacctttctc

SEQ ID NO: 1511741 - DNA, 15 bp, Homo sapiens
caaagacacctttct

SEQ ID NO: 1511742 - DNA, 15 bp, Homo sapiens
tcaaagacacctttc

SEQ ID NO: 1511743 - DNA, 15 bp, Homo sapiens
gtcaaagacaccttt

SEQ ID NO: 1511744 - DNA, 15 bp, Homo sapiens
agtcaaagacacctt

SEQ ID NO: 1511745 - DNA, 15 bp, Homo sapiens
aagtcaaagacacct

SEQ ID NO: 1511746 - DNA, 15 bp, Homo sapiens
gaagtcaaagacacc

SEQ ID NO: 1511747 - DNA, 15 bp, Homo sapiens
ggaagtcaaagacac

SEQ ID NO: 1511748 - DNA, 15 bp, Homo sapiens
tggaagtcaaagaca

SEQ ID NO: 1511749 - DNA, 15 bp, Homo sapiens
gtggaagtcaaagac

SEQ ID NO: 1511750 - DNA, 15 bp, Homo sapiens
ggtggaagtcaaaga

SEQ ID NO: 1511751 - DNA, 15 bp, Homo sapiens
aggtggaagtcaaag

SEQ ID NO: 1511752 - DNA, 15 bp, Homo sapiens
gaggtggaagtcaaa

SEQ ID NO: 1511753 - DNA, 15 bp, Homo sapiens
ggaggtggaagtcaa

SEQ ID NO: 1511754 - DNA, 15 bp, Homo sapiens
tggaggtggaagtca

SEQ ID NO: 1511755 - DNA, 15 bp, Homo sapiens
ctggaggtggaagtc

SEQ ID NO: 1511756 - DNA, 15 bp, Homo sapiens
tctggaggtggaagt

SEQ ID NO: 1511757 - DNA, 15 bp, Homo sapiens
ctctggaggtggaag

SEQ ID NO: 1511758 - DNA, 15 bp, Homo sapiens
tctctggaggtggaa

SEQ ID NO: 1511759 - DNA, 15 bp, Homo sapiens
gtctctggaggtgga

SEQ ID NO: 1511760 - DNA, 15 bp, Homo sapiens
agtctctggaggtgg

SEQ ID NO: 1511761 - DNA, 15 bp, Homo sapiens
cagtctctggaggtg

SEQ ID NO: 1511762 - DNA, 15 bp, Homo sapiens
acagtctctggaggt

SEQ ID NO: 1511763 - DNA, 15 bp, Homo sapiens
aacagtctctggagg

SEQ ID NO: 1511764 - DNA, 15 bp, Homo sapiens
taacagtctctggag

SEQ ID NO: 1511765 - DNA, 15 bp, Homo sapiens
gtaacagtctctgga

SEQ ID NO: 1511766 - DNA, 15 bp, Homo sapiens
agtaacagtctctgg

SEQ ID NO: 1511767 - DNA, 15 bp, Homo sapiens
tagtaacagtctctg

SEQ ID NO: 1511768 - DNA, 15 bp, Homo sapiens
ctagtaacagtctct

SEQ ID NO: 1511769 - DNA, 15 bp, Homo sapiens
actagtaacagtctc

SEQ ID NO: 1511770 - DNA, 15 bp, Homo sapiens
aactagtaacagtct

SEQ ID NO: 1511771 - DNA, 15 bp, Homo sapiens
taactagtaacagtc

SEQ ID NO: 1511772 - DNA, 15 bp, Homo sapiens
ttaactagtaacagt

SEQ ID NO: 1511773 - DNA, 15 bp, Homo sapiens
cttaactagtaacag

SEQ ID NO: 1511774 - DNA, 15 bp, Homo sapiens
acttaactagtaaca

SEQ ID NO: 1511775 - DNA, 15 bp, Homo sapiens
gacttaactagtaac

SEQ ID NO: 1511776 - DNA, 15 bp, Homo sapiens
agacttaactagtaa

SEQ ID NO: 1511777 - DNA, 15 bp, Homo sapiens
cagacttaactagta

SEQ ID NO: 1511778 - DNA, 15 bp, Homo sapiens
acagacttaactagt

SEQ ID NO: 1511779 - DNA, 15 bp, Homo sapiens
aacagacttaactag

SEQ ID NO: 1511780 - DNA, 15 bp, Homo sapiens
gaacagacttaacta

SEQ ID NO: 1511781 - DNA, 15 bp, Homo sapiens
ggaacagacttaact

SEQ ID NO: 1511782 - DNA, 15 bp, Homo sapiens
gggaacagacttaac

SEQ ID NO: 1511783 - DNA, 15 bp, Homo sapiens
ggggaacagacttaa

SEQ ID NO: 1511784 - DNA, 15 bp, Homo sapiens
aggggaacagactta

SEQ ID NO: 1511785 - DNA, 15 bp, Homo sapiens
caggggaacagactt

SEQ ID NO: 1511786 - DNA, 15 bp, Homo sapiens
acaggggaacagact

SEQ ID NO: 1511787 - DNA, 15 bp, Homo sapiens
gacaggggaacagac

SEQ ID NO: 1511788 - DNA, 15 bp, Homo sapiens
ggacaggggaacaga

SEQ ID NO: 1511789 - DNA, 15 bp, Homo sapiens
aggacaggggaacag

SEQ ID NO: 1511790 - DNA, 15 bp, Homo sapiens
aaggacaggggaaca

SEQ ID NO: 1511791 - DNA, 15 bp, Homo sapiens
aaaggacaggggaac

SEQ ID NO: 1511792 - DNA, 15 bp, Homo sapiens
aaaaggacaggggaa

SEQ ID NO: 1511793 - DNA, 15 bp, Homo sapiens
aaaaaggacagggga

SEQ ID NO: 1511794 - DNA, 15 bp, Homo sapiens
gaaaaaggacagggg

SEQ ID NO: 1511795 - DNA, 15 bp, Homo sapiens
ggaaaaaggacaggg

SEQ ID NO: 1511796 - DNA, 15 bp, Homo sapiens
tggaaaaaggacagg

SEQ ID NO: 1511797 - DNA, 15 bp, Homo sapiens
atggaaaaaggacag

SEQ ID NO: 1511798 - DNA, 15 bp, Homo sapiens
catggaaaaaggaca

SEQ ID NO: 1511799 - DNA, 15 bp, Homo sapiens
gcatggaaaaaggac

SEQ ID NO: 1511800 - DNA, 15 bp, Homo sapiens
tgcatggaaaaagga

SEQ ID NO: 1511801 - DNA, 15 bp, Homo sapiens
atgcatggaaaaagg

SEQ ID NO: 1511802 - DNA, 15 bp, Homo sapiens
aatgcatggaaaaag

SEQ ID NO: 1511803 - DNA, 15 bp, Homo sapiens
aaatgcatggaaaaa

SEQ ID NO: 1511804 - DNA, 15 bp, Homo sapiens
taaatgcatggaaaa

SEQ ID NO: 1511805 - DNA, 15 bp, Homo sapiens
gtaaatgcatggaaa

SEQ ID NO: 1511806 - DNA, 15 bp, Homo sapiens
tgtaaatgcatggaa

SEQ ID NO: 1511807 - DNA, 15 bp, Homo sapiens
atgtaaatgcatgga

SEQ ID NO: 1511808 - DNA, 15 bp, Homo sapiens
tatgtaaatgcatgg

SEQ ID NO: 1511809 - DNA, 15 bp, Homo sapiens
atatgtaaatgcatg

SEQ ID NO: 1511810 - DNA, 15 bp, Homo sapiens
aatatgtaaatgcat

SEQ ID NO: 1511811 - DNA, 15 bp, Homo sapiens
gaatatgtaaatgca

SEQ ID NO: 1511812 - DNA, 15 bp, Homo sapiens
tgaatatgtaaatgc

SEQ ID NO: 1511813 - DNA, 15 bp, Homo sapiens
atgaatatgtaaatg

SEQ ID NO: 1511814 - DNA, 15 bp, Homo sapiens
tatgaatatgtaaat

SEQ ID NO: 1511815 - DNA, 15 bp, Homo sapiens
atatgaatatgtaaa

SEQ ID NO: 1511816 - DNA, 15 bp, Homo sapiens
catatgaatatgtaa

SEQ ID NO: 1511817 - DNA, 15 bp, Homo sapiens
gcatatgaatatgta

SEQ ID NO: 1511818 - DNA, 15 bp, Homo sapiens
tgcatatgaatatgt

SEQ ID NO: 1511819 - DNA, 15 bp, Homo sapiens
ctgcatatgaatatg

SEQ ID NO: 1511820 - DNA, 15 bp, Homo sapiens
actgcatatgaatat

SEQ ID NO: 1511821 - DNA, 15 bp, Homo sapiens
gactgcatatgaata

SEQ ID NO: 1511822 - DNA, 15 bp, Homo sapiens
tgactgcatatgaat

SEQ ID NO: 1511823 - DNA, 15 bp, Homo sapiens
gtgactgcatatgaa

SEQ ID NO: 1511824 - DNA, 15 bp, Homo sapiens
agtgactgcatatga

SEQ ID NO: 1511825 - DNA, 15 bp, Homo sapiens
aagtgactgcatatg

SEQ ID NO: 1511826 - DNA, 15 bp, Homo sapiens
caagtgactgcatat

SEQ ID NO: 1511827 - DNA, 15 bp, Homo sapiens
gcaagtgactgcata

SEQ ID NO: 1511828 - DNA, 15 bp, Homo sapiens
tgcaagtgactgcat

SEQ ID NO: 1511829 - DNA, 15 bp, Homo sapiens
atgcaagtgactgca

SEQ ID NO: 1511830 - DNA, 15 bp, Homo sapiens
catgcaagtgactgc

SEQ ID NO: 1511831 - DNA, 15 bp, Homo sapiens
gcatgcaagtgactg

SEQ ID NO: 1511832 - DNA, 15 bp, Homo sapiens
tgcatgcaagtgact

SEQ ID NO: 1511833 - DNA, 15 bp, Homo sapiens
atgcatgcaagtgac

SEQ ID NO: 1511834 - DNA, 15 bp, Homo sapiens
tatgcatgcaagtga

SEQ ID NO: 1511835 - DNA, 15 bp, Homo sapiens
gtatgcatgcaagtg

SEQ ID NO: 1511836 - DNA, 15 bp, Homo sapiens
agtatgcatgcaagt

SEQ ID NO: 1511837 - DNA, 15 bp, Homo sapiens
gagtatgcatgcaag

SEQ ID NO: 1511838 - DNA, 15 bp, Homo sapiens
agagtatgcatgcaa

SEQ ID NO: 1511839 - DNA, 15 bp, Homo sapiens
aagagtatgcatgca

SEQ ID NO: 1511840 - DNA, 15 bp, Homo sapiens
aaagagtatgcatgc

SEQ ID NO: 1511841 - DNA, 15 bp, Homo sapiens
aaaagagtatgcatg

SEQ ID NO: 1511842 - DNA, 15 bp, Homo sapiens
aaaaagagtatgcat

SEQ ID NO: 1511843 - DNA, 15 bp, Homo sapiens
gaaaaagagtatgca

SEQ ID NO: 1511844 - DNA, 15 bp, Homo sapiens
agaaaaagagtatgc

SEQ ID NO: 1511845 - DNA, 15 bp, Homo sapiens
tagaaaaagagtatg

SEQ ID NO: 1511846 - DNA, 15 bp, Homo sapiens
ttagaaaaagagtat

SEQ ID NO: 1511847 - DNA, 15 bp, Homo sapiens
gttagaaaaagagta

SEQ ID NO: 1511848 - DNA, 15 bp, Homo sapiens
agttagaaaaagagt

SEQ ID NO: 1511849 - DNA, 15 bp, Homo sapiens
gagttagaaaaagag

SEQ ID NO: 1511850 - DNA, 15 bp, Homo sapiens
tgagttagaaaaaga

SEQ ID NO: 1511851 - DNA, 15 bp, Homo sapiens
gtgagttagaaaaag

SEQ ID NO: 1511852 - DNA, 15 bp, Homo sapiens
agtgagttagaaaaa

SEQ ID NO: 1511853 - DNA, 15 bp, Homo sapiens
aagtgagttagaaaa

SEQ ID NO: 1511854 - DNA, 15 bp, Homo sapiens
gaagtgagttagaaa

SEQ ID NO: 1511855 - DNA, 15 bp, Homo sapiens
agaagtgagttagaa

SEQ ID NO: 1511856 - DNA, 15 bp, Homo sapiens
aagaagtgagttaga

SEQ ID NO: 1511857 - DNA, 15 bp, Homo sapiens
gaagaagtgagttag

SEQ ID NO: 1511858 - DNA, 15 bp, Homo sapiens
agaagaagtgagtta

SEQ ID NO: 1511859 - DNA, 15 bp, Homo sapiens
tagaagaagtgagtt

SEQ ID NO: 1511860 - DNA, 15 bp, Homo sapiens
atagaagaagtgagt

SEQ ID NO: 1511861 - DNA, 15 bp, Homo sapiens
catagaagaagtgag

SEQ ID NO: 1511862 - DNA, 15 bp, Homo sapiens
tcatagaagaagtga

SEQ ID NO: 1511863 - DNA, 15 bp, Homo sapiens
atcatagaagaagtg

SEQ ID NO: 1511864 - DNA, 15 bp, Homo sapiens
catcatagaagaagt

SEQ ID NO: 1511865 - DNA, 15 bp, Homo sapiens
tcatcatagaagaag

SEQ ID NO: 1511866 - DNA, 15 bp, Homo sapiens
ctcatcatagaagaa

SEQ ID NO: 1511867 - DNA, 15 bp, Homo sapiens
cctcatcatagaaga

SEQ ID NO: 1511868 - DNA, 15 bp, Homo sapiens
tcctcatcatagaag

SEQ ID NO: 1511869 - DNA, 15 bp, Homo sapiens
ctcctcatcatagaa

SEQ ID NO: 1511870 - DNA, 15 bp, Homo sapiens
actcctcatcataga

SEQ ID NO: 1511871 - DNA, 15 bp, Homo sapiens
cactcctcatcatag

SEQ ID NO: 1511872 - DNA, 15 bp, Homo sapiens
tcactcctcatcata

SEQ ID NO: 1511873 - DNA, 15 bp, Homo sapiens
gtcactcctcatcat

SEQ ID NO: 1511874 - DNA, 15 bp, Homo sapiens
agtcactcctcatca

SEQ ID NO: 1511875 - DNA, 15 bp, Homo sapiens
aagtcactcctcatc

SEQ ID NO: 1511876 - DNA, 15 bp, Homo sapiens
taagtcactcctcat

SEQ ID NO: 1511877 - DNA, 15 bp, Homo sapiens
ctaagtcactcctca

SEQ ID NO: 1511878 - DNA, 15 bp, Homo sapiens
cctaagtcactcctc

SEQ ID NO: 1511879 - DNA, 15 bp, Homo sapiens
tcctaagtcactcct

SEQ ID NO: 1511880 - DNA, 15 bp, Homo sapiens
ctcctaagtcactcc

SEQ ID NO: 1511881 - DNA, 15 bp, Homo sapiens
tctcctaagtcactc

SEQ ID NO: 1511882 - DNA, 15 bp, Homo sapiens
ttctcctaagtcact

SEQ ID NO: 1511883 - DNA, 15 bp, Homo sapiens
cttctcctaagtcac

SEQ ID NO: 1511884 - DNA, 15 bp, Homo sapiens
ccttctcctaagtca

SEQ ID NO: 1511885 - DNA, 15 bp, Homo sapiens
cccttctcctaagtc

SEQ ID NO: 1511886 - DNA, 15 bp, Homo sapiens
tcccttctcctaagt

SEQ ID NO: 1511887 - DNA, 15 bp, Homo sapiens
ttcccttctcctaag

SEQ ID NO: 1511888 - DNA, 15 bp, Homo sapiens
tttcccttctcctaa

SEQ ID NO: 1511889 - DNA, 15 bp, Homo sapiens
ctttcccttctccta

SEQ ID NO: 1511890 - DNA, 15 bp, Homo sapiens
tctttcccttctcct

SEQ ID NO: 1511891 - DNA, 15 bp, Homo sapiens
ctctttcccttctcc

SEQ ID NO: 1511892 - DNA, 15 bp, Homo sapiens
cctctttcccttctc

SEQ ID NO: 1511893 - DNA, 15 bp, Homo sapiens
gcctctttcccttct

SEQ ID NO: 1511894 - DNA, 15 bp, Homo sapiens
agcctctttcccttc

SEQ ID NO: 1511895 - DNA, 15 bp, Homo sapiens
tagcctctttccctt

SEQ ID NO: 1511896 - DNA, 15 bp, Homo sapiens
ttagcctctttccct

SEQ ID NO: 1511897 - DNA, 15 bp, Homo sapiens
attagcctctttccc

SEQ ID NO: 1511898 - DNA, 15 bp, Homo sapiens
tattagcctctttcc

SEQ ID NO: 1511899 - DNA, 15 bp, Homo sapiens
ctattagcctctttc

SEQ ID NO: 1511900 - DNA, 15 bp, Homo sapiens
cctattagcctcttt

SEQ ID NO: 1511901 - DNA, 15 bp, Homo sapiens
acctattagcctctt

SEQ ID NO: 1511902 - DNA, 15 bp, Homo sapiens
tacctattagcctct

SEQ ID NO: 1511903 - DNA, 15 bp, Homo sapiens
ttacctattagcctc

SEQ ID NO: 1511904 - DNA, 15 bp, Homo sapiens
attacctattagcct

SEQ ID NO: 1511905 - DNA, 15 bp, Homo sapiens
cattacctattagcc

SEQ ID NO: 1511906 - DNA, 15 bp, Homo sapiens
gcattacctattagc

SEQ ID NO: 1511907 - DNA, 15 bp, Homo sapiens
tgcattacctattag

SEQ ID NO: 1511908 - DNA, 15 bp, Homo sapiens
ctgcattacctatta

SEQ ID NO: 1511909 - DNA, 15 bp, Homo sapiens
cctgcattacctatt

SEQ ID NO: 1511910 - DNA, 15 bp, Homo sapiens
gcctgcattacctat

SEQ ID NO: 1511911 - DNA, 15 bp, Homo sapiens
agcctgcattaccta

SEQ ID NO: 1511912 - DNA, 15 bp, Homo sapiens
cagcctgcattacct

SEQ ID NO: 1511913 - DNA, 15 bp, Homo sapiens
gcagcctgcattacc

SEQ ID NO: 1511914 - DNA, 15 bp, Homo sapiens
tgcagcctgcattac

SEQ ID NO: 1511915 - DNA, 15 bp, Homo sapiens
ctgcagcctgcatta

SEQ ID NO: 1511916 - DNA, 15 bp, Homo sapiens
actgcagcctgcatt

SEQ ID NO: 1511917 - DNA, 15 bp, Homo sapiens
aactgcagcctgcat

SEQ ID NO: 1511918 - DNA, 15 bp, Homo sapiens
aaactgcagcctgca

SEQ ID NO: 1511919 - DNA, 15 bp, Homo sapiens
taaactgcagcctgc

SEQ ID NO: 1511920 - DNA, 15 bp, Homo sapiens
ataaactgcagcctg

SEQ ID NO: 1511921 - DNA, 15 bp, Homo sapiens
aataaactgcagcct

SEQ ID NO: 1511922 - DNA, 15 bp, Homo sapiens
aaataaactgcagcc

SEQ ID NO: 1511923 - DNA, 15 bp, Homo sapiens
taaataaactgcagc

SEQ ID NO: 1511924 - DNA, 15 bp, Homo sapiens
ataaataaactgcag

SEQ ID NO: 1511925 - DNA, 15 bp, Homo sapiens
aataaataaactgca

SEQ ID NO: 1511926 - DNA, 15 bp, Homo sapiens
aaataaataaactgc

SEQ ID NO: 1511927 - DNA, 15 bp, Homo sapiens
caaataaataaactg

SEQ ID NO: 1511928 - DNA, 15 bp, Homo sapiens
acaaataaataaact

SEQ ID NO: 1511929 - DNA, 15 bp, Homo sapiens
gacaaataaataaac

SEQ ID NO: 1511930 - DNA, 15 bp, Homo sapiens
tgacaaataaataaa

SEQ ID NO: 1511931 - DNA, 15 bp, Homo sapiens
atgacaaataaataa

SEQ ID NO: 1511932 - DNA, 15 bp, Homo sapiens
aatgacaaataaata

SEQ ID NO: 1511933 - DNA, 15 bp, Homo sapiens
aaatgacaaataaat

SEQ ID NO: 1511934 - DNA, 15 bp, Homo sapiens
aaaatgacaaataaa

SEQ ID NO: 1511935 - DNA, 15 bp, Homo sapiens
aaaaatgacaaataa

SEQ ID NO: 1511936 - DNA, 15 bp, Homo sapiens
aaaaaatgacaaata

SEQ ID NO: 1511937 - DNA, 15 bp, Homo sapiens
aaaaaaatgacaaat

SEQ ID NO: 1511938 - DNA, 15 bp, Homo sapiens
taaaaaaatgacaaa

SEQ ID NO: 1511939 - DNA, 15 bp, Homo sapiens
ttaaaaaaatgacaa

SEQ ID NO: 1511940 - DNA, 15 bp, Homo sapiens
tttaaaaaaatgaca

SEQ ID NO: 1511941 - DNA, 15 bp, Homo sapiens
ttttaaaaaaatgac

SEQ ID NO: 1511942 - DNA, 15 bp, Homo sapiens
tttttaaaaaaatga

SEQ ID NO: 1511943 - DNA, 15 bp, Homo sapiens
atttttaaaaaaatg

SEQ ID NO: 1511944 - DNA, 15 bp, Homo sapiens
aatttttaaaaaaat

SEQ ID NO: 1511945 - DNA, 15 bp, Homo sapiens
aaatttttaaaaaaa

SEQ ID NO: 1511946 - DNA, 15 bp, Homo sapiens
ctcaaatttttaaaa

SEQ ID NO: 1511947 - DNA, 15 bp, Homo sapiens
tctcaaatttttaaa

SEQ ID NO: 1511948 - DNA, 15 bp, Homo sapiens
gtctcaaatttttaa

SEQ ID NO: 1511949 - DNA, 15 bp, Homo sapiens
tgtctcaaattttta

SEQ ID NO: 1511950 - DNA, 15 bp, Homo sapiens
ctgtctcaaattttt

SEQ ID NO: 1511951 - DNA, 15 bp, Homo sapiens
tctgtctcaaatttt

SEQ ID NO: 1511952 - DNA, 15 bp, Homo sapiens
ctctgtctcaaattt

SEQ ID NO: 1511953 - DNA, 15 bp, Homo sapiens
actctgtctcaaatt

SEQ ID NO: 1511954 - DNA, 15 bp, Homo sapiens
gactctgtctcaaat

SEQ ID NO: 1511955 - DNA, 15 bp, Homo sapiens
ggcagagtgagactc

SEQ ID NO: 1511956 - DNA, 15 bp, Homo sapiens
tggcagagtgagact

SEQ ID NO: 1511957 - DNA, 15 bp, Homo sapiens
atggcagagtgagac

SEQ ID NO: 1511958 - DNA, 15 bp, Homo sapiens
aatggcagagtgaga

SEQ ID NO: 1511959 - DNA, 15 bp, Homo sapiens
gaatggcagagtgag

SEQ ID NO: 1511960 - DNA, 15 bp, Homo sapiens
tgaatggcagagtga

SEQ ID NO: 1511961 - DNA, 15 bp, Homo sapiens
ctgaatggcagagtg

SEQ ID NO: 1511962 - DNA, 15 bp, Homo sapiens
cctgaatggcagagt

SEQ ID NO: 1511963 - DNA, 15 bp, Homo sapiens
gcctgaatggcagag

SEQ ID NO: 1511964 - DNA, 15 bp, Homo sapiens
agcctgaatggcaga

SEQ ID NO: 1511965 - DNA, 15 bp, Homo sapiens
cagcctgaatggcag

SEQ ID NO: 1511966 - DNA, 15 bp, Homo sapiens
ccagcctgaatggca

SEQ ID NO: 1511967 - DNA, 15 bp, Homo sapiens
cccagcctgaatggc

SEQ ID NO: 1511968 - DNA, 15 bp, Homo sapiens
ccccagcctgaatgg

SEQ ID NO: 1511969 - DNA, 15 bp, Homo sapiens
accccagcctgaatg

SEQ ID NO: 1511970 - DNA, 15 bp, Homo sapiens
caccccagcctgaat

SEQ ID NO: 1511971 - DNA, 15 bp, Homo sapiens
gcaccccagcctgaa

SEQ ID NO: 1511972 - DNA, 15 bp, Homo sapiens
tgcaccccagcctga

SEQ ID NO: 1511973 - DNA, 15 bp, Homo sapiens
gtgcaccccagcctg

SEQ ID NO: 1511974 - DNA, 15 bp, Homo sapiens
agtgcaccccagcct

SEQ ID NO: 1511975 - DNA, 15 bp, Homo sapiens
cagtgcaccccagcc

SEQ ID NO: 1511976 - DNA, 15 bp, Homo sapiens
ccagtgcaccccagc

SEQ ID NO: 1511977 - DNA, 15 bp, Homo sapiens
gccagtgcaccccag

SEQ ID NO: 1511978 - DNA, 15 bp, Homo sapiens
cgccagtgcacccca

SEQ ID NO: 1511979 - DNA, 15 bp, Homo sapiens
gcgccagtgcacccc

SEQ ID NO: 1511980 - DNA, 15 bp, Homo sapiens
tgcgccagtgcaccc

SEQ ID NO: 1511981 - DNA, 15 bp, Homo sapiens
ctgcgccagtgcacc

SEQ ID NO: 1511982 - DNA, 15 bp, Homo sapiens
actgcgccagtgcac

SEQ ID NO: 1511983 - DNA, 15 bp, Homo sapiens
gactgcgccagtgca

SEQ ID NO: 1511984 - DNA, 15 bp, Homo sapiens
agactgcgccagtgc

SEQ ID NO: 1511985 - DNA, 15 bp, Homo sapiens
gagactgcgccagtg

SEQ ID NO: 1511986 - DNA, 15 bp, Homo sapiens
cgagactgcgccagt

SEQ ID NO: 1511987 - DNA, 15 bp, Homo sapiens
ccgagactgcgccag

SEQ ID NO: 1511988 - DNA, 15 bp, Homo sapiens
cgaacctgggaggca

SEQ ID NO: 1511989 - DNA, 15 bp, Homo sapiens
acgaacctgggaggc

SEQ ID NO: 1511990 - DNA, 15 bp, Homo sapiens
cacgaacctgggagg

SEQ ID NO: 1511991 - DNA, 15 bp, Homo sapiens
acacgaacctgggag

SEQ ID NO: 1511992 - DNA, 15 bp, Homo sapiens
cacacgaacctggga

SEQ ID NO: 1511993 - DNA, 15 bp, Homo sapiens
tcacacgaacctggg

SEQ ID NO: 1511994 - DNA, 15 bp, Homo sapiens
atcacacgaacctgg

SEQ ID NO: 1511995 - DNA, 15 bp, Homo sapiens
aatcacacgaacctg

SEQ ID NO: 1511996 - DNA, 15 bp, Homo sapiens
gaatcacacgaacct

SEQ ID NO: 1511997 - DNA, 15 bp, Homo sapiens
agaatcacacgaacc

SEQ ID NO: 1511998 - DNA, 15 bp, Homo sapiens
gagaatcacacgaac

SEQ ID NO: 1511999 - DNA, 15 bp, Homo sapiens
ggagaatcacacgaa

SEQ ID NO: 1512000 - DNA, 15 bp, Homo sapiens
aggagaatcacacga

SEQ ID NO: 1512001 - DNA, 15 bp, Homo sapiens
caggagaatcacacg

SEQ ID NO: 1512002 - DNA, 15 bp, Homo sapiens
gcaggagaatcacac

SEQ ID NO: 1512003 - DNA, 15 bp, Homo sapiens
cctgggcgtggtggc

SEQ ID NO: 1512004 - DNA, 15 bp, Homo sapiens
acctgggcgtggtgg

SEQ ID NO: 1512005 - DNA, 15 bp, Homo sapiens
tacctgggcgtggtg

SEQ ID NO: 1512006 - DNA, 15 bp, Homo sapiens
ttacctgggcgtggt

SEQ ID NO: 1512007 - DNA, 15 bp, Homo sapiens
attacctgggcgtgg

SEQ ID NO: 1512008 - DNA, 15 bp, Homo sapiens
aattacctgggcgtg

SEQ ID NO: 1512009 - DNA, 15 bp, Homo sapiens
aaattacctgggcgt

SEQ ID NO: 1512010 - DNA, 15 bp, Homo sapiens
aaaattacctgggcg

SEQ ID NO: 1512011 - DNA, 15 bp, Homo sapiens
aaaaaattacctggg

SEQ ID NO: 1512012 - DNA, 15 bp, Homo sapiens
aaaaaaattacctgg

SEQ ID NO: 1512013 - DNA, 15 bp, Homo sapiens
aaaaaaaattacctg

SEQ ID NO: 1512014 - DNA, 15 bp, Homo sapiens
aaaaaaaaattacct

SEQ ID NO: 1512015 - DNA, 15 bp, Homo sapiens
aaaaaaaaaaattac

SEQ ID NO: 1512016 - DNA, 15 bp, Homo sapiens
atctctattaaaaat

SEQ ID NO: 1512017 - DNA, 15 bp, Homo sapiens
catctctattaaaaa

SEQ ID NO: 1512018 - DNA, 15 bp, Homo sapiens
ccatctctattaaaa

SEQ ID NO: 1512019 - DNA, 15 bp, Homo sapiens
accatctctattaaa

SEQ ID NO: 1512020 - DNA, 15 bp, Homo sapiens
caccatctctattaa

SEQ ID NO: 1512021 - DNA, 15 bp, Homo sapiens
acaccatctctatta

SEQ ID NO: 1512022 - DNA, 15 bp, Homo sapiens
aacaccatctctatt

SEQ ID NO: 1512023 - DNA, 15 bp, Homo sapiens
aaacaccatctctat

SEQ ID NO: 1512024 - DNA, 15 bp, Homo sapiens
tggtgaaacaccatc

SEQ ID NO: 1512025 - DNA, 15 bp, Homo sapiens
atggtgaaacaccat

SEQ ID NO: 1512026 - DNA, 15 bp, Homo sapiens
gatggtgaaacacca

SEQ ID NO: 1512027 - DNA, 15 bp, Homo sapiens
agatggtgaaacacc

SEQ ID NO: 1512028 - DNA, 15 bp, Homo sapiens
aagatggtgaaacac

SEQ ID NO: 1512029 - DNA, 15 bp, Homo sapiens
caagatggtgaaaca

SEQ ID NO: 1512030 - DNA, 15 bp, Homo sapiens
gggcaggcggatcac

SEQ ID NO: 1512031 - DNA, 15 bp, Homo sapiens
agggcaggcggatca

SEQ ID NO: 1512032 - DNA, 15 bp, Homo sapiens
cagggcaggcggatc

SEQ ID NO: 1512033 - DNA, 15 bp, Homo sapiens
ccagggcaggcggat

SEQ ID NO: 1512034 - DNA, 15 bp, Homo sapiens
gccagggcaggcgga

SEQ ID NO: 1512035 - DNA, 15 bp, Homo sapiens
ggccagggcaggcgg

SEQ ID NO: 1512036 - DNA, 15 bp, Homo sapiens
aggccagggcaggcg

SEQ ID NO: 1512037 - DNA, 15 bp, Homo sapiens
gaggccagggcaggc

SEQ ID NO: 1512038 - DNA, 15 bp, Homo sapiens
ggaggccagggcagg

SEQ ID NO: 1512039 - DNA, 15 bp, Homo sapiens
tggaggccagggcag

SEQ ID NO: 1512040 - DNA, 15 bp, Homo sapiens
ttggaggccagggca

SEQ ID NO: 1512041 - DNA, 15 bp, Homo sapiens
tttggaggccagggc

SEQ ID NO: 1512042 - DNA, 15 bp, Homo sapiens
ttttggaggccaggg

SEQ ID NO: 1512043 - DNA, 15 bp, Homo sapiens
tttttggaggccagg

SEQ ID NO: 1512044 - DNA, 15 bp, Homo sapiens
atttttggaggccag

SEQ ID NO: 1512045 - DNA, 15 bp, Homo sapiens
tatttttggaggcca

SEQ ID NO: 1512046 - DNA, 15 bp, Homo sapiens
gtatttttggaggcc

SEQ ID NO: 1512047 - DNA, 15 bp, Homo sapiens
agtatttttggaggc

SEQ ID NO: 1512048 - DNA, 15 bp, Homo sapiens
cagtatttttggagg

SEQ ID NO: 1512049 - DNA, 15 bp, Homo sapiens
ccagtatttttggag

SEQ ID NO: 1512050 - DNA, 15 bp, Homo sapiens
cccagtatttttgga

SEQ ID NO: 1512051 - DNA, 15 bp, Homo sapiens
tcccagtatttttgg

SEQ ID NO: 1512052 - DNA, 15 bp, Homo sapiens
atcccagtatttttg

SEQ ID NO: 1512053 - DNA, 15 bp, Homo sapiens
aatcccagtattttt

SEQ ID NO: 1512054 - DNA, 15 bp, Homo sapiens
taatcccagtatttt

SEQ ID NO: 1512055 - DNA, 15 bp, Homo sapiens
gtaatcccagtattt

SEQ ID NO: 1512056 - DNA, 15 bp, Homo sapiens
tgtaatcccagtatt

SEQ ID NO: 1512057 - DNA, 15 bp, Homo sapiens
ctgtaatcccagtat

SEQ ID NO: 1512058 - DNA, 15 bp, Homo sapiens
gcatggtggctcaca

SEQ ID NO: 1512059 - DNA, 15 bp, Homo sapiens
gggctgggcatggtg

SEQ ID NO: 1512060 - DNA, 15 bp, Homo sapiens
tgggctgggcatggt

SEQ ID NO: 1512061 - DNA, 15 bp, Homo sapiens
ctgggctgggcatgg

SEQ ID NO: 1512062 - DNA, 15 bp, Homo sapiens
tctgggctgggcatg

SEQ ID NO: 1512063 - DNA, 15 bp, Homo sapiens
ctctgggctgggcat

SEQ ID NO: 1512064 - DNA, 15 bp, Homo sapiens
actctgggctgggca

SEQ ID NO: 1512065 - DNA, 15 bp, Homo sapiens
cactctgggctgggc

SEQ ID NO: 1512066 - DNA, 15 bp, Homo sapiens
gcactctgggctggg

SEQ ID NO: 1512067 - DNA, 15 bp, Homo sapiens
tgcactctgggctgg

SEQ ID NO: 1512068 - DNA, 15 bp, Homo sapiens
ctgcactctgggctg

SEQ ID NO: 1512069 - DNA, 15 bp, Homo sapiens
actgcactctgggct

SEQ ID NO: 1512070 - DNA, 15 bp, Homo sapiens
aactgcactctgggc

SEQ ID NO: 1512071 - DNA, 15 bp, Homo sapiens
aaactgcactctggg

SEQ ID NO: 1512072 - DNA, 15 bp, Homo sapiens
taaactgcactctgg

SEQ ID NO: 1512073 - DNA, 15 bp, Homo sapiens
ttaaactgcactctg

SEQ ID NO: 1512074 - DNA, 15 bp, Homo sapiens
tttaaactgcactct

SEQ ID NO: 1512075 - DNA, 15 bp, Homo sapiens
gtttaaactgcactc

SEQ ID NO: 1512076 - DNA, 15 bp, Homo sapiens
ggtttaaactgcact

SEQ ID NO: 1512077 - DNA, 15 bp, Homo sapiens
tggtttaaactgcac

SEQ ID NO: 1512078 - DNA, 15 bp, Homo sapiens
gtggtttaaactgca

SEQ ID NO: 1512079 - DNA, 15 bp, Homo sapiens
ggtggtttaaactgc

SEQ ID NO: 1512080 - DNA, 15 bp, Homo sapiens
tggtggtttaaactg

SEQ ID NO: 1512081 - DNA, 15 bp, Homo sapiens
atggtggtttaaact

SEQ ID NO: 1512082 - DNA, 15 bp, Homo sapiens
aatggtggtttaaac

SEQ ID NO: 1512083 - DNA, 15 bp, Homo sapiens
aaatggtggtttaaa

SEQ ID NO: 1512084 - DNA, 15 bp, Homo sapiens
gaaatggtggtttaa

SEQ ID NO: 1512085 - DNA, 15 bp, Homo sapiens
agaaatggtggttta

SEQ ID NO: 1512086 - DNA, 15 bp, Homo sapiens
cagaaatggtggttt

SEQ ID NO: 1512087 - DNA, 15 bp, Homo sapiens
acagaaatggtggtt

SEQ ID NO: 1512088 - DNA, 15 bp, Homo sapiens
cacagaaatggtggt

SEQ ID NO: 1512089 - DNA, 15 bp, Homo sapiens
tcacagaaatggtgg

SEQ ID NO: 1512090 - DNA, 15 bp, Homo sapiens
ttcacagaaatggtg

SEQ ID NO: 1512091 - DNA, 15 bp, Homo sapiens
cttcacagaaatggt

SEQ ID NO: 1512092 - DNA, 15 bp, Homo sapiens
gcttcacagaaatgg

SEQ ID NO: 1512093 - DNA, 15 bp, Homo sapiens
agcttcacagaaatg

SEQ ID NO: 1512094 - DNA, 15 bp, Homo sapiens
aagcttcacagaaat

SEQ ID NO: 1512095 - DNA, 15 bp, Homo sapiens
aaagcttcacagaaa

SEQ ID NO: 1512096 - DNA, 15 bp, Homo sapiens
gaaagcttcacagaa

SEQ ID NO: 1512097 - DNA, 15 bp, Homo sapiens
agaaagcttcacaga

SEQ ID NO: 1512098 - DNA, 15 bp, Homo sapiens
gagaaagcttcacag

SEQ ID NO: 1512099 - DNA, 15 bp, Homo sapiens
agagaaagcttcaca

SEQ ID NO: 1512100 - DNA, 15 bp, Homo sapiens
cagagaaagcttcac

SEQ ID NO: 1512101 - DNA, 15 bp, Homo sapiens
gcagagaaagcttca

SEQ ID NO: 1512102 - DNA, 15 bp, Homo sapiens
agcagagaaagcttc

SEQ ID NO: 1512103 - DNA, 15 bp, Homo sapiens
aagcagagaaagctt

SEQ ID NO: 1512104 - DNA, 15 bp, Homo sapiens
caagcagagaaagct

SEQ ID NO: 1512105 - DNA, 15 bp, Homo sapiens
acaagcagagaaagc

SEQ ID NO: 1512106 - DNA, 15 bp, Homo sapiens
aacaagcagagaaag

SEQ ID NO: 1512107 - DNA, 15 bp, Homo sapiens
taacaagcagagaaa

SEQ ID NO: 1512108 - DNA, 15 bp, Homo sapiens
gtaacaagcagagaa

SEQ ID NO: 1512109 - DNA, 15 bp, Homo sapiens
ggtaacaagcagaga

SEQ ID NO: 1512110 - DNA, 15 bp, Homo sapiens
tggtaacaagcagag

SEQ ID NO: 1512111 - DNA, 15 bp, Homo sapiens
ctggtaacaagcaga

SEQ ID NO: 1512112 - DNA, 15 bp, Homo sapiens
cctggtaacaagcag

SEQ ID NO: 1512113 - DNA, 15 bp, Homo sapiens
acctggtaacaagca

SEQ ID NO: 1512114 - DNA, 15 bp, Homo sapiens
tacctggtaacaagc

SEQ ID NO: 1512115 - DNA, 15 bp, Homo sapiens
gtacctggtaacaag

SEQ ID NO: 1512116 - DNA, 15 bp, Homo sapiens
agtacctggtaacaa

SEQ ID NO: 1512117 - DNA, 15 bp, Homo sapiens
tagtacctggtaaca

SEQ ID NO: 1512118 - DNA, 15 bp, Homo sapiens
gtagtacctggtaac

SEQ ID NO: 1512119 - DNA, 15 bp, Homo sapiens
ggtagtacctggtaa

SEQ ID NO: 1512120 - DNA, 15 bp, Homo sapiens
gggtagtacctggta

SEQ ID NO: 1512121 - DNA, 15 bp, Homo sapiens
tgggtagtacctggt

SEQ ID NO: 1512122 - DNA, 15 bp, Homo sapiens
gtgggtagtacctgg

SEQ ID NO: 1512123 - DNA, 15 bp, Homo sapiens
cgtgggtagtacctg

SEQ ID NO: 1512124 - DNA, 15 bp, Homo sapiens
tcgtgggtagtacct

SEQ ID NO: 1512125 - DNA, 15 bp, Homo sapiens
ttcgtgggtagtacc

SEQ ID NO: 1512126 - DNA, 15 bp, Homo sapiens
gttcgtgggtagtac

SEQ ID NO: 1512127 - DNA, 15 bp, Homo sapiens
tgttcgtgggtagta

SEQ ID NO: 1512128 - DNA, 15 bp, Homo sapiens
ttgttcgtgggtagt

SEQ ID NO: 1512129 - DNA, 15 bp, Homo sapiens
tttgttcgtgggtag

SEQ ID NO: 1512130 - DNA, 15 bp, Homo sapiens
ctttgttcgtgggta

SEQ ID NO: 1512131 - DNA, 15 bp, Homo sapiens
tctttgttcgtgggt

SEQ ID NO: 1512132 - DNA, 15 bp, Homo sapiens
ttctttgttcgtggg

SEQ ID NO: 1512133 - DNA, 15 bp, Homo sapiens
tttctttgttcgtgg

SEQ ID NO: 1512134 - DNA, 15 bp, Homo sapiens
atttctttgttcgtg

SEQ ID NO: 1512135 - DNA, 15 bp, Homo sapiens
tatttctttgttcgt

SEQ ID NO: 1512136 - DNA, 15 bp, Homo sapiens
atatttctttgttcg

SEQ ID NO: 1512137 - DNA, 15 bp, Homo sapiens
catatttctttgttc

SEQ ID NO: 1512138 - DNA, 15 bp, Homo sapiens
gcatatttctttgtt

SEQ ID NO: 1512139 - DNA, 15 bp, Homo sapiens
agcatatttctttgt

SEQ ID NO: 1512140 - DNA, 15 bp, Homo sapiens
aagcatatttctttg

SEQ ID NO: 1512141 - DNA, 15 bp, Homo sapiens
aaagcatatttcttt

SEQ ID NO: 1512142 - DNA, 15 bp, Homo sapiens
caaagcatatttctt

SEQ ID NO: 1512143 - DNA, 15 bp, Homo sapiens
acaaagcatatttct

SEQ ID NO: 1512144 - DNA, 15 bp, Homo sapiens
aacaaagcatatttc

SEQ ID NO: 1512145 - DNA, 15 bp, Homo sapiens
gaacaaagcatattt

SEQ ID NO: 1512146 - DNA, 15 bp, Homo sapiens
agaacaaagcatatt

SEQ ID NO: 1512147 - DNA, 15 bp, Homo sapiens
cagaacaaagcatat

SEQ ID NO: 1512148 - DNA, 15 bp, Homo sapiens
acagaacaaagcata

SEQ ID NO: 1512149 - DNA, 15 bp, Homo sapiens
cacagaacaaagcat

SEQ ID NO: 1512150 - DNA, 15 bp, Homo sapiens
gcacagaacaaagca

SEQ ID NO: 1512151 - DNA, 15 bp, Homo sapiens
agcacagaacaaagc

SEQ ID NO: 1512152 - DNA, 15 bp, Homo sapiens
cagcacagaacaaag

SEQ ID NO: 1512153 - DNA, 15 bp, Homo sapiens
acagcacagaacaaa

SEQ ID NO: 1512154 - DNA, 15 bp, Homo sapiens
cacagcacagaacaa

SEQ ID NO: 1512155 - DNA, 15 bp, Homo sapiens
gcacagcacagaaca

SEQ ID NO: 1512156 - DNA, 15 bp, Homo sapiens
tgcacagcacagaac

SEQ ID NO: 1512157 - DNA, 15 bp, Homo sapiens
gtgcacagcacagaa

SEQ ID NO: 1512158 - DNA, 15 bp, Homo sapiens
ggtgcacagcacaga

SEQ ID NO: 1512159 - DNA, 15 bp, Homo sapiens
tggtgcacagcacag

SEQ ID NO: 1512160 - DNA, 15 bp, Homo sapiens
gtggtgcacagcaca

SEQ ID NO: 1512161 - DNA, 15 bp, Homo sapiens
ggtggtgcacagcac

SEQ ID NO: 1512162 - DNA, 15 bp, Homo sapiens
tggtggtgcacagca

SEQ ID NO: 1512163 - DNA, 15 bp, Homo sapiens
atggtggtgcacagc

SEQ ID NO: 1512164 - DNA, 15 bp, Homo sapiens
aatggtggtgcacag

SEQ ID NO: 1512165 - DNA, 15 bp, Homo sapiens
caatggtggtgcaca

SEQ ID NO: 1512166 - DNA, 15 bp, Homo sapiens
acaatggtggtgcac

SEQ ID NO: 1512167 - DNA, 15 bp, Homo sapiens
tacaatggtggtgca

SEQ ID NO: 1512168 - DNA, 15 bp, Homo sapiens
ttacaatggtggtgc

SEQ ID NO: 1512169 - DNA, 15 bp, Homo sapiens
gttacaatggtggtg

SEQ ID NO: 1512170 - DNA, 15 bp, Homo sapiens
tgttacaatggtggt

SEQ ID NO: 1512171 - DNA, 15 bp, Homo sapiens
ttgttacaatggtgg

SEQ ID NO: 1512172 - DNA, 15 bp, Homo sapiens
attgttacaatggtg

SEQ ID NO: 1512173 - DNA, 15 bp, Homo sapiens
aattgttacaatggt

SEQ ID NO: 1512174 - DNA, 15 bp, Homo sapiens
caattgttacaatgg

SEQ ID NO: 1512175 - DNA, 15 bp, Homo sapiens
acaattgttacaatg

SEQ ID NO: 1512176 - DNA, 15 bp, Homo sapiens
cacaattgttacaat

SEQ ID NO: 1512177 - DNA, 15 bp, Homo sapiens
tcacaattgttacaa

SEQ ID NO: 1512178 - DNA, 15 bp, Homo sapiens
gtcacaattgttaca

SEQ ID NO: 1512179 - DNA, 15 bp, Homo sapiens
cgtcacaattgttac

SEQ ID NO: 1512180 - DNA, 15 bp, Homo sapiens
tcgtcacaattgtta

SEQ ID NO: 1512181 - DNA, 15 bp, Homo sapiens
atcgtcacaattgtt

SEQ ID NO: 1512182 - DNA, 15 bp, Homo sapiens
aatcgtcacaattgt

SEQ ID NO: 1512183 - DNA, 15 bp, Homo sapiens
aaatcgtcacaattg

SEQ ID NO: 1512184 - DNA, 15 bp, Homo sapiens
taaatcgtcacaatt

SEQ ID NO: 1512185 - DNA, 15 bp, Homo sapiens
ataaatcgtcacaat

SEQ ID NO: 1512186 - DNA, 15 bp, Homo sapiens
cataaatcgtcacaa

SEQ ID NO: 1512187 - DNA, 15 bp, Homo sapiens
tcataaatcgtcaca

SEQ ID NO: 1512188 - DNA, 15 bp, Homo sapiens
ctcataaatcgtcac

SEQ ID NO: 1512189 - DNA, 15 bp, Homo sapiens
actcataaatcgtca

SEQ ID NO: 1512190 - DNA, 15 bp, Homo sapiens
aactcataaatcgtc

SEQ ID NO: 1512191 - DNA, 15 bp, Homo sapiens
aaactcataaatcgt

SEQ ID NO: 1512192 - DNA, 15 bp, Homo sapiens
gaaactcataaatcg

SEQ ID NO: 1512193 - DNA, 15 bp, Homo sapiens
agaaactcataaatc

SEQ ID NO: 1512194 - DNA, 15 bp, Homo sapiens
gagaaactcataaat

SEQ ID NO: 1512195 - DNA, 15 bp, Homo sapiens
agagaaactcataaa

SEQ ID NO: 1512196 - DNA, 15 bp, Homo sapiens
gagagaaactcataa

SEQ ID NO: 1512197 - DNA, 15 bp, Homo sapiens
agagagaaactcata

SEQ ID NO: 1512198 - DNA, 15 bp, Homo sapiens
gagagagaaactcat

SEQ ID NO: 1512199 - DNA, 15 bp, Homo sapiens
ggagagagaaactca

SEQ ID NO: 1512200 - DNA, 15 bp, Homo sapiens
aggagagagaaactc

SEQ ID NO: 1512201 - DNA, 15 bp, Homo sapiens
gaggagagagaaact

SEQ ID NO: 1512202 - DNA, 15 bp, Homo sapiens
agaggagagagaaac

SEQ ID NO: 1512203 - DNA, 15 bp, Homo sapiens
tagaggagagagaaa

SEQ ID NO: 1512204 - DNA, 15 bp, Homo sapiens
ctagaggagagagaa

SEQ ID NO: 1512205 - DNA, 15 bp, Homo sapiens
tctagaggagagaga

SEQ ID NO: 1512206 - DNA, 15 bp, Homo sapiens
gtctagaggagagag

SEQ ID NO: 1512207 - DNA, 15 bp, Homo sapiens
agtctagaggagaga

SEQ ID NO: 1512208 - DNA, 15 bp, Homo sapiens
cagtctagaggagag

SEQ ID NO: 1512209 - DNA, 15 bp, Homo sapiens
acagtctagaggaga

SEQ ID NO: 1512210 - DNA, 15 bp, Homo sapiens
aacagtctagaggag

SEQ ID NO: 1512211 - DNA, 15 bp, Homo sapiens
aaacagtctagagga

SEQ ID NO: 1512212 - DNA, 15 bp, Homo sapiens
caaacagtctagagg

SEQ ID NO: 1512213 - DNA, 15 bp, Homo sapiens
gcaaacagtctagag

SEQ ID NO: 1512214 - DNA, 15 bp, Homo sapiens
agcaaacagtctaga

SEQ ID NO: 1512215 - DNA, 15 bp, Homo sapiens
gagcaaacagtctag

SEQ ID NO: 1512216 - DNA, 15 bp, Homo sapiens
agagcaaacagtcta

SEQ ID NO: 1512217 - DNA, 15 bp, Homo sapiens
aagagcaaacagtct

SEQ ID NO: 1512218 - DNA, 15 bp, Homo sapiens
aaagagcaaacagtc

SEQ ID NO: 1512219 - DNA, 15 bp, Homo sapiens
aaaagagcaaacagt

SEQ ID NO: 1512220 - DNA, 15 bp, Homo sapiens
taaaagagcaaacag

SEQ ID NO: 1512221 - DNA, 15 bp, Homo sapiens
gtaaaagagcaaaca

SEQ ID NO: 1512222 - DNA, 15 bp, Homo sapiens
tgtaaaagagcaaac

SEQ ID NO: 1512223 - DNA, 15 bp, Homo sapiens
atgtaaaagagcaaa

SEQ ID NO: 1512224 - DNA, 15 bp, Homo sapiens
aatgtaaaagagcaa

SEQ ID NO: 1512225 - DNA, 15 bp, Homo sapiens
aaatgtaaaagagca

SEQ ID NO: 1512226 - DNA, 15 bp, Homo sapiens
aaaatgtaaaagagc

SEQ ID NO: 1512227 - DNA, 15 bp, Homo sapiens
aaaaatgtaaaagag

SEQ ID NO: 1512228 - DNA, 15 bp, Homo sapiens
taaaaatgtaaaaga

SEQ ID NO: 1512229 - DNA, 15 bp, Homo sapiens
gtaaaaatgtaaaag

SEQ ID NO: 1512230 - DNA, 15 bp, Homo sapiens
tgtaaaaatgtaaaa

SEQ ID NO: 1512231 - DNA, 15 bp, Homo sapiens
atgtaaaaatgtaaa

SEQ ID NO: 1512232 - DNA, 15 bp, Homo sapiens
gatgtaaaaatgtaa

SEQ ID NO: 1512233 - DNA, 15 bp, Homo sapiens
agatgtaaaaatgta

SEQ ID NO: 1512234 - DNA, 15 bp, Homo sapiens
aagatgtaaaaatgt

SEQ ID NO: 1512235 - DNA, 15 bp, Homo sapiens
aaagatgtaaaaatg

SEQ ID NO: 1512236 - DNA, 15 bp, Homo sapiens
taaagatgtaaaaat

SEQ ID NO: 1512237 - DNA, 15 bp, Homo sapiens
ataaagatgtaaaaa

SEQ ID NO: 1512238 - DNA, 15 bp, Homo sapiens
tataaagatgtaaaa

SEQ ID NO: 1512239 - DNA, 15 bp, Homo sapiens
atataaagatgtaaa

SEQ ID NO: 1512240 - DNA, 15 bp, Homo sapiens
gatataaagatgtaa

SEQ ID NO: 1512241 - DNA, 15 bp, Homo sapiens
ggatataaagatgta

SEQ ID NO: 1512242 - DNA, 15 bp, Homo sapiens
aggatataaagatgt

SEQ ID NO: 1512243 - DNA, 15 bp, Homo sapiens
aaggatataaagatg

SEQ ID NO: 1512244 - DNA, 15 bp, Homo sapiens
gaaggatataaagat

SEQ ID NO: 1512245 - DNA, 15 bp, Homo sapiens
ggaaggatataaaga

SEQ ID NO: 1512246 - DNA, 15 bp, Homo sapiens
tggaaggatataaag

SEQ ID NO: 1512247 - DNA, 15 bp, Homo sapiens
atggaaggatataaa

SEQ ID NO: 1512248 - DNA, 15 bp, Homo sapiens
catggaaggatataa

SEQ ID NO: 1512249 - DNA, 15 bp, Homo sapiens
tcatggaaggatata

SEQ ID NO: 1512250 - DNA, 15 bp, Homo sapiens
ttcatggaaggatat

SEQ ID NO: 1512251 - DNA, 15 bp, Homo sapiens
attcatggaaggata

SEQ ID NO: 1512252 - DNA, 15 bp, Homo sapiens
tattcatggaaggat

SEQ ID NO: 1512253 - DNA, 15 bp, Homo sapiens
atattcatggaagga

SEQ ID NO: 1512254 - DNA, 15 bp, Homo sapiens
aatattcatggaagg

SEQ ID NO: 1512255 - DNA, 15 bp, Homo sapiens
aaatattcatggaag

SEQ ID NO: 1512256 - DNA, 15 bp, Homo sapiens
taaatattcatggaa

SEQ ID NO: 1512257 - DNA, 15 bp, Homo sapiens
ctaaatattcatgga

SEQ ID NO: 1512258 - DNA, 15 bp, Homo sapiens
gctaaatattcatgg

SEQ ID NO: 1512259 - DNA, 15 bp, Homo sapiens
tgctaaatattcatg

SEQ ID NO: 1512260 - DNA, 15 bp, Homo sapiens
atgctaaatattcat

SEQ ID NO: 1512261 - DNA, 15 bp, Homo sapiens
catgctaaatattca

SEQ ID NO: 1512262 - DNA, 15 bp, Homo sapiens
ccatgctaaatattc

SEQ ID NO: 1512263 - DNA, 15 bp, Homo sapiens
accatgctaaatatt

SEQ ID NO: 1512264 - DNA, 15 bp, Homo sapiens
caccatgctaaatat

SEQ ID NO: 1512265 - DNA, 15 bp, Homo sapiens
acaccatgctaaata

SEQ ID NO: 1512266 - DNA, 15 bp, Homo sapiens
gacaccatgctaaat

SEQ ID NO: 1512267 - DNA, 15 bp, Homo sapiens
agacaccatgctaaa

SEQ ID NO: 1512268 - DNA, 15 bp, Homo sapiens
cagacaccatgctaa

SEQ ID NO: 1512269 - DNA, 15 bp, Homo sapiens
gcagacaccatgcta

SEQ ID NO: 1512270 - DNA, 15 bp, Homo sapiens
ggcagacaccatgct

SEQ ID NO: 1512271 - DNA, 15 bp, Homo sapiens
aggcagacaccatgc

SEQ ID NO: 1512272 - DNA, 15 bp, Homo sapiens
aaggcagacaccatg

SEQ ID NO: 1512273 - DNA, 15 bp, Homo sapiens
taaggcagacaccat

SEQ ID NO: 1512274 - DNA, 15 bp, Homo sapiens
ataaggcagacacca

SEQ ID NO: 1512275 - DNA, 15 bp, Homo sapiens
tataaggcagacacc

SEQ ID NO: 1512276 - DNA, 15 bp, Homo sapiens
ctataaggcagacac

SEQ ID NO: 1512277 - DNA, 15 bp, Homo sapiens
actataaggcagaca

SEQ ID NO: 1512278 - DNA, 15 bp, Homo sapiens
cactataaggcagac

SEQ ID NO: 1512279 - DNA, 15 bp, Homo sapiens
tcactataaggcaga

SEQ ID NO: 1512280 - DNA, 15 bp, Homo sapiens
ttcactataaggcag

SEQ ID NO: 1512281 - DNA, 15 bp, Homo sapiens
gttcactataaggca

SEQ ID NO: 1512282 - DNA, 15 bp, Homo sapiens
tgttcactataaggc

SEQ ID NO: 1512283 - DNA, 15 bp, Homo sapiens
atgttcactataagg

SEQ ID NO: 1512284 - DNA, 15 bp, Homo sapiens
aatgttcactataag

SEQ ID NO: 1512285 - DNA, 15 bp, Homo sapiens
aaatgttcactataa

SEQ ID NO: 1512286 - DNA, 15 bp, Homo sapiens
aaaatgttcactata

SEQ ID NO: 1512287 - DNA, 15 bp, Homo sapiens
taaaatgttcactat

SEQ ID NO: 1512288 - DNA, 15 bp, Homo sapiens
ataaaatgttcacta

SEQ ID NO: 1512289 - DNA, 15 bp, Homo sapiens
tataaaatgttcact

SEQ ID NO: 1512290 - DNA, 15 bp, Homo sapiens
ttataaaatgttcac

SEQ ID NO: 1512291 - DNA, 15 bp, Homo sapiens
tttataaaatgttca

SEQ ID NO: 1512292 - DNA, 15 bp, Homo sapiens
atttataaaatgttc

SEQ ID NO: 1512293 - DNA, 15 bp, Homo sapiens
tatttataaaatgtt

SEQ ID NO: 1512294 - DNA, 15 bp, Homo sapiens
atatttataaaatgt

SEQ ID NO: 1512295 - DNA, 15 bp, Homo sapiens
aatatttataaaatg

SEQ ID NO: 1512296 - DNA, 15 bp, Homo sapiens
aaatatttataaaat

SEQ ID NO: 1512297 - DNA, 15 bp, Homo sapiens
caaatatttataaaa

SEQ ID NO: 1512298 - DNA, 15 bp, Homo sapiens
acaaatatttataaa

SEQ ID NO: 1512299 - DNA, 15 bp, Homo sapiens
aacaaatatttataa

SEQ ID NO: 1512300 - DNA, 15 bp, Homo sapiens
ttaacaaatatttat

SEQ ID NO: 1512301 - DNA, 15 bp, Homo sapiens
cttaacaaatattta

SEQ ID NO: 1512302 - DNA, 15 bp, Homo sapiens
acttaacaaatattt

SEQ ID NO: 1512303 - DNA, 15 bp, Homo sapiens
cacttaacaaatatt

SEQ ID NO: 1512304 - DNA, 15 bp, Homo sapiens
tcacttaacaaatat

SEQ ID NO: 1512305 - DNA, 15 bp, Homo sapiens
ttcacttaacaaata

SEQ ID NO: 1512306 - DNA, 15 bp, Homo sapiens
attcacttaacaaat

SEQ ID NO: 1512307 - DNA, 15 bp, Homo sapiens
cattcacttaacaaa

SEQ ID NO: 1512308 - DNA, 15 bp, Homo sapiens
tcattcacttaacaa

SEQ ID NO: 1512309 - DNA, 15 bp, Homo sapiens
ttcattcacttaaca

SEQ ID NO: 1512310 - DNA, 15 bp, Homo sapiens
attcattcacttaac

SEQ ID NO: 1512311 - DNA, 15 bp, Homo sapiens
aattcattcacttaa

SEQ ID NO: 1512312 - DNA, 15 bp, Homo sapiens
aaattcattcactta

SEQ ID NO: 1512313 - DNA, 15 bp, Homo sapiens
aaaattcattcactt

SEQ ID NO: 1512314 - DNA, 15 bp, Homo sapiens
taaaattcattcact

SEQ ID NO: 1512315 - DNA, 15 bp, Homo sapiens
ttaaaattcattcac

SEQ ID NO: 1512316 - DNA, 15 bp, Homo sapiens
gttaaaattcattca

SEQ ID NO: 1512317 - DNA, 15 bp, Homo sapiens
cgttaaaattcattc

SEQ ID NO: 1512318 - DNA, 15 bp, Homo sapiens
ccgttaaaattcatt

SEQ ID NO: 1512319 - DNA, 15 bp, Homo sapiens
tccgttaaaattcat

SEQ ID NO: 1512320 - DNA, 15 bp, Homo sapiens
ttccgttaaaattca

SEQ ID NO: 1512321 - DNA, 15 bp, Homo sapiens
attccgttaaaattc

SEQ ID NO: 1512322 - DNA, 15 bp, Homo sapiens
tattccgttaaaatt

SEQ ID NO: 1512323 - DNA, 15 bp, Homo sapiens
atattccgttaaaat

SEQ ID NO: 1512324 - DNA, 15 bp, Homo sapiens
gatattccgttaaaa

SEQ ID NO: 1512325 - DNA, 15 bp, Homo sapiens
agatattccgttaaa

SEQ ID NO: 1512326 - DNA, 15 bp, Homo sapiens
aagatattccgttaa

SEQ ID NO: 1512327 - DNA, 15 bp, Homo sapiens
taagatattccgtta

SEQ ID NO: 1512328 - DNA, 15 bp, Homo sapiens
ataagatattccgtt

SEQ ID NO: 1512329 - DNA, 15 bp, Homo sapiens
cataagatattccgt

SEQ ID NO: 1512330 - DNA, 15 bp, Homo sapiens
gcataagatattccg

SEQ ID NO: 1512331 - DNA, 15 bp, Homo sapiens
agcataagatattcc

SEQ ID NO: 1512332 - DNA, 15 bp, Homo sapiens
aagcataagatattc

SEQ ID NO: 1512333 - DNA, 15 bp, Homo sapiens
caagcataagatatt

SEQ ID NO: 1512334 - DNA, 15 bp, Homo sapiens
gcaagcataagatat

SEQ ID NO: 1512335 - DNA, 15 bp, Homo sapiens
agcaagcataagata

SEQ ID NO: 1512336 - DNA, 15 bp, Homo sapiens
aagcaagcataagat

SEQ ID NO: 1512337 - DNA, 15 bp, Homo sapiens
aaagcaagcataaga

SEQ ID NO: 1512338 - DNA, 15 bp, Homo sapiens
aaaagcaagcataag

SEQ ID NO: 1512339 - DNA, 15 bp, Homo sapiens
aaaaagcaagcataa

SEQ ID NO: 1512340 - DNA, 15 bp, Homo sapiens
gaaaaagcaagcata

SEQ ID NO: 1512341 - DNA, 15 bp, Homo sapiens
agaaaaagcaagcat

SEQ ID NO: 1512342 - DNA, 15 bp, Homo sapiens
tagaaaaagcaagca

SEQ ID NO: 1512343 - DNA, 15 bp, Homo sapiens
ttagaaaaagcaagc

SEQ ID NO: 1512344 - DNA, 15 bp, Homo sapiens
cttagaaaaagcaag

SEQ ID NO: 1512345 - DNA, 15 bp, Homo sapiens
gcttagaaaaagcaa

SEQ ID NO: 1512346 - DNA, 15 bp, Homo sapiens
ggcttagaaaaagca

SEQ ID NO: 1512347 - DNA, 15 bp, Homo sapiens
tggcttagaaaaagc

SEQ ID NO: 1512348 - DNA, 15 bp, Homo sapiens
gtggcttagaaaaag

SEQ ID NO: 1512349 - DNA, 15 bp, Homo sapiens
tgtggcttagaaaaa

SEQ ID NO: 1512350 - DNA, 15 bp, Homo sapiens
atgtggcttagaaaa

SEQ ID NO: 1512351 - DNA, 15 bp, Homo sapiens
catgtggcttagaaa

SEQ ID NO: 1512352 - DNA, 15 bp, Homo sapiens
acatgtggcttagaa

SEQ ID NO: 1512353 - DNA, 15 bp, Homo sapiens
aacatgtggcttaga

SEQ ID NO: 1512354 - DNA, 15 bp, Homo sapiens
taacatgtggcttag

SEQ ID NO: 1512355 - DNA, 15 bp, Homo sapiens
ttaacatgtggctta

SEQ ID NO: 1512356 - DNA, 15 bp, Homo sapiens
cttaacatgtggctt

SEQ ID NO: 1512357 - DNA, 15 bp, Homo sapiens
tcttaacatgtggct

SEQ ID NO: 1512358 - DNA, 15 bp, Homo sapiens
atcttaacatgtggc

SEQ ID NO: 1512359 - DNA, 15 bp, Homo sapiens
catcttaacatgtgg

SEQ ID NO: 1512360 - DNA, 15 bp, Homo sapiens
acatcttaacatgtg

SEQ ID NO: 1512361 - DNA, 15 bp, Homo sapiens
aacatcttaacatgt

SEQ ID NO: 1512362 - DNA, 15 bp, Homo sapiens
gaacatcttaacatg

SEQ ID NO: 1512363 - DNA, 15 bp, Homo sapiens
agaacatcttaacat

SEQ ID NO: 1512364 - DNA, 15 bp, Homo sapiens
aagaacatcttaaca

SEQ ID NO: 1512365 - DNA, 15 bp, Homo sapiens
caagaacatcttaac

SEQ ID NO: 1512366 - DNA, 15 bp, Homo sapiens
acaagaacatcttaa

SEQ ID NO: 1512367 - DNA, 15 bp, Homo sapiens
gacaagaacatctta

SEQ ID NO: 1512368 - DNA, 15 bp, Homo sapiens
agacaagaacatctt

SEQ ID NO: 1512369 - DNA, 15 bp, Homo sapiens
cagacaagaacatct

SEQ ID NO: 1512370 - DNA, 15 bp, Homo sapiens
acagacaagaacatc

SEQ ID NO: 1512371 - DNA, 15 bp, Homo sapiens
gacagacaagaacat

SEQ ID NO: 1512372 - DNA, 15 bp, Homo sapiens
agacagacaagaaca

SEQ ID NO: 1512373 - DNA, 15 bp, Homo sapiens
aagacagacaagaac

SEQ ID NO: 1512374 - DNA, 15 bp, Homo sapiens
aaagacagacaagaa

SEQ ID NO: 1512375 - DNA, 15 bp, Homo sapiens
gaaagacagacaaga

SEQ ID NO: 1512376 - DNA, 15 bp, Homo sapiens
tgaaagacagacaag

SEQ ID NO: 1512377 - DNA, 15 bp, Homo sapiens
ctgaaagacagacaa

SEQ ID NO: 1512378 - DNA, 15 bp, Homo sapiens
actgaaagacagaca

SEQ ID NO: 1512379 - DNA, 15 bp, Homo sapiens
aactgaaagacagac

SEQ ID NO: 1512380 - DNA, 15 bp, Homo sapiens
taactgaaagacaga

SEQ ID NO: 1512381 - DNA, 15 bp, Homo sapiens
ctaactgaaagacag

SEQ ID NO: 1512382 - DNA, 15 bp, Homo sapiens
cctaactgaaagaca

SEQ ID NO: 1512383 - DNA, 15 bp, Homo sapiens
tcctaactgaaagac

SEQ ID NO: 1512384 - DNA, 15 bp, Homo sapiens
gtcctaactgaaaga

SEQ ID NO: 1512385 - DNA, 15 bp, Homo sapiens
agtcctaactgaaag

SEQ ID NO: 1512386 - DNA, 15 bp, Homo sapiens
aagtcctaactgaaa

SEQ ID NO: 1512387 - DNA, 15 bp, Homo sapiens
aaagtcctaactgaa

SEQ ID NO: 1512388 - DNA, 15 bp, Homo sapiens
taaagtcctaactga

SEQ ID NO: 1512389 - DNA, 15 bp, Homo sapiens
ataaagtcctaactg

SEQ ID NO: 1512390 - DNA, 15 bp, Homo sapiens
aataaagtcctaact

SEQ ID NO: 1512391 - DNA, 15 bp, Homo sapiens
aaataaagtcctaac

SEQ ID NO: 1512392 - DNA, 15 bp, Homo sapiens
aaaataaagtcctaa

SEQ ID NO: 1512393 - DNA, 15 bp, Homo sapiens
aaaaataaagtccta

SEQ ID NO: 1512394 - DNA, 15 bp, Homo sapiens
aaaaaataaagtcct

SEQ ID NO: 1512395 - DNA, 15 bp, Homo sapiens
taaaaaataaagtcc

SEQ ID NO: 1512396 - DNA, 15 bp, Homo sapiens
gtaaaaaataaagtc

SEQ ID NO: 1512397 - DNA, 15 bp, Homo sapiens
agtaaaaaataaagt

SEQ ID NO: 1512398 - DNA, 15 bp, Homo sapiens
aagtaaaaaataaag

SEQ ID NO: 1512399 - DNA, 15 bp, Homo sapiens
aaagtaaaaaataaa

SEQ ID NO: 1512400 - DNA, 15 bp, Homo sapiens
aaaagtaaaaaataa

SEQ ID NO: 1512401 - DNA, 15 bp, Homo sapiens
taaaagtaaaaaata

SEQ ID NO: 1512402 - DNA, 15 bp, Homo sapiens
ttaaaagtaaaaaat

SEQ ID NO: 1512403 - DNA, 15 bp, Homo sapiens
cttaaaagtaaaaaa

SEQ ID NO: 1512404 - DNA, 15 bp, Homo sapiens
acttaaaagtaaaaa

SEQ ID NO: 1512405 - DNA, 15 bp, Homo sapiens
aacttaaaagtaaaa

SEQ ID NO: 1512406 - DNA, 15 bp, Homo sapiens
gaacttaaaagtaaa

SEQ ID NO: 1512407 - DNA, 15 bp, Homo sapiens
tgaacttaaaagtaa

SEQ ID NO: 1512408 - DNA, 15 bp, Homo sapiens
ctgaacttaaaagta

SEQ ID NO: 1512409 - DNA, 15 bp, Homo sapiens
tctgaacttaaaagt

SEQ ID NO: 1512410 - DNA, 15 bp, Homo sapiens
ctctgaacttaaaag

SEQ ID NO: 1512411 - DNA, 15 bp, Homo sapiens
gctctgaacttaaaa

SEQ ID NO: 1512412 - DNA, 15 bp, Homo sapiens
agctctgaacttaaa

SEQ ID NO: 1512413 - DNA, 15 bp, Homo sapiens
aagctctgaacttaa

SEQ ID NO: 1512414 - DNA, 15 bp, Homo sapiens
gaagctctgaactta

SEQ ID NO: 1512415 - DNA, 15 bp, Homo sapiens
agaagctctgaactt

SEQ ID NO: 1512416 - DNA, 15 bp, Homo sapiens
aagaagctctgaact

SEQ ID NO: 1512417 - DNA, 15 bp, Homo sapiens
caagaagctctgaac

SEQ ID NO: 1512418 - DNA, 15 bp, Homo sapiens
tcaagaagctctgaa

SEQ ID NO: 1512419 - DNA, 15 bp, Homo sapiens
atcaagaagctctga

SEQ ID NO: 1512420 - DNA, 15 bp, Homo sapiens
catcaagaagctctg

SEQ ID NO: 1512421 - DNA, 15 bp, Homo sapiens
tcatcaagaagctct

SEQ ID NO: 1512422 - DNA, 15 bp, Homo sapiens
atcatcaagaagctc

SEQ ID NO: 1512423 - DNA, 15 bp, Homo sapiens
aatcatcaagaagct

SEQ ID NO: 1512424 - DNA, 15 bp, Homo sapiens
caatcatcaagaagc

SEQ ID NO: 1512425 - DNA, 15 bp, Homo sapiens
acaatcatcaagaag

SEQ ID NO: 1512426 - DNA, 15 bp, Homo sapiens
aacaatcatcaagaa

SEQ ID NO: 1512427 - DNA, 15 bp, Homo sapiens
gaacaatcatcaaga

SEQ ID NO: 1512428 - DNA, 15 bp, Homo sapiens
agaacaatcatcaag

SEQ ID NO: 1512429 - DNA, 15 bp, Homo sapiens
aagaacaatcatcaa

SEQ ID NO: 1512430 - DNA, 15 bp, Homo sapiens
gaagaacaatcatca

SEQ ID NO: 1512431 - DNA, 15 bp, Homo sapiens
ggaagaacaatcatc

SEQ ID NO: 1512432 - DNA, 15 bp, Homo sapiens
aggaagaacaatcat

SEQ ID NO: 1512433 - DNA, 15 bp, Homo sapiens
taggaagaacaatca

SEQ ID NO: 1512434 - DNA, 15 bp, Homo sapiens
ttaggaagaacaatc

SEQ ID NO: 1512435 - DNA, 15 bp, Homo sapiens
tttaggaagaacaat

SEQ ID NO: 1512436 - DNA, 15 bp, Homo sapiens
atttaggaagaacaa

SEQ ID NO: 1512437 - DNA, 15 bp, Homo sapiens
tatttaggaagaaca

SEQ ID NO: 1512438 - DNA, 15 bp, Homo sapiens
ttatttaggaagaac

SEQ ID NO: 1512439 - DNA, 15 bp, Homo sapiens
attatttaggaagaa

SEQ ID NO: 1512440 - DNA, 15 bp, Homo sapiens
gattatttaggaaga

SEQ ID NO: 1512441 - DNA, 15 bp, Homo sapiens
tgattatttaggaag

SEQ ID NO: 1512442 - DNA, 15 bp, Homo sapiens
atgattatttaggaa

SEQ ID NO: 1512443 - DNA, 15 bp, Homo sapiens
aatgattatttagga

SEQ ID NO: 1512444 - DNA, 15 bp, Homo sapiens
taatgattatttagg

SEQ ID NO: 1512445 - DNA, 15 bp, Homo sapiens
ataatgattatttag

SEQ ID NO: 1512446 - DNA, 15 bp, Homo sapiens
aataatgattattta

SEQ ID NO: 1512447 - DNA, 15 bp, Homo sapiens
aaataatgattattt

SEQ ID NO: 1512448 - DNA, 15 bp, Homo sapiens
taaataatgattatt

SEQ ID NO: 1512449 - DNA, 15 bp, Homo sapiens
ctaaataatgattat

SEQ ID NO: 1512450 - DNA, 15 bp, Homo sapiens
gctaaataatgatta

SEQ ID NO: 1512451 - DNA, 15 bp, Homo sapiens
tgctaaataatgatt

SEQ ID NO: 1512452 - DNA, 15 bp, Homo sapiens
ttgctaaataatgat

SEQ ID NO: 1512453 - DNA, 15 bp, Homo sapiens
gttgctaaataatga

SEQ ID NO: 1512454 - DNA, 15 bp, Homo sapiens
agttgctaaataatg

SEQ ID NO: 1512455 - DNA, 15 bp, Homo sapiens
cagttgctaaataat

SEQ ID NO: 1512456 - DNA, 15 bp, Homo sapiens
acagttgctaaataa

SEQ ID NO: 1512457 - DNA, 15 bp, Homo sapiens
cacagttgctaaata

SEQ ID NO: 1512458 - DNA, 15 bp, Homo sapiens
acacagttgctaaat

SEQ ID NO: 1512459 - DNA, 15 bp, Homo sapiens
tacacagttgctaaa

SEQ ID NO: 1512460 - DNA, 15 bp, Homo sapiens
atacacagttgctaa

SEQ ID NO: 1512461 - DNA, 15 bp, Homo sapiens
gatacacagttgcta

SEQ ID NO: 1512462 - DNA, 15 bp, Homo sapiens
tgatacacagttgct

SEQ ID NO: 1512463 - DNA, 15 bp, Homo sapiens
ctgatacacagttgc

SEQ ID NO: 1512464 - DNA, 15 bp, Homo sapiens
actgatacacagttg

SEQ ID NO: 1512465 - DNA, 15 bp, Homo sapiens
aactgatacacagtt

SEQ ID NO: 1512466 - DNA, 15 bp, Homo sapiens
caactgatacacagt

SEQ ID NO: 1512467 - DNA, 15 bp, Homo sapiens
tcaactgatacacag

SEQ ID NO: 1512468 - DNA, 15 bp, Homo sapiens
atcaactgatacaca

SEQ ID NO: 1512469 - DNA, 15 bp, Homo sapiens
tatcaactgatacac

SEQ ID NO: 1512470 - DNA, 15 bp, Homo sapiens
atatcaactgataca

SEQ ID NO: 1512471 - DNA, 15 bp, Homo sapiens
aatatcaactgatac

SEQ ID NO: 1512472 - DNA, 15 bp, Homo sapiens
aaatatcaactgata

SEQ ID NO: 1512473 - DNA, 15 bp, Homo sapiens
aaaatatcaactgat

SEQ ID NO: 1512474 - DNA, 15 bp, Homo sapiens
aaaaatatcaactga

SEQ ID NO: 1512475 - DNA, 15 bp, Homo sapiens
caaaaatatcaactg

SEQ ID NO: 1512476 - DNA, 15 bp, Homo sapiens
ccaaaaatatcaact

SEQ ID NO: 1512477 - DNA, 15 bp, Homo sapiens
gccaaaaatatcaac

SEQ ID NO: 1512478 - DNA, 15 bp, Homo sapiens
agccaaaaatatcaa

SEQ ID NO: 1512479 - DNA, 15 bp, Homo sapiens
gagccaaaaatatca

SEQ ID NO: 1512480 - DNA, 15 bp, Homo sapiens
agagccaaaaatatc

SEQ ID NO: 1512481 - DNA, 15 bp, Homo sapiens
cagagccaaaaatat

SEQ ID NO: 1512482 - DNA, 15 bp, Homo sapiens
gcagagccaaaaata

SEQ ID NO: 1512483 - DNA, 15 bp, Homo sapiens
tgcagagccaaaaat

SEQ ID NO: 1512484 - DNA, 15 bp, Homo sapiens
atgcagagccaaaaa

SEQ ID NO: 1512485 - DNA, 15 bp, Homo sapiens
aatgcagagccaaaa

SEQ ID NO: 1512486 - DNA, 15 bp, Homo sapiens
aaatgcagagccaaa

SEQ ID NO: 1512487 - DNA, 15 bp, Homo sapiens
caaatgcagagccaa

SEQ ID NO: 1512488 - DNA, 15 bp, Homo sapiens
gcaaatgcagagcca

SEQ ID NO: 1512489 - DNA, 15 bp, Homo sapiens
agcaaatgcagagcc

SEQ ID NO: 1512490 - DNA, 15 bp, Homo sapiens
cagcaaatgcagagc

SEQ ID NO: 1512491 - DNA, 15 bp, Homo sapiens
tcagcaaatgcagag

SEQ ID NO: 1512492 - DNA, 15 bp, Homo sapiens
ttcagcaaatgcaga

SEQ ID NO: 1512493 - DNA, 15 bp, Homo sapiens
cttcagcaaatgcag

SEQ ID NO: 1512494 - DNA, 15 bp, Homo sapiens
acttcagcaaatgca

SEQ ID NO: 1512495 - DNA, 15 bp, Homo sapiens
tacttcagcaaatgc

SEQ ID NO: 1512496 - DNA, 15 bp, Homo sapiens
atacttcagcaaatg

SEQ ID NO: 1512497 - DNA, 15 bp, Homo sapiens
gatacttcagcaaat

SEQ ID NO: 1512498 - DNA, 15 bp, Homo sapiens
tgatacttcagcaaa

SEQ ID NO: 1512499 - DNA, 15 bp, Homo sapiens
ttgatacttcagcaa

SEQ ID NO: 1512500 - DNA, 15 bp, Homo sapiens
gttgatacttcagca

SEQ ID NO: 1512501 - DNA, 15 bp, Homo sapiens
agttgatacttcagc

SEQ ID NO: 1512502 - DNA, 15 bp, Homo sapiens
cagttgatacttcag

SEQ ID NO: 1512503 - DNA, 15 bp, Homo sapiens
acagttgatacttca

SEQ ID NO: 1512504 - DNA, 15 bp, Homo sapiens
tacagttgatacttc

SEQ ID NO: 1512505 - DNA, 15 bp, Homo sapiens
ttacagttgatactt

SEQ ID NO: 1512506 - DNA, 15 bp, Homo sapiens
attacagttgatact

SEQ ID NO: 1512507 - DNA, 15 bp, Homo sapiens
tattacagttgatac

SEQ ID NO: 1512508 - DNA, 15 bp, Homo sapiens
atattacagttgata

SEQ ID NO: 1512509 - DNA, 15 bp, Homo sapiens
gatattacagttgat

SEQ ID NO: 1512510 - DNA, 15 bp, Homo sapiens
agatattacagttga

SEQ ID NO: 1512511 - DNA, 15 bp, Homo sapiens
tagatattacagttg

SEQ ID NO: 1512512 - DNA, 15 bp, Homo sapiens
atagatattacagtt

SEQ ID NO: 1512513 - DNA, 15 bp, Homo sapiens
aatagatattacagt

SEQ ID NO: 1512514 - DNA, 15 bp, Homo sapiens
gaatagatattacag

SEQ ID NO: 1512515 - DNA, 15 bp, Homo sapiens
tgaatagatattaca

SEQ ID NO: 1512516 - DNA, 15 bp, Homo sapiens
ctgaatagatattac

SEQ ID NO: 1512517 - DNA, 15 bp, Homo sapiens
tctgaatagatatta

SEQ ID NO: 1512518 - DNA, 15 bp, Homo sapiens
ttctgaatagatatt

SEQ ID NO: 1512519 - DNA, 15 bp, Homo sapiens
gttctgaatagatat

SEQ ID NO: 1512520 - DNA, 15 bp, Homo sapiens
agttctgaatagata

SEQ ID NO: 1512521 - DNA, 15 bp, Homo sapiens
gagttctgaatagat

SEQ ID NO: 1512522 - DNA, 15 bp, Homo sapiens
ggagttctgaataga

SEQ ID NO: 1512523 - DNA, 15 bp, Homo sapiens
tggagttctgaatag

SEQ ID NO: 1512524 - DNA, 15 bp, Homo sapiens
ctggagttctgaata

SEQ ID NO: 1512525 - DNA, 15 bp, Homo sapiens
gctggagttctgaat

SEQ ID NO: 1512526 - DNA, 15 bp, Homo sapiens
tgctggagttctgaa

SEQ ID NO: 1512527 - DNA, 15 bp, Homo sapiens
gtgctggagttctga

SEQ ID NO: 1512528 - DNA, 15 bp, Homo sapiens
agtgctggagttctg

SEQ ID NO: 1512529 - DNA, 15 bp, Homo sapiens
tagtgctggagttct

SEQ ID NO: 1512530 - DNA, 15 bp, Homo sapiens
ttagtgctggagttc

SEQ ID NO: 1512531 - DNA, 15 bp, Homo sapiens
cttagtgctggagtt

SEQ ID NO: 1512532 - DNA, 15 bp, Homo sapiens
gcttagtgctggagt

SEQ ID NO: 1512533 - DNA, 15 bp, Homo sapiens
ggcttagtgctggag

SEQ ID NO: 1512534 - DNA, 15 bp, Homo sapiens
tggcttagtgctgga

SEQ ID NO: 1512535 - DNA, 15 bp, Homo sapiens
ttggcttagtgctgg

SEQ ID NO: 1512536 - DNA, 15 bp, Homo sapiens
attggcttagtgctg

SEQ ID NO: 1512537 - DNA, 15 bp, Homo sapiens
aattggcttagtgct

SEQ ID NO: 1512538 - DNA, 15 bp, Homo sapiens
aaattggcttagtgc

SEQ ID NO: 1512539 - DNA, 15 bp, Homo sapiens
aaaattggcttagtg

SEQ ID NO: 1512540 - DNA, 15 bp, Homo sapiens
aaaaattggcttagt

SEQ ID NO: 1512541 - DNA, 15 bp, Homo sapiens
caaaaattggcttag

SEQ ID NO: 1512542 - DNA, 15 bp, Homo sapiens
acaaaaattggctta

SEQ ID NO: 1512543 - DNA, 15 bp, Homo sapiens
aacaaaaattggctt

SEQ ID NO: 1512544 - DNA, 15 bp, Homo sapiens
taacaaaaattggct

SEQ ID NO: 1512545 - DNA, 15 bp, Homo sapiens
ttaacaaaaattggc

SEQ ID NO: 1512546 - DNA, 15 bp, Homo sapiens
tttaacaaaaattgg

SEQ ID NO: 1512547 - DNA, 15 bp, Homo sapiens
ttttaacaaaaattg

SEQ ID NO: 1512548 - DNA, 15 bp, Homo sapiens
attttaacaaaaatt

SEQ ID NO: 1512549 - DNA, 15 bp, Homo sapiens
tattttaacaaaaat

SEQ ID NO: 1512550 - DNA, 15 bp, Homo sapiens
ctattttaacaaaaa

SEQ ID NO: 1512551 - DNA, 15 bp, Homo sapiens
actattttaacaaaa

SEQ ID NO: 1512552 - DNA, 15 bp, Homo sapiens
aactattttaacaaa

SEQ ID NO: 1512553 - DNA, 15 bp, Homo sapiens
taactattttaacaa

SEQ ID NO: 1512554 - DNA, 15 bp, Homo sapiens
ttaactattttaaca

SEQ ID NO: 1512555 - DNA, 15 bp, Homo sapiens
tttaactattttaac

SEQ ID NO: 1512556 - DNA, 15 bp, Homo sapiens
ttttaactattttaa

SEQ ID NO: 1512557 - DNA, 15 bp, Homo sapiens
tttttaactatttta

SEQ ID NO: 1512558 - DNA, 15 bp, Homo sapiens
gtttttaactatttt

SEQ ID NO: 1512559 - DNA, 15 bp, Homo sapiens
agtttttaactattt

SEQ ID NO: 1512560 - DNA, 15 bp, Homo sapiens
aagtttttaactatt

SEQ ID NO: 1512561 - DNA, 15 bp, Homo sapiens
taagtttttaactat

SEQ ID NO: 1512562 - DNA, 15 bp, Homo sapiens
ttaagtttttaacta

SEQ ID NO: 1512563 - DNA, 15 bp, Homo sapiens
tttaagtttttaact

SEQ ID NO: 1512564 - DNA, 15 bp, Homo sapiens
ttttaagtttttaac

SEQ ID NO: 1512565 - DNA, 15 bp, Homo sapiens
cttttaagtttttaa

SEQ ID NO: 1512566 - DNA, 15 bp, Homo sapiens
gcttttaagttttta

SEQ ID NO: 1512567 - DNA, 15 bp, Homo sapiens
ttgcttttaagtttt

SEQ ID NO: 1512568 - DNA, 15 bp, Homo sapiens
attgcttttaagttt

SEQ ID NO: 1512569 - DNA, 15 bp, Homo sapiens
aattgcttttaagtt

SEQ ID NO: 1512570 - DNA, 15 bp, Homo sapiens
aaattgcttttaagt

SEQ ID NO: 1512571 - DNA, 15 bp, Homo sapiens
aaaattgcttttaag

SEQ ID NO: 1512572 - DNA, 15 bp, Homo sapiens
aaaaattgcttttaa

SEQ ID NO: 1512573 - DNA, 15 bp, Homo sapiens
taaaaattgctttta

SEQ ID NO: 1512574 - DNA, 15 bp, Homo sapiens
ataaaaattgctttt

SEQ ID NO: 1512575 - DNA, 15 bp, Homo sapiens
tataaaaattgcttt

SEQ ID NO: 1512576 - DNA, 15 bp, Homo sapiens
atataaaaattgctt

SEQ ID NO: 1512577 - DNA, 15 bp, Homo sapiens
aatataaaaattgct

SEQ ID NO: 1512578 - DNA, 15 bp, Homo sapiens
aaatataaaaattgc

SEQ ID NO: 1512579 - DNA, 15 bp, Homo sapiens
ataaaaatataaaaa

SEQ ID NO: 1512580 - DNA, 15 bp, Homo sapiens
aataaaaatataaaa

SEQ ID NO: 1512581 - DNA, 15 bp, Homo sapiens
aaataaaaatataaa

SEQ ID NO: 1512582 - DNA, 15 bp, Homo sapiens
taaataaaaatataa

SEQ ID NO: 1512583 - DNA, 15 bp, Homo sapiens
gtaaataaaaatata

SEQ ID NO: 1512584 - DNA, 15 bp, Homo sapiens
agtaaataaaaatat

SEQ ID NO: 1512585 - DNA, 15 bp, Homo sapiens
aagtaaataaaaata

SEQ ID NO: 1512586 - DNA, 15 bp, Homo sapiens
gaagtaaataaaaat

SEQ ID NO: 1512587 - DNA, 15 bp, Homo sapiens
agaagtaaataaaaa

SEQ ID NO: 1512588 - DNA, 15 bp, Homo sapiens
aagaagtaaataaaa

SEQ ID NO: 1512589 - DNA, 15 bp, Homo sapiens
taagaagtaaataaa

SEQ ID NO: 1512590 - DNA, 15 bp, Homo sapiens
ataagaagtaaataa

SEQ ID NO: 1512591 - DNA, 15 bp, Homo sapiens
aataagaagtaaata

SEQ ID NO: 1512592 - DNA, 15 bp, Homo sapiens
aaataagaagtaaat

SEQ ID NO: 1512593 - DNA, 15 bp, Homo sapiens
aaaataagaagtaaa

SEQ ID NO: 1512594 - DNA, 15 bp, Homo sapiens
aaaaataagaagtaa

SEQ ID NO: 1512595 - DNA, 15 bp, Homo sapiens
aaaaaataagaagta

SEQ ID NO: 1512596 - DNA, 15 bp, Homo sapiens
caaaaaataagaagt

SEQ ID NO: 1512597 - DNA, 15 bp, Homo sapiens
tcaaaaaataagaag

SEQ ID NO: 1512598 - DNA, 15 bp, Homo sapiens
ttcaaaaaataagaa

SEQ ID NO: 1512599 - DNA, 15 bp, Homo sapiens
tttcaaaaaataaga

SEQ ID NO: 1512600 - DNA, 15 bp, Homo sapiens
atttcaaaaaataag

SEQ ID NO: 1512601 - DNA, 15 bp, Homo sapiens
catttcaaaaaataa

SEQ ID NO: 1512602 - DNA, 15 bp, Homo sapiens
ccatttcaaaaaata

SEQ ID NO: 1512603 - DNA, 15 bp, Homo sapiens
cccatttcaaaaaat

SEQ ID NO: 1512604 - DNA, 15 bp, Homo sapiens
ccccatttcaaaaaa

SEQ ID NO: 1512605 - DNA, 15 bp, Homo sapiens
accccatttcaaaaa

SEQ ID NO: 1512606 - DNA, 15 bp, Homo sapiens
gaccccatttcaaaa

SEQ ID NO: 1512607 - DNA, 15 bp, Homo sapiens
agaccccatttcaaa

SEQ ID NO: 1512608 - DNA, 15 bp, Homo sapiens
gagaccccatttcaa

SEQ ID NO: 1512609 - DNA, 15 bp, Homo sapiens
tgagaccccatttca

SEQ ID NO: 1512610 - DNA, 15 bp, Homo sapiens
gtgagaccccatttc

SEQ ID NO: 1512611 - DNA, 15 bp, Homo sapiens
agtgagaccccattt

SEQ ID NO: 1512612 - DNA, 15 bp, Homo sapiens
gagtgagaccccatt

SEQ ID NO: 1512613 - DNA, 15 bp, Homo sapiens
agagtgagaccccat

SEQ ID NO: 1512614 - DNA, 15 bp, Homo sapiens
cagagtgagacccca

SEQ ID NO: 1512615 - DNA, 15 bp, Homo sapiens
ggtgccaccgcactc

SEQ ID NO: 1512616 - DNA, 15 bp, Homo sapiens
tggtgccaccgcact

SEQ ID NO: 1512617 - DNA, 15 bp, Homo sapiens
atggtgccaccgcac

SEQ ID NO: 1512618 - DNA, 15 bp, Homo sapiens
gatggtgccaccgca

SEQ ID NO: 1512619 - DNA, 15 bp, Homo sapiens
agatggtgccaccgc

SEQ ID NO: 1512620 - DNA, 15 bp, Homo sapiens
gagatggtgccaccg

SEQ ID NO: 1512621 - DNA, 15 bp, Homo sapiens
cgagatggtgccacc

SEQ ID NO: 1512622 - DNA, 15 bp, Homo sapiens
ccgagatggtgccac

SEQ ID NO: 1512623 - DNA, 15 bp, Homo sapiens
gccgagatggtgcca

SEQ ID NO: 1512624 - DNA, 15 bp, Homo sapiens
agccgagatggtgcc

SEQ ID NO: 1512625 - DNA, 15 bp, Homo sapiens
gagccgagatggtgc

SEQ ID NO: 1512626 - DNA, 15 bp, Homo sapiens
tgagccgagatggtg

SEQ ID NO: 1512627 - DNA, 15 bp, Homo sapiens
gtgagccgagatggt

SEQ ID NO: 1512628 - DNA, 15 bp, Homo sapiens
aaggttgcagtgagc

SEQ ID NO: 1512629 - DNA, 15 bp, Homo sapiens
gaaggttgcagtgag

SEQ ID NO: 1512630 - DNA, 15 bp, Homo sapiens
ggaaggttgcagtga

SEQ ID NO: 1512631 - DNA, 15 bp, Homo sapiens
aggaaggttgcagtg

SEQ ID NO: 1512632 - DNA, 15 bp, Homo sapiens
caggaaggttgcagt

SEQ ID NO: 1512633 - DNA, 15 bp, Homo sapiens
acaggaaggttgcag

SEQ ID NO: 1512634 - DNA, 15 bp, Homo sapiens
cacaggaaggttgca

SEQ ID NO: 1512635 - DNA, 15 bp, Homo sapiens
gcacaggaaggttgc

SEQ ID NO: 1512636 - DNA, 15 bp, Homo sapiens
tgcacaggaaggttg

SEQ ID NO: 1512637 - DNA, 15 bp, Homo sapiens
ctgcacaggaaggtt

SEQ ID NO: 1512638 - DNA, 15 bp, Homo sapiens
cctgcacaggaaggt

SEQ ID NO: 1512639 - DNA, 15 bp, Homo sapiens
tcctgcacaggaagg

SEQ ID NO: 1512640 - DNA, 15 bp, Homo sapiens
gtcctgcacaggaag

SEQ ID NO: 1512641 - DNA, 15 bp, Homo sapiens
agtcctgcacaggaa

SEQ ID NO: 1512642 - DNA, 15 bp, Homo sapiens
gagtcctgcacagga

SEQ ID NO: 1512643 - DNA, 15 bp, Homo sapiens
tgagtcctgcacagg

SEQ ID NO: 1512644 - DNA, 15 bp, Homo sapiens
ttgagtcctgcacag

SEQ ID NO: 1512645 - DNA, 15 bp, Homo sapiens
cttgagtcctgcaca

SEQ ID NO: 1512646 - DNA, 15 bp, Homo sapiens
gcttgagtcctgcac

SEQ ID NO: 1512647 - DNA, 15 bp, Homo sapiens
cgcttgagtcctgca

SEQ ID NO: 1512648 - DNA, 15 bp, Homo sapiens
tcgcttgagtcctgc

SEQ ID NO: 1512649 - DNA, 15 bp, Homo sapiens
atcgcttgagtcctg

SEQ ID NO: 1512650 - DNA, 15 bp, Homo sapiens
aatcgcttgagtcct

SEQ ID NO: 1512651 - DNA, 15 bp, Homo sapiens
gaatcgcttgagtcc

SEQ ID NO: 1512652 - DNA, 15 bp, Homo sapiens
agaatcgcttgagtc

SEQ ID NO: 1512653 - DNA, 15 bp, Homo sapiens
gagaatcgcttgagt

SEQ ID NO: 1512654 - DNA, 15 bp, Homo sapiens
atgggagaatcgctt

SEQ ID NO: 1512655 - DNA, 15 bp, Homo sapiens
gatgggagaatcgct

SEQ ID NO: 1512656 - DNA, 15 bp, Homo sapiens
agatgggagaatcgc

SEQ ID NO: 1512657 - DNA, 15 bp, Homo sapiens
gagatgggagaatcg

SEQ ID NO: 1512658 - DNA, 15 bp, Homo sapiens
tgagatgggagaatc

SEQ ID NO: 1512659 - DNA, 15 bp, Homo sapiens
ctgagatgggagaat

SEQ ID NO: 1512660 - DNA, 15 bp, Homo sapiens
gctgagatgggagaa

SEQ ID NO: 1512661 - DNA, 15 bp, Homo sapiens
ggctgagatgggaga

SEQ ID NO: 1512662 - DNA, 15 bp, Homo sapiens
tgcatggtggtgcat

SEQ ID NO: 1512663 - DNA, 15 bp, Homo sapiens
ttgcatggtggtgca

SEQ ID NO: 1512664 - DNA, 15 bp, Homo sapiens
tttgcatggtggtgc

SEQ ID NO: 1512665 - DNA, 15 bp, Homo sapiens
ttttgcatggtggtg

SEQ ID NO: 1512666 - DNA, 15 bp, Homo sapiens
attttgcatggtggt

SEQ ID NO: 1512667 - DNA, 15 bp, Homo sapiens
tattttgcatggtgg

SEQ ID NO: 1512668 - DNA, 15 bp, Homo sapiens
gtattttgcatggtg

SEQ ID NO: 1512669 - DNA, 15 bp, Homo sapiens
tgtattttgcatggt

SEQ ID NO: 1512670 - DNA, 15 bp, Homo sapiens
ttgtattttgcatgg

SEQ ID NO: 1512671 - DNA, 15 bp, Homo sapiens
tttgtattttgcatg

SEQ ID NO: 1512672 - DNA, 15 bp, Homo sapiens
ttttgtattttgcat

SEQ ID NO: 1512673 - DNA, 15 bp, Homo sapiens
attttgtattttgca

SEQ ID NO: 1512674 - DNA, 15 bp, Homo sapiens
aattttgtattttgc

SEQ ID NO: 1512675 - DNA, 15 bp, Homo sapiens
aaattttgtattttg

SEQ ID NO: 1512676 - DNA, 15 bp, Homo sapiens
aaaattttgtatttt

SEQ ID NO: 1512677 - DNA, 15 bp, Homo sapiens
aaaaattttgtattt

SEQ ID NO: 1512678 - DNA, 15 bp, Homo sapiens
caaaaattttgtatt

SEQ ID NO: 1512679 - DNA, 15 bp, Homo sapiens
acaaaaattttgtat

SEQ ID NO: 1512680 - DNA, 15 bp, Homo sapiens
tacaaaaattttgta

SEQ ID NO: 1512681 - DNA, 15 bp, Homo sapiens
atacaaaaattttgt

SEQ ID NO: 1512682 - DNA, 15 bp, Homo sapiens
aatacaaaaattttg

SEQ ID NO: 1512683 - DNA, 15 bp, Homo sapiens
aaatacaaaaatttt

SEQ ID NO: 1512684 - DNA, 15 bp, Homo sapiens
caaaatacaaaaatt

SEQ ID NO: 1512685 - DNA, 15 bp, Homo sapiens
ccaaaatacaaaaat

SEQ ID NO: 1512686 - DNA, 15 bp, Homo sapiens
accaaaatacaaaaa

SEQ ID NO: 1512687 - DNA, 15 bp, Homo sapiens
taccaaaatacaaaa

SEQ ID NO: 1512688 - DNA, 15 bp, Homo sapiens
ctaccaaaatacaaa

SEQ ID NO: 1512689 - DNA, 15 bp, Homo sapiens
tctaccaaaatacaa

SEQ ID NO: 1512690 - DNA, 15 bp, Homo sapiens
ctctaccaaaataca

SEQ ID NO: 1512691 - DNA, 15 bp, Homo sapiens
tctctaccaaaatac

SEQ ID NO: 1512692 - DNA, 15 bp, Homo sapiens
gtctctaccaaaata

SEQ ID NO: 1512693 - DNA, 15 bp, Homo sapiens
cgtctctaccaaaat

SEQ ID NO: 1512694 - DNA, 15 bp, Homo sapiens
tcgtctctaccaaaa

SEQ ID NO: 1512695 - DNA, 15 bp, Homo sapiens
ctcgtctctaccaaa

SEQ ID NO: 1512696 - DNA, 15 bp, Homo sapiens
cctcgtctctaccaa

SEQ ID NO: 1512697 - DNA, 15 bp, Homo sapiens
acctcgtctctacca

SEQ ID NO: 1512698 - DNA, 15 bp, Homo sapiens
aacctcgtctctacc

SEQ ID NO: 1512699 - DNA, 15 bp, Homo sapiens
aaaacctcgtctcta

SEQ ID NO: 1512700 - DNA, 15 bp, Homo sapiens
caaaacctcgtctct

SEQ ID NO: 1512701 - DNA, 15 bp, Homo sapiens
gcaaaacctcgtctc

SEQ ID NO: 1512702 - DNA, 15 bp, Homo sapiens
ggcaaaacctcgtct

SEQ ID NO: 1512703 - DNA, 15 bp, Homo sapiens
aggcaaaacctcgtc

SEQ ID NO: 1512704 - DNA, 15 bp, Homo sapiens
aaggcaaaacctcgt

SEQ ID NO: 1512705 - DNA, 15 bp, Homo sapiens
caaggcaaaacctcg

SEQ ID NO: 1512706 - DNA, 15 bp, Homo sapiens
acaaggcaaaacctc

SEQ ID NO: 1512707 - DNA, 15 bp, Homo sapiens
aacaaggcaaaacct

SEQ ID NO: 1512708 - DNA, 15 bp, Homo sapiens
caacaaggcaaaacc

SEQ ID NO: 1512709 - DNA, 15 bp, Homo sapiens
gcaacaaggcaaaac

SEQ ID NO: 1512710 - DNA, 15 bp, Homo sapiens
ggcaacaaggcaaaa

SEQ ID NO: 1512711 - DNA, 15 bp, Homo sapiens
gggcaacaaggcaaa

SEQ ID NO: 1512712 - DNA, 15 bp, Homo sapiens
tgggcaacaaggcaa

SEQ ID NO: 1512713 - DNA, 15 bp, Homo sapiens
ctgggcaacaaggca

SEQ ID NO: 1512714 - DNA, 15 bp, Homo sapiens
cctgggcaacaaggc

SEQ ID NO: 1512715 - DNA, 15 bp, Homo sapiens
ctaggagtttgagac

SEQ ID NO: 1512716 - DNA, 15 bp, Homo sapiens
tctaggagtttgaga

SEQ ID NO: 1512717 - DNA, 15 bp, Homo sapiens
gtctaggagtttgag

SEQ ID NO: 1512718 - DNA, 15 bp, Homo sapiens
agtctaggagtttga

SEQ ID NO: 1512719 - DNA, 15 bp, Homo sapiens
tagtctaggagtttg

SEQ ID NO: 1512720 - DNA, 15 bp, Homo sapiens
ttagtctaggagttt

SEQ ID NO: 1512721 - DNA, 15 bp, Homo sapiens
tttagtctaggagtt

SEQ ID NO: 1512722 - DNA, 15 bp, Homo sapiens
ctttagtctaggagt

SEQ ID NO: 1512723 - DNA, 15 bp, Homo sapiens
tctttagtctaggag

SEQ ID NO: 1512724 - DNA, 15 bp, Homo sapiens
ctctttagtctagga

SEQ ID NO: 1512725 - DNA, 15 bp, Homo sapiens
tctctttagtctagg

SEQ ID NO: 1512726 - DNA, 15 bp, Homo sapiens
atctctttagtctag

SEQ ID NO: 1512727 - DNA, 15 bp, Homo sapiens
gatctctttagtcta

SEQ ID NO: 1512728 - DNA, 15 bp, Homo sapiens
ggatctctttagtct

SEQ ID NO: 1512729 - DNA, 15 bp, Homo sapiens
tggatctctttagtc

SEQ ID NO: 1512730 - DNA, 15 bp, Homo sapiens
gtggatctctttagt

SEQ ID NO: 1512731 - DNA, 15 bp, Homo sapiens
tgtggatctctttag

SEQ ID NO: 1512732 - DNA, 15 bp, Homo sapiens
atgtggatctcttta

SEQ ID NO: 1512733 - DNA, 15 bp, Homo sapiens
catgtggatctcttt

SEQ ID NO: 1512734 - DNA, 15 bp, Homo sapiens
gcatgtggatctctt

SEQ ID NO: 1512735 - DNA, 15 bp, Homo sapiens
agcatgtggatctct

SEQ ID NO: 1512736 - DNA, 15 bp, Homo sapiens
cagcatgtggatctc

SEQ ID NO: 1512737 - DNA, 15 bp, Homo sapiens
acagcatgtggatct

SEQ ID NO: 1512738 - DNA, 15 bp, Homo sapiens
cacagcatgtggatc

SEQ ID NO: 1512739 - DNA, 15 bp, Homo sapiens
ccacagcatgtggat

SEQ ID NO: 1512740 - DNA, 15 bp, Homo sapiens
gccacagcatgtgga

SEQ ID NO: 1512741 - DNA, 15 bp, Homo sapiens
ggccacagcatgtgg

SEQ ID NO: 1512742 - DNA, 15 bp, Homo sapiens
aggccacagcatgtg

SEQ ID NO: 1512743 - DNA, 15 bp, Homo sapiens
gaggccacagcatgt

SEQ ID NO: 1512744 - DNA, 15 bp, Homo sapiens
ggaggccacagcatg

SEQ ID NO: 1512745 - DNA, 15 bp, Homo sapiens
gggaggccacagcat

SEQ ID NO: 1512746 - DNA, 15 bp, Homo sapiens
tgggaggccacagca

SEQ ID NO: 1512747 - DNA, 15 bp, Homo sapiens
ttgggaggccacagc

SEQ ID NO: 1512748 - DNA, 15 bp, Homo sapiens
tttgggaggccacag

SEQ ID NO: 1512749 - DNA, 15 bp, Homo sapiens
ctttgggaggccaca

SEQ ID NO: 1512750 - DNA, 15 bp, Homo sapiens
actttgggaggccac

SEQ ID NO: 1512751 - DNA, 15 bp, Homo sapiens
ctcacatctgtaatc

SEQ ID NO: 1512752 - DNA, 15 bp, Homo sapiens
gctcacatctgtaat

SEQ ID NO: 1512753 - DNA, 15 bp, Homo sapiens
ggtggctcacatctg

SEQ ID NO: 1512754 - DNA, 15 bp, Homo sapiens
tggtggctcacatct

SEQ ID NO: 1512755 - DNA, 15 bp, Homo sapiens
gtggtggctcacatc

SEQ ID NO: 1512756 - DNA, 15 bp, Homo sapiens
cgtggtggctcacat

SEQ ID NO: 1512757 - DNA, 15 bp, Homo sapiens
gcgtggtggctcaca

SEQ ID NO: 1512758 - DNA, 15 bp, Homo sapiens
aggcgtggtggctca

SEQ ID NO: 1512759 - DNA, 15 bp, Homo sapiens
caggcgtggtggctc

SEQ ID NO: 1512760 - DNA, 15 bp, Homo sapiens
ccaggcgtggtggct

SEQ ID NO: 1512761 - DNA, 15 bp, Homo sapiens
ggccaggcgtggtgg

SEQ ID NO: 1512762 - DNA, 15 bp, Homo sapiens
tggccaggcgtggtg

SEQ ID NO: 1512763 - DNA, 15 bp, Homo sapiens
ttggccaggcgtggt

SEQ ID NO: 1512764 - DNA, 15 bp, Homo sapiens
tttggccaggcgtgg

SEQ ID NO: 1512765 - DNA, 15 bp, Homo sapiens
ctttggccaggcgtg

SEQ ID NO: 1512766 - DNA, 15 bp, Homo sapiens
gctttggccaggcgt

SEQ ID NO: 1512767 - DNA, 15 bp, Homo sapiens
tgctttggccaggcg

SEQ ID NO: 1512768 - DNA, 15 bp, Homo sapiens
ttgctttggccaggc

SEQ ID NO: 1512769 - DNA, 15 bp, Homo sapiens
attgctttggccagg

SEQ ID NO: 1512770 - DNA, 15 bp, Homo sapiens
cattgctttggccag

SEQ ID NO: 1512771 - DNA, 15 bp, Homo sapiens
acattgctttggcca

SEQ ID NO: 1512772 - DNA, 15 bp, Homo sapiens
aacattgctttggcc

SEQ ID NO: 1512773 - DNA, 15 bp, Homo sapiens
aaacattgctttggc

SEQ ID NO: 1512774 - DNA, 15 bp, Homo sapiens
aaaacattgctttgg

SEQ ID NO: 1512775 - DNA, 15 bp, Homo sapiens
caaaacattgctttg

SEQ ID NO: 1512776 - DNA, 15 bp, Homo sapiens
acaaaacattgcttt

SEQ ID NO: 1512777 - DNA, 15 bp, Homo sapiens
tacaaaacattgctt

SEQ ID NO: 1512778 - DNA, 15 bp, Homo sapiens
ttacaaaacattgct

SEQ ID NO: 1512779 - DNA, 15 bp, Homo sapiens
tttacaaaacattgc

SEQ ID NO: 1512780 - DNA, 15 bp, Homo sapiens
ctttacaaaacattg

SEQ ID NO: 1512781 - DNA, 15 bp, Homo sapiens
gctttacaaaacatt

SEQ ID NO: 1512782 - DNA, 15 bp, Homo sapiens
ggctttacaaaacat

SEQ ID NO: 1512783 - DNA, 15 bp, Homo sapiens
aggctttacaaaaca

SEQ ID NO: 1512784 - DNA, 15 bp, Homo sapiens
aaggctttacaaaac

SEQ ID NO: 1512785 - DNA, 15 bp, Homo sapiens
caaggctttacaaaa

SEQ ID NO: 1512786 - DNA, 15 bp, Homo sapiens
acaaggctttacaaa

SEQ ID NO: 1512787 - DNA, 15 bp, Homo sapiens
tacaaggctttacaa

SEQ ID NO: 1512788 - DNA, 15 bp, Homo sapiens
atacaaggctttaca

SEQ ID NO: 1512789 - DNA, 15 bp, Homo sapiens
aatacaaggctttac

SEQ ID NO: 1512790 - DNA, 15 bp, Homo sapiens
aaatacaaggcttta

SEQ ID NO: 1512791 - DNA, 15 bp, Homo sapiens
aaaatacaaggcttt

SEQ ID NO: 1512792 - DNA, 15 bp, Homo sapiens
gaaaatacaaggctt

SEQ ID NO: 1512793 - DNA, 15 bp, Homo sapiens
agaaaatacaaggct

SEQ ID NO: 1512794 - DNA, 15 bp, Homo sapiens
aagaaaatacaaggc

SEQ ID NO: 1512795 - DNA, 15 bp, Homo sapiens
caagaaaatacaagg

SEQ ID NO: 1512796 - DNA, 15 bp, Homo sapiens
gcaagaaaatacaag

SEQ ID NO: 1512797 - DNA, 15 bp, Homo sapiens
ggcaagaaaatacaa

SEQ ID NO: 1512798 - DNA, 15 bp, Homo sapiens
tggcaagaaaataca

SEQ ID NO: 1512799 - DNA, 15 bp, Homo sapiens
atggcaagaaaatac

SEQ ID NO: 1512800 - DNA, 15 bp, Homo sapiens
aatggcaagaaaata

SEQ ID NO: 1512801 - DNA, 15 bp, Homo sapiens
taatggcaagaaaat

SEQ ID NO: 1512802 - DNA, 15 bp, Homo sapiens
ttaatggcaagaaaa

SEQ ID NO: 1512803 - DNA, 15 bp, Homo sapiens
cttaatggcaagaaa

SEQ ID NO: 1512804 - DNA, 15 bp, Homo sapiens
gcttaatggcaagaa

SEQ ID NO: 1512805 - DNA, 15 bp, Homo sapiens
tgcttaatggcaaga

SEQ ID NO: 1512806 - DNA, 15 bp, Homo sapiens
gtgcttaatggcaag

SEQ ID NO: 1512807 - DNA, 15 bp, Homo sapiens
agtgcttaatggcaa

SEQ ID NO: 1512808 - DNA, 15 bp, Homo sapiens
aagtgcttaatggca

SEQ ID NO: 1512809 - DNA, 15 bp, Homo sapiens
aaagtgcttaatggc

SEQ ID NO: 1512810 - DNA, 15 bp, Homo sapiens
gaaagtgcttaatgg

SEQ ID NO: 1512811 - DNA, 15 bp, Homo sapiens
tgaaagtgcttaatg

SEQ ID NO: 1512812 - DNA, 15 bp, Homo sapiens
ctgaaagtgcttaat

SEQ ID NO: 1512813 - DNA, 15 bp, Homo sapiens
actgaaagtgcttaa

SEQ ID NO: 1512814 - DNA, 15 bp, Homo sapiens
aactgaaagtgctta

SEQ ID NO: 1512815 - DNA, 15 bp, Homo sapiens
aaactgaaagtgctt

SEQ ID NO: 1512816 - DNA, 15 bp, Homo sapiens
aaaactgaaagtgct

SEQ ID NO: 1512817 - DNA, 15 bp, Homo sapiens
aaaaactgaaagtgc

SEQ ID NO: 1512818 - DNA, 15 bp, Homo sapiens
aaaaaactgaaagtg

SEQ ID NO: 1512819 - DNA, 15 bp, Homo sapiens
aaaaaaactgaaagt

SEQ ID NO: 1512820 - DNA, 15 bp, Homo sapiens
gaaaaaaactgaaag

SEQ ID NO: 1512821 - DNA, 15 bp, Homo sapiens
agaaaaaaactgaaa

SEQ ID NO: 1512822 - DNA, 15 bp, Homo sapiens
aagaaaaaaactgaa

SEQ ID NO: 1512823 - DNA, 15 bp, Homo sapiens
caagaaaaaaactga

SEQ ID NO: 1512824 - DNA, 15 bp, Homo sapiens
tcaagaaaaaaactg

SEQ ID NO: 1512825 - DNA, 15 bp, Homo sapiens
gtcaagaaaaaaact

SEQ ID NO: 1512826 - DNA, 15 bp, Homo sapiens
tgtcaagaaaaaaac

SEQ ID NO: 1512827 - DNA, 15 bp, Homo sapiens
ttgtcaagaaaaaaa

SEQ ID NO: 1512828 - DNA, 15 bp, Homo sapiens
gttgtcaagaaaaaa

SEQ ID NO: 1512829 - DNA, 15 bp, Homo sapiens
agttgtcaagaaaaa

SEQ ID NO: 1512830 - DNA, 15 bp, Homo sapiens
aagttgtcaagaaaa

SEQ ID NO: 1512831 - DNA, 15 bp, Homo sapiens
agaagttgtcaagaa

SEQ ID NO: 1512832 - DNA, 15 bp, Homo sapiens
gagaagttgtcaaga

SEQ ID NO: 1512833 - DNA, 15 bp, Homo sapiens
tgagaagttgtcaag

SEQ ID NO: 1512834 - DNA, 15 bp, Homo sapiens
atgagaagttgtcaa

SEQ ID NO: 1512835 - DNA, 15 bp, Homo sapiens
catgagaagttgtca

SEQ ID NO: 1512836 - DNA, 15 bp, Homo sapiens
acatgagaagttgtc

SEQ ID NO: 1512837 - DNA, 15 bp, Homo sapiens
gacatgagaagttgt

SEQ ID NO: 1512838 - DNA, 15 bp, Homo sapiens
agacatgagaagttg

SEQ ID NO: 1512839 - DNA, 15 bp, Homo sapiens
tagacatgagaagtt

SEQ ID NO: 1512840 - DNA, 15 bp, Homo sapiens
gtagacatgagaagt

SEQ ID NO: 1512841 - DNA, 15 bp, Homo sapiens
agtagacatgagaag

SEQ ID NO: 1512842 - DNA, 15 bp, Homo sapiens
aagtagacatgagaa

SEQ ID NO: 1512843 - DNA, 15 bp, Homo sapiens
aaagtagacatgaga

SEQ ID NO: 1512844 - DNA, 15 bp, Homo sapiens
aaaagtagacatgag

SEQ ID NO: 1512845 - DNA, 15 bp, Homo sapiens
aaaaagtagacatga

SEQ ID NO: 1512846 - DNA, 15 bp, Homo sapiens
aaaaaagtagacatg

SEQ ID NO: 1512847 - DNA, 15 bp, Homo sapiens
aaaaaaagtagacat

SEQ ID NO: 1512848 - DNA, 15 bp, Homo sapiens
aaaaaaaagtagaca

SEQ ID NO: 1512849 - DNA, 15 bp, Homo sapiens
aaaaaaaaagtagac

SEQ ID NO: 1512850 - DNA, 15 bp, Homo sapiens
aaaaaaaaaagtaga

SEQ ID NO: 1512851 - DNA, 15 bp, Homo sapiens
attgcaaaaaaaaaa

SEQ ID NO: 1512852 - DNA, 15 bp, Homo sapiens
aattgcaaaaaaaaa

SEQ ID NO: 1512853 - DNA, 15 bp, Homo sapiens
aaattgcaaaaaaaa

SEQ ID NO: 1512854 - DNA, 15 bp, Homo sapiens
aaaattgcaaaaaaa

SEQ ID NO: 1512855 - DNA, 15 bp, Homo sapiens
gaaaattgcaaaaaa

SEQ ID NO: 1512856 - DNA, 15 bp, Homo sapiens
tgaaaattgcaaaaa

SEQ ID NO: 1512857 - DNA, 15 bp, Homo sapiens
ttgaaaattgcaaaa

SEQ ID NO: 1512858 - DNA, 15 bp, Homo sapiens
cttgaaaattgcaaa

SEQ ID NO: 1512859 - DNA, 15 bp, Homo sapiens
acttgaaaattgcaa

SEQ ID NO: 1512860 - DNA, 15 bp, Homo sapiens
cacttgaaaattgca

SEQ ID NO: 1512861 - DNA, 15 bp, Homo sapiens
acacttgaaaattgc

SEQ ID NO: 1512862 - DNA, 15 bp, Homo sapiens
tacacttgaaaattg

SEQ ID NO: 1512863 - DNA, 15 bp, Homo sapiens
gtacacttgaaaatt

SEQ ID NO: 1512864 - DNA, 15 bp, Homo sapiens
tgtacacttgaaaat

SEQ ID NO: 1512865 - DNA, 15 bp, Homo sapiens
atgtacacttgaaaa

SEQ ID NO: 1512866 - DNA, 15 bp, Homo sapiens
tatgtacacttgaaa

SEQ ID NO: 1512867 - DNA, 15 bp, Homo sapiens
ttatgtacacttgaa

SEQ ID NO: 1512868 - DNA, 15 bp, Homo sapiens
attatgtacacttga

SEQ ID NO: 1512869 - DNA, 15 bp, Homo sapiens
tattatgtacacttg

SEQ ID NO: 1512870 - DNA, 15 bp, Homo sapiens
gtattatgtacactt

SEQ ID NO: 1512871 - DNA, 15 bp, Homo sapiens
tgtattatgtacact

SEQ ID NO: 1512872 - DNA, 15 bp, Homo sapiens
atgtattatgtacac

SEQ ID NO: 1512873 - DNA, 15 bp, Homo sapiens
aatgtattatgtaca

SEQ ID NO: 1512874 - DNA, 15 bp, Homo sapiens
taatgtattatgtac

SEQ ID NO: 1512875 - DNA, 15 bp, Homo sapiens
ataatgtattatgta

SEQ ID NO: 1512876 - DNA, 15 bp, Homo sapiens
aataatgtattatgt

SEQ ID NO: 1512877 - DNA, 15 bp, Homo sapiens
taataatgtattatg

SEQ ID NO: 1512878 - DNA, 15 bp, Homo sapiens
gtaataatgtattat

SEQ ID NO: 1512879 - DNA, 15 bp, Homo sapiens
cgtaataatgtatta

SEQ ID NO: 1512880 - DNA, 15 bp, Homo sapiens
ccgtaataatgtatt

SEQ ID NO: 1512881 - DNA, 15 bp, Homo sapiens
tccgtaataatgtat

SEQ ID NO: 1512882 - DNA, 15 bp, Homo sapiens
atccgtaataatgta

SEQ ID NO: 1512883 - DNA, 15 bp, Homo sapiens
aatccgtaataatgt

SEQ ID NO: 1512884 - DNA, 15 bp, Homo sapiens
aaatccgtaataatg

SEQ ID NO: 1512885 - DNA, 15 bp, Homo sapiens
aaaatccgtaataat

SEQ ID NO: 1512886 - DNA, 15 bp, Homo sapiens
taaaatccgtaataa

SEQ ID NO: 1512887 - DNA, 15 bp, Homo sapiens
ataaaatccgtaata

SEQ ID NO: 1512888 - DNA, 15 bp, Homo sapiens
cataaaatccgtaat

SEQ ID NO: 1512889 - DNA, 15 bp, Homo sapiens
acataaaatccgtaa

SEQ ID NO: 1512890 - DNA, 15 bp, Homo sapiens
aacataaaatccgta

SEQ ID NO: 1512891 - DNA, 15 bp, Homo sapiens
taacataaaatccgt

SEQ ID NO: 1512892 - DNA, 15 bp, Homo sapiens
ttaacataaaatccg

SEQ ID NO: 1512893 - DNA, 15 bp, Homo sapiens
attaacataaaatcc

SEQ ID NO: 1512894 - DNA, 15 bp, Homo sapiens
aattaacataaaatc

SEQ ID NO: 1512895 - DNA, 15 bp, Homo sapiens
aaattaacataaaat

SEQ ID NO: 1512896 - DNA, 15 bp, Homo sapiens
aaaattaacataaaa

SEQ ID NO: 1512897 - DNA, 15 bp, Homo sapiens
caaaattaacataaa

SEQ ID NO: 1512898 - DNA, 15 bp, Homo sapiens
acaaaattaacataa

SEQ ID NO: 1512899 - DNA, 15 bp, Homo sapiens
cacaaaattaacata

SEQ ID NO: 1512900 - DNA, 15 bp, Homo sapiens
gcacaaaattaacat

SEQ ID NO: 1512901 - DNA, 15 bp, Homo sapiens
ggcacaaaattaaca

SEQ ID NO: 1512902 - DNA, 15 bp, Homo sapiens
gggcacaaaattaac

SEQ ID NO: 1512903 - DNA, 15 bp, Homo sapiens
agggcacaaaattaa

SEQ ID NO: 1512904 - DNA, 15 bp, Homo sapiens
tagggcacaaaatta

SEQ ID NO: 1512905 - DNA, 15 bp, Homo sapiens
gtagggcacaaaatt

SEQ ID NO: 1512906 - DNA, 15 bp, Homo sapiens
tgtagggcacaaaat

SEQ ID NO: 1512907 - DNA, 15 bp, Homo sapiens
ttgtagggcacaaaa

SEQ ID NO: 1512908 - DNA, 15 bp, Homo sapiens
attgtagggcacaaa

SEQ ID NO: 1512909 - DNA, 15 bp, Homo sapiens
aattgtagggcacaa

SEQ ID NO: 1512910 - DNA, 15 bp, Homo sapiens
aaattgtagggcaca

SEQ ID NO: 1512911 - DNA, 15 bp, Homo sapiens
aaaattgtagggcac

SEQ ID NO: 1512912 - DNA, 15 bp, Homo sapiens
taaaattgtagggca

SEQ ID NO: 1512913 - DNA, 15 bp, Homo sapiens
gtaaaattgtagggc

SEQ ID NO: 1512914 - DNA, 15 bp, Homo sapiens
agtaaaattgtaggg

SEQ ID NO: 1512915 - DNA, 15 bp, Homo sapiens
cagtaaaattgtagg

SEQ ID NO: 1512916 - DNA, 15 bp, Homo sapiens
tcagtaaaattgtag

SEQ ID NO: 1512917 - DNA, 15 bp, Homo sapiens
ttcagtaaaattgta

SEQ ID NO: 1512918 - DNA, 15 bp, Homo sapiens
attcagtaaaattgt

SEQ ID NO: 1512919 - DNA, 15 bp, Homo sapiens
gattcagtaaaattg

SEQ ID NO: 1512920 - DNA, 15 bp, Homo sapiens
agattcagtaaaatt

SEQ ID NO: 1512921 - DNA, 15 bp, Homo sapiens
aagattcagtaaaat

SEQ ID NO: 1512922 - DNA, 15 bp, Homo sapiens
taagattcagtaaaa

SEQ ID NO: 1512923 - DNA, 15 bp, Homo sapiens
ataagattcagtaaa

SEQ ID NO: 1512924 - DNA, 15 bp, Homo sapiens
aataagattcagtaa

SEQ ID NO: 1512925 - DNA, 15 bp, Homo sapiens
taataagattcagta

SEQ ID NO: 1512926 - DNA, 15 bp, Homo sapiens
ataataagattcagt

SEQ ID NO: 1512927 - DNA, 15 bp, Homo sapiens
aataataagattcag

SEQ ID NO: 1512928 - DNA, 15 bp, Homo sapiens
taataataagattca

SEQ ID NO: 1512929 - DNA, 15 bp, Homo sapiens
ttaataataagattc

SEQ ID NO: 1512930 - DNA, 15 bp, Homo sapiens
cttaataataagatt

SEQ ID NO: 1512931 - DNA, 15 bp, Homo sapiens
gcttaataataagat

SEQ ID NO: 1512932 - DNA, 15 bp, Homo sapiens
tgcttaataataaga

SEQ ID NO: 1512933 - DNA, 15 bp, Homo sapiens
ttgcttaataataag

SEQ ID NO: 1512934 - DNA, 15 bp, Homo sapiens
attgcttaataataa

SEQ ID NO: 1512935 - DNA, 15 bp, Homo sapiens
aattgcttaataata

SEQ ID NO: 1512936 - DNA, 15 bp, Homo sapiens
aaattgcttaataat

SEQ ID NO: 1512937 - DNA, 15 bp, Homo sapiens
aaaattgcttaataa

SEQ ID NO: 1512938 - DNA, 15 bp, Homo sapiens
taaaattgcttaata

SEQ ID NO: 1512939 - DNA, 15 bp, Homo sapiens
gtaaaattgcttaat

SEQ ID NO: 1512940 - DNA, 15 bp, Homo sapiens
agtaaaattgcttaa

SEQ ID NO: 1512941 - DNA, 15 bp, Homo sapiens
aagtaaaattgctta

SEQ ID NO: 1512942 - DNA, 15 bp, Homo sapiens
aaagtaaaattgctt

SEQ ID NO: 1512943 - DNA, 15 bp, Homo sapiens
gaaagtaaaattgct

SEQ ID NO: 1512944 - DNA, 15 bp, Homo sapiens
agaaagtaaaattgc

SEQ ID NO: 1512945 - DNA, 15 bp, Homo sapiens
tagaaagtaaaattg

SEQ ID NO: 1512946 - DNA, 15 bp, Homo sapiens
ttagaaagtaaaatt

SEQ ID NO: 1512947 - DNA, 15 bp, Homo sapiens
tttagaaagtaaaat

SEQ ID NO: 1512948 - DNA, 15 bp, Homo sapiens
ctttagaaagtaaaa

SEQ ID NO: 1512949 - DNA, 15 bp, Homo sapiens
cctttagaaagtaaa

SEQ ID NO: 1512950 - DNA, 15 bp, Homo sapiens
acctttagaaagtaa

SEQ ID NO: 1512951 - DNA, 15 bp, Homo sapiens
aacctttagaaagta

SEQ ID NO: 1512952 - DNA, 15 bp, Homo sapiens
taacctttagaaagt

SEQ ID NO: 1512953 - DNA, 15 bp, Homo sapiens
ttaacctttagaaag

SEQ ID NO: 1512954 - DNA, 15 bp, Homo sapiens
tttaacctttagaaa

SEQ ID NO: 1512955 - DNA, 15 bp, Homo sapiens
ctttaacctttagaa

SEQ ID NO: 1512956 - DNA, 15 bp, Homo sapiens
tctttaacctttaga

SEQ ID NO: 1512957 - DNA, 15 bp, Homo sapiens
ttctttaacctttag

SEQ ID NO: 1512958 - DNA, 15 bp, Homo sapiens
attctttaaccttta

SEQ ID NO: 1512959 - DNA, 15 bp, Homo sapiens
aattctttaaccttt

SEQ ID NO: 1512960 - DNA, 15 bp, Homo sapiens
taattctttaacctt

SEQ ID NO: 1512961 - DNA, 15 bp, Homo sapiens
gtaattctttaacct

SEQ ID NO: 1512962 - DNA, 15 bp, Homo sapiens
agtaattctttaacc

SEQ ID NO: 1512963 - DNA, 15 bp, Homo sapiens
aagtaattctttaac

SEQ ID NO: 1512964 - DNA, 15 bp, Homo sapiens
taagtaattctttaa

SEQ ID NO: 1512965 - DNA, 15 bp, Homo sapiens
ctaagtaattcttta

SEQ ID NO: 1512966 - DNA, 15 bp, Homo sapiens
tctaagtaattcttt

SEQ ID NO: 1512967 - DNA, 15 bp, Homo sapiens
ctctaagtaattctt

SEQ ID NO: 1512968 - DNA, 15 bp, Homo sapiens
tctctaagtaattct

SEQ ID NO: 1512969 - DNA, 15 bp, Homo sapiens
ctctctaagtaattc

SEQ ID NO: 1512970 - DNA, 15 bp, Homo sapiens
actctctaagtaatt

SEQ ID NO: 1512971 - DNA, 15 bp, Homo sapiens
cactctctaagtaat

SEQ ID NO: 1512972 - DNA, 15 bp, Homo sapiens
tcactctctaagtaa

SEQ ID NO: 1512973 - DNA, 15 bp, Homo sapiens
ttcactctctaagta

SEQ ID NO: 1512974 - DNA, 15 bp, Homo sapiens
gttcactctctaagt

SEQ ID NO: 1512975 - DNA, 15 bp, Homo sapiens
ggttcactctctaag

SEQ ID NO: 1512976 - DNA, 15 bp, Homo sapiens
tggttcactctctaa

SEQ ID NO: 1512977 - DNA, 15 bp, Homo sapiens
ctggttcactctcta

SEQ ID NO: 1512978 - DNA, 15 bp, Homo sapiens
gctggttcactctct

SEQ ID NO: 1512979 - DNA, 15 bp, Homo sapiens
agctggttcactctc

SEQ ID NO: 1512980 - DNA, 15 bp, Homo sapiens
cagctggttcactct

SEQ ID NO: 1512981 - DNA, 15 bp, Homo sapiens
gcagctggttcactc

SEQ ID NO: 1512982 - DNA, 15 bp, Homo sapiens
agcagctggttcact

SEQ ID NO: 1512983 - DNA, 15 bp, Homo sapiens
aagcagctggttcac

SEQ ID NO: 1512984 - DNA, 15 bp, Homo sapiens
gaagcagctggttca

SEQ ID NO: 1512985 - DNA, 15 bp, Homo sapiens
tgaagcagctggttc

SEQ ID NO: 1512986 - DNA, 15 bp, Homo sapiens
ttgaagcagctggtt

SEQ ID NO: 1512987 - DNA, 15 bp, Homo sapiens
tttgaagcagctggt

SEQ ID NO: 1512988 - DNA, 15 bp, Homo sapiens
atttgaagcagctgg

SEQ ID NO: 1512989 - DNA, 15 bp, Homo sapiens
tatttgaagcagctg

SEQ ID NO: 1512990 - DNA, 15 bp, Homo sapiens
ttatttgaagcagct

SEQ ID NO: 1512991 - DNA, 15 bp, Homo sapiens
cttatttgaagcagc

SEQ ID NO: 1512992 - DNA, 15 bp, Homo sapiens
acttatttgaagcag

SEQ ID NO: 1512993 - DNA, 15 bp, Homo sapiens
aacttatttgaagca

SEQ ID NO: 1512994 - DNA, 15 bp, Homo sapiens
aaacttatttgaagc

SEQ ID NO: 1512995 - DNA, 15 bp, Homo sapiens
taaacttatttgaag

SEQ ID NO: 1512996 - DNA, 15 bp, Homo sapiens
gtaaacttatttgaa

SEQ ID NO: 1512997 - DNA, 15 bp, Homo sapiens
agtaaacttatttga

SEQ ID NO: 1512998 - DNA, 15 bp, Homo sapiens
tagtaaacttatttg

SEQ ID NO: 1512999 - DNA, 15 bp, Homo sapiens
atagtaaacttattt

SEQ ID NO: 1513000 - DNA, 15 bp, Homo sapiens
tatagtaaacttatt

SEQ ID NO: 1513001 - DNA, 15 bp, Homo sapiens
gtatagtaaacttat

SEQ ID NO: 1513002 - DNA, 15 bp, Homo sapiens
tgtatagtaaactta

SEQ ID NO: 1513003 - DNA, 15 bp, Homo sapiens
ttgtatagtaaactt

SEQ ID NO: 1513004 - DNA, 15 bp, Homo sapiens
tttgtatagtaaact

SEQ ID NO: 1513005 - DNA, 15 bp, Homo sapiens
ctttgtatagtaaac

SEQ ID NO: 1513006 - DNA, 15 bp, Homo sapiens
actttgtatagtaaa

SEQ ID NO: 1513007 - DNA, 15 bp, Homo sapiens
cactttgtatagtaa

SEQ ID NO: 1513008 - DNA, 15 bp, Homo sapiens
gcactttgtatagta

SEQ ID NO: 1513009 - DNA, 15 bp, Homo sapiens
agcactttgtatagt

SEQ ID NO: 1513010 - DNA, 15 bp, Homo sapiens
cagcactttgtatag

SEQ ID NO: 1513011 - DNA, 15 bp, Homo sapiens
acagcactttgtata

SEQ ID NO: 1513012 - DNA, 15 bp, Homo sapiens
cacagcactttgtat

SEQ ID NO: 1513013 - DNA, 15 bp, Homo sapiens
ccacagcactttgta

SEQ ID NO: 1513014 - DNA, 15 bp, Homo sapiens
accacagcactttgt

SEQ ID NO: 1513015 - DNA, 15 bp, Homo sapiens
gaccacagcactttg

SEQ ID NO: 1513016 - DNA, 15 bp, Homo sapiens
ggaccacagcacttt

SEQ ID NO: 1513017 - DNA, 15 bp, Homo sapiens
tggaccacagcactt

SEQ ID NO: 1513018 - DNA, 15 bp, Homo sapiens
ctggaccacagcact

SEQ ID NO: 1513019 - DNA, 15 bp, Homo sapiens
tctggaccacagcac

SEQ ID NO: 1513020 - DNA, 15 bp, Homo sapiens
atctggaccacagca

SEQ ID NO: 1513021 - DNA, 15 bp, Homo sapiens
tatctggaccacagc

SEQ ID NO: 1513022 - DNA, 15 bp, Homo sapiens
ttatctggaccacag

SEQ ID NO: 1513023 - DNA, 15 bp, Homo sapiens
cttatctggaccaca

SEQ ID NO: 1513024 - DNA, 15 bp, Homo sapiens
tcttatctggaccac

SEQ ID NO: 1513025 - DNA, 15 bp, Homo sapiens
ctcttatctggacca

SEQ ID NO: 1513026 - DNA, 15 bp, Homo sapiens
tctcttatctggacc

SEQ ID NO: 1513027 - DNA, 15 bp, Homo sapiens
ttctcttatctggac

SEQ ID NO: 1513028 - DNA, 15 bp, Homo sapiens
gttctcttatctgga

SEQ ID NO: 1513029 - DNA, 15 bp, Homo sapiens
agttctcttatctgg

SEQ ID NO: 1513030 - DNA, 15 bp, Homo sapiens
tagttctcttatctg

SEQ ID NO: 1513031 - DNA, 15 bp, Homo sapiens
ctagttctcttatct

SEQ ID NO: 1513032 - DNA, 15 bp, Homo sapiens
tctagttctcttatc

SEQ ID NO: 1513033 - DNA, 15 bp, Homo sapiens
atctagttctcttat

SEQ ID NO: 1513034 - DNA, 15 bp, Homo sapiens
catctagttctctta

SEQ ID NO: 1513035 - DNA, 15 bp, Homo sapiens
ccatctagttctctt

SEQ ID NO: 1513036 - DNA, 15 bp, Homo sapiens
gccatctagttctct

SEQ ID NO: 1513037 - DNA, 15 bp, Homo sapiens
tgccatctagttctc

SEQ ID NO: 1513038 - DNA, 15 bp, Homo sapiens
ttgccatctagttct

SEQ ID NO: 1513039 - DNA, 15 bp, Homo sapiens
tttgccatctagttc

SEQ ID NO: 1513040 - DNA, 15 bp, Homo sapiens
gtttgccatctagtt

SEQ ID NO: 1513041 - DNA, 15 bp, Homo sapiens
tgtttgccatctagt

SEQ ID NO: 1513042 - DNA, 15 bp, Homo sapiens
ttgtttgccatctag

SEQ ID NO: 1513043 - DNA, 15 bp, Homo sapiens
attgtttgccatcta

SEQ ID NO: 1513044 - DNA, 15 bp, Homo sapiens
tattgtttgccatct

SEQ ID NO: 1513045 - DNA, 15 bp, Homo sapiens
atattgtttgccatc

SEQ ID NO: 1513046 - DNA, 15 bp, Homo sapiens
tatattgtttgccat

SEQ ID NO: 1513047 - DNA, 15 bp, Homo sapiens
gtatattgtttgcca

SEQ ID NO: 1513048 - DNA, 15 bp, Homo sapiens
agtatattgtttgcc

SEQ ID NO: 1513049 - DNA, 15 bp, Homo sapiens
gagtatattgtttgc

SEQ ID NO: 1513050 - DNA, 15 bp, Homo sapiens
tgagtatattgtttg

SEQ ID NO: 1513051 - DNA, 15 bp, Homo sapiens
gttcaatgtagtgct

SEQ ID NO: 1513052 - DNA, 15 bp, Homo sapiens
tgttcaatgtagtgc

SEQ ID NO: 1513053 - DNA, 15 bp, Homo sapiens
ttgttcaatgtagtg

SEQ ID NO: 1513054 - DNA, 15 bp, Homo sapiens
cttgttcaatgtagt

SEQ ID NO: 1513055 - DNA, 15 bp, Homo sapiens
tcttgttcaatgtag

SEQ ID NO: 1513056 - DNA, 15 bp, Homo sapiens
atcttgttcaatgta

SEQ ID NO: 1513057 - DNA, 15 bp, Homo sapiens
catcttgttcaatgt

SEQ ID NO: 1513058 - DNA, 15 bp, Homo sapiens
tcatcttgttcaatg

SEQ ID NO: 1513059 - DNA, 15 bp, Homo sapiens
ttcatcttgttcaat

SEQ ID NO: 1513060 - DNA, 15 bp, Homo sapiens
cttcatcttgttcaa

SEQ ID NO: 1513061 - DNA, 15 bp, Homo sapiens
acttcatcttgttca

SEQ ID NO: 1513062 - DNA, 15 bp, Homo sapiens
cacttcatcttgttc

SEQ ID NO: 1513063 - DNA, 15 bp, Homo sapiens
tcacttcatcttgtt

SEQ ID NO: 1513064 - DNA, 15 bp, Homo sapiens
ttcacttcatcttgt

SEQ ID NO: 1513065 - DNA, 15 bp, Homo sapiens
tttcacttcatcttg

SEQ ID NO: 1513066 - DNA, 15 bp, Homo sapiens
atttcacttcatctt

SEQ ID NO: 1513067 - DNA, 15 bp, Homo sapiens
tatttcacttcatct

SEQ ID NO: 1513068 - DNA, 15 bp, Homo sapiens
ttatttcacttcatc

SEQ ID NO: 1513069 - DNA, 15 bp, Homo sapiens
attatttcacttcat

SEQ ID NO: 1513070 - DNA, 15 bp, Homo sapiens
gattatttcacttca

SEQ ID NO: 1513071 - DNA, 15 bp, Homo sapiens
ggattatttcacttc

SEQ ID NO: 1513072 - DNA, 15 bp, Homo sapiens
gggattatttcactt

SEQ ID NO: 1513073 - DNA, 15 bp, Homo sapiens
ggggattatttcact

SEQ ID NO: 1513074 - DNA, 15 bp, Homo sapiens
tggggattatttcac

SEQ ID NO: 1513075 - DNA, 15 bp, Homo sapiens
atggggattatttca

SEQ ID NO: 1513076 - DNA, 15 bp, Homo sapiens
aatggggattatttc

SEQ ID NO: 1513077 - DNA, 15 bp, Homo sapiens
aaatggggattattt

SEQ ID NO: 1513078 - DNA, 15 bp, Homo sapiens
aaaatggggattatt

SEQ ID NO: 1513079 - DNA, 15 bp, Homo sapiens
aaaaatggggattat

SEQ ID NO: 1513080 - DNA, 15 bp, Homo sapiens
aaaaaatggggatta

SEQ ID NO: 1513081 - DNA, 15 bp, Homo sapiens
gaaaaaatggggatt

SEQ ID NO: 1513082 - DNA, 15 bp, Homo sapiens
ggaaaaaatggggat

SEQ ID NO: 1513083 - DNA, 15 bp, Homo sapiens
tggaaaaaatgggga

SEQ ID NO: 1513084 - DNA, 15 bp, Homo sapiens
ctggaaaaaatgggg

SEQ ID NO: 1513085 - DNA, 15 bp, Homo sapiens
tctggaaaaaatggg

SEQ ID NO: 1513086 - DNA, 15 bp, Homo sapiens
ctctggaaaaaatgg

SEQ ID NO: 1513087 - DNA, 15 bp, Homo sapiens
actctggaaaaaatg

SEQ ID NO: 1513088 - DNA, 15 bp, Homo sapiens
aactctggaaaaaat

SEQ ID NO: 1513089 - DNA, 15 bp, Homo sapiens
taactctggaaaaaa

SEQ ID NO: 1513090 - DNA, 15 bp, Homo sapiens
ttaactctggaaaaa

SEQ ID NO: 1513091 - DNA, 15 bp, Homo sapiens
attaactctggaaaa

SEQ ID NO: 1513092 - DNA, 15 bp, Homo sapiens
gattaactctggaaa

SEQ ID NO: 1513093 - DNA, 15 bp, Homo sapiens
agattaactctggaa

SEQ ID NO: 1513094 - DNA, 15 bp, Homo sapiens
cagattaactctgga

SEQ ID NO: 1513095 - DNA, 15 bp, Homo sapiens
ccagattaactctgg

SEQ ID NO: 1513096 - DNA, 15 bp, Homo sapiens
tccagattaactctg

SEQ ID NO: 1513097 - DNA, 15 bp, Homo sapiens
ctccagattaactct

SEQ ID NO: 1513098 - DNA, 15 bp, Homo sapiens
actccagattaactc

SEQ ID NO: 1513099 - DNA, 15 bp, Homo sapiens
gactccagattaact

SEQ ID NO: 1513100 - DNA, 15 bp, Homo sapiens
tgactccagattaac

SEQ ID NO: 1513101 - DNA, 15 bp, Homo sapiens
ctgactccagattaa

SEQ ID NO: 1513102 - DNA, 15 bp, Homo sapiens
gctgactccagatta

SEQ ID NO: 1513103 - DNA, 15 bp, Homo sapiens
ggctgactccagatt

SEQ ID NO: 1513104 - DNA, 15 bp, Homo sapiens
aggctgactccagat

SEQ ID NO: 1513105 - DNA, 15 bp, Homo sapiens
caggctgactccaga

SEQ ID NO: 1513106 - DNA, 15 bp, Homo sapiens
acaggctgactccag

SEQ ID NO: 1513107 - DNA, 15 bp, Homo sapiens
gacaggctgactcca

SEQ ID NO: 1513108 - DNA, 15 bp, Homo sapiens
tgacaggctgactcc

SEQ ID NO: 1513109 - DNA, 15 bp, Homo sapiens
atgacaggctgactc

SEQ ID NO: 1513110 - DNA, 15 bp, Homo sapiens
tatgacaggctgact

SEQ ID NO: 1513111 - DNA, 15 bp, Homo sapiens
ttatgacaggctgac

SEQ ID NO: 1513112 - DNA, 15 bp, Homo sapiens
attatgacaggctga

SEQ ID NO: 1513113 - DNA, 15 bp, Homo sapiens
aattatgacaggctg

SEQ ID NO: 1513114 - DNA, 15 bp, Homo sapiens
aaattatgacaggct

SEQ ID NO: 1513115 - DNA, 15 bp, Homo sapiens
caaattatgacaggc

SEQ ID NO: 1513116 - DNA, 15 bp, Homo sapiens
acaaattatgacagg

SEQ ID NO: 1513117 - DNA, 15 bp, Homo sapiens
cacaaattatgacag

SEQ ID NO: 1513118 - DNA, 15 bp, Homo sapiens
acacaaattatgaca

SEQ ID NO: 1513119 - DNA, 15 bp, Homo sapiens
gacacaaattatgac

SEQ ID NO: 1513120 - DNA, 15 bp, Homo sapiens
tgacacaaattatga

SEQ ID NO: 1513121 - DNA, 15 bp, Homo sapiens
atgacacaaattatg

SEQ ID NO: 1513122 - DNA, 15 bp, Homo sapiens
tatgacacaaattat

SEQ ID NO: 1513123 - DNA, 15 bp, Homo sapiens
ttatgacacaaatta

SEQ ID NO: 1513124 - DNA, 15 bp, Homo sapiens
attatgacacaaatt

SEQ ID NO: 1513125 - DNA, 15 bp, Homo sapiens
aattatgacacaaat

SEQ ID NO: 1513126 - DNA, 15 bp, Homo sapiens
aaattatgacacaaa

SEQ ID NO: 1513127 - DNA, 15 bp, Homo sapiens
gaaattatgacacaa

SEQ ID NO: 1513128 - DNA, 15 bp, Homo sapiens
ggaaattatgacaca

SEQ ID NO: 1513129 - DNA, 15 bp, Homo sapiens
aggaaattatgacac

SEQ ID NO: 1513130 - DNA, 15 bp, Homo sapiens
caggaaattatgaca

SEQ ID NO: 1513131 - DNA, 15 bp, Homo sapiens
acaggaaattatgac

SEQ ID NO: 1513132 - DNA, 15 bp, Homo sapiens
gacaggaaattatga

SEQ ID NO: 1513133 - DNA, 15 bp, Homo sapiens
tgacaggaaattatg

SEQ ID NO: 1513134 - DNA, 15 bp, Homo sapiens
atgacaggaaattat

SEQ ID NO: 1513135 - DNA, 15 bp, Homo sapiens
tatgacaggaaatta

SEQ ID NO: 1513136 - DNA, 15 bp, Homo sapiens
ttatgacaggaaatt

SEQ ID NO: 1513137 - DNA, 15 bp, Homo sapiens
tttatgacaggaaat

SEQ ID NO: 1513138 - DNA, 15 bp, Homo sapiens
atttatgacaggaaa

SEQ ID NO: 1513139 - DNA, 15 bp, Homo sapiens
aatttatgacaggaa

SEQ ID NO: 1513140 - DNA, 15 bp, Homo sapiens
taatttatgacagga

SEQ ID NO: 1513141 - DNA, 15 bp, Homo sapiens
ataatttatgacagg

SEQ ID NO: 1513142 - DNA, 15 bp, Homo sapiens
cataatttatgacag

SEQ ID NO: 1513143 - DNA, 15 bp, Homo sapiens
tcataatttatgaca

SEQ ID NO: 1513144 - DNA, 15 bp, Homo sapiens
gtcataatttatgac

SEQ ID NO: 1513145 - DNA, 15 bp, Homo sapiens
tgtcataatttatga

SEQ ID NO: 1513146 - DNA, 15 bp, Homo sapiens
ctgtcataatttatg

SEQ ID NO: 1513147 - DNA, 15 bp, Homo sapiens
cctgtcataatttat

SEQ ID NO: 1513148 - DNA, 15 bp, Homo sapiens
tcctgtcataattta

SEQ ID NO: 1513149 - DNA, 15 bp, Homo sapiens
ttcctgtcataattt

SEQ ID NO: 1513150 - DNA, 15 bp, Homo sapiens
tttcctgtcataatt

SEQ ID NO: 1513151 - DNA, 15 bp, Homo sapiens
atttcctgtcataat

SEQ ID NO: 1513152 - DNA, 15 bp, Homo sapiens
tatttcctgtcataa

SEQ ID NO: 1513153 - DNA, 15 bp, Homo sapiens
atatttcctgtcata

SEQ ID NO: 1513154 - DNA, 15 bp, Homo sapiens
aatatttcctgtcat

SEQ ID NO: 1513155 - DNA, 15 bp, Homo sapiens
aaatatttcctgtca

SEQ ID NO: 1513156 - DNA, 15 bp, Homo sapiens
taaatatttcctgtc

SEQ ID NO: 1513157 - DNA, 15 bp, Homo sapiens
ataaatatttcctgt

SEQ ID NO: 1513158 - DNA, 15 bp, Homo sapiens
aataaatatttcctg

SEQ ID NO: 1513159 - DNA, 15 bp, Homo sapiens
caataaatatttcct

SEQ ID NO: 1513160 - DNA, 15 bp, Homo sapiens
tcaataaatatttcc

SEQ ID NO: 1513161 - DNA, 15 bp, Homo sapiens
ttcaataaatatttc

SEQ ID NO: 1513162 - DNA, 15 bp, Homo sapiens
cttcaataaatattt

SEQ ID NO: 1513163 - DNA, 15 bp, Homo sapiens
gcttcaataaatatt

SEQ ID NO: 1513164 - DNA, 15 bp, Homo sapiens
tgcttcaataaatat

SEQ ID NO: 1513165 - DNA, 15 bp, Homo sapiens
atgcttcaataaata

SEQ ID NO: 1513166 - DNA, 15 bp, Homo sapiens
aatgcttcaataaat

SEQ ID NO: 1513167 - DNA, 15 bp, Homo sapiens
caatgcttcaataaa

SEQ ID NO: 1513168 - DNA, 15 bp, Homo sapiens
acaatgcttcaataa

SEQ ID NO: 1513169 - DNA, 15 bp, Homo sapiens
cacaatgcttcaata

SEQ ID NO: 1513170 - DNA, 15 bp, Homo sapiens
tcacaatgcttcaat

SEQ ID NO: 1513171 - DNA, 15 bp, Homo sapiens
ttcacaatgcttcaa

SEQ ID NO: 1513172 - DNA, 15 bp, Homo sapiens
tttcacaatgcttca

SEQ ID NO: 1513173 - DNA, 15 bp, Homo sapiens
ttttcacaatgcttc

SEQ ID NO: 1513174 - DNA, 15 bp, Homo sapiens
tttttcacaatgctt

SEQ ID NO: 1513175 - DNA, 15 bp, Homo sapiens
ttttttcacaatgct

SEQ ID NO: 1513176 - DNA, 15 bp, Homo sapiens
tttttttcacaatgc

SEQ ID NO: 1513177 - DNA, 15 bp, Homo sapiens
atttttttcacaatg

SEQ ID NO: 1513178 - DNA, 15 bp, Homo sapiens
tatttttttcacaat

SEQ ID NO: 1513179 - DNA, 15 bp, Homo sapiens
ctatttttttcacaa

SEQ ID NO: 1513180 - DNA, 15 bp, Homo sapiens
gctatttttttcaca

SEQ ID NO: 1513181 - DNA, 15 bp, Homo sapiens
agctatttttttcac

SEQ ID NO: 1513182 - DNA, 15 bp, Homo sapiens
tagctatttttttca

SEQ ID NO: 1513183 - DNA, 15 bp, Homo sapiens
gtagctatttttttc

SEQ ID NO: 1513184 - DNA, 15 bp, Homo sapiens
cgtagctattttttt

SEQ ID NO: 1513185 - DNA, 15 bp, Homo sapiens
acgtagctatttttt

SEQ ID NO: 1513186 - DNA, 15 bp, Homo sapiens
cacgtagctattttt

SEQ ID NO: 1513187 - DNA, 15 bp, Homo sapiens
tcacgtagctatttt

SEQ ID NO: 1513188 - DNA, 15 bp, Homo sapiens
atcacgtagctattt

SEQ ID NO: 1513189 - DNA, 15 bp, Homo sapiens
tatcacgtagctatt

SEQ ID NO: 1513190 - DNA, 15 bp, Homo sapiens
atatcacgtagctat

SEQ ID NO: 1513191 - DNA, 15 bp, Homo sapiens
aatatcacgtagcta

SEQ ID NO: 1513192 - DNA, 15 bp, Homo sapiens
gaatatcacgtagct

SEQ ID NO: 1513193 - DNA, 15 bp, Homo sapiens
ggaatatcacgtagc

SEQ ID NO: 1513194 - DNA, 15 bp, Homo sapiens
cggaatatcacgtag

SEQ ID NO: 1513195 - DNA, 15 bp, Homo sapiens
gcggaatatcacgta

SEQ ID NO: 1513196 - DNA, 15 bp, Homo sapiens
tgcggaatatcacgt

SEQ ID NO: 1513197 - DNA, 15 bp, Homo sapiens
atgcggaatatcacg

SEQ ID NO: 1513198 - DNA, 15 bp, Homo sapiens
catgcggaatatcac

SEQ ID NO: 1513199 - DNA, 15 bp, Homo sapiens
acatgcggaatatca

SEQ ID NO: 1513200 - DNA, 15 bp, Homo sapiens
tacatgcggaatatc

SEQ ID NO: 1513201 - DNA, 15 bp, Homo sapiens
ttacatgcggaatat

SEQ ID NO: 1513202 - DNA, 15 bp, Homo sapiens
tttacatgcggaata

SEQ ID NO: 1513203 - DNA, 15 bp, Homo sapiens
atttacatgcggaat

SEQ ID NO: 1513204 - DNA, 15 bp, Homo sapiens
gatttacatgcggaa

SEQ ID NO: 1513205 - DNA, 15 bp, Homo sapiens
agatttacatgcgga

SEQ ID NO: 1513206 - DNA, 15 bp, Homo sapiens
cagatttacatgcgg

SEQ ID NO: 1513207 - DNA, 15 bp, Homo sapiens
ccagatttacatgcg

SEQ ID NO: 1513208 - DNA, 15 bp, Homo sapiens
cccagatttacatgc

SEQ ID NO: 1513209 - DNA, 15 bp, Homo sapiens
acccagatttacatg

SEQ ID NO: 1513210 - DNA, 15 bp, Homo sapiens
gacccagatttacat

SEQ ID NO: 1513211 - DNA, 15 bp, Homo sapiens
ggacccagatttaca

SEQ ID NO: 1513212 - DNA, 15 bp, Homo sapiens
gggacccagatttac

SEQ ID NO: 1513213 - DNA, 15 bp, Homo sapiens
ggggacccagattta

SEQ ID NO: 1513214 - DNA, 15 bp, Homo sapiens
aggggacccagattt

SEQ ID NO: 1513215 - DNA, 15 bp, Homo sapiens
gaggggacccagatt

SEQ ID NO: 1513216 - DNA, 15 bp, Homo sapiens
ggaggggacccagat

SEQ ID NO: 1513217 - DNA, 15 bp, Homo sapiens
gggaggggacccaga

SEQ ID NO: 1513218 - DNA, 15 bp, Homo sapiens
tgggaggggacccag

SEQ ID NO: 1513219 - DNA, 15 bp, Homo sapiens
gtgggaggggaccca

SEQ ID NO: 1513220 - DNA, 15 bp, Homo sapiens
ggtgggaggggaccc

SEQ ID NO: 1513221 - DNA, 15 bp, Homo sapiens
tggtgggaggggacc

SEQ ID NO: 1513222 - DNA, 15 bp, Homo sapiens
ttggtgggaggggac

SEQ ID NO: 1513223 - DNA, 15 bp, Homo sapiens
attggtgggagggga

SEQ ID NO: 1513224 - DNA, 15 bp, Homo sapiens
tattggtgggagggg

SEQ ID NO: 1513225 - DNA, 15 bp, Homo sapiens
atattggtgggaggg

SEQ ID NO: 1513226 - DNA, 15 bp, Homo sapiens
gatattggtgggagg

SEQ ID NO: 1513227 - DNA, 15 bp, Homo sapiens
ggatattggtgggag

SEQ ID NO: 1513228 - DNA, 15 bp, Homo sapiens
aggatattggtggga

SEQ ID NO: 1513229 - DNA, 15 bp, Homo sapiens
aaggatattggtggg

SEQ ID NO: 1513230 - DNA, 15 bp, Homo sapiens
aaaggatattggtgg

SEQ ID NO: 1513231 - DNA, 15 bp, Homo sapiens
caaaggatattggtg

SEQ ID NO: 1513232 - DNA, 15 bp, Homo sapiens
tcaaaggatattggt

SEQ ID NO: 1513233 - DNA, 15 bp, Homo sapiens
ttcaaaggatattgg

SEQ ID NO: 1513234 - DNA, 15 bp, Homo sapiens
tttcaaaggatattg

SEQ ID NO: 1513235 - DNA, 15 bp, Homo sapiens
atttcaaaggatatt

SEQ ID NO: 1513236 - DNA, 15 bp, Homo sapiens
catttcaaaggatat

SEQ ID NO: 1513237 - DNA, 15 bp, Homo sapiens
tcatttcaaaggata

SEQ ID NO: 1513238 - DNA, 15 bp, Homo sapiens
ttcatttcaaaggat

SEQ ID NO: 1513239 - DNA, 15 bp, Homo sapiens
cttcatttcaaagga

SEQ ID NO: 1513240 - DNA, 15 bp, Homo sapiens
ccttcatttcaaagg

SEQ ID NO: 1513241 - DNA, 15 bp, Homo sapiens
accttcatttcaaag

SEQ ID NO: 1513242 - DNA, 15 bp, Homo sapiens
aaccttcatttcaaa

SEQ ID NO: 1513243 - DNA, 15 bp, Homo sapiens
aaaccttcatttcaa

SEQ ID NO: 1513244 - DNA, 15 bp, Homo sapiens
taaaccttcatttca

SEQ ID NO: 1513245 - DNA, 15 bp, Homo sapiens
ataaaccttcatttc

SEQ ID NO: 1513246 - DNA, 15 bp, Homo sapiens
gataaaccttcattt

SEQ ID NO: 1513247 - DNA, 15 bp, Homo sapiens
ggataaaccttcatt

SEQ ID NO: 1513248 - DNA, 15 bp, Homo sapiens
aggataaaccttcat

SEQ ID NO: 1513249 - DNA, 15 bp, Homo sapiens
aaggataaaccttca

SEQ ID NO: 1513250 - DNA, 15 bp, Homo sapiens
caaggataaaccttc

SEQ ID NO: 1513251 - DNA, 15 bp, Homo sapiens
tcaaggataaacctt

SEQ ID NO: 1513252 - DNA, 15 bp, Homo sapiens
gtcaaggataaacct

SEQ ID NO: 1513253 - DNA, 15 bp, Homo sapiens
tgtcaaggataaacc

SEQ ID NO: 1513254 - DNA, 15 bp, Homo sapiens
atgtcaaggataaac

SEQ ID NO: 1513255 - DNA, 15 bp, Homo sapiens
gatgtcaaggataaa

SEQ ID NO: 1513256 - DNA, 15 bp, Homo sapiens
tgatgtcaaggataa

SEQ ID NO: 1513257 - DNA, 15 bp, Homo sapiens
gtgatgtcaaggata

SEQ ID NO: 1513258 - DNA, 15 bp, Homo sapiens
tgtgatgtcaaggat

SEQ ID NO: 1513259 - DNA, 15 bp, Homo sapiens
ctgtgatgtcaagga

SEQ ID NO: 1513260 - DNA, 15 bp, Homo sapiens
tctgtgatgtcaagg

SEQ ID NO: 1513261 - DNA, 15 bp, Homo sapiens
ttctgtgatgtcaag

SEQ ID NO: 1513262 - DNA, 15 bp, Homo sapiens
attctgtgatgtcaa

SEQ ID NO: 1513263 - DNA, 15 bp, Homo sapiens
tattctgtgatgtca

SEQ ID NO: 1513264 - DNA, 15 bp, Homo sapiens
atattctgtgatgtc

SEQ ID NO: 1513265 - DNA, 15 bp, Homo sapiens
aatattctgtgatgt

SEQ ID NO: 1513266 - DNA, 15 bp, Homo sapiens
caatattctgtgatg

SEQ ID NO: 1513267 - DNA, 15 bp, Homo sapiens
tcaatattctgtgat

SEQ ID NO: 1513268 - DNA, 15 bp, Homo sapiens
ctcaatattctgtga

SEQ ID NO: 1513269 - DNA, 15 bp, Homo sapiens
actcaatattctgtg

SEQ ID NO: 1513270 - DNA, 15 bp, Homo sapiens
cactcaatattctgt

SEQ ID NO: 1513271 - DNA, 15 bp, Homo sapiens
ccactcaatattctg

SEQ ID NO: 1513272 - DNA, 15 bp, Homo sapiens
tccactcaatattct

SEQ ID NO: 1513273 - DNA, 15 bp, Homo sapiens
ttccactcaatattc

SEQ ID NO: 1513274 - DNA, 15 bp, Homo sapiens
attccactcaatatt

SEQ ID NO: 1513275 - DNA, 15 bp, Homo sapiens
cattccactcaatat

SEQ ID NO: 1513276 - DNA, 15 bp, Homo sapiens
gcattccactcaata

SEQ ID NO: 1513277 - DNA, 15 bp, Homo sapiens
agcattccactcaat

SEQ ID NO: 1513278 - DNA, 15 bp, Homo sapiens
tagcattccactcaa

SEQ ID NO: 1513279 - DNA, 15 bp, Homo sapiens
gtagcattccactca

SEQ ID NO: 1513280 - DNA, 15 bp, Homo sapiens
tgtagcattccactc

SEQ ID NO: 1513281 - DNA, 15 bp, Homo sapiens
ctgtagcattccact

SEQ ID NO: 1513282 - DNA, 15 bp, Homo sapiens
actgtagcattccac

SEQ ID NO: 1513283 - DNA, 15 bp, Homo sapiens
aactgtagcattcca

SEQ ID NO: 1513284 - DNA, 15 bp, Homo sapiens
aaactgtagcattcc

SEQ ID NO: 1513285 - DNA, 15 bp, Homo sapiens
aaaactgtagcattc

SEQ ID NO: 1513286 - DNA, 15 bp, Homo sapiens
caaaactgtagcatt

SEQ ID NO: 1513287 - DNA, 15 bp, Homo sapiens
acaaaactgtagcat

SEQ ID NO: 1513288 - DNA, 15 bp, Homo sapiens
tacaaaactgtagca

SEQ ID NO: 1513289 - DNA, 15 bp, Homo sapiens
ctacaaaactgtagc

SEQ ID NO: 1513290 - DNA, 15 bp, Homo sapiens
actacaaaactgtag

SEQ ID NO: 1513291 - DNA, 15 bp, Homo sapiens
gactacaaaactgta

SEQ ID NO: 1513292 - DNA, 15 bp, Homo sapiens
tgactacaaaactgt

SEQ ID NO: 1513293 - DNA, 15 bp, Homo sapiens
gtgactacaaaactg

SEQ ID NO: 1513294 - DNA, 15 bp, Homo sapiens
agtgactacaaaact

SEQ ID NO: 1513295 - DNA, 15 bp, Homo sapiens
cagtgactacaaaac

SEQ ID NO: 1513296 - DNA, 15 bp, Homo sapiens
gcagtgactacaaaa

SEQ ID NO: 1513297 - DNA, 15 bp, Homo sapiens
agcagtgactacaaa

SEQ ID NO: 1513298 - DNA, 15 bp, Homo sapiens
tagcagtgactacaa

SEQ ID NO: 1513299 - DNA, 15 bp, Homo sapiens
gtagcagtgactaca

SEQ ID NO: 1513300 - DNA, 15 bp, Homo sapiens
agtagcagtgactac

SEQ ID NO: 1513301 - DNA, 15 bp, Homo sapiens
aagtagcagtgacta

SEQ ID NO: 1513302 - DNA, 15 bp, Homo sapiens
aaagtagcagtgact

SEQ ID NO: 1513303 - DNA, 15 bp, Homo sapiens
taaagtagcagtgac

SEQ ID NO: 1513304 - DNA, 15 bp, Homo sapiens
ttaaagtagcagtga

SEQ ID NO: 1513305 - DNA, 15 bp, Homo sapiens
tttaaagtagcagtg

SEQ ID NO: 1513306 - DNA, 15 bp, Homo sapiens
gtttaaagtagcagt

SEQ ID NO: 1513307 - DNA, 15 bp, Homo sapiens
tgtttaaagtagcag

SEQ ID NO: 1513308 - DNA, 15 bp, Homo sapiens
ctgtttaaagtagca

SEQ ID NO: 1513309 - DNA, 15 bp, Homo sapiens
gctgtttaaagtagc

SEQ ID NO: 1513310 - DNA, 15 bp, Homo sapiens
tgctgtttaaagtag

SEQ ID NO: 1513311 - DNA, 15 bp, Homo sapiens
ctgctgtttaaagta

SEQ ID NO: 1513312 - DNA, 15 bp, Homo sapiens
actgctgtttaaagt

SEQ ID NO: 1513313 - DNA, 15 bp, Homo sapiens
aactgctgtttaaag

SEQ ID NO: 1513314 - DNA, 15 bp, Homo sapiens
aaactgctgtttaaa

SEQ ID NO: 1513315 - DNA, 15 bp, Homo sapiens
taaactgctgtttaa

SEQ ID NO: 1513316 - DNA, 15 bp, Homo sapiens
ctaaactgctgttta

SEQ ID NO: 1513317 - DNA, 15 bp, Homo sapiens
gctaaactgctgttt

SEQ ID NO: 1513318 - DNA, 15 bp, Homo sapiens
ggctaaactgctgtt

SEQ ID NO: 1513319 - DNA, 15 bp, Homo sapiens
cggctaaactgctgt

SEQ ID NO: 1513320 - DNA, 15 bp, Homo sapiens
gcggctaaactgctg

SEQ ID NO: 1513321 - DNA, 15 bp, Homo sapiens
tgcggctaaactgct

SEQ ID NO: 1513322 - DNA, 15 bp, Homo sapiens
gtgcggctaaactgc

SEQ ID NO: 1513323 - DNA, 15 bp, Homo sapiens
agtgcggctaaactg

SEQ ID NO: 1513324 - DNA, 15 bp, Homo sapiens
tagtgcggctaaact

SEQ ID NO: 1513325 - DNA, 15 bp, Homo sapiens
ttagtgcggctaaac

SEQ ID NO: 1513326 - DNA, 15 bp, Homo sapiens
cttagtgcggctaaa

SEQ ID NO: 1513327 - DNA, 15 bp, Homo sapiens
gcttagtgcggctaa

SEQ ID NO: 1513328 - DNA, 15 bp, Homo sapiens
tgcttagtgcggcta

SEQ ID NO: 1513329 - DNA, 15 bp, Homo sapiens
ttgcttagtgcggct

SEQ ID NO: 1513330 - DNA, 15 bp, Homo sapiens
cttgcttagtgcggc

SEQ ID NO: 1513331 - DNA, 15 bp, Homo sapiens
tcttgcttagtgcgg

SEQ ID NO: 1513332 - DNA, 15 bp, Homo sapiens
ttcttgcttagtgcg

SEQ ID NO: 1513333 - DNA, 15 bp, Homo sapiens
attcttgcttagtgc

SEQ ID NO: 1513334 - DNA, 15 bp, Homo sapiens
tattcttgcttagtg

SEQ ID NO: 1513335 - DNA, 15 bp, Homo sapiens
ctattcttgcttagt

SEQ ID NO: 1513336 - DNA, 15 bp, Homo sapiens
gctattcttgcttag

SEQ ID NO: 1513337 - DNA, 15 bp, Homo sapiens
agctattcttgctta

SEQ ID NO: 1513338 - DNA, 15 bp, Homo sapiens
cagctattcttgctt

SEQ ID NO: 1513339 - DNA, 15 bp, Homo sapiens
acagctattcttgct

SEQ ID NO: 1513340 - DNA, 15 bp, Homo sapiens
tacagctattcttgc

SEQ ID NO: 1513341 - DNA, 15 bp, Homo sapiens
ctacagctattcttg

SEQ ID NO: 1513342 - DNA, 15 bp, Homo sapiens
tctacagctattctt

SEQ ID NO: 1513343 - DNA, 15 bp, Homo sapiens
ctctacagctattct

SEQ ID NO: 1513344 - DNA, 15 bp, Homo sapiens
tctctacagctattc

SEQ ID NO: 1513345 - DNA, 15 bp, Homo sapiens
atctctacagctatt

SEQ ID NO: 1513346 - DNA, 15 bp, Homo sapiens
aatctctacagctat

SEQ ID NO: 1513347 - DNA, 15 bp, Homo sapiens
taatctctacagcta

SEQ ID NO: 1513348 - DNA, 15 bp, Homo sapiens
ttaatctctacagct

SEQ ID NO: 1513349 - DNA, 15 bp, Homo sapiens
tttaatctctacagc

SEQ ID NO: 1513350 - DNA, 15 bp, Homo sapiens
ttttaatctctacag

SEQ ID NO: 1513351 - DNA, 15 bp, Homo sapiens
attttaatctctaca

SEQ ID NO: 1513352 - DNA, 15 bp, Homo sapiens
cattttaatctctac

SEQ ID NO: 1513353 - DNA, 15 bp, Homo sapiens
acattttaatctcta

SEQ ID NO: 1513354 - DNA, 15 bp, Homo sapiens
aacattttaatctct

SEQ ID NO: 1513355 - DNA, 15 bp, Homo sapiens
taacattttaatctc

SEQ ID NO: 1513356 - DNA, 15 bp, Homo sapiens
gtaacattttaatct

SEQ ID NO: 1513357 - DNA, 15 bp, Homo sapiens
tgtaacattttaatc

SEQ ID NO: 1513358 - DNA, 15 bp, Homo sapiens
atgtaacattttaat

SEQ ID NO: 1513359 - DNA, 15 bp, Homo sapiens
aatgtaacattttaa

SEQ ID NO: 1513360 - DNA, 15 bp, Homo sapiens
taatgtaacatttta

SEQ ID NO: 1513361 - DNA, 15 bp, Homo sapiens
ttaatgtaacatttt

SEQ ID NO: 1513362 - DNA, 15 bp, Homo sapiens
cttaatgtaacattt

SEQ ID NO: 1513363 - DNA, 15 bp, Homo sapiens
acttaatgtaacatt

SEQ ID NO: 1513364 - DNA, 15 bp, Homo sapiens
cacttaatgtaacat

SEQ ID NO: 1513365 - DNA, 15 bp, Homo sapiens
acacttaatgtaaca

SEQ ID NO: 1513366 - DNA, 15 bp, Homo sapiens
aacacttaatgtaac

SEQ ID NO: 1513367 - DNA, 15 bp, Homo sapiens
gaacacttaatgtaa

SEQ ID NO: 1513368 - DNA, 15 bp, Homo sapiens
agaacacttaatgta

SEQ ID NO: 1513369 - DNA, 15 bp, Homo sapiens
aagaacacttaatgt

SEQ ID NO: 1513370 - DNA, 15 bp, Homo sapiens
aaagaacacttaatg

SEQ ID NO: 1513371 - DNA, 15 bp, Homo sapiens
taaagaacacttaat

SEQ ID NO: 1513372 - DNA, 15 bp, Homo sapiens
ttaaagaacacttaa

SEQ ID NO: 1513373 - DNA, 15 bp, Homo sapiens
tttaaagaacactta

SEQ ID NO: 1513374 - DNA, 15 bp, Homo sapiens
ttttaaagaacactt

SEQ ID NO: 1513375 - DNA, 15 bp, Homo sapiens
tttttaaagaacact

SEQ ID NO: 1513376 - DNA, 15 bp, Homo sapiens
atttttaaagaacac

SEQ ID NO: 1513377 - DNA, 15 bp, Homo sapiens
catttttaaagaaca

SEQ ID NO: 1513378 - DNA, 15 bp, Homo sapiens
tcatttttaaagaac

SEQ ID NO: 1513379 - DNA, 15 bp, Homo sapiens
ttcatttttaaagaa

SEQ ID NO: 1513380 - DNA, 15 bp, Homo sapiens
gttcatttttaaaga

SEQ ID NO: 1513381 - DNA, 15 bp, Homo sapiens
tgttcatttttaaag

SEQ ID NO: 1513382 - DNA, 15 bp, Homo sapiens
atgttcatttttaaa

SEQ ID NO: 1513383 - DNA, 15 bp, Homo sapiens
tatgttcatttttaa

SEQ ID NO: 1513384 - DNA, 15 bp, Homo sapiens
atatgttcattttta

SEQ ID NO: 1513385 - DNA, 15 bp, Homo sapiens
tatatgttcattttt

SEQ ID NO: 1513386 - DNA, 15 bp, Homo sapiens
atatatgttcatttt

SEQ ID NO: 1513387 - DNA, 15 bp, Homo sapiens
tatatatgttcattt

SEQ ID NO: 1513388 - DNA, 15 bp, Homo sapiens
ctatatatgttcatt

SEQ ID NO: 1513389 - DNA, 15 bp, Homo sapiens
actatatatgttcat

SEQ ID NO: 1513390 - DNA, 15 bp, Homo sapiens
tactatatatgttca

SEQ ID NO: 1513391 - DNA, 15 bp, Homo sapiens
atactatatatgttc

SEQ ID NO: 1513392 - DNA, 15 bp, Homo sapiens
tatactatatatgtt

SEQ ID NO: 1513393 - DNA, 15 bp, Homo sapiens
atatactatatatgt

SEQ ID NO: 1513394 - DNA, 15 bp, Homo sapiens
tatatactatatatg

SEQ ID NO: 1513395 - DNA, 15 bp, Homo sapiens
ttatatatactatat

SEQ ID NO: 1513396 - DNA, 15 bp, Homo sapiens
tttatatatactata

SEQ ID NO: 1513397 - DNA, 15 bp, Homo sapiens
ttttatatatactat

SEQ ID NO: 1513398 - DNA, 15 bp, Homo sapiens
tttttatatatacta

SEQ ID NO: 1513399 - DNA, 15 bp, Homo sapiens
atttttatatatact

SEQ ID NO: 1513400 - DNA, 15 bp, Homo sapiens
catttttatatatac

SEQ ID NO: 1513401 - DNA, 15 bp, Homo sapiens
acatttttatatata

SEQ ID NO: 1513402 - DNA, 15 bp, Homo sapiens
tacatttttatatat

SEQ ID NO: 1513403 - DNA, 15 bp, Homo sapiens
ttacatttttatata

SEQ ID NO: 1513404 - DNA, 15 bp, Homo sapiens
tttacatttttatat

SEQ ID NO: 1513405 - DNA, 15 bp, Homo sapiens
gtttacatttttata

SEQ ID NO: 1513406 - DNA, 15 bp, Homo sapiens
agtttacatttttat

SEQ ID NO: 1513407 - DNA, 15 bp, Homo sapiens
cagtttacattttta

SEQ ID NO: 1513408 - DNA, 15 bp, Homo sapiens
gcagtttacattttt

SEQ ID NO: 1513409 - DNA, 15 bp, Homo sapiens
tgcagtttacatttt

SEQ ID NO: 1513410 - DNA, 15 bp, Homo sapiens
ttgcagtttacattt

SEQ ID NO: 1513411 - DNA, 15 bp, Homo sapiens
tttgcagtttacatt

SEQ ID NO: 1513412 - DNA, 15 bp, Homo sapiens
ttttgcagtttacat

SEQ ID NO: 1513413 - DNA, 15 bp, Homo sapiens
attttgcagtttaca

SEQ ID NO: 1513414 - DNA, 15 bp, Homo sapiens
tattttgcagtttac

SEQ ID NO: 1513415 - DNA, 15 bp, Homo sapiens
atattttgcagttta

SEQ ID NO: 1513416 - DNA, 15 bp, Homo sapiens
tatattttgcagttt

SEQ ID NO: 1513417 - DNA, 15 bp, Homo sapiens
ttatattttgcagtt

SEQ ID NO: 1513418 - DNA, 15 bp, Homo sapiens
attatattttgcagt

SEQ ID NO: 1513419 - DNA, 15 bp, Homo sapiens
aattatattttgcag

SEQ ID NO: 1513420 - DNA, 15 bp, Homo sapiens
aaattatattttgca

SEQ ID NO: 1513421 - DNA, 15 bp, Homo sapiens
aaaattatattttgc

SEQ ID NO: 1513422 - DNA, 15 bp, Homo sapiens
gaaaattatattttg

SEQ ID NO: 1513423 - DNA, 15 bp, Homo sapiens
tgaaaattatatttt

SEQ ID NO: 1513424 - DNA, 15 bp, Homo sapiens
atgaaaattatattt

SEQ ID NO: 1513425 - DNA, 15 bp, Homo sapiens
gatgaaaattatatt

SEQ ID NO: 1513426 - DNA, 15 bp, Homo sapiens
agatgaaaattatat

SEQ ID NO: 1513427 - DNA, 15 bp, Homo sapiens
tagatgaaaattata

SEQ ID NO: 1513428 - DNA, 15 bp, Homo sapiens
atagatgaaaattat

SEQ ID NO: 1513429 - DNA, 15 bp, Homo sapiens
catagatgaaaatta

SEQ ID NO: 1513430 - DNA, 15 bp, Homo sapiens
tcatagatgaaaatt

SEQ ID NO: 1513431 - DNA, 15 bp, Homo sapiens
gtcatagatgaaaat

SEQ ID NO: 1513432 - DNA, 15 bp, Homo sapiens
tgtcatagatgaaaa

SEQ ID NO: 1513433 - DNA, 15 bp, Homo sapiens
atgtcatagatgaaa

SEQ ID NO: 1513434 - DNA, 15 bp, Homo sapiens
catgtcatagatgaa

SEQ ID NO: 1513435 - DNA, 15 bp, Homo sapiens
tcatgtcatagatga

SEQ ID NO: 1513436 - DNA, 15 bp, Homo sapiens
atcatgtcatagatg

SEQ ID NO: 1513437 - DNA, 15 bp, Homo sapiens
aatcatgtcatagat

SEQ ID NO: 1513438 - DNA, 15 bp, Homo sapiens
aaatcatgtcataga

SEQ ID NO: 1513439 - DNA, 15 bp, Homo sapiens
taaatcatgtcatag

SEQ ID NO: 1513440 - DNA, 15 bp, Homo sapiens
ttaaatcatgtcata

SEQ ID NO: 1513441 - DNA, 15 bp, Homo sapiens
tttaaatcatgtcat

SEQ ID NO: 1513442 - DNA, 15 bp, Homo sapiens
ctttaaatcatgtca

SEQ ID NO: 1513443 - DNA, 15 bp, Homo sapiens
gctttaaatcatgtc

SEQ ID NO: 1513444 - DNA, 15 bp, Homo sapiens
tgctttaaatcatgt

SEQ ID NO: 1513445 - DNA, 15 bp, Homo sapiens
ctgctttaaatcatg

SEQ ID NO: 1513446 - DNA, 15 bp, Homo sapiens
cctgctttaaatcat

SEQ ID NO: 1513447 - DNA, 15 bp, Homo sapiens
ccctgctttaaatca

SEQ ID NO: 1513448 - DNA, 15 bp, Homo sapiens
cccctgctttaaatc

SEQ ID NO: 1513449 - DNA, 15 bp, Homo sapiens
tcccctgctttaaat

SEQ ID NO: 1513450 - DNA, 15 bp, Homo sapiens
gtcccctgctttaaa

SEQ ID NO: 1513451 - DNA, 15 bp, Homo sapiens
agtcccctgctttaa

SEQ ID NO: 1513452 - DNA, 15 bp, Homo sapiens
gagtcccctgcttta

SEQ ID NO: 1513453 - DNA, 15 bp, Homo sapiens
agagtcccctgcttt

SEQ ID NO: 1513454 - DNA, 15 bp, Homo sapiens
cagagtcccctgctt

SEQ ID NO: 1513455 - DNA, 15 bp, Homo sapiens
ccagagtcccctgct

SEQ ID NO: 1513456 - DNA, 15 bp, Homo sapiens
tccagagtcccctgc

SEQ ID NO: 1513457 - DNA, 15 bp, Homo sapiens
ttccagagtcccctg

SEQ ID NO: 1513458 - DNA, 15 bp, Homo sapiens
tttccagagtcccct

SEQ ID NO: 1513459 - DNA, 15 bp, Homo sapiens
ctttccagagtcccc

SEQ ID NO: 1513460 - DNA, 15 bp, Homo sapiens
cctttccagagtccc

SEQ ID NO: 1513461 - DNA, 15 bp, Homo sapiens
ccctttccagagtcc

SEQ ID NO: 1513462 - DNA, 15 bp, Homo sapiens
tccctttccagagtc

SEQ ID NO: 1513463 - DNA, 15 bp, Homo sapiens
atccctttccagagt

SEQ ID NO: 1513464 - DNA, 15 bp, Homo sapiens
catccctttccagag

SEQ ID NO: 1513465 - DNA, 15 bp, Homo sapiens
ccatccctttccaga

SEQ ID NO: 1513466 - DNA, 15 bp, Homo sapiens
cccatccctttccag

SEQ ID NO: 1513467 - DNA, 15 bp, Homo sapiens
tcccatccctttcca

SEQ ID NO: 1513468 - DNA, 15 bp, Homo sapiens
ctcccatccctttcc

SEQ ID NO: 1513469 - DNA, 15 bp, Homo sapiens
gctcccatccctttc

SEQ ID NO: 1513470 - DNA, 15 bp, Homo sapiens
agctcccatcccttt

SEQ ID NO: 1513471 - DNA, 15 bp, Homo sapiens
cagctcccatccctt

SEQ ID NO: 1513472 - DNA, 15 bp, Homo sapiens
tcagctcccatccct

SEQ ID NO: 1513473 - DNA, 15 bp, Homo sapiens
ttcagctcccatccc

SEQ ID NO: 1513474 - DNA, 15 bp, Homo sapiens
gttcagctcccatcc

SEQ ID NO: 1513475 - DNA, 15 bp, Homo sapiens
ggttcagctcccatc

SEQ ID NO: 1513476 - DNA, 15 bp, Homo sapiens
tggttcagctcccat

SEQ ID NO: 1513477 - DNA, 15 bp, Homo sapiens
ctggttcagctccca

SEQ ID NO: 1513478 - DNA, 15 bp, Homo sapiens
actggttcagctccc

SEQ ID NO: 1513479 - DNA, 15 bp, Homo sapiens
aactggttcagctcc

SEQ ID NO: 1513480 - DNA, 15 bp, Homo sapiens
aaactggttcagctc

SEQ ID NO: 1513481 - DNA, 15 bp, Homo sapiens
aaaactggttcagct

SEQ ID NO: 1513482 - DNA, 15 bp, Homo sapiens
taaaactggttcagc

SEQ ID NO: 1513483 - DNA, 15 bp, Homo sapiens
ataaaactggttcag

SEQ ID NO: 1513484 - DNA, 15 bp, Homo sapiens
tataaaactggttca

SEQ ID NO: 1513485 - DNA, 15 bp, Homo sapiens
ctataaaactggttc

SEQ ID NO: 1513486 - DNA, 15 bp, Homo sapiens
gctataaaactggtt

SEQ ID NO: 1513487 - DNA, 15 bp, Homo sapiens
tgctataaaactggt

SEQ ID NO: 1513488 - DNA, 15 bp, Homo sapiens
gtgctataaaactgg

SEQ ID NO: 1513489 - DNA, 15 bp, Homo sapiens
agtgctataaaactg

SEQ ID NO: 1513490 - DNA, 15 bp, Homo sapiens
gagtgctataaaact

SEQ ID NO: 1513491 - DNA, 15 bp, Homo sapiens
agagtgctataaaac

SEQ ID NO: 1513492 - DNA, 15 bp, Homo sapiens
aagagtgctataaaa

SEQ ID NO: 1513493 - DNA, 15 bp, Homo sapiens
gaagagtgctataaa

SEQ ID NO: 1513494 - DNA, 15 bp, Homo sapiens
ggaagagtgctataa

SEQ ID NO: 1513495 - DNA, 15 bp, Homo sapiens
gggaagagtgctata

SEQ ID NO: 1513496 - DNA, 15 bp, Homo sapiens
cgggaagagtgctat

SEQ ID NO: 1513497 - DNA, 15 bp, Homo sapiens
tcgggaagagtgcta

SEQ ID NO: 1513498 - DNA, 15 bp, Homo sapiens
ctcgggaagagtgct

SEQ ID NO: 1513499 - DNA, 15 bp, Homo sapiens
gctcgggaagagtgc

SEQ ID NO: 1513500 - DNA, 15 bp, Homo sapiens
agctcgggaagagtg

SEQ ID NO: 1513501 - DNA, 15 bp, Homo sapiens
tagctcgggaagagt

SEQ ID NO: 1513502 - DNA, 15 bp, Homo sapiens
ttagctcgggaagag

SEQ ID NO: 1513503 - DNA, 15 bp, Homo sapiens
cttagctcgggaaga

SEQ ID NO: 1513504 - DNA, 15 bp, Homo sapiens
ccttagctcgggaag

SEQ ID NO: 1513505 - DNA, 15 bp, Homo sapiens
accttagctcgggaa

SEQ ID NO: 1513506 - DNA, 15 bp, Homo sapiens
taccttagctcggga

SEQ ID NO: 1513507 - DNA, 15 bp, Homo sapiens
gtaccttagctcggg

SEQ ID NO: 1513508 - DNA, 15 bp, Homo sapiens
ggtaccttagctcgg

SEQ ID NO: 1513509 - DNA, 15 bp, Homo sapiens
aggtaccttagctcg

SEQ ID NO: 1513510 - DNA, 15 bp, Homo sapiens
aaggtaccttagctc

SEQ ID NO: 1513511 - DNA, 15 bp, Homo sapiens
aaaggtaccttagct

SEQ ID NO: 1513512 - DNA, 15 bp, Homo sapiens
aaaaggtaccttagc

SEQ ID NO: 1513513 - DNA, 15 bp, Homo sapiens
aaaaaggtaccttag

SEQ ID NO: 1513514 - DNA, 15 bp, Homo sapiens
taaaaaggtacctta

SEQ ID NO: 1513515 - DNA, 15 bp, Homo sapiens
ataaaaaggtacctt

SEQ ID NO: 1513516 - DNA, 15 bp, Homo sapiens
gataaaaaggtacct

SEQ ID NO: 1513517 - DNA, 15 bp, Homo sapiens
agataaaaaggtacc

SEQ ID NO: 1513518 - DNA, 15 bp, Homo sapiens
aagataaaaaggtac

SEQ ID NO: 1513519 - DNA, 15 bp, Homo sapiens
taagataaaaaggta

SEQ ID NO: 1513520 - DNA, 15 bp, Homo sapiens
ttaagataaaaaggt

SEQ ID NO: 1513521 - DNA, 15 bp, Homo sapiens
attaagataaaaagg

SEQ ID NO: 1513522 - DNA, 15 bp, Homo sapiens
cattaagataaaaag

SEQ ID NO: 1513523 - DNA, 15 bp, Homo sapiens
acattaagataaaaa

SEQ ID NO: 1513524 - DNA, 15 bp, Homo sapiens
tacattaagataaaa

SEQ ID NO: 1513525 - DNA, 15 bp, Homo sapiens
ctacattaagataaa

SEQ ID NO: 1513526 - DNA, 15 bp, Homo sapiens
tctacattaagataa

SEQ ID NO: 1513527 - DNA, 15 bp, Homo sapiens
ttctacattaagata

SEQ ID NO: 1513528 - DNA, 15 bp, Homo sapiens
attctacattaagat

SEQ ID NO: 1513529 - DNA, 15 bp, Homo sapiens
cattctacattaaga

SEQ ID NO: 1513530 - DNA, 15 bp, Homo sapiens
acattctacattaag

SEQ ID NO: 1513531 - DNA, 15 bp, Homo sapiens
aacattctacattaa

SEQ ID NO: 1513532 - DNA, 15 bp, Homo sapiens
aaacattctacatta

SEQ ID NO: 1513533 - DNA, 15 bp, Homo sapiens
aaaacattctacatt

SEQ ID NO: 1513534 - DNA, 15 bp, Homo sapiens
taaaacattctacat

SEQ ID NO: 1513535 - DNA, 15 bp, Homo sapiens
ataaaacattctaca

SEQ ID NO: 1513536 - DNA, 15 bp, Homo sapiens
tataaaacattctac

SEQ ID NO: 1513537 - DNA, 15 bp, Homo sapiens
ttataaaacattcta

SEQ ID NO: 1513538 - DNA, 15 bp, Homo sapiens
tttataaaacattct

SEQ ID NO: 1513539 - DNA, 15 bp, Homo sapiens
ctttataaaacattc

SEQ ID NO: 1513540 - DNA, 15 bp, Homo sapiens
cctttataaaacatt

SEQ ID NO: 1513541 - DNA, 15 bp, Homo sapiens
ccctttataaaacat

SEQ ID NO: 1513542 - DNA, 15 bp, Homo sapiens
tccctttataaaaca

SEQ ID NO: 1513543 - DNA, 15 bp, Homo sapiens
ttccctttataaaac

SEQ ID NO: 1513544 - DNA, 15 bp, Homo sapiens
tttccctttataaaa

SEQ ID NO: 1513545 - DNA, 15 bp, Homo sapiens
ttttccctttataaa

SEQ ID NO: 1513546 - DNA, 15 bp, Homo sapiens
attttccctttataa

SEQ ID NO: 1513547 - DNA, 15 bp, Homo sapiens
gattttccctttata

SEQ ID NO: 1513548 - DNA, 15 bp, Homo sapiens
tgattttccctttat

SEQ ID NO: 1513549 - DNA, 15 bp, Homo sapiens
atgattttcccttta

SEQ ID NO: 1513550 - DNA, 15 bp, Homo sapiens
gatgattttcccttt

SEQ ID NO: 1513551 - DNA, 15 bp, Homo sapiens
ggatgattttccctt

SEQ ID NO: 1513552 - DNA, 15 bp, Homo sapiens
tggatgattttccct

SEQ ID NO: 1513553 - DNA, 15 bp, Homo sapiens
atggatgattttccc

SEQ ID NO: 1513554 - DNA, 15 bp, Homo sapiens
aatggatgattttcc

SEQ ID NO: 1513555 - DNA, 15 bp, Homo sapiens
aaatggatgattttc

SEQ ID NO: 1513556 - DNA, 15 bp, Homo sapiens
aaaatggatgatttt

SEQ ID NO: 1513557 - DNA, 15 bp, Homo sapiens
taaaatggatgattt

SEQ ID NO: 1513558 - DNA, 15 bp, Homo sapiens
ttaaaatggatgatt

SEQ ID NO: 1513559 - DNA, 15 bp, Homo sapiens
tttaaaatggatgat

SEQ ID NO: 1513560 - DNA, 15 bp, Homo sapiens
atttaaaatggatga

SEQ ID NO: 1513561 - DNA, 15 bp, Homo sapiens
tatttaaaatggatg

SEQ ID NO: 1513562 - DNA, 15 bp, Homo sapiens
atatttaaaatggat

SEQ ID NO: 1513563 - DNA, 15 bp, Homo sapiens
aatatttaaaatgga

SEQ ID NO: 1513564 - DNA, 15 bp, Homo sapiens
caatatttaaaatgg

SEQ ID NO: 1513565 - DNA, 15 bp, Homo sapiens
ccaatatttaaaatg

SEQ ID NO: 1513566 - DNA, 15 bp, Homo sapiens
cccaatatttaaaat

SEQ ID NO: 1513567 - DNA, 15 bp, Homo sapiens
acccaatatttaaaa

SEQ ID NO: 1513568 - DNA, 15 bp, Homo sapiens
aacccaatatttaaa

SEQ ID NO: 1513569 - DNA, 15 bp, Homo sapiens
gaacccaatatttaa

SEQ ID NO: 1513570 - DNA, 15 bp, Homo sapiens
tgaacccaatattta

SEQ ID NO: 1513571 - DNA, 15 bp, Homo sapiens
gtgaacccaatattt

SEQ ID NO: 1513572 - DNA, 15 bp, Homo sapiens
tgtgaacccaatatt

SEQ ID NO: 1513573 - DNA, 15 bp, Homo sapiens
atgtgaacccaatat

SEQ ID NO: 1513574 - DNA, 15 bp, Homo sapiens
aatgtgaacccaata

SEQ ID NO: 1513575 - DNA, 15 bp, Homo sapiens
caatgtgaacccaat

SEQ ID NO: 1513576 - DNA, 15 bp, Homo sapiens
gcaatgtgaacccaa

SEQ ID NO: 1513577 - DNA, 15 bp, Homo sapiens
agcaatgtgaaccca

SEQ ID NO: 1513578 - DNA, 15 bp, Homo sapiens
aagcaatgtgaaccc

SEQ ID NO: 1513579 - DNA, 15 bp, Homo sapiens
aaagcaatgtgaacc

SEQ ID NO: 1513580 - DNA, 15 bp, Homo sapiens
aaaagcaatgtgaac

SEQ ID NO: 1513581 - DNA, 15 bp, Homo sapiens
gaaaagcaatgtgaa

SEQ ID NO: 1513582 - DNA, 15 bp, Homo sapiens
tgaaaagcaatgtga

SEQ ID NO: 1513583 - DNA, 15 bp, Homo sapiens
ctgaaaagcaatgtg

SEQ ID NO: 1513584 - DNA, 15 bp, Homo sapiens
cctgaaaagcaatgt

SEQ ID NO: 1513585 - DNA, 15 bp, Homo sapiens
gcctgaaaagcaatg

SEQ ID NO: 1513586 - DNA, 15 bp, Homo sapiens
agcctgaaaagcaat

SEQ ID NO: 1513587 - DNA, 15 bp, Homo sapiens
cagcctgaaaagcaa

SEQ ID NO: 1513588 - DNA, 15 bp, Homo sapiens
ccagcctgaaaagca

SEQ ID NO: 1513589 - DNA, 15 bp, Homo sapiens
tccagcctgaaaagc

SEQ ID NO: 1513590 - DNA, 15 bp, Homo sapiens
gtccagcctgaaaag

SEQ ID NO: 1513591 - DNA, 15 bp, Homo sapiens
tgtccagcctgaaaa

SEQ ID NO: 1513592 - DNA, 15 bp, Homo sapiens
ttgtccagcctgaaa

SEQ ID NO: 1513593 - DNA, 15 bp, Homo sapiens
gttgtccagcctgaa

SEQ ID NO: 1513594 - DNA, 15 bp, Homo sapiens
ggttgtccagcctga

SEQ ID NO: 1513595 - DNA, 15 bp, Homo sapiens
tggttgtccagcctg

SEQ ID NO: 1513596 - DNA, 15 bp, Homo sapiens
atggttgtccagcct

SEQ ID NO: 1513597 - DNA, 15 bp, Homo sapiens
aatggttgtccagcc

SEQ ID NO: 1513598 - DNA, 15 bp, Homo sapiens
aaatggttgtccagc

SEQ ID NO: 1513599 - DNA, 15 bp, Homo sapiens
gaaatggttgtccag

SEQ ID NO: 1513600 - DNA, 15 bp, Homo sapiens
agaaatggttgtcca

SEQ ID NO: 1513601 - DNA, 15 bp, Homo sapiens
aagaaatggttgtcc

SEQ ID NO: 1513602 - DNA, 15 bp, Homo sapiens
caagaaatggttgtc

SEQ ID NO: 1513603 - DNA, 15 bp, Homo sapiens
tcaagaaatggttgt

SEQ ID NO: 1513604 - DNA, 15 bp, Homo sapiens
ctcaagaaatggttg

SEQ ID NO: 1513605 - DNA, 15 bp, Homo sapiens
actcaagaaatggtt

SEQ ID NO: 1513606 - DNA, 15 bp, Homo sapiens
aactcaagaaatggt

SEQ ID NO: 1513607 - DNA, 15 bp, Homo sapiens
gaactcaagaaatgg

SEQ ID NO: 1513608 - DNA, 15 bp, Homo sapiens
agaactcaagaaatg

SEQ ID NO: 1513609 - DNA, 15 bp, Homo sapiens
aagaactcaagaaat

SEQ ID NO: 1513610 - DNA, 15 bp, Homo sapiens
taagaactcaagaaa

SEQ ID NO: 1513611 - DNA, 15 bp, Homo sapiens
ttaagaactcaagaa

SEQ ID NO: 1513612 - DNA, 15 bp, Homo sapiens
tttaagaactcaaga

SEQ ID NO: 1513613 - DNA, 15 bp, Homo sapiens
atttaagaactcaag

SEQ ID NO: 1513614 - DNA, 15 bp, Homo sapiens
aatttaagaactcaa

SEQ ID NO: 1513615 - DNA, 15 bp, Homo sapiens
taatttaagaactca

SEQ ID NO: 1513616 - DNA, 15 bp, Homo sapiens
ataatttaagaactc

SEQ ID NO: 1513617 - DNA, 15 bp, Homo sapiens
aataatttaagaact

SEQ ID NO: 1513618 - DNA, 15 bp, Homo sapiens
aaataatttaagaac

SEQ ID NO: 1513619 - DNA, 15 bp, Homo sapiens
aaaataatttaagaa

SEQ ID NO: 1513620 - DNA, 15 bp, Homo sapiens
aaaaataatttaaga

SEQ ID NO: 1513621 - DNA, 15 bp, Homo sapiens
taaaaataatttaag

SEQ ID NO: 1513622 - DNA, 15 bp, Homo sapiens
ataaaaataatttaa

SEQ ID NO: 1513623 - DNA, 15 bp, Homo sapiens
aataaaaataattta

SEQ ID NO: 1513624 - DNA, 15 bp, Homo sapiens
aaataaaaataattt

SEQ ID NO: 1513625 - DNA, 15 bp, Homo sapiens
caaataaaaataatt

SEQ ID NO: 1513626 - DNA, 15 bp, Homo sapiens
tcaaataaaaataat

SEQ ID NO: 1513627 - DNA, 15 bp, Homo sapiens
gtcaaataaaaataa

SEQ ID NO: 1513628 - DNA, 15 bp, Homo sapiens
tgtcaaataaaaata

SEQ ID NO: 1513629 - DNA, 15 bp, Homo sapiens
ctgtcaaataaaaat

SEQ ID NO: 1513630 - DNA, 15 bp, Homo sapiens
tctgtcaaataaaaa

SEQ ID NO: 1513631 - DNA, 15 bp, Homo sapiens
ttctgtcaaataaaa

SEQ ID NO: 1513632 - DNA, 15 bp, Homo sapiens
attctgtcaaataaa

SEQ ID NO: 1513633 - DNA, 15 bp, Homo sapiens
aattctgtcaaataa

SEQ ID NO: 1513634 - DNA, 15 bp, Homo sapiens
taattctgtcaaata

SEQ ID NO: 1513635 - DNA, 15 bp, Homo sapiens
ataattctgtcaaat

SEQ ID NO: 1513636 - DNA, 15 bp, Homo sapiens
tataattctgtcaaa

SEQ ID NO: 1513637 - DNA, 15 bp, Homo sapiens
ttataattctgtcaa

SEQ ID NO: 1513638 - DNA, 15 bp, Homo sapiens
tttataattctgtca

SEQ ID NO: 1513639 - DNA, 15 bp, Homo sapiens
atttataattctgtc

SEQ ID NO: 1513640 - DNA, 15 bp, Homo sapiens
aatttataattctgt

SEQ ID NO: 1513641 - DNA, 15 bp, Homo sapiens
caatttataattctg

SEQ ID NO: 1513642 - DNA, 15 bp, Homo sapiens
tcaatttataattct

SEQ ID NO: 1513643 - DNA, 15 bp, Homo sapiens
ctcaatttataattc

SEQ ID NO: 1513644 - DNA, 15 bp, Homo sapiens
cctcaatttataatt

SEQ ID NO: 1513645 - DNA, 15 bp, Homo sapiens
acctcaatttataat

SEQ ID NO: 1513646 - DNA, 15 bp, Homo sapiens
tacctcaatttataa

SEQ ID NO: 1513647 - DNA, 15 bp, Homo sapiens
ctacctcaatttata

SEQ ID NO: 1513648 - DNA, 15 bp, Homo sapiens
tctacctcaatttat

SEQ ID NO: 1513649 - DNA, 15 bp, Homo sapiens
gtctacctcaattta

SEQ ID NO: 1513650 - DNA, 15 bp, Homo sapiens
tgtctacctcaattt

SEQ ID NO: 1513651 - DNA, 15 bp, Homo sapiens
atgtctacctcaatt

SEQ ID NO: 1513652 - DNA, 15 bp, Homo sapiens
tatgtctacctcaat

SEQ ID NO: 1513653 - DNA, 15 bp, Homo sapiens
ctatgtctacctcaa

SEQ ID NO: 1513654 - DNA, 15 bp, Homo sapiens
cctatgtctacctca

SEQ ID NO: 1513655 - DNA, 15 bp, Homo sapiens
ccctatgtctacctc

SEQ ID NO: 1513656 - DNA, 15 bp, Homo sapiens
cccctatgtctacct

SEQ ID NO: 1513657 - DNA, 15 bp, Homo sapiens
acccctatgtctacc

SEQ ID NO: 1513658 - DNA, 15 bp, Homo sapiens
aacccctatgtctac

SEQ ID NO: 1513659 - DNA, 15 bp, Homo sapiens
gaacccctatgtcta

SEQ ID NO: 1513660 - DNA, 15 bp, Homo sapiens
agaacccctatgtct

SEQ ID NO: 1513661 - DNA, 15 bp, Homo sapiens
gagaacccctatgtc

SEQ ID NO: 1513662 - DNA, 15 bp, Homo sapiens
agagaacccctatgt

SEQ ID NO: 1513663 - DNA, 15 bp, Homo sapiens
gagagaacccctatg

SEQ ID NO: 1513664 - DNA, 15 bp, Homo sapiens
agagagaacccctat

SEQ ID NO: 1513665 - DNA, 15 bp, Homo sapiens
agaagagagaacccc

SEQ ID NO: 1513666 - DNA, 15 bp, Homo sapiens
cagaagagagaaccc

SEQ ID NO: 1513667 - DNA, 15 bp, Homo sapiens
ccagaagagagaacc

SEQ ID NO: 1513668 - DNA, 15 bp, Homo sapiens
accagaagagagaac

SEQ ID NO: 1513669 - DNA, 15 bp, Homo sapiens
caccagaagagagaa

SEQ ID NO: 1513670 - DNA, 15 bp, Homo sapiens
tcaccagaagagaga

SEQ ID NO: 1513671 - DNA, 15 bp, Homo sapiens
ctcaccagaagagag

SEQ ID NO: 1513672 - DNA, 15 bp, Homo sapiens
tctcaccagaagaga

SEQ ID NO: 1513673 - DNA, 15 bp, Homo sapiens
atctcaccagaagag

SEQ ID NO: 1513674 - DNA, 15 bp, Homo sapiens
gatctcaccagaaga

SEQ ID NO: 1513675 - DNA, 15 bp, Homo sapiens
ggatctcaccagaag

SEQ ID NO: 1513676 - DNA, 15 bp, Homo sapiens
aggatctcaccagaa

SEQ ID NO: 1513677 - DNA, 15 bp, Homo sapiens
aaggatctcaccaga

SEQ ID NO: 1513678 - DNA, 15 bp, Homo sapiens
aaaggatctcaccag

SEQ ID NO: 1513679 - DNA, 15 bp, Homo sapiens
aaaaggatctcacca

SEQ ID NO: 1513680 - DNA, 15 bp, Homo sapiens
aaaaaggatctcacc

SEQ ID NO: 1513681 - DNA, 15 bp, Homo sapiens
aaaaaaggatctcac

SEQ ID NO: 1513682 - DNA, 15 bp, Homo sapiens
gaaaaaaggatctca

SEQ ID NO: 1513683 - DNA, 15 bp, Homo sapiens
agaaaaaaggatctc

SEQ ID NO: 1513684 - DNA, 15 bp, Homo sapiens
aagaaaaaaggatct

SEQ ID NO: 1513685 - DNA, 15 bp, Homo sapiens
aaagaaaaaaggatc

SEQ ID NO: 1513686 - DNA, 15 bp, Homo sapiens
aaaagaaaaaaggat

SEQ ID NO: 1513687 - DNA, 15 bp, Homo sapiens
taaaagaaaaaagga

SEQ ID NO: 1513688 - DNA, 15 bp, Homo sapiens
ctaaaagaaaaaagg

SEQ ID NO: 1513689 - DNA, 15 bp, Homo sapiens
cctaaaagaaaaaag

SEQ ID NO: 1513690 - DNA, 15 bp, Homo sapiens
acctaaaagaaaaaa

SEQ ID NO: 1513691 - DNA, 15 bp, Homo sapiens
gacctaaaagaaaaa

SEQ ID NO: 1513692 - DNA, 15 bp, Homo sapiens
ggacctaaaagaaaa

SEQ ID NO: 1513693 - DNA, 15 bp, Homo sapiens
gggacctaaaagaaa

SEQ ID NO: 1513694 - DNA, 15 bp, Homo sapiens
ggggacctaaaagaa

SEQ ID NO: 1513695 - DNA, 15 bp, Homo sapiens
tggggacctaaaaga

SEQ ID NO: 1513696 - DNA, 15 bp, Homo sapiens
ttggggacctaaaag

SEQ ID NO: 1513697 - DNA, 15 bp, Homo sapiens
cttggggacctaaaa

SEQ ID NO: 1513698 - DNA, 15 bp, Homo sapiens
tcttggggacctaaa

SEQ ID NO: 1513699 - DNA, 15 bp, Homo sapiens
ttcttggggacctaa

SEQ ID NO: 1513700 - DNA, 15 bp, Homo sapiens
attcttggggaccta

SEQ ID NO: 1513701 - DNA, 15 bp, Homo sapiens
aattcttggggacct

SEQ ID NO: 1513702 - DNA, 15 bp, Homo sapiens
gaattcttggggacc

SEQ ID NO: 1513703 - DNA, 15 bp, Homo sapiens
ggaattcttggggac

SEQ ID NO: 1513704 - DNA, 15 bp, Homo sapiens
gggaattcttgggga

SEQ ID NO: 1513705 - DNA, 15 bp, Homo sapiens
tgggaattcttgggg

SEQ ID NO: 1513706 - DNA, 15 bp, Homo sapiens
atgggaattcttggg

SEQ ID NO: 1513707 - DNA, 15 bp, Homo sapiens
gatgggaattcttgg

SEQ ID NO: 1513708 - DNA, 15 bp, Homo sapiens
ggatgggaattcttg

SEQ ID NO: 1513709 - DNA, 15 bp, Homo sapiens
gggatgggaattctt

SEQ ID NO: 1513710 - DNA, 15 bp, Homo sapiens
agggatgggaattct

SEQ ID NO: 1513711 - DNA, 15 bp, Homo sapiens
gagggatgggaattc

SEQ ID NO: 1513712 - DNA, 15 bp, Homo sapiens
ggagggatgggaatt

SEQ ID NO: 1513713 - DNA, 15 bp, Homo sapiens
tggagggatgggaat

SEQ ID NO: 1513714 - DNA, 15 bp, Homo sapiens
atggagggatgggaa

SEQ ID NO: 1513715 - DNA, 15 bp, Homo sapiens
catggagggatggga

SEQ ID NO: 1513716 - DNA, 15 bp, Homo sapiens
ccatggagggatggg

SEQ ID NO: 1513717 - DNA, 15 bp, Homo sapiens
accatggagggatgg

SEQ ID NO: 1513718 - DNA, 15 bp, Homo sapiens
aaccatggagggatg

SEQ ID NO: 1513719 - DNA, 15 bp, Homo sapiens
aaaccatggagggat

SEQ ID NO: 1513720 - DNA, 15 bp, Homo sapiens
taaaccatggaggga

SEQ ID NO: 1513721 - DNA, 15 bp, Homo sapiens
ttaaaccatggaggg

SEQ ID NO: 1513722 - DNA, 15 bp, Homo sapiens
tttaaaccatggagg

SEQ ID NO: 1513723 - DNA, 15 bp, Homo sapiens
atttaaaccatggag

SEQ ID NO: 1513724 - DNA, 15 bp, Homo sapiens
tatttaaaccatgga

SEQ ID NO: 1513725 - DNA, 15 bp, Homo sapiens
ttatttaaaccatgg

SEQ ID NO: 1513726 - DNA, 15 bp, Homo sapiens
attatttaaaccatg

SEQ ID NO: 1513727 - DNA, 15 bp, Homo sapiens
tattatttaaaccat

SEQ ID NO: 1513728 - DNA, 15 bp, Homo sapiens
ctattatttaaacca

SEQ ID NO: 1513729 - DNA, 15 bp, Homo sapiens
cctattatttaaacc

SEQ ID NO: 1513730 - DNA, 15 bp, Homo sapiens
acctattatttaaac

SEQ ID NO: 1513731 - DNA, 15 bp, Homo sapiens
tacctattatttaaa

SEQ ID NO: 1513732 - DNA, 15 bp, Homo sapiens
ctacctattatttaa

SEQ ID NO: 1513733 - DNA, 15 bp, Homo sapiens
cctacctattattta

SEQ ID NO: 1513734 - DNA, 15 bp, Homo sapiens
acctacctattattt

SEQ ID NO: 1513735 - DNA, 15 bp, Homo sapiens
aacctacctattatt

SEQ ID NO: 1513736 - DNA, 15 bp, Homo sapiens
gaacctacctattat

SEQ ID NO: 1513737 - DNA, 15 bp, Homo sapiens
agaacctacctatta

SEQ ID NO: 1513738 - DNA, 15 bp, Homo sapiens
aagaacctacctatt

SEQ ID NO: 1513739 - DNA, 15 bp, Homo sapiens
caagaacctacctat

SEQ ID NO: 1513740 - DNA, 15 bp, Homo sapiens
acaagaacctaccta

SEQ ID NO: 1513741 - DNA, 15 bp, Homo sapiens
tacaagaacctacct

SEQ ID NO: 1513742 - DNA, 15 bp, Homo sapiens
atacaagaacctacc

SEQ ID NO: 1513743 - DNA, 15 bp, Homo sapiens
aatacaagaacctac

SEQ ID NO: 1513744 - DNA, 15 bp, Homo sapiens
taatacaagaaccta

SEQ ID NO: 1513745 - DNA, 15 bp, Homo sapiens
ataatacaagaacct

SEQ ID NO: 1513746 - DNA, 15 bp, Homo sapiens
tataatacaagaacc

SEQ ID NO: 1513747 - DNA, 15 bp, Homo sapiens
ttataatacaagaac

SEQ ID NO: 1513748 - DNA, 15 bp, Homo sapiens
tttataatacaagaa

SEQ ID NO: 1513749 - DNA, 15 bp, Homo sapiens
ctttataatacaaga

SEQ ID NO: 1513750 - DNA, 15 bp, Homo sapiens
cctttataatacaag

SEQ ID NO: 1513751 - DNA, 15 bp, Homo sapiens
tcctttataatacaa

SEQ ID NO: 1513752 - DNA, 15 bp, Homo sapiens
ttcctttataataca

SEQ ID NO: 1513753 - DNA, 15 bp, Homo sapiens
cttcctttataatac

SEQ ID NO: 1513754 - DNA, 15 bp, Homo sapiens
gcttcctttataata

SEQ ID NO: 1513755 - DNA, 15 bp, Homo sapiens
agcttcctttataat

SEQ ID NO: 1513756 - DNA, 15 bp, Homo sapiens
cagcttcctttataa

SEQ ID NO: 1513757 - DNA, 15 bp, Homo sapiens
acagcttcctttata

SEQ ID NO: 1513758 - DNA, 15 bp, Homo sapiens
cacagcttcctttat

SEQ ID NO: 1513759 - DNA, 15 bp, Homo sapiens
tcacagcttccttta

SEQ ID NO: 1513760 - DNA, 15 bp, Homo sapiens
ttcacagcttccttt

SEQ ID NO: 1513761 - DNA, 15 bp, Homo sapiens
cttcacagcttcctt

SEQ ID NO: 1513762 - DNA, 15 bp, Homo sapiens
tcttcacagcttcct

SEQ ID NO: 1513763 - DNA, 15 bp, Homo sapiens
ttcttcacagcttcc

SEQ ID NO: 1513764 - DNA, 15 bp, Homo sapiens
tttcttcacagcttc

SEQ ID NO: 1513765 - DNA, 15 bp, Homo sapiens
ttttcttcacagctt

SEQ ID NO: 1513766 - DNA, 15 bp, Homo sapiens
cttttcttcacagct

SEQ ID NO: 1513767 - DNA, 15 bp, Homo sapiens
ccttttcttcacagc

SEQ ID NO: 1513768 - DNA, 15 bp, Homo sapiens
gccttttcttcacag

SEQ ID NO: 1513769 - DNA, 15 bp, Homo sapiens
tgccttttcttcaca

SEQ ID NO: 1513770 - DNA, 15 bp, Homo sapiens
gtgccttttcttcac

SEQ ID NO: 1513771 - DNA, 15 bp, Homo sapiens
agtgccttttcttca

SEQ ID NO: 1513772 - DNA, 15 bp, Homo sapiens
cagtgccttttcttc

SEQ ID NO: 1513773 - DNA, 15 bp, Homo sapiens
ccagtgccttttctt

SEQ ID NO: 1513774 - DNA, 15 bp, Homo sapiens
gccagtgccttttct

SEQ ID NO: 1513775 - DNA, 15 bp, Homo sapiens
tgccagtgccttttc

SEQ ID NO: 1513776 - DNA, 15 bp, Homo sapiens
ctgccagtgcctttt

SEQ ID NO: 1513777 - DNA, 15 bp, Homo sapiens
actgccagtgccttt

SEQ ID NO: 1513778 - DNA, 15 bp, Homo sapiens
tactgccagtgcctt

SEQ ID NO: 1513779 - DNA, 15 bp, Homo sapiens
ttactgccagtgcct

SEQ ID NO: 1513780 - DNA, 15 bp, Homo sapiens
gttactgccagtgcc

SEQ ID NO: 1513781 - DNA, 15 bp, Homo sapiens
tgttactgccagtgc

SEQ ID NO: 1513782 - DNA, 15 bp, Homo sapiens
atgttactgccagtg

SEQ ID NO: 1513783 - DNA, 15 bp, Homo sapiens
aatgttactgccagt

SEQ ID NO: 1513784 - DNA, 15 bp, Homo sapiens
taatgttactgccag

SEQ ID NO: 1513785 - DNA, 15 bp, Homo sapiens
gtaatgttactgcca

SEQ ID NO: 1513786 - DNA, 15 bp, Homo sapiens
agtaatgttactgcc

SEQ ID NO: 1513787 - DNA, 15 bp, Homo sapiens
aagtaatgttactgc

SEQ ID NO: 1513788 - DNA, 15 bp, Homo sapiens
caagtaatgttactg

SEQ ID NO: 1513789 - DNA, 15 bp, Homo sapiens
acaagtaatgttact

SEQ ID NO: 1513790 - DNA, 15 bp, Homo sapiens
tacaagtaatgttac

SEQ ID NO: 1513791 - DNA, 15 bp, Homo sapiens
ttacaagtaatgtta

SEQ ID NO: 1513792 - DNA, 15 bp, Homo sapiens
cttacaagtaatgtt

SEQ ID NO: 1513793 - DNA, 15 bp, Homo sapiens
acttacaagtaatgt

SEQ ID NO: 1513794 - DNA, 15 bp, Homo sapiens
tacttacaagtaatg

SEQ ID NO: 1513795 - DNA, 15 bp, Homo sapiens
ttacttacaagtaat

SEQ ID NO: 1513796 - DNA, 15 bp, Homo sapiens
cttacttacaagtaa

SEQ ID NO: 1513797 - DNA, 15 bp, Homo sapiens
acttacttacaagta

SEQ ID NO: 1513798 - DNA, 15 bp, Homo sapiens
aacttacttacaagt

SEQ ID NO: 1513799 - DNA, 15 bp, Homo sapiens
aaacttacttacaag

SEQ ID NO: 1513800 - DNA, 15 bp, Homo sapiens
aaaacttacttacaa

SEQ ID NO: 1513801 - DNA, 15 bp, Homo sapiens
aaaaacttacttaca

SEQ ID NO: 1513802 - DNA, 15 bp, Homo sapiens
aaaaaacttacttac

SEQ ID NO: 1513803 - DNA, 15 bp, Homo sapiens
aaaaaaacttactta

SEQ ID NO: 1513804 - DNA, 15 bp, Homo sapiens
aaaaaaaacttactt

SEQ ID NO: 1513805 - DNA, 15 bp, Homo sapiens
aaaaaaaaacttact

SEQ ID NO: 1513806 - DNA, 15 bp, Homo sapiens
aaaaaaaaaacttac

SEQ ID NO: 1513807 - DNA, 15 bp, Homo sapiens
gaaaaaaaaaaactt

SEQ ID NO: 1513808 - DNA, 15 bp, Homo sapiens
agaaaaaaaaaaact

SEQ ID NO: 1513809 - DNA, 15 bp, Homo sapiens
gagaaaaaaaaaaac

SEQ ID NO: 1513810 - DNA, 15 bp, Homo sapiens
tgagaaaaaaaaaaa

SEQ ID NO: 1513811 - DNA, 15 bp, Homo sapiens
ctgagaaaaaaaaaa

SEQ ID NO: 1513812 - DNA, 15 bp, Homo sapiens
actgagaaaaaaaaa

SEQ ID NO: 1513813 - DNA, 15 bp, Homo sapiens
tactgagaaaaaaaa

SEQ ID NO: 1513814 - DNA, 15 bp, Homo sapiens
ttactgagaaaaaaa

SEQ ID NO: 1513815 - DNA, 15 bp, Homo sapiens
cttactgagaaaaaa

SEQ ID NO: 1513816 - DNA, 15 bp, Homo sapiens
tcttactgagaaaaa

SEQ ID NO: 1513817 - DNA, 15 bp, Homo sapiens
ttcttactgagaaaa

SEQ ID NO: 1513818 - DNA, 15 bp, Homo sapiens
attcttactgagaaa

SEQ ID NO: 1513819 - DNA, 15 bp, Homo sapiens
gattcttactgagaa

SEQ ID NO: 1513820 - DNA, 15 bp, Homo sapiens
agattcttactgaga

SEQ ID NO: 1513821 - DNA, 15 bp, Homo sapiens
tagattcttactgag

SEQ ID NO: 1513822 - DNA, 15 bp, Homo sapiens
ttagattcttactga

SEQ ID NO: 1513823 - DNA, 15 bp, Homo sapiens
attagattcttactg

SEQ ID NO: 1513824 - DNA, 15 bp, Homo sapiens
tattagattcttact

SEQ ID NO: 1513825 - DNA, 15 bp, Homo sapiens
atattagattcttac

SEQ ID NO: 1513826 - DNA, 15 bp, Homo sapiens
taaaatattagattc

SEQ ID NO: 1513827 - DNA, 15 bp, Homo sapiens
ataaaatattagatt

SEQ ID NO: 1513828 - DNA, 15 bp, Homo sapiens
aataaaatattagat

SEQ ID NO: 1513829 - DNA, 15 bp, Homo sapiens
aaataaaatattaga

SEQ ID NO: 1513830 - DNA, 15 bp, Homo sapiens
aaaataaaatattag

SEQ ID NO: 1513831 - DNA, 15 bp, Homo sapiens
caaaataaaatatta

SEQ ID NO: 1513832 - DNA, 15 bp, Homo sapiens
acaaaataaaatatt

SEQ ID NO: 1513833 - DNA, 15 bp, Homo sapiens
tacaaaataaaatat

SEQ ID NO: 1513834 - DNA, 15 bp, Homo sapiens
atacaaaataaaata

SEQ ID NO: 1513835 - DNA, 15 bp, Homo sapiens
tatacaaaataaaat

SEQ ID NO: 1513836 - DNA, 15 bp, Homo sapiens
atatacaaaataaaa

SEQ ID NO: 1513837 - DNA, 15 bp, Homo sapiens
catatacaaaataaa

SEQ ID NO: 1513838 - DNA, 15 bp, Homo sapiens
ccatatacaaaataa

SEQ ID NO: 1513839 - DNA, 15 bp, Homo sapiens
gccatatacaaaata

SEQ ID NO: 1513840 - DNA, 15 bp, Homo sapiens
tgccatatacaaaat

SEQ ID NO: 1513841 - DNA, 15 bp, Homo sapiens
ttgccatatacaaaa

SEQ ID NO: 1513842 - DNA, 15 bp, Homo sapiens
cttgccatatacaaa

SEQ ID NO: 1513843 - DNA, 15 bp, Homo sapiens
gcttgccatatacaa

SEQ ID NO: 1513844 - DNA, 15 bp, Homo sapiens
tgcttgccatataca

SEQ ID NO: 1513845 - DNA, 15 bp, Homo sapiens
atgcttgccatatac

SEQ ID NO: 1513846 - DNA, 15 bp, Homo sapiens
aatgcttgccatata

SEQ ID NO: 1513847 - DNA, 15 bp, Homo sapiens
aaatgcttgccatat

SEQ ID NO: 1513848 - DNA, 15 bp, Homo sapiens
aaaatgcttgccata

SEQ ID NO: 1513849 - DNA, 15 bp, Homo sapiens
aaaaatgcttgccat

SEQ ID NO: 1513850 - DNA, 15 bp, Homo sapiens
aaaaaatgcttgcca

SEQ ID NO: 1513851 - DNA, 15 bp, Homo sapiens
aaaaaaatgcttgcc

SEQ ID NO: 1513852 - DNA, 15 bp, Homo sapiens
gaaaaaaatgcttgc

SEQ ID NO: 1513853 - DNA, 15 bp, Homo sapiens
agaaaaaaatgcttg

SEQ ID NO: 1513854 - DNA, 15 bp, Homo sapiens
aagaaaaaaatgctt

SEQ ID NO: 1513855 - DNA, 15 bp, Homo sapiens
taagaaaaaaatgct

SEQ ID NO: 1513856 - DNA, 15 bp, Homo sapiens
ttaagaaaaaaatgc

SEQ ID NO: 1513857 - DNA, 15 bp, Homo sapiens
tttaagaaaaaaatg

SEQ ID NO: 1513858 - DNA, 15 bp, Homo sapiens
atttaagaaaaaaat

SEQ ID NO: 1513859 - DNA, 15 bp, Homo sapiens
aatttaagaaaaaaa

SEQ ID NO: 1513860 - DNA, 15 bp, Homo sapiens
gaatttaagaaaaaa

SEQ ID NO: 1513861 - DNA, 15 bp, Homo sapiens
tgaatttaagaaaaa

SEQ ID NO: 1513862 - DNA, 15 bp, Homo sapiens
ttgaatttaagaaaa

SEQ ID NO: 1513863 - DNA, 15 bp, Homo sapiens
attgaatttaagaaa

SEQ ID NO: 1513864 - DNA, 15 bp, Homo sapiens
aattgaatttaagaa

SEQ ID NO: 1513865 - DNA, 15 bp, Homo sapiens
caattgaatttaaga

SEQ ID NO: 1513866 - DNA, 15 bp, Homo sapiens
acaattgaatttaag

SEQ ID NO: 1513867 - DNA, 15 bp, Homo sapiens
tacaattgaatttaa

SEQ ID NO: 1513868 - DNA, 15 bp, Homo sapiens
ttacaattgaattta

SEQ ID NO: 1513869 - DNA, 15 bp, Homo sapiens
gttacaattgaattt

SEQ ID NO: 1513870 - DNA, 15 bp, Homo sapiens
agttacaattgaatt

SEQ ID NO: 1513871 - DNA, 15 bp, Homo sapiens
cagttacaattgaat

SEQ ID NO: 1513872 - DNA, 15 bp, Homo sapiens
ccagttacaattgaa

SEQ ID NO: 1513873 - DNA, 15 bp, Homo sapiens
accagttacaattga

SEQ ID NO: 1513874 - DNA, 15 bp, Homo sapiens
taccagttacaattg

SEQ ID NO: 1513875 - DNA, 15 bp, Homo sapiens
gtaccagttacaatt

SEQ ID NO: 1513876 - DNA, 15 bp, Homo sapiens
tgtaccagttacaat

SEQ ID NO: 1513877 - DNA, 15 bp, Homo sapiens
gtgtaccagttacaa

SEQ ID NO: 1513878 - DNA, 15 bp, Homo sapiens
tgtgtaccagttaca

SEQ ID NO: 1513879 - DNA, 15 bp, Homo sapiens
ttgtgtaccagttac

SEQ ID NO: 1513880 - DNA, 15 bp, Homo sapiens
gttgtgtaccagtta

SEQ ID NO: 1513881 - DNA, 15 bp, Homo sapiens
tgttgtgtaccagtt

SEQ ID NO: 1513882 - DNA, 15 bp, Homo sapiens
ttgttgtgtaccagt

SEQ ID NO: 1513883 - DNA, 15 bp, Homo sapiens
tttgttgtgtaccag

SEQ ID NO: 1513884 - DNA, 15 bp, Homo sapiens
ttttgttgtgtacca

SEQ ID NO: 1513885 - DNA, 15 bp, Homo sapiens
attttgttgtgtacc

SEQ ID NO: 1513886 - DNA, 15 bp, Homo sapiens
cattttgttgtgtac

SEQ ID NO: 1513887 - DNA, 15 bp, Homo sapiens
acattttgttgtgta

SEQ ID NO: 1513888 - DNA, 15 bp, Homo sapiens
tacattttgttgtgt

SEQ ID NO: 1513889 - DNA, 15 bp, Homo sapiens
ttacattttgttgtg

SEQ ID NO: 1513890 - DNA, 15 bp, Homo sapiens
tttacattttgttgt

SEQ ID NO: 1513891 - DNA, 15 bp, Homo sapiens
atttacattttgttg

SEQ ID NO: 1513892 - DNA, 15 bp, Homo sapiens
tatttacattttgtt

SEQ ID NO: 1513893 - DNA, 15 bp, Homo sapiens
atatttacattttgt

SEQ ID NO: 1513894 - DNA, 15 bp, Homo sapiens
catatttacattttg

SEQ ID NO: 1513895 - DNA, 15 bp, Homo sapiens
acatatttacatttt

SEQ ID NO: 1513896 - DNA, 15 bp, Homo sapiens
tacatatttacattt

SEQ ID NO: 1513897 - DNA, 15 bp, Homo sapiens
gtacatatttacatt

SEQ ID NO: 1513898 - DNA, 15 bp, Homo sapiens
agtacatatttacat

SEQ ID NO: 1513899 - DNA, 15 bp, Homo sapiens
tagtacatatttaca

SEQ ID NO: 1513900 - DNA, 15 bp, Homo sapiens
atagtacatatttac

SEQ ID NO: 1513901 - DNA, 15 bp, Homo sapiens
gatagtacatattta

SEQ ID NO: 1513902 - DNA, 15 bp, Homo sapiens
tgatagtacatattt

SEQ ID NO: 1513903 - DNA, 15 bp, Homo sapiens
ctgatagtacatatt

SEQ ID NO: 1513904 - DNA, 15 bp, Homo sapiens
cctgatagtacatat

SEQ ID NO: 1513905 - DNA, 15 bp, Homo sapiens
acctgatagtacata

SEQ ID NO: 1513906 - DNA, 15 bp, Homo sapiens
tacctgatagtacat

SEQ ID NO: 1513907 - DNA, 15 bp, Homo sapiens
atacctgatagtaca

SEQ ID NO: 1513908 - DNA, 15 bp, Homo sapiens
tatacctgatagtac

SEQ ID NO: 1513909 - DNA, 15 bp, Homo sapiens
ctatacctgatagta

SEQ ID NO: 1513910 - DNA, 15 bp, Homo sapiens
cctatacctgatagt

SEQ ID NO: 1513911 - DNA, 15 bp, Homo sapiens
tcctatacctgatag

SEQ ID NO: 1513912 - DNA, 15 bp, Homo sapiens
atcctatacctgata

SEQ ID NO: 1513913 - DNA, 15 bp, Homo sapiens
catcctatacctgat

SEQ ID NO: 1513914 - DNA, 15 bp, Homo sapiens
acatcctatacctga

SEQ ID NO: 1513915 - DNA, 15 bp, Homo sapiens
aacatcctatacctg

SEQ ID NO: 1513916 - DNA, 15 bp, Homo sapiens
aaacatcctatacct

SEQ ID NO: 1513917 - DNA, 15 bp, Homo sapiens
aaaacatcctatacc

SEQ ID NO: 1513918 - DNA, 15 bp, Homo sapiens
caaaacatcctatac

SEQ ID NO: 1513919 - DNA, 15 bp, Homo sapiens
ccaaaacatcctata

SEQ ID NO: 1513920 - DNA, 15 bp, Homo sapiens
cccaaaacatcctat

SEQ ID NO: 1513921 - DNA, 15 bp, Homo sapiens
ccccaaaacatccta

SEQ ID NO: 1513922 - DNA, 15 bp, Homo sapiens
cccccaaaacatcct

SEQ ID NO: 1513923 - DNA, 15 bp, Homo sapiens
acccccaaaacatcc

SEQ ID NO: 1513924 - DNA, 15 bp, Homo sapiens
cacccccaaaacatc

SEQ ID NO: 1513925 - DNA, 15 bp, Homo sapiens
acacccccaaaacat

SEQ ID NO: 1513926 - DNA, 15 bp, Homo sapiens
cacacccccaaaaca

SEQ ID NO: 1513927 - DNA, 15 bp, Homo sapiens
gcacacccccaaaac

SEQ ID NO: 1513928 - DNA, 15 bp, Homo sapiens
agcacacccccaaaa

SEQ ID NO: 1513929 - DNA, 15 bp, Homo sapiens
cagcacacccccaaa

SEQ ID NO: 1513930 - DNA, 15 bp, Homo sapiens
acagcacacccccaa

SEQ ID NO: 1513931 - DNA, 15 bp, Homo sapiens
aacagcacaccccca

SEQ ID NO: 1513932 - DNA, 15 bp, Homo sapiens
caacagcacaccccc

SEQ ID NO: 1513933 - DNA, 15 bp, Homo sapiens
tcaacagcacacccc

SEQ ID NO: 1513934 - DNA, 15 bp, Homo sapiens
ttcaacagcacaccc

SEQ ID NO: 1513935 - DNA, 15 bp, Homo sapiens
tttcaacagcacacc

SEQ ID NO: 1513936 - DNA, 15 bp, Homo sapiens
ttttcaacagcacac

SEQ ID NO: 1513937 - DNA, 15 bp, Homo sapiens
attttcaacagcaca

SEQ ID NO: 1513938 - DNA, 15 bp, Homo sapiens
aattttcaacagcac

SEQ ID NO: 1513939 - DNA, 15 bp, Homo sapiens
aaattttcaacagca

SEQ ID NO: 1513940 - DNA, 15 bp, Homo sapiens
taaattttcaacagc

SEQ ID NO: 1513941 - DNA, 15 bp, Homo sapiens
ctaaattttcaacag

SEQ ID NO: 1513942 - DNA, 15 bp, Homo sapiens
actaaattttcaaca

SEQ ID NO: 1513943 - DNA, 15 bp, Homo sapiens
aactaaattttcaac

SEQ ID NO: 1513944 - DNA, 15 bp, Homo sapiens
aaactaaattttcaa

SEQ ID NO: 1513945 - DNA, 15 bp, Homo sapiens
gaaactaaattttca

SEQ ID NO: 1513946 - DNA, 15 bp, Homo sapiens
tgaaactaaattttc

SEQ ID NO: 1513947 - DNA, 15 bp, Homo sapiens
gtgaaactaaatttt

SEQ ID NO: 1513948 - DNA, 15 bp, Homo sapiens
cgtgaaactaaattt

SEQ ID NO: 1513949 - DNA, 15 bp, Homo sapiens
acgtgaaactaaatt

SEQ ID NO: 1513950 - DNA, 15 bp, Homo sapiens
aacgtgaaactaaat

SEQ ID NO: 1513951 - DNA, 15 bp, Homo sapiens
taacgtgaaactaaa

SEQ ID NO: 1513952 - DNA, 15 bp, Homo sapiens
ataacgtgaaactaa

SEQ ID NO: 1513953 - DNA, 15 bp, Homo sapiens
tataacgtgaaacta

SEQ ID NO: 1513954 - DNA, 15 bp, Homo sapiens
ttataacgtgaaact

SEQ ID NO: 1513955 - DNA, 15 bp, Homo sapiens
tttataacgtgaaac

SEQ ID NO: 1513956 - DNA, 15 bp, Homo sapiens
ctttataacgtgaaa

SEQ ID NO: 1513957 - DNA, 15 bp, Homo sapiens
actttataacgtgaa

SEQ ID NO: 1513958 - DNA, 15 bp, Homo sapiens
aactttataacgtga

SEQ ID NO: 1513959 - DNA, 15 bp, Homo sapiens
caactttataacgtg

SEQ ID NO: 1513960 - DNA, 15 bp, Homo sapiens
tcaactttataacgt

SEQ ID NO: 1513961 - DNA, 15 bp, Homo sapiens
gtcaactttataacg

SEQ ID NO: 1513962 - DNA, 15 bp, Homo sapiens
ggtcaactttataac

SEQ ID NO: 1513963 - DNA, 15 bp, Homo sapiens
tggtcaactttataa

SEQ ID NO: 1513964 - DNA, 15 bp, Homo sapiens
gtggtcaactttata

SEQ ID NO: 1513965 - DNA, 15 bp, Homo sapiens
tgtggtcaactttat

SEQ ID NO: 1513966 - DNA, 15 bp, Homo sapiens
gtgtggtcaacttta

SEQ ID NO: 1513967 - DNA, 15 bp, Homo sapiens
agtgtggtcaacttt

SEQ ID NO: 1513968 - DNA, 15 bp, Homo sapiens
aagtgtggtcaactt

SEQ ID NO: 1513969 - DNA, 15 bp, Homo sapiens
aaagtgtggtcaact

SEQ ID NO: 1513970 - DNA, 15 bp, Homo sapiens
gaaagtgtggtcaac

SEQ ID NO: 1513971 - DNA, 15 bp, Homo sapiens
tgaaagtgtggtcaa

SEQ ID NO: 1513972 - DNA, 15 bp, Homo sapiens
atgaaagtgtggtca

SEQ ID NO: 1513973 - DNA, 15 bp, Homo sapiens
catgaaagtgtggtc

SEQ ID NO: 1513974 - DNA, 15 bp, Homo sapiens
acatgaaagtgtggt

SEQ ID NO: 1513975 - DNA, 15 bp, Homo sapiens
gacatgaaagtgtgg

SEQ ID NO: 1513976 - DNA, 15 bp, Homo sapiens
agacatgaaagtgtg

SEQ ID NO: 1513977 - DNA, 15 bp, Homo sapiens
cagacatgaaagtgt

SEQ ID NO: 1513978 - DNA, 15 bp, Homo sapiens
acagacatgaaagtg

SEQ ID NO: 1513979 - DNA, 15 bp, Homo sapiens
aacagacatgaaagt

SEQ ID NO: 1513980 - DNA, 15 bp, Homo sapiens
taacagacatgaaag

SEQ ID NO: 1513981 - DNA, 15 bp, Homo sapiens
ttaacagacatgaaa

SEQ ID NO: 1513982 - DNA, 15 bp, Homo sapiens
attaacagacatgaa

SEQ ID NO: 1513983 - DNA, 15 bp, Homo sapiens
gattaacagacatga

SEQ ID NO: 1513984 - DNA, 15 bp, Homo sapiens
agattaacagacatg

SEQ ID NO: 1513985 - DNA, 15 bp, Homo sapiens
aagattaacagacat

SEQ ID NO: 1513986 - DNA, 15 bp, Homo sapiens
taagattaacagaca

SEQ ID NO: 1513987 - DNA, 15 bp, Homo sapiens
ctaagattaacagac

SEQ ID NO: 1513988 - DNA, 15 bp, Homo sapiens
actaagattaacaga

SEQ ID NO: 1513989 - DNA, 15 bp, Homo sapiens
tactaagattaacag

SEQ ID NO: 1513990 - DNA, 15 bp, Homo sapiens
ttactaagattaaca

SEQ ID NO: 1513991 - DNA, 15 bp, Homo sapiens
tttactaagattaac

SEQ ID NO: 1513992 - DNA, 15 bp, Homo sapiens
atttactaagattaa

SEQ ID NO: 1513993 - DNA, 15 bp, Homo sapiens
aatttactaagatta

SEQ ID NO: 1513994 - DNA, 15 bp, Homo sapiens
taatttactaagatt

SEQ ID NO: 1513995 - DNA, 15 bp, Homo sapiens
ataatttactaagat

SEQ ID NO: 1513996 - DNA, 15 bp, Homo sapiens
cataatttactaaga

SEQ ID NO: 1513997 - DNA, 15 bp, Homo sapiens
tcataatttactaag

SEQ ID NO: 1513998 - DNA, 15 bp, Homo sapiens
atcataatttactaa

SEQ ID NO: 1513999 - DNA, 15 bp, Homo sapiens
gatcataatttacta

SEQ ID NO: 1514000 - DNA, 15 bp, Homo sapiens
tgatcataatttact

SEQ ID NO: 1514001 - DNA, 15 bp, Homo sapiens
atgatcataatttac

SEQ ID NO: 1514002 - DNA, 15 bp, Homo sapiens
gatgatcataattta

SEQ ID NO: 1514003 - DNA, 15 bp, Homo sapiens
agatgatcataattt

SEQ ID NO: 1514004 - DNA, 15 bp, Homo sapiens
aagatgatcataatt

SEQ ID NO: 1514005 - DNA, 15 bp, Homo sapiens
aaagatgatcataat

SEQ ID NO: 1514006 - DNA, 15 bp, Homo sapiens
caaagatgatcataa

SEQ ID NO: 1514007 - DNA, 15 bp, Homo sapiens
acaaagatgatcata

SEQ ID NO: 1514008 - DNA, 15 bp, Homo sapiens
cacaaagatgatcat

SEQ ID NO: 1514009 - DNA, 15 bp, Homo sapiens
acacaaagatgatca

SEQ ID NO: 1514010 - DNA, 15 bp, Homo sapiens
cacacaaagatgatc

SEQ ID NO: 1514011 - DNA, 15 bp, Homo sapiens
tcacacaaagatgat

SEQ ID NO: 1514012 - DNA, 15 bp, Homo sapiens
ttcacacaaagatga

SEQ ID NO: 1514013 - DNA, 15 bp, Homo sapiens
tttcacacaaagatg

SEQ ID NO: 1514014 - DNA, 15 bp, Homo sapiens
ttttcacacaaagat

SEQ ID NO: 1514015 - DNA, 15 bp, Homo sapiens
tttttcacacaaaga

SEQ ID NO: 1514016 - DNA, 15 bp, Homo sapiens
atttttcacacaaag

SEQ ID NO: 1514017 - DNA, 15 bp, Homo sapiens
aatttttcacacaaa

SEQ ID NO: 1514018 - DNA, 15 bp, Homo sapiens
aaatttttcacacaa

SEQ ID NO: 1514019 - DNA, 15 bp, Homo sapiens
caaatttttcacaca

SEQ ID NO: 1514020 - DNA, 15 bp, Homo sapiens
ccaaatttttcacac

SEQ ID NO: 1514021 - DNA, 15 bp, Homo sapiens
accaaatttttcaca

SEQ ID NO: 1514022 - DNA, 15 bp, Homo sapiens
gaccaaatttttcac

SEQ ID NO: 1514023 - DNA, 15 bp, Homo sapiens
agaccaaatttttca

SEQ ID NO: 1514024 - DNA, 15 bp, Homo sapiens
cagaccaaatttttc

SEQ ID NO: 1514025 - DNA, 15 bp, Homo sapiens
gcagaccaaattttt

SEQ ID NO: 1514026 - DNA, 15 bp, Homo sapiens
agcagaccaaatttt

SEQ ID NO: 1514027 - DNA, 15 bp, Homo sapiens
aagcagaccaaattt

SEQ ID NO: 1514028 - DNA, 15 bp, Homo sapiens
aaagcagaccaaatt

SEQ ID NO: 1514029 - DNA, 15 bp, Homo sapiens
gaaagcagaccaaat

SEQ ID NO: 1514030 - DNA, 15 bp, Homo sapiens
tgaaagcagaccaaa

SEQ ID NO: 1514031 - DNA, 15 bp, Homo sapiens
atgaaagcagaccaa

SEQ ID NO: 1514032 - DNA, 15 bp, Homo sapiens
aatgaaagcagacca

SEQ ID NO: 1514033 - DNA, 15 bp, Homo sapiens
taatgaaagcagacc

SEQ ID NO: 1514034 - DNA, 15 bp, Homo sapiens
gtaatgaaagcagac

SEQ ID NO: 1514035 - DNA, 15 bp, Homo sapiens
agtaatgaaagcaga

SEQ ID NO: 1514036 - DNA, 15 bp, Homo sapiens
gagtaatgaaagcag

SEQ ID NO: 1514037 - DNA, 15 bp, Homo sapiens
tgagtaatgaaagca

SEQ ID NO: 1514038 - DNA, 15 bp, Homo sapiens
atgagtaatgaaagc

SEQ ID NO: 1514039 - DNA, 15 bp, Homo sapiens
gatgagtaatgaaag

SEQ ID NO: 1514040 - DNA, 15 bp, Homo sapiens
tgatgagtaatgaaa

SEQ ID NO: 1514041 - DNA, 15 bp, Homo sapiens
ttgatgagtaatgaa

SEQ ID NO: 1514042 - DNA, 15 bp, Homo sapiens
tttgatgagtaatga

SEQ ID NO: 1514043 - DNA, 15 bp, Homo sapiens
gtttgatgagtaatg

SEQ ID NO: 1514044 - DNA, 15 bp, Homo sapiens
tgtttgatgagtaat

SEQ ID NO: 1514045 - DNA, 15 bp, Homo sapiens
atgtttgatgagtaa

SEQ ID NO: 1514046 - DNA, 15 bp, Homo sapiens
catgtttgatgagta

SEQ ID NO: 1514047 - DNA, 15 bp, Homo sapiens
gcatgtttgatgagt

SEQ ID NO: 1514048 - DNA, 15 bp, Homo sapiens
tgcatgtttgatgag

SEQ ID NO: 1514049 - DNA, 15 bp, Homo sapiens
ctgcatgtttgatga

SEQ ID NO: 1514050 - DNA, 15 bp, Homo sapiens
actgcatgtttgatg

SEQ ID NO: 1514051 - DNA, 15 bp, Homo sapiens
tactgcatgtttgat

SEQ ID NO: 1514052 - DNA, 15 bp, Homo sapiens
atactgcatgtttga

SEQ ID NO: 1514053 - DNA, 15 bp, Homo sapiens
tatactgcatgtttg

SEQ ID NO: 1514054 - DNA, 15 bp, Homo sapiens
ttatactgcatgttt

SEQ ID NO: 1514055 - DNA, 15 bp, Homo sapiens
cttatactgcatgtt

SEQ ID NO: 1514056 - DNA, 15 bp, Homo sapiens
acttatactgcatgt

SEQ ID NO: 1514057 - DNA, 15 bp, Homo sapiens
cacttatactgcatg

SEQ ID NO: 1514058 - DNA, 15 bp, Homo sapiens
tcacttatactgcat

SEQ ID NO: 1514059 - DNA, 15 bp, Homo sapiens
atcacttatactgca

SEQ ID NO: 1514060 - DNA, 15 bp, Homo sapiens
catcacttatactgc

SEQ ID NO: 1514061 - DNA, 15 bp, Homo sapiens
tcatcacttatactg

SEQ ID NO: 1514062 - DNA, 15 bp, Homo sapiens
atcatcacttatact

SEQ ID NO: 1514063 - DNA, 15 bp, Homo sapiens
tatcatcacttatac

SEQ ID NO: 1514064 - DNA, 15 bp, Homo sapiens
gtatcatcacttata

SEQ ID NO: 1514065 - DNA, 15 bp, Homo sapiens
tgtatcatcacttat

SEQ ID NO: 1514066 - DNA, 15 bp, Homo sapiens
ctgtatcatcactta

SEQ ID NO: 1514067 - DNA, 15 bp, Homo sapiens
actgtatcatcactt

SEQ ID NO: 1514068 - DNA, 15 bp, Homo sapiens
cactgtatcatcact

SEQ ID NO: 1514069 - DNA, 15 bp, Homo sapiens
tcactgtatcatcac

SEQ ID NO: 1514070 - DNA, 15 bp, Homo sapiens
ttcactgtatcatca

SEQ ID NO: 1514071 - DNA, 15 bp, Homo sapiens
cttcactgtatcatc

SEQ ID NO: 1514072 - DNA, 15 bp, Homo sapiens
tcttcactgtatcat

SEQ ID NO: 1514073 - DNA, 15 bp, Homo sapiens
atcttcactgtatca

SEQ ID NO: 1514074 - DNA, 15 bp, Homo sapiens
gatcttcactgtatc

SEQ ID NO: 1514075 - DNA, 15 bp, Homo sapiens
agatcttcactgtat

SEQ ID NO: 1514076 - DNA, 15 bp, Homo sapiens
aagatcttcactgta

SEQ ID NO: 1514077 - DNA, 15 bp, Homo sapiens
aaagatcttcactgt

SEQ ID NO: 1514078 - DNA, 15 bp, Homo sapiens
aaaagatcttcactg

SEQ ID NO: 1514079 - DNA, 15 bp, Homo sapiens
aaaaagatcttcact

SEQ ID NO: 1514080 - DNA, 15 bp, Homo sapiens
aaaaaagatcttcac

SEQ ID NO: 1514081 - DNA, 15 bp, Homo sapiens
gaaaaaagatcttca

SEQ ID NO: 1514082 - DNA, 15 bp, Homo sapiens
tgaaaaaagatcttc

SEQ ID NO: 1514083 - DNA, 15 bp, Homo sapiens
ctgaaaaaagatctt

SEQ ID NO: 1514084 - DNA, 15 bp, Homo sapiens
cctgaaaaaagatct

SEQ ID NO: 1514085 - DNA, 15 bp, Homo sapiens
acctgaaaaaagatc

SEQ ID NO: 1514086 - DNA, 15 bp, Homo sapiens
aacctgaaaaaagat

SEQ ID NO: 1514087 - DNA, 15 bp, Homo sapiens
aaacctgaaaaaaga

SEQ ID NO: 1514088 - DNA, 15 bp, Homo sapiens
gaaacctgaaaaaag

SEQ ID NO: 1514089 - DNA, 15 bp, Homo sapiens
agaaacctgaaaaaa

SEQ ID NO: 1514090 - DNA, 15 bp, Homo sapiens
aagaaacctgaaaaa

SEQ ID NO: 1514091 - DNA, 15 bp, Homo sapiens
gaagaaacctgaaaa

SEQ ID NO: 1514092 - DNA, 15 bp, Homo sapiens
agaagaaacctgaaa

SEQ ID NO: 1514093 - DNA, 15 bp, Homo sapiens
tagaagaaacctgaa

SEQ ID NO: 1514094 - DNA, 15 bp, Homo sapiens
gtagaagaaacctga

SEQ ID NO: 1514095 - DNA, 15 bp, Homo sapiens
ggtagaagaaacctg

SEQ ID NO: 1514096 - DNA, 15 bp, Homo sapiens
gggtagaagaaacct

SEQ ID NO: 1514097 - DNA, 15 bp, Homo sapiens
tgggtagaagaaacc

SEQ ID NO: 1514098 - DNA, 15 bp, Homo sapiens
atgggtagaagaaac

SEQ ID NO: 1514099 - DNA, 15 bp, Homo sapiens
gatgggtagaagaaa

SEQ ID NO: 1514100 - DNA, 15 bp, Homo sapiens
agatgggtagaagaa

SEQ ID NO: 1514101 - DNA, 15 bp, Homo sapiens
gagatgggtagaaga

SEQ ID NO: 1514102 - DNA, 15 bp, Homo sapiens
tgagatgggtagaag

SEQ ID NO: 1514103 - DNA, 15 bp, Homo sapiens
atgagatgggtagaa

SEQ ID NO: 1514104 - DNA, 15 bp, Homo sapiens
gatgagatgggtaga

SEQ ID NO: 1514105 - DNA, 15 bp, Homo sapiens
ggatgagatgggtag

SEQ ID NO: 1514106 - DNA, 15 bp, Homo sapiens
tggatgagatgggta

SEQ ID NO: 1514107 - DNA, 15 bp, Homo sapiens
atggatgagatgggt

SEQ ID NO: 1514108 - DNA, 15 bp, Homo sapiens
catggatgagatggg

SEQ ID NO: 1514109 - DNA, 15 bp, Homo sapiens
tcatggatgagatgg

SEQ ID NO: 1514110 - DNA, 15 bp, Homo sapiens
ctcatggatgagatg

SEQ ID NO: 1514111 - DNA, 15 bp, Homo sapiens
cctcatggatgagat

SEQ ID NO: 1514112 - DNA, 15 bp, Homo sapiens
acctcatggatgaga

SEQ ID NO: 1514113 - DNA, 15 bp, Homo sapiens
aacctcatggatgag

SEQ ID NO: 1514114 - DNA, 15 bp, Homo sapiens
aaacctcatggatga

SEQ ID NO: 1514115 - DNA, 15 bp, Homo sapiens
aaaacctcatggatg

SEQ ID NO: 1514116 - DNA, 15 bp, Homo sapiens
aaaaacctcatggat

SEQ ID NO: 1514117 - DNA, 15 bp, Homo sapiens
gaaaaacctcatgga

SEQ ID NO: 1514118 - DNA, 15 bp, Homo sapiens
agaaaaacctcatgg

SEQ ID NO: 1514119 - DNA, 15 bp, Homo sapiens
aagaaaaacctcatg

SEQ ID NO: 1514120 - DNA, 15 bp, Homo sapiens
aaagaaaaacctcat

SEQ ID NO: 1514121 - DNA, 15 bp, Homo sapiens
gaaagaaaaacctca

SEQ ID NO: 1514122 - DNA, 15 bp, Homo sapiens
ggaaagaaaaacctc

SEQ ID NO: 1514123 - DNA, 15 bp, Homo sapiens
aggaaagaaaaacct

SEQ ID NO: 1514124 - DNA, 15 bp, Homo sapiens
gaggaaagaaaaacc

SEQ ID NO: 1514125 - DNA, 15 bp, Homo sapiens
agaggaaagaaaaac

SEQ ID NO: 1514126 - DNA, 15 bp, Homo sapiens
cagaggaaagaaaaa

SEQ ID NO: 1514127 - DNA, 15 bp, Homo sapiens
tcagaggaaagaaaa

SEQ ID NO: 1514128 - DNA, 15 bp, Homo sapiens
ctcagaggaaagaaa

SEQ ID NO: 1514129 - DNA, 15 bp, Homo sapiens
tctcagaggaaagaa

SEQ ID NO: 1514130 - DNA, 15 bp, Homo sapiens
atctcagaggaaaga

SEQ ID NO: 1514131 - DNA, 15 bp, Homo sapiens
tatctcagaggaaag

SEQ ID NO: 1514132 - DNA, 15 bp, Homo sapiens
gtatctcagaggaaa

SEQ ID NO: 1514133 - DNA, 15 bp, Homo sapiens
ggtatctcagaggaa

SEQ ID NO: 1514134 - DNA, 15 bp, Homo sapiens
aggtatctcagagga

SEQ ID NO: 1514135 - DNA, 15 bp, Homo sapiens
aaggtatctcagagg

SEQ ID NO: 1514136 - DNA, 15 bp, Homo sapiens
taaggtatctcagag

SEQ ID NO: 1514137 - DNA, 15 bp, Homo sapiens
ttaaggtatctcaga

SEQ ID NO: 1514138 - DNA, 15 bp, Homo sapiens
attaaggtatctcag

SEQ ID NO: 1514139 - DNA, 15 bp, Homo sapiens
aattaaggtatctca

SEQ ID NO: 1514140 - DNA, 15 bp, Homo sapiens
caattaaggtatctc

SEQ ID NO: 1514141 - DNA, 15 bp, Homo sapiens
acaattaaggtatct

SEQ ID NO: 1514142 - DNA, 15 bp, Homo sapiens
tacaattaaggtatc

SEQ ID NO: 1514143 - DNA, 15 bp, Homo sapiens
gtacaattaaggtat

SEQ ID NO: 1514144 - DNA, 15 bp, Homo sapiens
agtacaattaaggta

SEQ ID NO: 1514145 - DNA, 15 bp, Homo sapiens
aagtacaattaaggt

SEQ ID NO: 1514146 - DNA, 15 bp, Homo sapiens
aaagtacaattaagg

SEQ ID NO: 1514147 - DNA, 15 bp, Homo sapiens
taaagtacaattaag

SEQ ID NO: 1514148 - DNA, 15 bp, Homo sapiens
ttaaagtacaattaa

SEQ ID NO: 1514149 - DNA, 15 bp, Homo sapiens
attaaagtacaatta

SEQ ID NO: 1514150 - DNA, 15 bp, Homo sapiens
tattaaagtacaatt

SEQ ID NO: 1514151 - DNA, 15 bp, Homo sapiens
atattaaagtacaat

SEQ ID NO: 1514152 - DNA, 15 bp, Homo sapiens
catattaaagtacaa

SEQ ID NO: 1514153 - DNA, 15 bp, Homo sapiens
tcatattaaagtaca

SEQ ID NO: 1514154 - DNA, 15 bp, Homo sapiens
atcatattaaagtac

SEQ ID NO: 1514155 - DNA, 15 bp, Homo sapiens
tatcatattaaagta

SEQ ID NO: 1514156 - DNA, 15 bp, Homo sapiens
atatcatattaaagt

SEQ ID NO: 1514157 - DNA, 15 bp, Homo sapiens
tatatcatattaaag

SEQ ID NO: 1514158 - DNA, 15 bp, Homo sapiens
ttatatcatattaaa

SEQ ID NO: 1514159 - DNA, 15 bp, Homo sapiens
cttatatcatattaa

SEQ ID NO: 1514160 - DNA, 15 bp, Homo sapiens
tcttatatcatatta

SEQ ID NO: 1514161 - DNA, 15 bp, Homo sapiens
gtcttatatcatatt

SEQ ID NO: 1514162 - DNA, 15 bp, Homo sapiens
agtcttatatcatat

SEQ ID NO: 1514163 - DNA, 15 bp, Homo sapiens
tagtcttatatcata

SEQ ID NO: 1514164 - DNA, 15 bp, Homo sapiens
ctagtcttatatcat

SEQ ID NO: 1514165 - DNA, 15 bp, Homo sapiens
tctagtcttatatca

SEQ ID NO: 1514166 - DNA, 15 bp, Homo sapiens
ttctagtcttatatc

SEQ ID NO: 1514167 - DNA, 15 bp, Homo sapiens
attctagtcttatat

SEQ ID NO: 1514168 - DNA, 15 bp, Homo sapiens
aattctagtcttata

SEQ ID NO: 1514169 - DNA, 15 bp, Homo sapiens
caattctagtcttat

SEQ ID NO: 1514170 - DNA, 15 bp, Homo sapiens
tcaattctagtctta

SEQ ID NO: 1514171 - DNA, 15 bp, Homo sapiens
ctcaattctagtctt

SEQ ID NO: 1514172 - DNA, 15 bp, Homo sapiens
tctcaattctagtct

SEQ ID NO: 1514173 - DNA, 15 bp, Homo sapiens
ctctcaattctagtc

SEQ ID NO: 1514174 - DNA, 15 bp, Homo sapiens
cctctcaattctagt

SEQ ID NO: 1514175 - DNA, 15 bp, Homo sapiens
tcctctcaattctag

SEQ ID NO: 1514176 - DNA, 15 bp, Homo sapiens
ttcctctcaattcta

SEQ ID NO: 1514177 - DNA, 15 bp, Homo sapiens
tttcctctcaattct

SEQ ID NO: 1514178 - DNA, 15 bp, Homo sapiens
gtttcctctcaattc

SEQ ID NO: 1514179 - DNA, 15 bp, Homo sapiens
agtttcctctcaatt

SEQ ID NO: 1514180 - DNA, 15 bp, Homo sapiens
aagtttcctctcaat

SEQ ID NO: 1514181 - DNA, 15 bp, Homo sapiens
aaagtttcctctcaa

SEQ ID NO: 1514182 - DNA, 15 bp, Homo sapiens
taaagtttcctctca

SEQ ID NO: 1514183 - DNA, 15 bp, Homo sapiens
ataaagtttcctctc

SEQ ID NO: 1514184 - DNA, 15 bp, Homo sapiens
aataaagtttcctct

SEQ ID NO: 1514185 - DNA, 15 bp, Homo sapiens
aaataaagtttcctc

SEQ ID NO: 1514186 - DNA, 15 bp, Homo sapiens
aaaataaagtttcct

SEQ ID NO: 1514187 - DNA, 15 bp, Homo sapiens
gaaaataaagtttcc

SEQ ID NO: 1514188 - DNA, 15 bp, Homo sapiens
agaaaataaagtttc

SEQ ID NO: 1514189 - DNA, 15 bp, Homo sapiens
gagaaaataaagttt

SEQ ID NO: 1514190 - DNA, 15 bp, Homo sapiens
tgagaaaataaagtt

SEQ ID NO: 1514191 - DNA, 15 bp, Homo sapiens
atgagaaaataaagt

SEQ ID NO: 1514192 - DNA, 15 bp, Homo sapiens
catgagaaaataaag

SEQ ID NO: 1514193 - DNA, 15 bp, Homo sapiens
acatgagaaaataaa

SEQ ID NO: 1514194 - DNA, 15 bp, Homo sapiens
aacatgagaaaataa

SEQ ID NO: 1514195 - DNA, 15 bp, Homo sapiens
aaacatgagaaaata

SEQ ID NO: 1514196 - DNA, 15 bp, Homo sapiens
aaaacatgagaaaat

SEQ ID NO: 1514197 - DNA, 15 bp, Homo sapiens
caaaacatgagaaaa

SEQ ID NO: 1514198 - DNA, 15 bp, Homo sapiens
ccaaaacatgagaaa

SEQ ID NO: 1514199 - DNA, 15 bp, Homo sapiens
cccaaaacatgagaa

SEQ ID NO: 1514200 - DNA, 15 bp, Homo sapiens
tcccaaaacatgaga

SEQ ID NO: 1514201 - DNA, 15 bp, Homo sapiens
ctcccaaaacatgag

SEQ ID NO: 1514202 - DNA, 15 bp, Homo sapiens
tctcccaaaacatga

SEQ ID NO: 1514203 - DNA, 15 bp, Homo sapiens
ttctcccaaaacatg

SEQ ID NO: 1514204 - DNA, 15 bp, Homo sapiens
cttctcccaaaacat

SEQ ID NO: 1514205 - DNA, 15 bp, Homo sapiens
tcttctcccaaaaca

SEQ ID NO: 1514206 - DNA, 15 bp, Homo sapiens
ttcttctcccaaaac

SEQ ID NO: 1514207 - DNA, 15 bp, Homo sapiens
tttcttctcccaaaa

SEQ ID NO: 1514208 - DNA, 15 bp, Homo sapiens
tttttcttctcccaa

SEQ ID NO: 1514209 - DNA, 15 bp, Homo sapiens
ttttttcttctccca

SEQ ID NO: 1514210 - DNA, 15 bp, Homo sapiens
tttttttcttctccc

SEQ ID NO: 1514211 - DNA, 15 bp, Homo sapiens
atttttttcttctcc

SEQ ID NO: 1514212 - DNA, 15 bp, Homo sapiens
tatttttttcttctc

SEQ ID NO: 1514213 - DNA, 15 bp, Homo sapiens
ctatttttttcttct

SEQ ID NO: 1514214 - DNA, 15 bp, Homo sapiens
tctatttttttcttc

SEQ ID NO: 1514215 - DNA, 15 bp, Homo sapiens
ttctatttttttctt

SEQ ID NO: 1514216 - DNA, 15 bp, Homo sapiens
tttctatttttttct

SEQ ID NO: 1514217 - DNA, 15 bp, Homo sapiens
atttctatttttttc

SEQ ID NO: 1514218 - DNA, 15 bp, Homo sapiens
tatttctattttttt

SEQ ID NO: 1514219 - DNA, 15 bp, Homo sapiens
atatttctatttttt

SEQ ID NO: 1514220 - DNA, 15 bp, Homo sapiens
catatttctattttt

SEQ ID NO: 1514221 - DNA, 15 bp, Homo sapiens
acatatttctatttt

SEQ ID NO: 1514222 - DNA, 15 bp, Homo sapiens
gacatatttctattt

SEQ ID NO: 1514223 - DNA, 15 bp, Homo sapiens
tgacatatttctatt

SEQ ID NO: 1514224 - DNA, 15 bp, Homo sapiens
atgacatatttctat

SEQ ID NO: 1514225 - DNA, 15 bp, Homo sapiens
aatgacatatttcta

SEQ ID NO: 1514226 - DNA, 15 bp, Homo sapiens
gaatgacatatttct

SEQ ID NO: 1514227 - DNA, 15 bp, Homo sapiens
tgaatgacatatttc

SEQ ID NO: 1514228 - DNA, 15 bp, Homo sapiens
atgaatgacatattt

SEQ ID NO: 1514229 - DNA, 15 bp, Homo sapiens
catgaatgacatatt

SEQ ID NO: 1514230 - DNA, 15 bp, Homo sapiens
tcatgaatgacatat

SEQ ID NO: 1514231 - DNA, 15 bp, Homo sapiens
ctcatgaatgacata

SEQ ID NO: 1514232 - DNA, 15 bp, Homo sapiens
cctcatgaatgacat

SEQ ID NO: 1514233 - DNA, 15 bp, Homo sapiens
tcctcatgaatgaca

SEQ ID NO: 1514234 - DNA, 15 bp, Homo sapiens
gtcctcatgaatgac

SEQ ID NO: 1514235 - DNA, 15 bp, Homo sapiens
agtcctcatgaatga

SEQ ID NO: 1514236 - DNA, 15 bp, Homo sapiens
cagtcctcatgaatg

SEQ ID NO: 1514237 - DNA, 15 bp, Homo sapiens
tcagtcctcatgaat

SEQ ID NO: 1514238 - DNA, 15 bp, Homo sapiens
atcagtcctcatgaa

SEQ ID NO: 1514239 - DNA, 15 bp, Homo sapiens
aatcagtcctcatga

SEQ ID NO: 1514240 - DNA, 15 bp, Homo sapiens
caatcagtcctcatg

SEQ ID NO: 1514241 - DNA, 15 bp, Homo sapiens
tcaatcagtcctcat

SEQ ID NO: 1514242 - DNA, 15 bp, Homo sapiens
atcaatcagtcctca

SEQ ID NO: 1514243 - DNA, 15 bp, Homo sapiens
aatcaatcagtcctc

SEQ ID NO: 1514244 - DNA, 15 bp, Homo sapiens
gaatcaatcagtcct

SEQ ID NO: 1514245 - DNA, 15 bp, Homo sapiens
tgaatcaatcagtcc

SEQ ID NO: 1514246 - DNA, 15 bp, Homo sapiens
ctgaatcaatcagtc

SEQ ID NO: 1514247 - DNA, 15 bp, Homo sapiens
tctgaatcaatcagt

SEQ ID NO: 1514248 - DNA, 15 bp, Homo sapiens
ctctgaatcaatcag

SEQ ID NO: 1514249 - DNA, 15 bp, Homo sapiens
actctgaatcaatca

SEQ ID NO: 1514250 - DNA, 15 bp, Homo sapiens
aactctgaatcaatc

SEQ ID NO: 1514251 - DNA, 15 bp, Homo sapiens
aaactctgaatcaat

SEQ ID NO: 1514252 - DNA, 15 bp, Homo sapiens
aaaactctgaatcaa

SEQ ID NO: 1514253 - DNA, 15 bp, Homo sapiens
aaaaactctgaatca

SEQ ID NO: 1514254 - DNA, 15 bp, Homo sapiens
taaaaactctgaatc

SEQ ID NO: 1514255 - DNA, 15 bp, Homo sapiens
ataaaaactctgaat

SEQ ID NO: 1514256 - DNA, 15 bp, Homo sapiens
cataaaaactctgaa

SEQ ID NO: 1514257 - DNA, 15 bp, Homo sapiens
gcataaaaactctga

SEQ ID NO: 1514258 - DNA, 15 bp, Homo sapiens
tgcataaaaactctg

SEQ ID NO: 1514259 - DNA, 15 bp, Homo sapiens
ttgcataaaaactct

SEQ ID NO: 1514260 - DNA, 15 bp, Homo sapiens
tttgcataaaaactc

SEQ ID NO: 1514261 - DNA, 15 bp, Homo sapiens
ctttgcataaaaact

SEQ ID NO: 1514262 - DNA, 15 bp, Homo sapiens
actttgcataaaaac

SEQ ID NO: 1514263 - DNA, 15 bp, Homo sapiens
aactttgcataaaaa

SEQ ID NO: 1514264 - DNA, 15 bp, Homo sapiens
aaactttgcataaaa

SEQ ID NO: 1514265 - DNA, 15 bp, Homo sapiens
caaactttgcataaa

SEQ ID NO: 1514266 - DNA, 15 bp, Homo sapiens
tcaaactttgcataa

SEQ ID NO: 1514267 - DNA, 15 bp, Homo sapiens
gtcaaactttgcata

SEQ ID NO: 1514268 - DNA, 15 bp, Homo sapiens
ggtcaaactttgcat

SEQ ID NO: 1514269 - DNA, 15 bp, Homo sapiens
aggtcaaactttgca

SEQ ID NO: 1514270 - DNA, 15 bp, Homo sapiens
aaggtcaaactttgc

SEQ ID NO: 1514271 - DNA, 15 bp, Homo sapiens
aaaggtcaaactttg

SEQ ID NO: 1514272 - DNA, 15 bp, Homo sapiens
caaaggtcaaacttt

SEQ ID NO: 1514273 - DNA, 15 bp, Homo sapiens
tcaaaggtcaaactt

SEQ ID NO: 1514274 - DNA, 15 bp, Homo sapiens
ttcaaaggtcaaact

SEQ ID NO: 1514275 - DNA, 15 bp, Homo sapiens
gttcaaaggtcaaac

SEQ ID NO: 1514276 - DNA, 15 bp, Homo sapiens
agttcaaaggtcaaa

SEQ ID NO: 1514277 - DNA, 15 bp, Homo sapiens
gagttcaaaggtcaa

SEQ ID NO: 1514278 - DNA, 15 bp, Homo sapiens
agagttcaaaggtca

SEQ ID NO: 1514279 - DNA, 15 bp, Homo sapiens
aagagttcaaaggtc

SEQ ID NO: 1514280 - DNA, 15 bp, Homo sapiens
aaagagttcaaaggt

SEQ ID NO: 1514281 - DNA, 15 bp, Homo sapiens
caaagagttcaaagg

SEQ ID NO: 1514282 - DNA, 15 bp, Homo sapiens
acaaagagttcaaag

SEQ ID NO: 1514283 - DNA, 15 bp, Homo sapiens
aacaaagagttcaaa

SEQ ID NO: 1514284 - DNA, 15 bp, Homo sapiens
aaacaaagagttcaa

SEQ ID NO: 1514285 - DNA, 15 bp, Homo sapiens
aaaacaaagagttca

SEQ ID NO: 1514286 - DNA, 15 bp, Homo sapiens
gaaaacaaagagttc

SEQ ID NO: 1514287 - DNA, 15 bp, Homo sapiens
tgaaaacaaagagtt

SEQ ID NO: 1514288 - DNA, 15 bp, Homo sapiens
atgaaaacaaagagt

SEQ ID NO: 1514289 - DNA, 15 bp, Homo sapiens
catgaaaacaaagag

SEQ ID NO: 1514290 - DNA, 15 bp, Homo sapiens
acatgaaaacaaaga

SEQ ID NO: 1514291 - DNA, 15 bp, Homo sapiens
gacatgaaaacaaag

SEQ ID NO: 1514292 - DNA, 15 bp, Homo sapiens
agacatgaaaacaaa

SEQ ID NO: 1514293 - DNA, 15 bp, Homo sapiens
aagacatgaaaacaa

SEQ ID NO: 1514294 - DNA, 15 bp, Homo sapiens
aaagacatgaaaaca

SEQ ID NO: 1514295 - DNA, 15 bp, Homo sapiens
taaagacatgaaaac

SEQ ID NO: 1514296 - DNA, 15 bp, Homo sapiens
ataaagacatgaaaa

SEQ ID NO: 1514297 - DNA, 15 bp, Homo sapiens
tataaagacatgaaa

SEQ ID NO: 1514298 - DNA, 15 bp, Homo sapiens
atataaagacatgaa

SEQ ID NO: 1514299 - DNA, 15 bp, Homo sapiens
aatataaagacatga

SEQ ID NO: 1514300 - DNA, 15 bp, Homo sapiens
taatataaagacatg

SEQ ID NO: 1514301 - DNA, 15 bp, Homo sapiens
ttaatataaagacat

SEQ ID NO: 1514302 - DNA, 15 bp, Homo sapiens
attaatataaagaca

SEQ ID NO: 1514303 - DNA, 15 bp, Homo sapiens
aattaatataaagac

SEQ ID NO: 1514304 - DNA, 15 bp, Homo sapiens
gaattaatataaaga

SEQ ID NO: 1514305 - DNA, 15 bp, Homo sapiens
tgaattaatataaag

SEQ ID NO: 1514306 - DNA, 15 bp, Homo sapiens
ttgaattaatataaa

SEQ ID NO: 1514307 - DNA, 15 bp, Homo sapiens
tttgaattaatataa

SEQ ID NO: 1514308 - DNA, 15 bp, Homo sapiens
gtttgaattaatata

SEQ ID NO: 1514309 - DNA, 15 bp, Homo sapiens
ggtttgaattaatat

SEQ ID NO: 1514310 - DNA, 15 bp, Homo sapiens
aggtttgaattaata

SEQ ID NO: 1514311 - DNA, 15 bp, Homo sapiens
aaggtttgaattaat

SEQ ID NO: 1514312 - DNA, 15 bp, Homo sapiens
taaggtttgaattaa

SEQ ID NO: 1514313 - DNA, 15 bp, Homo sapiens
ataaggtttgaatta

SEQ ID NO: 1514314 - DNA, 15 bp, Homo sapiens
tataaggtttgaatt

SEQ ID NO: 1514315 - DNA, 15 bp, Homo sapiens
gtataaggtttgaat

SEQ ID NO: 1514316 - DNA, 15 bp, Homo sapiens
agtataaggtttgaa

SEQ ID NO: 1514317 - DNA, 15 bp, Homo sapiens
gagtataaggtttga

SEQ ID NO: 1514318 - DNA, 15 bp, Homo sapiens
tgagtataaggtttg

SEQ ID NO: 1514319 - DNA, 15 bp, Homo sapiens
ttgagtataaggttt

SEQ ID NO: 1514320 - DNA, 15 bp, Homo sapiens
attgagtataaggtt

SEQ ID NO: 1514321 - DNA, 15 bp, Homo sapiens
aattgagtataaggt

SEQ ID NO: 1514322 - DNA, 15 bp, Homo sapiens
gaattgagtataagg

SEQ ID NO: 1514323 - DNA, 15 bp, Homo sapiens
agaattgagtataag

SEQ ID NO: 1514324 - DNA, 15 bp, Homo sapiens
gagaattgagtataa

SEQ ID NO: 1514325 - DNA, 15 bp, Homo sapiens
tgagaattgagtata

SEQ ID NO: 1514326 - DNA, 15 bp, Homo sapiens
ttgagaattgagtat

SEQ ID NO: 1514327 - DNA, 15 bp, Homo sapiens
gttgagaattgagta

SEQ ID NO: 1514328 - DNA, 15 bp, Homo sapiens
agttgagaattgagt

SEQ ID NO: 1514329 - DNA, 15 bp, Homo sapiens
gagttgagaattgag

SEQ ID NO: 1514330 - DNA, 15 bp, Homo sapiens
ggagttgagaattga

SEQ ID NO: 1514331 - DNA, 15 bp, Homo sapiens
aggagttgagaattg

SEQ ID NO: 1514332 - DNA, 15 bp, Homo sapiens
aaggagttgagaatt

SEQ ID NO: 1514333 - DNA, 15 bp, Homo sapiens
caaggagttgagaat

SEQ ID NO: 1514334 - DNA, 15 bp, Homo sapiens
acaaggagttgagaa

SEQ ID NO: 1514335 - DNA, 15 bp, Homo sapiens
aacaaggagttgaga

SEQ ID NO: 1514336 - DNA, 15 bp, Homo sapiens
aaacaaggagttgag

SEQ ID NO: 1514337 - DNA, 15 bp, Homo sapiens
aaaacaaggagttga

SEQ ID NO: 1514338 - DNA, 15 bp, Homo sapiens
taaaaacaaggagtt

SEQ ID NO: 1514339 - DNA, 15 bp, Homo sapiens
ctaaaaacaaggagt

SEQ ID NO: 1514340 - DNA, 15 bp, Homo sapiens
cctaaaaacaaggag

SEQ ID NO: 1514341 - DNA, 15 bp, Homo sapiens
acctaaaaacaagga

SEQ ID NO: 1514342 - DNA, 15 bp, Homo sapiens
cacctaaaaacaagg

SEQ ID NO: 1514343 - DNA, 15 bp, Homo sapiens
ccacctaaaaacaag

SEQ ID NO: 1514344 - DNA, 15 bp, Homo sapiens
accacctaaaaacaa

SEQ ID NO: 1514345 - DNA, 15 bp, Homo sapiens
aaccacctaaaaaca

SEQ ID NO: 1514346 - DNA, 15 bp, Homo sapiens
taaccacctaaaaac

SEQ ID NO: 1514347 - DNA, 15 bp, Homo sapiens
ctaaccacctaaaaa

SEQ ID NO: 1514348 - DNA, 15 bp, Homo sapiens
gctaaccacctaaaa

SEQ ID NO: 1514349 - DNA, 15 bp, Homo sapiens
ggctaaccacctaaa

SEQ ID NO: 1514350 - DNA, 15 bp, Homo sapiens
tggctaaccacctaa

SEQ ID NO: 1514351 - DNA, 15 bp, Homo sapiens
ctggctaaccaccta

SEQ ID NO: 1514352 - DNA, 15 bp, Homo sapiens
gctggctaaccacct

SEQ ID NO: 1514353 - DNA, 15 bp, Homo sapiens
cgctggctaaccacc

SEQ ID NO: 1514354 - DNA, 15 bp, Homo sapiens
acgctggctaaccac

SEQ ID NO: 1514355 - DNA, 15 bp, Homo sapiens
aacgctggctaacca

SEQ ID NO: 1514356 - DNA, 15 bp, Homo sapiens
aaacgctggctaacc

SEQ ID NO: 1514357 - DNA, 15 bp, Homo sapiens
gaaacgctggctaac

SEQ ID NO: 1514358 - DNA, 15 bp, Homo sapiens
ggaaacgctggctaa

SEQ ID NO: 1514359 - DNA, 15 bp, Homo sapiens
gggaaacgctggcta

SEQ ID NO: 1514360 - DNA, 15 bp, Homo sapiens
agggaaacgctggct

SEQ ID NO: 1514361 - DNA, 15 bp, Homo sapiens
gagggaaacgctggc

SEQ ID NO: 1514362 - DNA, 15 bp, Homo sapiens
tgagggaaacgctgg

SEQ ID NO: 1514363 - DNA, 15 bp, Homo sapiens
ctgagggaaacgctg

SEQ ID NO: 1514364 - DNA, 15 bp, Homo sapiens
tctgagggaaacgct

SEQ ID NO: 1514365 - DNA, 15 bp, Homo sapiens
ttctgagggaaacgc

SEQ ID NO: 1514366 - DNA, 15 bp, Homo sapiens
gttctgagggaaacg

SEQ ID NO: 1514367 - DNA, 15 bp, Homo sapiens
tgttctgagggaaac

SEQ ID NO: 1514368 - DNA, 15 bp, Homo sapiens
ctgttctgagggaaa

SEQ ID NO: 1514369 - DNA, 15 bp, Homo sapiens
gctgttctgagggaa

SEQ ID NO: 1514370 - DNA, 15 bp, Homo sapiens
tgctgttctgaggga

SEQ ID NO: 1514371 - DNA, 15 bp, Homo sapiens
atgctgttctgaggg

SEQ ID NO: 1514372 - DNA, 15 bp, Homo sapiens
gatgctgttctgagg

SEQ ID NO: 1514373 - DNA, 15 bp, Homo sapiens
cgatgctgttctgag

SEQ ID NO: 1514374 - DNA, 15 bp, Homo sapiens
ccgatgctgttctga

SEQ ID NO: 1514375 - DNA, 15 bp, Homo sapiens
accgatgctgttctg

SEQ ID NO: 1514376 - DNA, 15 bp, Homo sapiens
caccgatgctgttct

SEQ ID NO: 1514377 - DNA, 15 bp, Homo sapiens
gcaccgatgctgttc

SEQ ID NO: 1514378 - DNA, 15 bp, Homo sapiens
tgcaccgatgctgtt

SEQ ID NO: 1514379 - DNA, 15 bp, Homo sapiens
ctgcaccgatgctgt

SEQ ID NO: 1514380 - DNA, 15 bp, Homo sapiens
actgcaccgatgctg

SEQ ID NO: 1514381 - DNA, 15 bp, Homo sapiens
tactgcaccgatgct

SEQ ID NO: 1514382 - DNA, 15 bp, Homo sapiens
ctactgcaccgatgc

SEQ ID NO: 1514383 - DNA, 15 bp, Homo sapiens
cctactgcaccgatg

SEQ ID NO: 1514384 - DNA, 15 bp, Homo sapiens
tcctactgcaccgat

SEQ ID NO: 1514385 - DNA, 15 bp, Homo sapiens
ttcctactgcaccga

SEQ ID NO: 1514386 - DNA, 15 bp, Homo sapiens
cttcctactgcaccg

SEQ ID NO: 1514387 - DNA, 15 bp, Homo sapiens
acttcctactgcacc

SEQ ID NO: 1514388 - DNA, 15 bp, Homo sapiens
cacttcctactgcac

SEQ ID NO: 1514389 - DNA, 15 bp, Homo sapiens
gcacttcctactgca

SEQ ID NO: 1514390 - DNA, 15 bp, Homo sapiens
ggcacttcctactgc

SEQ ID NO: 1514391 - DNA, 15 bp, Homo sapiens
tggcacttcctactg

SEQ ID NO: 1514392 - DNA, 15 bp, Homo sapiens
atggcacttcctact

SEQ ID NO: 1514393 - DNA, 15 bp, Homo sapiens
catggcacttcctac

SEQ ID NO: 1514394 - DNA, 15 bp, Homo sapiens
acatggcacttccta

SEQ ID NO: 1514395 - DNA, 15 bp, Homo sapiens
aacatggcacttcct

SEQ ID NO: 1514396 - DNA, 15 bp, Homo sapiens
gaacatggcacttcc

SEQ ID NO: 1514397 - DNA, 15 bp, Homo sapiens
ggaacatggcacttc

SEQ ID NO: 1514398 - DNA, 15 bp, Homo sapiens
aggaacatggcactt

SEQ ID NO: 1514399 - DNA, 15 bp, Homo sapiens
gaggaacatggcact

SEQ ID NO: 1514400 - DNA, 15 bp, Homo sapiens
tgaggaacatggcac

SEQ ID NO: 1514401 - DNA, 15 bp, Homo sapiens
ctgaggaacatggca

SEQ ID NO: 1514402 - DNA, 15 bp, Homo sapiens
tctgaggaacatggc

SEQ ID NO: 1514403 - DNA, 15 bp, Homo sapiens
atctgaggaacatgg

SEQ ID NO: 1514404 - DNA, 15 bp, Homo sapiens
aatctgaggaacatg

SEQ ID NO: 1514405 - DNA, 15 bp, Homo sapiens
aaatctgaggaacat

SEQ ID NO: 1514406 - DNA, 15 bp, Homo sapiens
taaatctgaggaaca

SEQ ID NO: 1514407 - DNA, 15 bp, Homo sapiens
ataaatctgaggaac

SEQ ID NO: 1514408 - DNA, 15 bp, Homo sapiens
gataaatctgaggaa

SEQ ID NO: 1514409 - DNA, 15 bp, Homo sapiens
tgataaatctgagga

SEQ ID NO: 1514410 - DNA, 15 bp, Homo sapiens
ttgataaatctgagg

SEQ ID NO: 1514411 - DNA, 15 bp, Homo sapiens
attgataaatctgag

SEQ ID NO: 1514412 - DNA, 15 bp, Homo sapiens
gattgataaatctga

SEQ ID NO: 1514413 - DNA, 15 bp, Homo sapiens
ggattgataaatctg

SEQ ID NO: 1514414 - DNA, 15 bp, Homo sapiens
aggattgataaatct

SEQ ID NO: 1514415 - DNA, 15 bp, Homo sapiens
caggattgataaatc

SEQ ID NO: 1514416 - DNA, 15 bp, Homo sapiens
gcaggattgataaat

SEQ ID NO: 1514417 - DNA, 15 bp, Homo sapiens
ggcaggattgataaa

SEQ ID NO: 1514418 - DNA, 15 bp, Homo sapiens
tggcaggattgataa

SEQ ID NO: 1514419 - DNA, 15 bp, Homo sapiens
atggcaggattgata

SEQ ID NO: 1514420 - DNA, 15 bp, Homo sapiens
aatggcaggattgat

SEQ ID NO: 1514421 - DNA, 15 bp, Homo sapiens
caatggcaggattga

SEQ ID NO: 1514422 - DNA, 15 bp, Homo sapiens
acaatggcaggattg

SEQ ID NO: 1514423 - DNA, 15 bp, Homo sapiens
gacaatggcaggatt

SEQ ID NO: 1514424 - DNA, 15 bp, Homo sapiens
agacaatggcaggat

SEQ ID NO: 1514425 - DNA, 15 bp, Homo sapiens
gagacaatggcagga

SEQ ID NO: 1514426 - DNA, 15 bp, Homo sapiens
tgagacaatggcagg

SEQ ID NO: 1514427 - DNA, 15 bp, Homo sapiens
gtgagacaatggcag

SEQ ID NO: 1514428 - DNA, 15 bp, Homo sapiens
ggtgagacaatggca

SEQ ID NO: 1514429 - DNA, 15 bp, Homo sapiens
cggtgagacaatggc

SEQ ID NO: 1514430 - DNA, 15 bp, Homo sapiens
acggtgagacaatgg

SEQ ID NO: 1514431 - DNA, 15 bp, Homo sapiens
tacggtgagacaatg

SEQ ID NO: 1514432 - DNA, 15 bp, Homo sapiens
atacggtgagacaat

SEQ ID NO: 1514433 - DNA, 15 bp, Homo sapiens
catacggtgagacaa

SEQ ID NO: 1514434 - DNA, 15 bp, Homo sapiens
tcatacggtgagaca

SEQ ID NO: 1514435 - DNA, 15 bp, Homo sapiens
ttcatacggtgagac

SEQ ID NO: 1514436 - DNA, 15 bp, Homo sapiens
cttcatacggtgaga

SEQ ID NO: 1514437 - DNA, 15 bp, Homo sapiens
gcttcatacggtgag

SEQ ID NO: 1514438 - DNA, 15 bp, Homo sapiens
tgcttcatacggtga

SEQ ID NO: 1514439 - DNA, 15 bp, Homo sapiens
ctgcttcatacggtg

SEQ ID NO: 1514440 - DNA, 15 bp, Homo sapiens
cctgcttcatacggt

SEQ ID NO: 1514441 - DNA, 15 bp, Homo sapiens
ccctgcttcatacgg

SEQ ID NO: 1514442 - DNA, 15 bp, Homo sapiens
tccctgcttcatacg

SEQ ID NO: 1514443 - DNA, 15 bp, Homo sapiens
atccctgcttcatac

SEQ ID NO: 1514444 - DNA, 15 bp, Homo sapiens
aatccctgcttcata

SEQ ID NO: 1514445 - DNA, 15 bp, Homo sapiens
aaatccctgcttcat

SEQ ID NO: 1514446 - DNA, 15 bp, Homo sapiens
aaaatccctgcttca

SEQ ID NO: 1514447 - DNA, 15 bp, Homo sapiens
taaaatccctgcttc

SEQ ID NO: 1514448 - DNA, 15 bp, Homo sapiens
ctaaaatccctgctt

SEQ ID NO: 1514449 - DNA, 15 bp, Homo sapiens
tctaaaatccctgct

SEQ ID NO: 1514450 - DNA, 15 bp, Homo sapiens
atctaaaatccctgc

SEQ ID NO: 1514451 - DNA, 15 bp, Homo sapiens
tatctaaaatccctg

SEQ ID NO: 1514452 - DNA, 15 bp, Homo sapiens
ttatctaaaatccct

SEQ ID NO: 1514453 - DNA, 15 bp, Homo sapiens
tttatctaaaatccc

SEQ ID NO: 1514454 - DNA, 15 bp, Homo sapiens
ttttatctaaaatcc

SEQ ID NO: 1514455 - DNA, 15 bp, Homo sapiens
tttttatctaaaatc

SEQ ID NO: 1514456 - DNA, 15 bp, Homo sapiens
ctttttatctaaaat

SEQ ID NO: 1514457 - DNA, 15 bp, Homo sapiens
gctttttatctaaaa

SEQ ID NO: 1514458 - DNA, 15 bp, Homo sapiens
ggctttttatctaaa

SEQ ID NO: 1514459 - DNA, 15 bp, Homo sapiens
tggctttttatctaa

SEQ ID NO: 1514460 - DNA, 15 bp, Homo sapiens
gtggctttttatcta

SEQ ID NO: 1514461 - DNA, 15 bp, Homo sapiens
ggtggctttttatct

SEQ ID NO: 1514462 - DNA, 15 bp, Homo sapiens
tggtggctttttatc

SEQ ID NO: 1514463 - DNA, 15 bp, Homo sapiens
gtggtggctttttat

SEQ ID NO: 1514464 - DNA, 15 bp, Homo sapiens
ggtggtggcttttta

SEQ ID NO: 1514465 - DNA, 15 bp, Homo sapiens
aggtggtggcttttt

SEQ ID NO: 1514466 - DNA, 15 bp, Homo sapiens
taggtggtggctttt

SEQ ID NO: 1514467 - DNA, 15 bp, Homo sapiens
ctaggtggtggcttt

SEQ ID NO: 1514468 - DNA, 15 bp, Homo sapiens
tctaggtggtggctt

SEQ ID NO: 1514469 - DNA, 15 bp, Homo sapiens
ttctaggtggtggct

SEQ ID NO: 1514470 - DNA, 15 bp, Homo sapiens
attctaggtggtggc

SEQ ID NO: 1514471 - DNA, 15 bp, Homo sapiens
gattctaggtggtgg

SEQ ID NO: 1514472 - DNA, 15 bp, Homo sapiens
cgattctaggtggtg

SEQ ID NO: 1514473 - DNA, 15 bp, Homo sapiens
tcgattctaggtggt

SEQ ID NO: 1514474 - DNA, 15 bp, Homo sapiens
ttcgattctaggtgg

SEQ ID NO: 1514475 - DNA, 15 bp, Homo sapiens
tttcgattctaggtg

SEQ ID NO: 1514476 - DNA, 15 bp, Homo sapiens
ctttcgattctaggt

SEQ ID NO: 1514477 - DNA, 15 bp, Homo sapiens
cctttcgattctagg

SEQ ID NO: 1514478 - DNA, 15 bp, Homo sapiens
ccctttcgattctag

SEQ ID NO: 1514479 - DNA, 15 bp, Homo sapiens
cccctttcgattcta

SEQ ID NO: 1514480 - DNA, 15 bp, Homo sapiens
gcccctttcgattct

SEQ ID NO: 1514481 - DNA, 15 bp, Homo sapiens
agcccctttcgattc

SEQ ID NO: 1514482 - DNA, 15 bp, Homo sapiens
aagcccctttcgatt

SEQ ID NO: 1514483 - DNA, 15 bp, Homo sapiens
caagcccctttcgat

SEQ ID NO: 1514484 - DNA, 15 bp, Homo sapiens
tcaagcccctttcga

SEQ ID NO: 1514485 - DNA, 15 bp, Homo sapiens
ttcaagcccctttcg

SEQ ID NO: 1514486 - DNA, 15 bp, Homo sapiens
cttcaagcccctttc

SEQ ID NO: 1514487 - DNA, 15 bp, Homo sapiens
acttcaagccccttt

SEQ ID NO: 1514488 - DNA, 15 bp, Homo sapiens
aacttcaagcccctt

SEQ ID NO: 1514489 - DNA, 15 bp, Homo sapiens
taacttcaagcccct

SEQ ID NO: 1514490 - DNA, 15 bp, Homo sapiens
ttaacttcaagcccc

SEQ ID NO: 1514491 - DNA, 15 bp, Homo sapiens
attaacttcaagccc

SEQ ID NO: 1514492 - DNA, 15 bp, Homo sapiens
cattaacttcaagcc

SEQ ID NO: 1514493 - DNA, 15 bp, Homo sapiens
acattaacttcaagc

SEQ ID NO: 1514494 - DNA, 15 bp, Homo sapiens
gacattaacttcaag

SEQ ID NO: 1514495 - DNA, 15 bp, Homo sapiens
tgacattaacttcaa

SEQ ID NO: 1514496 - DNA, 15 bp, Homo sapiens
ttgacattaacttca

SEQ ID NO: 1514497 - DNA, 15 bp, Homo sapiens
tttgacattaacttc

SEQ ID NO: 1514498 - DNA, 15 bp, Homo sapiens
ctttgacattaactt

SEQ ID NO: 1514499 - DNA, 15 bp, Homo sapiens
cctttgacattaact

SEQ ID NO: 1514500 - DNA, 15 bp, Homo sapiens
acctttgacattaac

SEQ ID NO: 1514501 - DNA, 15 bp, Homo sapiens
cacctttgacattaa

SEQ ID NO: 1514502 - DNA, 15 bp, Homo sapiens
tcacctttgacatta

SEQ ID NO: 1514503 - DNA, 15 bp, Homo sapiens
ttcacctttgacatt

SEQ ID NO: 1514504 - DNA, 15 bp, Homo sapiens
attcacctttgacat

SEQ ID NO: 1514505 - DNA, 15 bp, Homo sapiens
aattcacctttgaca

SEQ ID NO: 1514506 - DNA, 15 bp, Homo sapiens
taattcacctttgac

SEQ ID NO: 1514507 - DNA, 15 bp, Homo sapiens
ataattcacctttga

SEQ ID NO: 1514508 - DNA, 15 bp, Homo sapiens
aataattcacctttg

SEQ ID NO: 1514509 - DNA, 15 bp, Homo sapiens
aaataattcaccttt

SEQ ID NO: 1514510 - DNA, 15 bp, Homo sapiens
aaaataattcacctt

SEQ ID NO: 1514511 - DNA, 15 bp, Homo sapiens
caaaataattcacct

SEQ ID NO: 1514512 - DNA, 15 bp, Homo sapiens
tcaaaataattcacc

SEQ ID NO: 1514513 - DNA, 15 bp, Homo sapiens
atcaaaataattcac

SEQ ID NO: 1514514 - DNA, 15 bp, Homo sapiens
tatcaaaataattca

SEQ ID NO: 1514515 - DNA, 15 bp, Homo sapiens
ttatcaaaataattc

SEQ ID NO: 1514516 - DNA, 15 bp, Homo sapiens
attatcaaaataatt

SEQ ID NO: 1514517 - DNA, 15 bp, Homo sapiens
gattatcaaaataat

SEQ ID NO: 1514518 - DNA, 15 bp, Homo sapiens
agattatcaaaataa

SEQ ID NO: 1514519 - DNA, 15 bp, Homo sapiens
tagattatcaaaata

SEQ ID NO: 1514520 - DNA, 15 bp, Homo sapiens
ctagattatcaaaat

SEQ ID NO: 1514521 - DNA, 15 bp, Homo sapiens
gctagattatcaaaa

SEQ ID NO: 1514522 - DNA, 15 bp, Homo sapiens
agctagattatcaaa

SEQ ID NO: 1514523 - DNA, 15 bp, Homo sapiens
tagctagattatcaa

SEQ ID NO: 1514524 - DNA, 15 bp, Homo sapiens
atagctagattatca

SEQ ID NO: 1514525 - DNA, 15 bp, Homo sapiens
gatagctagattatc

SEQ ID NO: 1514526 - DNA, 15 bp, Homo sapiens
agatagctagattat

SEQ ID NO: 1514527 - DNA, 15 bp, Homo sapiens
aagatagctagatta

SEQ ID NO: 1514528 - DNA, 15 bp, Homo sapiens
taagatagctagatt

SEQ ID NO: 1514529 - DNA, 15 bp, Homo sapiens
ttaagatagctagat

SEQ ID NO: 1514530 - DNA, 15 bp, Homo sapiens
tttaagatagctaga

SEQ ID NO: 1514531 - DNA, 15 bp, Homo sapiens
atttaagatagctag

SEQ ID NO: 1514532 - DNA, 15 bp, Homo sapiens
aatttaagatagcta

SEQ ID NO: 1514533 - DNA, 15 bp, Homo sapiens
gaatttaagatagct

SEQ ID NO: 1514534 - DNA, 15 bp, Homo sapiens
ggaatttaagatagc

SEQ ID NO: 1514535 - DNA, 15 bp, Homo sapiens
gggaatttaagatag

SEQ ID NO: 1514536 - DNA, 15 bp, Homo sapiens
ggggaatttaagata

SEQ ID NO: 1514537 - DNA, 15 bp, Homo sapiens
aggggaatttaagat

SEQ ID NO: 1514538 - DNA, 15 bp, Homo sapiens
aaggggaatttaaga

SEQ ID NO: 1514539 - DNA, 15 bp, Homo sapiens
gaaggggaatttaag

SEQ ID NO: 1514540 - DNA, 15 bp, Homo sapiens
ggaaggggaatttaa

SEQ ID NO: 1514541 - DNA, 15 bp, Homo sapiens
tggaaggggaattta

SEQ ID NO: 1514542 - DNA, 15 bp, Homo sapiens
ttggaaggggaattt

SEQ ID NO: 1514543 - DNA, 15 bp, Homo sapiens
gttggaaggggaatt

SEQ ID NO: 1514544 - DNA, 15 bp, Homo sapiens
agttggaaggggaat

SEQ ID NO: 1514545 - DNA, 15 bp, Homo sapiens
tagttggaaggggaa

SEQ ID NO: 1514546 - DNA, 15 bp, Homo sapiens
ttagttggaagggga

SEQ ID NO: 1514547 - DNA, 15 bp, Homo sapiens
tttagttggaagggg

SEQ ID NO: 1514548 - DNA, 15 bp, Homo sapiens
atttagttggaaggg

SEQ ID NO: 1514549 - DNA, 15 bp, Homo sapiens
aatttagttggaagg

SEQ ID NO: 1514550 - DNA, 15 bp, Homo sapiens
aaatttagttggaag

SEQ ID NO: 1514551 - DNA, 15 bp, Homo sapiens
aaaatttagttggaa

SEQ ID NO: 1514552 - DNA, 15 bp, Homo sapiens
gaaaatttagttgga

SEQ ID NO: 1514553 - DNA, 15 bp, Homo sapiens
tgaaaatttagttgg

SEQ ID NO: 1514554 - DNA, 15 bp, Homo sapiens
ctgaaaatttagttg

SEQ ID NO: 1514555 - DNA, 15 bp, Homo sapiens
gctgaaaatttagtt

SEQ ID NO: 1514556 - DNA, 15 bp, Homo sapiens
agctgaaaatttagt

SEQ ID NO: 1514557 - DNA, 15 bp, Homo sapiens
aagctgaaaatttag

SEQ ID NO: 1514558 - DNA, 15 bp, Homo sapiens
aaagctgaaaattta

SEQ ID NO: 1514559 - DNA, 15 bp, Homo sapiens
aaaagctgaaaattt

SEQ ID NO: 1514560 - DNA, 15 bp, Homo sapiens
gaaaagctgaaaatt

SEQ ID NO: 1514561 - DNA, 15 bp, Homo sapiens
agaaaagctgaaaat

SEQ ID NO: 1514562 - DNA, 15 bp, Homo sapiens
aagaaaagctgaaaa

SEQ ID NO: 1514563 - DNA, 15 bp, Homo sapiens
taagaaaagctgaaa

SEQ ID NO: 1514564 - DNA, 15 bp, Homo sapiens
gtaagaaaagctgaa

SEQ ID NO: 1514565 - DNA, 15 bp, Homo sapiens
tgtaagaaaagctga

SEQ ID NO: 1514566 - DNA, 15 bp, Homo sapiens
ctgtaagaaaagctg

SEQ ID NO: 1514567 - DNA, 15 bp, Homo sapiens
actgtaagaaaagct

SEQ ID NO: 1514568 - DNA, 15 bp, Homo sapiens
tactgtaagaaaagc

SEQ ID NO: 1514569 - DNA, 15 bp, Homo sapiens
gtactgtaagaaaag

SEQ ID NO: 1514570 - DNA, 15 bp, Homo sapiens
agtactgtaagaaaa

SEQ ID NO: 1514571 - DNA, 15 bp, Homo sapiens
aagtactgtaagaaa

SEQ ID NO: 1514572 - DNA, 15 bp, Homo sapiens
gaagtactgtaagaa

SEQ ID NO: 1514573 - DNA, 15 bp, Homo sapiens
ggaagtactgtaaga

SEQ ID NO: 1514574 - DNA, 15 bp, Homo sapiens
aggaagtactgtaag

SEQ ID NO: 1514575 - DNA, 15 bp, Homo sapiens
gaggaagtactgtaa

SEQ ID NO: 1514576 - DNA, 15 bp, Homo sapiens
agaggaagtactgta

SEQ ID NO: 1514577 - DNA, 15 bp, Homo sapiens
aagaggaagtactgt

SEQ ID NO: 1514578 - DNA, 15 bp, Homo sapiens
taagaggaagtactg

SEQ ID NO: 1514579 - DNA, 15 bp, Homo sapiens
gtaagaggaagtact

SEQ ID NO: 1514580 - DNA, 15 bp, Homo sapiens
tgtaagaggaagtac

SEQ ID NO: 1514581 - DNA, 15 bp, Homo sapiens
atgtaagaggaagta

SEQ ID NO: 1514582 - DNA, 15 bp, Homo sapiens
aatgtaagaggaagt

SEQ ID NO: 1514583 - DNA, 15 bp, Homo sapiens
aaatgtaagaggaag

SEQ ID NO: 1514584 - DNA, 15 bp, Homo sapiens
taaatgtaagaggaa

SEQ ID NO: 1514585 - DNA, 15 bp, Homo sapiens
ataaatgtaagagga

SEQ ID NO: 1514586 - DNA, 15 bp, Homo sapiens
tataaatgtaagagg

SEQ ID NO: 1514587 - DNA, 15 bp, Homo sapiens
atataaatgtaagag

SEQ ID NO: 1514588 - DNA, 15 bp, Homo sapiens
aatataaatgtaaga

SEQ ID NO: 1514589 - DNA, 15 bp, Homo sapiens
aaatataaatgtaag

SEQ ID NO: 1514590 - DNA, 15 bp, Homo sapiens
caaatataaatgtaa

SEQ ID NO: 1514591 - DNA, 15 bp, Homo sapiens
tcaaatataaatgta

SEQ ID NO: 1514592 - DNA, 15 bp, Homo sapiens
ttcaaatataaatgt

SEQ ID NO: 1514593 - DNA, 15 bp, Homo sapiens
tttcaaatataaatg

SEQ ID NO: 1514594 - DNA, 15 bp, Homo sapiens
atttcaaatataaat

SEQ ID NO: 1514595 - DNA, 15 bp, Homo sapiens
tatttcaaatataaa

SEQ ID NO: 1514596 - DNA, 15 bp, Homo sapiens
gtatttcaaatataa

SEQ ID NO: 1514597 - DNA, 15 bp, Homo sapiens
ggtatttcaaatata

SEQ ID NO: 1514598 - DNA, 15 bp, Homo sapiens
gggtatttcaaatat

SEQ ID NO: 1514599 - DNA, 15 bp, Homo sapiens
agggtatttcaaata

SEQ ID NO: 1514600 - DNA, 15 bp, Homo sapiens
tagggtatttcaaat

SEQ ID NO: 1514601 - DNA, 15 bp, Homo sapiens
atagggtatttcaaa

SEQ ID NO: 1514602 - DNA, 15 bp, Homo sapiens
catagggtatttcaa

SEQ ID NO: 1514603 - DNA, 15 bp, Homo sapiens
ccatagggtatttca

SEQ ID NO: 1514604 - DNA, 15 bp, Homo sapiens
accatagggtatttc

SEQ ID NO: 1514605 - DNA, 15 bp, Homo sapiens
aaccatagggtattt

SEQ ID NO: 1514606 - DNA, 15 bp, Homo sapiens
aaaccatagggtatt

SEQ ID NO: 1514607 - DNA, 15 bp, Homo sapiens
aaaaccatagggtat

SEQ ID NO: 1514608 - DNA, 15 bp, Homo sapiens
gaaaaccatagggta

SEQ ID NO: 1514609 - DNA, 15 bp, Homo sapiens
tgaaaaccatagggt

SEQ ID NO: 1514610 - DNA, 15 bp, Homo sapiens
ctgaaaaccataggg

SEQ ID NO: 1514611 - DNA, 15 bp, Homo sapiens
actgaaaaccatagg

SEQ ID NO: 1514612 - DNA, 15 bp, Homo sapiens
aactgaaaaccatag

SEQ ID NO: 1514613 - DNA, 15 bp, Homo sapiens
taactgaaaaccata

SEQ ID NO: 1514614 - DNA, 15 bp, Homo sapiens
ataactgaaaaccat

SEQ ID NO: 1514615 - DNA, 15 bp, Homo sapiens
cataactgaaaacca

SEQ ID NO: 1514616 - DNA, 15 bp, Homo sapiens
acataactgaaaacc

SEQ ID NO: 1514617 - DNA, 15 bp, Homo sapiens
cacataactgaaaac

SEQ ID NO: 1514618 - DNA, 15 bp, Homo sapiens
gcacataactgaaaa

SEQ ID NO: 1514619 - DNA, 15 bp, Homo sapiens
agcacataactgaaa

SEQ ID NO: 1514620 - DNA, 15 bp, Homo sapiens
aagcacataactgaa

SEQ ID NO: 1514621 - DNA, 15 bp, Homo sapiens
aaagcacataactga

SEQ ID NO: 1514622 - DNA, 15 bp, Homo sapiens
aaaagcacataactg

SEQ ID NO: 1514623 - DNA, 15 bp, Homo sapiens
caaaagcacataact

SEQ ID NO: 1514624 - DNA, 15 bp, Homo sapiens
acaaaagcacataac

SEQ ID NO: 1514625 - DNA, 15 bp, Homo sapiens
aacaaaagcacataa

SEQ ID NO: 1514626 - DNA, 15 bp, Homo sapiens
aaacaaaagcacata

SEQ ID NO: 1514627 - DNA, 15 bp, Homo sapiens
aaaacaaaagcacat

SEQ ID NO: 1514628 - DNA, 15 bp, Homo sapiens
taaaacaaaagcaca

SEQ ID NO: 1514629 - DNA, 15 bp, Homo sapiens
ataaaacaaaagcac

SEQ ID NO: 1514630 - DNA, 15 bp, Homo sapiens
aataaaacaaaagca

SEQ ID NO: 1514631 - DNA, 15 bp, Homo sapiens
aaataaaacaaaagc

SEQ ID NO: 1514632 - DNA, 15 bp, Homo sapiens
caaataaaacaaaag

SEQ ID NO: 1514633 - DNA, 15 bp, Homo sapiens
acaaataaaacaaaa

SEQ ID NO: 1514634 - DNA, 15 bp, Homo sapiens
aacaaataaaacaaa

SEQ ID NO: 1514635 - DNA, 15 bp, Homo sapiens
aaacaaataaaacaa

SEQ ID NO: 1514636 - DNA, 15 bp, Homo sapiens
taaacaaataaaaca

SEQ ID NO: 1514637 - DNA, 15 bp, Homo sapiens
ataaacaaataaaac

SEQ ID NO: 1514638 - DNA, 15 bp, Homo sapiens
tataaacaaataaaa

SEQ ID NO: 1514639 - DNA, 15 bp, Homo sapiens
atataaacaaataaa

SEQ ID NO: 1514640 - DNA, 15 bp, Homo sapiens
aatataaacaaataa

SEQ ID NO: 1514641 - DNA, 15 bp, Homo sapiens
taatataaacaaata

SEQ ID NO: 1514642 - DNA, 15 bp, Homo sapiens
gtaatataaacaaat

SEQ ID NO: 1514643 - DNA, 15 bp, Homo sapiens
tgtaatataaacaaa

SEQ ID NO: 1514644 - DNA, 15 bp, Homo sapiens
ttgtaatataaacaa

SEQ ID NO: 1514645 - DNA, 15 bp, Homo sapiens
tttgtaatataaaca

SEQ ID NO: 1514646 - DNA, 15 bp, Homo sapiens
ctttgtaatataaac

SEQ ID NO: 1514647 - DNA, 15 bp, Homo sapiens
cctttgtaatataaa

SEQ ID NO: 1514648 - DNA, 15 bp, Homo sapiens
tcctttgtaatataa

SEQ ID NO: 1514649 - DNA, 15 bp, Homo sapiens
ttcctttgtaatata

SEQ ID NO: 1514650 - DNA, 15 bp, Homo sapiens
attcctttgtaatat

SEQ ID NO: 1514651 - DNA, 15 bp, Homo sapiens
aattcctttgtaata

SEQ ID NO: 1514652 - DNA, 15 bp, Homo sapiens
gaattcctttgtaat

SEQ ID NO: 1514653 - DNA, 15 bp, Homo sapiens
tgaattcctttgtaa

SEQ ID NO: 1514654 - DNA, 15 bp, Homo sapiens
atgaattcctttgta

SEQ ID NO: 1514655 - DNA, 15 bp, Homo sapiens
aatgaattcctttgt

SEQ ID NO: 1514656 - DNA, 15 bp, Homo sapiens
taatgaattcctttg

SEQ ID NO: 1514657 - DNA, 15 bp, Homo sapiens
ctaatgaattccttt

SEQ ID NO: 1514658 - DNA, 15 bp, Homo sapiens
actaatgaattcctt

SEQ ID NO: 1514659 - DNA, 15 bp, Homo sapiens
aactaatgaattcct

SEQ ID NO: 1514660 - DNA, 15 bp, Homo sapiens
taactaatgaattcc

SEQ ID NO: 1514661 - DNA, 15 bp, Homo sapiens
ctaactaatgaattc

SEQ ID NO: 1514662 - DNA, 15 bp, Homo sapiens
cctaactaatgaatt

SEQ ID NO: 1514663 - DNA, 15 bp, Homo sapiens
acctaactaatgaat

SEQ ID NO: 1514664 - DNA, 15 bp, Homo sapiens
tacctaactaatgaa

SEQ ID NO: 1514665 - DNA, 15 bp, Homo sapiens
gtacctaactaatga

SEQ ID NO: 1514666 - DNA, 15 bp, Homo sapiens
ggtacctaactaatg

SEQ ID NO: 1514667 - DNA, 15 bp, Homo sapiens
aggtacctaactaat

SEQ ID NO: 1514668 - DNA, 15 bp, Homo sapiens
caggtacctaactaa

SEQ ID NO: 1514669 - DNA, 15 bp, Homo sapiens
tcaggtacctaacta

SEQ ID NO: 1514670 - DNA, 15 bp, Homo sapiens
atcaggtacctaact

SEQ ID NO: 1514671 - DNA, 15 bp, Homo sapiens
catcaggtacctaac

SEQ ID NO: 1514672 - DNA, 15 bp, Homo sapiens
ccatcaggtacctaa

SEQ ID NO: 1514673 - DNA, 15 bp, Homo sapiens
tccatcaggtaccta

SEQ ID NO: 1514674 - DNA, 15 bp, Homo sapiens
gtccatcaggtacct

SEQ ID NO: 1514675 - DNA, 15 bp, Homo sapiens
ggtccatcaggtacc

SEQ ID NO: 1514676 - DNA, 15 bp, Homo sapiens
aggtccatcaggtac

SEQ ID NO: 1514677 - DNA, 15 bp, Homo sapiens
aaggtccatcaggta

SEQ ID NO: 1514678 - DNA, 15 bp, Homo sapiens
taaggtccatcaggt

SEQ ID NO: 1514679 - DNA, 15 bp, Homo sapiens
ataaggtccatcagg

SEQ ID NO: 1514680 - DNA, 15 bp, Homo sapiens
aataaggtccatcag

SEQ ID NO: 1514681 - DNA, 15 bp, Homo sapiens
aaataaggtccatca

SEQ ID NO: 1514682 - DNA, 15 bp, Homo sapiens
aaaataaggtccatc

SEQ ID NO: 1514683 - DNA, 15 bp, Homo sapiens
gaaaataaggtccat

SEQ ID NO: 1514684 - DNA, 15 bp, Homo sapiens
tgaaaataaggtcca

SEQ ID NO: 1514685 - DNA, 15 bp, Homo sapiens
atgaaaataaggtcc

SEQ ID NO: 1514686 - DNA, 15 bp, Homo sapiens
catgaaaataaggtc

SEQ ID NO: 1514687 - DNA, 15 bp, Homo sapiens
tcatgaaaataaggt

SEQ ID NO: 1514688 - DNA, 15 bp, Homo sapiens
atcatgaaaataagg

SEQ ID NO: 1514689 - DNA, 15 bp, Homo sapiens
tatcatgaaaataag

SEQ ID NO: 1514690 - DNA, 15 bp, Homo sapiens
ttatcatgaaaataa

SEQ ID NO: 1514691 - DNA, 15 bp, Homo sapiens
tttatcatgaaaata

SEQ ID NO: 1514692 - DNA, 15 bp, Homo sapiens
ttttatcatgaaaat

SEQ ID NO: 1514693 - DNA, 15 bp, Homo sapiens
gttttatcatgaaaa

SEQ ID NO: 1514694 - DNA, 15 bp, Homo sapiens
tgttttatcatgaaa

SEQ ID NO: 1514695 - DNA, 15 bp, Homo sapiens
atgttttatcatgaa

SEQ ID NO: 1514696 - DNA, 15 bp, Homo sapiens
aatgttttatcatga

SEQ ID NO: 1514697 - DNA, 15 bp, Homo sapiens
aaatgttttatcatg

SEQ ID NO: 1514698 - DNA, 15 bp, Homo sapiens
aaaatgttttatcat

SEQ ID NO: 1514699 - DNA, 15 bp, Homo sapiens
taaaatgttttatca

SEQ ID NO: 1514700 - DNA, 15 bp, Homo sapiens
ataaaatgttttatc

SEQ ID NO: 1514701 - DNA, 15 bp, Homo sapiens
aataaaatgttttat

SEQ ID NO: 1514702 - DNA, 15 bp, Homo sapiens
taataaaatgtttta

SEQ ID NO: 1514703 - DNA, 15 bp, Homo sapiens
ataataaaatgtttt

SEQ ID NO: 1514704 - DNA, 15 bp, Homo sapiens
tataataaaatgttt

SEQ ID NO: 1514705 - DNA, 15 bp, Homo sapiens
ctataataaaatgtt

SEQ ID NO: 1514706 - DNA, 15 bp, Homo sapiens
gctataataaaatgt

SEQ ID NO: 1514707 - DNA, 15 bp, Homo sapiens
tgctataataaaatg

SEQ ID NO: 1514708 - DNA, 15 bp, Homo sapiens
ctgctataataaaat

SEQ ID NO: 1514709 - DNA, 15 bp, Homo sapiens
tctgctataataaaa

SEQ ID NO: 1514710 - DNA, 15 bp, Homo sapiens
atctgctataataaa

SEQ ID NO: 1514711 - DNA, 15 bp, Homo sapiens
catctgctataataa

SEQ ID NO: 1514712 - DNA, 15 bp, Homo sapiens
acatctgctataata

SEQ ID NO: 1514713 - DNA, 15 bp, Homo sapiens
gacatctgctataat

SEQ ID NO: 1514714 - DNA, 15 bp, Homo sapiens
agacatctgctataa

SEQ ID NO: 1514715 - DNA, 15 bp, Homo sapiens
aagacatctgctata

SEQ ID NO: 1514716 - DNA, 15 bp, Homo sapiens
caagacatctgctat

SEQ ID NO: 1514717 - DNA, 15 bp, Homo sapiens
acaagacatctgcta

SEQ ID NO: 1514718 - DNA, 15 bp, Homo sapiens
cacaagacatctgct

SEQ ID NO: 1514719 - DNA, 15 bp, Homo sapiens
acacaagacatctgc

SEQ ID NO: 1514720 - DNA, 15 bp, Homo sapiens
aacacaagacatctg

SEQ ID NO: 1514721 - DNA, 15 bp, Homo sapiens
taacacaagacatct

SEQ ID NO: 1514722 - DNA, 15 bp, Homo sapiens
ataacacaagacatc

SEQ ID NO: 1514723 - DNA, 15 bp, Homo sapiens
cataacacaagacat

SEQ ID NO: 1514724 - DNA, 15 bp, Homo sapiens
tcataacacaagaca

SEQ ID NO: 1514725 - DNA, 15 bp, Homo sapiens
ttcataacacaagac

SEQ ID NO: 1514726 - DNA, 15 bp, Homo sapiens
cttcataacacaaga

SEQ ID NO: 1514727 - DNA, 15 bp, Homo sapiens
tcttcataacacaag

SEQ ID NO: 1514728 - DNA, 15 bp, Homo sapiens
atcttcataacacaa

SEQ ID NO: 1514729 - DNA, 15 bp, Homo sapiens
gatcttcataacaca

SEQ ID NO: 1514730 - DNA, 15 bp, Homo sapiens
tgatcttcataacac

SEQ ID NO: 1514731 - DNA, 15 bp, Homo sapiens
atgatcttcataaca

SEQ ID NO: 1514732 - DNA, 15 bp, Homo sapiens
aatgatcttcataac

SEQ ID NO: 1514733 - DNA, 15 bp, Homo sapiens
aaatgatcttcataa

SEQ ID NO: 1514734 - DNA, 15 bp, Homo sapiens
aaaatgatcttcata

SEQ ID NO: 1514735 - DNA, 15 bp, Homo sapiens
aaaaatgatcttcat

SEQ ID NO: 1514736 - DNA, 15 bp, Homo sapiens
aaaaaatgatcttca

SEQ ID NO: 1514737 - DNA, 15 bp, Homo sapiens
caaaaaatgatcttc

SEQ ID NO: 1514738 - DNA, 15 bp, Homo sapiens
gcaaaaaatgatctt

SEQ ID NO: 1514739 - DNA, 15 bp, Homo sapiens
cgcaaaaaatgatct

SEQ ID NO: 1514740 - DNA, 15 bp, Homo sapiens
acgcaaaaaatgatc

SEQ ID NO: 1514741 - DNA, 15 bp, Homo sapiens
tacgcaaaaaatgat

SEQ ID NO: 1514742 - DNA, 15 bp, Homo sapiens
ttacgcaaaaaatga

SEQ ID NO: 1514743 - DNA, 15 bp, Homo sapiens
attacgcaaaaaatg

SEQ ID NO: 1514744 - DNA, 15 bp, Homo sapiens
gattacgcaaaaaat

SEQ ID NO: 1514745 - DNA, 15 bp, Homo sapiens
tgattacgcaaaaaa

SEQ ID NO: 1514746 - DNA, 15 bp, Homo sapiens
atgattacgcaaaaa

SEQ ID NO: 1514747 - DNA, 15 bp, Homo sapiens
aatgattacgcaaaa

SEQ ID NO: 1514748 - DNA, 15 bp, Homo sapiens
gaatgattacgcaaa

SEQ ID NO: 1514749 - DNA, 15 bp, Homo sapiens
agaatgattacgcaa

SEQ ID NO: 1514750 - DNA, 15 bp, Homo sapiens
tagaatgattacgca

SEQ ID NO: 1514751 - DNA, 15 bp, Homo sapiens
ctagaatgattacgc

SEQ ID NO: 1514752 - DNA, 15 bp, Homo sapiens
tctagaatgattacg

SEQ ID NO: 1514753 - DNA, 15 bp, Homo sapiens
gtctagaatgattac

SEQ ID NO: 1514754 - DNA, 15 bp, Homo sapiens
tgtctagaatgatta

SEQ ID NO: 1514755 - DNA, 15 bp, Homo sapiens
atgtctagaatgatt

SEQ ID NO: 1514756 - DNA, 15 bp, Homo sapiens
aatgtctagaatgat

SEQ ID NO: 1514757 - DNA, 15 bp, Homo sapiens
gaatgtctagaatga

SEQ ID NO: 1514758 - DNA, 15 bp, Homo sapiens
agaatgtctagaatg

SEQ ID NO: 1514759 - DNA, 15 bp, Homo sapiens
cagaatgtctagaat

SEQ ID NO: 1514760 - DNA, 15 bp, Homo sapiens
tcagaatgtctagaa

SEQ ID NO: 1514761 - DNA, 15 bp, Homo sapiens
ttcagaatgtctaga

SEQ ID NO: 1514762 - DNA, 15 bp, Homo sapiens
tttcagaatgtctag

SEQ ID NO: 1514763 - DNA, 15 bp, Homo sapiens
gtttcagaatgtcta

SEQ ID NO: 1514764 - DNA, 15 bp, Homo sapiens
tgtttcagaatgtct

SEQ ID NO: 1514765 - DNA, 15 bp, Homo sapiens
ctgtttcagaatgtc

SEQ ID NO: 1514766 - DNA, 15 bp, Homo sapiens
tctgtttcagaatgt

SEQ ID NO: 1514767 - DNA, 15 bp, Homo sapiens
gtctgtttcagaatg

SEQ ID NO: 1514768 - DNA, 15 bp, Homo sapiens
agtctgtttcagaat

SEQ ID NO: 1514769 - DNA, 15 bp, Homo sapiens
tagtctgtttcagaa

SEQ ID NO: 1514770 - DNA, 15 bp, Homo sapiens
ctagtctgtttcaga

SEQ ID NO: 1514771 - DNA, 15 bp, Homo sapiens
tctagtctgtttcag

SEQ ID NO: 1514772 - DNA, 15 bp, Homo sapiens
ttctagtctgtttca

SEQ ID NO: 1514773 - DNA, 15 bp, Homo sapiens
attctagtctgtttc

SEQ ID NO: 1514774 - DNA, 15 bp, Homo sapiens
cattctagtctgttt

SEQ ID NO: 1514775 - DNA, 15 bp, Homo sapiens
acattctagtctgtt

SEQ ID NO: 1514776 - DNA, 15 bp, Homo sapiens
tacattctagtctgt

SEQ ID NO: 1514777 - DNA, 15 bp, Homo sapiens
ctacattctagtctg

SEQ ID NO: 1514778 - DNA, 15 bp, Homo sapiens
tctacattctagtct

SEQ ID NO: 1514779 - DNA, 15 bp, Homo sapiens
gtctacattctagtc

SEQ ID NO: 1514780 - DNA, 15 bp, Homo sapiens
agtctacattctagt

SEQ ID NO: 1514781 - DNA, 15 bp, Homo sapiens
tagtctacattctag

SEQ ID NO: 1514782 - DNA, 15 bp, Homo sapiens
atagtctacattcta

SEQ ID NO: 1514783 - DNA, 15 bp, Homo sapiens
tatagtctacattct

SEQ ID NO: 1514784 - DNA, 15 bp, Homo sapiens
ctatagtctacattc

SEQ ID NO: 1514785 - DNA, 15 bp, Homo sapiens
cctatagtctacatt

SEQ ID NO: 1514786 - DNA, 15 bp, Homo sapiens
tcctatagtctacat

SEQ ID NO: 1514787 - DNA, 15 bp, Homo sapiens
atcctatagtctaca

SEQ ID NO: 1514788 - DNA, 15 bp, Homo sapiens
aatcctatagtctac

SEQ ID NO: 1514789 - DNA, 15 bp, Homo sapiens
aaatcctatagtcta

SEQ ID NO: 1514790 - DNA, 15 bp, Homo sapiens
aaaatcctatagtct

SEQ ID NO: 1514791 - DNA, 15 bp, Homo sapiens
aaaaatcctatagtc

SEQ ID NO: 1514792 - DNA, 15 bp, Homo sapiens
aaaaaatcctatagt

SEQ ID NO: 1514793 - DNA, 15 bp, Homo sapiens
taaaaaatcctatag

SEQ ID NO: 1514794 - DNA, 15 bp, Homo sapiens
ataaaaaatcctata

SEQ ID NO: 1514795 - DNA, 15 bp, Homo sapiens
aataaaaaatcctat

SEQ ID NO: 1514796 - DNA, 15 bp, Homo sapiens
aaataaaaaatccta

SEQ ID NO: 1514797 - DNA, 15 bp, Homo sapiens
aaaataaaaaatcct

SEQ ID NO: 1514798 - DNA, 15 bp, Homo sapiens
taaaataaaaaatcc

SEQ ID NO: 1514799 - DNA, 15 bp, Homo sapiens
ttaaaataaaaaatc

SEQ ID NO: 1514800 - DNA, 15 bp, Homo sapiens
tttaaaataaaaaat

SEQ ID NO: 1514801 - DNA, 15 bp, Homo sapiens
ttttaaaataaaaaa

SEQ ID NO: 1514802 - DNA, 15 bp, Homo sapiens
cttttaaaataaaaa

SEQ ID NO: 1514803 - DNA, 15 bp, Homo sapiens
acttttaaaataaaa

SEQ ID NO: 1514804 - DNA, 15 bp, Homo sapiens
gacttttaaaataaa

SEQ ID NO: 1514805 - DNA, 15 bp, Homo sapiens
tgacttttaaaataa

SEQ ID NO: 1514806 - DNA, 15 bp, Homo sapiens
atgacttttaaaata

SEQ ID NO: 1514807 - DNA, 15 bp, Homo sapiens
aatgacttttaaaat

SEQ ID NO: 1514808 - DNA, 15 bp, Homo sapiens
taatgacttttaaaa

SEQ ID NO: 1514809 - DNA, 15 bp, Homo sapiens
ttaatgacttttaaa

SEQ ID NO: 1514810 - DNA, 15 bp, Homo sapiens
tttaatgacttttaa

SEQ ID NO: 1514811 - DNA, 15 bp, Homo sapiens
gtttaatgactttta

SEQ ID NO: 1514812 - DNA, 15 bp, Homo sapiens
tgtttaatgactttt

SEQ ID NO: 1514813 - DNA, 15 bp, Homo sapiens
atgtttaatgacttt

SEQ ID NO: 1514814 - DNA, 15 bp, Homo sapiens
aatgtttaatgactt

SEQ ID NO: 1514815 - DNA, 15 bp, Homo sapiens
aaatgtttaatgact

SEQ ID NO: 1514816 - DNA, 15 bp, Homo sapiens
aaaatgtttaatgac

SEQ ID NO: 1514817 - DNA, 15 bp, Homo sapiens
aaaaatgtttaatga

SEQ ID NO: 1514818 - DNA, 15 bp, Homo sapiens
taaaaatgtttaatg

SEQ ID NO: 1514819 - DNA, 15 bp, Homo sapiens
ttaaaaatgtttaat

SEQ ID NO: 1514820 - DNA, 15 bp, Homo sapiens
attaaaaatgtttaa

SEQ ID NO: 1514821 - DNA, 15 bp, Homo sapiens
tattaaaaatgttta

SEQ ID NO: 1514822 - DNA, 15 bp, Homo sapiens
atattaaaaatgttt

SEQ ID NO: 1514823 - DNA, 15 bp, Homo sapiens
catattaaaaatgtt

SEQ ID NO: 1514824 - DNA, 15 bp, Homo sapiens
acatattaaaaatgt

SEQ ID NO: 1514825 - DNA, 15 bp, Homo sapiens
tacatattaaaaatg

SEQ ID NO: 1514826 - DNA, 15 bp, Homo sapiens
atacatattaaaaat

SEQ ID NO: 1514827 - DNA, 15 bp, Homo sapiens
aatacatattaaaaa

SEQ ID NO: 1514828 - DNA, 15 bp, Homo sapiens
aaatacatattaaaa

SEQ ID NO: 1514829 - DNA, 15 bp, Homo sapiens
aaaaatacatattaa

SEQ ID NO: 1514830 - DNA, 15 bp, Homo sapiens
taaaaatacatatta

SEQ ID NO: 1514831 - DNA, 15 bp, Homo sapiens
gtaaaaatacatatt

SEQ ID NO: 1514832 - DNA, 15 bp, Homo sapiens
tgtaaaaatacatat

SEQ ID NO: 1514833 - DNA, 15 bp, Homo sapiens
atgtaaaaatacata

SEQ ID NO: 1514834 - DNA, 15 bp, Homo sapiens
catgtaaaaatacat

SEQ ID NO: 1514835 - DNA, 15 bp, Homo sapiens
acatgtaaaaataca

SEQ ID NO: 1514836 - DNA, 15 bp, Homo sapiens
tacatgtaaaaatac

SEQ ID NO: 1514837 - DNA, 15 bp, Homo sapiens
ttacatgtaaaaata

SEQ ID NO: 1514838 - DNA, 15 bp, Homo sapiens
tttacatgtaaaaat

SEQ ID NO: 1514839 - DNA, 15 bp, Homo sapiens
atttacatgtaaaaa

SEQ ID NO: 1514840 - DNA, 15 bp, Homo sapiens
tatttacatgtaaaa

SEQ ID NO: 1514841 - DNA, 15 bp, Homo sapiens
atatttacatgtaaa

SEQ ID NO: 1514842 - DNA, 15 bp, Homo sapiens
tatatttacatgtaa

SEQ ID NO: 1514843 - DNA, 15 bp, Homo sapiens
ttatatttacatgta

SEQ ID NO: 1514844 - DNA, 15 bp, Homo sapiens
attatatttacatgt

SEQ ID NO: 1514845 - DNA, 15 bp, Homo sapiens
tattatatttacatg

SEQ ID NO: 1514846 - DNA, 15 bp, Homo sapiens
ttattatatttacat

SEQ ID NO: 1514847 - DNA, 15 bp, Homo sapiens
attattatatttaca

SEQ ID NO: 1514848 - DNA, 15 bp, Homo sapiens
aattattatatttac

SEQ ID NO: 1514849 - DNA, 15 bp, Homo sapiens
taattattatattta

SEQ ID NO: 1514850 - DNA, 15 bp, Homo sapiens
ataattattatattt

SEQ ID NO: 1514851 - DNA, 15 bp, Homo sapiens
tataattattatatt

SEQ ID NO: 1514852 - DNA, 15 bp, Homo sapiens
atataattattatat

SEQ ID NO: 1514853 - DNA, 15 bp, Homo sapiens
aatataattattata

SEQ ID NO: 1514854 - DNA, 15 bp, Homo sapiens
aaatataattattat

SEQ ID NO: 1514855 - DNA, 15 bp, Homo sapiens
caaatataattatta

SEQ ID NO: 1514856 - DNA, 15 bp, Homo sapiens
ccaaatataattatt

SEQ ID NO: 1514857 - DNA, 15 bp, Homo sapiens
cccaaatataattat

SEQ ID NO: 1514858 - DNA, 15 bp, Homo sapiens
tcccaaatataatta

SEQ ID NO: 1514859 - DNA, 15 bp, Homo sapiens
ttcccaaatataatt

SEQ ID NO: 1514860 - DNA, 15 bp, Homo sapiens
cttcccaaatataat

SEQ ID NO: 1514861 - DNA, 15 bp, Homo sapiens
ccttcccaaatataa

SEQ ID NO: 1514862 - DNA, 15 bp, Homo sapiens
accttcccaaatata

SEQ ID NO: 1514863 - DNA, 15 bp, Homo sapiens
aaccttcccaaatat

SEQ ID NO: 1514864 - DNA, 15 bp, Homo sapiens
taaccttcccaaata

SEQ ID NO: 1514865 - DNA, 15 bp, Homo sapiens
ctaaccttcccaaat

SEQ ID NO: 1514866 - DNA, 15 bp, Homo sapiens
tctaaccttcccaaa

SEQ ID NO: 1514867 - DNA, 15 bp, Homo sapiens
ttctaaccttcccaa

SEQ ID NO: 1514868 - DNA, 15 bp, Homo sapiens
tttctaaccttccca

SEQ ID NO: 1514869 - DNA, 15 bp, Homo sapiens
gtttctaaccttccc

SEQ ID NO: 1514870 - DNA, 15 bp, Homo sapiens
tgtttctaaccttcc

SEQ ID NO: 1514871 - DNA, 15 bp, Homo sapiens
gtgtttctaaccttc

SEQ ID NO: 1514872 - DNA, 15 bp, Homo sapiens
agtgtttctaacctt

SEQ ID NO: 1514873 - DNA, 15 bp, Homo sapiens
tagtgtttctaacct

SEQ ID NO: 1514874 - DNA, 15 bp, Homo sapiens
gtagtgtttctaacc

SEQ ID NO: 1514875 - DNA, 15 bp, Homo sapiens
ggtagtgtttctaac

SEQ ID NO: 1514876 - DNA, 15 bp, Homo sapiens
aggtagtgtttctaa

SEQ ID NO: 1514877 - DNA, 15 bp, Homo sapiens
taggtagtgtttcta

SEQ ID NO: 1514878 - DNA, 15 bp, Homo sapiens
ttaggtagtgtttct

SEQ ID NO: 1514879 - DNA, 15 bp, Homo sapiens
tttaggtagtgtttc

SEQ ID NO: 1514880 - DNA, 15 bp, Homo sapiens
ttttaggtagtgttt

SEQ ID NO: 1514881 - DNA, 15 bp, Homo sapiens
attttaggtagtgtt

SEQ ID NO: 1514882 - DNA, 15 bp, Homo sapiens
tattttaggtagtgt

SEQ ID NO: 1514883 - DNA, 15 bp, Homo sapiens
ttattttaggtagtg

SEQ ID NO: 1514884 - DNA, 15 bp, Homo sapiens
attattttaggtagt

SEQ ID NO: 1514885 - DNA, 15 bp, Homo sapiens
aattattttaggtag

SEQ ID NO: 1514886 - DNA, 15 bp, Homo sapiens
aaattattttaggta

SEQ ID NO: 1514887 - DNA, 15 bp, Homo sapiens
taaattattttaggt

SEQ ID NO: 1514888 - DNA, 15 bp, Homo sapiens
ataaattattttagg

SEQ ID NO: 1514889 - DNA, 15 bp, Homo sapiens
tataaattattttag

SEQ ID NO: 1514890 - DNA, 15 bp, Homo sapiens
ctataaattatttta

SEQ ID NO: 1514891 - DNA, 15 bp, Homo sapiens
tctataaattatttt

SEQ ID NO: 1514892 - DNA, 15 bp, Homo sapiens
ttctataaattattt

SEQ ID NO: 1514893 - DNA, 15 bp, Homo sapiens
attctataaattatt

SEQ ID NO: 1514894 - DNA, 15 bp, Homo sapiens
cattctataaattat

SEQ ID NO: 1514895 - DNA, 15 bp, Homo sapiens
tcattctataaatta

SEQ ID NO: 1514896 - DNA, 15 bp, Homo sapiens
ctcattctataaatt

SEQ ID NO: 1514897 - DNA, 15 bp, Homo sapiens
cctcattctataaat

SEQ ID NO: 1514898 - DNA, 15 bp, Homo sapiens
tcctcattctataaa

SEQ ID NO: 1514899 - DNA, 15 bp, Homo sapiens
ttcctcattctataa

SEQ ID NO: 1514900 - DNA, 15 bp, Homo sapiens
attcctcattctata

SEQ ID NO: 1514901 - DNA, 15 bp, Homo sapiens
cattcctcattctat

SEQ ID NO: 1514902 - DNA, 15 bp, Homo sapiens
acattcctcattcta

SEQ ID NO: 1514903 - DNA, 15 bp, Homo sapiens
aacattcctcattct

SEQ ID NO: 1514904 - DNA, 15 bp, Homo sapiens
aaacattcctcattc

SEQ ID NO: 1514905 - DNA, 15 bp, Homo sapiens
caaacattcctcatt

SEQ ID NO: 1514906 - DNA, 15 bp, Homo sapiens
tcaaacattcctcat

SEQ ID NO: 1514907 - DNA, 15 bp, Homo sapiens
atcaaacattcctca

SEQ ID NO: 1514908 - DNA, 15 bp, Homo sapiens
aatcaaacattcctc

SEQ ID NO: 1514909 - DNA, 15 bp, Homo sapiens
aaatcaaacattcct

SEQ ID NO: 1514910 - DNA, 15 bp, Homo sapiens
aaaatcaaacattcc

SEQ ID NO: 1514911 - DNA, 15 bp, Homo sapiens
aaaaatcaaacattc

SEQ ID NO: 1514912 - DNA, 15 bp, Homo sapiens
taaaaatcaaacatt

SEQ ID NO: 1514913 - DNA, 15 bp, Homo sapiens
ttaaaaatcaaacat

SEQ ID NO: 1514914 - DNA, 15 bp, Homo sapiens
cttaaaaatcaaaca

SEQ ID NO: 1514915 - DNA, 15 bp, Homo sapiens
acttaaaaatcaaac

SEQ ID NO: 1514916 - DNA, 15 bp, Homo sapiens
tacttaaaaatcaaa

SEQ ID NO: 1514917 - DNA, 15 bp, Homo sapiens
gtacttaaaaatcaa

SEQ ID NO: 1514918 - DNA, 15 bp, Homo sapiens
agtacttaaaaatca

SEQ ID NO: 1514919 - DNA, 15 bp, Homo sapiens
tagtacttaaaaatc

SEQ ID NO: 1514920 - DNA, 15 bp, Homo sapiens
ctagtacttaaaaat

SEQ ID NO: 1514921 - DNA, 15 bp, Homo sapiens
gctagtacttaaaaa

SEQ ID NO: 1514922 - DNA, 15 bp, Homo sapiens
tgctagtacttaaaa

SEQ ID NO: 1514923 - DNA, 15 bp, Homo sapiens
ctgctagtacttaaa

SEQ ID NO: 1514924 - DNA, 15 bp, Homo sapiens
tctgctagtacttaa

SEQ ID NO: 1514925 - DNA, 15 bp, Homo sapiens
ttctgctagtactta

SEQ ID NO: 1514926 - DNA, 15 bp, Homo sapiens
tttctgctagtactt

SEQ ID NO: 1514927 - DNA, 15 bp, Homo sapiens
atttctgctagtact

SEQ ID NO: 1514928 - DNA, 15 bp, Homo sapiens
aatttctgctagtac

SEQ ID NO: 1514929 - DNA, 15 bp, Homo sapiens
taatttctgctagta

SEQ ID NO: 1514930 - DNA, 15 bp, Homo sapiens
ataatttctgctagt

SEQ ID NO: 1514931 - DNA, 15 bp, Homo sapiens
tataatttctgctag

SEQ ID NO: 1514932 - DNA, 15 bp, Homo sapiens
atataatttctgcta

SEQ ID NO: 1514933 - DNA, 15 bp, Homo sapiens
gatataatttctgct

SEQ ID NO: 1514934 - DNA, 15 bp, Homo sapiens
tgatataatttctgc

SEQ ID NO: 1514935 - DNA, 15 bp, Homo sapiens
ttgatataatttctg

SEQ ID NO: 1514936 - DNA, 15 bp, Homo sapiens
attgatataatttct

SEQ ID NO: 1514937 - DNA, 15 bp, Homo sapiens
cattgatataatttc

SEQ ID NO: 1514938 - DNA, 15 bp, Homo sapiens
tcattgatataattt

SEQ ID NO: 1514939 - DNA, 15 bp, Homo sapiens
ctcattgatataatt

SEQ ID NO: 1514940 - DNA, 15 bp, Homo sapiens
tctcattgatataat

SEQ ID NO: 1514941 - DNA, 15 bp, Homo sapiens
ttctcattgatataa

SEQ ID NO: 1514942 - DNA, 15 bp, Homo sapiens
tttctcattgatata

SEQ ID NO: 1514943 - DNA, 15 bp, Homo sapiens
ttttctcattgatat

SEQ ID NO: 1514944 - DNA, 15 bp, Homo sapiens
attttctcattgata

SEQ ID NO: 1514945 - DNA, 15 bp, Homo sapiens
aattttctcattgat

SEQ ID NO: 1514946 - DNA, 15 bp, Homo sapiens
gaattttctcattga

SEQ ID NO: 1514947 - DNA, 15 bp, Homo sapiens
tgaattttctcattg

SEQ ID NO: 1514948 - DNA, 15 bp, Homo sapiens
atgaattttctcatt

SEQ ID NO: 1514949 - DNA, 15 bp, Homo sapiens
catgaattttctcat

SEQ ID NO: 1514950 - DNA, 15 bp, Homo sapiens
acatgaattttctca

SEQ ID NO: 1514951 - DNA, 15 bp, Homo sapiens
aacatgaattttctc

SEQ ID NO: 1514952 - DNA, 15 bp, Homo sapiens
aaacatgaattttct

SEQ ID NO: 1514953 - DNA, 15 bp, Homo sapiens
aaaacatgaattttc

SEQ ID NO: 1514954 - DNA, 15 bp, Homo sapiens
aaaaacatgaatttt

SEQ ID NO: 1514955 - DNA, 15 bp, Homo sapiens
taaaaacatgaattt

SEQ ID NO: 1514956 - DNA, 15 bp, Homo sapiens
ttaaaaacatgaatt

SEQ ID NO: 1514957 - DNA, 15 bp, Homo sapiens
tttaaaaacatgaat

SEQ ID NO: 1514958 - DNA, 15 bp, Homo sapiens
ctttaaaaacatgaa

SEQ ID NO: 1514959 - DNA, 15 bp, Homo sapiens
tctttaaaaacatga

SEQ ID NO: 1514960 - DNA, 15 bp, Homo sapiens
ttctttaaaaacatg

SEQ ID NO: 1514961 - DNA, 15 bp, Homo sapiens
attctttaaaaacat

SEQ ID NO: 1514962 - DNA, 15 bp, Homo sapiens
cattctttaaaaaca

SEQ ID NO: 1514963 - DNA, 15 bp, Homo sapiens
acattctttaaaaac

SEQ ID NO: 1514964 - DNA, 15 bp, Homo sapiens
gacattctttaaaaa

SEQ ID NO: 1514965 - DNA, 15 bp, Homo sapiens
agacattctttaaaa

SEQ ID NO: 1514966 - DNA, 15 bp, Homo sapiens
aagacattctttaaa

SEQ ID NO: 1514967 - DNA, 15 bp, Homo sapiens
taagacattctttaa

SEQ ID NO: 1514968 - DNA, 15 bp, Homo sapiens
ttaagacattcttta

SEQ ID NO: 1514969 - DNA, 15 bp, Homo sapiens
attaagacattcttt

SEQ ID NO: 1514970 - DNA, 15 bp, Homo sapiens
cattaagacattctt

SEQ ID NO: 1514971 - DNA, 15 bp, Homo sapiens
acattaagacattct

SEQ ID NO: 1514972 - DNA, 15 bp, Homo sapiens
tacattaagacattc

SEQ ID NO: 1514973 - DNA, 15 bp, Homo sapiens
atacattaagacatt

SEQ ID NO: 1514974 - DNA, 15 bp, Homo sapiens
tatacattaagacat

SEQ ID NO: 1514975 - DNA, 15 bp, Homo sapiens
ctatacattaagaca

SEQ ID NO: 1514976 - DNA, 15 bp, Homo sapiens
tctatacattaagac

SEQ ID NO: 1514977 - DNA, 15 bp, Homo sapiens
gtctatacattaaga

SEQ ID NO: 1514978 - DNA, 15 bp, Homo sapiens
agtctatacattaag

SEQ ID NO: 1514979 - DNA, 15 bp, Homo sapiens
aagtctatacattaa

SEQ ID NO: 1514980 - DNA, 15 bp, Homo sapiens
gaagtctatacatta

SEQ ID NO: 1514981 - DNA, 15 bp, Homo sapiens
tgaagtctatacatt

SEQ ID NO: 1514982 - DNA, 15 bp, Homo sapiens
atgaagtctatacat

SEQ ID NO: 1514983 - DNA, 15 bp, Homo sapiens
tatgaagtctataca

SEQ ID NO: 1514984 - DNA, 15 bp, Homo sapiens
gtatgaagtctatac

SEQ ID NO: 1514985 - DNA, 15 bp, Homo sapiens
tgtatgaagtctata

SEQ ID NO: 1514986 - DNA, 15 bp, Homo sapiens
ttgtatgaagtctat

SEQ ID NO: 1514987 - DNA, 15 bp, Homo sapiens
attgtatgaagtcta

SEQ ID NO: 1514988 - DNA, 15 bp, Homo sapiens
tattgtatgaagtct

SEQ ID NO: 1514989 - DNA, 15 bp, Homo sapiens
ttattgtatgaagtc

SEQ ID NO: 1514990 - DNA, 15 bp, Homo sapiens
tttattgtatgaagt

SEQ ID NO: 1514991 - DNA, 15 bp, Homo sapiens
atttattgtatgaag

SEQ ID NO: 1514992 - DNA, 15 bp, Homo sapiens
tatttattgtatgaa

SEQ ID NO: 1514993 - DNA, 15 bp, Homo sapiens
ttatttattgtatga

SEQ ID NO: 1514994 - DNA, 15 bp, Homo sapiens
attatttattgtatg

SEQ ID NO: 1514995 - DNA, 15 bp, Homo sapiens
gattatttattgtat

SEQ ID NO: 1514996 - DNA, 15 bp, Homo sapiens
agattatttattgta

SEQ ID NO: 1514997 - DNA, 15 bp, Homo sapiens
cagattatttattgt

SEQ ID NO: 1514998 - DNA, 15 bp, Homo sapiens
tcagattatttattg

SEQ ID NO: 1514999 - DNA, 15 bp, Homo sapiens
atcagattatttatt

SEQ ID NO: 1515000 - DNA, 15 bp, Homo sapiens
aatcagattatttat

SEQ ID NO: 1515001 - DNA, 15 bp, Homo sapiens
taatcagattattta

SEQ ID NO: 1515002 - DNA, 15 bp, Homo sapiens
ataatcagattattt

SEQ ID NO: 1515003 - DNA, 15 bp, Homo sapiens
aataatcagattatt

SEQ ID NO: 1515004 - DNA, 15 bp, Homo sapiens
aaataatcagattat

SEQ ID NO: 1515005 - DNA, 15 bp, Homo sapiens
taaataatcagatta

SEQ ID NO: 1515006 - DNA, 15 bp, Homo sapiens
ataaataatcagatt

SEQ ID NO: 1515007 - DNA, 15 bp, Homo sapiens
tataaataatcagat

SEQ ID NO: 1515008 - DNA, 15 bp, Homo sapiens
ttataaataatcaga

SEQ ID NO: 1515009 - DNA, 15 bp, Homo sapiens
gttataaataatcag

SEQ ID NO: 1515010 - DNA, 15 bp, Homo sapiens
ggttataaataatca

SEQ ID NO: 1515011 - DNA, 15 bp, Homo sapiens
gggttataaataatc

SEQ ID NO: 1515012 - DNA, 15 bp, Homo sapiens
agggttataaataat

SEQ ID NO: 1515013 - DNA, 15 bp, Homo sapiens
cagggttataaataa

SEQ ID NO: 1515014 - DNA, 15 bp, Homo sapiens
acagggttataaata

SEQ ID NO: 1515015 - DNA, 15 bp, Homo sapiens
aacagggttataaat

SEQ ID NO: 1515016 - DNA, 15 bp, Homo sapiens
aaacagggttataaa

SEQ ID NO: 1515017 - DNA, 15 bp, Homo sapiens
aaaacagggttataa

SEQ ID NO: 1515018 - DNA, 15 bp, Homo sapiens
taaaacagggttata

SEQ ID NO: 1515019 - DNA, 15 bp, Homo sapiens
ataaaacagggttat

SEQ ID NO: 1515020 - DNA, 15 bp, Homo sapiens
aataaaacagggtta

SEQ ID NO: 1515021 - DNA, 15 bp, Homo sapiens
caataaaacagggtt

SEQ ID NO: 1515022 - DNA, 15 bp, Homo sapiens
acaataaaacagggt

SEQ ID NO: 1515023 - DNA, 15 bp, Homo sapiens
cacaataaaacaggg

SEQ ID NO: 1515024 - DNA, 15 bp, Homo sapiens
acacaataaaacagg

SEQ ID NO: 1515025 - DNA, 15 bp, Homo sapiens
tacacaataaaacag

SEQ ID NO: 1515026 - DNA, 15 bp, Homo sapiens
ctacacaataaaaca

SEQ ID NO: 1515027 - DNA, 15 bp, Homo sapiens
tctacacaataaaac

SEQ ID NO: 1515028 - DNA, 15 bp, Homo sapiens
atctacacaataaaa

SEQ ID NO: 1515029 - DNA, 15 bp, Homo sapiens
tatctacacaataaa

SEQ ID NO: 1515030 - DNA, 15 bp, Homo sapiens
gtatctacacaataa

SEQ ID NO: 1515031 - DNA, 15 bp, Homo sapiens
agtatctacacaata

SEQ ID NO: 1515032 - DNA, 15 bp, Homo sapiens
aagtatctacacaat

SEQ ID NO: 1515033 - DNA, 15 bp, Homo sapiens
gaagtatctacacaa

SEQ ID NO: 1515034 - DNA, 15 bp, Homo sapiens
tgaagtatctacaca

SEQ ID NO: 1515035 - DNA, 15 bp, Homo sapiens
ctgaagtatctacac

SEQ ID NO: 1515036 - DNA, 15 bp, Homo sapiens
tctgaagtatctaca

SEQ ID NO: 1515037 - DNA, 15 bp, Homo sapiens
ctctgaagtatctac

SEQ ID NO: 1515038 - DNA, 15 bp, Homo sapiens
actctgaagtatcta

SEQ ID NO: 1515039 - DNA, 15 bp, Homo sapiens
tactctgaagtatct

SEQ ID NO: 1515040 - DNA, 15 bp, Homo sapiens
atactctgaagtatc

SEQ ID NO: 1515041 - DNA, 15 bp, Homo sapiens
aatactctgaagtat

SEQ ID NO: 1515042 - DNA, 15 bp, Homo sapiens
caatactctgaagta

SEQ ID NO: 1515043 - DNA, 15 bp, Homo sapiens
gcaatactctgaagt

SEQ ID NO: 1515044 - DNA, 15 bp, Homo sapiens
ggcaatactctgaag

SEQ ID NO: 1515045 - DNA, 15 bp, Homo sapiens
tggcaatactctgaa

SEQ ID NO: 1515046 - DNA, 15 bp, Homo sapiens
ttggcaatactctga

SEQ ID NO: 1515047 - DNA, 15 bp, Homo sapiens
attggcaatactctg

SEQ ID NO: 1515048 - DNA, 15 bp, Homo sapiens
gattggcaatactct

SEQ ID NO: 1515049 - DNA, 15 bp, Homo sapiens
tgattggcaatactc

SEQ ID NO: 1515050 - DNA, 15 bp, Homo sapiens
atgattggcaatact

SEQ ID NO: 1515051 - DNA, 15 bp, Homo sapiens
catgattggcaatac

SEQ ID NO: 1515052 - DNA, 15 bp, Homo sapiens
acatgattggcaata

SEQ ID NO: 1515053 - DNA, 15 bp, Homo sapiens
aacatgattggcaat

SEQ ID NO: 1515054 - DNA, 15 bp, Homo sapiens
gaacatgattggcaa

SEQ ID NO: 1515055 - DNA, 15 bp, Homo sapiens
agaacatgattggca

SEQ ID NO: 1515056 - DNA, 15 bp, Homo sapiens
gagaacatgattggc

SEQ ID NO: 1515057 - DNA, 15 bp, Homo sapiens
agagaacatgattgg

SEQ ID NO: 1515058 - DNA, 15 bp, Homo sapiens
aagagaacatgattg

SEQ ID NO: 1515059 - DNA, 15 bp, Homo sapiens
gaagagaacatgatt

SEQ ID NO: 1515060 - DNA, 15 bp, Homo sapiens
tgaagagaacatgat

SEQ ID NO: 1515061 - DNA, 15 bp, Homo sapiens
gtgaagagaacatga

SEQ ID NO: 1515062 - DNA, 15 bp, Homo sapiens
tgtgaagagaacatg

SEQ ID NO: 1515063 - DNA, 15 bp, Homo sapiens
ttgtgaagagaacat

SEQ ID NO: 1515064 - DNA, 15 bp, Homo sapiens
tttgtgaagagaaca

SEQ ID NO: 1515065 - DNA, 15 bp, Homo sapiens
ttttgtgaagagaac

SEQ ID NO: 1515066 - DNA, 15 bp, Homo sapiens
cttttgtgaagagaa

SEQ ID NO: 1515067 - DNA, 15 bp, Homo sapiens
tcttttgtgaagaga

SEQ ID NO: 1515068 - DNA, 15 bp, Homo sapiens
ttcttttgtgaagag

SEQ ID NO: 1515069 - DNA, 15 bp, Homo sapiens
cttcttttgtgaaga

SEQ ID NO: 1515070 - DNA, 15 bp, Homo sapiens
tcttcttttgtgaag

SEQ ID NO: 1515071 - DNA, 15 bp, Homo sapiens
ttcttcttttgtgaa

SEQ ID NO: 1515072 - DNA, 15 bp, Homo sapiens
gttcttcttttgtga

SEQ ID NO: 1515073 - DNA, 15 bp, Homo sapiens
tgttcttcttttgtg

SEQ ID NO: 1515074 - DNA, 15 bp, Homo sapiens
atgttcttcttttgt

SEQ ID NO: 1515075 - DNA, 15 bp, Homo sapiens
tatgttcttcttttg

SEQ ID NO: 1515076 - DNA, 15 bp, Homo sapiens
atatgttcttctttt

SEQ ID NO: 1515077 - DNA, 15 bp, Homo sapiens
catatgttcttcttt

SEQ ID NO: 1515078 - DNA, 15 bp, Homo sapiens
gcatatgttcttctt

SEQ ID NO: 1515079 - DNA, 15 bp, Homo sapiens
cgcatatgttcttct

SEQ ID NO: 1515080 - DNA, 15 bp, Homo sapiens
ccgcatatgttcttc

SEQ ID NO: 1515081 - DNA, 15 bp, Homo sapiens
gccgcatatgttctt

SEQ ID NO: 1515082 - DNA, 15 bp, Homo sapiens
ggccgcatatgttct

SEQ ID NO: 1515083 - DNA, 15 bp, Homo sapiens
aggccgcatatgttc

SEQ ID NO: 1515084 - DNA, 15 bp, Homo sapiens
aaggccgcatatgtt

SEQ ID NO: 1515085 - DNA, 15 bp, Homo sapiens
aaaggccgcatatgt

SEQ ID NO: 1515086 - DNA, 15 bp, Homo sapiens
gaaaggccgcatatg

SEQ ID NO: 1515087 - DNA, 15 bp, Homo sapiens
tgaaaggccgcatat

SEQ ID NO: 1515088 - DNA, 15 bp, Homo sapiens
ttgaaaggccgcata

SEQ ID NO: 1515089 - DNA, 15 bp, Homo sapiens
attgaaaggccgcat

SEQ ID NO: 1515090 - DNA, 15 bp, Homo sapiens
cattgaaaggccgca

SEQ ID NO: 1515091 - DNA, 15 bp, Homo sapiens
tcattgaaaggccgc

SEQ ID NO: 1515092 - DNA, 15 bp, Homo sapiens
atcattgaaaggccg

SEQ ID NO: 1515093 - DNA, 15 bp, Homo sapiens
aatcattgaaaggcc

SEQ ID NO: 1515094 - DNA, 15 bp, Homo sapiens
aaatcattgaaaggc

SEQ ID NO: 1515095 - DNA, 15 bp, Homo sapiens
aaaatcattgaaagg

SEQ ID NO: 1515096 - DNA, 15 bp, Homo sapiens
caaaatcattgaaag

SEQ ID NO: 1515097 - DNA, 15 bp, Homo sapiens
acaaaatcattgaaa

SEQ ID NO: 1515098 - DNA, 15 bp, Homo sapiens
cacaaaatcattgaa

SEQ ID NO: 1515099 - DNA, 15 bp, Homo sapiens
tcacaaaatcattga

SEQ ID NO: 1515100 - DNA, 15 bp, Homo sapiens
ttcacaaaatcattg

SEQ ID NO: 1515101 - DNA, 15 bp, Homo sapiens
tttcacaaaatcatt

SEQ ID NO: 1515102 - DNA, 15 bp, Homo sapiens
ttttcacaaaatcat

SEQ ID NO: 1515103 - DNA, 15 bp, Homo sapiens
cttttcacaaaatca

SEQ ID NO: 1515104 - DNA, 15 bp, Homo sapiens
gcttttcacaaaatc

SEQ ID NO: 1515105 - DNA, 15 bp, Homo sapiens
tgcttttcacaaaat

SEQ ID NO: 1515106 - DNA, 15 bp, Homo sapiens
ttgcttttcacaaaa

SEQ ID NO: 1515107 - DNA, 15 bp, Homo sapiens
gttgcttttcacaaa

SEQ ID NO: 1515108 - DNA, 15 bp, Homo sapiens
agttgcttttcacaa

SEQ ID NO: 1515109 - DNA, 15 bp, Homo sapiens
aagttgcttttcaca

SEQ ID NO: 1515110 - DNA, 15 bp, Homo sapiens
aaagttgcttttcac

SEQ ID NO: 1515111 - DNA, 15 bp, Homo sapiens
caaagttgcttttca

SEQ ID NO: 1515112 - DNA, 15 bp, Homo sapiens
tcaaagttgcttttc

SEQ ID NO: 1515113 - DNA, 15 bp, Homo sapiens
atcaaagttgctttt

SEQ ID NO: 1515114 - DNA, 15 bp, Homo sapiens
catcaaagttgcttt

SEQ ID NO: 1515115 - DNA, 15 bp, Homo sapiens
gcatcaaagttgctt

SEQ ID NO: 1515116 - DNA, 15 bp, Homo sapiens
tgcatcaaagttgct

SEQ ID NO: 1515117 - DNA, 15 bp, Homo sapiens
ctgcatcaaagttgc

SEQ ID NO: 1515118 - DNA, 15 bp, Homo sapiens
gctgcatcaaagttg

SEQ ID NO: 1515119 - DNA, 15 bp, Homo sapiens
tgctgcatcaaagtt

SEQ ID NO: 1515120 - DNA, 15 bp, Homo sapiens
gtgctgcatcaaagt

SEQ ID NO: 1515121 - DNA, 15 bp, Homo sapiens
cgtgctgcatcaaag

SEQ ID NO: 1515122 - DNA, 15 bp, Homo sapiens
gcgtgctgcatcaaa

SEQ ID NO: 1515123 - DNA, 15 bp, Homo sapiens
tgcgtgctgcatcaa

SEQ ID NO: 1515124 - DNA, 15 bp, Homo sapiens
ctgcgtgctgcatca

SEQ ID NO: 1515125 - DNA, 15 bp, Homo sapiens
cctgcgtgctgcatc

SEQ ID NO: 1515126 - DNA, 15 bp, Homo sapiens
acctgcgtgctgcat

SEQ ID NO: 1515127 - DNA, 15 bp, Homo sapiens
tacctgcgtgctgca

SEQ ID NO: 1515128 - DNA, 15 bp, Homo sapiens
ttacctgcgtgctgc

SEQ ID NO: 1515129 - DNA, 15 bp, Homo sapiens
attacctgcgtgctg

SEQ ID NO: 1515130 - DNA, 15 bp, Homo sapiens
aattacctgcgtgct

SEQ ID NO: 1515131 - DNA, 15 bp, Homo sapiens
aaattacctgcgtgc

SEQ ID NO: 1515132 - DNA, 15 bp, Homo sapiens
aaaattacctgcgtg

SEQ ID NO: 1515133 - DNA, 15 bp, Homo sapiens
gaaaattacctgcgt

SEQ ID NO: 1515134 - DNA, 15 bp, Homo sapiens
agaaaattacctgcg

SEQ ID NO: 1515135 - DNA, 15 bp, Homo sapiens
aagaaaattacctgc

SEQ ID NO: 1515136 - DNA, 15 bp, Homo sapiens
caagaaaattacctg

SEQ ID NO: 1515137 - DNA, 15 bp, Homo sapiens
gcaagaaaattacct

SEQ ID NO: 1515138 - DNA, 15 bp, Homo sapiens
ggcaagaaaattacc

SEQ ID NO: 1515139 - DNA, 15 bp, Homo sapiens
tggcaagaaaattac

SEQ ID NO: 1515140 - DNA, 15 bp, Homo sapiens
gtggcaagaaaatta

SEQ ID NO: 1515141 - DNA, 15 bp, Homo sapiens
agtggcaagaaaatt

SEQ ID NO: 1515142 - DNA, 15 bp, Homo sapiens
aagtggcaagaaaat

SEQ ID NO: 1515143 - DNA, 15 bp, Homo sapiens
taagtggcaagaaaa

SEQ ID NO: 1515144 - DNA, 15 bp, Homo sapiens
gtaagtggcaagaaa

SEQ ID NO: 1515145 - DNA, 15 bp, Homo sapiens
agtaagtggcaagaa

SEQ ID NO: 1515146 - DNA, 15 bp, Homo sapiens
gagtaagtggcaaga

SEQ ID NO: 1515147 - DNA, 15 bp, Homo sapiens
tgagtaagtggcaag

SEQ ID NO: 1515148 - DNA, 15 bp, Homo sapiens
ctgagtaagtggcaa

SEQ ID NO: 1515149 - DNA, 15 bp, Homo sapiens
actgagtaagtggca

SEQ ID NO: 1515150 - DNA, 15 bp, Homo sapiens
aactgagtaagtggc

SEQ ID NO: 1515151 - DNA, 15 bp, Homo sapiens
caactgagtaagtgg

SEQ ID NO: 1515152 - DNA, 15 bp, Homo sapiens
gcaactgagtaagtg

SEQ ID NO: 1515153 - DNA, 15 bp, Homo sapiens
agcaactgagtaagt

SEQ ID NO: 1515154 - DNA, 15 bp, Homo sapiens
gagcaactgagtaag

SEQ ID NO: 1515155 - DNA, 15 bp, Homo sapiens
agagcaactgagtaa

SEQ ID NO: 1515156 - DNA, 15 bp, Homo sapiens
cagagcaactgagta

SEQ ID NO: 1515157 - DNA, 15 bp, Homo sapiens
acagagcaactgagt

SEQ ID NO: 1515158 - DNA, 15 bp, Homo sapiens
aacagagcaactgag

SEQ ID NO: 1515159 - DNA, 15 bp, Homo sapiens
aaacagagcaactga

SEQ ID NO: 1515160 - DNA, 15 bp, Homo sapiens
caaacagagcaactg

SEQ ID NO: 1515161 - DNA, 15 bp, Homo sapiens
tcaaacagagcaact

SEQ ID NO: 1515162 - DNA, 15 bp, Homo sapiens
ttcaaacagagcaac

SEQ ID NO: 1515163 - DNA, 15 bp, Homo sapiens
attcaaacagagcaa

SEQ ID NO: 1515164 - DNA, 15 bp, Homo sapiens
gattcaaacagagca

SEQ ID NO: 1515165 - DNA, 15 bp, Homo sapiens
tgattcaaacagagc

SEQ ID NO: 1515166 - DNA, 15 bp, Homo sapiens
ttgattcaaacagag

SEQ ID NO: 1515167 - DNA, 15 bp, Homo sapiens
tttgattcaaacaga

SEQ ID NO: 1515168 - DNA, 15 bp, Homo sapiens
atttgattcaaacag

SEQ ID NO: 1515169 - DNA, 15 bp, Homo sapiens
tatttgattcaaaca

SEQ ID NO: 1515170 - DNA, 15 bp, Homo sapiens
atatttgattcaaac

SEQ ID NO: 1515171 - DNA, 15 bp, Homo sapiens
aatatttgattcaaa

SEQ ID NO: 1515172 - DNA, 15 bp, Homo sapiens
aaatatttgattcaa

SEQ ID NO: 1515173 - DNA, 15 bp, Homo sapiens
aaaatatttgattca

SEQ ID NO: 1515174 - DNA, 15 bp, Homo sapiens
gaaaatatttgattc

SEQ ID NO: 1515175 - DNA, 15 bp, Homo sapiens
cgaaaatatttgatt

SEQ ID NO: 1515176 - DNA, 15 bp, Homo sapiens
ccgaaaatatttgat

SEQ ID NO: 1515177 - DNA, 15 bp, Homo sapiens
accgaaaatatttga

SEQ ID NO: 1515178 - DNA, 15 bp, Homo sapiens
aaccgaaaatatttg

SEQ ID NO: 1515179 - DNA, 15 bp, Homo sapiens
aaaccgaaaatattt

SEQ ID NO: 1515180 - DNA, 15 bp, Homo sapiens
gaaaccgaaaatatt

SEQ ID NO: 1515181 - DNA, 15 bp, Homo sapiens
tgaaaccgaaaatat

SEQ ID NO: 1515182 - DNA, 15 bp, Homo sapiens
gtgaaaccgaaaata

SEQ ID NO: 1515183 - DNA, 15 bp, Homo sapiens
tgtgaaaccgaaaat

SEQ ID NO: 1515184 - DNA, 15 bp, Homo sapiens
atgtgaaaccgaaaa

SEQ ID NO: 1515185 - DNA, 15 bp, Homo sapiens
tatgtgaaaccgaaa

SEQ ID NO: 1515186 - DNA, 15 bp, Homo sapiens
ttatgtgaaaccgaa

SEQ ID NO: 1515187 - DNA, 15 bp, Homo sapiens
tttatgtgaaaccga

SEQ ID NO: 1515188 - DNA, 15 bp, Homo sapiens
atttatgtgaaaccg

SEQ ID NO: 1515189 - DNA, 15 bp, Homo sapiens
gatttatgtgaaacc

SEQ ID NO: 1515190 - DNA, 15 bp, Homo sapiens
ggatttatgtgaaac

SEQ ID NO: 1515191 - DNA, 15 bp, Homo sapiens
tggatttatgtgaaa

SEQ ID NO: 1515192 - DNA, 15 bp, Homo sapiens
atggatttatgtgaa

SEQ ID NO: 1515193 - DNA, 15 bp, Homo sapiens
catggatttatgtga

SEQ ID NO: 1515194 - DNA, 15 bp, Homo sapiens
acatggatttatgtg

SEQ ID NO: 1515195 - DNA, 15 bp, Homo sapiens
tacatggatttatgt

SEQ ID NO: 1515196 - DNA, 15 bp, Homo sapiens
gtacatggatttatg

SEQ ID NO: 1515197 - DNA, 15 bp, Homo sapiens
ggtacatggatttat

SEQ ID NO: 1515198 - DNA, 15 bp, Homo sapiens
aggtacatggattta

SEQ ID NO: 1515199 - DNA, 15 bp, Homo sapiens
caggtacatggattt

SEQ ID NO: 1515200 - DNA, 15 bp, Homo sapiens
acaggtacatggatt

SEQ ID NO: 1515201 - DNA, 15 bp, Homo sapiens
aacaggtacatggat

SEQ ID NO: 1515202 - DNA, 15 bp, Homo sapiens
aaacaggtacatgga

SEQ ID NO: 1515203 - DNA, 15 bp, Homo sapiens
aaaacaggtacatgg

SEQ ID NO: 1515204 - DNA, 15 bp, Homo sapiens
taaaacaggtacatg

SEQ ID NO: 1515205 - DNA, 15 bp, Homo sapiens
gtaaaacaggtacat

SEQ ID NO: 1515206 - DNA, 15 bp, Homo sapiens
tgtaaaacaggtaca

SEQ ID NO: 1515207 - DNA, 15 bp, Homo sapiens
atgtaaaacaggtac

SEQ ID NO: 1515208 - DNA, 15 bp, Homo sapiens
catgtaaaacaggta

SEQ ID NO: 1515209 - DNA, 15 bp, Homo sapiens
tcatgtaaaacaggt

SEQ ID NO: 1515210 - DNA, 15 bp, Homo sapiens
ttcatgtaaaacagg

SEQ ID NO: 1515211 - DNA, 15 bp, Homo sapiens
cttcatgtaaaacag

SEQ ID NO: 1515212 - DNA, 15 bp, Homo sapiens
acttcatgtaaaaca

SEQ ID NO: 1515213 - DNA, 15 bp, Homo sapiens
aacttcatgtaaaac

SEQ ID NO: 1515214 - DNA, 15 bp, Homo sapiens
gaacttcatgtaaaa

SEQ ID NO: 1515215 - DNA, 15 bp, Homo sapiens
ggaacttcatgtaaa

SEQ ID NO: 1515216 - DNA, 15 bp, Homo sapiens
aggaacttcatgtaa

SEQ ID NO: 1515217 - DNA, 15 bp, Homo sapiens
caggaacttcatgta

SEQ ID NO: 1515218 - DNA, 15 bp, Homo sapiens
acaggaacttcatgt

SEQ ID NO: 1515219 - DNA, 15 bp, Homo sapiens
cacaggaacttcatg

SEQ ID NO: 1515220 - DNA, 15 bp, Homo sapiens
acacaggaacttcat

SEQ ID NO: 1515221 - DNA, 15 bp, Homo sapiens
tacacaggaacttca

SEQ ID NO: 1515222 - DNA, 15 bp, Homo sapiens
ttacacaggaacttc

SEQ ID NO: 1515223 - DNA, 15 bp, Homo sapiens
cttacacaggaactt

SEQ ID NO: 1515224 - DNA, 15 bp, Homo sapiens
acttacacaggaact

SEQ ID NO: 1515225 - DNA, 15 bp, Homo sapiens
aacttacacaggaac

SEQ ID NO: 1515226 - DNA, 15 bp, Homo sapiens
aaacttacacaggaa

SEQ ID NO: 1515227 - DNA, 15 bp, Homo sapiens
aaaacttacacagga

SEQ ID NO: 1515228 - DNA, 15 bp, Homo sapiens
aaaaacttacacagg

SEQ ID NO: 1515229 - DNA, 15 bp, Homo sapiens
aaaaaacttacacag

SEQ ID NO: 1515230 - DNA, 15 bp, Homo sapiens
aaaaaaacttacaca

SEQ ID NO: 1515231 - DNA, 15 bp, Homo sapiens
gaaaaaaacttacac

SEQ ID NO: 1515232 - DNA, 15 bp, Homo sapiens
agaaaaaaacttaca

SEQ ID NO: 1515233 - DNA, 15 bp, Homo sapiens
aagaaaaaaacttac

SEQ ID NO: 1515234 - DNA, 15 bp, Homo sapiens
aaagaaaaaaactta

SEQ ID NO: 1515235 - DNA, 15 bp, Homo sapiens
aaaagaaaaaaactt

SEQ ID NO: 1515236 - DNA, 15 bp, Homo sapiens
gaaaagaaaaaaact

SEQ ID NO: 1515237 - DNA, 15 bp, Homo sapiens
ggaaaagaaaaaaac

SEQ ID NO: 1515238 - DNA, 15 bp, Homo sapiens
aggaaaagaaaaaaa

SEQ ID NO: 1515239 - DNA, 15 bp, Homo sapiens
caggaaaagaaaaaa

SEQ ID NO: 1515240 - DNA, 15 bp, Homo sapiens
gcaggaaaagaaaaa

SEQ ID NO: 1515241 - DNA, 15 bp, Homo sapiens
agcaggaaaagaaaa

SEQ ID NO: 1515242 - DNA, 15 bp, Homo sapiens
gagcaggaaaagaaa

SEQ ID NO: 1515243 - DNA, 15 bp, Homo sapiens
agagcaggaaaagaa

SEQ ID NO: 1515244 - DNA, 15 bp, Homo sapiens
tagagcaggaaaaga

SEQ ID NO: 1515245 - DNA, 15 bp, Homo sapiens
ctagagcaggaaaag

SEQ ID NO: 1515246 - DNA, 15 bp, Homo sapiens
cctagagcaggaaaa

SEQ ID NO: 1515247 - DNA, 15 bp, Homo sapiens
acctagagcaggaaa

SEQ ID NO: 1515248 - DNA, 15 bp, Homo sapiens
gacctagagcaggaa

SEQ ID NO: 1515249 - DNA, 15 bp, Homo sapiens
tgacctagagcagga

SEQ ID NO: 1515250 - DNA, 15 bp, Homo sapiens
ttgacctagagcagg

SEQ ID NO: 1515251 - DNA, 15 bp, Homo sapiens
cttgacctagagcag

SEQ ID NO: 1515252 - DNA, 15 bp, Homo sapiens
tcttgacctagagca

SEQ ID NO: 1515253 - DNA, 15 bp, Homo sapiens
gtcttgacctagagc

SEQ ID NO: 1515254 - DNA, 15 bp, Homo sapiens
tgtcttgacctagag

SEQ ID NO: 1515255 - DNA, 15 bp, Homo sapiens
atgtcttgacctaga

SEQ ID NO: 1515256 - DNA, 15 bp, Homo sapiens
tatgtcttgacctag

SEQ ID NO: 1515257 - DNA, 15 bp, Homo sapiens
ctatgtcttgaccta

SEQ ID NO: 1515258 - DNA, 15 bp, Homo sapiens
gctatgtcttgacct

SEQ ID NO: 1515259 - DNA, 15 bp, Homo sapiens
agctatgtcttgacc

SEQ ID NO: 1515260 - DNA, 15 bp, Homo sapiens
aagctatgtcttgac

SEQ ID NO: 1515261 - DNA, 15 bp, Homo sapiens
caagctatgtcttga

SEQ ID NO: 1515262 - DNA, 15 bp, Homo sapiens
acaagctatgtcttg

SEQ ID NO: 1515263 - DNA, 15 bp, Homo sapiens
gacaagctatgtctt

SEQ ID NO: 1515264 - DNA, 15 bp, Homo sapiens
agacaagctatgtct

SEQ ID NO: 1515265 - DNA, 15 bp, Homo sapiens
aagacaagctatgtc

SEQ ID NO: 1515266 - DNA, 15 bp, Homo sapiens
taagacaagctatgt

SEQ ID NO: 1515267 - DNA, 15 bp, Homo sapiens
ataagacaagctatg

SEQ ID NO: 1515268 - DNA, 15 bp, Homo sapiens
aataagacaagctat

SEQ ID NO: 1515269 - DNA, 15 bp, Homo sapiens
aaataagacaagcta

SEQ ID NO: 1515270 - DNA, 15 bp, Homo sapiens
aaaataagacaagct

SEQ ID NO: 1515271 - DNA, 15 bp, Homo sapiens
taaaataagacaagc

SEQ ID NO: 1515272 - DNA, 15 bp, Homo sapiens
ataaaataagacaag

SEQ ID NO: 1515273 - DNA, 15 bp, Homo sapiens
aataaaataagacaa

SEQ ID NO: 1515274 - DNA, 15 bp, Homo sapiens
aaataaaataagaca

SEQ ID NO: 1515275 - DNA, 15 bp, Homo sapiens
aaaataaaataagac

SEQ ID NO: 1515276 - DNA, 15 bp, Homo sapiens
taaaataaaataaga

SEQ ID NO: 1515277 - DNA, 15 bp, Homo sapiens
gtaaaataaaataag

SEQ ID NO: 1515278 - DNA, 15 bp, Homo sapiens
tagtaaaataaaata

SEQ ID NO: 1515279 - DNA, 15 bp, Homo sapiens
atagtaaaataaaat

SEQ ID NO: 1515280 - DNA, 15 bp, Homo sapiens
tatagtaaaataaaa

SEQ ID NO: 1515281 - DNA, 15 bp, Homo sapiens
ttatagtaaaataaa

SEQ ID NO: 1515282 - DNA, 15 bp, Homo sapiens
tttatagtaaaataa

SEQ ID NO: 1515283 - DNA, 15 bp, Homo sapiens
ttttatagtaaaata

SEQ ID NO: 1515284 - DNA, 15 bp, Homo sapiens
cttttatagtaaaat

SEQ ID NO: 1515285 - DNA, 15 bp, Homo sapiens
tcttttatagtaaaa

SEQ ID NO: 1515286 - DNA, 15 bp, Homo sapiens
gtcttttatagtaaa

SEQ ID NO: 1515287 - DNA, 15 bp, Homo sapiens
tgtcttttatagtaa

SEQ ID NO: 1515288 - DNA, 15 bp, Homo sapiens
ctgtcttttatagta

SEQ ID NO: 1515289 - DNA, 15 bp, Homo sapiens
actgtcttttatagt

SEQ ID NO: 1515290 - DNA, 15 bp, Homo sapiens
gactgtcttttatag

SEQ ID NO: 1515291 - DNA, 15 bp, Homo sapiens
tgactgtcttttata

SEQ ID NO: 1515292 - DNA, 15 bp, Homo sapiens
atgactgtcttttat

SEQ ID NO: 1515293 - DNA, 15 bp, Homo sapiens
catgactgtctttta

SEQ ID NO: 1515294 - DNA, 15 bp, Homo sapiens
tcatgactgtctttt

SEQ ID NO: 1515295 - DNA, 15 bp, Homo sapiens
ttcatgactgtcttt

SEQ ID NO: 1515296 - DNA, 15 bp, Homo sapiens
tttcatgactgtctt

SEQ ID NO: 1515297 - DNA, 15 bp, Homo sapiens
atttcatgactgtct

SEQ ID NO: 1515298 - DNA, 15 bp, Homo sapiens
tatttcatgactgtc

SEQ ID NO: 1515299 - DNA, 15 bp, Homo sapiens
ttatttcatgactgt

SEQ ID NO: 1515300 - DNA, 15 bp, Homo sapiens
tttatttcatgactg

SEQ ID NO: 1515301 - DNA, 15 bp, Homo sapiens
atttatttcatgact

SEQ ID NO: 1515302 - DNA, 15 bp, Homo sapiens
aatttatttcatgac

SEQ ID NO: 1515303 - DNA, 15 bp, Homo sapiens
taatttatttcatga

SEQ ID NO: 1515304 - DNA, 15 bp, Homo sapiens
ttaatttatttcatg

SEQ ID NO: 1515305 - DNA, 15 bp, Homo sapiens
attaatttatttcat

SEQ ID NO: 1515306 - DNA, 15 bp, Homo sapiens
tattaatttatttca

SEQ ID NO: 1515307 - DNA, 15 bp, Homo sapiens
atattaatttatttc

SEQ ID NO: 1515308 - DNA, 15 bp, Homo sapiens
aatattaatttattt

SEQ ID NO: 1515309 - DNA, 15 bp, Homo sapiens
aaatattaatttatt

SEQ ID NO: 1515310 - DNA, 15 bp, Homo sapiens
aaaatattaatttat

SEQ ID NO: 1515311 - DNA, 15 bp, Homo sapiens
aaaaatattaattta

SEQ ID NO: 1515312 - DNA, 15 bp, Homo sapiens
aaaaaatattaattt

SEQ ID NO: 1515313 - DNA, 15 bp, Homo sapiens
taaaaaatattaatt

SEQ ID NO: 1515314 - DNA, 15 bp, Homo sapiens
ataaaaaatattaat

SEQ ID NO: 1515315 - DNA, 15 bp, Homo sapiens
tataaaaaatattaa

SEQ ID NO: 1515316 - DNA, 15 bp, Homo sapiens
ttataaaaaatatta

SEQ ID NO: 1515317 - DNA, 15 bp, Homo sapiens
attataaaaaatatt

SEQ ID NO: 1515318 - DNA, 15 bp, Homo sapiens
aattataaaaaatat

SEQ ID NO: 1515319 - DNA, 15 bp, Homo sapiens
aaattataaaaaata

SEQ ID NO: 1515320 - DNA, 15 bp, Homo sapiens
caaattataaaaaat

SEQ ID NO: 1515321 - DNA, 15 bp, Homo sapiens
ccaaattataaaaaa

SEQ ID NO: 1515322 - DNA, 15 bp, Homo sapiens
accaaattataaaaa

SEQ ID NO: 1515323 - DNA, 15 bp, Homo sapiens
taccaaattataaaa

SEQ ID NO: 1515324 - DNA, 15 bp, Homo sapiens
ctaccaaattataaa

SEQ ID NO: 1515325 - DNA, 15 bp, Homo sapiens
actaccaaattataa

SEQ ID NO: 1515326 - DNA, 15 bp, Homo sapiens
cactaccaaattata

SEQ ID NO: 1515327 - DNA, 15 bp, Homo sapiens
tcactaccaaattat

SEQ ID NO: 1515328 - DNA, 15 bp, Homo sapiens
atcactaccaaatta

SEQ ID NO: 1515329 - DNA, 15 bp, Homo sapiens
aatcactaccaaatt

SEQ ID NO: 1515330 - DNA, 15 bp, Homo sapiens
aaatcactaccaaat

SEQ ID NO: 1515331 - DNA, 15 bp, Homo sapiens
aaaatcactaccaaa

SEQ ID NO: 1515332 - DNA, 15 bp, Homo sapiens
gaaaatcactaccaa

SEQ ID NO: 1515333 - DNA, 15 bp, Homo sapiens
tgaaaatcactacca

SEQ ID NO: 1515334 - DNA, 15 bp, Homo sapiens
atgaaaatcactacc

SEQ ID NO: 1515335 - DNA, 15 bp, Homo sapiens
tatgaaaatcactac

SEQ ID NO: 1515336 - DNA, 15 bp, Homo sapiens
atatgaaaatcacta

SEQ ID NO: 1515337 - DNA, 15 bp, Homo sapiens
aatatgaaaatcact

SEQ ID NO: 1515338 - DNA, 15 bp, Homo sapiens
aaatatgaaaatcac

SEQ ID NO: 1515339 - DNA, 15 bp, Homo sapiens
caaatatgaaaatca

SEQ ID NO: 1515340 - DNA, 15 bp, Homo sapiens
tcaaatatgaaaatc

SEQ ID NO: 1515341 - DNA, 15 bp, Homo sapiens
ttcaaatatgaaaat

SEQ ID NO: 1515342 - DNA, 15 bp, Homo sapiens
tttcaaatatgaaaa

SEQ ID NO: 1515343 - DNA, 15 bp, Homo sapiens
gttttcaaatatgaa

SEQ ID NO: 1515344 - DNA, 15 bp, Homo sapiens
ggttttcaaatatga

SEQ ID NO: 1515345 - DNA, 15 bp, Homo sapiens
tggttttcaaatatg

SEQ ID NO: 1515346 - DNA, 15 bp, Homo sapiens
ttggttttcaaatat

SEQ ID NO: 1515347 - DNA, 15 bp, Homo sapiens
cttggttttcaaata

SEQ ID NO: 1515348 - DNA, 15 bp, Homo sapiens
tcttggttttcaaat

SEQ ID NO: 1515349 - DNA, 15 bp, Homo sapiens
ctcttggttttcaaa

SEQ ID NO: 1515350 - DNA, 15 bp, Homo sapiens
cctcttggttttcaa

SEQ ID NO: 1515351 - DNA, 15 bp, Homo sapiens
ccctcttggttttca

SEQ ID NO: 1515352 - DNA, 15 bp, Homo sapiens
tccctcttggttttc

SEQ ID NO: 1515353 - DNA, 15 bp, Homo sapiens
atccctcttggtttt

SEQ ID NO: 1515354 - DNA, 15 bp, Homo sapiens
aatccctcttggttt

SEQ ID NO: 1515355 - DNA, 15 bp, Homo sapiens
aaatccctcttggtt

SEQ ID NO: 1515356 - DNA, 15 bp, Homo sapiens
aaaatccctcttggt

SEQ ID NO: 1515357 - DNA, 15 bp, Homo sapiens
aaaaatccctcttgg

SEQ ID NO: 1515358 - DNA, 15 bp, Homo sapiens
caaaaatccctcttg

SEQ ID NO: 1515359 - DNA, 15 bp, Homo sapiens
tcaaaaatccctctt

SEQ ID NO: 1515360 - DNA, 15 bp, Homo sapiens
gtcaaaaatccctct

SEQ ID NO: 1515361 - DNA, 15 bp, Homo sapiens
tgtcaaaaatccctc

SEQ ID NO: 1515362 - DNA, 15 bp, Homo sapiens
atgtcaaaaatccct

SEQ ID NO: 1515363 - DNA, 15 bp, Homo sapiens
catgtcaaaaatccc

SEQ ID NO: 1515364 - DNA, 15 bp, Homo sapiens
acatgtcaaaaatcc

SEQ ID NO: 1515365 - DNA, 15 bp, Homo sapiens
gacatgtcaaaaatc

SEQ ID NO: 1515366 - DNA, 15 bp, Homo sapiens
agacatgtcaaaaat

SEQ ID NO: 1515367 - DNA, 15 bp, Homo sapiens
tagacatgtcaaaaa

SEQ ID NO: 1515368 - DNA, 15 bp, Homo sapiens
ttagacatgtcaaaa

SEQ ID NO: 1515369 - DNA, 15 bp, Homo sapiens
attagacatgtcaaa

SEQ ID NO: 1515370 - DNA, 15 bp, Homo sapiens
aattagacatgtcaa

SEQ ID NO: 1515371 - DNA, 15 bp, Homo sapiens
taattagacatgtca

SEQ ID NO: 1515372 - DNA, 15 bp, Homo sapiens
ttaattagacatgtc

SEQ ID NO: 1515373 - DNA, 15 bp, Homo sapiens
tttaattagacatgt

SEQ ID NO: 1515374 - DNA, 15 bp, Homo sapiens
atttaattagacatg

SEQ ID NO: 1515375 - DNA, 15 bp, Homo sapiens
tatttaattagacat

SEQ ID NO: 1515376 - DNA, 15 bp, Homo sapiens
ttatttaattagaca

SEQ ID NO: 1515377 - DNA, 15 bp, Homo sapiens
tttatttaattagac

SEQ ID NO: 1515378 - DNA, 15 bp, Homo sapiens
ctttatttaattaga

SEQ ID NO: 1515379 - DNA, 15 bp, Homo sapiens
cctttatttaattag

SEQ ID NO: 1515380 - DNA, 15 bp, Homo sapiens
tcctttatttaatta

SEQ ID NO: 1515381 - DNA, 15 bp, Homo sapiens
atcctttatttaatt

SEQ ID NO: 1515382 - DNA, 15 bp, Homo sapiens
aatcctttatttaat

SEQ ID NO: 1515383 - DNA, 15 bp, Homo sapiens
aaatcctttatttaa

SEQ ID NO: 1515384 - DNA, 15 bp, Homo sapiens
caaatcctttattta

SEQ ID NO: 1515385 - DNA, 15 bp, Homo sapiens
tcaaatcctttattt

SEQ ID NO: 1515386 - DNA, 15 bp, Homo sapiens
ctcaaatcctttatt

SEQ ID NO: 1515387 - DNA, 15 bp, Homo sapiens
cctcaaatcctttat

SEQ ID NO: 1515388 - DNA, 15 bp, Homo sapiens
tcctcaaatccttta

SEQ ID NO: 1515389 - DNA, 15 bp, Homo sapiens
atcctcaaatccttt

SEQ ID NO: 1515390 - DNA, 15 bp, Homo sapiens
catcctcaaatcctt

SEQ ID NO: 1515391 - DNA, 15 bp, Homo sapiens
ccatcctcaaatcct

SEQ ID NO: 1515392 - DNA, 15 bp, Homo sapiens
accatcctcaaatcc

SEQ ID NO: 1515393 - DNA, 15 bp, Homo sapiens
taccatcctcaaatc

SEQ ID NO: 1515394 - DNA, 15 bp, Homo sapiens
gtaccatcctcaaat

SEQ ID NO: 1515395 - DNA, 15 bp, Homo sapiens
tgtaccatcctcaaa

SEQ ID NO: 1515396 - DNA, 15 bp, Homo sapiens
ttgtaccatcctcaa

SEQ ID NO: 1515397 - DNA, 15 bp, Homo sapiens
attgtaccatcctca

SEQ ID NO: 1515398 - DNA, 15 bp, Homo sapiens
tattgtaccatcctc

SEQ ID NO: 1515399 - DNA, 15 bp, Homo sapiens
atattgtaccatcct

SEQ ID NO: 1515400 - DNA, 15 bp, Homo sapiens
catattgtaccatcc

SEQ ID NO: 1515401 - DNA, 15 bp, Homo sapiens
acatattgtaccatc

SEQ ID NO: 1515402 - DNA, 15 bp, Homo sapiens
cacatattgtaccat

SEQ ID NO: 1515403 - DNA, 15 bp, Homo sapiens
ccacatattgtacca

SEQ ID NO: 1515404 - DNA, 15 bp, Homo sapiens
tccacatattgtacc

SEQ ID NO: 1515405 - DNA, 15 bp, Homo sapiens
gtccacatattgtac

SEQ ID NO: 1515406 - DNA, 15 bp, Homo sapiens
tgtccacatattgta

SEQ ID NO: 1515407 - DNA, 15 bp, Homo sapiens
ttgtccacatattgt

SEQ ID NO: 1515408 - DNA, 15 bp, Homo sapiens
cttgtccacatattg

SEQ ID NO: 1515409 - DNA, 15 bp, Homo sapiens
ccttgtccacatatt

SEQ ID NO: 1515410 - DNA, 15 bp, Homo sapiens
tccttgtccacatat

SEQ ID NO: 1515411 - DNA, 15 bp, Homo sapiens
ttccttgtccacata

SEQ ID NO: 1515412 - DNA, 15 bp, Homo sapiens
cttccttgtccacat

SEQ ID NO: 1515413 - DNA, 15 bp, Homo sapiens
tcttccttgtccaca

SEQ ID NO: 1515414 - DNA, 15 bp, Homo sapiens
ttcttccttgtccac

SEQ ID NO: 1515415 - DNA, 15 bp, Homo sapiens
cttcttccttgtcca

SEQ ID NO: 1515416 - DNA, 15 bp, Homo sapiens
acttcttccttgtcc

SEQ ID NO: 1515417 - DNA, 15 bp, Homo sapiens
tacttcttccttgtc

SEQ ID NO: 1515418 - DNA, 15 bp, Homo sapiens
ctacttcttccttgt

SEQ ID NO: 1515419 - DNA, 15 bp, Homo sapiens
cctacttcttccttg

SEQ ID NO: 1515420 - DNA, 15 bp, Homo sapiens
tcctacttcttcctt

SEQ ID NO: 1515421 - DNA, 15 bp, Homo sapiens
atcctacttcttcct

SEQ ID NO: 1515422 - DNA, 15 bp, Homo sapiens
aatcctacttcttcc

SEQ ID NO: 1515423 - DNA, 15 bp, Homo sapiens
gaatcctacttcttc

SEQ ID NO: 1515424 - DNA, 15 bp, Homo sapiens
agaatcctacttctt

SEQ ID NO: 1515425 - DNA, 15 bp, Homo sapiens
aagaatcctacttct

SEQ ID NO: 1515426 - DNA, 15 bp, Homo sapiens
aaagaatcctacttc

SEQ ID NO: 1515427 - DNA, 15 bp, Homo sapiens
aaaagaatcctactt

SEQ ID NO: 1515428 - DNA, 15 bp, Homo sapiens
aaaaagaatcctact

SEQ ID NO: 1515429 - DNA, 15 bp, Homo sapiens
taaaaagaatcctac

SEQ ID NO: 1515430 - DNA, 15 bp, Homo sapiens
ataaaaagaatccta

SEQ ID NO: 1515431 - DNA, 15 bp, Homo sapiens
aataaaaagaatcct

SEQ ID NO: 1515432 - DNA, 15 bp, Homo sapiens
aaataaaaagaatcc

SEQ ID NO: 1515433 - DNA, 15 bp, Homo sapiens
taaataaaaagaatc

SEQ ID NO: 1515434 - DNA, 15 bp, Homo sapiens
ttaaataaaaagaat

SEQ ID NO: 1515435 - DNA, 15 bp, Homo sapiens
tttaaataaaaagaa

SEQ ID NO: 1515436 - DNA, 15 bp, Homo sapiens
ttttaaataaaaaga

SEQ ID NO: 1515437 - DNA, 15 bp, Homo sapiens
gttttaaataaaaag

SEQ ID NO: 1515438 - DNA, 15 bp, Homo sapiens
agttttaaataaaaa

SEQ ID NO: 1515439 - DNA, 15 bp, Homo sapiens
tagttttaaataaaa

SEQ ID NO: 1515440 - DNA, 15 bp, Homo sapiens
ttagttttaaataaa

SEQ ID NO: 1515441 - DNA, 15 bp, Homo sapiens
tttagttttaaataa

SEQ ID NO: 1515442 - DNA, 15 bp, Homo sapiens
ttttagttttaaata

SEQ ID NO: 1515443 - DNA, 15 bp, Homo sapiens
gttttagttttaaat

SEQ ID NO: 1515444 - DNA, 15 bp, Homo sapiens
ggttttagttttaaa

SEQ ID NO: 1515445 - DNA, 15 bp, Homo sapiens
tggttttagttttaa

SEQ ID NO: 1515446 - DNA, 15 bp, Homo sapiens
ttggttttagtttta

SEQ ID NO: 1515447 - DNA, 15 bp, Homo sapiens
tttggttttagtttt

SEQ ID NO: 1515448 - DNA, 15 bp, Homo sapiens
atttggttttagttt

SEQ ID NO: 1515449 - DNA, 15 bp, Homo sapiens
aatttggttttagtt

SEQ ID NO: 1515450 - DNA, 15 bp, Homo sapiens
caatttggttttagt

SEQ ID NO: 1515451 - DNA, 15 bp, Homo sapiens
ccaatttggttttag

SEQ ID NO: 1515452 - DNA, 15 bp, Homo sapiens
accaatttggtttta

SEQ ID NO: 1515453 - DNA, 15 bp, Homo sapiens
taccaatttggtttt

SEQ ID NO: 1515454 - DNA, 15 bp, Homo sapiens
ataccaatttggttt

SEQ ID NO: 1515455 - DNA, 15 bp, Homo sapiens
gataccaatttggtt

SEQ ID NO: 1515456 - DNA, 15 bp, Homo sapiens
tgataccaatttggt

SEQ ID NO: 1515457 - DNA, 15 bp, Homo sapiens
ttgataccaatttgg

SEQ ID NO: 1515458 - DNA, 15 bp, Homo sapiens
attgataccaatttg

SEQ ID NO: 1515459 - DNA, 15 bp, Homo sapiens
tattgataccaattt

SEQ ID NO: 1515460 - DNA, 15 bp, Homo sapiens
ttattgataccaatt

SEQ ID NO: 1515461 - DNA, 15 bp, Homo sapiens
attattgataccaat

SEQ ID NO: 1515462 - DNA, 15 bp, Homo sapiens
tattattgataccaa

SEQ ID NO: 1515463 - DNA, 15 bp, Homo sapiens
gtattattgatacca

SEQ ID NO: 1515464 - DNA, 15 bp, Homo sapiens
tgtattattgatacc

SEQ ID NO: 1515465 - DNA, 15 bp, Homo sapiens
atgtattattgatac

SEQ ID NO: 1515466 - DNA, 15 bp, Homo sapiens
tatgtattattgata

SEQ ID NO: 1515467 - DNA, 15 bp, Homo sapiens
ttatgtattattgat

SEQ ID NO: 1515468 - DNA, 15 bp, Homo sapiens
gttatgtattattga

SEQ ID NO: 1515469 - DNA, 15 bp, Homo sapiens
tgttatgtattattg

SEQ ID NO: 1515470 - DNA, 15 bp, Homo sapiens
ttgttatgtattatt

SEQ ID NO: 1515471 - DNA, 15 bp, Homo sapiens
attgttatgtattat

SEQ ID NO: 1515472 - DNA, 15 bp, Homo sapiens
cattgttatgtatta

SEQ ID NO: 1515473 - DNA, 15 bp, Homo sapiens
acattgttatgtatt

SEQ ID NO: 1515474 - DNA, 15 bp, Homo sapiens
aacattgttatgtat

SEQ ID NO: 1515475 - DNA, 15 bp, Homo sapiens
aaacattgttatgta

SEQ ID NO: 1515476 - DNA, 15 bp, Homo sapiens
taaacattgttatgt

SEQ ID NO: 1515477 - DNA, 15 bp, Homo sapiens
ttaaacattgttatg

SEQ ID NO: 1515478 - DNA, 15 bp, Homo sapiens
attaaacattgttat

SEQ ID NO: 1515479 - DNA, 15 bp, Homo sapiens
tattaaacattgtta

SEQ ID NO: 1515480 - DNA, 15 bp, Homo sapiens
ttattaaacattgtt

SEQ ID NO: 1515481 - DNA, 15 bp, Homo sapiens
cttattaaacattgt

SEQ ID NO: 1515482 - DNA, 15 bp, Homo sapiens
ccttattaaacattg

SEQ ID NO: 1515483 - DNA, 15 bp, Homo sapiens
accttattaaacatt

SEQ ID NO: 1515484 - DNA, 15 bp, Homo sapiens
aaccttattaaacat

SEQ ID NO: 1515485 - DNA, 15 bp, Homo sapiens
aaaccttattaaaca

SEQ ID NO: 1515486 - DNA, 15 bp, Homo sapiens
aaaaccttattaaac

SEQ ID NO: 1515487 - DNA, 15 bp, Homo sapiens
aaaaaccttattaaa

SEQ ID NO: 1515488 - DNA, 15 bp, Homo sapiens
aaaaaaccttattaa

SEQ ID NO: 1515489 - DNA, 15 bp, Homo sapiens
aaaaaaaccttatta

SEQ ID NO: 1515490 - DNA, 15 bp, Homo sapiens
caaaaaaaccttatt

SEQ ID NO: 1515491 - DNA, 15 bp, Homo sapiens
tcaaaaaaaccttat

SEQ ID NO: 1515492 - DNA, 15 bp, Homo sapiens
atcaaaaaaacctta

SEQ ID NO: 1515493 - DNA, 15 bp, Homo sapiens
catcaaaaaaacctt

SEQ ID NO: 1515494 - DNA, 15 bp, Homo sapiens
acatcaaaaaaacct

SEQ ID NO: 1515495 - DNA, 15 bp, Homo sapiens
aacatcaaaaaaacc

SEQ ID NO: 1515496 - DNA, 15 bp, Homo sapiens
taacatcaaaaaaac

SEQ ID NO: 1515497 - DNA, 15 bp, Homo sapiens
ctaacatcaaaaaaa

SEQ ID NO: 1515498 - DNA, 15 bp, Homo sapiens
tctaacatcaaaaaa

SEQ ID NO: 1515499 - DNA, 15 bp, Homo sapiens
ctctaacatcaaaaa

SEQ ID NO: 1515500 - DNA, 15 bp, Homo sapiens
actctaacatcaaaa

SEQ ID NO: 1515501 - DNA, 15 bp, Homo sapiens
tactctaacatcaaa

SEQ ID NO: 1515502 - DNA, 15 bp, Homo sapiens
atactctaacatcaa

SEQ ID NO: 1515503 - DNA, 15 bp, Homo sapiens
aatactctaacatca

SEQ ID NO: 1515504 - DNA, 15 bp, Homo sapiens
aaatactctaacatc

SEQ ID NO: 1515505 - DNA, 15 bp, Homo sapiens
caaatactctaacat

SEQ ID NO: 1515506 - DNA, 15 bp, Homo sapiens
acaaatactctaaca

SEQ ID NO: 1515507 - DNA, 15 bp, Homo sapiens
cacaaatactctaac

SEQ ID NO: 1515508 - DNA, 15 bp, Homo sapiens
tcacaaatactctaa

SEQ ID NO: 1515509 - DNA, 15 bp, Homo sapiens
atcacaaatactcta

SEQ ID NO: 1515510 - DNA, 15 bp, Homo sapiens
tatcacaaatactct

SEQ ID NO: 1515511 - DNA, 15 bp, Homo sapiens
gtatcacaaatactc

SEQ ID NO: 1515512 - DNA, 15 bp, Homo sapiens
agtatcacaaatact

SEQ ID NO: 1515513 - DNA, 15 bp, Homo sapiens
aagtatcacaaatac

SEQ ID NO: 1515514 - DNA, 15 bp, Homo sapiens
taagtatcacaaata

SEQ ID NO: 1515515 - DNA, 15 bp, Homo sapiens
ttaagtatcacaaat

SEQ ID NO: 1515516 - DNA, 15 bp, Homo sapiens
tttaagtatcacaaa

SEQ ID NO: 1515517 - DNA, 15 bp, Homo sapiens
atttaagtatcacaa

SEQ ID NO: 1515518 - DNA, 15 bp, Homo sapiens
aatttaagtatcaca

SEQ ID NO: 1515519 - DNA, 15 bp, Homo sapiens
aaatttaagtatcac

SEQ ID NO: 1515520 - DNA, 15 bp, Homo sapiens
caaatttaagtatca

SEQ ID NO: 1515521 - DNA, 15 bp, Homo sapiens
ccaaatttaagtatc

SEQ ID NO: 1515522 - DNA, 15 bp, Homo sapiens
tccaaatttaagtat

SEQ ID NO: 1515523 - DNA, 15 bp, Homo sapiens
ttccaaatttaagta

SEQ ID NO: 1515524 - DNA, 15 bp, Homo sapiens
cttccaaatttaagt

SEQ ID NO: 1515525 - DNA, 15 bp, Homo sapiens
acttccaaatttaag

SEQ ID NO: 1515526 - DNA, 15 bp, Homo sapiens
cacttccaaatttaa

SEQ ID NO: 1515527 - DNA, 15 bp, Homo sapiens
acacttccaaattta

SEQ ID NO: 1515528 - DNA, 15 bp, Homo sapiens
tacacttccaaattt

SEQ ID NO: 1515529 - DNA, 15 bp, Homo sapiens
atacacttccaaatt

SEQ ID NO: 1515530 - DNA, 15 bp, Homo sapiens
tagatacacttccaa

SEQ ID NO: 1515531 - DNA, 15 bp, Homo sapiens
ttagatacacttcca

SEQ ID NO: 1515532 - DNA, 15 bp, Homo sapiens
tttagatacacttcc

SEQ ID NO: 1515533 - DNA, 15 bp, Homo sapiens
gtttagatacacttc

SEQ ID NO: 1515534 - DNA, 15 bp, Homo sapiens
agtttagatacactt

SEQ ID NO: 1515535 - DNA, 15 bp, Homo sapiens
tagtttagatacact

SEQ ID NO: 1515536 - DNA, 15 bp, Homo sapiens
ttagtttagatacac

SEQ ID NO: 1515537 - DNA, 15 bp, Homo sapiens
tttagtttagataca

SEQ ID NO: 1515538 - DNA, 15 bp, Homo sapiens
ttttagtttagatac

SEQ ID NO: 1515539 - DNA, 15 bp, Homo sapiens
attttagtttagata

SEQ ID NO: 1515540 - DNA, 15 bp, Homo sapiens
cattttagtttagat

SEQ ID NO: 1515541 - DNA, 15 bp, Homo sapiens
acattttagtttaga

SEQ ID NO: 1515542 - DNA, 15 bp, Homo sapiens
aacattttagtttag

SEQ ID NO: 1515543 - DNA, 15 bp, Homo sapiens
taacattttagttta

SEQ ID NO: 1515544 - DNA, 15 bp, Homo sapiens
ataacattttagttt

SEQ ID NO: 1515545 - DNA, 15 bp, Homo sapiens
aataacattttagtt

SEQ ID NO: 1515546 - DNA, 15 bp, Homo sapiens
gaataacattttagt

SEQ ID NO: 1515547 - DNA, 15 bp, Homo sapiens
agaataacattttag

SEQ ID NO: 1515548 - DNA, 15 bp, Homo sapiens
aagaataacatttta

SEQ ID NO: 1515549 - DNA, 15 bp, Homo sapiens
aaagaataacatttt

SEQ ID NO: 1515550 - DNA, 15 bp, Homo sapiens
taaagaataacattt

SEQ ID NO: 1515551 - DNA, 15 bp, Homo sapiens
ttaaagaataacatt

SEQ ID NO: 1515552 - DNA, 15 bp, Homo sapiens
tttaaagaataacat

SEQ ID NO: 1515553 - DNA, 15 bp, Homo sapiens
gtttaaagaataaca

SEQ ID NO: 1515554 - DNA, 15 bp, Homo sapiens
ggtttaaagaataac

SEQ ID NO: 1515555 - DNA, 15 bp, Homo sapiens
tggtttaaagaataa

SEQ ID NO: 1515556 - DNA, 15 bp, Homo sapiens
ttggtttaaagaata

SEQ ID NO: 1515557 - DNA, 15 bp, Homo sapiens
cttggtttaaagaat

SEQ ID NO: 1515558 - DNA, 15 bp, Homo sapiens
acttggtttaaagaa

SEQ ID NO: 1515559 - DNA, 15 bp, Homo sapiens
gacttggtttaaaga

SEQ ID NO: 1515560 - DNA, 15 bp, Homo sapiens
tgacttggtttaaag

SEQ ID NO: 1515561 - DNA, 15 bp, Homo sapiens
ttgacttggtttaaa

SEQ ID NO: 1515562 - DNA, 15 bp, Homo sapiens
tttgacttggtttaa

SEQ ID NO: 1515563 - DNA, 15 bp, Homo sapiens
gtttgacttggttta

SEQ ID NO: 1515564 - DNA, 15 bp, Homo sapiens
tgtttgacttggttt

SEQ ID NO: 1515565 - DNA, 15 bp, Homo sapiens
ttgtttgacttggtt

SEQ ID NO: 1515566 - DNA, 15 bp, Homo sapiens
tttgtttgacttggt

SEQ ID NO: 1515567 - DNA, 15 bp, Homo sapiens
gtttgtttgacttgg

SEQ ID NO: 1515568 - DNA, 15 bp, Homo sapiens
tgtttgtttgacttg

SEQ ID NO: 1515569 - DNA, 15 bp, Homo sapiens
gtgtttgtttgactt

SEQ ID NO: 1515570 - DNA, 15 bp, Homo sapiens
tgtgtttgtttgact

SEQ ID NO: 1515571 - DNA, 15 bp, Homo sapiens
atgtgtttgtttgac

SEQ ID NO: 1515572 - DNA, 15 bp, Homo sapiens
tatgtgtttgtttga

SEQ ID NO: 1515573 - DNA, 15 bp, Homo sapiens
ttatgtgtttgtttg

SEQ ID NO: 1515574 - DNA, 15 bp, Homo sapiens
cttatgtgtttgttt

SEQ ID NO: 1515575 - DNA, 15 bp, Homo sapiens
tcttatgtgtttgtt

SEQ ID NO: 1515576 - DNA, 15 bp, Homo sapiens
atcttatgtgtttgt

SEQ ID NO: 1515577 - DNA, 15 bp, Homo sapiens
aatcttatgtgtttg

SEQ ID NO: 1515578 - DNA, 15 bp, Homo sapiens
aaatcttatgtgttt

SEQ ID NO: 1515579 - DNA, 15 bp, Homo sapiens
aaaatcttatgtgtt

SEQ ID NO: 1515580 - DNA, 15 bp, Homo sapiens
caaaatcttatgtgt

SEQ ID NO: 1515581 - DNA, 15 bp, Homo sapiens
acaaaatcttatgtg

SEQ ID NO: 1515582 - DNA, 15 bp, Homo sapiens
aacaaaatcttatgt

SEQ ID NO: 1515583 - DNA, 15 bp, Homo sapiens
aaacaaaatcttatg

SEQ ID NO: 1515584 - DNA, 15 bp, Homo sapiens
taaacaaaatcttat

SEQ ID NO: 1515585 - DNA, 15 bp, Homo sapiens
ataaacaaaatctta

SEQ ID NO: 1515586 - DNA, 15 bp, Homo sapiens
cataaacaaaatctt

SEQ ID NO: 1515587 - DNA, 15 bp, Homo sapiens
tcataaacaaaatct

SEQ ID NO: 1515588 - DNA, 15 bp, Homo sapiens
ctcataaacaaaatc

SEQ ID NO: 1515589 - DNA, 15 bp, Homo sapiens
cctcataaacaaaat

SEQ ID NO: 1515590 - DNA, 15 bp, Homo sapiens
tcctcataaacaaaa

SEQ ID NO: 1515591 - DNA, 15 bp, Homo sapiens
ttcctcataaacaaa

SEQ ID NO: 1515592 - DNA, 15 bp, Homo sapiens
gttcctcataaacaa

SEQ ID NO: 1515593 - DNA, 15 bp, Homo sapiens
agttcctcataaaca

SEQ ID NO: 1515594 - DNA, 15 bp, Homo sapiens
cagttcctcataaac

SEQ ID NO: 1515595 - DNA, 15 bp, Homo sapiens
tcagttcctcataaa

SEQ ID NO: 1515596 - DNA, 15 bp, Homo sapiens
ttcagttcctcataa

SEQ ID NO: 1515597 - DNA, 15 bp, Homo sapiens
gttcagttcctcata

SEQ ID NO: 1515598 - DNA, 15 bp, Homo sapiens
agttcagttcctcat

SEQ ID NO: 1515599 - DNA, 15 bp, Homo sapiens
aagttcagttcctca

SEQ ID NO: 1515600 - DNA, 15 bp, Homo sapiens
aaagttcagttcctc

SEQ ID NO: 1515601 - DNA, 15 bp, Homo sapiens
taaagttcagttcct

SEQ ID NO: 1515602 - DNA, 15 bp, Homo sapiens
ataaagttcagttcc

SEQ ID NO: 1515603 - DNA, 15 bp, Homo sapiens
cataaagttcagttc

SEQ ID NO: 1515604 - DNA, 15 bp, Homo sapiens
tcataaagttcagtt

SEQ ID NO: 1515605 - DNA, 15 bp, Homo sapiens
atcataaagttcagt

SEQ ID NO: 1515606 - DNA, 15 bp, Homo sapiens
aatcataaagttcag

SEQ ID NO: 1515607 - DNA, 15 bp, Homo sapiens
aaatcataaagttca

SEQ ID NO: 1515608 - DNA, 15 bp, Homo sapiens
aaaatcataaagttc

SEQ ID NO: 1515609 - DNA, 15 bp, Homo sapiens
taaaatcataaagtt

SEQ ID NO: 1515610 - DNA, 15 bp, Homo sapiens
ctaaaatcataaagt

SEQ ID NO: 1515611 - DNA, 15 bp, Homo sapiens
tctaaaatcataaag

SEQ ID NO: 1515612 - DNA, 15 bp, Homo sapiens
ttctaaaatcataaa

SEQ ID NO: 1515613 - DNA, 15 bp, Homo sapiens
tttctaaaatcataa

SEQ ID NO: 1515614 - DNA, 15 bp, Homo sapiens
ttttctaaaatcata

SEQ ID NO: 1515615 - DNA, 15 bp, Homo sapiens
gttttctaaaatcat

SEQ ID NO: 1515616 - DNA, 15 bp, Homo sapiens
agttttctaaaatca

SEQ ID NO: 1515617 - DNA, 15 bp, Homo sapiens
aagttttctaaaatc

SEQ ID NO: 1515618 - DNA, 15 bp, Homo sapiens
aaagttttctaaaat

SEQ ID NO: 1515619 - DNA, 15 bp, Homo sapiens
aaaagttttctaaaa

SEQ ID NO: 1515620 - DNA, 15 bp, Homo sapiens
gaaaagttttctaaa

SEQ ID NO: 1515621 - DNA, 15 bp, Homo sapiens
agaaaagttttctaa

SEQ ID NO: 1515622 - DNA, 15 bp, Homo sapiens
cagaaaagttttcta

SEQ ID NO: 1515623 - DNA, 15 bp, Homo sapiens
gcagaaaagttttct

SEQ ID NO: 1515624 - DNA, 15 bp, Homo sapiens
agcagaaaagttttc

SEQ ID NO: 1515625 - DNA, 15 bp, Homo sapiens
tagcagaaaagtttt

SEQ ID NO: 1515626 - DNA, 15 bp, Homo sapiens
ctagcagaaaagttt

SEQ ID NO: 1515627 - DNA, 15 bp, Homo sapiens
tctagcagaaaagtt

SEQ ID NO: 1515628 - DNA, 15 bp, Homo sapiens
atctagcagaaaagt

SEQ ID NO: 1515629 - DNA, 15 bp, Homo sapiens
aatctagcagaaaag

SEQ ID NO: 1515630 - DNA, 15 bp, Homo sapiens
aaatctagcagaaaa

SEQ ID NO: 1515631 - DNA, 15 bp, Homo sapiens
gaaatctagcagaaa

SEQ ID NO: 1515632 - DNA, 15 bp, Homo sapiens
agaaatctagcagaa

SEQ ID NO: 1515633 - DNA, 15 bp, Homo sapiens
tagaaatctagcaga

SEQ ID NO: 1515634 - DNA, 15 bp, Homo sapiens
atagaaatctagcag

SEQ ID NO: 1515635 - DNA, 15 bp, Homo sapiens
tatagaaatctagca

SEQ ID NO: 1515636 - DNA, 15 bp, Homo sapiens
ttatagaaatctagc

SEQ ID NO: 1515637 - DNA, 15 bp, Homo sapiens
gttatagaaatctag

SEQ ID NO: 1515638 - DNA, 15 bp, Homo sapiens
agttatagaaatcta

SEQ ID NO: 1515639 - DNA, 15 bp, Homo sapiens
tagttatagaaatct

SEQ ID NO: 1515640 - DNA, 15 bp, Homo sapiens
ctagttatagaaatc

SEQ ID NO: 1515641 - DNA, 15 bp, Homo sapiens
actagttatagaaat

SEQ ID NO: 1515642 - DNA, 15 bp, Homo sapiens
aactagttatagaaa

SEQ ID NO: 1515643 - DNA, 15 bp, Homo sapiens
taactagttatagaa

SEQ ID NO: 1515644 - DNA, 15 bp, Homo sapiens
ataactagttataga

SEQ ID NO: 1515645 - DNA, 15 bp, Homo sapiens
aataactagttatag

SEQ ID NO: 1515646 - DNA, 15 bp, Homo sapiens
aaataactagttata

SEQ ID NO: 1515647 - DNA, 15 bp, Homo sapiens
gaaataactagttat

SEQ ID NO: 1515648 - DNA, 15 bp, Homo sapiens
tgaaataactagtta

SEQ ID NO: 1515649 - DNA, 15 bp, Homo sapiens
gtgaaataactagtt

SEQ ID NO: 1515650 - DNA, 15 bp, Homo sapiens
agtgaaataactagt

SEQ ID NO: 1515651 - DNA, 15 bp, Homo sapiens
aagtgaaataactag

SEQ ID NO: 1515652 - DNA, 15 bp, Homo sapiens
aaagtgaaataacta

SEQ ID NO: 1515653 - DNA, 15 bp, Homo sapiens
taaagtgaaataact

SEQ ID NO: 1515654 - DNA, 15 bp, Homo sapiens
ataaagtgaaataac

SEQ ID NO: 1515655 - DNA, 15 bp, Homo sapiens
aataaagtgaaataa

SEQ ID NO: 1515656 - DNA, 15 bp, Homo sapiens
aaataaagtgaaata

SEQ ID NO: 1515657 - DNA, 15 bp, Homo sapiens
gaaataaagtgaaat

SEQ ID NO: 1515658 - DNA, 15 bp, Homo sapiens
agaaataaagtgaaa

SEQ ID NO: 1515659 - DNA, 15 bp, Homo sapiens
gagaaataaagtgaa

SEQ ID NO: 1515660 - DNA, 15 bp, Homo sapiens
agagaaataaagtga

SEQ ID NO: 1515661 - DNA, 15 bp, Homo sapiens
cagagaaataaagtg

SEQ ID NO: 1515662 - DNA, 15 bp, Homo sapiens
tcagagaaataaagt

SEQ ID NO: 1515663 - DNA, 15 bp, Homo sapiens
ctcagagaaataaag

SEQ ID NO: 1515664 - DNA, 15 bp, Homo sapiens
actcagagaaataaa

SEQ ID NO: 1515665 - DNA, 15 bp, Homo sapiens
aactcagagaaataa

SEQ ID NO: 1515666 - DNA, 15 bp, Homo sapiens
taactcagagaaata

SEQ ID NO: 1515667 - DNA, 15 bp, Homo sapiens
ataactcagagaaat

SEQ ID NO: 1515668 - DNA, 15 bp, Homo sapiens
aataactcagagaaa

SEQ ID NO: 1515669 - DNA, 15 bp, Homo sapiens
caataactcagagaa

SEQ ID NO: 1515670 - DNA, 15 bp, Homo sapiens
ccaataactcagaga

SEQ ID NO: 1515671 - DNA, 15 bp, Homo sapiens
accaataactcagag

SEQ ID NO: 1515672 - DNA, 15 bp, Homo sapiens
gaccaataactcaga

SEQ ID NO: 1515673 - DNA, 15 bp, Homo sapiens
agaccaataactcag

SEQ ID NO: 1515674 - DNA, 15 bp, Homo sapiens
tagaccaataactca

SEQ ID NO: 1515675 - DNA, 15 bp, Homo sapiens
atagaccaataactc

SEQ ID NO: 1515676 - DNA, 15 bp, Homo sapiens
gatagaccaataact

SEQ ID NO: 1515677 - DNA, 15 bp, Homo sapiens
agatagaccaataac

SEQ ID NO: 1515678 - DNA, 15 bp, Homo sapiens
cagatagaccaataa

SEQ ID NO: 1515679 - DNA, 15 bp, Homo sapiens
acagatagaccaata

SEQ ID NO: 1515680 - DNA, 15 bp, Homo sapiens
tacagatagaccaat

SEQ ID NO: 1515681 - DNA, 15 bp, Homo sapiens
ttacagatagaccaa

SEQ ID NO: 1515682 - DNA, 15 bp, Homo sapiens
tttacagatagacca

SEQ ID NO: 1515683 - DNA, 15 bp, Homo sapiens
ctttacagatagacc

SEQ ID NO: 1515684 - DNA, 15 bp, Homo sapiens
actttacagatagac

SEQ ID NO: 1515685 - DNA, 15 bp, Homo sapiens
tactttacagataga

SEQ ID NO: 1515686 - DNA, 15 bp, Homo sapiens
ctactttacagatag

SEQ ID NO: 1515687 - DNA, 15 bp, Homo sapiens
cctactttacagata

SEQ ID NO: 1515688 - DNA, 15 bp, Homo sapiens
ccctactttacagat

SEQ ID NO: 1515689 - DNA, 15 bp, Homo sapiens
tccctactttacaga

SEQ ID NO: 1515690 - DNA, 15 bp, Homo sapiens
atccctactttacag

SEQ ID NO: 1515691 - DNA, 15 bp, Homo sapiens
tatccctactttaca

SEQ ID NO: 1515692 - DNA, 15 bp, Homo sapiens
ttatccctactttac

SEQ ID NO: 1515693 - DNA, 15 bp, Homo sapiens
tttatccctacttta

SEQ ID NO: 1515694 - DNA, 15 bp, Homo sapiens
gtttatccctacttt

SEQ ID NO: 1515695 - DNA, 15 bp, Homo sapiens
agtttatccctactt

SEQ ID NO: 1515696 - DNA, 15 bp, Homo sapiens
gagtttatccctact

SEQ ID NO: 1515697 - DNA, 15 bp, Homo sapiens
agagtttatccctac

SEQ ID NO: 1515698 - DNA, 15 bp, Homo sapiens
aagagtttatcccta

SEQ ID NO: 1515699 - DNA, 15 bp, Homo sapiens
aaagagtttatccct

SEQ ID NO: 1515700 - DNA, 15 bp, Homo sapiens
caaagagtttatccc

SEQ ID NO: 1515701 - DNA, 15 bp, Homo sapiens
gcaaagagtttatcc

SEQ ID NO: 1515702 - DNA, 15 bp, Homo sapiens
ggcaaagagtttatc

SEQ ID NO: 1515703 - DNA, 15 bp, Homo sapiens
aggcaaagagtttat

SEQ ID NO: 1515704 - DNA, 15 bp, Homo sapiens
caggcaaagagttta

SEQ ID NO: 1515705 - DNA, 15 bp, Homo sapiens
tcaggcaaagagttt

SEQ ID NO: 1515706 - DNA, 15 bp, Homo sapiens
ctcaggcaaagagtt

SEQ ID NO: 1515707 - DNA, 15 bp, Homo sapiens
actcaggcaaagagt

SEQ ID NO: 1515708 - DNA, 15 bp, Homo sapiens
aactcaggcaaagag

SEQ ID NO: 1515709 - DNA, 15 bp, Homo sapiens
caactcaggcaaaga

SEQ ID NO: 1515710 - DNA, 15 bp, Homo sapiens
acaactcaggcaaag

SEQ ID NO: 1515711 - DNA, 15 bp, Homo sapiens
aacaactcaggcaaa

SEQ ID NO: 1515712 - DNA, 15 bp, Homo sapiens
aaacaactcaggcaa

SEQ ID NO: 1515713 - DNA, 15 bp, Homo sapiens
aaaacaactcaggca

SEQ ID NO: 1515714 - DNA, 15 bp, Homo sapiens
aaaaacaactcaggc

SEQ ID NO: 1515715 - DNA, 15 bp, Homo sapiens
taaaaacaactcagg

SEQ ID NO: 1515716 - DNA, 15 bp, Homo sapiens
ctaaaaacaactcag

SEQ ID NO: 1515717 - DNA, 15 bp, Homo sapiens
tctaaaaacaactca

SEQ ID NO: 1515718 - DNA, 15 bp, Homo sapiens
ctctaaaaacaactc

SEQ ID NO: 1515719 - DNA, 15 bp, Homo sapiens
tctctaaaaacaact

SEQ ID NO: 1515720 - DNA, 15 bp, Homo sapiens
ttctctaaaaacaac

SEQ ID NO: 1515721 - DNA, 15 bp, Homo sapiens
tttctctaaaaacaa

SEQ ID NO: 1515722 - DNA, 15 bp, Homo sapiens
ttttctctaaaaaca

SEQ ID NO: 1515723 - DNA, 15 bp, Homo sapiens
tttttctctaaaaac

SEQ ID NO: 1515724 - DNA, 15 bp, Homo sapiens
ttttttctctaaaaa

SEQ ID NO: 1515725 - DNA, 15 bp, Homo sapiens
tttttttctctaaaa

SEQ ID NO: 1515726 - DNA, 15 bp, Homo sapiens
atttttttctctaaa

SEQ ID NO: 1515727 - DNA, 15 bp, Homo sapiens
catttttttctctaa

SEQ ID NO: 1515728 - DNA, 15 bp, Homo sapiens
tcatttttttctcta

SEQ ID NO: 1515729 - DNA, 15 bp, Homo sapiens
ctcatttttttctct

SEQ ID NO: 1515730 - DNA, 15 bp, Homo sapiens
tctcatttttttctc

SEQ ID NO: 1515731 - DNA, 15 bp, Homo sapiens
atctcatttttttct

SEQ ID NO: 1515732 - DNA, 15 bp, Homo sapiens
tatctcatttttttc

SEQ ID NO: 1515733 - DNA, 15 bp, Homo sapiens
ttatctcattttttt

SEQ ID NO: 1515734 - DNA, 15 bp, Homo sapiens
attatctcatttttt

SEQ ID NO: 1515735 - DNA, 15 bp, Homo sapiens
aattatctcattttt

SEQ ID NO: 1515736 - DNA, 15 bp, Homo sapiens
gaattatctcatttt

SEQ ID NO: 1515737 - DNA, 15 bp, Homo sapiens
tgaattatctcattt

SEQ ID NO: 1515738 - DNA, 15 bp, Homo sapiens
atgaattatctcatt

SEQ ID NO: 1515739 - DNA, 15 bp, Homo sapiens
tatgaattatctcat

SEQ ID NO: 1515740 - DNA, 15 bp, Homo sapiens
ttatgaattatctca

SEQ ID NO: 1515741 - DNA, 15 bp, Homo sapiens
cttatgaattatctc

SEQ ID NO: 1515742 - DNA, 15 bp, Homo sapiens
tcttatgaattatct

SEQ ID NO: 1515743 - DNA, 15 bp, Homo sapiens
ttcttatgaattatc

SEQ ID NO: 1515744 - DNA, 15 bp, Homo sapiens
tttcttatgaattat

SEQ ID NO: 1515745 - DNA, 15 bp, Homo sapiens
ctttcttatgaatta

SEQ ID NO: 1515746 - DNA, 15 bp, Homo sapiens
gctttcttatgaatt

SEQ ID NO: 1515747 - DNA, 15 bp, Homo sapiens
cgctttcttatgaat

SEQ ID NO: 1515748 - DNA, 15 bp, Homo sapiens
gcgctttcttatgaa

SEQ ID NO: 1515749 - DNA, 15 bp, Homo sapiens
agcgctttcttatga

SEQ ID NO: 1515750 - DNA, 15 bp, Homo sapiens
aagcgctttcttatg

SEQ ID NO: 1515751 - DNA, 15 bp, Homo sapiens
aaagcgctttcttat

SEQ ID NO: 1515752 - DNA, 15 bp, Homo sapiens
caaagcgctttctta

SEQ ID NO: 1515753 - DNA, 15 bp, Homo sapiens
acaaagcgctttctt

SEQ ID NO: 1515754 - DNA, 15 bp, Homo sapiens
tacaaagcgctttct

SEQ ID NO: 1515755 - DNA, 15 bp, Homo sapiens
ttacaaagcgctttc

SEQ ID NO: 1515756 - DNA, 15 bp, Homo sapiens
tttacaaagcgcttt

SEQ ID NO: 1515757 - DNA, 15 bp, Homo sapiens
atttacaaagcgctt

SEQ ID NO: 1515758 - DNA, 15 bp, Homo sapiens
aatttacaaagcgct

SEQ ID NO: 1515759 - DNA, 15 bp, Homo sapiens
aaatttacaaagcgc

SEQ ID NO: 1515760 - DNA, 15 bp, Homo sapiens
taaatttacaaagcg

SEQ ID NO: 1515761 - DNA, 15 bp, Homo sapiens
ataaatttacaaagc

SEQ ID NO: 1515762 - DNA, 15 bp, Homo sapiens
cataaatttacaaag

SEQ ID NO: 1515763 - DNA, 15 bp, Homo sapiens
acataaatttacaaa

SEQ ID NO: 1515764 - DNA, 15 bp, Homo sapiens
gacataaatttacaa

SEQ ID NO: 1515765 - DNA, 15 bp, Homo sapiens
agacataaatttaca

SEQ ID NO: 1515766 - DNA, 15 bp, Homo sapiens
cagacataaatttac

SEQ ID NO: 1515767 - DNA, 15 bp, Homo sapiens
ccagacataaattta

SEQ ID NO: 1515768 - DNA, 15 bp, Homo sapiens
tccagacataaattt

SEQ ID NO: 1515769 - DNA, 15 bp, Homo sapiens
ttccagacataaatt

SEQ ID NO: 1515770 - DNA, 15 bp, Homo sapiens
attccagacataaat

SEQ ID NO: 1515771 - DNA, 15 bp, Homo sapiens
aattccagacataaa

SEQ ID NO: 1515772 - DNA, 15 bp, Homo sapiens
gaattccagacataa

SEQ ID NO: 1515773 - DNA, 15 bp, Homo sapiens
agaattccagacata

SEQ ID NO: 1515774 - DNA, 15 bp, Homo sapiens
cagaattccagacat

SEQ ID NO: 1515775 - DNA, 15 bp, Homo sapiens
gcagaattccagaca

SEQ ID NO: 1515776 - DNA, 15 bp, Homo sapiens
agcagaattccagac

SEQ ID NO: 1515777 - DNA, 15 bp, Homo sapiens
aagcagaattccaga

SEQ ID NO: 1515778 - DNA, 15 bp, Homo sapiens
aaagcagaattccag

SEQ ID NO: 1515779 - DNA, 15 bp, Homo sapiens
aaaagcagaattcca

SEQ ID NO: 1515780 - DNA, 15 bp, Homo sapiens
gaaaagcagaattcc

SEQ ID NO: 1515781 - DNA, 15 bp, Homo sapiens
tgaaaagcagaattc

SEQ ID NO: 1515782 - DNA, 15 bp, Homo sapiens
atgaaaagcagaatt

SEQ ID NO: 1515783 - DNA, 15 bp, Homo sapiens
catgaaaagcagaat

SEQ ID NO: 1515784 - DNA, 15 bp, Homo sapiens
gcatgaaaagcagaa

SEQ ID NO: 1515785 - DNA, 15 bp, Homo sapiens
tgcatgaaaagcaga

SEQ ID NO: 1515786 - DNA, 15 bp, Homo sapiens
ctgcatgaaaagcag

SEQ ID NO: 1515787 - DNA, 15 bp, Homo sapiens
actgcatgaaaagca

SEQ ID NO: 1515788 - DNA, 15 bp, Homo sapiens
cactgcatgaaaagc

SEQ ID NO: 1515789 - DNA, 15 bp, Homo sapiens
acactgcatgaaaag

SEQ ID NO: 1515790 - DNA, 15 bp, Homo sapiens
cacactgcatgaaaa

SEQ ID NO: 1515791 - DNA, 15 bp, Homo sapiens
tcacactgcatgaaa

SEQ ID NO: 1515792 - DNA, 15 bp, Homo sapiens
ttcacactgcatgaa

SEQ ID NO: 1515793 - DNA, 15 bp, Homo sapiens
attcacactgcatga

SEQ ID NO: 1515794 - DNA, 15 bp, Homo sapiens
gattcacactgcatg

SEQ ID NO: 1515795 - DNA, 15 bp, Homo sapiens
agattcacactgcat

SEQ ID NO: 1515796 - DNA, 15 bp, Homo sapiens
tagattcacactgca

SEQ ID NO: 1515797 - DNA, 15 bp, Homo sapiens
ttagattcacactgc

SEQ ID NO: 1515798 - DNA, 15 bp, Homo sapiens
attagattcacactg

SEQ ID NO: 1515799 - DNA, 15 bp, Homo sapiens
aattagattcacact

SEQ ID NO: 1515800 - DNA, 15 bp, Homo sapiens
caattagattcacac

SEQ ID NO: 1515801 - DNA, 15 bp, Homo sapiens
tcaattagattcaca

SEQ ID NO: 1515802 - DNA, 15 bp, Homo sapiens
atcaattagattcac

SEQ ID NO: 1515803 - DNA, 15 bp, Homo sapiens
gatcaattagattca

SEQ ID NO: 1515804 - DNA, 15 bp, Homo sapiens
ggatcaattagattc

SEQ ID NO: 1515805 - DNA, 15 bp, Homo sapiens
aggatcaattagatt

SEQ ID NO: 1515806 - DNA, 15 bp, Homo sapiens
gaggatcaattagat

SEQ ID NO: 1515807 - DNA, 15 bp, Homo sapiens
tgaggatcaattaga

SEQ ID NO: 1515808 - DNA, 15 bp, Homo sapiens
atgaggatcaattag

SEQ ID NO: 1515809 - DNA, 15 bp, Homo sapiens
gatgaggatcaatta

SEQ ID NO: 1515810 - DNA, 15 bp, Homo sapiens
tgatgaggatcaatt

SEQ ID NO: 1515811 - DNA, 15 bp, Homo sapiens
atgatgaggatcaat

SEQ ID NO: 1515812 - DNA, 15 bp, Homo sapiens
gatgatgaggatcaa

SEQ ID NO: 1515813 - DNA, 15 bp, Homo sapiens
agatgatgaggatca

SEQ ID NO: 1515814 - DNA, 15 bp, Homo sapiens
tagatgatgaggatc

SEQ ID NO: 1515815 - DNA, 15 bp, Homo sapiens
ttagatgatgaggat

SEQ ID NO: 1515816 - DNA, 15 bp, Homo sapiens
cttagatgatgagga

SEQ ID NO: 1515817 - DNA, 15 bp, Homo sapiens
gcttagatgatgagg

SEQ ID NO: 1515818 - DNA, 15 bp, Homo sapiens
agcttagatgatgag

SEQ ID NO: 1515819 - DNA, 15 bp, Homo sapiens
tagcttagatgatga

SEQ ID NO: 1515820 - DNA, 15 bp, Homo sapiens
ctagcttagatgatg

SEQ ID NO: 1515821 - DNA, 15 bp, Homo sapiens
gctagcttagatgat

SEQ ID NO: 1515822 - DNA, 15 bp, Homo sapiens
ggctagcttagatga

SEQ ID NO: 1515823 - DNA, 15 bp, Homo sapiens
aggctagcttagatg

SEQ ID NO: 1515824 - DNA, 15 bp, Homo sapiens
aaggctagcttagat

SEQ ID NO: 1515825 - DNA, 15 bp, Homo sapiens
caaggctagcttaga

SEQ ID NO: 1515826 - DNA, 15 bp, Homo sapiens
acaaggctagcttag

SEQ ID NO: 1515827 - DNA, 15 bp, Homo sapiens
tacaaggctagctta

SEQ ID NO: 1515828 - DNA, 15 bp, Homo sapiens
gtacaaggctagctt

SEQ ID NO: 1515829 - DNA, 15 bp, Homo sapiens
tgtacaaggctagct

SEQ ID NO: 1515830 - DNA, 15 bp, Homo sapiens
ttgtacaaggctagc

SEQ ID NO: 1515831 - DNA, 15 bp, Homo sapiens
gttgtacaaggctag

SEQ ID NO: 1515832 - DNA, 15 bp, Homo sapiens
agttgtacaaggcta

SEQ ID NO: 1515833 - DNA, 15 bp, Homo sapiens
gagttgtacaaggct

SEQ ID NO: 1515834 - DNA, 15 bp, Homo sapiens
agagttgtacaaggc

SEQ ID NO: 1515835 - DNA, 15 bp, Homo sapiens
gagagttgtacaagg

SEQ ID NO: 1515836 - DNA, 15 bp, Homo sapiens
agagagttgtacaag

SEQ ID NO: 1515837 - DNA, 15 bp, Homo sapiens
gagagagttgtacaa

SEQ ID NO: 1515838 - DNA, 15 bp, Homo sapiens
agagagagttgtaca

SEQ ID NO: 1515839 - DNA, 15 bp, Homo sapiens
aagagagagttgtac

SEQ ID NO: 1515840 - DNA, 15 bp, Homo sapiens
gaagagagagttgta

SEQ ID NO: 1515841 - DNA, 15 bp, Homo sapiens
ggaagagagagttgt

SEQ ID NO: 1515842 - DNA, 15 bp, Homo sapiens
tggaagagagagttg

SEQ ID NO: 1515843 - DNA, 15 bp, Homo sapiens
ctggaagagagagtt

SEQ ID NO: 1515844 - DNA, 15 bp, Homo sapiens
actggaagagagagt

SEQ ID NO: 1515845 - DNA, 15 bp, Homo sapiens
aactggaagagagag

SEQ ID NO: 1515846 - DNA, 15 bp, Homo sapiens
aaactggaagagaga

SEQ ID NO: 1515847 - DNA, 15 bp, Homo sapiens
taaactggaagagag

SEQ ID NO: 1515848 - DNA, 15 bp, Homo sapiens
ataaactggaagaga

SEQ ID NO: 1515849 - DNA, 15 bp, Homo sapiens
gataaactggaagag

SEQ ID NO: 1515850 - DNA, 15 bp, Homo sapiens
tgataaactggaaga

SEQ ID NO: 1515851 - DNA, 15 bp, Homo sapiens
atgataaactggaag

SEQ ID NO: 1515852 - DNA, 15 bp, Homo sapiens
gatgataaactggaa

SEQ ID NO: 1515853 - DNA, 15 bp, Homo sapiens
tgatgataaactgga

SEQ ID NO: 1515854 - DNA, 15 bp, Homo sapiens
atgatgataaactgg

SEQ ID NO: 1515855 - DNA, 15 bp, Homo sapiens
aatgatgataaactg

SEQ ID NO: 1515856 - DNA, 15 bp, Homo sapiens
caatgatgataaact

SEQ ID NO: 1515857 - DNA, 15 bp, Homo sapiens
acaatgatgataaac

SEQ ID NO: 1515858 - DNA, 15 bp, Homo sapiens
tacaatgatgataaa

SEQ ID NO: 1515859 - DNA, 15 bp, Homo sapiens
ctacaatgatgataa

SEQ ID NO: 1515860 - DNA, 15 bp, Homo sapiens
actacaatgatgata

SEQ ID NO: 1515861 - DNA, 15 bp, Homo sapiens
aactacaatgatgat

SEQ ID NO: 1515862 - DNA, 15 bp, Homo sapiens
caactacaatgatga

SEQ ID NO: 1515863 - DNA, 15 bp, Homo sapiens
acaactacaatgatg

SEQ ID NO: 1515864 - DNA, 15 bp, Homo sapiens
aacaactacaatgat

SEQ ID NO: 1515865 - DNA, 15 bp, Homo sapiens
taacaactacaatga

SEQ ID NO: 1515866 - DNA, 15 bp, Homo sapiens
gtaacaactacaatg

SEQ ID NO: 1515867 - DNA, 15 bp, Homo sapiens
agtaacaactacaat

SEQ ID NO: 1515868 - DNA, 15 bp, Homo sapiens
cagtaacaactacaa

SEQ ID NO: 1515869 - DNA, 15 bp, Homo sapiens
tcagtaacaactaca

SEQ ID NO: 1515870 - DNA, 15 bp, Homo sapiens
gtcagtaacaactac

SEQ ID NO: 1515871 - DNA, 15 bp, Homo sapiens
agtcagtaacaacta

SEQ ID NO: 1515872 - DNA, 15 bp, Homo sapiens
aagtcagtaacaact

SEQ ID NO: 1515873 - DNA, 15 bp, Homo sapiens
aaagtcagtaacaac

SEQ ID NO: 1515874 - DNA, 15 bp, Homo sapiens
aaaagtcagtaacaa

SEQ ID NO: 1515875 - DNA, 15 bp, Homo sapiens
aaaaagtcagtaaca

SEQ ID NO: 1515876 - DNA, 15 bp, Homo sapiens
aaaaaagtcagtaac

SEQ ID NO: 1515877 - DNA, 15 bp, Homo sapiens
aaaaaaagtcagtaa

SEQ ID NO: 1515878 - DNA, 15 bp, Homo sapiens
gaaaaaaagtcagta

SEQ ID NO: 1515879 - DNA, 15 bp, Homo sapiens
agaaaaaaagtcagt

SEQ ID NO: 1515880 - DNA, 15 bp, Homo sapiens
cagaaaaaaagtcag

SEQ ID NO: 1515881 - DNA, 15 bp, Homo sapiens
acagaaaaaaagtca

SEQ ID NO: 1515882 - DNA, 15 bp, Homo sapiens
aacagaaaaaaagtc

SEQ ID NO: 1515883 - DNA, 15 bp, Homo sapiens
taacagaaaaaaagt

SEQ ID NO: 1515884 - DNA, 15 bp, Homo sapiens
ctaacagaaaaaaag

SEQ ID NO: 1515885 - DNA, 15 bp, Homo sapiens
tctaacagaaaaaaa

SEQ ID NO: 1515886 - DNA, 15 bp, Homo sapiens
ctctaacagaaaaaa

SEQ ID NO: 1515887 - DNA, 15 bp, Homo sapiens
tctctaacagaaaaa

SEQ ID NO: 1515888 - DNA, 15 bp, Homo sapiens
tttctctaacagaaa

SEQ ID NO: 1515889 - DNA, 15 bp, Homo sapiens
atttctctaacagaa

SEQ ID NO: 1515890 - DNA, 15 bp, Homo sapiens
aatttctctaacaga

SEQ ID NO: 1515891 - DNA, 15 bp, Homo sapiens
caatttctctaacag

SEQ ID NO: 1515892 - DNA, 15 bp, Homo sapiens
ccaatttctctaaca

SEQ ID NO: 1515893 - DNA, 15 bp, Homo sapiens
tccaatttctctaac

SEQ ID NO: 1515894 - DNA, 15 bp, Homo sapiens
ctccaatttctctaa

SEQ ID NO: 1515895 - DNA, 15 bp, Homo sapiens
actccaatttctcta

SEQ ID NO: 1515896 - DNA, 15 bp, Homo sapiens
aactccaatttctct

SEQ ID NO: 1515897 - DNA, 15 bp, Homo sapiens
caactccaatttctc

SEQ ID NO: 1515898 - DNA, 15 bp, Homo sapiens
tcaactccaatttct

SEQ ID NO: 1515899 - DNA, 15 bp, Homo sapiens
ttcaactccaatttc

SEQ ID NO: 1515900 - DNA, 15 bp, Homo sapiens
tttcaactccaattt

SEQ ID NO: 1515901 - DNA, 15 bp, Homo sapiens
ttttcaactccaatt

SEQ ID NO: 1515902 - DNA, 15 bp, Homo sapiens
cttttcaactccaat

SEQ ID NO: 1515903 - DNA, 15 bp, Homo sapiens
ccttttcaactccaa

SEQ ID NO: 1515904 - DNA, 15 bp, Homo sapiens
accttttcaactcca

SEQ ID NO: 1515905 - DNA, 15 bp, Homo sapiens
taccttttcaactcc

SEQ ID NO: 1515906 - DNA, 15 bp, Homo sapiens
ataccttttcaactc

SEQ ID NO: 1515907 - DNA, 15 bp, Homo sapiens
tataccttttcaact

SEQ ID NO: 1515908 - DNA, 15 bp, Homo sapiens
atataccttttcaac

SEQ ID NO: 1515909 - DNA, 15 bp, Homo sapiens
aatataccttttcaa

SEQ ID NO: 1515910 - DNA, 15 bp, Homo sapiens
caatataccttttca

SEQ ID NO: 1515911 - DNA, 15 bp, Homo sapiens
gcaatataccttttc

SEQ ID NO: 1515912 - DNA, 15 bp, Homo sapiens
agcaatatacctttt

SEQ ID NO: 1515913 - DNA, 15 bp, Homo sapiens
cagcaatataccttt

SEQ ID NO: 1515914 - DNA, 15 bp, Homo sapiens
tcagcaatatacctt

SEQ ID NO: 1515915 - DNA, 15 bp, Homo sapiens
ttcagcaatatacct

SEQ ID NO: 1515916 - DNA, 15 bp, Homo sapiens
attcagcaatatacc

SEQ ID NO: 1515917 - DNA, 15 bp, Homo sapiens
cattcagcaatatac

SEQ ID NO: 1515918 - DNA, 15 bp, Homo sapiens
tcattcagcaatata

SEQ ID NO: 1515919 - DNA, 15 bp, Homo sapiens
gtcattcagcaatat

SEQ ID NO: 1515920 - DNA, 15 bp, Homo sapiens
tgtcattcagcaata

SEQ ID NO: 1515921 - DNA, 15 bp, Homo sapiens
ttgtcattcagcaat

SEQ ID NO: 1515922 - DNA, 15 bp, Homo sapiens
cttgtcattcagcaa

SEQ ID NO: 1515923 - DNA, 15 bp, Homo sapiens
gcttgtcattcagca

SEQ ID NO: 1515924 - DNA, 15 bp, Homo sapiens
ggcttgtcattcagc

SEQ ID NO: 1515925 - DNA, 15 bp, Homo sapiens
tggcttgtcattcag

SEQ ID NO: 1515926 - DNA, 15 bp, Homo sapiens
atggcttgtcattca

SEQ ID NO: 1515927 - DNA, 15 bp, Homo sapiens
catggcttgtcattc

SEQ ID NO: 1515928 - DNA, 15 bp, Homo sapiens
acatggcttgtcatt

SEQ ID NO: 1515929 - DNA, 15 bp, Homo sapiens
aacatggcttgtcat

SEQ ID NO: 1515930 - DNA, 15 bp, Homo sapiens
caacatggcttgtca

SEQ ID NO: 1515931 - DNA, 15 bp, Homo sapiens
ccaacatggcttgtc

SEQ ID NO: 1515932 - DNA, 15 bp, Homo sapiens
tccaacatggcttgt

SEQ ID NO: 1515933 - DNA, 15 bp, Homo sapiens
ttccaacatggcttg

SEQ ID NO: 1515934 - DNA, 15 bp, Homo sapiens
tttccaacatggctt

SEQ ID NO: 1515935 - DNA, 15 bp, Homo sapiens
ctttccaacatggct

SEQ ID NO: 1515936 - DNA, 15 bp, Homo sapiens
tctttccaacatggc

SEQ ID NO: 1515937 - DNA, 15 bp, Homo sapiens
ctctttccaacatgg

SEQ ID NO: 1515938 - DNA, 15 bp, Homo sapiens
tctctttccaacatg

SEQ ID NO: 1515939 - DNA, 15 bp, Homo sapiens
ctctctttccaacat

SEQ ID NO: 1515940 - DNA, 15 bp, Homo sapiens
actctctttccaaca

SEQ ID NO: 1515941 - DNA, 15 bp, Homo sapiens
cactctctttccaac

SEQ ID NO: 1515942 - DNA, 15 bp, Homo sapiens
tcactctctttccaa

SEQ ID NO: 1515943 - DNA, 15 bp, Homo sapiens
ttcactctctttcca

SEQ ID NO: 1515944 - DNA, 15 bp, Homo sapiens
attcactctctttcc

SEQ ID NO: 1515945 - DNA, 15 bp, Homo sapiens
cattcactctctttc

SEQ ID NO: 1515946 - DNA, 15 bp, Homo sapiens
acattcactctcttt

SEQ ID NO: 1515947 - DNA, 15 bp, Homo sapiens
gacattcactctctt

SEQ ID NO: 1515948 - DNA, 15 bp, Homo sapiens
tgacattcactctct

SEQ ID NO: 1515949 - DNA, 15 bp, Homo sapiens
ctgacattcactctc

SEQ ID NO: 1515950 - DNA, 15 bp, Homo sapiens
gctgacattcactct

SEQ ID NO: 1515951 - DNA, 15 bp, Homo sapiens
tgctgacattcactc

SEQ ID NO: 1515952 - DNA, 15 bp, Homo sapiens
atgctgacattcact

SEQ ID NO: 1515953 - DNA, 15 bp, Homo sapiens
tatgctgacattcac

SEQ ID NO: 1515954 - DNA, 15 bp, Homo sapiens
ctatgctgacattca

SEQ ID NO: 1515955 - DNA, 15 bp, Homo sapiens
tcctatgctgacatt

SEQ ID NO: 1515956 - DNA, 15 bp, Homo sapiens
atcctatgctgacat

SEQ ID NO: 1515957 - DNA, 15 bp, Homo sapiens
aatcctatgctgaca

SEQ ID NO: 1515958 - DNA, 15 bp, Homo sapiens
gaatcctatgctgac

SEQ ID NO: 1515959 - DNA, 15 bp, Homo sapiens
tgaatcctatgctga

SEQ ID NO: 1515960 - DNA, 15 bp, Homo sapiens
atgaatcctatgctg

SEQ ID NO: 1515961 - DNA, 15 bp, Homo sapiens
tatgaatcctatgct

SEQ ID NO: 1515962 - DNA, 15 bp, Homo sapiens
atatgaatcctatgc

SEQ ID NO: 1515963 - DNA, 15 bp, Homo sapiens
aatatgaatcctatg

SEQ ID NO: 1515964 - DNA, 15 bp, Homo sapiens
gaatatgaatcctat

SEQ ID NO: 1515965 - DNA, 15 bp, Homo sapiens
agaatatgaatccta

SEQ ID NO: 1515966 - DNA, 15 bp, Homo sapiens
cagaatatgaatcct

SEQ ID NO: 1515967 - DNA, 15 bp, Homo sapiens
ccagaatatgaatcc

SEQ ID NO: 1515968 - DNA, 15 bp, Homo sapiens
gccagaatatgaatc

SEQ ID NO: 1515969 - DNA, 15 bp, Homo sapiens
tgccagaatatgaat

SEQ ID NO: 1515970 - DNA, 15 bp, Homo sapiens
gtgccagaatatgaa

SEQ ID NO: 1515971 - DNA, 15 bp, Homo sapiens
agtgccagaatatga

SEQ ID NO: 1515972 - DNA, 15 bp, Homo sapiens
gagtgccagaatatg

SEQ ID NO: 1515973 - DNA, 15 bp, Homo sapiens
agagtgccagaatat

SEQ ID NO: 1515974 - DNA, 15 bp, Homo sapiens
cagagtgccagaata

SEQ ID NO: 1515975 - DNA, 15 bp, Homo sapiens
acagagtgccagaat

SEQ ID NO: 1515976 - DNA, 15 bp, Homo sapiens
cacagagtgccagaa

SEQ ID NO: 1515977 - DNA, 15 bp, Homo sapiens
acacagagtgccaga

SEQ ID NO: 1515978 - DNA, 15 bp, Homo sapiens
tacacagagtgccag

SEQ ID NO: 1515979 - DNA, 15 bp, Homo sapiens
gtacacagagtgcca

SEQ ID NO: 1515980 - DNA, 15 bp, Homo sapiens
ggtacacagagtgcc

SEQ ID NO: 1515981 - DNA, 15 bp, Homo sapiens
gggtacacagagtgc

SEQ ID NO: 1515982 - DNA, 15 bp, Homo sapiens
tgggtacacagagtg

SEQ ID NO: 1515983 - DNA, 15 bp, Homo sapiens
atgggtacacagagt

SEQ ID NO: 1515984 - DNA, 15 bp, Homo sapiens
tatgggtacacagag

SEQ ID NO: 1515985 - DNA, 15 bp, Homo sapiens
gtatgggtacacaga

SEQ ID NO: 1515986 - DNA, 15 bp, Homo sapiens
tgtatgggtacacag

SEQ ID NO: 1515987 - DNA, 15 bp, Homo sapiens
ttgtatgggtacaca

SEQ ID NO: 1515988 - DNA, 15 bp, Homo sapiens
tttgtatgggtacac

SEQ ID NO: 1515989 - DNA, 15 bp, Homo sapiens
ctttgtatgggtaca

SEQ ID NO: 1515990 - DNA, 15 bp, Homo sapiens
actttgtatgggtac

SEQ ID NO: 1515991 - DNA, 15 bp, Homo sapiens
aactttgtatgggta

SEQ ID NO: 1515992 - DNA, 15 bp, Homo sapiens
taactttgtatgggt

SEQ ID NO: 1515993 - DNA, 15 bp, Homo sapiens
ttaactttgtatggg

SEQ ID NO: 1515994 - DNA, 15 bp, Homo sapiens
tttaactttgtatgg

SEQ ID NO: 1515995 - DNA, 15 bp, Homo sapiens
ttttaactttgtatg

SEQ ID NO: 1515996 - DNA, 15 bp, Homo sapiens
cttttaactttgtat

SEQ ID NO: 1515997 - DNA, 15 bp, Homo sapiens
ccttttaactttgta

SEQ ID NO: 1515998 - DNA, 15 bp, Homo sapiens
tccttttaactttgt

SEQ ID NO: 1515999 - DNA, 15 bp, Homo sapiens
atccttttaactttg

SEQ ID NO: 1516000 - DNA, 15 bp, Homo sapiens
gatccttttaacttt

SEQ ID NO: 1516001 - DNA, 15 bp, Homo sapiens
tgatccttttaactt

SEQ ID NO: 1516002 - DNA, 15 bp, Homo sapiens
ttgatccttttaact

SEQ ID NO: 1516003 - DNA, 15 bp, Homo sapiens
tttgatccttttaac

SEQ ID NO: 1516004 - DNA, 15 bp, Homo sapiens
ctttgatccttttaa

SEQ ID NO: 1516005 - DNA, 15 bp, Homo sapiens
actttgatcctttta

SEQ ID NO: 1516006 - DNA, 15 bp, Homo sapiens
aactttgatcctttt

SEQ ID NO: 1516007 - DNA, 15 bp, Homo sapiens
aaactttgatccttt

SEQ ID NO: 1516008 - DNA, 15 bp, Homo sapiens
aaaactttgatcctt

SEQ ID NO: 1516009 - DNA, 15 bp, Homo sapiens
taaaactttgatcct

SEQ ID NO: 1516010 - DNA, 15 bp, Homo sapiens
ttaaaactttgatcc

SEQ ID NO: 1516011 - DNA, 15 bp, Homo sapiens
attaaaactttgatc

SEQ ID NO: 1516012 - DNA, 15 bp, Homo sapiens
gattaaaactttgat

SEQ ID NO: 1516013 - DNA, 15 bp, Homo sapiens
ggattaaaactttga

SEQ ID NO: 1516014 - DNA, 15 bp, Homo sapiens
aggattaaaactttg

SEQ ID NO: 1516015 - DNA, 15 bp, Homo sapiens
caggattaaaacttt

SEQ ID NO: 1516016 - DNA, 15 bp, Homo sapiens
ccaggattaaaactt

SEQ ID NO: 1516017 - DNA, 15 bp, Homo sapiens
gccaggattaaaact

SEQ ID NO: 1516018 - DNA, 15 bp, Homo sapiens
agccaggattaaaac

SEQ ID NO: 1516019 - DNA, 15 bp, Homo sapiens
gagccaggattaaaa

SEQ ID NO: 1516020 - DNA, 15 bp, Homo sapiens
agagccaggattaaa

SEQ ID NO: 1516021 - DNA, 15 bp, Homo sapiens
cagagccaggattaa

SEQ ID NO: 1516022 - DNA, 15 bp, Homo sapiens
tcagagccaggatta

SEQ ID NO: 1516023 - DNA, 15 bp, Homo sapiens
gtcagagccaggatt

SEQ ID NO: 1516024 - DNA, 15 bp, Homo sapiens
ggtcagagccaggat

SEQ ID NO: 1516025 - DNA, 15 bp, Homo sapiens
aggtcagagccagga

SEQ ID NO: 1516026 - DNA, 15 bp, Homo sapiens
taggtcagagccagg

SEQ ID NO: 1516027 - DNA, 15 bp, Homo sapiens
ctaggtcagagccag

SEQ ID NO: 1516028 - DNA, 15 bp, Homo sapiens
gctaggtcagagcca

SEQ ID NO: 1516029 - DNA, 15 bp, Homo sapiens
tgctaggtcagagcc

SEQ ID NO: 1516030 - DNA, 15 bp, Homo sapiens
ctgctaggtcagagc

SEQ ID NO: 1516031 - DNA, 15 bp, Homo sapiens
cctgctaggtcagag

SEQ ID NO: 1516032 - DNA, 15 bp, Homo sapiens
gcctgctaggtcaga

SEQ ID NO: 1516033 - DNA, 15 bp, Homo sapiens
agcctgctaggtcag

SEQ ID NO: 1516034 - DNA, 15 bp, Homo sapiens
tagcctgctaggtca

SEQ ID NO: 1516035 - DNA, 15 bp, Homo sapiens
atagcctgctaggtc

SEQ ID NO: 1516036 - DNA, 15 bp, Homo sapiens
tatagcctgctaggt

SEQ ID NO: 1516037 - DNA, 15 bp, Homo sapiens
atatagcctgctagg

SEQ ID NO: 1516038 - DNA, 15 bp, Homo sapiens
tatatagcctgctag

SEQ ID NO: 1516039 - DNA, 15 bp, Homo sapiens
atatatagcctgcta

SEQ ID NO: 1516040 - DNA, 15 bp, Homo sapiens
gatatatagcctgct

SEQ ID NO: 1516041 - DNA, 15 bp, Homo sapiens
agatatatagcctgc

SEQ ID NO: 1516042 - DNA, 15 bp, Homo sapiens
aagatatatagcctg

SEQ ID NO: 1516043 - DNA, 15 bp, Homo sapiens
aaagatatatagcct

SEQ ID NO: 1516044 - DNA, 15 bp, Homo sapiens
caaagatatatagcc

SEQ ID NO: 1516045 - DNA, 15 bp, Homo sapiens
ccaaagatatatagc

SEQ ID NO: 1516046 - DNA, 15 bp, Homo sapiens
cccaaagatatatag

SEQ ID NO: 1516047 - DNA, 15 bp, Homo sapiens
ccccaaagatatata

SEQ ID NO: 1516048 - DNA, 15 bp, Homo sapiens
tccccaaagatatat

SEQ ID NO: 1516049 - DNA, 15 bp, Homo sapiens
ctccccaaagatata

SEQ ID NO: 1516050 - DNA, 15 bp, Homo sapiens
cctccccaaagatat

SEQ ID NO: 1516051 - DNA, 15 bp, Homo sapiens
acctccccaaagata

SEQ ID NO: 1516052 - DNA, 15 bp, Homo sapiens
gacctccccaaagat

SEQ ID NO: 1516053 - DNA, 15 bp, Homo sapiens
agacctccccaaaga

SEQ ID NO: 1516054 - DNA, 15 bp, Homo sapiens
aagacctccccaaag

SEQ ID NO: 1516055 - DNA, 15 bp, Homo sapiens
aaagacctccccaaa

SEQ ID NO: 1516056 - DNA, 15 bp, Homo sapiens
gaaagacctccccaa

SEQ ID NO: 1516057 - DNA, 15 bp, Homo sapiens
cgaaagacctcccca

SEQ ID NO: 1516058 - DNA, 15 bp, Homo sapiens
acgaaagacctcccc

SEQ ID NO: 1516059 - DNA, 15 bp, Homo sapiens
gacgaaagacctccc

SEQ ID NO: 1516060 - DNA, 15 bp, Homo sapiens
agacgaaagacctcc

SEQ ID NO: 1516061 - DNA, 15 bp, Homo sapiens
cagacgaaagacctc

SEQ ID NO: 1516062 - DNA, 15 bp, Homo sapiens
ccagacgaaagacct

SEQ ID NO: 1516063 - DNA, 15 bp, Homo sapiens
tccagacgaaagacc

SEQ ID NO: 1516064 - DNA, 15 bp, Homo sapiens
gtccagacgaaagac

SEQ ID NO: 1516065 - DNA, 15 bp, Homo sapiens
ggtccagacgaaaga

SEQ ID NO: 1516066 - DNA, 15 bp, Homo sapiens
aggtccagacgaaag

SEQ ID NO: 1516067 - DNA, 15 bp, Homo sapiens
aaggtccagacgaaa

SEQ ID NO: 1516068 - DNA, 15 bp, Homo sapiens
gaaggtccagacgaa

SEQ ID NO: 1516069 - DNA, 15 bp, Homo sapiens
tgaaggtccagacga

SEQ ID NO: 1516070 - DNA, 15 bp, Homo sapiens
atgaaggtccagacg

SEQ ID NO: 1516071 - DNA, 15 bp, Homo sapiens
aatgaaggtccagac

SEQ ID NO: 1516072 - DNA, 15 bp, Homo sapiens
aaatgaaggtccaga

SEQ ID NO: 1516073 - DNA, 15 bp, Homo sapiens
gaaatgaaggtccag

SEQ ID NO: 1516074 - DNA, 15 bp, Homo sapiens
ggaaatgaaggtcca

SEQ ID NO: 1516075 - DNA, 15 bp, Homo sapiens
aggaaatgaaggtcc

SEQ ID NO: 1516076 - DNA, 15 bp, Homo sapiens
aaggaaatgaaggtc

SEQ ID NO: 1516077 - DNA, 15 bp, Homo sapiens
taaggaaatgaaggt

SEQ ID NO: 1516078 - DNA, 15 bp, Homo sapiens
ataaggaaatgaagg

SEQ ID NO: 1516079 - DNA, 15 bp, Homo sapiens
gataaggaaatgaag

SEQ ID NO: 1516080 - DNA, 15 bp, Homo sapiens
agataaggaaatgaa

SEQ ID NO: 1516081 - DNA, 15 bp, Homo sapiens
cagataaggaaatga

SEQ ID NO: 1516082 - DNA, 15 bp, Homo sapiens
acagataaggaaatg

SEQ ID NO: 1516083 - DNA, 15 bp, Homo sapiens
tacagataaggaaat

SEQ ID NO: 1516084 - DNA, 15 bp, Homo sapiens
ttacagataaggaaa

SEQ ID NO: 1516085 - DNA, 15 bp, Homo sapiens
tttacagataaggaa

SEQ ID NO: 1516086 - DNA, 15 bp, Homo sapiens
ttttacagataagga

SEQ ID NO: 1516087 - DNA, 15 bp, Homo sapiens
attttacagataagg

SEQ ID NO: 1516088 - DNA, 15 bp, Homo sapiens
tattttacagataag

SEQ ID NO: 1516089 - DNA, 15 bp, Homo sapiens
gtattttacagataa

SEQ ID NO: 1516090 - DNA, 15 bp, Homo sapiens
agtattttacagata

SEQ ID NO: 1516091 - DNA, 15 bp, Homo sapiens
tagtattttacagat

SEQ ID NO: 1516092 - DNA, 15 bp, Homo sapiens
ctagtattttacaga

SEQ ID NO: 1516093 - DNA, 15 bp, Homo sapiens
gctagtattttacag

SEQ ID NO: 1516094 - DNA, 15 bp, Homo sapiens
ggctagtattttaca

SEQ ID NO: 1516095 - DNA, 15 bp, Homo sapiens
aggctagtattttac

SEQ ID NO: 1516096 - DNA, 15 bp, Homo sapiens
gaggctagtatttta

SEQ ID NO: 1516097 - DNA, 15 bp, Homo sapiens
agaggctagtatttt

SEQ ID NO: 1516098 - DNA, 15 bp, Homo sapiens
aagaggctagtattt

SEQ ID NO: 1516099 - DNA, 15 bp, Homo sapiens
aaagaggctagtatt

SEQ ID NO: 1516100 - DNA, 15 bp, Homo sapiens
gaaagaggctagtat

SEQ ID NO: 1516101 - DNA, 15 bp, Homo sapiens
ggaaagaggctagta

SEQ ID NO: 1516102 - DNA, 15 bp, Homo sapiens
tggaaagaggctagt

SEQ ID NO: 1516103 - DNA, 15 bp, Homo sapiens
ttggaaagaggctag

SEQ ID NO: 1516104 - DNA, 15 bp, Homo sapiens
tttggaaagaggcta

SEQ ID NO: 1516105 - DNA, 15 bp, Homo sapiens
ctttggaaagaggct

SEQ ID NO: 1516106 - DNA, 15 bp, Homo sapiens
actttggaaagaggc

SEQ ID NO: 1516107 - DNA, 15 bp, Homo sapiens
aactttggaaagagg

SEQ ID NO: 1516108 - DNA, 15 bp, Homo sapiens
aaactttggaaagag

SEQ ID NO: 1516109 - DNA, 15 bp, Homo sapiens
gaaactttggaaaga

SEQ ID NO: 1516110 - DNA, 15 bp, Homo sapiens
tgaaactttggaaag

SEQ ID NO: 1516111 - DNA, 15 bp, Homo sapiens
atgaaactttggaaa

SEQ ID NO: 1516112 - DNA, 15 bp, Homo sapiens
gatgaaactttggaa

SEQ ID NO: 1516113 - DNA, 15 bp, Homo sapiens
ggatgaaactttgga

SEQ ID NO: 1516114 - DNA, 15 bp, Homo sapiens
tggatgaaactttgg

SEQ ID NO: 1516115 - DNA, 15 bp, Homo sapiens
atggatgaaactttg

SEQ ID NO: 1516116 - DNA, 15 bp, Homo sapiens
gatggatgaaacttt

SEQ ID NO: 1516117 - DNA, 15 bp, Homo sapiens
agatggatgaaactt

SEQ ID NO: 1516118 - DNA, 15 bp, Homo sapiens
aagatggatgaaact

SEQ ID NO: 1516119 - DNA, 15 bp, Homo sapiens
taagatggatgaaac

SEQ ID NO: 1516120 - DNA, 15 bp, Homo sapiens
ttaagatggatgaaa

SEQ ID NO: 1516121 - DNA, 15 bp, Homo sapiens
attaagatggatgaa

SEQ ID NO: 1516122 - DNA, 15 bp, Homo sapiens
aattaagatggatga

SEQ ID NO: 1516123 - DNA, 15 bp, Homo sapiens
aaattaagatggatg

SEQ ID NO: 1516124 - DNA, 15 bp, Homo sapiens
aaaattaagatggat

SEQ ID NO: 1516125 - DNA, 15 bp, Homo sapiens
caaaattaagatgga

SEQ ID NO: 1516126 - DNA, 15 bp, Homo sapiens
acaaaattaagatgg

SEQ ID NO: 1516127 - DNA, 15 bp, Homo sapiens
aacaaaattaagatg

SEQ ID NO: 1516128 - DNA, 15 bp, Homo sapiens
caacaaaattaagat

SEQ ID NO: 1516129 - DNA, 15 bp, Homo sapiens
acaacaaaattaaga

SEQ ID NO: 1516130 - DNA, 15 bp, Homo sapiens
aacaacaaaattaag

SEQ ID NO: 1516131 - DNA, 15 bp, Homo sapiens
caacaacaaaattaa

SEQ ID NO: 1516132 - DNA, 15 bp, Homo sapiens
acaacaacaaaatta

SEQ ID NO: 1516133 - DNA, 15 bp, Homo sapiens
aacaacaacaaaatt

SEQ ID NO: 1516134 - DNA, 15 bp, Homo sapiens
aaacaacaacaaaat

SEQ ID NO: 1516135 - DNA, 15 bp, Homo sapiens
taaacaacaacaaaa

SEQ ID NO: 1516136 - DNA, 15 bp, Homo sapiens
ttaaacaacaacaaa

SEQ ID NO: 1516137 - DNA, 15 bp, Homo sapiens
gttaaacaacaacaa

SEQ ID NO: 1516138 - DNA, 15 bp, Homo sapiens
agttaaacaacaaca

SEQ ID NO: 1516139 - DNA, 15 bp, Homo sapiens
aagttaaacaacaac

SEQ ID NO: 1516140 - DNA, 15 bp, Homo sapiens
gaagttaaacaacaa

SEQ ID NO: 1516141 - DNA, 15 bp, Homo sapiens
tgaagttaaacaaca

SEQ ID NO: 1516142 - DNA, 15 bp, Homo sapiens
ctgaagttaaacaac

SEQ ID NO: 1516143 - DNA, 15 bp, Homo sapiens
tctgaagttaaacaa

SEQ ID NO: 1516144 - DNA, 15 bp, Homo sapiens
ctctgaagttaaaca

SEQ ID NO: 1516145 - DNA, 15 bp, Homo sapiens
gctctgaagttaaac

SEQ ID NO: 1516146 - DNA, 15 bp, Homo sapiens
ggctctgaagttaaa

SEQ ID NO: 1516147 - DNA, 15 bp, Homo sapiens
aggctctgaagttaa

SEQ ID NO: 1516148 - DNA, 15 bp, Homo sapiens
taggctctgaagtta

SEQ ID NO: 1516149 - DNA, 15 bp, Homo sapiens
gtaggctctgaagtt

SEQ ID NO: 1516150 - DNA, 15 bp, Homo sapiens
agtaggctctgaagt

SEQ ID NO: 1516151 - DNA, 15 bp, Homo sapiens
aagtaggctctgaag

SEQ ID NO: 1516152 - DNA, 15 bp, Homo sapiens
aaagtaggctctgaa

SEQ ID NO: 1516153 - DNA, 15 bp, Homo sapiens
caaagtaggctctga

SEQ ID NO: 1516154 - DNA, 15 bp, Homo sapiens
tcaaagtaggctctg

SEQ ID NO: 1516155 - DNA, 15 bp, Homo sapiens
ttcaaagtaggctct

SEQ ID NO: 1516156 - DNA, 15 bp, Homo sapiens
cttcaaagtaggctc

SEQ ID NO: 1516157 - DNA, 15 bp, Homo sapiens
gcttcaaagtaggct

SEQ ID NO: 1516158 - DNA, 15 bp, Homo sapiens
agcttcaaagtaggc

SEQ ID NO: 1516159 - DNA, 15 bp, Homo sapiens
cagcttcaaagtagg

SEQ ID NO: 1516160 - DNA, 15 bp, Homo sapiens
tcagcttcaaagtag

SEQ ID NO: 1516161 - DNA, 15 bp, Homo sapiens
ttcagcttcaaagta

SEQ ID NO: 1516162 - DNA, 15 bp, Homo sapiens
cttcagcttcaaagt

SEQ ID NO: 1516163 - DNA, 15 bp, Homo sapiens
gcttcagcttcaaag

SEQ ID NO: 1516164 - DNA, 15 bp, Homo sapiens
ggcttcagcttcaaa

SEQ ID NO: 1516165 - DNA, 15 bp, Homo sapiens
cggcttcagcttcaa

SEQ ID NO: 1516166 - DNA, 15 bp, Homo sapiens
ccggcttcagcttca

SEQ ID NO: 1516167 - DNA, 15 bp, Homo sapiens
cccggcttcagcttc

SEQ ID NO: 1516168 - DNA, 15 bp, Homo sapiens
acccggcttcagctt

SEQ ID NO: 1516169 - DNA, 15 bp, Homo sapiens
tacccggcttcagct

SEQ ID NO: 1516170 - DNA, 15 bp, Homo sapiens
atacccggcttcagc

SEQ ID NO: 1516171 - DNA, 15 bp, Homo sapiens
gatacccggcttcag

SEQ ID NO: 1516172 - DNA, 15 bp, Homo sapiens
tgatacccggcttca

SEQ ID NO: 1516173 - DNA, 15 bp, Homo sapiens
ctgatacccggcttc

SEQ ID NO: 1516174 - DNA, 15 bp, Homo sapiens
tctgatacccggctt

SEQ ID NO: 1516175 - DNA, 15 bp, Homo sapiens
ttctgatacccggct

SEQ ID NO: 1516176 - DNA, 15 bp, Homo sapiens
tttctgatacccggc

SEQ ID NO: 1516177 - DNA, 15 bp, Homo sapiens
atttctgatacccgg

SEQ ID NO: 1516178 - DNA, 15 bp, Homo sapiens
catttctgatacccg

SEQ ID NO: 1516179 - DNA, 15 bp, Homo sapiens
ccatttctgataccc

SEQ ID NO: 1516180 - DNA, 15 bp, Homo sapiens
tccatttctgatacc

SEQ ID NO: 1516181 - DNA, 15 bp, Homo sapiens
ttccatttctgatac

SEQ ID NO: 1516182 - DNA, 15 bp, Homo sapiens
tttccatttctgata

SEQ ID NO: 1516183 - DNA, 15 bp, Homo sapiens
ctttccatttctgat

SEQ ID NO: 1516184 - DNA, 15 bp, Homo sapiens
gctttccatttctga

SEQ ID NO: 1516185 - DNA, 15 bp, Homo sapiens
ggctttccatttctg

SEQ ID NO: 1516186 - DNA, 15 bp, Homo sapiens
tggctttccatttct

SEQ ID NO: 1516187 - DNA, 15 bp, Homo sapiens
ttggctttccatttc

SEQ ID NO: 1516188 - DNA, 15 bp, Homo sapiens
gttggctttccattt

SEQ ID NO: 1516189 - DNA, 15 bp, Homo sapiens
agttggctttccatt

SEQ ID NO: 1516190 - DNA, 15 bp, Homo sapiens
aagttggctttccat

SEQ ID NO: 1516191 - DNA, 15 bp, Homo sapiens
aaagttggctttcca

SEQ ID NO: 1516192 - DNA, 15 bp, Homo sapiens
gaaagttggctttcc

SEQ ID NO: 1516193 - DNA, 15 bp, Homo sapiens
agaaagttggctttc

SEQ ID NO: 1516194 - DNA, 15 bp, Homo sapiens
gagaaagttggcttt

SEQ ID NO: 1516195 - DNA, 15 bp, Homo sapiens
ggagaaagttggctt

SEQ ID NO: 1516196 - DNA, 15 bp, Homo sapiens
aggagaaagttggct

SEQ ID NO: 1516197 - DNA, 15 bp, Homo sapiens
aaggagaaagttggc

SEQ ID NO: 1516198 - DNA, 15 bp, Homo sapiens
caaggagaaagttgg

SEQ ID NO: 1516199 - DNA, 15 bp, Homo sapiens
acaaggagaaagttg

SEQ ID NO: 1516200 - DNA, 15 bp, Homo sapiens
gacaaggagaaagtt

SEQ ID NO: 1516201 - DNA, 15 bp, Homo sapiens
ggacaaggagaaagt

SEQ ID NO: 1516202 - DNA, 15 bp, Homo sapiens
aggacaaggagaaag

SEQ ID NO: 1516203 - DNA, 15 bp, Homo sapiens
aaggacaaggagaaa

SEQ ID NO: 1516204 - DNA, 15 bp, Homo sapiens
aaaggacaaggagaa

SEQ ID NO: 1516205 - DNA, 15 bp, Homo sapiens
aaaaggacaaggaga

SEQ ID NO: 1516206 - DNA, 15 bp, Homo sapiens
aaaaaggacaaggag

SEQ ID NO: 1516207 - DNA, 15 bp, Homo sapiens
caaaaaggacaagga

SEQ ID NO: 1516208 - DNA, 15 bp, Homo sapiens
gcaaaaaggacaagg

SEQ ID NO: 1516209 - DNA, 15 bp, Homo sapiens
agcaaaaaggacaag

SEQ ID NO: 1516210 - DNA, 15 bp, Homo sapiens
aagcaaaaaggacaa

SEQ ID NO: 1516211 - DNA, 15 bp, Homo sapiens
aaagcaaaaaggaca

SEQ ID NO: 1516212 - DNA, 15 bp, Homo sapiens
caaagcaaaaaggac

SEQ ID NO: 1516213 - DNA, 15 bp, Homo sapiens
acaaagcaaaaagga

SEQ ID NO: 1516214 - DNA, 15 bp, Homo sapiens
gacaaagcaaaaagg

SEQ ID NO: 1516215 - DNA, 15 bp, Homo sapiens
agacaaagcaaaaag

SEQ ID NO: 1516216 - DNA, 15 bp, Homo sapiens
tagacaaagcaaaaa

SEQ ID NO: 1516217 - DNA, 15 bp, Homo sapiens
ttagacaaagcaaaa

SEQ ID NO: 1516218 - DNA, 15 bp, Homo sapiens
attagacaaagcaaa

SEQ ID NO: 1516219 - DNA, 15 bp, Homo sapiens
cattagacaaagcaa

SEQ ID NO: 1516220 - DNA, 15 bp, Homo sapiens
acattagacaaagca

SEQ ID NO: 1516221 - DNA, 15 bp, Homo sapiens
gacattagacaaagc

SEQ ID NO: 1516222 - DNA, 15 bp, Homo sapiens
tgacattagacaaag

SEQ ID NO: 1516223 - DNA, 15 bp, Homo sapiens
ttgacattagacaaa

SEQ ID NO: 1516224 - DNA, 15 bp, Homo sapiens
cttgacattagacaa

SEQ ID NO: 1516225 - DNA, 15 bp, Homo sapiens
acttgacattagaca

SEQ ID NO: 1516226 - DNA, 15 bp, Homo sapiens
gacttgacattagac

SEQ ID NO: 1516227 - DNA, 15 bp, Homo sapiens
tgacttgacattaga

SEQ ID NO: 1516228 - DNA, 15 bp, Homo sapiens
gtgacttgacattag

SEQ ID NO: 1516229 - DNA, 15 bp, Homo sapiens
tgtgacttgacatta

SEQ ID NO: 1516230 - DNA, 15 bp, Homo sapiens
atgtgacttgacatt

SEQ ID NO: 1516231 - DNA, 15 bp, Homo sapiens
aatgtgacttgacat

SEQ ID NO: 1516232 - DNA, 15 bp, Homo sapiens
caatgtgacttgaca

SEQ ID NO: 1516233 - DNA, 15 bp, Homo sapiens
acaatgtgacttgac

SEQ ID NO: 1516234 - DNA, 15 bp, Homo sapiens
cacaatgtgacttga

SEQ ID NO: 1516235 - DNA, 15 bp, Homo sapiens
acacaatgtgacttg

SEQ ID NO: 1516236 - DNA, 15 bp, Homo sapiens
cacacaatgtgactt

SEQ ID NO: 1516237 - DNA, 15 bp, Homo sapiens
tcacacaatgtgact

SEQ ID NO: 1516238 - DNA, 15 bp, Homo sapiens
ttcacacaatgtgac

SEQ ID NO: 1516239 - DNA, 15 bp, Homo sapiens
gttcacacaatgtga

SEQ ID NO: 1516240 - DNA, 15 bp, Homo sapiens
tgttcacacaatgtg

SEQ ID NO: 1516241 - DNA, 15 bp, Homo sapiens
ttgttcacacaatgt

SEQ ID NO: 1516242 - DNA, 15 bp, Homo sapiens
cttgttcacacaatg

SEQ ID NO: 1516243 - DNA, 15 bp, Homo sapiens
gcttgttcacacaat

SEQ ID NO: 1516244 - DNA, 15 bp, Homo sapiens
ggcttgttcacacaa

SEQ ID NO: 1516245 - DNA, 15 bp, Homo sapiens
gggcttgttcacaca

SEQ ID NO: 1516246 - DNA, 15 bp, Homo sapiens
agggcttgttcacac

SEQ ID NO: 1516247 - DNA, 15 bp, Homo sapiens
gagggcttgttcaca

SEQ ID NO: 1516248 - DNA, 15 bp, Homo sapiens
ggagggcttgttcac

SEQ ID NO: 1516249 - DNA, 15 bp, Homo sapiens
tggagggcttgttca

SEQ ID NO: 1516250 - DNA, 15 bp, Homo sapiens
atggagggcttgttc

SEQ ID NO: 1516251 - DNA, 15 bp, Homo sapiens
tatggagggcttgtt

SEQ ID NO: 1516252 - DNA, 15 bp, Homo sapiens
atatggagggcttgt

SEQ ID NO: 1516253 - DNA, 15 bp, Homo sapiens
aatatggagggcttg

SEQ ID NO: 1516254 - DNA, 15 bp, Homo sapiens
aaatatggagggctt

SEQ ID NO: 1516255 - DNA, 15 bp, Homo sapiens
caaatatggagggct

SEQ ID NO: 1516256 - DNA, 15 bp, Homo sapiens
acaaatatggagggc

SEQ ID NO: 1516257 - DNA, 15 bp, Homo sapiens
tacaaatatggaggg

SEQ ID NO: 1516258 - DNA, 15 bp, Homo sapiens
ttacaaatatggagg

SEQ ID NO: 1516259 - DNA, 15 bp, Homo sapiens
attacaaatatggag

SEQ ID NO: 1516260 - DNA, 15 bp, Homo sapiens
gattacaaatatgga

SEQ ID NO: 1516261 - DNA, 15 bp, Homo sapiens
agattacaaatatgg

SEQ ID NO: 1516262 - DNA, 15 bp, Homo sapiens
aagattacaaatatg

SEQ ID NO: 1516263 - DNA, 15 bp, Homo sapiens
taagattacaaatat

SEQ ID NO: 1516264 - DNA, 15 bp, Homo sapiens
ctaagattacaaata

SEQ ID NO: 1516265 - DNA, 15 bp, Homo sapiens
actaagattacaaat

SEQ ID NO: 1516266 - DNA, 15 bp, Homo sapiens
aactaagattacaaa

SEQ ID NO: 1516267 - DNA, 15 bp, Homo sapiens
taactaagattacaa

SEQ ID NO: 1516268 - DNA, 15 bp, Homo sapiens
gtaactaagattaca

SEQ ID NO: 1516269 - DNA, 15 bp, Homo sapiens
agtaactaagattac

SEQ ID NO: 1516270 - DNA, 15 bp, Homo sapiens
aagtaactaagatta

SEQ ID NO: 1516271 - DNA, 15 bp, Homo sapiens
gaagtaactaagatt

SEQ ID NO: 1516272 - DNA, 15 bp, Homo sapiens
tgaagtaactaagat

SEQ ID NO: 1516273 - DNA, 15 bp, Homo sapiens
gtgaagtaactaaga

SEQ ID NO: 1516274 - DNA, 15 bp, Homo sapiens
tgtgaagtaactaag

SEQ ID NO: 1516275 - DNA, 15 bp, Homo sapiens
ttgtgaagtaactaa

SEQ ID NO: 1516276 - DNA, 15 bp, Homo sapiens
tttgtgaagtaacta

SEQ ID NO: 1516277 - DNA, 15 bp, Homo sapiens
ctttgtgaagtaact

SEQ ID NO: 1516278 - DNA, 15 bp, Homo sapiens
actttgtgaagtaac

SEQ ID NO: 1516279 - DNA, 15 bp, Homo sapiens
aactttgtgaagtaa

SEQ ID NO: 1516280 - DNA, 15 bp, Homo sapiens
taactttgtgaagta

SEQ ID NO: 1516281 - DNA, 15 bp, Homo sapiens
gtaactttgtgaagt

SEQ ID NO: 1516282 - DNA, 15 bp, Homo sapiens
agtaactttgtgaag

SEQ ID NO: 1516283 - DNA, 15 bp, Homo sapiens
aagtaactttgtgaa

SEQ ID NO: 1516284 - DNA, 15 bp, Homo sapiens
gaagtaactttgtga

SEQ ID NO: 1516285 - DNA, 15 bp, Homo sapiens
agaagtaactttgtg

SEQ ID NO: 1516286 - DNA, 15 bp, Homo sapiens
aagaagtaactttgt

SEQ ID NO: 1516287 - DNA, 15 bp, Homo sapiens
taagaagtaactttg

SEQ ID NO: 1516288 - DNA, 15 bp, Homo sapiens
ataagaagtaacttt

SEQ ID NO: 1516289 - DNA, 15 bp, Homo sapiens
tataagaagtaactt

SEQ ID NO: 1516290 - DNA, 15 bp, Homo sapiens
ttataagaagtaact

SEQ ID NO: 1516291 - DNA, 15 bp, Homo sapiens
tttataagaagtaac

SEQ ID NO: 1516292 - DNA, 15 bp, Homo sapiens
atttataagaagtaa

SEQ ID NO: 1516293 - DNA, 15 bp, Homo sapiens
aatttataagaagta

SEQ ID NO: 1516294 - DNA, 15 bp, Homo sapiens
aaatttataagaagt

SEQ ID NO: 1516295 - DNA, 15 bp, Homo sapiens
taaatttataagaag

SEQ ID NO: 1516296 - DNA, 15 bp, Homo sapiens
ttaaatttataagaa

SEQ ID NO: 1516297 - DNA, 15 bp, Homo sapiens
attaaatttataaga

SEQ ID NO: 1516298 - DNA, 15 bp, Homo sapiens
aattaaatttataag

SEQ ID NO: 1516299 - DNA, 15 bp, Homo sapiens
gaattaaatttataa

SEQ ID NO: 1516300 - DNA, 15 bp, Homo sapiens
tgaattaaatttata

SEQ ID NO: 1516301 - DNA, 15 bp, Homo sapiens
ttgaattaaatttat

SEQ ID NO: 1516302 - DNA, 15 bp, Homo sapiens
tttgaattaaattta

SEQ ID NO: 1516303 - DNA, 15 bp, Homo sapiens
gtttgaattaaattt

SEQ ID NO: 1516304 - DNA, 15 bp, Homo sapiens
tgtttgaattaaatt

SEQ ID NO: 1516305 - DNA, 15 bp, Homo sapiens
atgtttgaattaaat

SEQ ID NO: 1516306 - DNA, 15 bp, Homo sapiens
tatgtttgaattaaa

SEQ ID NO: 1516307 - DNA, 15 bp, Homo sapiens
ttatgtttgaattaa

SEQ ID NO: 1516308 - DNA, 15 bp, Homo sapiens
cttatgtttgaatta

SEQ ID NO: 1516309 - DNA, 15 bp, Homo sapiens
acttatgtttgaatt

SEQ ID NO: 1516310 - DNA, 15 bp, Homo sapiens
gacttatgtttgaat

SEQ ID NO: 1516311 - DNA, 15 bp, Homo sapiens
agacttatgtttgaa

SEQ ID NO: 1516312 - DNA, 15 bp, Homo sapiens
cagacttatgtttga

SEQ ID NO: 1516313 - DNA, 15 bp, Homo sapiens
ccagacttatgtttg

SEQ ID NO: 1516314 - DNA, 15 bp, Homo sapiens
cccagacttatgttt

SEQ ID NO: 1516315 - DNA, 15 bp, Homo sapiens
acccagacttatgtt

SEQ ID NO: 1516316 - DNA, 15 bp, Homo sapiens
cacccagacttatgt

SEQ ID NO: 1516317 - DNA, 15 bp, Homo sapiens
acacccagacttatg

SEQ ID NO: 1516318 - DNA, 15 bp, Homo sapiens
tacacccagacttat

SEQ ID NO: 1516319 - DNA, 15 bp, Homo sapiens
atacacccagactta

SEQ ID NO: 1516320 - DNA, 15 bp, Homo sapiens
gatacacccagactt

SEQ ID NO: 1516321 - DNA, 15 bp, Homo sapiens
agatacacccagact

SEQ ID NO: 1516322 - DNA, 15 bp, Homo sapiens
cagatacacccagac

SEQ ID NO: 1516323 - DNA, 15 bp, Homo sapiens
ccagatacacccaga

SEQ ID NO: 1516324 - DNA, 15 bp, Homo sapiens
accagatacacccag

SEQ ID NO: 1516325 - DNA, 15 bp, Homo sapiens
caccagatacaccca

SEQ ID NO: 1516326 - DNA, 15 bp, Homo sapiens
acaccagatacaccc

SEQ ID NO: 1516327 - DNA, 15 bp, Homo sapiens
aacaccagatacacc

SEQ ID NO: 1516328 - DNA, 15 bp, Homo sapiens
caacaccagatacac

SEQ ID NO: 1516329 - DNA, 15 bp, Homo sapiens
tcaacaccagataca

SEQ ID NO: 1516330 - DNA, 15 bp, Homo sapiens
ttcaacaccagatac

SEQ ID NO: 1516331 - DNA, 15 bp, Homo sapiens
tttcaacaccagata

SEQ ID NO: 1516332 - DNA, 15 bp, Homo sapiens
ttttcaacaccagat

SEQ ID NO: 1516333 - DNA, 15 bp, Homo sapiens
attttcaacaccaga

SEQ ID NO: 1516334 - DNA, 15 bp, Homo sapiens
aattttcaacaccag

SEQ ID NO: 1516335 - DNA, 15 bp, Homo sapiens
gaattttcaacacca

SEQ ID NO: 1516336 - DNA, 15 bp, Homo sapiens
agaattttcaacacc

SEQ ID NO: 1516337 - DNA, 15 bp, Homo sapiens
tagaattttcaacac

SEQ ID NO: 1516338 - DNA, 15 bp, Homo sapiens
ttagaattttcaaca

SEQ ID NO: 1516339 - DNA, 15 bp, Homo sapiens
attagaattttcaac

SEQ ID NO: 1516340 - DNA, 15 bp, Homo sapiens
cattagaattttcaa

SEQ ID NO: 1516341 - DNA, 15 bp, Homo sapiens
tcattagaattttca

SEQ ID NO: 1516342 - DNA, 15 bp, Homo sapiens
gtcattagaattttc

SEQ ID NO: 1516343 - DNA, 15 bp, Homo sapiens
agtcattagaatttt

SEQ ID NO: 1516344 - DNA, 15 bp, Homo sapiens
aagtcattagaattt

SEQ ID NO: 1516345 - DNA, 15 bp, Homo sapiens
aaagtcattagaatt

SEQ ID NO: 1516346 - DNA, 15 bp, Homo sapiens
caaagtcattagaat

SEQ ID NO: 1516347 - DNA, 15 bp, Homo sapiens
gcaaagtcattagaa

SEQ ID NO: 1516348 - DNA, 15 bp, Homo sapiens
tgcaaagtcattaga

SEQ ID NO: 1516349 - DNA, 15 bp, Homo sapiens
atgcaaagtcattag

SEQ ID NO: 1516350 - DNA, 15 bp, Homo sapiens
aatgcaaagtcatta

SEQ ID NO: 1516351 - DNA, 15 bp, Homo sapiens
aaatgcaaagtcatt

SEQ ID NO: 1516352 - DNA, 15 bp, Homo sapiens
aaaatgcaaagtcat

SEQ ID NO: 1516353 - DNA, 15 bp, Homo sapiens
aaaaatgcaaagtca

SEQ ID NO: 1516354 - DNA, 15 bp, Homo sapiens
caaaaatgcaaagtc

SEQ ID NO: 1516355 - DNA, 15 bp, Homo sapiens
tcaaaaatgcaaagt

SEQ ID NO: 1516356 - DNA, 15 bp, Homo sapiens
ttcaaaaatgcaaag

SEQ ID NO: 1516357 - DNA, 15 bp, Homo sapiens
cttcaaaaatgcaaa

SEQ ID NO: 1516358 - DNA, 15 bp, Homo sapiens
ccttcaaaaatgcaa

SEQ ID NO: 1516359 - DNA, 15 bp, Homo sapiens
accttcaaaaatgca

SEQ ID NO: 1516360 - DNA, 15 bp, Homo sapiens
aaccttcaaaaatgc

SEQ ID NO: 1516361 - DNA, 15 bp, Homo sapiens
aaaccttcaaaaatg

SEQ ID NO: 1516362 - DNA, 15 bp, Homo sapiens
aaaaccttcaaaaat

SEQ ID NO: 1516363 - DNA, 15 bp, Homo sapiens
aaaaaccttcaaaaa

SEQ ID NO: 1516364 - DNA, 15 bp, Homo sapiens
gaaaaaccttcaaaa

SEQ ID NO: 1516365 - DNA, 15 bp, Homo sapiens
ggaaaaaccttcaaa

SEQ ID NO: 1516366 - DNA, 15 bp, Homo sapiens
aggaaaaaccttcaa

SEQ ID NO: 1516367 - DNA, 15 bp, Homo sapiens
aaggaaaaaccttca

SEQ ID NO: 1516368 - DNA, 15 bp, Homo sapiens
caaggaaaaaccttc

SEQ ID NO: 1516369 - DNA, 15 bp, Homo sapiens
tcaaggaaaaacctt

SEQ ID NO: 1516370 - DNA, 15 bp, Homo sapiens
atcaaggaaaaacct

SEQ ID NO: 1516371 - DNA, 15 bp, Homo sapiens
tatcaaggaaaaacc

SEQ ID NO: 1516372 - DNA, 15 bp, Homo sapiens
tatatcaaggaaaaa

SEQ ID NO: 1516373 - DNA, 15 bp, Homo sapiens
ctatatcaaggaaaa

SEQ ID NO: 1516374 - DNA, 15 bp, Homo sapiens
gctatatcaaggaaa

SEQ ID NO: 1516375 - DNA, 15 bp, Homo sapiens
tgctatatcaaggaa

SEQ ID NO: 1516376 - DNA, 15 bp, Homo sapiens
atgctatatcaagga

SEQ ID NO: 1516377 - DNA, 15 bp, Homo sapiens
gatgctatatcaagg

SEQ ID NO: 1516378 - DNA, 15 bp, Homo sapiens
agatgctatatcaag

SEQ ID NO: 1516379 - DNA, 15 bp, Homo sapiens
cagatgctatatcaa

SEQ ID NO: 1516380 - DNA, 15 bp, Homo sapiens
tcagatgctatatca

SEQ ID NO: 1516381 - DNA, 15 bp, Homo sapiens
atcagatgctatatc

SEQ ID NO: 1516382 - DNA, 15 bp, Homo sapiens
aatcagatgctatat

SEQ ID NO: 1516383 - DNA, 15 bp, Homo sapiens
caatcagatgctata

SEQ ID NO: 1516384 - DNA, 15 bp, Homo sapiens
acaatcagatgctat

SEQ ID NO: 1516385 - DNA, 15 bp, Homo sapiens
gacaatcagatgcta

SEQ ID NO: 1516386 - DNA, 15 bp, Homo sapiens
ggacaatcagatgct

SEQ ID NO: 1516387 - DNA, 15 bp, Homo sapiens
aggacaatcagatgc

SEQ ID NO: 1516388 - DNA, 15 bp, Homo sapiens
taggacaatcagatg

SEQ ID NO: 1516389 - DNA, 15 bp, Homo sapiens
gtaggacaatcagat

SEQ ID NO: 1516390 - DNA, 15 bp, Homo sapiens
tgtaggacaatcaga

SEQ ID NO: 1516391 - DNA, 15 bp, Homo sapiens
ttgtaggacaatcag

SEQ ID NO: 1516392 - DNA, 15 bp, Homo sapiens
cttgtaggacaatca

SEQ ID NO: 1516393 - DNA, 15 bp, Homo sapiens
acttgtaggacaatc

SEQ ID NO: 1516394 - DNA, 15 bp, Homo sapiens
cacttgtaggacaat

SEQ ID NO: 1516395 - DNA, 15 bp, Homo sapiens
tcacttgtaggacaa

SEQ ID NO: 1516396 - DNA, 15 bp, Homo sapiens
atcacttgtaggaca

SEQ ID NO: 1516397 - DNA, 15 bp, Homo sapiens
catcacttgtaggac

SEQ ID NO: 1516398 - DNA, 15 bp, Homo sapiens
gcatcacttgtagga

SEQ ID NO: 1516399 - DNA, 15 bp, Homo sapiens
tgcatcacttgtagg

SEQ ID NO: 1516400 - DNA, 15 bp, Homo sapiens
ctgcatcacttgtag

SEQ ID NO: 1516401 - DNA, 15 bp, Homo sapiens
actgcatcacttgta

SEQ ID NO: 1516402 - DNA, 15 bp, Homo sapiens
tactgcatcacttgt

SEQ ID NO: 1516403 - DNA, 15 bp, Homo sapiens
ttactgcatcacttg

SEQ ID NO: 1516404 - DNA, 15 bp, Homo sapiens
tttactgcatcactt

SEQ ID NO: 1516405 - DNA, 15 bp, Homo sapiens
atttactgcatcact

SEQ ID NO: 1516406 - DNA, 15 bp, Homo sapiens
gatttactgcatcac

SEQ ID NO: 1516407 - DNA, 15 bp, Homo sapiens
tgatttactgcatca

SEQ ID NO: 1516408 - DNA, 15 bp, Homo sapiens
atgatttactgcatc

SEQ ID NO: 1516409 - DNA, 15 bp, Homo sapiens
tatgatttactgcat

SEQ ID NO: 1516410 - DNA, 15 bp, Homo sapiens
ctatgatttactgca

SEQ ID NO: 1516411 - DNA, 15 bp, Homo sapiens
actatgatttactgc

SEQ ID NO: 1516412 - DNA, 15 bp, Homo sapiens
gactatgatttactg

SEQ ID NO: 1516413 - DNA, 15 bp, Homo sapiens
agactatgatttact

SEQ ID NO: 1516414 - DNA, 15 bp, Homo sapiens
aagactatgatttac

SEQ ID NO: 1516415 - DNA, 15 bp, Homo sapiens
aaagactatgattta

SEQ ID NO: 1516416 - DNA, 15 bp, Homo sapiens
gaaagactatgattt

SEQ ID NO: 1516417 - DNA, 15 bp, Homo sapiens
ggaaagactatgatt

SEQ ID NO: 1516418 - DNA, 15 bp, Homo sapiens
aggaaagactatgat

SEQ ID NO: 1516419 - DNA, 15 bp, Homo sapiens
aaggaaagactatga

SEQ ID NO: 1516420 - DNA, 15 bp, Homo sapiens
gaaggaaagactatg

SEQ ID NO: 1516421 - DNA, 15 bp, Homo sapiens
tgaaggaaagactat

SEQ ID NO: 1516422 - DNA, 15 bp, Homo sapiens
atgaaggaaagacta

SEQ ID NO: 1516423 - DNA, 15 bp, Homo sapiens
tatgaaggaaagact

SEQ ID NO: 1516424 - DNA, 15 bp, Homo sapiens
ttatgaaggaaagac

SEQ ID NO: 1516425 - DNA, 15 bp, Homo sapiens
cttatgaaggaaaga

SEQ ID NO: 1516426 - DNA, 15 bp, Homo sapiens
acttatgaaggaaag

SEQ ID NO: 1516427 - DNA, 15 bp, Homo sapiens
cacttatgaaggaaa

SEQ ID NO: 1516428 - DNA, 15 bp, Homo sapiens
tcacttatgaaggaa

SEQ ID NO: 1516429 - DNA, 15 bp, Homo sapiens
gtcacttatgaagga

SEQ ID NO: 1516430 - DNA, 15 bp, Homo sapiens
cgtcacttatgaagg

SEQ ID NO: 1516431 - DNA, 15 bp, Homo sapiens
ccgtcacttatgaag

SEQ ID NO: 1516432 - DNA, 15 bp, Homo sapiens
gccgtcacttatgaa

SEQ ID NO: 1516433 - DNA, 15 bp, Homo sapiens
tgccgtcacttatga

SEQ ID NO: 1516434 - DNA, 15 bp, Homo sapiens
ttgccgtcacttatg

SEQ ID NO: 1516435 - DNA, 15 bp, Homo sapiens
attgccgtcacttat

SEQ ID NO: 1516436 - DNA, 15 bp, Homo sapiens
cattgccgtcactta

SEQ ID NO: 1516437 - DNA, 15 bp, Homo sapiens
acattgccgtcactt

SEQ ID NO: 1516438 - DNA, 15 bp, Homo sapiens
cacattgccgtcact

SEQ ID NO: 1516439 - DNA, 15 bp, Homo sapiens
gcacattgccgtcac

SEQ ID NO: 1516440 - DNA, 15 bp, Homo sapiens
agcacattgccgtca

SEQ ID NO: 1516441 - DNA, 15 bp, Homo sapiens
aagcacattgccgtc

SEQ ID NO: 1516442 - DNA, 15 bp, Homo sapiens
caagcacattgccgt

SEQ ID NO: 1516443 - DNA, 15 bp, Homo sapiens
gcaagcacattgccg

SEQ ID NO: 1516444 - DNA, 15 bp, Homo sapiens
agcaagcacattgcc

SEQ ID NO: 1516445 - DNA, 15 bp, Homo sapiens
aagcaagcacattgc

SEQ ID NO: 1516446 - DNA, 15 bp, Homo sapiens
aaagcaagcacattg

SEQ ID NO: 1516447 - DNA, 15 bp, Homo sapiens
taaagcaagcacatt

SEQ ID NO: 1516448 - DNA, 15 bp, Homo sapiens
gtaaagcaagcacat

SEQ ID NO: 1516449 - DNA, 15 bp, Homo sapiens
tgtaaagcaagcaca

SEQ ID NO: 1516450 - DNA, 15 bp, Homo sapiens
atgtaaagcaagcac

SEQ ID NO: 1516451 - DNA, 15 bp, Homo sapiens
gatgtaaagcaagca

SEQ ID NO: 1516452 - DNA, 15 bp, Homo sapiens
cgatgtaaagcaagc

SEQ ID NO: 1516453 - DNA, 15 bp, Homo sapiens
acgatgtaaagcaag

SEQ ID NO: 1516454 - DNA, 15 bp, Homo sapiens
gacgatgtaaagcaa

SEQ ID NO: 1516455 - DNA, 15 bp, Homo sapiens
agacgatgtaaagca

SEQ ID NO: 1516456 - DNA, 15 bp, Homo sapiens
tagacgatgtaaagc

SEQ ID NO: 1516457 - DNA, 15 bp, Homo sapiens
gtagacgatgtaaag

SEQ ID NO: 1516458 - DNA, 15 bp, Homo sapiens
agtagacgatgtaaa

SEQ ID NO: 1516459 - DNA, 15 bp, Homo sapiens
gagtagacgatgtaa

SEQ ID NO: 1516460 - DNA, 15 bp, Homo sapiens
agagtagacgatgta

SEQ ID NO: 1516461 - DNA, 15 bp, Homo sapiens
cagagtagacgatgt

SEQ ID NO: 1516462 - DNA, 15 bp, Homo sapiens
ccagagtagacgatg

SEQ ID NO: 1516463 - DNA, 15 bp, Homo sapiens
tccagagtagacgat

SEQ ID NO: 1516464 - DNA, 15 bp, Homo sapiens
ttccagagtagacga

SEQ ID NO: 1516465 - DNA, 15 bp, Homo sapiens
gttccagagtagacg

SEQ ID NO: 1516466 - DNA, 15 bp, Homo sapiens
tgttccagagtagac

SEQ ID NO: 1516467 - DNA, 15 bp, Homo sapiens
ttgttccagagtaga

SEQ ID NO: 1516468 - DNA, 15 bp, Homo sapiens
attgttccagagtag

SEQ ID NO: 1516469 - DNA, 15 bp, Homo sapiens
gattgttccagagta

SEQ ID NO: 1516470 - DNA, 15 bp, Homo sapiens
tgattgttccagagt

SEQ ID NO: 1516471 - DNA, 15 bp, Homo sapiens
ctgattgttccagag

SEQ ID NO: 1516472 - DNA, 15 bp, Homo sapiens
cctgattgttccaga

SEQ ID NO: 1516473 - DNA, 15 bp, Homo sapiens
tcctgattgttccag

SEQ ID NO: 1516474 - DNA, 15 bp, Homo sapiens
ctcctgattgttcca

SEQ ID NO: 1516475 - DNA, 15 bp, Homo sapiens
tctcctgattgttcc

SEQ ID NO: 1516476 - DNA, 15 bp, Homo sapiens
ttctcctgattgttc

SEQ ID NO: 1516477 - DNA, 15 bp, Homo sapiens
tttctcctgattgtt

SEQ ID NO: 1516478 - DNA, 15 bp, Homo sapiens
ttttctcctgattgt

SEQ ID NO: 1516479 - DNA, 15 bp, Homo sapiens
attttctcctgattg

SEQ ID NO: 1516480 - DNA, 15 bp, Homo sapiens
aattttctcctgatt

SEQ ID NO: 1516481 - DNA, 15 bp, Homo sapiens
caattttctcctgat

SEQ ID NO: 1516482 - DNA, 15 bp, Homo sapiens
ccaattttctcctga

SEQ ID NO: 1516483 - DNA, 15 bp, Homo sapiens
cccaattttctcctg

SEQ ID NO: 1516484 - DNA, 15 bp, Homo sapiens
gcccaattttctcct

SEQ ID NO: 1516485 - DNA, 15 bp, Homo sapiens
tgcccaattttctcc

SEQ ID NO: 1516486 - DNA, 15 bp, Homo sapiens
ctgcccaattttctc

SEQ ID NO: 1516487 - DNA, 15 bp, Homo sapiens
actgcccaattttct

SEQ ID NO: 1516488 - DNA, 15 bp, Homo sapiens
tactgcccaattttc

SEQ ID NO: 1516489 - DNA, 15 bp, Homo sapiens
atactgcccaatttt

SEQ ID NO: 1516490 - DNA, 15 bp, Homo sapiens
gatactgcccaattt

SEQ ID NO: 1516491 - DNA, 15 bp, Homo sapiens
agatactgcccaatt

SEQ ID NO: 1516492 - DNA, 15 bp, Homo sapiens
aagatactgcccaat

SEQ ID NO: 1516493 - DNA, 15 bp, Homo sapiens
aaagatactgcccaa

SEQ ID NO: 1516494 - DNA, 15 bp, Homo sapiens
gaaagatactgccca

SEQ ID NO: 1516495 - DNA, 15 bp, Homo sapiens
ggaaagatactgccc

SEQ ID NO: 1516496 - DNA, 15 bp, Homo sapiens
tggaaagatactgcc

SEQ ID NO: 1516497 - DNA, 15 bp, Homo sapiens
ctggaaagatactgc

SEQ ID NO: 1516498 - DNA, 15 bp, Homo sapiens
gctggaaagatactg

SEQ ID NO: 1516499 - DNA, 15 bp, Homo sapiens
tgctggaaagatact

SEQ ID NO: 1516500 - DNA, 15 bp, Homo sapiens
ttgctggaaagatac

SEQ ID NO: 1516501 - DNA, 15 bp, Homo sapiens
gttgctggaaagata

SEQ ID NO: 1516502 - DNA, 15 bp, Homo sapiens
tgttgctggaaagat

SEQ ID NO: 1516503 - DNA, 15 bp, Homo sapiens
ctgttgctggaaaga

SEQ ID NO: 1516504 - DNA, 15 bp, Homo sapiens
cctgttgctggaaag

SEQ ID NO: 1516505 - DNA, 15 bp, Homo sapiens
acctgttgctggaaa

SEQ ID NO: 1516506 - DNA, 15 bp, Homo sapiens
tacctgttgctggaa

SEQ ID NO: 1516507 - DNA, 15 bp, Homo sapiens
ttacctgttgctgga

SEQ ID NO: 1516508 - DNA, 15 bp, Homo sapiens
cttacctgttgctgg

SEQ ID NO: 1516509 - DNA, 15 bp, Homo sapiens
tcttacctgttgctg

SEQ ID NO: 1516510 - DNA, 15 bp, Homo sapiens
atcttacctgttgct

SEQ ID NO: 1516511 - DNA, 15 bp, Homo sapiens
aatcttacctgttgc

SEQ ID NO: 1516512 - DNA, 15 bp, Homo sapiens
aaatcttacctgttg

SEQ ID NO: 1516513 - DNA, 15 bp, Homo sapiens
gaaatcttacctgtt

SEQ ID NO: 1516514 - DNA, 15 bp, Homo sapiens
ggaaatcttacctgt

SEQ ID NO: 1516515 - DNA, 15 bp, Homo sapiens
gggaaatcttacctg

SEQ ID NO: 1516516 - DNA, 15 bp, Homo sapiens
tgggaaatcttacct

SEQ ID NO: 1516517 - DNA, 15 bp, Homo sapiens
ctgggaaatcttacc

SEQ ID NO: 1516518 - DNA, 15 bp, Homo sapiens
actgggaaatcttac

SEQ ID NO: 1516519 - DNA, 15 bp, Homo sapiens
gactgggaaatctta

SEQ ID NO: 1516520 - DNA, 15 bp, Homo sapiens
tgactgggaaatctt

SEQ ID NO: 1516521 - DNA, 15 bp, Homo sapiens
atgactgggaaatct

SEQ ID NO: 1516522 - DNA, 15 bp, Homo sapiens
catgactgggaaatc

SEQ ID NO: 1516523 - DNA, 15 bp, Homo sapiens
ccatgactgggaaat

SEQ ID NO: 1516524 - DNA, 15 bp, Homo sapiens
cccatgactgggaaa

SEQ ID NO: 1516525 - DNA, 15 bp, Homo sapiens
ccccatgactgggaa

SEQ ID NO: 1516526 - DNA, 15 bp, Homo sapiens
tccccatgactggga

SEQ ID NO: 1516527 - DNA, 15 bp, Homo sapiens
atccccatgactggg

SEQ ID NO: 1516528 - DNA, 15 bp, Homo sapiens
tatccccatgactgg

SEQ ID NO: 1516529 - DNA, 15 bp, Homo sapiens
ctatccccatgactg

SEQ ID NO: 1516530 - DNA, 15 bp, Homo sapiens
actatccccatgact

SEQ ID NO: 1516531 - DNA, 15 bp, Homo sapiens
cactatccccatgac

SEQ ID NO: 1516532 - DNA, 15 bp, Homo sapiens
tcactatccccatga

SEQ ID NO: 1516533 - DNA, 15 bp, Homo sapiens
ttcactatccccatg

SEQ ID NO: 1516534 - DNA, 15 bp, Homo sapiens
gttcactatccccat

SEQ ID NO: 1516535 - DNA, 15 bp, Homo sapiens
tgttcactatcccca

SEQ ID NO: 1516536 - DNA, 15 bp, Homo sapiens
gtgttcactatcccc

SEQ ID NO: 1516537 - DNA, 15 bp, Homo sapiens
agtgttcactatccc

SEQ ID NO: 1516538 - DNA, 15 bp, Homo sapiens
gagtgttcactatcc

SEQ ID NO: 1516539 - DNA, 15 bp, Homo sapiens
agagtgttcactatc

SEQ ID NO: 1516540 - DNA, 15 bp, Homo sapiens
gagagtgttcactat

SEQ ID NO: 1516541 - DNA, 15 bp, Homo sapiens
ggagagtgttcacta

SEQ ID NO: 1516542 - DNA, 15 bp, Homo sapiens
cggagagtgttcact

SEQ ID NO: 1516543 - DNA, 15 bp, Homo sapiens
acggagagtgttcac

SEQ ID NO: 1516544 - DNA, 15 bp, Homo sapiens
aacggagagtgttca

SEQ ID NO: 1516545 - DNA, 15 bp, Homo sapiens
aaacggagagtgttc

SEQ ID NO: 1516546 - DNA, 15 bp, Homo sapiens
taaacggagagtgtt

SEQ ID NO: 1516547 - DNA, 15 bp, Homo sapiens
ttaaacggagagtgt

SEQ ID NO: 1516548 - DNA, 15 bp, Homo sapiens
tttaaacggagagtg

SEQ ID NO: 1516549 - DNA, 15 bp, Homo sapiens
atttaaacggagagt

SEQ ID NO: 1516550 - DNA, 15 bp, Homo sapiens
aatttaaacggagag

SEQ ID NO: 1516551 - DNA, 15 bp, Homo sapiens
aaatttaaacggaga

SEQ ID NO: 1516552 - DNA, 15 bp, Homo sapiens
taaatttaaacggag

SEQ ID NO: 1516553 - DNA, 15 bp, Homo sapiens
ctaaatttaaacgga

SEQ ID NO: 1516554 - DNA, 15 bp, Homo sapiens
tctaaatttaaacgg

SEQ ID NO: 1516555 - DNA, 15 bp, Homo sapiens
atctaaatttaaacg

SEQ ID NO: 1516556 - DNA, 15 bp, Homo sapiens
aatctaaatttaaac

SEQ ID NO: 1516557 - DNA, 15 bp, Homo sapiens
taatctaaatttaaa

SEQ ID NO: 1516558 - DNA, 15 bp, Homo sapiens
ttaatctaaatttaa

SEQ ID NO: 1516559 - DNA, 15 bp, Homo sapiens
attaatctaaattta

SEQ ID NO: 1516560 - DNA, 15 bp, Homo sapiens
tattaatctaaattt

SEQ ID NO: 1516561 - DNA, 15 bp, Homo sapiens
gtattaatctaaatt

SEQ ID NO: 1516562 - DNA, 15 bp, Homo sapiens
tgtattaatctaaat

SEQ ID NO: 1516563 - DNA, 15 bp, Homo sapiens
ttgtattaatctaaa

SEQ ID NO: 1516564 - DNA, 15 bp, Homo sapiens
attgtattaatctaa

SEQ ID NO: 1516565 - DNA, 15 bp, Homo sapiens
aattgtattaatcta

SEQ ID NO: 1516566 - DNA, 15 bp, Homo sapiens
taattgtattaatct

SEQ ID NO: 1516567 - DNA, 15 bp, Homo sapiens
ataattgtattaatc

SEQ ID NO: 1516568 - DNA, 15 bp, Homo sapiens
aataattgtattaat

SEQ ID NO: 1516569 - DNA, 15 bp, Homo sapiens
caataattgtattaa

SEQ ID NO: 1516570 - DNA, 15 bp, Homo sapiens
ccaataattgtatta

SEQ ID NO: 1516571 - DNA, 15 bp, Homo sapiens
accaataattgtatt

SEQ ID NO: 1516572 - DNA, 15 bp, Homo sapiens
gaccaataattgtat

SEQ ID NO: 1516573 - DNA, 15 bp, Homo sapiens
tgaccaataattgta

SEQ ID NO: 1516574 - DNA, 15 bp, Homo sapiens
atgaccaataattgt

SEQ ID NO: 1516575 - DNA, 15 bp, Homo sapiens
catgaccaataattg

SEQ ID NO: 1516576 - DNA, 15 bp, Homo sapiens
tcatgaccaataatt

SEQ ID NO: 1516577 - DNA, 15 bp, Homo sapiens
ttcatgaccaataat

SEQ ID NO: 1516578 - DNA, 15 bp, Homo sapiens
attcatgaccaataa

SEQ ID NO: 1516579 - DNA, 15 bp, Homo sapiens
tattcatgaccaata

SEQ ID NO: 1516580 - DNA, 15 bp, Homo sapiens
ctattcatgaccaat

SEQ ID NO: 1516581 - DNA, 15 bp, Homo sapiens
actattcatgaccaa

SEQ ID NO: 1516582 - DNA, 15 bp, Homo sapiens
cactattcatgacca

SEQ ID NO: 1516583 - DNA, 15 bp, Homo sapiens
gcactattcatgacc

SEQ ID NO: 1516584 - DNA, 15 bp, Homo sapiens
agcactattcatgac

SEQ ID NO: 1516585 - DNA, 15 bp, Homo sapiens
aagcactattcatga

SEQ ID NO: 1516586 - DNA, 15 bp, Homo sapiens
aaagcactattcatg

SEQ ID NO: 1516587 - DNA, 15 bp, Homo sapiens
aaaagcactattcat

SEQ ID NO: 1516588 - DNA, 15 bp, Homo sapiens
aaaaagcactattca

SEQ ID NO: 1516589 - DNA, 15 bp, Homo sapiens
taaaaagcactattc

SEQ ID NO: 1516590 - DNA, 15 bp, Homo sapiens
gtaaaaagcactatt

SEQ ID NO: 1516591 - DNA, 15 bp, Homo sapiens
agtaaaaagcactat

SEQ ID NO: 1516592 - DNA, 15 bp, Homo sapiens
aagtaaaaagcacta

SEQ ID NO: 1516593 - DNA, 15 bp, Homo sapiens
aaagtaaaaagcact

SEQ ID NO: 1516594 - DNA, 15 bp, Homo sapiens
caaagtaaaaagcac

SEQ ID NO: 1516595 - DNA, 15 bp, Homo sapiens
gcaaagtaaaaagca

SEQ ID NO: 1516596 - DNA, 15 bp, Homo sapiens
tgcaaagtaaaaagc

SEQ ID NO: 1516597 - DNA, 15 bp, Homo sapiens
atgcaaagtaaaaag

SEQ ID NO: 1516598 - DNA, 15 bp, Homo sapiens
gatgcaaagtaaaaa

SEQ ID NO: 1516599 - DNA, 15 bp, Homo sapiens
agatgcaaagtaaaa

SEQ ID NO: 1516600 - DNA, 15 bp, Homo sapiens
aagatgcaaagtaaa

SEQ ID NO: 1516601 - DNA, 15 bp, Homo sapiens
gaagatgcaaagtaa

SEQ ID NO: 1516602 - DNA, 15 bp, Homo sapiens
agaagatgcaaagta

SEQ ID NO: 1516603 - DNA, 15 bp, Homo sapiens
aagaagatgcaaagt

SEQ ID NO: 1516604 - DNA, 15 bp, Homo sapiens
caagaagatgcaaag

SEQ ID NO: 1516605 - DNA, 15 bp, Homo sapiens
ccaagaagatgcaaa

SEQ ID NO: 1516606 - DNA, 15 bp, Homo sapiens
tccaagaagatgcaa

SEQ ID NO: 1516607 - DNA, 15 bp, Homo sapiens
gtccaagaagatgca

SEQ ID NO: 1516608 - DNA, 15 bp, Homo sapiens
agtccaagaagatgc

SEQ ID NO: 1516609 - DNA, 15 bp, Homo sapiens
tagtccaagaagatg

SEQ ID NO: 1516610 - DNA, 15 bp, Homo sapiens
ttagtccaagaagat

SEQ ID NO: 1516611 - DNA, 15 bp, Homo sapiens
cttagtccaagaaga

SEQ ID NO: 1516612 - DNA, 15 bp, Homo sapiens
tcttagtccaagaag

SEQ ID NO: 1516613 - DNA, 15 bp, Homo sapiens
ttcttagtccaagaa

SEQ ID NO: 1516614 - DNA, 15 bp, Homo sapiens
attcttagtccaaga

SEQ ID NO: 1516615 - DNA, 15 bp, Homo sapiens
aattcttagtccaag

SEQ ID NO: 1516616 - DNA, 15 bp, Homo sapiens
taattcttagtccaa

SEQ ID NO: 1516617 - DNA, 15 bp, Homo sapiens
ataattcttagtcca

SEQ ID NO: 1516618 - DNA, 15 bp, Homo sapiens
cataattcttagtcc

SEQ ID NO: 1516619 - DNA, 15 bp, Homo sapiens
ccataattcttagtc

SEQ ID NO: 1516620 - DNA, 15 bp, Homo sapiens
accataattcttagt

SEQ ID NO: 1516621 - DNA, 15 bp, Homo sapiens
aaccataattcttag

SEQ ID NO: 1516622 - DNA, 15 bp, Homo sapiens
aaaccataattctta

SEQ ID NO: 1516623 - DNA, 15 bp, Homo sapiens
taaaccataattctt

SEQ ID NO: 1516624 - DNA, 15 bp, Homo sapiens
ctaaaccataattct

SEQ ID NO: 1516625 - DNA, 15 bp, Homo sapiens
tctaaaccataattc

SEQ ID NO: 1516626 - DNA, 15 bp, Homo sapiens
ttctaaaccataatt

SEQ ID NO: 1516627 - DNA, 15 bp, Homo sapiens
tttctaaaccataat

SEQ ID NO: 1516628 - DNA, 15 bp, Homo sapiens
ctttctaaaccataa

SEQ ID NO: 1516629 - DNA, 15 bp, Homo sapiens
tctttctaaaccata

SEQ ID NO: 1516630 - DNA, 15 bp, Homo sapiens
ctctttctaaaccat

SEQ ID NO: 1516631 - DNA, 15 bp, Homo sapiens
tctctttctaaacca

SEQ ID NO: 1516632 - DNA, 15 bp, Homo sapiens
ttctctttctaaacc

SEQ ID NO: 1516633 - DNA, 15 bp, Homo sapiens
tttctctttctaaac

SEQ ID NO: 1516634 - DNA, 15 bp, Homo sapiens
ctttctctttctaaa

SEQ ID NO: 1516635 - DNA, 15 bp, Homo sapiens
tctttctctttctaa

SEQ ID NO: 1516636 - DNA, 15 bp, Homo sapiens
atctttctctttcta

SEQ ID NO: 1516637 - DNA, 15 bp, Homo sapiens
aatctttctctttct

SEQ ID NO: 1516638 - DNA, 15 bp, Homo sapiens
gaatctttctctttc

SEQ ID NO: 1516639 - DNA, 15 bp, Homo sapiens
agaatctttctcttt

SEQ ID NO: 1516640 - DNA, 15 bp, Homo sapiens
aagaatctttctctt

SEQ ID NO: 1516641 - DNA, 15 bp, Homo sapiens
aaagaatctttctct

SEQ ID NO: 1516642 - DNA, 15 bp, Homo sapiens
aaaagaatctttctc

SEQ ID NO: 1516643 - DNA, 15 bp, Homo sapiens
aaaaagaatctttct

SEQ ID NO: 1516644 - DNA, 15 bp, Homo sapiens
aaaaaagaatctttc

SEQ ID NO: 1516645 - DNA, 15 bp, Homo sapiens
aaaaaaagaatcttt

SEQ ID NO: 1516646 - DNA, 15 bp, Homo sapiens
gaaaaaaagaatctt

SEQ ID NO: 1516647 - DNA, 15 bp, Homo sapiens
tgaaaaaaagaatct

SEQ ID NO: 1516648 - DNA, 15 bp, Homo sapiens
ttgaaaaaaagaatc

SEQ ID NO: 1516649 - DNA, 15 bp, Homo sapiens
tttgaaaaaaagaat

SEQ ID NO: 1516650 - DNA, 15 bp, Homo sapiens
ttttgaaaaaaagaa

SEQ ID NO: 1516651 - DNA, 15 bp, Homo sapiens
tttttgaaaaaaaga

SEQ ID NO: 1516652 - DNA, 15 bp, Homo sapiens
ttttttgaaaaaaag

SEQ ID NO: 1516653 - DNA, 15 bp, Homo sapiens
atttttttgaaaaaa

SEQ ID NO: 1516654 - DNA, 15 bp, Homo sapiens
tatttttttgaaaaa

SEQ ID NO: 1516655 - DNA, 15 bp, Homo sapiens
gtatttttttgaaaa

SEQ ID NO: 1516656 - DNA, 15 bp, Homo sapiens
tgtatttttttgaaa

SEQ ID NO: 1516657 - DNA, 15 bp, Homo sapiens
ttgtatttttttgaa

SEQ ID NO: 1516658 - DNA, 15 bp, Homo sapiens
tttgtatttttttga

SEQ ID NO: 1516659 - DNA, 15 bp, Homo sapiens
gtttgtatttttttg

SEQ ID NO: 1516660 - DNA, 15 bp, Homo sapiens
tgtttgtattttttt

SEQ ID NO: 1516661 - DNA, 15 bp, Homo sapiens
ttgtttgtatttttt

SEQ ID NO: 1516662 - DNA, 15 bp, Homo sapiens
tttgtttgtattttt

SEQ ID NO: 1516663 - DNA, 15 bp, Homo sapiens
ttttgtttgtatttt

SEQ ID NO: 1516664 - DNA, 15 bp, Homo sapiens
cttttgtttgtattt

SEQ ID NO: 1516665 - DNA, 15 bp, Homo sapiens
ccttttgtttgtatt

SEQ ID NO: 1516666 - DNA, 15 bp, Homo sapiens
accttttgtttgtat

SEQ ID NO: 1516667 - DNA, 15 bp, Homo sapiens
aaccttttgtttgta

SEQ ID NO: 1516668 - DNA, 15 bp, Homo sapiens
taaccttttgtttgt

SEQ ID NO: 1516669 - DNA, 15 bp, Homo sapiens
ttaaccttttgtttg

SEQ ID NO: 1516670 - DNA, 15 bp, Homo sapiens
cttaaccttttgttt

SEQ ID NO: 1516671 - DNA, 15 bp, Homo sapiens
acttaaccttttgtt

SEQ ID NO: 1516672 - DNA, 15 bp, Homo sapiens
gacttaaccttttgt

SEQ ID NO: 1516673 - DNA, 15 bp, Homo sapiens
tgacttaaccttttg

SEQ ID NO: 1516674 - DNA, 15 bp, Homo sapiens
atgacttaacctttt

SEQ ID NO: 1516675 - DNA, 15 bp, Homo sapiens
tatgacttaaccttt

SEQ ID NO: 1516676 - DNA, 15 bp, Homo sapiens
atatgacttaacctt

SEQ ID NO: 1516677 - DNA, 15 bp, Homo sapiens
aatatgacttaacct

SEQ ID NO: 1516678 - DNA, 15 bp, Homo sapiens
taatatgacttaacc

SEQ ID NO: 1516679 - DNA, 15 bp, Homo sapiens
ttaatatgacttaac

SEQ ID NO: 1516680 - DNA, 15 bp, Homo sapiens
tttaatatgacttaa

SEQ ID NO: 1516681 - DNA, 15 bp, Homo sapiens
atttaatatgactta

SEQ ID NO: 1516682 - DNA, 15 bp, Homo sapiens
tatttaatatgactt

SEQ ID NO: 1516683 - DNA, 15 bp, Homo sapiens
ttatttaatatgact

SEQ ID NO: 1516684 - DNA, 15 bp, Homo sapiens
attatttaatatgac

SEQ ID NO: 1516685 - DNA, 15 bp, Homo sapiens
gattatttaatatga

SEQ ID NO: 1516686 - DNA, 15 bp, Homo sapiens
tgattatttaatatg

SEQ ID NO: 1516687 - DNA, 15 bp, Homo sapiens
ttgattatttaatat

SEQ ID NO: 1516688 - DNA, 15 bp, Homo sapiens
gttgattatttaata

SEQ ID NO: 1516689 - DNA, 15 bp, Homo sapiens
tgttgattatttaat

SEQ ID NO: 1516690 - DNA, 15 bp, Homo sapiens
ttgttgattatttaa

SEQ ID NO: 1516691 - DNA, 15 bp, Homo sapiens
tttgttgattattta

SEQ ID NO: 1516692 - DNA, 15 bp, Homo sapiens
gtttgttgattattt

SEQ ID NO: 1516693 - DNA, 15 bp, Homo sapiens
ggtttgttgattatt

SEQ ID NO: 1516694 - DNA, 15 bp, Homo sapiens
aggtttgttgattat

SEQ ID NO: 1516695 - DNA, 15 bp, Homo sapiens
taggtttgttgatta

SEQ ID NO: 1516696 - DNA, 15 bp, Homo sapiens
gtaggtttgttgatt

SEQ ID NO: 1516697 - DNA, 15 bp, Homo sapiens
ggtaggtttgttgat

SEQ ID NO: 1516698 - DNA, 15 bp, Homo sapiens
aggtaggtttgttga

SEQ ID NO: 1516699 - DNA, 15 bp, Homo sapiens
taggtaggtttgttg

SEQ ID NO: 1516700 - DNA, 15 bp, Homo sapiens
ctaggtaggtttgtt

SEQ ID NO: 1516701 - DNA, 15 bp, Homo sapiens
cctaggtaggtttgt

SEQ ID NO: 1516702 - DNA, 15 bp, Homo sapiens
acctaggtaggtttg

SEQ ID NO: 1516703 - DNA, 15 bp, Homo sapiens
aacctaggtaggttt

SEQ ID NO: 1516704 - DNA, 15 bp, Homo sapiens
gaacctaggtaggtt

SEQ ID NO: 1516705 - DNA, 15 bp, Homo sapiens
ggaacctaggtaggt

SEQ ID NO: 1516706 - DNA, 15 bp, Homo sapiens
tggaacctaggtagg

SEQ ID NO: 1516707 - DNA, 15 bp, Homo sapiens
ctggaacctaggtag

SEQ ID NO: 1516708 - DNA, 15 bp, Homo sapiens
actggaacctaggta

SEQ ID NO: 1516709 - DNA, 15 bp, Homo sapiens
cactggaacctaggt

SEQ ID NO: 1516710 - DNA, 15 bp, Homo sapiens
ccactggaacctagg

SEQ ID NO: 1516711 - DNA, 15 bp, Homo sapiens
accactggaacctag

SEQ ID NO: 1516712 - DNA, 15 bp, Homo sapiens
gaccactggaaccta

SEQ ID NO: 1516713 - DNA, 15 bp, Homo sapiens
tgaccactggaacct

SEQ ID NO: 1516714 - DNA, 15 bp, Homo sapiens
atgaccactggaacc

SEQ ID NO: 1516715 - DNA, 15 bp, Homo sapiens
aatgaccactggaac

SEQ ID NO: 1516716 - DNA, 15 bp, Homo sapiens
taatgaccactggaa

SEQ ID NO: 1516717 - DNA, 15 bp, Homo sapiens
ataatgaccactgga

SEQ ID NO: 1516718 - DNA, 15 bp, Homo sapiens
aataatgaccactgg

SEQ ID NO: 1516719 - DNA, 15 bp, Homo sapiens
taataatgaccactg

SEQ ID NO: 1516720 - DNA, 15 bp, Homo sapiens
ataataatgaccact

SEQ ID NO: 1516721 - DNA, 15 bp, Homo sapiens
aataataatgaccac

SEQ ID NO: 1516722 - DNA, 15 bp, Homo sapiens
taataataatgacca

SEQ ID NO: 1516723 - DNA, 15 bp, Homo sapiens
ataataataatgacc

SEQ ID NO: 1516724 - DNA, 15 bp, Homo sapiens
aataataataatgac

SEQ ID NO: 1516725 - DNA, 15 bp, Homo sapiens
aaataataataatga

SEQ ID NO: 1516726 - DNA, 15 bp, Homo sapiens
aaaataataataatg

SEQ ID NO: 1516727 - DNA, 15 bp, Homo sapiens
caaaaaaataataat

SEQ ID NO: 1516728 - DNA, 15 bp, Homo sapiens
acaaaaaaataataa

SEQ ID NO: 1516729 - DNA, 15 bp, Homo sapiens
gacaaaaaaataata

SEQ ID NO: 1516730 - DNA, 15 bp, Homo sapiens
tgacaaaaaaataat

SEQ ID NO: 1516731 - DNA, 15 bp, Homo sapiens
ctgacaaaaaaataa

SEQ ID NO: 1516732 - DNA, 15 bp, Homo sapiens
cctgacaaaaaaata

SEQ ID NO: 1516733 - DNA, 15 bp, Homo sapiens
acctgacaaaaaaat

SEQ ID NO: 1516734 - DNA, 15 bp, Homo sapiens
aacctgacaaaaaaa

SEQ ID NO: 1516735 - DNA, 15 bp, Homo sapiens
taacctgacaaaaaa

SEQ ID NO: 1516736 - DNA, 15 bp, Homo sapiens
ttaacctgacaaaaa

SEQ ID NO: 1516737 - DNA, 15 bp, Homo sapiens
cttaacctgacaaaa

SEQ ID NO: 1516738 - DNA, 15 bp, Homo sapiens
tcttaacctgacaaa

SEQ ID NO: 1516739 - DNA, 15 bp, Homo sapiens
ttcttaacctgacaa

SEQ ID NO: 1516740 - DNA, 15 bp, Homo sapiens
tttcttaacctgaca

SEQ ID NO: 1516741 - DNA, 15 bp, Homo sapiens
atttcttaacctgac

SEQ ID NO: 1516742 - DNA, 15 bp, Homo sapiens
gatttcttaacctga

SEQ ID NO: 1516743 - DNA, 15 bp, Homo sapiens
tgatttcttaacctg

SEQ ID NO: 1516744 - DNA, 15 bp, Homo sapiens
tgtgatttcttaacc

SEQ ID NO: 1516745 - DNA, 15 bp, Homo sapiens
ctgtgatttcttaac

SEQ ID NO: 1516746 - DNA, 15 bp, Homo sapiens
tctgtgatttcttaa

SEQ ID NO: 1516747 - DNA, 15 bp, Homo sapiens
atctgtgatttctta

SEQ ID NO: 1516748 - DNA, 15 bp, Homo sapiens
aatctgtgatttctt

SEQ ID NO: 1516749 - DNA, 15 bp, Homo sapiens
aaatctgtgatttct

SEQ ID NO: 1516750 - DNA, 15 bp, Homo sapiens
caaatctgtgatttc

SEQ ID NO: 1516751 - DNA, 15 bp, Homo sapiens
gcaaatctgtgattt

SEQ ID NO: 1516752 - DNA, 15 bp, Homo sapiens
agcaaatctgtgatt

SEQ ID NO: 1516753 - DNA, 15 bp, Homo sapiens
gagcaaatctgtgat

SEQ ID NO: 1516754 - DNA, 15 bp, Homo sapiens
agagcaaatctgtga

SEQ ID NO: 1516755 - DNA, 15 bp, Homo sapiens
aagagcaaatctgtg

SEQ ID NO: 1516756 - DNA, 15 bp, Homo sapiens
aaagagcaaatctgt

SEQ ID NO: 1516757 - DNA, 15 bp, Homo sapiens
caaagagcaaatctg

SEQ ID NO: 1516758 - DNA, 15 bp, Homo sapiens
ccaaagagcaaatct

SEQ ID NO: 1516759 - DNA, 15 bp, Homo sapiens
cccaaagagcaaatc

SEQ ID NO: 1516760 - DNA, 15 bp, Homo sapiens
acccaaagagcaaat

SEQ ID NO: 1516761 - DNA, 15 bp, Homo sapiens
aacccaaagagcaaa

SEQ ID NO: 1516762 - DNA, 15 bp, Homo sapiens
aaacccaaagagcaa

SEQ ID NO: 1516763 - DNA, 15 bp, Homo sapiens
aaaacccaaagagca

SEQ ID NO: 1516764 - DNA, 15 bp, Homo sapiens
aaaaacccaaagagc

SEQ ID NO: 1516765 - DNA, 15 bp, Homo sapiens
taaaaacccaaagag

SEQ ID NO: 1516766 - DNA, 15 bp, Homo sapiens
ataaaaacccaaaga

SEQ ID NO: 1516767 - DNA, 15 bp, Homo sapiens
cataaaaacccaaag

SEQ ID NO: 1516768 - DNA, 15 bp, Homo sapiens
ccataaaaacccaaa

SEQ ID NO: 1516769 - DNA, 15 bp, Homo sapiens
gccataaaaacccaa

SEQ ID NO: 1516770 - DNA, 15 bp, Homo sapiens
agccataaaaaccca

SEQ ID NO: 1516771 - DNA, 15 bp, Homo sapiens
aagccataaaaaccc

SEQ ID NO: 1516772 - DNA, 15 bp, Homo sapiens
caagccataaaaacc

SEQ ID NO: 1516773 - DNA, 15 bp, Homo sapiens
gcaagccataaaaac

SEQ ID NO: 1516774 - DNA, 15 bp, Homo sapiens
tgcaagccataaaaa

SEQ ID NO: 1516775 - DNA, 15 bp, Homo sapiens
ctgcaagccataaaa

SEQ ID NO: 1516776 - DNA, 15 bp, Homo sapiens
tctgcaagccataaa

SEQ ID NO: 1516777 - DNA, 15 bp, Homo sapiens
atctgcaagccataa

SEQ ID NO: 1516778 - DNA, 15 bp, Homo sapiens
aatctgcaagccata

SEQ ID NO: 1516779 - DNA, 15 bp, Homo sapiens
caatctgcaagccat

SEQ ID NO: 1516780 - DNA, 15 bp, Homo sapiens
acaatctgcaagcca

SEQ ID NO: 1516781 - DNA, 15 bp, Homo sapiens
aacaatctgcaagcc

SEQ ID NO: 1516782 - DNA, 15 bp, Homo sapiens
taacaatctgcaagc

SEQ ID NO: 1516783 - DNA, 15 bp, Homo sapiens
ataacaatctgcaag

SEQ ID NO: 1516784 - DNA, 15 bp, Homo sapiens
tataacaatctgcaa

SEQ ID NO: 1516785 - DNA, 15 bp, Homo sapiens
ctataacaatctgca

SEQ ID NO: 1516786 - DNA, 15 bp, Homo sapiens
atctataacaatctg

SEQ ID NO: 1516787 - DNA, 15 bp, Homo sapiens
gatctataacaatct

SEQ ID NO: 1516788 - DNA, 15 bp, Homo sapiens
ggatctataacaatc

SEQ ID NO: 1516789 - DNA, 15 bp, Homo sapiens
tggatctataacaat

SEQ ID NO: 1516790 - DNA, 15 bp, Homo sapiens
ttggatctataacaa

SEQ ID NO: 1516791 - DNA, 15 bp, Homo sapiens
tttggatctataaca

SEQ ID NO: 1516792 - DNA, 15 bp, Homo sapiens
ctttggatctataac

SEQ ID NO: 1516793 - DNA, 15 bp, Homo sapiens
tctttggatctataa

SEQ ID NO: 1516794 - DNA, 15 bp, Homo sapiens
ttctttggatctata

SEQ ID NO: 1516795 - DNA, 15 bp, Homo sapiens
cttctttggatctat

SEQ ID NO: 1516796 - DNA, 15 bp, Homo sapiens
acttctttggatcta

SEQ ID NO: 1516797 - DNA, 15 bp, Homo sapiens
aacttctttggatct

SEQ ID NO: 1516798 - DNA, 15 bp, Homo sapiens
gaacttctttggatc

SEQ ID NO: 1516799 - DNA, 15 bp, Homo sapiens
tgaacttctttggat

SEQ ID NO: 1516800 - DNA, 15 bp, Homo sapiens
ctgaacttctttgga

SEQ ID NO: 1516801 - DNA, 15 bp, Homo sapiens
tctgaacttctttgg

SEQ ID NO: 1516802 - DNA, 15 bp, Homo sapiens
atctgaacttctttg

SEQ ID NO: 1516803 - DNA, 15 bp, Homo sapiens
aatctgaacttcttt

SEQ ID NO: 1516804 - DNA, 15 bp, Homo sapiens
taatctgaacttctt

SEQ ID NO: 1516805 - DNA, 15 bp, Homo sapiens
ctaatctgaacttct

SEQ ID NO: 1516806 - DNA, 15 bp, Homo sapiens
gctaatctgaacttc

SEQ ID NO: 1516807 - DNA, 15 bp, Homo sapiens
cgctaatctgaactt

SEQ ID NO: 1516808 - DNA, 15 bp, Homo sapiens
acgctaatctgaact

SEQ ID NO: 1516809 - DNA, 15 bp, Homo sapiens
aacgctaatctgaac

SEQ ID NO: 1516810 - DNA, 15 bp, Homo sapiens
caacgctaatctgaa

SEQ ID NO: 1516811 - DNA, 15 bp, Homo sapiens
ccaacgctaatctga

SEQ ID NO: 1516812 - DNA, 15 bp, Homo sapiens
gccaacgctaatctg

SEQ ID NO: 1516813 - DNA, 15 bp, Homo sapiens
tgccaacgctaatct

SEQ ID NO: 1516814 - DNA, 15 bp, Homo sapiens
atgccaacgctaatc

SEQ ID NO: 1516815 - DNA, 15 bp, Homo sapiens
aatgccaacgctaat

SEQ ID NO: 1516816 - DNA, 15 bp, Homo sapiens
aaatgccaacgctaa

SEQ ID NO: 1516817 - DNA, 15 bp, Homo sapiens
caaatgccaacgcta

SEQ ID NO: 1516818 - DNA, 15 bp, Homo sapiens
tcaaatgccaacgct

SEQ ID NO: 1516819 - DNA, 15 bp, Homo sapiens
gtcaaatgccaacgc

SEQ ID NO: 1516820 - DNA, 15 bp, Homo sapiens
agtcaaatgccaacg

SEQ ID NO: 1516821 - DNA, 15 bp, Homo sapiens
gagtcaaatgccaac

SEQ ID NO: 1516822 - DNA, 15 bp, Homo sapiens
agagtcaaatgccaa

SEQ ID NO: 1516823 - DNA, 15 bp, Homo sapiens
cagagtcaaatgcca

SEQ ID NO: 1516824 - DNA, 15 bp, Homo sapiens
tcagagtcaaatgcc

SEQ ID NO: 1516825 - DNA, 15 bp, Homo sapiens
ttcagagtcaaatgc

SEQ ID NO: 1516826 - DNA, 15 bp, Homo sapiens
cttcagagtcaaatg

SEQ ID NO: 1516827 - DNA, 15 bp, Homo sapiens
tcttcagagtcaaat

SEQ ID NO: 1516828 - DNA, 15 bp, Homo sapiens
ttcttcagagtcaaa

SEQ ID NO: 1516829 - DNA, 15 bp, Homo sapiens
gttcttcagagtcaa

SEQ ID NO: 1516830 - DNA, 15 bp, Homo sapiens
tgttcttcagagtca

SEQ ID NO: 1516831 - DNA, 15 bp, Homo sapiens
ctgttcttcagagtc

SEQ ID NO: 1516832 - DNA, 15 bp, Homo sapiens
gctgttcttcagagt

SEQ ID NO: 1516833 - DNA, 15 bp, Homo sapiens
ggctgttcttcagag

SEQ ID NO: 1516834 - DNA, 15 bp, Homo sapiens
tggctgttcttcaga

SEQ ID NO: 1516835 - DNA, 15 bp, Homo sapiens
ttggctgttcttcag

SEQ ID NO: 1516836 - DNA, 15 bp, Homo sapiens
attggctgttcttca

SEQ ID NO: 1516837 - DNA, 15 bp, Homo sapiens
aattggctgttcttc

SEQ ID NO: 1516838 - DNA, 15 bp, Homo sapiens
gaattggctgttctt

SEQ ID NO: 1516839 - DNA, 15 bp, Homo sapiens
cgaattggctgttct

SEQ ID NO: 1516840 - DNA, 15 bp, Homo sapiens
acgaattggctgttc

SEQ ID NO: 1516841 - DNA, 15 bp, Homo sapiens
tacgaattggctgtt

SEQ ID NO: 1516842 - DNA, 15 bp, Homo sapiens
ctacgaattggctgt

SEQ ID NO: 1516843 - DNA, 15 bp, Homo sapiens
cctacgaattggctg

SEQ ID NO: 1516844 - DNA, 15 bp, Homo sapiens
tcctacgaattggct

SEQ ID NO: 1516845 - DNA, 15 bp, Homo sapiens
ttcctacgaattggc

SEQ ID NO: 1516846 - DNA, 15 bp, Homo sapiens
attcctacgaattgg

SEQ ID NO: 1516847 - DNA, 15 bp, Homo sapiens
aattcctacgaattg

SEQ ID NO: 1516848 - DNA, 15 bp, Homo sapiens
gaattcctacgaatt

SEQ ID NO: 1516849 - DNA, 15 bp, Homo sapiens
tgaattcctacgaat

SEQ ID NO: 1516850 - DNA, 15 bp, Homo sapiens
ctgaattcctacgaa

SEQ ID NO: 1516851 - DNA, 15 bp, Homo sapiens
actgaattcctacga

SEQ ID NO: 1516852 - DNA, 15 bp, Homo sapiens
tactgaattcctacg

SEQ ID NO: 1516853 - DNA, 15 bp, Homo sapiens
ttactgaattcctac

SEQ ID NO: 1516854 - DNA, 15 bp, Homo sapiens
attactgaattccta

SEQ ID NO: 1516855 - DNA, 15 bp, Homo sapiens
aattactgaattcct

SEQ ID NO: 1516856 - DNA, 15 bp, Homo sapiens
taattactgaattcc

SEQ ID NO: 1516857 - DNA, 15 bp, Homo sapiens
ttaattactgaattc

SEQ ID NO: 1516858 - DNA, 15 bp, Homo sapiens
tttaattactgaatt

SEQ ID NO: 1516859 - DNA, 15 bp, Homo sapiens
ttttaattactgaat

SEQ ID NO: 1516860 - DNA, 15 bp, Homo sapiens
attttaattactgaa

SEQ ID NO: 1516861 - DNA, 15 bp, Homo sapiens
tattttaattactga

SEQ ID NO: 1516862 - DNA, 15 bp, Homo sapiens
atattttaattactg

SEQ ID NO: 1516863 - DNA, 15 bp, Homo sapiens
aatattttaattact

SEQ ID NO: 1516864 - DNA, 15 bp, Homo sapiens
caatattttaattac

SEQ ID NO: 1516865 - DNA, 15 bp, Homo sapiens
acaatattttaatta

SEQ ID NO: 1516866 - DNA, 15 bp, Homo sapiens
gacaatattttaatt

SEQ ID NO: 1516867 - DNA, 15 bp, Homo sapiens
tgacaatattttaat

SEQ ID NO: 1516868 - DNA, 15 bp, Homo sapiens
ctgacaatattttaa

SEQ ID NO: 1516869 - DNA, 15 bp, Homo sapiens
actgacaatatttta

SEQ ID NO: 1516870 - DNA, 15 bp, Homo sapiens
cactgacaatatttt

SEQ ID NO: 1516871 - DNA, 15 bp, Homo sapiens
acactgacaatattt

SEQ ID NO: 1516872 - DNA, 15 bp, Homo sapiens
aacactgacaatatt

SEQ ID NO: 1516873 - DNA, 15 bp, Homo sapiens
aaacactgacaatat

SEQ ID NO: 1516874 - DNA, 15 bp, Homo sapiens
aaaacactgacaata

SEQ ID NO: 1516875 - DNA, 15 bp, Homo sapiens
taaaacactgacaat

SEQ ID NO: 1516876 - DNA, 15 bp, Homo sapiens
ttaaaacactgacaa

SEQ ID NO: 1516877 - DNA, 15 bp, Homo sapiens
attaaaacactgaca

SEQ ID NO: 1516878 - DNA, 15 bp, Homo sapiens
aattaaaacactgac

SEQ ID NO: 1516879 - DNA, 15 bp, Homo sapiens
gaattaaaacactga

SEQ ID NO: 1516880 - DNA, 15 bp, Homo sapiens
agaattaaaacactg

SEQ ID NO: 1516881 - DNA, 15 bp, Homo sapiens
tagaattaaaacact

SEQ ID NO: 1516882 - DNA, 15 bp, Homo sapiens
atagaattaaaacac

SEQ ID NO: 1516883 - DNA, 15 bp, Homo sapiens
catagaattaaaaca

SEQ ID NO: 1516884 - DNA, 15 bp, Homo sapiens
tcatagaattaaaac

SEQ ID NO: 1516885 - DNA, 15 bp, Homo sapiens
atcatagaattaaaa

SEQ ID NO: 1516886 - DNA, 15 bp, Homo sapiens
tatcatagaattaaa

SEQ ID NO: 1516887 - DNA, 15 bp, Homo sapiens
ttatcatagaattaa

SEQ ID NO: 1516888 - DNA, 15 bp, Homo sapiens
tttatcatagaatta

SEQ ID NO: 1516889 - DNA, 15 bp, Homo sapiens
gtttatcatagaatt

SEQ ID NO: 1516890 - DNA, 15 bp, Homo sapiens
agtttatcatagaat

SEQ ID NO: 1516891 - DNA, 15 bp, Homo sapiens
gagtttatcatagaa

SEQ ID NO: 1516892 - DNA, 15 bp, Homo sapiens
tgagtttatcataga

SEQ ID NO: 1516893 - DNA, 15 bp, Homo sapiens
atgagtttatcatag

SEQ ID NO: 1516894 - DNA, 15 bp, Homo sapiens
aatgagtttatcata

SEQ ID NO: 1516895 - DNA, 15 bp, Homo sapiens
gaatgagtttatcat

SEQ ID NO: 1516896 - DNA, 15 bp, Homo sapiens
cgaatgagtttatca

SEQ ID NO: 1516897 - DNA, 15 bp, Homo sapiens
acgaatgagtttatc

SEQ ID NO: 1516898 - DNA, 15 bp, Homo sapiens
cacgaatgagtttat

SEQ ID NO: 1516899 - DNA, 15 bp, Homo sapiens
tcacgaatgagttta

SEQ ID NO: 1516900 - DNA, 15 bp, Homo sapiens
atcacgaatgagttt

SEQ ID NO: 1516901 - DNA, 15 bp, Homo sapiens
tatcacgaatgagtt

SEQ ID NO: 1516902 - DNA, 15 bp, Homo sapiens
gtatcacgaatgagt

SEQ ID NO: 1516903 - DNA, 15 bp, Homo sapiens
agtatcacgaatgag

SEQ ID NO: 1516904 - DNA, 15 bp, Homo sapiens
gagtatcacgaatga

SEQ ID NO: 1516905 - DNA, 15 bp, Homo sapiens
agagtatcacgaatg

SEQ ID NO: 1516906 - DNA, 15 bp, Homo sapiens
aagagtatcacgaat

SEQ ID NO: 1516907 - DNA, 15 bp, Homo sapiens
taagagtatcacgaa

SEQ ID NO: 1516908 - DNA, 15 bp, Homo sapiens
ttaagagtatcacga

SEQ ID NO: 1516909 - DNA, 15 bp, Homo sapiens
cttaagagtatcacg

SEQ ID NO: 1516910 - DNA, 15 bp, Homo sapiens
acttaagagtatcac

SEQ ID NO: 1516911 - DNA, 15 bp, Homo sapiens
tacttaagagtatca

SEQ ID NO: 1516912 - DNA, 15 bp, Homo sapiens
atacttaagagtatc

SEQ ID NO: 1516913 - DNA, 15 bp, Homo sapiens
tatacttaagagtat

SEQ ID NO: 1516914 - DNA, 15 bp, Homo sapiens
atatacttaagagta

SEQ ID NO: 1516915 - DNA, 15 bp, Homo sapiens
catatacttaagagt

SEQ ID NO: 1516916 - DNA, 15 bp, Homo sapiens
gcatatacttaagag

SEQ ID NO: 1516917 - DNA, 15 bp, Homo sapiens
tgcatatacttaaga

SEQ ID NO: 1516918 - DNA, 15 bp, Homo sapiens
ttgcatatacttaag

SEQ ID NO: 1516919 - DNA, 15 bp, Homo sapiens
tttgcatatacttaa

SEQ ID NO: 1516920 - DNA, 15 bp, Homo sapiens
atttgcatatactta

SEQ ID NO: 1516921 - DNA, 15 bp, Homo sapiens
tatttgcatatactt

SEQ ID NO: 1516922 - DNA, 15 bp, Homo sapiens
ttatttgcatatact

SEQ ID NO: 1516923 - DNA, 15 bp, Homo sapiens
tttatttgcatatac

SEQ ID NO: 1516924 - DNA, 15 bp, Homo sapiens
ctttatttgcatata

SEQ ID NO: 1516925 - DNA, 15 bp, Homo sapiens
gctttatttgcatat

SEQ ID NO: 1516926 - DNA, 15 bp, Homo sapiens
agctttatttgcata

SEQ ID NO: 1516927 - DNA, 15 bp, Homo sapiens
aagctttatttgcat

SEQ ID NO: 1516928 - DNA, 15 bp, Homo sapiens
aaagctttatttgca

SEQ ID NO: 1516929 - DNA, 15 bp, Homo sapiens
taaagctttatttgc

SEQ ID NO: 1516930 - DNA, 15 bp, Homo sapiens
ataaagctttatttg

SEQ ID NO: 1516931 - DNA, 15 bp, Homo sapiens
tataaagctttattt

SEQ ID NO: 1516932 - DNA, 15 bp, Homo sapiens
atataaagctttatt

SEQ ID NO: 1516933 - DNA, 15 bp, Homo sapiens
tatataaagctttat

SEQ ID NO: 1516934 - DNA, 15 bp, Homo sapiens
ctatataaagcttta

SEQ ID NO: 1516935 - DNA, 15 bp, Homo sapiens
tctatataaagcttt

SEQ ID NO: 1516936 - DNA, 15 bp, Homo sapiens
ttctatataaagctt

SEQ ID NO: 1516937 - DNA, 15 bp, Homo sapiens
tttctatataaagct

SEQ ID NO: 1516938 - DNA, 15 bp, Homo sapiens
ttttctatataaagc

SEQ ID NO: 1516939 - DNA, 15 bp, Homo sapiens
attttctatataaag

SEQ ID NO: 1516940 - DNA, 15 bp, Homo sapiens
tattttctatataaa

SEQ ID NO: 1516941 - DNA, 15 bp, Homo sapiens
gtattttctatataa

SEQ ID NO: 1516942 - DNA, 15 bp, Homo sapiens
ggtattttctatata

SEQ ID NO: 1516943 - DNA, 15 bp, Homo sapiens
cggtattttctatat

SEQ ID NO: 1516944 - DNA, 15 bp, Homo sapiens
ccggtattttctata

SEQ ID NO: 1516945 - DNA, 15 bp, Homo sapiens
gccggtattttctat

SEQ ID NO: 1516946 - DNA, 15 bp, Homo sapiens
ggccggtattttcta

SEQ ID NO: 1516947 - DNA, 15 bp, Homo sapiens
aggccggtattttct

SEQ ID NO: 1516948 - DNA, 15 bp, Homo sapiens
caggccggtattttc

SEQ ID NO: 1516949 - DNA, 15 bp, Homo sapiens
ccaggccggtatttt

SEQ ID NO: 1516950 - DNA, 15 bp, Homo sapiens
gccaggccggtattt

SEQ ID NO: 1516951 - DNA, 15 bp, Homo sapiens
tgccaggccggtatt

SEQ ID NO: 1516952 - DNA, 15 bp, Homo sapiens
gtgccaggccggtat

SEQ ID NO: 1516953 - DNA, 15 bp, Homo sapiens
tgtgccaggccggta

SEQ ID NO: 1516954 - DNA, 15 bp, Homo sapiens
ctgtgccaggccggt

SEQ ID NO: 1516955 - DNA, 15 bp, Homo sapiens
actgtgccaggccgg

SEQ ID NO: 1516956 - DNA, 15 bp, Homo sapiens
cactgtgccaggccg

SEQ ID NO: 1516957 - DNA, 15 bp, Homo sapiens
ccactgtgccaggcc

SEQ ID NO: 1516958 - DNA, 15 bp, Homo sapiens
tccactgtgccaggc

SEQ ID NO: 1516959 - DNA, 15 bp, Homo sapiens
atccactgtgccagg

SEQ ID NO: 1516960 - DNA, 15 bp, Homo sapiens
aatccactgtgccag

SEQ ID NO: 1516961 - DNA, 15 bp, Homo sapiens
taatccactgtgcca

SEQ ID NO: 1516962 - DNA, 15 bp, Homo sapiens
gtaatccactgtgcc

SEQ ID NO: 1516963 - DNA, 15 bp, Homo sapiens
tgtaatccactgtgc

SEQ ID NO: 1516964 - DNA, 15 bp, Homo sapiens
gtgtaatccactgtg

SEQ ID NO: 1516965 - DNA, 15 bp, Homo sapiens
ggtgtaatccactgt

SEQ ID NO: 1516966 - DNA, 15 bp, Homo sapiens
aggtgtaatccactg

SEQ ID NO: 1516967 - DNA, 15 bp, Homo sapiens
taggtgtaatccact

SEQ ID NO: 1516968 - DNA, 15 bp, Homo sapiens
ataggtgtaatccac

SEQ ID NO: 1516969 - DNA, 15 bp, Homo sapiens
tataggtgtaatcca

SEQ ID NO: 1516970 - DNA, 15 bp, Homo sapiens
ttataggtgtaatcc

SEQ ID NO: 1516971 - DNA, 15 bp, Homo sapiens
attataggtgtaatc

SEQ ID NO: 1516972 - DNA, 15 bp, Homo sapiens
gattataggtgtaat

SEQ ID NO: 1516973 - DNA, 15 bp, Homo sapiens
agattataggtgtaa

SEQ ID NO: 1516974 - DNA, 15 bp, Homo sapiens
gagattataggtgta

SEQ ID NO: 1516975 - DNA, 15 bp, Homo sapiens
tgagattataggtgt

SEQ ID NO: 1516976 - DNA, 15 bp, Homo sapiens
ctgagattataggtg

SEQ ID NO: 1516977 - DNA, 15 bp, Homo sapiens
gctgagattataggt

SEQ ID NO: 1516978 - DNA, 15 bp, Homo sapiens
tgctgagattatagg

SEQ ID NO: 1516979 - DNA, 15 bp, Homo sapiens
gtgctgagattatag

SEQ ID NO: 1516980 - DNA, 15 bp, Homo sapiens
agtgctgagattata

SEQ ID NO: 1516981 - DNA, 15 bp, Homo sapiens
aagtgctgagattat

SEQ ID NO: 1516982 - DNA, 15 bp, Homo sapiens
acccaaagtgctgag

SEQ ID NO: 1516983 - DNA, 15 bp, Homo sapiens
cacccaaagtgctga

SEQ ID NO: 1516984 - DNA, 15 bp, Homo sapiens
ccacccaaagtgctg

SEQ ID NO: 1516985 - DNA, 15 bp, Homo sapiens
gccacccaaagtgct

SEQ ID NO: 1516986 - DNA, 15 bp, Homo sapiens
agccacccaaagtgc

SEQ ID NO: 1516987 - DNA, 15 bp, Homo sapiens
cagccacccaaagtg

SEQ ID NO: 1516988 - DNA, 15 bp, Homo sapiens
tcagccacccaaagt

SEQ ID NO: 1516989 - DNA, 15 bp, Homo sapiens
ctcagccacccaaag

SEQ ID NO: 1516990 - DNA, 15 bp, Homo sapiens
cctcagccacccaaa

SEQ ID NO: 1516991 - DNA, 15 bp, Homo sapiens
gcctcagccacccaa

SEQ ID NO: 1516992 - DNA, 15 bp, Homo sapiens
tgcctcagccaccca

SEQ ID NO: 1516993 - DNA, 15 bp, Homo sapiens
ctgcctcagccaccc

SEQ ID NO: 1516994 - DNA, 15 bp, Homo sapiens
cctgcctcagccacc

SEQ ID NO: 1516995 - DNA, 15 bp, Homo sapiens
gcctgcctcagccac

SEQ ID NO: 1516996 - DNA, 15 bp, Homo sapiens
tgcctgcctcagcca

SEQ ID NO: 1516997 - DNA, 15 bp, Homo sapiens
gatctgcctgcctca

SEQ ID NO: 1516998 - DNA, 15 bp, Homo sapiens
tgatctgcctgcctc

SEQ ID NO: 1516999 - DNA, 15 bp, Homo sapiens
ggtgatctgcctgcc

SEQ ID NO: 1517000 - DNA, 15 bp, Homo sapiens
aggtgatctgcctgc

SEQ ID NO: 1517001 - DNA, 15 bp, Homo sapiens
caggtgatctgcctg

SEQ ID NO: 1517002 - DNA, 15 bp, Homo sapiens
tcaggtgatctgcct

SEQ ID NO: 1517003 - DNA, 15 bp, Homo sapiens
atctcgaactcctga

SEQ ID NO: 1517004 - DNA, 15 bp, Homo sapiens
gatctcgaactcctg

SEQ ID NO: 1517005 - DNA, 15 bp, Homo sapiens
tgatctcgaactcct

SEQ ID NO: 1517006 - DNA, 15 bp, Homo sapiens
ctgatctcgaactcc

SEQ ID NO: 1517007 - DNA, 15 bp, Homo sapiens
cctgatctcgaactc

SEQ ID NO: 1517008 - DNA, 15 bp, Homo sapiens
gcctgatctcgaact

SEQ ID NO: 1517009 - DNA, 15 bp, Homo sapiens
agcctgatctcgaac

SEQ ID NO: 1517010 - DNA, 15 bp, Homo sapiens
cagcctgatctcgaa

SEQ ID NO: 1517011 - DNA, 15 bp, Homo sapiens
ccagcctgatctcga

SEQ ID NO: 1517012 - DNA, 15 bp, Homo sapiens
gccagcctgatctcg

SEQ ID NO: 1517013 - DNA, 15 bp, Homo sapiens
ggccagcctgatctc

SEQ ID NO: 1517014 - DNA, 15 bp, Homo sapiens
tggccagcctgatct

SEQ ID NO: 1517015 - DNA, 15 bp, Homo sapiens
ttggccagcctgatc

SEQ ID NO: 1517016 - DNA, 15 bp, Homo sapiens
gttggccagcctgat

SEQ ID NO: 1517017 - DNA, 15 bp, Homo sapiens
tgttggccagcctga

SEQ ID NO: 1517018 - DNA, 15 bp, Homo sapiens
atgttggccagcctg

SEQ ID NO: 1517019 - DNA, 15 bp, Homo sapiens
catgttggccagcct

SEQ ID NO: 1517020 - DNA, 15 bp, Homo sapiens
ccatgttggccagcc

SEQ ID NO: 1517021 - DNA, 15 bp, Homo sapiens
accatgttggccagc

SEQ ID NO: 1517022 - DNA, 15 bp, Homo sapiens
cgtagagacagggtt

SEQ ID NO: 1517023 - DNA, 15 bp, Homo sapiens
tcgtagagacagggt

SEQ ID NO: 1517024 - DNA, 15 bp, Homo sapiens
ttcgtagagacaggg

SEQ ID NO: 1517025 - DNA, 15 bp, Homo sapiens
tttcgtagagacagg

SEQ ID NO: 1517026 - DNA, 15 bp, Homo sapiens
atttttcgtagagac

SEQ ID NO: 1517027 - DNA, 15 bp, Homo sapiens
atttttgtatttttc

SEQ ID NO: 1517028 - DNA, 15 bp, Homo sapiens
ccctgccaccatgcc

SEQ ID NO: 1517029 - DNA, 15 bp, Homo sapiens
cccctgccaccatgc

SEQ ID NO: 1517030 - DNA, 15 bp, Homo sapiens
gcccctgccaccatg

SEQ ID NO: 1517031 - DNA, 15 bp, Homo sapiens
ggcccctgccaccat

SEQ ID NO: 1517032 - DNA, 15 bp, Homo sapiens
aggcccctgccacca

SEQ ID NO: 1517033 - DNA, 15 bp, Homo sapiens
caggcccctgccacc

SEQ ID NO: 1517034 - DNA, 15 bp, Homo sapiens
acaggcccctgccac

SEQ ID NO: 1517035 - DNA, 15 bp, Homo sapiens
tacaggcccctgcca

SEQ ID NO: 1517036 - DNA, 15 bp, Homo sapiens
ttacaggcccctgcc

SEQ ID NO: 1517037 - DNA, 15 bp, Homo sapiens
attacaggcccctgc

SEQ ID NO: 1517038 - DNA, 15 bp, Homo sapiens
gattacaggcccctg

SEQ ID NO: 1517039 - DNA, 15 bp, Homo sapiens
ggattacaggcccct

SEQ ID NO: 1517040 - DNA, 15 bp, Homo sapiens
gggattacaggcccc

SEQ ID NO: 1517041 - DNA, 15 bp, Homo sapiens
tgggattacaggccc

SEQ ID NO: 1517042 - DNA, 15 bp, Homo sapiens
gctcagcctcccgag

SEQ ID NO: 1517043 - DNA, 15 bp, Homo sapiens
ggctcagcctcccga

SEQ ID NO: 1517044 - DNA, 15 bp, Homo sapiens
tggctcagcctcccg

SEQ ID NO: 1517045 - DNA, 15 bp, Homo sapiens
ctggctcagcctccc

SEQ ID NO: 1517046 - DNA, 15 bp, Homo sapiens
cctggctcagcctcc

SEQ ID NO: 1517047 - DNA, 15 bp, Homo sapiens
tcctggctcagcctc

SEQ ID NO: 1517048 - DNA, 15 bp, Homo sapiens
ttcctggctcagcct

SEQ ID NO: 1517049 - DNA, 15 bp, Homo sapiens
tttcctggctcagcc

SEQ ID NO: 1517050 - DNA, 15 bp, Homo sapiens
ttttcctggctcagc

SEQ ID NO: 1517051 - DNA, 15 bp, Homo sapiens
attttcctggctcag

SEQ ID NO: 1517052 - DNA, 15 bp, Homo sapiens
gattttcctggctca

SEQ ID NO: 1517053 - DNA, 15 bp, Homo sapiens
cgattttcctggctc

SEQ ID NO: 1517054 - DNA, 15 bp, Homo sapiens
gcgattttcctggct

SEQ ID NO: 1517055 - DNA, 15 bp, Homo sapiens
agcgattttcctggc

SEQ ID NO: 1517056 - DNA, 15 bp, Homo sapiens
aagcgattttcctgg

SEQ ID NO: 1517057 - DNA, 15 bp, Homo sapiens
ggttcaagcgatttt

SEQ ID NO: 1517058 - DNA, 15 bp, Homo sapiens
gggttcaagcgattt

SEQ ID NO: 1517059 - DNA, 15 bp, Homo sapiens
atcactgcaacctct

SEQ ID NO: 1517060 - DNA, 15 bp, Homo sapiens
gatcactgcaacctc

SEQ ID NO: 1517061 - DNA, 15 bp, Homo sapiens
ggatcactgcaacct

SEQ ID NO: 1517062 - DNA, 15 bp, Homo sapiens
tggatcactgcaacc

SEQ ID NO: 1517063 - DNA, 15 bp, Homo sapiens
ttggatcactgcaac

SEQ ID NO: 1517064 - DNA, 15 bp, Homo sapiens
cttggatcactgcaa

SEQ ID NO: 1517065 - DNA, 15 bp, Homo sapiens
tcttggatcactgca

SEQ ID NO: 1517066 - DNA, 15 bp, Homo sapiens
atcttggatcactgc

SEQ ID NO: 1517067 - DNA, 15 bp, Homo sapiens
gatcttggatcactg

SEQ ID NO: 1517068 - DNA, 15 bp, Homo sapiens
cgatcttggatcact

SEQ ID NO: 1517069 - DNA, 15 bp, Homo sapiens
gcgatcttggatcac

SEQ ID NO: 1517070 - DNA, 15 bp, Homo sapiens
tgcgatcttggatca

SEQ ID NO: 1517071 - DNA, 15 bp, Homo sapiens
gtgcgatcttggatc

SEQ ID NO: 1517072 - DNA, 15 bp, Homo sapiens
tgtgcgatcttggat

SEQ ID NO: 1517073 - DNA, 15 bp, Homo sapiens
ttgtgcgatcttgga

SEQ ID NO: 1517074 - DNA, 15 bp, Homo sapiens
attgtgcgatcttgg

SEQ ID NO: 1517075 - DNA, 15 bp, Homo sapiens
aattgtgcgatcttg

SEQ ID NO: 1517076 - DNA, 15 bp, Homo sapiens
caattgtgcgatctt

SEQ ID NO: 1517077 - DNA, 15 bp, Homo sapiens
acaattgtgcgatct

SEQ ID NO: 1517078 - DNA, 15 bp, Homo sapiens
tacaattgtgcgatc

SEQ ID NO: 1517079 - DNA, 15 bp, Homo sapiens
gtacaattgtgcgat

SEQ ID NO: 1517080 - DNA, 15 bp, Homo sapiens
agtacaattgtgcga

SEQ ID NO: 1517081 - DNA, 15 bp, Homo sapiens
gagtacaattgtgcg

SEQ ID NO: 1517082 - DNA, 15 bp, Homo sapiens
ggagtacaattgtgc

SEQ ID NO: 1517083 - DNA, 15 bp, Homo sapiens
tggagtacaattgtg

SEQ ID NO: 1517084 - DNA, 15 bp, Homo sapiens
ctggagtacaattgt

SEQ ID NO: 1517085 - DNA, 15 bp, Homo sapiens
gctggagtacaattg

SEQ ID NO: 1517086 - DNA, 15 bp, Homo sapiens
ggctggagtacaatt

SEQ ID NO: 1517087 - DNA, 15 bp, Homo sapiens
ttgtggcccaggctg

SEQ ID NO: 1517088 - DNA, 15 bp, Homo sapiens
cttgtggcccaggct

SEQ ID NO: 1517089 - DNA, 15 bp, Homo sapiens
tcttgtggcccaggc

SEQ ID NO: 1517090 - DNA, 15 bp, Homo sapiens
ctcttgtggcccagg

SEQ ID NO: 1517091 - DNA, 15 bp, Homo sapiens
gctcttgtggcccag

SEQ ID NO: 1517092 - DNA, 15 bp, Homo sapiens
agctcttgtggccca

SEQ ID NO: 1517093 - DNA, 15 bp, Homo sapiens
tagctcttgtggccc

SEQ ID NO: 1517094 - DNA, 15 bp, Homo sapiens
ttagctcttgtggcc

SEQ ID NO: 1517095 - DNA, 15 bp, Homo sapiens
tttagctcttgtggc

SEQ ID NO: 1517096 - DNA, 15 bp, Homo sapiens
gtttagctcttgtgg

SEQ ID NO: 1517097 - DNA, 15 bp, Homo sapiens
agtttagctcttgtg

SEQ ID NO: 1517098 - DNA, 15 bp, Homo sapiens
gagtttagctcttgt

SEQ ID NO: 1517099 - DNA, 15 bp, Homo sapiens
ggagtttagctcttg

SEQ ID NO: 1517100 - DNA, 15 bp, Homo sapiens
tggagtttagctctt

SEQ ID NO: 1517101 - DNA, 15 bp, Homo sapiens
atggagtttagctct

SEQ ID NO: 1517102 - DNA, 15 bp, Homo sapiens
gatggagtttagctc

SEQ ID NO: 1517103 - DNA, 15 bp, Homo sapiens
agatggagtttagct

SEQ ID NO: 1517104 - DNA, 15 bp, Homo sapiens
gagatggagtttagc

SEQ ID NO: 1517105 - DNA, 15 bp, Homo sapiens
tgagatggagtttag

SEQ ID NO: 1517106 - DNA, 15 bp, Homo sapiens
ctgagatggagttta

SEQ ID NO: 1517107 - DNA, 15 bp, Homo sapiens
atttctgagatggag

SEQ ID NO: 1517108 - DNA, 15 bp, Homo sapiens
aatttctgagatgga

SEQ ID NO: 1517109 - DNA, 15 bp, Homo sapiens
taatttctgagatgg

SEQ ID NO: 1517110 - DNA, 15 bp, Homo sapiens
ttaatttctgagatg

SEQ ID NO: 1517111 - DNA, 15 bp, Homo sapiens
tttaatttctgagat

SEQ ID NO: 1517112 - DNA, 15 bp, Homo sapiens
ttttaatttctgaga

SEQ ID NO: 1517113 - DNA, 15 bp, Homo sapiens
tttttaatttctgag

SEQ ID NO: 1517114 - DNA, 15 bp, Homo sapiens
ttttttaatttctga

SEQ ID NO: 1517115 - DNA, 15 bp, Homo sapiens
tttttttaatttctg

SEQ ID NO: 1517116 - DNA, 15 bp, Homo sapiens
ttttttttaatttct

SEQ ID NO: 1517117 - DNA, 15 bp, Homo sapiens
aagtatttttttttt

SEQ ID NO: 1517118 - DNA, 15 bp, Homo sapiens
taagtattttttttt

SEQ ID NO: 1517119 - DNA, 15 bp, Homo sapiens
ttaagtatttttttt

SEQ ID NO: 1517120 - DNA, 15 bp, Homo sapiens
tttaagtattttttt

SEQ ID NO: 1517121 - DNA, 15 bp, Homo sapiens
ttttaagtatttttt

SEQ ID NO: 1517122 - DNA, 15 bp, Homo sapiens
tttttaagtattttt

SEQ ID NO: 1517123 - DNA, 15 bp, Homo sapiens
atttttaagtatttt

SEQ ID NO: 1517124 - DNA, 15 bp, Homo sapiens
gatttttaagtattt

SEQ ID NO: 1517125 - DNA, 15 bp, Homo sapiens
ttgatttttaagtat

SEQ ID NO: 1517126 - DNA, 15 bp, Homo sapiens
tttgatttttaagta

SEQ ID NO: 1517127 - DNA, 15 bp, Homo sapiens
ttttgatttttaagt

SEQ ID NO: 1517128 - DNA, 15 bp, Homo sapiens
attttgatttttaag

SEQ ID NO: 1517129 - DNA, 15 bp, Homo sapiens
aattttgatttttaa

SEQ ID NO: 1517130 - DNA, 15 bp, Homo sapiens
taattttgattttta

SEQ ID NO: 1517131 - DNA, 15 bp, Homo sapiens
ataattttgattttt

SEQ ID NO: 1517132 - DNA, 15 bp, Homo sapiens
taataattttgattt

SEQ ID NO: 1517133 - DNA, 15 bp, Homo sapiens
ttaataattttgatt

SEQ ID NO: 1517134 - DNA, 15 bp, Homo sapiens
attaataattttgat

SEQ ID NO: 1517135 - DNA, 15 bp, Homo sapiens
aattaataattttga

SEQ ID NO: 1517136 - DNA, 15 bp, Homo sapiens
aaattaataattttg

SEQ ID NO: 1517137 - DNA, 15 bp, Homo sapiens
caaattaataatttt

SEQ ID NO: 1517138 - DNA, 15 bp, Homo sapiens
ccaaattaataattt

SEQ ID NO: 1517139 - DNA, 15 bp, Homo sapiens
cccaaattaataatt

SEQ ID NO: 1517140 - DNA, 15 bp, Homo sapiens
gcccaaattaataat

SEQ ID NO: 1517141 - DNA, 15 bp, Homo sapiens
tgcccaaattaataa

SEQ ID NO: 1517142 - DNA, 15 bp, Homo sapiens
atgcccaaattaata

SEQ ID NO: 1517143 - DNA, 15 bp, Homo sapiens
aatgcccaaattaat

SEQ ID NO: 1517144 - DNA, 15 bp, Homo sapiens
caatgcccaaattaa

SEQ ID NO: 1517145 - DNA, 15 bp, Homo sapiens
acaatgcccaaatta

SEQ ID NO: 1517146 - DNA, 15 bp, Homo sapiens
aacaatgcccaaatt

SEQ ID NO: 1517147 - DNA, 15 bp, Homo sapiens
aaacaatgcccaaat

SEQ ID NO: 1517148 - DNA, 15 bp, Homo sapiens
gaaacaatgcccaaa

SEQ ID NO: 1517149 - DNA, 15 bp, Homo sapiens
tgaaacaatgcccaa

SEQ ID NO: 1517150 - DNA, 15 bp, Homo sapiens
atgaaacaatgccca

SEQ ID NO: 1517151 - DNA, 15 bp, Homo sapiens
aatgaaacaatgccc

SEQ ID NO: 1517152 - DNA, 15 bp, Homo sapiens
taatgaaacaatgcc

SEQ ID NO: 1517153 - DNA, 15 bp, Homo sapiens
ctaatgaaacaatgc

SEQ ID NO: 1517154 - DNA, 15 bp, Homo sapiens
gctaatgaaacaatg

SEQ ID NO: 1517155 - DNA, 15 bp, Homo sapiens
agctaatgaaacaat

SEQ ID NO: 1517156 - DNA, 15 bp, Homo sapiens
gagctaatgaaacaa

SEQ ID NO: 1517157 - DNA, 15 bp, Homo sapiens
agagctaatgaaaca

SEQ ID NO: 1517158 - DNA, 15 bp, Homo sapiens
aagagctaatgaaac

SEQ ID NO: 1517159 - DNA, 15 bp, Homo sapiens
taagagctaatgaaa

SEQ ID NO: 1517160 - DNA, 15 bp, Homo sapiens
ataagagctaatgaa

SEQ ID NO: 1517161 - DNA, 15 bp, Homo sapiens
aataagagctaatga

SEQ ID NO: 1517162 - DNA, 15 bp, Homo sapiens
taataagagctaatg

SEQ ID NO: 1517163 - DNA, 15 bp, Homo sapiens
ctaataagagctaat

SEQ ID NO: 1517164 - DNA, 15 bp, Homo sapiens
actaataagagctaa

SEQ ID NO: 1517165 - DNA, 15 bp, Homo sapiens
gactaataagagcta

SEQ ID NO: 1517166 - DNA, 15 bp, Homo sapiens
agactaataagagct

SEQ ID NO: 1517167 - DNA, 15 bp, Homo sapiens
gagactaataagagc

SEQ ID NO: 1517168 - DNA, 15 bp, Homo sapiens
agagactaataagag

SEQ ID NO: 1517169 - DNA, 15 bp, Homo sapiens
aagagactaataaga

SEQ ID NO: 1517170 - DNA, 15 bp, Homo sapiens
caagagactaataag

SEQ ID NO: 1517171 - DNA, 15 bp, Homo sapiens
acaagagactaataa

SEQ ID NO: 1517172 - DNA, 15 bp, Homo sapiens
cacaagagactaata

SEQ ID NO: 1517173 - DNA, 15 bp, Homo sapiens
acacaagagactaat

SEQ ID NO: 1517174 - DNA, 15 bp, Homo sapiens
tacacaagagactaa

SEQ ID NO: 1517175 - DNA, 15 bp, Homo sapiens
ttacacaagagacta

SEQ ID NO: 1517176 - DNA, 15 bp, Homo sapiens
gttacacaagagact

SEQ ID NO: 1517177 - DNA, 15 bp, Homo sapiens
tgttacacaagagac

SEQ ID NO: 1517178 - DNA, 15 bp, Homo sapiens
atgttacacaagaga

SEQ ID NO: 1517179 - DNA, 15 bp, Homo sapiens
tatgttacacaagag

SEQ ID NO: 1517180 - DNA, 15 bp, Homo sapiens
ttatgttacacaaga

SEQ ID NO: 1517181 - DNA, 15 bp, Homo sapiens
tttatgttacacaag

SEQ ID NO: 1517182 - DNA, 15 bp, Homo sapiens
atttatgttacacaa

SEQ ID NO: 1517183 - DNA, 15 bp, Homo sapiens
aatttatgttacaca

SEQ ID NO: 1517184 - DNA, 15 bp, Homo sapiens
taatttatgttacac

SEQ ID NO: 1517185 - DNA, 15 bp, Homo sapiens
gtaatttatgttaca

SEQ ID NO: 1517186 - DNA, 15 bp, Homo sapiens
agtaatttatgttac

SEQ ID NO: 1517187 - DNA, 15 bp, Homo sapiens
gcaagtaatttatgt

SEQ ID NO: 1517188 - DNA, 15 bp, Homo sapiens
agcaagtaatttatg

SEQ ID NO: 1517189 - DNA, 15 bp, Homo sapiens
cagcaagtaatttat

SEQ ID NO: 1517190 - DNA, 15 bp, Homo sapiens
acagcaagtaattta

SEQ ID NO: 1517191 - DNA, 15 bp, Homo sapiens
gacagcaagtaattt

SEQ ID NO: 1517192 - DNA, 15 bp, Homo sapiens
ggacagcaagtaatt

SEQ ID NO: 1517193 - DNA, 15 bp, Homo sapiens
gggacagcaagtaat

SEQ ID NO: 1517194 - DNA, 15 bp, Homo sapiens
tgggacagcaagtaa

SEQ ID NO: 1517195 - DNA, 15 bp, Homo sapiens
atgggacagcaagta

SEQ ID NO: 1517196 - DNA, 15 bp, Homo sapiens
gatgggacagcaagt

SEQ ID NO: 1517197 - DNA, 15 bp, Homo sapiens
agatgggacagcaag

SEQ ID NO: 1517198 - DNA, 15 bp, Homo sapiens
tagatgggacagcaa

SEQ ID NO: 1517199 - DNA, 15 bp, Homo sapiens
ctagatgggacagca

SEQ ID NO: 1517200 - DNA, 15 bp, Homo sapiens
actagatgggacagc

SEQ ID NO: 1517201 - DNA, 15 bp, Homo sapiens
aactagatgggacag

SEQ ID NO: 1517202 - DNA, 15 bp, Homo sapiens
taactagatgggaca

SEQ ID NO: 1517203 - DNA, 15 bp, Homo sapiens
ataactagatgggac

SEQ ID NO: 1517204 - DNA, 15 bp, Homo sapiens
tataactagatggga

SEQ ID NO: 1517205 - DNA, 15 bp, Homo sapiens
atataactagatggg

SEQ ID NO: 1517206 - DNA, 15 bp, Homo sapiens
tatataactagatgg

SEQ ID NO: 1517207 - DNA, 15 bp, Homo sapiens
ttatataactagatg

SEQ ID NO: 1517208 - DNA, 15 bp, Homo sapiens
tttatataactagat

SEQ ID NO: 1517209 - DNA, 15 bp, Homo sapiens
gtttatataactaga

SEQ ID NO: 1517210 - DNA, 15 bp, Homo sapiens
agtttatataactag

SEQ ID NO: 1517211 - DNA, 15 bp, Homo sapiens
aagtttatataacta

SEQ ID NO: 1517212 - DNA, 15 bp, Homo sapiens
caagtttatataact

SEQ ID NO: 1517213 - DNA, 15 bp, Homo sapiens
acaagtttatataac

SEQ ID NO: 1517214 - DNA, 15 bp, Homo sapiens
tacaagtttatataa

SEQ ID NO: 1517215 - DNA, 15 bp, Homo sapiens
ttacaagtttatata

SEQ ID NO: 1517216 - DNA, 15 bp, Homo sapiens
tttacaagtttatat

SEQ ID NO: 1517217 - DNA, 15 bp, Homo sapiens
ctttacaagtttata

SEQ ID NO: 1517218 - DNA, 15 bp, Homo sapiens
cctttacaagtttat

SEQ ID NO: 1517219 - DNA, 15 bp, Homo sapiens
ccctttacaagttta

SEQ ID NO: 1517220 - DNA, 15 bp, Homo sapiens
tccctttacaagttt

SEQ ID NO: 1517221 - DNA, 15 bp, Homo sapiens
gtccctttacaagtt

SEQ ID NO: 1517222 - DNA, 15 bp, Homo sapiens
ggtccctttacaagt

SEQ ID NO: 1517223 - DNA, 15 bp, Homo sapiens
tggtccctttacaag

SEQ ID NO: 1517224 - DNA, 15 bp, Homo sapiens
ttggtccctttacaa

SEQ ID NO: 1517225 - DNA, 15 bp, Homo sapiens
tttggtccctttaca

SEQ ID NO: 1517226 - DNA, 15 bp, Homo sapiens
atttggtccctttac

SEQ ID NO: 1517227 - DNA, 15 bp, Homo sapiens
aatttggtcccttta

SEQ ID NO: 1517228 - DNA, 15 bp, Homo sapiens
gaatttggtcccttt

SEQ ID NO: 1517229 - DNA, 15 bp, Homo sapiens
ggaatttggtccctt

SEQ ID NO: 1517230 - DNA, 15 bp, Homo sapiens
aggaatttggtccct

SEQ ID NO: 1517231 - DNA, 15 bp, Homo sapiens
taggaatttggtccc

SEQ ID NO: 1517232 - DNA, 15 bp, Homo sapiens
ataggaatttggtcc

SEQ ID NO: 1517233 - DNA, 15 bp, Homo sapiens
cataggaatttggtc

SEQ ID NO: 1517234 - DNA, 15 bp, Homo sapiens
acataggaatttggt

SEQ ID NO: 1517235 - DNA, 15 bp, Homo sapiens
tacataggaatttgg

SEQ ID NO: 1517236 - DNA, 15 bp, Homo sapiens
atacataggaatttg

SEQ ID NO: 1517237 - DNA, 15 bp, Homo sapiens
catacataggaattt

SEQ ID NO: 1517238 - DNA, 15 bp, Homo sapiens
tcatacataggaatt

SEQ ID NO: 1517239 - DNA, 15 bp, Homo sapiens
ttcatacataggaat

SEQ ID NO: 1517240 - DNA, 15 bp, Homo sapiens
cttcatacataggaa

SEQ ID NO: 1517241 - DNA, 15 bp, Homo sapiens
tcttcatacatagga

SEQ ID NO: 1517242 - DNA, 15 bp, Homo sapiens
ctcttcatacatagg

SEQ ID NO: 1517243 - DNA, 15 bp, Homo sapiens
actcttcatacatag

SEQ ID NO: 1517244 - DNA, 15 bp, Homo sapiens
aactcttcatacata

SEQ ID NO: 1517245 - DNA, 15 bp, Homo sapiens
gaactcttcatacat

SEQ ID NO: 1517246 - DNA, 15 bp, Homo sapiens
ggaactcttcataca

SEQ ID NO: 1517247 - DNA, 15 bp, Homo sapiens
aggaactcttcatac

SEQ ID NO: 1517248 - DNA, 15 bp, Homo sapiens
aaggaactcttcata

SEQ ID NO: 1517249 - DNA, 15 bp, Homo sapiens
taaggaactcttcat

SEQ ID NO: 1517250 - DNA, 15 bp, Homo sapiens
gtaaggaactcttca

SEQ ID NO: 1517251 - DNA, 15 bp, Homo sapiens
tgtaaggaactcttc

SEQ ID NO: 1517252 - DNA, 15 bp, Homo sapiens
ttgtaaggaactctt

SEQ ID NO: 1517253 - DNA, 15 bp, Homo sapiens
tttgtaaggaactct

SEQ ID NO: 1517254 - DNA, 15 bp, Homo sapiens
ctttgtaaggaactc

SEQ ID NO: 1517255 - DNA, 15 bp, Homo sapiens
cctttgtaaggaact

SEQ ID NO: 1517256 - DNA, 15 bp, Homo sapiens
tcctttgtaaggaac

SEQ ID NO: 1517257 - DNA, 15 bp, Homo sapiens
ttcctttgtaaggaa

SEQ ID NO: 1517258 - DNA, 15 bp, Homo sapiens
cttcctttgtaagga

SEQ ID NO: 1517259 - DNA, 15 bp, Homo sapiens
tcttcctttgtaagg

SEQ ID NO: 1517260 - DNA, 15 bp, Homo sapiens
ttcttcctttgtaag

SEQ ID NO: 1517261 - DNA, 15 bp, Homo sapiens
attcttcctttgtaa

SEQ ID NO: 1517262 - DNA, 15 bp, Homo sapiens
cattcttcctttgta

SEQ ID NO: 1517263 - DNA, 15 bp, Homo sapiens
tcattcttcctttgt

SEQ ID NO: 1517264 - DNA, 15 bp, Homo sapiens
ctcattcttcctttg

SEQ ID NO: 1517265 - DNA, 15 bp, Homo sapiens
actcattcttccttt

SEQ ID NO: 1517266 - DNA, 15 bp, Homo sapiens
gactcattcttcctt

SEQ ID NO: 1517267 - DNA, 15 bp, Homo sapiens
ggactcattcttcct

SEQ ID NO: 1517268 - DNA, 15 bp, Homo sapiens
tggactcattcttcc

SEQ ID NO: 1517269 - DNA, 15 bp, Homo sapiens
ttggactcattcttc

SEQ ID NO: 1517270 - DNA, 15 bp, Homo sapiens
tttggactcattctt

SEQ ID NO: 1517271 - DNA, 15 bp, Homo sapiens
atttggactcattct

SEQ ID NO: 1517272 - DNA, 15 bp, Homo sapiens
aatttggactcattc

SEQ ID NO: 1517273 - DNA, 15 bp, Homo sapiens
taatttggactcatt

SEQ ID NO: 1517274 - DNA, 15 bp, Homo sapiens
ataatttggactcat

SEQ ID NO: 1517275 - DNA, 15 bp, Homo sapiens
aataatttggactca

SEQ ID NO: 1517276 - DNA, 15 bp, Homo sapiens
aaataatttggactc

SEQ ID NO: 1517277 - DNA, 15 bp, Homo sapiens
aaaataatttggact

SEQ ID NO: 1517278 - DNA, 15 bp, Homo sapiens
aaaaataatttggac

SEQ ID NO: 1517279 - DNA, 15 bp, Homo sapiens
taaaaataatttgga

SEQ ID NO: 1517280 - DNA, 15 bp, Homo sapiens
ttaaaaataatttgg

SEQ ID NO: 1517281 - DNA, 15 bp, Homo sapiens
tttaaaaataatttg

SEQ ID NO: 1517282 - DNA, 15 bp, Homo sapiens
atttaaaaataattt

SEQ ID NO: 1517283 - DNA, 15 bp, Homo sapiens
catttaaaaataatt

SEQ ID NO: 1517284 - DNA, 15 bp, Homo sapiens
gcatttaaaaataat

SEQ ID NO: 1517285 - DNA, 15 bp, Homo sapiens
ggcatttaaaaataa

SEQ ID NO: 1517286 - DNA, 15 bp, Homo sapiens
tggcatttaaaaata

SEQ ID NO: 1517287 - DNA, 15 bp, Homo sapiens
ttggcatttaaaaat

SEQ ID NO: 1517288 - DNA, 15 bp, Homo sapiens
attggcatttaaaaa

SEQ ID NO: 1517289 - DNA, 15 bp, Homo sapiens
tattggcatttaaaa

SEQ ID NO: 1517290 - DNA, 15 bp, Homo sapiens
ttattggcatttaaa

SEQ ID NO: 1517291 - DNA, 15 bp, Homo sapiens
tttattggcatttaa

SEQ ID NO: 1517292 - DNA, 15 bp, Homo sapiens
ttttattggcattta

SEQ ID NO: 1517293 - DNA, 15 bp, Homo sapiens
tttttattggcattt

SEQ ID NO: 1517294 - DNA, 15 bp, Homo sapiens
atttttattggcatt

SEQ ID NO: 1517295 - DNA, 15 bp, Homo sapiens
catttttattggcat

SEQ ID NO: 1517296 - DNA, 15 bp, Homo sapiens
tcatttttattggca

SEQ ID NO: 1517297 - DNA, 15 bp, Homo sapiens
atcatttttattggc

SEQ ID NO: 1517298 - DNA, 15 bp, Homo sapiens
aatcatttttattgg

SEQ ID NO: 1517299 - DNA, 15 bp, Homo sapiens
taatcatttttattg

SEQ ID NO: 1517300 - DNA, 15 bp, Homo sapiens
ctaatcatttttatt

SEQ ID NO: 1517301 - DNA, 15 bp, Homo sapiens
gctaatcatttttat

SEQ ID NO: 1517302 - DNA, 15 bp, Homo sapiens
tgctaatcattttta

SEQ ID NO: 1517303 - DNA, 15 bp, Homo sapiens
gtgctaatcattttt

SEQ ID NO: 1517304 - DNA, 15 bp, Homo sapiens
tgtgctaatcatttt

SEQ ID NO: 1517305 - DNA, 15 bp, Homo sapiens
atgtgctaatcattt

SEQ ID NO: 1517306 - DNA, 15 bp, Homo sapiens
aatgtgctaatcatt

SEQ ID NO: 1517307 - DNA, 15 bp, Homo sapiens
gaatgtgctaatcat

SEQ ID NO: 1517308 - DNA, 15 bp, Homo sapiens
tgaatgtgctaatca

SEQ ID NO: 1517309 - DNA, 15 bp, Homo sapiens
gtgaatgtgctaatc

SEQ ID NO: 1517310 - DNA, 15 bp, Homo sapiens
cgtgaatgtgctaat

SEQ ID NO: 1517311 - DNA, 15 bp, Homo sapiens
ccgtgaatgtgctaa

SEQ ID NO: 1517312 - DNA, 15 bp, Homo sapiens
cccgtgaatgtgcta

SEQ ID NO: 1517313 - DNA, 15 bp, Homo sapiens
tcccgtgaatgtgct

SEQ ID NO: 1517314 - DNA, 15 bp, Homo sapiens
ttcccgtgaatgtgc

SEQ ID NO: 1517315 - DNA, 15 bp, Homo sapiens
tttcccgtgaatgtg

SEQ ID NO: 1517316 - DNA, 15 bp, Homo sapiens
ttttcccgtgaatgt

SEQ ID NO: 1517317 - DNA, 15 bp, Homo sapiens
cttttcccgtgaatg

SEQ ID NO: 1517318 - DNA, 15 bp, Homo sapiens
acttttcccgtgaat

SEQ ID NO: 1517319 - DNA, 15 bp, Homo sapiens
tacttttcccgtgaa

SEQ ID NO: 1517320 - DNA, 15 bp, Homo sapiens
ctacttttcccgtga

SEQ ID NO: 1517321 - DNA, 15 bp, Homo sapiens
actacttttcccgtg

SEQ ID NO: 1517322 - DNA, 15 bp, Homo sapiens
cactacttttcccgt

SEQ ID NO: 1517323 - DNA, 15 bp, Homo sapiens
ccactacttttcccg

SEQ ID NO: 1517324 - DNA, 15 bp, Homo sapiens
tccactacttttccc

SEQ ID NO: 1517325 - DNA, 15 bp, Homo sapiens
gtccactacttttcc

SEQ ID NO: 1517326 - DNA, 15 bp, Homo sapiens
agtccactacttttc

SEQ ID NO: 1517327 - DNA, 15 bp, Homo sapiens
cagtccactactttt

SEQ ID NO: 1517328 - DNA, 15 bp, Homo sapiens
acagtccactacttt

SEQ ID NO: 1517329 - DNA, 15 bp, Homo sapiens
cacagtccactactt

SEQ ID NO: 1517330 - DNA, 15 bp, Homo sapiens
tcacagtccactact

SEQ ID NO: 1517331 - DNA, 15 bp, Homo sapiens
ttcacagtccactac

SEQ ID NO: 1517332 - DNA, 15 bp, Homo sapiens
cttcacagtccacta

SEQ ID NO: 1517333 - DNA, 15 bp, Homo sapiens
gcttcacagtccact

SEQ ID NO: 1517334 - DNA, 15 bp, Homo sapiens
agcttcacagtccac

SEQ ID NO: 1517335 - DNA, 15 bp, Homo sapiens
tagcttcacagtcca

SEQ ID NO: 1517336 - DNA, 15 bp, Homo sapiens
ttagcttcacagtcc

SEQ ID NO: 1517337 - DNA, 15 bp, Homo sapiens
cttagcttcacagtc

SEQ ID NO: 1517338 - DNA, 15 bp, Homo sapiens
ccttagcttcacagt

SEQ ID NO: 1517339 - DNA, 15 bp, Homo sapiens
cccttagcttcacag

SEQ ID NO: 1517340 - DNA, 15 bp, Homo sapiens
acccttagcttcaca

SEQ ID NO: 1517341 - DNA, 15 bp, Homo sapiens
tacccttagcttcac

SEQ ID NO: 1517342 - DNA, 15 bp, Homo sapiens
ttacccttagcttca

SEQ ID NO: 1517343 - DNA, 15 bp, Homo sapiens
cttacccttagcttc

SEQ ID NO: 1517344 - DNA, 15 bp, Homo sapiens
gcttacccttagctt

SEQ ID NO: 1517345 - DNA, 15 bp, Homo sapiens
tgcttacccttagct

SEQ ID NO: 1517346 - DNA, 15 bp, Homo sapiens
ttgcttacccttagc

SEQ ID NO: 1517347 - DNA, 15 bp, Homo sapiens
attgcttacccttag

SEQ ID NO: 1517348 - DNA, 15 bp, Homo sapiens
aattgcttaccctta

SEQ ID NO: 1517349 - DNA, 15 bp, Homo sapiens
caattgcttaccctt

SEQ ID NO: 1517350 - DNA, 15 bp, Homo sapiens
ccaattgcttaccct

SEQ ID NO: 1517351 - DNA, 15 bp, Homo sapiens
cccaattgcttaccc

SEQ ID NO: 1517352 - DNA, 15 bp, Homo sapiens
tcccaattgcttacc

SEQ ID NO: 1517353 - DNA, 15 bp, Homo sapiens
ctcccaattgcttac

SEQ ID NO: 1517354 - DNA, 15 bp, Homo sapiens
tctcccaattgctta

SEQ ID NO: 1517355 - DNA, 15 bp, Homo sapiens
atctcccaattgctt

SEQ ID NO: 1517356 - DNA, 15 bp, Homo sapiens
catctcccaattgct

SEQ ID NO: 1517357 - DNA, 15 bp, Homo sapiens
ccatctcccaattgc

SEQ ID NO: 1517358 - DNA, 15 bp, Homo sapiens
cccatctcccaattg

SEQ ID NO: 1517359 - DNA, 15 bp, Homo sapiens
tcccatctcccaatt

SEQ ID NO: 1517360 - DNA, 15 bp, Homo sapiens
ctcccatctcccaat

SEQ ID NO: 1517361 - DNA, 15 bp, Homo sapiens
actcccatctcccaa

SEQ ID NO: 1517362 - DNA, 15 bp, Homo sapiens
aactcccatctccca

SEQ ID NO: 1517363 - DNA, 15 bp, Homo sapiens
aaactcccatctccc

SEQ ID NO: 1517364 - DNA, 15 bp, Homo sapiens
taaactcccatctcc

SEQ ID NO: 1517365 - DNA, 15 bp, Homo sapiens
ttaaactcccatctc

SEQ ID NO: 1517366 - DNA, 15 bp, Homo sapiens
tttaaactcccatct

SEQ ID NO: 1517367 - DNA, 15 bp, Homo sapiens
atttaaactcccatc

SEQ ID NO: 1517368 - DNA, 15 bp, Homo sapiens
catttaaactcccat

SEQ ID NO: 1517369 - DNA, 15 bp, Homo sapiens
tcatttaaactccca

SEQ ID NO: 1517370 - DNA, 15 bp, Homo sapiens
gtcatttaaactccc

SEQ ID NO: 1517371 - DNA, 15 bp, Homo sapiens
tgtcatttaaactcc

SEQ ID NO: 1517372 - DNA, 15 bp, Homo sapiens
ctgtcatttaaactc

SEQ ID NO: 1517373 - DNA, 15 bp, Homo sapiens
cctgtcatttaaact

SEQ ID NO: 1517374 - DNA, 15 bp, Homo sapiens
ccctgtcatttaaac

SEQ ID NO: 1517375 - DNA, 15 bp, Homo sapiens
gccctgtcatttaaa

SEQ ID NO: 1517376 - DNA, 15 bp, Homo sapiens
tgccctgtcatttaa

SEQ ID NO: 1517377 - DNA, 15 bp, Homo sapiens
atgccctgtcattta

SEQ ID NO: 1517378 - DNA, 15 bp, Homo sapiens
aatgccctgtcattt

SEQ ID NO: 1517379 - DNA, 15 bp, Homo sapiens
aaatgccctgtcatt

SEQ ID NO: 1517380 - DNA, 15 bp, Homo sapiens
aaaatgccctgtcat

SEQ ID NO: 1517381 - DNA, 15 bp, Homo sapiens
taaaatgccctgtca

SEQ ID NO: 1517382 - DNA, 15 bp, Homo sapiens
ttaaaatgccctgtc

SEQ ID NO: 1517383 - DNA, 15 bp, Homo sapiens
attaaaatgccctgt

SEQ ID NO: 1517384 - DNA, 15 bp, Homo sapiens
gattaaaatgccctg

SEQ ID NO: 1517385 - DNA, 15 bp, Homo sapiens
agattaaaatgccct

SEQ ID NO: 1517386 - DNA, 15 bp, Homo sapiens
aagattaaaatgccc

SEQ ID NO: 1517387 - DNA, 15 bp, Homo sapiens
aaagattaaaatgcc

SEQ ID NO: 1517388 - DNA, 15 bp, Homo sapiens
aaaagattaaaatgc

SEQ ID NO: 1517389 - DNA, 15 bp, Homo sapiens
taaaagattaaaatg

SEQ ID NO: 1517390 - DNA, 15 bp, Homo sapiens
ataaaagattaaaat

SEQ ID NO: 1517391 - DNA, 15 bp, Homo sapiens
cataaaagattaaaa

SEQ ID NO: 1517392 - DNA, 15 bp, Homo sapiens
tcataaaagattaaa

SEQ ID NO: 1517393 - DNA, 15 bp, Homo sapiens
ttcataaaagattaa

SEQ ID NO: 1517394 - DNA, 15 bp, Homo sapiens
attcataaaagatta

SEQ ID NO: 1517395 - DNA, 15 bp, Homo sapiens
aattcataaaagatt

SEQ ID NO: 1517396 - DNA, 15 bp, Homo sapiens
taattcataaaagat

SEQ ID NO: 1517397 - DNA, 15 bp, Homo sapiens
ataattcataaaaga

SEQ ID NO: 1517398 - DNA, 15 bp, Homo sapiens
aataattcataaaag

SEQ ID NO: 1517399 - DNA, 15 bp, Homo sapiens
taataattcataaaa

SEQ ID NO: 1517400 - DNA, 15 bp, Homo sapiens
ttaataattcataaa

SEQ ID NO: 1517401 - DNA, 15 bp, Homo sapiens
attaataattcataa

SEQ ID NO: 1517402 - DNA, 15 bp, Homo sapiens
cattaataattcata

SEQ ID NO: 1517403 - DNA, 15 bp, Homo sapiens
ccattaataattcat

SEQ ID NO: 1517404 - DNA, 15 bp, Homo sapiens
tccattaataattca

SEQ ID NO: 1517405 - DNA, 15 bp, Homo sapiens
atccattaataattc

SEQ ID NO: 1517406 - DNA, 15 bp, Homo sapiens
aatccattaataatt

SEQ ID NO: 1517407 - DNA, 15 bp, Homo sapiens
caatccattaataat

SEQ ID NO: 1517408 - DNA, 15 bp, Homo sapiens
tcaatccattaataa

SEQ ID NO: 1517409 - DNA, 15 bp, Homo sapiens
ttcaatccattaata

SEQ ID NO: 1517410 - DNA, 15 bp, Homo sapiens
cttcaatccattaat

SEQ ID NO: 1517411 - DNA, 15 bp, Homo sapiens
acttcaatccattaa

SEQ ID NO: 1517412 - DNA, 15 bp, Homo sapiens
tacttcaatccatta

SEQ ID NO: 1517413 - DNA, 15 bp, Homo sapiens
ctacttcaatccatt

SEQ ID NO: 1517414 - DNA, 15 bp, Homo sapiens
tctacttcaatccat

SEQ ID NO: 1517415 - DNA, 15 bp, Homo sapiens
gtctacttcaatcca

SEQ ID NO: 1517416 - DNA, 15 bp, Homo sapiens
tgtctacttcaatcc

SEQ ID NO: 1517417 - DNA, 15 bp, Homo sapiens
atgtctacttcaatc

SEQ ID NO: 1517418 - DNA, 15 bp, Homo sapiens
catgtctacttcaat

SEQ ID NO: 1517419 - DNA, 15 bp, Homo sapiens
ccatgtctacttcaa

SEQ ID NO: 1517420 - DNA, 15 bp, Homo sapiens
accatgtctacttca

SEQ ID NO: 1517421 - DNA, 15 bp, Homo sapiens
gaccatgtctacttc

SEQ ID NO: 1517422 - DNA, 15 bp, Homo sapiens
ggaccatgtctactt

SEQ ID NO: 1517423 - DNA, 15 bp, Homo sapiens
aggaccatgtctact

SEQ ID NO: 1517424 - DNA, 15 bp, Homo sapiens
caggaccatgtctac

SEQ ID NO: 1517425 - DNA, 15 bp, Homo sapiens
tcaggaccatgtcta

SEQ ID NO: 1517426 - DNA, 15 bp, Homo sapiens
ctcaggaccatgtct

SEQ ID NO: 1517427 - DNA, 15 bp, Homo sapiens
cctcaggaccatgtc

SEQ ID NO: 1517428 - DNA, 15 bp, Homo sapiens
acctcaggaccatgt

SEQ ID NO: 1517429 - DNA, 15 bp, Homo sapiens
gacctcaggaccatg

SEQ ID NO: 1517430 - DNA, 15 bp, Homo sapiens
agacctcaggaccat

SEQ ID NO: 1517431 - DNA, 15 bp, Homo sapiens
aagacctcaggacca

SEQ ID NO: 1517432 - DNA, 15 bp, Homo sapiens
aaagacctcaggacc

SEQ ID NO: 1517433 - DNA, 15 bp, Homo sapiens
aaaagacctcaggac

SEQ ID NO: 1517434 - DNA, 15 bp, Homo sapiens
aaaaagacctcagga

SEQ ID NO: 1517435 - DNA, 15 bp, Homo sapiens
caaaaagacctcagg

SEQ ID NO: 1517436 - DNA, 15 bp, Homo sapiens
ccaaaaagacctcag

SEQ ID NO: 1517437 - DNA, 15 bp, Homo sapiens
accaaaaagacctca

SEQ ID NO: 1517438 - DNA, 15 bp, Homo sapiens
caccaaaaagacctc

SEQ ID NO: 1517439 - DNA, 15 bp, Homo sapiens
gcaccaaaaagacct

SEQ ID NO: 1517440 - DNA, 15 bp, Homo sapiens
agcaccaaaaagacc

SEQ ID NO: 1517441 - DNA, 15 bp, Homo sapiens
cagcaccaaaaagac

SEQ ID NO: 1517442 - DNA, 15 bp, Homo sapiens
acagcaccaaaaaga

SEQ ID NO: 1517443 - DNA, 15 bp, Homo sapiens
aacagcaccaaaaag

SEQ ID NO: 1517444 - DNA, 15 bp, Homo sapiens
aaacagcaccaaaaa

SEQ ID NO: 1517445 - DNA, 15 bp, Homo sapiens
taaacagcaccaaaa

SEQ ID NO: 1517446 - DNA, 15 bp, Homo sapiens
gtaaacagcaccaaa

SEQ ID NO: 1517447 - DNA, 15 bp, Homo sapiens
tgtaaacagcaccaa

SEQ ID NO: 1517448 - DNA, 15 bp, Homo sapiens
ttgtaaacagcacca

SEQ ID NO: 1517449 - DNA, 15 bp, Homo sapiens
tttgtaaacagcacc

SEQ ID NO: 1517450 - DNA, 15 bp, Homo sapiens
atttgtaaacagcac

SEQ ID NO: 1517451 - DNA, 15 bp, Homo sapiens
gatttgtaaacagca

SEQ ID NO: 1517452 - DNA, 15 bp, Homo sapiens
tgatttgtaaacagc

SEQ ID NO: 1517453 - DNA, 15 bp, Homo sapiens
ctgatttgtaaacag

SEQ ID NO: 1517454 - DNA, 15 bp, Homo sapiens
gctgatttgtaaaca

SEQ ID NO: 1517455 - DNA, 15 bp, Homo sapiens
agctgatttgtaaac

SEQ ID NO: 1517456 - DNA, 15 bp, Homo sapiens
cagctgatttgtaaa

SEQ ID NO: 1517457 - DNA, 15 bp, Homo sapiens
tcagctgatttgtaa

SEQ ID NO: 1517458 - DNA, 15 bp, Homo sapiens
gtcagctgatttgta

SEQ ID NO: 1517459 - DNA, 15 bp, Homo sapiens
tgtcagctgatttgt

SEQ ID NO: 1517460 - DNA, 15 bp, Homo sapiens
ctgtcagctgatttg

SEQ ID NO: 1517461 - DNA, 15 bp, Homo sapiens
actgtcagctgattt

SEQ ID NO: 1517462 - DNA, 15 bp, Homo sapiens
tactgtcagctgatt

SEQ ID NO: 1517463 - DNA, 15 bp, Homo sapiens
ttactgtcagctgat

SEQ ID NO: 1517464 - DNA, 15 bp, Homo sapiens
tttactgtcagctga

SEQ ID NO: 1517465 - DNA, 15 bp, Homo sapiens
ttttactgtcagctg

SEQ ID NO: 1517466 - DNA, 15 bp, Homo sapiens
cttttactgtcagct

SEQ ID NO: 1517467 - DNA, 15 bp, Homo sapiens
ccttttactgtcagc

SEQ ID NO: 1517468 - DNA, 15 bp, Homo sapiens
tccttttactgtcag

SEQ ID NO: 1517469 - DNA, 15 bp, Homo sapiens
ttccttttactgtca

SEQ ID NO: 1517470 - DNA, 15 bp, Homo sapiens
tttccttttactgtc

SEQ ID NO: 1517471 - DNA, 15 bp, Homo sapiens
ttttccttttactgt

SEQ ID NO: 1517472 - DNA, 15 bp, Homo sapiens
cttttccttttactg

SEQ ID NO: 1517473 - DNA, 15 bp, Homo sapiens
gcttttccttttact

SEQ ID NO: 1517474 - DNA, 15 bp, Homo sapiens
tgcttttccttttac

SEQ ID NO: 1517475 - DNA, 15 bp, Homo sapiens
ttgcttttcctttta

SEQ ID NO: 1517476 - DNA, 15 bp, Homo sapiens
gttgcttttcctttt

SEQ ID NO: 1517477 - DNA, 15 bp, Homo sapiens
ggttgcttttccttt

SEQ ID NO: 1517478 - DNA, 15 bp, Homo sapiens
tggttgcttttcctt

SEQ ID NO: 1517479 - DNA, 15 bp, Homo sapiens
ctggttgcttttcct

SEQ ID NO: 1517480 - DNA, 15 bp, Homo sapiens
actggttgcttttcc

SEQ ID NO: 1517481 - DNA, 15 bp, Homo sapiens
aactggttgcttttc

SEQ ID NO: 1517482 - DNA, 15 bp, Homo sapiens
taactggttgctttt

SEQ ID NO: 1517483 - DNA, 15 bp, Homo sapiens
gtaactggttgcttt

SEQ ID NO: 1517484 - DNA, 15 bp, Homo sapiens
tgtaactggttgctt

SEQ ID NO: 1517485 - DNA, 15 bp, Homo sapiens
ttgtaactggttgct

SEQ ID NO: 1517486 - DNA, 15 bp, Homo sapiens
cttgtaactggttgc

SEQ ID NO: 1517487 - DNA, 15 bp, Homo sapiens
acttgtaactggttg

SEQ ID NO: 1517488 - DNA, 15 bp, Homo sapiens
aacttgtaactggtt

SEQ ID NO: 1517489 - DNA, 15 bp, Homo sapiens
taacttgtaactggt

SEQ ID NO: 1517490 - DNA, 15 bp, Homo sapiens
ttaacttgtaactgg

SEQ ID NO: 1517491 - DNA, 15 bp, Homo sapiens
tttaacttgtaactg

SEQ ID NO: 1517492 - DNA, 15 bp, Homo sapiens
ctttaacttgtaact

SEQ ID NO: 1517493 - DNA, 15 bp, Homo sapiens
tctttaacttgtaac

SEQ ID NO: 1517494 - DNA, 15 bp, Homo sapiens
ttctttaacttgtaa

SEQ ID NO: 1517495 - DNA, 15 bp, Homo sapiens
tttctttaacttgta

SEQ ID NO: 1517496 - DNA, 15 bp, Homo sapiens
atttctttaacttgt

SEQ ID NO: 1517497 - DNA, 15 bp, Homo sapiens
catttctttaacttg

SEQ ID NO: 1517498 - DNA, 15 bp, Homo sapiens
acatttctttaactt

SEQ ID NO: 1517499 - DNA, 15 bp, Homo sapiens
cacatttctttaact

SEQ ID NO: 1517500 - DNA, 15 bp, Homo sapiens
acacatttctttaac

SEQ ID NO: 1517501 - DNA, 15 bp, Homo sapiens
tacacatttctttaa

SEQ ID NO: 1517502 - DNA, 15 bp, Homo sapiens
ctacacatttcttta

SEQ ID NO: 1517503 - DNA, 15 bp, Homo sapiens
actacacatttcttt

SEQ ID NO: 1517504 - DNA, 15 bp, Homo sapiens
cactacacatttctt

SEQ ID NO: 1517505 - DNA, 15 bp, Homo sapiens
gcactacacatttct

SEQ ID NO: 1517506 - DNA, 15 bp, Homo sapiens
agcactacacatttc

SEQ ID NO: 1517507 - DNA, 15 bp, Homo sapiens
tagcactacacattt

SEQ ID NO: 1517508 - DNA, 15 bp, Homo sapiens
ttagcactacacatt

SEQ ID NO: 1517509 - DNA, 15 bp, Homo sapiens
tttagcactacacat

SEQ ID NO: 1517510 - DNA, 15 bp, Homo sapiens
atttagcactacaca

SEQ ID NO: 1517511 - DNA, 15 bp, Homo sapiens
catttagcactacac

SEQ ID NO: 1517512 - DNA, 15 bp, Homo sapiens
acatttagcactaca

SEQ ID NO: 1517513 - DNA, 15 bp, Homo sapiens
cacatttagcactac

SEQ ID NO: 1517514 - DNA, 15 bp, Homo sapiens
tcacatttagcacta

SEQ ID NO: 1517515 - DNA, 15 bp, Homo sapiens
ttcacatttagcact

SEQ ID NO: 1517516 - DNA, 15 bp, Homo sapiens
gttcacatttagcac

SEQ ID NO: 1517517 - DNA, 15 bp, Homo sapiens
agttcacatttagca

SEQ ID NO: 1517518 - DNA, 15 bp, Homo sapiens
cagttcacatttagc

SEQ ID NO: 1517519 - DNA, 15 bp, Homo sapiens
gcagttcacatttag

SEQ ID NO: 1517520 - DNA, 15 bp, Homo sapiens
agcagttcacattta

SEQ ID NO: 1517521 - DNA, 15 bp, Homo sapiens
tagcagttcacattt

SEQ ID NO: 1517522 - DNA, 15 bp, Homo sapiens
ttagcagttcacatt

SEQ ID NO: 1517523 - DNA, 15 bp, Homo sapiens
attagcagttcacat

SEQ ID NO: 1517524 - DNA, 15 bp, Homo sapiens
aattagcagttcaca

SEQ ID NO: 1517525 - DNA, 15 bp, Homo sapiens
aaattagcagttcac

SEQ ID NO: 1517526 - DNA, 15 bp, Homo sapiens
aaaattagcagttca

SEQ ID NO: 1517527 - DNA, 15 bp, Homo sapiens
aaaaattagcagttc

SEQ ID NO: 1517528 - DNA, 15 bp, Homo sapiens
aaaaaattagcagtt

SEQ ID NO: 1517529 - DNA, 15 bp, Homo sapiens
aaaaaaattagcagt

SEQ ID NO: 1517530 - DNA, 15 bp, Homo sapiens
aaaaaaaattagcag

SEQ ID NO: 1517531 - DNA, 15 bp, Homo sapiens
gaaaaaaaattagca

SEQ ID NO: 1517532 - DNA, 15 bp, Homo sapiens
agaaaaaaaattagc

SEQ ID NO: 1517533 - DNA, 15 bp, Homo sapiens
tagaaaaaaaattag

SEQ ID NO: 1517534 - DNA, 15 bp, Homo sapiens
ttagaaaaaaaatta

SEQ ID NO: 1517535 - DNA, 15 bp, Homo sapiens
cttagaaaaaaaatt

SEQ ID NO: 1517536 - DNA, 15 bp, Homo sapiens
acttagaaaaaaaat

SEQ ID NO: 1517537 - DNA, 15 bp, Homo sapiens
tacttagaaaaaaaa

SEQ ID NO: 1517538 - DNA, 15 bp, Homo sapiens
ctacttagaaaaaaa

SEQ ID NO: 1517539 - DNA, 15 bp, Homo sapiens
aactacttagaaaaa

SEQ ID NO: 1517540 - DNA, 15 bp, Homo sapiens
aaactacttagaaaa

SEQ ID NO: 1517541 - DNA, 15 bp, Homo sapiens
caaactacttagaaa

SEQ ID NO: 1517542 - DNA, 15 bp, Homo sapiens
gcaaactacttagaa

SEQ ID NO: 1517543 - DNA, 15 bp, Homo sapiens
agcaaactacttaga

SEQ ID NO: 1517544 - DNA, 15 bp, Homo sapiens
cagcaaactacttag

SEQ ID NO: 1517545 - DNA, 15 bp, Homo sapiens
acagcaaactactta

SEQ ID NO: 1517546 - DNA, 15 bp, Homo sapiens
tacagcaaactactt

SEQ ID NO: 1517547 - DNA, 15 bp, Homo sapiens
atacagcaaactact

SEQ ID NO: 1517548 - DNA, 15 bp, Homo sapiens
gatacagcaaactac

SEQ ID NO: 1517549 - DNA, 15 bp, Homo sapiens
agatacagcaaacta

SEQ ID NO: 1517550 - DNA, 15 bp, Homo sapiens
tagatacagcaaact

SEQ ID NO: 1517551 - DNA, 15 bp, Homo sapiens
ctagatacagcaaac

SEQ ID NO: 1517552 - DNA, 15 bp, Homo sapiens
cctagatacagcaaa

SEQ ID NO: 1517553 - DNA, 15 bp, Homo sapiens
ccctagatacagcaa

SEQ ID NO: 1517554 - DNA, 15 bp, Homo sapiens
tccctagatacagca

SEQ ID NO: 1517555 - DNA, 15 bp, Homo sapiens
atccctagatacagc

SEQ ID NO: 1517556 - DNA, 15 bp, Homo sapiens
gatccctagatacag

SEQ ID NO: 1517557 - DNA, 15 bp, Homo sapiens
tgatccctagataca

SEQ ID NO: 1517558 - DNA, 15 bp, Homo sapiens
atgatccctagatac

SEQ ID NO: 1517559 - DNA, 15 bp, Homo sapiens
tatgatccctagata

SEQ ID NO: 1517560 - DNA, 15 bp, Homo sapiens
ttatgatccctagat

SEQ ID NO: 1517561 - DNA, 15 bp, Homo sapiens
tttatgatccctaga

SEQ ID NO: 1517562 - DNA, 15 bp, Homo sapiens
ctttatgatccctag

SEQ ID NO: 1517563 - DNA, 15 bp, Homo sapiens
gctttatgatcccta

SEQ ID NO: 1517564 - DNA, 15 bp, Homo sapiens
agctttatgatccct

SEQ ID NO: 1517565 - DNA, 15 bp, Homo sapiens
cagctttatgatccc

SEQ ID NO: 1517566 - DNA, 15 bp, Homo sapiens
acagctttatgatcc

SEQ ID NO: 1517567 - DNA, 15 bp, Homo sapiens
aacagctttatgatc

SEQ ID NO: 1517568 - DNA, 15 bp, Homo sapiens
caacagctttatgat

SEQ ID NO: 1517569 - DNA, 15 bp, Homo sapiens
ccaacagctttatga

SEQ ID NO: 1517570 - DNA, 15 bp, Homo sapiens
tccaacagctttatg

SEQ ID NO: 1517571 - DNA, 15 bp, Homo sapiens
ttccaacagctttat

SEQ ID NO: 1517572 - DNA, 15 bp, Homo sapiens
cttccaacagcttta

SEQ ID NO: 1517573 - DNA, 15 bp, Homo sapiens
tcttccaacagcttt

SEQ ID NO: 1517574 - DNA, 15 bp, Homo sapiens
gtcttccaacagctt

SEQ ID NO: 1517575 - DNA, 15 bp, Homo sapiens
cgtcttccaacagct

SEQ ID NO: 1517576 - DNA, 15 bp, Homo sapiens
tcgtcttccaacagc

SEQ ID NO: 1517577 - DNA, 15 bp, Homo sapiens
gtcgtcttccaacag

SEQ ID NO: 1517578 - DNA, 15 bp, Homo sapiens
ggtcgtcttccaaca

SEQ ID NO: 1517579 - DNA, 15 bp, Homo sapiens
aggtcgtcttccaac

SEQ ID NO: 1517580 - DNA, 15 bp, Homo sapiens
aaggtcgtcttccaa

SEQ ID NO: 1517581 - DNA, 15 bp, Homo sapiens
aaaggtcgtcttcca

SEQ ID NO: 1517582 - DNA, 15 bp, Homo sapiens
aaaaggtcgtcttcc

SEQ ID NO: 1517583 - DNA, 15 bp, Homo sapiens
caaaaggtcgtcttc

SEQ ID NO: 1517584 - DNA, 15 bp, Homo sapiens
tcaaaaggtcgtctt

SEQ ID NO: 1517585 - DNA, 15 bp, Homo sapiens
atcaaaaggtcgtct

SEQ ID NO: 1517586 - DNA, 15 bp, Homo sapiens
tatcaaaaggtcgtc

SEQ ID NO: 1517587 - DNA, 15 bp, Homo sapiens
ttatcaaaaggtcgt

SEQ ID NO: 1517588 - DNA, 15 bp, Homo sapiens
cttatcaaaaggtcg

SEQ ID NO: 1517589 - DNA, 15 bp, Homo sapiens
tcttatcaaaaggtc

SEQ ID NO: 1517590 - DNA, 15 bp, Homo sapiens
atcttatcaaaaggt

SEQ ID NO: 1517591 - DNA, 15 bp, Homo sapiens
catcttatcaaaagg

SEQ ID NO: 1517592 - DNA, 15 bp, Homo sapiens
ccatcttatcaaaag

SEQ ID NO: 1517593 - DNA, 15 bp, Homo sapiens
gccatcttatcaaaa

SEQ ID NO: 1517594 - DNA, 15 bp, Homo sapiens
tgccatcttatcaaa

SEQ ID NO: 1517595 - DNA, 15 bp, Homo sapiens
ttgccatcttatcaa

SEQ ID NO: 1517596 - DNA, 15 bp, Homo sapiens
gttgccatcttatca

SEQ ID NO: 1517597 - DNA, 15 bp, Homo sapiens
tgttgccatcttatc

SEQ ID NO: 1517598 - DNA, 15 bp, Homo sapiens
gtgttgccatcttat

SEQ ID NO: 1517599 - DNA, 15 bp, Homo sapiens
agtgttgccatctta

SEQ ID NO: 1517600 - DNA, 15 bp, Homo sapiens
aagtgttgccatctt

SEQ ID NO: 1517601 - DNA, 15 bp, Homo sapiens
gaagtgttgccatct

SEQ ID NO: 1517602 - DNA, 15 bp, Homo sapiens
agaagtgttgccatc

SEQ ID NO: 1517603 - DNA, 15 bp, Homo sapiens
aagaagtgttgccat

SEQ ID NO: 1517604 - DNA, 15 bp, Homo sapiens
caagaagtgttgcca

SEQ ID NO: 1517605 - DNA, 15 bp, Homo sapiens
gcaagaagtgttgcc

SEQ ID NO: 1517606 - DNA, 15 bp, Homo sapiens
tgcaagaagtgttgc

SEQ ID NO: 1517607 - DNA, 15 bp, Homo sapiens
atgcaagaagtgttg

SEQ ID NO: 1517608 - DNA, 15 bp, Homo sapiens
tatgcaagaagtgtt

SEQ ID NO: 1517609 - DNA, 15 bp, Homo sapiens
gtatgcaagaagtgt

SEQ ID NO: 1517610 - DNA, 15 bp, Homo sapiens
ggtatgcaagaagtg

SEQ ID NO: 1517611 - DNA, 15 bp, Homo sapiens
aggtatgcaagaagt

SEQ ID NO: 1517612 - DNA, 15 bp, Homo sapiens
caggtatgcaagaag

SEQ ID NO: 1517613 - DNA, 15 bp, Homo sapiens
ccaggtatgcaagaa

SEQ ID NO: 1517614 - DNA, 15 bp, Homo sapiens
cccaggtatgcaaga

SEQ ID NO: 1517615 - DNA, 15 bp, Homo sapiens
acccaggtatgcaag

SEQ ID NO: 1517616 - DNA, 15 bp, Homo sapiens
gacccaggtatgcaa

SEQ ID NO: 1517617 - DNA, 15 bp, Homo sapiens
ggacccaggtatgca

SEQ ID NO: 1517618 - DNA, 15 bp, Homo sapiens
aggacccaggtatgc

SEQ ID NO: 1517619 - DNA, 15 bp, Homo sapiens
gaggacccaggtatg

SEQ ID NO: 1517620 - DNA, 15 bp, Homo sapiens
ggaggacccaggtat

SEQ ID NO: 1517621 - DNA, 15 bp, Homo sapiens
tggaggacccaggta

SEQ ID NO: 1517622 - DNA, 15 bp, Homo sapiens
ctggaggacccaggt

SEQ ID NO: 1517623 - DNA, 15 bp, Homo sapiens
tctggaggacccagg

SEQ ID NO: 1517624 - DNA, 15 bp, Homo sapiens
ctctggaggacccag

SEQ ID NO: 1517625 - DNA, 15 bp, Homo sapiens
gctctggaggaccca

SEQ ID NO: 1517626 - DNA, 15 bp, Homo sapiens
tgctctggaggaccc

SEQ ID NO: 1517627 - DNA, 15 bp, Homo sapiens
gtgctctggaggacc

SEQ ID NO: 1517628 - DNA, 15 bp, Homo sapiens
tgtgctctggaggac

SEQ ID NO: 1517629 - DNA, 15 bp, Homo sapiens
ttgtgctctggagga

SEQ ID NO: 1517630 - DNA, 15 bp, Homo sapiens
tttgtgctctggagg

SEQ ID NO: 1517631 - DNA, 15 bp, Homo sapiens
gtttgtgctctggag

SEQ ID NO: 1517632 - DNA, 15 bp, Homo sapiens
ggtttgtgctctgga

SEQ ID NO: 1517633 - DNA, 15 bp, Homo sapiens
aggtttgtgctctgg

SEQ ID NO: 1517634 - DNA, 15 bp, Homo sapiens
caggtttgtgctctg

SEQ ID NO: 1517635 - DNA, 15 bp, Homo sapiens
acaggtttgtgctct

SEQ ID NO: 1517636 - DNA, 15 bp, Homo sapiens
cacaggtttgtgctc

SEQ ID NO: 1517637 - DNA, 15 bp, Homo sapiens
ccacaggtttgtgct

SEQ ID NO: 1517638 - DNA, 15 bp, Homo sapiens
gccacaggtttgtgc

SEQ ID NO: 1517639 - DNA, 15 bp, Homo sapiens
tgccacaggtttgtg

SEQ ID NO: 1517640 - DNA, 15 bp, Homo sapiens
ctgccacaggtttgt

SEQ ID NO: 1517641 - DNA, 15 bp, Homo sapiens
tctgccacaggtttg

SEQ ID NO: 1517642 - DNA, 15 bp, Homo sapiens
atctgccacaggttt

SEQ ID NO: 1517643 - DNA, 15 bp, Homo sapiens
tatctgccacaggtt

SEQ ID NO: 1517644 - DNA, 15 bp, Homo sapiens
gtatctgccacaggt

SEQ ID NO: 1517645 - DNA, 15 bp, Homo sapiens
tgtatctgccacagg

SEQ ID NO: 1517646 - DNA, 15 bp, Homo sapiens
gtgtatctgccacag

SEQ ID NO: 1517647 - DNA, 15 bp, Homo sapiens
tgtgtatctgccaca

SEQ ID NO: 1517648 - DNA, 15 bp, Homo sapiens
gtgtgtatctgccac

SEQ ID NO: 1517649 - DNA, 15 bp, Homo sapiens
agtgtgtatctgcca

SEQ ID NO: 1517650 - DNA, 15 bp, Homo sapiens
cagtgtgtatctgcc

SEQ ID NO: 1517651 - DNA, 15 bp, Homo sapiens
ccagtgtgtatctgc

SEQ ID NO: 1517652 - DNA, 15 bp, Homo sapiens
accagtgtgtatctg

SEQ ID NO: 1517653 - DNA, 15 bp, Homo sapiens
gaccagtgtgtatct

SEQ ID NO: 1517654 - DNA, 15 bp, Homo sapiens
ggaccagtgtgtatc

SEQ ID NO: 1517655 - DNA, 15 bp, Homo sapiens
tggaccagtgtgtat

SEQ ID NO: 1517656 - DNA, 15 bp, Homo sapiens
ctggaccagtgtgta

SEQ ID NO: 1517657 - DNA, 15 bp, Homo sapiens
gctggaccagtgtgt

SEQ ID NO: 1517658 - DNA, 15 bp, Homo sapiens
ggctggaccagtgtg

SEQ ID NO: 1517659 - DNA, 15 bp, Homo sapiens
aggctggaccagtgt

SEQ ID NO: 1517660 - DNA, 15 bp, Homo sapiens
aaggctggaccagtg

SEQ ID NO: 1517661 - DNA, 15 bp, Homo sapiens
taaggctggaccagt

SEQ ID NO: 1517662 - DNA, 15 bp, Homo sapiens
ttaaggctggaccag

SEQ ID NO: 1517663 - DNA, 15 bp, Homo sapiens
gttaaggctggacca

SEQ ID NO: 1517664 - DNA, 15 bp, Homo sapiens
ggttaaggctggacc

SEQ ID NO: 1517665 - DNA, 15 bp, Homo sapiens
aggttaaggctggac

SEQ ID NO: 1517666 - DNA, 15 bp, Homo sapiens
aaggttaaggctgga

SEQ ID NO: 1517667 - DNA, 15 bp, Homo sapiens
taaggttaaggctgg

SEQ ID NO: 1517668 - DNA, 15 bp, Homo sapiens
gtaaggttaaggctg

SEQ ID NO: 1517669 - DNA, 15 bp, Homo sapiens
ggtaaggttaaggct

SEQ ID NO: 1517670 - DNA, 15 bp, Homo sapiens
tggtaaggttaaggc

SEQ ID NO: 1517671 - DNA, 15 bp, Homo sapiens
ctggtaaggttaagg

SEQ ID NO: 1517672 - DNA, 15 bp, Homo sapiens
actggtaaggttaag

SEQ ID NO: 1517673 - DNA, 15 bp, Homo sapiens
aactggtaaggttaa

SEQ ID NO: 1517674 - DNA, 15 bp, Homo sapiens
gaactggtaaggtta

SEQ ID NO: 1517675 - DNA, 15 bp, Homo sapiens
tgaactggtaaggtt

SEQ ID NO: 1517676 - DNA, 15 bp, Homo sapiens
ttgaactggtaaggt

SEQ ID NO: 1517677 - DNA, 15 bp, Homo sapiens
tttgaactggtaagg

SEQ ID NO: 1517678 - DNA, 15 bp, Homo sapiens
ctttgaactggtaag

SEQ ID NO: 1517679 - DNA, 15 bp, Homo sapiens
actttgaactggtaa

SEQ ID NO: 1517680 - DNA, 15 bp, Homo sapiens
aactttgaactggta

SEQ ID NO: 1517681 - DNA, 15 bp, Homo sapiens
aaactttgaactggt

SEQ ID NO: 1517682 - DNA, 15 bp, Homo sapiens
caaactttgaactgg

SEQ ID NO: 1517683 - DNA, 15 bp, Homo sapiens
tcaaactttgaactg

SEQ ID NO: 1517684 - DNA, 15 bp, Homo sapiens
ctcaaactttgaact

SEQ ID NO: 1517685 - DNA, 15 bp, Homo sapiens
cctcaaactttgaac

SEQ ID NO: 1517686 - DNA, 15 bp, Homo sapiens
tcctcaaactttgaa

SEQ ID NO: 1517687 - DNA, 15 bp, Homo sapiens
ttcctcaaactttga

SEQ ID NO: 1517688 - DNA, 15 bp, Homo sapiens
attcctcaaactttg

SEQ ID NO: 1517689 - DNA, 15 bp, Homo sapiens
aattcctcaaacttt

SEQ ID NO: 1517690 - DNA, 15 bp, Homo sapiens
aaattcctcaaactt

SEQ ID NO: 1517691 - DNA, 15 bp, Homo sapiens
taaattcctcaaact

SEQ ID NO: 1517692 - DNA, 15 bp, Homo sapiens
ataaattcctcaaac

SEQ ID NO: 1517693 - DNA, 15 bp, Homo sapiens
cataaattcctcaaa

SEQ ID NO: 1517694 - DNA, 15 bp, Homo sapiens
tcataaattcctcaa

SEQ ID NO: 1517695 - DNA, 15 bp, Homo sapiens
gtcataaattcctca

SEQ ID NO: 1517696 - DNA, 15 bp, Homo sapiens
agtcataaattcctc

SEQ ID NO: 1517697 - DNA, 15 bp, Homo sapiens
tagtcataaattcct

SEQ ID NO: 1517698 - DNA, 15 bp, Homo sapiens
ctagtcataaattcc

SEQ ID NO: 1517699 - DNA, 15 bp, Homo sapiens
cctagtcataaattc

SEQ ID NO: 1517700 - DNA, 15 bp, Homo sapiens
acctagtcataaatt

SEQ ID NO: 1517701 - DNA, 15 bp, Homo sapiens
tacctagtcataaat

SEQ ID NO: 1517702 - DNA, 15 bp, Homo sapiens
ttacctagtcataaa

SEQ ID NO: 1517703 - DNA, 15 bp, Homo sapiens
tttacctagtcataa

SEQ ID NO: 1517704 - DNA, 15 bp, Homo sapiens
ctttacctagtcata

SEQ ID NO: 1517705 - DNA, 15 bp, Homo sapiens
actttacctagtcat

SEQ ID NO: 1517706 - DNA, 15 bp, Homo sapiens
tactttacctagtca

SEQ ID NO: 1517707 - DNA, 15 bp, Homo sapiens
gtactttacctagtc

SEQ ID NO: 1517708 - DNA, 15 bp, Homo sapiens
tgtactttacctagt

SEQ ID NO: 1517709 - DNA, 15 bp, Homo sapiens
ttgtactttacctag

SEQ ID NO: 1517710 - DNA, 15 bp, Homo sapiens
gttgtactttaccta

SEQ ID NO: 1517711 - DNA, 15 bp, Homo sapiens
ggttgtactttacct

SEQ ID NO: 1517712 - DNA, 15 bp, Homo sapiens
aggttgtactttacc

SEQ ID NO: 1517713 - DNA, 15 bp, Homo sapiens
aaggttgtactttac

SEQ ID NO: 1517714 - DNA, 15 bp, Homo sapiens
caaggttgtacttta

SEQ ID NO: 1517715 - DNA, 15 bp, Homo sapiens
tcaaggttgtacttt

SEQ ID NO: 1517716 - DNA, 15 bp, Homo sapiens
ttcaaggttgtactt

SEQ ID NO: 1517717 - DNA, 15 bp, Homo sapiens
tttcaaggttgtact

SEQ ID NO: 1517718 - DNA, 15 bp, Homo sapiens
atttcaaggttgtac

SEQ ID NO: 1517719 - DNA, 15 bp, Homo sapiens
tatttcaaggttgta

SEQ ID NO: 1517720 - DNA, 15 bp, Homo sapiens
ctatttcaaggttgt

SEQ ID NO: 1517721 - DNA, 15 bp, Homo sapiens
actatttcaaggttg

SEQ ID NO: 1517722 - DNA, 15 bp, Homo sapiens
aactatttcaaggtt

SEQ ID NO: 1517723 - DNA, 15 bp, Homo sapiens
caactatttcaaggt

SEQ ID NO: 1517724 - DNA, 15 bp, Homo sapiens
tcaactatttcaagg

SEQ ID NO: 1517725 - DNA, 15 bp, Homo sapiens
atcaactatttcaag

SEQ ID NO: 1517726 - DNA, 15 bp, Homo sapiens
aatcaactatttcaa

SEQ ID NO: 1517727 - DNA, 15 bp, Homo sapiens
caatcaactatttca

SEQ ID NO: 1517728 - DNA, 15 bp, Homo sapiens
gcaatcaactatttc

SEQ ID NO: 1517729 - DNA, 15 bp, Homo sapiens
agcaatcaactattt

SEQ ID NO: 1517730 - DNA, 15 bp, Homo sapiens
aagcaatcaactatt

SEQ ID NO: 1517731 - DNA, 15 bp, Homo sapiens
aaagcaatcaactat

SEQ ID NO: 1517732 - DNA, 15 bp, Homo sapiens
gaaagcaatcaacta

SEQ ID NO: 1517733 - DNA, 15 bp, Homo sapiens
agaaagcaatcaact

SEQ ID NO: 1517734 - DNA, 15 bp, Homo sapiens
aagaaagcaatcaac

SEQ ID NO: 1517735 - DNA, 15 bp, Homo sapiens
aaagaaagcaatcaa

SEQ ID NO: 1517736 - DNA, 15 bp, Homo sapiens
aaaagaaagcaatca

SEQ ID NO: 1517737 - DNA, 15 bp, Homo sapiens
aaaaagaaagcaatc

SEQ ID NO: 1517738 - DNA, 15 bp, Homo sapiens
caaaaagaaagcaat

SEQ ID NO: 1517739 - DNA, 15 bp, Homo sapiens
ccaaaaagaaagcaa

SEQ ID NO: 1517740 - DNA, 15 bp, Homo sapiens
accaaaaagaaagca

SEQ ID NO: 1517741 - DNA, 15 bp, Homo sapiens
aaccaaaaagaaagc

SEQ ID NO: 1517742 - DNA, 15 bp, Homo sapiens
caaccaaaaagaaag

SEQ ID NO: 1517743 - DNA, 15 bp, Homo sapiens
tcaaccaaaaagaaa

SEQ ID NO: 1517744 - DNA, 15 bp, Homo sapiens
ctcaaccaaaaagaa

SEQ ID NO: 1517745 - DNA, 15 bp, Homo sapiens
tctcaaccaaaaaga

SEQ ID NO: 1517746 - DNA, 15 bp, Homo sapiens
ttctcaaccaaaaag

SEQ ID NO: 1517747 - DNA, 15 bp, Homo sapiens
cttctcaaccaaaaa

SEQ ID NO: 1517748 - DNA, 15 bp, Homo sapiens
ccttctcaaccaaaa

SEQ ID NO: 1517749 - DNA, 15 bp, Homo sapiens
tccttctcaaccaaa

SEQ ID NO: 1517750 - DNA, 15 bp, Homo sapiens
ctccttctcaaccaa

SEQ ID NO: 1517751 - DNA, 15 bp, Homo sapiens
tctccttctcaacca

SEQ ID NO: 1517752 - DNA, 15 bp, Homo sapiens
ctctccttctcaacc

SEQ ID NO: 1517753 - DNA, 15 bp, Homo sapiens
actctccttctcaac

SEQ ID NO: 1517754 - DNA, 15 bp, Homo sapiens
aactctccttctcaa

SEQ ID NO: 1517755 - DNA, 15 bp, Homo sapiens
aaactctccttctca

SEQ ID NO: 1517756 - DNA, 15 bp, Homo sapiens
caaactctccttctc

SEQ ID NO: 1517757 - DNA, 15 bp, Homo sapiens
gcaaactctccttct

SEQ ID NO: 1517758 - DNA, 15 bp, Homo sapiens
ggcaaactctccttc

SEQ ID NO: 1517759 - DNA, 15 bp, Homo sapiens
tggcaaactctcctt

SEQ ID NO: 1517760 - DNA, 15 bp, Homo sapiens
gtggcaaactctcct

SEQ ID NO: 1517761 - DNA, 15 bp, Homo sapiens
ggtggcaaactctcc

SEQ ID NO: 1517762 - DNA, 15 bp, Homo sapiens
tggtggcaaactctc

SEQ ID NO: 1517763 - DNA, 15 bp, Homo sapiens
ctggtggcaaactct

SEQ ID NO: 1517764 - DNA, 15 bp, Homo sapiens
cctggtggcaaactc

SEQ ID NO: 1517765 - DNA, 15 bp, Homo sapiens
gcctggtggcaaact

SEQ ID NO: 1517766 - DNA, 15 bp, Homo sapiens
ggcctggtggcaaac

SEQ ID NO: 1517767 - DNA, 15 bp, Homo sapiens
tggcctggtggcaaa

SEQ ID NO: 1517768 - DNA, 15 bp, Homo sapiens
gtggcctggtggcaa

SEQ ID NO: 1517769 - DNA, 15 bp, Homo sapiens
agtggcctggtggca

SEQ ID NO: 1517770 - DNA, 15 bp, Homo sapiens
aagtggcctggtggc

SEQ ID NO: 1517771 - DNA, 15 bp, Homo sapiens
caagtggcctggtgg

SEQ ID NO: 1517772 - DNA, 15 bp, Homo sapiens
acaagtggcctggtg

SEQ ID NO: 1517773 - DNA, 15 bp, Homo sapiens
aacaagtggcctggt

SEQ ID NO: 1517774 - DNA, 15 bp, Homo sapiens
taacaagtggcctgg

SEQ ID NO: 1517775 - DNA, 15 bp, Homo sapiens
ctaacaagtggcctg

SEQ ID NO: 1517776 - DNA, 15 bp, Homo sapiens
tctaacaagtggcct

SEQ ID NO: 1517777 - DNA, 15 bp, Homo sapiens
atctaacaagtggcc

SEQ ID NO: 1517778 - DNA, 15 bp, Homo sapiens
tatctaacaagtggc

SEQ ID NO: 1517779 - DNA, 15 bp, Homo sapiens
atatctaacaagtgg

SEQ ID NO: 1517780 - DNA, 15 bp, Homo sapiens
catatctaacaagtg

SEQ ID NO: 1517781 - DNA, 15 bp, Homo sapiens
tcatatctaacaagt

SEQ ID NO: 1517782 - DNA, 15 bp, Homo sapiens
atcatatctaacaag

SEQ ID NO: 1517783 - DNA, 15 bp, Homo sapiens
tatcatatctaacaa

SEQ ID NO: 1517784 - DNA, 15 bp, Homo sapiens
ctatcatatctaaca

SEQ ID NO: 1517785 - DNA, 15 bp, Homo sapiens
tctatcatatctaac

SEQ ID NO: 1517786 - DNA, 15 bp, Homo sapiens
ttctatcatatctaa

SEQ ID NO: 1517787 - DNA, 15 bp, Homo sapiens
cttctatcatatcta

SEQ ID NO: 1517788 - DNA, 15 bp, Homo sapiens
tcttctatcatatct

SEQ ID NO: 1517789 - DNA, 15 bp, Homo sapiens
gtcttctatcatatc

SEQ ID NO: 1517790 - DNA, 15 bp, Homo sapiens
agtcttctatcatat

SEQ ID NO: 1517791 - DNA, 15 bp, Homo sapiens
tagtcttctatcata

SEQ ID NO: 1517792 - DNA, 15 bp, Homo sapiens
atagtcttctatcat

SEQ ID NO: 1517793 - DNA, 15 bp, Homo sapiens
catagtcttctatca

SEQ ID NO: 1517794 - DNA, 15 bp, Homo sapiens
tcatagtcttctatc

SEQ ID NO: 1517795 - DNA, 15 bp, Homo sapiens
ctcatagtcttctat

SEQ ID NO: 1517796 - DNA, 15 bp, Homo sapiens
cctcatagtcttcta

SEQ ID NO: 1517797 - DNA, 15 bp, Homo sapiens
tcctcatagtcttct

SEQ ID NO: 1517798 - DNA, 15 bp, Homo sapiens
ttcctcatagtcttc

SEQ ID NO: 1517799 - DNA, 15 bp, Homo sapiens
tttcctcatagtctt

SEQ ID NO: 1517800 - DNA, 15 bp, Homo sapiens
ctttcctcatagtct

SEQ ID NO: 1517801 - DNA, 15 bp, Homo sapiens
tctttcctcatagtc

SEQ ID NO: 1517802 - DNA, 15 bp, Homo sapiens
atctttcctcatagt

SEQ ID NO: 1517803 - DNA, 15 bp, Homo sapiens
catctttcctcatag

SEQ ID NO: 1517804 - DNA, 15 bp, Homo sapiens
acatctttcctcata

SEQ ID NO: 1517805 - DNA, 15 bp, Homo sapiens
atacatctttcctca

SEQ ID NO: 1517806 - DNA, 15 bp, Homo sapiens
aatacatctttcctc

SEQ ID NO: 1517807 - DNA, 15 bp, Homo sapiens
aaatacatctttcct

SEQ ID NO: 1517808 - DNA, 15 bp, Homo sapiens
taaatacatctttcc

SEQ ID NO: 1517809 - DNA, 15 bp, Homo sapiens
ttaaatacatctttc

SEQ ID NO: 1517810 - DNA, 15 bp, Homo sapiens
attaaatacatcttt

SEQ ID NO: 1517811 - DNA, 15 bp, Homo sapiens
tattaaatacatctt

SEQ ID NO: 1517812 - DNA, 15 bp, Homo sapiens
ttattaaatacatct

SEQ ID NO: 1517813 - DNA, 15 bp, Homo sapiens
attattaaatacatc

SEQ ID NO: 1517814 - DNA, 15 bp, Homo sapiens
gattattaaatacat

SEQ ID NO: 1517815 - DNA, 15 bp, Homo sapiens
tgattattaaataca

SEQ ID NO: 1517816 - DNA, 15 bp, Homo sapiens
gtgattattaaatac

SEQ ID NO: 1517817 - DNA, 15 bp, Homo sapiens
tgtgattattaaata

SEQ ID NO: 1517818 - DNA, 15 bp, Homo sapiens
atgtgattattaaat

SEQ ID NO: 1517819 - DNA, 15 bp, Homo sapiens
aatgtgattattaaa

SEQ ID NO: 1517820 - DNA, 15 bp, Homo sapiens
caatgtgattattaa

SEQ ID NO: 1517821 - DNA, 15 bp, Homo sapiens
gcaatgtgattatta

SEQ ID NO: 1517822 - DNA, 15 bp, Homo sapiens
ggcaatgtgattatt

SEQ ID NO: 1517823 - DNA, 15 bp, Homo sapiens
tggcaatgtgattat

SEQ ID NO: 1517824 - DNA, 15 bp, Homo sapiens
atggcaatgtgatta

SEQ ID NO: 1517825 - DNA, 15 bp, Homo sapiens
catggcaatgtgatt

SEQ ID NO: 1517826 - DNA, 15 bp, Homo sapiens
acatggcaatgtgat

SEQ ID NO: 1517827 - DNA, 15 bp, Homo sapiens
aacatggcaatgtga

SEQ ID NO: 1517828 - DNA, 15 bp, Homo sapiens
aaacatggcaatgtg

SEQ ID NO: 1517829 - DNA, 15 bp, Homo sapiens
caaacatggcaatgt

SEQ ID NO: 1517830 - DNA, 15 bp, Homo sapiens
ccaaacatggcaatg

SEQ ID NO: 1517831 - DNA, 15 bp, Homo sapiens
cccaaacatggcaat

SEQ ID NO: 1517832 - DNA, 15 bp, Homo sapiens
ccccaaacatggcaa

SEQ ID NO: 1517833 - DNA, 15 bp, Homo sapiens
tccccaaacatggca

SEQ ID NO: 1517834 - DNA, 15 bp, Homo sapiens
ttccccaaacatggc

SEQ ID NO: 1517835 - DNA, 15 bp, Homo sapiens
attccccaaacatgg

SEQ ID NO: 1517836 - DNA, 15 bp, Homo sapiens
gattccccaaacatg

SEQ ID NO: 1517837 - DNA, 15 bp, Homo sapiens
ggattccccaaacat

SEQ ID NO: 1517838 - DNA, 15 bp, Homo sapiens
tggattccccaaaca

SEQ ID NO: 1517839 - DNA, 15 bp, Homo sapiens
ttggattccccaaac

SEQ ID NO: 1517840 - DNA, 15 bp, Homo sapiens
gttggattccccaaa

SEQ ID NO: 1517841 - DNA, 15 bp, Homo sapiens
agttggattccccaa

SEQ ID NO: 1517842 - DNA, 15 bp, Homo sapiens
tagttggattcccca

SEQ ID NO: 1517843 - DNA, 15 bp, Homo sapiens
atagttggattcccc

SEQ ID NO: 1517844 - DNA, 15 bp, Homo sapiens
tatagttggattccc

SEQ ID NO: 1517845 - DNA, 15 bp, Homo sapiens
atatagttggattcc

SEQ ID NO: 1517846 - DNA, 15 bp, Homo sapiens
tatatagttggattc

SEQ ID NO: 1517847 - DNA, 15 bp, Homo sapiens
atatatagttggatt

SEQ ID NO: 1517848 - DNA, 15 bp, Homo sapiens
aatatatagttggat

SEQ ID NO: 1517849 - DNA, 15 bp, Homo sapiens
taatatatagttgga

SEQ ID NO: 1517850 - DNA, 15 bp, Homo sapiens
ataatatatagttgg

SEQ ID NO: 1517851 - DNA, 15 bp, Homo sapiens
aataatatatagttg

SEQ ID NO: 1517852 - DNA, 15 bp, Homo sapiens
aaataatatatagtt

SEQ ID NO: 1517853 - DNA, 15 bp, Homo sapiens
taaataatatatagt

SEQ ID NO: 1517854 - DNA, 15 bp, Homo sapiens
ataaataatatatag

SEQ ID NO: 1517855 - DNA, 15 bp, Homo sapiens
tataaataatatata

SEQ ID NO: 1517856 - DNA, 15 bp, Homo sapiens
atataaataatatat

SEQ ID NO: 1517857 - DNA, 15 bp, Homo sapiens
tatataaataatata

SEQ ID NO: 1517858 - DNA, 15 bp, Homo sapiens
atatataaataatat

SEQ ID NO: 1517859 - DNA, 15 bp, Homo sapiens
tatatataaataata

SEQ ID NO: 1517860 - DNA, 15 bp, Homo sapiens
atatatataaataat

SEQ ID NO: 1517861 - DNA, 15 bp, Homo sapiens
tatatatataaataa

SEQ ID NO: 1517862 - DNA, 15 bp, Homo sapiens
ctatatatataaata

SEQ ID NO: 1517863 - DNA, 15 bp, Homo sapiens
cctatatatataaat

SEQ ID NO: 1517864 - DNA, 15 bp, Homo sapiens
ccctatatatataaa

SEQ ID NO: 1517865 - DNA, 15 bp, Homo sapiens
accctatatatataa

SEQ ID NO: 1517866 - DNA, 15 bp, Homo sapiens
caccctatatatata

SEQ ID NO: 1517867 - DNA, 15 bp, Homo sapiens
acaccctatatatat

SEQ ID NO: 1517868 - DNA, 15 bp, Homo sapiens
cacaccctatatata

SEQ ID NO: 1517869 - DNA, 15 bp, Homo sapiens
acacaccctatatat

SEQ ID NO: 1517870 - DNA, 15 bp, Homo sapiens
aacacaccctatata

SEQ ID NO: 1517871 - DNA, 15 bp, Homo sapiens
aaacacaccctatat

SEQ ID NO: 1517872 - DNA, 15 bp, Homo sapiens
aaaacacaccctata

SEQ ID NO: 1517873 - DNA, 15 bp, Homo sapiens
taaaacacaccctat

SEQ ID NO: 1517874 - DNA, 15 bp, Homo sapiens
ataaaacacacccta

SEQ ID NO: 1517875 - DNA, 15 bp, Homo sapiens
aataaaacacaccct

SEQ ID NO: 1517876 - DNA, 15 bp, Homo sapiens
aaataaaacacaccc

SEQ ID NO: 1517877 - DNA, 15 bp, Homo sapiens
aaaataaaacacacc

SEQ ID NO: 1517878 - DNA, 15 bp, Homo sapiens
taaaataaaacacac

SEQ ID NO: 1517879 - DNA, 15 bp, Homo sapiens
ataaaataaaacaca

SEQ ID NO: 1517880 - DNA, 15 bp, Homo sapiens
tataaaataaaacac

SEQ ID NO: 1517881 - DNA, 15 bp, Homo sapiens
atataaaataaaaca

SEQ ID NO: 1517882 - DNA, 15 bp, Homo sapiens
tatataaaataaaac

SEQ ID NO: 1517883 - DNA, 15 bp, Homo sapiens
atatataaaataaaa

SEQ ID NO: 1517884 - DNA, 15 bp, Homo sapiens
aatatataaaataaa

SEQ ID NO: 1517885 - DNA, 15 bp, Homo sapiens
caatatataaaataa

SEQ ID NO: 1517886 - DNA, 15 bp, Homo sapiens
tcaatatataaaata

SEQ ID NO: 1517887 - DNA, 15 bp, Homo sapiens
atcaatatataaaat

SEQ ID NO: 1517888 - DNA, 15 bp, Homo sapiens
aatcaatatataaaa

SEQ ID NO: 1517889 - DNA, 15 bp, Homo sapiens
caatcaatatataaa

SEQ ID NO: 1517890 - DNA, 15 bp, Homo sapiens
acaatcaatatataa

SEQ ID NO: 1517891 - DNA, 15 bp, Homo sapiens
gacaatcaatatata

SEQ ID NO: 1517892 - DNA, 15 bp, Homo sapiens
tgacaatcaatatat

SEQ ID NO: 1517893 - DNA, 15 bp, Homo sapiens
atgacaatcaatata

SEQ ID NO: 1517894 - DNA, 15 bp, Homo sapiens
tatgacaatcaatat

SEQ ID NO: 1517895 - DNA, 15 bp, Homo sapiens
ttatgacaatcaata

SEQ ID NO: 1517896 - DNA, 15 bp, Homo sapiens
gttatgacaatcaat

SEQ ID NO: 1517897 - DNA, 15 bp, Homo sapiens
tgttatgacaatcaa

SEQ ID NO: 1517898 - DNA, 15 bp, Homo sapiens
ttgttatgacaatca

SEQ ID NO: 1517899 - DNA, 15 bp, Homo sapiens
attgttatgacaatc

SEQ ID NO: 1517900 - DNA, 15 bp, Homo sapiens
tattgttatgacaat

SEQ ID NO: 1517901 - DNA, 15 bp, Homo sapiens
ctattgttatgacaa

SEQ ID NO: 1517902 - DNA, 15 bp, Homo sapiens
actattgttatgaca

SEQ ID NO: 1517903 - DNA, 15 bp, Homo sapiens
tactattgttatgac

SEQ ID NO: 1517904 - DNA, 15 bp, Homo sapiens
ttactattgttatga

SEQ ID NO: 1517905 - DNA, 15 bp, Homo sapiens
gttactattgttatg

SEQ ID NO: 1517906 - DNA, 15 bp, Homo sapiens
tgttactattgttat

SEQ ID NO: 1517907 - DNA, 15 bp, Homo sapiens
ttgttactattgtta

SEQ ID NO: 1517908 - DNA, 15 bp, Homo sapiens
tttgttactattgtt

SEQ ID NO: 1517909 - DNA, 15 bp, Homo sapiens
atttgttactattgt

SEQ ID NO: 1517910 - DNA, 15 bp, Homo sapiens
gatttgttactattg

SEQ ID NO: 1517911 - DNA, 15 bp, Homo sapiens
tgatttgttactatt

SEQ ID NO: 1517912 - DNA, 15 bp, Homo sapiens
atgatttgttactat

SEQ ID NO: 1517913 - DNA, 15 bp, Homo sapiens
tatgatttgttacta

SEQ ID NO: 1517914 - DNA, 15 bp, Homo sapiens
atatgatttgttact

SEQ ID NO: 1517915 - DNA, 15 bp, Homo sapiens
aatatgatttgttac

SEQ ID NO: 1517916 - DNA, 15 bp, Homo sapiens
aaatatgatttgtta

SEQ ID NO: 1517917 - DNA, 15 bp, Homo sapiens
aaaatatgatttgtt

SEQ ID NO: 1517918 - DNA, 15 bp, Homo sapiens
taaaatatgatttgt

SEQ ID NO: 1517919 - DNA, 15 bp, Homo sapiens
ataaaatatgatttg

SEQ ID NO: 1517920 - DNA, 15 bp, Homo sapiens
gataaaatatgattt

SEQ ID NO: 1517921 - DNA, 15 bp, Homo sapiens
tgataaaatatgatt

SEQ ID NO: 1517922 - DNA, 15 bp, Homo sapiens
atgataaaatatgat

SEQ ID NO: 1517923 - DNA, 15 bp, Homo sapiens
gatgataaaatatga

SEQ ID NO: 1517924 - DNA, 15 bp, Homo sapiens
agatgataaaatatg

SEQ ID NO: 1517925 - DNA, 15 bp, Homo sapiens
aagatgataaaatat

SEQ ID NO: 1517926 - DNA, 15 bp, Homo sapiens
caagatgataaaata

SEQ ID NO: 1517927 - DNA, 15 bp, Homo sapiens
gcaagatgataaaat

SEQ ID NO: 1517928 - DNA, 15 bp, Homo sapiens
agcaagatgataaaa

SEQ ID NO: 1517929 - DNA, 15 bp, Homo sapiens
aagcaagatgataaa

SEQ ID NO: 1517930 - DNA, 15 bp, Homo sapiens
aaagcaagatgataa

SEQ ID NO: 1517931 - DNA, 15 bp, Homo sapiens
gaaagcaagatgata

SEQ ID NO: 1517932 - DNA, 15 bp, Homo sapiens
tgaaagcaagatgat

SEQ ID NO: 1517933 - DNA, 15 bp, Homo sapiens
atgaaagcaagatga

SEQ ID NO: 1517934 - DNA, 15 bp, Homo sapiens
tatgaaagcaagatg

SEQ ID NO: 1517935 - DNA, 15 bp, Homo sapiens
ttatgaaagcaagat

SEQ ID NO: 1517936 - DNA, 15 bp, Homo sapiens
cttatgaaagcaaga

SEQ ID NO: 1517937 - DNA, 15 bp, Homo sapiens
acttatgaaagcaag

SEQ ID NO: 1517938 - DNA, 15 bp, Homo sapiens
aacttatgaaagcaa

SEQ ID NO: 1517939 - DNA, 15 bp, Homo sapiens
aaacttatgaaagca

SEQ ID NO: 1517940 - DNA, 15 bp, Homo sapiens
aaaacttatgaaagc

SEQ ID NO: 1517941 - DNA, 15 bp, Homo sapiens
gaaaacttatgaaag

SEQ ID NO: 1517942 - DNA, 15 bp, Homo sapiens
tgaaaacttatgaaa

SEQ ID NO: 1517943 - DNA, 15 bp, Homo sapiens
gtgaaaacttatgaa

SEQ ID NO: 1517944 - DNA, 15 bp, Homo sapiens
tgtgaaaacttatga

SEQ ID NO: 1517945 - DNA, 15 bp, Homo sapiens
atgtgaaaacttatg

SEQ ID NO: 1517946 - DNA, 15 bp, Homo sapiens
aatgtgaaaacttat

SEQ ID NO: 1517947 - DNA, 15 bp, Homo sapiens
aaatgtgaaaactta

SEQ ID NO: 1517948 - DNA, 15 bp, Homo sapiens
taaatgtgaaaactt

SEQ ID NO: 1517949 - DNA, 15 bp, Homo sapiens
ttaaatgtgaaaact

SEQ ID NO: 1517950 - DNA, 15 bp, Homo sapiens
attaaatgtgaaaac

SEQ ID NO: 1517951 - DNA, 15 bp, Homo sapiens
tattaaatgtgaaaa

SEQ ID NO: 1517952 - DNA, 15 bp, Homo sapiens
gtattaaatgtgaaa

SEQ ID NO: 1517953 - DNA, 15 bp, Homo sapiens
agtattaaatgtgaa

SEQ ID NO: 1517954 - DNA, 15 bp, Homo sapiens
aagtattaaatgtga

SEQ ID NO: 1517955 - DNA, 15 bp, Homo sapiens
taagtattaaatgtg

SEQ ID NO: 1517956 - DNA, 15 bp, Homo sapiens
gtaagtattaaatgt

SEQ ID NO: 1517957 - DNA, 15 bp, Homo sapiens
ggtaagtattaaatg

SEQ ID NO: 1517958 - DNA, 15 bp, Homo sapiens
tggtaagtattaaat

SEQ ID NO: 1517959 - DNA, 15 bp, Homo sapiens
ctggtaagtattaaa

SEQ ID NO: 1517960 - DNA, 15 bp, Homo sapiens
cctggtaagtattaa

SEQ ID NO: 1517961 - DNA, 15 bp, Homo sapiens
ccctggtaagtatta

SEQ ID NO: 1517962 - DNA, 15 bp, Homo sapiens
tccctggtaagtatt

SEQ ID NO: 1517963 - DNA, 15 bp, Homo sapiens
ctccctggtaagtat

SEQ ID NO: 1517964 - DNA, 15 bp, Homo sapiens
actccctggtaagta

SEQ ID NO: 1517965 - DNA, 15 bp, Homo sapiens
cactccctggtaagt

SEQ ID NO: 1517966 - DNA, 15 bp, Homo sapiens
tcactccctggtaag

SEQ ID NO: 1517967 - DNA, 15 bp, Homo sapiens
ttcactccctggtaa

SEQ ID NO: 1517968 - DNA, 15 bp, Homo sapiens
cttcactccctggta

SEQ ID NO: 1517969 - DNA, 15 bp, Homo sapiens
tcttcactccctggt

SEQ ID NO: 1517970 - DNA, 15 bp, Homo sapiens
gtcttcactccctgg

SEQ ID NO: 1517971 - DNA, 15 bp, Homo sapiens
tgtcttcactccctg

SEQ ID NO: 1517972 - DNA, 15 bp, Homo sapiens
ttgtcttcactccct

SEQ ID NO: 1517973 - DNA, 15 bp, Homo sapiens
gttgtcttcactccc

SEQ ID NO: 1517974 - DNA, 15 bp, Homo sapiens
tgttgtcttcactcc

SEQ ID NO: 1517975 - DNA, 15 bp, Homo sapiens
atgttgtcttcactc

SEQ ID NO: 1517976 - DNA, 15 bp, Homo sapiens
aatgttgtcttcact

SEQ ID NO: 1517977 - DNA, 15 bp, Homo sapiens
taatgttgtcttcac

SEQ ID NO: 1517978 - DNA, 15 bp, Homo sapiens
ataatgttgtcttca

SEQ ID NO: 1517979 - DNA, 15 bp, Homo sapiens
aataatgttgtcttc

SEQ ID NO: 1517980 - DNA, 15 bp, Homo sapiens
aaataatgttgtctt

SEQ ID NO: 1517981 - DNA, 15 bp, Homo sapiens
aaaataatgttgtct

SEQ ID NO: 1517982 - DNA, 15 bp, Homo sapiens
gaaaataatgttgtc

SEQ ID NO: 1517983 - DNA, 15 bp, Homo sapiens
tgaaaataatgttgt

SEQ ID NO: 1517984 - DNA, 15 bp, Homo sapiens
ttgaaaataatgttg

SEQ ID NO: 1517985 - DNA, 15 bp, Homo sapiens
tttgaaaataatgtt

SEQ ID NO: 1517986 - DNA, 15 bp, Homo sapiens
atttgaaaataatgt

SEQ ID NO: 1517987 - DNA, 15 bp, Homo sapiens
aatttgaaaataatg

SEQ ID NO: 1517988 - DNA, 15 bp, Homo sapiens
taatttgaaaataat

SEQ ID NO: 1517989 - DNA, 15 bp, Homo sapiens
ataatttgaaaataa

SEQ ID NO: 1517990 - DNA, 15 bp, Homo sapiens
tataatttgaaaata

SEQ ID NO: 1517991 - DNA, 15 bp, Homo sapiens
ctataatttgaaaat

SEQ ID NO: 1517992 - DNA, 15 bp, Homo sapiens
actataatttgaaaa

SEQ ID NO: 1517993 - DNA, 15 bp, Homo sapiens
aactataatttgaaa

SEQ ID NO: 1517994 - DNA, 15 bp, Homo sapiens
taactataatttgaa

SEQ ID NO: 1517995 - DNA, 15 bp, Homo sapiens
ttaactataatttga

SEQ ID NO: 1517996 - DNA, 15 bp, Homo sapiens
cttaactataatttg

SEQ ID NO: 1517997 - DNA, 15 bp, Homo sapiens
ccttaactataattt

SEQ ID NO: 1517998 - DNA, 15 bp, Homo sapiens
tccttaactataatt

SEQ ID NO: 1517999 - DNA, 15 bp, Homo sapiens
ttccttaactataat

SEQ ID NO: 1518000 - DNA, 15 bp, Homo sapiens
tttccttaactataa

SEQ ID NO: 1518001 - DNA, 15 bp, Homo sapiens
ttttccttaactata

SEQ ID NO: 1518002 - DNA, 15 bp, Homo sapiens
attttccttaactat

SEQ ID NO: 1518003 - DNA, 15 bp, Homo sapiens
cattttccttaacta

SEQ ID NO: 1518004 - DNA, 15 bp, Homo sapiens
gcattttccttaact

SEQ ID NO: 1518005 - DNA, 15 bp, Homo sapiens
tgcattttccttaac

SEQ ID NO: 1518006 - DNA, 15 bp, Homo sapiens
ttgcattttccttaa

SEQ ID NO: 1518007 - DNA, 15 bp, Homo sapiens
gttgcattttcctta

SEQ ID NO: 1518008 - DNA, 15 bp, Homo sapiens
gagttgcattttcct

SEQ ID NO: 1518009 - DNA, 15 bp, Homo sapiens
tgagttgcattttcc

SEQ ID NO: 1518010 - DNA, 15 bp, Homo sapiens
ttgagttgcattttc

SEQ ID NO: 1518011 - DNA, 15 bp, Homo sapiens
attgagttgcatttt

SEQ ID NO: 1518012 - DNA, 15 bp, Homo sapiens
cattgagttgcattt

SEQ ID NO: 1518013 - DNA, 15 bp, Homo sapiens
acattgagttgcatt

SEQ ID NO: 1518014 - DNA, 15 bp, Homo sapiens
cacattgagttgcat

SEQ ID NO: 1518015 - DNA, 15 bp, Homo sapiens
tcacattgagttgca

SEQ ID NO: 1518016 - DNA, 15 bp, Homo sapiens
ttcacattgagttgc

SEQ ID NO: 1518017 - DNA, 15 bp, Homo sapiens
attcacattgagttg

SEQ ID NO: 1518018 - DNA, 15 bp, Homo sapiens
tattcacattgagtt

SEQ ID NO: 1518019 - DNA, 15 bp, Homo sapiens
ttattcacattgagt

SEQ ID NO: 1518020 - DNA, 15 bp, Homo sapiens
attattcacattgag

SEQ ID NO: 1518021 - DNA, 15 bp, Homo sapiens
aattattcacattga

SEQ ID NO: 1518022 - DNA, 15 bp, Homo sapiens
caattattcacattg

SEQ ID NO: 1518023 - DNA, 15 bp, Homo sapiens
tcaattattcacatt

SEQ ID NO: 1518024 - DNA, 15 bp, Homo sapiens
gtcaattattcacat

SEQ ID NO: 1518025 - DNA, 15 bp, Homo sapiens
agtcaattattcaca

SEQ ID NO: 1518026 - DNA, 15 bp, Homo sapiens
aagtcaattattcac

SEQ ID NO: 1518027 - DNA, 15 bp, Homo sapiens
caagtcaattattca

SEQ ID NO: 1518028 - DNA, 15 bp, Homo sapiens
gcaagtcaattattc

SEQ ID NO: 1518029 - DNA, 15 bp, Homo sapiens
ggcaagtcaattatt

SEQ ID NO: 1518030 - DNA, 15 bp, Homo sapiens
aggcaagtcaattat

SEQ ID NO: 1518031 - DNA, 15 bp, Homo sapiens
taggcaagtcaatta

SEQ ID NO: 1518032 - DNA, 15 bp, Homo sapiens
ttaggcaagtcaatt

SEQ ID NO: 1518033 - DNA, 15 bp, Homo sapiens
cttaggcaagtcaat

SEQ ID NO: 1518034 - DNA, 15 bp, Homo sapiens
tcttaggcaagtcaa

SEQ ID NO: 1518035 - DNA, 15 bp, Homo sapiens
atcttaggcaagtca

SEQ ID NO: 1518036 - DNA, 15 bp, Homo sapiens
aatcttaggcaagtc

SEQ ID NO: 1518037 - DNA, 15 bp, Homo sapiens
gaatcttaggcaagt

SEQ ID NO: 1518038 - DNA, 15 bp, Homo sapiens
ggaatcttaggcaag

SEQ ID NO: 1518039 - DNA, 15 bp, Homo sapiens
tggaatcttaggcaa

SEQ ID NO: 1518040 - DNA, 15 bp, Homo sapiens
gtggaatcttaggca

SEQ ID NO: 1518041 - DNA, 15 bp, Homo sapiens
tgtggaatcttaggc

SEQ ID NO: 1518042 - DNA, 15 bp, Homo sapiens
gtgtggaatcttagg

SEQ ID NO: 1518043 - DNA, 15 bp, Homo sapiens
ggtgtggaatcttag

SEQ ID NO: 1518044 - DNA, 15 bp, Homo sapiens
aggtgtggaatctta

SEQ ID NO: 1518045 - DNA, 15 bp, Homo sapiens
caggtgtggaatctt

SEQ ID NO: 1518046 - DNA, 15 bp, Homo sapiens
tcaggtgtggaatct

SEQ ID NO: 1518047 - DNA, 15 bp, Homo sapiens
atcaggtgtggaatc

SEQ ID NO: 1518048 - DNA, 15 bp, Homo sapiens
aatcaggtgtggaat

SEQ ID NO: 1518049 - DNA, 15 bp, Homo sapiens
gaatcaggtgtggaa

SEQ ID NO: 1518050 - DNA, 15 bp, Homo sapiens
tgaatcaggtgtgga

SEQ ID NO: 1518051 - DNA, 15 bp, Homo sapiens
atgaatcaggtgtgg

SEQ ID NO: 1518052 - DNA, 15 bp, Homo sapiens
tatgaatcaggtgtg

SEQ ID NO: 1518053 - DNA, 15 bp, Homo sapiens
ctatgaatcaggtgt

SEQ ID NO: 1518054 - DNA, 15 bp, Homo sapiens
cctatgaatcaggtg

SEQ ID NO: 1518055 - DNA, 15 bp, Homo sapiens
acctatgaatcaggt

SEQ ID NO: 1518056 - DNA, 15 bp, Homo sapiens
gacctatgaatcagg

SEQ ID NO: 1518057 - DNA, 15 bp, Homo sapiens
agacctatgaatcag

SEQ ID NO: 1518058 - DNA, 15 bp, Homo sapiens
aagacctatgaatca

SEQ ID NO: 1518059 - DNA, 15 bp, Homo sapiens
aaagacctatgaatc

SEQ ID NO: 1518060 - DNA, 15 bp, Homo sapiens
aaaagacctatgaat

SEQ ID NO: 1518061 - DNA, 15 bp, Homo sapiens
caaaagacctatgaa

SEQ ID NO: 1518062 - DNA, 15 bp, Homo sapiens
ccaaaagacctatga

SEQ ID NO: 1518063 - DNA, 15 bp, Homo sapiens
accaaaagacctatg

SEQ ID NO: 1518064 - DNA, 15 bp, Homo sapiens
aaccaaaagacctat

SEQ ID NO: 1518065 - DNA, 15 bp, Homo sapiens
aaaccaaaagaccta

SEQ ID NO: 1518066 - DNA, 15 bp, Homo sapiens
aaaaccaaaagacct

SEQ ID NO: 1518067 - DNA, 15 bp, Homo sapiens
taaaaccaaaagacc

SEQ ID NO: 1518068 - DNA, 15 bp, Homo sapiens
ttaaaaccaaaagac

SEQ ID NO: 1518069 - DNA, 15 bp, Homo sapiens
cttaaaaccaaaaga

SEQ ID NO: 1518070 - DNA, 15 bp, Homo sapiens
acttaaaaccaaaag

SEQ ID NO: 1518071 - DNA, 15 bp, Homo sapiens
cacttaaaaccaaaa

SEQ ID NO: 1518072 - DNA, 15 bp, Homo sapiens
gcacttaaaaccaaa

SEQ ID NO: 1518073 - DNA, 15 bp, Homo sapiens
tgcacttaaaaccaa

SEQ ID NO: 1518074 - DNA, 15 bp, Homo sapiens
ctgcacttaaaacca

SEQ ID NO: 1518075 - DNA, 15 bp, Homo sapiens
cctgcacttaaaacc

SEQ ID NO: 1518076 - DNA, 15 bp, Homo sapiens
tcctgcacttaaaac

SEQ ID NO: 1518077 - DNA, 15 bp, Homo sapiens
gtcctgcacttaaaa

SEQ ID NO: 1518078 - DNA, 15 bp, Homo sapiens
agtcctgcacttaaa

SEQ ID NO: 1518079 - DNA, 15 bp, Homo sapiens
aagtcctgcacttaa

SEQ ID NO: 1518080 - DNA, 15 bp, Homo sapiens
gaagtcctgcactta

SEQ ID NO: 1518081 - DNA, 15 bp, Homo sapiens
agaagtcctgcactt

SEQ ID NO: 1518082 - DNA, 15 bp, Homo sapiens
gagaagtcctgcact

SEQ ID NO: 1518083 - DNA, 15 bp, Homo sapiens
agagaagtcctgcac

SEQ ID NO: 1518084 - DNA, 15 bp, Homo sapiens
tagagaagtcctgca

SEQ ID NO: 1518085 - DNA, 15 bp, Homo sapiens
gtagagaagtcctgc

SEQ ID NO: 1518086 - DNA, 15 bp, Homo sapiens
agtagagaagtcctg

SEQ ID NO: 1518087 - DNA, 15 bp, Homo sapiens
tagtagagaagtcct

SEQ ID NO: 1518088 - DNA, 15 bp, Homo sapiens
gtagtagagaagtcc

SEQ ID NO: 1518089 - DNA, 15 bp, Homo sapiens
tgtagtagagaagtc

SEQ ID NO: 1518090 - DNA, 15 bp, Homo sapiens
gtgtagtagagaagt

SEQ ID NO: 1518091 - DNA, 15 bp, Homo sapiens
agtgtagtagagaag

SEQ ID NO: 1518092 - DNA, 15 bp, Homo sapiens
tagtgtagtagagaa

SEQ ID NO: 1518093 - DNA, 15 bp, Homo sapiens
atagtgtagtagaga

SEQ ID NO: 1518094 - DNA, 15 bp, Homo sapiens
tatagtgtagtagag

SEQ ID NO: 1518095 - DNA, 15 bp, Homo sapiens
ttatagtgtagtaga

SEQ ID NO: 1518096 - DNA, 15 bp, Homo sapiens
gttatagtgtagtag

SEQ ID NO: 1518097 - DNA, 15 bp, Homo sapiens
tgttatagtgtagta

SEQ ID NO: 1518098 - DNA, 15 bp, Homo sapiens
atgttatagtgtagt

SEQ ID NO: 1518099 - DNA, 15 bp, Homo sapiens
aatgttatagtgtag

SEQ ID NO: 1518100 - DNA, 15 bp, Homo sapiens
aaatgttatagtgta

SEQ ID NO: 1518101 - DNA, 15 bp, Homo sapiens
aaaatgttatagtgt

SEQ ID NO: 1518102 - DNA, 15 bp, Homo sapiens
aaaaatgttatagtg

SEQ ID NO: 1518103 - DNA, 15 bp, Homo sapiens
gaaaaatgttatagt

SEQ ID NO: 1518104 - DNA, 15 bp, Homo sapiens
tgaaaaatgttatag

SEQ ID NO: 1518105 - DNA, 15 bp, Homo sapiens
ctgaaaaatgttata

SEQ ID NO: 1518106 - DNA, 15 bp, Homo sapiens
tctgaaaaatgttat

SEQ ID NO: 1518107 - DNA, 15 bp, Homo sapiens
ttctgaaaaatgtta

SEQ ID NO: 1518108 - DNA, 15 bp, Homo sapiens
gttctgaaaaatgtt

SEQ ID NO: 1518109 - DNA, 15 bp, Homo sapiens
ggttctgaaaaatgt

SEQ ID NO: 1518110 - DNA, 15 bp, Homo sapiens
gggttctgaaaaatg

SEQ ID NO: 1518111 - DNA, 15 bp, Homo sapiens
agggttctgaaaaat

SEQ ID NO: 1518112 - DNA, 15 bp, Homo sapiens
gagggttctgaaaaa

SEQ ID NO: 1518113 - DNA, 15 bp, Homo sapiens
tgagggttctgaaaa

SEQ ID NO: 1518114 - DNA, 15 bp, Homo sapiens
atgagggttctgaaa

SEQ ID NO: 1518115 - DNA, 15 bp, Homo sapiens
tatgagggttctgaa

SEQ ID NO: 1518116 - DNA, 15 bp, Homo sapiens
ttatgagggttctga

SEQ ID NO: 1518117 - DNA, 15 bp, Homo sapiens
tttatgagggttctg

SEQ ID NO: 1518118 - DNA, 15 bp, Homo sapiens
ctttatgagggttct

SEQ ID NO: 1518119 - DNA, 15 bp, Homo sapiens
cctttatgagggttc

SEQ ID NO: 1518120 - DNA, 15 bp, Homo sapiens
acctttatgagggtt

SEQ ID NO: 1518121 - DNA, 15 bp, Homo sapiens
aacctttatgagggt

SEQ ID NO: 1518122 - DNA, 15 bp, Homo sapiens
taacctttatgaggg

SEQ ID NO: 1518123 - DNA, 15 bp, Homo sapiens
ttaacctttatgagg

SEQ ID NO: 1518124 - DNA, 15 bp, Homo sapiens
attaacctttatgag

SEQ ID NO: 1518125 - DNA, 15 bp, Homo sapiens
cattaacctttatga

SEQ ID NO: 1518126 - DNA, 15 bp, Homo sapiens
ccattaacctttatg

SEQ ID NO: 1518127 - DNA, 15 bp, Homo sapiens
accattaacctttat

SEQ ID NO: 1518128 - DNA, 15 bp, Homo sapiens
aaccattaaccttta

SEQ ID NO: 1518129 - DNA, 15 bp, Homo sapiens
aaaccattaaccttt

SEQ ID NO: 1518130 - DNA, 15 bp, Homo sapiens
aaaaccattaacctt

SEQ ID NO: 1518131 - DNA, 15 bp, Homo sapiens
taaaaccattaacct

SEQ ID NO: 1518132 - DNA, 15 bp, Homo sapiens
ttaaaaccattaacc

SEQ ID NO: 1518133 - DNA, 15 bp, Homo sapiens
tttaaaaccattaac

SEQ ID NO: 1518134 - DNA, 15 bp, Homo sapiens
atttaaaaccattaa

SEQ ID NO: 1518135 - DNA, 15 bp, Homo sapiens
aatttaaaaccatta

SEQ ID NO: 1518136 - DNA, 15 bp, Homo sapiens
taatttaaaaccatt

SEQ ID NO: 1518137 - DNA, 15 bp, Homo sapiens
ataatttaaaaccat

SEQ ID NO: 1518138 - DNA, 15 bp, Homo sapiens
aataatttaaaacca

SEQ ID NO: 1518139 - DNA, 15 bp, Homo sapiens
aaataatttaaaacc

SEQ ID NO: 1518140 - DNA, 15 bp, Homo sapiens
gaaataatttaaaac

SEQ ID NO: 1518141 - DNA, 15 bp, Homo sapiens
tgaaataatttaaaa

SEQ ID NO: 1518142 - DNA, 15 bp, Homo sapiens
ctgaaataatttaaa

SEQ ID NO: 1518143 - DNA, 15 bp, Homo sapiens
tctgaaataatttaa

SEQ ID NO: 1518144 - DNA, 15 bp, Homo sapiens
atctgaaataattta

SEQ ID NO: 1518145 - DNA, 15 bp, Homo sapiens
aatctgaaataattt

SEQ ID NO: 1518146 - DNA, 15 bp, Homo sapiens
taatctgaaataatt

SEQ ID NO: 1518147 - DNA, 15 bp, Homo sapiens
ttaatctgaaataat

SEQ ID NO: 1518148 - DNA, 15 bp, Homo sapiens
cttaatctgaaataa

SEQ ID NO: 1518149 - DNA, 15 bp, Homo sapiens
ccttaatctgaaata

SEQ ID NO: 1518150 - DNA, 15 bp, Homo sapiens
accttaatctgaaat

SEQ ID NO: 1518151 - DNA, 15 bp, Homo sapiens
aaccttaatctgaaa

SEQ ID NO: 1518152 - DNA, 15 bp, Homo sapiens
gaaccttaatctgaa

SEQ ID NO: 1518153 - DNA, 15 bp, Homo sapiens
tgaaccttaatctga

SEQ ID NO: 1518154 - DNA, 15 bp, Homo sapiens
ctgaaccttaatctg

SEQ ID NO: 1518155 - DNA, 15 bp, Homo sapiens
tctgaaccttaatct

SEQ ID NO: 1518156 - DNA, 15 bp, Homo sapiens
ttctgaaccttaatc

SEQ ID NO: 1518157 - DNA, 15 bp, Homo sapiens
tttctgaaccttaat

SEQ ID NO: 1518158 - DNA, 15 bp, Homo sapiens
ttttctgaaccttaa

SEQ ID NO: 1518159 - DNA, 15 bp, Homo sapiens
attttctgaacctta

SEQ ID NO: 1518160 - DNA, 15 bp, Homo sapiens
tattttctgaacctt

SEQ ID NO: 1518161 - DNA, 15 bp, Homo sapiens
atattttctgaacct

SEQ ID NO: 1518162 - DNA, 15 bp, Homo sapiens
tatattttctgaacc

SEQ ID NO: 1518163 - DNA, 15 bp, Homo sapiens
ctatattttctgaac

SEQ ID NO: 1518164 - DNA, 15 bp, Homo sapiens
actatattttctgaa

SEQ ID NO: 1518165 - DNA, 15 bp, Homo sapiens
tactatattttctga

SEQ ID NO: 1518166 - DNA, 15 bp, Homo sapiens
atactatattttctg

SEQ ID NO: 1518167 - DNA, 15 bp, Homo sapiens
tatactatattttct

SEQ ID NO: 1518168 - DNA, 15 bp, Homo sapiens
gtatactatattttc

SEQ ID NO: 1518169 - DNA, 15 bp, Homo sapiens
agtatactatatttt

SEQ ID NO: 1518170 - DNA, 15 bp, Homo sapiens
aagtatactatattt

SEQ ID NO: 1518171 - DNA, 15 bp, Homo sapiens
gaagtatactatatt

SEQ ID NO: 1518172 - DNA, 15 bp, Homo sapiens
tgaagtatactatat

SEQ ID NO: 1518173 - DNA, 15 bp, Homo sapiens
ctgaagtatactata

SEQ ID NO: 1518174 - DNA, 15 bp, Homo sapiens
actgaagtatactat

SEQ ID NO: 1518175 - DNA, 15 bp, Homo sapiens
tactgaagtatacta

SEQ ID NO: 1518176 - DNA, 15 bp, Homo sapiens
atactgaagtatact

SEQ ID NO: 1518177 - DNA, 15 bp, Homo sapiens
aatactgaagtatac

SEQ ID NO: 1518178 - DNA, 15 bp, Homo sapiens
caatactgaagtata

SEQ ID NO: 1518179 - DNA, 15 bp, Homo sapiens
gcaatactgaagtat

SEQ ID NO: 1518180 - DNA, 15 bp, Homo sapiens
agcaatactgaagta

SEQ ID NO: 1518181 - DNA, 15 bp, Homo sapiens
tagcaatactgaagt

SEQ ID NO: 1518182 - DNA, 15 bp, Homo sapiens
atagcaatactgaag

SEQ ID NO: 1518183 - DNA, 15 bp, Homo sapiens
tatagcaatactgaa

SEQ ID NO: 1518184 - DNA, 15 bp, Homo sapiens
ttatagcaatactga

SEQ ID NO: 1518185 - DNA, 15 bp, Homo sapiens
tttatagcaatactg

SEQ ID NO: 1518186 - DNA, 15 bp, Homo sapiens
ttttatagcaatact

SEQ ID NO: 1518187 - DNA, 15 bp, Homo sapiens
attttatagcaatac

SEQ ID NO: 1518188 - DNA, 15 bp, Homo sapiens
aattttatagcaata

SEQ ID NO: 1518189 - DNA, 15 bp, Homo sapiens
aaattttatagcaat

SEQ ID NO: 1518190 - DNA, 15 bp, Homo sapiens
gaaattttatagcaa

SEQ ID NO: 1518191 - DNA, 15 bp, Homo sapiens
agaaattttatagca

SEQ ID NO: 1518192 - DNA, 15 bp, Homo sapiens
cagaaattttatagc

SEQ ID NO: 1518193 - DNA, 15 bp, Homo sapiens
acagaaattttatag

SEQ ID NO: 1518194 - DNA, 15 bp, Homo sapiens
cacagaaattttata

SEQ ID NO: 1518195 - DNA, 15 bp, Homo sapiens
ccacagaaattttat

SEQ ID NO: 1518196 - DNA, 15 bp, Homo sapiens
tccacagaaatttta

SEQ ID NO: 1518197 - DNA, 15 bp, Homo sapiens
gtccacagaaatttt

SEQ ID NO: 1518198 - DNA, 15 bp, Homo sapiens
tgtccacagaaattt

SEQ ID NO: 1518199 - DNA, 15 bp, Homo sapiens
atgtccacagaaatt

SEQ ID NO: 1518200 - DNA, 15 bp, Homo sapiens
aatgtccacagaaat

SEQ ID NO: 1518201 - DNA, 15 bp, Homo sapiens
aaatgtccacagaaa

SEQ ID NO: 1518202 - DNA, 15 bp, Homo sapiens
caaatgtccacagaa

SEQ ID NO: 1518203 - DNA, 15 bp, Homo sapiens
acaaatgtccacaga

SEQ ID NO: 1518204 - DNA, 15 bp, Homo sapiens
aacaaatgtccacag

SEQ ID NO: 1518205 - DNA, 15 bp, Homo sapiens
aaacaaatgtccaca

SEQ ID NO: 1518206 - DNA, 15 bp, Homo sapiens
caaacaaatgtccac

SEQ ID NO: 1518207 - DNA, 15 bp, Homo sapiens
tcaaacaaatgtcca

SEQ ID NO: 1518208 - DNA, 15 bp, Homo sapiens
ttcaaacaaatgtcc

SEQ ID NO: 1518209 - DNA, 15 bp, Homo sapiens
attcaaacaaatgtc

SEQ ID NO: 1518210 - DNA, 15 bp, Homo sapiens
gattcaaacaaatgt

SEQ ID NO: 1518211 - DNA, 15 bp, Homo sapiens
ggattcaaacaaatg

SEQ ID NO: 1518212 - DNA, 15 bp, Homo sapiens
gggattcaaacaaat

SEQ ID NO: 1518213 - DNA, 15 bp, Homo sapiens
tgggattcaaacaaa

SEQ ID NO: 1518214 - DNA, 15 bp, Homo sapiens
atgggattcaaacaa

SEQ ID NO: 1518215 - DNA, 15 bp, Homo sapiens
aatgggattcaaaca

SEQ ID NO: 1518216 - DNA, 15 bp, Homo sapiens
aaatgggattcaaac

SEQ ID NO: 1518217 - DNA, 15 bp, Homo sapiens
taaatgggattcaaa

SEQ ID NO: 1518218 - DNA, 15 bp, Homo sapiens
ctaaatgggattcaa

SEQ ID NO: 1518219 - DNA, 15 bp, Homo sapiens
actaaatgggattca

SEQ ID NO: 1518220 - DNA, 15 bp, Homo sapiens
cactaaatgggattc

SEQ ID NO: 1518221 - DNA, 15 bp, Homo sapiens
ccactaaatgggatt

SEQ ID NO: 1518222 - DNA, 15 bp, Homo sapiens
cccactaaatgggat

SEQ ID NO: 1518223 - DNA, 15 bp, Homo sapiens
tcccactaaatggga

SEQ ID NO: 1518224 - DNA, 15 bp, Homo sapiens
atcccactaaatggg

SEQ ID NO: 1518225 - DNA, 15 bp, Homo sapiens
aatcccactaaatgg

SEQ ID NO: 1518226 - DNA, 15 bp, Homo sapiens
aaatcccactaaatg

SEQ ID NO: 1518227 - DNA, 15 bp, Homo sapiens
taaatcccactaaat

SEQ ID NO: 1518228 - DNA, 15 bp, Homo sapiens
ctaaatcccactaaa

SEQ ID NO: 1518229 - DNA, 15 bp, Homo sapiens
actaaatcccactaa

SEQ ID NO: 1518230 - DNA, 15 bp, Homo sapiens
aactaaatcccacta

SEQ ID NO: 1518231 - DNA, 15 bp, Homo sapiens
aaactaaatcccact

SEQ ID NO: 1518232 - DNA, 15 bp, Homo sapiens
caaactaaatcccac

SEQ ID NO: 1518233 - DNA, 15 bp, Homo sapiens
acaaactaaatccca

SEQ ID NO: 1518234 - DNA, 15 bp, Homo sapiens
cacaaactaaatccc

SEQ ID NO: 1518235 - DNA, 15 bp, Homo sapiens
tcacaaactaaatcc

SEQ ID NO: 1518236 - DNA, 15 bp, Homo sapiens
ttcacaaactaaatc

SEQ ID NO: 1518237 - DNA, 15 bp, Homo sapiens
attcacaaactaaat

SEQ ID NO: 1518238 - DNA, 15 bp, Homo sapiens
cattcacaaactaaa

SEQ ID NO: 1518239 - DNA, 15 bp, Homo sapiens
tcattcacaaactaa

SEQ ID NO: 1518240 - DNA, 15 bp, Homo sapiens
ttcattcacaaacta

SEQ ID NO: 1518241 - DNA, 15 bp, Homo sapiens
tttcattcacaaact

SEQ ID NO: 1518242 - DNA, 15 bp, Homo sapiens
ttttcattcacaaac

SEQ ID NO: 1518243 - DNA, 15 bp, Homo sapiens
atcttttcattcaca

SEQ ID NO: 1518244 - DNA, 15 bp, Homo sapiens
gatcttttcattcac

SEQ ID NO: 1518245 - DNA, 15 bp, Homo sapiens
ggatcttttcattca

SEQ ID NO: 1518246 - DNA, 15 bp, Homo sapiens
aggatcttttcattc

SEQ ID NO: 1518247 - DNA, 15 bp, Homo sapiens
gaggatcttttcatt

SEQ ID NO: 1518248 - DNA, 15 bp, Homo sapiens
tgaggatcttttcat

SEQ ID NO: 1518249 - DNA, 15 bp, Homo sapiens
atgaggatcttttca

SEQ ID NO: 1518250 - DNA, 15 bp, Homo sapiens
aatgaggatcttttc

SEQ ID NO: 1518251 - DNA, 15 bp, Homo sapiens
caatgaggatctttt

SEQ ID NO: 1518252 - DNA, 15 bp, Homo sapiens
acaatgaggatcttt

SEQ ID NO: 1518253 - DNA, 15 bp, Homo sapiens
aacaatgaggatctt

SEQ ID NO: 1518254 - DNA, 15 bp, Homo sapiens
taacaatgaggatct

SEQ ID NO: 1518255 - DNA, 15 bp, Homo sapiens
ctaacaatgaggatc

SEQ ID NO: 1518256 - DNA, 15 bp, Homo sapiens
tctaacaatgaggat

SEQ ID NO: 1518257 - DNA, 15 bp, Homo sapiens
gtctaacaatgagga

SEQ ID NO: 1518258 - DNA, 15 bp, Homo sapiens
tgtctaacaatgagg

SEQ ID NO: 1518259 - DNA, 15 bp, Homo sapiens
gtgtctaacaatgag

SEQ ID NO: 1518260 - DNA, 15 bp, Homo sapiens
agtgtctaacaatga

SEQ ID NO: 1518261 - DNA, 15 bp, Homo sapiens
aagtgtctaacaatg

SEQ ID NO: 1518262 - DNA, 15 bp, Homo sapiens
taagtgtctaacaat

SEQ ID NO: 1518263 - DNA, 15 bp, Homo sapiens
gtaagtgtctaacaa

SEQ ID NO: 1518264 - DNA, 15 bp, Homo sapiens
gtcctgctatgttgc

SEQ ID NO: 1518265 - DNA, 15 bp, Homo sapiens
agtcctgctatgttg

SEQ ID NO: 1518266 - DNA, 15 bp, Homo sapiens
gagtcctgctatgtt

SEQ ID NO: 1518267 - DNA, 15 bp, Homo sapiens
ggagtcctgctatgt

SEQ ID NO: 1518268 - DNA, 15 bp, Homo sapiens
atggagtcctgctat

SEQ ID NO: 1518269 - DNA, 15 bp, Homo sapiens
gatggagtcctgcta

SEQ ID NO: 1518270 - DNA, 15 bp, Homo sapiens
agatggagtcctgct

SEQ ID NO: 1518271 - DNA, 15 bp, Homo sapiens
gagatggagtcctgc

SEQ ID NO: 1518272 - DNA, 15 bp, Homo sapiens
agagatggagtcctg

SEQ ID NO: 1518273 - DNA, 15 bp, Homo sapiens
tagagatggagtcct

SEQ ID NO: 1518274 - DNA, 15 bp, Homo sapiens
gtagagatggagtcc

SEQ ID NO: 1518275 - DNA, 15 bp, Homo sapiens
attatttgtagagat

SEQ ID NO: 1518276 - DNA, 15 bp, Homo sapiens
tattatttgtagaga

SEQ ID NO: 1518277 - DNA, 15 bp, Homo sapiens
ttattatttgtagag

SEQ ID NO: 1518278 - DNA, 15 bp, Homo sapiens
tttattatttgtaga

SEQ ID NO: 1518279 - DNA, 15 bp, Homo sapiens
ttttattatttgtag

SEQ ID NO: 1518280 - DNA, 15 bp, Homo sapiens
attttattatttgta

SEQ ID NO: 1518281 - DNA, 15 bp, Homo sapiens
tattttattatttgt

SEQ ID NO: 1518282 - DNA, 15 bp, Homo sapiens
atattttattatttg

SEQ ID NO: 1518283 - DNA, 15 bp, Homo sapiens
aatattttattattt

SEQ ID NO: 1518284 - DNA, 15 bp, Homo sapiens
taatattttattatt

SEQ ID NO: 1518285 - DNA, 15 bp, Homo sapiens
ttaatattttattat

SEQ ID NO: 1518286 - DNA, 15 bp, Homo sapiens
gttaatattttatta

SEQ ID NO: 1518287 - DNA, 15 bp, Homo sapiens
ggttaatattttatt

SEQ ID NO: 1518288 - DNA, 15 bp, Homo sapiens
tggttaatattttat

SEQ ID NO: 1518289 - DNA, 15 bp, Homo sapiens
ctggttaatatttta

SEQ ID NO: 1518290 - DNA, 15 bp, Homo sapiens
cctggttaatatttt

SEQ ID NO: 1518291 - DNA, 15 bp, Homo sapiens
acctggttaatattt

SEQ ID NO: 1518292 - DNA, 15 bp, Homo sapiens
cacctggttaatatt

SEQ ID NO: 1518293 - DNA, 15 bp, Homo sapiens
acacctggttaatat

SEQ ID NO: 1518294 - DNA, 15 bp, Homo sapiens
cacacctggttaata

SEQ ID NO: 1518295 - DNA, 15 bp, Homo sapiens
tcacacctggttaat

SEQ ID NO: 1518296 - DNA, 15 bp, Homo sapiens
atcacacctggttaa

SEQ ID NO: 1518297 - DNA, 15 bp, Homo sapiens
catcacacctggtta

SEQ ID NO: 1518298 - DNA, 15 bp, Homo sapiens
ccatcacacctggtt

SEQ ID NO: 1518299 - DNA, 15 bp, Homo sapiens
accatcacacctggt

SEQ ID NO: 1518300 - DNA, 15 bp, Homo sapiens
taccatcacacctgg

SEQ ID NO: 1518301 - DNA, 15 bp, Homo sapiens
gtaccatcacacctg

SEQ ID NO: 1518302 - DNA, 15 bp, Homo sapiens
cgtaccatcacacct

SEQ ID NO: 1518303 - DNA, 15 bp, Homo sapiens
gcgtaccatcacacc

SEQ ID NO: 1518304 - DNA, 15 bp, Homo sapiens
tgcgtaccatcacac

SEQ ID NO: 1518305 - DNA, 15 bp, Homo sapiens
gtgcgtaccatcaca

SEQ ID NO: 1518306 - DNA, 15 bp, Homo sapiens
ggtgcgtaccatcac

SEQ ID NO: 1518307 - DNA, 15 bp, Homo sapiens
aggtgcgtaccatca

SEQ ID NO: 1518308 - DNA, 15 bp, Homo sapiens
caggtgcgtaccatc

SEQ ID NO: 1518309 - DNA, 15 bp, Homo sapiens
acaggtgcgtaccat

SEQ ID NO: 1518310 - DNA, 15 bp, Homo sapiens
cacaggtgcgtacca

SEQ ID NO: 1518311 - DNA, 15 bp, Homo sapiens
ccacaggtgcgtacc

SEQ ID NO: 1518312 - DNA, 15 bp, Homo sapiens
accacaggtgcgtac

SEQ ID NO: 1518313 - DNA, 15 bp, Homo sapiens
gaccacaggtgcgta

SEQ ID NO: 1518314 - DNA, 15 bp, Homo sapiens
ggaccacaggtgcgt

SEQ ID NO: 1518315 - DNA, 15 bp, Homo sapiens
gggaccacaggtgcg

SEQ ID NO: 1518316 - DNA, 15 bp, Homo sapiens
tgggaccacaggtgc

SEQ ID NO: 1518317 - DNA, 15 bp, Homo sapiens
ctgggaccacaggtg

SEQ ID NO: 1518318 - DNA, 15 bp, Homo sapiens
gctgggaccacaggt

SEQ ID NO: 1518319 - DNA, 15 bp, Homo sapiens
ggtagctgggaccac

SEQ ID NO: 1518320 - DNA, 15 bp, Homo sapiens
aggtagctgggacca

SEQ ID NO: 1518321 - DNA, 15 bp, Homo sapiens
caggtagctgggacc

SEQ ID NO: 1518322 - DNA, 15 bp, Homo sapiens
ccaggtagctgggac

SEQ ID NO: 1518323 - DNA, 15 bp, Homo sapiens
tcctcaagcaatcct

SEQ ID NO: 1518324 - DNA, 15 bp, Homo sapiens
atcctcaagcaatcc

SEQ ID NO: 1518325 - DNA, 15 bp, Homo sapiens
catcctcaagcaatc

SEQ ID NO: 1518326 - DNA, 15 bp, Homo sapiens
gcatcctcaagcaat

SEQ ID NO: 1518327 - DNA, 15 bp, Homo sapiens
tgcatcctcaagcaa

SEQ ID NO: 1518328 - DNA, 15 bp, Homo sapiens
ctgcatcctcaagca

SEQ ID NO: 1518329 - DNA, 15 bp, Homo sapiens
actgcatcctcaagc

SEQ ID NO: 1518330 - DNA, 15 bp, Homo sapiens
cactgcatcctcaag

SEQ ID NO: 1518331 - DNA, 15 bp, Homo sapiens
tcactgcatcctcaa

SEQ ID NO: 1518332 - DNA, 15 bp, Homo sapiens
ttcactgcatcctca

SEQ ID NO: 1518333 - DNA, 15 bp, Homo sapiens
gttcactgcatcctc

SEQ ID NO: 1518334 - DNA, 15 bp, Homo sapiens
agttcactgcatcct

SEQ ID NO: 1518335 - DNA, 15 bp, Homo sapiens
cagttcactgcatcc

SEQ ID NO: 1518336 - DNA, 15 bp, Homo sapiens
acagttcactgcatc

SEQ ID NO: 1518337 - DNA, 15 bp, Homo sapiens
cacagttcactgcat

SEQ ID NO: 1518338 - DNA, 15 bp, Homo sapiens
tcacagttcactgca

SEQ ID NO: 1518339 - DNA, 15 bp, Homo sapiens
atcacagttcactgc

SEQ ID NO: 1518340 - DNA, 15 bp, Homo sapiens
aatcacagttcactg

SEQ ID NO: 1518341 - DNA, 15 bp, Homo sapiens
caatcacagttcact

SEQ ID NO: 1518342 - DNA, 15 bp, Homo sapiens
gcaatcacagttcac

SEQ ID NO: 1518343 - DNA, 15 bp, Homo sapiens
tgcaatcacagttca

SEQ ID NO: 1518344 - DNA, 15 bp, Homo sapiens
gtgcaatcacagttc

SEQ ID NO: 1518345 - DNA, 15 bp, Homo sapiens
ggtgcaatcacagtt

SEQ ID NO: 1518346 - DNA, 15 bp, Homo sapiens
tggtgcaatcacagt

SEQ ID NO: 1518347 - DNA, 15 bp, Homo sapiens
ctggtgcaatcacag

SEQ ID NO: 1518348 - DNA, 15 bp, Homo sapiens
actggtgcaatcaca

SEQ ID NO: 1518349 - DNA, 15 bp, Homo sapiens
cactggtgcaatcac

SEQ ID NO: 1518350 - DNA, 15 bp, Homo sapiens
gcactggtgcaatca

SEQ ID NO: 1518351 - DNA, 15 bp, Homo sapiens
tgcactggtgcaatc

SEQ ID NO: 1518352 - DNA, 15 bp, Homo sapiens
atgcactggtgcaat

SEQ ID NO: 1518353 - DNA, 15 bp, Homo sapiens
aatgcactggtgcaa

SEQ ID NO: 1518354 - DNA, 15 bp, Homo sapiens
aaatgcactggtgca

SEQ ID NO: 1518355 - DNA, 15 bp, Homo sapiens
gaaatgcactggtgc

SEQ ID NO: 1518356 - DNA, 15 bp, Homo sapiens
ggaaatgcactggtg

SEQ ID NO: 1518357 - DNA, 15 bp, Homo sapiens
tggaaatgcactggt

SEQ ID NO: 1518358 - DNA, 15 bp, Homo sapiens
ctggaaatgcactgg

SEQ ID NO: 1518359 - DNA, 15 bp, Homo sapiens
gctggaaatgcactg

SEQ ID NO: 1518360 - DNA, 15 bp, Homo sapiens
ggctggaaatgcact

SEQ ID NO: 1518361 - DNA, 15 bp, Homo sapiens
aggctggaaatgcac

SEQ ID NO: 1518362 - DNA, 15 bp, Homo sapiens
taggctggaaatgca

SEQ ID NO: 1518363 - DNA, 15 bp, Homo sapiens
ctaggctggaaatgc

SEQ ID NO: 1518364 - DNA, 15 bp, Homo sapiens
cctaggctggaaatg

SEQ ID NO: 1518365 - DNA, 15 bp, Homo sapiens
acctaggctggaaat

SEQ ID NO: 1518366 - DNA, 15 bp, Homo sapiens
cacctaggctggaaa

SEQ ID NO: 1518367 - DNA, 15 bp, Homo sapiens
tcacctaggctggaa

SEQ ID NO: 1518368 - DNA, 15 bp, Homo sapiens
gtcacctaggctgga

SEQ ID NO: 1518369 - DNA, 15 bp, Homo sapiens
tgtcacctaggctgg

SEQ ID NO: 1518370 - DNA, 15 bp, Homo sapiens
tctgtcacctaggct

SEQ ID NO: 1518371 - DNA, 15 bp, Homo sapiens
ttctgtcacctaggc

SEQ ID NO: 1518372 - DNA, 15 bp, Homo sapiens
attctgtcacctagg

SEQ ID NO: 1518373 - DNA, 15 bp, Homo sapiens
cattctgtcacctag

SEQ ID NO: 1518374 - DNA, 15 bp, Homo sapiens
tcattctgtcaccta

SEQ ID NO: 1518375 - DNA, 15 bp, Homo sapiens
ctcattctgtcacct

SEQ ID NO: 1518376 - DNA, 15 bp, Homo sapiens
aggtctcattctgtc

SEQ ID NO: 1518377 - DNA, 15 bp, Homo sapiens
aaggtctcattctgt

SEQ ID NO: 1518378 - DNA, 15 bp, Homo sapiens
caaggtctcattctg

SEQ ID NO: 1518379 - DNA, 15 bp, Homo sapiens
acaaggtctcattct

SEQ ID NO: 1518380 - DNA, 15 bp, Homo sapiens
gacaaggtctcattc

SEQ ID NO: 1518381 - DNA, 15 bp, Homo sapiens
agacaaggtctcatt

SEQ ID NO: 1518382 - DNA, 15 bp, Homo sapiens
tagacaaggtctcat

SEQ ID NO: 1518383 - DNA, 15 bp, Homo sapiens
atagacaaggtctca

SEQ ID NO: 1518384 - DNA, 15 bp, Homo sapiens
tatagacaaggtctc

SEQ ID NO: 1518385 - DNA, 15 bp, Homo sapiens
ttatagacaaggtct

SEQ ID NO: 1518386 - DNA, 15 bp, Homo sapiens
tttatagacaaggtc

SEQ ID NO: 1518387 - DNA, 15 bp, Homo sapiens
atttatagacaaggt

SEQ ID NO: 1518388 - DNA, 15 bp, Homo sapiens
tatttatagacaagg

SEQ ID NO: 1518389 - DNA, 15 bp, Homo sapiens
ttatttatagacaag

SEQ ID NO: 1518390 - DNA, 15 bp, Homo sapiens
tttatttatagacaa

SEQ ID NO: 1518391 - DNA, 15 bp, Homo sapiens
ctttatttatagaca

SEQ ID NO: 1518392 - DNA, 15 bp, Homo sapiens
tctttatttatagac

SEQ ID NO: 1518393 - DNA, 15 bp, Homo sapiens
ttctttatttataga

SEQ ID NO: 1518394 - DNA, 15 bp, Homo sapiens
tttctttatttatag

SEQ ID NO: 1518395 - DNA, 15 bp, Homo sapiens
atttctttatttata

SEQ ID NO: 1518396 - DNA, 15 bp, Homo sapiens
tatttctttatttat

SEQ ID NO: 1518397 - DNA, 15 bp, Homo sapiens
ttatttctttattta

SEQ ID NO: 1518398 - DNA, 15 bp, Homo sapiens
cttatttctttattt

SEQ ID NO: 1518399 - DNA, 15 bp, Homo sapiens
acttatttctttatt

SEQ ID NO: 1518400 - DNA, 15 bp, Homo sapiens
tacttatttctttat

SEQ ID NO: 1518401 - DNA, 15 bp, Homo sapiens
ttacttatttcttta

SEQ ID NO: 1518402 - DNA, 15 bp, Homo sapiens
tttacttatttcttt

SEQ ID NO: 1518403 - DNA, 15 bp, Homo sapiens
ttttacttatttctt

SEQ ID NO: 1518404 - DNA, 15 bp, Homo sapiens
tttttacttatttct

SEQ ID NO: 1518405 - DNA, 15 bp, Homo sapiens
atttttacttatttc

SEQ ID NO: 1518406 - DNA, 15 bp, Homo sapiens
tatttttacttattt

SEQ ID NO: 1518407 - DNA, 15 bp, Homo sapiens
atatttttacttatt

SEQ ID NO: 1518408 - DNA, 15 bp, Homo sapiens
tatatttttacttat

SEQ ID NO: 1518409 - DNA, 15 bp, Homo sapiens
ttatatttttactta

SEQ ID NO: 1518410 - DNA, 15 bp, Homo sapiens
tttatatttttactt

SEQ ID NO: 1518411 - DNA, 15 bp, Homo sapiens
atttatatttttact

SEQ ID NO: 1518412 - DNA, 15 bp, Homo sapiens
tatttatatttttac

SEQ ID NO: 1518413 - DNA, 15 bp, Homo sapiens
ttatttatattttta

SEQ ID NO: 1518414 - DNA, 15 bp, Homo sapiens
cttatttatattttt

SEQ ID NO: 1518415 - DNA, 15 bp, Homo sapiens
acttatttatatttt

SEQ ID NO: 1518416 - DNA, 15 bp, Homo sapiens
tacttatttatattt

SEQ ID NO: 1518417 - DNA, 15 bp, Homo sapiens
ttacttatttatatt

SEQ ID NO: 1518418 - DNA, 15 bp, Homo sapiens
tttacttatttatat

SEQ ID NO: 1518419 - DNA, 15 bp, Homo sapiens
ttttacttatttata

SEQ ID NO: 1518420 - DNA, 15 bp, Homo sapiens
tttttacttatttat

SEQ ID NO: 1518421 - DNA, 15 bp, Homo sapiens
ctttttacttattta

SEQ ID NO: 1518422 - DNA, 15 bp, Homo sapiens
tctttttacttattt

SEQ ID NO: 1518423 - DNA, 15 bp, Homo sapiens
ttctttttacttatt

SEQ ID NO: 1518424 - DNA, 15 bp, Homo sapiens
tttctttttacttat

SEQ ID NO: 1518425 - DNA, 15 bp, Homo sapiens
atttctttttactta

SEQ ID NO: 1518426 - DNA, 15 bp, Homo sapiens
tatttctttttactt

SEQ ID NO: 1518427 - DNA, 15 bp, Homo sapiens
atatttctttttact

SEQ ID NO: 1518428 - DNA, 15 bp, Homo sapiens
tatatttctttttac

SEQ ID NO: 1518429 - DNA, 15 bp, Homo sapiens
ttatatttcttttta

SEQ ID NO: 1518430 - DNA, 15 bp, Homo sapiens
cttatatttcttttt

SEQ ID NO: 1518431 - DNA, 15 bp, Homo sapiens
acttatatttctttt

SEQ ID NO: 1518432 - DNA, 15 bp, Homo sapiens
tacttatatttcttt

SEQ ID NO: 1518433 - DNA, 15 bp, Homo sapiens
ttacttatatttctt

SEQ ID NO: 1518434 - DNA, 15 bp, Homo sapiens
tttacttatatttct

SEQ ID NO: 1518435 - DNA, 15 bp, Homo sapiens
atttacttatatttc

SEQ ID NO: 1518436 - DNA, 15 bp, Homo sapiens
atatttacttatatt

SEQ ID NO: 1518437 - DNA, 15 bp, Homo sapiens
tatatttacttatat

SEQ ID NO: 1518438 - DNA, 15 bp, Homo sapiens
ttatatttacttata

SEQ ID NO: 1518439 - DNA, 15 bp, Homo sapiens
tttatatttacttat

SEQ ID NO: 1518440 - DNA, 15 bp, Homo sapiens
atttatatttactta

SEQ ID NO: 1518441 - DNA, 15 bp, Homo sapiens
tatttatatttactt

SEQ ID NO: 1518442 - DNA, 15 bp, Homo sapiens
atatttatatttact

SEQ ID NO: 1518443 - DNA, 15 bp, Homo sapiens
tatatttatatttac

SEQ ID NO: 1518444 - DNA, 15 bp, Homo sapiens
ttatatttatattta

SEQ ID NO: 1518445 - DNA, 15 bp, Homo sapiens
tttatatttatattt

SEQ ID NO: 1518446 - DNA, 15 bp, Homo sapiens
atttatatttatatt

SEQ ID NO: 1518447 - DNA, 15 bp, Homo sapiens
tatttatatttatat

SEQ ID NO: 1518448 - DNA, 15 bp, Homo sapiens
ttatttatatttata

SEQ ID NO: 1518449 - DNA, 15 bp, Homo sapiens
tttatttatatttat

SEQ ID NO: 1518450 - DNA, 15 bp, Homo sapiens
atttatttatattta

SEQ ID NO: 1518451 - DNA, 15 bp, Homo sapiens
tttatatttatttat

SEQ ID NO: 1518452 - DNA, 15 bp, Homo sapiens
atttatatttattta

SEQ ID NO: 1518453 - DNA, 15 bp, Homo sapiens
tatttatatttattt

SEQ ID NO: 1518454 - DNA, 15 bp, Homo sapiens
atatttatatttatt

SEQ ID NO: 1518455 - DNA, 15 bp, Homo sapiens
tatatttatatttat

SEQ ID NO: 1518456 - DNA, 15 bp, Homo sapiens
ttttatatttatatt

SEQ ID NO: 1518457 - DNA, 15 bp, Homo sapiens
tttttatatttatat

SEQ ID NO: 1518458 - DNA, 15 bp, Homo sapiens
catttttatatttat

SEQ ID NO: 1518459 - DNA, 15 bp, Homo sapiens
tcatttttatattta

SEQ ID NO: 1518460 - DNA, 15 bp, Homo sapiens
ttcatttttatattt

SEQ ID NO: 1518461 - DNA, 15 bp, Homo sapiens
attcatttttatatt

SEQ ID NO: 1518462 - DNA, 15 bp, Homo sapiens
cattcatttttatat

SEQ ID NO: 1518463 - DNA, 15 bp, Homo sapiens
tcattcatttttata

SEQ ID NO: 1518464 - DNA, 15 bp, Homo sapiens
ttcattcatttttat

SEQ ID NO: 1518465 - DNA, 15 bp, Homo sapiens
attcattcattttta

SEQ ID NO: 1518466 - DNA, 15 bp, Homo sapiens
gattcattcattttt

SEQ ID NO: 1518467 - DNA, 15 bp, Homo sapiens
tgattcattcatttt

SEQ ID NO: 1518468 - DNA, 15 bp, Homo sapiens
ttgattcattcattt

SEQ ID NO: 1518469 - DNA, 15 bp, Homo sapiens
tttgattcattcatt

SEQ ID NO: 1518470 - DNA, 15 bp, Homo sapiens
ttttgattcattcat

SEQ ID NO: 1518471 - DNA, 15 bp, Homo sapiens
gttttgattcattca

SEQ ID NO: 1518472 - DNA, 15 bp, Homo sapiens
tgttttgattcattc

SEQ ID NO: 1518473 - DNA, 15 bp, Homo sapiens
ctgttttgattcatt

SEQ ID NO: 1518474 - DNA, 15 bp, Homo sapiens
actgttttgattcat

SEQ ID NO: 1518475 - DNA, 15 bp, Homo sapiens
aactgttttgattca

SEQ ID NO: 1518476 - DNA, 15 bp, Homo sapiens
aaactgttttgattc

SEQ ID NO: 1518477 - DNA, 15 bp, Homo sapiens
aaaactgttttgatt

SEQ ID NO: 1518478 - DNA, 15 bp, Homo sapiens
aaaaactgttttgat

SEQ ID NO: 1518479 - DNA, 15 bp, Homo sapiens
taaaaactgttttga

SEQ ID NO: 1518480 - DNA, 15 bp, Homo sapiens
ttaaaaactgttttg

SEQ ID NO: 1518481 - DNA, 15 bp, Homo sapiens
tttaaaaactgtttt

SEQ ID NO: 1518482 - DNA, 15 bp, Homo sapiens
atttaaaaactgttt

SEQ ID NO: 1518483 - DNA, 15 bp, Homo sapiens
aatttaaaaactgtt

SEQ ID NO: 1518484 - DNA, 15 bp, Homo sapiens
aaatttaaaaactgt

SEQ ID NO: 1518485 - DNA, 15 bp, Homo sapiens
caaatttaaaaactg

SEQ ID NO: 1518486 - DNA, 15 bp, Homo sapiens
tcaaatttaaaaact

SEQ ID NO: 1518487 - DNA, 15 bp, Homo sapiens
gtcaaatttaaaaac

SEQ ID NO: 1518488 - DNA, 15 bp, Homo sapiens
tgtcaaatttaaaaa

SEQ ID NO: 1518489 - DNA, 15 bp, Homo sapiens
atgtcaaatttaaaa

SEQ ID NO: 1518490 - DNA, 15 bp, Homo sapiens
gatgtcaaatttaaa

SEQ ID NO: 1518491 - DNA, 15 bp, Homo sapiens
tgatgtcaaatttaa

SEQ ID NO: 1518492 - DNA, 15 bp, Homo sapiens
gtgatgtcaaattta

SEQ ID NO: 1518493 - DNA, 15 bp, Homo sapiens
agtgatgtcaaattt

SEQ ID NO: 1518494 - DNA, 15 bp, Homo sapiens
cagtgatgtcaaatt

SEQ ID NO: 1518495 - DNA, 15 bp, Homo sapiens
tcagtgatgtcaaat

SEQ ID NO: 1518496 - DNA, 15 bp, Homo sapiens
ctcagtgatgtcaaa

SEQ ID NO: 1518497 - DNA, 15 bp, Homo sapiens
cctcagtgatgtcaa

SEQ ID NO: 1518498 - DNA, 15 bp, Homo sapiens
tcctcagtgatgtca

SEQ ID NO: 1518499 - DNA, 15 bp, Homo sapiens
gtcctcagtgatgtc

SEQ ID NO: 1518500 - DNA, 15 bp, Homo sapiens
tgtcctcagtgatgt

SEQ ID NO: 1518501 - DNA, 15 bp, Homo sapiens
atgtcctcagtgatg

SEQ ID NO: 1518502 - DNA, 15 bp, Homo sapiens
gatgtcctcagtgat

SEQ ID NO: 1518503 - DNA, 15 bp, Homo sapiens
ggatgtcctcagtga

SEQ ID NO: 1518504 - DNA, 15 bp, Homo sapiens
aggatgtcctcagtg

SEQ ID NO: 1518505 - DNA, 15 bp, Homo sapiens
taggatgtcctcagt

SEQ ID NO: 1518506 - DNA, 15 bp, Homo sapiens
ctaggatgtcctcag

SEQ ID NO: 1518507 - DNA, 15 bp, Homo sapiens
gctaggatgtcctca

SEQ ID NO: 1518508 - DNA, 15 bp, Homo sapiens
ggctaggatgtcctc

SEQ ID NO: 1518509 - DNA, 15 bp, Homo sapiens
tggctaggatgtcct

SEQ ID NO: 1518510 - DNA, 15 bp, Homo sapiens
atggctaggatgtcc

SEQ ID NO: 1518511 - DNA, 15 bp, Homo sapiens
aatggctaggatgtc

SEQ ID NO: 1518512 - DNA, 15 bp, Homo sapiens
aaatggctaggatgt

SEQ ID NO: 1518513 - DNA, 15 bp, Homo sapiens
aaaatggctaggatg

SEQ ID NO: 1518514 - DNA, 15 bp, Homo sapiens
aaaaatggctaggat

SEQ ID NO: 1518515 - DNA, 15 bp, Homo sapiens
gaaaaatggctagga

SEQ ID NO: 1518516 - DNA, 15 bp, Homo sapiens
agaaaaatggctagg

SEQ ID NO: 1518517 - DNA, 15 bp, Homo sapiens
tagaaaaatggctag

SEQ ID NO: 1518518 - DNA, 15 bp, Homo sapiens
ctagaaaaatggcta

SEQ ID NO: 1518519 - DNA, 15 bp, Homo sapiens
tctagaaaaatggct

SEQ ID NO: 1518520 - DNA, 15 bp, Homo sapiens
ttctagaaaaatggc

SEQ ID NO: 1518521 - DNA, 15 bp, Homo sapiens
tttctagaaaaatgg

SEQ ID NO: 1518522 - DNA, 15 bp, Homo sapiens
ttttctagaaaaatg

SEQ ID NO: 1518523 - DNA, 15 bp, Homo sapiens
tttttctagaaaaat

SEQ ID NO: 1518524 - DNA, 15 bp, Homo sapiens
atttttctagaaaaa

SEQ ID NO: 1518525 - DNA, 15 bp, Homo sapiens
aatatttttctagaa

SEQ ID NO: 1518526 - DNA, 15 bp, Homo sapiens
aaatatttttctaga

SEQ ID NO: 1518527 - DNA, 15 bp, Homo sapiens
aaaatatttttctag

SEQ ID NO: 1518528 - DNA, 15 bp, Homo sapiens
aaaaatatttttcta

SEQ ID NO: 1518529 - DNA, 15 bp, Homo sapiens
taaaaatatttttct

SEQ ID NO: 1518530 - DNA, 15 bp, Homo sapiens
ataaaaatatttttc

SEQ ID NO: 1518531 - DNA, 15 bp, Homo sapiens
aataaaaatattttt

SEQ ID NO: 1518532 - DNA, 15 bp, Homo sapiens
taataaaaatatttt

SEQ ID NO: 1518533 - DNA, 15 bp, Homo sapiens
ataataaaaatattt

SEQ ID NO: 1518534 - DNA, 15 bp, Homo sapiens
gaataataaaaatat

SEQ ID NO: 1518535 - DNA, 15 bp, Homo sapiens
ggaataataaaaata

SEQ ID NO: 1518536 - DNA, 15 bp, Homo sapiens
aggaataataaaaat

SEQ ID NO: 1518537 - DNA, 15 bp, Homo sapiens
aaggaataataaaaa

SEQ ID NO: 1518538 - DNA, 15 bp, Homo sapiens
aaaggaataataaaa

SEQ ID NO: 1518539 - DNA, 15 bp, Homo sapiens
aaaaggaataataaa

SEQ ID NO: 1518540 - DNA, 15 bp, Homo sapiens
aaaaaggaataataa

SEQ ID NO: 1518541 - DNA, 15 bp, Homo sapiens
aaaaaaggaataata

SEQ ID NO: 1518542 - DNA, 15 bp, Homo sapiens
gaaaaaaggaataat

SEQ ID NO: 1518543 - DNA, 15 bp, Homo sapiens
agaaaaaaggaataa

SEQ ID NO: 1518544 - DNA, 15 bp, Homo sapiens
cagaaaaaaggaata

SEQ ID NO: 1518545 - DNA, 15 bp, Homo sapiens
tcagaaaaaaggaat

SEQ ID NO: 1518546 - DNA, 15 bp, Homo sapiens
ctcagaaaaaaggaa

SEQ ID NO: 1518547 - DNA, 15 bp, Homo sapiens
tctcagaaaaaagga

SEQ ID NO: 1518548 - DNA, 15 bp, Homo sapiens
atctcagaaaaaagg

SEQ ID NO: 1518549 - DNA, 15 bp, Homo sapiens
gatctcagaaaaaag

SEQ ID NO: 1518550 - DNA, 15 bp, Homo sapiens
ggatctcagaaaaaa

SEQ ID NO: 1518551 - DNA, 15 bp, Homo sapiens
aggatctcagaaaaa

SEQ ID NO: 1518552 - DNA, 15 bp, Homo sapiens
gtaggatctcagaaa

SEQ ID NO: 1518553 - DNA, 15 bp, Homo sapiens
ggtaggatctcagaa

SEQ ID NO: 1518554 - DNA, 15 bp, Homo sapiens
aggtaggatctcaga

SEQ ID NO: 1518555 - DNA, 15 bp, Homo sapiens
aaggtaggatctcag

SEQ ID NO: 1518556 - DNA, 15 bp, Homo sapiens
gaaggtaggatctca

SEQ ID NO: 1518557 - DNA, 15 bp, Homo sapiens
ggaaggtaggatctc

SEQ ID NO: 1518558 - DNA, 15 bp, Homo sapiens
gggaaggtaggatct

SEQ ID NO: 1518559 - DNA, 15 bp, Homo sapiens
agggaaggtaggatc

SEQ ID NO: 1518560 - DNA, 15 bp, Homo sapiens
aagggaaggtaggat

SEQ ID NO: 1518561 - DNA, 15 bp, Homo sapiens
taagggaaggtagga

SEQ ID NO: 1518562 - DNA, 15 bp, Homo sapiens
gtaagggaaggtagg

SEQ ID NO: 1518563 - DNA, 15 bp, Homo sapiens
tgtaagggaaggtag

SEQ ID NO: 1518564 - DNA, 15 bp, Homo sapiens
ttgtaagggaaggta

SEQ ID NO: 1518565 - DNA, 15 bp, Homo sapiens
tttgtaagggaaggt

SEQ ID NO: 1518566 - DNA, 15 bp, Homo sapiens
ctttgtaagggaagg

SEQ ID NO: 1518567 - DNA, 15 bp, Homo sapiens
gctttgtaagggaag

SEQ ID NO: 1518568 - DNA, 15 bp, Homo sapiens
tgctttgtaagggaa

SEQ ID NO: 1518569 - DNA, 15 bp, Homo sapiens
ttgctttgtaaggga

SEQ ID NO: 1518570 - DNA, 15 bp, Homo sapiens
attgctttgtaaggg

SEQ ID NO: 1518571 - DNA, 15 bp, Homo sapiens
gattgctttgtaagg

SEQ ID NO: 1518572 - DNA, 15 bp, Homo sapiens
agattgctttgtaag

SEQ ID NO: 1518573 - DNA, 15 bp, Homo sapiens
aagattgctttgtaa

SEQ ID NO: 1518574 - DNA, 15 bp, Homo sapiens
aaagattgctttgta

SEQ ID NO: 1518575 - DNA, 15 bp, Homo sapiens
aaaagattgctttgt

SEQ ID NO: 1518576 - DNA, 15 bp, Homo sapiens
caaaagattgctttg

SEQ ID NO: 1518577 - DNA, 15 bp, Homo sapiens
acaaaagattgcttt

SEQ ID NO: 1518578 - DNA, 15 bp, Homo sapiens
cacaaaagattgctt

SEQ ID NO: 1518579 - DNA, 15 bp, Homo sapiens
gcacaaaagattgct

SEQ ID NO: 1518580 - DNA, 15 bp, Homo sapiens
agcacaaaagattgc

SEQ ID NO: 1518581 - DNA, 15 bp, Homo sapiens
aagcacaaaagattg

SEQ ID NO: 1518582 - DNA, 15 bp, Homo sapiens
aaagcacaaaagatt

SEQ ID NO: 1518583 - DNA, 15 bp, Homo sapiens
aaaagcacaaaagat

SEQ ID NO: 1518584 - DNA, 15 bp, Homo sapiens
caaaagcacaaaaga

SEQ ID NO: 1518585 - DNA, 15 bp, Homo sapiens
tcaaaagcacaaaag

SEQ ID NO: 1518586 - DNA, 15 bp, Homo sapiens
ttcaaaagcacaaaa

SEQ ID NO: 1518587 - DNA, 15 bp, Homo sapiens
cttcaaaagcacaaa

SEQ ID NO: 1518588 - DNA, 15 bp, Homo sapiens
tcttcaaaagcacaa

SEQ ID NO: 1518589 - DNA, 15 bp, Homo sapiens
atcttcaaaagcaca

SEQ ID NO: 1518590 - DNA, 15 bp, Homo sapiens
aatcttcaaaagcac

SEQ ID NO: 1518591 - DNA, 15 bp, Homo sapiens
taatcttcaaaagca

SEQ ID NO: 1518592 - DNA, 15 bp, Homo sapiens
ttaatcttcaaaagc

SEQ ID NO: 1518593 - DNA, 15 bp, Homo sapiens
cttaatcttcaaaag

SEQ ID NO: 1518594 - DNA, 15 bp, Homo sapiens
acttaatcttcaaaa

SEQ ID NO: 1518595 - DNA, 15 bp, Homo sapiens
tacttaatcttcaaa

SEQ ID NO: 1518596 - DNA, 15 bp, Homo sapiens
ttacttaatcttcaa

SEQ ID NO: 1518597 - DNA, 15 bp, Homo sapiens
attacttaatcttca

SEQ ID NO: 1518598 - DNA, 15 bp, Homo sapiens
gattacttaatcttc

SEQ ID NO: 1518599 - DNA, 15 bp, Homo sapiens
ggattacttaatctt

SEQ ID NO: 1518600 - DNA, 15 bp, Homo sapiens
tggattacttaatct

SEQ ID NO: 1518601 - DNA, 15 bp, Homo sapiens
ttggattacttaatc

SEQ ID NO: 1518602 - DNA, 15 bp, Homo sapiens
attggattacttaat

SEQ ID NO: 1518603 - DNA, 15 bp, Homo sapiens
tattggattacttaa

SEQ ID NO: 1518604 - DNA, 15 bp, Homo sapiens
atattggattactta

SEQ ID NO: 1518605 - DNA, 15 bp, Homo sapiens
tatattggattactt

SEQ ID NO: 1518606 - DNA, 15 bp, Homo sapiens
atatattggattact

SEQ ID NO: 1518607 - DNA, 15 bp, Homo sapiens
tatatattggattac

SEQ ID NO: 1518608 - DNA, 15 bp, Homo sapiens
atatatattggatta

SEQ ID NO: 1518609 - DNA, 15 bp, Homo sapiens
tatatatattggatt

SEQ ID NO: 1518610 - DNA, 15 bp, Homo sapiens
ttatatatattggat

SEQ ID NO: 1518611 - DNA, 15 bp, Homo sapiens
attatatatattgga

SEQ ID NO: 1518612 - DNA, 15 bp, Homo sapiens
tattatatatattgg

SEQ ID NO: 1518613 - DNA, 15 bp, Homo sapiens
atattatatatattg

SEQ ID NO: 1518614 - DNA, 15 bp, Homo sapiens
tatattatatatatt

SEQ ID NO: 1518615 - DNA, 15 bp, Homo sapiens
gtatattatatatat

SEQ ID NO: 1518616 - DNA, 15 bp, Homo sapiens
agtatattatatata

SEQ ID NO: 1518617 - DNA, 15 bp, Homo sapiens
aagtatattatatat

SEQ ID NO: 1518618 - DNA, 15 bp, Homo sapiens
taagtatattatata

SEQ ID NO: 1518619 - DNA, 15 bp, Homo sapiens
ctaagtatattatat

SEQ ID NO: 1518620 - DNA, 15 bp, Homo sapiens
gctaagtatattata

SEQ ID NO: 1518621 - DNA, 15 bp, Homo sapiens
tgctaagtatattat

SEQ ID NO: 1518622 - DNA, 15 bp, Homo sapiens
atgctaagtatatta

SEQ ID NO: 1518623 - DNA, 15 bp, Homo sapiens
tatgctaagtatatt

SEQ ID NO: 1518624 - DNA, 15 bp, Homo sapiens
ctatgctaagtatat

SEQ ID NO: 1518625 - DNA, 15 bp, Homo sapiens
actatgctaagtata

SEQ ID NO: 1518626 - DNA, 15 bp, Homo sapiens
tactatgctaagtat

SEQ ID NO: 1518627 - DNA, 15 bp, Homo sapiens
atactatgctaagta

SEQ ID NO: 1518628 - DNA, 15 bp, Homo sapiens
gatactatgctaagt

SEQ ID NO: 1518629 - DNA, 15 bp, Homo sapiens
agatactatgctaag

SEQ ID NO: 1518630 - DNA, 15 bp, Homo sapiens
cagatactatgctaa

SEQ ID NO: 1518631 - DNA, 15 bp, Homo sapiens
ccagatactatgcta

SEQ ID NO: 1518632 - DNA, 15 bp, Homo sapiens
accagatactatgct

SEQ ID NO: 1518633 - DNA, 15 bp, Homo sapiens
taccagatactatgc

SEQ ID NO: 1518634 - DNA, 15 bp, Homo sapiens
gtaccagatactatg

SEQ ID NO: 1518635 - DNA, 15 bp, Homo sapiens
agtaccagatactat

SEQ ID NO: 1518636 - DNA, 15 bp, Homo sapiens
aagtaccagatacta

SEQ ID NO: 1518637 - DNA, 15 bp, Homo sapiens
caagtaccagatact

SEQ ID NO: 1518638 - DNA, 15 bp, Homo sapiens
acaagtaccagatac

SEQ ID NO: 1518639 - DNA, 15 bp, Homo sapiens
tacaagtaccagata

SEQ ID NO: 1518640 - DNA, 15 bp, Homo sapiens
ttacaagtaccagat

SEQ ID NO: 1518641 - DNA, 15 bp, Homo sapiens
tttacaagtaccaga

SEQ ID NO: 1518642 - DNA, 15 bp, Homo sapiens
ctttacaagtaccag

SEQ ID NO: 1518643 - DNA, 15 bp, Homo sapiens
actttacaagtacca

SEQ ID NO: 1518644 - DNA, 15 bp, Homo sapiens
tactttacaagtacc

SEQ ID NO: 1518645 - DNA, 15 bp, Homo sapiens
ttactttacaagtac

SEQ ID NO: 1518646 - DNA, 15 bp, Homo sapiens
attactttacaagta

SEQ ID NO: 1518647 - DNA, 15 bp, Homo sapiens
aattactttacaagt

SEQ ID NO: 1518648 - DNA, 15 bp, Homo sapiens
taattactttacaag

SEQ ID NO: 1518649 - DNA, 15 bp, Homo sapiens
ttaattactttacaa

SEQ ID NO: 1518650 - DNA, 15 bp, Homo sapiens
attaattactttaca

SEQ ID NO: 1518651 - DNA, 15 bp, Homo sapiens
tattaattactttac

SEQ ID NO: 1518652 - DNA, 15 bp, Homo sapiens
ttattaattacttta

SEQ ID NO: 1518653 - DNA, 15 bp, Homo sapiens
tttattaattacttt

SEQ ID NO: 1518654 - DNA, 15 bp, Homo sapiens
atttattaattactt

SEQ ID NO: 1518655 - DNA, 15 bp, Homo sapiens
catttattaattact

SEQ ID NO: 1518656 - DNA, 15 bp, Homo sapiens
acatttattaattac

SEQ ID NO: 1518657 - DNA, 15 bp, Homo sapiens
aacatttattaatta

SEQ ID NO: 1518658 - DNA, 15 bp, Homo sapiens
caacatttattaatt

SEQ ID NO: 1518659 - DNA, 15 bp, Homo sapiens
ccaacatttattaat

SEQ ID NO: 1518660 - DNA, 15 bp, Homo sapiens
tccaacatttattaa

SEQ ID NO: 1518661 - DNA, 15 bp, Homo sapiens
atccaacatttatta

SEQ ID NO: 1518662 - DNA, 15 bp, Homo sapiens
gatccaacatttatt

SEQ ID NO: 1518663 - DNA, 15 bp, Homo sapiens
agatccaacatttat

SEQ ID NO: 1518664 - DNA, 15 bp, Homo sapiens
aagatccaacattta

SEQ ID NO: 1518665 - DNA, 15 bp, Homo sapiens
taagatccaacattt

SEQ ID NO: 1518666 - DNA, 15 bp, Homo sapiens
ataagatccaacatt

SEQ ID NO: 1518667 - DNA, 15 bp, Homo sapiens
aataagatccaacat

SEQ ID NO: 1518668 - DNA, 15 bp, Homo sapiens
aaataagatccaaca

SEQ ID NO: 1518669 - DNA, 15 bp, Homo sapiens
aaaataagatccaac

SEQ ID NO: 1518670 - DNA, 15 bp, Homo sapiens
aaaaataagatccaa

SEQ ID NO: 1518671 - DNA, 15 bp, Homo sapiens
caaaaataagatcca

SEQ ID NO: 1518672 - DNA, 15 bp, Homo sapiens
acaaaaataagatcc

SEQ ID NO: 1518673 - DNA, 15 bp, Homo sapiens
aacaaaaataagatc

SEQ ID NO: 1518674 - DNA, 15 bp, Homo sapiens
gaacaaaaataagat

SEQ ID NO: 1518675 - DNA, 15 bp, Homo sapiens
agaacaaaaataaga

SEQ ID NO: 1518676 - DNA, 15 bp, Homo sapiens
tagaacaaaaataag

SEQ ID NO: 1518677 - DNA, 15 bp, Homo sapiens
ttagaacaaaaataa

SEQ ID NO: 1518678 - DNA, 15 bp, Homo sapiens
tttagaacaaaaata

SEQ ID NO: 1518679 - DNA, 15 bp, Homo sapiens
atttagaacaaaaat

SEQ ID NO: 1518680 - DNA, 15 bp, Homo sapiens
aatttagaacaaaaa

SEQ ID NO: 1518681 - DNA, 15 bp, Homo sapiens
gaatttagaacaaaa

SEQ ID NO: 1518682 - DNA, 15 bp, Homo sapiens
ggaatttagaacaaa

SEQ ID NO: 1518683 - DNA, 15 bp, Homo sapiens
gggaatttagaacaa

SEQ ID NO: 1518684 - DNA, 15 bp, Homo sapiens
tgggaatttagaaca

SEQ ID NO: 1518685 - DNA, 15 bp, Homo sapiens
gtgggaatttagaac

SEQ ID NO: 1518686 - DNA, 15 bp, Homo sapiens
agtgggaatttagaa

SEQ ID NO: 1518687 - DNA, 15 bp, Homo sapiens
cagtgggaatttaga

SEQ ID NO: 1518688 - DNA, 15 bp, Homo sapiens
tcagtgggaatttag

SEQ ID NO: 1518689 - DNA, 15 bp, Homo sapiens
atcagtgggaattta

SEQ ID NO: 1518690 - DNA, 15 bp, Homo sapiens
catcagtgggaattt

SEQ ID NO: 1518691 - DNA, 15 bp, Homo sapiens
gcatcagtgggaatt

SEQ ID NO: 1518692 - DNA, 15 bp, Homo sapiens
agcatcagtgggaat

SEQ ID NO: 1518693 - DNA, 15 bp, Homo sapiens
gagcatcagtgggaa

SEQ ID NO: 1518694 - DNA, 15 bp, Homo sapiens
agagcatcagtggga

SEQ ID NO: 1518695 - DNA, 15 bp, Homo sapiens
aagagcatcagtggg

SEQ ID NO: 1518696 - DNA, 15 bp, Homo sapiens
caagagcatcagtgg

SEQ ID NO: 1518697 - DNA, 15 bp, Homo sapiens
ccaagagcatcagtg

SEQ ID NO: 1518698 - DNA, 15 bp, Homo sapiens
tccaagagcatcagt

SEQ ID NO: 1518699 - DNA, 15 bp, Homo sapiens
ctccaagagcatcag

SEQ ID NO: 1518700 - DNA, 15 bp, Homo sapiens
tctccaagagcatca

SEQ ID NO: 1518701 - DNA, 15 bp, Homo sapiens
gtctccaagagcatc

SEQ ID NO: 1518702 - DNA, 15 bp, Homo sapiens
ggtctccaagagcat

SEQ ID NO: 1518703 - DNA, 15 bp, Homo sapiens
gggtctccaagagca

SEQ ID NO: 1518704 - DNA, 15 bp, Homo sapiens
tgggtctccaagagc

SEQ ID NO: 1518705 - DNA, 15 bp, Homo sapiens
atgggtctccaagag

SEQ ID NO: 1518706 - DNA, 15 bp, Homo sapiens
aatgggtctccaaga

SEQ ID NO: 1518707 - DNA, 15 bp, Homo sapiens
aaatgggtctccaag

SEQ ID NO: 1518708 - DNA, 15 bp, Homo sapiens
aaaatgggtctccaa

SEQ ID NO: 1518709 - DNA, 15 bp, Homo sapiens
gaaaatgggtctcca

SEQ ID NO: 1518710 - DNA, 15 bp, Homo sapiens
agaaaatgggtctcc

SEQ ID NO: 1518711 - DNA, 15 bp, Homo sapiens
aagaaaatgggtctc

SEQ ID NO: 1518712 - DNA, 15 bp, Homo sapiens
aaagaaaatgggtct

SEQ ID NO: 1518713 - DNA, 15 bp, Homo sapiens
aaaagaaaatgggtc

SEQ ID NO: 1518714 - DNA, 15 bp, Homo sapiens
aaaaagaaaatgggt

SEQ ID NO: 1518715 - DNA, 15 bp, Homo sapiens
aaaaaagaaaatggg

SEQ ID NO: 1518716 - DNA, 15 bp, Homo sapiens
aaaaaaagaaaatgg

SEQ ID NO: 1518717 - DNA, 15 bp, Homo sapiens
taaaaaaaagaaaat

SEQ ID NO: 1518718 - DNA, 15 bp, Homo sapiens
ttaaaaaaaagaaaa

SEQ ID NO: 1518719 - DNA, 15 bp, Homo sapiens
tttaaaaaaaagaaa

SEQ ID NO: 1518720 - DNA, 15 bp, Homo sapiens
ttttaaaaaaaagaa

SEQ ID NO: 1518721 - DNA, 15 bp, Homo sapiens
tttttaaaaaaaaga

SEQ ID NO: 1518722 - DNA, 15 bp, Homo sapiens
ttttttaaaaaaaag

SEQ ID NO: 1518723 - DNA, 15 bp, Homo sapiens
attttttttaaaaaa

SEQ ID NO: 1518724 - DNA, 15 bp, Homo sapiens
cattttttttaaaaa

SEQ ID NO: 1518725 - DNA, 15 bp, Homo sapiens
tcattttttttaaaa

SEQ ID NO: 1518726 - DNA, 15 bp, Homo sapiens
ttcattttttttaaa

SEQ ID NO: 1518727 - DNA, 15 bp, Homo sapiens
cttcattttttttaa

SEQ ID NO: 1518728 - DNA, 15 bp, Homo sapiens
ccttcatttttttta

SEQ ID NO: 1518729 - DNA, 15 bp, Homo sapiens
accttcatttttttt

SEQ ID NO: 1518730 - DNA, 15 bp, Homo sapiens
taccttcattttttt

SEQ ID NO: 1518731 - DNA, 15 bp, Homo sapiens
ctaccttcatttttt

SEQ ID NO: 1518732 - DNA, 15 bp, Homo sapiens
gctaccttcattttt

SEQ ID NO: 1518733 - DNA, 15 bp, Homo sapiens
agctaccttcatttt

SEQ ID NO: 1518734 - DNA, 15 bp, Homo sapiens
aagctaccttcattt

SEQ ID NO: 1518735 - DNA, 15 bp, Homo sapiens
aaagctaccttcatt

SEQ ID NO: 1518736 - DNA, 15 bp, Homo sapiens
taaagctaccttcat

SEQ ID NO: 1518737 - DNA, 15 bp, Homo sapiens
ataaagctaccttca

SEQ ID NO: 1518738 - DNA, 15 bp, Homo sapiens
tataaagctaccttc

SEQ ID NO: 1518739 - DNA, 15 bp, Homo sapiens
ttataaagctacctt

SEQ ID NO: 1518740 - DNA, 15 bp, Homo sapiens
attataaagctacct

SEQ ID NO: 1518741 - DNA, 15 bp, Homo sapiens
tattataaagctacc

SEQ ID NO: 1518742 - DNA, 15 bp, Homo sapiens
atattataaagctac

SEQ ID NO: 1518743 - DNA, 15 bp, Homo sapiens
aatattataaagcta

SEQ ID NO: 1518744 - DNA, 15 bp, Homo sapiens
gaatattataaagct

SEQ ID NO: 1518745 - DNA, 15 bp, Homo sapiens
agaatattataaagc

SEQ ID NO: 1518746 - DNA, 15 bp, Homo sapiens
gagaatattataaag

SEQ ID NO: 1518747 - DNA, 15 bp, Homo sapiens
tgagaatattataaa

SEQ ID NO: 1518748 - DNA, 15 bp, Homo sapiens
ctgagaatattataa

SEQ ID NO: 1518749 - DNA, 15 bp, Homo sapiens
actgagaatattata

SEQ ID NO: 1518750 - DNA, 15 bp, Homo sapiens
aactgagaatattat

SEQ ID NO: 1518751 - DNA, 15 bp, Homo sapiens
taactgagaatatta

SEQ ID NO: 1518752 - DNA, 15 bp, Homo sapiens
ataactgagaatatt

SEQ ID NO: 1518753 - DNA, 15 bp, Homo sapiens
aataactgagaatat

SEQ ID NO: 1518754 - DNA, 15 bp, Homo sapiens
aaataactgagaata

SEQ ID NO: 1518755 - DNA, 15 bp, Homo sapiens
taaataactgagaat

SEQ ID NO: 1518756 - DNA, 15 bp, Homo sapiens
ttaaataactgagaa

SEQ ID NO: 1518757 - DNA, 15 bp, Homo sapiens
tttaaataactgaga

SEQ ID NO: 1518758 - DNA, 15 bp, Homo sapiens
ttttttaaataactg

SEQ ID NO: 1518759 - DNA, 15 bp, Homo sapiens
attttttaaataact

SEQ ID NO: 1518760 - DNA, 15 bp, Homo sapiens
aattttttaaataac

SEQ ID NO: 1518761 - DNA, 15 bp, Homo sapiens
taattttttaaataa

SEQ ID NO: 1518762 - DNA, 15 bp, Homo sapiens
taataattttttaaa

SEQ ID NO: 1518763 - DNA, 15 bp, Homo sapiens
ttaataattttttaa

SEQ ID NO: 1518764 - DNA, 15 bp, Homo sapiens
tttaataatttttta

SEQ ID NO: 1518765 - DNA, 15 bp, Homo sapiens
atttaataatttttt

SEQ ID NO: 1518766 - DNA, 15 bp, Homo sapiens
aatttaataattttt

SEQ ID NO: 1518767 - DNA, 15 bp, Homo sapiens
taatttaataatttt

SEQ ID NO: 1518768 - DNA, 15 bp, Homo sapiens
gtaatttaataattt

SEQ ID NO: 1518769 - DNA, 15 bp, Homo sapiens
agtaatttaataatt

SEQ ID NO: 1518770 - DNA, 15 bp, Homo sapiens
aagtaatttaataat

SEQ ID NO: 1518771 - DNA, 15 bp, Homo sapiens
caagtaatttaataa

SEQ ID NO: 1518772 - DNA, 15 bp, Homo sapiens
tcaagtaatttaata

SEQ ID NO: 1518773 - DNA, 15 bp, Homo sapiens
atcaagtaatttaat

SEQ ID NO: 1518774 - DNA, 15 bp, Homo sapiens
tatcaagtaatttaa

SEQ ID NO: 1518775 - DNA, 15 bp, Homo sapiens
atatcaagtaattta

SEQ ID NO: 1518776 - DNA, 15 bp, Homo sapiens
tatatcaagtaattt

SEQ ID NO: 1518777 - DNA, 15 bp, Homo sapiens
ctatatcaagtaatt

SEQ ID NO: 1518778 - DNA, 15 bp, Homo sapiens
tctatatcaagtaat

SEQ ID NO: 1518779 - DNA, 15 bp, Homo sapiens
ttctatatcaagtaa

SEQ ID NO: 1518780 - DNA, 15 bp, Homo sapiens
tttctatatcaagta

SEQ ID NO: 1518781 - DNA, 15 bp, Homo sapiens
atttctatatcaagt

SEQ ID NO: 1518782 - DNA, 15 bp, Homo sapiens
gatttctatatcaag

SEQ ID NO: 1518783 - DNA, 15 bp, Homo sapiens
agatttctatatcaa

SEQ ID NO: 1518784 - DNA, 15 bp, Homo sapiens
tagatttctatatca

SEQ ID NO: 1518785 - DNA, 15 bp, Homo sapiens
ttagatttctatatc

SEQ ID NO: 1518786 - DNA, 15 bp, Homo sapiens
tttagatttctatat

SEQ ID NO: 1518787 - DNA, 15 bp, Homo sapiens
ctttagatttctata

SEQ ID NO: 1518788 - DNA, 15 bp, Homo sapiens
tctttagatttctat

SEQ ID NO: 1518789 - DNA, 15 bp, Homo sapiens
ttctttagatttcta

SEQ ID NO: 1518790 - DNA, 15 bp, Homo sapiens
tttctttagatttct

SEQ ID NO: 1518791 - DNA, 15 bp, Homo sapiens
ctttctttagatttc

SEQ ID NO: 1518792 - DNA, 15 bp, Homo sapiens
actttctttagattt

SEQ ID NO: 1518793 - DNA, 15 bp, Homo sapiens
aactttctttagatt

SEQ ID NO: 1518794 - DNA, 15 bp, Homo sapiens
taactttctttagat

SEQ ID NO: 1518795 - DNA, 15 bp, Homo sapiens
ttaactttctttaga

SEQ ID NO: 1518796 - DNA, 15 bp, Homo sapiens
tttaactttctttag

SEQ ID NO: 1518797 - DNA, 15 bp, Homo sapiens
ttttaactttcttta

SEQ ID NO: 1518798 - DNA, 15 bp, Homo sapiens
tttttaactttcttt

SEQ ID NO: 1518799 - DNA, 15 bp, Homo sapiens
ttttttaactttctt

SEQ ID NO: 1518800 - DNA, 15 bp, Homo sapiens
tttttttaactttct

SEQ ID NO: 1518801 - DNA, 15 bp, Homo sapiens
atttttttaactttc

SEQ ID NO: 1518802 - DNA, 15 bp, Homo sapiens
aatttttttaacttt

SEQ ID NO: 1518803 - DNA, 15 bp, Homo sapiens
taatttttttaactt

SEQ ID NO: 1518804 - DNA, 15 bp, Homo sapiens
ttaatttttttaact

SEQ ID NO: 1518805 - DNA, 15 bp, Homo sapiens
tttaatttttttaac

SEQ ID NO: 1518806 - DNA, 15 bp, Homo sapiens
ttttaatttttttaa

SEQ ID NO: 1518807 - DNA, 15 bp, Homo sapiens
tttttaattttttta

SEQ ID NO: 1518808 - DNA, 15 bp, Homo sapiens
caatttttaattttt

SEQ ID NO: 1518809 - DNA, 15 bp, Homo sapiens
acaatttttaatttt

SEQ ID NO: 1518810 - DNA, 15 bp, Homo sapiens
aacaatttttaattt

SEQ ID NO: 1518811 - DNA, 15 bp, Homo sapiens
aaacaatttttaatt

SEQ ID NO: 1518812 - DNA, 15 bp, Homo sapiens
taaacaatttttaat

SEQ ID NO: 1518813 - DNA, 15 bp, Homo sapiens
gataaacaattttta

SEQ ID NO: 1518814 - DNA, 15 bp, Homo sapiens
ggataaacaattttt

SEQ ID NO: 1518815 - DNA, 15 bp, Homo sapiens
aggataaacaatttt

SEQ ID NO: 1518816 - DNA, 15 bp, Homo sapiens
gaggataaacaattt

SEQ ID NO: 1518817 - DNA, 15 bp, Homo sapiens
ggaggataaacaatt

SEQ ID NO: 1518818 - DNA, 15 bp, Homo sapiens
gggaggataaacaat

SEQ ID NO: 1518819 - DNA, 15 bp, Homo sapiens
agggaggataaacaa

SEQ ID NO: 1518820 - DNA, 15 bp, Homo sapiens
gagggaggataaaca

SEQ ID NO: 1518821 - DNA, 15 bp, Homo sapiens
agagggaggataaac

SEQ ID NO: 1518822 - DNA, 15 bp, Homo sapiens
gagagggaggataaa

SEQ ID NO: 1518823 - DNA, 15 bp, Homo sapiens
tgagagggaggataa

SEQ ID NO: 1518824 - DNA, 15 bp, Homo sapiens
ctgagagggaggata

SEQ ID NO: 1518825 - DNA, 15 bp, Homo sapiens
tctgagagggaggat

SEQ ID NO: 1518826 - DNA, 15 bp, Homo sapiens
ttctgagagggagga

SEQ ID NO: 1518827 - DNA, 15 bp, Homo sapiens
attctgagagggagg

SEQ ID NO: 1518828 - DNA, 15 bp, Homo sapiens
tattctgagagggag

SEQ ID NO: 1518829 - DNA, 15 bp, Homo sapiens
gtattctgagaggga

SEQ ID NO: 1518830 - DNA, 15 bp, Homo sapiens
agtattctgagaggg

SEQ ID NO: 1518831 - DNA, 15 bp, Homo sapiens
aagtattctgagagg

SEQ ID NO: 1518832 - DNA, 15 bp, Homo sapiens
gaagtattctgagag

SEQ ID NO: 1518833 - DNA, 15 bp, Homo sapiens
tgaagtattctgaga

SEQ ID NO: 1518834 - DNA, 15 bp, Homo sapiens
gtgaagtattctgag

SEQ ID NO: 1518835 - DNA, 15 bp, Homo sapiens
agtgaagtattctga

SEQ ID NO: 1518836 - DNA, 15 bp, Homo sapiens
aagtgaagtattctg

SEQ ID NO: 1518837 - DNA, 15 bp, Homo sapiens
taagtgaagtattct

SEQ ID NO: 1518838 - DNA, 15 bp, Homo sapiens
ttaagtgaagtattc

SEQ ID NO: 1518839 - DNA, 15 bp, Homo sapiens
gttaagtgaagtatt

SEQ ID NO: 1518840 - DNA, 15 bp, Homo sapiens
cgttaagtgaagtat

SEQ ID NO: 1518841 - DNA, 15 bp, Homo sapiens
acgttaagtgaagta

SEQ ID NO: 1518842 - DNA, 15 bp, Homo sapiens
aacgttaagtgaagt

SEQ ID NO: 1518843 - DNA, 15 bp, Homo sapiens
aaacgttaagtgaag

SEQ ID NO: 1518844 - DNA, 15 bp, Homo sapiens
caaacgttaagtgaa

SEQ ID NO: 1518845 - DNA, 15 bp, Homo sapiens
ccaaacgttaagtga

SEQ ID NO: 1518846 - DNA, 15 bp, Homo sapiens
accaaacgttaagtg

SEQ ID NO: 1518847 - DNA, 15 bp, Homo sapiens
caccaaacgttaagt

SEQ ID NO: 1518848 - DNA, 15 bp, Homo sapiens
tcaccaaacgttaag

SEQ ID NO: 1518849 - DNA, 15 bp, Homo sapiens
ttcaccaaacgttaa

SEQ ID NO: 1518850 - DNA, 15 bp, Homo sapiens
attcaccaaacgtta

SEQ ID NO: 1518851 - DNA, 15 bp, Homo sapiens
tattcaccaaacgtt

SEQ ID NO: 1518852 - DNA, 15 bp, Homo sapiens
ctattcaccaaacgt

SEQ ID NO: 1518853 - DNA, 15 bp, Homo sapiens
actattcaccaaacg

SEQ ID NO: 1518854 - DNA, 15 bp, Homo sapiens
gactattcaccaaac

SEQ ID NO: 1518855 - DNA, 15 bp, Homo sapiens
agactattcaccaaa

SEQ ID NO: 1518856 - DNA, 15 bp, Homo sapiens
gagactattcaccaa

SEQ ID NO: 1518857 - DNA, 15 bp, Homo sapiens
ggagactattcacca

SEQ ID NO: 1518858 - DNA, 15 bp, Homo sapiens
gggagactattcacc

SEQ ID NO: 1518859 - DNA, 15 bp, Homo sapiens
tgggagactattcac

SEQ ID NO: 1518860 - DNA, 15 bp, Homo sapiens
ctgggagactattca

SEQ ID NO: 1518861 - DNA, 15 bp, Homo sapiens
actgggagactattc

SEQ ID NO: 1518862 - DNA, 15 bp, Homo sapiens
gactgggagactatt

SEQ ID NO: 1518863 - DNA, 15 bp, Homo sapiens
tgactgggagactat

SEQ ID NO: 1518864 - DNA, 15 bp, Homo sapiens
atgactgggagacta

SEQ ID NO: 1518865 - DNA, 15 bp, Homo sapiens
aatgactgggagact

SEQ ID NO: 1518866 - DNA, 15 bp, Homo sapiens
aaatgactgggagac

SEQ ID NO: 1518867 - DNA, 15 bp, Homo sapiens
taaatgactgggaga

SEQ ID NO: 1518868 - DNA, 15 bp, Homo sapiens
ataaatgactgggag

SEQ ID NO: 1518869 - DNA, 15 bp, Homo sapiens
gataaatgactggga

SEQ ID NO: 1518870 - DNA, 15 bp, Homo sapiens
agataaatgactggg

SEQ ID NO: 1518871 - DNA, 15 bp, Homo sapiens
tagataaatgactgg

SEQ ID NO: 1518872 - DNA, 15 bp, Homo sapiens
atagataaatgactg

SEQ ID NO: 1518873 - DNA, 15 bp, Homo sapiens
catagataaatgact

SEQ ID NO: 1518874 - DNA, 15 bp, Homo sapiens
gcatagataaatgac

SEQ ID NO: 1518875 - DNA, 15 bp, Homo sapiens
tgcatagataaatga

SEQ ID NO: 1518876 - DNA, 15 bp, Homo sapiens
gtgcatagataaatg

SEQ ID NO: 1518877 - DNA, 15 bp, Homo sapiens
tgtgcatagataaat

SEQ ID NO: 1518878 - DNA, 15 bp, Homo sapiens
atgtgcatagataaa

SEQ ID NO: 1518879 - DNA, 15 bp, Homo sapiens
catgtgcatagataa

SEQ ID NO: 1518880 - DNA, 15 bp, Homo sapiens
acatgtgcatagata

SEQ ID NO: 1518881 - DNA, 15 bp, Homo sapiens
tacatgtgcatagat

SEQ ID NO: 1518882 - DNA, 15 bp, Homo sapiens
gtacatgtgcataga

SEQ ID NO: 1518883 - DNA, 15 bp, Homo sapiens
tgtacatgtgcatag

SEQ ID NO: 1518884 - DNA, 15 bp, Homo sapiens
atgtacatgtgcata

SEQ ID NO: 1518885 - DNA, 15 bp, Homo sapiens
aatgtacatgtgcat

SEQ ID NO: 1518886 - DNA, 15 bp, Homo sapiens
aaatgtacatgtgca

SEQ ID NO: 1518887 - DNA, 15 bp, Homo sapiens
caaatgtacatgtgc

SEQ ID NO: 1518888 - DNA, 15 bp, Homo sapiens
acaaatgtacatgtg

SEQ ID NO: 1518889 - DNA, 15 bp, Homo sapiens
aacaaatgtacatgt

SEQ ID NO: 1518890 - DNA, 15 bp, Homo sapiens
aaacaaatgtacatg

SEQ ID NO: 1518891 - DNA, 15 bp, Homo sapiens
gaaacaaatgtacat

SEQ ID NO: 1518892 - DNA, 15 bp, Homo sapiens
agaaacaaatgtaca

SEQ ID NO: 1518893 - DNA, 15 bp, Homo sapiens
gagaaacaaatgtac

SEQ ID NO: 1518894 - DNA, 15 bp, Homo sapiens
ggagaaacaaatgta

SEQ ID NO: 1518895 - DNA, 15 bp, Homo sapiens
aggagaaacaaatgt

SEQ ID NO: 1518896 - DNA, 15 bp, Homo sapiens
taggagaaacaaatg

SEQ ID NO: 1518897 - DNA, 15 bp, Homo sapiens
ataggagaaacaaat

SEQ ID NO: 1518898 - DNA, 15 bp, Homo sapiens
gataggagaaacaaa

SEQ ID NO: 1518899 - DNA, 15 bp, Homo sapiens
tgataggagaaacaa

SEQ ID NO: 1518900 - DNA, 15 bp, Homo sapiens
ttgataggagaaaca

SEQ ID NO: 1518901 - DNA, 15 bp, Homo sapiens
tttgataggagaaac

SEQ ID NO: 1518902 - DNA, 15 bp, Homo sapiens
atttgataggagaaa

SEQ ID NO: 1518903 - DNA, 15 bp, Homo sapiens
catttgataggagaa

SEQ ID NO: 1518904 - DNA, 15 bp, Homo sapiens
tcatttgataggaga

SEQ ID NO: 1518905 - DNA, 15 bp, Homo sapiens
atcatttgataggag

SEQ ID NO: 1518906 - DNA, 15 bp, Homo sapiens
tatcatttgatagga

SEQ ID NO: 1518907 - DNA, 15 bp, Homo sapiens
atatcatttgatagg

SEQ ID NO: 1518908 - DNA, 15 bp, Homo sapiens
gatatcatttgatag

SEQ ID NO: 1518909 - DNA, 15 bp, Homo sapiens
agatatcatttgata

SEQ ID NO: 1518910 - DNA, 15 bp, Homo sapiens
tagatatcatttgat

SEQ ID NO: 1518911 - DNA, 15 bp, Homo sapiens
ctagatatcatttga

SEQ ID NO: 1518912 - DNA, 15 bp, Homo sapiens
cctagatatcatttg

SEQ ID NO: 1518913 - DNA, 15 bp, Homo sapiens
acctagatatcattt

SEQ ID NO: 1518914 - DNA, 15 bp, Homo sapiens
aacctagatatcatt

SEQ ID NO: 1518915 - DNA, 15 bp, Homo sapiens
caacctagatatcat

SEQ ID NO: 1518916 - DNA, 15 bp, Homo sapiens
acaacctagatatca

SEQ ID NO: 1518917 - DNA, 15 bp, Homo sapiens
aacaacctagatatc

SEQ ID NO: 1518918 - DNA, 15 bp, Homo sapiens
aaacaacctagatat

SEQ ID NO: 1518919 - DNA, 15 bp, Homo sapiens
gaaacaacctagata

SEQ ID NO: 1518920 - DNA, 15 bp, Homo sapiens
ggaaacaacctagat

SEQ ID NO: 1518921 - DNA, 15 bp, Homo sapiens
tggaaacaacctaga

SEQ ID NO: 1518922 - DNA, 15 bp, Homo sapiens
atggaaacaacctag

SEQ ID NO: 1518923 - DNA, 15 bp, Homo sapiens
aatggaaacaaccta

SEQ ID NO: 1518924 - DNA, 15 bp, Homo sapiens
taatggaaacaacct

SEQ ID NO: 1518925 - DNA, 15 bp, Homo sapiens
ttaatggaaacaacc

SEQ ID NO: 1518926 - DNA, 15 bp, Homo sapiens
attaatggaaacaac

SEQ ID NO: 1518927 - DNA, 15 bp, Homo sapiens
tattaatggaaacaa

SEQ ID NO: 1518928 - DNA, 15 bp, Homo sapiens
atattaatggaaaca

SEQ ID NO: 1518929 - DNA, 15 bp, Homo sapiens
aatattaatggaaac

SEQ ID NO: 1518930 - DNA, 15 bp, Homo sapiens
aaatattaatggaaa

SEQ ID NO: 1518931 - DNA, 15 bp, Homo sapiens
aaaatattaatggaa

SEQ ID NO: 1518932 - DNA, 15 bp, Homo sapiens
aaaaatattaatgga

SEQ ID NO: 1518933 - DNA, 15 bp, Homo sapiens
taaaaatattaatgg

SEQ ID NO: 1518934 - DNA, 15 bp, Homo sapiens
ttaaaaatattaatg

SEQ ID NO: 1518935 - DNA, 15 bp, Homo sapiens
tttaaaaatattaat

SEQ ID NO: 1518936 - DNA, 15 bp, Homo sapiens
ttttaaaaatattaa

SEQ ID NO: 1518937 - DNA, 15 bp, Homo sapiens
attttaaaaatatta

SEQ ID NO: 1518938 - DNA, 15 bp, Homo sapiens
aattttaaaaatatt

SEQ ID NO: 1518939 - DNA, 15 bp, Homo sapiens
gaattttaaaaatat

SEQ ID NO: 1518940 - DNA, 15 bp, Homo sapiens
agaattttaaaaata

SEQ ID NO: 1518941 - DNA, 15 bp, Homo sapiens
tcagaattttaaaaa

SEQ ID NO: 1518942 - DNA, 15 bp, Homo sapiens
gtcagaattttaaaa

SEQ ID NO: 1518943 - DNA, 15 bp, Homo sapiens
ggtcagaattttaaa

SEQ ID NO: 1518944 - DNA, 15 bp, Homo sapiens
aggtcagaattttaa

SEQ ID NO: 1518945 - DNA, 15 bp, Homo sapiens
caggtcagaatttta

SEQ ID NO: 1518946 - DNA, 15 bp, Homo sapiens
ccaggtcagaatttt

SEQ ID NO: 1518947 - DNA, 15 bp, Homo sapiens
accaggtcagaattt

SEQ ID NO: 1518948 - DNA, 15 bp, Homo sapiens
taccaggtcagaatt

SEQ ID NO: 1518949 - DNA, 15 bp, Homo sapiens
gtaccaggtcagaat

SEQ ID NO: 1518950 - DNA, 15 bp, Homo sapiens
ggtaccaggtcagaa

SEQ ID NO: 1518951 - DNA, 15 bp, Homo sapiens
tggtaccaggtcaga

SEQ ID NO: 1518952 - DNA, 15 bp, Homo sapiens
ctggtaccaggtcag

SEQ ID NO: 1518953 - DNA, 15 bp, Homo sapiens
gctggtaccaggtca

SEQ ID NO: 1518954 - DNA, 15 bp, Homo sapiens
tgctggtaccaggtc

SEQ ID NO: 1518955 - DNA, 15 bp, Homo sapiens
ctgctggtaccaggt

SEQ ID NO: 1518956 - DNA, 15 bp, Homo sapiens
gctgctggtaccagg

SEQ ID NO: 1518957 - DNA, 15 bp, Homo sapiens
tgctgctggtaccag

SEQ ID NO: 1518958 - DNA, 15 bp, Homo sapiens
atgctgctggtacca

SEQ ID NO: 1518959 - DNA, 15 bp, Homo sapiens
catgctgctggtacc

SEQ ID NO: 1518960 - DNA, 15 bp, Homo sapiens
tcatgctgctggtac

SEQ ID NO: 1518961 - DNA, 15 bp, Homo sapiens
atcatgctgctggta

SEQ ID NO: 1518962 - DNA, 15 bp, Homo sapiens
catcatgctgctggt

SEQ ID NO: 1518963 - DNA, 15 bp, Homo sapiens
ccatcatgctgctgg

SEQ ID NO: 1518964 - DNA, 15 bp, Homo sapiens
cccatcatgctgctg

SEQ ID NO: 1518965 - DNA, 15 bp, Homo sapiens
gcccatcatgctgct

SEQ ID NO: 1518966 - DNA, 15 bp, Homo sapiens
agcccatcatgctgc

SEQ ID NO: 1518967 - DNA, 15 bp, Homo sapiens
cagcccatcatgctg

SEQ ID NO: 1518968 - DNA, 15 bp, Homo sapiens
tcagcccatcatgct

SEQ ID NO: 1518969 - DNA, 15 bp, Homo sapiens
ctcagcccatcatgc

SEQ ID NO: 1518970 - DNA, 15 bp, Homo sapiens
gctcagcccatcatg

SEQ ID NO: 1518971 - DNA, 15 bp, Homo sapiens
agctcagcccatcat

SEQ ID NO: 1518972 - DNA, 15 bp, Homo sapiens
tagctcagcccatca

SEQ ID NO: 1518973 - DNA, 15 bp, Homo sapiens
ttagctcagcccatc

SEQ ID NO: 1518974 - DNA, 15 bp, Homo sapiens
attagctcagcccat

SEQ ID NO: 1518975 - DNA, 15 bp, Homo sapiens
cattagctcagccca

SEQ ID NO: 1518976 - DNA, 15 bp, Homo sapiens
gcattagctcagccc

SEQ ID NO: 1518977 - DNA, 15 bp, Homo sapiens
tgcattagctcagcc

SEQ ID NO: 1518978 - DNA, 15 bp, Homo sapiens
ttgcattagctcagc

SEQ ID NO: 1518979 - DNA, 15 bp, Homo sapiens
attgcattagctcag

SEQ ID NO: 1518980 - DNA, 15 bp, Homo sapiens
gattgcattagctca

SEQ ID NO: 1518981 - DNA, 15 bp, Homo sapiens
agattgcattagctc

SEQ ID NO: 1518982 - DNA, 15 bp, Homo sapiens
gagattgcattagct

SEQ ID NO: 1518983 - DNA, 15 bp, Homo sapiens
agagattgcattagc

SEQ ID NO: 1518984 - DNA, 15 bp, Homo sapiens
aagagattgcattag

SEQ ID NO: 1518985 - DNA, 15 bp, Homo sapiens
gaagagattgcatta

SEQ ID NO: 1518986 - DNA, 15 bp, Homo sapiens
ggaagagattgcatt

SEQ ID NO: 1518987 - DNA, 15 bp, Homo sapiens
gggaagagattgcat

SEQ ID NO: 1518988 - DNA, 15 bp, Homo sapiens
tgggaagagattgca

SEQ ID NO: 1518989 - DNA, 15 bp, Homo sapiens
ttgggaagagattgc

SEQ ID NO: 1518990 - DNA, 15 bp, Homo sapiens
cttgggaagagattg

SEQ ID NO: 1518991 - DNA, 15 bp, Homo sapiens
tcttgggaagagatt

SEQ ID NO: 1518992 - DNA, 15 bp, Homo sapiens
gtcttgggaagagat

SEQ ID NO: 1518993 - DNA, 15 bp, Homo sapiens
tgtcttgggaagaga

SEQ ID NO: 1518994 - DNA, 15 bp, Homo sapiens
atgtcttgggaagag

SEQ ID NO: 1518995 - DNA, 15 bp, Homo sapiens
tatgtcttgggaaga

SEQ ID NO: 1518996 - DNA, 15 bp, Homo sapiens
ttatgtcttgggaag

SEQ ID NO: 1518997 - DNA, 15 bp, Homo sapiens
cttatgtcttgggaa

SEQ ID NO: 1518998 - DNA, 15 bp, Homo sapiens
ccttatgtcttggga

SEQ ID NO: 1518999 - DNA, 15 bp, Homo sapiens
gccttatgtcttggg

SEQ ID NO: 1519000 - DNA, 15 bp, Homo sapiens
agccttatgtcttgg

SEQ ID NO: 1519001 - DNA, 15 bp, Homo sapiens
gagccttatgtcttg

SEQ ID NO: 1519002 - DNA, 15 bp, Homo sapiens
tgagccttatgtctt

SEQ ID NO: 1519003 - DNA, 15 bp, Homo sapiens
atgagccttatgtct

SEQ ID NO: 1519004 - DNA, 15 bp, Homo sapiens
tatgagccttatgtc

SEQ ID NO: 1519005 - DNA, 15 bp, Homo sapiens
ctatgagccttatgt

SEQ ID NO: 1519006 - DNA, 15 bp, Homo sapiens
tctatgagccttatg

SEQ ID NO: 1519007 - DNA, 15 bp, Homo sapiens
ttctatgagccttat

SEQ ID NO: 1519008 - DNA, 15 bp, Homo sapiens
tttctatgagcctta

SEQ ID NO: 1519009 - DNA, 15 bp, Homo sapiens
atttctatgagcctt

SEQ ID NO: 1519010 - DNA, 15 bp, Homo sapiens
tatttctatgagcct

SEQ ID NO: 1519011 - DNA, 15 bp, Homo sapiens
gtatttctatgagcc

SEQ ID NO: 1519012 - DNA, 15 bp, Homo sapiens
agtatttctatgagc

SEQ ID NO: 1519013 - DNA, 15 bp, Homo sapiens
tagtatttctatgag

SEQ ID NO: 1519014 - DNA, 15 bp, Homo sapiens
ctagtatttctatga

SEQ ID NO: 1519015 - DNA, 15 bp, Homo sapiens
cctagtatttctatg

SEQ ID NO: 1519016 - DNA, 15 bp, Homo sapiens
acctagtatttctat

SEQ ID NO: 1519017 - DNA, 15 bp, Homo sapiens
cacctagtatttcta

SEQ ID NO: 1519018 - DNA, 15 bp, Homo sapiens
acacctagtatttct

SEQ ID NO: 1519019 - DNA, 15 bp, Homo sapiens
tacacctagtatttc

SEQ ID NO: 1519020 - DNA, 15 bp, Homo sapiens
ttacacctagtattt

SEQ ID NO: 1519021 - DNA, 15 bp, Homo sapiens
tttacacctagtatt

SEQ ID NO: 1519022 - DNA, 15 bp, Homo sapiens
ttttacacctagtat

SEQ ID NO: 1519023 - DNA, 15 bp, Homo sapiens
cttttacacctagta

SEQ ID NO: 1519024 - DNA, 15 bp, Homo sapiens
tcttttacacctagt

SEQ ID NO: 1519025 - DNA, 15 bp, Homo sapiens
ttcttttacacctag

SEQ ID NO: 1519026 - DNA, 15 bp, Homo sapiens
tttcttttacaccta

SEQ ID NO: 1519027 - DNA, 15 bp, Homo sapiens
ttttcttttacacct

SEQ ID NO: 1519028 - DNA, 15 bp, Homo sapiens
attttcttttacacc

SEQ ID NO: 1519029 - DNA, 15 bp, Homo sapiens
tattttcttttacac

SEQ ID NO: 1519030 - DNA, 15 bp, Homo sapiens
atattttcttttaca

SEQ ID NO: 1519031 - DNA, 15 bp, Homo sapiens
catattttcttttac

SEQ ID NO: 1519032 - DNA, 15 bp, Homo sapiens
acatattttctttta

SEQ ID NO: 1519033 - DNA, 15 bp, Homo sapiens
cacatattttctttt

SEQ ID NO: 1519034 - DNA, 15 bp, Homo sapiens
acacatattttcttt

SEQ ID NO: 1519035 - DNA, 15 bp, Homo sapiens
gtacacatattttct

SEQ ID NO: 1519036 - DNA, 15 bp, Homo sapiens
agtacacatattttc

SEQ ID NO: 1519037 - DNA, 15 bp, Homo sapiens
aagtacacatatttt

SEQ ID NO: 1519038 - DNA, 15 bp, Homo sapiens
taagtacacatattt

SEQ ID NO: 1519039 - DNA, 15 bp, Homo sapiens
ttaagtacacatatt

SEQ ID NO: 1519040 - DNA, 15 bp, Homo sapiens
tttaagtacacatat

SEQ ID NO: 1519041 - DNA, 15 bp, Homo sapiens
ttttaagtacacata

SEQ ID NO: 1519042 - DNA, 15 bp, Homo sapiens
tttttaagtacacat

SEQ ID NO: 1519043 - DNA, 15 bp, Homo sapiens
ttttttaagtacaca

SEQ ID NO: 1519044 - DNA, 15 bp, Homo sapiens
tttttttaagtacac

SEQ ID NO: 1519045 - DNA, 15 bp, Homo sapiens
atttttttaagtaca

SEQ ID NO: 1519046 - DNA, 15 bp, Homo sapiens
aatttttttaagtac

SEQ ID NO: 1519047 - DNA, 15 bp, Homo sapiens
aaatttttttaagta

SEQ ID NO: 1519048 - DNA, 15 bp, Homo sapiens
taaatttttttaagt

SEQ ID NO: 1519049 - DNA, 15 bp, Homo sapiens
ctaaatttttttaag

SEQ ID NO: 1519050 - DNA, 15 bp, Homo sapiens
cctaaatttttttaa

SEQ ID NO: 1519051 - DNA, 15 bp, Homo sapiens
gcctaaattttttta

SEQ ID NO: 1519052 - DNA, 15 bp, Homo sapiens
ggcctaaattttttt

SEQ ID NO: 1519053 - DNA, 15 bp, Homo sapiens
cggcctaaatttttt

SEQ ID NO: 1519054 - DNA, 15 bp, Homo sapiens
tcggcctaaattttt

SEQ ID NO: 1519055 - DNA, 15 bp, Homo sapiens
ctcggcctaaatttt

SEQ ID NO: 1519056 - DNA, 15 bp, Homo sapiens
actcggcctaaattt

SEQ ID NO: 1519057 - DNA, 15 bp, Homo sapiens
cactcggcctaaatt

SEQ ID NO: 1519058 - DNA, 15 bp, Homo sapiens
gcactcggcctaaat

SEQ ID NO: 1519059 - DNA, 15 bp, Homo sapiens
cgcactcggcctaaa

SEQ ID NO: 1519060 - DNA, 15 bp, Homo sapiens
ccgcactcggcctaa

SEQ ID NO: 1519061 - DNA, 15 bp, Homo sapiens
accgcactcggccta

SEQ ID NO: 1519062 - DNA, 15 bp, Homo sapiens
caccgcactcggcct

SEQ ID NO: 1519063 - DNA, 15 bp, Homo sapiens
tcaccgcactcggcc

SEQ ID NO: 1519064 - DNA, 15 bp, Homo sapiens
gtcaccgcactcggc

SEQ ID NO: 1519065 - DNA, 15 bp, Homo sapiens
agtcaccgcactcgg

SEQ ID NO: 1519066 - DNA, 15 bp, Homo sapiens
gagtcaccgcactcg

SEQ ID NO: 1519067 - DNA, 15 bp, Homo sapiens
tgagtcaccgcactc

SEQ ID NO: 1519068 - DNA, 15 bp, Homo sapiens
gtgagtcaccgcact

SEQ ID NO: 1519069 - DNA, 15 bp, Homo sapiens
cgtgagtcaccgcac

SEQ ID NO: 1519070 - DNA, 15 bp, Homo sapiens
gcgtgagtcaccgca

SEQ ID NO: 1519071 - DNA, 15 bp, Homo sapiens
ggcgtgagtcaccgc

SEQ ID NO: 1519072 - DNA, 15 bp, Homo sapiens
aggcgtgagtcaccg

SEQ ID NO: 1519073 - DNA, 15 bp, Homo sapiens
caggcgtgagtcacc

SEQ ID NO: 1519074 - DNA, 15 bp, Homo sapiens
acaggcgtgagtcac

SEQ ID NO: 1519075 - DNA, 15 bp, Homo sapiens
tacaggcgtgagtca

SEQ ID NO: 1519076 - DNA, 15 bp, Homo sapiens
ttacaggcgtgagtc

SEQ ID NO: 1519077 - DNA, 15 bp, Homo sapiens
attacaggcgtgagt

SEQ ID NO: 1519078 - DNA, 15 bp, Homo sapiens
cggcctcccaaaatg

SEQ ID NO: 1519079 - DNA, 15 bp, Homo sapiens
tcggcctcccaaaat

SEQ ID NO: 1519080 - DNA, 15 bp, Homo sapiens
ctcggcctcccaaaa

SEQ ID NO: 1519081 - DNA, 15 bp, Homo sapiens
tacccacctcggcct

SEQ ID NO: 1519082 - DNA, 15 bp, Homo sapiens
ctacccacctcggcc

SEQ ID NO: 1519083 - DNA, 15 bp, Homo sapiens
tctacccacctcggc

SEQ ID NO: 1519084 - DNA, 15 bp, Homo sapiens
atctacccacctcgg

SEQ ID NO: 1519085 - DNA, 15 bp, Homo sapiens
gatctacccacctcg

SEQ ID NO: 1519086 - DNA, 15 bp, Homo sapiens
tgatctacccacctc

SEQ ID NO: 1519087 - DNA, 15 bp, Homo sapiens
gtgatctacccacct

SEQ ID NO: 1519088 - DNA, 15 bp, Homo sapiens
ggtgatctacccacc

SEQ ID NO: 1519089 - DNA, 15 bp, Homo sapiens
aggtgatctacccac

SEQ ID NO: 1519090 - DNA, 15 bp, Homo sapiens
caggtgatctaccca

SEQ ID NO: 1519091 - DNA, 15 bp, Homo sapiens
tcaggtgatctaccc

SEQ ID NO: 1519092 - DNA, 15 bp, Homo sapiens
ctcaggtgatctacc

SEQ ID NO: 1519093 - DNA, 15 bp, Homo sapiens
cctcaggtgatctac

SEQ ID NO: 1519094 - DNA, 15 bp, Homo sapiens
acctcaggtgatcta

SEQ ID NO: 1519095 - DNA, 15 bp, Homo sapiens
cctcgaactcctgac

SEQ ID NO: 1519096 - DNA, 15 bp, Homo sapiens
gcctcgaactcctga

SEQ ID NO: 1519097 - DNA, 15 bp, Homo sapiens
tgcctcgaactcctg

SEQ ID NO: 1519098 - DNA, 15 bp, Homo sapiens
ttgcctcgaactcct

SEQ ID NO: 1519099 - DNA, 15 bp, Homo sapiens
cttgcctcgaactcc

SEQ ID NO: 1519100 - DNA, 15 bp, Homo sapiens
gcttgcctcgaactc

SEQ ID NO: 1519101 - DNA, 15 bp, Homo sapiens
ggcttgcctcgaact

SEQ ID NO: 1519102 - DNA, 15 bp, Homo sapiens
aggcttgcctcgaac

SEQ ID NO: 1519103 - DNA, 15 bp, Homo sapiens
caggcttgcctcgaa

SEQ ID NO: 1519104 - DNA, 15 bp, Homo sapiens
ccaggcttgcctcga

SEQ ID NO: 1519105 - DNA, 15 bp, Homo sapiens
gccaggcttgcctcg

SEQ ID NO: 1519106 - DNA, 15 bp, Homo sapiens
ggccaggcttgcctc

SEQ ID NO: 1519107 - DNA, 15 bp, Homo sapiens
tggccaggcttgcct

SEQ ID NO: 1519108 - DNA, 15 bp, Homo sapiens
ctggccaggcttgcc

SEQ ID NO: 1519109 - DNA, 15 bp, Homo sapiens
gctggccaggcttgc

SEQ ID NO: 1519110 - DNA, 15 bp, Homo sapiens
tgctggccaggcttg

SEQ ID NO: 1519111 - DNA, 15 bp, Homo sapiens
atgctggccaggctt

SEQ ID NO: 1519112 - DNA, 15 bp, Homo sapiens
catgctggccaggct

SEQ ID NO: 1519113 - DNA, 15 bp, Homo sapiens
ccatgctggccaggc

SEQ ID NO: 1519114 - DNA, 15 bp, Homo sapiens
gccatgctggccagg

SEQ ID NO: 1519115 - DNA, 15 bp, Homo sapiens
cgccatgctggccag

SEQ ID NO: 1519116 - DNA, 15 bp, Homo sapiens
tcgccatgctggcca

SEQ ID NO: 1519117 - DNA, 15 bp, Homo sapiens
ttcgccatgctggcc

SEQ ID NO: 1519118 - DNA, 15 bp, Homo sapiens
tttcgccatgctggc

SEQ ID NO: 1519119 - DNA, 15 bp, Homo sapiens
gtttcgccatgctgg

SEQ ID NO: 1519120 - DNA, 15 bp, Homo sapiens
ggtttcgccatgctg

SEQ ID NO: 1519121 - DNA, 15 bp, Homo sapiens
gggtttcgccatgct

SEQ ID NO: 1519122 - DNA, 15 bp, Homo sapiens
ggggtttcgccatgc

SEQ ID NO: 1519123 - DNA, 15 bp, Homo sapiens
tggggtttcgccatg

SEQ ID NO: 1519124 - DNA, 15 bp, Homo sapiens
atggggtttcgccat

SEQ ID NO: 1519125 - DNA, 15 bp, Homo sapiens
gatggggtttcgcca

SEQ ID NO: 1519126 - DNA, 15 bp, Homo sapiens
agatggggtttcgcc

SEQ ID NO: 1519127 - DNA, 15 bp, Homo sapiens
gagatggggtttcgc

SEQ ID NO: 1519128 - DNA, 15 bp, Homo sapiens
atttagtagagatgg

SEQ ID NO: 1519129 - DNA, 15 bp, Homo sapiens
tatttagtagagatg

SEQ ID NO: 1519130 - DNA, 15 bp, Homo sapiens
ttatttagtagagat

SEQ ID NO: 1519131 - DNA, 15 bp, Homo sapiens
tttatttagtagaga

SEQ ID NO: 1519132 - DNA, 15 bp, Homo sapiens
atttatttagtagag

SEQ ID NO: 1519133 - DNA, 15 bp, Homo sapiens
tatttatttagtaga

SEQ ID NO: 1519134 - DNA, 15 bp, Homo sapiens
ttatttatttagtag

SEQ ID NO: 1519135 - DNA, 15 bp, Homo sapiens
tttatttatttagta

SEQ ID NO: 1519136 - DNA, 15 bp, Homo sapiens
atttatttatttagt

SEQ ID NO: 1519137 - DNA, 15 bp, Homo sapiens
tatatttatttattt

SEQ ID NO: 1519138 - DNA, 15 bp, Homo sapiens
atatatttatttatt

SEQ ID NO: 1519139 - DNA, 15 bp, Homo sapiens
tatatatttatttat

SEQ ID NO: 1519140 - DNA, 15 bp, Homo sapiens
atatatatttattta

SEQ ID NO: 1519141 - DNA, 15 bp, Homo sapiens
tatatatatttattt

SEQ ID NO: 1519142 - DNA, 15 bp, Homo sapiens
tatatatatatttat

SEQ ID NO: 1519143 - DNA, 15 bp, Homo sapiens
catatatatatattt

SEQ ID NO: 1519144 - DNA, 15 bp, Homo sapiens
tcatatatatatatt

SEQ ID NO: 1519145 - DNA, 15 bp, Homo sapiens
ttcatatatatatat

SEQ ID NO: 1519146 - DNA, 15 bp, Homo sapiens
attcatatatatata

SEQ ID NO: 1519147 - DNA, 15 bp, Homo sapiens
aattcatatatatat

SEQ ID NO: 1519148 - DNA, 15 bp, Homo sapiens
taattcatatatata

SEQ ID NO: 1519149 - DNA, 15 bp, Homo sapiens
ctaattcatatatat

SEQ ID NO: 1519150 - DNA, 15 bp, Homo sapiens
gctaattcatatata

SEQ ID NO: 1519151 - DNA, 15 bp, Homo sapiens
ggctaattcatatat

SEQ ID NO: 1519152 - DNA, 15 bp, Homo sapiens
tggctaattcatata

SEQ ID NO: 1519153 - DNA, 15 bp, Homo sapiens
ctggctaattcatat

SEQ ID NO: 1519154 - DNA, 15 bp, Homo sapiens
cctggctaattcata

SEQ ID NO: 1519155 - DNA, 15 bp, Homo sapiens
acctggctaattcat

SEQ ID NO: 1519156 - DNA, 15 bp, Homo sapiens
cacctggctaattca

SEQ ID NO: 1519157 - DNA, 15 bp, Homo sapiens
acacctggctaattc

SEQ ID NO: 1519158 - DNA, 15 bp, Homo sapiens
tgcccaccaccacac

SEQ ID NO: 1519159 - DNA, 15 bp, Homo sapiens
gtgcccaccaccaca

SEQ ID NO: 1519160 - DNA, 15 bp, Homo sapiens
agtgcccaccaccac

SEQ ID NO: 1519161 - DNA, 15 bp, Homo sapiens
aagtgcccaccacca

SEQ ID NO: 1519162 - DNA, 15 bp, Homo sapiens
caagtgcccaccacc

SEQ ID NO: 1519163 - DNA, 15 bp, Homo sapiens
acaagtgcccaccac

SEQ ID NO: 1519164 - DNA, 15 bp, Homo sapiens
tacaagtgcccacca

SEQ ID NO: 1519165 - DNA, 15 bp, Homo sapiens
ttacaagtgcccacc

SEQ ID NO: 1519166 - DNA, 15 bp, Homo sapiens
attacaagtgcccac

SEQ ID NO: 1519167 - DNA, 15 bp, Homo sapiens
gattacaagtgccca

SEQ ID NO: 1519168 - DNA, 15 bp, Homo sapiens
ggattacaagtgccc

SEQ ID NO: 1519169 - DNA, 15 bp, Homo sapiens
gggattacaagtgcc

SEQ ID NO: 1519170 - DNA, 15 bp, Homo sapiens
tgggattacaagtgc

SEQ ID NO: 1519171 - DNA, 15 bp, Homo sapiens
ctgggattacaagtg

SEQ ID NO: 1519172 - DNA, 15 bp, Homo sapiens
ggcctcccaagtagc

SEQ ID NO: 1519173 - DNA, 15 bp, Homo sapiens
tggcctcccaagtag

SEQ ID NO: 1519174 - DNA, 15 bp, Homo sapiens
ttggcctcccaagta

SEQ ID NO: 1519175 - DNA, 15 bp, Homo sapiens
cttggcctcccaagt

SEQ ID NO: 1519176 - DNA, 15 bp, Homo sapiens
tctcctgccttggcc

SEQ ID NO: 1519177 - DNA, 15 bp, Homo sapiens
attctcctgccttgg

SEQ ID NO: 1519178 - DNA, 15 bp, Homo sapiens
gattctcctgccttg

SEQ ID NO: 1519179 - DNA, 15 bp, Homo sapiens
tgattctcctgcctt

SEQ ID NO: 1519180 - DNA, 15 bp, Homo sapiens
caaatgattctcctg

SEQ ID NO: 1519181 - DNA, 15 bp, Homo sapiens
tcaaatgattctcct

SEQ ID NO: 1519182 - DNA, 15 bp, Homo sapiens
ttcaaatgattctcc

SEQ ID NO: 1519183 - DNA, 15 bp, Homo sapiens
gttcaaatgattctc

SEQ ID NO: 1519184 - DNA, 15 bp, Homo sapiens
ggttcaaatgattct

SEQ ID NO: 1519185 - DNA, 15 bp, Homo sapiens
gggttcaaatgattc

SEQ ID NO: 1519186 - DNA, 15 bp, Homo sapiens
cgggttcaaatgatt

SEQ ID NO: 1519187 - DNA, 15 bp, Homo sapiens
ccgggttcaaatgat

SEQ ID NO: 1519188 - DNA, 15 bp, Homo sapiens
cccgggttcaaatga

SEQ ID NO: 1519189 - DNA, 15 bp, Homo sapiens
tcccgggttcaaatg

SEQ ID NO: 1519190 - DNA, 15 bp, Homo sapiens
ctcccgggttcaaat

SEQ ID NO: 1519191 - DNA, 15 bp, Homo sapiens
gaccaggctggagtg

SEQ ID NO: 1519192 - DNA, 15 bp, Homo sapiens
tgaccaggctggagt

SEQ ID NO: 1519193 - DNA, 15 bp, Homo sapiens
ttgaccaggctggag

SEQ ID NO: 1519194 - DNA, 15 bp, Homo sapiens
gttgaccaggctgga

SEQ ID NO: 1519195 - DNA, 15 bp, Homo sapiens
ttgttgaccaggctg

SEQ ID NO: 1519196 - DNA, 15 bp, Homo sapiens
cttgttgaccaggct

SEQ ID NO: 1519197 - DNA, 15 bp, Homo sapiens
tcttgttgaccaggc

SEQ ID NO: 1519198 - DNA, 15 bp, Homo sapiens
ctcttgttgaccagg

SEQ ID NO: 1519199 - DNA, 15 bp, Homo sapiens
gctcttgttgaccag

SEQ ID NO: 1519200 - DNA, 15 bp, Homo sapiens
tgctcttgttgacca

SEQ ID NO: 1519201 - DNA, 15 bp, Homo sapiens
ttgctcttgttgacc

SEQ ID NO: 1519202 - DNA, 15 bp, Homo sapiens
tttgctcttgttgac

SEQ ID NO: 1519203 - DNA, 15 bp, Homo sapiens
ttttgctcttgttga

SEQ ID NO: 1519204 - DNA, 15 bp, Homo sapiens
tttaatttttttttt

SEQ ID NO: 1519205 - DNA, 15 bp, Homo sapiens
atttaattttttttt

SEQ ID NO: 1519206 - DNA, 15 bp, Homo sapiens
aatttaatttttttt

SEQ ID NO: 1519207 - DNA, 15 bp, Homo sapiens
aaatttaattttttt

SEQ ID NO: 1519208 - DNA, 15 bp, Homo sapiens
ataaatttaattttt

SEQ ID NO: 1519209 - DNA, 15 bp, Homo sapiens
tataaatttaatttt

SEQ ID NO: 1519210 - DNA, 15 bp, Homo sapiens
ctataaatttaattt

SEQ ID NO: 1519211 - DNA, 15 bp, Homo sapiens
gctataaatttaatt

SEQ ID NO: 1519212 - DNA, 15 bp, Homo sapiens
agctataaatttaat

SEQ ID NO: 1519213 - DNA, 15 bp, Homo sapiens
cagctataaatttaa

SEQ ID NO: 1519214 - DNA, 15 bp, Homo sapiens
tcagctataaattta

SEQ ID NO: 1519215 - DNA, 15 bp, Homo sapiens
ttcagctataaattt

SEQ ID NO: 1519216 - DNA, 15 bp, Homo sapiens
cttcagctataaatt

SEQ ID NO: 1519217 - DNA, 15 bp, Homo sapiens
gcttcagctataaat

SEQ ID NO: 1519218 - DNA, 15 bp, Homo sapiens
agcttcagctataaa

SEQ ID NO: 1519219 - DNA, 15 bp, Homo sapiens
tagcttcagctataa

SEQ ID NO: 1519220 - DNA, 15 bp, Homo sapiens
ctagcttcagctata

SEQ ID NO: 1519221 - DNA, 15 bp, Homo sapiens
actagcttcagctat

SEQ ID NO: 1519222 - DNA, 15 bp, Homo sapiens
aactagcttcagcta

SEQ ID NO: 1519223 - DNA, 15 bp, Homo sapiens
aaactagcttcagct

SEQ ID NO: 1519224 - DNA, 15 bp, Homo sapiens
gaaactagcttcagc

SEQ ID NO: 1519225 - DNA, 15 bp, Homo sapiens
agaaactagcttcag

SEQ ID NO: 1519226 - DNA, 15 bp, Homo sapiens
tagaaactagcttca

SEQ ID NO: 1519227 - DNA, 15 bp, Homo sapiens
ttagaaactagcttc

SEQ ID NO: 1519228 - DNA, 15 bp, Homo sapiens
cttagaaactagctt

SEQ ID NO: 1519229 - DNA, 15 bp, Homo sapiens
gcttagaaactagct

SEQ ID NO: 1519230 - DNA, 15 bp, Homo sapiens
tgcttagaaactagc

SEQ ID NO: 1519231 - DNA, 15 bp, Homo sapiens
ttgcttagaaactag

SEQ ID NO: 1519232 - DNA, 15 bp, Homo sapiens
tttgcttagaaacta

SEQ ID NO: 1519233 - DNA, 15 bp, Homo sapiens
gtaatttgcttagaa

SEQ ID NO: 1519234 - DNA, 15 bp, Homo sapiens
ggtaatttgcttaga

SEQ ID NO: 1519235 - DNA, 15 bp, Homo sapiens
aggtaatttgcttag

SEQ ID NO: 1519236 - DNA, 15 bp, Homo sapiens
taggtaatttgctta

SEQ ID NO: 1519237 - DNA, 15 bp, Homo sapiens
ctaggtaatttgctt

SEQ ID NO: 1519238 - DNA, 15 bp, Homo sapiens
gctaggtaatttgct

SEQ ID NO: 1519239 - DNA, 15 bp, Homo sapiens
tgctaggtaatttgc

SEQ ID NO: 1519240 - DNA, 15 bp, Homo sapiens
atgctaggtaatttg

SEQ ID NO: 1519241 - DNA, 15 bp, Homo sapiens
tatgctaggtaattt

SEQ ID NO: 1519242 - DNA, 15 bp, Homo sapiens
gtatgctaggtaatt

SEQ ID NO: 1519243 - DNA, 15 bp, Homo sapiens
tgtatgctaggtaat

SEQ ID NO: 1519244 - DNA, 15 bp, Homo sapiens
ctgtatgctaggtaa

SEQ ID NO: 1519245 - DNA, 15 bp, Homo sapiens
actgtatgctaggta

SEQ ID NO: 1519246 - DNA, 15 bp, Homo sapiens
gactgtatgctaggt

SEQ ID NO: 1519247 - DNA, 15 bp, Homo sapiens
tgactgtatgctagg

SEQ ID NO: 1519248 - DNA, 15 bp, Homo sapiens
ctgactgtatgctag

SEQ ID NO: 1519249 - DNA, 15 bp, Homo sapiens
actgactgtatgcta

SEQ ID NO: 1519250 - DNA, 15 bp, Homo sapiens
tactgactgtatgct

SEQ ID NO: 1519251 - DNA, 15 bp, Homo sapiens
atactgactgtatgc

SEQ ID NO: 1519252 - DNA, 15 bp, Homo sapiens
tatactgactgtatg

SEQ ID NO: 1519253 - DNA, 15 bp, Homo sapiens
ctatactgactgtat

SEQ ID NO: 1519254 - DNA, 15 bp, Homo sapiens
tctatactgactgta

SEQ ID NO: 1519255 - DNA, 15 bp, Homo sapiens
gtctatactgactgt

SEQ ID NO: 1519256 - DNA, 15 bp, Homo sapiens
tgtctatactgactg

SEQ ID NO: 1519257 - DNA, 15 bp, Homo sapiens
ctgtctatactgact

SEQ ID NO: 1519258 - DNA, 15 bp, Homo sapiens
tctgtctatactgac

SEQ ID NO: 1519259 - DNA, 15 bp, Homo sapiens
atctgtctatactga

SEQ ID NO: 1519260 - DNA, 15 bp, Homo sapiens
tatctgtctatactg

SEQ ID NO: 1519261 - DNA, 15 bp, Homo sapiens
ttatctgtctatact

SEQ ID NO: 1519262 - DNA, 15 bp, Homo sapiens
tttatctgtctatac

SEQ ID NO: 1519263 - DNA, 15 bp, Homo sapiens
atttatctgtctata

SEQ ID NO: 1519264 - DNA, 15 bp, Homo sapiens
catttatctgtctat

SEQ ID NO: 1519265 - DNA, 15 bp, Homo sapiens
ccatttatctgtcta

SEQ ID NO: 1519266 - DNA, 15 bp, Homo sapiens
tccatttatctgtct

SEQ ID NO: 1519267 - DNA, 15 bp, Homo sapiens
ttccatttatctgtc

SEQ ID NO: 1519268 - DNA, 15 bp, Homo sapiens
tttccatttatctgt

SEQ ID NO: 1519269 - DNA, 15 bp, Homo sapiens
ttttccatttatctg

SEQ ID NO: 1519270 - DNA, 15 bp, Homo sapiens
attttccatttatct

SEQ ID NO: 1519271 - DNA, 15 bp, Homo sapiens
tattttccatttatc

SEQ ID NO: 1519272 - DNA, 15 bp, Homo sapiens
atattttccatttat

SEQ ID NO: 1519273 - DNA, 15 bp, Homo sapiens
catattttccattta

SEQ ID NO: 1519274 - DNA, 15 bp, Homo sapiens
tcatattttccattt

SEQ ID NO: 1519275 - DNA, 15 bp, Homo sapiens
ttcatattttccatt

SEQ ID NO: 1519276 - DNA, 15 bp, Homo sapiens
tttcatattttccat

SEQ ID NO: 1519277 - DNA, 15 bp, Homo sapiens
ctttcatattttcca

SEQ ID NO: 1519278 - DNA, 15 bp, Homo sapiens
tctttcatattttcc

SEQ ID NO: 1519279 - DNA, 15 bp, Homo sapiens
ctctttcatattttc

SEQ ID NO: 1519280 - DNA, 15 bp, Homo sapiens
cctctttcatatttt

SEQ ID NO: 1519281 - DNA, 15 bp, Homo sapiens
acctctttcatattt

SEQ ID NO: 1519282 - DNA, 15 bp, Homo sapiens
aacctctttcatatt

SEQ ID NO: 1519283 - DNA, 15 bp, Homo sapiens
taacctctttcatat

SEQ ID NO: 1519284 - DNA, 15 bp, Homo sapiens
ctaacctctttcata

SEQ ID NO: 1519285 - DNA, 15 bp, Homo sapiens
cctaacctctttcat

SEQ ID NO: 1519286 - DNA, 15 bp, Homo sapiens
tcctaacctctttca

SEQ ID NO: 1519287 - DNA, 15 bp, Homo sapiens
ctcctaacctctttc

SEQ ID NO: 1519288 - DNA, 15 bp, Homo sapiens
tctcctaacctcttt

SEQ ID NO: 1519289 - DNA, 15 bp, Homo sapiens
atctcctaacctctt

SEQ ID NO: 1519290 - DNA, 15 bp, Homo sapiens
catctcctaacctct

SEQ ID NO: 1519291 - DNA, 15 bp, Homo sapiens
gcatctcctaacctc

SEQ ID NO: 1519292 - DNA, 15 bp, Homo sapiens
tgcatctcctaacct

SEQ ID NO: 1519293 - DNA, 15 bp, Homo sapiens
ctgcatctcctaacc

SEQ ID NO: 1519294 - DNA, 15 bp, Homo sapiens
tctgcatctcctaac

SEQ ID NO: 1519295 - DNA, 15 bp, Homo sapiens
ttctgcatctcctaa

SEQ ID NO: 1519296 - DNA, 15 bp, Homo sapiens
cttctgcatctccta

SEQ ID NO: 1519297 - DNA, 15 bp, Homo sapiens
tcttctgcatctcct

SEQ ID NO: 1519298 - DNA, 15 bp, Homo sapiens
atcttctgcatctcc

SEQ ID NO: 1519299 - DNA, 15 bp, Homo sapiens
tatcttctgcatctc

SEQ ID NO: 1519300 - DNA, 15 bp, Homo sapiens
ttatcttctgcatct

SEQ ID NO: 1519301 - DNA, 15 bp, Homo sapiens
tttatcttctgcatc

SEQ ID NO: 1519302 - DNA, 15 bp, Homo sapiens
ttttatcttctgcat

SEQ ID NO: 1519303 - DNA, 15 bp, Homo sapiens
attttatcttctgca

SEQ ID NO: 1519304 - DNA, 15 bp, Homo sapiens
cattttatcttctgc

SEQ ID NO: 1519305 - DNA, 15 bp, Homo sapiens
tcattttatcttctg

SEQ ID NO: 1519306 - DNA, 15 bp, Homo sapiens
ctcattttatcttct

SEQ ID NO: 1519307 - DNA, 15 bp, Homo sapiens
cctcattttatcttc

SEQ ID NO: 1519308 - DNA, 15 bp, Homo sapiens
tcctcattttatctt

SEQ ID NO: 1519309 - DNA, 15 bp, Homo sapiens
ctcctcattttatct

SEQ ID NO: 1519310 - DNA, 15 bp, Homo sapiens
cctcctcattttatc

SEQ ID NO: 1519311 - DNA, 15 bp, Homo sapiens
acctcctcattttat

SEQ ID NO: 1519312 - DNA, 15 bp, Homo sapiens
aacctcctcatttta

SEQ ID NO: 1519313 - DNA, 15 bp, Homo sapiens
gaacctcctcatttt

SEQ ID NO: 1519314 - DNA, 15 bp, Homo sapiens
tgaacctcctcattt

SEQ ID NO: 1519315 - DNA, 15 bp, Homo sapiens
ttgaacctcctcatt

SEQ ID NO: 1519316 - DNA, 15 bp, Homo sapiens
tttgaacctcctcat

SEQ ID NO: 1519317 - DNA, 15 bp, Homo sapiens
ttttgaacctcctca

SEQ ID NO: 1519318 - DNA, 15 bp, Homo sapiens
attttgaacctcctc

SEQ ID NO: 1519319 - DNA, 15 bp, Homo sapiens
tattttgaacctcct

SEQ ID NO: 1519320 - DNA, 15 bp, Homo sapiens
atattttgaacctcc

SEQ ID NO: 1519321 - DNA, 15 bp, Homo sapiens
catattttgaacctc

SEQ ID NO: 1519322 - DNA, 15 bp, Homo sapiens
acatattttgaacct

SEQ ID NO: 1519323 - DNA, 15 bp, Homo sapiens
gacatattttgaacc

SEQ ID NO: 1519324 - DNA, 15 bp, Homo sapiens
agacatattttgaac

SEQ ID NO: 1519325 - DNA, 15 bp, Homo sapiens
tagacatattttgaa

SEQ ID NO: 1519326 - DNA, 15 bp, Homo sapiens
ctagacatattttga

SEQ ID NO: 1519327 - DNA, 15 bp, Homo sapiens
actagacatattttg

SEQ ID NO: 1519328 - DNA, 15 bp, Homo sapiens
tactagacatatttt

SEQ ID NO: 1519329 - DNA, 15 bp, Homo sapiens
ctactagacatattt

SEQ ID NO: 1519330 - DNA, 15 bp, Homo sapiens
cctactagacatatt

SEQ ID NO: 1519331 - DNA, 15 bp, Homo sapiens
acctactagacatat

SEQ ID NO: 1519332 - DNA, 15 bp, Homo sapiens
cacctactagacata

SEQ ID NO: 1519333 - DNA, 15 bp, Homo sapiens
acacctactagacat

SEQ ID NO: 1519334 - DNA, 15 bp, Homo sapiens
aacacctactagaca

SEQ ID NO: 1519335 - DNA, 15 bp, Homo sapiens
gaacacctactagac

SEQ ID NO: 1519336 - DNA, 15 bp, Homo sapiens
ggaacacctactaga

SEQ ID NO: 1519337 - DNA, 15 bp, Homo sapiens
gggaacacctactag

SEQ ID NO: 1519338 - DNA, 15 bp, Homo sapiens
agggaacacctacta

SEQ ID NO: 1519339 - DNA, 15 bp, Homo sapiens
tagggaacacctact

SEQ ID NO: 1519340 - DNA, 15 bp, Homo sapiens
ctagggaacacctac

SEQ ID NO: 1519341 - DNA, 15 bp, Homo sapiens
tctagggaacaccta

SEQ ID NO: 1519342 - DNA, 15 bp, Homo sapiens
ttctagggaacacct

SEQ ID NO: 1519343 - DNA, 15 bp, Homo sapiens
tttctagggaacacc

SEQ ID NO: 1519344 - DNA, 15 bp, Homo sapiens
gtttctagggaacac

SEQ ID NO: 1519345 - DNA, 15 bp, Homo sapiens
agtttctagggaaca

SEQ ID NO: 1519346 - DNA, 15 bp, Homo sapiens
cagtttctagggaac

SEQ ID NO: 1519347 - DNA, 15 bp, Homo sapiens
tcagtttctagggaa

SEQ ID NO: 1519348 - DNA, 15 bp, Homo sapiens
ctcagtttctaggga

SEQ ID NO: 1519349 - DNA, 15 bp, Homo sapiens
gctcagtttctaggg

SEQ ID NO: 1519350 - DNA, 15 bp, Homo sapiens
agctcagtttctagg

SEQ ID NO: 1519351 - DNA, 15 bp, Homo sapiens
gagctcagtttctag

SEQ ID NO: 1519352 - DNA, 15 bp, Homo sapiens
tgagctcagtttcta

SEQ ID NO: 1519353 - DNA, 15 bp, Homo sapiens
ctgagctcagtttct

SEQ ID NO: 1519354 - DNA, 15 bp, Homo sapiens
actgagctcagtttc

SEQ ID NO: 1519355 - DNA, 15 bp, Homo sapiens
cactgagctcagttt

SEQ ID NO: 1519356 - DNA, 15 bp, Homo sapiens
tcactgagctcagtt

SEQ ID NO: 1519357 - DNA, 15 bp, Homo sapiens
ctcactgagctcagt

SEQ ID NO: 1519358 - DNA, 15 bp, Homo sapiens
tctcactgagctcag

SEQ ID NO: 1519359 - DNA, 15 bp, Homo sapiens
ttctcactgagctca

SEQ ID NO: 1519360 - DNA, 15 bp, Homo sapiens
attctcactgagctc

SEQ ID NO: 1519361 - DNA, 15 bp, Homo sapiens
cattctcactgagct

SEQ ID NO: 1519362 - DNA, 15 bp, Homo sapiens
ccattctcactgagc

SEQ ID NO: 1519363 - DNA, 15 bp, Homo sapiens
cccattctcactgag

SEQ ID NO: 1519364 - DNA, 15 bp, Homo sapiens
tcccattctcactga

SEQ ID NO: 1519365 - DNA, 15 bp, Homo sapiens
ttcccattctcactg

SEQ ID NO: 1519366 - DNA, 15 bp, Homo sapiens
cttcccattctcact

SEQ ID NO: 1519367 - DNA, 15 bp, Homo sapiens
tcttcccattctcac

SEQ ID NO: 1519368 - DNA, 15 bp, Homo sapiens
ttcttcccattctca

SEQ ID NO: 1519369 - DNA, 15 bp, Homo sapiens
cttcttcccattctc

SEQ ID NO: 1519370 - DNA, 15 bp, Homo sapiens
acttcttcccattct

SEQ ID NO: 1519371 - DNA, 15 bp, Homo sapiens
tacttcttcccattc

SEQ ID NO: 1519372 - DNA, 15 bp, Homo sapiens
ttacttcttcccatt

SEQ ID NO: 1519373 - DNA, 15 bp, Homo sapiens
attacttcttcccat

SEQ ID NO: 1519374 - DNA, 15 bp, Homo sapiens
tattacttcttccca

SEQ ID NO: 1519375 - DNA, 15 bp, Homo sapiens
atattacttcttccc

SEQ ID NO: 1519376 - DNA, 15 bp, Homo sapiens
aatattacttcttcc

SEQ ID NO: 1519377 - DNA, 15 bp, Homo sapiens
aaatattacttcttc

SEQ ID NO: 1519378 - DNA, 15 bp, Homo sapiens
caaatattacttctt

SEQ ID NO: 1519379 - DNA, 15 bp, Homo sapiens
tcaaatattacttct

SEQ ID NO: 1519380 - DNA, 15 bp, Homo sapiens
ttcaaatattacttc

SEQ ID NO: 1519381 - DNA, 15 bp, Homo sapiens
tttcaaatattactt

SEQ ID NO: 1519382 - DNA, 15 bp, Homo sapiens
ctttcaaatattact

SEQ ID NO: 1519383 - DNA, 15 bp, Homo sapiens
cctttcaaatattac

SEQ ID NO: 1519384 - DNA, 15 bp, Homo sapiens
gcctttcaaatatta

SEQ ID NO: 1519385 - DNA, 15 bp, Homo sapiens
agcctttcaaatatt

SEQ ID NO: 1519386 - DNA, 15 bp, Homo sapiens
tagcctttcaaatat

SEQ ID NO: 1519387 - DNA, 15 bp, Homo sapiens
ttagcctttcaaata

SEQ ID NO: 1519388 - DNA, 15 bp, Homo sapiens
attagcctttcaaat

SEQ ID NO: 1519389 - DNA, 15 bp, Homo sapiens
cattagcctttcaaa

SEQ ID NO: 1519390 - DNA, 15 bp, Homo sapiens
ccattagcctttcaa

SEQ ID NO: 1519391 - DNA, 15 bp, Homo sapiens
tccattagcctttca

SEQ ID NO: 1519392 - DNA, 15 bp, Homo sapiens
atccattagcctttc

SEQ ID NO: 1519393 - DNA, 15 bp, Homo sapiens
catccattagccttt

SEQ ID NO: 1519394 - DNA, 15 bp, Homo sapiens
acatccattagcctt

SEQ ID NO: 1519395 - DNA, 15 bp, Homo sapiens
tacatccattagcct

SEQ ID NO: 1519396 - DNA, 15 bp, Homo sapiens
atacatccattagcc

SEQ ID NO: 1519397 - DNA, 15 bp, Homo sapiens
catacatccattagc

SEQ ID NO: 1519398 - DNA, 15 bp, Homo sapiens
acatacatccattag

SEQ ID NO: 1519399 - DNA, 15 bp, Homo sapiens
aacatacatccatta

SEQ ID NO: 1519400 - DNA, 15 bp, Homo sapiens
aaacatacatccatt

SEQ ID NO: 1519401 - DNA, 15 bp, Homo sapiens
aaaacatacatccat

SEQ ID NO: 1519402 - DNA, 15 bp, Homo sapiens
gaaaacatacatcca

SEQ ID NO: 1519403 - DNA, 15 bp, Homo sapiens
agaaaacatacatcc

SEQ ID NO: 1519404 - DNA, 15 bp, Homo sapiens
tagaaaacatacatc

SEQ ID NO: 1519405 - DNA, 15 bp, Homo sapiens
ctagaaaacatacat

SEQ ID NO: 1519406 - DNA, 15 bp, Homo sapiens
tctagaaaacataca

SEQ ID NO: 1519407 - DNA, 15 bp, Homo sapiens
ctctagaaaacatac

SEQ ID NO: 1519408 - DNA, 15 bp, Homo sapiens
actctagaaaacata

SEQ ID NO: 1519409 - DNA, 15 bp, Homo sapiens
aactctagaaaacat

SEQ ID NO: 1519410 - DNA, 15 bp, Homo sapiens
caactctagaaaaca

SEQ ID NO: 1519411 - DNA, 15 bp, Homo sapiens
tcaactctagaaaac

SEQ ID NO: 1519412 - DNA, 15 bp, Homo sapiens
atcaactctagaaaa

SEQ ID NO: 1519413 - DNA, 15 bp, Homo sapiens
catcaactctagaaa

SEQ ID NO: 1519414 - DNA, 15 bp, Homo sapiens
tcatcaactctagaa

SEQ ID NO: 1519415 - DNA, 15 bp, Homo sapiens
ttcatcaactctaga

SEQ ID NO: 1519416 - DNA, 15 bp, Homo sapiens
attcatcaactctag

SEQ ID NO: 1519417 - DNA, 15 bp, Homo sapiens
cattcatcaactcta

SEQ ID NO: 1519418 - DNA, 15 bp, Homo sapiens
tcattcatcaactct

SEQ ID NO: 1519419 - DNA, 15 bp, Homo sapiens
gtcattcatcaactc

SEQ ID NO: 1519420 - DNA, 15 bp, Homo sapiens
tgtcattcatcaact

SEQ ID NO: 1519421 - DNA, 15 bp, Homo sapiens
atgtcattcatcaac

SEQ ID NO: 1519422 - DNA, 15 bp, Homo sapiens
catgtcattcatcaa

SEQ ID NO: 1519423 - DNA, 15 bp, Homo sapiens
tcatgtcattcatca

SEQ ID NO: 1519424 - DNA, 15 bp, Homo sapiens
ttcatgtcattcatc

SEQ ID NO: 1519425 - DNA, 15 bp, Homo sapiens
attcatgtcattcat

SEQ ID NO: 1519426 - DNA, 15 bp, Homo sapiens
gattcatgtcattca

SEQ ID NO: 1519427 - DNA, 15 bp, Homo sapiens
agattcatgtcattc

SEQ ID NO: 1519428 - DNA, 15 bp, Homo sapiens
aagattcatgtcatt

SEQ ID NO: 1519429 - DNA, 15 bp, Homo sapiens
caagattcatgtcat

SEQ ID NO: 1519430 - DNA, 15 bp, Homo sapiens
tcaagattcatgtca

SEQ ID NO: 1519431 - DNA, 15 bp, Homo sapiens
ctcaagattcatgtc

SEQ ID NO: 1519432 - DNA, 15 bp, Homo sapiens
cctcaagattcatgt

SEQ ID NO: 1519433 - DNA, 15 bp, Homo sapiens
acctcaagattcatg

SEQ ID NO: 1519434 - DNA, 15 bp, Homo sapiens
aacctcaagattcat

SEQ ID NO: 1519435 - DNA, 15 bp, Homo sapiens
caacctcaagattca

SEQ ID NO: 1519436 - DNA, 15 bp, Homo sapiens
tcaacctcaagattc

SEQ ID NO: 1519437 - DNA, 15 bp, Homo sapiens
ttcaacctcaagatt

SEQ ID NO: 1519438 - DNA, 15 bp, Homo sapiens
cttcaacctcaagat

SEQ ID NO: 1519439 - DNA, 15 bp, Homo sapiens
tcttcaacctcaaga

SEQ ID NO: 1519440 - DNA, 15 bp, Homo sapiens
ttcttcaacctcaag

SEQ ID NO: 1519441 - DNA, 15 bp, Homo sapiens
cttcttcaacctcaa

SEQ ID NO: 1519442 - DNA, 15 bp, Homo sapiens
gcttcttcaacctca

SEQ ID NO: 1519443 - DNA, 15 bp, Homo sapiens
tgcttcttcaacctc

SEQ ID NO: 1519444 - DNA, 15 bp, Homo sapiens
gtgcttcttcaacct

SEQ ID NO: 1519445 - DNA, 15 bp, Homo sapiens
tgtgcttcttcaacc

SEQ ID NO: 1519446 - DNA, 15 bp, Homo sapiens
gtgtgcttcttcaac

SEQ ID NO: 1519447 - DNA, 15 bp, Homo sapiens
agtgtgcttcttcaa

SEQ ID NO: 1519448 - DNA, 15 bp, Homo sapiens
cagtgtgcttcttca

SEQ ID NO: 1519449 - DNA, 15 bp, Homo sapiens
tcagtgtgcttcttc

SEQ ID NO: 1519450 - DNA, 15 bp, Homo sapiens
ctcagtgtgcttctt

SEQ ID NO: 1519451 - DNA, 15 bp, Homo sapiens
actcagtgtgcttct

SEQ ID NO: 1519452 - DNA, 15 bp, Homo sapiens
gactcagtgtgcttc

SEQ ID NO: 1519453 - DNA, 15 bp, Homo sapiens
agactcagtgtgctt

SEQ ID NO: 1519454 - DNA, 15 bp, Homo sapiens
aagactcagtgtgct

SEQ ID NO: 1519455 - DNA, 15 bp, Homo sapiens
caagactcagtgtgc

SEQ ID NO: 1519456 - DNA, 15 bp, Homo sapiens
tcaagactcagtgtg

SEQ ID NO: 1519457 - DNA, 15 bp, Homo sapiens
ctcaagactcagtgt

SEQ ID NO: 1519458 - DNA, 15 bp, Homo sapiens
gctcaagactcagtg

SEQ ID NO: 1519459 - DNA, 15 bp, Homo sapiens
tgctcaagactcagt

SEQ ID NO: 1519460 - DNA, 15 bp, Homo sapiens
ttgctcaagactcag

SEQ ID NO: 1519461 - DNA, 15 bp, Homo sapiens
tttgctcaagactca

SEQ ID NO: 1519462 - DNA, 15 bp, Homo sapiens
gtttgctcaagactc

SEQ ID NO: 1519463 - DNA, 15 bp, Homo sapiens
agtttgctcaagact

SEQ ID NO: 1519464 - DNA, 15 bp, Homo sapiens
tagtttgctcaagac

SEQ ID NO: 1519465 - DNA, 15 bp, Homo sapiens
atagtttgctcaaga

SEQ ID NO: 1519466 - DNA, 15 bp, Homo sapiens
tatagtttgctcaag

SEQ ID NO: 1519467 - DNA, 15 bp, Homo sapiens
atatagtttgctcaa

SEQ ID NO: 1519468 - DNA, 15 bp, Homo sapiens
tatatagtttgctca

SEQ ID NO: 1519469 - DNA, 15 bp, Homo sapiens
ttatatagtttgctc

SEQ ID NO: 1519470 - DNA, 15 bp, Homo sapiens
tttatatagtttgct

SEQ ID NO: 1519471 - DNA, 15 bp, Homo sapiens
ttttatatagtttgc

SEQ ID NO: 1519472 - DNA, 15 bp, Homo sapiens
tttttatatagtttg

SEQ ID NO: 1519473 - DNA, 15 bp, Homo sapiens
atttttatatagttt

SEQ ID NO: 1519474 - DNA, 15 bp, Homo sapiens
aatttttatatagtt

SEQ ID NO: 1519475 - DNA, 15 bp, Homo sapiens
taatttttatatagt

SEQ ID NO: 1519476 - DNA, 15 bp, Homo sapiens
ttaatttttatatag

SEQ ID NO: 1519477 - DNA, 15 bp, Homo sapiens
tttaatttttatata

SEQ ID NO: 1519478 - DNA, 15 bp, Homo sapiens
gtttaatttttatat

SEQ ID NO: 1519479 - DNA, 15 bp, Homo sapiens
ggtttaatttttata

SEQ ID NO: 1519480 - DNA, 15 bp, Homo sapiens
tggtttaatttttat

SEQ ID NO: 1519481 - DNA, 15 bp, Homo sapiens
ctggtttaattttta

SEQ ID NO: 1519482 - DNA, 15 bp, Homo sapiens
cctggtttaattttt

SEQ ID NO: 1519483 - DNA, 15 bp, Homo sapiens
gcctggtttaatttt

SEQ ID NO: 1519484 - DNA, 15 bp, Homo sapiens
agcctggtttaattt

SEQ ID NO: 1519485 - DNA, 15 bp, Homo sapiens
aagcctggtttaatt

SEQ ID NO: 1519486 - DNA, 15 bp, Homo sapiens
aaagcctggtttaat

SEQ ID NO: 1519487 - DNA, 15 bp, Homo sapiens
taaagcctggtttaa

SEQ ID NO: 1519488 - DNA, 15 bp, Homo sapiens
ttaaagcctggttta

SEQ ID NO: 1519489 - DNA, 15 bp, Homo sapiens
attaaagcctggttt

SEQ ID NO: 1519490 - DNA, 15 bp, Homo sapiens
tattaaagcctggtt

SEQ ID NO: 1519491 - DNA, 15 bp, Homo sapiens
gtattaaagcctggt

SEQ ID NO: 1519492 - DNA, 15 bp, Homo sapiens
tgtattaaagcctgg

SEQ ID NO: 1519493 - DNA, 15 bp, Homo sapiens
atgtattaaagcctg

SEQ ID NO: 1519494 - DNA, 15 bp, Homo sapiens
tatgtattaaagcct

SEQ ID NO: 1519495 - DNA, 15 bp, Homo sapiens
atatgtattaaagcc

SEQ ID NO: 1519496 - DNA, 15 bp, Homo sapiens
catatgtattaaagc

SEQ ID NO: 1519497 - DNA, 15 bp, Homo sapiens
ccatatgtattaaag

SEQ ID NO: 1519498 - DNA, 15 bp, Homo sapiens
cccatatgtattaaa

SEQ ID NO: 1519499 - DNA, 15 bp, Homo sapiens
tcccatatgtattaa

SEQ ID NO: 1519500 - DNA, 15 bp, Homo sapiens
ttcccatatgtatta

SEQ ID NO: 1519501 - DNA, 15 bp, Homo sapiens
gttcccatatgtatt

SEQ ID NO: 1519502 - DNA, 15 bp, Homo sapiens
tgttcccatatgtat

SEQ ID NO: 1519503 - DNA, 15 bp, Homo sapiens
atgttcccatatgta

SEQ ID NO: 1519504 - DNA, 15 bp, Homo sapiens
tatgttcccatatgt

SEQ ID NO: 1519505 - DNA, 15 bp, Homo sapiens
ttatgttcccatatg

SEQ ID NO: 1519506 - DNA, 15 bp, Homo sapiens
attatgttcccatat

SEQ ID NO: 1519507 - DNA, 15 bp, Homo sapiens
tattatgttcccata

SEQ ID NO: 1519508 - DNA, 15 bp, Homo sapiens
atattatgttcccat

SEQ ID NO: 1519509 - DNA, 15 bp, Homo sapiens
tatattatgttccca

SEQ ID NO: 1519510 - DNA, 15 bp, Homo sapiens
atatattatgttccc

SEQ ID NO: 1519511 - DNA, 15 bp, Homo sapiens
catatattatgttcc

SEQ ID NO: 1519512 - DNA, 15 bp, Homo sapiens
gcatatattatgttc

SEQ ID NO: 1519513 - DNA, 15 bp, Homo sapiens
agcatatattatgtt

SEQ ID NO: 1519514 - DNA, 15 bp, Homo sapiens
tagcatatattatgt

SEQ ID NO: 1519515 - DNA, 15 bp, Homo sapiens
ttagcatatattatg

SEQ ID NO: 1519516 - DNA, 15 bp, Homo sapiens
tttagcatatattat

SEQ ID NO: 1519517 - DNA, 15 bp, Homo sapiens
ctttagcatatatta

SEQ ID NO: 1519518 - DNA, 15 bp, Homo sapiens
gctttagcatatatt

SEQ ID NO: 1519519 - DNA, 15 bp, Homo sapiens
agctttagcatatat

SEQ ID NO: 1519520 - DNA, 15 bp, Homo sapiens
cagctttagcatata

SEQ ID NO: 1519521 - DNA, 15 bp, Homo sapiens
ccagctttagcatat

SEQ ID NO: 1519522 - DNA, 15 bp, Homo sapiens
accagctttagcata

SEQ ID NO: 1519523 - DNA, 15 bp, Homo sapiens
taccagctttagcat

SEQ ID NO: 1519524 - DNA, 15 bp, Homo sapiens
ataccagctttagca

SEQ ID NO: 1519525 - DNA, 15 bp, Homo sapiens
aataccagctttagc

SEQ ID NO: 1519526 - DNA, 15 bp, Homo sapiens
gaataccagctttag

SEQ ID NO: 1519527 - DNA, 15 bp, Homo sapiens
tgaataccagcttta

SEQ ID NO: 1519528 - DNA, 15 bp, Homo sapiens
ctgaataccagcttt

SEQ ID NO: 1519529 - DNA, 15 bp, Homo sapiens
tctgaataccagctt

SEQ ID NO: 1519530 - DNA, 15 bp, Homo sapiens
ttctgaataccagct

SEQ ID NO: 1519531 - DNA, 15 bp, Homo sapiens
attctgaataccagc

SEQ ID NO: 1519532 - DNA, 15 bp, Homo sapiens
gattctgaataccag

SEQ ID NO: 1519533 - DNA, 15 bp, Homo sapiens
cgattctgaatacca

SEQ ID NO: 1519534 - DNA, 15 bp, Homo sapiens
tcgattctgaatacc

SEQ ID NO: 1519535 - DNA, 15 bp, Homo sapiens
ctcgattctgaatac

SEQ ID NO: 1519536 - DNA, 15 bp, Homo sapiens
tctcgattctgaata

SEQ ID NO: 1519537 - DNA, 15 bp, Homo sapiens
atctcgattctgaat

SEQ ID NO: 1519538 - DNA, 15 bp, Homo sapiens
aatctcgattctgaa

SEQ ID NO: 1519539 - DNA, 15 bp, Homo sapiens
taatctcgattctga

SEQ ID NO: 1519540 - DNA, 15 bp, Homo sapiens
ctaatctcgattctg

SEQ ID NO: 1519541 - DNA, 15 bp, Homo sapiens
cctaatctcgattct

SEQ ID NO: 1519542 - DNA, 15 bp, Homo sapiens
tcctaatctcgattc

SEQ ID NO: 1519543 - DNA, 15 bp, Homo sapiens
atcctaatctcgatt

SEQ ID NO: 1519544 - DNA, 15 bp, Homo sapiens
catcctaatctcgat

SEQ ID NO: 1519545 - DNA, 15 bp, Homo sapiens
ccatcctaatctcga

SEQ ID NO: 1519546 - DNA, 15 bp, Homo sapiens
tccatcctaatctcg

SEQ ID NO: 1519547 - DNA, 15 bp, Homo sapiens
gtccatcctaatctc

SEQ ID NO: 1519548 - DNA, 15 bp, Homo sapiens
agtccatcctaatct

SEQ ID NO: 1519549 - DNA, 15 bp, Homo sapiens
aagtccatcctaatc

SEQ ID NO: 1519550 - DNA, 15 bp, Homo sapiens
aaagtccatcctaat

SEQ ID NO: 1519551 - DNA, 15 bp, Homo sapiens
gaaagtccatcctaa

SEQ ID NO: 1519552 - DNA, 15 bp, Homo sapiens
tgaaagtccatccta

SEQ ID NO: 1519553 - DNA, 15 bp, Homo sapiens
ttgaaagtccatcct

SEQ ID NO: 1519554 - DNA, 15 bp, Homo sapiens
attgaaagtccatcc

SEQ ID NO: 1519555 - DNA, 15 bp, Homo sapiens
tattgaaagtccatc

SEQ ID NO: 1519556 - DNA, 15 bp, Homo sapiens
ttattgaaagtccat

SEQ ID NO: 1519557 - DNA, 15 bp, Homo sapiens
tttattgaaagtcca

SEQ ID NO: 1519558 - DNA, 15 bp, Homo sapiens
atttattgaaagtcc

SEQ ID NO: 1519559 - DNA, 15 bp, Homo sapiens
catttattgaaagtc

SEQ ID NO: 1519560 - DNA, 15 bp, Homo sapiens
ccatttattgaaagt

SEQ ID NO: 1519561 - DNA, 15 bp, Homo sapiens
accatttattgaaag

SEQ ID NO: 1519562 - DNA, 15 bp, Homo sapiens
aaccatttattgaaa

SEQ ID NO: 1519563 - DNA, 15 bp, Homo sapiens
aaaccatttattgaa

SEQ ID NO: 1519564 - DNA, 15 bp, Homo sapiens
aaaaccatttattga

SEQ ID NO: 1519565 - DNA, 15 bp, Homo sapiens
caaaaccatttattg

SEQ ID NO: 1519566 - DNA, 15 bp, Homo sapiens
tcaaaaccatttatt

SEQ ID NO: 1519567 - DNA, 15 bp, Homo sapiens
atcaaaaccatttat

SEQ ID NO: 1519568 - DNA, 15 bp, Homo sapiens
tatcaaaaccattta

SEQ ID NO: 1519569 - DNA, 15 bp, Homo sapiens
ttatcaaaaccattt

SEQ ID NO: 1519570 - DNA, 15 bp, Homo sapiens
tttatcaaaaccatt

SEQ ID NO: 1519571 - DNA, 15 bp, Homo sapiens
ttttatcaaaaccat

SEQ ID NO: 1519572 - DNA, 15 bp, Homo sapiens
gttttatcaaaacca

SEQ ID NO: 1519573 - DNA, 15 bp, Homo sapiens
agttttatcaaaacc

SEQ ID NO: 1519574 - DNA, 15 bp, Homo sapiens
cagttttatcaaaac

SEQ ID NO: 1519575 - DNA, 15 bp, Homo sapiens
tcagttttatcaaaa

SEQ ID NO: 1519576 - DNA, 15 bp, Homo sapiens
ctcagttttatcaaa

SEQ ID NO: 1519577 - DNA, 15 bp, Homo sapiens
actcagttttatcaa

SEQ ID NO: 1519578 - DNA, 15 bp, Homo sapiens
tactcagttttatca

SEQ ID NO: 1519579 - DNA, 15 bp, Homo sapiens
ttactcagttttatc

SEQ ID NO: 1519580 - DNA, 15 bp, Homo sapiens
attactcagttttat

SEQ ID NO: 1519581 - DNA, 15 bp, Homo sapiens
cattactcagtttta

SEQ ID NO: 1519582 - DNA, 15 bp, Homo sapiens
tcattactcagtttt

SEQ ID NO: 1519583 - DNA, 15 bp, Homo sapiens
atcattactcagttt

SEQ ID NO: 1519584 - DNA, 15 bp, Homo sapiens
aatcattactcagtt

SEQ ID NO: 1519585 - DNA, 15 bp, Homo sapiens
aaatcattactcagt

SEQ ID NO: 1519586 - DNA, 15 bp, Homo sapiens
caaatcattactcag

SEQ ID NO: 1519587 - DNA, 15 bp, Homo sapiens
ccaaatcattactca

SEQ ID NO: 1519588 - DNA, 15 bp, Homo sapiens
tccaaatcattactc

SEQ ID NO: 1519589 - DNA, 15 bp, Homo sapiens
ttccaaatcattact

SEQ ID NO: 1519590 - DNA, 15 bp, Homo sapiens
tttccaaatcattac

SEQ ID NO: 1519591 - DNA, 15 bp, Homo sapiens
ttttccaaatcatta

SEQ ID NO: 1519592 - DNA, 15 bp, Homo sapiens
tttttccaaatcatt

SEQ ID NO: 1519593 - DNA, 15 bp, Homo sapiens
atttttccaaatcat

SEQ ID NO: 1519594 - DNA, 15 bp, Homo sapiens
tatttttccaaatca

SEQ ID NO: 1519595 - DNA, 15 bp, Homo sapiens
atatttttccaaatc

SEQ ID NO: 1519596 - DNA, 15 bp, Homo sapiens
aatatttttccaaat

SEQ ID NO: 1519597 - DNA, 15 bp, Homo sapiens
aaatatttttccaaa

SEQ ID NO: 1519598 - DNA, 15 bp, Homo sapiens
aaaatatttttccaa

SEQ ID NO: 1519599 - DNA, 15 bp, Homo sapiens
gaaaatatttttcca

SEQ ID NO: 1519600 - DNA, 15 bp, Homo sapiens
tgaaaatatttttcc

SEQ ID NO: 1519601 - DNA, 15 bp, Homo sapiens
atgaaaatatttttc

SEQ ID NO: 1519602 - DNA, 15 bp, Homo sapiens
tatgaaaatattttt

SEQ ID NO: 1519603 - DNA, 15 bp, Homo sapiens
gtatgaaaatatttt

SEQ ID NO: 1519604 - DNA, 15 bp, Homo sapiens
ggtatgaaaatattt

SEQ ID NO: 1519605 - DNA, 15 bp, Homo sapiens
tggtatgaaaatatt

SEQ ID NO: 1519606 - DNA, 15 bp, Homo sapiens
atggtatgaaaatat

SEQ ID NO: 1519607 - DNA, 15 bp, Homo sapiens
aatggtatgaaaata

SEQ ID NO: 1519608 - DNA, 15 bp, Homo sapiens
aaatggtatgaaaat

SEQ ID NO: 1519609 - DNA, 15 bp, Homo sapiens
taaatggtatgaaaa

SEQ ID NO: 1519610 - DNA, 15 bp, Homo sapiens
ataaatggtatgaaa

SEQ ID NO: 1519611 - DNA, 15 bp, Homo sapiens
cataaatggtatgaa

SEQ ID NO: 1519612 - DNA, 15 bp, Homo sapiens
tcataaatggtatga

SEQ ID NO: 1519613 - DNA, 15 bp, Homo sapiens
atcataaatggtatg

SEQ ID NO: 1519614 - DNA, 15 bp, Homo sapiens
tatcataaatggtat

SEQ ID NO: 1519615 - DNA, 15 bp, Homo sapiens
ttatcataaatggta

SEQ ID NO: 1519616 - DNA, 15 bp, Homo sapiens
tttatcataaatggt

SEQ ID NO: 1519617 - DNA, 15 bp, Homo sapiens
gtttatcataaatgg

SEQ ID NO: 1519618 - DNA, 15 bp, Homo sapiens
agtttatcataaatg

SEQ ID NO: 1519619 - DNA, 15 bp, Homo sapiens
aagtttatcataaat

SEQ ID NO: 1519620 - DNA, 15 bp, Homo sapiens
gaagtttatcataaa

SEQ ID NO: 1519621 - DNA, 15 bp, Homo sapiens
ggaagtttatcataa

SEQ ID NO: 1519622 - DNA, 15 bp, Homo sapiens
tggaagtttatcata

SEQ ID NO: 1519623 - DNA, 15 bp, Homo sapiens
atggaagtttatcat

SEQ ID NO: 1519624 - DNA, 15 bp, Homo sapiens
tatggaagtttatca

SEQ ID NO: 1519625 - DNA, 15 bp, Homo sapiens
ttatggaagtttatc

SEQ ID NO: 1519626 - DNA, 15 bp, Homo sapiens
tttatggaagtttat

SEQ ID NO: 1519627 - DNA, 15 bp, Homo sapiens
atttatggaagttta

SEQ ID NO: 1519628 - DNA, 15 bp, Homo sapiens
gatttatggaagttt

SEQ ID NO: 1519629 - DNA, 15 bp, Homo sapiens
tgatttatggaagtt

SEQ ID NO: 1519630 - DNA, 15 bp, Homo sapiens
ttgatttatggaagt

SEQ ID NO: 1519631 - DNA, 15 bp, Homo sapiens
tttgatttatggaag

SEQ ID NO: 1519632 - DNA, 15 bp, Homo sapiens
ttttgatttatggaa

SEQ ID NO: 1519633 - DNA, 15 bp, Homo sapiens
tttttgatttatgga

SEQ ID NO: 1519634 - DNA, 15 bp, Homo sapiens
ttttttgatttatgg

SEQ ID NO: 1519635 - DNA, 15 bp, Homo sapiens
tttttttgatttatg

SEQ ID NO: 1519636 - DNA, 15 bp, Homo sapiens
ttttttttgatttat

SEQ ID NO: 1519637 - DNA, 15 bp, Homo sapiens
attttttttgattta

SEQ ID NO: 1519638 - DNA, 15 bp, Homo sapiens
cattttttttgattt

SEQ ID NO: 1519639 - DNA, 15 bp, Homo sapiens
tcattttttttgatt

SEQ ID NO: 1519640 - DNA, 15 bp, Homo sapiens
ctcattttttttgat

SEQ ID NO: 1519641 - DNA, 15 bp, Homo sapiens
gctcattttttttga

SEQ ID NO: 1519642 - DNA, 15 bp, Homo sapiens
tgctcattttttttg

SEQ ID NO: 1519643 - DNA, 15 bp, Homo sapiens
ttgctcatttttttt

SEQ ID NO: 1519644 - DNA, 15 bp, Homo sapiens
tttgctcattttttt

SEQ ID NO: 1519645 - DNA, 15 bp, Homo sapiens
ctttgctcatttttt

SEQ ID NO: 1519646 - DNA, 15 bp, Homo sapiens
gctttgctcattttt

SEQ ID NO: 1519647 - DNA, 15 bp, Homo sapiens
tgctttgctcatttt

SEQ ID NO: 1519648 - DNA, 15 bp, Homo sapiens
ttgctttgctcattt

SEQ ID NO: 1519649 - DNA, 15 bp, Homo sapiens
cttgctttgctcatt

SEQ ID NO: 1519650 - DNA, 15 bp, Homo sapiens
ccttgctttgctcat

SEQ ID NO: 1519651 - DNA, 15 bp, Homo sapiens
gccttgctttgctca

SEQ ID NO: 1519652 - DNA, 15 bp, Homo sapiens
ggccttgctttgctc

SEQ ID NO: 1519653 - DNA, 15 bp, Homo sapiens
aggccttgctttgct

SEQ ID NO: 1519654 - DNA, 15 bp, Homo sapiens
aaggccttgctttgc

SEQ ID NO: 1519655 - DNA, 15 bp, Homo sapiens
aaaggccttgctttg

SEQ ID NO: 1519656 - DNA, 15 bp, Homo sapiens
aaaaggccttgcttt

SEQ ID NO: 1519657 - DNA, 15 bp, Homo sapiens
aaaaaggccttgctt

SEQ ID NO: 1519658 - DNA, 15 bp, Homo sapiens
gaaaaaggccttgct

SEQ ID NO: 1519659 - DNA, 15 bp, Homo sapiens
tgaaaaaggccttgc

SEQ ID NO: 1519660 - DNA, 15 bp, Homo sapiens
atgaaaaaggccttg

SEQ ID NO: 1519661 - DNA, 15 bp, Homo sapiens
gatgaaaaaggcctt

SEQ ID NO: 1519662 - DNA, 15 bp, Homo sapiens
ggatgaaaaaggcct

SEQ ID NO: 1519663 - DNA, 15 bp, Homo sapiens
tggatgaaaaaggcc

SEQ ID NO: 1519664 - DNA, 15 bp, Homo sapiens
atggatgaaaaaggc

SEQ ID NO: 1519665 - DNA, 15 bp, Homo sapiens
aatggatgaaaaagg

SEQ ID NO: 1519666 - DNA, 15 bp, Homo sapiens
gaatggatgaaaaag

SEQ ID NO: 1519667 - DNA, 15 bp, Homo sapiens
tgaatggatgaaaaa

SEQ ID NO: 1519668 - DNA, 15 bp, Homo sapiens
ttgaatggatgaaaa

SEQ ID NO: 1519669 - DNA, 15 bp, Homo sapiens
tttgaatggatgaaa

SEQ ID NO: 1519670 - DNA, 15 bp, Homo sapiens
ttttgaatggatgaa

SEQ ID NO: 1519671 - DNA, 15 bp, Homo sapiens
attttgaatggatga

SEQ ID NO: 1519672 - DNA, 15 bp, Homo sapiens
gattttgaatggatg

SEQ ID NO: 1519673 - DNA, 15 bp, Homo sapiens
ggattttgaatggat

SEQ ID NO: 1519674 - DNA, 15 bp, Homo sapiens
tggattttgaatgga

SEQ ID NO: 1519675 - DNA, 15 bp, Homo sapiens
atggattttgaatgg

SEQ ID NO: 1519676 - DNA, 15 bp, Homo sapiens
tatggattttgaatg

SEQ ID NO: 1519677 - DNA, 15 bp, Homo sapiens
ttatggattttgaat

SEQ ID NO: 1519678 - DNA, 15 bp, Homo sapiens
tttatggattttgaa

SEQ ID NO: 1519679 - DNA, 15 bp, Homo sapiens
gtttatggattttga

SEQ ID NO: 1519680 - DNA, 15 bp, Homo sapiens
agtttatggattttg

SEQ ID NO: 1519681 - DNA, 15 bp, Homo sapiens
tagtttatggatttt

SEQ ID NO: 1519682 - DNA, 15 bp, Homo sapiens
ctagtttatggattt

SEQ ID NO: 1519683 - DNA, 15 bp, Homo sapiens
tctagtttatggatt

SEQ ID NO: 1519684 - DNA, 15 bp, Homo sapiens
ttctagtttatggat

SEQ ID NO: 1519685 - DNA, 15 bp, Homo sapiens
tttctagtttatgga

SEQ ID NO: 1519686 - DNA, 15 bp, Homo sapiens
ttttctagtttatgg

SEQ ID NO: 1519687 - DNA, 15 bp, Homo sapiens
cttttctagtttatg

SEQ ID NO: 1519688 - DNA, 15 bp, Homo sapiens
tcttttctagtttat

SEQ ID NO: 1519689 - DNA, 15 bp, Homo sapiens
atcttttctagttta

SEQ ID NO: 1519690 - DNA, 15 bp, Homo sapiens
aatcttttctagttt

SEQ ID NO: 1519691 - DNA, 15 bp, Homo sapiens
caatcttttctagtt

SEQ ID NO: 1519692 - DNA, 15 bp, Homo sapiens
tcaatcttttctagt

SEQ ID NO: 1519693 - DNA, 15 bp, Homo sapiens
atcaatcttttctag

SEQ ID NO: 1519694 - DNA, 15 bp, Homo sapiens
tatcaatcttttcta

SEQ ID NO: 1519695 - DNA, 15 bp, Homo sapiens
ttatcaatcttttct

SEQ ID NO: 1519696 - DNA, 15 bp, Homo sapiens
tttatcaatcttttc

SEQ ID NO: 1519697 - DNA, 15 bp, Homo sapiens
ttttatcaatctttt

SEQ ID NO: 1519698 - DNA, 15 bp, Homo sapiens
attttatcaatcttt

SEQ ID NO: 1519699 - DNA, 15 bp, Homo sapiens
cattttatcaatctt

SEQ ID NO: 1519700 - DNA, 15 bp, Homo sapiens
tcattttatcaatct

SEQ ID NO: 1519701 - DNA, 15 bp, Homo sapiens
ttcattttatcaatc

SEQ ID NO: 1519702 - DNA, 15 bp, Homo sapiens
attcattttatcaat

SEQ ID NO: 1519703 - DNA, 15 bp, Homo sapiens
aattcattttatcaa

SEQ ID NO: 1519704 - DNA, 15 bp, Homo sapiens
taattcattttatca

SEQ ID NO: 1519705 - DNA, 15 bp, Homo sapiens
ataattcattttatc

SEQ ID NO: 1519706 - DNA, 15 bp, Homo sapiens
aaataattcatttta

SEQ ID NO: 1519707 - DNA, 15 bp, Homo sapiens
taaataattcatttt

SEQ ID NO: 1519708 - DNA, 15 bp, Homo sapiens
tttaaataattcatt

SEQ ID NO: 1519709 - DNA, 15 bp, Homo sapiens
ttttaaataattcat

SEQ ID NO: 1519710 - DNA, 15 bp, Homo sapiens
tttttaaataattca

SEQ ID NO: 1519711 - DNA, 15 bp, Homo sapiens
ttttttaaataattc

SEQ ID NO: 1519712 - DNA, 15 bp, Homo sapiens
attttttaaataatt

SEQ ID NO: 1519713 - DNA, 15 bp, Homo sapiens
gattttttaaataat

SEQ ID NO: 1519714 - DNA, 15 bp, Homo sapiens
tgattttttaaataa

SEQ ID NO: 1519715 - DNA, 15 bp, Homo sapiens
atgattttttaaata

SEQ ID NO: 1519716 - DNA, 15 bp, Homo sapiens
tatgattttttaaat

SEQ ID NO: 1519717 - DNA, 15 bp, Homo sapiens
ttatgattttttaaa

SEQ ID NO: 1519718 - DNA, 15 bp, Homo sapiens
tttatgattttttaa

SEQ ID NO: 1519719 - DNA, 15 bp, Homo sapiens
gtttatgatttttta

SEQ ID NO: 1519720 - DNA, 15 bp, Homo sapiens
agtttatgatttttt

SEQ ID NO: 1519721 - DNA, 15 bp, Homo sapiens
aagtttatgattttt

SEQ ID NO: 1519722 - DNA, 15 bp, Homo sapiens
gaagtttatgatttt

SEQ ID NO: 1519723 - DNA, 15 bp, Homo sapiens
agaagtttatgattt

SEQ ID NO: 1519724 - DNA, 15 bp, Homo sapiens
cagaagtttatgatt

SEQ ID NO: 1519725 - DNA, 15 bp, Homo sapiens
acagaagtttatgat

SEQ ID NO: 1519726 - DNA, 15 bp, Homo sapiens
gacagaagtttatga

SEQ ID NO: 1519727 - DNA, 15 bp, Homo sapiens
agacagaagtttatg

SEQ ID NO: 1519728 - DNA, 15 bp, Homo sapiens
cagacagaagtttat

SEQ ID NO: 1519729 - DNA, 15 bp, Homo sapiens
ccagacagaagttta

SEQ ID NO: 1519730 - DNA, 15 bp, Homo sapiens
cccagacagaagttt

SEQ ID NO: 1519731 - DNA, 15 bp, Homo sapiens
tcccagacagaagtt

SEQ ID NO: 1519732 - DNA, 15 bp, Homo sapiens
gtcccagacagaagt

SEQ ID NO: 1519733 - DNA, 15 bp, Homo sapiens
tgtcccagacagaag

SEQ ID NO: 1519734 - DNA, 15 bp, Homo sapiens
ttgtcccagacagaa

SEQ ID NO: 1519735 - DNA, 15 bp, Homo sapiens
tttgtcccagacaga

SEQ ID NO: 1519736 - DNA, 15 bp, Homo sapiens
ttttgtcccagacag

SEQ ID NO: 1519737 - DNA, 15 bp, Homo sapiens
tttttgtcccagaca

SEQ ID NO: 1519738 - DNA, 15 bp, Homo sapiens
atttttgtcccagac

SEQ ID NO: 1519739 - DNA, 15 bp, Homo sapiens
catttttgtcccaga

SEQ ID NO: 1519740 - DNA, 15 bp, Homo sapiens
acatttttgtcccag

SEQ ID NO: 1519741 - DNA, 15 bp, Homo sapiens
gacatttttgtccca

SEQ ID NO: 1519742 - DNA, 15 bp, Homo sapiens
tgacatttttgtccc

SEQ ID NO: 1519743 - DNA, 15 bp, Homo sapiens
atgacatttttgtcc

SEQ ID NO: 1519744 - DNA, 15 bp, Homo sapiens
catgacatttttgtc

SEQ ID NO: 1519745 - DNA, 15 bp, Homo sapiens
tcatgacatttttgt

SEQ ID NO: 1519746 - DNA, 15 bp, Homo sapiens
ctcatgacatttttg

SEQ ID NO: 1519747 - DNA, 15 bp, Homo sapiens
actcatgacattttt

SEQ ID NO: 1519748 - DNA, 15 bp, Homo sapiens
tactcatgacatttt

SEQ ID NO: 1519749 - DNA, 15 bp, Homo sapiens
ttactcatgacattt

SEQ ID NO: 1519750 - DNA, 15 bp, Homo sapiens
tttactcatgacatt

SEQ ID NO: 1519751 - DNA, 15 bp, Homo sapiens
ttttactcatgacat

SEQ ID NO: 1519752 - DNA, 15 bp, Homo sapiens
gttttactcatgaca

SEQ ID NO: 1519753 - DNA, 15 bp, Homo sapiens
ggttttactcatgac

SEQ ID NO: 1519754 - DNA, 15 bp, Homo sapiens
tggttttactcatga

SEQ ID NO: 1519755 - DNA, 15 bp, Homo sapiens
ttggttttactcatg

SEQ ID NO: 1519756 - DNA, 15 bp, Homo sapiens
attggttttactcat

SEQ ID NO: 1519757 - DNA, 15 bp, Homo sapiens
gattggttttactca

SEQ ID NO: 1519758 - DNA, 15 bp, Homo sapiens
ggattggttttactc

SEQ ID NO: 1519759 - DNA, 15 bp, Homo sapiens
aggattggttttact

SEQ ID NO: 1519760 - DNA, 15 bp, Homo sapiens
taggattggttttac

SEQ ID NO: 1519761 - DNA, 15 bp, Homo sapiens
ataggattggtttta

SEQ ID NO: 1519762 - DNA, 15 bp, Homo sapiens
cataggattggtttt

SEQ ID NO: 1519763 - DNA, 15 bp, Homo sapiens
ccataggattggttt

SEQ ID NO: 1519764 - DNA, 15 bp, Homo sapiens
accataggattggtt

SEQ ID NO: 1519765 - DNA, 15 bp, Homo sapiens
aaccataggattggt

SEQ ID NO: 1519766 - DNA, 15 bp, Homo sapiens
taaccataggattgg

SEQ ID NO: 1519767 - DNA, 15 bp, Homo sapiens
ttaaccataggattg

SEQ ID NO: 1519768 - DNA, 15 bp, Homo sapiens
attaaccataggatt

SEQ ID NO: 1519769 - DNA, 15 bp, Homo sapiens
tattaaccataggat

SEQ ID NO: 1519770 - DNA, 15 bp, Homo sapiens
atattaaccatagga

SEQ ID NO: 1519771 - DNA, 15 bp, Homo sapiens
aatattaaccatagg

SEQ ID NO: 1519772 - DNA, 15 bp, Homo sapiens
gaatattaaccatag

SEQ ID NO: 1519773 - DNA, 15 bp, Homo sapiens
agaatattaaccata

SEQ ID NO: 1519774 - DNA, 15 bp, Homo sapiens
aagaatattaaccat

SEQ ID NO: 1519775 - DNA, 15 bp, Homo sapiens
caagaatattaacca

SEQ ID NO: 1519776 - DNA, 15 bp, Homo sapiens
gcaagaatattaacc

SEQ ID NO: 1519777 - DNA, 15 bp, Homo sapiens
ggcaagaatattaac

SEQ ID NO: 1519778 - DNA, 15 bp, Homo sapiens
gggcaagaatattaa

SEQ ID NO: 1519779 - DNA, 15 bp, Homo sapiens
tgggcaagaatatta

SEQ ID NO: 1519780 - DNA, 15 bp, Homo sapiens
ctgggcaagaatatt

SEQ ID NO: 1519781 - DNA, 15 bp, Homo sapiens
actgggcaagaatat

SEQ ID NO: 1519782 - DNA, 15 bp, Homo sapiens
tactgggcaagaata

SEQ ID NO: 1519783 - DNA, 15 bp, Homo sapiens
ctactgggcaagaat

SEQ ID NO: 1519784 - DNA, 15 bp, Homo sapiens
actactgggcaagaa

SEQ ID NO: 1519785 - DNA, 15 bp, Homo sapiens
aactactgggcaaga

SEQ ID NO: 1519786 - DNA, 15 bp, Homo sapiens
gaactactgggcaag

SEQ ID NO: 1519787 - DNA, 15 bp, Homo sapiens
agaactactgggcaa

SEQ ID NO: 1519788 - DNA, 15 bp, Homo sapiens
gagaactactgggca

SEQ ID NO: 1519789 - DNA, 15 bp, Homo sapiens
agagaactactgggc

SEQ ID NO: 1519790 - DNA, 15 bp, Homo sapiens
aagagaactactggg

SEQ ID NO: 1519791 - DNA, 15 bp, Homo sapiens
taagagaactactgg

SEQ ID NO: 1519792 - DNA, 15 bp, Homo sapiens
ctaagagaactactg

SEQ ID NO: 1519793 - DNA, 15 bp, Homo sapiens
tctaagagaactact

SEQ ID NO: 1519794 - DNA, 15 bp, Homo sapiens
ttctaagagaactac

SEQ ID NO: 1519795 - DNA, 15 bp, Homo sapiens
attctaagagaacta

SEQ ID NO: 1519796 - DNA, 15 bp, Homo sapiens
tattctaagagaact

SEQ ID NO: 1519797 - DNA, 15 bp, Homo sapiens
ctattctaagagaac

SEQ ID NO: 1519798 - DNA, 15 bp, Homo sapiens
actattctaagagaa

SEQ ID NO: 1519799 - DNA, 15 bp, Homo sapiens
gactattctaagaga

SEQ ID NO: 1519800 - DNA, 15 bp, Homo sapiens
ggactattctaagag

SEQ ID NO: 1519801 - DNA, 15 bp, Homo sapiens
aggactattctaaga

SEQ ID NO: 1519802 - DNA, 15 bp, Homo sapiens
taggactattctaag

SEQ ID NO: 1519803 - DNA, 15 bp, Homo sapiens
ttaggactattctaa

SEQ ID NO: 1519804 - DNA, 15 bp, Homo sapiens
tttaggactattcta

SEQ ID NO: 1519805 - DNA, 15 bp, Homo sapiens
ttttaggactattct

SEQ ID NO: 1519806 - DNA, 15 bp, Homo sapiens
cttttaggactattc

SEQ ID NO: 1519807 - DNA, 15 bp, Homo sapiens
acttttaggactatt

SEQ ID NO: 1519808 - DNA, 15 bp, Homo sapiens
cacttttaggactat

SEQ ID NO: 1519809 - DNA, 15 bp, Homo sapiens
gcacttttaggacta

SEQ ID NO: 1519810 - DNA, 15 bp, Homo sapiens
agcacttttaggact

SEQ ID NO: 1519811 - DNA, 15 bp, Homo sapiens
aagcacttttaggac

SEQ ID NO: 1519812 - DNA, 15 bp, Homo sapiens
aaagcacttttagga

SEQ ID NO: 1519813 - DNA, 15 bp, Homo sapiens
aaaagcacttttagg

SEQ ID NO: 1519814 - DNA, 15 bp, Homo sapiens
caaaagcacttttag

SEQ ID NO: 1519815 - DNA, 15 bp, Homo sapiens
acaaaagcactttta

SEQ ID NO: 1519816 - DNA, 15 bp, Homo sapiens
cacaaaagcactttt

SEQ ID NO: 1519817 - DNA, 15 bp, Homo sapiens
ccacaaaagcacttt

SEQ ID NO: 1519818 - DNA, 15 bp, Homo sapiens
accacaaaagcactt

SEQ ID NO: 1519819 - DNA, 15 bp, Homo sapiens
aaccacaaaagcact

SEQ ID NO: 1519820 - DNA, 15 bp, Homo sapiens
gaaccacaaaagcac

SEQ ID NO: 1519821 - DNA, 15 bp, Homo sapiens
tgaaccacaaaagca

SEQ ID NO: 1519822 - DNA, 15 bp, Homo sapiens
ttgaaccacaaaagc

SEQ ID NO: 1519823 - DNA, 15 bp, Homo sapiens
tttgaaccacaaaag

SEQ ID NO: 1519824 - DNA, 15 bp, Homo sapiens
ctttgaaccacaaaa

SEQ ID NO: 1519825 - DNA, 15 bp, Homo sapiens
tctttgaaccacaaa

SEQ ID NO: 1519826 - DNA, 15 bp, Homo sapiens
ctctttgaaccacaa

SEQ ID NO: 1519827 - DNA, 15 bp, Homo sapiens
actctttgaaccaca

SEQ ID NO: 1519828 - DNA, 15 bp, Homo sapiens
tactctttgaaccac

SEQ ID NO: 1519829 - DNA, 15 bp, Homo sapiens
ttactctttgaacca

SEQ ID NO: 1519830 - DNA, 15 bp, Homo sapiens
attactctttgaacc

SEQ ID NO: 1519831 - DNA, 15 bp, Homo sapiens
tattactctttgaac

SEQ ID NO: 1519832 - DNA, 15 bp, Homo sapiens
gtattactctttgaa

SEQ ID NO: 1519833 - DNA, 15 bp, Homo sapiens
ggtattactctttga

SEQ ID NO: 1519834 - DNA, 15 bp, Homo sapiens
aggtattactctttg

SEQ ID NO: 1519835 - DNA, 15 bp, Homo sapiens
aaggtattactcttt

SEQ ID NO: 1519836 - DNA, 15 bp, Homo sapiens
caaggtattactctt

SEQ ID NO: 1519837 - DNA, 15 bp, Homo sapiens
tcaaggtattactct

SEQ ID NO: 1519838 - DNA, 15 bp, Homo sapiens
ttcaaggtattactc

SEQ ID NO: 1519839 - DNA, 15 bp, Homo sapiens
tttcaaggtattact

SEQ ID NO: 1519840 - DNA, 15 bp, Homo sapiens
atttcaaggtattac

SEQ ID NO: 1519841 - DNA, 15 bp, Homo sapiens
aatttcaaggtatta

SEQ ID NO: 1519842 - DNA, 15 bp, Homo sapiens
aaatttcaaggtatt

SEQ ID NO: 1519843 - DNA, 15 bp, Homo sapiens
aaaatttcaaggtat

SEQ ID NO: 1519844 - DNA, 15 bp, Homo sapiens
aaaaatttcaaggta

SEQ ID NO: 1519845 - DNA, 15 bp, Homo sapiens
caaaaatttcaaggt

SEQ ID NO: 1519846 - DNA, 15 bp, Homo sapiens
ccaaaaatttcaagg

SEQ ID NO: 1519847 - DNA, 15 bp, Homo sapiens
accaaaaatttcaag

SEQ ID NO: 1519848 - DNA, 15 bp, Homo sapiens
caccaaaaatttcaa

SEQ ID NO: 1519849 - DNA, 15 bp, Homo sapiens
gcaccaaaaatttca

SEQ ID NO: 1519850 - DNA, 15 bp, Homo sapiens
tgcaccaaaaatttc

SEQ ID NO: 1519851 - DNA, 15 bp, Homo sapiens
atgcaccaaaaattt

SEQ ID NO: 1519852 - DNA, 15 bp, Homo sapiens
catgcaccaaaaatt

SEQ ID NO: 1519853 - DNA, 15 bp, Homo sapiens
acatgcaccaaaaat

SEQ ID NO: 1519854 - DNA, 15 bp, Homo sapiens
aacatgcaccaaaaa

SEQ ID NO: 1519855 - DNA, 15 bp, Homo sapiens
caacatgcaccaaaa

SEQ ID NO: 1519856 - DNA, 15 bp, Homo sapiens
gcaacatgcaccaaa

SEQ ID NO: 1519857 - DNA, 15 bp, Homo sapiens
ggcaacatgcaccaa

SEQ ID NO: 1519858 - DNA, 15 bp, Homo sapiens
tggcaacatgcacca

SEQ ID NO: 1519859 - DNA, 15 bp, Homo sapiens
ttggcaacatgcacc

SEQ ID NO: 1519860 - DNA, 15 bp, Homo sapiens
tttggcaacatgcac

SEQ ID NO: 1519861 - DNA, 15 bp, Homo sapiens
atttggcaacatgca

SEQ ID NO: 1519862 - DNA, 15 bp, Homo sapiens
aatttggcaacatgc

SEQ ID NO: 1519863 - DNA, 15 bp, Homo sapiens
taatttggcaacatg

SEQ ID NO: 1519864 - DNA, 15 bp, Homo sapiens
gtaatttggcaacat

SEQ ID NO: 1519865 - DNA, 15 bp, Homo sapiens
ggtaatttggcaaca

SEQ ID NO: 1519866 - DNA, 15 bp, Homo sapiens
gggtaatttggcaac

SEQ ID NO: 1519867 - DNA, 15 bp, Homo sapiens
agggtaatttggcaa

SEQ ID NO: 1519868 - DNA, 15 bp, Homo sapiens
aagggtaatttggca

SEQ ID NO: 1519869 - DNA, 15 bp, Homo sapiens
aaagggtaatttggc

SEQ ID NO: 1519870 - DNA, 15 bp, Homo sapiens
taaagggtaatttgg

SEQ ID NO: 1519871 - DNA, 15 bp, Homo sapiens
ttctaaagggtaatt

SEQ ID NO: 1519872 - DNA, 15 bp, Homo sapiens
attctaaagggtaat

SEQ ID NO: 1519873 - DNA, 15 bp, Homo sapiens
cattctaaagggtaa

SEQ ID NO: 1519874 - DNA, 15 bp, Homo sapiens
gcattctaaagggta

SEQ ID NO: 1519875 - DNA, 15 bp, Homo sapiens
ggcattctaaagggt

SEQ ID NO: 1519876 - DNA, 15 bp, Homo sapiens
aggcattctaaaggg

SEQ ID NO: 1519877 - DNA, 15 bp, Homo sapiens
caggcattctaaagg

SEQ ID NO: 1519878 - DNA, 15 bp, Homo sapiens
acaggcattctaaag

SEQ ID NO: 1519879 - DNA, 15 bp, Homo sapiens
aacaggcattctaaa

SEQ ID NO: 1519880 - DNA, 15 bp, Homo sapiens
caacaggcattctaa

SEQ ID NO: 1519881 - DNA, 15 bp, Homo sapiens
gcaacaggcattcta

SEQ ID NO: 1519882 - DNA, 15 bp, Homo sapiens
agcaacaggcattct

SEQ ID NO: 1519883 - DNA, 15 bp, Homo sapiens
aagcaacaggcattc

SEQ ID NO: 1519884 - DNA, 15 bp, Homo sapiens
aaagcaacaggcatt

SEQ ID NO: 1519885 - DNA, 15 bp, Homo sapiens
aaaagcaacaggcat

SEQ ID NO: 1519886 - DNA, 15 bp, Homo sapiens
taaaagcaacaggca

SEQ ID NO: 1519887 - DNA, 15 bp, Homo sapiens
ttaaaagcaacaggc

SEQ ID NO: 1519888 - DNA, 15 bp, Homo sapiens
tttaaaagcaacagg

SEQ ID NO: 1519889 - DNA, 15 bp, Homo sapiens
ttttaaaagcaacag

SEQ ID NO: 1519890 - DNA, 15 bp, Homo sapiens
attttaaaagcaaca

SEQ ID NO: 1519891 - DNA, 15 bp, Homo sapiens
tattttaaaagcaac

SEQ ID NO: 1519892 - DNA, 15 bp, Homo sapiens
atattttaaaagcaa

SEQ ID NO: 1519893 - DNA, 15 bp, Homo sapiens
aatattttaaaagca

SEQ ID NO: 1519894 - DNA, 15 bp, Homo sapiens
aaatattttaaaagc

SEQ ID NO: 1519895 - DNA, 15 bp, Homo sapiens
aaaatattttaaaag

SEQ ID NO: 1519896 - DNA, 15 bp, Homo sapiens
aaaaatattttaaaa

SEQ ID NO: 1519897 - DNA, 15 bp, Homo sapiens
aaaaaatattttaaa

SEQ ID NO: 1519898 - DNA, 15 bp, Homo sapiens
gaaaaaatattttaa

SEQ ID NO: 1519899 - DNA, 15 bp, Homo sapiens
tgaaaaaatatttta

SEQ ID NO: 1519900 - DNA, 15 bp, Homo sapiens
atgaaaaaatatttt

SEQ ID NO: 1519901 - DNA, 15 bp, Homo sapiens
aatgaaaaaatattt

SEQ ID NO: 1519902 - DNA, 15 bp, Homo sapiens
aaatgaaaaaatatt

SEQ ID NO: 1519903 - DNA, 15 bp, Homo sapiens
aaaatgaaaaaatat

SEQ ID NO: 1519904 - DNA, 15 bp, Homo sapiens
taaaatgaaaaaata

SEQ ID NO: 1519905 - DNA, 15 bp, Homo sapiens
ctaaaatgaaaaaat

SEQ ID NO: 1519906 - DNA, 15 bp, Homo sapiens
actaaaatgaaaaaa

SEQ ID NO: 1519907 - DNA, 15 bp, Homo sapiens
tactaaaatgaaaaa

SEQ ID NO: 1519908 - DNA, 15 bp, Homo sapiens
atactaaaatgaaaa

SEQ ID NO: 1519909 - DNA, 15 bp, Homo sapiens
aatactaaaatgaaa

SEQ ID NO: 1519910 - DNA, 15 bp, Homo sapiens
aaatactaaaatgaa

SEQ ID NO: 1519911 - DNA, 15 bp, Homo sapiens
aaaatactaaaatga

SEQ ID NO: 1519912 - DNA, 15 bp, Homo sapiens
taaaatactaaaatg

SEQ ID NO: 1519913 - DNA, 15 bp, Homo sapiens
ataaaatactaaaat

SEQ ID NO: 1519914 - DNA, 15 bp, Homo sapiens
aataaaatactaaaa

SEQ ID NO: 1519915 - DNA, 15 bp, Homo sapiens
caataaaatactaaa

SEQ ID NO: 1519916 - DNA, 15 bp, Homo sapiens
acaataaaatactaa

SEQ ID NO: 1519917 - DNA, 15 bp, Homo sapiens
aacaataaaatacta

SEQ ID NO: 1519918 - DNA, 15 bp, Homo sapiens
aaacaataaaatact

SEQ ID NO: 1519919 - DNA, 15 bp, Homo sapiens
taaacaataaaatac

SEQ ID NO: 1519920 - DNA, 15 bp, Homo sapiens
ataaacaataaaata

SEQ ID NO: 1519921 - DNA, 15 bp, Homo sapiens
gataaacaataaaat

SEQ ID NO: 1519922 - DNA, 15 bp, Homo sapiens
ggataaacaataaaa

SEQ ID NO: 1519923 - DNA, 15 bp, Homo sapiens
tggataaacaataaa

SEQ ID NO: 1519924 - DNA, 15 bp, Homo sapiens
ttggataaacaataa

SEQ ID NO: 1519925 - DNA, 15 bp, Homo sapiens
attggataaacaata

SEQ ID NO: 1519926 - DNA, 15 bp, Homo sapiens
aattggataaacaat

SEQ ID NO: 1519927 - DNA, 15 bp, Homo sapiens
taattggataaacaa

SEQ ID NO: 1519928 - DNA, 15 bp, Homo sapiens
ataattggataaaca

SEQ ID NO: 1519929 - DNA, 15 bp, Homo sapiens
tataattggataaac

SEQ ID NO: 1519930 - DNA, 15 bp, Homo sapiens
ctataattggataaa

SEQ ID NO: 1519931 - DNA, 15 bp, Homo sapiens
tctataattggataa

SEQ ID NO: 1519932 - DNA, 15 bp, Homo sapiens
gtctataattggata

SEQ ID NO: 1519933 - DNA, 15 bp, Homo sapiens
agtctataattggat

SEQ ID NO: 1519934 - DNA, 15 bp, Homo sapiens
aagtctataattgga

SEQ ID NO: 1519935 - DNA, 15 bp, Homo sapiens
aaagtctataattgg

SEQ ID NO: 1519936 - DNA, 15 bp, Homo sapiens
aaaagtctataattg

SEQ ID NO: 1519937 - DNA, 15 bp, Homo sapiens
aaaaagtctataatt

SEQ ID NO: 1519938 - DNA, 15 bp, Homo sapiens
aaaaaagtctataat

SEQ ID NO: 1519939 - DNA, 15 bp, Homo sapiens
taaaaaagtctataa

SEQ ID NO: 1519940 - DNA, 15 bp, Homo sapiens
gtaaaaaagtctata

SEQ ID NO: 1519941 - DNA, 15 bp, Homo sapiens
tgtaaaaaagtctat

SEQ ID NO: 1519942 - DNA, 15 bp, Homo sapiens
atgtaaaaaagtcta

SEQ ID NO: 1519943 - DNA, 15 bp, Homo sapiens
tatgtaaaaaagtct

SEQ ID NO: 1519944 - DNA, 15 bp, Homo sapiens
gtatgtaaaaaagtc

SEQ ID NO: 1519945 - DNA, 15 bp, Homo sapiens
agtatgtaaaaaagt

SEQ ID NO: 1519946 - DNA, 15 bp, Homo sapiens
gagtatgtaaaaaag

SEQ ID NO: 1519947 - DNA, 15 bp, Homo sapiens
tgagtatgtaaaaaa

SEQ ID NO: 1519948 - DNA, 15 bp, Homo sapiens
ctgagtatgtaaaaa

SEQ ID NO: 1519949 - DNA, 15 bp, Homo sapiens
actgagtatgtaaaa

SEQ ID NO: 1519950 - DNA, 15 bp, Homo sapiens
tactgagtatgtaaa

SEQ ID NO: 1519951 - DNA, 15 bp, Homo sapiens
ctactgagtatgtaa

SEQ ID NO: 1519952 - DNA, 15 bp, Homo sapiens
tctactgagtatgta

SEQ ID NO: 1519953 - DNA, 15 bp, Homo sapiens
gtctactgagtatgt

SEQ ID NO: 1519954 - DNA, 15 bp, Homo sapiens
tgtctactgagtatg

SEQ ID NO: 1519955 - DNA, 15 bp, Homo sapiens
ttgtctactgagtat

SEQ ID NO: 1519956 - DNA, 15 bp, Homo sapiens
gttgtctactgagta

SEQ ID NO: 1519957 - DNA, 15 bp, Homo sapiens
tgttgtctactgagt

SEQ ID NO: 1519958 - DNA, 15 bp, Homo sapiens
atgttgtctactgag

SEQ ID NO: 1519959 - DNA, 15 bp, Homo sapiens
tatgttgtctactga

SEQ ID NO: 1519960 - DNA, 15 bp, Homo sapiens
ttatgttgtctactg

SEQ ID NO: 1519961 - DNA, 15 bp, Homo sapiens
tttatgttgtctact

SEQ ID NO: 1519962 - DNA, 15 bp, Homo sapiens
ctttatgttgtctac

SEQ ID NO: 1519963 - DNA, 15 bp, Homo sapiens
gctttatgttgtcta

SEQ ID NO: 1519964 - DNA, 15 bp, Homo sapiens
ggctttatgttgtct

SEQ ID NO: 1519965 - DNA, 15 bp, Homo sapiens
aggctttatgttgtc

SEQ ID NO: 1519966 - DNA, 15 bp, Homo sapiens
gaggctttatgttgt

SEQ ID NO: 1519967 - DNA, 15 bp, Homo sapiens
tgaggctttatgttg

SEQ ID NO: 1519968 - DNA, 15 bp, Homo sapiens
atgaggctttatgtt

SEQ ID NO: 1519969 - DNA, 15 bp, Homo sapiens
tatgaggctttatgt

SEQ ID NO: 1519970 - DNA, 15 bp, Homo sapiens
ttatgaggctttatg

SEQ ID NO: 1519971 - DNA, 15 bp, Homo sapiens
attatgaggctttat

SEQ ID NO: 1519972 - DNA, 15 bp, Homo sapiens
aattatgaggcttta

SEQ ID NO: 1519973 - DNA, 15 bp, Homo sapiens
taattatgaggcttt

SEQ ID NO: 1519974 - DNA, 15 bp, Homo sapiens
gtaattatgaggctt

SEQ ID NO: 1519975 - DNA, 15 bp, Homo sapiens
agtaattatgaggct

SEQ ID NO: 1519976 - DNA, 15 bp, Homo sapiens
gagtaattatgaggc

SEQ ID NO: 1519977 - DNA, 15 bp, Homo sapiens
agagtaattatgagg

SEQ ID NO: 1519978 - DNA, 15 bp, Homo sapiens
cagagtaattatgag

SEQ ID NO: 1519979 - DNA, 15 bp, Homo sapiens
acagagtaattatga

SEQ ID NO: 1519980 - DNA, 15 bp, Homo sapiens
aacagagtaattatg

SEQ ID NO: 1519981 - DNA, 15 bp, Homo sapiens
taacagagtaattat

SEQ ID NO: 1519982 - DNA, 15 bp, Homo sapiens
ataacagagtaatta

SEQ ID NO: 1519983 - DNA, 15 bp, Homo sapiens
aataacagagtaatt

SEQ ID NO: 1519984 - DNA, 15 bp, Homo sapiens
aaataacagagtaat

SEQ ID NO: 1519985 - DNA, 15 bp, Homo sapiens
aaaataacagagtaa

SEQ ID NO: 1519986 - DNA, 15 bp, Homo sapiens
aaaaataacagagta

SEQ ID NO: 1519987 - DNA, 15 bp, Homo sapiens
gaaaaataacagagt

SEQ ID NO: 1519988 - DNA, 15 bp, Homo sapiens
agaaaaataacagag

SEQ ID NO: 1519989 - DNA, 15 bp, Homo sapiens
aagaaaaataacaga

SEQ ID NO: 1519990 - DNA, 15 bp, Homo sapiens
aaagaaaaataacag

SEQ ID NO: 1519991 - DNA, 15 bp, Homo sapiens
aaaagaaaaataaca

SEQ ID NO: 1519992 - DNA, 15 bp, Homo sapiens
taaaagaaaaataac

SEQ ID NO: 1519993 - DNA, 15 bp, Homo sapiens
ctaaaagaaaaataa

SEQ ID NO: 1519994 - DNA, 15 bp, Homo sapiens
cctaaaagaaaaata

SEQ ID NO: 1519995 - DNA, 15 bp, Homo sapiens
gcctaaaagaaaaat

SEQ ID NO: 1519996 - DNA, 15 bp, Homo sapiens
tgcctaaaagaaaaa

SEQ ID NO: 1519997 - DNA, 15 bp, Homo sapiens
atgcctaaaagaaaa

SEQ ID NO: 1519998 - DNA, 15 bp, Homo sapiens
gatgcctaaaagaaa

SEQ ID NO: 1519999 - DNA, 15 bp, Homo sapiens
tgatgcctaaaagaa

SEQ ID NO: 1520000 - DNA, 15 bp, Homo sapiens
ctgatgcctaaaaga

SEQ ID NO: 1520001 - DNA, 15 bp, Homo sapiens
cctgatgcctaaaag

SEQ ID NO: 1520002 - DNA, 15 bp, Homo sapiens
acctgatgcctaaaa

SEQ ID NO: 1520003 - DNA, 15 bp, Homo sapiens
tacctgatgcctaaa

SEQ ID NO: 1520004 - DNA, 15 bp, Homo sapiens
gtacctgatgcctaa

SEQ ID NO: 1520005 - DNA, 15 bp, Homo sapiens
tgtacctgatgccta

SEQ ID NO: 1520006 - DNA, 15 bp, Homo sapiens
atgtacctgatgcct

SEQ ID NO: 1520007 - DNA, 15 bp, Homo sapiens
catgtacctgatgcc

SEQ ID NO: 1520008 - DNA, 15 bp, Homo sapiens
tcatgtacctgatgc

SEQ ID NO: 1520009 - DNA, 15 bp, Homo sapiens
ttcatgtacctgatg

SEQ ID NO: 1520010 - DNA, 15 bp, Homo sapiens
tttcatgtacctgat

SEQ ID NO: 1520011 - DNA, 15 bp, Homo sapiens
ttttcatgtacctga

SEQ ID NO: 1520012 - DNA, 15 bp, Homo sapiens
tttttcatgtacctg

SEQ ID NO: 1520013 - DNA, 15 bp, Homo sapiens
ctttttcatgtacct

SEQ ID NO: 1520014 - DNA, 15 bp, Homo sapiens
tctttttcatgtacc

SEQ ID NO: 1520015 - DNA, 15 bp, Homo sapiens
ttctttttcatgtac

SEQ ID NO: 1520016 - DNA, 15 bp, Homo sapiens
cttctttttcatgta

SEQ ID NO: 1520017 - DNA, 15 bp, Homo sapiens
tcttctttttcatgt

SEQ ID NO: 1520018 - DNA, 15 bp, Homo sapiens
ttcttctttttcatg

SEQ ID NO: 1520019 - DNA, 15 bp, Homo sapiens
attcttctttttcat

SEQ ID NO: 1520020 - DNA, 15 bp, Homo sapiens
aattcttctttttca

SEQ ID NO: 1520021 - DNA, 15 bp, Homo sapiens
gaattcttctttttc

SEQ ID NO: 1520022 - DNA, 15 bp, Homo sapiens
tgaattcttcttttt

SEQ ID NO: 1520023 - DNA, 15 bp, Homo sapiens
ttgaattcttctttt

SEQ ID NO: 1520024 - DNA, 15 bp, Homo sapiens
cttgaattcttcttt

SEQ ID NO: 1520025 - DNA, 15 bp, Homo sapiens
ccttgaattcttctt

SEQ ID NO: 1520026 - DNA, 15 bp, Homo sapiens
gccttgaattcttct

SEQ ID NO: 1520027 - DNA, 15 bp, Homo sapiens
agccttgaattcttc

SEQ ID NO: 1520028 - DNA, 15 bp, Homo sapiens
aagccttgaattctt

SEQ ID NO: 1520029 - DNA, 15 bp, Homo sapiens
aaagccttgaattct

SEQ ID NO: 1520030 - DNA, 15 bp, Homo sapiens
caaagccttgaattc

SEQ ID NO: 1520031 - DNA, 15 bp, Homo sapiens
tcaaagccttgaatt

SEQ ID NO: 1520032 - DNA, 15 bp, Homo sapiens
ttcaaagccttgaat

SEQ ID NO: 1520033 - DNA, 15 bp, Homo sapiens
tttcaaagccttgaa

SEQ ID NO: 1520034 - DNA, 15 bp, Homo sapiens
ttttcaaagccttga

SEQ ID NO: 1520035 - DNA, 15 bp, Homo sapiens
gttttcaaagccttg

SEQ ID NO: 1520036 - DNA, 15 bp, Homo sapiens
cgttttcaaagcctt

SEQ ID NO: 1520037 - DNA, 15 bp, Homo sapiens
acgttttcaaagcct

SEQ ID NO: 1520038 - DNA, 15 bp, Homo sapiens
aacgttttcaaagcc

SEQ ID NO: 1520039 - DNA, 15 bp, Homo sapiens
taacgttttcaaagc

SEQ ID NO: 1520040 - DNA, 15 bp, Homo sapiens
ttaacgttttcaaag

SEQ ID NO: 1520041 - DNA, 15 bp, Homo sapiens
cttaacgttttcaaa

SEQ ID NO: 1520042 - DNA, 15 bp, Homo sapiens
acttaacgttttcaa

SEQ ID NO: 1520043 - DNA, 15 bp, Homo sapiens
tacttaacgttttca

SEQ ID NO: 1520044 - DNA, 15 bp, Homo sapiens
atacttaacgttttc

SEQ ID NO: 1520045 - DNA, 15 bp, Homo sapiens
aatacttaacgtttt

SEQ ID NO: 1520046 - DNA, 15 bp, Homo sapiens
aaatacttaacgttt

SEQ ID NO: 1520047 - DNA, 15 bp, Homo sapiens
aaaatacttaacgtt

SEQ ID NO: 1520048 - DNA, 15 bp, Homo sapiens
gaaaatacttaacgt

SEQ ID NO: 1520049 - DNA, 15 bp, Homo sapiens
agaaaatacttaacg

SEQ ID NO: 1520050 - DNA, 15 bp, Homo sapiens
tagaaaatacttaac

SEQ ID NO: 1520051 - DNA, 15 bp, Homo sapiens
gtagaaaatacttaa

SEQ ID NO: 1520052 - DNA, 15 bp, Homo sapiens
ggtagaaaatactta

SEQ ID NO: 1520053 - DNA, 15 bp, Homo sapiens
tggtagaaaatactt

SEQ ID NO: 1520054 - DNA, 15 bp, Homo sapiens
ttggtagaaaatact

SEQ ID NO: 1520055 - DNA, 15 bp, Homo sapiens
cttggtagaaaatac

SEQ ID NO: 1520056 - DNA, 15 bp, Homo sapiens
gcttggtagaaaata

SEQ ID NO: 1520057 - DNA, 15 bp, Homo sapiens
agcttggtagaaaat

SEQ ID NO: 1520058 - DNA, 15 bp, Homo sapiens
cagcttggtagaaaa

SEQ ID NO: 1520059 - DNA, 15 bp, Homo sapiens
ccagcttggtagaaa

SEQ ID NO: 1520060 - DNA, 15 bp, Homo sapiens
cccagcttggtagaa

SEQ ID NO: 1520061 - DNA, 15 bp, Homo sapiens
tcccagcttggtaga

SEQ ID NO: 1520062 - DNA, 15 bp, Homo sapiens
gtcccagcttggtag

SEQ ID NO: 1520063 - DNA, 15 bp, Homo sapiens
agtcccagcttggta

SEQ ID NO: 1520064 - DNA, 15 bp, Homo sapiens
aagtcccagcttggt

SEQ ID NO: 1520065 - DNA, 15 bp, Homo sapiens
gaagtcccagcttgg

SEQ ID NO: 1520066 - DNA, 15 bp, Homo sapiens
ggaagtcccagcttg

SEQ ID NO: 1520067 - DNA, 15 bp, Homo sapiens
tggaagtcccagctt

SEQ ID NO: 1520068 - DNA, 15 bp, Homo sapiens
ttggaagtcccagct

SEQ ID NO: 1520069 - DNA, 15 bp, Homo sapiens
tttggaagtcccagc

SEQ ID NO: 1520070 - DNA, 15 bp, Homo sapiens
ctttggaagtcccag

SEQ ID NO: 1520071 - DNA, 15 bp, Homo sapiens
gctttggaagtccca

SEQ ID NO: 1520072 - DNA, 15 bp, Homo sapiens
agctttggaagtccc

SEQ ID NO: 1520073 - DNA, 15 bp, Homo sapiens
cagctttggaagtcc

SEQ ID NO: 1520074 - DNA, 15 bp, Homo sapiens
ccagctttggaagtc

SEQ ID NO: 1520075 - DNA, 15 bp, Homo sapiens
cccagctttggaagt

SEQ ID NO: 1520076 - DNA, 15 bp, Homo sapiens
tcccagctttggaag

SEQ ID NO: 1520077 - DNA, 15 bp, Homo sapiens
ttcccagctttggaa

SEQ ID NO: 1520078 - DNA, 15 bp, Homo sapiens
attcccagctttgga

SEQ ID NO: 1520079 - DNA, 15 bp, Homo sapiens
gattcccagctttgg

SEQ ID NO: 1520080 - DNA, 15 bp, Homo sapiens
ggattcccagctttg

SEQ ID NO: 1520081 - DNA, 15 bp, Homo sapiens
aggattcccagcttt

SEQ ID NO: 1520082 - DNA, 15 bp, Homo sapiens
taggattcccagctt

SEQ ID NO: 1520083 - DNA, 15 bp, Homo sapiens
ataggattcccagct

SEQ ID NO: 1520084 - DNA, 15 bp, Homo sapiens
aataggattcccagc

SEQ ID NO: 1520085 - DNA, 15 bp, Homo sapiens
aaataggattcccag

SEQ ID NO: 1520086 - DNA, 15 bp, Homo sapiens
taaaaaataggattc

SEQ ID NO: 1520087 - DNA, 15 bp, Homo sapiens
ataaaaaataggatt

SEQ ID NO: 1520088 - DNA, 15 bp, Homo sapiens
aataaaaaataggat

SEQ ID NO: 1520089 - DNA, 15 bp, Homo sapiens
taataaaaaatagga

SEQ ID NO: 1520090 - DNA, 15 bp, Homo sapiens
ataataaaaaatagg

SEQ ID NO: 1520091 - DNA, 15 bp, Homo sapiens
cataataaaaaatag

SEQ ID NO: 1520092 - DNA, 15 bp, Homo sapiens
acataataaaaaata

SEQ ID NO: 1520093 - DNA, 15 bp, Homo sapiens
aacataataaaaaat

SEQ ID NO: 1520094 - DNA, 15 bp, Homo sapiens
caacataataaaaaa

SEQ ID NO: 1520095 - DNA, 15 bp, Homo sapiens
gcaacataataaaaa

SEQ ID NO: 1520096 - DNA, 15 bp, Homo sapiens
tgcaacataataaaa

SEQ ID NO: 1520097 - DNA, 15 bp, Homo sapiens
gtgcaacataataaa

SEQ ID NO: 1520098 - DNA, 15 bp, Homo sapiens
cgtgcaacataataa

SEQ ID NO: 1520099 - DNA, 15 bp, Homo sapiens
ccgtgcaacataata

SEQ ID NO: 1520100 - DNA, 15 bp, Homo sapiens
tccgtgcaacataat

SEQ ID NO: 1520101 - DNA, 15 bp, Homo sapiens
ctccgtgcaacataa

SEQ ID NO: 1520102 - DNA, 15 bp, Homo sapiens
cctccgtgcaacata

SEQ ID NO: 1520103 - DNA, 15 bp, Homo sapiens
acctccgtgcaacat

SEQ ID NO: 1520104 - DNA, 15 bp, Homo sapiens
tacctccgtgcaaca

SEQ ID NO: 1520105 - DNA, 15 bp, Homo sapiens
ttacctccgtgcaac

SEQ ID NO: 1520106 - DNA, 15 bp, Homo sapiens
cttacctccgtgcaa

SEQ ID NO: 1520107 - DNA, 15 bp, Homo sapiens
tcttacctccgtgca

SEQ ID NO: 1520108 - DNA, 15 bp, Homo sapiens
ttcttacctccgtgc

SEQ ID NO: 1520109 - DNA, 15 bp, Homo sapiens
tttcttacctccgtg

SEQ ID NO: 1520110 - DNA, 15 bp, Homo sapiens
atttcttacctccgt

SEQ ID NO: 1520111 - DNA, 15 bp, Homo sapiens
tatttcttacctccg

SEQ ID NO: 1520112 - DNA, 15 bp, Homo sapiens
gtatttcttacctcc

SEQ ID NO: 1520113 - DNA, 15 bp, Homo sapiens
agtatttcttacctc

SEQ ID NO: 1520114 - DNA, 15 bp, Homo sapiens
tagtatttcttacct

SEQ ID NO: 1520115 - DNA, 15 bp, Homo sapiens
atagtatttcttacc

SEQ ID NO: 1520116 - DNA, 15 bp, Homo sapiens
catagtatttcttac

SEQ ID NO: 1520117 - DNA, 15 bp, Homo sapiens
acatagtatttctta

SEQ ID NO: 1520118 - DNA, 15 bp, Homo sapiens
aacatagtatttctt

SEQ ID NO: 1520119 - DNA, 15 bp, Homo sapiens
aaacatagtatttct

SEQ ID NO: 1520120 - DNA, 15 bp, Homo sapiens
aaaacatagtatttc

SEQ ID NO: 1520121 - DNA, 15 bp, Homo sapiens
caaaacatagtattt

SEQ ID NO: 1520122 - DNA, 15 bp, Homo sapiens
ccaaaacatagtatt

SEQ ID NO: 1520123 - DNA, 15 bp, Homo sapiens
cccaaaacatagtat

SEQ ID NO: 1520124 - DNA, 15 bp, Homo sapiens
acccaaaacatagta

SEQ ID NO: 1520125 - DNA, 15 bp, Homo sapiens
gacccaaaacatagt

SEQ ID NO: 1520126 - DNA, 15 bp, Homo sapiens
agacccaaaacatag

SEQ ID NO: 1520127 - DNA, 15 bp, Homo sapiens
gagacccaaaacata

SEQ ID NO: 1520128 - DNA, 15 bp, Homo sapiens
agagacccaaaacat

SEQ ID NO: 1520129 - DNA, 15 bp, Homo sapiens
aagagacccaaaaca

SEQ ID NO: 1520130 - DNA, 15 bp, Homo sapiens
taagagacccaaaac

SEQ ID NO: 1520131 - DNA, 15 bp, Homo sapiens
ttaagagacccaaaa

SEQ ID NO: 1520132 - DNA, 15 bp, Homo sapiens
gttaagagacccaaa

SEQ ID NO: 1520133 - DNA, 15 bp, Homo sapiens
tgttaagagacccaa

SEQ ID NO: 1520134 - DNA, 15 bp, Homo sapiens
ctgttaagagaccca

SEQ ID NO: 1520135 - DNA, 15 bp, Homo sapiens
tctgttaagagaccc

SEQ ID NO: 1520136 - DNA, 15 bp, Homo sapiens
ttctgttaagagacc

SEQ ID NO: 1520137 - DNA, 15 bp, Homo sapiens
attctgttaagagac

SEQ ID NO: 1520138 - DNA, 15 bp, Homo sapiens
aattctgttaagaga

SEQ ID NO: 1520139 - DNA, 15 bp, Homo sapiens
aaattctgttaagag

SEQ ID NO: 1520140 - DNA, 15 bp, Homo sapiens
aaaattctgttaaga

SEQ ID NO: 1520141 - DNA, 15 bp, Homo sapiens
aaaaattctgttaag

SEQ ID NO: 1520142 - DNA, 15 bp, Homo sapiens
aaaaaattctgttaa

SEQ ID NO: 1520143 - DNA, 15 bp, Homo sapiens
taaaaaattctgtta

SEQ ID NO: 1520144 - DNA, 15 bp, Homo sapiens
ttaaaaaattctgtt

SEQ ID NO: 1520145 - DNA, 15 bp, Homo sapiens
tttaaaaaattctgt

SEQ ID NO: 1520146 - DNA, 15 bp, Homo sapiens
atttaaaaaattctg

SEQ ID NO: 1520147 - DNA, 15 bp, Homo sapiens
aatttaaaaaattct

SEQ ID NO: 1520148 - DNA, 15 bp, Homo sapiens
taatttaaaaaattc

SEQ ID NO: 1520149 - DNA, 15 bp, Homo sapiens
ctataatttaaaaaa

SEQ ID NO: 1520150 - DNA, 15 bp, Homo sapiens
gctataatttaaaaa

SEQ ID NO: 1520151 - DNA, 15 bp, Homo sapiens
tgctataatttaaaa

SEQ ID NO: 1520152 - DNA, 15 bp, Homo sapiens
ttgctataatttaaa

SEQ ID NO: 1520153 - DNA, 15 bp, Homo sapiens
tttgctataatttaa

SEQ ID NO: 1520154 - DNA, 15 bp, Homo sapiens
atttgctataattta

SEQ ID NO: 1520155 - DNA, 15 bp, Homo sapiens
tatttgctataattt

SEQ ID NO: 1520156 - DNA, 15 bp, Homo sapiens
atatttgctataatt

SEQ ID NO: 1520157 - DNA, 15 bp, Homo sapiens
tatatttgctataat

SEQ ID NO: 1520158 - DNA, 15 bp, Homo sapiens
ctatatttgctataa

SEQ ID NO: 1520159 - DNA, 15 bp, Homo sapiens
tctatatttgctata

SEQ ID NO: 1520160 - DNA, 15 bp, Homo sapiens
ctctatatttgctat

SEQ ID NO: 1520161 - DNA, 15 bp, Homo sapiens
tctctatatttgcta

SEQ ID NO: 1520162 - DNA, 15 bp, Homo sapiens
ctctctatatttgct

SEQ ID NO: 1520163 - DNA, 15 bp, Homo sapiens
tctctctatatttgc

SEQ ID NO: 1520164 - DNA, 15 bp, Homo sapiens
atctctctatatttg

SEQ ID NO: 1520165 - DNA, 15 bp, Homo sapiens
catctctctatattt

SEQ ID NO: 1520166 - DNA, 15 bp, Homo sapiens
ccatctctctatatt

SEQ ID NO: 1520167 - DNA, 15 bp, Homo sapiens
gccatctctctatat

SEQ ID NO: 1520168 - DNA, 15 bp, Homo sapiens
tgccatctctctata

SEQ ID NO: 1520169 - DNA, 15 bp, Homo sapiens
ttgccatctctctat

SEQ ID NO: 1520170 - DNA, 15 bp, Homo sapiens
cttgccatctctcta

SEQ ID NO: 1520171 - DNA, 15 bp, Homo sapiens
acttgccatctctct

SEQ ID NO: 1520172 - DNA, 15 bp, Homo sapiens
aacttgccatctctc

SEQ ID NO: 1520173 - DNA, 15 bp, Homo sapiens
aaacttgccatctct

SEQ ID NO: 1520174 - DNA, 15 bp, Homo sapiens
caaacttgccatctc

SEQ ID NO: 1520175 - DNA, 15 bp, Homo sapiens
ccaaacttgccatct

SEQ ID NO: 1520176 - DNA, 15 bp, Homo sapiens
accaaacttgccatc

SEQ ID NO: 1520177 - DNA, 15 bp, Homo sapiens
aaccaaacttgccat

SEQ ID NO: 1520178 - DNA, 15 bp, Homo sapiens
aaaccaaacttgcca

SEQ ID NO: 1520179 - DNA, 15 bp, Homo sapiens
aaaaccaaacttgcc

SEQ ID NO: 1520180 - DNA, 15 bp, Homo sapiens
aaaaaccaaacttgc

SEQ ID NO: 1520181 - DNA, 15 bp, Homo sapiens
gaaaaaccaaacttg

SEQ ID NO: 1520182 - DNA, 15 bp, Homo sapiens
ggaaaaaccaaactt

SEQ ID NO: 1520183 - DNA, 15 bp, Homo sapiens
gggaaaaaccaaact

SEQ ID NO: 1520184 - DNA, 15 bp, Homo sapiens
tgggaaaaaccaaac

SEQ ID NO: 1520185 - DNA, 15 bp, Homo sapiens
ctgggaaaaaccaaa

SEQ ID NO: 1520186 - DNA, 15 bp, Homo sapiens
actgggaaaaaccaa

SEQ ID NO: 1520187 - DNA, 15 bp, Homo sapiens
aactgggaaaaacca

SEQ ID NO: 1520188 - DNA, 15 bp, Homo sapiens
caactgggaaaaacc

SEQ ID NO: 1520189 - DNA, 15 bp, Homo sapiens
tcaactgggaaaaac

SEQ ID NO: 1520190 - DNA, 15 bp, Homo sapiens
gtcaactgggaaaaa

SEQ ID NO: 1520191 - DNA, 15 bp, Homo sapiens
agtcaactgggaaaa

SEQ ID NO: 1520192 - DNA, 15 bp, Homo sapiens
aagtcaactgggaaa

SEQ ID NO: 1520193 - DNA, 15 bp, Homo sapiens
taagtcaactgggaa

SEQ ID NO: 1520194 - DNA, 15 bp, Homo sapiens
ttaagtcaactggga

SEQ ID NO: 1520195 - DNA, 15 bp, Homo sapiens
gttaagtcaactggg

SEQ ID NO: 1520196 - DNA, 15 bp, Homo sapiens
tgttaagtcaactgg

SEQ ID NO: 1520197 - DNA, 15 bp, Homo sapiens
ctgttaagtcaactg

SEQ ID NO: 1520198 - DNA, 15 bp, Homo sapiens
cctgttaagtcaact

SEQ ID NO: 1520199 - DNA, 15 bp, Homo sapiens
tcctgttaagtcaac

SEQ ID NO: 1520200 - DNA, 15 bp, Homo sapiens
ttcctgttaagtcaa

SEQ ID NO: 1520201 - DNA, 15 bp, Homo sapiens
attcctgttaagtca

SEQ ID NO: 1520202 - DNA, 15 bp, Homo sapiens
aattcctgttaagtc

SEQ ID NO: 1520203 - DNA, 15 bp, Homo sapiens
caattcctgttaagt

SEQ ID NO: 1520204 - DNA, 15 bp, Homo sapiens
tcaattcctgttaag

SEQ ID NO: 1520205 - DNA, 15 bp, Homo sapiens
ttcaattcctgttaa

SEQ ID NO: 1520206 - DNA, 15 bp, Homo sapiens
cttcaattcctgtta

SEQ ID NO: 1520207 - DNA, 15 bp, Homo sapiens
tcttcaattcctgtt

SEQ ID NO: 1520208 - DNA, 15 bp, Homo sapiens
gtcttcaattcctgt

SEQ ID NO: 1520209 - DNA, 15 bp, Homo sapiens
tgtcttcaattcctg

SEQ ID NO: 1520210 - DNA, 15 bp, Homo sapiens
ttgtcttcaattcct

SEQ ID NO: 1520211 - DNA, 15 bp, Homo sapiens
cttgtcttcaattcc

SEQ ID NO: 1520212 - DNA, 15 bp, Homo sapiens
acttgtcttcaattc

SEQ ID NO: 1520213 - DNA, 15 bp, Homo sapiens
aacttgtcttcaatt

SEQ ID NO: 1520214 - DNA, 15 bp, Homo sapiens
aaacttgtcttcaat

SEQ ID NO: 1520215 - DNA, 15 bp, Homo sapiens
taaacttgtcttcaa

SEQ ID NO: 1520216 - DNA, 15 bp, Homo sapiens
gtaaacttgtcttca

SEQ ID NO: 1520217 - DNA, 15 bp, Homo sapiens
agtaaacttgtcttc

SEQ ID NO: 1520218 - DNA, 15 bp, Homo sapiens
aagtaaacttgtctt

SEQ ID NO: 1520219 - DNA, 15 bp, Homo sapiens
caagtaaacttgtct

SEQ ID NO: 1520220 - DNA, 15 bp, Homo sapiens
ccaagtaaacttgtc

SEQ ID NO: 1520221 - DNA, 15 bp, Homo sapiens
cccaagtaaacttgt

SEQ ID NO: 1520222 - DNA, 15 bp, Homo sapiens
tcccaagtaaacttg

SEQ ID NO: 1520223 - DNA, 15 bp, Homo sapiens
ctcccaagtaaactt

SEQ ID NO: 1520224 - DNA, 15 bp, Homo sapiens
gctcccaagtaaact

SEQ ID NO: 1520225 - DNA, 15 bp, Homo sapiens
tgctcccaagtaaac

SEQ ID NO: 1520226 - DNA, 15 bp, Homo sapiens
atgctcccaagtaaa

SEQ ID NO: 1520227 - DNA, 15 bp, Homo sapiens
tatgctcccaagtaa

SEQ ID NO: 1520228 - DNA, 15 bp, Homo sapiens
atatgctcccaagta

SEQ ID NO: 1520229 - DNA, 15 bp, Homo sapiens
tatatgctcccaagt

SEQ ID NO: 1520230 - DNA, 15 bp, Homo sapiens
ctatatgctcccaag

SEQ ID NO: 1520231 - DNA, 15 bp, Homo sapiens
gctatatgctcccaa

SEQ ID NO: 1520232 - DNA, 15 bp, Homo sapiens
tgctatatgctccca

SEQ ID NO: 1520233 - DNA, 15 bp, Homo sapiens
ctgctatatgctccc

SEQ ID NO: 1520234 - DNA, 15 bp, Homo sapiens
cctgctatatgctcc

SEQ ID NO: 1520235 - DNA, 15 bp, Homo sapiens
ccctgctatatgctc

SEQ ID NO: 1520236 - DNA, 15 bp, Homo sapiens
accctgctatatgct

SEQ ID NO: 1520237 - DNA, 15 bp, Homo sapiens
taccctgctatatgc

SEQ ID NO: 1520238 - DNA, 15 bp, Homo sapiens
ttaccctgctatatg

SEQ ID NO: 1520239 - DNA, 15 bp, Homo sapiens
tttaccctgctatat

SEQ ID NO: 1520240 - DNA, 15 bp, Homo sapiens
atttaccctgctata

SEQ ID NO: 1520241 - DNA, 15 bp, Homo sapiens
tatttaccctgctat

SEQ ID NO: 1520242 - DNA, 15 bp, Homo sapiens
ctatttaccctgcta

SEQ ID NO: 1520243 - DNA, 15 bp, Homo sapiens
gctatttaccctgct

SEQ ID NO: 1520244 - DNA, 15 bp, Homo sapiens
ggctatttaccctgc

SEQ ID NO: 1520245 - DNA, 15 bp, Homo sapiens
aggctatttaccctg

SEQ ID NO: 1520246 - DNA, 15 bp, Homo sapiens
caggctatttaccct

SEQ ID NO: 1520247 - DNA, 15 bp, Homo sapiens
gcaggctatttaccc

SEQ ID NO: 1520248 - DNA, 15 bp, Homo sapiens
cgcaggctatttacc

SEQ ID NO: 1520249 - DNA, 15 bp, Homo sapiens
acgcaggctatttac

SEQ ID NO: 1520250 - DNA, 15 bp, Homo sapiens
aacgcaggctattta

SEQ ID NO: 1520251 - DNA, 15 bp, Homo sapiens
aaacgcaggctattt

SEQ ID NO: 1520252 - DNA, 15 bp, Homo sapiens
gaaacgcaggctatt

SEQ ID NO: 1520253 - DNA, 15 bp, Homo sapiens
ggaaacgcaggctat

SEQ ID NO: 1520254 - DNA, 15 bp, Homo sapiens
aggaaacgcaggcta

SEQ ID NO: 1520255 - DNA, 15 bp, Homo sapiens
taggaaacgcaggct

SEQ ID NO: 1520256 - DNA, 15 bp, Homo sapiens
ttaggaaacgcaggc

SEQ ID NO: 1520257 - DNA, 15 bp, Homo sapiens
tttaggaaacgcagg

SEQ ID NO: 1520258 - DNA, 15 bp, Homo sapiens
ttttaggaaacgcag

SEQ ID NO: 1520259 - DNA, 15 bp, Homo sapiens
attttaggaaacgca

SEQ ID NO: 1520260 - DNA, 15 bp, Homo sapiens
cattttaggaaacgc

SEQ ID NO: 1520261 - DNA, 15 bp, Homo sapiens
tcattttaggaaacg

SEQ ID NO: 1520262 - DNA, 15 bp, Homo sapiens
atcattttaggaaac

SEQ ID NO: 1520263 - DNA, 15 bp, Homo sapiens
catcattttaggaaa

SEQ ID NO: 1520264 - DNA, 15 bp, Homo sapiens
ccatcattttaggaa

SEQ ID NO: 1520265 - DNA, 15 bp, Homo sapiens
accatcattttagga

SEQ ID NO: 1520266 - DNA, 15 bp, Homo sapiens
gaccatcattttagg

SEQ ID NO: 1520267 - DNA, 15 bp, Homo sapiens
cgaccatcattttag

SEQ ID NO: 1520268 - DNA, 15 bp, Homo sapiens
ccgaccatcatttta

SEQ ID NO: 1520269 - DNA, 15 bp, Homo sapiens
accgaccatcatttt

SEQ ID NO: 1520270 - DNA, 15 bp, Homo sapiens
taccgaccatcattt

SEQ ID NO: 1520271 - DNA, 15 bp, Homo sapiens
ataccgaccatcatt

SEQ ID NO: 1520272 - DNA, 15 bp, Homo sapiens
gataccgaccatcat

SEQ ID NO: 1520273 - DNA, 15 bp, Homo sapiens
agataccgaccatca

SEQ ID NO: 1520274 - DNA, 15 bp, Homo sapiens
tagataccgaccatc

SEQ ID NO: 1520275 - DNA, 15 bp, Homo sapiens
ctagataccgaccat

SEQ ID NO: 1520276 - DNA, 15 bp, Homo sapiens
actagataccgacca

SEQ ID NO: 1520277 - DNA, 15 bp, Homo sapiens
tactagataccgacc

SEQ ID NO: 1520278 - DNA, 15 bp, Homo sapiens
ctactagataccgac

SEQ ID NO: 1520279 - DNA, 15 bp, Homo sapiens
gctactagataccga

SEQ ID NO: 1520280 - DNA, 15 bp, Homo sapiens
agctactagataccg

SEQ ID NO: 1520281 - DNA, 15 bp, Homo sapiens
cagctactagatacc

SEQ ID NO: 1520282 - DNA, 15 bp, Homo sapiens
gcagctactagatac

SEQ ID NO: 1520283 - DNA, 15 bp, Homo sapiens
agcagctactagata

SEQ ID NO: 1520284 - DNA, 15 bp, Homo sapiens
aagcagctactagat

SEQ ID NO: 1520285 - DNA, 15 bp, Homo sapiens
aaagcagctactaga

SEQ ID NO: 1520286 - DNA, 15 bp, Homo sapiens
aaaagcagctactag

SEQ ID NO: 1520287 - DNA, 15 bp, Homo sapiens
gaaaagcagctacta

SEQ ID NO: 1520288 - DNA, 15 bp, Homo sapiens
tgaaaagcagctact

SEQ ID NO: 1520289 - DNA, 15 bp, Homo sapiens
atgaaaagcagctac

SEQ ID NO: 1520290 - DNA, 15 bp, Homo sapiens
tatgaaaagcagcta

SEQ ID NO: 1520291 - DNA, 15 bp, Homo sapiens
gtatgaaaagcagct

SEQ ID NO: 1520292 - DNA, 15 bp, Homo sapiens
agtatgaaaagcagc

SEQ ID NO: 1520293 - DNA, 15 bp, Homo sapiens
tagtatgaaaagcag

SEQ ID NO: 1520294 - DNA, 15 bp, Homo sapiens
gtagtatgaaaagca

SEQ ID NO: 1520295 - DNA, 15 bp, Homo sapiens
ggtagtatgaaaagc

SEQ ID NO: 1520296 - DNA, 15 bp, Homo sapiens
gggtagtatgaaaag

SEQ ID NO: 1520297 - DNA, 15 bp, Homo sapiens
tgggtagtatgaaaa

SEQ ID NO: 1520298 - DNA, 15 bp, Homo sapiens
atgggtagtatgaaa

SEQ ID NO: 1520299 - DNA, 15 bp, Homo sapiens
aatgggtagtatgaa

SEQ ID NO: 1520300 - DNA, 15 bp, Homo sapiens
aaatgggtagtatga

SEQ ID NO: 1520301 - DNA, 15 bp, Homo sapiens
gaaatgggtagtatg

SEQ ID NO: 1520302 - DNA, 15 bp, Homo sapiens
tgaaatgggtagtat

SEQ ID NO: 1520303 - DNA, 15 bp, Homo sapiens
atgaaatgggtagta

SEQ ID NO: 1520304 - DNA, 15 bp, Homo sapiens
tatgaaatgggtagt

SEQ ID NO: 1520305 - DNA, 15 bp, Homo sapiens
atatgaaatgggtag

SEQ ID NO: 1520306 - DNA, 15 bp, Homo sapiens
aatatgaaatgggta

SEQ ID NO: 1520307 - DNA, 15 bp, Homo sapiens
caatatgaaatgggt

SEQ ID NO: 1520308 - DNA, 15 bp, Homo sapiens
gcaatatgaaatggg

SEQ ID NO: 1520309 - DNA, 15 bp, Homo sapiens
gtaagcaatatgaaa

SEQ ID NO: 1520310 - DNA, 15 bp, Homo sapiens
agtaagcaatatgaa

SEQ ID NO: 1520311 - DNA, 15 bp, Homo sapiens
gagtaagcaatatga

SEQ ID NO: 1520312 - DNA, 15 bp, Homo sapiens
agagtaagcaatatg

SEQ ID NO: 1520313 - DNA, 15 bp, Homo sapiens
cagagtaagcaatat

SEQ ID NO: 1520314 - DNA, 15 bp, Homo sapiens
acagagtaagcaata

SEQ ID NO: 1520315 - DNA, 15 bp, Homo sapiens
gacagagtaagcaat

SEQ ID NO: 1520316 - DNA, 15 bp, Homo sapiens
ggacagagtaagcaa

SEQ ID NO: 1520317 - DNA, 15 bp, Homo sapiens
aggacagagtaagca

SEQ ID NO: 1520318 - DNA, 15 bp, Homo sapiens
taggacagagtaagc

SEQ ID NO: 1520319 - DNA, 15 bp, Homo sapiens
gtaggacagagtaag

SEQ ID NO: 1520320 - DNA, 15 bp, Homo sapiens
tgtaggacagagtaa

SEQ ID NO: 1520321 - DNA, 15 bp, Homo sapiens
atgtaggacagagta

SEQ ID NO: 1520322 - DNA, 15 bp, Homo sapiens
gatgtaggacagagt

SEQ ID NO: 1520323 - DNA, 15 bp, Homo sapiens
tgatgtaggacagag

SEQ ID NO: 1520324 - DNA, 15 bp, Homo sapiens
atgatgtaggacaga

SEQ ID NO: 1520325 - DNA, 15 bp, Homo sapiens
aatgatgtaggacag

SEQ ID NO: 1520326 - DNA, 15 bp, Homo sapiens
aaatgatgtaggaca

SEQ ID NO: 1520327 - DNA, 15 bp, Homo sapiens
aaaatgatgtaggac

SEQ ID NO: 1520328 - DNA, 15 bp, Homo sapiens
aaaaatgatgtagga

SEQ ID NO: 1520329 - DNA, 15 bp, Homo sapiens
aaaaaatgatgtagg

SEQ ID NO: 1520330 - DNA, 15 bp, Homo sapiens
taaaaaatgatgtag

SEQ ID NO: 1520331 - DNA, 15 bp, Homo sapiens
ttaaaaaatgatgta

SEQ ID NO: 1520332 - DNA, 15 bp, Homo sapiens
tttaaaaaatgatgt

SEQ ID NO: 1520333 - DNA, 15 bp, Homo sapiens
ttttaaaaaatgatg

SEQ ID NO: 1520334 - DNA, 15 bp, Homo sapiens
gtattttaaaaaatg

SEQ ID NO: 1520335 - DNA, 15 bp, Homo sapiens
agtattttaaaaaat

SEQ ID NO: 1520336 - DNA, 15 bp, Homo sapiens
cagtattttaaaaaa

SEQ ID NO: 1520337 - DNA, 15 bp, Homo sapiens
gcagtattttaaaaa

SEQ ID NO: 1520338 - DNA, 15 bp, Homo sapiens
ggcagtattttaaaa

SEQ ID NO: 1520339 - DNA, 15 bp, Homo sapiens
aggcagtattttaaa

SEQ ID NO: 1520340 - DNA, 15 bp, Homo sapiens
caggcagtattttaa

SEQ ID NO: 1520341 - DNA, 15 bp, Homo sapiens
gcaggcagtatttta

SEQ ID NO: 1520342 - DNA, 15 bp, Homo sapiens
tgcaggcagtatttt

SEQ ID NO: 1520343 - DNA, 15 bp, Homo sapiens
ttgcaggcagtattt

SEQ ID NO: 1520344 - DNA, 15 bp, Homo sapiens
attgcaggcagtatt

SEQ ID NO: 1520345 - DNA, 15 bp, Homo sapiens
cattgcaggcagtat

SEQ ID NO: 1520346 - DNA, 15 bp, Homo sapiens
ccattgcaggcagta

SEQ ID NO: 1520347 - DNA, 15 bp, Homo sapiens
tccattgcaggcagt

SEQ ID NO: 1520348 - DNA, 15 bp, Homo sapiens
atccattgcaggcag

SEQ ID NO: 1520349 - DNA, 15 bp, Homo sapiens
aatccattgcaggca

SEQ ID NO: 1520350 - DNA, 15 bp, Homo sapiens
taatccattgcaggc

SEQ ID NO: 1520351 - DNA, 15 bp, Homo sapiens
ttaatccattgcagg

SEQ ID NO: 1520352 - DNA, 15 bp, Homo sapiens
attaatccattgcag

SEQ ID NO: 1520353 - DNA, 15 bp, Homo sapiens
aattaatccattgca

SEQ ID NO: 1520354 - DNA, 15 bp, Homo sapiens
taattaatccattgc

SEQ ID NO: 1520355 - DNA, 15 bp, Homo sapiens
gtaattaatccattg

SEQ ID NO: 1520356 - DNA, 15 bp, Homo sapiens
ggtaattaatccatt

SEQ ID NO: 1520357 - DNA, 15 bp, Homo sapiens
tggtaattaatccat

SEQ ID NO: 1520358 - DNA, 15 bp, Homo sapiens
ttggtaattaatcca

SEQ ID NO: 1520359 - DNA, 15 bp, Homo sapiens
cttggtaattaatcc

SEQ ID NO: 1520360 - DNA, 15 bp, Homo sapiens
tcttggtaattaatc

SEQ ID NO: 1520361 - DNA, 15 bp, Homo sapiens
ctcttggtaattaat

SEQ ID NO: 1520362 - DNA, 15 bp, Homo sapiens
actcttggtaattaa

SEQ ID NO: 1520363 - DNA, 15 bp, Homo sapiens
aactcttggtaatta

SEQ ID NO: 1520364 - DNA, 15 bp, Homo sapiens
taactcttggtaatt

SEQ ID NO: 1520365 - DNA, 15 bp, Homo sapiens
ttaactcttggtaat

SEQ ID NO: 1520366 - DNA, 15 bp, Homo sapiens
tttaactcttggtaa

SEQ ID NO: 1520367 - DNA, 15 bp, Homo sapiens
ttttaactcttggta

SEQ ID NO: 1520368 - DNA, 15 bp, Homo sapiens
tttttaactcttggt

SEQ ID NO: 1520369 - DNA, 15 bp, Homo sapiens
gtttttaactcttgg

SEQ ID NO: 1520370 - DNA, 15 bp, Homo sapiens
ggtttttaactcttg

SEQ ID NO: 1520371 - DNA, 15 bp, Homo sapiens
gggtttttaactctt

SEQ ID NO: 1520372 - DNA, 15 bp, Homo sapiens
tgggtttttaactct

SEQ ID NO: 1520373 - DNA, 15 bp, Homo sapiens
gtgggtttttaactc

SEQ ID NO: 1520374 - DNA, 15 bp, Homo sapiens
tgtgggtttttaact

SEQ ID NO: 1520375 - DNA, 15 bp, Homo sapiens
ttgtgggtttttaac

SEQ ID NO: 1520376 - DNA, 15 bp, Homo sapiens
tttgtgggtttttaa

SEQ ID NO: 1520377 - DNA, 15 bp, Homo sapiens
ctttgtgggttttta

SEQ ID NO: 1520378 - DNA, 15 bp, Homo sapiens
tctttgtgggttttt

SEQ ID NO: 1520379 - DNA, 15 bp, Homo sapiens
ttctttgtgggtttt

SEQ ID NO: 1520380 - DNA, 15 bp, Homo sapiens
attctttgtgggttt

SEQ ID NO: 1520381 - DNA, 15 bp, Homo sapiens
gattctttgtgggtt

SEQ ID NO: 1520382 - DNA, 15 bp, Homo sapiens
agattctttgtgggt

SEQ ID NO: 1520383 - DNA, 15 bp, Homo sapiens
aagattctttgtggg

SEQ ID NO: 1520384 - DNA, 15 bp, Homo sapiens
aaagattctttgtgg

SEQ ID NO: 1520385 - DNA, 15 bp, Homo sapiens
aaaagattctttgtg

SEQ ID NO: 1520386 - DNA, 15 bp, Homo sapiens
caaaagattctttgt

SEQ ID NO: 1520387 - DNA, 15 bp, Homo sapiens
acaaaagattctttg

SEQ ID NO: 1520388 - DNA, 15 bp, Homo sapiens
aacaaaagattcttt

SEQ ID NO: 1520389 - DNA, 15 bp, Homo sapiens
aaacaaaagattctt

SEQ ID NO: 1520390 - DNA, 15 bp, Homo sapiens
aaaacaaaagattct

SEQ ID NO: 1520391 - DNA, 15 bp, Homo sapiens
gaaaacaaaagattc

SEQ ID NO: 1520392 - DNA, 15 bp, Homo sapiens
tgaaaacaaaagatt

SEQ ID NO: 1520393 - DNA, 15 bp, Homo sapiens
ttgaaaacaaaagat

SEQ ID NO: 1520394 - DNA, 15 bp, Homo sapiens
cttgaaaacaaaaga

SEQ ID NO: 1520395 - DNA, 15 bp, Homo sapiens
acttgaaaacaaaag

SEQ ID NO: 1520396 - DNA, 15 bp, Homo sapiens
tacttgaaaacaaaa

SEQ ID NO: 1520397 - DNA, 15 bp, Homo sapiens
atacttgaaaacaaa

SEQ ID NO: 1520398 - DNA, 15 bp, Homo sapiens
tatacttgaaaacaa

SEQ ID NO: 1520399 - DNA, 15 bp, Homo sapiens
atatacttgaaaaca

SEQ ID NO: 1520400 - DNA, 15 bp, Homo sapiens
aatatacttgaaaac

SEQ ID NO: 1520401 - DNA, 15 bp, Homo sapiens
gaatatacttgaaaa

SEQ ID NO: 1520402 - DNA, 15 bp, Homo sapiens
agaatatacttgaaa

SEQ ID NO: 1520403 - DNA, 15 bp, Homo sapiens
cagaatatacttgaa

SEQ ID NO: 1520404 - DNA, 15 bp, Homo sapiens
tcagaatatacttga

SEQ ID NO: 1520405 - DNA, 15 bp, Homo sapiens
atcagaatatacttg

SEQ ID NO: 1520406 - DNA, 15 bp, Homo sapiens
aatcagaatatactt

SEQ ID NO: 1520407 - DNA, 15 bp, Homo sapiens
tatttaatcagaata

SEQ ID NO: 1520408 - DNA, 15 bp, Homo sapiens
ctatttaatcagaat

SEQ ID NO: 1520409 - DNA, 15 bp, Homo sapiens
actatttaatcagaa

SEQ ID NO: 1520410 - DNA, 15 bp, Homo sapiens
tactatttaatcaga

SEQ ID NO: 1520411 - DNA, 15 bp, Homo sapiens
gtactatttaatcag

SEQ ID NO: 1520412 - DNA, 15 bp, Homo sapiens
agtactatttaatca

SEQ ID NO: 1520413 - DNA, 15 bp, Homo sapiens
gagtactatttaatc

SEQ ID NO: 1520414 - DNA, 15 bp, Homo sapiens
tgagtactatttaat

SEQ ID NO: 1520415 - DNA, 15 bp, Homo sapiens
gtgagtactatttaa

SEQ ID NO: 1520416 - DNA, 15 bp, Homo sapiens
tgtgagtactattta

SEQ ID NO: 1520417 - DNA, 15 bp, Homo sapiens
ttgtgagtactattt

SEQ ID NO: 1520418 - DNA, 15 bp, Homo sapiens
gttgtgagtactatt

SEQ ID NO: 1520419 - DNA, 15 bp, Homo sapiens
tgttgtgagtactat

SEQ ID NO: 1520420 - DNA, 15 bp, Homo sapiens
atgttgtgagtacta

SEQ ID NO: 1520421 - DNA, 15 bp, Homo sapiens
catgttgtgagtact

SEQ ID NO: 1520422 - DNA, 15 bp, Homo sapiens
tcatgttgtgagtac

SEQ ID NO: 1520423 - DNA, 15 bp, Homo sapiens
atcatgttgtgagta

SEQ ID NO: 1520424 - DNA, 15 bp, Homo sapiens
tatcatgttgtgagt

SEQ ID NO: 1520425 - DNA, 15 bp, Homo sapiens
ttatcatgttgtgag

SEQ ID NO: 1520426 - DNA, 15 bp, Homo sapiens
gttatcatgttgtga

SEQ ID NO: 1520427 - DNA, 15 bp, Homo sapiens
agttatcatgttgtg

SEQ ID NO: 1520428 - DNA, 15 bp, Homo sapiens
cagttatcatgttgt

SEQ ID NO: 1520429 - DNA, 15 bp, Homo sapiens
ccagttatcatgttg

SEQ ID NO: 1520430 - DNA, 15 bp, Homo sapiens
cccagttatcatgtt

SEQ ID NO: 1520431 - DNA, 15 bp, Homo sapiens
tcccagttatcatgt

SEQ ID NO: 1520432 - DNA, 15 bp, Homo sapiens
ttcccagttatcatg

SEQ ID NO: 1520433 - DNA, 15 bp, Homo sapiens
gttcccagttatcat

SEQ ID NO: 1520434 - DNA, 15 bp, Homo sapiens
agttcccagttatca

SEQ ID NO: 1520435 - DNA, 15 bp, Homo sapiens
aagttcccagttatc

SEQ ID NO: 1520436 - DNA, 15 bp, Homo sapiens
aaagttcccagttat

SEQ ID NO: 1520437 - DNA, 15 bp, Homo sapiens
aaaagttcccagtta

SEQ ID NO: 1520438 - DNA, 15 bp, Homo sapiens
aaaaagttcccagtt

SEQ ID NO: 1520439 - DNA, 15 bp, Homo sapiens
aaaaaagttcccagt

SEQ ID NO: 1520440 - DNA, 15 bp, Homo sapiens
aaaaaaagttcccag

SEQ ID NO: 1520441 - DNA, 15 bp, Homo sapiens
taaaaaaagttccca

SEQ ID NO: 1520442 - DNA, 15 bp, Homo sapiens
ttaaaaaaagttccc

SEQ ID NO: 1520443 - DNA, 15 bp, Homo sapiens
tttaaaaaaagttcc

SEQ ID NO: 1520444 - DNA, 15 bp, Homo sapiens
ctttaaaaaaagttc

SEQ ID NO: 1520445 - DNA, 15 bp, Homo sapiens
cctttaaaaaaagtt

SEQ ID NO: 1520446 - DNA, 15 bp, Homo sapiens
tcctttaaaaaaagt

SEQ ID NO: 1520447 - DNA, 15 bp, Homo sapiens
ttcctttaaaaaaag

SEQ ID NO: 1520448 - DNA, 15 bp, Homo sapiens
cttcctttaaaaaaa

SEQ ID NO: 1520449 - DNA, 15 bp, Homo sapiens
tcttcctttaaaaaa

SEQ ID NO: 1520450 - DNA, 15 bp, Homo sapiens
ttcttcctttaaaaa

SEQ ID NO: 1520451 - DNA, 15 bp, Homo sapiens
tttcttcctttaaaa

SEQ ID NO: 1520452 - DNA, 15 bp, Homo sapiens
atttcttcctttaaa

SEQ ID NO: 1520453 - DNA, 15 bp, Homo sapiens
tatttcttcctttaa

SEQ ID NO: 1520454 - DNA, 15 bp, Homo sapiens
ttatttcttccttta

SEQ ID NO: 1520455 - DNA, 15 bp, Homo sapiens
tttatttcttccttt

SEQ ID NO: 1520456 - DNA, 15 bp, Homo sapiens
ttttatttcttcctt

SEQ ID NO: 1520457 - DNA, 15 bp, Homo sapiens
gttttatttcttcct

SEQ ID NO: 1520458 - DNA, 15 bp, Homo sapiens
agttttatttcttcc

SEQ ID NO: 1520459 - DNA, 15 bp, Homo sapiens
tagttttatttcttc

SEQ ID NO: 1520460 - DNA, 15 bp, Homo sapiens
atagttttatttctt

SEQ ID NO: 1520461 - DNA, 15 bp, Homo sapiens
tatagttttatttct

SEQ ID NO: 1520462 - DNA, 15 bp, Homo sapiens
ttatagttttatttc

SEQ ID NO: 1520463 - DNA, 15 bp, Homo sapiens
cttatagttttattt

SEQ ID NO: 1520464 - DNA, 15 bp, Homo sapiens
tcttatagttttatt

SEQ ID NO: 1520465 - DNA, 15 bp, Homo sapiens
ctcttatagttttat

SEQ ID NO: 1520466 - DNA, 15 bp, Homo sapiens
gctcttatagtttta

SEQ ID NO: 1520467 - DNA, 15 bp, Homo sapiens
ggctcttatagtttt

SEQ ID NO: 1520468 - DNA, 15 bp, Homo sapiens
aggctcttatagttt

SEQ ID NO: 1520469 - DNA, 15 bp, Homo sapiens
taggctcttatagtt

SEQ ID NO: 1520470 - DNA, 15 bp, Homo sapiens
ataggctcttatagt

SEQ ID NO: 1520471 - DNA, 15 bp, Homo sapiens
aataggctcttatag

SEQ ID NO: 1520472 - DNA, 15 bp, Homo sapiens
aaataggctcttata

SEQ ID NO: 1520473 - DNA, 15 bp, Homo sapiens
gaaataggctcttat

SEQ ID NO: 1520474 - DNA, 15 bp, Homo sapiens
agaaataggctctta

SEQ ID NO: 1520475 - DNA, 15 bp, Homo sapiens
cagaaataggctctt

SEQ ID NO: 1520476 - DNA, 15 bp, Homo sapiens
tcagaaataggctct

SEQ ID NO: 1520477 - DNA, 15 bp, Homo sapiens
ctcagaaataggctc

SEQ ID NO: 1520478 - DNA, 15 bp, Homo sapiens
tctcagaaataggct

SEQ ID NO: 1520479 - DNA, 15 bp, Homo sapiens
ttctcagaaataggc

SEQ ID NO: 1520480 - DNA, 15 bp, Homo sapiens
gttctcagaaatagg

SEQ ID NO: 1520481 - DNA, 15 bp, Homo sapiens
aagttctcagaaata

SEQ ID NO: 1520482 - DNA, 15 bp, Homo sapiens
aaagttctcagaaat

SEQ ID NO: 1520483 - DNA, 15 bp, Homo sapiens
aaaagttctcagaaa

SEQ ID NO: 1520484 - DNA, 15 bp, Homo sapiens
taaaagttctcagaa

SEQ ID NO: 1520485 - DNA, 15 bp, Homo sapiens
ttaaaagttctcaga

SEQ ID NO: 1520486 - DNA, 15 bp, Homo sapiens
tttaaaagttctcag

SEQ ID NO: 1520487 - DNA, 15 bp, Homo sapiens
ttttaaaagttctca

SEQ ID NO: 1520488 - DNA, 15 bp, Homo sapiens
tttttaaaagttctc

SEQ ID NO: 1520489 - DNA, 15 bp, Homo sapiens
atttttaaaagttct

SEQ ID NO: 1520490 - DNA, 15 bp, Homo sapiens
tatttttaaaagttc

SEQ ID NO: 1520491 - DNA, 15 bp, Homo sapiens
atatttttaaaagtt

SEQ ID NO: 1520492 - DNA, 15 bp, Homo sapiens
catatttttaaaagt

SEQ ID NO: 1520493 - DNA, 15 bp, Homo sapiens
gcatatttttaaaag

SEQ ID NO: 1520494 - DNA, 15 bp, Homo sapiens
agcatatttttaaaa

SEQ ID NO: 1520495 - DNA, 15 bp, Homo sapiens
cagcatatttttaaa

SEQ ID NO: 1520496 - DNA, 15 bp, Homo sapiens
acagcatatttttaa

SEQ ID NO: 1520497 - DNA, 15 bp, Homo sapiens
cacagcatattttta

SEQ ID NO: 1520498 - DNA, 15 bp, Homo sapiens
acacagcatattttt

SEQ ID NO: 1520499 - DNA, 15 bp, Homo sapiens
tacacagcatatttt

SEQ ID NO: 1520500 - DNA, 15 bp, Homo sapiens
ttacacagcatattt

SEQ ID NO: 1520501 - DNA, 15 bp, Homo sapiens
cttacacagcatatt

SEQ ID NO: 1520502 - DNA, 15 bp, Homo sapiens
tcttacacagcatat

SEQ ID NO: 1520503 - DNA, 15 bp, Homo sapiens
gtcttacacagcata

SEQ ID NO: 1520504 - DNA, 15 bp, Homo sapiens
tgtcttacacagcat

SEQ ID NO: 1520505 - DNA, 15 bp, Homo sapiens
ctgtcttacacagca

SEQ ID NO: 1520506 - DNA, 15 bp, Homo sapiens
gctgtcttacacagc

SEQ ID NO: 1520507 - DNA, 15 bp, Homo sapiens
tgctgtcttacacag

SEQ ID NO: 1520508 - DNA, 15 bp, Homo sapiens
atgctgtcttacaca

SEQ ID NO: 1520509 - DNA, 15 bp, Homo sapiens
gatgctgtcttacac

SEQ ID NO: 1520510 - DNA, 15 bp, Homo sapiens
tgatgctgtcttaca

SEQ ID NO: 1520511 - DNA, 15 bp, Homo sapiens
ctgatgctgtcttac

SEQ ID NO: 1520512 - DNA, 15 bp, Homo sapiens
cctgatgctgtctta

SEQ ID NO: 1520513 - DNA, 15 bp, Homo sapiens
tcctgatgctgtctt

SEQ ID NO: 1520514 - DNA, 15 bp, Homo sapiens
atcctgatgctgtct

SEQ ID NO: 1520515 - DNA, 15 bp, Homo sapiens
catcctgatgctgtc

SEQ ID NO: 1520516 - DNA, 15 bp, Homo sapiens
tcatcctgatgctgt

SEQ ID NO: 1520517 - DNA, 15 bp, Homo sapiens
atcatcctgatgctg

SEQ ID NO: 1520518 - DNA, 15 bp, Homo sapiens
aatcatcctgatgct

SEQ ID NO: 1520519 - DNA, 15 bp, Homo sapiens
aaatcatcctgatgc

SEQ ID NO: 1520520 - DNA, 15 bp, Homo sapiens
taaatcatcctgatg

SEQ ID NO: 1520521 - DNA, 15 bp, Homo sapiens
ttaaatcatcctgat

SEQ ID NO: 1520522 - DNA, 15 bp, Homo sapiens
tttaaatcatcctga

SEQ ID NO: 1520523 - DNA, 15 bp, Homo sapiens
ttttaaatcatcctg

SEQ ID NO: 1520524 - DNA, 15 bp, Homo sapiens
tttttaaatcatcct

SEQ ID NO: 1520525 - DNA, 15 bp, Homo sapiens
ttttttaaatcatcc

SEQ ID NO: 1520526 - DNA, 15 bp, Homo sapiens
attttttaaatcatc

SEQ ID NO: 1520527 - DNA, 15 bp, Homo sapiens
tattttttaaatcat

SEQ ID NO: 1520528 - DNA, 15 bp, Homo sapiens
ttattttttaaatca

SEQ ID NO: 1520529 - DNA, 15 bp, Homo sapiens
attattttttaaatc

SEQ ID NO: 1520530 - DNA, 15 bp, Homo sapiens
aattattttttaaat

SEQ ID NO: 1520531 - DNA, 15 bp, Homo sapiens
gaattattttttaaa

SEQ ID NO: 1520532 - DNA, 15 bp, Homo sapiens
tgaattattttttaa

SEQ ID NO: 1520533 - DNA, 15 bp, Homo sapiens
ttgaattatttttta

SEQ ID NO: 1520534 - DNA, 15 bp, Homo sapiens
tttgaattatttttt

SEQ ID NO: 1520535 - DNA, 15 bp, Homo sapiens
ctttgaattattttt

SEQ ID NO: 1520536 - DNA, 15 bp, Homo sapiens
cctttgaattatttt

SEQ ID NO: 1520537 - DNA, 15 bp, Homo sapiens
tcctttgaattattt

SEQ ID NO: 1520538 - DNA, 15 bp, Homo sapiens
ctcctttgaattatt

SEQ ID NO: 1520539 - DNA, 15 bp, Homo sapiens
actcctttgaattat

SEQ ID NO: 1520540 - DNA, 15 bp, Homo sapiens
cactcctttgaatta

SEQ ID NO: 1520541 - DNA, 15 bp, Homo sapiens
ccactcctttgaatt

SEQ ID NO: 1520542 - DNA, 15 bp, Homo sapiens
accactcctttgaat

SEQ ID NO: 1520543 - DNA, 15 bp, Homo sapiens
caccactcctttgaa

SEQ ID NO: 1520544 - DNA, 15 bp, Homo sapiens
tcaccactcctttga

SEQ ID NO: 1520545 - DNA, 15 bp, Homo sapiens
ttcaccactcctttg

SEQ ID NO: 1520546 - DNA, 15 bp, Homo sapiens
tttcaccactccttt

SEQ ID NO: 1520547 - DNA, 15 bp, Homo sapiens
ttttcaccactcctt

SEQ ID NO: 1520548 - DNA, 15 bp, Homo sapiens
tttttcaccactcct

SEQ ID NO: 1520549 - DNA, 15 bp, Homo sapiens
atttttcaccactcc

SEQ ID NO: 1520550 - DNA, 15 bp, Homo sapiens
gatttttcaccactc

SEQ ID NO: 1520551 - DNA, 15 bp, Homo sapiens
agatttttcaccact

SEQ ID NO: 1520552 - DNA, 15 bp, Homo sapiens
gagatttttcaccac

SEQ ID NO: 1520553 - DNA, 15 bp, Homo sapiens
agagatttttcacca

SEQ ID NO: 1520554 - DNA, 15 bp, Homo sapiens
tagagatttttcacc

SEQ ID NO: 1520555 - DNA, 15 bp, Homo sapiens
atagagatttttcac

SEQ ID NO: 1520556 - DNA, 15 bp, Homo sapiens
catagagatttttca

SEQ ID NO: 1520557 - DNA, 15 bp, Homo sapiens
tcatagagatttttc

SEQ ID NO: 1520558 - DNA, 15 bp, Homo sapiens
ttcatagagattttt

SEQ ID NO: 1520559 - DNA, 15 bp, Homo sapiens
cttcatagagatttt

SEQ ID NO: 1520560 - DNA, 15 bp, Homo sapiens
tcttcatagagattt

SEQ ID NO: 1520561 - DNA, 15 bp, Homo sapiens
atcttcatagagatt

SEQ ID NO: 1520562 - DNA, 15 bp, Homo sapiens
catcttcatagagat

SEQ ID NO: 1520563 - DNA, 15 bp, Homo sapiens
ccatcttcatagaga

SEQ ID NO: 1520564 - DNA, 15 bp, Homo sapiens
accatcttcatagag

SEQ ID NO: 1520565 - DNA, 15 bp, Homo sapiens
caccatcttcataga

SEQ ID NO: 1520566 - DNA, 15 bp, Homo sapiens
gcaccatcttcatag

SEQ ID NO: 1520567 - DNA, 15 bp, Homo sapiens
tgcaccatcttcata

SEQ ID NO: 1520568 - DNA, 15 bp, Homo sapiens
ttgcaccatcttcat

SEQ ID NO: 1520569 - DNA, 15 bp, Homo sapiens
cttgcaccatcttca

SEQ ID NO: 1520570 - DNA, 15 bp, Homo sapiens
ccttgcaccatcttc

SEQ ID NO: 1520571 - DNA, 15 bp, Homo sapiens
cccttgcaccatctt

SEQ ID NO: 1520572 - DNA, 15 bp, Homo sapiens
ccccttgcaccatct

SEQ ID NO: 1520573 - DNA, 15 bp, Homo sapiens
accccttgcaccatc

SEQ ID NO: 1520574 - DNA, 15 bp, Homo sapiens
caccccttgcaccat

SEQ ID NO: 1520575 - DNA, 15 bp, Homo sapiens
ccaccccttgcacca

SEQ ID NO: 1520576 - DNA, 15 bp, Homo sapiens
gccaccccttgcacc

SEQ ID NO: 1520577 - DNA, 15 bp, Homo sapiens
ggccaccccttgcac

SEQ ID NO: 1520578 - DNA, 15 bp, Homo sapiens
aggccaccccttgca

SEQ ID NO: 1520579 - DNA, 15 bp, Homo sapiens
caggccaccccttgc

SEQ ID NO: 1520580 - DNA, 15 bp, Homo sapiens
ccaggccaccccttg

SEQ ID NO: 1520581 - DNA, 15 bp, Homo sapiens
tccaggccacccctt

SEQ ID NO: 1520582 - DNA, 15 bp, Homo sapiens
ttccaggccacccct

SEQ ID NO: 1520583 - DNA, 15 bp, Homo sapiens
tttccaggccacccc

SEQ ID NO: 1520584 - DNA, 15 bp, Homo sapiens
ttttccaggccaccc

SEQ ID NO: 1520585 - DNA, 15 bp, Homo sapiens
gttttccaggccacc

SEQ ID NO: 1520586 - DNA, 15 bp, Homo sapiens
cgttttccaggccac

SEQ ID NO: 1520587 - DNA, 15 bp, Homo sapiens
ccgttttccaggcca

SEQ ID NO: 1520588 - DNA, 15 bp, Homo sapiens
accgttttccaggcc

SEQ ID NO: 1520589 - DNA, 15 bp, Homo sapiens
caccgttttccaggc

SEQ ID NO: 1520590 - DNA, 15 bp, Homo sapiens
gcaccgttttccagg

SEQ ID NO: 1520591 - DNA, 15 bp, Homo sapiens
agcaccgttttccag

SEQ ID NO: 1520592 - DNA, 15 bp, Homo sapiens
aagcaccgttttcca

SEQ ID NO: 1520593 - DNA, 15 bp, Homo sapiens
caagcaccgttttcc

SEQ ID NO: 1520594 - DNA, 15 bp, Homo sapiens
acaagcaccgttttc

SEQ ID NO: 1520595 - DNA, 15 bp, Homo sapiens
aacaagcaccgtttt

SEQ ID NO: 1520596 - DNA, 15 bp, Homo sapiens
gaacaagcaccgttt

SEQ ID NO: 1520597 - DNA, 15 bp, Homo sapiens
tgaacaagcaccgtt

SEQ ID NO: 1520598 - DNA, 15 bp, Homo sapiens
atgaacaagcaccgt

SEQ ID NO: 1520599 - DNA, 15 bp, Homo sapiens
catgaacaagcaccg

SEQ ID NO: 1520600 - DNA, 15 bp, Homo sapiens
gcatgaacaagcacc

SEQ ID NO: 1520601 - DNA, 15 bp, Homo sapiens
agcatgaacaagcac

SEQ ID NO: 1520602 - DNA, 15 bp, Homo sapiens
cagcatgaacaagca

SEQ ID NO: 1520603 - DNA, 15 bp, Homo sapiens
gcagcatgaacaagc

SEQ ID NO: 1520604 - DNA, 15 bp, Homo sapiens
ggcagcatgaacaag

SEQ ID NO: 1520605 - DNA, 15 bp, Homo sapiens
gggcagcatgaacaa

SEQ ID NO: 1520606 - DNA, 15 bp, Homo sapiens
agggcagcatgaaca

SEQ ID NO: 1520607 - DNA, 15 bp, Homo sapiens
gagggcagcatgaac

SEQ ID NO: 1520608 - DNA, 15 bp, Homo sapiens
tgagggcagcatgaa

SEQ ID NO: 1520609 - DNA, 15 bp, Homo sapiens
ctgagggcagcatga

SEQ ID NO: 1520610 - DNA, 15 bp, Homo sapiens
actgagggcagcatg

SEQ ID NO: 1520611 - DNA, 15 bp, Homo sapiens
aactgagggcagcat

SEQ ID NO: 1520612 - DNA, 15 bp, Homo sapiens
caactgagggcagca

SEQ ID NO: 1520613 - DNA, 15 bp, Homo sapiens
tcaactgagggcagc

SEQ ID NO: 1520614 - DNA, 15 bp, Homo sapiens
ctcaactgagggcag

SEQ ID NO: 1520615 - DNA, 15 bp, Homo sapiens
cctcaactgagggca

SEQ ID NO: 1520616 - DNA, 15 bp, Homo sapiens
gcctcaactgagggc

SEQ ID NO: 1520617 - DNA, 15 bp, Homo sapiens
agcctcaactgaggg

SEQ ID NO: 1520618 - DNA, 15 bp, Homo sapiens
tagcctcaactgagg

SEQ ID NO: 1520619 - DNA, 15 bp, Homo sapiens
ctagcctcaactgag

SEQ ID NO: 1520620 - DNA, 15 bp, Homo sapiens
actagcctcaactga

SEQ ID NO: 1520621 - DNA, 15 bp, Homo sapiens
aactagcctcaactg

SEQ ID NO: 1520622 - DNA, 15 bp, Homo sapiens
gaactagcctcaact

SEQ ID NO: 1520623 - DNA, 15 bp, Homo sapiens
ggaactagcctcaac

SEQ ID NO: 1520624 - DNA, 15 bp, Homo sapiens
aggaactagcctcaa

SEQ ID NO: 1520625 - DNA, 15 bp, Homo sapiens
taggaactagcctca

SEQ ID NO: 1520626 - DNA, 15 bp, Homo sapiens
ctaggaactagcctc

SEQ ID NO: 1520627 - DNA, 15 bp, Homo sapiens
tctaggaactagcct

SEQ ID NO: 1520628 - DNA, 15 bp, Homo sapiens
ttctaggaactagcc

SEQ ID NO: 1520629 - DNA, 15 bp, Homo sapiens
tttctaggaactagc

SEQ ID NO: 1520630 - DNA, 15 bp, Homo sapiens
ctttctaggaactag

SEQ ID NO: 1520631 - DNA, 15 bp, Homo sapiens
gctttctaggaacta

SEQ ID NO: 1520632 - DNA, 15 bp, Homo sapiens
ggctttctaggaact

SEQ ID NO: 1520633 - DNA, 15 bp, Homo sapiens
aggctttctaggaac

SEQ ID NO: 1520634 - DNA, 15 bp, Homo sapiens
aaggctttctaggaa

SEQ ID NO: 1520635 - DNA, 15 bp, Homo sapiens
aaaggctttctagga

SEQ ID NO: 1520636 - DNA, 15 bp, Homo sapiens
gaaaggctttctagg

SEQ ID NO: 1520637 - DNA, 15 bp, Homo sapiens
agaaaggctttctag

SEQ ID NO: 1520638 - DNA, 15 bp, Homo sapiens
cagaaaggctttcta

SEQ ID NO: 1520639 - DNA, 15 bp, Homo sapiens
ccagaaaggctttct

SEQ ID NO: 1520640 - DNA, 15 bp, Homo sapiens
tccagaaaggctttc

SEQ ID NO: 1520641 - DNA, 15 bp, Homo sapiens
ttccagaaaggcttt

SEQ ID NO: 1520642 - DNA, 15 bp, Homo sapiens
tttccagaaaggctt

SEQ ID NO: 1520643 - DNA, 15 bp, Homo sapiens
atttccagaaaggct

SEQ ID NO: 1520644 - DNA, 15 bp, Homo sapiens
catttccagaaaggc

SEQ ID NO: 1520645 - DNA, 15 bp, Homo sapiens
acatttccagaaagg

SEQ ID NO: 1520646 - DNA, 15 bp, Homo sapiens
aacatttccagaaag

SEQ ID NO: 1520647 - DNA, 15 bp, Homo sapiens
caacatttccagaaa

SEQ ID NO: 1520648 - DNA, 15 bp, Homo sapiens
acaacatttccagaa

SEQ ID NO: 1520649 - DNA, 15 bp, Homo sapiens
cacaacatttccaga

SEQ ID NO: 1520650 - DNA, 15 bp, Homo sapiens
tcacaacatttccag

SEQ ID NO: 1520651 - DNA, 15 bp, Homo sapiens
ctcacaacatttcca

SEQ ID NO: 1520652 - DNA, 15 bp, Homo sapiens
gctcacaacatttcc

SEQ ID NO: 1520653 - DNA, 15 bp, Homo sapiens
agctcacaacatttc

SEQ ID NO: 1520654 - DNA, 15 bp, Homo sapiens
gagctcacaacattt

SEQ ID NO: 1520655 - DNA, 15 bp, Homo sapiens
agagctcacaacatt

SEQ ID NO: 1520656 - DNA, 15 bp, Homo sapiens
aagagctcacaacat

SEQ ID NO: 1520657 - DNA, 15 bp, Homo sapiens
gaagagctcacaaca

SEQ ID NO: 1520658 - DNA, 15 bp, Homo sapiens
ggaagagctcacaac

SEQ ID NO: 1520659 - DNA, 15 bp, Homo sapiens
aggaagagctcacaa

SEQ ID NO: 1520660 - DNA, 15 bp, Homo sapiens
aaggaagagctcaca

SEQ ID NO: 1520661 - DNA, 15 bp, Homo sapiens
taaggaagagctcac

SEQ ID NO: 1520662 - DNA, 15 bp, Homo sapiens
ttaaggaagagctca

SEQ ID NO: 1520663 - DNA, 15 bp, Homo sapiens
attaaggaagagctc

SEQ ID NO: 1520664 - DNA, 15 bp, Homo sapiens
tattaaggaagagct

SEQ ID NO: 1520665 - DNA, 15 bp, Homo sapiens
ttattaaggaagagc

SEQ ID NO: 1520666 - DNA, 15 bp, Homo sapiens
attattaaggaagag

SEQ ID NO: 1520667 - DNA, 15 bp, Homo sapiens
tattattaaggaaga

SEQ ID NO: 1520668 - DNA, 15 bp, Homo sapiens
ctattattaaggaag

SEQ ID NO: 1520669 - DNA, 15 bp, Homo sapiens
cctattattaaggaa

SEQ ID NO: 1520670 - DNA, 15 bp, Homo sapiens
acctattattaagga

SEQ ID NO: 1520671 - DNA, 15 bp, Homo sapiens
tacctattattaagg

SEQ ID NO: 1520672 - DNA, 15 bp, Homo sapiens
atacctattattaag

SEQ ID NO: 1520673 - DNA, 15 bp, Homo sapiens
catacctattattaa

SEQ ID NO: 1520674 - DNA, 15 bp, Homo sapiens
tcatacctattatta

SEQ ID NO: 1520675 - DNA, 15 bp, Homo sapiens
atcatacctattatt

SEQ ID NO: 1520676 - DNA, 15 bp, Homo sapiens
catcatacctattat

SEQ ID NO: 1520677 - DNA, 15 bp, Homo sapiens
gcatcatacctatta

SEQ ID NO: 1520678 - DNA, 15 bp, Homo sapiens
agcatcatacctatt

SEQ ID NO: 1520679 - DNA, 15 bp, Homo sapiens
aagcatcatacctat

SEQ ID NO: 1520680 - DNA, 15 bp, Homo sapiens
caagcatcataccta

SEQ ID NO: 1520681 - DNA, 15 bp, Homo sapiens
gcaagcatcatacct

SEQ ID NO: 1520682 - DNA, 15 bp, Homo sapiens
ggcaagcatcatacc

SEQ ID NO: 1520683 - DNA, 15 bp, Homo sapiens
aggcaagcatcatac

SEQ ID NO: 1520684 - DNA, 15 bp, Homo sapiens
aaggcaagcatcata

SEQ ID NO: 1520685 - DNA, 15 bp, Homo sapiens
caaggcaagcatcat

SEQ ID NO: 1520686 - DNA, 15 bp, Homo sapiens
gcaaggcaagcatca

SEQ ID NO: 1520687 - DNA, 15 bp, Homo sapiens
agcaaggcaagcatc

SEQ ID NO: 1520688 - DNA, 15 bp, Homo sapiens
aagcaaggcaagcat

SEQ ID NO: 1520689 - DNA, 15 bp, Homo sapiens
aaagcaaggcaagca

SEQ ID NO: 1520690 - DNA, 15 bp, Homo sapiens
gaaagcaaggcaagc

SEQ ID NO: 1520691 - DNA, 15 bp, Homo sapiens
ggaaagcaaggcaag

SEQ ID NO: 1520692 - DNA, 15 bp, Homo sapiens
gggaaagcaaggcaa

SEQ ID NO: 1520693 - DNA, 15 bp, Homo sapiens
agggaaagcaaggca

SEQ ID NO: 1520694 - DNA, 15 bp, Homo sapiens
tagggaaagcaaggc

SEQ ID NO: 1520695 - DNA, 15 bp, Homo sapiens
gtagggaaagcaagg

SEQ ID NO: 1520696 - DNA, 15 bp, Homo sapiens
ggtagggaaagcaag

SEQ ID NO: 1520697 - DNA, 15 bp, Homo sapiens
tggtagggaaagcaa

SEQ ID NO: 1520698 - DNA, 15 bp, Homo sapiens
atggtagggaaagca

SEQ ID NO: 1520699 - DNA, 15 bp, Homo sapiens
aatggtagggaaagc

SEQ ID NO: 1520700 - DNA, 15 bp, Homo sapiens
caatggtagggaaag

SEQ ID NO: 1520701 - DNA, 15 bp, Homo sapiens
acaatggtagggaaa

SEQ ID NO: 1520702 - DNA, 15 bp, Homo sapiens
gacaatggtagggaa

SEQ ID NO: 1520703 - DNA, 15 bp, Homo sapiens
agacaatggtaggga

SEQ ID NO: 1520704 - DNA, 15 bp, Homo sapiens
aagacaatggtaggg

SEQ ID NO: 1520705 - DNA, 15 bp, Homo sapiens
aaagacaatggtagg

SEQ ID NO: 1520706 - DNA, 15 bp, Homo sapiens
aaaagacaatggtag

SEQ ID NO: 1520707 - DNA, 15 bp, Homo sapiens
gaaaagacaatggta

SEQ ID NO: 1520708 - DNA, 15 bp, Homo sapiens
agaaaagacaatggt

SEQ ID NO: 1520709 - DNA, 15 bp, Homo sapiens
aagaaaagacaatgg

SEQ ID NO: 1520710 - DNA, 15 bp, Homo sapiens
aaagaaaagacaatg

SEQ ID NO: 1520711 - DNA, 15 bp, Homo sapiens
aaaagaaaagacaat

SEQ ID NO: 1520712 - DNA, 15 bp, Homo sapiens
aaaaagaaaagacaa

SEQ ID NO: 1520713 - DNA, 15 bp, Homo sapiens
aaaaaagaaaagaca

SEQ ID NO: 1520714 - DNA, 15 bp, Homo sapiens
caaaaaagaaaagac

SEQ ID NO: 1520715 - DNA, 15 bp, Homo sapiens
gcaaaaaagaaaaga

SEQ ID NO: 1520716 - DNA, 15 bp, Homo sapiens
agcaaaaaagaaaag

SEQ ID NO: 1520717 - DNA, 15 bp, Homo sapiens
aagcaaaaaagaaaa

SEQ ID NO: 1520718 - DNA, 15 bp, Homo sapiens
gaagcaaaaaagaaa

SEQ ID NO: 1520719 - DNA, 15 bp, Homo sapiens
tgaagcaaaaaagaa

SEQ ID NO: 1520720 - DNA, 15 bp, Homo sapiens
atgaagcaaaaaaga

SEQ ID NO: 1520721 - DNA, 15 bp, Homo sapiens
aatgaagcaaaaaag

SEQ ID NO: 1520722 - DNA, 15 bp, Homo sapiens
aaatgaagcaaaaaa

SEQ ID NO: 1520723 - DNA, 15 bp, Homo sapiens
aaaatgaagcaaaaa

SEQ ID NO: 1520724 - DNA, 15 bp, Homo sapiens
taaaatgaagcaaaa

SEQ ID NO: 1520725 - DNA, 15 bp, Homo sapiens
gtaaaatgaagcaaa

SEQ ID NO: 1520726 - DNA, 15 bp, Homo sapiens
ggtaaaatgaagcaa

SEQ ID NO: 1520727 - DNA, 15 bp, Homo sapiens
aggtaaaatgaagca

SEQ ID NO: 1520728 - DNA, 15 bp, Homo sapiens
aaggtaaaatgaagc

SEQ ID NO: 1520729 - DNA, 15 bp, Homo sapiens
gaaggtaaaatgaag

SEQ ID NO: 1520730 - DNA, 15 bp, Homo sapiens
ggaaggtaaaatgaa

SEQ ID NO: 1520731 - DNA, 15 bp, Homo sapiens
aggaaggtaaaatga

SEQ ID NO: 1520732 - DNA, 15 bp, Homo sapiens
aaggaaggtaaaatg

SEQ ID NO: 1520733 - DNA, 15 bp, Homo sapiens
aaaggaaggtaaaat

SEQ ID NO: 1520734 - DNA, 15 bp, Homo sapiens
aaaaggaaggtaaaa

SEQ ID NO: 1520735 - DNA, 15 bp, Homo sapiens
caaaaggaaggtaaa

SEQ ID NO: 1520736 - DNA, 15 bp, Homo sapiens
tcaaaaggaaggtaa

SEQ ID NO: 1520737 - DNA, 15 bp, Homo sapiens
ttcaaaaggaaggta

SEQ ID NO: 1520738 - DNA, 15 bp, Homo sapiens
tttcaaaaggaaggt

SEQ ID NO: 1520739 - DNA, 15 bp, Homo sapiens
ttttcaaaaggaagg

SEQ ID NO: 1520740 - DNA, 15 bp, Homo sapiens
gttttcaaaaggaag

SEQ ID NO: 1520741 - DNA, 15 bp, Homo sapiens
agttttcaaaaggaa

SEQ ID NO: 1520742 - DNA, 15 bp, Homo sapiens
gagttttcaaaagga

SEQ ID NO: 1520743 - DNA, 15 bp, Homo sapiens
tgagttttcaaaagg

SEQ ID NO: 1520744 - DNA, 15 bp, Homo sapiens
ttgagttttcaaaag

SEQ ID NO: 1520745 - DNA, 15 bp, Homo sapiens
attgagttttcaaaa

SEQ ID NO: 1520746 - DNA, 15 bp, Homo sapiens
gattgagttttcaaa

SEQ ID NO: 1520747 - DNA, 15 bp, Homo sapiens
agattgagttttcaa

SEQ ID NO: 1520748 - DNA, 15 bp, Homo sapiens
cagattgagttttca

SEQ ID NO: 1520749 - DNA, 15 bp, Homo sapiens
acagattgagttttc

SEQ ID NO: 1520750 - DNA, 15 bp, Homo sapiens
cacagattgagtttt

SEQ ID NO: 1520751 - DNA, 15 bp, Homo sapiens
tcacagattgagttt

SEQ ID NO: 1520752 - DNA, 15 bp, Homo sapiens
gtcacagattgagtt

SEQ ID NO: 1520753 - DNA, 15 bp, Homo sapiens
cgtcacagattgagt

SEQ ID NO: 1520754 - DNA, 15 bp, Homo sapiens
acgtcacagattgag

SEQ ID NO: 1520755 - DNA, 15 bp, Homo sapiens
aacgtcacagattga

SEQ ID NO: 1520756 - DNA, 15 bp, Homo sapiens
taacgtcacagattg

SEQ ID NO: 1520757 - DNA, 15 bp, Homo sapiens
ataacgtcacagatt

SEQ ID NO: 1520758 - DNA, 15 bp, Homo sapiens
aataacgtcacagat

SEQ ID NO: 1520759 - DNA, 15 bp, Homo sapiens
aaataacgtcacaga

SEQ ID NO: 1520760 - DNA, 15 bp, Homo sapiens
caaataacgtcacag

SEQ ID NO: 1520761 - DNA, 15 bp, Homo sapiens
ccaaataacgtcaca

SEQ ID NO: 1520762 - DNA, 15 bp, Homo sapiens
accaaataacgtcac

SEQ ID NO: 1520763 - DNA, 15 bp, Homo sapiens
gaccaaataacgtca

SEQ ID NO: 1520764 - DNA, 15 bp, Homo sapiens
tgaccaaataacgtc

SEQ ID NO: 1520765 - DNA, 15 bp, Homo sapiens
ctgaccaaataacgt

SEQ ID NO: 1520766 - DNA, 15 bp, Homo sapiens
actgaccaaataacg

SEQ ID NO: 1520767 - DNA, 15 bp, Homo sapiens
aactgaccaaataac

SEQ ID NO: 1520768 - DNA, 15 bp, Homo sapiens
aaactgaccaaataa

SEQ ID NO: 1520769 - DNA, 15 bp, Homo sapiens
aaaactgaccaaata

SEQ ID NO: 1520770 - DNA, 15 bp, Homo sapiens
taaaactgaccaaat

SEQ ID NO: 1520771 - DNA, 15 bp, Homo sapiens
gtaaaactgaccaaa

SEQ ID NO: 1520772 - DNA, 15 bp, Homo sapiens
agtaaaactgaccaa

SEQ ID NO: 1520773 - DNA, 15 bp, Homo sapiens
aagtaaaactgacca

SEQ ID NO: 1520774 - DNA, 15 bp, Homo sapiens
aaagtaaaactgacc

SEQ ID NO: 1520775 - DNA, 15 bp, Homo sapiens
aaaagtaaaactgac

SEQ ID NO: 1520776 - DNA, 15 bp, Homo sapiens
aaaaagtaaaactga

SEQ ID NO: 1520777 - DNA, 15 bp, Homo sapiens
gaaaaagtaaaactg

SEQ ID NO: 1520778 - DNA, 15 bp, Homo sapiens
ggaaaaagtaaaact

SEQ ID NO: 1520779 - DNA, 15 bp, Homo sapiens
gggaaaaagtaaaac

SEQ ID NO: 1520780 - DNA, 15 bp, Homo sapiens
tgggaaaaagtaaaa

SEQ ID NO: 1520781 - DNA, 15 bp, Homo sapiens
atgggaaaaagtaaa

SEQ ID NO: 1520782 - DNA, 15 bp, Homo sapiens
aatgggaaaaagtaa

SEQ ID NO: 1520783 - DNA, 15 bp, Homo sapiens
aaatgggaaaaagta

SEQ ID NO: 1520784 - DNA, 15 bp, Homo sapiens
taaatgggaaaaagt

SEQ ID NO: 1520785 - DNA, 15 bp, Homo sapiens
gtaaatgggaaaaag

SEQ ID NO: 1520786 - DNA, 15 bp, Homo sapiens
ggtaaatgggaaaaa

SEQ ID NO: 1520787 - DNA, 15 bp, Homo sapiens
tggtaaatgggaaaa

SEQ ID NO: 1520788 - DNA, 15 bp, Homo sapiens
atggtaaatgggaaa

SEQ ID NO: 1520789 - DNA, 15 bp, Homo sapiens
catggtaaatgggaa

SEQ ID NO: 1520790 - DNA, 15 bp, Homo sapiens
tcatggtaaatggga

SEQ ID NO: 1520791 - DNA, 15 bp, Homo sapiens
gtcatggtaaatggg

SEQ ID NO: 1520792 - DNA, 15 bp, Homo sapiens
tgtcatggtaaatgg

SEQ ID NO: 1520793 - DNA, 15 bp, Homo sapiens
atgtcatggtaaatg

SEQ ID NO: 1520794 - DNA, 15 bp, Homo sapiens
tatgtcatggtaaat

SEQ ID NO: 1520795 - DNA, 15 bp, Homo sapiens
gtatgtcatggtaaa

SEQ ID NO: 1520796 - DNA, 15 bp, Homo sapiens
tgtatgtcatggtaa

SEQ ID NO: 1520797 - DNA, 15 bp, Homo sapiens
atgtatgtcatggta

SEQ ID NO: 1520798 - DNA, 15 bp, Homo sapiens
aatgtatgtcatggt

SEQ ID NO: 1520799 - DNA, 15 bp, Homo sapiens
gaatgtatgtcatgg

SEQ ID NO: 1520800 - DNA, 15 bp, Homo sapiens
tgaatgtatgtcatg

SEQ ID NO: 1520801 - DNA, 15 bp, Homo sapiens
atgaatgtatgtcat

SEQ ID NO: 1520802 - DNA, 15 bp, Homo sapiens
catgaatgtatgtca

SEQ ID NO: 1520803 - DNA, 15 bp, Homo sapiens
ccatgaatgtatgtc

SEQ ID NO: 1520804 - DNA, 15 bp, Homo sapiens
accatgaatgtatgt

SEQ ID NO: 1520805 - DNA, 15 bp, Homo sapiens
taccatgaatgtatg

SEQ ID NO: 1520806 - DNA, 15 bp, Homo sapiens
ttaccatgaatgtat

SEQ ID NO: 1520807 - DNA, 15 bp, Homo sapiens
attaccatgaatgta

SEQ ID NO: 1520808 - DNA, 15 bp, Homo sapiens
aattaccatgaatgt

SEQ ID NO: 1520809 - DNA, 15 bp, Homo sapiens
caattaccatgaatg

SEQ ID NO: 1520810 - DNA, 15 bp, Homo sapiens
tcaattaccatgaat

SEQ ID NO: 1520811 - DNA, 15 bp, Homo sapiens
ctcaattaccatgaa

SEQ ID NO: 1520812 - DNA, 15 bp, Homo sapiens
gctcaattaccatga

SEQ ID NO: 1520813 - DNA, 15 bp, Homo sapiens
ggctcaattaccatg

SEQ ID NO: 1520814 - DNA, 15 bp, Homo sapiens
aggctcaattaccat

SEQ ID NO: 1520815 - DNA, 15 bp, Homo sapiens
aaggctcaattacca

SEQ ID NO: 1520816 - DNA, 15 bp, Homo sapiens
taaggctcaattacc

SEQ ID NO: 1520817 - DNA, 15 bp, Homo sapiens
ctaaggctcaattac

SEQ ID NO: 1520818 - DNA, 15 bp, Homo sapiens
tctaaggctcaatta

SEQ ID NO: 1520819 - DNA, 15 bp, Homo sapiens
ctctaaggctcaatt

SEQ ID NO: 1520820 - DNA, 15 bp, Homo sapiens
tctctaaggctcaat

SEQ ID NO: 1520821 - DNA, 15 bp, Homo sapiens
gtctctaaggctcaa

SEQ ID NO: 1520822 - DNA, 15 bp, Homo sapiens
tgtctctaaggctca

SEQ ID NO: 1520823 - DNA, 15 bp, Homo sapiens
ttgtctctaaggctc

SEQ ID NO: 1520824 - DNA, 15 bp, Homo sapiens
gttgtctctaaggct

SEQ ID NO: 1520825 - DNA, 15 bp, Homo sapiens
tgttgtctctaaggc

SEQ ID NO: 1520826 - DNA, 15 bp, Homo sapiens
atgttgtctctaagg

SEQ ID NO: 1520827 - DNA, 15 bp, Homo sapiens
catgttgtctctaag

SEQ ID NO: 1520828 - DNA, 15 bp, Homo sapiens
tcatgttgtctctaa

SEQ ID NO: 1520829 - DNA, 15 bp, Homo sapiens
atcatgttgtctcta

SEQ ID NO: 1520830 - DNA, 15 bp, Homo sapiens
tatcatgttgtctct

SEQ ID NO: 1520831 - DNA, 15 bp, Homo sapiens
gtatcatgttgtctc

SEQ ID NO: 1520832 - DNA, 15 bp, Homo sapiens
tgtatcatgttgtct

SEQ ID NO: 1520833 - DNA, 15 bp, Homo sapiens
atgtatcatgttgtc

SEQ ID NO: 1520834 - DNA, 15 bp, Homo sapiens
tatgtatcatgttgt

SEQ ID NO: 1520835 - DNA, 15 bp, Homo sapiens
ctatgtatcatgttg

SEQ ID NO: 1520836 - DNA, 15 bp, Homo sapiens
tctatgtatcatgtt

SEQ ID NO: 1520837 - DNA, 15 bp, Homo sapiens
ctctatgtatcatgt

SEQ ID NO: 1520838 - DNA, 15 bp, Homo sapiens
tctctatgtatcatg

SEQ ID NO: 1520839 - DNA, 15 bp, Homo sapiens
ttctctatgtatcat

SEQ ID NO: 1520840 - DNA, 15 bp, Homo sapiens
tttctctatgtatca

SEQ ID NO: 1520841 - DNA, 15 bp, Homo sapiens
gtttctctatgtatc

SEQ ID NO: 1520842 - DNA, 15 bp, Homo sapiens
ggtttctctatgtat

SEQ ID NO: 1520843 - DNA, 15 bp, Homo sapiens
tggtttctctatgta

SEQ ID NO: 1520844 - DNA, 15 bp, Homo sapiens
gtggtttctctatgt

SEQ ID NO: 1520845 - DNA, 15 bp, Homo sapiens
agtggtttctctatg

SEQ ID NO: 1520846 - DNA, 15 bp, Homo sapiens
cagtggtttctctat

SEQ ID NO: 1520847 - DNA, 15 bp, Homo sapiens
tcagtggtttctcta

SEQ ID NO: 1520848 - DNA, 15 bp, Homo sapiens
gtcagtggtttctct

SEQ ID NO: 1520849 - DNA, 15 bp, Homo sapiens
agtcagtggtttctc

SEQ ID NO: 1520850 - DNA, 15 bp, Homo sapiens
aagtcagtggtttct

SEQ ID NO: 1520851 - DNA, 15 bp, Homo sapiens
aaagtcagtggtttc

SEQ ID NO: 1520852 - DNA, 15 bp, Homo sapiens
caaagtcagtggttt

SEQ ID NO: 1520853 - DNA, 15 bp, Homo sapiens
ccaaagtcagtggtt

SEQ ID NO: 1520854 - DNA, 15 bp, Homo sapiens
tccaaagtcagtggt

SEQ ID NO: 1520855 - DNA, 15 bp, Homo sapiens
ttccaaagtcagtgg

SEQ ID NO: 1520856 - DNA, 15 bp, Homo sapiens
attccaaagtcagtg

SEQ ID NO: 1520857 - DNA, 15 bp, Homo sapiens
gattccaaagtcagt

SEQ ID NO: 1520858 - DNA, 15 bp, Homo sapiens
agattccaaagtcag

SEQ ID NO: 1520859 - DNA, 15 bp, Homo sapiens
gagattccaaagtca

SEQ ID NO: 1520860 - DNA, 15 bp, Homo sapiens
tgagattccaaagtc

SEQ ID NO: 1520861 - DNA, 15 bp, Homo sapiens
ttgagattccaaagt

SEQ ID NO: 1520862 - DNA, 15 bp, Homo sapiens
cttgagattccaaag

SEQ ID NO: 1520863 - DNA, 15 bp, Homo sapiens
ccttgagattccaaa

SEQ ID NO: 1520864 - DNA, 15 bp, Homo sapiens
tccttgagattccaa

SEQ ID NO: 1520865 - DNA, 15 bp, Homo sapiens
gtccttgagattcca

SEQ ID NO: 1520866 - DNA, 15 bp, Homo sapiens
ggtccttgagattcc

SEQ ID NO: 1520867 - DNA, 15 bp, Homo sapiens
tggtccttgagattc

SEQ ID NO: 1520868 - DNA, 15 bp, Homo sapiens
atggtccttgagatt

SEQ ID NO: 1520869 - DNA, 15 bp, Homo sapiens
catggtccttgagat

SEQ ID NO: 1520870 - DNA, 15 bp, Homo sapiens
acatggtccttgaga

SEQ ID NO: 1520871 - DNA, 15 bp, Homo sapiens
aacatggtccttgag

SEQ ID NO: 1520872 - DNA, 15 bp, Homo sapiens
aaacatggtccttga

SEQ ID NO: 1520873 - DNA, 15 bp, Homo sapiens
taaacatggtccttg

SEQ ID NO: 1520874 - DNA, 15 bp, Homo sapiens
ctaaacatggtcctt

SEQ ID NO: 1520875 - DNA, 15 bp, Homo sapiens
tctaaacatggtcct

SEQ ID NO: 1520876 - DNA, 15 bp, Homo sapiens
gtctaaacatggtcc

SEQ ID NO: 1520877 - DNA, 15 bp, Homo sapiens
ggtctaaacatggtc

SEQ ID NO: 1520878 - DNA, 15 bp, Homo sapiens
aggtctaaacatggt

SEQ ID NO: 1520879 - DNA, 15 bp, Homo sapiens
taggtctaaacatgg

SEQ ID NO: 1520880 - DNA, 15 bp, Homo sapiens
ctaggtctaaacatg

SEQ ID NO: 1520881 - DNA, 15 bp, Homo sapiens
actaggtctaaacat

SEQ ID NO: 1520882 - DNA, 15 bp, Homo sapiens
aactaggtctaaaca

SEQ ID NO: 1520883 - DNA, 15 bp, Homo sapiens
gaactaggtctaaac

SEQ ID NO: 1520884 - DNA, 15 bp, Homo sapiens
agaactaggtctaaa

SEQ ID NO: 1520885 - DNA, 15 bp, Homo sapiens
cagaactaggtctaa

SEQ ID NO: 1520886 - DNA, 15 bp, Homo sapiens
gcagaactaggtcta

SEQ ID NO: 1520887 - DNA, 15 bp, Homo sapiens
agcagaactaggtct

SEQ ID NO: 1520888 - DNA, 15 bp, Homo sapiens
tagcagaactaggtc

SEQ ID NO: 1520889 - DNA, 15 bp, Homo sapiens
gtagcagaactaggt

SEQ ID NO: 1520890 - DNA, 15 bp, Homo sapiens
agtagcagaactagg

SEQ ID NO: 1520891 - DNA, 15 bp, Homo sapiens
gagtagcagaactag

SEQ ID NO: 1520892 - DNA, 15 bp, Homo sapiens
tgagtagcagaacta

SEQ ID NO: 1520893 - DNA, 15 bp, Homo sapiens
atgagtagcagaact

SEQ ID NO: 1520894 - DNA, 15 bp, Homo sapiens
aatgagtagcagaac

SEQ ID NO: 1520895 - DNA, 15 bp, Homo sapiens
taatgagtagcagaa

SEQ ID NO: 1520896 - DNA, 15 bp, Homo sapiens
actaatgagtagcag

SEQ ID NO: 1520897 - DNA, 15 bp, Homo sapiens
aactaatgagtagca

SEQ ID NO: 1520898 - DNA, 15 bp, Homo sapiens
taactaatgagtagc

SEQ ID NO: 1520899 - DNA, 15 bp, Homo sapiens
ataactaatgagtag

SEQ ID NO: 1520900 - DNA, 15 bp, Homo sapiens
tataactaatgagta

SEQ ID NO: 1520901 - DNA, 15 bp, Homo sapiens
ctataactaatgagt

SEQ ID NO: 1520902 - DNA, 15 bp, Homo sapiens
tctataactaatgag

SEQ ID NO: 1520903 - DNA, 15 bp, Homo sapiens
gtctataactaatga

SEQ ID NO: 1520904 - DNA, 15 bp, Homo sapiens
agtctataactaatg

SEQ ID NO: 1520905 - DNA, 15 bp, Homo sapiens
aagtctataactaat

SEQ ID NO: 1520906 - DNA, 15 bp, Homo sapiens
taagtctataactaa

SEQ ID NO: 1520907 - DNA, 15 bp, Homo sapiens
ttaagtctataacta

SEQ ID NO: 1520908 - DNA, 15 bp, Homo sapiens
attaagtctataact

SEQ ID NO: 1520909 - DNA, 15 bp, Homo sapiens
gattaagtctataac

SEQ ID NO: 1520910 - DNA, 15 bp, Homo sapiens
agattaagtctataa

SEQ ID NO: 1520911 - DNA, 15 bp, Homo sapiens
aagattaagtctata

SEQ ID NO: 1520912 - DNA, 15 bp, Homo sapiens
aaagattaagtctat

SEQ ID NO: 1520913 - DNA, 15 bp, Homo sapiens
taaagattaagtcta

SEQ ID NO: 1520914 - DNA, 15 bp, Homo sapiens
gtaaagattaagtct

SEQ ID NO: 1520915 - DNA, 15 bp, Homo sapiens
ggtaaagattaagtc

SEQ ID NO: 1520916 - DNA, 15 bp, Homo sapiens
tggtaaagattaagt

SEQ ID NO: 1520917 - DNA, 15 bp, Homo sapiens
ctggtaaagattaag

SEQ ID NO: 1520918 - DNA, 15 bp, Homo sapiens
actggtaaagattaa

SEQ ID NO: 1520919 - DNA, 15 bp, Homo sapiens
aactggtaaagatta

SEQ ID NO: 1520920 - DNA, 15 bp, Homo sapiens
aaactggtaaagatt

SEQ ID NO: 1520921 - DNA, 15 bp, Homo sapiens
gaaactggtaaagat

SEQ ID NO: 1520922 - DNA, 15 bp, Homo sapiens
ggaaactggtaaaga

SEQ ID NO: 1520923 - DNA, 15 bp, Homo sapiens
aggaaactggtaaag

SEQ ID NO: 1520924 - DNA, 15 bp, Homo sapiens
caggaaactggtaaa

SEQ ID NO: 1520925 - DNA, 15 bp, Homo sapiens
tcaggaaactggtaa

SEQ ID NO: 1520926 - DNA, 15 bp, Homo sapiens
ttcaggaaactggta

SEQ ID NO: 1520927 - DNA, 15 bp, Homo sapiens
attcaggaaactggt

SEQ ID NO: 1520928 - DNA, 15 bp, Homo sapiens
aattcaggaaactgg

SEQ ID NO: 1520929 - DNA, 15 bp, Homo sapiens
aaattcaggaaactg

SEQ ID NO: 1520930 - DNA, 15 bp, Homo sapiens
taaattcaggaaact

SEQ ID NO: 1520931 - DNA, 15 bp, Homo sapiens
ttaaattcaggaaac

SEQ ID NO: 1520932 - DNA, 15 bp, Homo sapiens
gttaaattcaggaaa

SEQ ID NO: 1520933 - DNA, 15 bp, Homo sapiens
tgttaaattcaggaa

SEQ ID NO: 1520934 - DNA, 15 bp, Homo sapiens
ctgttaaattcagga

SEQ ID NO: 1520935 - DNA, 15 bp, Homo sapiens
actgttaaattcagg

SEQ ID NO: 1520936 - DNA, 15 bp, Homo sapiens
tactgttaaattcag

SEQ ID NO: 1520937 - DNA, 15 bp, Homo sapiens
atactgttaaattca

SEQ ID NO: 1520938 - DNA, 15 bp, Homo sapiens
aatactgttaaattc

SEQ ID NO: 1520939 - DNA, 15 bp, Homo sapiens
aaatactgttaaatt

SEQ ID NO: 1520940 - DNA, 15 bp, Homo sapiens
taaatactgttaaat

SEQ ID NO: 1520941 - DNA, 15 bp, Homo sapiens
ttaaatactgttaaa

SEQ ID NO: 1520942 - DNA, 15 bp, Homo sapiens
gttaaatactgttaa

SEQ ID NO: 1520943 - DNA, 15 bp, Homo sapiens
tgttaaatactgtta

SEQ ID NO: 1520944 - DNA, 15 bp, Homo sapiens
atgttaaatactgtt

SEQ ID NO: 1520945 - DNA, 15 bp, Homo sapiens
gatgttaaatactgt

SEQ ID NO: 1520946 - DNA, 15 bp, Homo sapiens
ggatgttaaatactg

SEQ ID NO: 1520947 - DNA, 15 bp, Homo sapiens
tggatgttaaatact

SEQ ID NO: 1520948 - DNA, 15 bp, Homo sapiens
atggatgttaaatac

SEQ ID NO: 1520949 - DNA, 15 bp, Homo sapiens
catggatgttaaata

SEQ ID NO: 1520950 - DNA, 15 bp, Homo sapiens
tcatggatgttaaat

SEQ ID NO: 1520951 - DNA, 15 bp, Homo sapiens
gtcatggatgttaaa

SEQ ID NO: 1520952 - DNA, 15 bp, Homo sapiens
ggtcatggatgttaa

SEQ ID NO: 1520953 - DNA, 15 bp, Homo sapiens
tggtcatggatgtta

SEQ ID NO: 1520954 - DNA, 15 bp, Homo sapiens
atggtcatggatgtt

SEQ ID NO: 1520955 - DNA, 15 bp, Homo sapiens
aatggtcatggatgt

SEQ ID NO: 1520956 - DNA, 15 bp, Homo sapiens
taatggtcatggatg

SEQ ID NO: 1520957 - DNA, 15 bp, Homo sapiens
ttaatggtcatggat

SEQ ID NO: 1520958 - DNA, 15 bp, Homo sapiens
cttaatggtcatgga

SEQ ID NO: 1520959 - DNA, 15 bp, Homo sapiens
acttaatggtcatgg

SEQ ID NO: 1520960 - DNA, 15 bp, Homo sapiens
aacttaatggtcatg

SEQ ID NO: 1520961 - DNA, 15 bp, Homo sapiens
taacttaatggtcat

SEQ ID NO: 1520962 - DNA, 15 bp, Homo sapiens
ctaacttaatggtca

SEQ ID NO: 1520963 - DNA, 15 bp, Homo sapiens
actaacttaatggtc

SEQ ID NO: 1520964 - DNA, 15 bp, Homo sapiens
tactaacttaatggt

SEQ ID NO: 1520965 - DNA, 15 bp, Homo sapiens
ctactaacttaatgg

SEQ ID NO: 1520966 - DNA, 15 bp, Homo sapiens
tctactaacttaatg

SEQ ID NO: 1520967 - DNA, 15 bp, Homo sapiens
gtctactaacttaat

SEQ ID NO: 1520968 - DNA, 15 bp, Homo sapiens
agtctactaacttaa

SEQ ID NO: 1520969 - DNA, 15 bp, Homo sapiens
aagtctactaactta

SEQ ID NO: 1520970 - DNA, 15 bp, Homo sapiens
taagtctactaactt

SEQ ID NO: 1520971 - DNA, 15 bp, Homo sapiens
gtaagtctactaact

SEQ ID NO: 1520972 - DNA, 15 bp, Homo sapiens
tgtaagtctactaac

SEQ ID NO: 1520973 - DNA, 15 bp, Homo sapiens
atgtaagtctactaa

SEQ ID NO: 1520974 - DNA, 15 bp, Homo sapiens
aatgtaagtctacta

SEQ ID NO: 1520975 - DNA, 15 bp, Homo sapiens
caatgtaagtctact

SEQ ID NO: 1520976 - DNA, 15 bp, Homo sapiens
acaatgtaagtctac

SEQ ID NO: 1520977 - DNA, 15 bp, Homo sapiens
aacaatgtaagtcta

SEQ ID NO: 1520978 - DNA, 15 bp, Homo sapiens
taacaatgtaagtct

SEQ ID NO: 1520979 - DNA, 15 bp, Homo sapiens
ctaacaatgtaagtc

SEQ ID NO: 1520980 - DNA, 15 bp, Homo sapiens
actaacaatgtaagt

SEQ ID NO: 1520981 - DNA, 15 bp, Homo sapiens
gactaacaatgtaag

SEQ ID NO: 1520982 - DNA, 15 bp, Homo sapiens
tgactaacaatgtaa

SEQ ID NO: 1520983 - DNA, 15 bp, Homo sapiens
ctgactaacaatgta

SEQ ID NO: 1520984 - DNA, 15 bp, Homo sapiens
gctgactaacaatgt

SEQ ID NO: 1520985 - DNA, 15 bp, Homo sapiens
agctgactaacaatg

SEQ ID NO: 1520986 - DNA, 15 bp, Homo sapiens
aagctgactaacaat

SEQ ID NO: 1520987 - DNA, 15 bp, Homo sapiens
caagctgactaacaa

SEQ ID NO: 1520988 - DNA, 15 bp, Homo sapiens
gcaagctgactaaca

SEQ ID NO: 1520989 - DNA, 15 bp, Homo sapiens
agcaagctgactaac

SEQ ID NO: 1520990 - DNA, 15 bp, Homo sapiens
cagcaagctgactaa

SEQ ID NO: 1520991 - DNA, 15 bp, Homo sapiens
ccagcaagctgacta

SEQ ID NO: 1520992 - DNA, 15 bp, Homo sapiens
gccagcaagctgact

SEQ ID NO: 1520993 - DNA, 15 bp, Homo sapiens
ggccagcaagctgac

SEQ ID NO: 1520994 - DNA, 15 bp, Homo sapiens
tggccagcaagctga

SEQ ID NO: 1520995 - DNA, 15 bp, Homo sapiens
gtggccagcaagctg

SEQ ID NO: 1520996 - DNA, 15 bp, Homo sapiens
tgtggccagcaagct

SEQ ID NO: 1520997 - DNA, 15 bp, Homo sapiens
ctgtggccagcaagc

SEQ ID NO: 1520998 - DNA, 15 bp, Homo sapiens
cctgtggccagcaag

SEQ ID NO: 1520999 - DNA, 15 bp, Homo sapiens
acctgtggccagcaa

SEQ ID NO: 1521000 - DNA, 15 bp, Homo sapiens
cacctgtggccagca

SEQ ID NO: 1521001 - DNA, 15 bp, Homo sapiens
ccacctgtggccagc

SEQ ID NO: 1521002 - DNA, 15 bp, Homo sapiens
gccacctgtggccag

SEQ ID NO: 1521003 - DNA, 15 bp, Homo sapiens
tgccacctgtggcca

SEQ ID NO: 1521004 - DNA, 15 bp, Homo sapiens
ctgccacctgtggcc

SEQ ID NO: 1521005 - DNA, 15 bp, Homo sapiens
actgccacctgtggc

SEQ ID NO: 1521006 - DNA, 15 bp, Homo sapiens
cactgccacctgtgg

SEQ ID NO: 1521007 - DNA, 15 bp, Homo sapiens
acactgccacctgtg

SEQ ID NO: 1521008 - DNA, 15 bp, Homo sapiens
cacactgccacctgt

SEQ ID NO: 1521009 - DNA, 15 bp, Homo sapiens
acacactgccacctg

SEQ ID NO: 1521010 - DNA, 15 bp, Homo sapiens
tacacactgccacct

SEQ ID NO: 1521011 - DNA, 15 bp, Homo sapiens
ctacacactgccacc

SEQ ID NO: 1521012 - DNA, 15 bp, Homo sapiens
cctacacactgccac

SEQ ID NO: 1521013 - DNA, 15 bp, Homo sapiens
tcctacacactgcca

SEQ ID NO: 1521014 - DNA, 15 bp, Homo sapiens
ttcctacacactgcc

SEQ ID NO: 1521015 - DNA, 15 bp, Homo sapiens
tttcctacacactgc

SEQ ID NO: 1521016 - DNA, 15 bp, Homo sapiens
gtttcctacacactg

SEQ ID NO: 1521017 - DNA, 15 bp, Homo sapiens
tgtttcctacacact

SEQ ID NO: 1521018 - DNA, 15 bp, Homo sapiens
tttgtttcctacaca

SEQ ID NO: 1521019 - DNA, 15 bp, Homo sapiens
atttgtttcctacac

SEQ ID NO: 1521020 - DNA, 15 bp, Homo sapiens
gatttgtttcctaca

SEQ ID NO: 1521021 - DNA, 15 bp, Homo sapiens
tgatttgtttcctac

SEQ ID NO: 1521022 - DNA, 15 bp, Homo sapiens
ttgatttgtttccta

SEQ ID NO: 1521023 - DNA, 15 bp, Homo sapiens
cttgatttgtttcct

SEQ ID NO: 1521024 - DNA, 15 bp, Homo sapiens
ccttgatttgtttcc

SEQ ID NO: 1521025 - DNA, 15 bp, Homo sapiens
accttgatttgtttc

SEQ ID NO: 1521026 - DNA, 15 bp, Homo sapiens
aaccttgatttgttt

SEQ ID NO: 1521027 - DNA, 15 bp, Homo sapiens
caaccttgatttgtt

SEQ ID NO: 1521028 - DNA, 15 bp, Homo sapiens
tcaaccttgatttgt

SEQ ID NO: 1521029 - DNA, 15 bp, Homo sapiens
ctcaaccttgatttg

SEQ ID NO: 1521030 - DNA, 15 bp, Homo sapiens
tctcaaccttgattt

SEQ ID NO: 1521031 - DNA, 15 bp, Homo sapiens
ttctcaaccttgatt

SEQ ID NO: 1521032 - DNA, 15 bp, Homo sapiens
tttctcaaccttgat

SEQ ID NO: 1521033 - DNA, 15 bp, Homo sapiens
atttctcaaccttga

SEQ ID NO: 1521034 - DNA, 15 bp, Homo sapiens
tatttctcaaccttg

SEQ ID NO: 1521035 - DNA, 15 bp, Homo sapiens
ctatttctcaacctt

SEQ ID NO: 1521036 - DNA, 15 bp, Homo sapiens
actatttctcaacct

SEQ ID NO: 1521037 - DNA, 15 bp, Homo sapiens
tactatttctcaacc

SEQ ID NO: 1521038 - DNA, 15 bp, Homo sapiens
ctactatttctcaac

SEQ ID NO: 1521039 - DNA, 15 bp, Homo sapiens
tctactatttctcaa

SEQ ID NO: 1521040 - DNA, 15 bp, Homo sapiens
ctctactatttctca

SEQ ID NO: 1521041 - DNA, 15 bp, Homo sapiens
tctctactatttctc

SEQ ID NO: 1521042 - DNA, 15 bp, Homo sapiens
ctctctactatttct

SEQ ID NO: 1521043 - DNA, 15 bp, Homo sapiens
tctctctactatttc

SEQ ID NO: 1521044 - DNA, 15 bp, Homo sapiens
gtctctctactattt

SEQ ID NO: 1521045 - DNA, 15 bp, Homo sapiens
cgtctctctactatt

SEQ ID NO: 1521046 - DNA, 15 bp, Homo sapiens
ccgtctctctactat

SEQ ID NO: 1521047 - DNA, 15 bp, Homo sapiens
accgtctctctacta

SEQ ID NO: 1521048 - DNA, 15 bp, Homo sapiens
caccgtctctctact

SEQ ID NO: 1521049 - DNA, 15 bp, Homo sapiens
tcaccgtctctctac

SEQ ID NO: 1521050 - DNA, 15 bp, Homo sapiens
ttcaccgtctctcta

SEQ ID NO: 1521051 - DNA, 15 bp, Homo sapiens
cttcaccgtctctct

SEQ ID NO: 1521052 - DNA, 15 bp, Homo sapiens
ccttcaccgtctctc

SEQ ID NO: 1521053 - DNA, 15 bp, Homo sapiens
tccttcaccgtctct

SEQ ID NO: 1521054 - DNA, 15 bp, Homo sapiens
ttccttcaccgtctc

SEQ ID NO: 1521055 - DNA, 15 bp, Homo sapiens
cttccttcaccgtct

SEQ ID NO: 1521056 - DNA, 15 bp, Homo sapiens
tcttccttcaccgtc

SEQ ID NO: 1521057 - DNA, 15 bp, Homo sapiens
atcttccttcaccgt

SEQ ID NO: 1521058 - DNA, 15 bp, Homo sapiens
gatcttccttcaccg

SEQ ID NO: 1521059 - DNA, 15 bp, Homo sapiens
tgatcttccttcacc

SEQ ID NO: 1521060 - DNA, 15 bp, Homo sapiens
ctgatcttccttcac

SEQ ID NO: 1521061 - DNA, 15 bp, Homo sapiens
actgatcttccttca

SEQ ID NO: 1521062 - DNA, 15 bp, Homo sapiens
cactgatcttccttc

SEQ ID NO: 1521063 - DNA, 15 bp, Homo sapiens
ccactgatcttcctt

SEQ ID NO: 1521064 - DNA, 15 bp, Homo sapiens
tccactgatcttcct

SEQ ID NO: 1521065 - DNA, 15 bp, Homo sapiens
ttccactgatcttcc

SEQ ID NO: 1521066 - DNA, 15 bp, Homo sapiens
cttccactgatcttc

SEQ ID NO: 1521067 - DNA, 15 bp, Homo sapiens
tcttccactgatctt

SEQ ID NO: 1521068 - DNA, 15 bp, Homo sapiens
atcttccactgatct

SEQ ID NO: 1521069 - DNA, 15 bp, Homo sapiens
catcttccactgatc

SEQ ID NO: 1521070 - DNA, 15 bp, Homo sapiens
ccatcttccactgat

SEQ ID NO: 1521071 - DNA, 15 bp, Homo sapiens
cccatcttccactga

SEQ ID NO: 1521072 - DNA, 15 bp, Homo sapiens
tcccatcttccactg

SEQ ID NO: 1521073 - DNA, 15 bp, Homo sapiens
ttcccatcttccact

SEQ ID NO: 1521074 - DNA, 15 bp, Homo sapiens
tttcccatcttccac

SEQ ID NO: 1521075 - DNA, 15 bp, Homo sapiens
gtttcccatcttcca

SEQ ID NO: 1521076 - DNA, 15 bp, Homo sapiens
agtttcccatcttcc

SEQ ID NO: 1521077 - DNA, 15 bp, Homo sapiens
aagtttcccatcttc

SEQ ID NO: 1521078 - DNA, 15 bp, Homo sapiens
caagtttcccatctt

SEQ ID NO: 1521079 - DNA, 15 bp, Homo sapiens
acaagtttcccatct

SEQ ID NO: 1521080 - DNA, 15 bp, Homo sapiens
gacaagtttcccatc

SEQ ID NO: 1521081 - DNA, 15 bp, Homo sapiens
agacaagtttcccat

SEQ ID NO: 1521082 - DNA, 15 bp, Homo sapiens
tagacaagtttccca

SEQ ID NO: 1521083 - DNA, 15 bp, Homo sapiens
ttagacaagtttccc

SEQ ID NO: 1521084 - DNA, 15 bp, Homo sapiens
attagacaagtttcc

SEQ ID NO: 1521085 - DNA, 15 bp, Homo sapiens
tattagacaagtttc

SEQ ID NO: 1521086 - DNA, 15 bp, Homo sapiens
ctattagacaagttt

SEQ ID NO: 1521087 - DNA, 15 bp, Homo sapiens
cctattagacaagtt

SEQ ID NO: 1521088 - DNA, 15 bp, Homo sapiens
ccctattagacaagt

SEQ ID NO: 1521089 - DNA, 15 bp, Homo sapiens
accctattagacaag

SEQ ID NO: 1521090 - DNA, 15 bp, Homo sapiens
gaccctattagacaa

SEQ ID NO: 1521091 - DNA, 15 bp, Homo sapiens
tgaccctattagaca

SEQ ID NO: 1521092 - DNA, 15 bp, Homo sapiens
atgaccctattagac

SEQ ID NO: 1521093 - DNA, 15 bp, Homo sapiens
aatgaccctattaga

SEQ ID NO: 1521094 - DNA, 15 bp, Homo sapiens
gaatgaccctattag

SEQ ID NO: 1521095 - DNA, 15 bp, Homo sapiens
tgaatgaccctatta

SEQ ID NO: 1521096 - DNA, 15 bp, Homo sapiens
ctgaatgaccctatt

SEQ ID NO: 1521097 - DNA, 15 bp, Homo sapiens
tctgaatgaccctat

SEQ ID NO: 1521098 - DNA, 15 bp, Homo sapiens
atctgaatgacccta

SEQ ID NO: 1521099 - DNA, 15 bp, Homo sapiens
tatctgaatgaccct

SEQ ID NO: 1521100 - DNA, 15 bp, Homo sapiens
ctatctgaatgaccc

SEQ ID NO: 1521101 - DNA, 15 bp, Homo sapiens
gctatctgaatgacc

SEQ ID NO: 1521102 - DNA, 15 bp, Homo sapiens
ggctatctgaatgac

SEQ ID NO: 1521103 - DNA, 15 bp, Homo sapiens
aggctatctgaatga

SEQ ID NO: 1521104 - DNA, 15 bp, Homo sapiens
aaggctatctgaatg

SEQ ID NO: 1521105 - DNA, 15 bp, Homo sapiens
taaggctatctgaat

SEQ ID NO: 1521106 - DNA, 15 bp, Homo sapiens
ttaaggctatctgaa

SEQ ID NO: 1521107 - DNA, 15 bp, Homo sapiens
cttaaggctatctga

SEQ ID NO: 1521108 - DNA, 15 bp, Homo sapiens
tcttaaggctatctg

SEQ ID NO: 1521109 - DNA, 15 bp, Homo sapiens
gtcttaaggctatct

SEQ ID NO: 1521110 - DNA, 15 bp, Homo sapiens
ggtcttaaggctatc

SEQ ID NO: 1521111 - DNA, 15 bp, Homo sapiens
tggtcttaaggctat

SEQ ID NO: 1521112 - DNA, 15 bp, Homo sapiens
ttggtcttaaggcta

SEQ ID NO: 1521113 - DNA, 15 bp, Homo sapiens
cttggtcttaaggct

SEQ ID NO: 1521114 - DNA, 15 bp, Homo sapiens
tcttggtcttaaggc

SEQ ID NO: 1521115 - DNA, 15 bp, Homo sapiens
ttcttggtcttaagg

SEQ ID NO: 1521116 - DNA, 15 bp, Homo sapiens
cttcttggtcttaag

SEQ ID NO: 1521117 - DNA, 15 bp, Homo sapiens
acttcttggtcttaa

SEQ ID NO: 1521118 - DNA, 15 bp, Homo sapiens
gacttcttggtctta

SEQ ID NO: 1521119 - DNA, 15 bp, Homo sapiens
ggacttcttggtctt

SEQ ID NO: 1521120 - DNA, 15 bp, Homo sapiens
tggacttcttggtct

SEQ ID NO: 1521121 - DNA, 15 bp, Homo sapiens
ttggacttcttggtc

SEQ ID NO: 1521122 - DNA, 15 bp, Homo sapiens
tttggacttcttggt

SEQ ID NO: 1521123 - DNA, 15 bp, Homo sapiens
ctttggacttcttgg

SEQ ID NO: 1521124 - DNA, 15 bp, Homo sapiens
cctttggacttcttg

SEQ ID NO: 1521125 - DNA, 15 bp, Homo sapiens
tcctttggacttctt

SEQ ID NO: 1521126 - DNA, 15 bp, Homo sapiens
gtcctttggacttct

SEQ ID NO: 1521127 - DNA, 15 bp, Homo sapiens
agtcctttggacttc

SEQ ID NO: 1521128 - DNA, 15 bp, Homo sapiens
cagtcctttggactt

SEQ ID NO: 1521129 - DNA, 15 bp, Homo sapiens
ccagtcctttggact

SEQ ID NO: 1521130 - DNA, 15 bp, Homo sapiens
tccagtcctttggac

SEQ ID NO: 1521131 - DNA, 15 bp, Homo sapiens
ctccagtcctttgga

SEQ ID NO: 1521132 - DNA, 15 bp, Homo sapiens
actccagtcctttgg

SEQ ID NO: 1521133 - DNA, 15 bp, Homo sapiens
tactccagtcctttg

SEQ ID NO: 1521134 - DNA, 15 bp, Homo sapiens
atactccagtccttt

SEQ ID NO: 1521135 - DNA, 15 bp, Homo sapiens
aatactccagtcctt

SEQ ID NO: 1521136 - DNA, 15 bp, Homo sapiens
taatactccagtcct

SEQ ID NO: 1521137 - DNA, 15 bp, Homo sapiens
ctaatactccagtcc

SEQ ID NO: 1521138 - DNA, 15 bp, Homo sapiens
cctaatactccagtc

SEQ ID NO: 1521139 - DNA, 15 bp, Homo sapiens
ccctaatactccagt

SEQ ID NO: 1521140 - DNA, 15 bp, Homo sapiens
tccctaatactccag

SEQ ID NO: 1521141 - DNA, 15 bp, Homo sapiens
ttccctaatactcca

SEQ ID NO: 1521142 - DNA, 15 bp, Homo sapiens
attccctaatactcc

SEQ ID NO: 1521143 - DNA, 15 bp, Homo sapiens
gattccctaatactc

SEQ ID NO: 1521144 - DNA, 15 bp, Homo sapiens
tgattccctaatact

SEQ ID NO: 1521145 - DNA, 15 bp, Homo sapiens
ttgattccctaatac

SEQ ID NO: 1521146 - DNA, 15 bp, Homo sapiens
cttgattccctaata

SEQ ID NO: 1521147 - DNA, 15 bp, Homo sapiens
tcttgattccctaat

SEQ ID NO: 1521148 - DNA, 15 bp, Homo sapiens
ttcttgattccctaa

SEQ ID NO: 1521149 - DNA, 15 bp, Homo sapiens
tttcttgattcccta

SEQ ID NO: 1521150 - DNA, 15 bp, Homo sapiens
ctttcttgattccct

SEQ ID NO: 1521151 - DNA, 15 bp, Homo sapiens
actttcttgattccc

SEQ ID NO: 1521152 - DNA, 15 bp, Homo sapiens
tactttcttgattcc

SEQ ID NO: 1521153 - DNA, 15 bp, Homo sapiens
ttactttcttgattc

SEQ ID NO: 1521154 - DNA, 15 bp, Homo sapiens
cttactttcttgatt

SEQ ID NO: 1521155 - DNA, 15 bp, Homo sapiens
tcttactttcttgat

SEQ ID NO: 1521156 - DNA, 15 bp, Homo sapiens
ttcttactttcttga

SEQ ID NO: 1521157 - DNA, 15 bp, Homo sapiens
tttcttactttcttg

SEQ ID NO: 1521158 - DNA, 15 bp, Homo sapiens
ttttcttactttctt

SEQ ID NO: 1521159 - DNA, 15 bp, Homo sapiens
attttcttactttct

SEQ ID NO: 1521160 - DNA, 15 bp, Homo sapiens
aattttcttactttc

SEQ ID NO: 1521161 - DNA, 15 bp, Homo sapiens
caattttcttacttt

SEQ ID NO: 1521162 - DNA, 15 bp, Homo sapiens
gcaattttcttactt

SEQ ID NO: 1521163 - DNA, 15 bp, Homo sapiens
tgcaattttcttact

SEQ ID NO: 1521164 - DNA, 15 bp, Homo sapiens
atgcaattttcttac

SEQ ID NO: 1521165 - DNA, 15 bp, Homo sapiens
aatgcaattttctta

SEQ ID NO: 1521166 - DNA, 15 bp, Homo sapiens
caatgcaattttctt

SEQ ID NO: 1521167 - DNA, 15 bp, Homo sapiens
tcaatgcaattttct

SEQ ID NO: 1521168 - DNA, 15 bp, Homo sapiens
ttcaatgcaattttc

SEQ ID NO: 1521169 - DNA, 15 bp, Homo sapiens
gttcaatgcaatttt

SEQ ID NO: 1521170 - DNA, 15 bp, Homo sapiens
ggttcaatgcaattt

SEQ ID NO: 1521171 - DNA, 15 bp, Homo sapiens
aggttcaatgcaatt

SEQ ID NO: 1521172 - DNA, 15 bp, Homo sapiens
gaggttcaatgcaat

SEQ ID NO: 1521173 - DNA, 15 bp, Homo sapiens
ggaggttcaatgcaa

SEQ ID NO: 1521174 - DNA, 15 bp, Homo sapiens
gggaggttcaatgca

SEQ ID NO: 1521175 - DNA, 15 bp, Homo sapiens
cgggaggttcaatgc

SEQ ID NO: 1521176 - DNA, 15 bp, Homo sapiens
gcgggaggttcaatg

SEQ ID NO: 1521177 - DNA, 15 bp, Homo sapiens
ggcgggaggttcaat

SEQ ID NO: 1521178 - DNA, 15 bp, Homo sapiens
tggcgggaggttcaa

SEQ ID NO: 1521179 - DNA, 15 bp, Homo sapiens
gtggcgggaggttca

SEQ ID NO: 1521180 - DNA, 15 bp, Homo sapiens
ggtggcgggaggttc

SEQ ID NO: 1521181 - DNA, 15 bp, Homo sapiens
gggtggcgggaggtt

SEQ ID NO: 1521182 - DNA, 15 bp, Homo sapiens
ggggtggcgggaggt

SEQ ID NO: 1521183 - DNA, 15 bp, Homo sapiens
gggggtggcgggagg

SEQ ID NO: 1521184 - DNA, 15 bp, Homo sapiens
ggggggtggcgggag

SEQ ID NO: 1521185 - DNA, 15 bp, Homo sapiens
aggggggtggcggga

SEQ ID NO: 1521186 - DNA, 15 bp, Homo sapiens
caggggggtggcggg

SEQ ID NO: 1521187 - DNA, 15 bp, Homo sapiens
gcaggggggtggcgg

SEQ ID NO: 1521188 - DNA, 15 bp, Homo sapiens
ggcaggggggtggcg

SEQ ID NO: 1521189 - DNA, 15 bp, Homo sapiens
gggcaggggggtggc

SEQ ID NO: 1521190 - DNA, 15 bp, Homo sapiens
agggcaggggggtgg

SEQ ID NO: 1521191 - DNA, 15 bp, Homo sapiens
aagggcaggggggtg

SEQ ID NO: 1521192 - DNA, 15 bp, Homo sapiens
aaagggcaggggggt

SEQ ID NO: 1521193 - DNA, 15 bp, Homo sapiens
taaagggcagggggg

SEQ ID NO: 1521194 - DNA, 15 bp, Homo sapiens
ttaaagggcaggggg

SEQ ID NO: 1521195 - DNA, 15 bp, Homo sapiens
gttaaagggcagggg

SEQ ID NO: 1521196 - DNA, 15 bp, Homo sapiens
tgttaaagggcaggg

SEQ ID NO: 1521197 - DNA, 15 bp, Homo sapiens
ttgttaaagggcagg

SEQ ID NO: 1521198 - DNA, 15 bp, Homo sapiens
gttgttaaagggcag

SEQ ID NO: 1521199 - DNA, 15 bp, Homo sapiens
agttgttaaagggca

SEQ ID NO: 1521200 - DNA, 15 bp, Homo sapiens
gagttgttaaagggc

SEQ ID NO: 1521201 - DNA, 15 bp, Homo sapiens
agagttgttaaaggg

SEQ ID NO: 1521202 - DNA, 15 bp, Homo sapiens
tagagttgttaaagg

SEQ ID NO: 1521203 - DNA, 15 bp, Homo sapiens
ttagagttgttaaag

SEQ ID NO: 1521204 - DNA, 15 bp, Homo sapiens
cttagagttgttaaa

SEQ ID NO: 1521205 - DNA, 15 bp, Homo sapiens
acttagagttgttaa

SEQ ID NO: 1521206 - DNA, 15 bp, Homo sapiens
tacttagagttgtta

SEQ ID NO: 1521207 - DNA, 15 bp, Homo sapiens
ttacttagagttgtt

SEQ ID NO: 1521208 - DNA, 15 bp, Homo sapiens
gttacttagagttgt

SEQ ID NO: 1521209 - DNA, 15 bp, Homo sapiens
ggttacttagagttg

SEQ ID NO: 1521210 - DNA, 15 bp, Homo sapiens
gggttacttagagtt

SEQ ID NO: 1521211 - DNA, 15 bp, Homo sapiens
ggggttacttagagt

SEQ ID NO: 1521212 - DNA, 15 bp, Homo sapiens
aggggttacttagag

SEQ ID NO: 1521213 - DNA, 15 bp, Homo sapiens
caggggttacttaga

SEQ ID NO: 1521214 - DNA, 15 bp, Homo sapiens
gcaggggttacttag

SEQ ID NO: 1521215 - DNA, 15 bp, Homo sapiens
agcaggggttactta

SEQ ID NO: 1521216 - DNA, 15 bp, Homo sapiens
gagcaggggttactt

SEQ ID NO: 1521217 - DNA, 15 bp, Homo sapiens
tgagcaggggttact

SEQ ID NO: 1521218 - DNA, 15 bp, Homo sapiens
gtgagcaggggttac

SEQ ID NO: 1521219 - DNA, 15 bp, Homo sapiens
ggtgagcaggggtta

SEQ ID NO: 1521220 - DNA, 15 bp, Homo sapiens
aggtgagcaggggtt

SEQ ID NO: 1521221 - DNA, 15 bp, Homo sapiens
aaggtgagcaggggt

SEQ ID NO: 1521222 - DNA, 15 bp, Homo sapiens
gaaggtgagcagggg

SEQ ID NO: 1521223 - DNA, 15 bp, Homo sapiens
ggaaggtgagcaggg

SEQ ID NO: 1521224 - DNA, 15 bp, Homo sapiens
gggaaggtgagcagg

SEQ ID NO: 1521225 - DNA, 15 bp, Homo sapiens
tgggaaggtgagcag

SEQ ID NO: 1521226 - DNA, 15 bp, Homo sapiens
atgggaaggtgagca

SEQ ID NO: 1521227 - DNA, 15 bp, Homo sapiens
catgggaaggtgagc

SEQ ID NO: 1521228 - DNA, 15 bp, Homo sapiens
tcatgggaaggtgag

SEQ ID NO: 1521229 - DNA, 15 bp, Homo sapiens
ttcatgggaaggtga

SEQ ID NO: 1521230 - DNA, 15 bp, Homo sapiens
tttcatgggaaggtg

SEQ ID NO: 1521231 - DNA, 15 bp, Homo sapiens
ctttcatgggaaggt

SEQ ID NO: 1521232 - DNA, 15 bp, Homo sapiens
cctttcatgggaagg

SEQ ID NO: 1521233 - DNA, 15 bp, Homo sapiens
gcctttcatgggaag

SEQ ID NO: 1521234 - DNA, 15 bp, Homo sapiens
ggcctttcatgggaa

SEQ ID NO: 1521235 - DNA, 15 bp, Homo sapiens
aggcctttcatggga

SEQ ID NO: 1521236 - DNA, 15 bp, Homo sapiens
gaggcctttcatggg

SEQ ID NO: 1521237 - DNA, 15 bp, Homo sapiens
agaggcctttcatgg

SEQ ID NO: 1521238 - DNA, 15 bp, Homo sapiens
gagaggcctttcatg

SEQ ID NO: 1521239 - DNA, 15 bp, Homo sapiens
agagaggcctttcat

SEQ ID NO: 1521240 - DNA, 15 bp, Homo sapiens
gagagaggcctttca

SEQ ID NO: 1521241 - DNA, 15 bp, Homo sapiens
ggagagaggcctttc

SEQ ID NO: 1521242 - DNA, 15 bp, Homo sapiens
tggagagaggccttt

SEQ ID NO: 1521243 - DNA, 15 bp, Homo sapiens
ctggagagaggcctt

SEQ ID NO: 1521244 - DNA, 15 bp, Homo sapiens
gctggagagaggcct

SEQ ID NO: 1521245 - DNA, 15 bp, Homo sapiens
agctggagagaggcc

SEQ ID NO: 1521246 - DNA, 15 bp, Homo sapiens
gagctggagagaggc

SEQ ID NO: 1521247 - DNA, 15 bp, Homo sapiens
agagctggagagagg

SEQ ID NO: 1521248 - DNA, 15 bp, Homo sapiens
gagagctggagagag

SEQ ID NO: 1521249 - DNA, 15 bp, Homo sapiens
tgagagctggagaga

SEQ ID NO: 1521250 - DNA, 15 bp, Homo sapiens
atgagagctggagag

SEQ ID NO: 1521251 - DNA, 15 bp, Homo sapiens
gatgagagctggaga

SEQ ID NO: 1521252 - DNA, 15 bp, Homo sapiens
tgagatgagagctgg

SEQ ID NO: 1521253 - DNA, 15 bp, Homo sapiens
ctgagatgagagctg

SEQ ID NO: 1521254 - DNA, 15 bp, Homo sapiens
actgagatgagagct

SEQ ID NO: 1521255 - DNA, 15 bp, Homo sapiens
aactgagatgagagc

SEQ ID NO: 1521256 - DNA, 15 bp, Homo sapiens
caactgagatgagag

SEQ ID NO: 1521257 - DNA, 15 bp, Homo sapiens
gcaactgagatgaga

SEQ ID NO: 1521258 - DNA, 15 bp, Homo sapiens
ggcaactgagatgag

SEQ ID NO: 1521259 - DNA, 15 bp, Homo sapiens
tggcaactgagatga

SEQ ID NO: 1521260 - DNA, 15 bp, Homo sapiens
atggcaactgagatg

SEQ ID NO: 1521261 - DNA, 15 bp, Homo sapiens
aatggcaactgagat

SEQ ID NO: 1521262 - DNA, 15 bp, Homo sapiens
aaatggcaactgaga

SEQ ID NO: 1521263 - DNA, 15 bp, Homo sapiens
gaaatggcaactgag

SEQ ID NO: 1521264 - DNA, 15 bp, Homo sapiens
agaaatggcaactga

SEQ ID NO: 1521265 - DNA, 15 bp, Homo sapiens
tagaaatggcaactg

SEQ ID NO: 1521266 - DNA, 15 bp, Homo sapiens
ttagaaatggcaact

SEQ ID NO: 1521267 - DNA, 15 bp, Homo sapiens
tttagaaatggcaac

SEQ ID NO: 1521268 - DNA, 15 bp, Homo sapiens
atttagaaatggcaa

SEQ ID NO: 1521269 - DNA, 15 bp, Homo sapiens
aatttagaaatggca

SEQ ID NO: 1521270 - DNA, 15 bp, Homo sapiens
caatttagaaatggc

SEQ ID NO: 1521271 - DNA, 15 bp, Homo sapiens
gcaatttagaaatgg

SEQ ID NO: 1521272 - DNA, 15 bp, Homo sapiens
ggcaatttagaaatg

SEQ ID NO: 1521273 - DNA, 15 bp, Homo sapiens
aggcaatttagaaat

SEQ ID NO: 1521274 - DNA, 15 bp, Homo sapiens
taggcaatttagaaa

SEQ ID NO: 1521275 - DNA, 15 bp, Homo sapiens
ttaggcaatttagaa

SEQ ID NO: 1521276 - DNA, 15 bp, Homo sapiens
cttaggcaatttaga

SEQ ID NO: 1521277 - DNA, 15 bp, Homo sapiens
tcttaggcaatttag

SEQ ID NO: 1521278 - DNA, 15 bp, Homo sapiens
atcttaggcaattta

SEQ ID NO: 1521279 - DNA, 15 bp, Homo sapiens
gatcttaggcaattt

SEQ ID NO: 1521280 - DNA, 15 bp, Homo sapiens
tgatcttaggcaatt

SEQ ID NO: 1521281 - DNA, 15 bp, Homo sapiens
atgatcttaggcaat

SEQ ID NO: 1521282 - DNA, 15 bp, Homo sapiens
aatgatcttaggcaa

SEQ ID NO: 1521283 - DNA, 15 bp, Homo sapiens
aaatgatcttaggca

SEQ ID NO: 1521284 - DNA, 15 bp, Homo sapiens
aaaatgatcttaggc

SEQ ID NO: 1521285 - DNA, 15 bp, Homo sapiens
taaaatgatcttagg

SEQ ID NO: 1521286 - DNA, 15 bp, Homo sapiens
ttaaaatgatcttag

SEQ ID NO: 1521287 - DNA, 15 bp, Homo sapiens
attaaaatgatctta

SEQ ID NO: 1521288 - DNA, 15 bp, Homo sapiens
aattaaaatgatctt

SEQ ID NO: 1521289 - DNA, 15 bp, Homo sapiens
aaattaaaatgatct

SEQ ID NO: 1521290 - DNA, 15 bp, Homo sapiens
aaaattaaaatgatc

SEQ ID NO: 1521291 - DNA, 15 bp, Homo sapiens
gaaaattaaaatgat

SEQ ID NO: 1521292 - DNA, 15 bp, Homo sapiens
cgaaaattaaaatga

SEQ ID NO: 1521293 - DNA, 15 bp, Homo sapiens
acgaaaattaaaatg

SEQ ID NO: 1521294 - DNA, 15 bp, Homo sapiens
aacgaaaattaaaat

SEQ ID NO: 1521295 - DNA, 15 bp, Homo sapiens
aaacgaaaattaaaa

SEQ ID NO: 1521296 - DNA, 15 bp, Homo sapiens
caaacgaaaattaaa

SEQ ID NO: 1521297 - DNA, 15 bp, Homo sapiens
gcaaacgaaaattaa

SEQ ID NO: 1521298 - DNA, 15 bp, Homo sapiens
cgcaaacgaaaatta

SEQ ID NO: 1521299 - DNA, 15 bp, Homo sapiens
acgcaaacgaaaatt

SEQ ID NO: 1521300 - DNA, 15 bp, Homo sapiens
aacgcaaacgaaaat

SEQ ID NO: 1521301 - DNA, 15 bp, Homo sapiens
aaacgcaaacgaaaa

SEQ ID NO: 1521302 - DNA, 15 bp, Homo sapiens
caaacgcaaacgaaa

SEQ ID NO: 1521303 - DNA, 15 bp, Homo sapiens
tcaaacgcaaacgaa

SEQ ID NO: 1521304 - DNA, 15 bp, Homo sapiens
ctcaaacgcaaacga

SEQ ID NO: 1521305 - DNA, 15 bp, Homo sapiens
tctcaaacgcaaacg

SEQ ID NO: 1521306 - DNA, 15 bp, Homo sapiens
atctcaaacgcaaac

SEQ ID NO: 1521307 - DNA, 15 bp, Homo sapiens
catctcaaacgcaaa

SEQ ID NO: 1521308 - DNA, 15 bp, Homo sapiens
tcatctcaaacgcaa

SEQ ID NO: 1521309 - DNA, 15 bp, Homo sapiens
ttcatctcaaacgca

SEQ ID NO: 1521310 - DNA, 15 bp, Homo sapiens
gttcatctcaaacgc

SEQ ID NO: 1521311 - DNA, 15 bp, Homo sapiens
ggttcatctcaaacg

SEQ ID NO: 1521312 - DNA, 15 bp, Homo sapiens
tggttcatctcaaac

SEQ ID NO: 1521313 - DNA, 15 bp, Homo sapiens
atggttcatctcaaa

SEQ ID NO: 1521314 - DNA, 15 bp, Homo sapiens
tatggttcatctcaa

SEQ ID NO: 1521315 - DNA, 15 bp, Homo sapiens
atatggttcatctca

SEQ ID NO: 1521316 - DNA, 15 bp, Homo sapiens
aatatggttcatctc

SEQ ID NO: 1521317 - DNA, 15 bp, Homo sapiens
aaatatggttcatct

SEQ ID NO: 1521318 - DNA, 15 bp, Homo sapiens
caaatatggttcatc

SEQ ID NO: 1521319 - DNA, 15 bp, Homo sapiens
acaaatatggttcat

SEQ ID NO: 1521320 - DNA, 15 bp, Homo sapiens
tacaaatatggttca

SEQ ID NO: 1521321 - DNA, 15 bp, Homo sapiens
atacaaatatggttc

SEQ ID NO: 1521322 - DNA, 15 bp, Homo sapiens
aatacaaatatggtt

SEQ ID NO: 1521323 - DNA, 15 bp, Homo sapiens
gaatacaaatatggt

SEQ ID NO: 1521324 - DNA, 15 bp, Homo sapiens
agaatacaaatatgg

SEQ ID NO: 1521325 - DNA, 15 bp, Homo sapiens
tagaatacaaatatg

SEQ ID NO: 1521326 - DNA, 15 bp, Homo sapiens
ttagaatacaaatat

SEQ ID NO: 1521327 - DNA, 15 bp, Homo sapiens
gttagaatacaaata

SEQ ID NO: 1521328 - DNA, 15 bp, Homo sapiens
ggttagaatacaaat

SEQ ID NO: 1521329 - DNA, 15 bp, Homo sapiens
gggttagaatacaaa

SEQ ID NO: 1521330 - DNA, 15 bp, Homo sapiens
ggggttagaatacaa

SEQ ID NO: 1521331 - DNA, 15 bp, Homo sapiens
tggggttagaataca

SEQ ID NO: 1521332 - DNA, 15 bp, Homo sapiens
ttggggttagaatac

SEQ ID NO: 1521333 - DNA, 15 bp, Homo sapiens
gttggggttagaata

SEQ ID NO: 1521334 - DNA, 15 bp, Homo sapiens
ggttggggttagaat

SEQ ID NO: 1521335 - DNA, 15 bp, Homo sapiens
aggttggggttagaa

SEQ ID NO: 1521336 - DNA, 15 bp, Homo sapiens
aaggttggggttaga

SEQ ID NO: 1521337 - DNA, 15 bp, Homo sapiens
aaaggttggggttag

SEQ ID NO: 1521338 - DNA, 15 bp, Homo sapiens
taaaggttggggtta

SEQ ID NO: 1521339 - DNA, 15 bp, Homo sapiens
ttaaaggttggggtt

SEQ ID NO: 1521340 - DNA, 15 bp, Homo sapiens
attaaaggttggggt

SEQ ID NO: 1521341 - DNA, 15 bp, Homo sapiens
tattaaaggttgggg

SEQ ID NO: 1521342 - DNA, 15 bp, Homo sapiens
gtattaaaggttggg

SEQ ID NO: 1521343 - DNA, 15 bp, Homo sapiens
tgtattaaaggttgg

SEQ ID NO: 1521344 - DNA, 15 bp, Homo sapiens
ttgtattaaaggttg

SEQ ID NO: 1521345 - DNA, 15 bp, Homo sapiens
gttgtattaaaggtt

SEQ ID NO: 1521346 - DNA, 15 bp, Homo sapiens
ggttgtattaaaggt

SEQ ID NO: 1521347 - DNA, 15 bp, Homo sapiens
tggttgtattaaagg

SEQ ID NO: 1521348 - DNA, 15 bp, Homo sapiens
ctggttgtattaaag

SEQ ID NO: 1521349 - DNA, 15 bp, Homo sapiens
cctggttgtattaaa

SEQ ID NO: 1521350 - DNA, 15 bp, Homo sapiens
tcctggttgtattaa

SEQ ID NO: 1521351 - DNA, 15 bp, Homo sapiens
atcctggttgtatta

SEQ ID NO: 1521352 - DNA, 15 bp, Homo sapiens
tatcctggttgtatt

SEQ ID NO: 1521353 - DNA, 15 bp, Homo sapiens
atatcctggttgtat

SEQ ID NO: 1521354 - DNA, 15 bp, Homo sapiens
aatatcctggttgta

SEQ ID NO: 1521355 - DNA, 15 bp, Homo sapiens
aaatatcctggttgt

SEQ ID NO: 1521356 - DNA, 15 bp, Homo sapiens
aaaatatcctggttg

SEQ ID NO: 1521357 - DNA, 15 bp, Homo sapiens
aaaaatatcctggtt

SEQ ID NO: 1521358 - DNA, 15 bp, Homo sapiens
taaaaatatcctggt

SEQ ID NO: 1521359 - DNA, 15 bp, Homo sapiens
gtaaaaatatcctgg

SEQ ID NO: 1521360 - DNA, 15 bp, Homo sapiens
agtaaaaatatcctg

SEQ ID NO: 1521361 - DNA, 15 bp, Homo sapiens
aagtaaaaatatcct

SEQ ID NO: 1521362 - DNA, 15 bp, Homo sapiens
aaagtaaaaatatcc

SEQ ID NO: 1521363 - DNA, 15 bp, Homo sapiens
aaaagtaaaaatatc

SEQ ID NO: 1521364 - DNA, 15 bp, Homo sapiens
ggaaaagtaaaaata

SEQ ID NO: 1521365 - DNA, 15 bp, Homo sapiens
cggaaaagtaaaaat

SEQ ID NO: 1521366 - DNA, 15 bp, Homo sapiens
acggaaaagtaaaaa

SEQ ID NO: 1521367 - DNA, 15 bp, Homo sapiens
aacggaaaagtaaaa

SEQ ID NO: 1521368 - DNA, 15 bp, Homo sapiens
caacggaaaagtaaa

SEQ ID NO: 1521369 - DNA, 15 bp, Homo sapiens
acaacggaaaagtaa

SEQ ID NO: 1521370 - DNA, 15 bp, Homo sapiens
aacaacggaaaagta

SEQ ID NO: 1521371 - DNA, 15 bp, Homo sapiens
caacaacggaaaagt

SEQ ID NO: 1521372 - DNA, 15 bp, Homo sapiens
acaacaacggaaaag

SEQ ID NO: 1521373 - DNA, 15 bp, Homo sapiens
gacaacaacggaaaa

SEQ ID NO: 1521374 - DNA, 15 bp, Homo sapiens
agacaacaacggaaa

SEQ ID NO: 1521375 - DNA, 15 bp, Homo sapiens
tagacaacaacggaa

SEQ ID NO: 1521376 - DNA, 15 bp, Homo sapiens
ttagacaacaacgga

SEQ ID NO: 1521377 - DNA, 15 bp, Homo sapiens
cttagacaacaacgg

SEQ ID NO: 1521378 - DNA, 15 bp, Homo sapiens
acttagacaacaacg

SEQ ID NO: 1521379 - DNA, 15 bp, Homo sapiens
tacttagacaacaac

SEQ ID NO: 1521380 - DNA, 15 bp, Homo sapiens
ttacttagacaacaa

SEQ ID NO: 1521381 - DNA, 15 bp, Homo sapiens
tttacttagacaaca

SEQ ID NO: 1521382 - DNA, 15 bp, Homo sapiens
ttttacttagacaac

SEQ ID NO: 1521383 - DNA, 15 bp, Homo sapiens
tttttacttagacaa

SEQ ID NO: 1521384 - DNA, 15 bp, Homo sapiens
ctttttacttagaca

SEQ ID NO: 1521385 - DNA, 15 bp, Homo sapiens
gctttttacttagac

SEQ ID NO: 1521386 - DNA, 15 bp, Homo sapiens
tgctttttacttaga

SEQ ID NO: 1521387 - DNA, 15 bp, Homo sapiens
ttgctttttacttag

SEQ ID NO: 1521388 - DNA, 15 bp, Homo sapiens
tttgctttttactta

SEQ ID NO: 1521389 - DNA, 15 bp, Homo sapiens
gtttgctttttactt

SEQ ID NO: 1521390 - DNA, 15 bp, Homo sapiens
tgtttgctttttact

SEQ ID NO: 1521391 - DNA, 15 bp, Homo sapiens
atgtttgctttttac

SEQ ID NO: 1521392 - DNA, 15 bp, Homo sapiens
aatgtttgcttttta

SEQ ID NO: 1521393 - DNA, 15 bp, Homo sapiens
caatgtttgcttttt

SEQ ID NO: 1521394 - DNA, 15 bp, Homo sapiens
ccaatgtttgctttt

SEQ ID NO: 1521395 - DNA, 15 bp, Homo sapiens
accaatgtttgcttt

SEQ ID NO: 1521396 - DNA, 15 bp, Homo sapiens
taccaatgtttgctt

SEQ ID NO: 1521397 - DNA, 15 bp, Homo sapiens
ttaccaatgtttgct

SEQ ID NO: 1521398 - DNA, 15 bp, Homo sapiens
cttaccaatgtttgc

SEQ ID NO: 1521399 - DNA, 15 bp, Homo sapiens
ccttaccaatgtttg

SEQ ID NO: 1521400 - DNA, 15 bp, Homo sapiens
cccttaccaatgttt

SEQ ID NO: 1521401 - DNA, 15 bp, Homo sapiens
tcccttaccaatgtt

SEQ ID NO: 1521402 - DNA, 15 bp, Homo sapiens
ctcccttaccaatgt

SEQ ID NO: 1521403 - DNA, 15 bp, Homo sapiens
cctcccttaccaatg

SEQ ID NO: 1521404 - DNA, 15 bp, Homo sapiens
acctcccttaccaat

SEQ ID NO: 1521405 - DNA, 15 bp, Homo sapiens
tacctcccttaccaa

SEQ ID NO: 1521406 - DNA, 15 bp, Homo sapiens
ctacctcccttacca

SEQ ID NO: 1521407 - DNA, 15 bp, Homo sapiens
tctacctcccttacc

SEQ ID NO: 1521408 - DNA, 15 bp, Homo sapiens
ttctacctcccttac

SEQ ID NO: 1521409 - DNA, 15 bp, Homo sapiens
cttctacctccctta

SEQ ID NO: 1521410 - DNA, 15 bp, Homo sapiens
tcttctacctccctt

SEQ ID NO: 1521411 - DNA, 15 bp, Homo sapiens
atcttctacctccct

SEQ ID NO: 1521412 - DNA, 15 bp, Homo sapiens
catcttctacctccc

SEQ ID NO: 1521413 - DNA, 15 bp, Homo sapiens
acatcttctacctcc

SEQ ID NO: 1521414 - DNA, 15 bp, Homo sapiens
cacatcttctacctc

SEQ ID NO: 1521415 - DNA, 15 bp, Homo sapiens
acacatcttctacct

SEQ ID NO: 1521416 - DNA, 15 bp, Homo sapiens
aacacatcttctacc

SEQ ID NO: 1521417 - DNA, 15 bp, Homo sapiens
aaacacatcttctac

SEQ ID NO: 1521418 - DNA, 15 bp, Homo sapiens
gaaacacatcttcta

SEQ ID NO: 1521419 - DNA, 15 bp, Homo sapiens
ggaaacacatcttct

SEQ ID NO: 1521420 - DNA, 15 bp, Homo sapiens
gggaaacacatcttc

SEQ ID NO: 1521421 - DNA, 15 bp, Homo sapiens
ggggaaacacatctt

SEQ ID NO: 1521422 - DNA, 15 bp, Homo sapiens
gggggaaacacatct

SEQ ID NO: 1521423 - DNA, 15 bp, Homo sapiens
agggggaaacacatc

SEQ ID NO: 1521424 - DNA, 15 bp, Homo sapiens
gagggggaaacacat

SEQ ID NO: 1521425 - DNA, 15 bp, Homo sapiens
agagggggaaacaca

SEQ ID NO: 1521426 - DNA, 15 bp, Homo sapiens
aagagggggaaacac

SEQ ID NO: 1521427 - DNA, 15 bp, Homo sapiens
gaagagggggaaaca

SEQ ID NO: 1521428 - DNA, 15 bp, Homo sapiens
agaagagggggaaac

SEQ ID NO: 1521429 - DNA, 15 bp, Homo sapiens
aagaagagggggaaa

SEQ ID NO: 1521430 - DNA, 15 bp, Homo sapiens
aaagaagagggggaa

SEQ ID NO: 1521431 - DNA, 15 bp, Homo sapiens
taaagaagaggggga

SEQ ID NO: 1521432 - DNA, 15 bp, Homo sapiens
ttaaagaagaggggg

SEQ ID NO: 1521433 - DNA, 15 bp, Homo sapiens
tttaaagaagagggg

SEQ ID NO: 1521434 - DNA, 15 bp, Homo sapiens
ttttaaagaagaggg

SEQ ID NO: 1521435 - DNA, 15 bp, Homo sapiens
attttaaagaagagg

SEQ ID NO: 1521436 - DNA, 15 bp, Homo sapiens
gattttaaagaagag

SEQ ID NO: 1521437 - DNA, 15 bp, Homo sapiens
agattttaaagaaga

SEQ ID NO: 1521438 - DNA, 15 bp, Homo sapiens
aagattttaaagaag

SEQ ID NO: 1521439 - DNA, 15 bp, Homo sapiens
taagattttaaagaa

SEQ ID NO: 1521440 - DNA, 15 bp, Homo sapiens
ataagattttaaaga

SEQ ID NO: 1521441 - DNA, 15 bp, Homo sapiens
aataagattttaaag

SEQ ID NO: 1521442 - DNA, 15 bp, Homo sapiens
taataagattttaaa

SEQ ID NO: 1521443 - DNA, 15 bp, Homo sapiens
ctaataagattttaa

SEQ ID NO: 1521444 - DNA, 15 bp, Homo sapiens
actaataagatttta

SEQ ID NO: 1521445 - DNA, 15 bp, Homo sapiens
aactaataagatttt

SEQ ID NO: 1521446 - DNA, 15 bp, Homo sapiens
aaactaataagattt

SEQ ID NO: 1521447 - DNA, 15 bp, Homo sapiens
taaactaataagatt

SEQ ID NO: 1521448 - DNA, 15 bp, Homo sapiens
gtaaactaataagat

SEQ ID NO: 1521449 - DNA, 15 bp, Homo sapiens
tgtaaactaataaga

SEQ ID NO: 1521450 - DNA, 15 bp, Homo sapiens
ttgtaaactaataag

SEQ ID NO: 1521451 - DNA, 15 bp, Homo sapiens
tttgtaaactaataa

SEQ ID NO: 1521452 - DNA, 15 bp, Homo sapiens
atttgtaaactaata

SEQ ID NO: 1521453 - DNA, 15 bp, Homo sapiens
tatttgtaaactaat

SEQ ID NO: 1521454 - DNA, 15 bp, Homo sapiens
ctatttgtaaactaa

SEQ ID NO: 1521455 - DNA, 15 bp, Homo sapiens
gctatttgtaaacta

SEQ ID NO: 1521456 - DNA, 15 bp, Homo sapiens
tgctatttgtaaact

SEQ ID NO: 1521457 - DNA, 15 bp, Homo sapiens
ttgctatttgtaaac

SEQ ID NO: 1521458 - DNA, 15 bp, Homo sapiens
tttgctatttgtaaa

SEQ ID NO: 1521459 - DNA, 15 bp, Homo sapiens
ctttgctatttgtaa

SEQ ID NO: 1521460 - DNA, 15 bp, Homo sapiens
tctttgctatttgta

SEQ ID NO: 1521461 - DNA, 15 bp, Homo sapiens
atctttgctatttgt

SEQ ID NO: 1521462 - DNA, 15 bp, Homo sapiens
aatctttgctatttg

SEQ ID NO: 1521463 - DNA, 15 bp, Homo sapiens
aaatctttgctattt

SEQ ID NO: 1521464 - DNA, 15 bp, Homo sapiens
gaaatctttgctatt

SEQ ID NO: 1521465 - DNA, 15 bp, Homo sapiens
agaaatctttgctat

SEQ ID NO: 1521466 - DNA, 15 bp, Homo sapiens
cagaaatctttgcta

SEQ ID NO: 1521467 - DNA, 15 bp, Homo sapiens
ccagaaatctttgct

SEQ ID NO: 1521468 - DNA, 15 bp, Homo sapiens
tccagaaatctttgc

SEQ ID NO: 1521469 - DNA, 15 bp, Homo sapiens
ttccagaaatctttg

SEQ ID NO: 1521470 - DNA, 15 bp, Homo sapiens
tttccagaaatcttt

SEQ ID NO: 1521471 - DNA, 15 bp, Homo sapiens
ttttccagaaatctt

SEQ ID NO: 1521472 - DNA, 15 bp, Homo sapiens
gttttccagaaatct

SEQ ID NO: 1521473 - DNA, 15 bp, Homo sapiens
tgttttccagaaatc

SEQ ID NO: 1521474 - DNA, 15 bp, Homo sapiens
ttgttttccagaaat

SEQ ID NO: 1521475 - DNA, 15 bp, Homo sapiens
tttgttttccagaaa

SEQ ID NO: 1521476 - DNA, 15 bp, Homo sapiens
ctttgttttccagaa

SEQ ID NO: 1521477 - DNA, 15 bp, Homo sapiens
gctttgttttccaga

SEQ ID NO: 1521478 - DNA, 15 bp, Homo sapiens
agctttgttttccag

SEQ ID NO: 1521479 - DNA, 15 bp, Homo sapiens
cagctttgttttcca

SEQ ID NO: 1521480 - DNA, 15 bp, Homo sapiens
gcagctttgttttcc

SEQ ID NO: 1521481 - DNA, 15 bp, Homo sapiens
cgcagctttgttttc

SEQ ID NO: 1521482 - DNA, 15 bp, Homo sapiens
acgcagctttgtttt

SEQ ID NO: 1521483 - DNA, 15 bp, Homo sapiens
aacgcagctttgttt

SEQ ID NO: 1521484 - DNA, 15 bp, Homo sapiens
aaacgcagctttgtt

SEQ ID NO: 1521485 - DNA, 15 bp, Homo sapiens
aaaacgcagctttgt

SEQ ID NO: 1521486 - DNA, 15 bp, Homo sapiens
aaaaacgcagctttg

SEQ ID NO: 1521487 - DNA, 15 bp, Homo sapiens
aaaaaacgcagcttt

SEQ ID NO: 1521488 - DNA, 15 bp, Homo sapiens
aaaaaaacgcagctt

SEQ ID NO: 1521489 - DNA, 15 bp, Homo sapiens
aaaaaaaacgcagct

SEQ ID NO: 1521490 - DNA, 15 bp, Homo sapiens
aaaaaaaaacgcagc

SEQ ID NO: 1521491 - DNA, 15 bp, Homo sapiens
aaaaaaaaaacgcag

SEQ ID NO: 1521492 - DNA, 15 bp, Homo sapiens
aaaaaaaaaaacgca

SEQ ID NO: 1521493 - DNA, 15 bp, Homo sapiens
gaaaaaaaaaaacgc

SEQ ID NO: 1521494 - DNA, 15 bp, Homo sapiens
cgaaaaaaaaaaacg

SEQ ID NO: 1521495 - DNA, 15 bp, Homo sapiens
ccgaaaaaaaaaaac

SEQ ID NO: 1521496 - DNA, 15 bp, Homo sapiens
ttccgaaaaaaaaaa

SEQ ID NO: 1521497 - DNA, 15 bp, Homo sapiens
attccgaaaaaaaaa

SEQ ID NO: 1521498 - DNA, 15 bp, Homo sapiens
gattccgaaaaaaaa

SEQ ID NO: 1521499 - DNA, 15 bp, Homo sapiens
tgattccgaaaaaaa

SEQ ID NO: 1521500 - DNA, 15 bp, Homo sapiens
ctgattccgaaaaaa

SEQ ID NO: 1521501 - DNA, 15 bp, Homo sapiens
tctgattccgaaaaa

SEQ ID NO: 1521502 - DNA, 15 bp, Homo sapiens
ttctgattccgaaaa

SEQ ID NO: 1521503 - DNA, 15 bp, Homo sapiens
tttctgattccgaaa

SEQ ID NO: 1521504 - DNA, 15 bp, Homo sapiens
gtttctgattccgaa

SEQ ID NO: 1521505 - DNA, 15 bp, Homo sapiens
agtttctgattccga

SEQ ID NO: 1521506 - DNA, 15 bp, Homo sapiens
cagtttctgattccg

SEQ ID NO: 1521507 - DNA, 15 bp, Homo sapiens
acagtttctgattcc

SEQ ID NO: 1521508 - DNA, 15 bp, Homo sapiens
aacagtttctgattc

SEQ ID NO: 1521509 - DNA, 15 bp, Homo sapiens
taacagtttctgatt

SEQ ID NO: 1521510 - DNA, 15 bp, Homo sapiens
ataacagtttctgat

SEQ ID NO: 1521511 - DNA, 15 bp, Homo sapiens
tataacagtttctga

SEQ ID NO: 1521512 - DNA, 15 bp, Homo sapiens
atataacagtttctg

SEQ ID NO: 1521513 - DNA, 15 bp, Homo sapiens
aatataacagtttct

SEQ ID NO: 1521514 - DNA, 15 bp, Homo sapiens
aaatataacagtttc

SEQ ID NO: 1521515 - DNA, 15 bp, Homo sapiens
caaatataacagttt

SEQ ID NO: 1521516 - DNA, 15 bp, Homo sapiens
acaaatataacagtt

SEQ ID NO: 1521517 - DNA, 15 bp, Homo sapiens
tacaaatataacagt

SEQ ID NO: 1521518 - DNA, 15 bp, Homo sapiens
atacaaatataacag

SEQ ID NO: 1521519 - DNA, 15 bp, Homo sapiens
aatacaaatataaca

SEQ ID NO: 1521520 - DNA, 15 bp, Homo sapiens
gaatacaaatataac

SEQ ID NO: 1521521 - DNA, 15 bp, Homo sapiens
ggaatacaaatataa

SEQ ID NO: 1521522 - DNA, 15 bp, Homo sapiens
gggaatacaaatata

SEQ ID NO: 1521523 - DNA, 15 bp, Homo sapiens
agggaatacaaatat

SEQ ID NO: 1521524 - DNA, 15 bp, Homo sapiens
gagggaatacaaata

SEQ ID NO: 1521525 - DNA, 15 bp, Homo sapiens
agagggaatacaaat

SEQ ID NO: 1521526 - DNA, 15 bp, Homo sapiens
gagagggaatacaaa

SEQ ID NO: 1521527 - DNA, 15 bp, Homo sapiens
agagagggaatacaa

SEQ ID NO: 1521528 - DNA, 15 bp, Homo sapiens
cagagagggaataca

SEQ ID NO: 1521529 - DNA, 15 bp, Homo sapiens
acagagagggaatac

SEQ ID NO: 1521530 - DNA, 15 bp, Homo sapiens
cacagagagggaata

SEQ ID NO: 1521531 - DNA, 15 bp, Homo sapiens
ccacagagagggaat

SEQ ID NO: 1521532 - DNA, 15 bp, Homo sapiens
accacagagagggaa

SEQ ID NO: 1521533 - DNA, 15 bp, Homo sapiens
caccacagagaggga

SEQ ID NO: 1521534 - DNA, 15 bp, Homo sapiens
tcaccacagagaggg

SEQ ID NO: 1521535 - DNA, 15 bp, Homo sapiens
atcaccacagagagg

SEQ ID NO: 1521536 - DNA, 15 bp, Homo sapiens
gatcaccacagagag

SEQ ID NO: 1521537 - DNA, 15 bp, Homo sapiens
agatcaccacagaga

SEQ ID NO: 1521538 - DNA, 15 bp, Homo sapiens
tagatcaccacagag

SEQ ID NO: 1521539 - DNA, 15 bp, Homo sapiens
ctagatcaccacaga

SEQ ID NO: 1521540 - DNA, 15 bp, Homo sapiens
tctagatcaccacag

SEQ ID NO: 1521541 - DNA, 15 bp, Homo sapiens
ttctagatcaccaca

SEQ ID NO: 1521542 - DNA, 15 bp, Homo sapiens
tttctagatcaccac

SEQ ID NO: 1521543 - DNA, 15 bp, Homo sapiens
ttttctagatcacca

SEQ ID NO: 1521544 - DNA, 15 bp, Homo sapiens
tttttctagatcacc

SEQ ID NO: 1521545 - DNA, 15 bp, Homo sapiens
ctttttctagatcac

SEQ ID NO: 1521546 - DNA, 15 bp, Homo sapiens
gctttttctagatca

SEQ ID NO: 1521547 - DNA, 15 bp, Homo sapiens
agctttttctagatc

SEQ ID NO: 1521548 - DNA, 15 bp, Homo sapiens
tagctttttctagat

SEQ ID NO: 1521549 - DNA, 15 bp, Homo sapiens
ttagctttttctaga

SEQ ID NO: 1521550 - DNA, 15 bp, Homo sapiens
tttagctttttctag

SEQ ID NO: 1521551 - DNA, 15 bp, Homo sapiens
ctttagctttttcta

SEQ ID NO: 1521552 - DNA, 15 bp, Homo sapiens
cctttagctttttct

SEQ ID NO: 1521553 - DNA, 15 bp, Homo sapiens
tcctttagctttttc

SEQ ID NO: 1521554 - DNA, 15 bp, Homo sapiens
ttcctttagcttttt

SEQ ID NO: 1521555 - DNA, 15 bp, Homo sapiens
tttcctttagctttt

SEQ ID NO: 1521556 - DNA, 15 bp, Homo sapiens
ctttcctttagcttt

SEQ ID NO: 1521557 - DNA, 15 bp, Homo sapiens
tctttcctttagctt

SEQ ID NO: 1521558 - DNA, 15 bp, Homo sapiens
atctttcctttagct

SEQ ID NO: 1521559 - DNA, 15 bp, Homo sapiens
aatctttcctttagc

SEQ ID NO: 1521560 - DNA, 15 bp, Homo sapiens
caatctttcctttag

SEQ ID NO: 1521561 - DNA, 15 bp, Homo sapiens
ccaatctttccttta

SEQ ID NO: 1521562 - DNA, 15 bp, Homo sapiens
tccaatctttccttt

SEQ ID NO: 1521563 - DNA, 15 bp, Homo sapiens
gtccaatctttcctt

SEQ ID NO: 1521564 - DNA, 15 bp, Homo sapiens
ggtccaatctttcct

SEQ ID NO: 1521565 - DNA, 15 bp, Homo sapiens
aggtccaatctttcc

SEQ ID NO: 1521566 - DNA, 15 bp, Homo sapiens
caggtccaatctttc

SEQ ID NO: 1521567 - DNA, 15 bp, Homo sapiens
gcaggtccaatcttt

SEQ ID NO: 1521568 - DNA, 15 bp, Homo sapiens
agcaggtccaatctt

SEQ ID NO: 1521569 - DNA, 15 bp, Homo sapiens
cagcaggtccaatct

SEQ ID NO: 1521570 - DNA, 15 bp, Homo sapiens
gcagcaggtccaatc

SEQ ID NO: 1521571 - DNA, 15 bp, Homo sapiens
tgcagcaggtccaat

SEQ ID NO: 1521572 - DNA, 15 bp, Homo sapiens
ctgcagcaggtccaa

SEQ ID NO: 1521573 - DNA, 15 bp, Homo sapiens
tctgcagcaggtcca

SEQ ID NO: 1521574 - DNA, 15 bp, Homo sapiens
atctgcagcaggtcc

SEQ ID NO: 1521575 - DNA, 15 bp, Homo sapiens
gatctgcagcaggtc

SEQ ID NO: 1521576 - DNA, 15 bp, Homo sapiens
ggatctgcagcaggt

SEQ ID NO: 1521577 - DNA, 15 bp, Homo sapiens
gggatctgcagcagg

SEQ ID NO: 1521578 - DNA, 15 bp, Homo sapiens
agggatctgcagcag

SEQ ID NO: 1521579 - DNA, 15 bp, Homo sapiens
aagggatctgcagca

SEQ ID NO: 1521580 - DNA, 15 bp, Homo sapiens
taagggatctgcagc

SEQ ID NO: 1521581 - DNA, 15 bp, Homo sapiens
ctaagggatctgcag

SEQ ID NO: 1521582 - DNA, 15 bp, Homo sapiens
actaagggatctgca

SEQ ID NO: 1521583 - DNA, 15 bp, Homo sapiens
cactaagggatctgc

SEQ ID NO: 1521584 - DNA, 15 bp, Homo sapiens
tcactaagggatctg

SEQ ID NO: 1521585 - DNA, 15 bp, Homo sapiens
ctcactaagggatct

SEQ ID NO: 1521586 - DNA, 15 bp, Homo sapiens
tctcactaagggatc

SEQ ID NO: 1521587 - DNA, 15 bp, Homo sapiens
atctcactaagggat

SEQ ID NO: 1521588 - DNA, 15 bp, Homo sapiens
aatctcactaaggga

SEQ ID NO: 1521589 - DNA, 15 bp, Homo sapiens
gaatctcactaaggg

SEQ ID NO: 1521590 - DNA, 15 bp, Homo sapiens
tgaatctcactaagg

SEQ ID NO: 1521591 - DNA, 15 bp, Homo sapiens
ttgaatctcactaag

SEQ ID NO: 1521592 - DNA, 15 bp, Homo sapiens
attgaatctcactaa

SEQ ID NO: 1521593 - DNA, 15 bp, Homo sapiens
gattgaatctcacta

SEQ ID NO: 1521594 - DNA, 15 bp, Homo sapiens
tgattgaatctcact

SEQ ID NO: 1521595 - DNA, 15 bp, Homo sapiens
ctgattgaatctcac

SEQ ID NO: 1521596 - DNA, 15 bp, Homo sapiens
actgattgaatctca

SEQ ID NO: 1521597 - DNA, 15 bp, Homo sapiens
aactgattgaatctc

SEQ ID NO: 1521598 - DNA, 15 bp, Homo sapiens
aaactgattgaatct

SEQ ID NO: 1521599 - DNA, 15 bp, Homo sapiens
caaactgattgaatc

SEQ ID NO: 1521600 - DNA, 15 bp, Homo sapiens
ccaaactgattgaat

SEQ ID NO: 1521601 - DNA, 15 bp, Homo sapiens
accaaactgattgaa

SEQ ID NO: 1521602 - DNA, 15 bp, Homo sapiens
aaccaaactgattga

SEQ ID NO: 1521603 - DNA, 15 bp, Homo sapiens
aaaccaaactgattg

SEQ ID NO: 1521604 - DNA, 15 bp, Homo sapiens
gaaaccaaactgatt

SEQ ID NO: 1521605 - DNA, 15 bp, Homo sapiens
ggaaaccaaactgat

SEQ ID NO: 1521606 - DNA, 15 bp, Homo sapiens
tggaaaccaaactga

SEQ ID NO: 1521607 - DNA, 15 bp, Homo sapiens
atggaaaccaaactg

SEQ ID NO: 1521608 - DNA, 15 bp, Homo sapiens
catggaaaccaaact

SEQ ID NO: 1521609 - DNA, 15 bp, Homo sapiens
tcatggaaaccaaac

SEQ ID NO: 1521610 - DNA, 15 bp, Homo sapiens
ttcatggaaaccaaa

SEQ ID NO: 1521611 - DNA, 15 bp, Homo sapiens
tttcatggaaaccaa

SEQ ID NO: 1521612 - DNA, 15 bp, Homo sapiens
gtttcatggaaacca

SEQ ID NO: 1521613 - DNA, 15 bp, Homo sapiens
ggtttcatggaaacc

SEQ ID NO: 1521614 - DNA, 15 bp, Homo sapiens
aggtttcatggaaac

SEQ ID NO: 1521615 - DNA, 15 bp, Homo sapiens
taggtttcatggaaa

SEQ ID NO: 1521616 - DNA, 15 bp, Homo sapiens
ataggtttcatggaa

SEQ ID NO: 1521617 - DNA, 15 bp, Homo sapiens
aataggtttcatgga

SEQ ID NO: 1521618 - DNA, 15 bp, Homo sapiens
caataggtttcatgg

SEQ ID NO: 1521619 - DNA, 15 bp, Homo sapiens
tcaataggtttcatg

SEQ ID NO: 1521620 - DNA, 15 bp, Homo sapiens
ctcaataggtttcat

SEQ ID NO: 1521621 - DNA, 15 bp, Homo sapiens
actcaataggtttca

SEQ ID NO: 1521622 - DNA, 15 bp, Homo sapiens
gactcaataggtttc

SEQ ID NO: 1521623 - DNA, 15 bp, Homo sapiens
agactcaataggttt

SEQ ID NO: 1521624 - DNA, 15 bp, Homo sapiens
aagactcaataggtt

SEQ ID NO: 1521625 - DNA, 15 bp, Homo sapiens
caagactcaataggt

SEQ ID NO: 1521626 - DNA, 15 bp, Homo sapiens
acaagactcaatagg

SEQ ID NO: 1521627 - DNA, 15 bp, Homo sapiens
cacaagactcaatag

SEQ ID NO: 1521628 - DNA, 15 bp, Homo sapiens
ccacaagactcaata

SEQ ID NO: 1521629 - DNA, 15 bp, Homo sapiens
gccacaagactcaat

SEQ ID NO: 1521630 - DNA, 15 bp, Homo sapiens
ggccacaagactcaa

SEQ ID NO: 1521631 - DNA, 15 bp, Homo sapiens
aggccacaagactca

SEQ ID NO: 1521632 - DNA, 15 bp, Homo sapiens
caggccacaagactc

SEQ ID NO: 1521633 - DNA, 15 bp, Homo sapiens
tcaggccacaagact

SEQ ID NO: 1521634 - DNA, 15 bp, Homo sapiens
ctcaggccacaagac

SEQ ID NO: 1521635 - DNA, 15 bp, Homo sapiens
tctcaggccacaaga

SEQ ID NO: 1521636 - DNA, 15 bp, Homo sapiens
ttctcaggccacaag

SEQ ID NO: 1521637 - DNA, 15 bp, Homo sapiens
attctcaggccacaa

SEQ ID NO: 1521638 - DNA, 15 bp, Homo sapiens
cattctcaggccaca

SEQ ID NO: 1521639 - DNA, 15 bp, Homo sapiens
gcattctcaggccac

SEQ ID NO: 1521640 - DNA, 15 bp, Homo sapiens
agcattctcaggcca

SEQ ID NO: 1521641 - DNA, 15 bp, Homo sapiens
tagcattctcaggcc

SEQ ID NO: 1521642 - DNA, 15 bp, Homo sapiens
ttagcattctcaggc

SEQ ID NO: 1521643 - DNA, 15 bp, Homo sapiens
cttagcattctcagg

SEQ ID NO: 1521644 - DNA, 15 bp, Homo sapiens
tcttagcattctcag

SEQ ID NO: 1521645 - DNA, 15 bp, Homo sapiens
ttcttagcattctca

SEQ ID NO: 1521646 - DNA, 15 bp, Homo sapiens
attcttagcattctc

SEQ ID NO: 1521647 - DNA, 15 bp, Homo sapiens
aattcttagcattct

SEQ ID NO: 1521648 - DNA, 15 bp, Homo sapiens
gaattcttagcattc

SEQ ID NO: 1521649 - DNA, 15 bp, Homo sapiens
agaattcttagcatt

SEQ ID NO: 1521650 - DNA, 15 bp, Homo sapiens
gagaattcttagcat

SEQ ID NO: 1521651 - DNA, 15 bp, Homo sapiens
tgagaattcttagca

SEQ ID NO: 1521652 - DNA, 15 bp, Homo sapiens
ctgagaattcttagc

SEQ ID NO: 1521653 - DNA, 15 bp, Homo sapiens
gctgagaattcttag

SEQ ID NO: 1521654 - DNA, 15 bp, Homo sapiens
agctgagaattctta

SEQ ID NO: 1521655 - DNA, 15 bp, Homo sapiens
gagctgagaattctt

SEQ ID NO: 1521656 - DNA, 15 bp, Homo sapiens
agagctgagaattct

SEQ ID NO: 1521657 - DNA, 15 bp, Homo sapiens
cagagctgagaattc

SEQ ID NO: 1521658 - DNA, 15 bp, Homo sapiens
gcagagctgagaatt

SEQ ID NO: 1521659 - DNA, 15 bp, Homo sapiens
agcagagctgagaat

SEQ ID NO: 1521660 - DNA, 15 bp, Homo sapiens
cagcagagctgagaa

SEQ ID NO: 1521661 - DNA, 15 bp, Homo sapiens
gcagcagagctgaga

SEQ ID NO: 1521662 - DNA, 15 bp, Homo sapiens
agcagcagagctgag

SEQ ID NO: 1521663 - DNA, 15 bp, Homo sapiens
aagcagcagagctga

SEQ ID NO: 1521664 - DNA, 15 bp, Homo sapiens
taagcagcagagctg

SEQ ID NO: 1521665 - DNA, 15 bp, Homo sapiens
ataagcagcagagct

SEQ ID NO: 1521666 - DNA, 15 bp, Homo sapiens
aataagcagcagagc

SEQ ID NO: 1521667 - DNA, 15 bp, Homo sapiens
taataagcagcagag

SEQ ID NO: 1521668 - DNA, 15 bp, Homo sapiens
ctaataagcagcaga

SEQ ID NO: 1521669 - DNA, 15 bp, Homo sapiens
gctaataagcagcag

SEQ ID NO: 1521670 - DNA, 15 bp, Homo sapiens
agctaataagcagca

SEQ ID NO: 1521671 - DNA, 15 bp, Homo sapiens
cagctaataagcagc

SEQ ID NO: 1521672 - DNA, 15 bp, Homo sapiens
gcagctaataagcag

SEQ ID NO: 1521673 - DNA, 15 bp, Homo sapiens
tgcagctaataagca

SEQ ID NO: 1521674 - DNA, 15 bp, Homo sapiens
atgcagctaataagc

SEQ ID NO: 1521675 - DNA, 15 bp, Homo sapiens
tatgcagctaataag

SEQ ID NO: 1521676 - DNA, 15 bp, Homo sapiens
ttatgcagctaataa

SEQ ID NO: 1521677 - DNA, 15 bp, Homo sapiens
attatgcagctaata

SEQ ID NO: 1521678 - DNA, 15 bp, Homo sapiens
gattatgcagctaat

SEQ ID NO: 1521679 - DNA, 15 bp, Homo sapiens
agattatgcagctaa

SEQ ID NO: 1521680 - DNA, 15 bp, Homo sapiens
aagattatgcagcta

SEQ ID NO: 1521681 - DNA, 15 bp, Homo sapiens
aaagattatgcagct

SEQ ID NO: 1521682 - DNA, 15 bp, Homo sapiens
aaaagattatgcagc

SEQ ID NO: 1521683 - DNA, 15 bp, Homo sapiens
aaaaagattatgcag

SEQ ID NO: 1521684 - DNA, 15 bp, Homo sapiens
aaaaaagattatgca

SEQ ID NO: 1521685 - DNA, 15 bp, Homo sapiens
aaaaaaagattatgc

SEQ ID NO: 1521686 - DNA, 15 bp, Homo sapiens
aaaaaaaagattatg

SEQ ID NO: 1521687 - DNA, 15 bp, Homo sapiens
aaaaaaaaagattat

SEQ ID NO: 1521688 - DNA, 15 bp, Homo sapiens
aaaaaaaaaagatta

SEQ ID NO: 1521689 - DNA, 15 bp, Homo sapiens
tccatttcaaaaaaa

SEQ ID NO: 1521690 - DNA, 15 bp, Homo sapiens
ctccatttcaaaaaa

SEQ ID NO: 1521691 - DNA, 15 bp, Homo sapiens
actccatttcaaaaa

SEQ ID NO: 1521692 - DNA, 15 bp, Homo sapiens
aactccatttcaaaa

SEQ ID NO: 1521693 - DNA, 15 bp, Homo sapiens
aaactccatttcaaa

SEQ ID NO: 1521694 - DNA, 15 bp, Homo sapiens
gaaactccatttcaa

SEQ ID NO: 1521695 - DNA, 15 bp, Homo sapiens
tgaaactccatttca

SEQ ID NO: 1521696 - DNA, 15 bp, Homo sapiens
gtgaaactccatttc

SEQ ID NO: 1521697 - DNA, 15 bp, Homo sapiens
agtgaaactccattt

SEQ ID NO: 1521698 - DNA, 15 bp, Homo sapiens
gagtgaaactccatt

SEQ ID NO: 1521699 - DNA, 15 bp, Homo sapiens
tgacaagagtgaaac

SEQ ID NO: 1521700 - DNA, 15 bp, Homo sapiens
gtgacaagagtgaaa

SEQ ID NO: 1521701 - DNA, 15 bp, Homo sapiens
ggtgacaagagtgaa

SEQ ID NO: 1521702 - DNA, 15 bp, Homo sapiens
gggtgacaagagtga

SEQ ID NO: 1521703 - DNA, 15 bp, Homo sapiens
tgggtgacaagagtg

SEQ ID NO: 1521704 - DNA, 15 bp, Homo sapiens
ctgggtgacaagagt

SEQ ID NO: 1521705 - DNA, 15 bp, Homo sapiens
cctgggtgacaagag

SEQ ID NO: 1521706 - DNA, 15 bp, Homo sapiens
gcctgggtgacaaga

SEQ ID NO: 1521707 - DNA, 15 bp, Homo sapiens
agcctgggtgacaag

SEQ ID NO: 1521708 - DNA, 15 bp, Homo sapiens
tccattgcactccag

SEQ ID NO: 1521709 - DNA, 15 bp, Homo sapiens
ctccattgcactcca

SEQ ID NO: 1521710 - DNA, 15 bp, Homo sapiens
gctccattgcactcc

SEQ ID NO: 1521711 - DNA, 15 bp, Homo sapiens
cgctccattgcactc

SEQ ID NO: 1521712 - DNA, 15 bp, Homo sapiens
tcgctccattgcact

SEQ ID NO: 1521713 - DNA, 15 bp, Homo sapiens
atcgctccattgcac

SEQ ID NO: 1521714 - DNA, 15 bp, Homo sapiens
gatcgctccattgca

SEQ ID NO: 1521715 - DNA, 15 bp, Homo sapiens
agatcgctccattgc

SEQ ID NO: 1521716 - DNA, 15 bp, Homo sapiens
gagatcgctccattg

SEQ ID NO: 1521717 - DNA, 15 bp, Homo sapiens
cgagatcgctccatt

SEQ ID NO: 1521718 - DNA, 15 bp, Homo sapiens
ccgagatcgctccat

SEQ ID NO: 1521719 - DNA, 15 bp, Homo sapiens
gccgagatcgctcca

SEQ ID NO: 1521720 - DNA, 15 bp, Homo sapiens
agccgagatcgctcc

SEQ ID NO: 1521721 - DNA, 15 bp, Homo sapiens
gagccgagatcgctc

SEQ ID NO: 1521722 - DNA, 15 bp, Homo sapiens
tgagccgagatcgct

SEQ ID NO: 1521723 - DNA, 15 bp, Homo sapiens
gccaggaggtggagg

SEQ ID NO: 1521724 - DNA, 15 bp, Homo sapiens
agccaggaggtggag

SEQ ID NO: 1521725 - DNA, 15 bp, Homo sapiens
aagccaggaggtgga

SEQ ID NO: 1521726 - DNA, 15 bp, Homo sapiens
gaagccaggaggtgg

SEQ ID NO: 1521727 - DNA, 15 bp, Homo sapiens
tgaagccaggaggtg

SEQ ID NO: 1521728 - DNA, 15 bp, Homo sapiens
ttgaagccaggaggt

SEQ ID NO: 1521729 - DNA, 15 bp, Homo sapiens
cttgaagccaggagg

SEQ ID NO: 1521730 - DNA, 15 bp, Homo sapiens
acttgaagccaggag

SEQ ID NO: 1521731 - DNA, 15 bp, Homo sapiens
cacttgaagccagga

SEQ ID NO: 1521732 - DNA, 15 bp, Homo sapiens
tcacttgaagccagg

SEQ ID NO: 1521733 - DNA, 15 bp, Homo sapiens
atcacttgaagccag

SEQ ID NO: 1521734 - DNA, 15 bp, Homo sapiens
aatcacttgaagcca

SEQ ID NO: 1521735 - DNA, 15 bp, Homo sapiens
gaatcacttgaagcc

SEQ ID NO: 1521736 - DNA, 15 bp, Homo sapiens
agaatcacttgaagc

SEQ ID NO: 1521737 - DNA, 15 bp, Homo sapiens
gagaatcacttgaag

SEQ ID NO: 1521738 - DNA, 15 bp, Homo sapiens
acaggagaatcactt

SEQ ID NO: 1521739 - DNA, 15 bp, Homo sapiens
gacaggagaatcact

SEQ ID NO: 1521740 - DNA, 15 bp, Homo sapiens
aagacaggagaatca

SEQ ID NO: 1521741 - DNA, 15 bp, Homo sapiens
taagacaggagaatc

SEQ ID NO: 1521742 - DNA, 15 bp, Homo sapiens
ctaagacaggagaat

SEQ ID NO: 1521743 - DNA, 15 bp, Homo sapiens
gctaagacaggagaa

SEQ ID NO: 1521744 - DNA, 15 bp, Homo sapiens
ggctaagacaggaga

SEQ ID NO: 1521745 - DNA, 15 bp, Homo sapiens
aggctaagacaggag

SEQ ID NO: 1521746 - DNA, 15 bp, Homo sapiens
gaggctaagacagga

SEQ ID NO: 1521747 - DNA, 15 bp, Homo sapiens
ggaggctaagacagg

SEQ ID NO: 1521748 - DNA, 15 bp, Homo sapiens
gggaggctaagacag

SEQ ID NO: 1521749 - DNA, 15 bp, Homo sapiens
cgggaggctaagaca

SEQ ID NO: 1521750 - DNA, 15 bp, Homo sapiens
tcgggaggctaagac

SEQ ID NO: 1521751 - DNA, 15 bp, Homo sapiens
ctcgggaggctaaga

SEQ ID NO: 1521752 - DNA, 15 bp, Homo sapiens
caatcccagctactc

SEQ ID NO: 1521753 - DNA, 15 bp, Homo sapiens
gcaatcccagctact

SEQ ID NO: 1521754 - DNA, 15 bp, Homo sapiens
tgcaatcccagctac

SEQ ID NO: 1521755 - DNA, 15 bp, Homo sapiens
tctgcaatcccagct

SEQ ID NO: 1521756 - DNA, 15 bp, Homo sapiens
gtctgcaatcccagc

SEQ ID NO: 1521757 - DNA, 15 bp, Homo sapiens
tgtctgcaatcccag

SEQ ID NO: 1521758 - DNA, 15 bp, Homo sapiens
atgtctgcaatccca

SEQ ID NO: 1521759 - DNA, 15 bp, Homo sapiens
catgtctgcaatccc

SEQ ID NO: 1521760 - DNA, 15 bp, Homo sapiens
acatgtctgcaatcc

SEQ ID NO: 1521761 - DNA, 15 bp, Homo sapiens
tacatgtctgcaatc

SEQ ID NO: 1521762 - DNA, 15 bp, Homo sapiens
ctacatgtctgcaat

SEQ ID NO: 1521763 - DNA, 15 bp, Homo sapiens
tctacatgtctgcaa

SEQ ID NO: 1521764 - DNA, 15 bp, Homo sapiens
ttctacatgtctgca

SEQ ID NO: 1521765 - DNA, 15 bp, Homo sapiens
gttctacatgtctgc

SEQ ID NO: 1521766 - DNA, 15 bp, Homo sapiens
ggttctacatgtctg

SEQ ID NO: 1521767 - DNA, 15 bp, Homo sapiens
tggttctacatgtct

SEQ ID NO: 1521768 - DNA, 15 bp, Homo sapiens
atggttctacatgtc

SEQ ID NO: 1521769 - DNA, 15 bp, Homo sapiens
catggttctacatgt

SEQ ID NO: 1521770 - DNA, 15 bp, Homo sapiens
gcatggttctacatg

SEQ ID NO: 1521771 - DNA, 15 bp, Homo sapiens
cgcatggttctacat

SEQ ID NO: 1521772 - DNA, 15 bp, Homo sapiens
acgcatggttctaca

SEQ ID NO: 1521773 - DNA, 15 bp, Homo sapiens
cacgcatggttctac

SEQ ID NO: 1521774 - DNA, 15 bp, Homo sapiens
ccacgcatggttcta

SEQ ID NO: 1521775 - DNA, 15 bp, Homo sapiens
gccacgcatggttct

SEQ ID NO: 1521776 - DNA, 15 bp, Homo sapiens
agccacgcatggttc

SEQ ID NO: 1521777 - DNA, 15 bp, Homo sapiens
cagccacgcatggtt

SEQ ID NO: 1521778 - DNA, 15 bp, Homo sapiens
tcagccacgcatggt

SEQ ID NO: 1521779 - DNA, 15 bp, Homo sapiens
atcagccacgcatgg

SEQ ID NO: 1521780 - DNA, 15 bp, Homo sapiens
aatcagccacgcatg

SEQ ID NO: 1521781 - DNA, 15 bp, Homo sapiens
aaatcagccacgcat

SEQ ID NO: 1521782 - DNA, 15 bp, Homo sapiens
aaaatcagccacgca

SEQ ID NO: 1521783 - DNA, 15 bp, Homo sapiens
caaaatcagccacgc

SEQ ID NO: 1521784 - DNA, 15 bp, Homo sapiens
acaaaatcagccacg

SEQ ID NO: 1521785 - DNA, 15 bp, Homo sapiens
tacaaaatcagccac

SEQ ID NO: 1521786 - DNA, 15 bp, Homo sapiens
atacaaaatcagcca

SEQ ID NO: 1521787 - DNA, 15 bp, Homo sapiens
ttcccagcactttgg

SEQ ID NO: 1521788 - DNA, 15 bp, Homo sapiens
attcccagcactttg

SEQ ID NO: 1521789 - DNA, 15 bp, Homo sapiens
aattcccagcacttt

SEQ ID NO: 1521790 - DNA, 15 bp, Homo sapiens
taattcccagcactt

SEQ ID NO: 1521791 - DNA, 15 bp, Homo sapiens
gtaattcccagcact

SEQ ID NO: 1521792 - DNA, 15 bp, Homo sapiens
tgtaattcccagcac

SEQ ID NO: 1521793 - DNA, 15 bp, Homo sapiens
ctgtaattcccagca

SEQ ID NO: 1521794 - DNA, 15 bp, Homo sapiens
cctgtaattcccagc

SEQ ID NO: 1521795 - DNA, 15 bp, Homo sapiens
acctgtaattcccag

SEQ ID NO: 1521796 - DNA, 15 bp, Homo sapiens
cacctgtaattccca

SEQ ID NO: 1521797 - DNA, 15 bp, Homo sapiens
acacctgtaattccc

SEQ ID NO: 1521798 - DNA, 15 bp, Homo sapiens
cacacctgtaattcc

SEQ ID NO: 1521799 - DNA, 15 bp, Homo sapiens
tcacacctgtaattc

SEQ ID NO: 1521800 - DNA, 15 bp, Homo sapiens
ctaaggccaggtgca

SEQ ID NO: 1521801 - DNA, 15 bp, Homo sapiens
gctaaggccaggtgc

SEQ ID NO: 1521802 - DNA, 15 bp, Homo sapiens
agctaaggccaggtg

SEQ ID NO: 1521803 - DNA, 15 bp, Homo sapiens
cagctaaggccaggt

SEQ ID NO: 1521804 - DNA, 15 bp, Homo sapiens
gcagctaaggccagg

SEQ ID NO: 1521805 - DNA, 15 bp, Homo sapiens
tgcagctaaggccag

SEQ ID NO: 1521806 - DNA, 15 bp, Homo sapiens
atgcagctaaggcca

SEQ ID NO: 1521807 - DNA, 15 bp, Homo sapiens
tatgcagctaaggcc

SEQ ID NO: 1521808 - DNA, 15 bp, Homo sapiens
ttatgcagctaaggc

SEQ ID NO: 1521809 - DNA, 15 bp, Homo sapiens
attatgcagctaagg

SEQ ID NO: 1521810 - DNA, 15 bp, Homo sapiens
gattatgcagctaag

SEQ ID NO: 1521811 - DNA, 15 bp, Homo sapiens
taagattatgcagct

SEQ ID NO: 1521812 - DNA, 15 bp, Homo sapiens
ctaagattatgcagc

SEQ ID NO: 1521813 - DNA, 15 bp, Homo sapiens
tctaagattatgcag

SEQ ID NO: 1521814 - DNA, 15 bp, Homo sapiens
atctaagattatgca

SEQ ID NO: 1521815 - DNA, 15 bp, Homo sapiens
tatctaagattatgc

SEQ ID NO: 1521816 - DNA, 15 bp, Homo sapiens
ttatctaagattatg

SEQ ID NO: 1521817 - DNA, 15 bp, Homo sapiens
cttatctaagattat

SEQ ID NO: 1521818 - DNA, 15 bp, Homo sapiens
acttatctaagatta

SEQ ID NO: 1521819 - DNA, 15 bp, Homo sapiens
aacttatctaagatt

SEQ ID NO: 1521820 - DNA, 15 bp, Homo sapiens
aaacttatctaagat

SEQ ID NO: 1521821 - DNA, 15 bp, Homo sapiens
taaacttatctaaga

SEQ ID NO: 1521822 - DNA, 15 bp, Homo sapiens
ataaacttatctaag

SEQ ID NO: 1521823 - DNA, 15 bp, Homo sapiens
aataaacttatctaa

SEQ ID NO: 1521824 - DNA, 15 bp, Homo sapiens
aaataaacttatcta

SEQ ID NO: 1521825 - DNA, 15 bp, Homo sapiens
aaaataaacttatct

SEQ ID NO: 1521826 - DNA, 15 bp, Homo sapiens
aaaaataaacttatc

SEQ ID NO: 1521827 - DNA, 15 bp, Homo sapiens
gaaaaataaacttat

SEQ ID NO: 1521828 - DNA, 15 bp, Homo sapiens
ggaaaaataaactta

SEQ ID NO: 1521829 - DNA, 15 bp, Homo sapiens
tggaaaaataaactt

SEQ ID NO: 1521830 - DNA, 15 bp, Homo sapiens
ttggaaaaataaact

SEQ ID NO: 1521831 - DNA, 15 bp, Homo sapiens
tttggaaaaataaac

SEQ ID NO: 1521832 - DNA, 15 bp, Homo sapiens
atttggaaaaataaa

SEQ ID NO: 1521833 - DNA, 15 bp, Homo sapiens
gatttggaaaaataa

SEQ ID NO: 1521834 - DNA, 15 bp, Homo sapiens
agatttggaaaaata

SEQ ID NO: 1521835 - DNA, 15 bp, Homo sapiens
cagatttggaaaaat

SEQ ID NO: 1521836 - DNA, 15 bp, Homo sapiens
acagatttggaaaaa

SEQ ID NO: 1521837 - DNA, 15 bp, Homo sapiens
aacagatttggaaaa

SEQ ID NO: 1521838 - DNA, 15 bp, Homo sapiens
caacagatttggaaa

SEQ ID NO: 1521839 - DNA, 15 bp, Homo sapiens
gcaacagatttggaa

SEQ ID NO: 1521840 - DNA, 15 bp, Homo sapiens
agcaacagatttgga

SEQ ID NO: 1521841 - DNA, 15 bp, Homo sapiens
aagcaacagatttgg

SEQ ID NO: 1521842 - DNA, 15 bp, Homo sapiens
gaagcaacagatttg

SEQ ID NO: 1521843 - DNA, 15 bp, Homo sapiens
tgaagcaacagattt

SEQ ID NO: 1521844 - DNA, 15 bp, Homo sapiens
atgaagcaacagatt

SEQ ID NO: 1521845 - DNA, 15 bp, Homo sapiens
tatgaagcaacagat

SEQ ID NO: 1521846 - DNA, 15 bp, Homo sapiens
atatgaagcaacaga

SEQ ID NO: 1521847 - DNA, 15 bp, Homo sapiens
catatgaagcaacag

SEQ ID NO: 1521848 - DNA, 15 bp, Homo sapiens
acatatgaagcaaca

SEQ ID NO: 1521849 - DNA, 15 bp, Homo sapiens
aacatatgaagcaac

SEQ ID NO: 1521850 - DNA, 15 bp, Homo sapiens
taacatatgaagcaa

SEQ ID NO: 1521851 - DNA, 15 bp, Homo sapiens
ttaacatatgaagca

SEQ ID NO: 1521852 - DNA, 15 bp, Homo sapiens
tttaacatatgaagc

SEQ ID NO: 1521853 - DNA, 15 bp, Homo sapiens
ctttaacatatgaag

SEQ ID NO: 1521854 - DNA, 15 bp, Homo sapiens
gctttaacatatgaa

SEQ ID NO: 1521855 - DNA, 15 bp, Homo sapiens
agctttaacatatga

SEQ ID NO: 1521856 - DNA, 15 bp, Homo sapiens
cagctttaacatatg

SEQ ID NO: 1521857 - DNA, 15 bp, Homo sapiens
ccagctttaacatat

SEQ ID NO: 1521858 - DNA, 15 bp, Homo sapiens
cccagctttaacata

SEQ ID NO: 1521859 - DNA, 15 bp, Homo sapiens
ccccagctttaacat

SEQ ID NO: 1521860 - DNA, 15 bp, Homo sapiens
accccagctttaaca

SEQ ID NO: 1521861 - DNA, 15 bp, Homo sapiens
taccccagctttaac

SEQ ID NO: 1521862 - DNA, 15 bp, Homo sapiens
ataccccagctttaa

SEQ ID NO: 1521863 - DNA, 15 bp, Homo sapiens
cataccccagcttta

SEQ ID NO: 1521864 - DNA, 15 bp, Homo sapiens
acataccccagcttt

SEQ ID NO: 1521865 - DNA, 15 bp, Homo sapiens
cacataccccagctt

SEQ ID NO: 1521866 - DNA, 15 bp, Homo sapiens
gcacataccccagct

SEQ ID NO: 1521867 - DNA, 15 bp, Homo sapiens
agcacataccccagc

SEQ ID NO: 1521868 - DNA, 15 bp, Homo sapiens
aagcacataccccag

SEQ ID NO: 1521869 - DNA, 15 bp, Homo sapiens
taagcacatacccca

SEQ ID NO: 1521870 - DNA, 15 bp, Homo sapiens
ataagcacatacccc

SEQ ID NO: 1521871 - DNA, 15 bp, Homo sapiens
tataagcacataccc

SEQ ID NO: 1521872 - DNA, 15 bp, Homo sapiens
ttataagcacatacc

SEQ ID NO: 1521873 - DNA, 15 bp, Homo sapiens
tttataagcacatac

SEQ ID NO: 1521874 - DNA, 15 bp, Homo sapiens
ttttataagcacata

SEQ ID NO: 1521875 - DNA, 15 bp, Homo sapiens
tttttataagcacat

SEQ ID NO: 1521876 - DNA, 15 bp, Homo sapiens
gtttttataagcaca

SEQ ID NO: 1521877 - DNA, 15 bp, Homo sapiens
agtttttataagcac

SEQ ID NO: 1521878 - DNA, 15 bp, Homo sapiens
cagtttttataagca

SEQ ID NO: 1521879 - DNA, 15 bp, Homo sapiens
acagtttttataagc

SEQ ID NO: 1521880 - DNA, 15 bp, Homo sapiens
gacagtttttataag

SEQ ID NO: 1521881 - DNA, 15 bp, Homo sapiens
agacagtttttataa

SEQ ID NO: 1521882 - DNA, 15 bp, Homo sapiens
tagacagtttttata

SEQ ID NO: 1521883 - DNA, 15 bp, Homo sapiens
gtagacagtttttat

SEQ ID NO: 1521884 - DNA, 15 bp, Homo sapiens
ggtagacagttttta

SEQ ID NO: 1521885 - DNA, 15 bp, Homo sapiens
aggtagacagttttt

SEQ ID NO: 1521886 - DNA, 15 bp, Homo sapiens
gaggtagacagtttt

SEQ ID NO: 1521887 - DNA, 15 bp, Homo sapiens
agaggtagacagttt

SEQ ID NO: 1521888 - DNA, 15 bp, Homo sapiens
gagaggtagacagtt

SEQ ID NO: 1521889 - DNA, 15 bp, Homo sapiens
ggagaggtagacagt

SEQ ID NO: 1521890 - DNA, 15 bp, Homo sapiens
aggagaggtagacag

SEQ ID NO: 1521891 - DNA, 15 bp, Homo sapiens
taggagaggtagaca

SEQ ID NO: 1521892 - DNA, 15 bp, Homo sapiens
ataggagaggtagac

SEQ ID NO: 1521893 - DNA, 15 bp, Homo sapiens
tataggagaggtaga

SEQ ID NO: 1521894 - DNA, 15 bp, Homo sapiens
ttataggagaggtag

SEQ ID NO: 1521895 - DNA, 15 bp, Homo sapiens
tttataggagaggta

SEQ ID NO: 1521896 - DNA, 15 bp, Homo sapiens
ctttataggagaggt

SEQ ID NO: 1521897 - DNA, 15 bp, Homo sapiens
actttataggagagg

SEQ ID NO: 1521898 - DNA, 15 bp, Homo sapiens
cactttataggagag

SEQ ID NO: 1521899 - DNA, 15 bp, Homo sapiens
acactttataggaga

SEQ ID NO: 1521900 - DNA, 15 bp, Homo sapiens
aacactttataggag

SEQ ID NO: 1521901 - DNA, 15 bp, Homo sapiens
aaacactttatagga

SEQ ID NO: 1521902 - DNA, 15 bp, Homo sapiens
aaaacactttatagg

SEQ ID NO: 1521903 - DNA, 15 bp, Homo sapiens
caaaacactttatag

SEQ ID NO: 1521904 - DNA, 15 bp, Homo sapiens
acaaaacactttata

SEQ ID NO: 1521905 - DNA, 15 bp, Homo sapiens
cacaaaacactttat

SEQ ID NO: 1521906 - DNA, 15 bp, Homo sapiens
tcacaaaacacttta

SEQ ID NO: 1521907 - DNA, 15 bp, Homo sapiens
gtcacaaaacacttt

SEQ ID NO: 1521908 - DNA, 15 bp, Homo sapiens
ggtcacaaaacactt

SEQ ID NO: 1521909 - DNA, 15 bp, Homo sapiens
aggtcacaaaacact

SEQ ID NO: 1521910 - DNA, 15 bp, Homo sapiens
taggtcacaaaacac

SEQ ID NO: 1521911 - DNA, 15 bp, Homo sapiens
ataggtcacaaaaca

SEQ ID NO: 1521912 - DNA, 15 bp, Homo sapiens
tataggtcacaaaac

SEQ ID NO: 1521913 - DNA, 15 bp, Homo sapiens
agaacctaacattaa

SEQ ID NO: 1521914 - DNA, 15 bp, Homo sapiens
cagaacctaacatta

SEQ ID NO: 1521915 - DNA, 15 bp, Homo sapiens
ccagaacctaacatt

SEQ ID NO: 1521916 - DNA, 15 bp, Homo sapiens
gccagaacctaacat

SEQ ID NO: 1521917 - DNA, 15 bp, Homo sapiens
ggccagaacctaaca

SEQ ID NO: 1521918 - DNA, 15 bp, Homo sapiens
tggccagaacctaac

SEQ ID NO: 1521919 - DNA, 15 bp, Homo sapiens
ctggccagaacctaa

SEQ ID NO: 1521920 - DNA, 15 bp, Homo sapiens
gctggccagaaccta

SEQ ID NO: 1521921 - DNA, 15 bp, Homo sapiens
ggctggccagaacct

SEQ ID NO: 1521922 - DNA, 15 bp, Homo sapiens
tggctggccagaacc

SEQ ID NO: 1521923 - DNA, 15 bp, Homo sapiens
ctggctggccagaac

SEQ ID NO: 1521924 - DNA, 15 bp, Homo sapiens
actggctggccagaa

SEQ ID NO: 1521925 - DNA, 15 bp, Homo sapiens
aactggctggccaga

SEQ ID NO: 1521926 - DNA, 15 bp, Homo sapiens
caactggctggccag

SEQ ID NO: 1521927 - DNA, 15 bp, Homo sapiens
tcaactggctggcca

SEQ ID NO: 1521928 - DNA, 15 bp, Homo sapiens
atcaactggctggcc

SEQ ID NO: 1521929 - DNA, 15 bp, Homo sapiens
aatcaactggctggc

SEQ ID NO: 1521930 - DNA, 15 bp, Homo sapiens
taatcaactggctgg

SEQ ID NO: 1521931 - DNA, 15 bp, Homo sapiens
gtaatcaactggctg

SEQ ID NO: 1521932 - DNA, 15 bp, Homo sapiens
agtaatcaactggct

SEQ ID NO: 1521933 - DNA, 15 bp, Homo sapiens
cagtaatcaactggc

SEQ ID NO: 1521934 - DNA, 15 bp, Homo sapiens
ccagtaatcaactgg

SEQ ID NO: 1521935 - DNA, 15 bp, Homo sapiens
gccagtaatcaactg

SEQ ID NO: 1521936 - DNA, 15 bp, Homo sapiens
agccagtaatcaact

SEQ ID NO: 1521937 - DNA, 15 bp, Homo sapiens
cagccagtaatcaac

SEQ ID NO: 1521938 - DNA, 15 bp, Homo sapiens
gcagccagtaatcaa

SEQ ID NO: 1521939 - DNA, 15 bp, Homo sapiens
ggcagccagtaatca

SEQ ID NO: 1521940 - DNA, 15 bp, Homo sapiens
gggcagccagtaatc

SEQ ID NO: 1521941 - DNA, 15 bp, Homo sapiens
ggggcagccagtaat

SEQ ID NO: 1521942 - DNA, 15 bp, Homo sapiens
aggggcagccagtaa

SEQ ID NO: 1521943 - DNA, 15 bp, Homo sapiens
taggggcagccagta

SEQ ID NO: 1521944 - DNA, 15 bp, Homo sapiens
ataggggcagccagt

SEQ ID NO: 1521945 - DNA, 15 bp, Homo sapiens
cataggggcagccag

SEQ ID NO: 1521946 - DNA, 15 bp, Homo sapiens
acataggggcagcca

SEQ ID NO: 1521947 - DNA, 15 bp, Homo sapiens
gacataggggcagcc

SEQ ID NO: 1521948 - DNA, 15 bp, Homo sapiens
ggacataggggcagc

SEQ ID NO: 1521949 - DNA, 15 bp, Homo sapiens
tggacataggggcag

SEQ ID NO: 1521950 - DNA, 15 bp, Homo sapiens
ctggacataggggca

SEQ ID NO: 1521951 - DNA, 15 bp, Homo sapiens
actggacataggggc

SEQ ID NO: 1521952 - DNA, 15 bp, Homo sapiens
tactggacatagggg

SEQ ID NO: 1521953 - DNA, 15 bp, Homo sapiens
atactggacataggg

SEQ ID NO: 1521954 - DNA, 15 bp, Homo sapiens
catactggacatagg

SEQ ID NO: 1521955 - DNA, 15 bp, Homo sapiens
acatactggacatag

SEQ ID NO: 1521956 - DNA, 15 bp, Homo sapiens
cacatactggacata

SEQ ID NO: 1521957 - DNA, 15 bp, Homo sapiens
gcacatactggacat

SEQ ID NO: 1521958 - DNA, 15 bp, Homo sapiens
agcacatactggaca

SEQ ID NO: 1521959 - DNA, 15 bp, Homo sapiens
gagcacatactggac

SEQ ID NO: 1521960 - DNA, 15 bp, Homo sapiens
ggagcacatactgga

SEQ ID NO: 1521961 - DNA, 15 bp, Homo sapiens
aggagcacatactgg

SEQ ID NO: 1521962 - DNA, 15 bp, Homo sapiens
caggagcacatactg

SEQ ID NO: 1521963 - DNA, 15 bp, Homo sapiens
ccaggagcacatact

SEQ ID NO: 1521964 - DNA, 15 bp, Homo sapiens
gccaggagcacatac

SEQ ID NO: 1521965 - DNA, 15 bp, Homo sapiens
ggccaggagcacata

SEQ ID NO: 1521966 - DNA, 15 bp, Homo sapiens
gggccaggagcacat

SEQ ID NO: 1521967 - DNA, 15 bp, Homo sapiens
tgggccaggagcaca

SEQ ID NO: 1521968 - DNA, 15 bp, Homo sapiens
ctgggccaggagcac

SEQ ID NO: 1521969 - DNA, 15 bp, Homo sapiens
gctgggccaggagca

SEQ ID NO: 1521970 - DNA, 15 bp, Homo sapiens
tgctgggccaggagc

SEQ ID NO: 1521971 - DNA, 15 bp, Homo sapiens
ctgctgggccaggag

SEQ ID NO: 1521972 - DNA, 15 bp, Homo sapiens
actgctgggccagga

SEQ ID NO: 1521973 - DNA, 15 bp, Homo sapiens
gactgctgggccagg

SEQ ID NO: 1521974 - DNA, 15 bp, Homo sapiens
tgactgctgggccag

SEQ ID NO: 1521975 - DNA, 15 bp, Homo sapiens
atgactgctgggcca

SEQ ID NO: 1521976 - DNA, 15 bp, Homo sapiens
catgactgctgggcc

SEQ ID NO: 1521977 - DNA, 15 bp, Homo sapiens
acatgactgctgggc

SEQ ID NO: 1521978 - DNA, 15 bp, Homo sapiens
cacatgactgctggg

SEQ ID NO: 1521979 - DNA, 15 bp, Homo sapiens
tcacatgactgctgg

SEQ ID NO: 1521980 - DNA, 15 bp, Homo sapiens
atcacatgactgctg

SEQ ID NO: 1521981 - DNA, 15 bp, Homo sapiens
aatcacatgactgct

SEQ ID NO: 1521982 - DNA, 15 bp, Homo sapiens
gaatcacatgactgc

SEQ ID NO: 1521983 - DNA, 15 bp, Homo sapiens
tgaatcacatgactg

SEQ ID NO: 1521984 - DNA, 15 bp, Homo sapiens
ttgaatcacatgact

SEQ ID NO: 1521985 - DNA, 15 bp, Homo sapiens
tttgaatcacatgac

SEQ ID NO: 1521986 - DNA, 15 bp, Homo sapiens
ttttgaatcacatga

SEQ ID NO: 1521987 - DNA, 15 bp, Homo sapiens
attttgaatcacatg

SEQ ID NO: 1521988 - DNA, 15 bp, Homo sapiens
cattttgaatcacat

SEQ ID NO: 1521989 - DNA, 15 bp, Homo sapiens
acattttgaatcaca

SEQ ID NO: 1521990 - DNA, 15 bp, Homo sapiens
cacattttgaatcac

SEQ ID NO: 1521991 - DNA, 15 bp, Homo sapiens
tcacattttgaatca

SEQ ID NO: 1521992 - DNA, 15 bp, Homo sapiens
gtcacattttgaatc

SEQ ID NO: 1521993 - DNA, 15 bp, Homo sapiens
ggtcacattttgaat

SEQ ID NO: 1521994 - DNA, 15 bp, Homo sapiens
tggtcacattttgaa

SEQ ID NO: 1521995 - DNA, 15 bp, Homo sapiens
gtggtcacattttga

SEQ ID NO: 1521996 - DNA, 15 bp, Homo sapiens
agtggtcacattttg

SEQ ID NO: 1521997 - DNA, 15 bp, Homo sapiens
aagtggtcacatttt

SEQ ID NO: 1521998 - DNA, 15 bp, Homo sapiens
caagtggtcacattt

SEQ ID NO: 1521999 - DNA, 15 bp, Homo sapiens
ccaagtggtcacatt

SEQ ID NO: 1522000 - DNA, 15 bp, Homo sapiens
gccaagtggtcacat

SEQ ID NO: 1522001 - DNA, 15 bp, Homo sapiens
agccaagtggtcaca

SEQ ID NO: 1522002 - DNA, 15 bp, Homo sapiens
cagccaagtggtcac

SEQ ID NO: 1522003 - DNA, 15 bp, Homo sapiens
ccagccaagtggtca

SEQ ID NO: 1522004 - DNA, 15 bp, Homo sapiens
cccagccaagtggtc

SEQ ID NO: 1522005 - DNA, 15 bp, Homo sapiens
gcccagccaagtggt

SEQ ID NO: 1522006 - DNA, 15 bp, Homo sapiens
cgcccagccaagtgg

SEQ ID NO: 1522007 - DNA, 15 bp, Homo sapiens
gcgcccagccaagtg

SEQ ID NO: 1522008 - DNA, 15 bp, Homo sapiens
cgcgcccagccaagt

SEQ ID NO: 1522009 - DNA, 15 bp, Homo sapiens
ccgcgcccagccaag

SEQ ID NO: 1522010 - DNA, 15 bp, Homo sapiens
accgcgcccagccaa

SEQ ID NO: 1522011 - DNA, 15 bp, Homo sapiens
caccgcgcccagcca

SEQ ID NO: 1522012 - DNA, 15 bp, Homo sapiens
cggtcttgatctcct

SEQ ID NO: 1522013 - DNA, 15 bp, Homo sapiens
acggtcttgatctcc

SEQ ID NO: 1522014 - DNA, 15 bp, Homo sapiens
gacggtcttgatctc

SEQ ID NO: 1522015 - DNA, 15 bp, Homo sapiens
ggacggtcttgatct

SEQ ID NO: 1522016 - DNA, 15 bp, Homo sapiens
aggacggtcttgatc

SEQ ID NO: 1522017 - DNA, 15 bp, Homo sapiens
caggacggtcttgat

SEQ ID NO: 1522018 - DNA, 15 bp, Homo sapiens
ccaggacggtcttga

SEQ ID NO: 1522019 - DNA, 15 bp, Homo sapiens
gccaggacggtcttg

SEQ ID NO: 1522020 - DNA, 15 bp, Homo sapiens
ggccaggacggtctt

SEQ ID NO: 1522021 - DNA, 15 bp, Homo sapiens
tggccaggacggtct

SEQ ID NO: 1522022 - DNA, 15 bp, Homo sapiens
ttggccaggacggtc

SEQ ID NO: 1522023 - DNA, 15 bp, Homo sapiens
gttggccaggacggt

SEQ ID NO: 1522024 - DNA, 15 bp, Homo sapiens
tgttggccaggacgg

SEQ ID NO: 1522025 - DNA, 15 bp, Homo sapiens
atgttggccaggacg

SEQ ID NO: 1522026 - DNA, 15 bp, Homo sapiens
catgttggccaggac

SEQ ID NO: 1522027 - DNA, 15 bp, Homo sapiens
tcatgttggccagga

SEQ ID NO: 1522028 - DNA, 15 bp, Homo sapiens
atcatgttggccagg

SEQ ID NO: 1522029 - DNA, 15 bp, Homo sapiens
catcatgttggccag

SEQ ID NO: 1522030 - DNA, 15 bp, Homo sapiens
ttcatcatgttggcc

SEQ ID NO: 1522031 - DNA, 15 bp, Homo sapiens
tttcatcatgttggc

SEQ ID NO: 1522032 - DNA, 15 bp, Homo sapiens
gtttcatcatgttgg

SEQ ID NO: 1522033 - DNA, 15 bp, Homo sapiens
ggtttcatcatgttg

SEQ ID NO: 1522034 - DNA, 15 bp, Homo sapiens
gggtttcatcatgtt

SEQ ID NO: 1522035 - DNA, 15 bp, Homo sapiens
ggggtttcatcatgt

SEQ ID NO: 1522036 - DNA, 15 bp, Homo sapiens
gagatggggtttcat

SEQ ID NO: 1522037 - DNA, 15 bp, Homo sapiens
gttttagtagagatg

SEQ ID NO: 1522038 - DNA, 15 bp, Homo sapiens
tgttttagtagagat

SEQ ID NO: 1522039 - DNA, 15 bp, Homo sapiens
gtgttttagtagaga

SEQ ID NO: 1522040 - DNA, 15 bp, Homo sapiens
tgtgttttagtagag

SEQ ID NO: 1522041 - DNA, 15 bp, Homo sapiens
ttgtgttttagtaga

SEQ ID NO: 1522042 - DNA, 15 bp, Homo sapiens
tttgtgttttagtag

SEQ ID NO: 1522043 - DNA, 15 bp, Homo sapiens
ttttgtgttttagta

SEQ ID NO: 1522044 - DNA, 15 bp, Homo sapiens
tttttgtgttttagt

SEQ ID NO: 1522045 - DNA, 15 bp, Homo sapiens
ttttttgtgttttag

SEQ ID NO: 1522046 - DNA, 15 bp, Homo sapiens
attttttgtgtttta

SEQ ID NO: 1522047 - DNA, 15 bp, Homo sapiens
aattttttgtgtttt

SEQ ID NO: 1522048 - DNA, 15 bp, Homo sapiens
taattttttgtgttt

SEQ ID NO: 1522049 - DNA, 15 bp, Homo sapiens
ctaattttttgtgtt

SEQ ID NO: 1522050 - DNA, 15 bp, Homo sapiens
cctaattttttgtgt

SEQ ID NO: 1522051 - DNA, 15 bp, Homo sapiens
gcctaattttttgtg

SEQ ID NO: 1522052 - DNA, 15 bp, Homo sapiens
tgcctaattttttgt

SEQ ID NO: 1522053 - DNA, 15 bp, Homo sapiens
ctgcctaattttttg

SEQ ID NO: 1522054 - DNA, 15 bp, Homo sapiens
cgtgccaccacgcct

SEQ ID NO: 1522055 - DNA, 15 bp, Homo sapiens
acgtgccaccacgcc

SEQ ID NO: 1522056 - DNA, 15 bp, Homo sapiens
cacgtgccaccacgc

SEQ ID NO: 1522057 - DNA, 15 bp, Homo sapiens
ccacgtgccaccacg

SEQ ID NO: 1522058 - DNA, 15 bp, Homo sapiens
gccacgtgccaccac

SEQ ID NO: 1522059 - DNA, 15 bp, Homo sapiens
agccacgtgccacca

SEQ ID NO: 1522060 - DNA, 15 bp, Homo sapiens
cagccacgtgccacc

SEQ ID NO: 1522061 - DNA, 15 bp, Homo sapiens
acagccacgtgccac

SEQ ID NO: 1522062 - DNA, 15 bp, Homo sapiens
tacagccacgtgcca

SEQ ID NO: 1522063 - DNA, 15 bp, Homo sapiens
ctacagccacgtgcc

SEQ ID NO: 1522064 - DNA, 15 bp, Homo sapiens
actacagccacgtgc

SEQ ID NO: 1522065 - DNA, 15 bp, Homo sapiens
gactacagccacgtg

SEQ ID NO: 1522066 - DNA, 15 bp, Homo sapiens
ggactacagccacgt

SEQ ID NO: 1522067 - DNA, 15 bp, Homo sapiens
gggactacagccacg

SEQ ID NO: 1522068 - DNA, 15 bp, Homo sapiens
tgggactacagccac

SEQ ID NO: 1522069 - DNA, 15 bp, Homo sapiens
ctgggactacagcca

SEQ ID NO: 1522070 - DNA, 15 bp, Homo sapiens
gctgggactacagcc

SEQ ID NO: 1522071 - DNA, 15 bp, Homo sapiens
agctgggactacagc

SEQ ID NO: 1522072 - DNA, 15 bp, Homo sapiens
aattcccctgcctca

SEQ ID NO: 1522073 - DNA, 15 bp, Homo sapiens
caattcccctgcctc

SEQ ID NO: 1522074 - DNA, 15 bp, Homo sapiens
gcaatcttggttcac

SEQ ID NO: 1522075 - DNA, 15 bp, Homo sapiens
tgcaatcttggttca

SEQ ID NO: 1522076 - DNA, 15 bp, Homo sapiens
gtgcaatcttggttc

SEQ ID NO: 1522077 - DNA, 15 bp, Homo sapiens
ggtgcaatcttggtt

SEQ ID NO: 1522078 - DNA, 15 bp, Homo sapiens
tggtgcaatcttggt

SEQ ID NO: 1522079 - DNA, 15 bp, Homo sapiens
gtggtgcaatcttgg

SEQ ID NO: 1522080 - DNA, 15 bp, Homo sapiens
agtggtgcaatcttg

SEQ ID NO: 1522081 - DNA, 15 bp, Homo sapiens
cagtggtgcaatctt

SEQ ID NO: 1522082 - DNA, 15 bp, Homo sapiens
tgctctgtcaccagg

SEQ ID NO: 1522083 - DNA, 15 bp, Homo sapiens
ttgctctgtcaccag

SEQ ID NO: 1522084 - DNA, 15 bp, Homo sapiens
cttgctctgtcacca

SEQ ID NO: 1522085 - DNA, 15 bp, Homo sapiens
tcacttttttttttt

SEQ ID NO: 1522086 - DNA, 15 bp, Homo sapiens
gtcactttttttttt

SEQ ID NO: 1522087 - DNA, 15 bp, Homo sapiens
ggtcacttttttttt

SEQ ID NO: 1522088 - DNA, 15 bp, Homo sapiens
tggtcactttttttt

SEQ ID NO: 1522089 - DNA, 15 bp, Homo sapiens
gtggtcacttttttt

SEQ ID NO: 1522090 - DNA, 15 bp, Homo sapiens
agtggtcactttttt

SEQ ID NO: 1522091 - DNA, 15 bp, Homo sapiens
aagtggtcacttttt

SEQ ID NO: 1522092 - DNA, 15 bp, Homo sapiens
caagtggtcactttt

SEQ ID NO: 1522093 - DNA, 15 bp, Homo sapiens
ccaagtggtcacttt

SEQ ID NO: 1522094 - DNA, 15 bp, Homo sapiens
accaagtggtcactt

SEQ ID NO: 1522095 - DNA, 15 bp, Homo sapiens
caccaagtggtcact

SEQ ID NO: 1522096 - DNA, 15 bp, Homo sapiens
gcaccaagtggtcac

SEQ ID NO: 1522097 - DNA, 15 bp, Homo sapiens
agcaccaagtggtca

SEQ ID NO: 1522098 - DNA, 15 bp, Homo sapiens
cagcaccaagtggtc

SEQ ID NO: 1522099 - DNA, 15 bp, Homo sapiens
acagcaccaagtggt

SEQ ID NO: 1522100 - DNA, 15 bp, Homo sapiens
aacagcaccaagtgg

SEQ ID NO: 1522101 - DNA, 15 bp, Homo sapiens
aaacagcaccaagtg

SEQ ID NO: 1522102 - DNA, 15 bp, Homo sapiens
gaaacagcaccaagt

SEQ ID NO: 1522103 - DNA, 15 bp, Homo sapiens
agaaacagcaccaag

SEQ ID NO: 1522104 - DNA, 15 bp, Homo sapiens
aagaaacagcaccaa

SEQ ID NO: 1522105 - DNA, 15 bp, Homo sapiens
gaagaaacagcacca

SEQ ID NO: 1522106 - DNA, 15 bp, Homo sapiens
tgaagaaacagcacc

SEQ ID NO: 1522107 - DNA, 15 bp, Homo sapiens
atgaagaaacagcac

SEQ ID NO: 1522108 - DNA, 15 bp, Homo sapiens
gatgaagaaacagca

SEQ ID NO: 1522109 - DNA, 15 bp, Homo sapiens
tgatgaagaaacagc

SEQ ID NO: 1522110 - DNA, 15 bp, Homo sapiens
ctgatgaagaaacag

SEQ ID NO: 1522111 - DNA, 15 bp, Homo sapiens
cctgatgaagaaaca

SEQ ID NO: 1522112 - DNA, 15 bp, Homo sapiens
ccctgatgaagaaac

SEQ ID NO: 1522113 - DNA, 15 bp, Homo sapiens
cccctgatgaagaaa

SEQ ID NO: 1522114 - DNA, 15 bp, Homo sapiens
gcccctgatgaagaa

SEQ ID NO: 1522115 - DNA, 15 bp, Homo sapiens
agcccctgatgaaga

SEQ ID NO: 1522116 - DNA, 15 bp, Homo sapiens
cagcccctgatgaag

SEQ ID NO: 1522117 - DNA, 15 bp, Homo sapiens
acagcccctgatgaa

SEQ ID NO: 1522118 - DNA, 15 bp, Homo sapiens
aacagcccctgatga

SEQ ID NO: 1522119 - DNA, 15 bp, Homo sapiens
gaacagcccctgatg

SEQ ID NO: 1522120 - DNA, 15 bp, Homo sapiens
agaacagcccctgat

SEQ ID NO: 1522121 - DNA, 15 bp, Homo sapiens
aagaacagcccctga

SEQ ID NO: 1522122 - DNA, 15 bp, Homo sapiens
taagaacagcccctg

SEQ ID NO: 1522123 - DNA, 15 bp, Homo sapiens
ctaagaacagcccct

SEQ ID NO: 1522124 - DNA, 15 bp, Homo sapiens
cctaagaacagcccc

SEQ ID NO: 1522125 - DNA, 15 bp, Homo sapiens
acctaagaacagccc

SEQ ID NO: 1522126 - DNA, 15 bp, Homo sapiens
tacctaagaacagcc

SEQ ID NO: 1522127 - DNA, 15 bp, Homo sapiens
atacctaagaacagc

SEQ ID NO: 1522128 - DNA, 15 bp, Homo sapiens
catacctaagaacag

SEQ ID NO: 1522129 - DNA, 15 bp, Homo sapiens
acatacctaagaaca

SEQ ID NO: 1522130 - DNA, 15 bp, Homo sapiens
cacatacctaagaac

SEQ ID NO: 1522131 - DNA, 15 bp, Homo sapiens
acacatacctaagaa

SEQ ID NO: 1522132 - DNA, 15 bp, Homo sapiens
aacacatacctaaga

SEQ ID NO: 1522133 - DNA, 15 bp, Homo sapiens
aaacacatacctaag

SEQ ID NO: 1522134 - DNA, 15 bp, Homo sapiens
aaaacacatacctaa

SEQ ID NO: 1522135 - DNA, 15 bp, Homo sapiens
taaaacacataccta

SEQ ID NO: 1522136 - DNA, 15 bp, Homo sapiens
ttaaaacacatacct

SEQ ID NO: 1522137 - DNA, 15 bp, Homo sapiens
attaaaacacatacc

SEQ ID NO: 1522138 - DNA, 15 bp, Homo sapiens
aattaaaacacatac

SEQ ID NO: 1522139 - DNA, 15 bp, Homo sapiens
aaattaaaacacata

SEQ ID NO: 1522140 - DNA, 15 bp, Homo sapiens
aaaattaaaacacat

SEQ ID NO: 1522141 - DNA, 15 bp, Homo sapiens
aaaaattaaaacaca

SEQ ID NO: 1522142 - DNA, 15 bp, Homo sapiens
aaaaaattaaaacac

SEQ ID NO: 1522143 - DNA, 15 bp, Homo sapiens
aaaaaaaattaaaac

SEQ ID NO: 1522144 - DNA, 15 bp, Homo sapiens
caaaaaaaattaaaa

SEQ ID NO: 1522145 - DNA, 15 bp, Homo sapiens
acaaaaaaaattaaa

SEQ ID NO: 1522146 - DNA, 15 bp, Homo sapiens
aacaaaaaaaattaa

SEQ ID NO: 1522147 - DNA, 15 bp, Homo sapiens
aaacaaaaaaaatta

SEQ ID NO: 1522148 - DNA, 15 bp, Homo sapiens
aaaacaaaaaaaatt

SEQ ID NO: 1522149 - DNA, 15 bp, Homo sapiens
caaaacaaaaaaaat

SEQ ID NO: 1522150 - DNA, 15 bp, Homo sapiens
tcaaaaacaaaacaa

SEQ ID NO: 1522151 - DNA, 15 bp, Homo sapiens
ctcaaaaacaaaaca

SEQ ID NO: 1522152 - DNA, 15 bp, Homo sapiens
tctcaaaaacaaaac

SEQ ID NO: 1522153 - DNA, 15 bp, Homo sapiens
ctgtctcaaaaacaa

SEQ ID NO: 1522154 - DNA, 15 bp, Homo sapiens
cctgtctcaaaaaca

SEQ ID NO: 1522155 - DNA, 15 bp, Homo sapiens
ccctgtctcaaaaac

SEQ ID NO: 1522156 - DNA, 15 bp, Homo sapiens
acaacagagtgagac

SEQ ID NO: 1522157 - DNA, 15 bp, Homo sapiens
gacaacagagtgaga

SEQ ID NO: 1522158 - DNA, 15 bp, Homo sapiens
agacaacagagtgag

SEQ ID NO: 1522159 - DNA, 15 bp, Homo sapiens
tagacaacagagtga

SEQ ID NO: 1522160 - DNA, 15 bp, Homo sapiens
ctagacaacagagtg

SEQ ID NO: 1522161 - DNA, 15 bp, Homo sapiens
cctagacaacagagt

SEQ ID NO: 1522162 - DNA, 15 bp, Homo sapiens
gcctagacaacagag

SEQ ID NO: 1522163 - DNA, 15 bp, Homo sapiens
agcctagacaacaga

SEQ ID NO: 1522164 - DNA, 15 bp, Homo sapiens
cagcctagacaacag

SEQ ID NO: 1522165 - DNA, 15 bp, Homo sapiens
ccagcctagacaaca

SEQ ID NO: 1522166 - DNA, 15 bp, Homo sapiens
tccagcctagacaac

SEQ ID NO: 1522167 - DNA, 15 bp, Homo sapiens
ctccagcctagacaa

SEQ ID NO: 1522168 - DNA, 15 bp, Homo sapiens
actccagcctagaca

SEQ ID NO: 1522169 - DNA, 15 bp, Homo sapiens
cactccagcctagac

SEQ ID NO: 1522170 - DNA, 15 bp, Homo sapiens
gcactccagcctaga

SEQ ID NO: 1522171 - DNA, 15 bp, Homo sapiens
gtagtgccactgcac

SEQ ID NO: 1522172 - DNA, 15 bp, Homo sapiens
ggtagtgccactgca

SEQ ID NO: 1522173 - DNA, 15 bp, Homo sapiens
tggtagtgccactgc

SEQ ID NO: 1522174 - DNA, 15 bp, Homo sapiens
atggtagtgccactg

SEQ ID NO: 1522175 - DNA, 15 bp, Homo sapiens
catggtagtgccact

SEQ ID NO: 1522176 - DNA, 15 bp, Homo sapiens
ccatggtagtgccac

SEQ ID NO: 1522177 - DNA, 15 bp, Homo sapiens
gccatggtagtgcca

SEQ ID NO: 1522178 - DNA, 15 bp, Homo sapiens
agccatggtagtgcc

SEQ ID NO: 1522179 - DNA, 15 bp, Homo sapiens
gagccatggtagtgc

SEQ ID NO: 1522180 - DNA, 15 bp, Homo sapiens
tgagccatggtagtg

SEQ ID NO: 1522181 - DNA, 15 bp, Homo sapiens
gtgagccatggtagt

SEQ ID NO: 1522182 - DNA, 15 bp, Homo sapiens
agtgagccatggtag

SEQ ID NO: 1522183 - DNA, 15 bp, Homo sapiens
cagtgagccatggta

SEQ ID NO: 1522184 - DNA, 15 bp, Homo sapiens
gcagtgagccatggt

SEQ ID NO: 1522185 - DNA, 15 bp, Homo sapiens
tgcagtgagccatgg

SEQ ID NO: 1522186 - DNA, 15 bp, Homo sapiens
ctagaggctgcagtg

SEQ ID NO: 1522187 - DNA, 15 bp, Homo sapiens
gctagaggctgcagt

SEQ ID NO: 1522188 - DNA, 15 bp, Homo sapiens
agctagaggctgcag

SEQ ID NO: 1522189 - DNA, 15 bp, Homo sapiens
gagctagaggctgca

SEQ ID NO: 1522190 - DNA, 15 bp, Homo sapiens
ggagctagaggctgc

SEQ ID NO: 1522191 - DNA, 15 bp, Homo sapiens
gggagctagaggctg

SEQ ID NO: 1522192 - DNA, 15 bp, Homo sapiens
tgggagctagaggct

SEQ ID NO: 1522193 - DNA, 15 bp, Homo sapiens
ctgggagctagaggc

SEQ ID NO: 1522194 - DNA, 15 bp, Homo sapiens
cctgggagctagagg

SEQ ID NO: 1522195 - DNA, 15 bp, Homo sapiens
gcctgggagctagag

SEQ ID NO: 1522196 - DNA, 15 bp, Homo sapiens
agcctgggagctaga

SEQ ID NO: 1522197 - DNA, 15 bp, Homo sapiens
gagcctgggagctag

SEQ ID NO: 1522198 - DNA, 15 bp, Homo sapiens
tgagcctgggagcta

SEQ ID NO: 1522199 - DNA, 15 bp, Homo sapiens
ttgagcctgggagct

SEQ ID NO: 1522200 - DNA, 15 bp, Homo sapiens
tttgagcctgggagc

SEQ ID NO: 1522201 - DNA, 15 bp, Homo sapiens
gtttgagcctgggag

SEQ ID NO: 1522202 - DNA, 15 bp, Homo sapiens
tgtttgagcctggga

SEQ ID NO: 1522203 - DNA, 15 bp, Homo sapiens
ttgtttgagcctggg

SEQ ID NO: 1522204 - DNA, 15 bp, Homo sapiens
attgtttgagcctgg

SEQ ID NO: 1522205 - DNA, 15 bp, Homo sapiens
gattgtttgagcctg

SEQ ID NO: 1522206 - DNA, 15 bp, Homo sapiens
agattgtttgagcct

SEQ ID NO: 1522207 - DNA, 15 bp, Homo sapiens
aagattgtttgagcc

SEQ ID NO: 1522208 - DNA, 15 bp, Homo sapiens
gaagattgtttgagc

SEQ ID NO: 1522209 - DNA, 15 bp, Homo sapiens
ggaagattgtttgag

SEQ ID NO: 1522210 - DNA, 15 bp, Homo sapiens
aggaagattgtttga

SEQ ID NO: 1522211 - DNA, 15 bp, Homo sapiens
caggaagattgtttg

SEQ ID NO: 1522212 - DNA, 15 bp, Homo sapiens
gcaggaagattgttt

SEQ ID NO: 1522213 - DNA, 15 bp, Homo sapiens
ggcaggaagattgtt

SEQ ID NO: 1522214 - DNA, 15 bp, Homo sapiens
aggcaggaagattgt

SEQ ID NO: 1522215 - DNA, 15 bp, Homo sapiens
gaggcaggaagattg

SEQ ID NO: 1522216 - DNA, 15 bp, Homo sapiens
tgaggcaggaagatt

SEQ ID NO: 1522217 - DNA, 15 bp, Homo sapiens
atgaggcaggaagat

SEQ ID NO: 1522218 - DNA, 15 bp, Homo sapiens
tatgaggcaggaaga

SEQ ID NO: 1522219 - DNA, 15 bp, Homo sapiens
gtatgaggcaggaag

SEQ ID NO: 1522220 - DNA, 15 bp, Homo sapiens
agtatgaggcaggaa

SEQ ID NO: 1522221 - DNA, 15 bp, Homo sapiens
gagtatgaggcagga

SEQ ID NO: 1522222 - DNA, 15 bp, Homo sapiens
ggagtatgaggcagg

SEQ ID NO: 1522223 - DNA, 15 bp, Homo sapiens
gggagtatgaggcag

SEQ ID NO: 1522224 - DNA, 15 bp, Homo sapiens
tgggagtatgaggca

SEQ ID NO: 1522225 - DNA, 15 bp, Homo sapiens
ttgggagtatgaggc

SEQ ID NO: 1522226 - DNA, 15 bp, Homo sapiens
cttgggagtatgagg

SEQ ID NO: 1522227 - DNA, 15 bp, Homo sapiens
acttgggagtatgag

SEQ ID NO: 1522228 - DNA, 15 bp, Homo sapiens
tacttgggagtatga

SEQ ID NO: 1522229 - DNA, 15 bp, Homo sapiens
ctacttgggagtatg

SEQ ID NO: 1522230 - DNA, 15 bp, Homo sapiens
gctacttgggagtat

SEQ ID NO: 1522231 - DNA, 15 bp, Homo sapiens
agctacttgggagta

SEQ ID NO: 1522232 - DNA, 15 bp, Homo sapiens
cagctacttgggagt

SEQ ID NO: 1522233 - DNA, 15 bp, Homo sapiens
tgtcccagctacttg

SEQ ID NO: 1522234 - DNA, 15 bp, Homo sapiens
ttgtcccagctactt

SEQ ID NO: 1522235 - DNA, 15 bp, Homo sapiens
cctgttgtcccagct

SEQ ID NO: 1522236 - DNA, 15 bp, Homo sapiens
acctgttgtcccagc

SEQ ID NO: 1522237 - DNA, 15 bp, Homo sapiens
cacctgttgtcccag

SEQ ID NO: 1522238 - DNA, 15 bp, Homo sapiens
acacctgttgtccca

SEQ ID NO: 1522239 - DNA, 15 bp, Homo sapiens
cacacctgttgtccc

SEQ ID NO: 1522240 - DNA, 15 bp, Homo sapiens
acacacctgttgtcc

SEQ ID NO: 1522241 - DNA, 15 bp, Homo sapiens
cacacacctgttgtc

SEQ ID NO: 1522242 - DNA, 15 bp, Homo sapiens
gcacacacctgttgt

SEQ ID NO: 1522243 - DNA, 15 bp, Homo sapiens
ggcacacacctgttg

SEQ ID NO: 1522244 - DNA, 15 bp, Homo sapiens
tggcacacacctgtt

SEQ ID NO: 1522245 - DNA, 15 bp, Homo sapiens
ctgtggtggcacaca

SEQ ID NO: 1522246 - DNA, 15 bp, Homo sapiens
gctgtggtggcacac

SEQ ID NO: 1522247 - DNA, 15 bp, Homo sapiens
agctgtggtggcaca

SEQ ID NO: 1522248 - DNA, 15 bp, Homo sapiens
cagctgtggtggcac

SEQ ID NO: 1522249 - DNA, 15 bp, Homo sapiens
ccagctgtggtggca

SEQ ID NO: 1522250 - DNA, 15 bp, Homo sapiens
gccagctgtggtggc

SEQ ID NO: 1522251 - DNA, 15 bp, Homo sapiens
agccagctgtggtgg

SEQ ID NO: 1522252 - DNA, 15 bp, Homo sapiens
tagccagctgtggtg

SEQ ID NO: 1522253 - DNA, 15 bp, Homo sapiens
ttagccagctgtggt

SEQ ID NO: 1522254 - DNA, 15 bp, Homo sapiens
attagccagctgtgg

SEQ ID NO: 1522255 - DNA, 15 bp, Homo sapiens
aattagccagctgtg

SEQ ID NO: 1522256 - DNA, 15 bp, Homo sapiens
aaattagccagctgt

SEQ ID NO: 1522257 - DNA, 15 bp, Homo sapiens
taaattagccagctg

SEQ ID NO: 1522258 - DNA, 15 bp, Homo sapiens
ataaattagccagct

SEQ ID NO: 1522259 - DNA, 15 bp, Homo sapiens
aataaattagccagc

SEQ ID NO: 1522260 - DNA, 15 bp, Homo sapiens
taataaattagccag

SEQ ID NO: 1522261 - DNA, 15 bp, Homo sapiens
ataataaattagcca

SEQ ID NO: 1522262 - DNA, 15 bp, Homo sapiens
aataataaattagcc

SEQ ID NO: 1522263 - DNA, 15 bp, Homo sapiens
taataataaattagc

SEQ ID NO: 1522264 - DNA, 15 bp, Homo sapiens
ataataataaattag

SEQ ID NO: 1522265 - DNA, 15 bp, Homo sapiens
taataataataaatt

SEQ ID NO: 1522266 - DNA, 15 bp, Homo sapiens
ataataataataaat

SEQ ID NO: 1522267 - DNA, 15 bp, Homo sapiens
acaaaaaaaataata

SEQ ID NO: 1522268 - DNA, 15 bp, Homo sapiens
tacaaaaaaaataat

SEQ ID NO: 1522269 - DNA, 15 bp, Homo sapiens
ctacaaaaaaaataa

SEQ ID NO: 1522270 - DNA, 15 bp, Homo sapiens
tctacaaaaaaaata

SEQ ID NO: 1522271 - DNA, 15 bp, Homo sapiens
catctctacaaaaaa

SEQ ID NO: 1522272 - DNA, 15 bp, Homo sapiens
agcaaaacctcatct

SEQ ID NO: 1522273 - DNA, 15 bp, Homo sapiens
tagcaaaacctcatc

SEQ ID NO: 1522274 - DNA, 15 bp, Homo sapiens
atagcaaaacctcat

SEQ ID NO: 1522275 - DNA, 15 bp, Homo sapiens
catagcaaaacctca

SEQ ID NO: 1522276 - DNA, 15 bp, Homo sapiens
acatagcaaaacctc

SEQ ID NO: 1522277 - DNA, 15 bp, Homo sapiens
aacatagcaaaacct

SEQ ID NO: 1522278 - DNA, 15 bp, Homo sapiens
cgcaacatagcaaaa

SEQ ID NO: 1522279 - DNA, 15 bp, Homo sapiens
gcgcaacatagcaaa

SEQ ID NO: 1522280 - DNA, 15 bp, Homo sapiens
tgcgcaacatagcaa

SEQ ID NO: 1522281 - DNA, 15 bp, Homo sapiens
ctgcgcaacatagca

SEQ ID NO: 1522282 - DNA, 15 bp, Homo sapiens
cctgcgcaacatagc

SEQ ID NO: 1522283 - DNA, 15 bp, Homo sapiens
gcctgcgcaacatag

SEQ ID NO: 1522284 - DNA, 15 bp, Homo sapiens
agcctgcgcaacata

SEQ ID NO: 1522285 - DNA, 15 bp, Homo sapiens
cagcctgcgcaacat

SEQ ID NO: 1522286 - DNA, 15 bp, Homo sapiens
ccagcctgcgcaaca

SEQ ID NO: 1522287 - DNA, 15 bp, Homo sapiens
cccagcctgcgcaac

SEQ ID NO: 1522288 - DNA, 15 bp, Homo sapiens
gcccagcctgcgcaa

SEQ ID NO: 1522289 - DNA, 15 bp, Homo sapiens
agcccagcctgcgca

SEQ ID NO: 1522290 - DNA, 15 bp, Homo sapiens
aagcccagcctgcgc

SEQ ID NO: 1522291 - DNA, 15 bp, Homo sapiens
caagcccagcctgcg

SEQ ID NO: 1522292 - DNA, 15 bp, Homo sapiens
tcaagcccagcctgc

SEQ ID NO: 1522293 - DNA, 15 bp, Homo sapiens
ttcaagcccagcctg

SEQ ID NO: 1522294 - DNA, 15 bp, Homo sapiens
gttcaagcccagcct

SEQ ID NO: 1522295 - DNA, 15 bp, Homo sapiens
agttcaagcccagcc

SEQ ID NO: 1522296 - DNA, 15 bp, Homo sapiens
gagttcaagcccagc

SEQ ID NO: 1522297 - DNA, 15 bp, Homo sapiens
ggagttcaagcccag

SEQ ID NO: 1522298 - DNA, 15 bp, Homo sapiens
aggagttcaagccca

SEQ ID NO: 1522299 - DNA, 15 bp, Homo sapiens
caggagttcaagccc

SEQ ID NO: 1522300 - DNA, 15 bp, Homo sapiens
ccaggagttcaagcc

SEQ ID NO: 1522301 - DNA, 15 bp, Homo sapiens
tccagcactttagga

SEQ ID NO: 1522302 - DNA, 15 bp, Homo sapiens
ttccagcactttagg

SEQ ID NO: 1522303 - DNA, 15 bp, Homo sapiens
attccagcactttag

SEQ ID NO: 1522304 - DNA, 15 bp, Homo sapiens
aattccagcacttta

SEQ ID NO: 1522305 - DNA, 15 bp, Homo sapiens
gtaattccagcactt

SEQ ID NO: 1522306 - DNA, 15 bp, Homo sapiens
tgtaattccagcact

SEQ ID NO: 1522307 - DNA, 15 bp, Homo sapiens
ctgtaattccagcac

SEQ ID NO: 1522308 - DNA, 15 bp, Homo sapiens
tctgtaattccagca

SEQ ID NO: 1522309 - DNA, 15 bp, Homo sapiens
atctgtaattccagc

SEQ ID NO: 1522310 - DNA, 15 bp, Homo sapiens
catctgtaattccag

SEQ ID NO: 1522311 - DNA, 15 bp, Homo sapiens
acatctgtaattcca

SEQ ID NO: 1522312 - DNA, 15 bp, Homo sapiens
cacatctgtaattcc

SEQ ID NO: 1522313 - DNA, 15 bp, Homo sapiens
tcacatctgtaattc

SEQ ID NO: 1522314 - DNA, 15 bp, Homo sapiens
ctcacatctgtaatt

SEQ ID NO: 1522315 - DNA, 15 bp, Homo sapiens
tgtggtggctcacat

SEQ ID NO: 1522316 - DNA, 15 bp, Homo sapiens
gtgtggtggctcaca

SEQ ID NO: 1522317 - DNA, 15 bp, Homo sapiens
ttaggccaggtgtgg

SEQ ID NO: 1522318 - DNA, 15 bp, Homo sapiens
attaggccaggtgtg

SEQ ID NO: 1522319 - DNA, 15 bp, Homo sapiens
aattaggccaggtgt

SEQ ID NO: 1522320 - DNA, 15 bp, Homo sapiens
aaattaggccaggtg

SEQ ID NO: 1522321 - DNA, 15 bp, Homo sapiens
aaaattaggccaggt

SEQ ID NO: 1522322 - DNA, 15 bp, Homo sapiens
aaaaattaggccagg

SEQ ID NO: 1522323 - DNA, 15 bp, Homo sapiens
aaaaaaattaggcca

SEQ ID NO: 1522324 - DNA, 15 bp, Homo sapiens
aaaaaaaattaggcc

SEQ ID NO: 1522325 - DNA, 15 bp, Homo sapiens
aaaaaaaaattaggc

SEQ ID NO: 1522326 - DNA, 15 bp, Homo sapiens
aaaaaaaaaattagg

SEQ ID NO: 1522327 - DNA, 15 bp, Homo sapiens
ctaaaaaaaaaaatt

SEQ ID NO: 1522328 - DNA, 15 bp, Homo sapiens
actaaaaaaaaaaat

SEQ ID NO: 1522329 - DNA, 15 bp, Homo sapiens
aactaaaaaaaaaaa

SEQ ID NO: 1522330 - DNA, 15 bp, Homo sapiens
caactaaaaaaaaaa

SEQ ID NO: 1522331 - DNA, 15 bp, Homo sapiens
ccaactaaaaaaaaa

SEQ ID NO: 1522332 - DNA, 15 bp, Homo sapiens
tccaactaaaaaaaa

SEQ ID NO: 1522333 - DNA, 15 bp, Homo sapiens
gtccaactaaaaaaa

SEQ ID NO: 1522334 - DNA, 15 bp, Homo sapiens
ggtccaactaaaaaa

SEQ ID NO: 1522335 - DNA, 15 bp, Homo sapiens
aggtccaactaaaaa

SEQ ID NO: 1522336 - DNA, 15 bp, Homo sapiens
aaggtccaactaaaa

SEQ ID NO: 1522337 - DNA, 15 bp, Homo sapiens
taaggtccaactaaa

SEQ ID NO: 1522338 - DNA, 15 bp, Homo sapiens
ttaaggtccaactaa

SEQ ID NO: 1522339 - DNA, 15 bp, Homo sapiens
attaaggtccaacta

SEQ ID NO: 1522340 - DNA, 15 bp, Homo sapiens
cattaaggtccaact

SEQ ID NO: 1522341 - DNA, 15 bp, Homo sapiens
ccattaaggtccaac

SEQ ID NO: 1522342 - DNA, 15 bp, Homo sapiens
accattaaggtccaa

SEQ ID NO: 1522343 - DNA, 15 bp, Homo sapiens
gaccattaaggtcca

SEQ ID NO: 1522344 - DNA, 15 bp, Homo sapiens
agaccattaaggtcc

SEQ ID NO: 1522345 - DNA, 15 bp, Homo sapiens
tagaccattaaggtc

SEQ ID NO: 1522346 - DNA, 15 bp, Homo sapiens
ttagaccattaaggt

SEQ ID NO: 1522347 - DNA, 15 bp, Homo sapiens
attagaccattaagg

SEQ ID NO: 1522348 - DNA, 15 bp, Homo sapiens
tattagaccattaag

SEQ ID NO: 1522349 - DNA, 15 bp, Homo sapiens
atattagaccattaa

SEQ ID NO: 1522350 - DNA, 15 bp, Homo sapiens
aatattagaccatta

SEQ ID NO: 1522351 - DNA, 15 bp, Homo sapiens
taatattagaccatt

SEQ ID NO: 1522352 - DNA, 15 bp, Homo sapiens
gtaatattagaccat

SEQ ID NO: 1522353 - DNA, 15 bp, Homo sapiens
agtaatattagacca

SEQ ID NO: 1522354 - DNA, 15 bp, Homo sapiens
tagtaatattagacc

SEQ ID NO: 1522355 - DNA, 15 bp, Homo sapiens
atagtaatattagac

SEQ ID NO: 1522356 - DNA, 15 bp, Homo sapiens
aatagtaatattaga

SEQ ID NO: 1522357 - DNA, 15 bp, Homo sapiens
taatagtaatattag

SEQ ID NO: 1522358 - DNA, 15 bp, Homo sapiens
gtaatagtaatatta

SEQ ID NO: 1522359 - DNA, 15 bp, Homo sapiens
cgtaatagtaatatt

SEQ ID NO: 1522360 - DNA, 15 bp, Homo sapiens
acgtaatagtaatat

SEQ ID NO: 1522361 - DNA, 15 bp, Homo sapiens
tacgtaatagtaata

SEQ ID NO: 1522362 - DNA, 15 bp, Homo sapiens
gtacgtaatagtaat

SEQ ID NO: 1522363 - DNA, 15 bp, Homo sapiens
ggtacgtaatagtaa

SEQ ID NO: 1522364 - DNA, 15 bp, Homo sapiens
aggtacgtaatagta

SEQ ID NO: 1522365 - DNA, 15 bp, Homo sapiens
aaggtacgtaatagt

SEQ ID NO: 1522366 - DNA, 15 bp, Homo sapiens
caaggtacgtaatag

SEQ ID NO: 1522367 - DNA, 15 bp, Homo sapiens
ccaaggtacgtaata

SEQ ID NO: 1522368 - DNA, 15 bp, Homo sapiens
gccaaggtacgtaat

SEQ ID NO: 1522369 - DNA, 15 bp, Homo sapiens
tgccaaggtacgtaa

SEQ ID NO: 1522370 - DNA, 15 bp, Homo sapiens
ttgccaaggtacgta

SEQ ID NO: 1522371 - DNA, 15 bp, Homo sapiens
attgccaaggtacgt

SEQ ID NO: 1522372 - DNA, 15 bp, Homo sapiens
cattgccaaggtacg

SEQ ID NO: 1522373 - DNA, 15 bp, Homo sapiens
acattgccaaggtac

SEQ ID NO: 1522374 - DNA, 15 bp, Homo sapiens
gacattgccaaggta

SEQ ID NO: 1522375 - DNA, 15 bp, Homo sapiens
agacattgccaaggt

SEQ ID NO: 1522376 - DNA, 15 bp, Homo sapiens
aagacattgccaagg

SEQ ID NO: 1522377 - DNA, 15 bp, Homo sapiens
aaagacattgccaag

SEQ ID NO: 1522378 - DNA, 15 bp, Homo sapiens
gaaagacattgccaa

SEQ ID NO: 1522379 - DNA, 15 bp, Homo sapiens
cgaaagacattgcca

SEQ ID NO: 1522380 - DNA, 15 bp, Homo sapiens
tcgaaagacattgcc

SEQ ID NO: 1522381 - DNA, 15 bp, Homo sapiens
ttcgaaagacattgc

SEQ ID NO: 1522382 - DNA, 15 bp, Homo sapiens
tttcgaaagacattg

SEQ ID NO: 1522383 - DNA, 15 bp, Homo sapiens
gtttcgaaagacatt

SEQ ID NO: 1522384 - DNA, 15 bp, Homo sapiens
ggtttcgaaagacat

SEQ ID NO: 1522385 - DNA, 15 bp, Homo sapiens
tggtttcgaaagaca

SEQ ID NO: 1522386 - DNA, 15 bp, Homo sapiens
atggtttcgaaagac

SEQ ID NO: 1522387 - DNA, 15 bp, Homo sapiens
aatggtttcgaaaga

SEQ ID NO: 1522388 - DNA, 15 bp, Homo sapiens
aaatggtttcgaaag

SEQ ID NO: 1522389 - DNA, 15 bp, Homo sapiens
aaaatggtttcgaaa

SEQ ID NO: 1522390 - DNA, 15 bp, Homo sapiens
gaaaatggtttcgaa

SEQ ID NO: 1522391 - DNA, 15 bp, Homo sapiens
ggaaaatggtttcga

SEQ ID NO: 1522392 - DNA, 15 bp, Homo sapiens
gggaaaatggtttcg

SEQ ID NO: 1522393 - DNA, 15 bp, Homo sapiens
ggggaaaatggtttc

SEQ ID NO: 1522394 - DNA, 15 bp, Homo sapiens
gggggaaaatggttt

SEQ ID NO: 1522395 - DNA, 15 bp, Homo sapiens
tgggggaaaatggtt

SEQ ID NO: 1522396 - DNA, 15 bp, Homo sapiens
gtgggggaaaatggt

SEQ ID NO: 1522397 - DNA, 15 bp, Homo sapiens
agtgggggaaaatgg

SEQ ID NO: 1522398 - DNA, 15 bp, Homo sapiens
cagtgggggaaaatg

SEQ ID NO: 1522399 - DNA, 15 bp, Homo sapiens
gcagtgggggaaaat

SEQ ID NO: 1522400 - DNA, 15 bp, Homo sapiens
agcagtgggggaaaa

SEQ ID NO: 1522401 - DNA, 15 bp, Homo sapiens
aagcagtgggggaaa

SEQ ID NO: 1522402 - DNA, 15 bp, Homo sapiens
aaagcagtgggggaa

SEQ ID NO: 1522403 - DNA, 15 bp, Homo sapiens
caaagcagtggggga

SEQ ID NO: 1522404 - DNA, 15 bp, Homo sapiens
gcaaagcagtggggg

SEQ ID NO: 1522405 - DNA, 15 bp, Homo sapiens
agcaaagcagtgggg

SEQ ID NO: 1522406 - DNA, 15 bp, Homo sapiens
cagcaaagcagtggg

SEQ ID NO: 1522407 - DNA, 15 bp, Homo sapiens
ccagcaaagcagtgg

SEQ ID NO: 1522408 - DNA, 15 bp, Homo sapiens
tccagcaaagcagtg

SEQ ID NO: 1522409 - DNA, 15 bp, Homo sapiens
ttccagcaaagcagt

SEQ ID NO: 1522410 - DNA, 15 bp, Homo sapiens
gttccagcaaagcag

SEQ ID NO: 1522411 - DNA, 15 bp, Homo sapiens
agttccagcaaagca

SEQ ID NO: 1522412 - DNA, 15 bp, Homo sapiens
gagttccagcaaagc

SEQ ID NO: 1522413 - DNA, 15 bp, Homo sapiens
agagttccagcaaag

SEQ ID NO: 1522414 - DNA, 15 bp, Homo sapiens
cagagttccagcaaa

SEQ ID NO: 1522415 - DNA, 15 bp, Homo sapiens
acagagttccagcaa

SEQ ID NO: 1522416 - DNA, 15 bp, Homo sapiens
cacagagttccagca

SEQ ID NO: 1522417 - DNA, 15 bp, Homo sapiens
acacagagttccagc

SEQ ID NO: 1522418 - DNA, 15 bp, Homo sapiens
gacacagagttccag

SEQ ID NO: 1522419 - DNA, 15 bp, Homo sapiens
agacacagagttcca

SEQ ID NO: 1522420 - DNA, 15 bp, Homo sapiens
aagacacagagttcc

SEQ ID NO: 1522421 - DNA, 15 bp, Homo sapiens
taagacacagagttc

SEQ ID NO: 1522422 - DNA, 15 bp, Homo sapiens
gtaagacacagagtt

SEQ ID NO: 1522423 - DNA, 15 bp, Homo sapiens
ggtaagacacagagt

SEQ ID NO: 1522424 - DNA, 15 bp, Homo sapiens
aggtaagacacagag

SEQ ID NO: 1522425 - DNA, 15 bp, Homo sapiens
taggtaagacacaga

SEQ ID NO: 1522426 - DNA, 15 bp, Homo sapiens
ataggtaagacacag

SEQ ID NO: 1522427 - DNA, 15 bp, Homo sapiens
tataggtaagacaca

SEQ ID NO: 1522428 - DNA, 15 bp, Homo sapiens
gtataggtaagacac

SEQ ID NO: 1522429 - DNA, 15 bp, Homo sapiens
agtataggtaagaca

SEQ ID NO: 1522430 - DNA, 15 bp, Homo sapiens
tagtataggtaagac

SEQ ID NO: 1522431 - DNA, 15 bp, Homo sapiens
ttagtataggtaaga

SEQ ID NO: 1522432 - DNA, 15 bp, Homo sapiens
attagtataggtaag

SEQ ID NO: 1522433 - DNA, 15 bp, Homo sapiens
cattagtataggtaa

SEQ ID NO: 1522434 - DNA, 15 bp, Homo sapiens
acattagtataggta

SEQ ID NO: 1522435 - DNA, 15 bp, Homo sapiens
tacattagtataggt

SEQ ID NO: 1522436 - DNA, 15 bp, Homo sapiens
ctacattagtatagg

SEQ ID NO: 1522437 - DNA, 15 bp, Homo sapiens
gctacattagtatag

SEQ ID NO: 1522438 - DNA, 15 bp, Homo sapiens
tgctacattagtata

SEQ ID NO: 1522439 - DNA, 15 bp, Homo sapiens
atgctacattagtat

SEQ ID NO: 1522440 - DNA, 15 bp, Homo sapiens
aatgctacattagta

SEQ ID NO: 1522441 - DNA, 15 bp, Homo sapiens
taatgctacattagt

SEQ ID NO: 1522442 - DNA, 15 bp, Homo sapiens
ataatgctacattag

SEQ ID NO: 1522443 - DNA, 15 bp, Homo sapiens
aataatgctacatta

SEQ ID NO: 1522444 - DNA, 15 bp, Homo sapiens
gaataatgctacatt

SEQ ID NO: 1522445 - DNA, 15 bp, Homo sapiens
agaataatgctacat

SEQ ID NO: 1522446 - DNA, 15 bp, Homo sapiens
gagaataatgctaca

SEQ ID NO: 1522447 - DNA, 15 bp, Homo sapiens
ggagaataatgctac

SEQ ID NO: 1522448 - DNA, 15 bp, Homo sapiens
aggagaataatgcta

SEQ ID NO: 1522449 - DNA, 15 bp, Homo sapiens
gaggagaataatgct

SEQ ID NO: 1522450 - DNA, 15 bp, Homo sapiens
ggaggagaataatgc

SEQ ID NO: 1522451 - DNA, 15 bp, Homo sapiens
aggaggagaataatg

SEQ ID NO: 1522452 - DNA, 15 bp, Homo sapiens
gaggaggagaataat

SEQ ID NO: 1522453 - DNA, 15 bp, Homo sapiens
ggaggaggagaataa

SEQ ID NO: 1522454 - DNA, 15 bp, Homo sapiens
aggaggaggagaata

SEQ ID NO: 1522455 - DNA, 15 bp, Homo sapiens
aaggaggaggagaat

SEQ ID NO: 1522456 - DNA, 15 bp, Homo sapiens
gaaggaggaggagaa

SEQ ID NO: 1522457 - DNA, 15 bp, Homo sapiens
tgaaggaggaggaga

SEQ ID NO: 1522458 - DNA, 15 bp, Homo sapiens
atgaaggaggaggag

SEQ ID NO: 1522459 - DNA, 15 bp, Homo sapiens
gatgaaggaggagga

SEQ ID NO: 1522460 - DNA, 15 bp, Homo sapiens
tgatgaaggaggagg

SEQ ID NO: 1522461 - DNA, 15 bp, Homo sapiens
gtgatgaaggaggag

SEQ ID NO: 1522462 - DNA, 15 bp, Homo sapiens
ggtgatgaaggagga

SEQ ID NO: 1522463 - DNA, 15 bp, Homo sapiens
tggtgatgaaggagg

SEQ ID NO: 1522464 - DNA, 15 bp, Homo sapiens
ctggtgatgaaggag

SEQ ID NO: 1522465 - DNA, 15 bp, Homo sapiens
actggtgatgaagga

SEQ ID NO: 1522466 - DNA, 15 bp, Homo sapiens
aactggtgatgaagg

SEQ ID NO: 1522467 - DNA, 15 bp, Homo sapiens
caactggtgatgaag

SEQ ID NO: 1522468 - DNA, 15 bp, Homo sapiens
tcaactggtgatgaa

SEQ ID NO: 1522469 - DNA, 15 bp, Homo sapiens
gtcaactggtgatga

SEQ ID NO: 1522470 - DNA, 15 bp, Homo sapiens
agtcaactggtgatg

SEQ ID NO: 1522471 - DNA, 15 bp, Homo sapiens
tagtcaactggtgat

SEQ ID NO: 1522472 - DNA, 15 bp, Homo sapiens
gtagtcaactggtga

SEQ ID NO: 1522473 - DNA, 15 bp, Homo sapiens
agtagtcaactggtg

SEQ ID NO: 1522474 - DNA, 15 bp, Homo sapiens
aagtagtcaactggt

SEQ ID NO: 1522475 - DNA, 15 bp, Homo sapiens
gaagtagtcaactgg

SEQ ID NO: 1522476 - DNA, 15 bp, Homo sapiens
agaagtagtcaactg

SEQ ID NO: 1522477 - DNA, 15 bp, Homo sapiens
tagaagtagtcaact

SEQ ID NO: 1522478 - DNA, 15 bp, Homo sapiens
ctagaagtagtcaac

SEQ ID NO: 1522479 - DNA, 15 bp, Homo sapiens
cctagaagtagtcaa

SEQ ID NO: 1522480 - DNA, 15 bp, Homo sapiens
acctagaagtagtca

SEQ ID NO: 1522481 - DNA, 15 bp, Homo sapiens
tacctagaagtagtc

SEQ ID NO: 1522482 - DNA, 15 bp, Homo sapiens
ttacctagaagtagt

SEQ ID NO: 1522483 - DNA, 15 bp, Homo sapiens
attacctagaagtag

SEQ ID NO: 1522484 - DNA, 15 bp, Homo sapiens
gattacctagaagta

SEQ ID NO: 1522485 - DNA, 15 bp, Homo sapiens
agattacctagaagt

SEQ ID NO: 1522486 - DNA, 15 bp, Homo sapiens
aagattacctagaag

SEQ ID NO: 1522487 - DNA, 15 bp, Homo sapiens
taagattacctagaa

SEQ ID NO: 1522488 - DNA, 15 bp, Homo sapiens
ttaagattacctaga

SEQ ID NO: 1522489 - DNA, 15 bp, Homo sapiens
gttaagattacctag

SEQ ID NO: 1522490 - DNA, 15 bp, Homo sapiens
tgttaagattaccta

SEQ ID NO: 1522491 - DNA, 15 bp, Homo sapiens
atgttaagattacct

SEQ ID NO: 1522492 - DNA, 15 bp, Homo sapiens
aatgttaagattacc

SEQ ID NO: 1522493 - DNA, 15 bp, Homo sapiens
aaatgttaagattac

SEQ ID NO: 1522494 - DNA, 15 bp, Homo sapiens
gaaatgttaagatta

SEQ ID NO: 1522495 - DNA, 15 bp, Homo sapiens
agaaatgttaagatt

SEQ ID NO: 1522496 - DNA, 15 bp, Homo sapiens
aagaaatgttaagat

SEQ ID NO: 1522497 - DNA, 15 bp, Homo sapiens
gaagaaatgttaaga

SEQ ID NO: 1522498 - DNA, 15 bp, Homo sapiens
agaagaaatgttaag

SEQ ID NO: 1522499 - DNA, 15 bp, Homo sapiens
cagaagaaatgttaa

SEQ ID NO: 1522500 - DNA, 15 bp, Homo sapiens
ccagaagaaatgtta

SEQ ID NO: 1522501 - DNA, 15 bp, Homo sapiens
tccagaagaaatgtt

SEQ ID NO: 1522502 - DNA, 15 bp, Homo sapiens
ctccagaagaaatgt

SEQ ID NO: 1522503 - DNA, 15 bp, Homo sapiens
gctccagaagaaatg

SEQ ID NO: 1522504 - DNA, 15 bp, Homo sapiens
ggctccagaagaaat

SEQ ID NO: 1522505 - DNA, 15 bp, Homo sapiens
tggctccagaagaaa

SEQ ID NO: 1522506 - DNA, 15 bp, Homo sapiens
ctggctccagaagaa

SEQ ID NO: 1522507 - DNA, 15 bp, Homo sapiens
actggctccagaaga

SEQ ID NO: 1522508 - DNA, 15 bp, Homo sapiens
aactggctccagaag

SEQ ID NO: 1522509 - DNA, 15 bp, Homo sapiens
aaactggctccagaa

SEQ ID NO: 1522510 - DNA, 15 bp, Homo sapiens
gaaactggctccaga

SEQ ID NO: 1522511 - DNA, 15 bp, Homo sapiens
ggaaactggctccag

SEQ ID NO: 1522512 - DNA, 15 bp, Homo sapiens
tggaaactggctcca

SEQ ID NO: 1522513 - DNA, 15 bp, Homo sapiens
ctggaaactggctcc

SEQ ID NO: 1522514 - DNA, 15 bp, Homo sapiens
actggaaactggctc

SEQ ID NO: 1522515 - DNA, 15 bp, Homo sapiens
tactggaaactggct

SEQ ID NO: 1522516 - DNA, 15 bp, Homo sapiens
ctactggaaactggc

SEQ ID NO: 1522517 - DNA, 15 bp, Homo sapiens
tctactggaaactgg

SEQ ID NO: 1522518 - DNA, 15 bp, Homo sapiens
ttctactggaaactg

SEQ ID NO: 1522519 - DNA, 15 bp, Homo sapiens
tttctactggaaact

SEQ ID NO: 1522520 - DNA, 15 bp, Homo sapiens
ctttctactggaaac

SEQ ID NO: 1522521 - DNA, 15 bp, Homo sapiens
gctttctactggaaa

SEQ ID NO: 1522522 - DNA, 15 bp, Homo sapiens
agctttctactggaa

SEQ ID NO: 1522523 - DNA, 15 bp, Homo sapiens
aagctttctactgga

SEQ ID NO: 1522524 - DNA, 15 bp, Homo sapiens
caagctttctactgg

SEQ ID NO: 1522525 - DNA, 15 bp, Homo sapiens
acaagctttctactg

SEQ ID NO: 1522526 - DNA, 15 bp, Homo sapiens
gacaagctttctact

SEQ ID NO: 1522527 - DNA, 15 bp, Homo sapiens
agacaagctttctac

SEQ ID NO: 1522528 - DNA, 15 bp, Homo sapiens
cagacaagctttcta

SEQ ID NO: 1522529 - DNA, 15 bp, Homo sapiens
acagacaagctttct

SEQ ID NO: 1522530 - DNA, 15 bp, Homo sapiens
gacagacaagctttc

SEQ ID NO: 1522531 - DNA, 15 bp, Homo sapiens
ggacagacaagcttt

SEQ ID NO: 1522532 - DNA, 15 bp, Homo sapiens
gggacagacaagctt

SEQ ID NO: 1522533 - DNA, 15 bp, Homo sapiens
tgggacagacaagct

SEQ ID NO: 1522534 - DNA, 15 bp, Homo sapiens
atgggacagacaagc

SEQ ID NO: 1522535 - DNA, 15 bp, Homo sapiens
aatgggacagacaag

SEQ ID NO: 1522536 - DNA, 15 bp, Homo sapiens
caatgggacagacaa

SEQ ID NO: 1522537 - DNA, 15 bp, Homo sapiens
tcaatgggacagaca

SEQ ID NO: 1522538 - DNA, 15 bp, Homo sapiens
gtcaatgggacagac

SEQ ID NO: 1522539 - DNA, 15 bp, Homo sapiens
agtcaatgggacaga

SEQ ID NO: 1522540 - DNA, 15 bp, Homo sapiens
gagtcaatgggacag

SEQ ID NO: 1522541 - DNA, 15 bp, Homo sapiens
ggagtcaatgggaca

SEQ ID NO: 1522542 - DNA, 15 bp, Homo sapiens
gggagtcaatgggac

SEQ ID NO: 1522543 - DNA, 15 bp, Homo sapiens
agggagtcaatggga

SEQ ID NO: 1522544 - DNA, 15 bp, Homo sapiens
cagggagtcaatggg

SEQ ID NO: 1522545 - DNA, 15 bp, Homo sapiens
acagggagtcaatgg

SEQ ID NO: 1522546 - DNA, 15 bp, Homo sapiens
tacagggagtcaatg

SEQ ID NO: 1522547 - DNA, 15 bp, Homo sapiens
atacagggagtcaat

SEQ ID NO: 1522548 - DNA, 15 bp, Homo sapiens
tatacagggagtcaa

SEQ ID NO: 1522549 - DNA, 15 bp, Homo sapiens
ttatacagggagtca

SEQ ID NO: 1522550 - DNA, 15 bp, Homo sapiens
tttatacagggagtc

SEQ ID NO: 1522551 - DNA, 15 bp, Homo sapiens
ctttatacagggagt

SEQ ID NO: 1522552 - DNA, 15 bp, Homo sapiens
actttatacagggag

SEQ ID NO: 1522553 - DNA, 15 bp, Homo sapiens
gactttatacaggga

SEQ ID NO: 1522554 - DNA, 15 bp, Homo sapiens
ggactttatacaggg

SEQ ID NO: 1522555 - DNA, 15 bp, Homo sapiens
tggactttatacagg

SEQ ID NO: 1522556 - DNA, 15 bp, Homo sapiens
ttggactttatacag

SEQ ID NO: 1522557 - DNA, 15 bp, Homo sapiens
cttggactttataca

SEQ ID NO: 1522558 - DNA, 15 bp, Homo sapiens
acttggactttatac

SEQ ID NO: 1522559 - DNA, 15 bp, Homo sapiens
aacttggactttata

SEQ ID NO: 1522560 - DNA, 15 bp, Homo sapiens
gaacttggactttat

SEQ ID NO: 1522561 - DNA, 15 bp, Homo sapiens
agaacttggacttta

SEQ ID NO: 1522562 - DNA, 15 bp, Homo sapiens
cagaacttggacttt

SEQ ID NO: 1522563 - DNA, 15 bp, Homo sapiens
acagaacttggactt

SEQ ID NO: 1522564 - DNA, 15 bp, Homo sapiens
tacagaacttggact

SEQ ID NO: 1522565 - DNA, 15 bp, Homo sapiens
ctacagaacttggac

SEQ ID NO: 1522566 - DNA, 15 bp, Homo sapiens
actacagaacttgga

SEQ ID NO: 1522567 - DNA, 15 bp, Homo sapiens
gactacagaacttgg

SEQ ID NO: 1522568 - DNA, 15 bp, Homo sapiens
tgactacagaacttg

SEQ ID NO: 1522569 - DNA, 15 bp, Homo sapiens
ttgactacagaactt

SEQ ID NO: 1522570 - DNA, 15 bp, Homo sapiens
tttgactacagaact

SEQ ID NO: 1522571 - DNA, 15 bp, Homo sapiens
gtttgactacagaac

SEQ ID NO: 1522572 - DNA, 15 bp, Homo sapiens
tgtttgactacagaa

SEQ ID NO: 1522573 - DNA, 15 bp, Homo sapiens
atgtttgactacaga

SEQ ID NO: 1522574 - DNA, 15 bp, Homo sapiens
catgtttgactacag

SEQ ID NO: 1522575 - DNA, 15 bp, Homo sapiens
gcatgtttgactaca

SEQ ID NO: 1522576 - DNA, 15 bp, Homo sapiens
tgcatgtttgactac

SEQ ID NO: 1522577 - DNA, 15 bp, Homo sapiens
ttgcatgtttgacta

SEQ ID NO: 1522578 - DNA, 15 bp, Homo sapiens
cttgcatgtttgact

SEQ ID NO: 1522579 - DNA, 15 bp, Homo sapiens
ccttgcatgtttgac

SEQ ID NO: 1522580 - DNA, 15 bp, Homo sapiens
accttgcatgtttga

SEQ ID NO: 1522581 - DNA, 15 bp, Homo sapiens
taccttgcatgtttg

SEQ ID NO: 1522582 - DNA, 15 bp, Homo sapiens
ttaccttgcatgttt

SEQ ID NO: 1522583 - DNA, 15 bp, Homo sapiens
attaccttgcatgtt

SEQ ID NO: 1522584 - DNA, 15 bp, Homo sapiens
aattaccttgcatgt

SEQ ID NO: 1522585 - DNA, 15 bp, Homo sapiens
aaattaccttgcatg

SEQ ID NO: 1522586 - DNA, 15 bp, Homo sapiens
aaaattaccttgcat

SEQ ID NO: 1522587 - DNA, 15 bp, Homo sapiens
caaaattaccttgca

SEQ ID NO: 1522588 - DNA, 15 bp, Homo sapiens
ccaaaattaccttgc

SEQ ID NO: 1522589 - DNA, 15 bp, Homo sapiens
gccaaaattaccttg

SEQ ID NO: 1522590 - DNA, 15 bp, Homo sapiens
ggccaaaattacctt

SEQ ID NO: 1522591 - DNA, 15 bp, Homo sapiens
aggccaaaattacct

SEQ ID NO: 1522592 - DNA, 15 bp, Homo sapiens
taggccaaaattacc

SEQ ID NO: 1522593 - DNA, 15 bp, Homo sapiens
ttaggccaaaattac

SEQ ID NO: 1522594 - DNA, 15 bp, Homo sapiens
attaggccaaaatta

SEQ ID NO: 1522595 - DNA, 15 bp, Homo sapiens
cattaggccaaaatt

SEQ ID NO: 1522596 - DNA, 15 bp, Homo sapiens
acattaggccaaaat

SEQ ID NO: 1522597 - DNA, 15 bp, Homo sapiens
tacattaggccaaaa

SEQ ID NO: 1522598 - DNA, 15 bp, Homo sapiens
gtacattaggccaaa

SEQ ID NO: 1522599 - DNA, 15 bp, Homo sapiens
agtacattaggccaa

SEQ ID NO: 1522600 - DNA, 15 bp, Homo sapiens
aagtacattaggcca

SEQ ID NO: 1522601 - DNA, 15 bp, Homo sapiens
aaagtacattaggcc

SEQ ID NO: 1522602 - DNA, 15 bp, Homo sapiens
aaaagtacattaggc

SEQ ID NO: 1522603 - DNA, 15 bp, Homo sapiens
gaaaagtacattagg

SEQ ID NO: 1522604 - DNA, 15 bp, Homo sapiens
agaaaagtacattag

SEQ ID NO: 1522605 - DNA, 15 bp, Homo sapiens
tagaaaagtacatta

SEQ ID NO: 1522606 - DNA, 15 bp, Homo sapiens
ttagaaaagtacatt

SEQ ID NO: 1522607 - DNA, 15 bp, Homo sapiens
attagaaaagtacat

SEQ ID NO: 1522608 - DNA, 15 bp, Homo sapiens
gattagaaaagtaca

SEQ ID NO: 1522609 - DNA, 15 bp, Homo sapiens
agattagaaaagtac

SEQ ID NO: 1522610 - DNA, 15 bp, Homo sapiens
aagattagaaaagta

SEQ ID NO: 1522611 - DNA, 15 bp, Homo sapiens
aaagattagaaaagt

SEQ ID NO: 1522612 - DNA, 15 bp, Homo sapiens
aaaagattagaaaag

SEQ ID NO: 1522613 - DNA, 15 bp, Homo sapiens
gaaaagattagaaaa

SEQ ID NO: 1522614 - DNA, 15 bp, Homo sapiens
ggaaaagattagaaa

SEQ ID NO: 1522615 - DNA, 15 bp, Homo sapiens
aggaaaagattagaa

SEQ ID NO: 1522616 - DNA, 15 bp, Homo sapiens
aaggaaaagattaga

SEQ ID NO: 1522617 - DNA, 15 bp, Homo sapiens
gaaggaaaagattag

SEQ ID NO: 1522618 - DNA, 15 bp, Homo sapiens
agaaggaaaagatta

SEQ ID NO: 1522619 - DNA, 15 bp, Homo sapiens
tagaaggaaaagatt

SEQ ID NO: 1522620 - DNA, 15 bp, Homo sapiens
atagaaggaaaagat

SEQ ID NO: 1522621 - DNA, 15 bp, Homo sapiens
aatagaaggaaaaga

SEQ ID NO: 1522622 - DNA, 15 bp, Homo sapiens
gaatagaaggaaaag

SEQ ID NO: 1522623 - DNA, 15 bp, Homo sapiens
ggaatagaaggaaaa

SEQ ID NO: 1522624 - DNA, 15 bp, Homo sapiens
tggaatagaaggaaa

SEQ ID NO: 1522625 - DNA, 15 bp, Homo sapiens
atggaatagaaggaa

SEQ ID NO: 1522626 - DNA, 15 bp, Homo sapiens
gatggaatagaagga

SEQ ID NO: 1522627 - DNA, 15 bp, Homo sapiens
ggatggaatagaagg

SEQ ID NO: 1522628 - DNA, 15 bp, Homo sapiens
tggatggaatagaag

SEQ ID NO: 1522629 - DNA, 15 bp, Homo sapiens
ttggatggaatagaa

SEQ ID NO: 1522630 - DNA, 15 bp, Homo sapiens
attggatggaataga

SEQ ID NO: 1522631 - DNA, 15 bp, Homo sapiens
tattggatggaatag

SEQ ID NO: 1522632 - DNA, 15 bp, Homo sapiens
atattggatggaata

SEQ ID NO: 1522633 - DNA, 15 bp, Homo sapiens
tatattggatggaat

SEQ ID NO: 1522634 - DNA, 15 bp, Homo sapiens
gtatattggatggaa

SEQ ID NO: 1522635 - DNA, 15 bp, Homo sapiens
agtatattggatgga

SEQ ID NO: 1522636 - DNA, 15 bp, Homo sapiens
aagtatattggatgg

SEQ ID NO: 1522637 - DNA, 15 bp, Homo sapiens
taagtatattggatg

SEQ ID NO: 1522638 - DNA, 15 bp, Homo sapiens
ataagtatattggat

SEQ ID NO: 1522639 - DNA, 15 bp, Homo sapiens
cataagtatattgga

SEQ ID NO: 1522640 - DNA, 15 bp, Homo sapiens
gcataagtatattgg

SEQ ID NO: 1522641 - DNA, 15 bp, Homo sapiens
agcataagtatattg

SEQ ID NO: 1522642 - DNA, 15 bp, Homo sapiens
gagcataagtatatt

SEQ ID NO: 1522643 - DNA, 15 bp, Homo sapiens
agagcataagtatat

SEQ ID NO: 1522644 - DNA, 15 bp, Homo sapiens
aagagcataagtata

SEQ ID NO: 1522645 - DNA, 15 bp, Homo sapiens
caagagcataagtat

SEQ ID NO: 1522646 - DNA, 15 bp, Homo sapiens
gcaagagcataagta

SEQ ID NO: 1522647 - DNA, 15 bp, Homo sapiens
ggcaagagcataagt

SEQ ID NO: 1522648 - DNA, 15 bp, Homo sapiens
gggcaagagcataag

SEQ ID NO: 1522649 - DNA, 15 bp, Homo sapiens
agggcaagagcataa

SEQ ID NO: 1522650 - DNA, 15 bp, Homo sapiens
cagggcaagagcata

SEQ ID NO: 1522651 - DNA, 15 bp, Homo sapiens
acagggcaagagcat

SEQ ID NO: 1522652 - DNA, 15 bp, Homo sapiens
cacagggcaagagca

SEQ ID NO: 1522653 - DNA, 15 bp, Homo sapiens
ccacagggcaagagc

SEQ ID NO: 1522654 - DNA, 15 bp, Homo sapiens
accacagggcaagag

SEQ ID NO: 1522655 - DNA, 15 bp, Homo sapiens
taccacagggcaaga

SEQ ID NO: 1522656 - DNA, 15 bp, Homo sapiens
ttaccacagggcaag

SEQ ID NO: 1522657 - DNA, 15 bp, Homo sapiens
cttaccacagggcaa

SEQ ID NO: 1522658 - DNA, 15 bp, Homo sapiens
ccttaccacagggca

SEQ ID NO: 1522659 - DNA, 15 bp, Homo sapiens
accttaccacagggc

SEQ ID NO: 1522660 - DNA, 15 bp, Homo sapiens
taccttaccacaggg

SEQ ID NO: 1522661 - DNA, 15 bp, Homo sapiens
ctaccttaccacagg

SEQ ID NO: 1522662 - DNA, 15 bp, Homo sapiens
gctaccttaccacag

SEQ ID NO: 1522663 - DNA, 15 bp, Homo sapiens
tgctaccttaccaca

SEQ ID NO: 1522664 - DNA, 15 bp, Homo sapiens
atgctaccttaccac

SEQ ID NO: 1522665 - DNA, 15 bp, Homo sapiens
tatgctaccttacca

SEQ ID NO: 1522666 - DNA, 15 bp, Homo sapiens
ttatgctaccttacc

SEQ ID NO: 1522667 - DNA, 15 bp, Homo sapiens
attatgctaccttac

SEQ ID NO: 1522668 - DNA, 15 bp, Homo sapiens
tattatgctacctta

SEQ ID NO: 1522669 - DNA, 15 bp, Homo sapiens
gtattatgctacctt

SEQ ID NO: 1522670 - DNA, 15 bp, Homo sapiens
tgtattatgctacct

SEQ ID NO: 1522671 - DNA, 15 bp, Homo sapiens
ttgtattatgctacc

SEQ ID NO: 1522672 - DNA, 15 bp, Homo sapiens
cttgtattatgctac

SEQ ID NO: 1522673 - DNA, 15 bp, Homo sapiens
ccttgtattatgcta

SEQ ID NO: 1522674 - DNA, 15 bp, Homo sapiens
tccttgtattatgct

SEQ ID NO: 1522675 - DNA, 15 bp, Homo sapiens
gtccttgtattatgc

SEQ ID NO: 1522676 - DNA, 15 bp, Homo sapiens
tgtccttgtattatg

SEQ ID NO: 1522677 - DNA, 15 bp, Homo sapiens
atgtccttgtattat

SEQ ID NO: 1522678 - DNA, 15 bp, Homo sapiens
aatgtccttgtatta

SEQ ID NO: 1522679 - DNA, 15 bp, Homo sapiens
caatgtccttgtatt

SEQ ID NO: 1522680 - DNA, 15 bp, Homo sapiens
acaatgtccttgtat

SEQ ID NO: 1522681 - DNA, 15 bp, Homo sapiens
aacaatgtccttgta

SEQ ID NO: 1522682 - DNA, 15 bp, Homo sapiens
caacaatgtccttgt

SEQ ID NO: 1522683 - DNA, 15 bp, Homo sapiens
gcaacaatgtccttg

SEQ ID NO: 1522684 - DNA, 15 bp, Homo sapiens
tgcaacaatgtcctt

SEQ ID NO: 1522685 - DNA, 15 bp, Homo sapiens
ttgcaacaatgtcct

SEQ ID NO: 1522686 - DNA, 15 bp, Homo sapiens
gttgcaacaatgtcc

SEQ ID NO: 1522687 - DNA, 15 bp, Homo sapiens
tgttgcaacaatgtc

SEQ ID NO: 1522688 - DNA, 15 bp, Homo sapiens
atgttgcaacaatgt

SEQ ID NO: 1522689 - DNA, 15 bp, Homo sapiens
aatgttgcaacaatg

SEQ ID NO: 1522690 - DNA, 15 bp, Homo sapiens
caatgttgcaacaat

SEQ ID NO: 1522691 - DNA, 15 bp, Homo sapiens
acaatgttgcaacaa

SEQ ID NO: 1522692 - DNA, 15 bp, Homo sapiens
aacaatgttgcaaca

SEQ ID NO: 1522693 - DNA, 15 bp, Homo sapiens
aaacaatgttgcaac

SEQ ID NO: 1522694 - DNA, 15 bp, Homo sapiens
taaacaatgttgcaa

SEQ ID NO: 1522695 - DNA, 15 bp, Homo sapiens
ataaacaatgttgca

SEQ ID NO: 1522696 - DNA, 15 bp, Homo sapiens
tataaacaatgttgc

SEQ ID NO: 1522697 - DNA, 15 bp, Homo sapiens
atataaacaatgttg

SEQ ID NO: 1522698 - DNA, 15 bp, Homo sapiens
tatataaacaatgtt

SEQ ID NO: 1522699 - DNA, 15 bp, Homo sapiens
ctatataaacaatgt

SEQ ID NO: 1522700 - DNA, 15 bp, Homo sapiens
actatataaacaatg

SEQ ID NO: 1522701 - DNA, 15 bp, Homo sapiens
cactatataaacaat

SEQ ID NO: 1522702 - DNA, 15 bp, Homo sapiens
ccactatataaacaa

SEQ ID NO: 1522703 - DNA, 15 bp, Homo sapiens
gccactatataaaca

SEQ ID NO: 1522704 - DNA, 15 bp, Homo sapiens
tgccactatataaac

SEQ ID NO: 1522705 - DNA, 15 bp, Homo sapiens
ttgccactatataaa

SEQ ID NO: 1522706 - DNA, 15 bp, Homo sapiens
gttgccactatataa

SEQ ID NO: 1522707 - DNA, 15 bp, Homo sapiens
tgttgccactatata

SEQ ID NO: 1522708 - DNA, 15 bp, Homo sapiens
ttgttgccactatat

SEQ ID NO: 1522709 - DNA, 15 bp, Homo sapiens
tttgttgccactata

SEQ ID NO: 1522710 - DNA, 15 bp, Homo sapiens
ttttgttgccactat

SEQ ID NO: 1522711 - DNA, 15 bp, Homo sapiens
tttttgttgccacta

SEQ ID NO: 1522712 - DNA, 15 bp, Homo sapiens
ctttttgttgccact

SEQ ID NO: 1522713 - DNA, 15 bp, Homo sapiens
cctttttgttgccac

SEQ ID NO: 1522714 - DNA, 15 bp, Homo sapiens
tcctttttgttgcca

SEQ ID NO: 1522715 - DNA, 15 bp, Homo sapiens
ttcctttttgttgcc

SEQ ID NO: 1522716 - DNA, 15 bp, Homo sapiens
tttcctttttgttgc

SEQ ID NO: 1522717 - DNA, 15 bp, Homo sapiens
ttttcctttttgttg

SEQ ID NO: 1522718 - DNA, 15 bp, Homo sapiens
gttttcctttttgtt

SEQ ID NO: 1522719 - DNA, 15 bp, Homo sapiens
tgttttcctttttgt

SEQ ID NO: 1522720 - DNA, 15 bp, Homo sapiens
ttgttttcctttttg

SEQ ID NO: 1522721 - DNA, 15 bp, Homo sapiens
attgttttccttttt

SEQ ID NO: 1522722 - DNA, 15 bp, Homo sapiens
tattgttttcctttt

SEQ ID NO: 1522723 - DNA, 15 bp, Homo sapiens
ctattgttttccttt

SEQ ID NO: 1522724 - DNA, 15 bp, Homo sapiens
tctattgttttcctt

SEQ ID NO: 1522725 - DNA, 15 bp, Homo sapiens
ctctattgttttcct

SEQ ID NO: 1522726 - DNA, 15 bp, Homo sapiens
actctattgttttcc

SEQ ID NO: 1522727 - DNA, 15 bp, Homo sapiens
aactctattgttttc

SEQ ID NO: 1522728 - DNA, 15 bp, Homo sapiens
caactctattgtttt

SEQ ID NO: 1522729 - DNA, 15 bp, Homo sapiens
acaactctattgttt

SEQ ID NO: 1522730 - DNA, 15 bp, Homo sapiens
cacaactctattgtt

SEQ ID NO: 1522731 - DNA, 15 bp, Homo sapiens
acacaactctattgt

SEQ ID NO: 1522732 - DNA, 15 bp, Homo sapiens
aacacaactctattg

SEQ ID NO: 1522733 - DNA, 15 bp, Homo sapiens
aaacacaactctatt

SEQ ID NO: 1522734 - DNA, 15 bp, Homo sapiens
gaaacacaactctat

SEQ ID NO: 1522735 - DNA, 15 bp, Homo sapiens
tgaaacacaactcta

SEQ ID NO: 1522736 - DNA, 15 bp, Homo sapiens
ttgaaacacaactct

SEQ ID NO: 1522737 - DNA, 15 bp, Homo sapiens
tttgaaacacaactc

SEQ ID NO: 1522738 - DNA, 15 bp, Homo sapiens
ttttgaaacacaact

SEQ ID NO: 1522739 - DNA, 15 bp, Homo sapiens
cttttgaaacacaac

SEQ ID NO: 1522740 - DNA, 15 bp, Homo sapiens
ccttttgaaacacaa

SEQ ID NO: 1522741 - DNA, 15 bp, Homo sapiens
cccttttgaaacaca

SEQ ID NO: 1522742 - DNA, 15 bp, Homo sapiens
ccccttttgaaacac

SEQ ID NO: 1522743 - DNA, 15 bp, Homo sapiens
tccccttttgaaaca

SEQ ID NO: 1522744 - DNA, 15 bp, Homo sapiens
ttccccttttgaaac

SEQ ID NO: 1522745 - DNA, 15 bp, Homo sapiens
attccccttttgaaa

SEQ ID NO: 1522746 - DNA, 15 bp, Homo sapiens
aattccccttttgaa

SEQ ID NO: 1522747 - DNA, 15 bp, Homo sapiens
caattccccttttga

SEQ ID NO: 1522748 - DNA, 15 bp, Homo sapiens
acaattccccttttg

SEQ ID NO: 1522749 - DNA, 15 bp, Homo sapiens
aacaattcccctttt

SEQ ID NO: 1522750 - DNA, 15 bp, Homo sapiens
caacaattccccttt

SEQ ID NO: 1522751 - DNA, 15 bp, Homo sapiens
tcaacaattcccctt

SEQ ID NO: 1522752 - DNA, 15 bp, Homo sapiens
ttcaacaattcccct

SEQ ID NO: 1522753 - DNA, 15 bp, Homo sapiens
attcaacaattcccc

SEQ ID NO: 1522754 - DNA, 15 bp, Homo sapiens
tattcaacaattccc

SEQ ID NO: 1522755 - DNA, 15 bp, Homo sapiens
ttattcaacaattcc

SEQ ID NO: 1522756 - DNA, 15 bp, Homo sapiens
tttattcaacaattc

SEQ ID NO: 1522757 - DNA, 15 bp, Homo sapiens
atttattcaacaatt

SEQ ID NO: 1522758 - DNA, 15 bp, Homo sapiens
catttattcaacaat

SEQ ID NO: 1522759 - DNA, 15 bp, Homo sapiens
tcatttattcaacaa

SEQ ID NO: 1522760 - DNA, 15 bp, Homo sapiens
atcatttattcaaca

SEQ ID NO: 1522761 - DNA, 15 bp, Homo sapiens
catcatttattcaac

SEQ ID NO: 1522762 - DNA, 15 bp, Homo sapiens
tcatcatttattcaa

SEQ ID NO: 1522763 - DNA, 15 bp, Homo sapiens
atcatcatttattca

SEQ ID NO: 1522764 - DNA, 15 bp, Homo sapiens
tatcatcatttattc

SEQ ID NO: 1522765 - DNA, 15 bp, Homo sapiens
gtatcatcatttatt

SEQ ID NO: 1522766 - DNA, 15 bp, Homo sapiens
tgtatcatcatttat

SEQ ID NO: 1522767 - DNA, 15 bp, Homo sapiens
atgtatcatcattta

SEQ ID NO: 1522768 - DNA, 15 bp, Homo sapiens
aatgtatcatcattt

SEQ ID NO: 1522769 - DNA, 15 bp, Homo sapiens
aaatgtatcatcatt

SEQ ID NO: 1522770 - DNA, 15 bp, Homo sapiens
taaatgtatcatcat

SEQ ID NO: 1522771 - DNA, 15 bp, Homo sapiens
gtaaatgtatcatca

SEQ ID NO: 1522772 - DNA, 15 bp, Homo sapiens
tgtaaatgtatcatc

SEQ ID NO: 1522773 - DNA, 15 bp, Homo sapiens
atgtaaatgtatcat

SEQ ID NO: 1522774 - DNA, 15 bp, Homo sapiens
aatgtaaatgtatca

SEQ ID NO: 1522775 - DNA, 15 bp, Homo sapiens
taatgtaaatgtatc

SEQ ID NO: 1522776 - DNA, 15 bp, Homo sapiens
ctaatgtaaatgtat

SEQ ID NO: 1522777 - DNA, 15 bp, Homo sapiens
cctaatgtaaatgta

SEQ ID NO: 1522778 - DNA, 15 bp, Homo sapiens
ccctaatgtaaatgt

SEQ ID NO: 1522779 - DNA, 15 bp, Homo sapiens
tccctaatgtaaatg

SEQ ID NO: 1522780 - DNA, 15 bp, Homo sapiens
ttccctaatgtaaat

SEQ ID NO: 1522781 - DNA, 15 bp, Homo sapiens
attccctaatgtaaa

SEQ ID NO: 1522782 - DNA, 15 bp, Homo sapiens
tattccctaatgtaa

SEQ ID NO: 1522783 - DNA, 15 bp, Homo sapiens
ttattccctaatgta

SEQ ID NO: 1522784 - DNA, 15 bp, Homo sapiens
cttattccctaatgt

SEQ ID NO: 1522785 - DNA, 15 bp, Homo sapiens
ccttattccctaatg

SEQ ID NO: 1522786 - DNA, 15 bp, Homo sapiens
gccttattccctaat

SEQ ID NO: 1522787 - DNA, 15 bp, Homo sapiens
tgccttattccctaa

SEQ ID NO: 1522788 - DNA, 15 bp, Homo sapiens
ttgccttattcccta

SEQ ID NO: 1522789 - DNA, 15 bp, Homo sapiens
attgccttattccct

SEQ ID NO: 1522790 - DNA, 15 bp, Homo sapiens
cattgccttattccc

SEQ ID NO: 1522791 - DNA, 15 bp, Homo sapiens
acattgccttattcc

SEQ ID NO: 1522792 - DNA, 15 bp, Homo sapiens
cacattgccttattc

SEQ ID NO: 1522793 - DNA, 15 bp, Homo sapiens
acacattgccttatt

SEQ ID NO: 1522794 - DNA, 15 bp, Homo sapiens
aacacattgccttat

SEQ ID NO: 1522795 - DNA, 15 bp, Homo sapiens
taacacattgcctta

SEQ ID NO: 1522796 - DNA, 15 bp, Homo sapiens
ttaacacattgcctt

SEQ ID NO: 1522797 - DNA, 15 bp, Homo sapiens
attaacacattgcct

SEQ ID NO: 1522798 - DNA, 15 bp, Homo sapiens
aattaacacattgcc

SEQ ID NO: 1522799 - DNA, 15 bp, Homo sapiens
aaattaacacattgc

SEQ ID NO: 1522800 - DNA, 15 bp, Homo sapiens
aaaattaacacattg

SEQ ID NO: 1522801 - DNA, 15 bp, Homo sapiens
caaaattaacacatt

SEQ ID NO: 1522802 - DNA, 15 bp, Homo sapiens
gcaaaattaacacat

SEQ ID NO: 1522803 - DNA, 15 bp, Homo sapiens
agcaaaattaacaca

SEQ ID NO: 1522804 - DNA, 15 bp, Homo sapiens
aagcaaaattaacac

SEQ ID NO: 1522805 - DNA, 15 bp, Homo sapiens
caagcaaaattaaca

SEQ ID NO: 1522806 - DNA, 15 bp, Homo sapiens
acaagcaaaattaac

SEQ ID NO: 1522807 - DNA, 15 bp, Homo sapiens
aacaagcaaaattaa

SEQ ID NO: 1522808 - DNA, 15 bp, Homo sapiens
taacaagcaaaatta

SEQ ID NO: 1522809 - DNA, 15 bp, Homo sapiens
gtaacaagcaaaatt

SEQ ID NO: 1522810 - DNA, 15 bp, Homo sapiens
tgtaacaagcaaaat

SEQ ID NO: 1522811 - DNA, 15 bp, Homo sapiens
ttgtaacaagcaaaa

SEQ ID NO: 1522812 - DNA, 15 bp, Homo sapiens
cttgtaacaagcaaa

SEQ ID NO: 1522813 - DNA, 15 bp, Homo sapiens
acttgtaacaagcaa

SEQ ID NO: 1522814 - DNA, 15 bp, Homo sapiens
cacttgtaacaagca

SEQ ID NO: 1522815 - DNA, 15 bp, Homo sapiens
tcacttgtaacaagc

SEQ ID NO: 1522816 - DNA, 15 bp, Homo sapiens
gtcacttgtaacaag

SEQ ID NO: 1522817 - DNA, 15 bp, Homo sapiens
tgtcacttgtaacaa

SEQ ID NO: 1522818 - DNA, 15 bp, Homo sapiens
ctgtcacttgtaaca

SEQ ID NO: 1522819 - DNA, 15 bp, Homo sapiens
tctgtcacttgtaac

SEQ ID NO: 1522820 - DNA, 15 bp, Homo sapiens
ttctgtcacttgtaa

SEQ ID NO: 1522821 - DNA, 15 bp, Homo sapiens
tttctgtcacttgta

SEQ ID NO: 1522822 - DNA, 15 bp, Homo sapiens
atttctgtcacttgt

SEQ ID NO: 1522823 - DNA, 15 bp, Homo sapiens
catttctgtcacttg

SEQ ID NO: 1522824 - DNA, 15 bp, Homo sapiens
gcatttctgtcactt

SEQ ID NO: 1522825 - DNA, 15 bp, Homo sapiens
tgcatttctgtcact

SEQ ID NO: 1522826 - DNA, 15 bp, Homo sapiens
ttgcatttctgtcac

SEQ ID NO: 1522827 - DNA, 15 bp, Homo sapiens
attgcatttctgtca

SEQ ID NO: 1522828 - DNA, 15 bp, Homo sapiens
aattgcatttctgtc

SEQ ID NO: 1522829 - DNA, 15 bp, Homo sapiens
gaattgcatttctgt

SEQ ID NO: 1522830 - DNA, 15 bp, Homo sapiens
tgaattgcatttctg

SEQ ID NO: 1522831 - DNA, 15 bp, Homo sapiens
ttgaattgcatttct

SEQ ID NO: 1522832 - DNA, 15 bp, Homo sapiens
tttgaattgcatttc

SEQ ID NO: 1522833 - DNA, 15 bp, Homo sapiens
atttgaattgcattt

SEQ ID NO: 1522834 - DNA, 15 bp, Homo sapiens
aatttgaattgcatt

SEQ ID NO: 1522835 - DNA, 15 bp, Homo sapiens
aaatttgaattgcat

SEQ ID NO: 1522836 - DNA, 15 bp, Homo sapiens
taaatttgaattgca

SEQ ID NO: 1522837 - DNA, 15 bp, Homo sapiens
ataaatttgaattgc

SEQ ID NO: 1522838 - DNA, 15 bp, Homo sapiens
cataaatttgaattg

SEQ ID NO: 1522839 - DNA, 15 bp, Homo sapiens
acataaatttgaatt

SEQ ID NO: 1522840 - DNA, 15 bp, Homo sapiens
cacataaatttgaat

SEQ ID NO: 1522841 - DNA, 15 bp, Homo sapiens
acacataaatttgaa

SEQ ID NO: 1522842 - DNA, 15 bp, Homo sapiens
cacacataaatttga

SEQ ID NO: 1522843 - DNA, 15 bp, Homo sapiens
gcacacataaatttg

SEQ ID NO: 1522844 - DNA, 15 bp, Homo sapiens
ggcacacataaattt

SEQ ID NO: 1522845 - DNA, 15 bp, Homo sapiens
tggcacacataaatt

SEQ ID NO: 1522846 - DNA, 15 bp, Homo sapiens
ttggcacacataaat

SEQ ID NO: 1522847 - DNA, 15 bp, Homo sapiens
tttggcacacataaa

SEQ ID NO: 1522848 - DNA, 15 bp, Homo sapiens
ttttggcacacataa

SEQ ID NO: 1522849 - DNA, 15 bp, Homo sapiens
tttttggcacacata

SEQ ID NO: 1522850 - DNA, 15 bp, Homo sapiens
ctttttggcacacat

SEQ ID NO: 1522851 - DNA, 15 bp, Homo sapiens
cctttttggcacaca

SEQ ID NO: 1522852 - DNA, 15 bp, Homo sapiens
tcctttttggcacac

SEQ ID NO: 1522853 - DNA, 15 bp, Homo sapiens
ttcctttttggcaca

SEQ ID NO: 1522854 - DNA, 15 bp, Homo sapiens
attcctttttggcac

SEQ ID NO: 1522855 - DNA, 15 bp, Homo sapiens
aattcctttttggca

SEQ ID NO: 1522856 - DNA, 15 bp, Homo sapiens
aaattcctttttggc

SEQ ID NO: 1522857 - DNA, 15 bp, Homo sapiens
taaattcctttttgg

SEQ ID NO: 1522858 - DNA, 15 bp, Homo sapiens
ataaattcctttttg

SEQ ID NO: 1522859 - DNA, 15 bp, Homo sapiens
aataaattccttttt

SEQ ID NO: 1522860 - DNA, 15 bp, Homo sapiens
caataaattcctttt

SEQ ID NO: 1522861 - DNA, 15 bp, Homo sapiens
tcaataaattccttt

SEQ ID NO: 1522862 - DNA, 15 bp, Homo sapiens
gtcaataaattcctt

SEQ ID NO: 1522863 - DNA, 15 bp, Homo sapiens
agtcaataaattcct

SEQ ID NO: 1522864 - DNA, 15 bp, Homo sapiens
gagtcaataaattcc

SEQ ID NO: 1522865 - DNA, 15 bp, Homo sapiens
tgagtcaataaattc

SEQ ID NO: 1522866 - DNA, 15 bp, Homo sapiens
atgagtcaataaatt

SEQ ID NO: 1522867 - DNA, 15 bp, Homo sapiens
catgagtcaataaat

SEQ ID NO: 1522868 - DNA, 15 bp, Homo sapiens
acatgagtcaataaa

SEQ ID NO: 1522869 - DNA, 15 bp, Homo sapiens
tacatgagtcaataa

SEQ ID NO: 1522870 - DNA, 15 bp, Homo sapiens
gtacatgagtcaata

SEQ ID NO: 1522871 - DNA, 15 bp, Homo sapiens
ggtacatgagtcaat

SEQ ID NO: 1522872 - DNA, 15 bp, Homo sapiens
aggtacatgagtcaa

SEQ ID NO: 1522873 - DNA, 15 bp, Homo sapiens
taggtacatgagtca

SEQ ID NO: 1522874 - DNA, 15 bp, Homo sapiens
ttaggtacatgagtc

SEQ ID NO: 1522875 - DNA, 15 bp, Homo sapiens
cttaggtacatgagt

SEQ ID NO: 1522876 - DNA, 15 bp, Homo sapiens
tcttaggtacatgag

SEQ ID NO: 1522877 - DNA, 15 bp, Homo sapiens
ttcttaggtacatga

SEQ ID NO: 1522878 - DNA, 15 bp, Homo sapiens
tttcttaggtacatg

SEQ ID NO: 1522879 - DNA, 15 bp, Homo sapiens
ttttcttaggtacat

SEQ ID NO: 1522880 - DNA, 15 bp, Homo sapiens
attttcttaggtaca

SEQ ID NO: 1522881 - DNA, 15 bp, Homo sapiens
gattttcttaggtac

SEQ ID NO: 1522882 - DNA, 15 bp, Homo sapiens
tgattttcttaggta

SEQ ID NO: 1522883 - DNA, 15 bp, Homo sapiens
ttgattttcttaggt

SEQ ID NO: 1522884 - DNA, 15 bp, Homo sapiens
cttgattttcttagg

SEQ ID NO: 1522885 - DNA, 15 bp, Homo sapiens
tcttgattttcttag

SEQ ID NO: 1522886 - DNA, 15 bp, Homo sapiens
ctcttgattttctta

SEQ ID NO: 1522887 - DNA, 15 bp, Homo sapiens
tctcttgattttctt

SEQ ID NO: 1522888 - DNA, 15 bp, Homo sapiens
atctcttgattttct

SEQ ID NO: 1522889 - DNA, 15 bp, Homo sapiens
catctcttgattttc

SEQ ID NO: 1522890 - DNA, 15 bp, Homo sapiens
acatctcttgatttt

SEQ ID NO: 1522891 - DNA, 15 bp, Homo sapiens
tacatctcttgattt

SEQ ID NO: 1522892 - DNA, 15 bp, Homo sapiens
atacatctcttgatt

SEQ ID NO: 1522893 - DNA, 15 bp, Homo sapiens
aatacatctcttgat

SEQ ID NO: 1522894 - DNA, 15 bp, Homo sapiens
taatacatctcttga

SEQ ID NO: 1522895 - DNA, 15 bp, Homo sapiens
ctaatacatctcttg

SEQ ID NO: 1522896 - DNA, 15 bp, Homo sapiens
actaatacatctctt

SEQ ID NO: 1522897 - DNA, 15 bp, Homo sapiens
aactaatacatctct

SEQ ID NO: 1522898 - DNA, 15 bp, Homo sapiens
aaactaatacatctc

SEQ ID NO: 1522899 - DNA, 15 bp, Homo sapiens
gaaactaatacatct

SEQ ID NO: 1522900 - DNA, 15 bp, Homo sapiens
agaaactaatacatc

SEQ ID NO: 1522901 - DNA, 15 bp, Homo sapiens
aagaaactaatacat

SEQ ID NO: 1522902 - DNA, 15 bp, Homo sapiens
caagaaactaataca

SEQ ID NO: 1522903 - DNA, 15 bp, Homo sapiens
gcaagaaactaatac

SEQ ID NO: 1522904 - DNA, 15 bp, Homo sapiens
tgcaagaaactaata

SEQ ID NO: 1522905 - DNA, 15 bp, Homo sapiens
atgcaagaaactaat

SEQ ID NO: 1522906 - DNA, 15 bp, Homo sapiens
catgcaagaaactaa

SEQ ID NO: 1522907 - DNA, 15 bp, Homo sapiens
tcatgcaagaaacta

SEQ ID NO: 1522908 - DNA, 15 bp, Homo sapiens
gtcatgcaagaaact

SEQ ID NO: 1522909 - DNA, 15 bp, Homo sapiens
agtcatgcaagaaac

SEQ ID NO: 1522910 - DNA, 15 bp, Homo sapiens
tagtcatgcaagaaa

SEQ ID NO: 1522911 - DNA, 15 bp, Homo sapiens
ctagtcatgcaagaa

SEQ ID NO: 1522912 - DNA, 15 bp, Homo sapiens
gctagtcatgcaaga

SEQ ID NO: 1522913 - DNA, 15 bp, Homo sapiens
agctagtcatgcaag

SEQ ID NO: 1522914 - DNA, 15 bp, Homo sapiens
cagctagtcatgcaa

SEQ ID NO: 1522915 - DNA, 15 bp, Homo sapiens
gcagctagtcatgca

SEQ ID NO: 1522916 - DNA, 15 bp, Homo sapiens
tgcagctagtcatgc

SEQ ID NO: 1522917 - DNA, 15 bp, Homo sapiens
ctgcagctagtcatg

SEQ ID NO: 1522918 - DNA, 15 bp, Homo sapiens
tctgcagctagtcat

SEQ ID NO: 1522919 - DNA, 15 bp, Homo sapiens
ctctgcagctagtca

SEQ ID NO: 1522920 - DNA, 15 bp, Homo sapiens
gctctgcagctagtc

SEQ ID NO: 1522921 - DNA, 15 bp, Homo sapiens
agctctgcagctagt

SEQ ID NO: 1522922 - DNA, 15 bp, Homo sapiens
aagctctgcagctag

SEQ ID NO: 1522923 - DNA, 15 bp, Homo sapiens
aaagctctgcagcta

SEQ ID NO: 1522924 - DNA, 15 bp, Homo sapiens
taaagctctgcagct

SEQ ID NO: 1522925 - DNA, 15 bp, Homo sapiens
ttaaagctctgcagc

SEQ ID NO: 1522926 - DNA, 15 bp, Homo sapiens
tttaaagctctgcag

SEQ ID NO: 1522927 - DNA, 15 bp, Homo sapiens
gtttaaagctctgca

SEQ ID NO: 1522928 - DNA, 15 bp, Homo sapiens
tgtttaaagctctgc

SEQ ID NO: 1522929 - DNA, 15 bp, Homo sapiens
ctgtttaaagctctg

SEQ ID NO: 1522930 - DNA, 15 bp, Homo sapiens
actgtttaaagctct

SEQ ID NO: 1522931 - DNA, 15 bp, Homo sapiens
tactgtttaaagctc

SEQ ID NO: 1522932 - DNA, 15 bp, Homo sapiens
atactgtttaaagct

SEQ ID NO: 1522933 - DNA, 15 bp, Homo sapiens
gatactgtttaaagc

SEQ ID NO: 1522934 - DNA, 15 bp, Homo sapiens
tgatactgtttaaag

SEQ ID NO: 1522935 - DNA, 15 bp, Homo sapiens
atgatactgtttaaa

SEQ ID NO: 1522936 - DNA, 15 bp, Homo sapiens
gatgatactgtttaa

SEQ ID NO: 1522937 - DNA, 15 bp, Homo sapiens
agatgatactgttta

SEQ ID NO: 1522938 - DNA, 15 bp, Homo sapiens
cagatgatactgttt

SEQ ID NO: 1522939 - DNA, 15 bp, Homo sapiens
gcagatgatactgtt

SEQ ID NO: 1522940 - DNA, 15 bp, Homo sapiens
tgcagatgatactgt

SEQ ID NO: 1522941 - DNA, 15 bp, Homo sapiens
ctgcagatgatactg

SEQ ID NO: 1522942 - DNA, 15 bp, Homo sapiens
tctgcagatgatact

SEQ ID NO: 1522943 - DNA, 15 bp, Homo sapiens
ttctgcagatgatac

SEQ ID NO: 1522944 - DNA, 15 bp, Homo sapiens
gttctgcagatgata

SEQ ID NO: 1522945 - DNA, 15 bp, Homo sapiens
tgttctgcagatgat

SEQ ID NO: 1522946 - DNA, 15 bp, Homo sapiens
atgttctgcagatga

SEQ ID NO: 1522947 - DNA, 15 bp, Homo sapiens
gatgttctgcagatg

SEQ ID NO: 1522948 - DNA, 15 bp, Homo sapiens
agatgttctgcagat

SEQ ID NO: 1522949 - DNA, 15 bp, Homo sapiens
cagatgttctgcaga

SEQ ID NO: 1522950 - DNA, 15 bp, Homo sapiens
acagatgttctgcag

SEQ ID NO: 1522951 - DNA, 15 bp, Homo sapiens
gacagatgttctgca

SEQ ID NO: 1522952 - DNA, 15 bp, Homo sapiens
agacagatgttctgc

SEQ ID NO: 1522953 - DNA, 15 bp, Homo sapiens
aagacagatgttctg

SEQ ID NO: 1522954 - DNA, 15 bp, Homo sapiens
gaagacagatgttct

SEQ ID NO: 1522955 - DNA, 15 bp, Homo sapiens
agaagacagatgttc

SEQ ID NO: 1522956 - DNA, 15 bp, Homo sapiens
gagaagacagatgtt

SEQ ID NO: 1522957 - DNA, 15 bp, Homo sapiens
agagaagacagatgt

SEQ ID NO: 1522958 - DNA, 15 bp, Homo sapiens
cagagaagacagatg

SEQ ID NO: 1522959 - DNA, 15 bp, Homo sapiens
ccagagaagacagat

SEQ ID NO: 1522960 - DNA, 15 bp, Homo sapiens
gccagagaagacaga

SEQ ID NO: 1522961 - DNA, 15 bp, Homo sapiens
agccagagaagacag

SEQ ID NO: 1522962 - DNA, 15 bp, Homo sapiens
gagccagagaagaca

SEQ ID NO: 1522963 - DNA, 15 bp, Homo sapiens
agagccagagaagac

SEQ ID NO: 1522964 - DNA, 15 bp, Homo sapiens
aagagccagagaaga

SEQ ID NO: 1522965 - DNA, 15 bp, Homo sapiens
taagagccagagaag

SEQ ID NO: 1522966 - DNA, 15 bp, Homo sapiens
ttaagagccagagaa

SEQ ID NO: 1522967 - DNA, 15 bp, Homo sapiens
gttaagagccagaga

SEQ ID NO: 1522968 - DNA, 15 bp, Homo sapiens
agttaagagccagag

SEQ ID NO: 1522969 - DNA, 15 bp, Homo sapiens
gagttaagagccaga

SEQ ID NO: 1522970 - DNA, 15 bp, Homo sapiens
agagttaagagccag

SEQ ID NO: 1522971 - DNA, 15 bp, Homo sapiens
tagagttaagagcca

SEQ ID NO: 1522972 - DNA, 15 bp, Homo sapiens
gtagagttaagagcc

SEQ ID NO: 1522973 - DNA, 15 bp, Homo sapiens
agtagagttaagagc

SEQ ID NO: 1522974 - DNA, 15 bp, Homo sapiens
aagtagagttaagag

SEQ ID NO: 1522975 - DNA, 15 bp, Homo sapiens
aaagtagagttaaga

SEQ ID NO: 1522976 - DNA, 15 bp, Homo sapiens
gaaagtagagttaag

SEQ ID NO: 1522977 - DNA, 15 bp, Homo sapiens
agaaagtagagttaa

SEQ ID NO: 1522978 - DNA, 15 bp, Homo sapiens
aagaaagtagagtta

SEQ ID NO: 1522979 - DNA, 15 bp, Homo sapiens
aaagaaagtagagtt

SEQ ID NO: 1522980 - DNA, 15 bp, Homo sapiens
caaagaaagtagagt

SEQ ID NO: 1522981 - DNA, 15 bp, Homo sapiens
acaaagaaagtagag

SEQ ID NO: 1522982 - DNA, 15 bp, Homo sapiens
cacaaagaaagtaga

SEQ ID NO: 1522983 - DNA, 15 bp, Homo sapiens
acacaaagaaagtag

SEQ ID NO: 1522984 - DNA, 15 bp, Homo sapiens
gacacaaagaaagta

SEQ ID NO: 1522985 - DNA, 15 bp, Homo sapiens
cgacacaaagaaagt

SEQ ID NO: 1522986 - DNA, 15 bp, Homo sapiens
ccgacacaaagaaag

SEQ ID NO: 1522987 - DNA, 15 bp, Homo sapiens
accgacacaaagaaa

SEQ ID NO: 1522988 - DNA, 15 bp, Homo sapiens
aaccgacacaaagaa

SEQ ID NO: 1522989 - DNA, 15 bp, Homo sapiens
aaaccgacacaaaga

SEQ ID NO: 1522990 - DNA, 15 bp, Homo sapiens
aaaaccgacacaaag

SEQ ID NO: 1522991 - DNA, 15 bp, Homo sapiens
taaaaccgacacaaa

SEQ ID NO: 1522992 - DNA, 15 bp, Homo sapiens
ataaaaccgacacaa

SEQ ID NO: 1522993 - DNA, 15 bp, Homo sapiens
aataaaaccgacaca

SEQ ID NO: 1522994 - DNA, 15 bp, Homo sapiens
gaataaaaccgacac

SEQ ID NO: 1522995 - DNA, 15 bp, Homo sapiens
ggaataaaaccgaca

SEQ ID NO: 1522996 - DNA, 15 bp, Homo sapiens
gggaataaaaccgac

SEQ ID NO: 1522997 - DNA, 15 bp, Homo sapiens
tgggaataaaaccga

SEQ ID NO: 1522998 - DNA, 15 bp, Homo sapiens
ttgggaataaaaccg

SEQ ID NO: 1522999 - DNA, 15 bp, Homo sapiens
cttgggaataaaacc

SEQ ID NO: 1523000 - DNA, 15 bp, Homo sapiens
gcttgggaataaaac

SEQ ID NO: 1523001 - DNA, 15 bp, Homo sapiens
tgcttgggaataaaa

SEQ ID NO: 1523002 - DNA, 15 bp, Homo sapiens
ctgcttgggaataaa

SEQ ID NO: 1523003 - DNA, 15 bp, Homo sapiens
gctgcttgggaataa

SEQ ID NO: 1523004 - DNA, 15 bp, Homo sapiens
agctgcttgggaata

SEQ ID NO: 1523005 - DNA, 15 bp, Homo sapiens
cagctgcttgggaat

SEQ ID NO: 1523006 - DNA, 15 bp, Homo sapiens
gcagctgcttgggaa

SEQ ID NO: 1523007 - DNA, 15 bp, Homo sapiens
agcagctgcttggga

SEQ ID NO: 1523008 - DNA, 15 bp, Homo sapiens
gagcagctgcttggg

SEQ ID NO: 1523009 - DNA, 15 bp, Homo sapiens
ggagcagctgcttgg

SEQ ID NO: 1523010 - DNA, 15 bp, Homo sapiens
gggagcagctgcttg

SEQ ID NO: 1523011 - DNA, 15 bp, Homo sapiens
agggagcagctgctt

SEQ ID NO: 1523012 - DNA, 15 bp, Homo sapiens
tagggagcagctgct

SEQ ID NO: 1523013 - DNA, 15 bp, Homo sapiens
ctagggagcagctgc

SEQ ID NO: 1523014 - DNA, 15 bp, Homo sapiens
gctagggagcagctg

SEQ ID NO: 1523015 - DNA, 15 bp, Homo sapiens
agctagggagcagct

SEQ ID NO: 1523016 - DNA, 15 bp, Homo sapiens
cagctagggagcagc

SEQ ID NO: 1523017 - DNA, 15 bp, Homo sapiens
acagctagggagcag

SEQ ID NO: 1523018 - DNA, 15 bp, Homo sapiens
cacagctagggagca

SEQ ID NO: 1523019 - DNA, 15 bp, Homo sapiens
ccacagctagggagc

SEQ ID NO: 1523020 - DNA, 15 bp, Homo sapiens
gccacagctagggag

SEQ ID NO: 1523021 - DNA, 15 bp, Homo sapiens
agccacagctaggga

SEQ ID NO: 1523022 - DNA, 15 bp, Homo sapiens
cagccacagctaggg

SEQ ID NO: 1523023 - DNA, 15 bp, Homo sapiens
ccagccacagctagg

SEQ ID NO: 1523024 - DNA, 15 bp, Homo sapiens
accagccacagctag

SEQ ID NO: 1523025 - DNA, 15 bp, Homo sapiens
taccagccacagcta

SEQ ID NO: 1523026 - DNA, 15 bp, Homo sapiens
ttaccagccacagct

SEQ ID NO: 1523027 - DNA, 15 bp, Homo sapiens
attaccagccacagc

SEQ ID NO: 1523028 - DNA, 15 bp, Homo sapiens
cattaccagccacag

SEQ ID NO: 1523029 - DNA, 15 bp, Homo sapiens
ccattaccagccaca

SEQ ID NO: 1523030 - DNA, 15 bp, Homo sapiens
accattaccagccac

SEQ ID NO: 1523031 - DNA, 15 bp, Homo sapiens
aaccattaccagcca

SEQ ID NO: 1523032 - DNA, 15 bp, Homo sapiens
aaaccattaccagcc

SEQ ID NO: 1523033 - DNA, 15 bp, Homo sapiens
caaaccattaccagc

SEQ ID NO: 1523034 - DNA, 15 bp, Homo sapiens
acaaaccattaccag

SEQ ID NO: 1523035 - DNA, 15 bp, Homo sapiens
cacaaaccattacca

SEQ ID NO: 1523036 - DNA, 15 bp, Homo sapiens
acacaaaccattacc

SEQ ID NO: 1523037 - DNA, 15 bp, Homo sapiens
aacacaaaccattac

SEQ ID NO: 1523038 - DNA, 15 bp, Homo sapiens
gaacacaaaccatta

SEQ ID NO: 1523039 - DNA, 15 bp, Homo sapiens
agaacacaaaccatt

SEQ ID NO: 1523040 - DNA, 15 bp, Homo sapiens
gagaacacaaaccat

SEQ ID NO: 1523041 - DNA, 15 bp, Homo sapiens
ggagaacacaaacca

SEQ ID NO: 1523042 - DNA, 15 bp, Homo sapiens
gggagaacacaaacc

SEQ ID NO: 1523043 - DNA, 15 bp, Homo sapiens
tgggagaacacaaac

SEQ ID NO: 1523044 - DNA, 15 bp, Homo sapiens
ctgggagaacacaaa

SEQ ID NO: 1523045 - DNA, 15 bp, Homo sapiens
gctgggagaacacaa

SEQ ID NO: 1523046 - DNA, 15 bp, Homo sapiens
agctgggagaacaca

SEQ ID NO: 1523047 - DNA, 15 bp, Homo sapiens
aagctgggagaacac

SEQ ID NO: 1523048 - DNA, 15 bp, Homo sapiens
taagctgggagaaca

SEQ ID NO: 1523049 - DNA, 15 bp, Homo sapiens
ttaagctgggagaac

SEQ ID NO: 1523050 - DNA, 15 bp, Homo sapiens
gttaagctgggagaa

SEQ ID NO: 1523051 - DNA, 15 bp, Homo sapiens
tgttaagctgggaga

SEQ ID NO: 1523052 - DNA, 15 bp, Homo sapiens
ttgttaagctgggag

SEQ ID NO: 1523053 - DNA, 15 bp, Homo sapiens
attgttaagctggga

SEQ ID NO: 1523054 - DNA, 15 bp, Homo sapiens
gattgttaagctggg

SEQ ID NO: 1523055 - DNA, 15 bp, Homo sapiens
ggattgttaagctgg

SEQ ID NO: 1523056 - DNA, 15 bp, Homo sapiens
gggattgttaagctg

SEQ ID NO: 1523057 - DNA, 15 bp, Homo sapiens
tgggattgttaagct

SEQ ID NO: 1523058 - DNA, 15 bp, Homo sapiens
ctgggattgttaagc

SEQ ID NO: 1523059 - DNA, 15 bp, Homo sapiens
tctgggattgttaag

SEQ ID NO: 1523060 - DNA, 15 bp, Homo sapiens
ctctgggattgttaa

SEQ ID NO: 1523061 - DNA, 15 bp, Homo sapiens
cctctgggattgtta

SEQ ID NO: 1523062 - DNA, 15 bp, Homo sapiens
tcctctgggattgtt

SEQ ID NO: 1523063 - DNA, 15 bp, Homo sapiens
ttcctctgggattgt

SEQ ID NO: 1523064 - DNA, 15 bp, Homo sapiens
tttcctctgggattg

SEQ ID NO: 1523065 - DNA, 15 bp, Homo sapiens
ttttcctctgggatt

SEQ ID NO: 1523066 - DNA, 15 bp, Homo sapiens
tttttcctctgggat

SEQ ID NO: 1523067 - DNA, 15 bp, Homo sapiens
gtttttcctctggga

SEQ ID NO: 1523068 - DNA, 15 bp, Homo sapiens
tgtttttcctctggg

SEQ ID NO: 1523069 - DNA, 15 bp, Homo sapiens
gtgtttttcctctgg

SEQ ID NO: 1523070 - DNA, 15 bp, Homo sapiens
ggtgtttttcctctg

SEQ ID NO: 1523071 - DNA, 15 bp, Homo sapiens
aggtgtttttcctct

SEQ ID NO: 1523072 - DNA, 15 bp, Homo sapiens
gaggtgtttttcctc

SEQ ID NO: 1523073 - DNA, 15 bp, Homo sapiens
agaggtgtttttcct

SEQ ID NO: 1523074 - DNA, 15 bp, Homo sapiens
aagaggtgtttttcc

SEQ ID NO: 1523075 - DNA, 15 bp, Homo sapiens
aaagaggtgtttttc

SEQ ID NO: 1523076 - DNA, 15 bp, Homo sapiens
gaaagaggtgttttt

SEQ ID NO: 1523077 - DNA, 15 bp, Homo sapiens
ggaaagaggtgtttt

SEQ ID NO: 1523078 - DNA, 15 bp, Homo sapiens
gggaaagaggtgttt

SEQ ID NO: 1523079 - DNA, 15 bp, Homo sapiens
tgggaaagaggtgtt

SEQ ID NO: 1523080 - DNA, 15 bp, Homo sapiens
ctgggaaagaggtgt

SEQ ID NO: 1523081 - DNA, 15 bp, Homo sapiens
actgggaaagaggtg

SEQ ID NO: 1523082 - DNA, 15 bp, Homo sapiens
aactgggaaagaggt

SEQ ID NO: 1523083 - DNA, 15 bp, Homo sapiens
aaactgggaaagagg

SEQ ID NO: 1523084 - DNA, 15 bp, Homo sapiens
aaaactgggaaagag

SEQ ID NO: 1523085 - DNA, 15 bp, Homo sapiens
caaaactgggaaaga

SEQ ID NO: 1523086 - DNA, 15 bp, Homo sapiens
acaaaactgggaaag

SEQ ID NO: 1523087 - DNA, 15 bp, Homo sapiens
cacaaaactgggaaa

SEQ ID NO: 1523088 - DNA, 15 bp, Homo sapiens
ccacaaaactgggaa

SEQ ID NO: 1523089 - DNA, 15 bp, Homo sapiens
accacaaaactggga

SEQ ID NO: 1523090 - DNA, 15 bp, Homo sapiens
aaccacaaaactggg

SEQ ID NO: 1523091 - DNA, 15 bp, Homo sapiens
aaaccacaaaactgg

SEQ ID NO: 1523092 - DNA, 15 bp, Homo sapiens
gaaaccacaaaactg

SEQ ID NO: 1523093 - DNA, 15 bp, Homo sapiens
tgaaaccacaaaact

SEQ ID NO: 1523094 - DNA, 15 bp, Homo sapiens
ctgaaaccacaaaac

SEQ ID NO: 1523095 - DNA, 15 bp, Homo sapiens
gctgaaaccacaaaa

SEQ ID NO: 1523096 - DNA, 15 bp, Homo sapiens
tgctgaaaccacaaa

SEQ ID NO: 1523097 - DNA, 15 bp, Homo sapiens
ttgctgaaaccacaa

SEQ ID NO: 1523098 - DNA, 15 bp, Homo sapiens
tttgctgaaaccaca

SEQ ID NO: 1523099 - DNA, 15 bp, Homo sapiens
ttttgctgaaaccac

SEQ ID NO: 1523100 - DNA, 15 bp, Homo sapiens
cttttgctgaaacca

SEQ ID NO: 1523101 - DNA, 15 bp, Homo sapiens
acttttgctgaaacc

SEQ ID NO: 1523102 - DNA, 15 bp, Homo sapiens
cacttttgctgaaac

SEQ ID NO: 1523103 - DNA, 15 bp, Homo sapiens
ccacttttgctgaaa

SEQ ID NO: 1523104 - DNA, 15 bp, Homo sapiens
accacttttgctgaa

SEQ ID NO: 1523105 - DNA, 15 bp, Homo sapiens
aaccacttttgctga

SEQ ID NO: 1523106 - DNA, 15 bp, Homo sapiens
caaccacttttgctg

SEQ ID NO: 1523107 - DNA, 15 bp, Homo sapiens
ccaaccacttttgct

SEQ ID NO: 1523108 - DNA, 15 bp, Homo sapiens
accaaccacttttgc

SEQ ID NO: 1523109 - DNA, 15 bp, Homo sapiens
gaccaaccacttttg

SEQ ID NO: 1523110 - DNA, 15 bp, Homo sapiens
agaccaaccactttt

SEQ ID NO: 1523111 - DNA, 15 bp, Homo sapiens
aagaccaaccacttt

SEQ ID NO: 1523112 - DNA, 15 bp, Homo sapiens
taagaccaaccactt

SEQ ID NO: 1523113 - DNA, 15 bp, Homo sapiens
gtaagaccaaccact

SEQ ID NO: 1523114 - DNA, 15 bp, Homo sapiens
agtaagaccaaccac

SEQ ID NO: 1523115 - DNA, 15 bp, Homo sapiens
cagtaagaccaacca

SEQ ID NO: 1523116 - DNA, 15 bp, Homo sapiens
ccagtaagaccaacc

SEQ ID NO: 1523117 - DNA, 15 bp, Homo sapiens
gccagtaagaccaac

SEQ ID NO: 1523118 - DNA, 15 bp, Homo sapiens
ggccagtaagaccaa

SEQ ID NO: 1523119 - DNA, 15 bp, Homo sapiens
aggccagtaagacca

SEQ ID NO: 1523120 - DNA, 15 bp, Homo sapiens
caggccagtaagacc

SEQ ID NO: 1523121 - DNA, 15 bp, Homo sapiens
ccaggccagtaagac

SEQ ID NO: 1523122 - DNA, 15 bp, Homo sapiens
accaggccagtaaga

SEQ ID NO: 1523123 - DNA, 15 bp, Homo sapiens
caccaggccagtaag

SEQ ID NO: 1523124 - DNA, 15 bp, Homo sapiens
acaccaggccagtaa

SEQ ID NO: 1523125 - DNA, 15 bp, Homo sapiens
cacaccaggccagta

SEQ ID NO: 1523126 - DNA, 15 bp, Homo sapiens
tcacaccaggccagt

SEQ ID NO: 1523127 - DNA, 15 bp, Homo sapiens
ctcacaccaggccag

SEQ ID NO: 1523128 - DNA, 15 bp, Homo sapiens
actcacaccaggcca

SEQ ID NO: 1523129 - DNA, 15 bp, Homo sapiens
gactcacaccaggcc

SEQ ID NO: 1523130 - DNA, 15 bp, Homo sapiens
tgactcacaccaggc

SEQ ID NO: 1523131 - DNA, 15 bp, Homo sapiens
gtgactcacaccagg

SEQ ID NO: 1523132 - DNA, 15 bp, Homo sapiens
tgtgactcacaccag

SEQ ID NO: 1523133 - DNA, 15 bp, Homo sapiens
atgtgactcacacca

SEQ ID NO: 1523134 - DNA, 15 bp, Homo sapiens
catgtgactcacacc

SEQ ID NO: 1523135 - DNA, 15 bp, Homo sapiens
gcatgtgactcacac

SEQ ID NO: 1523136 - DNA, 15 bp, Homo sapiens
ggcatgtgactcaca

SEQ ID NO: 1523137 - DNA, 15 bp, Homo sapiens
tggcatgtgactcac

SEQ ID NO: 1523138 - DNA, 15 bp, Homo sapiens
atggcatgtgactca

SEQ ID NO: 1523139 - DNA, 15 bp, Homo sapiens
aatggcatgtgactc

SEQ ID NO: 1523140 - DNA, 15 bp, Homo sapiens
gaatggcatgtgact

SEQ ID NO: 1523141 - DNA, 15 bp, Homo sapiens
ggaatggcatgtgac

SEQ ID NO: 1523142 - DNA, 15 bp, Homo sapiens
aggaatggcatgtga

SEQ ID NO: 1523143 - DNA, 15 bp, Homo sapiens
taggaatggcatgtg

SEQ ID NO: 1523144 - DNA, 15 bp, Homo sapiens
ttaggaatggcatgt

SEQ ID NO: 1523145 - DNA, 15 bp, Homo sapiens
cttaggaatggcatg

SEQ ID NO: 1523146 - DNA, 15 bp, Homo sapiens
ccttaggaatggcat

SEQ ID NO: 1523147 - DNA, 15 bp, Homo sapiens
gccttaggaatggca

SEQ ID NO: 1523148 - DNA, 15 bp, Homo sapiens
tgccttaggaatggc

SEQ ID NO: 1523149 - DNA, 15 bp, Homo sapiens
ctgccttaggaatgg

SEQ ID NO: 1523150 - DNA, 15 bp, Homo sapiens
actgccttaggaatg

SEQ ID NO: 1523151 - DNA, 15 bp, Homo sapiens
gactgccttaggaat

SEQ ID NO: 1523152 - DNA, 15 bp, Homo sapiens
tgactgccttaggaa

SEQ ID NO: 1523153 - DNA, 15 bp, Homo sapiens
gtgactgccttagga

SEQ ID NO: 1523154 - DNA, 15 bp, Homo sapiens
agtgactgccttagg

SEQ ID NO: 1523155 - DNA, 15 bp, Homo sapiens
tagtgactgccttag

SEQ ID NO: 1523156 - DNA, 15 bp, Homo sapiens
atagtgactgcctta

SEQ ID NO: 1523157 - DNA, 15 bp, Homo sapiens
catagtgactgcctt

SEQ ID NO: 1523158 - DNA, 15 bp, Homo sapiens
ccatagtgactgcct

SEQ ID NO: 1523159 - DNA, 15 bp, Homo sapiens
gccatagtgactgcc

SEQ ID NO: 1523160 - DNA, 15 bp, Homo sapiens
tgccatagtgactgc

SEQ ID NO: 1523161 - DNA, 15 bp, Homo sapiens
ttgccatagtgactg

SEQ ID NO: 1523162 - DNA, 15 bp, Homo sapiens
cttgccatagtgact

SEQ ID NO: 1523163 - DNA, 15 bp, Homo sapiens
ccttgccatagtgac

SEQ ID NO: 1523164 - DNA, 15 bp, Homo sapiens
cccttgccatagtga

SEQ ID NO: 1523165 - DNA, 15 bp, Homo sapiens
ccccttgccatagtg

SEQ ID NO: 1523166 - DNA, 15 bp, Homo sapiens
cccccttgccatagt

SEQ ID NO: 1523167 - DNA, 15 bp, Homo sapiens
tcccccttgccatag

SEQ ID NO: 1523168 - DNA, 15 bp, Homo sapiens
atcccccttgccata

SEQ ID NO: 1523169 - DNA, 15 bp, Homo sapiens
catcccccttgccat

SEQ ID NO: 1523170 - DNA, 15 bp, Homo sapiens
ccatcccccttgcca

SEQ ID NO: 1523171 - DNA, 15 bp, Homo sapiens
tccatcccccttgcc

SEQ ID NO: 1523172 - DNA, 15 bp, Homo sapiens
ttccatcccccttgc

SEQ ID NO: 1523173 - DNA, 15 bp, Homo sapiens
attccatcccccttg

SEQ ID NO: 1523174 - DNA, 15 bp, Homo sapiens
aattccatccccctt

SEQ ID NO: 1523175 - DNA, 15 bp, Homo sapiens
aaattccatccccct

SEQ ID NO: 1523176 - DNA, 15 bp, Homo sapiens
gaaattccatccccc

SEQ ID NO: 1523177 - DNA, 15 bp, Homo sapiens
agaaattccatcccc

SEQ ID NO: 1523178 - DNA, 15 bp, Homo sapiens
aagaaattccatccc

SEQ ID NO: 1523179 - DNA, 15 bp, Homo sapiens
caagaaattccatcc

SEQ ID NO: 1523180 - DNA, 15 bp, Homo sapiens
ccaagaaattccatc

SEQ ID NO: 1523181 - DNA, 15 bp, Homo sapiens
accaagaaattccat

SEQ ID NO: 1523182 - DNA, 15 bp, Homo sapiens
aaccaagaaattcca

SEQ ID NO: 1523183 - DNA, 15 bp, Homo sapiens
taaccaagaaattcc

SEQ ID NO: 1523184 - DNA, 15 bp, Homo sapiens
ataaccaagaaattc

SEQ ID NO: 1523185 - DNA, 15 bp, Homo sapiens
gataaccaagaaatt

SEQ ID NO: 1523186 - DNA, 15 bp, Homo sapiens
agataaccaagaaat

SEQ ID NO: 1523187 - DNA, 15 bp, Homo sapiens
tagataaccaagaaa

SEQ ID NO: 1523188 - DNA, 15 bp, Homo sapiens
ctagataaccaagaa

SEQ ID NO: 1523189 - DNA, 15 bp, Homo sapiens
cctagataaccaaga

SEQ ID NO: 1523190 - DNA, 15 bp, Homo sapiens
gcctagataaccaag

SEQ ID NO: 1523191 - DNA, 15 bp, Homo sapiens
ggcctagataaccaa

SEQ ID NO: 1523192 - DNA, 15 bp, Homo sapiens
aggcctagataacca

SEQ ID NO: 1523193 - DNA, 15 bp, Homo sapiens
caggcctagataacc

SEQ ID NO: 1523194 - DNA, 15 bp, Homo sapiens
ccaggcctagataac

SEQ ID NO: 1523195 - DNA, 15 bp, Homo sapiens
tccaggcctagataa

SEQ ID NO: 1523196 - DNA, 15 bp, Homo sapiens
atccaggcctagata

SEQ ID NO: 1523197 - DNA, 15 bp, Homo sapiens
gatccaggcctagat

SEQ ID NO: 1523198 - DNA, 15 bp, Homo sapiens
tgatccaggcctaga

SEQ ID NO: 1523199 - DNA, 15 bp, Homo sapiens
atgatccaggcctag

SEQ ID NO: 1523200 - DNA, 15 bp, Homo sapiens
catgatccaggccta

SEQ ID NO: 1523201 - DNA, 15 bp, Homo sapiens
acatgatccaggcct

SEQ ID NO: 1523202 - DNA, 15 bp, Homo sapiens
cacatgatccaggcc

SEQ ID NO: 1523203 - DNA, 15 bp, Homo sapiens
gcacatgatccaggc

SEQ ID NO: 1523204 - DNA, 15 bp, Homo sapiens
ggcacatgatccagg

SEQ ID NO: 1523205 - DNA, 15 bp, Homo sapiens
gggcacatgatccag

SEQ ID NO: 1523206 - DNA, 15 bp, Homo sapiens
ggggcacatgatcca

SEQ ID NO: 1523207 - DNA, 15 bp, Homo sapiens
aggggcacatgatcc

SEQ ID NO: 1523208 - DNA, 15 bp, Homo sapiens
aaggggcacatgatc

SEQ ID NO: 1523209 - DNA, 15 bp, Homo sapiens
gaaggggcacatgat

SEQ ID NO: 1523210 - DNA, 15 bp, Homo sapiens
ggaaggggcacatga

SEQ ID NO: 1523211 - DNA, 15 bp, Homo sapiens
aggaaggggcacatg

SEQ ID NO: 1523212 - DNA, 15 bp, Homo sapiens
caggaaggggcacat

SEQ ID NO: 1523213 - DNA, 15 bp, Homo sapiens
ccaggaaggggcaca

SEQ ID NO: 1523214 - DNA, 15 bp, Homo sapiens
tccaggaaggggcac

SEQ ID NO: 1523215 - DNA, 15 bp, Homo sapiens
ttccaggaaggggca

SEQ ID NO: 1523216 - DNA, 15 bp, Homo sapiens
attccaggaaggggc

SEQ ID NO: 1523217 - DNA, 15 bp, Homo sapiens
cattccaggaagggg

SEQ ID NO: 1523218 - DNA, 15 bp, Homo sapiens
gcattccaggaaggg

SEQ ID NO: 1523219 - DNA, 15 bp, Homo sapiens
tgcattccaggaagg

SEQ ID NO: 1523220 - DNA, 15 bp, Homo sapiens
ctgcattccaggaag

SEQ ID NO: 1523221 - DNA, 15 bp, Homo sapiens
actgcattccaggaa

SEQ ID NO: 1523222 - DNA, 15 bp, Homo sapiens
cactgcattccagga

SEQ ID NO: 1523223 - DNA, 15 bp, Homo sapiens
ccactgcattccagg

SEQ ID NO: 1523224 - DNA, 15 bp, Homo sapiens
taccactgcattcca

SEQ ID NO: 1523225 - DNA, 15 bp, Homo sapiens
ttaccactgcattcc

SEQ ID NO: 1523226 - DNA, 15 bp, Homo sapiens
tttaccactgcattc

SEQ ID NO: 1523227 - DNA, 15 bp, Homo sapiens
ctttaccactgcatt

SEQ ID NO: 1523228 - DNA, 15 bp, Homo sapiens
gctttaccactgcat

SEQ ID NO: 1523229 - DNA, 15 bp, Homo sapiens
ggctttaccactgca

SEQ ID NO: 1523230 - DNA, 15 bp, Homo sapiens
tggctttaccactgc

SEQ ID NO: 1523231 - DNA, 15 bp, Homo sapiens
ctggctttaccactg

SEQ ID NO: 1523232 - DNA, 15 bp, Homo sapiens
gctggctttaccact

SEQ ID NO: 1523233 - DNA, 15 bp, Homo sapiens
ggctggctttaccac

SEQ ID NO: 1523234 - DNA, 15 bp, Homo sapiens
gggctggctttacca

SEQ ID NO: 1523235 - DNA, 15 bp, Homo sapiens
agggctggctttacc

SEQ ID NO: 1523236 - DNA, 15 bp, Homo sapiens
tagggctggctttac

SEQ ID NO: 1523237 - DNA, 15 bp, Homo sapiens
atagggctggcttta

SEQ ID NO: 1523238 - DNA, 15 bp, Homo sapiens
gatagggctggcttt

SEQ ID NO: 1523239 - DNA, 15 bp, Homo sapiens
ggatagggctggctt

SEQ ID NO: 1523240 - DNA, 15 bp, Homo sapiens
tggatagggctggct

SEQ ID NO: 1523241 - DNA, 15 bp, Homo sapiens
ttggatagggctggc

SEQ ID NO: 1523242 - DNA, 15 bp, Homo sapiens
tttggatagggctgg

SEQ ID NO: 1523243 - DNA, 15 bp, Homo sapiens
atttggatagggctg

SEQ ID NO: 1523244 - DNA, 15 bp, Homo sapiens
aatttggatagggct

SEQ ID NO: 1523245 - DNA, 15 bp, Homo sapiens
caatttggatagggc

SEQ ID NO: 1523246 - DNA, 15 bp, Homo sapiens
gcaatttggataggg

SEQ ID NO: 1523247 - DNA, 15 bp, Homo sapiens
tgcaatttggatagg

SEQ ID NO: 1523248 - DNA, 15 bp, Homo sapiens
atgcaatttggatag

SEQ ID NO: 1523249 - DNA, 15 bp, Homo sapiens
catgcaatttggata

SEQ ID NO: 1523250 - DNA, 15 bp, Homo sapiens
tcatgcaatttggat

SEQ ID NO: 1523251 - DNA, 15 bp, Homo sapiens
ttcatgcaatttgga

SEQ ID NO: 1523252 - DNA, 15 bp, Homo sapiens
gttcatgcaatttgg

SEQ ID NO: 1523253 - DNA, 15 bp, Homo sapiens
agttcatgcaatttg

SEQ ID NO: 1523254 - DNA, 15 bp, Homo sapiens
tagttcatgcaattt

SEQ ID NO: 1523255 - DNA, 15 bp, Homo sapiens
ttagttcatgcaatt

SEQ ID NO: 1523256 - DNA, 15 bp, Homo sapiens
tttagttcatgcaat

SEQ ID NO: 1523257 - DNA, 15 bp, Homo sapiens
ttttagttcatgcaa

SEQ ID NO: 1523258 - DNA, 15 bp, Homo sapiens
cttttagttcatgca

SEQ ID NO: 1523259 - DNA, 15 bp, Homo sapiens
ccttttagttcatgc

SEQ ID NO: 1523260 - DNA, 15 bp, Homo sapiens
tccttttagttcatg

SEQ ID NO: 1523261 - DNA, 15 bp, Homo sapiens
ctccttttagttcat

SEQ ID NO: 1523262 - DNA, 15 bp, Homo sapiens
cctccttttagttca

SEQ ID NO: 1523263 - DNA, 15 bp, Homo sapiens
ccctccttttagttc

SEQ ID NO: 1523264 - DNA, 15 bp, Homo sapiens
gccctccttttagtt

SEQ ID NO: 1523265 - DNA, 15 bp, Homo sapiens
tgccctccttttagt

SEQ ID NO: 1523266 - DNA, 15 bp, Homo sapiens
atgccctccttttag

SEQ ID NO: 1523267 - DNA, 15 bp, Homo sapiens
catgccctcctttta

SEQ ID NO: 1523268 - DNA, 15 bp, Homo sapiens
ccatgccctcctttt

SEQ ID NO: 1523269 - DNA, 15 bp, Homo sapiens
cccatgccctccttt

SEQ ID NO: 1523270 - DNA, 15 bp, Homo sapiens
ccccatgccctcctt

SEQ ID NO: 1523271 - DNA, 15 bp, Homo sapiens
cccccatgccctcct

SEQ ID NO: 1523272 - DNA, 15 bp, Homo sapiens
gcccccatgccctcc

SEQ ID NO: 1523273 - DNA, 15 bp, Homo sapiens
tgcccccatgccctc

SEQ ID NO: 1523274 - DNA, 15 bp, Homo sapiens
ctgcccccatgccct

SEQ ID NO: 1523275 - DNA, 15 bp, Homo sapiens
cctgcccccatgccc

SEQ ID NO: 1523276 - DNA, 15 bp, Homo sapiens
ccctgcccccatgcc

SEQ ID NO: 1523277 - DNA, 15 bp, Homo sapiens
accctgcccccatgc

SEQ ID NO: 1523278 - DNA, 15 bp, Homo sapiens
aaccctgcccccatg

SEQ ID NO: 1523279 - DNA, 15 bp, Homo sapiens
aaaccctgcccccat

SEQ ID NO: 1523280 - DNA, 15 bp, Homo sapiens
aaaaccctgccccca

SEQ ID NO: 1523281 - DNA, 15 bp, Homo sapiens
gaaaaccctgccccc

SEQ ID NO: 1523282 - DNA, 15 bp, Homo sapiens
tgaaaaccctgcccc

SEQ ID NO: 1523283 - DNA, 15 bp, Homo sapiens
gtgaaaaccctgccc

SEQ ID NO: 1523284 - DNA, 15 bp, Homo sapiens
tgtgaaaaccctgcc

SEQ ID NO: 1523285 - DNA, 15 bp, Homo sapiens
ttgtgaaaaccctgc

SEQ ID NO: 1523286 - DNA, 15 bp, Homo sapiens
tttgtgaaaaccctg

SEQ ID NO: 1523287 - DNA, 15 bp, Homo sapiens
ctttgtgaaaaccct

SEQ ID NO: 1523288 - DNA, 15 bp, Homo sapiens
cctttgtgaaaaccc

SEQ ID NO: 1523289 - DNA, 15 bp, Homo sapiens
tcctttgtgaaaacc

SEQ ID NO: 1523290 - DNA, 15 bp, Homo sapiens
ttcctttgtgaaaac

SEQ ID NO: 1523291 - DNA, 15 bp, Homo sapiens
tttcctttgtgaaaa

SEQ ID NO: 1523292 - DNA, 15 bp, Homo sapiens
ttttcctttgtgaaa

SEQ ID NO: 1523293 - DNA, 15 bp, Homo sapiens
attttcctttgtgaa

SEQ ID NO: 1523294 - DNA, 15 bp, Homo sapiens
aattttcctttgtga

SEQ ID NO: 1523295 - DNA, 15 bp, Homo sapiens
caattttcctttgtg

SEQ ID NO: 1523296 - DNA, 15 bp, Homo sapiens
tcaattttcctttgt

SEQ ID NO: 1523297 - DNA, 15 bp, Homo sapiens
ttcaattttcctttg

SEQ ID NO: 1523298 - DNA, 15 bp, Homo sapiens
attcaattttccttt

SEQ ID NO: 1523299 - DNA, 15 bp, Homo sapiens
aattcaattttcctt

SEQ ID NO: 1523300 - DNA, 15 bp, Homo sapiens
caattcaattttcct

SEQ ID NO: 1523301 - DNA, 15 bp, Homo sapiens
gcaattcaattttcc

SEQ ID NO: 1523302 - DNA, 15 bp, Homo sapiens
agcaattcaattttc

SEQ ID NO: 1523303 - DNA, 15 bp, Homo sapiens
cagcaattcaatttt

SEQ ID NO: 1523304 - DNA, 15 bp, Homo sapiens
acagcaattcaattt

SEQ ID NO: 1523305 - DNA, 15 bp, Homo sapiens
aacagcaattcaatt

SEQ ID NO: 1523306 - DNA, 15 bp, Homo sapiens
taacagcaattcaat

SEQ ID NO: 1523307 - DNA, 15 bp, Homo sapiens
gtaacagcaattcaa

SEQ ID NO: 1523308 - DNA, 15 bp, Homo sapiens
agtaacagcaattca

SEQ ID NO: 1523309 - DNA, 15 bp, Homo sapiens
tagtaacagcaattc

SEQ ID NO: 1523310 - DNA, 15 bp, Homo sapiens
ctagtaacagcaatt

SEQ ID NO: 1523311 - DNA, 15 bp, Homo sapiens
tctagtaacagcaat

SEQ ID NO: 1523312 - DNA, 15 bp, Homo sapiens
ttctagtaacagcaa

SEQ ID NO: 1523313 - DNA, 15 bp, Homo sapiens
attctagtaacagca

SEQ ID NO: 1523314 - DNA, 15 bp, Homo sapiens
cattctagtaacagc

SEQ ID NO: 1523315 - DNA, 15 bp, Homo sapiens
tcattctagtaacag

SEQ ID NO: 1523316 - DNA, 15 bp, Homo sapiens
ctcattctagtaaca

SEQ ID NO: 1523317 - DNA, 15 bp, Homo sapiens
cctcattctagtaac

SEQ ID NO: 1523318 - DNA, 15 bp, Homo sapiens
gcctcattctagtaa

SEQ ID NO: 1523319 - DNA, 15 bp, Homo sapiens
tgcctcattctagta

SEQ ID NO: 1523320 - DNA, 15 bp, Homo sapiens
ttgcctcattctagt

SEQ ID NO: 1523321 - DNA, 15 bp, Homo sapiens
tttgcctcattctag

SEQ ID NO: 1523322 - DNA, 15 bp, Homo sapiens
ttttgcctcattcta

SEQ ID NO: 1523323 - DNA, 15 bp, Homo sapiens
attttgcctcattct

SEQ ID NO: 1523324 - DNA, 15 bp, Homo sapiens
cattttgcctcattc

SEQ ID NO: 1523325 - DNA, 15 bp, Homo sapiens
ccattttgcctcatt

SEQ ID NO: 1523326 - DNA, 15 bp, Homo sapiens
tccattttgcctcat

SEQ ID NO: 1523327 - DNA, 15 bp, Homo sapiens
atccattttgcctca

SEQ ID NO: 1523328 - DNA, 15 bp, Homo sapiens
tatccattttgcctc

SEQ ID NO: 1523329 - DNA, 15 bp, Homo sapiens
gtatccattttgcct

SEQ ID NO: 1523330 - DNA, 15 bp, Homo sapiens
agtatccattttgcc

SEQ ID NO: 1523331 - DNA, 15 bp, Homo sapiens
cagtatccattttgc

SEQ ID NO: 1523332 - DNA, 15 bp, Homo sapiens
ccagtatccattttg

SEQ ID NO: 1523333 - DNA, 15 bp, Homo sapiens
cccagtatccatttt

SEQ ID NO: 1523334 - DNA, 15 bp, Homo sapiens
gcccagtatccattt

SEQ ID NO: 1523335 - DNA, 15 bp, Homo sapiens
tgcccagtatccatt

SEQ ID NO: 1523336 - DNA, 15 bp, Homo sapiens
ctgcccagtatccat

SEQ ID NO: 1523337 - DNA, 15 bp, Homo sapiens
cctgcccagtatcca

SEQ ID NO: 1523338 - DNA, 15 bp, Homo sapiens
gcctgcccagtatcc

SEQ ID NO: 1523339 - DNA, 15 bp, Homo sapiens
tgcctgcccagtatc

SEQ ID NO: 1523340 - DNA, 15 bp, Homo sapiens
ctgcctgcccagtat

SEQ ID NO: 1523341 - DNA, 15 bp, Homo sapiens
tctgcctgcccagta

SEQ ID NO: 1523342 - DNA, 15 bp, Homo sapiens
ttctgcctgcccagt

SEQ ID NO: 1523343 - DNA, 15 bp, Homo sapiens
cttctgcctgcccag

SEQ ID NO: 1523344 - DNA, 15 bp, Homo sapiens
acttctgcctgccca

SEQ ID NO: 1523345 - DNA, 15 bp, Homo sapiens
tacttctgcctgccc

SEQ ID NO: 1523346 - DNA, 15 bp, Homo sapiens
ctacttctgcctgcc

SEQ ID NO: 1523347 - DNA, 15 bp, Homo sapiens
gctacttctgcctgc

SEQ ID NO: 1523348 - DNA, 15 bp, Homo sapiens
tgctacttctgcctg

SEQ ID NO: 1523349 - DNA, 15 bp, Homo sapiens
ctgctacttctgcct

SEQ ID NO: 1523350 - DNA, 15 bp, Homo sapiens
tctgctacttctgcc

SEQ ID NO: 1523351 - DNA, 15 bp, Homo sapiens
ttctgctacttctgc

SEQ ID NO: 1523352 - DNA, 15 bp, Homo sapiens
cttctgctacttctg

SEQ ID NO: 1523353 - DNA, 15 bp, Homo sapiens
acttctgctacttct

SEQ ID NO: 1523354 - DNA, 15 bp, Homo sapiens
gacttctgctacttc

SEQ ID NO: 1523355 - DNA, 15 bp, Homo sapiens
ggacttctgctactt

SEQ ID NO: 1523356 - DNA, 15 bp, Homo sapiens
aggacttctgctact

SEQ ID NO: 1523357 - DNA, 15 bp, Homo sapiens
gaggacttctgctac

SEQ ID NO: 1523358 - DNA, 15 bp, Homo sapiens
agaggacttctgcta

SEQ ID NO: 1523359 - DNA, 15 bp, Homo sapiens
tagaggacttctgct

SEQ ID NO: 1523360 - DNA, 15 bp, Homo sapiens
gtagaggacttctgc

SEQ ID NO: 1523361 - DNA, 15 bp, Homo sapiens
tgtagaggacttctg

SEQ ID NO: 1523362 - DNA, 15 bp, Homo sapiens
atgtagaggacttct

SEQ ID NO: 1523363 - DNA, 15 bp, Homo sapiens
gatgtagaggacttc

SEQ ID NO: 1523364 - DNA, 15 bp, Homo sapiens
ggatgtagaggactt

SEQ ID NO: 1523365 - DNA, 15 bp, Homo sapiens
tggatgtagaggact

SEQ ID NO: 1523366 - DNA, 15 bp, Homo sapiens
ctggatgtagaggac

SEQ ID NO: 1523367 - DNA, 15 bp, Homo sapiens
gctggatgtagagga

SEQ ID NO: 1523368 - DNA, 15 bp, Homo sapiens
agctggatgtagagg

SEQ ID NO: 1523369 - DNA, 15 bp, Homo sapiens
aagctggatgtagag

SEQ ID NO: 1523370 - DNA, 15 bp, Homo sapiens
aaagctggatgtaga

SEQ ID NO: 1523371 - DNA, 15 bp, Homo sapiens
taaagctggatgtag

SEQ ID NO: 1523372 - DNA, 15 bp, Homo sapiens
ttaaagctggatgta

SEQ ID NO: 1523373 - DNA, 15 bp, Homo sapiens
tttaaagctggatgt

SEQ ID NO: 1523374 - DNA, 15 bp, Homo sapiens
ttttaaagctggatg

SEQ ID NO: 1523375 - DNA, 15 bp, Homo sapiens
tttttaaagctggat

SEQ ID NO: 1523376 - DNA, 15 bp, Homo sapiens
ctttttaaagctgga

SEQ ID NO: 1523377 - DNA, 15 bp, Homo sapiens
cctttttaaagctgg

SEQ ID NO: 1523378 - DNA, 15 bp, Homo sapiens
gcctttttaaagctg

SEQ ID NO: 1523379 - DNA, 15 bp, Homo sapiens
gggcctttttaaagc

SEQ ID NO: 1523380 - DNA, 15 bp, Homo sapiens
tgggcctttttaaag

SEQ ID NO: 1523381 - DNA, 15 bp, Homo sapiens
ctgggcctttttaaa

SEQ ID NO: 1523382 - DNA, 15 bp, Homo sapiens
tctgggcctttttaa

SEQ ID NO: 1523383 - DNA, 15 bp, Homo sapiens
ttctgggccttttta

SEQ ID NO: 1523384 - DNA, 15 bp, Homo sapiens
tttctgggccttttt

SEQ ID NO: 1523385 - DNA, 15 bp, Homo sapiens
ctttctgggcctttt

SEQ ID NO: 1523386 - DNA, 15 bp, Homo sapiens
tctttctgggccttt

SEQ ID NO: 1523387 - DNA, 15 bp, Homo sapiens
atctttctgggcctt

SEQ ID NO: 1523388 - DNA, 15 bp, Homo sapiens
catctttctgggcct

SEQ ID NO: 1523389 - DNA, 15 bp, Homo sapiens
tcatctttctgggcc

SEQ ID NO: 1523390 - DNA, 15 bp, Homo sapiens
gtcatctttctgggc

SEQ ID NO: 1523391 - DNA, 15 bp, Homo sapiens
agtcatctttctggg

SEQ ID NO: 1523392 - DNA, 15 bp, Homo sapiens
gagtcatctttctgg

SEQ ID NO: 1523393 - DNA, 15 bp, Homo sapiens
agagtcatctttctg

SEQ ID NO: 1523394 - DNA, 15 bp, Homo sapiens
cagagtcatctttct

SEQ ID NO: 1523395 - DNA, 15 bp, Homo sapiens
tcagagtcatctttc

SEQ ID NO: 1523396 - DNA, 15 bp, Homo sapiens
gtcagagtcatcttt

SEQ ID NO: 1523397 - DNA, 15 bp, Homo sapiens
tgtcagagtcatctt

SEQ ID NO: 1523398 - DNA, 15 bp, Homo sapiens
gtgtcagagtcatct

SEQ ID NO: 1523399 - DNA, 15 bp, Homo sapiens
agtgtcagagtcatc

SEQ ID NO: 1523400 - DNA, 15 bp, Homo sapiens
aagtgtcagagtcat

SEQ ID NO: 1523401 - DNA, 15 bp, Homo sapiens
taagtgtcagagtca

SEQ ID NO: 1523402 - DNA, 15 bp, Homo sapiens
gtaagtgtcagagtc

SEQ ID NO: 1523403 - DNA, 15 bp, Homo sapiens
ggtaagtgtcagagt

SEQ ID NO: 1523404 - DNA, 15 bp, Homo sapiens
aggtaagtgtcagag

SEQ ID NO: 1523405 - DNA, 15 bp, Homo sapiens
aaggtaagtgtcaga

SEQ ID NO: 1523406 - DNA, 15 bp, Homo sapiens
taaggtaagtgtcag

SEQ ID NO: 1523407 - DNA, 15 bp, Homo sapiens
gtaaggtaagtgtca

SEQ ID NO: 1523408 - DNA, 15 bp, Homo sapiens
tgtaaggtaagtgtc

SEQ ID NO: 1523409 - DNA, 15 bp, Homo sapiens
ttgtaaggtaagtgt

SEQ ID NO: 1523410 - DNA, 15 bp, Homo sapiens
cttgtaaggtaagtg

SEQ ID NO: 1523411 - DNA, 15 bp, Homo sapiens
ccttgtaaggtaagt

SEQ ID NO: 1523412 - DNA, 15 bp, Homo sapiens
accttgtaaggtaag

SEQ ID NO: 1523413 - DNA, 15 bp, Homo sapiens
taccttgtaaggtaa

SEQ ID NO: 1523414 - DNA, 15 bp, Homo sapiens
gtaccttgtaaggta

SEQ ID NO: 1523415 - DNA, 15 bp, Homo sapiens
tgtaccttgtaaggt

SEQ ID NO: 1523416 - DNA, 15 bp, Homo sapiens
gtgtaccttgtaagg

SEQ ID NO: 1523417 - DNA, 15 bp, Homo sapiens
cgtgtaccttgtaag

SEQ ID NO: 1523418 - DNA, 15 bp, Homo sapiens
tcgtgtaccttgtaa

SEQ ID NO: 1523419 - DNA, 15 bp, Homo sapiens
gtcgtgtaccttgta

SEQ ID NO: 1523420 - DNA, 15 bp, Homo sapiens
tgtcgtgtaccttgt

SEQ ID NO: 1523421 - DNA, 15 bp, Homo sapiens
ctgtcgtgtaccttg

SEQ ID NO: 1523422 - DNA, 15 bp, Homo sapiens
actgtcgtgtacctt

SEQ ID NO: 1523423 - DNA, 15 bp, Homo sapiens
cactgtcgtgtacct

SEQ ID NO: 1523424 - DNA, 15 bp, Homo sapiens
acactgtcgtgtacc

SEQ ID NO: 1523425 - DNA, 15 bp, Homo sapiens
cacactgtcgtgtac

SEQ ID NO: 1523426 - DNA, 15 bp, Homo sapiens
acacactgtcgtgta

SEQ ID NO: 1523427 - DNA, 15 bp, Homo sapiens
cacacactgtcgtgt

SEQ ID NO: 1523428 - DNA, 15 bp, Homo sapiens
acacacactgtcgtg

SEQ ID NO: 1523429 - DNA, 15 bp, Homo sapiens
cacacacactgtcgt

SEQ ID NO: 1523430 - DNA, 15 bp, Homo sapiens
acacacacactgtcg

SEQ ID NO: 1523431 - DNA, 15 bp, Homo sapiens
cacacacacactgtc

SEQ ID NO: 1523432 - DNA, 15 bp, Homo sapiens
gcacacacacactgt

SEQ ID NO: 1523433 - DNA, 15 bp, Homo sapiens
tgcacacacacactg

SEQ ID NO: 1523434 - DNA, 15 bp, Homo sapiens
gtgcacacacacact

SEQ ID NO: 1523435 - DNA, 15 bp, Homo sapiens
aggtgcacacacaca

SEQ ID NO: 1523436 - DNA, 15 bp, Homo sapiens
caggtgcacacacac

SEQ ID NO: 1523437 - DNA, 15 bp, Homo sapiens
gcaggtgcacacaca

SEQ ID NO: 1523438 - DNA, 15 bp, Homo sapiens
tgcaggtgcacacac

SEQ ID NO: 1523439 - DNA, 15 bp, Homo sapiens
gtgcaggtgcacaca

SEQ ID NO: 1523440 - DNA, 15 bp, Homo sapiens
tgtgcaggtgcacac

SEQ ID NO: 1523441 - DNA, 15 bp, Homo sapiens
atgtgcaggtgcaca

SEQ ID NO: 1523442 - DNA, 15 bp, Homo sapiens
catgtgcaggtgcac

SEQ ID NO: 1523443 - DNA, 15 bp, Homo sapiens
acatgtgcaggtgca

SEQ ID NO: 1523444 - DNA, 15 bp, Homo sapiens
cacatgtgcaggtgc

SEQ ID NO: 1523445 - DNA, 15 bp, Homo sapiens
acacatgtgcaggtg

SEQ ID NO: 1523446 - DNA, 15 bp, Homo sapiens
tacacatgtgcaggt

SEQ ID NO: 1523447 - DNA, 15 bp, Homo sapiens
atacacatgtgcagg

SEQ ID NO: 1523448 - DNA, 15 bp, Homo sapiens
catacacatgtgcag

SEQ ID NO: 1523449 - DNA, 15 bp, Homo sapiens
acatacacatgtgca

SEQ ID NO: 1523450 - DNA, 15 bp, Homo sapiens
cacatacacatgtgc

SEQ ID NO: 1523451 - DNA, 15 bp, Homo sapiens
acacatacacatgtg

SEQ ID NO: 1523452 - DNA, 15 bp, Homo sapiens
tacacatacacatgt

SEQ ID NO: 1523453 - DNA, 15 bp, Homo sapiens
ctacacatacacatg

SEQ ID NO: 1523454 - DNA, 15 bp, Homo sapiens
tctacacatacacat

SEQ ID NO: 1523455 - DNA, 15 bp, Homo sapiens
gtctacacatacaca

SEQ ID NO: 1523456 - DNA, 15 bp, Homo sapiens
agtctacacatacac

SEQ ID NO: 1523457 - DNA, 15 bp, Homo sapiens
cagtctacacataca

SEQ ID NO: 1523458 - DNA, 15 bp, Homo sapiens
tcagtctacacatac

SEQ ID NO: 1523459 - DNA, 15 bp, Homo sapiens
ctcagtctacacata

SEQ ID NO: 1523460 - DNA, 15 bp, Homo sapiens
tctcagtctacacat

SEQ ID NO: 1523461 - DNA, 15 bp, Homo sapiens
ttctcagtctacaca

SEQ ID NO: 1523462 - DNA, 15 bp, Homo sapiens
tttctcagtctacac

SEQ ID NO: 1523463 - DNA, 15 bp, Homo sapiens
atttctcagtctaca

SEQ ID NO: 1523464 - DNA, 15 bp, Homo sapiens
catttctcagtctac

SEQ ID NO: 1523465 - DNA, 15 bp, Homo sapiens
acatttctcagtcta

SEQ ID NO: 1523466 - DNA, 15 bp, Homo sapiens
tacatttctcagtct

SEQ ID NO: 1523467 - DNA, 15 bp, Homo sapiens
atacatttctcagtc

SEQ ID NO: 1523468 - DNA, 15 bp, Homo sapiens
catacatttctcagt

SEQ ID NO: 1523469 - DNA, 15 bp, Homo sapiens
tcatacatttctcag

SEQ ID NO: 1523470 - DNA, 15 bp, Homo sapiens
ttcatacatttctca

SEQ ID NO: 1523471 - DNA, 15 bp, Homo sapiens
tttcatacatttctc

SEQ ID NO: 1523472 - DNA, 15 bp, Homo sapiens
ctttcatacatttct

SEQ ID NO: 1523473 - DNA, 15 bp, Homo sapiens
actttcatacatttc

SEQ ID NO: 1523474 - DNA, 15 bp, Homo sapiens
tactttcatacattt

SEQ ID NO: 1523475 - DNA, 15 bp, Homo sapiens
atactttcatacatt

SEQ ID NO: 1523476 - DNA, 15 bp, Homo sapiens
tatactttcatacat

SEQ ID NO: 1523477 - DNA, 15 bp, Homo sapiens
gtatactttcataca

SEQ ID NO: 1523478 - DNA, 15 bp, Homo sapiens
tgtatactttcatac

SEQ ID NO: 1523479 - DNA, 15 bp, Homo sapiens
atgtatactttcata

SEQ ID NO: 1523480 - DNA, 15 bp, Homo sapiens
tatgtatactttcat

SEQ ID NO: 1523481 - DNA, 15 bp, Homo sapiens
atatgtatactttca

SEQ ID NO: 1523482 - DNA, 15 bp, Homo sapiens
aatatgtatactttc

SEQ ID NO: 1523483 - DNA, 15 bp, Homo sapiens
taatatgtatacttt

SEQ ID NO: 1523484 - DNA, 15 bp, Homo sapiens
ttaatatgtatactt

SEQ ID NO: 1523485 - DNA, 15 bp, Homo sapiens
gttaatatgtatact

SEQ ID NO: 1523486 - DNA, 15 bp, Homo sapiens
agttaatatgtatac

SEQ ID NO: 1523487 - DNA, 15 bp, Homo sapiens
cagttaatatgtata

SEQ ID NO: 1523488 - DNA, 15 bp, Homo sapiens
acagttaatatgtat

SEQ ID NO: 1523489 - DNA, 15 bp, Homo sapiens
aacagttaatatgta

SEQ ID NO: 1523490 - DNA, 15 bp, Homo sapiens
gaacagttaatatgt

SEQ ID NO: 1523491 - DNA, 15 bp, Homo sapiens
tgaacagttaatatg

SEQ ID NO: 1523492 - DNA, 15 bp, Homo sapiens
gtgaacagttaatat

SEQ ID NO: 1523493 - DNA, 15 bp, Homo sapiens
tgtgaacagttaata

SEQ ID NO: 1523494 - DNA, 15 bp, Homo sapiens
atgtgaacagttaat

SEQ ID NO: 1523495 - DNA, 15 bp, Homo sapiens
aatgtgaacagttaa

SEQ ID NO: 1523496 - DNA, 15 bp, Homo sapiens
caatgtgaacagtta

SEQ ID NO: 1523497 - DNA, 15 bp, Homo sapiens
gcaatgtgaacagtt

SEQ ID NO: 1523498 - DNA, 15 bp, Homo sapiens
agcaatgtgaacagt

SEQ ID NO: 1523499 - DNA, 15 bp, Homo sapiens
aagcaatgtgaacag

SEQ ID NO: 1523500 - DNA, 15 bp, Homo sapiens
taagcaatgtgaaca

SEQ ID NO: 1523501 - DNA, 15 bp, Homo sapiens
ataagcaatgtgaac

SEQ ID NO: 1523502 - DNA, 15 bp, Homo sapiens
gataagcaatgtgaa

SEQ ID NO: 1523503 - DNA, 15 bp, Homo sapiens
agataagcaatgtga

SEQ ID NO: 1523504 - DNA, 15 bp, Homo sapiens
gagataagcaatgtg

SEQ ID NO: 1523505 - DNA, 15 bp, Homo sapiens
tgagataagcaatgt

SEQ ID NO: 1523506 - DNA, 15 bp, Homo sapiens
ctgagataagcaatg

SEQ ID NO: 1523507 - DNA, 15 bp, Homo sapiens
tctgagataagcaat

SEQ ID NO: 1523508 - DNA, 15 bp, Homo sapiens
ttctgagataagcaa

SEQ ID NO: 1523509 - DNA, 15 bp, Homo sapiens
cttctgagataagca

SEQ ID NO: 1523510 - DNA, 15 bp, Homo sapiens
acttctgagataagc

SEQ ID NO: 1523511 - DNA, 15 bp, Homo sapiens
cacttctgagataag

SEQ ID NO: 1523512 - DNA, 15 bp, Homo sapiens
acacttctgagataa

SEQ ID NO: 1523513 - DNA, 15 bp, Homo sapiens
cacacttctgagata

SEQ ID NO: 1523514 - DNA, 15 bp, Homo sapiens
tcacacttctgagat

SEQ ID NO: 1523515 - DNA, 15 bp, Homo sapiens
atcacacttctgaga

SEQ ID NO: 1523516 - DNA, 15 bp, Homo sapiens
aatcacacttctgag

SEQ ID NO: 1523517 - DNA, 15 bp, Homo sapiens
caatcacacttctga

SEQ ID NO: 1523518 - DNA, 15 bp, Homo sapiens
ccaatcacacttctg

SEQ ID NO: 1523519 - DNA, 15 bp, Homo sapiens
tccaatcacacttct

SEQ ID NO: 1523520 - DNA, 15 bp, Homo sapiens
ctccaatcacacttc

SEQ ID NO: 1523521 - DNA, 15 bp, Homo sapiens
cctccaatcacactt

SEQ ID NO: 1523522 - DNA, 15 bp, Homo sapiens
tcctccaatcacact

SEQ ID NO: 1523523 - DNA, 15 bp, Homo sapiens
ctcctccaatcacac

SEQ ID NO: 1523524 - DNA, 15 bp, Homo sapiens
tctcctccaatcaca

SEQ ID NO: 1523525 - DNA, 15 bp, Homo sapiens
atctcctccaatcac

SEQ ID NO: 1523526 - DNA, 15 bp, Homo sapiens
tatctcctccaatca

SEQ ID NO: 1523527 - DNA, 15 bp, Homo sapiens
ctatctcctccaatc

SEQ ID NO: 1523528 - DNA, 15 bp, Homo sapiens
tctatctcctccaat

SEQ ID NO: 1523529 - DNA, 15 bp, Homo sapiens
ctctatctcctccaa

SEQ ID NO: 1523530 - DNA, 15 bp, Homo sapiens
cctctatctcctcca

SEQ ID NO: 1523531 - DNA, 15 bp, Homo sapiens
tcctctatctcctcc

SEQ ID NO: 1523532 - DNA, 15 bp, Homo sapiens
gtcctctatctcctc

SEQ ID NO: 1523533 - DNA, 15 bp, Homo sapiens
ggtcctctatctcct

SEQ ID NO: 1523534 - DNA, 15 bp, Homo sapiens
tggtcctctatctcc

SEQ ID NO: 1523535 - DNA, 15 bp, Homo sapiens
ttggtcctctatctc

SEQ ID NO: 1523536 - DNA, 15 bp, Homo sapiens
attggtcctctatct

SEQ ID NO: 1523537 - DNA, 15 bp, Homo sapiens
aattggtcctctatc

SEQ ID NO: 1523538 - DNA, 15 bp, Homo sapiens
aaattggtcctctat

SEQ ID NO: 1523539 - DNA, 15 bp, Homo sapiens
taaattggtcctcta

SEQ ID NO: 1523540 - DNA, 15 bp, Homo sapiens
ttaaattggtcctct

SEQ ID NO: 1523541 - DNA, 15 bp, Homo sapiens
attaaattggtcctc

SEQ ID NO: 1523542 - DNA, 15 bp, Homo sapiens
tattaaattggtcct

SEQ ID NO: 1523543 - DNA, 15 bp, Homo sapiens
atattaaattggtcc

SEQ ID NO: 1523544 - DNA, 15 bp, Homo sapiens
aatattaaattggtc

SEQ ID NO: 1523545 - DNA, 15 bp, Homo sapiens
aaatattaaattggt

SEQ ID NO: 1523546 - DNA, 15 bp, Homo sapiens
gaaatattaaattgg

SEQ ID NO: 1523547 - DNA, 15 bp, Homo sapiens
agaaatattaaattg

SEQ ID NO: 1523548 - DNA, 15 bp, Homo sapiens
cagaaatattaaatt

SEQ ID NO: 1523549 - DNA, 15 bp, Homo sapiens
acagaaatattaaat

SEQ ID NO: 1523550 - DNA, 15 bp, Homo sapiens
aacagaaatattaaa

SEQ ID NO: 1523551 - DNA, 15 bp, Homo sapiens
tagataacagaaata

SEQ ID NO: 1523552 - DNA, 15 bp, Homo sapiens
atagataacagaaat

SEQ ID NO: 1523553 - DNA, 15 bp, Homo sapiens
gatagataacagaaa

SEQ ID NO: 1523554 - DNA, 15 bp, Homo sapiens
agatagataacagaa

SEQ ID NO: 1523555 - DNA, 15 bp, Homo sapiens
gagatagataacaga

SEQ ID NO: 1523556 - DNA, 15 bp, Homo sapiens
agagatagataacag

SEQ ID NO: 1523557 - DNA, 15 bp, Homo sapiens
tagagatagataaca

SEQ ID NO: 1523558 - DNA, 15 bp, Homo sapiens
atagagatagataac

SEQ ID NO: 1523559 - DNA, 15 bp, Homo sapiens
catagagatagataa

SEQ ID NO: 1523560 - DNA, 15 bp, Homo sapiens
acatagagatagata

SEQ ID NO: 1523561 - DNA, 15 bp, Homo sapiens
aacatagagatagat

SEQ ID NO: 1523562 - DNA, 15 bp, Homo sapiens
caacatagagataga

SEQ ID NO: 1523563 - DNA, 15 bp, Homo sapiens
acaacatagagatag

SEQ ID NO: 1523564 - DNA, 15 bp, Homo sapiens
aacaacatagagata

SEQ ID NO: 1523565 - DNA, 15 bp, Homo sapiens
aaacaacatagagat

SEQ ID NO: 1523566 - DNA, 15 bp, Homo sapiens
caaacaacatagaga

SEQ ID NO: 1523567 - DNA, 15 bp, Homo sapiens
ccaaacaacatagag

SEQ ID NO: 1523568 - DNA, 15 bp, Homo sapiens
gccaaacaacataga

SEQ ID NO: 1523569 - DNA, 15 bp, Homo sapiens
agccaaacaacatag

SEQ ID NO: 1523570 - DNA, 15 bp, Homo sapiens
aagccaaacaacata

SEQ ID NO: 1523571 - DNA, 15 bp, Homo sapiens
caagccaaacaacat

SEQ ID NO: 1523572 - DNA, 15 bp, Homo sapiens
gcaagccaaacaaca

SEQ ID NO: 1523573 - DNA, 15 bp, Homo sapiens
ggcaagccaaacaac

SEQ ID NO: 1523574 - DNA, 15 bp, Homo sapiens
tggcaagccaaacaa

SEQ ID NO: 1523575 - DNA, 15 bp, Homo sapiens
ctggcaagccaaaca

SEQ ID NO: 1523576 - DNA, 15 bp, Homo sapiens
cctggcaagccaaac

SEQ ID NO: 1523577 - DNA, 15 bp, Homo sapiens
tcctggcaagccaaa

SEQ ID NO: 1523578 - DNA, 15 bp, Homo sapiens
ctcctggcaagccaa

SEQ ID NO: 1523579 - DNA, 15 bp, Homo sapiens
gctcctggcaagcca

SEQ ID NO: 1523580 - DNA, 15 bp, Homo sapiens
tgctcctggcaagcc

SEQ ID NO: 1523581 - DNA, 15 bp, Homo sapiens
atgctcctggcaagc

SEQ ID NO: 1523582 - DNA, 15 bp, Homo sapiens
tatgctcctggcaag

SEQ ID NO: 1523583 - DNA, 15 bp, Homo sapiens
atatgctcctggcaa

SEQ ID NO: 1523584 - DNA, 15 bp, Homo sapiens
tatatgctcctggca

SEQ ID NO: 1523585 - DNA, 15 bp, Homo sapiens
atatatgctcctggc

SEQ ID NO: 1523586 - DNA, 15 bp, Homo sapiens
aatatatgctcctgg

SEQ ID NO: 1523587 - DNA, 15 bp, Homo sapiens
caatatatgctcctg

SEQ ID NO: 1523588 - DNA, 15 bp, Homo sapiens
acaatatatgctcct

SEQ ID NO: 1523589 - DNA, 15 bp, Homo sapiens
aacaatatatgctcc

SEQ ID NO: 1523590 - DNA, 15 bp, Homo sapiens
aaacaatatatgctc

SEQ ID NO: 1523591 - DNA, 15 bp, Homo sapiens
aaaacaatatatgct

SEQ ID NO: 1523592 - DNA, 15 bp, Homo sapiens
aaaaacaatatatgc

SEQ ID NO: 1523593 - DNA, 15 bp, Homo sapiens
caaaaacaatatatg

SEQ ID NO: 1523594 - DNA, 15 bp, Homo sapiens
acaaaaacaatatat

SEQ ID NO: 1523595 - DNA, 15 bp, Homo sapiens
tacaaaaacaatata

SEQ ID NO: 1523596 - DNA, 15 bp, Homo sapiens
ttacaaaaacaatat

SEQ ID NO: 1523597 - DNA, 15 bp, Homo sapiens
cttacaaaaacaata

SEQ ID NO: 1523598 - DNA, 15 bp, Homo sapiens
tcttacaaaaacaat

SEQ ID NO: 1523599 - DNA, 15 bp, Homo sapiens
ttcttacaaaaacaa

SEQ ID NO: 1523600 - DNA, 15 bp, Homo sapiens
attcttacaaaaaca

SEQ ID NO: 1523601 - DNA, 15 bp, Homo sapiens
tattcttacaaaaac

SEQ ID NO: 1523602 - DNA, 15 bp, Homo sapiens
ttattcttacaaaaa

SEQ ID NO: 1523603 - DNA, 15 bp, Homo sapiens
attattcttacaaaa

SEQ ID NO: 1523604 - DNA, 15 bp, Homo sapiens
aattattcttacaaa

SEQ ID NO: 1523605 - DNA, 15 bp, Homo sapiens
taattattcttacaa

SEQ ID NO: 1523606 - DNA, 15 bp, Homo sapiens
ttaattattcttaca

SEQ ID NO: 1523607 - DNA, 15 bp, Homo sapiens
tttaattattcttac

SEQ ID NO: 1523608 - DNA, 15 bp, Homo sapiens
ttttaattattctta

SEQ ID NO: 1523609 - DNA, 15 bp, Homo sapiens
tttttaattattctt

SEQ ID NO: 1523610 - DNA, 15 bp, Homo sapiens
atttttaattattct

SEQ ID NO: 1523611 - DNA, 15 bp, Homo sapiens
tatttttaattattc

SEQ ID NO: 1523612 - DNA, 15 bp, Homo sapiens
atatttttaattatt

SEQ ID NO: 1523613 - DNA, 15 bp, Homo sapiens
tatatttttaattat

SEQ ID NO: 1523614 - DNA, 15 bp, Homo sapiens
ttatatttttaatta

SEQ ID NO: 1523615 - DNA, 15 bp, Homo sapiens
tttatatttttaatt

SEQ ID NO: 1523616 - DNA, 15 bp, Homo sapiens
ttttatatttttaat

SEQ ID NO: 1523617 - DNA, 15 bp, Homo sapiens
gttttatatttttaa

SEQ ID NO: 1523618 - DNA, 15 bp, Homo sapiens
ggttttatattttta

SEQ ID NO: 1523619 - DNA, 15 bp, Homo sapiens
gggttttatattttt

SEQ ID NO: 1523620 - DNA, 15 bp, Homo sapiens
ggggttttatatttt

SEQ ID NO: 1523621 - DNA, 15 bp, Homo sapiens
tggggttttatattt

SEQ ID NO: 1523622 - DNA, 15 bp, Homo sapiens
ttggggttttatatt

SEQ ID NO: 1523623 - DNA, 15 bp, Homo sapiens
tttggggttttatat

SEQ ID NO: 1523624 - DNA, 15 bp, Homo sapiens
ctttggggttttata

SEQ ID NO: 1523625 - DNA, 15 bp, Homo sapiens
actttggggttttat

SEQ ID NO: 1523626 - DNA, 15 bp, Homo sapiens
cactttggggtttta

SEQ ID NO: 1523627 - DNA, 15 bp, Homo sapiens
ccactttggggtttt

SEQ ID NO: 1523628 - DNA, 15 bp, Homo sapiens
gccactttggggttt

SEQ ID NO: 1523629 - DNA, 15 bp, Homo sapiens
ggccactttggggtt

SEQ ID NO: 1523630 - DNA, 15 bp, Homo sapiens
cggccactttggggt

SEQ ID NO: 1523631 - DNA, 15 bp, Homo sapiens
ccggccactttgggg

SEQ ID NO: 1523632 - DNA, 15 bp, Homo sapiens
cccggccactttggg

SEQ ID NO: 1523633 - DNA, 15 bp, Homo sapiens
gcccggccactttgg

SEQ ID NO: 1523634 - DNA, 15 bp, Homo sapiens
tgcccggccactttg

SEQ ID NO: 1523635 - DNA, 15 bp, Homo sapiens
ttgcccggccacttt

SEQ ID NO: 1523636 - DNA, 15 bp, Homo sapiens
cttgcccggccactt

SEQ ID NO: 1523637 - DNA, 15 bp, Homo sapiens
ccttgcccggccact

SEQ ID NO: 1523638 - DNA, 15 bp, Homo sapiens
accttgcccggccac

SEQ ID NO: 1523639 - DNA, 15 bp, Homo sapiens
caccttgcccggcca

SEQ ID NO: 1523640 - DNA, 15 bp, Homo sapiens
ccaccttgcccggcc

SEQ ID NO: 1523641 - DNA, 15 bp, Homo sapiens
gccaccttgcccggc

SEQ ID NO: 1523642 - DNA, 15 bp, Homo sapiens
agccaccttgcccgg

SEQ ID NO: 1523643 - DNA, 15 bp, Homo sapiens
gagccaccttgcccg

SEQ ID NO: 1523644 - DNA, 15 bp, Homo sapiens
gtgagccaccttgcc

SEQ ID NO: 1523645 - DNA, 15 bp, Homo sapiens
tgtgagccaccttgc

SEQ ID NO: 1523646 - DNA, 15 bp, Homo sapiens
gtgtgagccaccttg

SEQ ID NO: 1523647 - DNA, 15 bp, Homo sapiens
ggtgtgagccacctt

SEQ ID NO: 1523648 - DNA, 15 bp, Homo sapiens
aggtgtgagccacct

SEQ ID NO: 1523649 - DNA, 15 bp, Homo sapiens
ccccgccttggcctc

SEQ ID NO: 1523650 - DNA, 15 bp, Homo sapiens
tccccgccttggcct

SEQ ID NO: 1523651 - DNA, 15 bp, Homo sapiens
ttccccgccttggcc

SEQ ID NO: 1523652 - DNA, 15 bp, Homo sapiens
tttccccgccttggc

SEQ ID NO: 1523653 - DNA, 15 bp, Homo sapiens
atttccccgccttgg

SEQ ID NO: 1523654 - DNA, 15 bp, Homo sapiens
gatttccccgccttg

SEQ ID NO: 1523655 - DNA, 15 bp, Homo sapiens
tgatttccccgcctt

SEQ ID NO: 1523656 - DNA, 15 bp, Homo sapiens
gtgatttccccgcct

SEQ ID NO: 1523657 - DNA, 15 bp, Homo sapiens
agtgatttccccgcc

SEQ ID NO: 1523658 - DNA, 15 bp, Homo sapiens
aagtgatttccccgc

SEQ ID NO: 1523659 - DNA, 15 bp, Homo sapiens
caagtgatttccccg

SEQ ID NO: 1523660 - DNA, 15 bp, Homo sapiens
ccaagtgatttcccc

SEQ ID NO: 1523661 - DNA, 15 bp, Homo sapiens
cccaagtgatttccc

SEQ ID NO: 1523662 - DNA, 15 bp, Homo sapiens
gcccaagtgatttcc

SEQ ID NO: 1523663 - DNA, 15 bp, Homo sapiens
agcccaagtgatttc

SEQ ID NO: 1523664 - DNA, 15 bp, Homo sapiens
gagcccaagtgattt

SEQ ID NO: 1523665 - DNA, 15 bp, Homo sapiens
tgagcccaagtgatt

SEQ ID NO: 1523666 - DNA, 15 bp, Homo sapiens
ctgagcccaagtgat

SEQ ID NO: 1523667 - DNA, 15 bp, Homo sapiens
cctgagcccaagtga

SEQ ID NO: 1523668 - DNA, 15 bp, Homo sapiens
tcctgagcccaagtg

SEQ ID NO: 1523669 - DNA, 15 bp, Homo sapiens
ctcctgagcccaagt

SEQ ID NO: 1523670 - DNA, 15 bp, Homo sapiens
actcctgagcccaag

SEQ ID NO: 1523671 - DNA, 15 bp, Homo sapiens
aaactcctgagccca

SEQ ID NO: 1523672 - DNA, 15 bp, Homo sapiens
caaactcctgagccc

SEQ ID NO: 1523673 - DNA, 15 bp, Homo sapiens
tcaaactcctgagcc

SEQ ID NO: 1523674 - DNA, 15 bp, Homo sapiens
ctcaaactcctgagc

SEQ ID NO: 1523675 - DNA, 15 bp, Homo sapiens
tctcaaactcctgag

SEQ ID NO: 1523676 - DNA, 15 bp, Homo sapiens
atctcaaactcctga

SEQ ID NO: 1523677 - DNA, 15 bp, Homo sapiens
ctgatctcaaactcc

SEQ ID NO: 1523678 - DNA, 15 bp, Homo sapiens
agctgatctcaaact

SEQ ID NO: 1523679 - DNA, 15 bp, Homo sapiens
aagctgatctcaaac

SEQ ID NO: 1523680 - DNA, 15 bp, Homo sapiens
caagctgatctcaaa

SEQ ID NO: 1523681 - DNA, 15 bp, Homo sapiens
ccaagctgatctcaa

SEQ ID NO: 1523682 - DNA, 15 bp, Homo sapiens
cccaagctgatctca

SEQ ID NO: 1523683 - DNA, 15 bp, Homo sapiens
gcccaagctgatctc

SEQ ID NO: 1523684 - DNA, 15 bp, Homo sapiens
tgcccaagctgatct

SEQ ID NO: 1523685 - DNA, 15 bp, Homo sapiens
ctgcccaagctgatc

SEQ ID NO: 1523686 - DNA, 15 bp, Homo sapiens
gctgcccaagctgat

SEQ ID NO: 1523687 - DNA, 15 bp, Homo sapiens
tgctgcccaagctga

SEQ ID NO: 1523688 - DNA, 15 bp, Homo sapiens
atgctgcccaagctg

SEQ ID NO: 1523689 - DNA, 15 bp, Homo sapiens
catgctgcccaagct

SEQ ID NO: 1523690 - DNA, 15 bp, Homo sapiens
ccatgctgcccaagc

SEQ ID NO: 1523691 - DNA, 15 bp, Homo sapiens
accatgctgcccaag

SEQ ID NO: 1523692 - DNA, 15 bp, Homo sapiens
caccatgctgcccaa

SEQ ID NO: 1523693 - DNA, 15 bp, Homo sapiens
tcaccatgctgccca

SEQ ID NO: 1523694 - DNA, 15 bp, Homo sapiens
ttcaccatgctgccc

SEQ ID NO: 1523695 - DNA, 15 bp, Homo sapiens
tttcaccatgctgcc

SEQ ID NO: 1523696 - DNA, 15 bp, Homo sapiens
gtttcaccatgctgc

SEQ ID NO: 1523697 - DNA, 15 bp, Homo sapiens
ggtttcaccatgctg

SEQ ID NO: 1523698 - DNA, 15 bp, Homo sapiens
gggtttcaccatgct

SEQ ID NO: 1523699 - DNA, 15 bp, Homo sapiens
agggtttcaccatgc

SEQ ID NO: 1523700 - DNA, 15 bp, Homo sapiens
tgacagggtttcacc

SEQ ID NO: 1523701 - DNA, 15 bp, Homo sapiens
gtgacagggtttcac

SEQ ID NO: 1523702 - DNA, 15 bp, Homo sapiens
ggtgacagggtttca

SEQ ID NO: 1523703 - DNA, 15 bp, Homo sapiens
tggtgacagggtttc

SEQ ID NO: 1523704 - DNA, 15 bp, Homo sapiens
gtggtgacagggttt

SEQ ID NO: 1523705 - DNA, 15 bp, Homo sapiens
cgtggtgacagggtt

SEQ ID NO: 1523706 - DNA, 15 bp, Homo sapiens
ccgtggtgacagggt

SEQ ID NO: 1523707 - DNA, 15 bp, Homo sapiens
tccgtggtgacaggg

SEQ ID NO: 1523708 - DNA, 15 bp, Homo sapiens
ttccgtggtgacagg

SEQ ID NO: 1523709 - DNA, 15 bp, Homo sapiens
cttccgtggtgacag

SEQ ID NO: 1523710 - DNA, 15 bp, Homo sapiens
tcttccgtggtgaca

SEQ ID NO: 1523711 - DNA, 15 bp, Homo sapiens
ttcttccgtggtgac

SEQ ID NO: 1523712 - DNA, 15 bp, Homo sapiens
attcttccgtggtga

SEQ ID NO: 1523713 - DNA, 15 bp, Homo sapiens
tattcttccgtggtg

SEQ ID NO: 1523714 - DNA, 15 bp, Homo sapiens
gtattcttccgtggt

SEQ ID NO: 1523715 - DNA, 15 bp, Homo sapiens
tgtattcttccgtgg

SEQ ID NO: 1523716 - DNA, 15 bp, Homo sapiens
ttgtattcttccgtg

SEQ ID NO: 1523717 - DNA, 15 bp, Homo sapiens
tttgtattcttccgt

SEQ ID NO: 1523718 - DNA, 15 bp, Homo sapiens
ttttgtattcttccg

SEQ ID NO: 1523719 - DNA, 15 bp, Homo sapiens
tttttgtattcttcc

SEQ ID NO: 1523720 - DNA, 15 bp, Homo sapiens
atttttgtattcttc

SEQ ID NO: 1523721 - DNA, 15 bp, Homo sapiens
gatttttgtattctt

SEQ ID NO: 1523722 - DNA, 15 bp, Homo sapiens
tgatttttgtattct

SEQ ID NO: 1523723 - DNA, 15 bp, Homo sapiens
ctgatttttgtattc

SEQ ID NO: 1523724 - DNA, 15 bp, Homo sapiens
cggctgatttttgta

SEQ ID NO: 1523725 - DNA, 15 bp, Homo sapiens
acggctgatttttgt

SEQ ID NO: 1523726 - DNA, 15 bp, Homo sapiens
tacggctgatttttg

SEQ ID NO: 1523727 - DNA, 15 bp, Homo sapiens
gtacggctgattttt

SEQ ID NO: 1523728 - DNA, 15 bp, Homo sapiens
tgtacggctgatttt

SEQ ID NO: 1523729 - DNA, 15 bp, Homo sapiens
atgtacggctgattt

SEQ ID NO: 1523730 - DNA, 15 bp, Homo sapiens
aatgtacggctgatt

SEQ ID NO: 1523731 - DNA, 15 bp, Homo sapiens
caatgtacggctgat

SEQ ID NO: 1523732 - DNA, 15 bp, Homo sapiens
acaatgtacggctga

SEQ ID NO: 1523733 - DNA, 15 bp, Homo sapiens
cacaatgtacggctg

SEQ ID NO: 1523734 - DNA, 15 bp, Homo sapiens
ccacaatgtacggct

SEQ ID NO: 1523735 - DNA, 15 bp, Homo sapiens
gccacaatgtacggc

SEQ ID NO: 1523736 - DNA, 15 bp, Homo sapiens
tgccacaatgtacgg

SEQ ID NO: 1523737 - DNA, 15 bp, Homo sapiens
atgccacaatgtacg

SEQ ID NO: 1523738 - DNA, 15 bp, Homo sapiens
tatgccacaatgtac

SEQ ID NO: 1523739 - DNA, 15 bp, Homo sapiens
gtatgccacaatgta

SEQ ID NO: 1523740 - DNA, 15 bp, Homo sapiens
tgtatgccacaatgt

SEQ ID NO: 1523741 - DNA, 15 bp, Homo sapiens
gtgtatgccacaatg

SEQ ID NO: 1523742 - DNA, 15 bp, Homo sapiens
ggtgtatgccacaat

SEQ ID NO: 1523743 - DNA, 15 bp, Homo sapiens
aggtgtatgccacaa

SEQ ID NO: 1523744 - DNA, 15 bp, Homo sapiens
caggtgtatgccaca

SEQ ID NO: 1523745 - DNA, 15 bp, Homo sapiens
ctacaggtgtatgcc

SEQ ID NO: 1523746 - DNA, 15 bp, Homo sapiens
gctacaggtgtatgc

SEQ ID NO: 1523747 - DNA, 15 bp, Homo sapiens
ggctacaggtgtatg

SEQ ID NO: 1523748 - DNA, 15 bp, Homo sapiens
gggctacaggtgtat

SEQ ID NO: 1523749 - DNA, 15 bp, Homo sapiens
ggggctacaggtgta

SEQ ID NO: 1523750 - DNA, 15 bp, Homo sapiens
tggggctacaggtgt

SEQ ID NO: 1523751 - DNA, 15 bp, Homo sapiens
ctggggctacaggtg

SEQ ID NO: 1523752 - DNA, 15 bp, Homo sapiens
gctggggctacaggt

SEQ ID NO: 1523753 - DNA, 15 bp, Homo sapiens
agctggggctacagg

SEQ ID NO: 1523754 - DNA, 15 bp, Homo sapiens
tagctggggctacag

SEQ ID NO: 1523755 - DNA, 15 bp, Homo sapiens
gtagctggggctaca

SEQ ID NO: 1523756 - DNA, 15 bp, Homo sapiens
agtagctggggctac

SEQ ID NO: 1523757 - DNA, 15 bp, Homo sapiens
gagtagctggggcta

SEQ ID NO: 1523758 - DNA, 15 bp, Homo sapiens
tgagtagctggggct

SEQ ID NO: 1523759 - DNA, 15 bp, Homo sapiens
atcaagtgatcctcc

SEQ ID NO: 1523760 - DNA, 15 bp, Homo sapiens
gatcaagtgatcctc

SEQ ID NO: 1523761 - DNA, 15 bp, Homo sapiens
ggatcaagtgatcct

SEQ ID NO: 1523762 - DNA, 15 bp, Homo sapiens
aggatcaagtgatcc

SEQ ID NO: 1523763 - DNA, 15 bp, Homo sapiens
caggatcaagtgatc

SEQ ID NO: 1523764 - DNA, 15 bp, Homo sapiens
ccaggatcaagtgat

SEQ ID NO: 1523765 - DNA, 15 bp, Homo sapiens
cccaggatcaagtga

SEQ ID NO: 1523766 - DNA, 15 bp, Homo sapiens
tcccaggatcaagtg

SEQ ID NO: 1523767 - DNA, 15 bp, Homo sapiens
ctcccaggatcaagt

SEQ ID NO: 1523768 - DNA, 15 bp, Homo sapiens
cctcccaggatcaag

SEQ ID NO: 1523769 - DNA, 15 bp, Homo sapiens
acctcccaggatcaa

SEQ ID NO: 1523770 - DNA, 15 bp, Homo sapiens
gacctcccaggatca

SEQ ID NO: 1523771 - DNA, 15 bp, Homo sapiens
tgacctcccaggatc

SEQ ID NO: 1523772 - DNA, 15 bp, Homo sapiens
ttgacctcccaggat

SEQ ID NO: 1523773 - DNA, 15 bp, Homo sapiens
cttgacctcccagga

SEQ ID NO: 1523774 - DNA, 15 bp, Homo sapiens
tcttgacctcccagg

SEQ ID NO: 1523775 - DNA, 15 bp, Homo sapiens
gtcttgacctcccag

SEQ ID NO: 1523776 - DNA, 15 bp, Homo sapiens
agtcttgacctccca

SEQ ID NO: 1523777 - DNA, 15 bp, Homo sapiens
cagtcttgacctccc

SEQ ID NO: 1523778 - DNA, 15 bp, Homo sapiens
gcagtcttgacctcc

SEQ ID NO: 1523779 - DNA, 15 bp, Homo sapiens
tgcagtcttgacctc

SEQ ID NO: 1523780 - DNA, 15 bp, Homo sapiens
atgcagtcttgacct

SEQ ID NO: 1523781 - DNA, 15 bp, Homo sapiens
aatgcagtcttgacc

SEQ ID NO: 1523782 - DNA, 15 bp, Homo sapiens
caatgcagtcttgac

SEQ ID NO: 1523783 - DNA, 15 bp, Homo sapiens
tcaatgcagtcttga

SEQ ID NO: 1523784 - DNA, 15 bp, Homo sapiens
ctcaatgcagtcttg

SEQ ID NO: 1523785 - DNA, 15 bp, Homo sapiens
gctcaatgcagtctt

SEQ ID NO: 1523786 - DNA, 15 bp, Homo sapiens
ggctcaatgcagtct

SEQ ID NO: 1523787 - DNA, 15 bp, Homo sapiens
cggctcaatgcagtc

SEQ ID NO: 1523788 - DNA, 15 bp, Homo sapiens
tcggctcaatgcagt

SEQ ID NO: 1523789 - DNA, 15 bp, Homo sapiens
ctcggctcaatgcag

SEQ ID NO: 1523790 - DNA, 15 bp, Homo sapiens
tctcggctcaatgca

SEQ ID NO: 1523791 - DNA, 15 bp, Homo sapiens
atctcggctcaatgc

SEQ ID NO: 1523792 - DNA, 15 bp, Homo sapiens
gatctcggctcaatg

SEQ ID NO: 1523793 - DNA, 15 bp, Homo sapiens
tgatctcggctcaat

SEQ ID NO: 1523794 - DNA, 15 bp, Homo sapiens
gtgatctcggctcaa

SEQ ID NO: 1523795 - DNA, 15 bp, Homo sapiens
cctcactctgttgcc

SEQ ID NO: 1523796 - DNA, 15 bp, Homo sapiens
gcctcactctgttgc

SEQ ID NO: 1523797 - DNA, 15 bp, Homo sapiens
ggcctcactctgttg

SEQ ID NO: 1523798 - DNA, 15 bp, Homo sapiens
aggcctcactctgtt

SEQ ID NO: 1523799 - DNA, 15 bp, Homo sapiens
aaggcctcactctgt

SEQ ID NO: 1523800 - DNA, 15 bp, Homo sapiens
gaaggcctcactctg

SEQ ID NO: 1523801 - DNA, 15 bp, Homo sapiens
agaaggcctcactct

SEQ ID NO: 1523802 - DNA, 15 bp, Homo sapiens
gagaaggcctcactc

SEQ ID NO: 1523803 - DNA, 15 bp, Homo sapiens
agagaaggcctcact

SEQ ID NO: 1523804 - DNA, 15 bp, Homo sapiens
cagagaaggcctcac

SEQ ID NO: 1523805 - DNA, 15 bp, Homo sapiens
tcagagaaggcctca

SEQ ID NO: 1523806 - DNA, 15 bp, Homo sapiens
ttcagagaaggcctc

SEQ ID NO: 1523807 - DNA, 15 bp, Homo sapiens
tttcagagaaggcct

SEQ ID NO: 1523808 - DNA, 15 bp, Homo sapiens
ctttcagagaaggcc

SEQ ID NO: 1523809 - DNA, 15 bp, Homo sapiens
tctttcagagaaggc

SEQ ID NO: 1523810 - DNA, 15 bp, Homo sapiens
ttctttcagagaagg

SEQ ID NO: 1523811 - DNA, 15 bp, Homo sapiens
attctttcagagaag

SEQ ID NO: 1523812 - DNA, 15 bp, Homo sapiens
tattctttcagagaa

SEQ ID NO: 1523813 - DNA, 15 bp, Homo sapiens
gtattctttcagaga

SEQ ID NO: 1523814 - DNA, 15 bp, Homo sapiens
tgtattctttcagag

SEQ ID NO: 1523815 - DNA, 15 bp, Homo sapiens
atgtattctttcaga

SEQ ID NO: 1523816 - DNA, 15 bp, Homo sapiens
aatgtattctttcag

SEQ ID NO: 1523817 - DNA, 15 bp, Homo sapiens
taatgtattctttca

SEQ ID NO: 1523818 - DNA, 15 bp, Homo sapiens
ttaatgtattctttc

SEQ ID NO: 1523819 - DNA, 15 bp, Homo sapiens
tttaatgtattcttt

SEQ ID NO: 1523820 - DNA, 15 bp, Homo sapiens
ttttaatgtattctt

SEQ ID NO: 1523821 - DNA, 15 bp, Homo sapiens
gttttaatgtattct

SEQ ID NO: 1523822 - DNA, 15 bp, Homo sapiens
tgttttaatgtattc

SEQ ID NO: 1523823 - DNA, 15 bp, Homo sapiens
ttgttttaatgtatt

SEQ ID NO: 1523824 - DNA, 15 bp, Homo sapiens
tttgttttaatgtat

SEQ ID NO: 1523825 - DNA, 15 bp, Homo sapiens
ttttgttttaatgta

SEQ ID NO: 1523826 - DNA, 15 bp, Homo sapiens
gttttgttttaatgt

SEQ ID NO: 1523827 - DNA, 15 bp, Homo sapiens
tgttttgttttaatg

SEQ ID NO: 1523828 - DNA, 15 bp, Homo sapiens
ttgttttgttttaat

SEQ ID NO: 1523829 - DNA, 15 bp, Homo sapiens
tttgttttgttttaa

SEQ ID NO: 1523830 - DNA, 15 bp, Homo sapiens
ttttgttttgtttta

SEQ ID NO: 1523831 - DNA, 15 bp, Homo sapiens
ggtttttgttttgtt

SEQ ID NO: 1523832 - DNA, 15 bp, Homo sapiens
gggtttttgttttgt

SEQ ID NO: 1523833 - DNA, 15 bp, Homo sapiens
ggggtttttgttttg

SEQ ID NO: 1523834 - DNA, 15 bp, Homo sapiens
tggggtttttgtttt

SEQ ID NO: 1523835 - DNA, 15 bp, Homo sapiens
ttggggtttttgttt

SEQ ID NO: 1523836 - DNA, 15 bp, Homo sapiens
cttggggtttttgtt

SEQ ID NO: 1523837 - DNA, 15 bp, Homo sapiens
acttggggtttttgt

SEQ ID NO: 1523838 - DNA, 15 bp, Homo sapiens
aacttggggtttttg

SEQ ID NO: 1523839 - DNA, 15 bp, Homo sapiens
taacttggggttttt

SEQ ID NO: 1523840 - DNA, 15 bp, Homo sapiens
gtaacttggggtttt

SEQ ID NO: 1523841 - DNA, 15 bp, Homo sapiens
tgtaacttggggttt

SEQ ID NO: 1523842 - DNA, 15 bp, Homo sapiens
ttgtaacttggggtt

SEQ ID NO: 1523843 - DNA, 15 bp, Homo sapiens
tttgtaacttggggt

SEQ ID NO: 1523844 - DNA, 15 bp, Homo sapiens
ctttgtaacttgggg

SEQ ID NO: 1523845 - DNA, 15 bp, Homo sapiens
tctttgtaacttggg

SEQ ID NO: 1523846 - DNA, 15 bp, Homo sapiens
ttctttgtaacttgg

SEQ ID NO: 1523847 - DNA, 15 bp, Homo sapiens
cttctttgtaacttg

SEQ ID NO: 1523848 - DNA, 15 bp, Homo sapiens
tcttctttgtaactt

SEQ ID NO: 1523849 - DNA, 15 bp, Homo sapiens
ctcttctttgtaact

SEQ ID NO: 1523850 - DNA, 15 bp, Homo sapiens
actcttctttgtaac

SEQ ID NO: 1523851 - DNA, 15 bp, Homo sapiens
aactcttctttgtaa

SEQ ID NO: 1523852 - DNA, 15 bp, Homo sapiens
aaactcttctttgta

SEQ ID NO: 1523853 - DNA, 15 bp, Homo sapiens
aaaactcttctttgt

SEQ ID NO: 1523854 - DNA, 15 bp, Homo sapiens
gaaaactcttctttg

SEQ ID NO: 1523855 - DNA, 15 bp, Homo sapiens
ggaaaactcttcttt

SEQ ID NO: 1523856 - DNA, 15 bp, Homo sapiens
aggaaaactcttctt

SEQ ID NO: 1523857 - DNA, 15 bp, Homo sapiens
gaggaaaactcttct

SEQ ID NO: 1523858 - DNA, 15 bp, Homo sapiens
agaggaaaactcttc

SEQ ID NO: 1523859 - DNA, 15 bp, Homo sapiens
aagaggaaaactctt

SEQ ID NO: 1523860 - DNA, 15 bp, Homo sapiens
taagaggaaaactct

SEQ ID NO: 1523861 - DNA, 15 bp, Homo sapiens
ctaagaggaaaactc

SEQ ID NO: 1523862 - DNA, 15 bp, Homo sapiens
cctaagaggaaaact

SEQ ID NO: 1523863 - DNA, 15 bp, Homo sapiens
tcctaagaggaaaac

SEQ ID NO: 1523864 - DNA, 15 bp, Homo sapiens
ttcctaagaggaaaa

SEQ ID NO: 1523865 - DNA, 15 bp, Homo sapiens
attcctaagaggaaa

SEQ ID NO: 1523866 - DNA, 15 bp, Homo sapiens
tattcctaagaggaa

SEQ ID NO: 1523867 - DNA, 15 bp, Homo sapiens
atattcctaagagga

SEQ ID NO: 1523868 - DNA, 15 bp, Homo sapiens
aatattcctaagagg

SEQ ID NO: 1523869 - DNA, 15 bp, Homo sapiens
caatattcctaagag

SEQ ID NO: 1523870 - DNA, 15 bp, Homo sapiens
acaatattcctaaga

SEQ ID NO: 1523871 - DNA, 15 bp, Homo sapiens
cacaatattcctaag

SEQ ID NO: 1523872 - DNA, 15 bp, Homo sapiens
tcacaatattcctaa

SEQ ID NO: 1523873 - DNA, 15 bp, Homo sapiens
atcacaatattccta

SEQ ID NO: 1523874 - DNA, 15 bp, Homo sapiens
tatcacaatattcct

SEQ ID NO: 1523875 - DNA, 15 bp, Homo sapiens
gtatcacaatattcc

SEQ ID NO: 1523876 - DNA, 15 bp, Homo sapiens
ggtatcacaatattc

SEQ ID NO: 1523877 - DNA, 15 bp, Homo sapiens
aggtatcacaatatt

SEQ ID NO: 1523878 - DNA, 15 bp, Homo sapiens
caggtatcacaatat

SEQ ID NO: 1523879 - DNA, 15 bp, Homo sapiens
ccaggtatcacaata

SEQ ID NO: 1523880 - DNA, 15 bp, Homo sapiens
gccaggtatcacaat

SEQ ID NO: 1523881 - DNA, 15 bp, Homo sapiens
tgccaggtatcacaa

SEQ ID NO: 1523882 - DNA, 15 bp, Homo sapiens
ttgccaggtatcaca

SEQ ID NO: 1523883 - DNA, 15 bp, Homo sapiens
attgccaggtatcac

SEQ ID NO: 1523884 - DNA, 15 bp, Homo sapiens
aattgccaggtatca

SEQ ID NO: 1523885 - DNA, 15 bp, Homo sapiens
caattgccaggtatc

SEQ ID NO: 1523886 - DNA, 15 bp, Homo sapiens
gcaattgccaggtat

SEQ ID NO: 1523887 - DNA, 15 bp, Homo sapiens
agcaattgccaggta

SEQ ID NO: 1523888 - DNA, 15 bp, Homo sapiens
aagcaattgccaggt

SEQ ID NO: 1523889 - DNA, 15 bp, Homo sapiens
aaagcaattgccagg

SEQ ID NO: 1523890 - DNA, 15 bp, Homo sapiens
aaaagcaattgccag

SEQ ID NO: 1523891 - DNA, 15 bp, Homo sapiens
aaaaagcaattgcca

SEQ ID NO: 1523892 - DNA, 15 bp, Homo sapiens
caaaaagcaattgcc

SEQ ID NO: 1523893 - DNA, 15 bp, Homo sapiens
ccaaaaagcaattgc

SEQ ID NO: 1523894 - DNA, 15 bp, Homo sapiens
cccaaaaagcaattg

SEQ ID NO: 1523895 - DNA, 15 bp, Homo sapiens
acccaaaaagcaatt

SEQ ID NO: 1523896 - DNA, 15 bp, Homo sapiens
cacccaaaaagcaat

SEQ ID NO: 1523897 - DNA, 15 bp, Homo sapiens
ccacccaaaaagcaa

SEQ ID NO: 1523898 - DNA, 15 bp, Homo sapiens
accacccaaaaagca

SEQ ID NO: 1523899 - DNA, 15 bp, Homo sapiens
taccacccaaaaagc

SEQ ID NO: 1523900 - DNA, 15 bp, Homo sapiens
ctaccacccaaaaag

SEQ ID NO: 1523901 - DNA, 15 bp, Homo sapiens
actaccacccaaaaa

SEQ ID NO: 1523902 - DNA, 15 bp, Homo sapiens
tactaccacccaaaa

SEQ ID NO: 1523903 - DNA, 15 bp, Homo sapiens
ctactaccacccaaa

SEQ ID NO: 1523904 - DNA, 15 bp, Homo sapiens
actactaccacccaa

SEQ ID NO: 1523905 - DNA, 15 bp, Homo sapiens
tttactactaccacc

SEQ ID NO: 1523906 - DNA, 15 bp, Homo sapiens
atttactactaccac

SEQ ID NO: 1523907 - DNA, 15 bp, Homo sapiens
tatttactactacca

SEQ ID NO: 1523908 - DNA, 15 bp, Homo sapiens
ttatttactactacc

SEQ ID NO: 1523909 - DNA, 15 bp, Homo sapiens
attatttactactac

SEQ ID NO: 1523910 - DNA, 15 bp, Homo sapiens
cattatttactacta

SEQ ID NO: 1523911 - DNA, 15 bp, Homo sapiens
tcattatttactact

SEQ ID NO: 1523912 - DNA, 15 bp, Homo sapiens
atcattatttactac

SEQ ID NO: 1523913 - DNA, 15 bp, Homo sapiens
tatcattatttacta

SEQ ID NO: 1523914 - DNA, 15 bp, Homo sapiens
ttatcattatttact

SEQ ID NO: 1523915 - DNA, 15 bp, Homo sapiens
attatcattatttac

SEQ ID NO: 1523916 - DNA, 15 bp, Homo sapiens
tattatcattattta

SEQ ID NO: 1523917 - DNA, 15 bp, Homo sapiens
ctattatcattattt

SEQ ID NO: 1523918 - DNA, 15 bp, Homo sapiens
gctattatcattatt

SEQ ID NO: 1523919 - DNA, 15 bp, Homo sapiens
agctattatcattat

SEQ ID NO: 1523920 - DNA, 15 bp, Homo sapiens
tagctattatcatta

SEQ ID NO: 1523921 - DNA, 15 bp, Homo sapiens
ttagctattatcatt

SEQ ID NO: 1523922 - DNA, 15 bp, Homo sapiens
gttagctattatcat

SEQ ID NO: 1523923 - DNA, 15 bp, Homo sapiens
tgttagctattatca

SEQ ID NO: 1523924 - DNA, 15 bp, Homo sapiens
atgttagctattatc

SEQ ID NO: 1523925 - DNA, 15 bp, Homo sapiens
aatgttagctattat

SEQ ID NO: 1523926 - DNA, 15 bp, Homo sapiens
aaatgttagctatta

SEQ ID NO: 1523927 - DNA, 15 bp, Homo sapiens
gaaatgttagctatt

SEQ ID NO: 1523928 - DNA, 15 bp, Homo sapiens
ggaaatgttagctat

SEQ ID NO: 1523929 - DNA, 15 bp, Homo sapiens
aggaaatgttagcta

SEQ ID NO: 1523930 - DNA, 15 bp, Homo sapiens
taggaaatgttagct

SEQ ID NO: 1523931 - DNA, 15 bp, Homo sapiens
ttaggaaatgttagc

SEQ ID NO: 1523932 - DNA, 15 bp, Homo sapiens
cttaggaaatgttag

SEQ ID NO: 1523933 - DNA, 15 bp, Homo sapiens
acttaggaaatgtta

SEQ ID NO: 1523934 - DNA, 15 bp, Homo sapiens
cacttaggaaatgtt

SEQ ID NO: 1523935 - DNA, 15 bp, Homo sapiens
gcacttaggaaatgt

SEQ ID NO: 1523936 - DNA, 15 bp, Homo sapiens
agcacttaggaaatg

SEQ ID NO: 1523937 - DNA, 15 bp, Homo sapiens
aagcacttaggaaat

SEQ ID NO: 1523938 - DNA, 15 bp, Homo sapiens
aaagcacttaggaaa

SEQ ID NO: 1523939 - DNA, 15 bp, Homo sapiens
gaaagcacttaggaa

SEQ ID NO: 1523940 - DNA, 15 bp, Homo sapiens
agaaagcacttagga

SEQ ID NO: 1523941 - DNA, 15 bp, Homo sapiens
gagaaagcacttagg

SEQ ID NO: 1523942 - DNA, 15 bp, Homo sapiens
agagaaagcacttag

SEQ ID NO: 1523943 - DNA, 15 bp, Homo sapiens
cagagaaagcactta

SEQ ID NO: 1523944 - DNA, 15 bp, Homo sapiens
gcagagaaagcactt

SEQ ID NO: 1523945 - DNA, 15 bp, Homo sapiens
tgcagagaaagcact

SEQ ID NO: 1523946 - DNA, 15 bp, Homo sapiens
atgcagagaaagcac

SEQ ID NO: 1523947 - DNA, 15 bp, Homo sapiens
gatgcagagaaagca

SEQ ID NO: 1523948 - DNA, 15 bp, Homo sapiens
tgatgcagagaaagc

SEQ ID NO: 1523949 - DNA, 15 bp, Homo sapiens
ctgatgcagagaaag

SEQ ID NO: 1523950 - DNA, 15 bp, Homo sapiens
cctgatgcagagaaa

SEQ ID NO: 1523951 - DNA, 15 bp, Homo sapiens
tcctgatgcagagaa

SEQ ID NO: 1523952 - DNA, 15 bp, Homo sapiens
ttcctgatgcagaga

SEQ ID NO: 1523953 - DNA, 15 bp, Homo sapiens
tttcctgatgcagag

SEQ ID NO: 1523954 - DNA, 15 bp, Homo sapiens
gtttcctgatgcaga

SEQ ID NO: 1523955 - DNA, 15 bp, Homo sapiens
agtttcctgatgcag

SEQ ID NO: 1523956 - DNA, 15 bp, Homo sapiens
cagtttcctgatgca

SEQ ID NO: 1523957 - DNA, 15 bp, Homo sapiens
acagtttcctgatgc

SEQ ID NO: 1523958 - DNA, 15 bp, Homo sapiens
cacagtttcctgatg

SEQ ID NO: 1523959 - DNA, 15 bp, Homo sapiens
gcacagtttcctgat

SEQ ID NO: 1523960 - DNA, 15 bp, Homo sapiens
tgcacagtttcctga

SEQ ID NO: 1523961 - DNA, 15 bp, Homo sapiens
atgcacagtttcctg

SEQ ID NO: 1523962 - DNA, 15 bp, Homo sapiens
tatgcacagtttcct

SEQ ID NO: 1523963 - DNA, 15 bp, Homo sapiens
atatgcacagtttcc

SEQ ID NO: 1523964 - DNA, 15 bp, Homo sapiens
aatatgcacagtttc

SEQ ID NO: 1523965 - DNA, 15 bp, Homo sapiens
taatatgcacagttt

SEQ ID NO: 1523966 - DNA, 15 bp, Homo sapiens
gtaatatgcacagtt

SEQ ID NO: 1523967 - DNA, 15 bp, Homo sapiens
tgtaatatgcacagt

SEQ ID NO: 1523968 - DNA, 15 bp, Homo sapiens
atgtaatatgcacag

SEQ ID NO: 1523969 - DNA, 15 bp, Homo sapiens
tatgtaatatgcaca

SEQ ID NO: 1523970 - DNA, 15 bp, Homo sapiens
ttatgtaatatgcac

SEQ ID NO: 1523971 - DNA, 15 bp, Homo sapiens
attatgtaatatgca

SEQ ID NO: 1523972 - DNA, 15 bp, Homo sapiens
aattatgtaatatgc

SEQ ID NO: 1523973 - DNA, 15 bp, Homo sapiens
aaattatgtaatatg

SEQ ID NO: 1523974 - DNA, 15 bp, Homo sapiens
gaaattatgtaatat

SEQ ID NO: 1523975 - DNA, 15 bp, Homo sapiens
agaaattatgtaata

SEQ ID NO: 1523976 - DNA, 15 bp, Homo sapiens
gagaaattatgtaat

SEQ ID NO: 1523977 - DNA, 15 bp, Homo sapiens
tgagaaattatgtaa

SEQ ID NO: 1523978 - DNA, 15 bp, Homo sapiens
atgagaaattatgta

SEQ ID NO: 1523979 - DNA, 15 bp, Homo sapiens
aatgagaaattatgt

SEQ ID NO: 1523980 - DNA, 15 bp, Homo sapiens
aaatgagaaattatg

SEQ ID NO: 1523981 - DNA, 15 bp, Homo sapiens
taaatgagaaattat

SEQ ID NO: 1523982 - DNA, 15 bp, Homo sapiens
ttaaatgagaaatta

SEQ ID NO: 1523983 - DNA, 15 bp, Homo sapiens
attaaatgagaaatt

SEQ ID NO: 1523984 - DNA, 15 bp, Homo sapiens
gattaaatgagaaat

SEQ ID NO: 1523985 - DNA, 15 bp, Homo sapiens
agattaaatgagaaa

SEQ ID NO: 1523986 - DNA, 15 bp, Homo sapiens
tagattaaatgagaa

SEQ ID NO: 1523987 - DNA, 15 bp, Homo sapiens
gtagattaaatgaga

SEQ ID NO: 1523988 - DNA, 15 bp, Homo sapiens
tgtagattaaatgag

SEQ ID NO: 1523989 - DNA, 15 bp, Homo sapiens
atgtagattaaatga

SEQ ID NO: 1523990 - DNA, 15 bp, Homo sapiens
tatgtagattaaatg

SEQ ID NO: 1523991 - DNA, 15 bp, Homo sapiens
ttatgtagattaaat

SEQ ID NO: 1523992 - DNA, 15 bp, Homo sapiens
attatgtagattaaa

SEQ ID NO: 1523993 - DNA, 15 bp, Homo sapiens
tattatgtagattaa

SEQ ID NO: 1523994 - DNA, 15 bp, Homo sapiens
ttattatgtagatta

SEQ ID NO: 1523995 - DNA, 15 bp, Homo sapiens
gttattatgtagatt

SEQ ID NO: 1523996 - DNA, 15 bp, Homo sapiens
ggttattatgtagat

SEQ ID NO: 1523997 - DNA, 15 bp, Homo sapiens
aggttattatgtaga

SEQ ID NO: 1523998 - DNA, 15 bp, Homo sapiens
aaggttattatgtag

SEQ ID NO: 1523999 - DNA, 15 bp, Homo sapiens
gaaggttattatgta

SEQ ID NO: 1524000 - DNA, 15 bp, Homo sapiens
agaaggttattatgt

SEQ ID NO: 1524001 - DNA, 15 bp, Homo sapiens
cagaaggttattatg

SEQ ID NO: 1524002 - DNA, 15 bp, Homo sapiens
tcagaaggttattat

SEQ ID NO: 1524003 - DNA, 15 bp, Homo sapiens
ctcagaaggttatta

SEQ ID NO: 1524004 - DNA, 15 bp, Homo sapiens
tctcagaaggttatt

SEQ ID NO: 1524005 - DNA, 15 bp, Homo sapiens
atctcagaaggttat

SEQ ID NO: 1524006 - DNA, 15 bp, Homo sapiens
tatctcagaaggtta

SEQ ID NO: 1524007 - DNA, 15 bp, Homo sapiens
atatctcagaaggtt

SEQ ID NO: 1524008 - DNA, 15 bp, Homo sapiens
aatatctcagaaggt

SEQ ID NO: 1524009 - DNA, 15 bp, Homo sapiens
taatatctcagaagg

SEQ ID NO: 1524010 - DNA, 15 bp, Homo sapiens
ataatatctcagaag

SEQ ID NO: 1524011 - DNA, 15 bp, Homo sapiens
aataatatctcagaa

SEQ ID NO: 1524012 - DNA, 15 bp, Homo sapiens
taataatatctcaga

SEQ ID NO: 1524013 - DNA, 15 bp, Homo sapiens
ttaataatatctcag

SEQ ID NO: 1524014 - DNA, 15 bp, Homo sapiens
gttaataatatctca

SEQ ID NO: 1524015 - DNA, 15 bp, Homo sapiens
tgttaataatatctc

SEQ ID NO: 1524016 - DNA, 15 bp, Homo sapiens
ttgttaataatatct

SEQ ID NO: 1524017 - DNA, 15 bp, Homo sapiens
attgttaataatatc

SEQ ID NO: 1524018 - DNA, 15 bp, Homo sapiens
aattgttaataatat

SEQ ID NO: 1524019 - DNA, 15 bp, Homo sapiens
taattgttaataata

SEQ ID NO: 1524020 - DNA, 15 bp, Homo sapiens
ttaattgttaataat

SEQ ID NO: 1524021 - DNA, 15 bp, Homo sapiens
attaattgttaataa

SEQ ID NO: 1524022 - DNA, 15 bp, Homo sapiens
aattaattgttaata

SEQ ID NO: 1524023 - DNA, 15 bp, Homo sapiens
caattaattgttaat

SEQ ID NO: 1524024 - DNA, 15 bp, Homo sapiens
tcaattaattgttaa

SEQ ID NO: 1524025 - DNA, 15 bp, Homo sapiens
gtcaattaattgtta

SEQ ID NO: 1524026 - DNA, 15 bp, Homo sapiens
cgtcaattaattgtt

SEQ ID NO: 1524027 - DNA, 15 bp, Homo sapiens
acgtcaattaattgt

SEQ ID NO: 1524028 - DNA, 15 bp, Homo sapiens
tacgtcaattaattg

SEQ ID NO: 1524029 - DNA, 15 bp, Homo sapiens
gtacgtcaattaatt

SEQ ID NO: 1524030 - DNA, 15 bp, Homo sapiens
cgtacgtcaattaat

SEQ ID NO: 1524031 - DNA, 15 bp, Homo sapiens
acgtacgtcaattaa

SEQ ID NO: 1524032 - DNA, 15 bp, Homo sapiens
tacgtacgtcaatta

SEQ ID NO: 1524033 - DNA, 15 bp, Homo sapiens
atacgtacgtcaatt

SEQ ID NO: 1524034 - DNA, 15 bp, Homo sapiens
tatacgtacgtcaat

SEQ ID NO: 1524035 - DNA, 15 bp, Homo sapiens
ttatacgtacgtcaa

SEQ ID NO: 1524036 - DNA, 15 bp, Homo sapiens
tttatacgtacgtca

SEQ ID NO: 1524037 - DNA, 15 bp, Homo sapiens
gtttatacgtacgtc

SEQ ID NO: 1524038 - DNA, 15 bp, Homo sapiens
agtttatacgtacgt

SEQ ID NO: 1524039 - DNA, 15 bp, Homo sapiens
cagtttatacgtacg

SEQ ID NO: 1524040 - DNA, 15 bp, Homo sapiens
tcagtttatacgtac

SEQ ID NO: 1524041 - DNA, 15 bp, Homo sapiens
ttcagtttatacgta

SEQ ID NO: 1524042 - DNA, 15 bp, Homo sapiens
tttcagtttatacgt

SEQ ID NO: 1524043 - DNA, 15 bp, Homo sapiens
gtttcagtttatacg

SEQ ID NO: 1524044 - DNA, 15 bp, Homo sapiens
ggtttcagtttatac

SEQ ID NO: 1524045 - DNA, 15 bp, Homo sapiens
gggtttcagtttata

SEQ ID NO: 1524046 - DNA, 15 bp, Homo sapiens
tgggtttcagtttat

SEQ ID NO: 1524047 - DNA, 15 bp, Homo sapiens
ttgggtttcagttta

SEQ ID NO: 1524048 - DNA, 15 bp, Homo sapiens
tttgggtttcagttt

SEQ ID NO: 1524049 - DNA, 15 bp, Homo sapiens
gtttgggtttcagtt

SEQ ID NO: 1524050 - DNA, 15 bp, Homo sapiens
tgtttgggtttcagt

SEQ ID NO: 1524051 - DNA, 15 bp, Homo sapiens
atgtttgggtttcag

SEQ ID NO: 1524052 - DNA, 15 bp, Homo sapiens
catgtttgggtttca

SEQ ID NO: 1524053 - DNA, 15 bp, Homo sapiens
ccatgtttgggtttc

SEQ ID NO: 1524054 - DNA, 15 bp, Homo sapiens
gccatgtttgggttt

SEQ ID NO: 1524055 - DNA, 15 bp, Homo sapiens
agccatgtttgggtt

SEQ ID NO: 1524056 - DNA, 15 bp, Homo sapiens
tagccatgtttgggt

SEQ ID NO: 1524057 - DNA, 15 bp, Homo sapiens
atagccatgtttggg

SEQ ID NO: 1524058 - DNA, 15 bp, Homo sapiens
gatagccatgtttgg

SEQ ID NO: 1524059 - DNA, 15 bp, Homo sapiens
tgatagccatgtttg

SEQ ID NO: 1524060 - DNA, 15 bp, Homo sapiens
ctgatagccatgttt

SEQ ID NO: 1524061 - DNA, 15 bp, Homo sapiens
tctgatagccatgtt

SEQ ID NO: 1524062 - DNA, 15 bp, Homo sapiens
ttctgatagccatgt

SEQ ID NO: 1524063 - DNA, 15 bp, Homo sapiens
attctgatagccatg

SEQ ID NO: 1524064 - DNA, 15 bp, Homo sapiens
cattctgatagccat

SEQ ID NO: 1524065 - DNA, 15 bp, Homo sapiens
tcattctgatagcca

SEQ ID NO: 1524066 - DNA, 15 bp, Homo sapiens
atcattctgatagcc

SEQ ID NO: 1524067 - DNA, 15 bp, Homo sapiens
gatcattctgatagc

SEQ ID NO: 1524068 - DNA, 15 bp, Homo sapiens
agatcattctgatag

SEQ ID NO: 1524069 - DNA, 15 bp, Homo sapiens
cagatcattctgata

SEQ ID NO: 1524070 - DNA, 15 bp, Homo sapiens
ccagatcattctgat

SEQ ID NO: 1524071 - DNA, 15 bp, Homo sapiens
tccagatcattctga

SEQ ID NO: 1524072 - DNA, 15 bp, Homo sapiens
ttccagatcattctg

SEQ ID NO: 1524073 - DNA, 15 bp, Homo sapiens
gttccagatcattct

SEQ ID NO: 1524074 - DNA, 15 bp, Homo sapiens
tgttccagatcattc

SEQ ID NO: 1524075 - DNA, 15 bp, Homo sapiens
atgttccagatcatt

SEQ ID NO: 1524076 - DNA, 15 bp, Homo sapiens
aatgttccagatcat

SEQ ID NO: 1524077 - DNA, 15 bp, Homo sapiens
taatgttccagatca

SEQ ID NO: 1524078 - DNA, 15 bp, Homo sapiens
ttaatgttccagatc

SEQ ID NO: 1524079 - DNA, 15 bp, Homo sapiens
tttaatgttccagat

SEQ ID NO: 1524080 - DNA, 15 bp, Homo sapiens
ttttaatgttccaga

SEQ ID NO: 1524081 - DNA, 15 bp, Homo sapiens
gttttaatgttccag

SEQ ID NO: 1524082 - DNA, 15 bp, Homo sapiens
tgttttaatgttcca

SEQ ID NO: 1524083 - DNA, 15 bp, Homo sapiens
ttgttttaatgttcc

SEQ ID NO: 1524084 - DNA, 15 bp, Homo sapiens
tttgttttaatgttc

SEQ ID NO: 1524085 - DNA, 15 bp, Homo sapiens
gtttgttttaatgtt

SEQ ID NO: 1524086 - DNA, 15 bp, Homo sapiens
tgtttgttttaatgt

SEQ ID NO: 1524087 - DNA, 15 bp, Homo sapiens
atgtttgttttaatg

SEQ ID NO: 1524088 - DNA, 15 bp, Homo sapiens
tatgtttgttttaat

SEQ ID NO: 1524089 - DNA, 15 bp, Homo sapiens
atatgtttgttttaa

SEQ ID NO: 1524090 - DNA, 15 bp, Homo sapiens
gatatgtttgtttta

SEQ ID NO: 1524091 - DNA, 15 bp, Homo sapiens
ggatatgtttgtttt

SEQ ID NO: 1524092 - DNA, 15 bp, Homo sapiens
gggatatgtttgttt

SEQ ID NO: 1524093 - DNA, 15 bp, Homo sapiens
ggggatatgtttgtt

SEQ ID NO: 1524094 - DNA, 15 bp, Homo sapiens
tggggatatgtttgt

SEQ ID NO: 1524095 - DNA, 15 bp, Homo sapiens
ctggggatatgtttg

SEQ ID NO: 1524096 - DNA, 15 bp, Homo sapiens
gctggggatatgttt

SEQ ID NO: 1524097 - DNA, 15 bp, Homo sapiens
ggctggggatatgtt

SEQ ID NO: 1524098 - DNA, 15 bp, Homo sapiens
gggctggggatatgt

SEQ ID NO: 1524099 - DNA, 15 bp, Homo sapiens
ggggctggggatatg

SEQ ID NO: 1524100 - DNA, 15 bp, Homo sapiens
gggggctggggatat

SEQ ID NO: 1524101 - DNA, 15 bp, Homo sapiens
tgggggctggggata

SEQ ID NO: 1524102 - DNA, 15 bp, Homo sapiens
atgggggctggggat

SEQ ID NO: 1524103 - DNA, 15 bp, Homo sapiens
aatgggggctgggga

SEQ ID NO: 1524104 - DNA, 15 bp, Homo sapiens
aaatgggggctgggg

SEQ ID NO: 1524105 - DNA, 15 bp, Homo sapiens
gaaatgggggctggg

SEQ ID NO: 1524106 - DNA, 15 bp, Homo sapiens
ggaaatgggggctgg

SEQ ID NO: 1524107 - DNA, 15 bp, Homo sapiens
tggaaatgggggctg

SEQ ID NO: 1524108 - DNA, 15 bp, Homo sapiens
ttggaaatgggggct

SEQ ID NO: 1524109 - DNA, 15 bp, Homo sapiens
tttggaaatgggggc

SEQ ID NO: 1524110 - DNA, 15 bp, Homo sapiens
gtttggaaatggggg

SEQ ID NO: 1524111 - DNA, 15 bp, Homo sapiens
ggtttggaaatgggg

SEQ ID NO: 1524112 - DNA, 15 bp, Homo sapiens
tggtttggaaatggg

SEQ ID NO: 1524113 - DNA, 15 bp, Homo sapiens
ttggtttggaaatgg

SEQ ID NO: 1524114 - DNA, 15 bp, Homo sapiens
tttggtttggaaatg

SEQ ID NO: 1524115 - DNA, 15 bp, Homo sapiens
ttttggtttggaaat

SEQ ID NO: 1524116 - DNA, 15 bp, Homo sapiens
attttggtttggaaa

SEQ ID NO: 1524117 - DNA, 15 bp, Homo sapiens
gattttggtttggaa

SEQ ID NO: 1524118 - DNA, 15 bp, Homo sapiens
agattttggtttgga

SEQ ID NO: 1524119 - DNA, 15 bp, Homo sapiens
gagattttggtttgg

SEQ ID NO: 1524120 - DNA, 15 bp, Homo sapiens
tgagattttggtttg

SEQ ID NO: 1524121 - DNA, 15 bp, Homo sapiens
ctgagattttggttt

SEQ ID NO: 1524122 - DNA, 15 bp, Homo sapiens
cctgagattttggtt

SEQ ID NO: 1524123 - DNA, 15 bp, Homo sapiens
ccctgagattttggt

SEQ ID NO: 1524124 - DNA, 15 bp, Homo sapiens
cccctgagattttgg

SEQ ID NO: 1524125 - DNA, 15 bp, Homo sapiens
gcccctgagattttg

SEQ ID NO: 1524126 - DNA, 15 bp, Homo sapiens
tgcccctgagatttt

SEQ ID NO: 1524127 - DNA, 15 bp, Homo sapiens
ctgcccctgagattt

SEQ ID NO: 1524128 - DNA, 15 bp, Homo sapiens
cctgcccctgagatt

SEQ ID NO: 1524129 - DNA, 15 bp, Homo sapiens
ccctgcccctgagat

SEQ ID NO: 1524130 - DNA, 15 bp, Homo sapiens
gccctgcccctgaga

SEQ ID NO: 1524131 - DNA, 15 bp, Homo sapiens
ggccctgcccctgag

SEQ ID NO: 1524132 - DNA, 15 bp, Homo sapiens
aggccctgcccctga

SEQ ID NO: 1524133 - DNA, 15 bp, Homo sapiens
aaggccctgcccctg

SEQ ID NO: 1524134 - DNA, 15 bp, Homo sapiens
taaggccctgcccct

SEQ ID NO: 1524135 - DNA, 15 bp, Homo sapiens
ataaggccctgcccc

SEQ ID NO: 1524136 - DNA, 15 bp, Homo sapiens
aataaggccctgccc

SEQ ID NO: 1524137 - DNA, 15 bp, Homo sapiens
aaataaggccctgcc

SEQ ID NO: 1524138 - DNA, 15 bp, Homo sapiens
taaataaggccctgc

SEQ ID NO: 1524139 - DNA, 15 bp, Homo sapiens
ataaataaggccctg

SEQ ID NO: 1524140 - DNA, 15 bp, Homo sapiens
tataaataaggccct

SEQ ID NO: 1524141 - DNA, 15 bp, Homo sapiens
atataaataaggccc

SEQ ID NO: 1524142 - DNA, 15 bp, Homo sapiens
tatataaataaggcc

SEQ ID NO: 1524143 - DNA, 15 bp, Homo sapiens
atatataaataaggc

SEQ ID NO: 1524144 - DNA, 15 bp, Homo sapiens
aatatataaataagg

SEQ ID NO: 1524145 - DNA, 15 bp, Homo sapiens
aaatatataaataag

SEQ ID NO: 1524146 - DNA, 15 bp, Homo sapiens
taaatatataaataa

SEQ ID NO: 1524147 - DNA, 15 bp, Homo sapiens
gttaaatatataaat

SEQ ID NO: 1524148 - DNA, 15 bp, Homo sapiens
tgttaaatatataaa

SEQ ID NO: 1524149 - DNA, 15 bp, Homo sapiens
ctgttaaatatataa

SEQ ID NO: 1524150 - DNA, 15 bp, Homo sapiens
cctgttaaatatata

SEQ ID NO: 1524151 - DNA, 15 bp, Homo sapiens
gcctgttaaatatat

SEQ ID NO: 1524152 - DNA, 15 bp, Homo sapiens
tgcctgttaaatata

SEQ ID NO: 1524153 - DNA, 15 bp, Homo sapiens
gtgcctgttaaatat

SEQ ID NO: 1524154 - DNA, 15 bp, Homo sapiens
agtgcctgttaaata

SEQ ID NO: 1524155 - DNA, 15 bp, Homo sapiens
gagtgcctgttaaat

SEQ ID NO: 1524156 - DNA, 15 bp, Homo sapiens
ggagtgcctgttaaa

SEQ ID NO: 1524157 - DNA, 15 bp, Homo sapiens
tggagtgcctgttaa

SEQ ID NO: 1524158 - DNA, 15 bp, Homo sapiens
ttggagtgcctgtta

SEQ ID NO: 1524159 - DNA, 15 bp, Homo sapiens
cttggagtgcctgtt

SEQ ID NO: 1524160 - DNA, 15 bp, Homo sapiens
acttggagtgcctgt

SEQ ID NO: 1524161 - DNA, 15 bp, Homo sapiens
cacttggagtgcctg

SEQ ID NO: 1524162 - DNA, 15 bp, Homo sapiens
acacttggagtgcct

SEQ ID NO: 1524163 - DNA, 15 bp, Homo sapiens
aacacttggagtgcc

SEQ ID NO: 1524164 - DNA, 15 bp, Homo sapiens
aaacacttggagtgc

SEQ ID NO: 1524165 - DNA, 15 bp, Homo sapiens
gaaacacttggagtg

SEQ ID NO: 1524166 - DNA, 15 bp, Homo sapiens
tgaaacacttggagt

SEQ ID NO: 1524167 - DNA, 15 bp, Homo sapiens
atgaaacacttggag

SEQ ID NO: 1524168 - DNA, 15 bp, Homo sapiens
aatgaaacacttgga

SEQ ID NO: 1524169 - DNA, 15 bp, Homo sapiens
aaatgaaacacttgg

SEQ ID NO: 1524170 - DNA, 15 bp, Homo sapiens
taaatgaaacacttg

SEQ ID NO: 1524171 - DNA, 15 bp, Homo sapiens
ataaatgaaacactt

SEQ ID NO: 1524172 - DNA, 15 bp, Homo sapiens
aataaatgaaacact

SEQ ID NO: 1524173 - DNA, 15 bp, Homo sapiens
taataaatgaaacac

SEQ ID NO: 1524174 - DNA, 15 bp, Homo sapiens
gtaataaatgaaaca

SEQ ID NO: 1524175 - DNA, 15 bp, Homo sapiens
agtaataaatgaaac

SEQ ID NO: 1524176 - DNA, 15 bp, Homo sapiens
tagtaataaatgaaa

SEQ ID NO: 1524177 - DNA, 15 bp, Homo sapiens
ttagtaataaatgaa

SEQ ID NO: 1524178 - DNA, 15 bp, Homo sapiens
tttagtaataaatga

SEQ ID NO: 1524179 - DNA, 15 bp, Homo sapiens
ctttagtaataaatg

SEQ ID NO: 1524180 - DNA, 15 bp, Homo sapiens
actttagtaataaat

SEQ ID NO: 1524181 - DNA, 15 bp, Homo sapiens
aactttagtaataaa

SEQ ID NO: 1524182 - DNA, 15 bp, Homo sapiens
aaactttagtaataa

SEQ ID NO: 1524183 - DNA, 15 bp, Homo sapiens
caaactttagtaata

SEQ ID NO: 1524184 - DNA, 15 bp, Homo sapiens
ccaaactttagtaat

SEQ ID NO: 1524185 - DNA, 15 bp, Homo sapiens
cccaaactttagtaa

SEQ ID NO: 1524186 - DNA, 15 bp, Homo sapiens
tcccaaactttagta

SEQ ID NO: 1524187 - DNA, 15 bp, Homo sapiens
ttcccaaactttagt

SEQ ID NO: 1524188 - DNA, 15 bp, Homo sapiens
attcccaaactttag

SEQ ID NO: 1524189 - DNA, 15 bp, Homo sapiens
gattcccaaacttta

SEQ ID NO: 1524190 - DNA, 15 bp, Homo sapiens
agattcccaaacttt

SEQ ID NO: 1524191 - DNA, 15 bp, Homo sapiens
gagattcccaaactt

SEQ ID NO: 1524192 - DNA, 15 bp, Homo sapiens
tgagattcccaaact

SEQ ID NO: 1524193 - DNA, 15 bp, Homo sapiens
gtgagattcccaaac

SEQ ID NO: 1524194 - DNA, 15 bp, Homo sapiens
agtgagattcccaaa

SEQ ID NO: 1524195 - DNA, 15 bp, Homo sapiens
cagtgagattcccaa

SEQ ID NO: 1524196 - DNA, 15 bp, Homo sapiens
ccagtgagattccca

SEQ ID NO: 1524197 - DNA, 15 bp, Homo sapiens
cccagtgagattccc

SEQ ID NO: 1524198 - DNA, 15 bp, Homo sapiens
acccagtgagattcc

SEQ ID NO: 1524199 - DNA, 15 bp, Homo sapiens
gacccagtgagattc

SEQ ID NO: 1524200 - DNA, 15 bp, Homo sapiens
tgacccagtgagatt

SEQ ID NO: 1524201 - DNA, 15 bp, Homo sapiens
atgacccagtgagat

SEQ ID NO: 1524202 - DNA, 15 bp, Homo sapiens
catgacccagtgaga

SEQ ID NO: 1524203 - DNA, 15 bp, Homo sapiens
acatgacccagtgag

SEQ ID NO: 1524204 - DNA, 15 bp, Homo sapiens
tacatgacccagtga

SEQ ID NO: 1524205 - DNA, 15 bp, Homo sapiens
gtacatgacccagtg

SEQ ID NO: 1524206 - DNA, 15 bp, Homo sapiens
agtacatgacccagt

SEQ ID NO: 1524207 - DNA, 15 bp, Homo sapiens
taagtacatgaccca

SEQ ID NO: 1524208 - DNA, 15 bp, Homo sapiens
ttaagtacatgaccc

SEQ ID NO: 1524209 - DNA, 15 bp, Homo sapiens
attaagtacatgacc

SEQ ID NO: 1524210 - DNA, 15 bp, Homo sapiens
aattaagtacatgac

SEQ ID NO: 1524211 - DNA, 15 bp, Homo sapiens
gaattaagtacatga

SEQ ID NO: 1524212 - DNA, 15 bp, Homo sapiens
tgaattaagtacatg

SEQ ID NO: 1524213 - DNA, 15 bp, Homo sapiens
atgaattaagtacat

SEQ ID NO: 1524214 - DNA, 15 bp, Homo sapiens
catgaattaagtaca

SEQ ID NO: 1524215 - DNA, 15 bp, Homo sapiens
ccatgaattaagtac

SEQ ID NO: 1524216 - DNA, 15 bp, Homo sapiens
accatgaattaagta

SEQ ID NO: 1524217 - DNA, 15 bp, Homo sapiens
taccatgaattaagt

SEQ ID NO: 1524218 - DNA, 15 bp, Homo sapiens
ctaccatgaattaag

SEQ ID NO: 1524219 - DNA, 15 bp, Homo sapiens
gctaccatgaattaa

SEQ ID NO: 1524220 - DNA, 15 bp, Homo sapiens
tgctaccatgaatta

SEQ ID NO: 1524221 - DNA, 15 bp, Homo sapiens
gtgctaccatgaatt

SEQ ID NO: 1524222 - DNA, 15 bp, Homo sapiens
tgtgctaccatgaat

SEQ ID NO: 1524223 - DNA, 15 bp, Homo sapiens
ttgtgctaccatgaa

SEQ ID NO: 1524224 - DNA, 15 bp, Homo sapiens
gttgtgctaccatga

SEQ ID NO: 1524225 - DNA, 15 bp, Homo sapiens
agttgtgctaccatg

SEQ ID NO: 1524226 - DNA, 15 bp, Homo sapiens
tagttgtgctaccat

SEQ ID NO: 1524227 - DNA, 15 bp, Homo sapiens
ctagttgtgctacca

SEQ ID NO: 1524228 - DNA, 15 bp, Homo sapiens
actagttgtgctacc

SEQ ID NO: 1524229 - DNA, 15 bp, Homo sapiens
tactagttgtgctac

SEQ ID NO: 1524230 - DNA, 15 bp, Homo sapiens
ttactagttgtgcta

SEQ ID NO: 1524231 - DNA, 15 bp, Homo sapiens
cttactagttgtgct

SEQ ID NO: 1524232 - DNA, 15 bp, Homo sapiens
tcttactagttgtgc

SEQ ID NO: 1524233 - DNA, 15 bp, Homo sapiens
ttcttactagttgtg

SEQ ID NO: 1524234 - DNA, 15 bp, Homo sapiens
attcttactagttgt

SEQ ID NO: 1524235 - DNA, 15 bp, Homo sapiens
gattcttactagttg

SEQ ID NO: 1524236 - DNA, 15 bp, Homo sapiens
tgattcttactagtt

SEQ ID NO: 1524237 - DNA, 15 bp, Homo sapiens
ctgattcttactagt

SEQ ID NO: 1524238 - DNA, 15 bp, Homo sapiens
tctgattcttactag

SEQ ID NO: 1524239 - DNA, 15 bp, Homo sapiens
ttctgattcttacta

SEQ ID NO: 1524240 - DNA, 15 bp, Homo sapiens
attctgattcttact

SEQ ID NO: 1524241 - DNA, 15 bp, Homo sapiens
aattctgattcttac

SEQ ID NO: 1524242 - DNA, 15 bp, Homo sapiens
gaattctgattctta

SEQ ID NO: 1524243 - DNA, 15 bp, Homo sapiens
cgaattctgattctt

SEQ ID NO: 1524244 - DNA, 15 bp, Homo sapiens
ccgaattctgattct

SEQ ID NO: 1524245 - DNA, 15 bp, Homo sapiens
accgaattctgattc

SEQ ID NO: 1524246 - DNA, 15 bp, Homo sapiens
aaccgaattctgatt

SEQ ID NO: 1524247 - DNA, 15 bp, Homo sapiens
aaaccgaattctgat

SEQ ID NO: 1524248 - DNA, 15 bp, Homo sapiens
gaaaccgaattctga

SEQ ID NO: 1524249 - DNA, 15 bp, Homo sapiens
tgaaaccgaattctg

SEQ ID NO: 1524250 - DNA, 15 bp, Homo sapiens
ttgaaaccgaattct

SEQ ID NO: 1524251 - DNA, 15 bp, Homo sapiens
tttgaaaccgaattc

SEQ ID NO: 1524252 - DNA, 15 bp, Homo sapiens
gtttgaaaccgaatt

SEQ ID NO: 1524253 - DNA, 15 bp, Homo sapiens
ggtttgaaaccgaat

SEQ ID NO: 1524254 - DNA, 15 bp, Homo sapiens
aggtttgaaaccgaa

SEQ ID NO: 1524255 - DNA, 15 bp, Homo sapiens
taggtttgaaaccga

SEQ ID NO: 1524256 - DNA, 15 bp, Homo sapiens
ttaggtttgaaaccg

SEQ ID NO: 1524257 - DNA, 15 bp, Homo sapiens
cttaggtttgaaacc

SEQ ID NO: 1524258 - DNA, 15 bp, Homo sapiens
gcttaggtttgaaac

SEQ ID NO: 1524259 - DNA, 15 bp, Homo sapiens
ggcttaggtttgaaa

SEQ ID NO: 1524260 - DNA, 15 bp, Homo sapiens
tggcttaggtttgaa

SEQ ID NO: 1524261 - DNA, 15 bp, Homo sapiens
ttggcttaggtttga

SEQ ID NO: 1524262 - DNA, 15 bp, Homo sapiens
tttggcttaggtttg

SEQ ID NO: 1524263 - DNA, 15 bp, Homo sapiens
ctttggcttaggttt

SEQ ID NO: 1524264 - DNA, 15 bp, Homo sapiens
gctttggcttaggtt

SEQ ID NO: 1524265 - DNA, 15 bp, Homo sapiens
agctttggcttaggt

SEQ ID NO: 1524266 - DNA, 15 bp, Homo sapiens
gagctttggcttagg

SEQ ID NO: 1524267 - DNA, 15 bp, Homo sapiens
agagctttggcttag

SEQ ID NO: 1524268 - DNA, 15 bp, Homo sapiens
aagagctttggctta

SEQ ID NO: 1524269 - DNA, 15 bp, Homo sapiens
taagagctttggctt

SEQ ID NO: 1524270 - DNA, 15 bp, Homo sapiens
ttaagagctttggct

SEQ ID NO: 1524271 - DNA, 15 bp, Homo sapiens
gttaagagctttggc

SEQ ID NO: 1524272 - DNA, 15 bp, Homo sapiens
tgttaagagctttgg

SEQ ID NO: 1524273 - DNA, 15 bp, Homo sapiens
ttgttaagagctttg

SEQ ID NO: 1524274 - DNA, 15 bp, Homo sapiens
tttgttaagagcttt

SEQ ID NO: 1524275 - DNA, 15 bp, Homo sapiens
atttgttaagagctt

SEQ ID NO: 1524276 - DNA, 15 bp, Homo sapiens
catttgttaagagct

SEQ ID NO: 1524277 - DNA, 15 bp, Homo sapiens
gcatttgttaagagc

SEQ ID NO: 1524278 - DNA, 15 bp, Homo sapiens
tgcatttgttaagag

SEQ ID NO: 1524279 - DNA, 15 bp, Homo sapiens
gtgcatttgttaaga

SEQ ID NO: 1524280 - DNA, 15 bp, Homo sapiens
agtgcatttgttaag

SEQ ID NO: 1524281 - DNA, 15 bp, Homo sapiens
tagtgcatttgttaa

SEQ ID NO: 1524282 - DNA, 15 bp, Homo sapiens
atagtgcatttgtta

SEQ ID NO: 1524283 - DNA, 15 bp, Homo sapiens
aatagtgcatttgtt

SEQ ID NO: 1524284 - DNA, 15 bp, Homo sapiens
taatagtgcatttgt

SEQ ID NO: 1524285 - DNA, 15 bp, Homo sapiens
ttaatagtgcatttg

SEQ ID NO: 1524286 - DNA, 15 bp, Homo sapiens
attaatagtgcattt

SEQ ID NO: 1524287 - DNA, 15 bp, Homo sapiens
aattaatagtgcatt

SEQ ID NO: 1524288 - DNA, 15 bp, Homo sapiens
taattaatagtgcat

SEQ ID NO: 1524289 - DNA, 15 bp, Homo sapiens
gtaattaatagtgca

SEQ ID NO: 1524290 - DNA, 15 bp, Homo sapiens
tgtaattaatagtgc

SEQ ID NO: 1524291 - DNA, 15 bp, Homo sapiens
atgtaattaatagtg

SEQ ID NO: 1524292 - DNA, 15 bp, Homo sapiens
catgtaattaatagt

SEQ ID NO: 1524293 - DNA, 15 bp, Homo sapiens
gcatgtaattaatag

SEQ ID NO: 1524294 - DNA, 15 bp, Homo sapiens
agcatgtaattaata

SEQ ID NO: 1524295 - DNA, 15 bp, Homo sapiens
aagcatgtaattaat

SEQ ID NO: 1524296 - DNA, 15 bp, Homo sapiens
taagcatgtaattaa

SEQ ID NO: 1524297 - DNA, 15 bp, Homo sapiens
ataagcatgtaatta

SEQ ID NO: 1524298 - DNA, 15 bp, Homo sapiens
aataagcatgtaatt

SEQ ID NO: 1524299 - DNA, 15 bp, Homo sapiens
taataagcatgtaat

SEQ ID NO: 1524300 - DNA, 15 bp, Homo sapiens
gtaataagcatgtaa

SEQ ID NO: 1524301 - DNA, 15 bp, Homo sapiens
agtaataagcatgta

SEQ ID NO: 1524302 - DNA, 15 bp, Homo sapiens
tagtaataagcatgt

SEQ ID NO: 1524303 - DNA, 15 bp, Homo sapiens
atagtaataagcatg

SEQ ID NO: 1524304 - DNA, 15 bp, Homo sapiens
aatagtaataagcat

SEQ ID NO: 1524305 - DNA, 15 bp, Homo sapiens
taatagtaataagca

SEQ ID NO: 1524306 - DNA, 15 bp, Homo sapiens
ataatagtaataagc

SEQ ID NO: 1524307 - DNA, 15 bp, Homo sapiens
tataatagtaataag

SEQ ID NO: 1524308 - DNA, 15 bp, Homo sapiens
ttataatagtaataa

SEQ ID NO: 1524309 - DNA, 15 bp, Homo sapiens
attataatagtaata

SEQ ID NO: 1524310 - DNA, 15 bp, Homo sapiens
aattataatagtaat

SEQ ID NO: 1524311 - DNA, 15 bp, Homo sapiens
caattataatagtaa

SEQ ID NO: 1524312 - DNA, 15 bp, Homo sapiens
acaattataatagta

SEQ ID NO: 1524313 - DNA, 15 bp, Homo sapiens
tacaattataatagt

SEQ ID NO: 1524314 - DNA, 15 bp, Homo sapiens
atacaattataatag

SEQ ID NO: 1524315 - DNA, 15 bp, Homo sapiens
catacaattataata

SEQ ID NO: 1524316 - DNA, 15 bp, Homo sapiens
gcatacaattataat

SEQ ID NO: 1524317 - DNA, 15 bp, Homo sapiens
agcatacaattataa

SEQ ID NO: 1524318 - DNA, 15 bp, Homo sapiens
aagcatacaattata

SEQ ID NO: 1524319 - DNA, 15 bp, Homo sapiens
caagcatacaattat

SEQ ID NO: 1524320 - DNA, 15 bp, Homo sapiens
ccaagcatacaatta

SEQ ID NO: 1524321 - DNA, 15 bp, Homo sapiens
cccaagcatacaatt

SEQ ID NO: 1524322 - DNA, 15 bp, Homo sapiens
acccaagcatacaat

SEQ ID NO: 1524323 - DNA, 15 bp, Homo sapiens
tacccaagcatacaa

SEQ ID NO: 1524324 - DNA, 15 bp, Homo sapiens
ttacccaagcataca

SEQ ID NO: 1524325 - DNA, 15 bp, Homo sapiens
tttacccaagcatac

SEQ ID NO: 1524326 - DNA, 15 bp, Homo sapiens
atttacccaagcata

SEQ ID NO: 1524327 - DNA, 15 bp, Homo sapiens
gatttacccaagcat

SEQ ID NO: 1524328 - DNA, 15 bp, Homo sapiens
agatttacccaagca

SEQ ID NO: 1524329 - DNA, 15 bp, Homo sapiens
aagatttacccaagc

SEQ ID NO: 1524330 - DNA, 15 bp, Homo sapiens
aaagatttacccaag

SEQ ID NO: 1524331 - DNA, 15 bp, Homo sapiens
caaagatttacccaa

SEQ ID NO: 1524332 - DNA, 15 bp, Homo sapiens
acaaagatttaccca

SEQ ID NO: 1524333 - DNA, 15 bp, Homo sapiens
tacaaagatttaccc

SEQ ID NO: 1524334 - DNA, 15 bp, Homo sapiens
ctacaaagatttacc

SEQ ID NO: 1524335 - DNA, 15 bp, Homo sapiens
tctacaaagatttac

SEQ ID NO: 1524336 - DNA, 15 bp, Homo sapiens
atctacaaagattta

SEQ ID NO: 1524337 - DNA, 15 bp, Homo sapiens
catctacaaagattt

SEQ ID NO: 1524338 - DNA, 15 bp, Homo sapiens
tcatctacaaagatt

SEQ ID NO: 1524339 - DNA, 15 bp, Homo sapiens
ctcatctacaaagat

SEQ ID NO: 1524340 - DNA, 15 bp, Homo sapiens
gctcatctacaaaga

SEQ ID NO: 1524341 - DNA, 15 bp, Homo sapiens
tgctcatctacaaag

SEQ ID NO: 1524342 - DNA, 15 bp, Homo sapiens
atgctcatctacaaa

SEQ ID NO: 1524343 - DNA, 15 bp, Homo sapiens
catgctcatctacaa

SEQ ID NO: 1524344 - DNA, 15 bp, Homo sapiens
tcatgctcatctaca

SEQ ID NO: 1524345 - DNA, 15 bp, Homo sapiens
ttcatgctcatctac

SEQ ID NO: 1524346 - DNA, 15 bp, Homo sapiens
tttcatgctcatcta

SEQ ID NO: 1524347 - DNA, 15 bp, Homo sapiens
ttttcatgctcatct

SEQ ID NO: 1524348 - DNA, 15 bp, Homo sapiens
gttttcatgctcatc

SEQ ID NO: 1524349 - DNA, 15 bp, Homo sapiens
ggttttcatgctcat

SEQ ID NO: 1524350 - DNA, 15 bp, Homo sapiens
aggttttcatgctca

SEQ ID NO: 1524351 - DNA, 15 bp, Homo sapiens
taggttttcatgctc

SEQ ID NO: 1524352 - DNA, 15 bp, Homo sapiens
ttaggttttcatgct

SEQ ID NO: 1524353 - DNA, 15 bp, Homo sapiens
gttaggttttcatgc

SEQ ID NO: 1524354 - DNA, 15 bp, Homo sapiens
ggttaggttttcatg

SEQ ID NO: 1524355 - DNA, 15 bp, Homo sapiens
tggttaggttttcat

SEQ ID NO: 1524356 - DNA, 15 bp, Homo sapiens
ttggttaggttttca

SEQ ID NO: 1524357 - DNA, 15 bp, Homo sapiens
gttggttaggttttc

SEQ ID NO: 1524358 - DNA, 15 bp, Homo sapiens
tgttggttaggtttt

SEQ ID NO: 1524359 - DNA, 15 bp, Homo sapiens
ctgttggttaggttt

SEQ ID NO: 1524360 - DNA, 15 bp, Homo sapiens
actgttggttaggtt

SEQ ID NO: 1524361 - DNA, 15 bp, Homo sapiens
aactgttggttaggt

SEQ ID NO: 1524362 - DNA, 15 bp, Homo sapiens
taactgttggttagg

SEQ ID NO: 1524363 - DNA, 15 bp, Homo sapiens
ataactgttggttag

SEQ ID NO: 1524364 - DNA, 15 bp, Homo sapiens
cataactgttggtta

SEQ ID NO: 1524365 - DNA, 15 bp, Homo sapiens
tcataactgttggtt

SEQ ID NO: 1524366 - DNA, 15 bp, Homo sapiens
ctcataactgttggt

SEQ ID NO: 1524367 - DNA, 15 bp, Homo sapiens
tctcataactgttgg

SEQ ID NO: 1524368 - DNA, 15 bp, Homo sapiens
atctcataactgttg

SEQ ID NO: 1524369 - DNA, 15 bp, Homo sapiens
tatctcataactgtt

SEQ ID NO: 1524370 - DNA, 15 bp, Homo sapiens
atatctcataactgt

SEQ ID NO: 1524371 - DNA, 15 bp, Homo sapiens
tatatctcataactg

SEQ ID NO: 1524372 - DNA, 15 bp, Homo sapiens
atatatctcataact

SEQ ID NO: 1524373 - DNA, 15 bp, Homo sapiens
aatatatctcataac

SEQ ID NO: 1524374 - DNA, 15 bp, Homo sapiens
taatatatctcataa

SEQ ID NO: 1524375 - DNA, 15 bp, Homo sapiens
gtaatatatctcata

SEQ ID NO: 1524376 - DNA, 15 bp, Homo sapiens
agtaatatatctcat

SEQ ID NO: 1524377 - DNA, 15 bp, Homo sapiens
gagtaatatatctca

SEQ ID NO: 1524378 - DNA, 15 bp, Homo sapiens
agagtaatatatctc

SEQ ID NO: 1524379 - DNA, 15 bp, Homo sapiens
cagagtaatatatct

SEQ ID NO: 1524380 - DNA, 15 bp, Homo sapiens
ccagagtaatatatc

SEQ ID NO: 1524381 - DNA, 15 bp, Homo sapiens
cccagagtaatatat

SEQ ID NO: 1524382 - DNA, 15 bp, Homo sapiens
ccccagagtaatata

SEQ ID NO: 1524383 - DNA, 15 bp, Homo sapiens
tccccagagtaatat

SEQ ID NO: 1524384 - DNA, 15 bp, Homo sapiens
ttccccagagtaata

SEQ ID NO: 1524385 - DNA, 15 bp, Homo sapiens
tttccccagagtaat

SEQ ID NO: 1524386 - DNA, 15 bp, Homo sapiens
ttttccccagagtaa

SEQ ID NO: 1524387 - DNA, 15 bp, Homo sapiens
attttccccagagta

SEQ ID NO: 1524388 - DNA, 15 bp, Homo sapiens
tattttccccagagt

SEQ ID NO: 1524389 - DNA, 15 bp, Homo sapiens
ttattttccccagag

SEQ ID NO: 1524390 - DNA, 15 bp, Homo sapiens
cttattttccccaga

SEQ ID NO: 1524391 - DNA, 15 bp, Homo sapiens
acttattttccccag

SEQ ID NO: 1524392 - DNA, 15 bp, Homo sapiens
aacttattttcccca

SEQ ID NO: 1524393 - DNA, 15 bp, Homo sapiens
gaacttattttcccc

SEQ ID NO: 1524394 - DNA, 15 bp, Homo sapiens
agaacttattttccc

SEQ ID NO: 1524395 - DNA, 15 bp, Homo sapiens
gagaacttattttcc

SEQ ID NO: 1524396 - DNA, 15 bp, Homo sapiens
cgagaacttattttc

SEQ ID NO: 1524397 - DNA, 15 bp, Homo sapiens
tcgagaacttatttt

SEQ ID NO: 1524398 - DNA, 15 bp, Homo sapiens
atcgagaacttattt

SEQ ID NO: 1524399 - DNA, 15 bp, Homo sapiens
aatcgagaacttatt

SEQ ID NO: 1524400 - DNA, 15 bp, Homo sapiens
gaatcgagaacttat

SEQ ID NO: 1524401 - DNA, 15 bp, Homo sapiens
ggaatcgagaactta

SEQ ID NO: 1524402 - DNA, 15 bp, Homo sapiens
tggaatcgagaactt

SEQ ID NO: 1524403 - DNA, 15 bp, Homo sapiens
ctggaatcgagaact

SEQ ID NO: 1524404 - DNA, 15 bp, Homo sapiens
cctggaatcgagaac

SEQ ID NO: 1524405 - DNA, 15 bp, Homo sapiens
gcctggaatcgagaa

SEQ ID NO: 1524406 - DNA, 15 bp, Homo sapiens
tgcctggaatcgaga

SEQ ID NO: 1524407 - DNA, 15 bp, Homo sapiens
atgcctggaatcgag

SEQ ID NO: 1524408 - DNA, 15 bp, Homo sapiens
gatgcctggaatcga

SEQ ID NO: 1524409 - DNA, 15 bp, Homo sapiens
agatgcctggaatcg

SEQ ID NO: 1524410 - DNA, 15 bp, Homo sapiens
cagatgcctggaatc

SEQ ID NO: 1524411 - DNA, 15 bp, Homo sapiens
tcagatgcctggaat

SEQ ID NO: 1524412 - DNA, 15 bp, Homo sapiens
atcagatgcctggaa

SEQ ID NO: 1524413 - DNA, 15 bp, Homo sapiens
aatcagatgcctgga

SEQ ID NO: 1524414 - DNA, 15 bp, Homo sapiens
aaatcagatgcctgg

SEQ ID NO: 1524415 - DNA, 15 bp, Homo sapiens
taaatcagatgcctg

SEQ ID NO: 1524416 - DNA, 15 bp, Homo sapiens
gtaaatcagatgcct

SEQ ID NO: 1524417 - DNA, 15 bp, Homo sapiens
tgtaaatcagatgcc

SEQ ID NO: 1524418 - DNA, 15 bp, Homo sapiens
ttgtaaatcagatgc

SEQ ID NO: 1524419 - DNA, 15 bp, Homo sapiens
tttgtaaatcagatg

SEQ ID NO: 1524420 - DNA, 15 bp, Homo sapiens
atttgtaaatcagat

SEQ ID NO: 1524421 - DNA, 15 bp, Homo sapiens
catttgtaaatcaga

SEQ ID NO: 1524422 - DNA, 15 bp, Homo sapiens
ccatttgtaaatcag

SEQ ID NO: 1524423 - DNA, 15 bp, Homo sapiens
accatttgtaaatca

SEQ ID NO: 1524424 - DNA, 15 bp, Homo sapiens
aaccatttgtaaatc

SEQ ID NO: 1524425 - DNA, 15 bp, Homo sapiens
aaaccatttgtaaat

SEQ ID NO: 1524426 - DNA, 15 bp, Homo sapiens
aaaaccatttgtaaa

SEQ ID NO: 1524427 - DNA, 15 bp, Homo sapiens
aaaaaccatttgtaa

SEQ ID NO: 1524428 - DNA, 15 bp, Homo sapiens
aaaaaaccatttgta

SEQ ID NO: 1524429 - DNA, 15 bp, Homo sapiens
caaaaaaccatttgt

SEQ ID NO: 1524430 - DNA, 15 bp, Homo sapiens
tcaaaaaaccatttg

SEQ ID NO: 1524431 - DNA, 15 bp, Homo sapiens
ttcaaaaaaccattt

SEQ ID NO: 1524432 - DNA, 15 bp, Homo sapiens
tttcaaaaaaccatt

SEQ ID NO: 1524433 - DNA, 15 bp, Homo sapiens
gtttcaaaaaaccat

SEQ ID NO: 1524434 - DNA, 15 bp, Homo sapiens
tgtttcaaaaaacca

SEQ ID NO: 1524435 - DNA, 15 bp, Homo sapiens
atgtttcaaaaaacc

SEQ ID NO: 1524436 - DNA, 15 bp, Homo sapiens
tatgtttcaaaaaac

SEQ ID NO: 1524437 - DNA, 15 bp, Homo sapiens
ttatgtttcaaaaaa

SEQ ID NO: 1524438 - DNA, 15 bp, Homo sapiens
cttatgtttcaaaaa

SEQ ID NO: 1524439 - DNA, 15 bp, Homo sapiens
tcttatgtttcaaaa

SEQ ID NO: 1524440 - DNA, 15 bp, Homo sapiens
gtcttatgtttcaaa

SEQ ID NO: 1524441 - DNA, 15 bp, Homo sapiens
tgtcttatgtttcaa

SEQ ID NO: 1524442 - DNA, 15 bp, Homo sapiens
ttgtcttatgtttca

SEQ ID NO: 1524443 - DNA, 15 bp, Homo sapiens
cttgtcttatgtttc

SEQ ID NO: 1524444 - DNA, 15 bp, Homo sapiens
tcttgtcttatgttt

SEQ ID NO: 1524445 - DNA, 15 bp, Homo sapiens
ctcttgtcttatgtt

SEQ ID NO: 1524446 - DNA, 15 bp, Homo sapiens
actcttgtcttatgt

SEQ ID NO: 1524447 - DNA, 15 bp, Homo sapiens
cactcttgtcttatg

SEQ ID NO: 1524448 - DNA, 15 bp, Homo sapiens
acactcttgtcttat

SEQ ID NO: 1524449 - DNA, 15 bp, Homo sapiens
tacactcttgtctta

SEQ ID NO: 1524450 - DNA, 15 bp, Homo sapiens
gtacactcttgtctt

SEQ ID NO: 1524451 - DNA, 15 bp, Homo sapiens
agtacactcttgtct

SEQ ID NO: 1524452 - DNA, 15 bp, Homo sapiens
gagtacactcttgtc

SEQ ID NO: 1524453 - DNA, 15 bp, Homo sapiens
tgagtacactcttgt

SEQ ID NO: 1524454 - DNA, 15 bp, Homo sapiens
ttgagtacactcttg

SEQ ID NO: 1524455 - DNA, 15 bp, Homo sapiens
attgagtacactctt

SEQ ID NO: 1524456 - DNA, 15 bp, Homo sapiens
tattgagtacactct

SEQ ID NO: 1524457 - DNA, 15 bp, Homo sapiens
atattgagtacactc

SEQ ID NO: 1524458 - DNA, 15 bp, Homo sapiens
tatattgagtacact

SEQ ID NO: 1524459 - DNA, 15 bp, Homo sapiens
ttatattgagtacac

SEQ ID NO: 1524460 - DNA, 15 bp, Homo sapiens
cttatattgagtaca

SEQ ID NO: 1524461 - DNA, 15 bp, Homo sapiens
tcttatattgagtac

SEQ ID NO: 1524462 - DNA, 15 bp, Homo sapiens
atcttatattgagta

SEQ ID NO: 1524463 - DNA, 15 bp, Homo sapiens
tatcttatattgagt

SEQ ID NO: 1524464 - DNA, 15 bp, Homo sapiens
ttatcttatattgag

SEQ ID NO: 1524465 - DNA, 15 bp, Homo sapiens
attatcttatattga

SEQ ID NO: 1524466 - DNA, 15 bp, Homo sapiens
gattatcttatattg

SEQ ID NO: 1524467 - DNA, 15 bp, Homo sapiens
agattatcttatatt

SEQ ID NO: 1524468 - DNA, 15 bp, Homo sapiens
aagattatcttatat

SEQ ID NO: 1524469 - DNA, 15 bp, Homo sapiens
caagattatcttata

SEQ ID NO: 1524470 - DNA, 15 bp, Homo sapiens
acaagattatcttat

SEQ ID NO: 1524471 - DNA, 15 bp, Homo sapiens
gacaagattatctta

SEQ ID NO: 1524472 - DNA, 15 bp, Homo sapiens
tgacaagattatctt

SEQ ID NO: 1524473 - DNA, 15 bp, Homo sapiens
atgacaagattatct

SEQ ID NO: 1524474 - DNA, 15 bp, Homo sapiens
aatgacaagattatc

SEQ ID NO: 1524475 - DNA, 15 bp, Homo sapiens
caatgacaagattat

SEQ ID NO: 1524476 - DNA, 15 bp, Homo sapiens
ccaatgacaagatta

SEQ ID NO: 1524477 - DNA, 15 bp, Homo sapiens
gccaatgacaagatt

SEQ ID NO: 1524478 - DNA, 15 bp, Homo sapiens
cgccaatgacaagat

SEQ ID NO: 1524479 - DNA, 15 bp, Homo sapiens
gcgccaatgacaaga

SEQ ID NO: 1524480 - DNA, 15 bp, Homo sapiens
tgcgccaatgacaag

SEQ ID NO: 1524481 - DNA, 15 bp, Homo sapiens
ttgcgccaatgacaa

SEQ ID NO: 1524482 - DNA, 15 bp, Homo sapiens
attgcgccaatgaca

SEQ ID NO: 1524483 - DNA, 15 bp, Homo sapiens
tattgcgccaatgac

SEQ ID NO: 1524484 - DNA, 15 bp, Homo sapiens
atattgcgccaatga

SEQ ID NO: 1524485 - DNA, 15 bp, Homo sapiens
gatattgcgccaatg

SEQ ID NO: 1524486 - DNA, 15 bp, Homo sapiens
tgatattgcgccaat

SEQ ID NO: 1524487 - DNA, 15 bp, Homo sapiens
atgatattgcgccaa

SEQ ID NO: 1524488 - DNA, 15 bp, Homo sapiens
aatgatattgcgcca

SEQ ID NO: 1524489 - DNA, 15 bp, Homo sapiens
taatgatattgcgcc

SEQ ID NO: 1524490 - DNA, 15 bp, Homo sapiens
ataatgatattgcgc

SEQ ID NO: 1524491 - DNA, 15 bp, Homo sapiens
tataatgatattgcg

SEQ ID NO: 1524492 - DNA, 15 bp, Homo sapiens
gtataatgatattgc

SEQ ID NO: 1524493 - DNA, 15 bp, Homo sapiens
tgtataatgatattg

SEQ ID NO: 1524494 - DNA, 15 bp, Homo sapiens
atgtataatgatatt

SEQ ID NO: 1524495 - DNA, 15 bp, Homo sapiens
aatgtataatgatat

SEQ ID NO: 1524496 - DNA, 15 bp, Homo sapiens
taatgtataatgata

SEQ ID NO: 1524497 - DNA, 15 bp, Homo sapiens
gtaatgtataatgat

SEQ ID NO: 1524498 - DNA, 15 bp, Homo sapiens
tgtaatgtataatga

SEQ ID NO: 1524499 - DNA, 15 bp, Homo sapiens
ttgtaatgtataatg

SEQ ID NO: 1524500 - DNA, 15 bp, Homo sapiens
tttgtaatgtataat

SEQ ID NO: 1524501 - DNA, 15 bp, Homo sapiens
ctttgtaatgtataa

SEQ ID NO: 1524502 - DNA, 15 bp, Homo sapiens
cctttgtaatgtata

SEQ ID NO: 1524503 - DNA, 15 bp, Homo sapiens
acctttgtaatgtat

SEQ ID NO: 1524504 - DNA, 15 bp, Homo sapiens
aacctttgtaatgta

SEQ ID NO: 1524505 - DNA, 15 bp, Homo sapiens
taacctttgtaatgt

SEQ ID NO: 1524506 - DNA, 15 bp, Homo sapiens
ctaacctttgtaatg

SEQ ID NO: 1524507 - DNA, 15 bp, Homo sapiens
gctaacctttgtaat

SEQ ID NO: 1524508 - DNA, 15 bp, Homo sapiens
tgctaacctttgtaa

SEQ ID NO: 1524509 - DNA, 15 bp, Homo sapiens
ctgctaacctttgta

SEQ ID NO: 1524510 - DNA, 15 bp, Homo sapiens
tctgctaacctttgt

SEQ ID NO: 1524511 - DNA, 15 bp, Homo sapiens
ttctgctaacctttg

SEQ ID NO: 1524512 - DNA, 15 bp, Homo sapiens
attctgctaaccttt

SEQ ID NO: 1524513 - DNA, 15 bp, Homo sapiens
aattctgctaacctt

SEQ ID NO: 1524514 - DNA, 15 bp, Homo sapiens
caattctgctaacct

SEQ ID NO: 1524515 - DNA, 15 bp, Homo sapiens
ccaattctgctaacc

SEQ ID NO: 1524516 - DNA, 15 bp, Homo sapiens
gccaattctgctaac

SEQ ID NO: 1524517 - DNA, 15 bp, Homo sapiens
tgccaattctgctaa

SEQ ID NO: 1524518 - DNA, 15 bp, Homo sapiens
gtgccaattctgcta

SEQ ID NO: 1524519 - DNA, 15 bp, Homo sapiens
ggtgccaattctgct

SEQ ID NO: 1524520 - DNA, 15 bp, Homo sapiens
aggtgccaattctgc

SEQ ID NO: 1524521 - DNA, 15 bp, Homo sapiens
aaggtgccaattctg

SEQ ID NO: 1524522 - DNA, 15 bp, Homo sapiens
aaaggtgccaattct

SEQ ID NO: 1524523 - DNA, 15 bp, Homo sapiens
aaaaggtgccaattc

SEQ ID NO: 1524524 - DNA, 15 bp, Homo sapiens
gaaaaggtgccaatt

SEQ ID NO: 1524525 - DNA, 15 bp, Homo sapiens
agaaaaggtgccaat

SEQ ID NO: 1524526 - DNA, 15 bp, Homo sapiens
aagaaaaggtgccaa

SEQ ID NO: 1524527 - DNA, 15 bp, Homo sapiens
taagaaaaggtgcca

SEQ ID NO: 1524528 - DNA, 15 bp, Homo sapiens
ctaagaaaaggtgcc

SEQ ID NO: 1524529 - DNA, 15 bp, Homo sapiens
gctaagaaaaggtgc

SEQ ID NO: 1524530 - DNA, 15 bp, Homo sapiens
cgctaagaaaaggtg

SEQ ID NO: 1524531 - DNA, 15 bp, Homo sapiens
tcgctaagaaaaggt

SEQ ID NO: 1524532 - DNA, 15 bp, Homo sapiens
ttcgctaagaaaagg

SEQ ID NO: 1524533 - DNA, 15 bp, Homo sapiens
tttcgctaagaaaag

SEQ ID NO: 1524534 - DNA, 15 bp, Homo sapiens
atttcgctaagaaaa

SEQ ID NO: 1524535 - DNA, 15 bp, Homo sapiens
catttcgctaagaaa

SEQ ID NO: 1524536 - DNA, 15 bp, Homo sapiens
tcatttcgctaagaa

SEQ ID NO: 1524537 - DNA, 15 bp, Homo sapiens
gtcatttcgctaaga

SEQ ID NO: 1524538 - DNA, 15 bp, Homo sapiens
tgtcatttcgctaag

SEQ ID NO: 1524539 - DNA, 15 bp, Homo sapiens
atgtcatttcgctaa

SEQ ID NO: 1524540 - DNA, 15 bp, Homo sapiens
tatgtcatttcgcta

SEQ ID NO: 1524541 - DNA, 15 bp, Homo sapiens
atatgtcatttcgct

SEQ ID NO: 1524542 - DNA, 15 bp, Homo sapiens
aatatgtcatttcgc

SEQ ID NO: 1524543 - DNA, 15 bp, Homo sapiens
taatatgtcatttcg

SEQ ID NO: 1524544 - DNA, 15 bp, Homo sapiens
gtaatatgtcatttc

SEQ ID NO: 1524545 - DNA, 15 bp, Homo sapiens
agtaatatgtcattt

SEQ ID NO: 1524546 - DNA, 15 bp, Homo sapiens
tagtaatatgtcatt

SEQ ID NO: 1524547 - DNA, 15 bp, Homo sapiens
atagtaatatgtcat

SEQ ID NO: 1524548 - DNA, 15 bp, Homo sapiens
aatagtaatatgtca

SEQ ID NO: 1524549 - DNA, 15 bp, Homo sapiens
taatagtaatatgtc

SEQ ID NO: 1524550 - DNA, 15 bp, Homo sapiens
ttaatagtaatatgt

SEQ ID NO: 1524551 - DNA, 15 bp, Homo sapiens
gttaatagtaatatg

SEQ ID NO: 1524552 - DNA, 15 bp, Homo sapiens
tgttaatagtaatat

SEQ ID NO: 1524553 - DNA, 15 bp, Homo sapiens
gtgttaatagtaata

SEQ ID NO: 1524554 - DNA, 15 bp, Homo sapiens
tgtgttaatagtaat

SEQ ID NO: 1524555 - DNA, 15 bp, Homo sapiens
atgtgttaatagtaa

SEQ ID NO: 1524556 - DNA, 15 bp, Homo sapiens
aatgtgttaatagta

SEQ ID NO: 1524557 - DNA, 15 bp, Homo sapiens
gaatgtgttaatagt

SEQ ID NO: 1524558 - DNA, 15 bp, Homo sapiens
tgaatgtgttaatag

SEQ ID NO: 1524559 - DNA, 15 bp, Homo sapiens
atgaatgtgttaata

SEQ ID NO: 1524560 - DNA, 15 bp, Homo sapiens
catgaatgtgttaat

SEQ ID NO: 1524561 - DNA, 15 bp, Homo sapiens
tcatgaatgtgttaa

SEQ ID NO: 1524562 - DNA, 15 bp, Homo sapiens
ttcatgaatgtgtta

SEQ ID NO: 1524563 - DNA, 15 bp, Homo sapiens
tttcatgaatgtgtt

SEQ ID NO: 1524564 - DNA, 15 bp, Homo sapiens
atttcatgaatgtgt

SEQ ID NO: 1524565 - DNA, 15 bp, Homo sapiens
tatttcatgaatgtg

SEQ ID NO: 1524566 - DNA, 15 bp, Homo sapiens
atatttcatgaatgt

SEQ ID NO: 1524567 - DNA, 15 bp, Homo sapiens
catatttcatgaatg

SEQ ID NO: 1524568 - DNA, 15 bp, Homo sapiens
acatatttcatgaat

SEQ ID NO: 1524569 - DNA, 15 bp, Homo sapiens
ttaacatatttcatg

SEQ ID NO: 1524570 - DNA, 15 bp, Homo sapiens
attaacatatttcat

SEQ ID NO: 1524571 - DNA, 15 bp, Homo sapiens
tattaacatatttca

SEQ ID NO: 1524572 - DNA, 15 bp, Homo sapiens
gtattaacatatttc

SEQ ID NO: 1524573 - DNA, 15 bp, Homo sapiens
tgtattaacatattt

SEQ ID NO: 1524574 - DNA, 15 bp, Homo sapiens
ctgtattaacatatt

SEQ ID NO: 1524575 - DNA, 15 bp, Homo sapiens
tctgtattaacatat

SEQ ID NO: 1524576 - DNA, 15 bp, Homo sapiens
atctgtattaacata

SEQ ID NO: 1524577 - DNA, 15 bp, Homo sapiens
catctgtattaacat

SEQ ID NO: 1524578 - DNA, 15 bp, Homo sapiens
tcatctgtattaaca

SEQ ID NO: 1524579 - DNA, 15 bp, Homo sapiens
ttcatctgtattaac

SEQ ID NO: 1524580 - DNA, 15 bp, Homo sapiens
attcatctgtattaa

SEQ ID NO: 1524581 - DNA, 15 bp, Homo sapiens
cattcatctgtatta

SEQ ID NO: 1524582 - DNA, 15 bp, Homo sapiens
acattcatctgtatt

SEQ ID NO: 1524583 - DNA, 15 bp, Homo sapiens
cacattcatctgtat

SEQ ID NO: 1524584 - DNA, 15 bp, Homo sapiens
acacattcatctgta

SEQ ID NO: 1524585 - DNA, 15 bp, Homo sapiens
aacacattcatctgt

SEQ ID NO: 1524586 - DNA, 15 bp, Homo sapiens
taacacattcatctg

SEQ ID NO: 1524587 - DNA, 15 bp, Homo sapiens
ataacacattcatct

SEQ ID NO: 1524588 - DNA, 15 bp, Homo sapiens
aataacacattcatc

SEQ ID NO: 1524589 - DNA, 15 bp, Homo sapiens
aaataacacattcat

SEQ ID NO: 1524590 - DNA, 15 bp, Homo sapiens
aaaataacacattca

SEQ ID NO: 1524591 - DNA, 15 bp, Homo sapiens
caaaataacacattc

SEQ ID NO: 1524592 - DNA, 15 bp, Homo sapiens
acaaaataacacatt

SEQ ID NO: 1524593 - DNA, 15 bp, Homo sapiens
tacaaaataacacat

SEQ ID NO: 1524594 - DNA, 15 bp, Homo sapiens
ctacaaaataacaca

SEQ ID NO: 1524595 - DNA, 15 bp, Homo sapiens
tctacaaaataacac

SEQ ID NO: 1524596 - DNA, 15 bp, Homo sapiens
ctctacaaaataaca

SEQ ID NO: 1524597 - DNA, 15 bp, Homo sapiens
gctctacaaaataac

SEQ ID NO: 1524598 - DNA, 15 bp, Homo sapiens
cgctctacaaaataa

SEQ ID NO: 1524599 - DNA, 15 bp, Homo sapiens
gcgctctacaaaata

SEQ ID NO: 1524600 - DNA, 15 bp, Homo sapiens
agcgctctacaaaat

SEQ ID NO: 1524601 - DNA, 15 bp, Homo sapiens
aagcgctctacaaaa

SEQ ID NO: 1524602 - DNA, 15 bp, Homo sapiens
aaagcgctctacaaa

SEQ ID NO: 1524603 - DNA, 15 bp, Homo sapiens
taaagcgctctacaa

SEQ ID NO: 1524604 - DNA, 15 bp, Homo sapiens
ctaaagcgctctaca

SEQ ID NO: 1524605 - DNA, 15 bp, Homo sapiens
actaaagcgctctac

SEQ ID NO: 1524606 - DNA, 15 bp, Homo sapiens
aactaaagcgctcta

SEQ ID NO: 1524607 - DNA, 15 bp, Homo sapiens
aaactaaagcgctct

SEQ ID NO: 1524608 - DNA, 15 bp, Homo sapiens
taaactaaagcgctc

SEQ ID NO: 1524609 - DNA, 15 bp, Homo sapiens
ataaactaaagcgct

SEQ ID NO: 1524610 - DNA, 15 bp, Homo sapiens
gataaactaaagcgc

SEQ ID NO: 1524611 - DNA, 15 bp, Homo sapiens
tgataaactaaagcg

SEQ ID NO: 1524612 - DNA, 15 bp, Homo sapiens
ctgataaactaaagc

SEQ ID NO: 1524613 - DNA, 15 bp, Homo sapiens
tctgataaactaaag

SEQ ID NO: 1524614 - DNA, 15 bp, Homo sapiens
atctgataaactaaa

SEQ ID NO: 1524615 - DNA, 15 bp, Homo sapiens
aatctgataaactaa

SEQ ID NO: 1524616 - DNA, 15 bp, Homo sapiens
taatctgataaacta

SEQ ID NO: 1524617 - DNA, 15 bp, Homo sapiens
ctaatctgataaact

SEQ ID NO: 1524618 - DNA, 15 bp, Homo sapiens
gctaatctgataaac

SEQ ID NO: 1524619 - DNA, 15 bp, Homo sapiens
tgctaatctgataaa

SEQ ID NO: 1524620 - DNA, 15 bp, Homo sapiens
atgctaatctgataa

SEQ ID NO: 1524621 - DNA, 15 bp, Homo sapiens
aatgctaatctgata

SEQ ID NO: 1524622 - DNA, 15 bp, Homo sapiens
aaatgctaatctgat

SEQ ID NO: 1524623 - DNA, 15 bp, Homo sapiens
aaaatgctaatctga

SEQ ID NO: 1524624 - DNA, 15 bp, Homo sapiens
aaaaatgctaatctg

SEQ ID NO: 1524625 - DNA, 15 bp, Homo sapiens
aaaaaatgctaatct

SEQ ID NO: 1524626 - DNA, 15 bp, Homo sapiens
caaaaaatgctaatc

SEQ ID NO: 1524627 - DNA, 15 bp, Homo sapiens
acaaaaaatgctaat

SEQ ID NO: 1524628 - DNA, 15 bp, Homo sapiens
gacaaaaaatgctaa

SEQ ID NO: 1524629 - DNA, 15 bp, Homo sapiens
agacaaaaaatgcta

SEQ ID NO: 1524630 - DNA, 15 bp, Homo sapiens
cagacaaaaaatgct

SEQ ID NO: 1524631 - DNA, 15 bp, Homo sapiens
acagacaaaaaatgc

SEQ ID NO: 1524632 - DNA, 15 bp, Homo sapiens
aacagacaaaaaatg

SEQ ID NO: 1524633 - DNA, 15 bp, Homo sapiens
aaacagacaaaaaat

SEQ ID NO: 1524634 - DNA, 15 bp, Homo sapiens
taaacagacaaaaaa

SEQ ID NO: 1524635 - DNA, 15 bp, Homo sapiens
ttaaacagacaaaaa

SEQ ID NO: 1524636 - DNA, 15 bp, Homo sapiens
attaaacagacaaaa

SEQ ID NO: 1524637 - DNA, 15 bp, Homo sapiens
tattaaacagacaaa

SEQ ID NO: 1524638 - DNA, 15 bp, Homo sapiens
ttattaaacagacaa

SEQ ID NO: 1524639 - DNA, 15 bp, Homo sapiens
tttattaaacagaca

SEQ ID NO: 1524640 - DNA, 15 bp, Homo sapiens
ttttattaaacagac

SEQ ID NO: 1524641 - DNA, 15 bp, Homo sapiens
tttttattaaacaga

SEQ ID NO: 1524642 - DNA, 15 bp, Homo sapiens
attttttattaaaca

SEQ ID NO: 1524643 - DNA, 15 bp, Homo sapiens
tattttttattaaac

SEQ ID NO: 1524644 - DNA, 15 bp, Homo sapiens
ttattttttattaaa

SEQ ID NO: 1524645 - DNA, 15 bp, Homo sapiens
tttattttttattaa

SEQ ID NO: 1524646 - DNA, 15 bp, Homo sapiens
ttttattttttatta

SEQ ID NO: 1524647 - DNA, 15 bp, Homo sapiens
atattttatttttta

SEQ ID NO: 1524648 - DNA, 15 bp, Homo sapiens
ctatattttattttt

SEQ ID NO: 1524649 - DNA, 15 bp, Homo sapiens
tctatattttatttt

SEQ ID NO: 1524650 - DNA, 15 bp, Homo sapiens
gtctatattttattt

SEQ ID NO: 1524651 - DNA, 15 bp, Homo sapiens
ggtctatattttatt

SEQ ID NO: 1524652 - DNA, 15 bp, Homo sapiens
cggtctatattttat

SEQ ID NO: 1524653 - DNA, 15 bp, Homo sapiens
ccggtctatatttta

SEQ ID NO: 1524654 - DNA, 15 bp, Homo sapiens
cccggtctatatttt

SEQ ID NO: 1524655 - DNA, 15 bp, Homo sapiens
gcccggtctatattt

SEQ ID NO: 1524656 - DNA, 15 bp, Homo sapiens
tgcccggtctatatt

SEQ ID NO: 1524657 - DNA, 15 bp, Homo sapiens
atgcccggtctatat

SEQ ID NO: 1524658 - DNA, 15 bp, Homo sapiens
catgcccggtctata

SEQ ID NO: 1524659 - DNA, 15 bp, Homo sapiens
ccatgcccggtctat

SEQ ID NO: 1524660 - DNA, 15 bp, Homo sapiens
accatgcccggtcta

SEQ ID NO: 1524661 - DNA, 15 bp, Homo sapiens
caccatgcccggtct

SEQ ID NO: 1524662 - DNA, 15 bp, Homo sapiens
ccaccatgcccggtc

SEQ ID NO: 1524663 - DNA, 15 bp, Homo sapiens
gccaccatgcccggt

SEQ ID NO: 1524664 - DNA, 15 bp, Homo sapiens
agccaccatgcccgg

SEQ ID NO: 1524665 - DNA, 15 bp, Homo sapiens
gagccaccatgcccg

SEQ ID NO: 1524666 - DNA, 15 bp, Homo sapiens
ttcccaaagtgctga

SEQ ID NO: 1524667 - DNA, 15 bp, Homo sapiens
gccttggcttcccaa

SEQ ID NO: 1524668 - DNA, 15 bp, Homo sapiens
cgccttggcttccca

SEQ ID NO: 1524669 - DNA, 15 bp, Homo sapiens
ccgccttggcttccc

SEQ ID NO: 1524670 - DNA, 15 bp, Homo sapiens
cccgccttggcttcc

SEQ ID NO: 1524671 - DNA, 15 bp, Homo sapiens
acccgccttggcttc

SEQ ID NO: 1524672 - DNA, 15 bp, Homo sapiens
tacccgccttggctt

SEQ ID NO: 1524673 - DNA, 15 bp, Homo sapiens
ctacccgccttggct

SEQ ID NO: 1524674 - DNA, 15 bp, Homo sapiens
tctacccgccttggc

SEQ ID NO: 1524675 - DNA, 15 bp, Homo sapiens
atctacccgccttgg

SEQ ID NO: 1524676 - DNA, 15 bp, Homo sapiens
gatctacccgccttg

SEQ ID NO: 1524677 - DNA, 15 bp, Homo sapiens
ggatctacccgcctt

SEQ ID NO: 1524678 - DNA, 15 bp, Homo sapiens
gggatctacccgcct

SEQ ID NO: 1524679 - DNA, 15 bp, Homo sapiens
ggggatctacccgcc

SEQ ID NO: 1524680 - DNA, 15 bp, Homo sapiens
aggggatctacccgc

SEQ ID NO: 1524681 - DNA, 15 bp, Homo sapiens
caggggatctacccg

SEQ ID NO: 1524682 - DNA, 15 bp, Homo sapiens
tcaggggatctaccc

SEQ ID NO: 1524683 - DNA, 15 bp, Homo sapiens
ttcaggggatctacc

SEQ ID NO: 1524684 - DNA, 15 bp, Homo sapiens
cttcaggggatctac

SEQ ID NO: 1524685 - DNA, 15 bp, Homo sapiens
acttcaggggatcta

SEQ ID NO: 1524686 - DNA, 15 bp, Homo sapiens
gacttcaggggatct

SEQ ID NO: 1524687 - DNA, 15 bp, Homo sapiens
tgacttcaggggatc

SEQ ID NO: 1524688 - DNA, 15 bp, Homo sapiens
ctgacttcaggggat

SEQ ID NO: 1524689 - DNA, 15 bp, Homo sapiens
cctgacttcagggga

SEQ ID NO: 1524690 - DNA, 15 bp, Homo sapiens
tcctgacttcagggg

SEQ ID NO: 1524691 - DNA, 15 bp, Homo sapiens
ctcctgacttcaggg

SEQ ID NO: 1524692 - DNA, 15 bp, Homo sapiens
actcctgacttcagg

SEQ ID NO: 1524693 - DNA, 15 bp, Homo sapiens
aactcctgacttcag

SEQ ID NO: 1524694 - DNA, 15 bp, Homo sapiens
cgctggtctcaaact

SEQ ID NO: 1524695 - DNA, 15 bp, Homo sapiens
acgctggtctcaaac

SEQ ID NO: 1524696 - DNA, 15 bp, Homo sapiens
cacgctggtctcaaa

SEQ ID NO: 1524697 - DNA, 15 bp, Homo sapiens
ccacgctggtctcaa

SEQ ID NO: 1524698 - DNA, 15 bp, Homo sapiens
gccacgctggtctca

SEQ ID NO: 1524699 - DNA, 15 bp, Homo sapiens
ggccacgctggtctc

SEQ ID NO: 1524700 - DNA, 15 bp, Homo sapiens
tggccacgctggtct

SEQ ID NO: 1524701 - DNA, 15 bp, Homo sapiens
ttggccacgctggtc

SEQ ID NO: 1524702 - DNA, 15 bp, Homo sapiens
gttggccacgctggt

SEQ ID NO: 1524703 - DNA, 15 bp, Homo sapiens
tgttggccacgctgg

SEQ ID NO: 1524704 - DNA, 15 bp, Homo sapiens
atgttggccacgctg

SEQ ID NO: 1524705 - DNA, 15 bp, Homo sapiens
catgttggccacgct

SEQ ID NO: 1524706 - DNA, 15 bp, Homo sapiens
ccatgttggccacgc

SEQ ID NO: 1524707 - DNA, 15 bp, Homo sapiens
accatgttggccacg

SEQ ID NO: 1524708 - DNA, 15 bp, Homo sapiens
caccatgttggccac

SEQ ID NO: 1524709 - DNA, 15 bp, Homo sapiens
aggggtttcaccatg

SEQ ID NO: 1524710 - DNA, 15 bp, Homo sapiens
tagaggggtttcacc

SEQ ID NO: 1524711 - DNA, 15 bp, Homo sapiens
gtagaggggtttcac

SEQ ID NO: 1524712 - DNA, 15 bp, Homo sapiens
agtagaggggtttca

SEQ ID NO: 1524713 - DNA, 15 bp, Homo sapiens
tagtagaggggtttc

SEQ ID NO: 1524714 - DNA, 15 bp, Homo sapiens
ttagtagaggggttt

SEQ ID NO: 1524715 - DNA, 15 bp, Homo sapiens
tttagtagaggggtt

SEQ ID NO: 1524716 - DNA, 15 bp, Homo sapiens
ttttagtagaggggt

SEQ ID NO: 1524717 - DNA, 15 bp, Homo sapiens
tttttagtagagggg

SEQ ID NO: 1524718 - DNA, 15 bp, Homo sapiens
atttttagtagaggg

SEQ ID NO: 1524719 - DNA, 15 bp, Homo sapiens
attaattttttgtat

SEQ ID NO: 1524720 - DNA, 15 bp, Homo sapiens
gattaattttttgta

SEQ ID NO: 1524721 - DNA, 15 bp, Homo sapiens
cgattaattttttgt

SEQ ID NO: 1524722 - DNA, 15 bp, Homo sapiens
tcgattaattttttg

SEQ ID NO: 1524723 - DNA, 15 bp, Homo sapiens
ctcgattaatttttt

SEQ ID NO: 1524724 - DNA, 15 bp, Homo sapiens
gctcgattaattttt

SEQ ID NO: 1524725 - DNA, 15 bp, Homo sapiens
cgctcgattaatttt

SEQ ID NO: 1524726 - DNA, 15 bp, Homo sapiens
acgctcgattaattt

SEQ ID NO: 1524727 - DNA, 15 bp, Homo sapiens
cacgctcgattaatt

SEQ ID NO: 1524728 - DNA, 15 bp, Homo sapiens
ccacgctcgattaat

SEQ ID NO: 1524729 - DNA, 15 bp, Homo sapiens
accacgctcgattaa

SEQ ID NO: 1524730 - DNA, 15 bp, Homo sapiens
caccacgctcgatta

SEQ ID NO: 1524731 - DNA, 15 bp, Homo sapiens
ccaccacgctcgatt

SEQ ID NO: 1524732 - DNA, 15 bp, Homo sapiens
accaccacgctcgat

SEQ ID NO: 1524733 - DNA, 15 bp, Homo sapiens
caccaccacgctcga

SEQ ID NO: 1524734 - DNA, 15 bp, Homo sapiens
ccaccaccacgctcg

SEQ ID NO: 1524735 - DNA, 15 bp, Homo sapiens
cccaccaccacgctc

SEQ ID NO: 1524736 - DNA, 15 bp, Homo sapiens
gcccaccaccacgct

SEQ ID NO: 1524737 - DNA, 15 bp, Homo sapiens
atgcccaccaccacg

SEQ ID NO: 1524738 - DNA, 15 bp, Homo sapiens
gatgcccaccaccac

SEQ ID NO: 1524739 - DNA, 15 bp, Homo sapiens
agatgcccaccacca

SEQ ID NO: 1524740 - DNA, 15 bp, Homo sapiens
cagatgcccaccacc

SEQ ID NO: 1524741 - DNA, 15 bp, Homo sapiens
acagatgcccaccac

SEQ ID NO: 1524742 - DNA, 15 bp, Homo sapiens
tacagatgcccacca

SEQ ID NO: 1524743 - DNA, 15 bp, Homo sapiens
ttacagatgcccacc

SEQ ID NO: 1524744 - DNA, 15 bp, Homo sapiens
attacagatgcccac

SEQ ID NO: 1524745 - DNA, 15 bp, Homo sapiens
gattacagatgccca

SEQ ID NO: 1524746 - DNA, 15 bp, Homo sapiens
ggattacagatgccc

SEQ ID NO: 1524747 - DNA, 15 bp, Homo sapiens
gggattacagatgcc

SEQ ID NO: 1524748 - DNA, 15 bp, Homo sapiens
tgggattacagatgc

SEQ ID NO: 1524749 - DNA, 15 bp, Homo sapiens
agctgggattacaga

SEQ ID NO: 1524750 - DNA, 15 bp, Homo sapiens
cccagagtagctggg

SEQ ID NO: 1524751 - DNA, 15 bp, Homo sapiens
ccccagagtagctgg

SEQ ID NO: 1524752 - DNA, 15 bp, Homo sapiens
cccccagagtagctg

SEQ ID NO: 1524753 - DNA, 15 bp, Homo sapiens
gcccccagagtagct

SEQ ID NO: 1524754 - DNA, 15 bp, Homo sapiens
agcccccagagtagc

SEQ ID NO: 1524755 - DNA, 15 bp, Homo sapiens
cagcccccagagtag

SEQ ID NO: 1524756 - DNA, 15 bp, Homo sapiens
tcagcccccagagta

SEQ ID NO: 1524757 - DNA, 15 bp, Homo sapiens
ctcagcccccagagt

SEQ ID NO: 1524758 - DNA, 15 bp, Homo sapiens
cctcagcccccagag

SEQ ID NO: 1524759 - DNA, 15 bp, Homo sapiens
gcctcagcccccaga

SEQ ID NO: 1524760 - DNA, 15 bp, Homo sapiens
tgcctcagcccccag

SEQ ID NO: 1524761 - DNA, 15 bp, Homo sapiens
ctcctgcctcagccc

SEQ ID NO: 1524762 - DNA, 15 bp, Homo sapiens
cctcagctcactgca

SEQ ID NO: 1524763 - DNA, 15 bp, Homo sapiens
acctcagctcactgc

SEQ ID NO: 1524764 - DNA, 15 bp, Homo sapiens
gacctcagctcactg

SEQ ID NO: 1524765 - DNA, 15 bp, Homo sapiens
tgacctcagctcact

SEQ ID NO: 1524766 - DNA, 15 bp, Homo sapiens
atgacctcagctcac

SEQ ID NO: 1524767 - DNA, 15 bp, Homo sapiens
catgacctcagctca

SEQ ID NO: 1524768 - DNA, 15 bp, Homo sapiens
gcatgacctcagctc

SEQ ID NO: 1524769 - DNA, 15 bp, Homo sapiens
ggcatgacctcagct

SEQ ID NO: 1524770 - DNA, 15 bp, Homo sapiens
tggcatgacctcagc

SEQ ID NO: 1524771 - DNA, 15 bp, Homo sapiens
atggcatgacctcag

SEQ ID NO: 1524772 - DNA, 15 bp, Homo sapiens
aatggcatgacctca

SEQ ID NO: 1524773 - DNA, 15 bp, Homo sapiens
caatggcatgacctc

SEQ ID NO: 1524774 - DNA, 15 bp, Homo sapiens
gcaatggcatgacct

SEQ ID NO: 1524775 - DNA, 15 bp, Homo sapiens
tgcaatggcatgacc

SEQ ID NO: 1524776 - DNA, 15 bp, Homo sapiens
gtgcaatggcatgac

SEQ ID NO: 1524777 - DNA, 15 bp, Homo sapiens
agtgcaatggcatga

SEQ ID NO: 1524778 - DNA, 15 bp, Homo sapiens
gagtgcaatggcatg

SEQ ID NO: 1524779 - DNA, 15 bp, Homo sapiens
ggagtgcaatggcat

SEQ ID NO: 1524780 - DNA, 15 bp, Homo sapiens
tcctgttgcccaggc

SEQ ID NO: 1524781 - DNA, 15 bp, Homo sapiens
ctcctgttgcccagg

SEQ ID NO: 1524782 - DNA, 15 bp, Homo sapiens
actcctgttgcccag

SEQ ID NO: 1524783 - DNA, 15 bp, Homo sapiens
cactcctgttgccca

SEQ ID NO: 1524784 - DNA, 15 bp, Homo sapiens
tcactcctgttgccc

SEQ ID NO: 1524785 - DNA, 15 bp, Homo sapiens
ttcactcctgttgcc

SEQ ID NO: 1524786 - DNA, 15 bp, Homo sapiens
tttcactcctgttgc

SEQ ID NO: 1524787 - DNA, 15 bp, Homo sapiens
gtttcactcctgttg

SEQ ID NO: 1524788 - DNA, 15 bp, Homo sapiens
agtttcactcctgtt

SEQ ID NO: 1524789 - DNA, 15 bp, Homo sapiens
gagtttcactcctgt

SEQ ID NO: 1524790 - DNA, 15 bp, Homo sapiens
agagtttcactcctg

SEQ ID NO: 1524791 - DNA, 15 bp, Homo sapiens
cagagtttcactcct

SEQ ID NO: 1524792 - DNA, 15 bp, Homo sapiens
acagagtttcactcc

SEQ ID NO: 1524793 - DNA, 15 bp, Homo sapiens
gacagagtttcactc

SEQ ID NO: 1524794 - DNA, 15 bp, Homo sapiens
agacagagtttcact

SEQ ID NO: 1524795 - DNA, 15 bp, Homo sapiens
gagacagagtttcac

SEQ ID NO: 1524796 - DNA, 15 bp, Homo sapiens
tgagacagagtttca

SEQ ID NO: 1524797 - DNA, 15 bp, Homo sapiens
ttgagacagagtttc

SEQ ID NO: 1524798 - DNA, 15 bp, Homo sapiens
atttttatttttttg

SEQ ID NO: 1524799 - DNA, 15 bp, Homo sapiens
attttatttttattt

SEQ ID NO: 1524800 - DNA, 15 bp, Homo sapiens
tattttatttttatt

SEQ ID NO: 1524801 - DNA, 15 bp, Homo sapiens
gtattttatttttat

SEQ ID NO: 1524802 - DNA, 15 bp, Homo sapiens
tgtattttattttta

SEQ ID NO: 1524803 - DNA, 15 bp, Homo sapiens
ttgtattttattttt

SEQ ID NO: 1524804 - DNA, 15 bp, Homo sapiens
tttgtattttatttt

SEQ ID NO: 1524805 - DNA, 15 bp, Homo sapiens
ttttgtattttattt

SEQ ID NO: 1524806 - DNA, 15 bp, Homo sapiens
tttttgtattttatt

SEQ ID NO: 1524807 - DNA, 15 bp, Homo sapiens
gtttttgtattttat

SEQ ID NO: 1524808 - DNA, 15 bp, Homo sapiens
tgtttttgtatttta

SEQ ID NO: 1524809 - DNA, 15 bp, Homo sapiens
ttgtttttgtatttt

SEQ ID NO: 1524810 - DNA, 15 bp, Homo sapiens
gttgtttttgtattt

SEQ ID NO: 1524811 - DNA, 15 bp, Homo sapiens
agttgtttttgtatt

SEQ ID NO: 1524812 - DNA, 15 bp, Homo sapiens
aagttgtttttgtat

SEQ ID NO: 1524813 - DNA, 15 bp, Homo sapiens
gaagttgtttttgta

SEQ ID NO: 1524814 - DNA, 15 bp, Homo sapiens
ggaagttgtttttgt

SEQ ID NO: 1524815 - DNA, 15 bp, Homo sapiens
gggaagttgtttttg

SEQ ID NO: 1524816 - DNA, 15 bp, Homo sapiens
ggggaagttgttttt

SEQ ID NO: 1524817 - DNA, 15 bp, Homo sapiens
gggggaagttgtttt

SEQ ID NO: 1524818 - DNA, 15 bp, Homo sapiens
tgggggaagttgttt

SEQ ID NO: 1524819 - DNA, 15 bp, Homo sapiens
atgggggaagttgtt

SEQ ID NO: 1524820 - DNA, 15 bp, Homo sapiens
tatgggggaagttgt

SEQ ID NO: 1524821 - DNA, 15 bp, Homo sapiens
gtatgggggaagttg

SEQ ID NO: 1524822 - DNA, 15 bp, Homo sapiens
ggtatgggggaagtt

SEQ ID NO: 1524823 - DNA, 15 bp, Homo sapiens
tggtatgggggaagt

SEQ ID NO: 1524824 - DNA, 15 bp, Homo sapiens
gtggtatgggggaag

SEQ ID NO: 1524825 - DNA, 15 bp, Homo sapiens
agtggtatgggggaa

SEQ ID NO: 1524826 - DNA, 15 bp, Homo sapiens
gagtggtatggggga

SEQ ID NO: 1524827 - DNA, 15 bp, Homo sapiens
ggagtggtatggggg

SEQ ID NO: 1524828 - DNA, 15 bp, Homo sapiens
aggagtggtatgggg

SEQ ID NO: 1524829 - DNA, 15 bp, Homo sapiens
aaggagtggtatggg

SEQ ID NO: 1524830 - DNA, 15 bp, Homo sapiens
taaggagtggtatgg

SEQ ID NO: 1524831 - DNA, 15 bp, Homo sapiens
ataaggagtggtatg

SEQ ID NO: 1524832 - DNA, 15 bp, Homo sapiens
gataaggagtggtat

SEQ ID NO: 1524833 - DNA, 15 bp, Homo sapiens
ggataaggagtggta

SEQ ID NO: 1524834 - DNA, 15 bp, Homo sapiens
gggataaggagtggt

SEQ ID NO: 1524835 - DNA, 15 bp, Homo sapiens
tgggataaggagtgg

SEQ ID NO: 1524836 - DNA, 15 bp, Homo sapiens
gtgggataaggagtg

SEQ ID NO: 1524837 - DNA, 15 bp, Homo sapiens
tgtgggataaggagt

SEQ ID NO: 1524838 - DNA, 15 bp, Homo sapiens
gtgtgggataaggag

SEQ ID NO: 1524839 - DNA, 15 bp, Homo sapiens
ggtgtgggataagga

SEQ ID NO: 1524840 - DNA, 15 bp, Homo sapiens
gggtgtgggataagg

SEQ ID NO: 1524841 - DNA, 15 bp, Homo sapiens
ggggtgtgggataag

SEQ ID NO: 1524842 - DNA, 15 bp, Homo sapiens
gggggtgtgggataa

SEQ ID NO: 1524843 - DNA, 15 bp, Homo sapiens
tgggggtgtgggata

SEQ ID NO: 1524844 - DNA, 15 bp, Homo sapiens
atgggggtgtgggat

SEQ ID NO: 1524845 - DNA, 15 bp, Homo sapiens
gatgggggtgtggga

SEQ ID NO: 1524846 - DNA, 15 bp, Homo sapiens
ggatgggggtgtggg

SEQ ID NO: 1524847 - DNA, 15 bp, Homo sapiens
aggatgggggtgtgg

SEQ ID NO: 1524848 - DNA, 15 bp, Homo sapiens
gaggatgggggtgtg

SEQ ID NO: 1524849 - DNA, 15 bp, Homo sapiens
agaggatgggggtgt

SEQ ID NO: 1524850 - DNA, 15 bp, Homo sapiens
tagaggatgggggtg

SEQ ID NO: 1524851 - DNA, 15 bp, Homo sapiens
atagaggatgggggt

SEQ ID NO: 1524852 - DNA, 15 bp, Homo sapiens
gatagaggatggggg

SEQ ID NO: 1524853 - DNA, 15 bp, Homo sapiens
ggatagaggatgggg

SEQ ID NO: 1524854 - DNA, 15 bp, Homo sapiens
gggatagaggatggg

SEQ ID NO: 1524855 - DNA, 15 bp, Homo sapiens
ggggatagaggatgg

SEQ ID NO: 1524856 - DNA, 15 bp, Homo sapiens
aggggatagaggatg

SEQ ID NO: 1524857 - DNA, 15 bp, Homo sapiens
taggggatagaggat

SEQ ID NO: 1524858 - DNA, 15 bp, Homo sapiens
ataggggatagagga

SEQ ID NO: 1524859 - DNA, 15 bp, Homo sapiens
gataggggatagagg

SEQ ID NO: 1524860 - DNA, 15 bp, Homo sapiens
ggataggggatagag

SEQ ID NO: 1524861 - DNA, 15 bp, Homo sapiens
gggataggggataga

SEQ ID NO: 1524862 - DNA, 15 bp, Homo sapiens
ggggataggggatag

SEQ ID NO: 1524863 - DNA, 15 bp, Homo sapiens
aggggataggggata

SEQ ID NO: 1524864 - DNA, 15 bp, Homo sapiens
taggggataggggat

SEQ ID NO: 1524865 - DNA, 15 bp, Homo sapiens
ataggggatagggga

SEQ ID NO: 1524866 - DNA, 15 bp, Homo sapiens
gataggggatagggg

SEQ ID NO: 1524867 - DNA, 15 bp, Homo sapiens
ggataggggataggg

SEQ ID NO: 1524868 - DNA, 15 bp, Homo sapiens
aggataggggatagg

SEQ ID NO: 1524869 - DNA, 15 bp, Homo sapiens
aaggataggggatag

SEQ ID NO: 1524870 - DNA, 15 bp, Homo sapiens
gaaggataggggata

SEQ ID NO: 1524871 - DNA, 15 bp, Homo sapiens
tgaaggataggggat

SEQ ID NO: 1524872 - DNA, 15 bp, Homo sapiens
atgaaggatagggga

SEQ ID NO: 1524873 - DNA, 15 bp, Homo sapiens
gatgaaggatagggg

SEQ ID NO: 1524874 - DNA, 15 bp, Homo sapiens
agatgaaggataggg

SEQ ID NO: 1524875 - DNA, 15 bp, Homo sapiens
gagatgaaggatagg

SEQ ID NO: 1524876 - DNA, 15 bp, Homo sapiens
agagatgaaggatag

SEQ ID NO: 1524877 - DNA, 15 bp, Homo sapiens
gagagatgaaggata

SEQ ID NO: 1524878 - DNA, 15 bp, Homo sapiens
agagagatgaaggat

SEQ ID NO: 1524879 - DNA, 15 bp, Homo sapiens
cagagagatgaagga

SEQ ID NO: 1524880 - DNA, 15 bp, Homo sapiens
acagagagatgaagg

SEQ ID NO: 1524881 - DNA, 15 bp, Homo sapiens
gacagagagatgaag

SEQ ID NO: 1524882 - DNA, 15 bp, Homo sapiens
tgacagagagatgaa

SEQ ID NO: 1524883 - DNA, 15 bp, Homo sapiens
gtgacagagagatga

SEQ ID NO: 1524884 - DNA, 15 bp, Homo sapiens
agtgacagagagatg

SEQ ID NO: 1524885 - DNA, 15 bp, Homo sapiens
cagtgacagagagat

SEQ ID NO: 1524886 - DNA, 15 bp, Homo sapiens
acagtgacagagaga

SEQ ID NO: 1524887 - DNA, 15 bp, Homo sapiens
aacagtgacagagag

SEQ ID NO: 1524888 - DNA, 15 bp, Homo sapiens
caacagtgacagaga

SEQ ID NO: 1524889 - DNA, 15 bp, Homo sapiens
gcaacagtgacagag

SEQ ID NO: 1524890 - DNA, 15 bp, Homo sapiens
agcaacagtgacaga

SEQ ID NO: 1524891 - DNA, 15 bp, Homo sapiens
gagcaacagtgacag

SEQ ID NO: 1524892 - DNA, 15 bp, Homo sapiens
tgagcaacagtgaca

SEQ ID NO: 1524893 - DNA, 15 bp, Homo sapiens
gtgagcaacagtgac

SEQ ID NO: 1524894 - DNA, 15 bp, Homo sapiens
agtgagcaacagtga

SEQ ID NO: 1524895 - DNA, 15 bp, Homo sapiens
gagtgagcaacagtg

SEQ ID NO: 1524896 - DNA, 15 bp, Homo sapiens
cgagtgagcaacagt

SEQ ID NO: 1524897 - DNA, 15 bp, Homo sapiens
gcgagtgagcaacag

SEQ ID NO: 1524898 - DNA, 15 bp, Homo sapiens
agcgagtgagcaaca

SEQ ID NO: 1524899 - DNA, 15 bp, Homo sapiens
gagcgagtgagcaac

SEQ ID NO: 1524900 - DNA, 15 bp, Homo sapiens
agagcgagtgagcaa

SEQ ID NO: 1524901 - DNA, 15 bp, Homo sapiens
gagagcgagtgagca

SEQ ID NO: 1524902 - DNA, 15 bp, Homo sapiens
agagagcgagtgagc

SEQ ID NO: 1524903 - DNA, 15 bp, Homo sapiens
gagagagcgagtgag

SEQ ID NO: 1524904 - DNA, 15 bp, Homo sapiens
tgagagagcgagtga

SEQ ID NO: 1524905 - DNA, 15 bp, Homo sapiens
gtgagagagcgagtg

SEQ ID NO: 1524906 - DNA, 15 bp, Homo sapiens
agtgagagagcgagt

SEQ ID NO: 1524907 - DNA, 15 bp, Homo sapiens
gagtgagagagcgag

SEQ ID NO: 1524908 - DNA, 15 bp, Homo sapiens
agagtgagagagcga

SEQ ID NO: 1524909 - DNA, 15 bp, Homo sapiens
gagagtgagagagcg

SEQ ID NO: 1524910 - DNA, 15 bp, Homo sapiens
tgagagtgagagagc

SEQ ID NO: 1524911 - DNA, 15 bp, Homo sapiens
atgagagtgagagag

SEQ ID NO: 1524912 - DNA, 15 bp, Homo sapiens
catgagagtgagaga

SEQ ID NO: 1524913 - DNA, 15 bp, Homo sapiens
acatgagagtgagag

SEQ ID NO: 1524914 - DNA, 15 bp, Homo sapiens
cacatgagagtgaga

SEQ ID NO: 1524915 - DNA, 15 bp, Homo sapiens
acacatgagagtgag

SEQ ID NO: 1524916 - DNA, 15 bp, Homo sapiens
cacacatgagagtga

SEQ ID NO: 1524917 - DNA, 15 bp, Homo sapiens
acacacatgagagtg

SEQ ID NO: 1524918 - DNA, 15 bp, Homo sapiens
cacacacatgagagt

SEQ ID NO: 1524919 - DNA, 15 bp, Homo sapiens
gcacacacatgagag

SEQ ID NO: 1524920 - DNA, 15 bp, Homo sapiens
agcacacacatgaga

SEQ ID NO: 1524921 - DNA, 15 bp, Homo sapiens
gagcacacacatgag

SEQ ID NO: 1524922 - DNA, 15 bp, Homo sapiens
agagcacacacatga

SEQ ID NO: 1524923 - DNA, 15 bp, Homo sapiens
gagagcacacacatg

SEQ ID NO: 1524924 - DNA, 15 bp, Homo sapiens
agagagcacacacat

SEQ ID NO: 1524925 - DNA, 15 bp, Homo sapiens
gagagagcacacaca

SEQ ID NO: 1524926 - DNA, 15 bp, Homo sapiens
agagagagcacacac

SEQ ID NO: 1524927 - DNA, 15 bp, Homo sapiens
gagagagagcacaca

SEQ ID NO: 1524928 - DNA, 15 bp, Homo sapiens
tgagagagagcacac

SEQ ID NO: 1524929 - DNA, 15 bp, Homo sapiens
gtgagagagagcaca

SEQ ID NO: 1524930 - DNA, 15 bp, Homo sapiens
tgtgagagagagcac

SEQ ID NO: 1524931 - DNA, 15 bp, Homo sapiens
atgtgagagagagca

SEQ ID NO: 1524932 - DNA, 15 bp, Homo sapiens
tatgtgagagagagc

SEQ ID NO: 1524933 - DNA, 15 bp, Homo sapiens
gtatgtgagagagag

SEQ ID NO: 1524934 - DNA, 15 bp, Homo sapiens
tgtatgtgagagaga

SEQ ID NO: 1524935 - DNA, 15 bp, Homo sapiens
gtgtatgtgagagag

SEQ ID NO: 1524936 - DNA, 15 bp, Homo sapiens
ggtgtatgtgagaga

SEQ ID NO: 1524937 - DNA, 15 bp, Homo sapiens
tggtgtatgtgagag

SEQ ID NO: 1524938 - DNA, 15 bp, Homo sapiens
gtggtgtatgtgaga

SEQ ID NO: 1524939 - DNA, 15 bp, Homo sapiens
tgtggtgtatgtgag

SEQ ID NO: 1524940 - DNA, 15 bp, Homo sapiens
gtgtggtgtatgtga

SEQ ID NO: 1524941 - DNA, 15 bp, Homo sapiens
tgtgtggtgtatgtg

SEQ ID NO: 1524942 - DNA, 15 bp, Homo sapiens
gtgtgtggtgtatgt

SEQ ID NO: 1524943 - DNA, 15 bp, Homo sapiens
tgtgtgtggtgtatg

SEQ ID NO: 1524944 - DNA, 15 bp, Homo sapiens
gtgtgtgtggtgtat

SEQ ID NO: 1524945 - DNA, 15 bp, Homo sapiens
tgtgtgtgtggtgta

SEQ ID NO: 1524946 - DNA, 15 bp, Homo sapiens
gtgtgtgtgtggtgt

SEQ ID NO: 1524947 - DNA, 15 bp, Homo sapiens
tgtgtgtgtgtggtg

SEQ ID NO: 1524948 - DNA, 15 bp, Homo sapiens
gtgtgtgtgtgtggt

SEQ ID NO: 1524949 - DNA, 15 bp, Homo sapiens
tggggtgtgtgtgtg

SEQ ID NO: 1524950 - DNA, 15 bp, Homo sapiens
gtggggtgtgtgtgt

SEQ ID NO: 1524951 - DNA, 15 bp, Homo sapiens
ggtggggtgtgtgtg

SEQ ID NO: 1524952 - DNA, 15 bp, Homo sapiens
aggtggggtgtgtgt

SEQ ID NO: 1524953 - DNA, 15 bp, Homo sapiens
taggtggggtgtgtg

SEQ ID NO: 1524954 - DNA, 15 bp, Homo sapiens
gtaggtggggtgtgt

SEQ ID NO: 1524955 - DNA, 15 bp, Homo sapiens
tgtaggtggggtgtg

SEQ ID NO: 1524956 - DNA, 15 bp, Homo sapiens
atgtaggtggggtgt

SEQ ID NO: 1524957 - DNA, 15 bp, Homo sapiens
tatgtaggtggggtg

SEQ ID NO: 1524958 - DNA, 15 bp, Homo sapiens
ttatgtaggtggggt

SEQ ID NO: 1524959 - DNA, 15 bp, Homo sapiens
attatgtaggtgggg

SEQ ID NO: 1524960 - DNA, 15 bp, Homo sapiens
aattatgtaggtggg

SEQ ID NO: 1524961 - DNA, 15 bp, Homo sapiens
aaattatgtaggtgg

SEQ ID NO: 1524962 - DNA, 15 bp, Homo sapiens
gaaattatgtaggtg

SEQ ID NO: 1524963 - DNA, 15 bp, Homo sapiens
agaaattatgtaggt

SEQ ID NO: 1524964 - DNA, 15 bp, Homo sapiens
aagaaattatgtagg

SEQ ID NO: 1524965 - DNA, 15 bp, Homo sapiens
gaagaaattatgtag

SEQ ID NO: 1524966 - DNA, 15 bp, Homo sapiens
agaagaaattatgta

SEQ ID NO: 1524967 - DNA, 15 bp, Homo sapiens
gagaagaaattatgt

SEQ ID NO: 1524968 - DNA, 15 bp, Homo sapiens
agagaagaaattatg

SEQ ID NO: 1524969 - DNA, 15 bp, Homo sapiens
aagagaagaaattat

SEQ ID NO: 1524970 - DNA, 15 bp, Homo sapiens
taagagaagaaatta

SEQ ID NO: 1524971 - DNA, 15 bp, Homo sapiens
gtaagagaagaaatt

SEQ ID NO: 1524972 - DNA, 15 bp, Homo sapiens
tgtaagagaagaaat

SEQ ID NO: 1524973 - DNA, 15 bp, Homo sapiens
gtgtaagagaagaaa

SEQ ID NO: 1524974 - DNA, 15 bp, Homo sapiens
ggtgtaagagaagaa

SEQ ID NO: 1524975 - DNA, 15 bp, Homo sapiens
aggtgtaagagaaga

SEQ ID NO: 1524976 - DNA, 15 bp, Homo sapiens
aaggtgtaagagaag

SEQ ID NO: 1524977 - DNA, 15 bp, Homo sapiens
aaaggtgtaagagaa

SEQ ID NO: 1524978 - DNA, 15 bp, Homo sapiens
taaaggtgtaagaga

SEQ ID NO: 1524979 - DNA, 15 bp, Homo sapiens
ttaaaggtgtaagag

SEQ ID NO: 1524980 - DNA, 15 bp, Homo sapiens
attaaaggtgtaaga

SEQ ID NO: 1524981 - DNA, 15 bp, Homo sapiens
tattaaaggtgtaag

SEQ ID NO: 1524982 - DNA, 15 bp, Homo sapiens
atattaaaggtgtaa

SEQ ID NO: 1524983 - DNA, 15 bp, Homo sapiens
tatattaaaggtgta

SEQ ID NO: 1524984 - DNA, 15 bp, Homo sapiens
ttatattaaaggtgt

SEQ ID NO: 1524985 - DNA, 15 bp, Homo sapiens
tttatattaaaggtg

SEQ ID NO: 1524986 - DNA, 15 bp, Homo sapiens
atttatattaaaggt

SEQ ID NO: 1524987 - DNA, 15 bp, Homo sapiens
tatttatattaaagg

SEQ ID NO: 1524988 - DNA, 15 bp, Homo sapiens
atatttatattaaag

SEQ ID NO: 1524989 - DNA, 15 bp, Homo sapiens
gatatttatattaaa

SEQ ID NO: 1524990 - DNA, 15 bp, Homo sapiens
agatatttatattaa

SEQ ID NO: 1524991 - DNA, 15 bp, Homo sapiens
cagatatttatatta

SEQ ID NO: 1524992 - DNA, 15 bp, Homo sapiens
tcagatatttatatt

SEQ ID NO: 1524993 - DNA, 15 bp, Homo sapiens
ctcagatatttatat

SEQ ID NO: 1524994 - DNA, 15 bp, Homo sapiens
actcagatatttata

SEQ ID NO: 1524995 - DNA, 15 bp, Homo sapiens
aactcagatatttat

SEQ ID NO: 1524996 - DNA, 15 bp, Homo sapiens
aaactcagatattta

SEQ ID NO: 1524997 - DNA, 15 bp, Homo sapiens
aaaactcagatattt

SEQ ID NO: 1524998 - DNA, 15 bp, Homo sapiens
caaaactcagatatt

SEQ ID NO: 1524999 - DNA, 15 bp, Homo sapiens
ccaaaactcagatat

SEQ ID NO: 1525000 - DNA, 15 bp, Homo sapiens
accaaaactcagata

SEQ ID NO: 1525001 - DNA, 15 bp, Homo sapiens
aaccaaaactcagat

SEQ ID NO: 1525002 - DNA, 15 bp, Homo sapiens
gaaccaaaactcaga

SEQ ID NO: 1525003 - DNA, 15 bp, Homo sapiens
tgaaccaaaactcag

SEQ ID NO: 1525004 - DNA, 15 bp, Homo sapiens
ctgaaccaaaactca

SEQ ID NO: 1525005 - DNA, 15 bp, Homo sapiens
actgaaccaaaactc

SEQ ID NO: 1525006 - DNA, 15 bp, Homo sapiens
aactgaaccaaaact

SEQ ID NO: 1525007 - DNA, 15 bp, Homo sapiens
aaactgaaccaaaac

SEQ ID NO: 1525008 - DNA, 15 bp, Homo sapiens
aaaactgaaccaaaa

SEQ ID NO: 1525009 - DNA, 15 bp, Homo sapiens
caaaactgaaccaaa

SEQ ID NO: 1525010 - DNA, 15 bp, Homo sapiens
gcaaaactgaaccaa

SEQ ID NO: 1525011 - DNA, 15 bp, Homo sapiens
tgcaaaactgaacca

SEQ ID NO: 1525012 - DNA, 15 bp, Homo sapiens
ttgcaaaactgaacc

SEQ ID NO: 1525013 - DNA, 15 bp, Homo sapiens
tttgcaaaactgaac

SEQ ID NO: 1525014 - DNA, 15 bp, Homo sapiens
gtttgcaaaactgaa

SEQ ID NO: 1525015 - DNA, 15 bp, Homo sapiens
tgtttgcaaaactga

SEQ ID NO: 1525016 - DNA, 15 bp, Homo sapiens
atgtttgcaaaactg

SEQ ID NO: 1525017 - DNA, 15 bp, Homo sapiens
aatgtttgcaaaact

SEQ ID NO: 1525018 - DNA, 15 bp, Homo sapiens
taaatgtttgcaaaa

SEQ ID NO: 1525019 - DNA, 15 bp, Homo sapiens
ttaaatgtttgcaaa

SEQ ID NO: 1525020 - DNA, 15 bp, Homo sapiens
tttaaatgtttgcaa

SEQ ID NO: 1525021 - DNA, 15 bp, Homo sapiens
ttttaaatgtttgca

SEQ ID NO: 1525022 - DNA, 15 bp, Homo sapiens
cttttaaatgtttgc

SEQ ID NO: 1525023 - DNA, 15 bp, Homo sapiens
ccttttaaatgtttg

SEQ ID NO: 1525024 - DNA, 15 bp, Homo sapiens
gccttttaaatgttt

SEQ ID NO: 1525025 - DNA, 15 bp, Homo sapiens
tgccttttaaatgtt

SEQ ID NO: 1525026 - DNA, 15 bp, Homo sapiens
ttgccttttaaatgt

SEQ ID NO: 1525027 - DNA, 15 bp, Homo sapiens
tttgccttttaaatg

SEQ ID NO: 1525028 - DNA, 15 bp, Homo sapiens
gtttgccttttaaat

SEQ ID NO: 1525029 - DNA, 15 bp, Homo sapiens
tgtttgccttttaaa

SEQ ID NO: 1525030 - DNA, 15 bp, Homo sapiens
atgtttgccttttaa

SEQ ID NO: 1525031 - DNA, 15 bp, Homo sapiens
catgtttgcctttta

SEQ ID NO: 1525032 - DNA, 15 bp, Homo sapiens
ccatgtttgcctttt

SEQ ID NO: 1525033 - DNA, 15 bp, Homo sapiens
accatgtttgccttt

SEQ ID NO: 1525034 - DNA, 15 bp, Homo sapiens
taccatgtttgcctt

SEQ ID NO: 1525035 - DNA, 15 bp, Homo sapiens
ataccatgtttgcct

SEQ ID NO: 1525036 - DNA, 15 bp, Homo sapiens
aataccatgtttgcc

SEQ ID NO: 1525037 - DNA, 15 bp, Homo sapiens
aaataccatgtttgc

SEQ ID NO: 1525038 - DNA, 15 bp, Homo sapiens
aaaataccatgtttg

SEQ ID NO: 1525039 - DNA, 15 bp, Homo sapiens
caaaataccatgttt

SEQ ID NO: 1525040 - DNA, 15 bp, Homo sapiens
gcaaaataccatgtt

SEQ ID NO: 1525041 - DNA, 15 bp, Homo sapiens
agcaaaataccatgt

SEQ ID NO: 1525042 - DNA, 15 bp, Homo sapiens
aagcaaaataccatg

SEQ ID NO: 1525043 - DNA, 15 bp, Homo sapiens
caagcaaaataccat

SEQ ID NO: 1525044 - DNA, 15 bp, Homo sapiens
acaagcaaaatacca

SEQ ID NO: 1525045 - DNA, 15 bp, Homo sapiens
aacaagcaaaatacc

SEQ ID NO: 1525046 - DNA, 15 bp, Homo sapiens
aaacaagcaaaatac

SEQ ID NO: 1525047 - DNA, 15 bp, Homo sapiens
gaaacaagcaaaata

SEQ ID NO: 1525048 - DNA, 15 bp, Homo sapiens
tgaaacaagcaaaat

SEQ ID NO: 1525049 - DNA, 15 bp, Homo sapiens
ctgaaacaagcaaaa

SEQ ID NO: 1525050 - DNA, 15 bp, Homo sapiens
gctgaaacaagcaaa

SEQ ID NO: 1525051 - DNA, 15 bp, Homo sapiens
tgctgaaacaagcaa

SEQ ID NO: 1525052 - DNA, 15 bp, Homo sapiens
atgctgaaacaagca

SEQ ID NO: 1525053 - DNA, 15 bp, Homo sapiens
aatgctgaaacaagc

SEQ ID NO: 1525054 - DNA, 15 bp, Homo sapiens
aaatgctgaaacaag

SEQ ID NO: 1525055 - DNA, 15 bp, Homo sapiens
taaatgctgaaacaa

SEQ ID NO: 1525056 - DNA, 15 bp, Homo sapiens
ttaaatgctgaaaca

SEQ ID NO: 1525057 - DNA, 15 bp, Homo sapiens
attaaatgctgaaac

SEQ ID NO: 1525058 - DNA, 15 bp, Homo sapiens
tattaaatgctgaaa

SEQ ID NO: 1525059 - DNA, 15 bp, Homo sapiens
ttattaaatgctgaa

SEQ ID NO: 1525060 - DNA, 15 bp, Homo sapiens
cttattaaatgctga

SEQ ID NO: 1525061 - DNA, 15 bp, Homo sapiens
ccttattaaatgctg

SEQ ID NO: 1525062 - DNA, 15 bp, Homo sapiens
accttattaaatgct

SEQ ID NO: 1525063 - DNA, 15 bp, Homo sapiens
taccttattaaatgc

SEQ ID NO: 1525064 - DNA, 15 bp, Homo sapiens
ctaccttattaaatg

SEQ ID NO: 1525065 - DNA, 15 bp, Homo sapiens
actaccttattaaat

SEQ ID NO: 1525066 - DNA, 15 bp, Homo sapiens
cactaccttattaaa

SEQ ID NO: 1525067 - DNA, 15 bp, Homo sapiens
gcactaccttattaa

SEQ ID NO: 1525068 - DNA, 15 bp, Homo sapiens
tgcactaccttatta

SEQ ID NO: 1525069 - DNA, 15 bp, Homo sapiens
atgcactaccttatt

SEQ ID NO: 1525070 - DNA, 15 bp, Homo sapiens
tatgcactaccttat

SEQ ID NO: 1525071 - DNA, 15 bp, Homo sapiens
gtatgcactacctta

SEQ ID NO: 1525072 - DNA, 15 bp, Homo sapiens
agtatgcactacctt

SEQ ID NO: 1525073 - DNA, 15 bp, Homo sapiens
aagtatgcactacct

SEQ ID NO: 1525074 - DNA, 15 bp, Homo sapiens
gaagtatgcactacc

SEQ ID NO: 1525075 - DNA, 15 bp, Homo sapiens
agaagtatgcactac

SEQ ID NO: 1525076 - DNA, 15 bp, Homo sapiens
aagaagtatgcacta

SEQ ID NO: 1525077 - DNA, 15 bp, Homo sapiens
aaagaagtatgcact

SEQ ID NO: 1525078 - DNA, 15 bp, Homo sapiens
gaaagaagtatgcac

SEQ ID NO: 1525079 - DNA, 15 bp, Homo sapiens
tgaaagaagtatgca

SEQ ID NO: 1525080 - DNA, 15 bp, Homo sapiens
atgaaagaagtatgc

SEQ ID NO: 1525081 - DNA, 15 bp, Homo sapiens
tatgaaagaagtatg

SEQ ID NO: 1525082 - DNA, 15 bp, Homo sapiens
atatgaaagaagtat

SEQ ID NO: 1525083 - DNA, 15 bp, Homo sapiens
catatgaaagaagta

SEQ ID NO: 1525084 - DNA, 15 bp, Homo sapiens
ccatatgaaagaagt

SEQ ID NO: 1525085 - DNA, 15 bp, Homo sapiens
tccatatgaaagaag

SEQ ID NO: 1525086 - DNA, 15 bp, Homo sapiens
ttccatatgaaagaa

SEQ ID NO: 1525087 - DNA, 15 bp, Homo sapiens
cttccatatgaaaga

SEQ ID NO: 1525088 - DNA, 15 bp, Homo sapiens
ccttccatatgaaag

SEQ ID NO: 1525089 - DNA, 15 bp, Homo sapiens
tccttccatatgaaa

SEQ ID NO: 1525090 - DNA, 15 bp, Homo sapiens
ttccttccatatgaa

SEQ ID NO: 1525091 - DNA, 15 bp, Homo sapiens
tttccttccatatga

SEQ ID NO: 1525092 - DNA, 15 bp, Homo sapiens
ttttccttccatatg

SEQ ID NO: 1525093 - DNA, 15 bp, Homo sapiens
gttttccttccatat

SEQ ID NO: 1525094 - DNA, 15 bp, Homo sapiens
tgttttccttccata

SEQ ID NO: 1525095 - DNA, 15 bp, Homo sapiens
atgttttccttccat

SEQ ID NO: 1525096 - DNA, 15 bp, Homo sapiens
gatgttttccttcca

SEQ ID NO: 1525097 - DNA, 15 bp, Homo sapiens
tgatgttttccttcc

SEQ ID NO: 1525098 - DNA, 15 bp, Homo sapiens
atgatgttttccttc

SEQ ID NO: 1525099 - DNA, 15 bp, Homo sapiens
tatgatgttttcctt

SEQ ID NO: 1525100 - DNA, 15 bp, Homo sapiens
atatgatgttttcct

SEQ ID NO: 1525101 - DNA, 15 bp, Homo sapiens
aatatgatgttttcc

SEQ ID NO: 1525102 - DNA, 15 bp, Homo sapiens
taatatgatgttttc

SEQ ID NO: 1525103 - DNA, 15 bp, Homo sapiens
ttaatatgatgtttt

SEQ ID NO: 1525104 - DNA, 15 bp, Homo sapiens
cttaatatgatgttt

SEQ ID NO: 1525105 - DNA, 15 bp, Homo sapiens
acttaatatgatgtt

SEQ ID NO: 1525106 - DNA, 15 bp, Homo sapiens
aacttaatatgatgt

SEQ ID NO: 1525107 - DNA, 15 bp, Homo sapiens
taacttaatatgatg

SEQ ID NO: 1525108 - DNA, 15 bp, Homo sapiens
ttaacttaatatgat

SEQ ID NO: 1525109 - DNA, 15 bp, Homo sapiens
attaacttaatatga

SEQ ID NO: 1525110 - DNA, 15 bp, Homo sapiens
tattaacttaatatg

SEQ ID NO: 1525111 - DNA, 15 bp, Homo sapiens
atattaacttaatat

SEQ ID NO: 1525112 - DNA, 15 bp, Homo sapiens
aatattaacttaata

SEQ ID NO: 1525113 - DNA, 15 bp, Homo sapiens
aaatattaacttaat

SEQ ID NO: 1525114 - DNA, 15 bp, Homo sapiens
taaatattaacttaa

SEQ ID NO: 1525115 - DNA, 15 bp, Homo sapiens
ttaaatattaactta

SEQ ID NO: 1525116 - DNA, 15 bp, Homo sapiens
tttaaatattaactt

SEQ ID NO: 1525117 - DNA, 15 bp, Homo sapiens
gtttaaatattaact

SEQ ID NO: 1525118 - DNA, 15 bp, Homo sapiens
cgtttaaatattaac

SEQ ID NO: 1525119 - DNA, 15 bp, Homo sapiens
acgtttaaatattaa

SEQ ID NO: 1525120 - DNA, 15 bp, Homo sapiens
tacgtttaaatatta

SEQ ID NO: 1525121 - DNA, 15 bp, Homo sapiens
gtacgtttaaatatt

SEQ ID NO: 1525122 - DNA, 15 bp, Homo sapiens
tgtacgtttaaatat

SEQ ID NO: 1525123 - DNA, 15 bp, Homo sapiens
gtgtacgtttaaata

SEQ ID NO: 1525124 - DNA, 15 bp, Homo sapiens
tgtgtacgtttaaat

SEQ ID NO: 1525125 - DNA, 15 bp, Homo sapiens
ttgtgtacgtttaaa

SEQ ID NO: 1525126 - DNA, 15 bp, Homo sapiens
attgtgtacgtttaa

SEQ ID NO: 1525127 - DNA, 15 bp, Homo sapiens
aattgtgtacgttta

SEQ ID NO: 1525128 - DNA, 15 bp, Homo sapiens
taattgtgtacgttt

SEQ ID NO: 1525129 - DNA, 15 bp, Homo sapiens
ataattgtgtacgtt

SEQ ID NO: 1525130 - DNA, 15 bp, Homo sapiens
tataattgtgtacgt

SEQ ID NO: 1525131 - DNA, 15 bp, Homo sapiens
ttataattgtgtacg

SEQ ID NO: 1525132 - DNA, 15 bp, Homo sapiens
attataattgtgtac

SEQ ID NO: 1525133 - DNA, 15 bp, Homo sapiens
aattataattgtgta

SEQ ID NO: 1525134 - DNA, 15 bp, Homo sapiens
aaattataattgtgt

SEQ ID NO: 1525135 - DNA, 15 bp, Homo sapiens
caaattataattgtg

SEQ ID NO: 1525136 - DNA, 15 bp, Homo sapiens
gcaaattataattgt

SEQ ID NO: 1525137 - DNA, 15 bp, Homo sapiens
tgcaaattataattg

SEQ ID NO: 1525138 - DNA, 15 bp, Homo sapiens
ttgcaaattataatt

SEQ ID NO: 1525139 - DNA, 15 bp, Homo sapiens
tttgcaaattataat

SEQ ID NO: 1525140 - DNA, 15 bp, Homo sapiens
ttttgcaaattataa

SEQ ID NO: 1525141 - DNA, 15 bp, Homo sapiens
tttttgcaaattata

SEQ ID NO: 1525142 - DNA, 15 bp, Homo sapiens
ttttttgcaaattat

SEQ ID NO: 1525143 - DNA, 15 bp, Homo sapiens
tttttttgcaaatta

SEQ ID NO: 1525144 - DNA, 15 bp, Homo sapiens
ttttttttgcaaatt

SEQ ID NO: 1525145 - DNA, 15 bp, Homo sapiens
atttttttttgcaaa

SEQ ID NO: 1525146 - DNA, 15 bp, Homo sapiens
tgatttttttttgca

SEQ ID NO: 1525147 - DNA, 15 bp, Homo sapiens
ttgatttttttttgc

SEQ ID NO: 1525148 - DNA, 15 bp, Homo sapiens
cttgatttttttttg

SEQ ID NO: 1525149 - DNA, 15 bp, Homo sapiens
tcttgattttttttt

SEQ ID NO: 1525150 - DNA, 15 bp, Homo sapiens
atcttgatttttttt

SEQ ID NO: 1525151 - DNA, 15 bp, Homo sapiens
catcttgattttttt

SEQ ID NO: 1525152 - DNA, 15 bp, Homo sapiens
tcatcttgatttttt

SEQ ID NO: 1525153 - DNA, 15 bp, Homo sapiens
atcatcttgattttt

SEQ ID NO: 1525154 - DNA, 15 bp, Homo sapiens
tatcatcttgatttt

SEQ ID NO: 1525155 - DNA, 15 bp, Homo sapiens
ttatcatcttgattt

SEQ ID NO: 1525156 - DNA, 15 bp, Homo sapiens
attatcatcttgatt

SEQ ID NO: 1525157 - DNA, 15 bp, Homo sapiens
aattatcatcttgat

SEQ ID NO: 1525158 - DNA, 15 bp, Homo sapiens
aaattatcatcttga

SEQ ID NO: 1525159 - DNA, 15 bp, Homo sapiens
gaaattatcatcttg

SEQ ID NO: 1525160 - DNA, 15 bp, Homo sapiens
agaaattatcatctt

SEQ ID NO: 1525161 - DNA, 15 bp, Homo sapiens
aagaaattatcatct

SEQ ID NO: 1525162 - DNA, 15 bp, Homo sapiens
taagaaattatcatc

SEQ ID NO: 1525163 - DNA, 15 bp, Homo sapiens
ttaagaaattatcat

SEQ ID NO: 1525164 - DNA, 15 bp, Homo sapiens
tttaagaaattatca

SEQ ID NO: 1525165 - DNA, 15 bp, Homo sapiens
atttaagaaattatc

SEQ ID NO: 1525166 - DNA, 15 bp, Homo sapiens
tatttaagaaattat

SEQ ID NO: 1525167 - DNA, 15 bp, Homo sapiens
ctatttaagaaatta

SEQ ID NO: 1525168 - DNA, 15 bp, Homo sapiens
actatttaagaaatt

SEQ ID NO: 1525169 - DNA, 15 bp, Homo sapiens
tactatttaagaaat

SEQ ID NO: 1525170 - DNA, 15 bp, Homo sapiens
ttactatttaagaaa

SEQ ID NO: 1525171 - DNA, 15 bp, Homo sapiens
tttactatttaagaa

SEQ ID NO: 1525172 - DNA, 15 bp, Homo sapiens
atttactatttaaga

SEQ ID NO: 1525173 - DNA, 15 bp, Homo sapiens
aatttactatttaag

SEQ ID NO: 1525174 - DNA, 15 bp, Homo sapiens
caatttactatttaa

SEQ ID NO: 1525175 - DNA, 15 bp, Homo sapiens
tcaatttactattta

SEQ ID NO: 1525176 - DNA, 15 bp, Homo sapiens
ttcaatttactattt

SEQ ID NO: 1525177 - DNA, 15 bp, Homo sapiens
tttcaatttactatt

SEQ ID NO: 1525178 - DNA, 15 bp, Homo sapiens
atttcaatttactat

SEQ ID NO: 1525179 - DNA, 15 bp, Homo sapiens
tatttcaatttacta

SEQ ID NO: 1525180 - DNA, 15 bp, Homo sapiens
ttatttcaatttact

SEQ ID NO: 1525181 - DNA, 15 bp, Homo sapiens
tttatttcaatttac

SEQ ID NO: 1525182 - DNA, 15 bp, Homo sapiens
atttatttcaattta

SEQ ID NO: 1525183 - DNA, 15 bp, Homo sapiens
catttatttcaattt

SEQ ID NO: 1525184 - DNA, 15 bp, Homo sapiens
tcatttatttcaatt

SEQ ID NO: 1525185 - DNA, 15 bp, Homo sapiens
atcatttatttcaat

SEQ ID NO: 1525186 - DNA, 15 bp, Homo sapiens
tatcatttatttcaa

SEQ ID NO: 1525187 - DNA, 15 bp, Homo sapiens
atatcatttatttca

SEQ ID NO: 1525188 - DNA, 15 bp, Homo sapiens
aaatatcatttattt

SEQ ID NO: 1525189 - DNA, 15 bp, Homo sapiens
aaaatatcatttatt

SEQ ID NO: 1525190 - DNA, 15 bp, Homo sapiens
gaaaatatcatttat

SEQ ID NO: 1525191 - DNA, 15 bp, Homo sapiens
ggaaaatatcattta

SEQ ID NO: 1525192 - DNA, 15 bp, Homo sapiens
aggaaaatatcattt

SEQ ID NO: 1525193 - DNA, 15 bp, Homo sapiens
taggaaaatatcatt

SEQ ID NO: 1525194 - DNA, 15 bp, Homo sapiens
ctaggaaaatatcat

SEQ ID NO: 1525195 - DNA, 15 bp, Homo sapiens
gctaggaaaatatca

SEQ ID NO: 1525196 - DNA, 15 bp, Homo sapiens
tgctaggaaaatatc

SEQ ID NO: 1525197 - DNA, 15 bp, Homo sapiens
atgctaggaaaatat

SEQ ID NO: 1525198 - DNA, 15 bp, Homo sapiens
catgctaggaaaata

SEQ ID NO: 1525199 - DNA, 15 bp, Homo sapiens
gcatgctaggaaaat

SEQ ID NO: 1525200 - DNA, 15 bp, Homo sapiens
agcatgctaggaaaa

SEQ ID NO: 1525201 - DNA, 15 bp, Homo sapiens
aagcatgctaggaaa

SEQ ID NO: 1525202 - DNA, 15 bp, Homo sapiens
caagcatgctaggaa

SEQ ID NO: 1525203 - DNA, 15 bp, Homo sapiens
acaagcatgctagga

SEQ ID NO: 1525204 - DNA, 15 bp, Homo sapiens
gacaagcatgctagg

SEQ ID NO: 1525205 - DNA, 15 bp, Homo sapiens
tgacaagcatgctag

SEQ ID NO: 1525206 - DNA, 15 bp, Homo sapiens
atgacaagcatgcta

SEQ ID NO: 1525207 - DNA, 15 bp, Homo sapiens
aatgacaagcatgct

SEQ ID NO: 1525208 - DNA, 15 bp, Homo sapiens
gaatgacaagcatgc

SEQ ID NO: 1525209 - DNA, 15 bp, Homo sapiens
tgaatgacaagcatg

SEQ ID NO: 1525210 - DNA, 15 bp, Homo sapiens
ctgaatgacaagcat

SEQ ID NO: 1525211 - DNA, 15 bp, Homo sapiens
gctgaatgacaagca

SEQ ID NO: 1525212 - DNA, 15 bp, Homo sapiens
tgctgaatgacaagc

SEQ ID NO: 1525213 - DNA, 15 bp, Homo sapiens
ttgctgaatgacaag

SEQ ID NO: 1525214 - DNA, 15 bp, Homo sapiens
attgctgaatgacaa

SEQ ID NO: 1525215 - DNA, 15 bp, Homo sapiens
tattgctgaatgaca

SEQ ID NO: 1525216 - DNA, 15 bp, Homo sapiens
ttattgctgaatgac

SEQ ID NO: 1525217 - DNA, 15 bp, Homo sapiens
attattgctgaatga

SEQ ID NO: 1525218 - DNA, 15 bp, Homo sapiens
tattattgctgaatg

SEQ ID NO: 1525219 - DNA, 15 bp, Homo sapiens
ttattattgctgaat

SEQ ID NO: 1525220 - DNA, 15 bp, Homo sapiens
cttattattgctgaa

SEQ ID NO: 1525221 - DNA, 15 bp, Homo sapiens
tcttattattgctga

SEQ ID NO: 1525222 - DNA, 15 bp, Homo sapiens
ttcttattattgctg

SEQ ID NO: 1525223 - DNA, 15 bp, Homo sapiens
tttcttattattgct

SEQ ID NO: 1525224 - DNA, 15 bp, Homo sapiens
gtttcttattattgc

SEQ ID NO: 1525225 - DNA, 15 bp, Homo sapiens
agtttcttattattg

SEQ ID NO: 1525226 - DNA, 15 bp, Homo sapiens
cagtttcttattatt

SEQ ID NO: 1525227 - DNA, 15 bp, Homo sapiens
tcagtttcttattat

SEQ ID NO: 1525228 - DNA, 15 bp, Homo sapiens
ctcagtttcttatta

SEQ ID NO: 1525229 - DNA, 15 bp, Homo sapiens
tctcagtttcttatt

SEQ ID NO: 1525230 - DNA, 15 bp, Homo sapiens
atctcagtttcttat

SEQ ID NO: 1525231 - DNA, 15 bp, Homo sapiens
tatctcagtttctta

SEQ ID NO: 1525232 - DNA, 15 bp, Homo sapiens
ttatctcagtttctt

SEQ ID NO: 1525233 - DNA, 15 bp, Homo sapiens
cttatctcagtttct

SEQ ID NO: 1525234 - DNA, 15 bp, Homo sapiens
tcttatctcagtttc

SEQ ID NO: 1525235 - DNA, 15 bp, Homo sapiens
ttcttatctcagttt

SEQ ID NO: 1525236 - DNA, 15 bp, Homo sapiens
attcttatctcagtt

SEQ ID NO: 1525237 - DNA, 15 bp, Homo sapiens
cattcttatctcagt

SEQ ID NO: 1525238 - DNA, 15 bp, Homo sapiens
gcattcttatctcag

SEQ ID NO: 1525239 - DNA, 15 bp, Homo sapiens
tgcattcttatctca

SEQ ID NO: 1525240 - DNA, 15 bp, Homo sapiens
ctgcattcttatctc

SEQ ID NO: 1525241 - DNA, 15 bp, Homo sapiens
cctgcattcttatct

SEQ ID NO: 1525242 - DNA, 15 bp, Homo sapiens
gcctgcattcttatc

SEQ ID NO: 1525243 - DNA, 15 bp, Homo sapiens
tgcctgcattcttat

SEQ ID NO: 1525244 - DNA, 15 bp, Homo sapiens
ctgcctgcattctta

SEQ ID NO: 1525245 - DNA, 15 bp, Homo sapiens
actgcctgcattctt

SEQ ID NO: 1525246 - DNA, 15 bp, Homo sapiens
aactgcctgcattct

SEQ ID NO: 1525247 - DNA, 15 bp, Homo sapiens
caactgcctgcattc

SEQ ID NO: 1525248 - DNA, 15 bp, Homo sapiens
tcaactgcctgcatt

SEQ ID NO: 1525249 - DNA, 15 bp, Homo sapiens
ttcaactgcctgcat

SEQ ID NO: 1525250 - DNA, 15 bp, Homo sapiens
cttcaactgcctgca

SEQ ID NO: 1525251 - DNA, 15 bp, Homo sapiens
acttcaactgcctgc

SEQ ID NO: 1525252 - DNA, 15 bp, Homo sapiens
aacttcaactgcctg

SEQ ID NO: 1525253 - DNA, 15 bp, Homo sapiens
gaacttcaactgcct

SEQ ID NO: 1525254 - DNA, 15 bp, Homo sapiens
tgaacttcaactgcc

SEQ ID NO: 1525255 - DNA, 15 bp, Homo sapiens
gtgaacttcaactgc

SEQ ID NO: 1525256 - DNA, 15 bp, Homo sapiens
agtgaacttcaactg

SEQ ID NO: 1525257 - DNA, 15 bp, Homo sapiens
aagtgaacttcaact

SEQ ID NO: 1525258 - DNA, 15 bp, Homo sapiens
gaagtgaacttcaac

SEQ ID NO: 1525259 - DNA, 15 bp, Homo sapiens
tgaagtgaacttcaa

SEQ ID NO: 1525260 - DNA, 15 bp, Homo sapiens
ctgaagtgaacttca

SEQ ID NO: 1525261 - DNA, 15 bp, Homo sapiens
gctgaagtgaacttc

SEQ ID NO: 1525262 - DNA, 15 bp, Homo sapiens
ggctgaagtgaactt

SEQ ID NO: 1525263 - DNA, 15 bp, Homo sapiens
aggctgaagtgaact

SEQ ID NO: 1525264 - DNA, 15 bp, Homo sapiens
caggctgaagtgaac

SEQ ID NO: 1525265 - DNA, 15 bp, Homo sapiens
tcaggctgaagtgaa

SEQ ID NO: 1525266 - DNA, 15 bp, Homo sapiens
ctcaggctgaagtga

SEQ ID NO: 1525267 - DNA, 15 bp, Homo sapiens
actcaggctgaagtg

SEQ ID NO: 1525268 - DNA, 15 bp, Homo sapiens
cactcaggctgaagt

SEQ ID NO: 1525269 - DNA, 15 bp, Homo sapiens
gcactcaggctgaag

SEQ ID NO: 1525270 - DNA, 15 bp, Homo sapiens
tgcactcaggctgaa

SEQ ID NO: 1525271 - DNA, 15 bp, Homo sapiens
ttgcactcaggctga

SEQ ID NO: 1525272 - DNA, 15 bp, Homo sapiens
cttgcactcaggctg

SEQ ID NO: 1525273 - DNA, 15 bp, Homo sapiens
acttgcactcaggct

SEQ ID NO: 1525274 - DNA, 15 bp, Homo sapiens
tacttgcactcaggc

SEQ ID NO: 1525275 - DNA, 15 bp, Homo sapiens
atacttgcactcagg

SEQ ID NO: 1525276 - DNA, 15 bp, Homo sapiens
tatacttgcactcag

SEQ ID NO: 1525277 - DNA, 15 bp, Homo sapiens
gtatacttgcactca

SEQ ID NO: 1525278 - DNA, 15 bp, Homo sapiens
tgtatacttgcactc

SEQ ID NO: 1525279 - DNA, 15 bp, Homo sapiens
gtgtatacttgcact

SEQ ID NO: 1525280 - DNA, 15 bp, Homo sapiens
tgtgtatacttgcac

SEQ ID NO: 1525281 - DNA, 15 bp, Homo sapiens
ttgtgtatacttgca

SEQ ID NO: 1525282 - DNA, 15 bp, Homo sapiens
tttgtgtatacttgc

SEQ ID NO: 1525283 - DNA, 15 bp, Homo sapiens
ttttgtgtatacttg

SEQ ID NO: 1525284 - DNA, 15 bp, Homo sapiens
gttttgtgtatactt

SEQ ID NO: 1525285 - DNA, 15 bp, Homo sapiens
tgttttgtgtatact

SEQ ID NO: 1525286 - DNA, 15 bp, Homo sapiens
ctgttttgtgtatac

SEQ ID NO: 1525287 - DNA, 15 bp, Homo sapiens
gctgttttgtgtata

SEQ ID NO: 1525288 - DNA, 15 bp, Homo sapiens
tgctgttttgtgtat

SEQ ID NO: 1525289 - DNA, 15 bp, Homo sapiens
ttgctgttttgtgta

SEQ ID NO: 1525290 - DNA, 15 bp, Homo sapiens
tttgctgttttgtgt

SEQ ID NO: 1525291 - DNA, 15 bp, Homo sapiens
ttttgctgttttgtg

SEQ ID NO: 1525292 - DNA, 15 bp, Homo sapiens
tttttgctgttttgt

SEQ ID NO: 1525293 - DNA, 15 bp, Homo sapiens
atttttgctgttttg

SEQ ID NO: 1525294 - DNA, 15 bp, Homo sapiens
tatttttgctgtttt

SEQ ID NO: 1525295 - DNA, 15 bp, Homo sapiens
atatttttgctgttt

SEQ ID NO: 1525296 - DNA, 15 bp, Homo sapiens
aatatttttgctgtt

SEQ ID NO: 1525297 - DNA, 15 bp, Homo sapiens
taatatttttgctgt

SEQ ID NO: 1525298 - DNA, 15 bp, Homo sapiens
gtaatatttttgctg

SEQ ID NO: 1525299 - DNA, 15 bp, Homo sapiens
tgtaatatttttgct

SEQ ID NO: 1525300 - DNA, 15 bp, Homo sapiens
atgtaatatttttgc

SEQ ID NO: 1525301 - DNA, 15 bp, Homo sapiens
tatgtaatatttttg

SEQ ID NO: 1525302 - DNA, 15 bp, Homo sapiens
ctatgtaatattttt

SEQ ID NO: 1525303 - DNA, 15 bp, Homo sapiens
tctatgtaatatttt

SEQ ID NO: 1525304 - DNA, 15 bp, Homo sapiens
ttctatgtaatattt

SEQ ID NO: 1525305 - DNA, 15 bp, Homo sapiens
tttctatgtaatatt

SEQ ID NO: 1525306 - DNA, 15 bp, Homo sapiens
ttttctatgtaatat

SEQ ID NO: 1525307 - DNA, 15 bp, Homo sapiens
attttctatgtaata

SEQ ID NO: 1525308 - DNA, 15 bp, Homo sapiens
tattttctatgtaat

SEQ ID NO: 1525309 - DNA, 15 bp, Homo sapiens
ttattttctatgtaa

SEQ ID NO: 1525310 - DNA, 15 bp, Homo sapiens
tttattttctatgta

SEQ ID NO: 1525311 - DNA, 15 bp, Homo sapiens
atttattttctatgt

SEQ ID NO: 1525312 - DNA, 15 bp, Homo sapiens
catttattttctatg

SEQ ID NO: 1525313 - DNA, 15 bp, Homo sapiens
acatttattttctat

SEQ ID NO: 1525314 - DNA, 15 bp, Homo sapiens
aacatttattttcta

SEQ ID NO: 1525315 - DNA, 15 bp, Homo sapiens
caacatttattttct

SEQ ID NO: 1525316 - DNA, 15 bp, Homo sapiens
acaacatttattttc

SEQ ID NO: 1525317 - DNA, 15 bp, Homo sapiens
ggacaacatttattt

SEQ ID NO: 1525318 - DNA, 15 bp, Homo sapiens
tggacaacatttatt

SEQ ID NO: 1525319 - DNA, 15 bp, Homo sapiens
atggacaacatttat

SEQ ID NO: 1525320 - DNA, 15 bp, Homo sapiens
aatggacaacattta

SEQ ID NO: 1525321 - DNA, 15 bp, Homo sapiens
caatggacaacattt

SEQ ID NO: 1525322 - DNA, 15 bp, Homo sapiens
ccaatggacaacatt

SEQ ID NO: 1525323 - DNA, 15 bp, Homo sapiens
tccaatggacaacat

SEQ ID NO: 1525324 - DNA, 15 bp, Homo sapiens
atccaatggacaaca

SEQ ID NO: 1525325 - DNA, 15 bp, Homo sapiens
aatccaatggacaac

SEQ ID NO: 1525326 - DNA, 15 bp, Homo sapiens
caatccaatggacaa

SEQ ID NO: 1525327 - DNA, 15 bp, Homo sapiens
tcaatccaatggaca

SEQ ID NO: 1525328 - DNA, 15 bp, Homo sapiens
ctcaatccaatggac

SEQ ID NO: 1525329 - DNA, 15 bp, Homo sapiens
actcaatccaatgga

SEQ ID NO: 1525330 - DNA, 15 bp, Homo sapiens
tactcaatccaatgg

SEQ ID NO: 1525331 - DNA, 15 bp, Homo sapiens
atactcaatccaatg

SEQ ID NO: 1525332 - DNA, 15 bp, Homo sapiens
catactcaatccaat

SEQ ID NO: 1525333 - DNA, 15 bp, Homo sapiens
ccatactcaatccaa

SEQ ID NO: 1525334 - DNA, 15 bp, Homo sapiens
accatactcaatcca

SEQ ID NO: 1525335 - DNA, 15 bp, Homo sapiens
caccatactcaatcc

SEQ ID NO: 1525336 - DNA, 15 bp, Homo sapiens
gcaccatactcaatc

SEQ ID NO: 1525337 - DNA, 15 bp, Homo sapiens
agcaccatactcaat

SEQ ID NO: 1525338 - DNA, 15 bp, Homo sapiens
tagcaccatactcaa

SEQ ID NO: 1525339 - DNA, 15 bp, Homo sapiens
gtagcaccatactca

SEQ ID NO: 1525340 - DNA, 15 bp, Homo sapiens
ggtagcaccatactc

SEQ ID NO: 1525341 - DNA, 15 bp, Homo sapiens
tggtagcaccatact

SEQ ID NO: 1525342 - DNA, 15 bp, Homo sapiens
atggtagcaccatac

SEQ ID NO: 1525343 - DNA, 15 bp, Homo sapiens
aatggtagcaccata

SEQ ID NO: 1525344 - DNA, 15 bp, Homo sapiens
aaatggtagcaccat

SEQ ID NO: 1525345 - DNA, 15 bp, Homo sapiens
caaatggtagcacca

SEQ ID NO: 1525346 - DNA, 15 bp, Homo sapiens
acaaatggtagcacc

SEQ ID NO: 1525347 - DNA, 15 bp, Homo sapiens
gacaaatggtagcac

SEQ ID NO: 1525348 - DNA, 15 bp, Homo sapiens
tgacaaatggtagca

SEQ ID NO: 1525349 - DNA, 15 bp, Homo sapiens
gtgacaaatggtagc

SEQ ID NO: 1525350 - DNA, 15 bp, Homo sapiens
tgtgacaaatggtag

SEQ ID NO: 1525351 - DNA, 15 bp, Homo sapiens
ctgtgacaaatggta

SEQ ID NO: 1525352 - DNA, 15 bp, Homo sapiens
actgtgacaaatggt

SEQ ID NO: 1525353 - DNA, 15 bp, Homo sapiens
cactgtgacaaatgg

SEQ ID NO: 1525354 - DNA, 15 bp, Homo sapiens
acactgtgacaaatg

SEQ ID NO: 1525355 - DNA, 15 bp, Homo sapiens
aacactgtgacaaat

SEQ ID NO: 1525356 - DNA, 15 bp, Homo sapiens
gaacactgtgacaaa

SEQ ID NO: 1525357 - DNA, 15 bp, Homo sapiens
tgaacactgtgacaa

SEQ ID NO: 1525358 - DNA, 15 bp, Homo sapiens
atgaacactgtgaca

SEQ ID NO: 1525359 - DNA, 15 bp, Homo sapiens
tatgaacactgtgac

SEQ ID NO: 1525360 - DNA, 15 bp, Homo sapiens
atatgaacactgtga

SEQ ID NO: 1525361 - DNA, 15 bp, Homo sapiens
aatatgaacactgtg

SEQ ID NO: 1525362 - DNA, 15 bp, Homo sapiens
gaatatgaacactgt

SEQ ID NO: 1525363 - DNA, 15 bp, Homo sapiens
tgaatatgaacactg

SEQ ID NO: 1525364 - DNA, 15 bp, Homo sapiens
atgaatatgaacact

SEQ ID NO: 1525365 - DNA, 15 bp, Homo sapiens
tatgaatatgaacac

SEQ ID NO: 1525366 - DNA, 15 bp, Homo sapiens
ctatgaatatgaaca

SEQ ID NO: 1525367 - DNA, 15 bp, Homo sapiens
actatgaatatgaac

SEQ ID NO: 1525368 - DNA, 15 bp, Homo sapiens
aactatgaatatgaa

SEQ ID NO: 1525369 - DNA, 15 bp, Homo sapiens
caactatgaatatga

SEQ ID NO: 1525370 - DNA, 15 bp, Homo sapiens
acaactatgaatatg

SEQ ID NO: 1525371 - DNA, 15 bp, Homo sapiens
cacaactatgaatat

SEQ ID NO: 1525372 - DNA, 15 bp, Homo sapiens
ccacaactatgaata

SEQ ID NO: 1525373 - DNA, 15 bp, Homo sapiens
gccacaactatgaat

SEQ ID NO: 1525374 - DNA, 15 bp, Homo sapiens
agccacaactatgaa

SEQ ID NO: 1525375 - DNA, 15 bp, Homo sapiens
tagccacaactatga

SEQ ID NO: 1525376 - DNA, 15 bp, Homo sapiens
atagccacaactatg

SEQ ID NO: 1525377 - DNA, 15 bp, Homo sapiens
gatagccacaactat

SEQ ID NO: 1525378 - DNA, 15 bp, Homo sapiens
agatagccacaacta

SEQ ID NO: 1525379 - DNA, 15 bp, Homo sapiens
aagatagccacaact

SEQ ID NO: 1525380 - DNA, 15 bp, Homo sapiens
aaagatagccacaac

SEQ ID NO: 1525381 - DNA, 15 bp, Homo sapiens
caaagatagccacaa

SEQ ID NO: 1525382 - DNA, 15 bp, Homo sapiens
ccaaagatagccaca

SEQ ID NO: 1525383 - DNA, 15 bp, Homo sapiens
cccaaagatagccac

SEQ ID NO: 1525384 - DNA, 15 bp, Homo sapiens
ccccaaagatagcca

SEQ ID NO: 1525385 - DNA, 15 bp, Homo sapiens
accccaaagatagcc

SEQ ID NO: 1525386 - DNA, 15 bp, Homo sapiens
gaccccaaagatagc

SEQ ID NO: 1525387 - DNA, 15 bp, Homo sapiens
tgaccccaaagatag

SEQ ID NO: 1525388 - DNA, 15 bp, Homo sapiens
gtgaccccaaagata

SEQ ID NO: 1525389 - DNA, 15 bp, Homo sapiens
agtgaccccaaagat

SEQ ID NO: 1525390 - DNA, 15 bp, Homo sapiens
cagtgaccccaaaga

SEQ ID NO: 1525391 - DNA, 15 bp, Homo sapiens
gcagtgaccccaaag

SEQ ID NO: 1525392 - DNA, 15 bp, Homo sapiens
agcagtgaccccaaa

SEQ ID NO: 1525393 - DNA, 15 bp, Homo sapiens
cagcagtgaccccaa

SEQ ID NO: 1525394 - DNA, 15 bp, Homo sapiens
acagcagtgacccca

SEQ ID NO: 1525395 - DNA, 15 bp, Homo sapiens
tacagcagtgacccc

SEQ ID NO: 1525396 - DNA, 15 bp, Homo sapiens
atacagcagtgaccc

SEQ ID NO: 1525397 - DNA, 15 bp, Homo sapiens
aatacagcagtgacc

SEQ ID NO: 1525398 - DNA, 15 bp, Homo sapiens
gaatacagcagtgac

SEQ ID NO: 1525399 - DNA, 15 bp, Homo sapiens
tgaatacagcagtga

SEQ ID NO: 1525400 - DNA, 15 bp, Homo sapiens
ctgaatacagcagtg

SEQ ID NO: 1525401 - DNA, 15 bp, Homo sapiens
tctgaatacagcagt

SEQ ID NO: 1525402 - DNA, 15 bp, Homo sapiens
gtctgaatacagcag

SEQ ID NO: 1525403 - DNA, 15 bp, Homo sapiens
agtctgaatacagca

SEQ ID NO: 1525404 - DNA, 15 bp, Homo sapiens
aagtctgaatacagc

SEQ ID NO: 1525405 - DNA, 15 bp, Homo sapiens
caagtctgaatacag

SEQ ID NO: 1525406 - DNA, 15 bp, Homo sapiens
acaagtctgaataca

SEQ ID NO: 1525407 - DNA, 15 bp, Homo sapiens
gacaagtctgaatac

SEQ ID NO: 1525408 - DNA, 15 bp, Homo sapiens
agacaagtctgaata

SEQ ID NO: 1525409 - DNA, 15 bp, Homo sapiens
aagacaagtctgaat

SEQ ID NO: 1525410 - DNA, 15 bp, Homo sapiens
caagacaagtctgaa

SEQ ID NO: 1525411 - DNA, 15 bp, Homo sapiens
ccaagacaagtctga

SEQ ID NO: 1525412 - DNA, 15 bp, Homo sapiens
tccaagacaagtctg

SEQ ID NO: 1525413 - DNA, 15 bp, Homo sapiens
ttccaagacaagtct

SEQ ID NO: 1525414 - DNA, 15 bp, Homo sapiens
attccaagacaagtc

SEQ ID NO: 1525415 - DNA, 15 bp, Homo sapiens
aattccaagacaagt

SEQ ID NO: 1525416 - DNA, 15 bp, Homo sapiens
aaattccaagacaag

SEQ ID NO: 1525417 - DNA, 15 bp, Homo sapiens
caaattccaagacaa

SEQ ID NO: 1525418 - DNA, 15 bp, Homo sapiens
ccaaattccaagaca

SEQ ID NO: 1525419 - DNA, 15 bp, Homo sapiens
tccaaattccaagac

SEQ ID NO: 1525420 - DNA, 15 bp, Homo sapiens
ctccaaattccaaga

SEQ ID NO: 1525421 - DNA, 15 bp, Homo sapiens
actccaaattccaag

SEQ ID NO: 1525422 - DNA, 15 bp, Homo sapiens
gactccaaattccaa

SEQ ID NO: 1525423 - DNA, 15 bp, Homo sapiens
tgactccaaattcca

SEQ ID NO: 1525424 - DNA, 15 bp, Homo sapiens
atgactccaaattcc

SEQ ID NO: 1525425 - DNA, 15 bp, Homo sapiens
gatgactccaaattc

SEQ ID NO: 1525426 - DNA, 15 bp, Homo sapiens
agatgactccaaatt

SEQ ID NO: 1525427 - DNA, 15 bp, Homo sapiens
tagatgactccaaat

SEQ ID NO: 1525428 - DNA, 15 bp, Homo sapiens
ctagatgactccaaa

SEQ ID NO: 1525429 - DNA, 15 bp, Homo sapiens
cctagatgactccaa

SEQ ID NO: 1525430 - DNA, 15 bp, Homo sapiens
ccctagatgactcca

SEQ ID NO: 1525431 - DNA, 15 bp, Homo sapiens
tccctagatgactcc

SEQ ID NO: 1525432 - DNA, 15 bp, Homo sapiens
atccctagatgactc

SEQ ID NO: 1525433 - DNA, 15 bp, Homo sapiens
aatccctagatgact

SEQ ID NO: 1525434 - DNA, 15 bp, Homo sapiens
aaatccctagatgac

SEQ ID NO: 1525435 - DNA, 15 bp, Homo sapiens
caaatccctagatga

SEQ ID NO: 1525436 - DNA, 15 bp, Homo sapiens
tcaaatccctagatg

SEQ ID NO: 1525437 - DNA, 15 bp, Homo sapiens
ctcaaatccctagat

SEQ ID NO: 1525438 - DNA, 15 bp, Homo sapiens
cctcaaatccctaga

SEQ ID NO: 1525439 - DNA, 15 bp, Homo sapiens
acctcaaatccctag

SEQ ID NO: 1525440 - DNA, 15 bp, Homo sapiens
gacctcaaatcccta

SEQ ID NO: 1525441 - DNA, 15 bp, Homo sapiens
tgacctcaaatccct

SEQ ID NO: 1525442 - DNA, 15 bp, Homo sapiens
atgacctcaaatccc

SEQ ID NO: 1525443 - DNA, 15 bp, Homo sapiens
aatgacctcaaatcc

SEQ ID NO: 1525444 - DNA, 15 bp, Homo sapiens
aaatgacctcaaatc

SEQ ID NO: 1525445 - DNA, 15 bp, Homo sapiens
aaaatgacctcaaat

SEQ ID NO: 1525446 - DNA, 15 bp, Homo sapiens
caaaatgacctcaaa

SEQ ID NO: 1525447 - DNA, 15 bp, Homo sapiens
tcaaaatgacctcaa

SEQ ID NO: 1525448 - DNA, 15 bp, Homo sapiens
ctcaaaatgacctca

SEQ ID NO: 1525449 - DNA, 15 bp, Homo sapiens
tctcaaaatgacctc

SEQ ID NO: 1525450 - DNA, 15 bp, Homo sapiens
atctcaaaatgacct

SEQ ID NO: 1525451 - DNA, 15 bp, Homo sapiens
aatctcaaaatgacc

SEQ ID NO: 1525452 - DNA, 15 bp, Homo sapiens
aaatctcaaaatgac

SEQ ID NO: 1525453 - DNA, 15 bp, Homo sapiens
caaatctcaaaatga

SEQ ID NO: 1525454 - DNA, 15 bp, Homo sapiens
ccaaatctcaaaatg

SEQ ID NO: 1525455 - DNA, 15 bp, Homo sapiens
cccaaatctcaaaat

SEQ ID NO: 1525456 - DNA, 15 bp, Homo sapiens
gcccaaatctcaaaa

SEQ ID NO: 1525457 - DNA, 15 bp, Homo sapiens
agcccaaatctcaaa

SEQ ID NO: 1525458 - DNA, 15 bp, Homo sapiens
aagcccaaatctcaa

SEQ ID NO: 1525459 - DNA, 15 bp, Homo sapiens
caagcccaaatctca

SEQ ID NO: 1525460 - DNA, 15 bp, Homo sapiens
acaagcccaaatctc

SEQ ID NO: 1525461 - DNA, 15 bp, Homo sapiens
gacaagcccaaatct

SEQ ID NO: 1525462 - DNA, 15 bp, Homo sapiens
ggacaagcccaaatc

SEQ ID NO: 1525463 - DNA, 15 bp, Homo sapiens
gggacaagcccaaat

SEQ ID NO: 1525464 - DNA, 15 bp, Homo sapiens
tgggacaagcccaaa

SEQ ID NO: 1525465 - DNA, 15 bp, Homo sapiens
ctgggacaagcccaa

SEQ ID NO: 1525466 - DNA, 15 bp, Homo sapiens
cctgggacaagccca

SEQ ID NO: 1525467 - DNA, 15 bp, Homo sapiens
tcctgggacaagccc

SEQ ID NO: 1525468 - DNA, 15 bp, Homo sapiens
atcctgggacaagcc

SEQ ID NO: 1525469 - DNA, 15 bp, Homo sapiens
aatcctgggacaagc

SEQ ID NO: 1525470 - DNA, 15 bp, Homo sapiens
caatcctgggacaag

SEQ ID NO: 1525471 - DNA, 15 bp, Homo sapiens
ccaatcctgggacaa

SEQ ID NO: 1525472 - DNA, 15 bp, Homo sapiens
accaatcctgggaca

SEQ ID NO: 1525473 - DNA, 15 bp, Homo sapiens
caccaatcctgggac

SEQ ID NO: 1525474 - DNA, 15 bp, Homo sapiens
gcaccaatcctggga

SEQ ID NO: 1525475 - DNA, 15 bp, Homo sapiens
agcaccaatcctggg

SEQ ID NO: 1525476 - DNA, 15 bp, Homo sapiens
tagcaccaatcctgg

SEQ ID NO: 1525477 - DNA, 15 bp, Homo sapiens
gtagcaccaatcctg

SEQ ID NO: 1525478 - DNA, 15 bp, Homo sapiens
ggtagcaccaatcct

SEQ ID NO: 1525479 - DNA, 15 bp, Homo sapiens
tggtagcaccaatcc

SEQ ID NO: 1525480 - DNA, 15 bp, Homo sapiens
atggtagcaccaatc

SEQ ID NO: 1525481 - DNA, 15 bp, Homo sapiens
aatggtagcaccaat

SEQ ID NO: 1525482 - DNA, 15 bp, Homo sapiens
aaatggtagcaccaa

SEQ ID NO: 1525483 - DNA, 15 bp, Homo sapiens
tactgtgacaaatgg

SEQ ID NO: 1525484 - DNA, 15 bp, Homo sapiens
atactgtgacaaatg

SEQ ID NO: 1525485 - DNA, 15 bp, Homo sapiens
aatactgtgacaaat

SEQ ID NO: 1525486 - DNA, 15 bp, Homo sapiens
gaatactgtgacaaa

SEQ ID NO: 1525487 - DNA, 15 bp, Homo sapiens
tgaatactgtgacaa

SEQ ID NO: 1525488 - DNA, 15 bp, Homo sapiens
atgaatactgtgaca

SEQ ID NO: 1525489 - DNA, 15 bp, Homo sapiens
tatgaatactgtgac

SEQ ID NO: 1525490 - DNA, 15 bp, Homo sapiens
atatgaatactgtga

SEQ ID NO: 1525491 - DNA, 15 bp, Homo sapiens
aatatgaatactgtg

SEQ ID NO: 1525492 - DNA, 15 bp, Homo sapiens
gaatatgaatactgt

SEQ ID NO: 1525493 - DNA, 15 bp, Homo sapiens
tgaatatgaatactg

SEQ ID NO: 1525494 - DNA, 15 bp, Homo sapiens
atgaatatgaatact

SEQ ID NO: 1525495 - DNA, 15 bp, Homo sapiens
tatgaatatgaatac

SEQ ID NO: 1525496 - DNA, 15 bp, Homo sapiens
ctatgaatatgaata

SEQ ID NO: 1525497 - DNA, 15 bp, Homo sapiens
actatgaatatgaat

SEQ ID NO: 1525498 - DNA, 15 bp, Homo sapiens
gagccacaactatga

SEQ ID NO: 1525499 - DNA, 15 bp, Homo sapiens
agagccacaactatg

SEQ ID NO: 1525500 - DNA, 15 bp, Homo sapiens
aagagccacaactat

SEQ ID NO: 1525501 - DNA, 15 bp, Homo sapiens
aaagagccacaacta

SEQ ID NO: 1525502 - DNA, 15 bp, Homo sapiens
caaagagccacaact

SEQ ID NO: 1525503 - DNA, 15 bp, Homo sapiens
ccaaagagccacaac

SEQ ID NO: 1525504 - DNA, 15 bp, Homo sapiens
cccaaagagccacaa

SEQ ID NO: 1525505 - DNA, 15 bp, Homo sapiens
ccccaaagagccaca

SEQ ID NO: 1525506 - DNA, 15 bp, Homo sapiens
accccaaagagccac

SEQ ID NO: 1525507 - DNA, 15 bp, Homo sapiens
gaccccaaagagcca

SEQ ID NO: 1525508 - DNA, 15 bp, Homo sapiens
tgaccccaaagagcc

SEQ ID NO: 1525509 - DNA, 15 bp, Homo sapiens
gtgaccccaaagagc

SEQ ID NO: 1525510 - DNA, 15 bp, Homo sapiens
agtgaccccaaagag

SEQ ID NO: 1525511 - DNA, 15 bp, Homo sapiens
gagcagtgaccccaa

SEQ ID NO: 1525512 - DNA, 15 bp, Homo sapiens
agagcagtgacccca

SEQ ID NO: 1525513 - DNA, 15 bp, Homo sapiens
tagagcagtgacccc

SEQ ID NO: 1525514 - DNA, 15 bp, Homo sapiens
atagagcagtgaccc

SEQ ID NO: 1525515 - DNA, 15 bp, Homo sapiens
aatagagcagtgacc

SEQ ID NO: 1525516 - DNA, 15 bp, Homo sapiens
gaatagagcagtgac

SEQ ID NO: 1525517 - DNA, 15 bp, Homo sapiens
tgaatagagcagtga

SEQ ID NO: 1525518 - DNA, 15 bp, Homo sapiens
ctgaatagagcagtg

SEQ ID NO: 1525519 - DNA, 15 bp, Homo sapiens
tctgaatagagcagt

SEQ ID NO: 1525520 - DNA, 15 bp, Homo sapiens
gtctgaatagagcag

SEQ ID NO: 1525521 - DNA, 15 bp, Homo sapiens
agtctgaatagagca

SEQ ID NO: 1525522 - DNA, 15 bp, Homo sapiens
aagtctgaatagagc

SEQ ID NO: 1525523 - DNA, 15 bp, Homo sapiens
caagtctgaatagag

SEQ ID NO: 1525524 - DNA, 15 bp, Homo sapiens
acaagtctgaataga

SEQ ID NO: 1525525 - DNA, 15 bp, Homo sapiens
gacaagtctgaatag

SEQ ID NO: 1525526 - DNA, 15 bp, Homo sapiens
aagatgactccaaat

SEQ ID NO: 1525527 - DNA, 15 bp, Homo sapiens
caagatgactccaaa

SEQ ID NO: 1525528 - DNA, 15 bp, Homo sapiens
ccaagatgactccaa

SEQ ID NO: 1525529 - DNA, 15 bp, Homo sapiens
cccaagatgactcca

SEQ ID NO: 1525530 - DNA, 15 bp, Homo sapiens
tcccaagatgactcc

SEQ ID NO: 1525531 - DNA, 15 bp, Homo sapiens
gtcccaagatgactc

SEQ ID NO: 1525532 - DNA, 15 bp, Homo sapiens
agtcccaagatgact

SEQ ID NO: 1525533 - DNA, 15 bp, Homo sapiens
gagtcccaagatgac

SEQ ID NO: 1525534 - DNA, 15 bp, Homo sapiens
cgagtcccaagatga

SEQ ID NO: 1525535 - DNA, 15 bp, Homo sapiens
tcgagtcccaagatg

SEQ ID NO: 1525536 - DNA, 15 bp, Homo sapiens
ctcgagtcccaagat

SEQ ID NO: 1525537 - DNA, 15 bp, Homo sapiens
cctcgagtcccaaga

SEQ ID NO: 1525538 - DNA, 15 bp, Homo sapiens
acctcgagtcccaag

SEQ ID NO: 1525539 - DNA, 15 bp, Homo sapiens
gacctcgagtcccaa

SEQ ID NO: 1525540 - DNA, 15 bp, Homo sapiens
tgacctcgagtccca

SEQ ID NO: 1525541 - DNA, 15 bp, Homo sapiens
atgacctcgagtccc

SEQ ID NO: 1525542 - DNA, 15 bp, Homo sapiens
aatgacctcgagtcc

SEQ ID NO: 1525543 - DNA, 15 bp, Homo sapiens
aaatgacctcgagtc

SEQ ID NO: 1525544 - DNA, 15 bp, Homo sapiens
aaaatgacctcgagt

SEQ ID NO: 1525545 - DNA, 15 bp, Homo sapiens
caaaatgacctcgag

SEQ ID NO: 1525546 - DNA, 15 bp, Homo sapiens
tcaaaatgacctcga

SEQ ID NO: 1525547 - DNA, 15 bp, Homo sapiens
ctcaaaatgacctcg

SEQ ID NO: 1525548 - DNA, 15 bp, Homo sapiens
gatctcaaaatgacc

SEQ ID NO: 1525549 - DNA, 15 bp, Homo sapiens
agatctcaaaatgac

SEQ ID NO: 1525550 - DNA, 15 bp, Homo sapiens
cagatctcaaaatga

SEQ ID NO: 1525551 - DNA, 15 bp, Homo sapiens
ccagatctcaaaatg

SEQ ID NO: 1525552 - DNA, 15 bp, Homo sapiens
cccagatctcaaaat

SEQ ID NO: 1525553 - DNA, 15 bp, Homo sapiens
gcccagatctcaaaa

SEQ ID NO: 1525554 - DNA, 15 bp, Homo sapiens
agcccagatctcaaa

SEQ ID NO: 1525555 - DNA, 15 bp, Homo sapiens
aagcccagatctcaa

SEQ ID NO: 1525556 - DNA, 15 bp, Homo sapiens
taagcccagatctca

SEQ ID NO: 1525557 - DNA, 15 bp, Homo sapiens
ataagcccagatctc

SEQ ID NO: 1525558 - DNA, 15 bp, Homo sapiens
gataagcccagatct

SEQ ID NO: 1525559 - DNA, 15 bp, Homo sapiens
ggataagcccagatc

SEQ ID NO: 1525560 - DNA, 15 bp, Homo sapiens
gggataagcccagat

SEQ ID NO: 1525561 - DNA, 15 bp, Homo sapiens
tgggataagcccaga

SEQ ID NO: 1525562 - DNA, 15 bp, Homo sapiens
ctgggataagcccag

SEQ ID NO: 1525563 - DNA, 15 bp, Homo sapiens
cctgggataagccca

SEQ ID NO: 1525564 - DNA, 15 bp, Homo sapiens
tcctgggataagccc

SEQ ID NO: 1525565 - DNA, 15 bp, Homo sapiens
atcctgggataagcc

SEQ ID NO: 1525566 - DNA, 15 bp, Homo sapiens
aatcctgggataagc

SEQ ID NO: 1525567 - DNA, 15 bp, Homo sapiens
caatcctgggataag

SEQ ID NO: 1525568 - DNA, 15 bp, Homo sapiens
ccaatcctgggataa

SEQ ID NO: 1525569 - DNA, 15 bp, Homo sapiens
cccaatcctgggata

SEQ ID NO: 1525570 - DNA, 15 bp, Homo sapiens
ccccaatcctgggat

SEQ ID NO: 1525571 - DNA, 15 bp, Homo sapiens
accccaatcctggga

SEQ ID NO: 1525572 - DNA, 15 bp, Homo sapiens
aaccccaatcctggg

SEQ ID NO: 1525573 - DNA, 15 bp, Homo sapiens
gaaccccaatcctgg

SEQ ID NO: 1525574 - DNA, 15 bp, Homo sapiens
tgaaccccaatcctg

SEQ ID NO: 1525575 - DNA, 15 bp, Homo sapiens
atgaaccccaatcct

SEQ ID NO: 1525576 - DNA, 15 bp, Homo sapiens
aatgaaccccaatcc

SEQ ID NO: 1525577 - DNA, 15 bp, Homo sapiens
gaatgaaccccaatc

SEQ ID NO: 1525578 - DNA, 15 bp, Homo sapiens
agaatgaaccccaat

SEQ ID NO: 1525579 - DNA, 15 bp, Homo sapiens
cagaatgaaccccaa

SEQ ID NO: 1525580 - DNA, 15 bp, Homo sapiens
ccagaatgaacccca

SEQ ID NO: 1525581 - DNA, 15 bp, Homo sapiens
cccagaatgaacccc

SEQ ID NO: 1525582 - DNA, 15 bp, Homo sapiens
tcccagaatgaaccc

SEQ ID NO: 1525583 - DNA, 15 bp, Homo sapiens
atcccagaatgaacc

SEQ ID NO: 1525584 - DNA, 15 bp, Homo sapiens
aatcccagaatgaac

SEQ ID NO: 1525585 - DNA, 15 bp, Homo sapiens
caatcccagaatgaa

SEQ ID NO: 1525586 - DNA, 15 bp, Homo sapiens
ccaatcccagaatga

SEQ ID NO: 1525587 - DNA, 15 bp, Homo sapiens
accaatcccagaatg

SEQ ID NO: 1525588 - DNA, 15 bp, Homo sapiens
caccaatcccagaat

SEQ ID NO: 1525589 - DNA, 15 bp, Homo sapiens
gcaccaatcccagaa

SEQ ID NO: 1525590 - DNA, 15 bp, Homo sapiens
agcaccaatcccaga

SEQ ID NO: 1525591 - DNA, 15 bp, Homo sapiens
gagcaccaatcccag

SEQ ID NO: 1525592 - DNA, 15 bp, Homo sapiens
agagcaccaatccca

SEQ ID NO: 1525593 - DNA, 15 bp, Homo sapiens
aagagcaccaatccc

SEQ ID NO: 1525594 - DNA, 15 bp, Homo sapiens
gaagagcaccaatcc

SEQ ID NO: 1525595 - DNA, 15 bp, Homo sapiens
ggaagagcaccaatc

SEQ ID NO: 1525596 - DNA, 15 bp, Homo sapiens
aggaagagcaccaat

SEQ ID NO: 1525597 - DNA, 15 bp, Homo sapiens
caggaagagcaccaa

SEQ ID NO: 1525598 - DNA, 15 bp, Homo sapiens
ccaggaagagcacca

SEQ ID NO: 1525599 - DNA, 15 bp, Homo sapiens
cccaggaagagcacc

SEQ ID NO: 1525600 - DNA, 15 bp, Homo sapiens
tcccaggaagagcac

SEQ ID NO: 1525601 - DNA, 15 bp, Homo sapiens
atcccaggaagagca

SEQ ID NO: 1525602 - DNA, 15 bp, Homo sapiens
aatcccaggaagagc

SEQ ID NO: 1525603 - DNA, 15 bp, Homo sapiens
taatcccaggaagag

SEQ ID NO: 1525604 - DNA, 15 bp, Homo sapiens
ctaatcccaggaaga

SEQ ID NO: 1525605 - DNA, 15 bp, Homo sapiens
cctaatcccaggaag

SEQ ID NO: 1525606 - DNA, 15 bp, Homo sapiens
acctaatcccaggaa

SEQ ID NO: 1525607 - DNA, 15 bp, Homo sapiens
gacctaatcccagga

SEQ ID NO: 1525608 - DNA, 15 bp, Homo sapiens
agacctaatcccagg

SEQ ID NO: 1525609 - DNA, 15 bp, Homo sapiens
cagacctaatcccag

SEQ ID NO: 1525610 - DNA, 15 bp, Homo sapiens
ccagacctaatccca

SEQ ID NO: 1525611 - DNA, 15 bp, Homo sapiens
accagacctaatccc

SEQ ID NO: 1525612 - DNA, 15 bp, Homo sapiens
gaccagacctaatcc

SEQ ID NO: 1525613 - DNA, 15 bp, Homo sapiens
ggaccagacctaatc

SEQ ID NO: 1525614 - DNA, 15 bp, Homo sapiens
gggaccagacctaat

SEQ ID NO: 1525615 - DNA, 15 bp, Homo sapiens
cgggaccagacctaa

SEQ ID NO: 1525616 - DNA, 15 bp, Homo sapiens
ccgggaccagaccta

SEQ ID NO: 1525617 - DNA, 15 bp, Homo sapiens
cccgggaccagacct

SEQ ID NO: 1525618 - DNA, 15 bp, Homo sapiens
tcccgggaccagacc

SEQ ID NO: 1525619 - DNA, 15 bp, Homo sapiens
atcccgggaccagac

SEQ ID NO: 1525620 - DNA, 15 bp, Homo sapiens
aatcccgggaccaga

SEQ ID NO: 1525621 - DNA, 15 bp, Homo sapiens
gaatcccgggaccag

SEQ ID NO: 1525622 - DNA, 15 bp, Homo sapiens
tgaatcccgggacca

SEQ ID NO: 1525623 - DNA, 15 bp, Homo sapiens
ctgaatcccgggacc

SEQ ID NO: 1525624 - DNA, 15 bp, Homo sapiens
cctgaatcccgggac

SEQ ID NO: 1525625 - DNA, 15 bp, Homo sapiens
gcctgaatcccggga

SEQ ID NO: 1525626 - DNA, 15 bp, Homo sapiens
agcctgaatcccggg

SEQ ID NO: 1525627 - DNA, 15 bp, Homo sapiens
aagcctgaatcccgg

SEQ ID NO: 1525628 - DNA, 15 bp, Homo sapiens
caagcctgaatcccg

SEQ ID NO: 1525629 - DNA, 15 bp, Homo sapiens
tcaagcctgaatccc

SEQ ID NO: 1525630 - DNA, 15 bp, Homo sapiens
gtcaagcctgaatcc

SEQ ID NO: 1525631 - DNA, 15 bp, Homo sapiens
cgtcaagcctgaatc

SEQ ID NO: 1525632 - DNA, 15 bp, Homo sapiens
gcgtcaagcctgaat

SEQ ID NO: 1525633 - DNA, 15 bp, Homo sapiens
tgcgtcaagcctgaa

SEQ ID NO: 1525634 - DNA, 15 bp, Homo sapiens
ctgcgtcaagcctga

SEQ ID NO: 1525635 - DNA, 15 bp, Homo sapiens
cctgcgtcaagcctg

SEQ ID NO: 1525636 - DNA, 15 bp, Homo sapiens
tcctgcgtcaagcct

SEQ ID NO: 1525637 - DNA, 15 bp, Homo sapiens
atcctgcgtcaagcc

SEQ ID NO: 1525638 - DNA, 15 bp, Homo sapiens
aatcctgcgtcaagc

SEQ ID NO: 1525639 - DNA, 15 bp, Homo sapiens
caatcctgcgtcaag

SEQ ID NO: 1525640 - DNA, 15 bp, Homo sapiens
ccaatcctgcgtcaa

SEQ ID NO: 1525641 - DNA, 15 bp, Homo sapiens
tccaatcctgcgtca

SEQ ID NO: 1525642 - DNA, 15 bp, Homo sapiens
atccaatcctgcgtc

SEQ ID NO: 1525643 - DNA, 15 bp, Homo sapiens
tatccaatcctgcgt

SEQ ID NO: 1525644 - DNA, 15 bp, Homo sapiens
gtatccaatcctgcg

SEQ ID NO: 1525645 - DNA, 15 bp, Homo sapiens
agtatccaatcctgc

SEQ ID NO: 1525646 - DNA, 15 bp, Homo sapiens
cagtatccaatcctg

SEQ ID NO: 1525647 - DNA, 15 bp, Homo sapiens
gcagtatccaatcct

SEQ ID NO: 1525648 - DNA, 15 bp, Homo sapiens
ggcagtatccaatcc

SEQ ID NO: 1525649 - DNA, 15 bp, Homo sapiens
tggcagtatccaatc

SEQ ID NO: 1525650 - DNA, 15 bp, Homo sapiens
atggcagtatccaat

SEQ ID NO: 1525651 - DNA, 15 bp, Homo sapiens
tatggcagtatccaa

SEQ ID NO: 1525652 - DNA, 15 bp, Homo sapiens
ctatggcagtatcca

SEQ ID NO: 1525653 - DNA, 15 bp, Homo sapiens
tctatggcagtatcc

SEQ ID NO: 1525654 - DNA, 15 bp, Homo sapiens
ttctatggcagtatc

SEQ ID NO: 1525655 - DNA, 15 bp, Homo sapiens
attctatggcagtat

SEQ ID NO: 1525656 - DNA, 15 bp, Homo sapiens
aattctatggcagta

SEQ ID NO: 1525657 - DNA, 15 bp, Homo sapiens
aaattctatggcagt

SEQ ID NO: 1525658 - DNA, 15 bp, Homo sapiens
caaattctatggcag

SEQ ID NO: 1525659 - DNA, 15 bp, Homo sapiens
tcaaattctatggca

SEQ ID NO: 1525660 - DNA, 15 bp, Homo sapiens
ctcaaattctatggc

SEQ ID NO: 1525661 - DNA, 15 bp, Homo sapiens
cctcaaattctatgg

SEQ ID NO: 1525662 - DNA, 15 bp, Homo sapiens
acctcaaattctatg

SEQ ID NO: 1525663 - DNA, 15 bp, Homo sapiens
aacctcaaattctat

SEQ ID NO: 1525664 - DNA, 15 bp, Homo sapiens
caacctcaaattcta

SEQ ID NO: 1525665 - DNA, 15 bp, Homo sapiens
acaacctcaaattct

SEQ ID NO: 1525666 - DNA, 15 bp, Homo sapiens
aacaacctcaaattc

SEQ ID NO: 1525667 - DNA, 15 bp, Homo sapiens
caacaacctcaaatt

SEQ ID NO: 1525668 - DNA, 15 bp, Homo sapiens
tcaacaacctcaaat

SEQ ID NO: 1525669 - DNA, 15 bp, Homo sapiens
atcaacaacctcaaa

SEQ ID NO: 1525670 - DNA, 15 bp, Homo sapiens
catcaacaacctcaa

SEQ ID NO: 1525671 - DNA, 15 bp, Homo sapiens
acatcaacaacctca

SEQ ID NO: 1525672 - DNA, 15 bp, Homo sapiens
aacatcaacaacctc

SEQ ID NO: 1525673 - DNA, 15 bp, Homo sapiens
caacatcaacaacct

SEQ ID NO: 1525674 - DNA, 15 bp, Homo sapiens
tcaacatcaacaacc

SEQ ID NO: 1525675 - DNA, 15 bp, Homo sapiens
ttcaacatcaacaac

SEQ ID NO: 1525676 - DNA, 15 bp, Homo sapiens
cttcaacatcaacaa

SEQ ID NO: 1525677 - DNA, 15 bp, Homo sapiens
acttcaacatcaaca

SEQ ID NO: 1525678 - DNA, 15 bp, Homo sapiens
aacttcaacatcaac

SEQ ID NO: 1525679 - DNA, 15 bp, Homo sapiens
aaacttcaacatcaa

SEQ ID NO: 1525680 - DNA, 15 bp, Homo sapiens
caaacttcaacatca

SEQ ID NO: 1525681 - DNA, 15 bp, Homo sapiens
acaaacttcaacatc

SEQ ID NO: 1525682 - DNA, 15 bp, Homo sapiens
gacaaacttcaacat

SEQ ID NO: 1525683 - DNA, 15 bp, Homo sapiens
ggacaaacttcaaca

SEQ ID NO: 1525684 - DNA, 15 bp, Homo sapiens
gggacaaacttcaac

SEQ ID NO: 1525685 - DNA, 15 bp, Homo sapiens
ggggacaaacttcaa

SEQ ID NO: 1525686 - DNA, 15 bp, Homo sapiens
cggggacaaacttca

SEQ ID NO: 1525687 - DNA, 15 bp, Homo sapiens
ccggggacaaacttc

SEQ ID NO: 1525688 - DNA, 15 bp, Homo sapiens
tccggggacaaactt

SEQ ID NO: 1525689 - DNA, 15 bp, Homo sapiens
ttccggggacaaact

SEQ ID NO: 1525690 - DNA, 15 bp, Homo sapiens
attccggggacaaac

SEQ ID NO: 1525691 - DNA, 15 bp, Homo sapiens
cattccggggacaaa

SEQ ID NO: 1525692 - DNA, 15 bp, Homo sapiens
acattccggggacaa

SEQ ID NO: 1525693 - DNA, 15 bp, Homo sapiens
aacattccggggaca

SEQ ID NO: 1525694 - DNA, 15 bp, Homo sapiens
taacattccggggac

SEQ ID NO: 1525695 - DNA, 15 bp, Homo sapiens
ttaacattccgggga

SEQ ID NO: 1525696 - DNA, 15 bp, Homo sapiens
gttaacattccgggg

SEQ ID NO: 1525697 - DNA, 15 bp, Homo sapiens
tgttaacattccggg

SEQ ID NO: 1525698 - DNA, 15 bp, Homo sapiens
ttgttaacattccgg

SEQ ID NO: 1525699 - DNA, 15 bp, Homo sapiens
tttgttaacattccg

SEQ ID NO: 1525700 - DNA, 15 bp, Homo sapiens
gtttgttaacattcc

SEQ ID NO: 1525701 - DNA, 15 bp, Homo sapiens
tgtttgttaacattc

SEQ ID NO: 1525702 - DNA, 15 bp, Homo sapiens
atgtttgttaacatt

SEQ ID NO: 1525703 - DNA, 15 bp, Homo sapiens
catgtttgttaacat

SEQ ID NO: 1525704 - DNA, 15 bp, Homo sapiens
tcatgtttgttaaca

SEQ ID NO: 1525705 - DNA, 15 bp, Homo sapiens
ttcatgtttgttaac

SEQ ID NO: 1525706 - DNA, 15 bp, Homo sapiens
cttcatgtttgttaa

SEQ ID NO: 1525707 - DNA, 15 bp, Homo sapiens
tcttcatgtttgtta

SEQ ID NO: 1525708 - DNA, 15 bp, Homo sapiens
ctcttcatgtttgtt

SEQ ID NO: 1525709 - DNA, 15 bp, Homo sapiens
gctcttcatgtttgt

SEQ ID NO: 1525710 - DNA, 15 bp, Homo sapiens
tgctcttcatgtttg

SEQ ID NO: 1525711 - DNA, 15 bp, Homo sapiens
ctgctcttcatgttt

SEQ ID NO: 1525712 - DNA, 15 bp, Homo sapiens
cctgctcttcatgtt

SEQ ID NO: 1525713 - DNA, 15 bp, Homo sapiens
gcctgctcttcatgt

SEQ ID NO: 1525714 - DNA, 15 bp, Homo sapiens
ggcctgctcttcatg

SEQ ID NO: 1525715 - DNA, 15 bp, Homo sapiens
tggcctgctcttcat

SEQ ID NO: 1525716 - DNA, 15 bp, Homo sapiens
ttggcctgctcttca

SEQ ID NO: 1525717 - DNA, 15 bp, Homo sapiens
attggcctgctcttc

SEQ ID NO: 1525718 - DNA, 15 bp, Homo sapiens
gattggcctgctctt

SEQ ID NO: 1525719 - DNA, 15 bp, Homo sapiens
cgattggcctgctct

SEQ ID NO: 1525720 - DNA, 15 bp, Homo sapiens
ccgattggcctgctc

SEQ ID NO: 1525721 - DNA, 15 bp, Homo sapiens
accgattggcctgct

SEQ ID NO: 1525722 - DNA, 15 bp, Homo sapiens
caccgattggcctgc

SEQ ID NO: 1525723 - DNA, 15 bp, Homo sapiens
tcaccgattggcctg

SEQ ID NO: 1525724 - DNA, 15 bp, Homo sapiens
atcaccgattggcct

SEQ ID NO: 1525725 - DNA, 15 bp, Homo sapiens
tatcaccgattggcc

SEQ ID NO: 1525726 - DNA, 15 bp, Homo sapiens
ctatcaccgattggc

SEQ ID NO: 1525727 - DNA, 15 bp, Homo sapiens
gctatcaccgattgg

SEQ ID NO: 1525728 - DNA, 15 bp, Homo sapiens
agctatcaccgattg

SEQ ID NO: 1525729 - DNA, 15 bp, Homo sapiens
aagctatcaccgatt

SEQ ID NO: 1525730 - DNA, 15 bp, Homo sapiens
caagctatcaccgat

SEQ ID NO: 1525731 - DNA, 15 bp, Homo sapiens
tcaagctatcaccga

SEQ ID NO: 1525732 - DNA, 15 bp, Homo sapiens
ttcaagctatcaccg

SEQ ID NO: 1525733 - DNA, 15 bp, Homo sapiens
gttcaagctatcacc

SEQ ID NO: 1525734 - DNA, 15 bp, Homo sapiens
tgttcaagctatcac

SEQ ID NO: 1525735 - DNA, 15 bp, Homo sapiens
atgttcaagctatca

SEQ ID NO: 1525736 - DNA, 15 bp, Homo sapiens
gatgttcaagctatc

SEQ ID NO: 1525737 - DNA, 15 bp, Homo sapiens
tgatgttcaagctat

SEQ ID NO: 1525738 - DNA, 15 bp, Homo sapiens
atgatgttcaagcta

SEQ ID NO: 1525739 - DNA, 15 bp, Homo sapiens
gatgatgttcaagct

SEQ ID NO: 1525740 - DNA, 15 bp, Homo sapiens
ggatgatgttcaagc

SEQ ID NO: 1525741 - DNA, 15 bp, Homo sapiens
aggatgatgttcaag

SEQ ID NO: 1525742 - DNA, 15 bp, Homo sapiens
gaggatgatgttcaa

SEQ ID NO: 1525743 - DNA, 15 bp, Homo sapiens
ggaggatgatgttca

SEQ ID NO: 1525744 - DNA, 15 bp, Homo sapiens
aggaggatgatgttc

SEQ ID NO: 1525745 - DNA, 15 bp, Homo sapiens
gaggaggatgatgtt

SEQ ID NO: 1525746 - DNA, 15 bp, Homo sapiens
agaggaggatgatgt

SEQ ID NO: 1525747 - DNA, 15 bp, Homo sapiens
cagaggaggatgatg

SEQ ID NO: 1525748 - DNA, 15 bp, Homo sapiens
acagaggaggatgat

SEQ ID NO: 1525749 - DNA, 15 bp, Homo sapiens
aacagaggaggatga

SEQ ID NO: 1525750 - DNA, 15 bp, Homo sapiens
aaacagaggaggatg

SEQ ID NO: 1525751 - DNA, 15 bp, Homo sapiens
gaaacagaggaggat

SEQ ID NO: 1525752 - DNA, 15 bp, Homo sapiens
tgaaacagaggagga

SEQ ID NO: 1525753 - DNA, 15 bp, Homo sapiens
gtgaaacagaggagg

SEQ ID NO: 1525754 - DNA, 15 bp, Homo sapiens
tgtgaaacagaggag

SEQ ID NO: 1525755 - DNA, 15 bp, Homo sapiens
ttgtgaaacagagga

SEQ ID NO: 1525756 - DNA, 15 bp, Homo sapiens
attgtgaaacagagg

SEQ ID NO: 1525757 - DNA, 15 bp, Homo sapiens
tattgtgaaacagag

SEQ ID NO: 1525758 - DNA, 15 bp, Homo sapiens
ttattgtgaaacaga

SEQ ID NO: 1525759 - DNA, 15 bp, Homo sapiens
attattgtgaaacag

SEQ ID NO: 1525760 - DNA, 15 bp, Homo sapiens
aattattgtgaaaca

SEQ ID NO: 1525761 - DNA, 15 bp, Homo sapiens
taattattgtgaaac

SEQ ID NO: 1525762 - DNA, 15 bp, Homo sapiens
ataattattgtgaaa

SEQ ID NO: 1525763 - DNA, 15 bp, Homo sapiens
tataattattgtgaa

SEQ ID NO: 1525764 - DNA, 15 bp, Homo sapiens
atataattattgtga

SEQ ID NO: 1525765 - DNA, 15 bp, Homo sapiens
tatataattattgtg

SEQ ID NO: 1525766 - DNA, 15 bp, Homo sapiens
ttatataattattgt

SEQ ID NO: 1525767 - DNA, 15 bp, Homo sapiens
attatataattattg

SEQ ID NO: 1525768 - DNA, 15 bp, Homo sapiens
aattatataattatt

SEQ ID NO: 1525769 - DNA, 15 bp, Homo sapiens
aaattatataattat

SEQ ID NO: 1525770 - DNA, 15 bp, Homo sapiens
aaaattatataatta

SEQ ID NO: 1525771 - DNA, 15 bp, Homo sapiens
taaaattatataatt

SEQ ID NO: 1525772 - DNA, 15 bp, Homo sapiens
ttaaaattatataat

SEQ ID NO: 1525773 - DNA, 15 bp, Homo sapiens
attaaaattatataa

SEQ ID NO: 1525774 - DNA, 15 bp, Homo sapiens
aattaaaattatata

SEQ ID NO: 1525775 - DNA, 15 bp, Homo sapiens
caattaaaattatat

SEQ ID NO: 1525776 - DNA, 15 bp, Homo sapiens
tcaattaaaattata

SEQ ID NO: 1525777 - DNA, 15 bp, Homo sapiens
ttcaattaaaattat

SEQ ID NO: 1525778 - DNA, 15 bp, Homo sapiens
gttcaattaaaatta

SEQ ID NO: 1525779 - DNA, 15 bp, Homo sapiens
tgttcaattaaaatt

SEQ ID NO: 1525780 - DNA, 15 bp, Homo sapiens
gtgttcaattaaaat

SEQ ID NO: 1525781 - DNA, 15 bp, Homo sapiens
agtgttcaattaaaa

SEQ ID NO: 1525782 - DNA, 15 bp, Homo sapiens
aagtgttcaattaaa

SEQ ID NO: 1525783 - DNA, 15 bp, Homo sapiens
caagtgttcaattaa

SEQ ID NO: 1525784 - DNA, 15 bp, Homo sapiens
ccaagtgttcaatta

SEQ ID NO: 1525785 - DNA, 15 bp, Homo sapiens
tccaagtgttcaatt

SEQ ID NO: 1525786 - DNA, 15 bp, Homo sapiens
atccaagtgttcaat

SEQ ID NO: 1525787 - DNA, 15 bp, Homo sapiens
gatccaagtgttcaa

SEQ ID NO: 1525788 - DNA, 15 bp, Homo sapiens
tgatccaagtgttca

SEQ ID NO: 1525789 - DNA, 15 bp, Homo sapiens
gtgatccaagtgttc

SEQ ID NO: 1525790 - DNA, 15 bp, Homo sapiens
tgtgatccaagtgtt

SEQ ID NO: 1525791 - DNA, 15 bp, Homo sapiens
ttgtgatccaagtgt

SEQ ID NO: 1525792 - DNA, 15 bp, Homo sapiens
tttgtgatccaagtg

SEQ ID NO: 1525793 - DNA, 15 bp, Homo sapiens
atttgtgatccaagt

SEQ ID NO: 1525794 - DNA, 15 bp, Homo sapiens
tatttgtgatccaag

SEQ ID NO: 1525795 - DNA, 15 bp, Homo sapiens
ctatttgtgatccaa

SEQ ID NO: 1525796 - DNA, 15 bp, Homo sapiens
cctatttgtgatcca

SEQ ID NO: 1525797 - DNA, 15 bp, Homo sapiens
gcctatttgtgatcc

SEQ ID NO: 1525798 - DNA, 15 bp, Homo sapiens
tgcctatttgtgatc

SEQ ID NO: 1525799 - DNA, 15 bp, Homo sapiens
ttgcctatttgtgat

SEQ ID NO: 1525800 - DNA, 15 bp, Homo sapiens
cttgcctatttgtga

SEQ ID NO: 1525801 - DNA, 15 bp, Homo sapiens
gcttgcctatttgtg

SEQ ID NO: 1525802 - DNA, 15 bp, Homo sapiens
tgcttgcctatttgt

SEQ ID NO: 1525803 - DNA, 15 bp, Homo sapiens
atgcttgcctatttg

SEQ ID NO: 1525804 - DNA, 15 bp, Homo sapiens
tatgcttgcctattt

SEQ ID NO: 1525805 - DNA, 15 bp, Homo sapiens
atatgcttgcctatt

SEQ ID NO: 1525806 - DNA, 15 bp, Homo sapiens
tatatgcttgcctat

SEQ ID NO: 1525807 - DNA, 15 bp, Homo sapiens
atatatgcttgccta

SEQ ID NO: 1525808 - DNA, 15 bp, Homo sapiens
gatatatgcttgcct

SEQ ID NO: 1525809 - DNA, 15 bp, Homo sapiens
ggatatatgcttgcc

SEQ ID NO: 1525810 - DNA, 15 bp, Homo sapiens
aggatatatgcttgc

SEQ ID NO: 1525811 - DNA, 15 bp, Homo sapiens
aaggatatatgcttg

SEQ ID NO: 1525812 - DNA, 15 bp, Homo sapiens
taaggatatatgctt

SEQ ID NO: 1525813 - DNA, 15 bp, Homo sapiens
ttaaggatatatgct

SEQ ID NO: 1525814 - DNA, 15 bp, Homo sapiens
attaaggatatatgc

SEQ ID NO: 1525815 - DNA, 15 bp, Homo sapiens
aattaaggatatatg

SEQ ID NO: 1525816 - DNA, 15 bp, Homo sapiens
caattaaggatatat

SEQ ID NO: 1525817 - DNA, 15 bp, Homo sapiens
acaattaaggatata

SEQ ID NO: 1525818 - DNA, 15 bp, Homo sapiens
cacaattaaggatat

SEQ ID NO: 1525819 - DNA, 15 bp, Homo sapiens
acacaattaaggata

SEQ ID NO: 1525820 - DNA, 15 bp, Homo sapiens
aacacaattaaggat

SEQ ID NO: 1525821 - DNA, 15 bp, Homo sapiens
aaacacaattaagga

SEQ ID NO: 1525822 - DNA, 15 bp, Homo sapiens
taaacacaattaagg

SEQ ID NO: 1525823 - DNA, 15 bp, Homo sapiens
ataaacacaattaag

SEQ ID NO: 1525824 - DNA, 15 bp, Homo sapiens
gataaacacaattaa

SEQ ID NO: 1525825 - DNA, 15 bp, Homo sapiens
tgataaacacaatta

SEQ ID NO: 1525826 - DNA, 15 bp, Homo sapiens
ctgataaacacaatt

SEQ ID NO: 1525827 - DNA, 15 bp, Homo sapiens
actgataaacacaat

SEQ ID NO: 1525828 - DNA, 15 bp, Homo sapiens
tactgataaacacaa

SEQ ID NO: 1525829 - DNA, 15 bp, Homo sapiens
gtactgataaacaca

SEQ ID NO: 1525830 - DNA, 15 bp, Homo sapiens
tgtactgataaacac

SEQ ID NO: 1525831 - DNA, 15 bp, Homo sapiens
atgtactgataaaca

SEQ ID NO: 1525832 - DNA, 15 bp, Homo sapiens
aatgtactgataaac

SEQ ID NO: 1525833 - DNA, 15 bp, Homo sapiens
aaatgtactgataaa

SEQ ID NO: 1525834 - DNA, 15 bp, Homo sapiens
caaatgtactgataa

SEQ ID NO: 1525835 - DNA, 15 bp, Homo sapiens
acaaatgtactgata

SEQ ID NO: 1525836 - DNA, 15 bp, Homo sapiens
cacaaatgtactgat

SEQ ID NO: 1525837 - DNA, 15 bp, Homo sapiens
acacaaatgtactga

SEQ ID NO: 1525838 - DNA, 15 bp, Homo sapiens
aacacaaatgtactg

SEQ ID NO: 1525839 - DNA, 15 bp, Homo sapiens
taacacaaatgtact

SEQ ID NO: 1525840 - DNA, 15 bp, Homo sapiens
ataacacaaatgtac

SEQ ID NO: 1525841 - DNA, 15 bp, Homo sapiens
cataacacaaatgta

SEQ ID NO: 1525842 - DNA, 15 bp, Homo sapiens
acataacacaaatgt

SEQ ID NO: 1525843 - DNA, 15 bp, Homo sapiens
tacataacacaaatg

SEQ ID NO: 1525844 - DNA, 15 bp, Homo sapiens
ttacataacacaaat

SEQ ID NO: 1525845 - DNA, 15 bp, Homo sapiens
tttacataacacaaa

SEQ ID NO: 1525846 - DNA, 15 bp, Homo sapiens
atttacataacacaa

SEQ ID NO: 1525847 - DNA, 15 bp, Homo sapiens
catttacataacaca

SEQ ID NO: 1525848 - DNA, 15 bp, Homo sapiens
acatttacataacac

SEQ ID NO: 1525849 - DNA, 15 bp, Homo sapiens
aacatttacataaca

SEQ ID NO: 1525850 - DNA, 15 bp, Homo sapiens
aaacatttacataac

SEQ ID NO: 1525851 - DNA, 15 bp, Homo sapiens
caaacatttacataa

SEQ ID NO: 1525852 - DNA, 15 bp, Homo sapiens
gcaaacatttacata

SEQ ID NO: 1525853 - DNA, 15 bp, Homo sapiens
agcaaacatttacat

SEQ ID NO: 1525854 - DNA, 15 bp, Homo sapiens
aagcaaacatttaca

SEQ ID NO: 1525855 - DNA, 15 bp, Homo sapiens
aaagcaaacatttac

SEQ ID NO: 1525856 - DNA, 15 bp, Homo sapiens
aaaagcaaacattta

SEQ ID NO: 1525857 - DNA, 15 bp, Homo sapiens
aaaaagcaaacattt

SEQ ID NO: 1525858 - DNA, 15 bp, Homo sapiens
gaaaaagcaaacatt

SEQ ID NO: 1525859 - DNA, 15 bp, Homo sapiens
tgaaaaagcaaacat

SEQ ID NO: 1525860 - DNA, 15 bp, Homo sapiens
gtgaaaaagcaaaca

SEQ ID NO: 1525861 - DNA, 15 bp, Homo sapiens
agtgaaaaagcaaac

SEQ ID NO: 1525862 - DNA, 15 bp, Homo sapiens
tagtgaaaaagcaaa

SEQ ID NO: 1525863 - DNA, 15 bp, Homo sapiens
atagtgaaaaagcaa

SEQ ID NO: 1525864 - DNA, 15 bp, Homo sapiens
aatagtgaaaaagca

SEQ ID NO: 1525865 - DNA, 15 bp, Homo sapiens
taatagtgaaaaagc

SEQ ID NO: 1525866 - DNA, 15 bp, Homo sapiens
ctaatagtgaaaaag

SEQ ID NO: 1525867 - DNA, 15 bp, Homo sapiens
actaatagtgaaaaa

SEQ ID NO: 1525868 - DNA, 15 bp, Homo sapiens
cactaatagtgaaaa

SEQ ID NO: 1525869 - DNA, 15 bp, Homo sapiens
tcactaatagtgaaa

SEQ ID NO: 1525870 - DNA, 15 bp, Homo sapiens
ttcactaatagtgaa

SEQ ID NO: 1525871 - DNA, 15 bp, Homo sapiens
gttcactaatagtga

SEQ ID NO: 1525872 - DNA, 15 bp, Homo sapiens
tgttcactaatagtg

SEQ ID NO: 1525873 - DNA, 15 bp, Homo sapiens
ttgttcactaatagt

SEQ ID NO: 1525874 - DNA, 15 bp, Homo sapiens
tttgttcactaatag

SEQ ID NO: 1525875 - DNA, 15 bp, Homo sapiens
atttgttcactaata

SEQ ID NO: 1525876 - DNA, 15 bp, Homo sapiens
aatttgttcactaat

SEQ ID NO: 1525877 - DNA, 15 bp, Homo sapiens
taatttgttcactaa

SEQ ID NO: 1525878 - DNA, 15 bp, Homo sapiens
ttaatttgttcacta

SEQ ID NO: 1525879 - DNA, 15 bp, Homo sapiens
tttaatttgttcact

SEQ ID NO: 1525880 - DNA, 15 bp, Homo sapiens
ttttaatttgttcac

SEQ ID NO: 1525881 - DNA, 15 bp, Homo sapiens
cttttaatttgttca

SEQ ID NO: 1525882 - DNA, 15 bp, Homo sapiens
gcttttaatttgttc

SEQ ID NO: 1525883 - DNA, 15 bp, Homo sapiens
agcttttaatttgtt

SEQ ID NO: 1525884 - DNA, 15 bp, Homo sapiens
aagcttttaatttgt

SEQ ID NO: 1525885 - DNA, 15 bp, Homo sapiens
gaagcttttaatttg

SEQ ID NO: 1525886 - DNA, 15 bp, Homo sapiens
ggaagcttttaattt

SEQ ID NO: 1525887 - DNA, 15 bp, Homo sapiens
gggaagcttttaatt

SEQ ID NO: 1525888 - DNA, 15 bp, Homo sapiens
agggaagcttttaat

SEQ ID NO: 1525889 - DNA, 15 bp, Homo sapiens
aagggaagcttttaa

SEQ ID NO: 1525890 - DNA, 15 bp, Homo sapiens
aaagggaagctttta

SEQ ID NO: 1525891 - DNA, 15 bp, Homo sapiens
gaaagggaagctttt

SEQ ID NO: 1525892 - DNA, 15 bp, Homo sapiens
agaaagggaagcttt

SEQ ID NO: 1525893 - DNA, 15 bp, Homo sapiens
aagaaagggaagctt

SEQ ID NO: 1525894 - DNA, 15 bp, Homo sapiens
aaagaaagggaagct

SEQ ID NO: 1525895 - DNA, 15 bp, Homo sapiens
caaagaaagggaagc

SEQ ID NO: 1525896 - DNA, 15 bp, Homo sapiens
acaaagaaagggaag

SEQ ID NO: 1525897 - DNA, 15 bp, Homo sapiens
aacaaagaaagggaa

SEQ ID NO: 1525898 - DNA, 15 bp, Homo sapiens
caacaaagaaaggga

SEQ ID NO: 1525899 - DNA, 15 bp, Homo sapiens
acaacaaagaaaggg

SEQ ID NO: 1525900 - DNA, 15 bp, Homo sapiens
gacaacaaagaaagg

SEQ ID NO: 1525901 - DNA, 15 bp, Homo sapiens
tgacaacaaagaaag

SEQ ID NO: 1525902 - DNA, 15 bp, Homo sapiens
ttgacaacaaagaaa

SEQ ID NO: 1525903 - DNA, 15 bp, Homo sapiens
gttgacaacaaagaa

SEQ ID NO: 1525904 - DNA, 15 bp, Homo sapiens
tgttgacaacaaaga

SEQ ID NO: 1525905 - DNA, 15 bp, Homo sapiens
atgttgacaacaaag

SEQ ID NO: 1525906 - DNA, 15 bp, Homo sapiens
gatgttgacaacaaa

SEQ ID NO: 1525907 - DNA, 15 bp, Homo sapiens
agatgttgacaacaa

SEQ ID NO: 1525908 - DNA, 15 bp, Homo sapiens
cagatgttgacaaca

SEQ ID NO: 1525909 - DNA, 15 bp, Homo sapiens
gcagatgttgacaac

SEQ ID NO: 1525910 - DNA, 15 bp, Homo sapiens
agcagatgttgacaa

SEQ ID NO: 1525911 - DNA, 15 bp, Homo sapiens
cagcagatgttgaca

SEQ ID NO: 1525912 - DNA, 15 bp, Homo sapiens
tcagcagatgttgac

SEQ ID NO: 1525913 - DNA, 15 bp, Homo sapiens
gtcagcagatgttga

SEQ ID NO: 1525914 - DNA, 15 bp, Homo sapiens
tgtcagcagatgttg

SEQ ID NO: 1525915 - DNA, 15 bp, Homo sapiens
gtgtcagcagatgtt

SEQ ID NO: 1525916 - DNA, 15 bp, Homo sapiens
tgtgtcagcagatgt

SEQ ID NO: 1525917 - DNA, 15 bp, Homo sapiens
ttgtgtcagcagatg

SEQ ID NO: 1525918 - DNA, 15 bp, Homo sapiens
cttgtgtcagcagat

SEQ ID NO: 1525919 - DNA, 15 bp, Homo sapiens
tcttgtgtcagcaga

SEQ ID NO: 1525920 - DNA, 15 bp, Homo sapiens
gtcttgtgtcagcag

SEQ ID NO: 1525921 - DNA, 15 bp, Homo sapiens
ggtcttgtgtcagca

SEQ ID NO: 1525922 - DNA, 15 bp, Homo sapiens
aggtcttgtgtcagc

SEQ ID NO: 1525923 - DNA, 15 bp, Homo sapiens
taggtcttgtgtcag

SEQ ID NO: 1525924 - DNA, 15 bp, Homo sapiens
ataggtcttgtgtca

SEQ ID NO: 1525925 - DNA, 15 bp, Homo sapiens
aataggtcttgtgtc

SEQ ID NO: 1525926 - DNA, 15 bp, Homo sapiens
aaataggtcttgtgt

SEQ ID NO: 1525927 - DNA, 15 bp, Homo sapiens
aaaataggtcttgtg

SEQ ID NO: 1525928 - DNA, 15 bp, Homo sapiens
gaaaataggtcttgt

SEQ ID NO: 1525929 - DNA, 15 bp, Homo sapiens
agaaaataggtcttg

SEQ ID NO: 1525930 - DNA, 15 bp, Homo sapiens
tagaaaataggtctt

SEQ ID NO: 1525931 - DNA, 15 bp, Homo sapiens
atagaaaataggtct

SEQ ID NO: 1525932 - DNA, 15 bp, Homo sapiens
aatagaaaataggtc

SEQ ID NO: 1525933 - DNA, 15 bp, Homo sapiens
caatagaaaataggt

SEQ ID NO: 1525934 - DNA, 15 bp, Homo sapiens
tcaatagaaaatagg

SEQ ID NO: 1525935 - DNA, 15 bp, Homo sapiens
ctcaatagaaaatag

SEQ ID NO: 1525936 - DNA, 15 bp, Homo sapiens
cctcaatagaaaata

SEQ ID NO: 1525937 - DNA, 15 bp, Homo sapiens
ccctcaatagaaaat

SEQ ID NO: 1525938 - DNA, 15 bp, Homo sapiens
gccctcaatagaaaa

SEQ ID NO: 1525939 - DNA, 15 bp, Homo sapiens
agccctcaatagaaa

SEQ ID NO: 1525940 - DNA, 15 bp, Homo sapiens
tagccctcaatagaa

SEQ ID NO: 1525941 - DNA, 15 bp, Homo sapiens
gtagccctcaataga

SEQ ID NO: 1525942 - DNA, 15 bp, Homo sapiens
ggtagccctcaatag

SEQ ID NO: 1525943 - DNA, 15 bp, Homo sapiens
tggtagccctcaata

SEQ ID NO: 1525944 - DNA, 15 bp, Homo sapiens
ttggtagccctcaat

SEQ ID NO: 1525945 - DNA, 15 bp, Homo sapiens
gttggtagccctcaa

SEQ ID NO: 1525946 - DNA, 15 bp, Homo sapiens
agttggtagccctca

SEQ ID NO: 1525947 - DNA, 15 bp, Homo sapiens
cagttggtagccctc

SEQ ID NO: 1525948 - DNA, 15 bp, Homo sapiens
tcagttggtagccct

SEQ ID NO: 1525949 - DNA, 15 bp, Homo sapiens
ttcagttggtagccc

SEQ ID NO: 1525950 - DNA, 15 bp, Homo sapiens
cttcagttggtagcc

SEQ ID NO: 1525951 - DNA, 15 bp, Homo sapiens
ccttcagttggtagc

SEQ ID NO: 1525952 - DNA, 15 bp, Homo sapiens
gccttcagttggtag

SEQ ID NO: 1525953 - DNA, 15 bp, Homo sapiens
tgccttcagttggta

SEQ ID NO: 1525954 - DNA, 15 bp, Homo sapiens
ttgccttcagttggt

SEQ ID NO: 1525955 - DNA, 15 bp, Homo sapiens
tttgccttcagttgg

SEQ ID NO: 1525956 - DNA, 15 bp, Homo sapiens
ttttgccttcagttg

SEQ ID NO: 1525957 - DNA, 15 bp, Homo sapiens
tttttgccttcagtt

SEQ ID NO: 1525958 - DNA, 15 bp, Homo sapiens
gtttttgccttcagt

SEQ ID NO: 1525959 - DNA, 15 bp, Homo sapiens
tgtttttgccttcag

SEQ ID NO: 1525960 - DNA, 15 bp, Homo sapiens
ttgtttttgccttca

SEQ ID NO: 1525961 - DNA, 15 bp, Homo sapiens
attgtttttgccttc

SEQ ID NO: 1525962 - DNA, 15 bp, Homo sapiens
gattgtttttgcctt

SEQ ID NO: 1525963 - DNA, 15 bp, Homo sapiens
ggattgtttttgcct

SEQ ID NO: 1525964 - DNA, 15 bp, Homo sapiens
gggattgtttttgcc

SEQ ID NO: 1525965 - DNA, 15 bp, Homo sapiens
tgggattgtttttgc

SEQ ID NO: 1525966 - DNA, 15 bp, Homo sapiens
ttgggattgtttttg

SEQ ID NO: 1525967 - DNA, 15 bp, Homo sapiens
cttgggattgttttt

SEQ ID NO: 1525968 - DNA, 15 bp, Homo sapiens
tcttgggattgtttt

SEQ ID NO: 1525969 - DNA, 15 bp, Homo sapiens
gtcttgggattgttt

SEQ ID NO: 1525970 - DNA, 15 bp, Homo sapiens
agtcttgggattgtt

SEQ ID NO: 1525971 - DNA, 15 bp, Homo sapiens
cagtcttgggattgt

SEQ ID NO: 1525972 - DNA, 15 bp, Homo sapiens
tcagtcttgggattg

SEQ ID NO: 1525973 - DNA, 15 bp, Homo sapiens
ttcagtcttgggatt

SEQ ID NO: 1525974 - DNA, 15 bp, Homo sapiens
tttcagtcttgggat

SEQ ID NO: 1525975 - DNA, 15 bp, Homo sapiens
ttttcagtcttggga

SEQ ID NO: 1525976 - DNA, 15 bp, Homo sapiens
tttttcagtcttggg

SEQ ID NO: 1525977 - DNA, 15 bp, Homo sapiens
ctttttcagtcttgg

SEQ ID NO: 1525978 - DNA, 15 bp, Homo sapiens
tctttttcagtcttg

SEQ ID NO: 1525979 - DNA, 15 bp, Homo sapiens
ctctttttcagtctt

SEQ ID NO: 1525980 - DNA, 15 bp, Homo sapiens
gctctttttcagtct

SEQ ID NO: 1525981 - DNA, 15 bp, Homo sapiens
agctctttttcagtc

SEQ ID NO: 1525982 - DNA, 15 bp, Homo sapiens
aagctctttttcagt

SEQ ID NO: 1525983 - DNA, 15 bp, Homo sapiens
taagctctttttcag

SEQ ID NO: 1525984 - DNA, 15 bp, Homo sapiens
ttaagctctttttca

SEQ ID NO: 1525985 - DNA, 15 bp, Homo sapiens
attaagctctttttc

SEQ ID NO: 1525986 - DNA, 15 bp, Homo sapiens
aattaagctcttttt

SEQ ID NO: 1525987 - DNA, 15 bp, Homo sapiens
caattaagctctttt

SEQ ID NO: 1525988 - DNA, 15 bp, Homo sapiens
ccaattaagctcttt

SEQ ID NO: 1525989 - DNA, 15 bp, Homo sapiens
gccaattaagctctt

SEQ ID NO: 1525990 - DNA, 15 bp, Homo sapiens
tgccaattaagctct

SEQ ID NO: 1525991 - DNA, 15 bp, Homo sapiens
atgccaattaagctc

SEQ ID NO: 1525992 - DNA, 15 bp, Homo sapiens
aatgccaattaagct

SEQ ID NO: 1525993 - DNA, 15 bp, Homo sapiens
aaatgccaattaagc

SEQ ID NO: 1525994 - DNA, 15 bp, Homo sapiens
aaaatgccaattaag

SEQ ID NO: 1525995 - DNA, 15 bp, Homo sapiens
aaaaatgccaattaa

SEQ ID NO: 1525996 - DNA, 15 bp, Homo sapiens
gaaaaatgccaatta

SEQ ID NO: 1525997 - DNA, 15 bp, Homo sapiens
agaaaaatgccaatt

SEQ ID NO: 1525998 - DNA, 15 bp, Homo sapiens
tagaaaaatgccaat

SEQ ID NO: 1525999 - DNA, 15 bp, Homo sapiens
atagaaaaatgccaa

SEQ ID NO: 1526000 - DNA, 15 bp, Homo sapiens
aatagaaaaatgcca

SEQ ID NO: 1526001 - DNA, 15 bp, Homo sapiens
aaatagaaaaatgcc

SEQ ID NO: 1526002 - DNA, 15 bp, Homo sapiens
taaatagaaaaatgc

SEQ ID NO: 1526003 - DNA, 15 bp, Homo sapiens
ttaaatagaaaaatg

SEQ ID NO: 1526004 - DNA, 15 bp, Homo sapiens
tttaaatagaaaaat

SEQ ID NO: 1526005 - DNA, 15 bp, Homo sapiens
ttttaaatagaaaaa

SEQ ID NO: 1526006 - DNA, 15 bp, Homo sapiens
tttttaaatagaaaa

SEQ ID NO: 1526007 - DNA, 15 bp, Homo sapiens
ttttttaaatagaaa

SEQ ID NO: 1526008 - DNA, 15 bp, Homo sapiens
cttttttaaatagaa

SEQ ID NO: 1526009 - DNA, 15 bp, Homo sapiens
ccttttttaaataga

SEQ ID NO: 1526010 - DNA, 15 bp, Homo sapiens
tccttttttaaatag

SEQ ID NO: 1526011 - DNA, 15 bp, Homo sapiens
ttccttttttaaata

SEQ ID NO: 1526012 - DNA, 15 bp, Homo sapiens
tttccttttttaaat

SEQ ID NO: 1526013 - DNA, 15 bp, Homo sapiens
ttttccttttttaaa

SEQ ID NO: 1526014 - DNA, 15 bp, Homo sapiens
ttttttcctttttta

SEQ ID NO: 1526015 - DNA, 15 bp, Homo sapiens
atttttttccttttt

SEQ ID NO: 1526016 - DNA, 15 bp, Homo sapiens
tatttttttcctttt

SEQ ID NO: 1526017 - DNA, 15 bp, Homo sapiens
ttatttttttccttt

SEQ ID NO: 1526018 - DNA, 15 bp, Homo sapiens
tttatttttttcctt

SEQ ID NO: 1526019 - DNA, 15 bp, Homo sapiens
ttttatttttttcct

SEQ ID NO: 1526020 - DNA, 15 bp, Homo sapiens
gttttatttttttcc

SEQ ID NO: 1526021 - DNA, 15 bp, Homo sapiens
agttttatttttttc

SEQ ID NO: 1526022 - DNA, 15 bp, Homo sapiens
gagttttattttttt

SEQ ID NO: 1526023 - DNA, 15 bp, Homo sapiens
agagttttatttttt

SEQ ID NO: 1526024 - DNA, 15 bp, Homo sapiens
tagagttttattttt

SEQ ID NO: 1526025 - DNA, 15 bp, Homo sapiens
ctagagttttatttt

SEQ ID NO: 1526026 - DNA, 15 bp, Homo sapiens
tctagagttttattt

SEQ ID NO: 1526027 - DNA, 15 bp, Homo sapiens
gtctagagttttatt

SEQ ID NO: 1526028 - DNA, 15 bp, Homo sapiens
tgtctagagttttat

SEQ ID NO: 1526029 - DNA, 15 bp, Homo sapiens
atgtctagagtttta

SEQ ID NO: 1526030 - DNA, 15 bp, Homo sapiens
aatgtctagagtttt

SEQ ID NO: 1526031 - DNA, 15 bp, Homo sapiens
gaatgtctagagttt

SEQ ID NO: 1526032 - DNA, 15 bp, Homo sapiens
tgaatgtctagagtt

SEQ ID NO: 1526033 - DNA, 15 bp, Homo sapiens
ttgaatgtctagagt

SEQ ID NO: 1526034 - DNA, 15 bp, Homo sapiens
attgaatgtctagag

SEQ ID NO: 1526035 - DNA, 15 bp, Homo sapiens
cattgaatgtctaga

SEQ ID NO: 1526036 - DNA, 15 bp, Homo sapiens
gcattgaatgtctag

SEQ ID NO: 1526037 - DNA, 15 bp, Homo sapiens
tgcattgaatgtcta

SEQ ID NO: 1526038 - DNA, 15 bp, Homo sapiens
ttgcattgaatgtct

SEQ ID NO: 1526039 - DNA, 15 bp, Homo sapiens
attgcattgaatgtc

SEQ ID NO: 1526040 - DNA, 15 bp, Homo sapiens
tattgcattgaatgt

SEQ ID NO: 1526041 - DNA, 15 bp, Homo sapiens
ttattgcattgaatg

SEQ ID NO: 1526042 - DNA, 15 bp, Homo sapiens
tttattgcattgaat

SEQ ID NO: 1526043 - DNA, 15 bp, Homo sapiens
atttattgcattgaa

SEQ ID NO: 1526044 - DNA, 15 bp, Homo sapiens
tatttattgcattga

SEQ ID NO: 1526045 - DNA, 15 bp, Homo sapiens
atatttattgcattg

SEQ ID NO: 1526046 - DNA, 15 bp, Homo sapiens
catatttattgcatt

SEQ ID NO: 1526047 - DNA, 15 bp, Homo sapiens
ccatatttattgcat

SEQ ID NO: 1526048 - DNA, 15 bp, Homo sapiens
cccatatttattgca

SEQ ID NO: 1526049 - DNA, 15 bp, Homo sapiens
ccccatatttattgc

SEQ ID NO: 1526050 - DNA, 15 bp, Homo sapiens
cccccatatttattg

SEQ ID NO: 1526051 - DNA, 15 bp, Homo sapiens
gcccccatatttatt

SEQ ID NO: 1526052 - DNA, 15 bp, Homo sapiens
agcccccatatttat

SEQ ID NO: 1526053 - DNA, 15 bp, Homo sapiens
aagcccccatattta

SEQ ID NO: 1526054 - DNA, 15 bp, Homo sapiens
caagcccccatattt

SEQ ID NO: 1526055 - DNA, 15 bp, Homo sapiens
tcaagcccccatatt

SEQ ID NO: 1526056 - DNA, 15 bp, Homo sapiens
ctcaagcccccatat

SEQ ID NO: 1526057 - DNA, 15 bp, Homo sapiens
tctcaagcccccata

SEQ ID NO: 1526058 - DNA, 15 bp, Homo sapiens
atctcaagcccccat

SEQ ID NO: 1526059 - DNA, 15 bp, Homo sapiens
gatctcaagccccca

SEQ ID NO: 1526060 - DNA, 15 bp, Homo sapiens
tgatctcaagccccc

SEQ ID NO: 1526061 - DNA, 15 bp, Homo sapiens
ctgatctcaagcccc

SEQ ID NO: 1526062 - DNA, 15 bp, Homo sapiens
actgatctcaagccc

SEQ ID NO: 1526063 - DNA, 15 bp, Homo sapiens
tactgatctcaagcc

SEQ ID NO: 1526064 - DNA, 15 bp, Homo sapiens
atactgatctcaagc

SEQ ID NO: 1526065 - DNA, 15 bp, Homo sapiens
tatactgatctcaag

SEQ ID NO: 1526066 - DNA, 15 bp, Homo sapiens
ctatactgatctcaa

SEQ ID NO: 1526067 - DNA, 15 bp, Homo sapiens
tctatactgatctca

SEQ ID NO: 1526068 - DNA, 15 bp, Homo sapiens
ctctatactgatctc

SEQ ID NO: 1526069 - DNA, 15 bp, Homo sapiens
actctatactgatct

SEQ ID NO: 1526070 - DNA, 15 bp, Homo sapiens
tactctatactgatc

SEQ ID NO: 1526071 - DNA, 15 bp, Homo sapiens
ctactctatactgat

SEQ ID NO: 1526072 - DNA, 15 bp, Homo sapiens
cctactctatactga

SEQ ID NO: 1526073 - DNA, 15 bp, Homo sapiens
ccctactctatactg

SEQ ID NO: 1526074 - DNA, 15 bp, Homo sapiens
accctactctatact

SEQ ID NO: 1526075 - DNA, 15 bp, Homo sapiens
taccctactctatac

SEQ ID NO: 1526076 - DNA, 15 bp, Homo sapiens
ctaccctactctata

SEQ ID NO: 1526077 - DNA, 15 bp, Homo sapiens
cctaccctactctat

SEQ ID NO: 1526078 - DNA, 15 bp, Homo sapiens
ccctaccctactcta

SEQ ID NO: 1526079 - DNA, 15 bp, Homo sapiens
cccctaccctactct

SEQ ID NO: 1526080 - DNA, 15 bp, Homo sapiens
gcccctaccctactc

SEQ ID NO: 1526081 - DNA, 15 bp, Homo sapiens
tgcccctaccctact

SEQ ID NO: 1526082 - DNA, 15 bp, Homo sapiens
ttgcccctaccctac

SEQ ID NO: 1526083 - DNA, 15 bp, Homo sapiens
tttgcccctacccta

SEQ ID NO: 1526084 - DNA, 15 bp, Homo sapiens
ctttgcccctaccct

SEQ ID NO: 1526085 - DNA, 15 bp, Homo sapiens
tctttgcccctaccc

SEQ ID NO: 1526086 - DNA, 15 bp, Homo sapiens
gtctttgcccctacc

SEQ ID NO: 1526087 - DNA, 15 bp, Homo sapiens
agtctttgcccctac

SEQ ID NO: 1526088 - DNA, 15 bp, Homo sapiens
cagtctttgccccta

SEQ ID NO: 1526089 - DNA, 15 bp, Homo sapiens
tcagtctttgcccct

SEQ ID NO: 1526090 - DNA, 15 bp, Homo sapiens
ctcagtctttgcccc

SEQ ID NO: 1526091 - DNA, 15 bp, Homo sapiens
tctcagtctttgccc

SEQ ID NO: 1526092 - DNA, 15 bp, Homo sapiens
ctctcagtctttgcc

SEQ ID NO: 1526093 - DNA, 15 bp, Homo sapiens
cctctcagtctttgc

SEQ ID NO: 1526094 - DNA, 15 bp, Homo sapiens
gcctctcagtctttg

SEQ ID NO: 1526095 - DNA, 15 bp, Homo sapiens
tgcctctcagtcttt

SEQ ID NO: 1526096 - DNA, 15 bp, Homo sapiens
ttgcctctcagtctt

SEQ ID NO: 1526097 - DNA, 15 bp, Homo sapiens
attgcctctcagtct

SEQ ID NO: 1526098 - DNA, 15 bp, Homo sapiens
aattgcctctcagtc

SEQ ID NO: 1526099 - DNA, 15 bp, Homo sapiens
aaattgcctctcagt

SEQ ID NO: 1526100 - DNA, 15 bp, Homo sapiens
caaattgcctctcag

SEQ ID NO: 1526101 - DNA, 15 bp, Homo sapiens
ccaaattgcctctca

SEQ ID NO: 1526102 - DNA, 15 bp, Homo sapiens
cccaaattgcctctc

SEQ ID NO: 1526103 - DNA, 15 bp, Homo sapiens
tcccaaattgcctct

SEQ ID NO: 1526104 - DNA, 15 bp, Homo sapiens
gtcccaaattgcctc

SEQ ID NO: 1526105 - DNA, 15 bp, Homo sapiens
tgtcccaaattgcct

SEQ ID NO: 1526106 - DNA, 15 bp, Homo sapiens
actgtcccaaattgc

SEQ ID NO: 1526107 - DNA, 15 bp, Homo sapiens
tactgtcccaaattg

SEQ ID NO: 1526108 - DNA, 15 bp, Homo sapiens
ctactgtcccaaatt

SEQ ID NO: 1526109 - DNA, 15 bp, Homo sapiens
tctactgtcccaaat

SEQ ID NO: 1526110 - DNA, 15 bp, Homo sapiens
ctctactgtcccaaa

SEQ ID NO: 1526111 - DNA, 15 bp, Homo sapiens
gctctactgtcccaa

SEQ ID NO: 1526112 - DNA, 15 bp, Homo sapiens
tgctctactgtccca

SEQ ID NO: 1526113 - DNA, 15 bp, Homo sapiens
ttgctctactgtccc

SEQ ID NO: 1526114 - DNA, 15 bp, Homo sapiens
gttgctctactgtcc

SEQ ID NO: 1526115 - DNA, 15 bp, Homo sapiens
tgttgctctactgtc

SEQ ID NO: 1526116 - DNA, 15 bp, Homo sapiens
ttgttgctctactgt

SEQ ID NO: 1526117 - DNA, 15 bp, Homo sapiens
tttgttgctctactg

SEQ ID NO: 1526118 - DNA, 15 bp, Homo sapiens
ttttgttgctctact

SEQ ID NO: 1526119 - DNA, 15 bp, Homo sapiens
cttttgttgctctac

SEQ ID NO: 1526120 - DNA, 15 bp, Homo sapiens
tcttttgttgctcta

SEQ ID NO: 1526121 - DNA, 15 bp, Homo sapiens
ttcttttgttgctct

SEQ ID NO: 1526122 - DNA, 15 bp, Homo sapiens
tttcttttgttgctc

SEQ ID NO: 1526123 - DNA, 15 bp, Homo sapiens
atttcttttgttgct

SEQ ID NO: 1526124 - DNA, 15 bp, Homo sapiens
tatttcttttgttgc

SEQ ID NO: 1526125 - DNA, 15 bp, Homo sapiens
ttatttcttttgttg

SEQ ID NO: 1526126 - DNA, 15 bp, Homo sapiens
attatttcttttgtt

SEQ ID NO: 1526127 - DNA, 15 bp, Homo sapiens
cattatttcttttgt

SEQ ID NO: 1526128 - DNA, 15 bp, Homo sapiens
tcattatttcttttg

SEQ ID NO: 1526129 - DNA, 15 bp, Homo sapiens
ttcattatttctttt

SEQ ID NO: 1526130 - DNA, 15 bp, Homo sapiens
tttcattatttcttt

SEQ ID NO: 1526131 - DNA, 15 bp, Homo sapiens
atttcattatttctt

SEQ ID NO: 1526132 - DNA, 15 bp, Homo sapiens
tatttcattatttct

SEQ ID NO: 1526133 - DNA, 15 bp, Homo sapiens
ttatttcattatttc

SEQ ID NO: 1526134 - DNA, 15 bp, Homo sapiens
tttatttcattattt

SEQ ID NO: 1526135 - DNA, 15 bp, Homo sapiens
atttatttcattatt

SEQ ID NO: 1526136 - DNA, 15 bp, Homo sapiens
tatttatttcattat

SEQ ID NO: 1526137 - DNA, 15 bp, Homo sapiens
atatttatttcatta

SEQ ID NO: 1526138 - DNA, 15 bp, Homo sapiens
aatatttatttcatt

SEQ ID NO: 1526139 - DNA, 15 bp, Homo sapiens
caatatttatttcat

SEQ ID NO: 1526140 - DNA, 15 bp, Homo sapiens
ccaatatttatttca

SEQ ID NO: 1526141 - DNA, 15 bp, Homo sapiens
accaatatttatttc

SEQ ID NO: 1526142 - DNA, 15 bp, Homo sapiens
taccaatatttattt

SEQ ID NO: 1526143 - DNA, 15 bp, Homo sapiens
ataccaatatttatt

SEQ ID NO: 1526144 - DNA, 15 bp, Homo sapiens
aataccaatatttat

SEQ ID NO: 1526145 - DNA, 15 bp, Homo sapiens
aaataccaatattta

SEQ ID NO: 1526146 - DNA, 15 bp, Homo sapiens
aaaataccaatattt

SEQ ID NO: 1526147 - DNA, 15 bp, Homo sapiens
gaaaataccaatatt

SEQ ID NO: 1526148 - DNA, 15 bp, Homo sapiens
agaaaataccaatat

SEQ ID NO: 1526149 - DNA, 15 bp, Homo sapiens
aagaaaataccaata

SEQ ID NO: 1526150 - DNA, 15 bp, Homo sapiens
caagaaaataccaat

SEQ ID NO: 1526151 - DNA, 15 bp, Homo sapiens
tcaagaaaataccaa

SEQ ID NO: 1526152 - DNA, 15 bp, Homo sapiens
atcaagaaaatacca

SEQ ID NO: 1526153 - DNA, 15 bp, Homo sapiens
aatcaagaaaatacc

SEQ ID NO: 1526154 - DNA, 15 bp, Homo sapiens
aaatcaagaaaatac

SEQ ID NO: 1526155 - DNA, 15 bp, Homo sapiens
gaaatcaagaaaata

SEQ ID NO: 1526156 - DNA, 15 bp, Homo sapiens
agaaatcaagaaaat

SEQ ID NO: 1526157 - DNA, 15 bp, Homo sapiens
gagaaatcaagaaaa

SEQ ID NO: 1526158 - DNA, 15 bp, Homo sapiens
tgagaaatcaagaaa

SEQ ID NO: 1526159 - DNA, 15 bp, Homo sapiens
atgagaaatcaagaa

SEQ ID NO: 1526160 - DNA, 15 bp, Homo sapiens
catgagaaatcaaga

SEQ ID NO: 1526161 - DNA, 15 bp, Homo sapiens
tcatgagaaatcaag

SEQ ID NO: 1526162 - DNA, 15 bp, Homo sapiens
gtcatgagaaatcaa

SEQ ID NO: 1526163 - DNA, 15 bp, Homo sapiens
ggtcatgagaaatca

SEQ ID NO: 1526164 - DNA, 15 bp, Homo sapiens
aggtcatgagaaatc

SEQ ID NO: 1526165 - DNA, 15 bp, Homo sapiens
aaggtcatgagaaat

SEQ ID NO: 1526166 - DNA, 15 bp, Homo sapiens
aaaggtcatgagaaa

SEQ ID NO: 1526167 - DNA, 15 bp, Homo sapiens
taaaggtcatgagaa

SEQ ID NO: 1526168 - DNA, 15 bp, Homo sapiens
ataaaggtcatgaga

SEQ ID NO: 1526169 - DNA, 15 bp, Homo sapiens
aataaaggtcatgag

SEQ ID NO: 1526170 - DNA, 15 bp, Homo sapiens
gaataaaggtcatga

SEQ ID NO: 1526171 - DNA, 15 bp, Homo sapiens
ggaataaaggtcatg

SEQ ID NO: 1526172 - DNA, 15 bp, Homo sapiens
tggaataaaggtcat

SEQ ID NO: 1526173 - DNA, 15 bp, Homo sapiens
ttggaataaaggtca

SEQ ID NO: 1526174 - DNA, 15 bp, Homo sapiens
gttggaataaaggtc

SEQ ID NO: 1526175 - DNA, 15 bp, Homo sapiens
tgttggaataaaggt

SEQ ID NO: 1526176 - DNA, 15 bp, Homo sapiens
ttgttggaataaagg

SEQ ID NO: 1526177 - DNA, 15 bp, Homo sapiens
attgttggaataaag

SEQ ID NO: 1526178 - DNA, 15 bp, Homo sapiens
aattgttggaataaa

SEQ ID NO: 1526179 - DNA, 15 bp, Homo sapiens
aaattgttggaataa

SEQ ID NO: 1526180 - DNA, 15 bp, Homo sapiens
taaattgttggaata

SEQ ID NO: 1526181 - DNA, 15 bp, Homo sapiens
ttaaattgttggaat

SEQ ID NO: 1526182 - DNA, 15 bp, Homo sapiens
cttaaattgttggaa

SEQ ID NO: 1526183 - DNA, 15 bp, Homo sapiens
ccttaaattgttgga

SEQ ID NO: 1526184 - DNA, 15 bp, Homo sapiens
accttaaattgttgg

SEQ ID NO: 1526185 - DNA, 15 bp, Homo sapiens
aaccttaaattgttg

SEQ ID NO: 1526186 - DNA, 15 bp, Homo sapiens
aaaccttaaattgtt

SEQ ID NO: 1526187 - DNA, 15 bp, Homo sapiens
aaaaccttaaattgt

SEQ ID NO: 1526188 - DNA, 15 bp, Homo sapiens
taaaaccttaaattg

SEQ ID NO: 1526189 - DNA, 15 bp, Homo sapiens
ctaaaaccttaaatt

SEQ ID NO: 1526190 - DNA, 15 bp, Homo sapiens
actaaaaccttaaat

SEQ ID NO: 1526191 - DNA, 15 bp, Homo sapiens
aactaaaaccttaaa

SEQ ID NO: 1526192 - DNA, 15 bp, Homo sapiens
aaactaaaaccttaa

SEQ ID NO: 1526193 - DNA, 15 bp, Homo sapiens
taaactaaaacctta

SEQ ID NO: 1526194 - DNA, 15 bp, Homo sapiens
ctaaactaaaacctt

SEQ ID NO: 1526195 - DNA, 15 bp, Homo sapiens
cctaaactaaaacct

SEQ ID NO: 1526196 - DNA, 15 bp, Homo sapiens
acctaaactaaaacc

SEQ ID NO: 1526197 - DNA, 15 bp, Homo sapiens
gacctaaactaaaac

SEQ ID NO: 1526198 - DNA, 15 bp, Homo sapiens
tgacctaaactaaaa

SEQ ID NO: 1526199 - DNA, 15 bp, Homo sapiens
gtgacctaaactaaa

SEQ ID NO: 1526200 - DNA, 15 bp, Homo sapiens
tgtgacctaaactaa

SEQ ID NO: 1526201 - DNA, 15 bp, Homo sapiens
ttgtgacctaaacta

SEQ ID NO: 1526202 - DNA, 15 bp, Homo sapiens
tttgtgacctaaact

SEQ ID NO: 1526203 - DNA, 15 bp, Homo sapiens
atttgtgacctaaac

SEQ ID NO: 1526204 - DNA, 15 bp, Homo sapiens
aatttgtgacctaaa

SEQ ID NO: 1526205 - DNA, 15 bp, Homo sapiens
taatttgtgacctaa

SEQ ID NO: 1526206 - DNA, 15 bp, Homo sapiens
ctaatttgtgaccta

SEQ ID NO: 1526207 - DNA, 15 bp, Homo sapiens
cctaatttgtgacct

SEQ ID NO: 1526208 - DNA, 15 bp, Homo sapiens
tcctaatttgtgacc

SEQ ID NO: 1526209 - DNA, 15 bp, Homo sapiens
atcctaatttgtgac

SEQ ID NO: 1526210 - DNA, 15 bp, Homo sapiens
tatcctaatttgtga

SEQ ID NO: 1526211 - DNA, 15 bp, Homo sapiens
atatcctaatttgtg

SEQ ID NO: 1526212 - DNA, 15 bp, Homo sapiens
aatatcctaatttgt

SEQ ID NO: 1526213 - DNA, 15 bp, Homo sapiens
taatatcctaatttg

SEQ ID NO: 1526214 - DNA, 15 bp, Homo sapiens
gtaatatcctaattt

SEQ ID NO: 1526215 - DNA, 15 bp, Homo sapiens
agtaatatcctaatt

SEQ ID NO: 1526216 - DNA, 15 bp, Homo sapiens
aagtaatatcctaat

SEQ ID NO: 1526217 - DNA, 15 bp, Homo sapiens
gaagtaatatcctaa

SEQ ID NO: 1526218 - DNA, 15 bp, Homo sapiens
agaagtaatatccta

SEQ ID NO: 1526219 - DNA, 15 bp, Homo sapiens
tagaagtaatatcct

SEQ ID NO: 1526220 - DNA, 15 bp, Homo sapiens
ttagaagtaatatcc

SEQ ID NO: 1526221 - DNA, 15 bp, Homo sapiens
tttagaagtaatatc

SEQ ID NO: 1526222 - DNA, 15 bp, Homo sapiens
atttagaagtaatat

SEQ ID NO: 1526223 - DNA, 15 bp, Homo sapiens
tatttagaagtaata

SEQ ID NO: 1526224 - DNA, 15 bp, Homo sapiens
atatttagaagtaat

SEQ ID NO: 1526225 - DNA, 15 bp, Homo sapiens
aatatttagaagtaa

SEQ ID NO: 1526226 - DNA, 15 bp, Homo sapiens
aaatatttagaagta

SEQ ID NO: 1526227 - DNA, 15 bp, Homo sapiens
taaatatttagaagt

SEQ ID NO: 1526228 - DNA, 15 bp, Homo sapiens
gtaaatatttagaag

SEQ ID NO: 1526229 - DNA, 15 bp, Homo sapiens
ggtaaatatttagaa

SEQ ID NO: 1526230 - DNA, 15 bp, Homo sapiens
gggtaaatatttaga

SEQ ID NO: 1526231 - DNA, 15 bp, Homo sapiens
tgggtaaatatttag

SEQ ID NO: 1526232 - DNA, 15 bp, Homo sapiens
ttgggtaaatattta

SEQ ID NO: 1526233 - DNA, 15 bp, Homo sapiens
tctttgggtaaatat

SEQ ID NO: 1526234 - DNA, 15 bp, Homo sapiens
gtctttgggtaaata

SEQ ID NO: 1526235 - DNA, 15 bp, Homo sapiens
agtctttgggtaaat

SEQ ID NO: 1526236 - DNA, 15 bp, Homo sapiens
tagtctttgggtaaa

SEQ ID NO: 1526237 - DNA, 15 bp, Homo sapiens
ttagtctttgggtaa

SEQ ID NO: 1526238 - DNA, 15 bp, Homo sapiens
tttagtctttgggta

SEQ ID NO: 1526239 - DNA, 15 bp, Homo sapiens
ctttagtctttgggt

SEQ ID NO: 1526240 - DNA, 15 bp, Homo sapiens
tctttagtctttggg

SEQ ID NO: 1526241 - DNA, 15 bp, Homo sapiens
ctctttagtctttgg

SEQ ID NO: 1526242 - DNA, 15 bp, Homo sapiens
cctctttagtctttg

SEQ ID NO: 1526243 - DNA, 15 bp, Homo sapiens
acctctttagtcttt

SEQ ID NO: 1526244 - DNA, 15 bp, Homo sapiens
aacctctttagtctt

SEQ ID NO: 1526245 - DNA, 15 bp, Homo sapiens
taacctctttagtct

SEQ ID NO: 1526246 - DNA, 15 bp, Homo sapiens
ttaacctctttagtc

SEQ ID NO: 1526247 - DNA, 15 bp, Homo sapiens
tttaacctctttagt

SEQ ID NO: 1526248 - DNA, 15 bp, Homo sapiens
gtttaacctctttag

SEQ ID NO: 1526249 - DNA, 15 bp, Homo sapiens
ggtttaacctcttta

SEQ ID NO: 1526250 - DNA, 15 bp, Homo sapiens
tggtttaacctcttt

SEQ ID NO: 1526251 - DNA, 15 bp, Homo sapiens
ttggtttaacctctt

SEQ ID NO: 1526252 - DNA, 15 bp, Homo sapiens
tttggtttaacctct

SEQ ID NO: 1526253 - DNA, 15 bp, Homo sapiens
ctttggtttaacctc

SEQ ID NO: 1526254 - DNA, 15 bp, Homo sapiens
gctttggtttaacct

SEQ ID NO: 1526255 - DNA, 15 bp, Homo sapiens
tgctttggtttaacc

SEQ ID NO: 1526256 - DNA, 15 bp, Homo sapiens
atgctttggtttaac

SEQ ID NO: 1526257 - DNA, 15 bp, Homo sapiens
aatgctttggtttaa

SEQ ID NO: 1526258 - DNA, 15 bp, Homo sapiens
aaatgctttggttta

SEQ ID NO: 1526259 - DNA, 15 bp, Homo sapiens
gaaatgctttggttt

SEQ ID NO: 1526260 - DNA, 15 bp, Homo sapiens
ggaaatgctttggtt

SEQ ID NO: 1526261 - DNA, 15 bp, Homo sapiens
gggaaatgctttggt

SEQ ID NO: 1526262 - DNA, 15 bp, Homo sapiens
tggggaaatgctttg

SEQ ID NO: 1526263 - DNA, 15 bp, Homo sapiens
ctggggaaatgcttt

SEQ ID NO: 1526264 - DNA, 15 bp, Homo sapiens
actggggaaatgctt

SEQ ID NO: 1526265 - DNA, 15 bp, Homo sapiens
cactggggaaatgct

SEQ ID NO: 1526266 - DNA, 15 bp, Homo sapiens
gcactggggaaatgc

SEQ ID NO: 1526267 - DNA, 15 bp, Homo sapiens
agcactggggaaatg

SEQ ID NO: 1526268 - DNA, 15 bp, Homo sapiens
cagcactggggaaat

SEQ ID NO: 1526269 - DNA, 15 bp, Homo sapiens
ccagcactggggaaa

SEQ ID NO: 1526270 - DNA, 15 bp, Homo sapiens
cccagcactggggaa

SEQ ID NO: 1526271 - DNA, 15 bp, Homo sapiens
tcccagcactgggga

SEQ ID NO: 1526272 - DNA, 15 bp, Homo sapiens
atcccagcactgggg

SEQ ID NO: 1526273 - DNA, 15 bp, Homo sapiens
catcccagcactggg

SEQ ID NO: 1526274 - DNA, 15 bp, Homo sapiens
tcatcccagcactgg

SEQ ID NO: 1526275 - DNA, 15 bp, Homo sapiens
ctcatcccagcactg

SEQ ID NO: 1526276 - DNA, 15 bp, Homo sapiens
cctcatcccagcact

SEQ ID NO: 1526277 - DNA, 15 bp, Homo sapiens
acctcatcccagcac

SEQ ID NO: 1526278 - DNA, 15 bp, Homo sapiens
aacctcatcccagca

SEQ ID NO: 1526279 - DNA, 15 bp, Homo sapiens
aaacctcatcccagc

SEQ ID NO: 1526280 - DNA, 15 bp, Homo sapiens
aaaacctcatcccag

SEQ ID NO: 1526281 - DNA, 15 bp, Homo sapiens
gaaaacctcatccca

SEQ ID NO: 1526282 - DNA, 15 bp, Homo sapiens
agaaaacctcatccc

SEQ ID NO: 1526283 - DNA, 15 bp, Homo sapiens
aagaaaacctcatcc

SEQ ID NO: 1526284 - DNA, 15 bp, Homo sapiens
gaagaaaacctcatc

SEQ ID NO: 1526285 - DNA, 15 bp, Homo sapiens
tgaagaaaacctcat

SEQ ID NO: 1526286 - DNA, 15 bp, Homo sapiens
atgaagaaaacctca

SEQ ID NO: 1526287 - DNA, 15 bp, Homo sapiens
aatgaagaaaacctc

SEQ ID NO: 1526288 - DNA, 15 bp, Homo sapiens
taatgaagaaaacct

SEQ ID NO: 1526289 - DNA, 15 bp, Homo sapiens
ttaatgaagaaaacc

SEQ ID NO: 1526290 - DNA, 15 bp, Homo sapiens
gttaatgaagaaaac

SEQ ID NO: 1526291 - DNA, 15 bp, Homo sapiens
tgttaatgaagaaaa

SEQ ID NO: 1526292 - DNA, 15 bp, Homo sapiens
ttgttaatgaagaaa

SEQ ID NO: 1526293 - DNA, 15 bp, Homo sapiens
gttgttaatgaagaa

SEQ ID NO: 1526294 - DNA, 15 bp, Homo sapiens
tgttgttaatgaaga

SEQ ID NO: 1526295 - DNA, 15 bp, Homo sapiens
ttgttgttaatgaag

SEQ ID NO: 1526296 - DNA, 15 bp, Homo sapiens
gttgttgttaatgaa

SEQ ID NO: 1526297 - DNA, 15 bp, Homo sapiens
tgttgttgttaatga

SEQ ID NO: 1526298 - DNA, 15 bp, Homo sapiens
ttgttgttgttaatg

SEQ ID NO: 1526299 - DNA, 15 bp, Homo sapiens
gttgttgttgttaat

SEQ ID NO: 1526300 - DNA, 15 bp, Homo sapiens
tgttgttgttgttaa

SEQ ID NO: 1526301 - DNA, 15 bp, Homo sapiens
gttgttgttgttgtt

SEQ ID NO: 1526302 - DNA, 15 bp, Homo sapiens
tgttgttgttgttgt

SEQ ID NO: 1526303 - DNA, 15 bp, Homo sapiens
attgttgttgttgtt

SEQ ID NO: 1526304 - DNA, 15 bp, Homo sapiens
tattgttgttgttgt

SEQ ID NO: 1526305 - DNA, 15 bp, Homo sapiens
ttattgttgttgttg

SEQ ID NO: 1526306 - DNA, 15 bp, Homo sapiens
gttattgttgttgtt

SEQ ID NO: 1526307 - DNA, 15 bp, Homo sapiens
tgttattgttgttgt

SEQ ID NO: 1526308 - DNA, 15 bp, Homo sapiens
ttgttattgttgttg

SEQ ID NO: 1526309 - DNA, 15 bp, Homo sapiens
tttgttattgttgtt

SEQ ID NO: 1526310 - DNA, 15 bp, Homo sapiens
gtttgttattgttgt

SEQ ID NO: 1526311 - DNA, 15 bp, Homo sapiens
agtttgttattgttg

SEQ ID NO: 1526312 - DNA, 15 bp, Homo sapiens
tagtttgttattgtt

SEQ ID NO: 1526313 - DNA, 15 bp, Homo sapiens
ctagtttgttattgt

SEQ ID NO: 1526314 - DNA, 15 bp, Homo sapiens
tctagtttgttattg

SEQ ID NO: 1526315 - DNA, 15 bp, Homo sapiens
ctctagtttgttatt

SEQ ID NO: 1526316 - DNA, 15 bp, Homo sapiens
tctctagtttgttat

SEQ ID NO: 1526317 - DNA, 15 bp, Homo sapiens
ttctctagtttgtta

SEQ ID NO: 1526318 - DNA, 15 bp, Homo sapiens
cttctctagtttgtt

SEQ ID NO: 1526319 - DNA, 15 bp, Homo sapiens
acttctctagtttgt

SEQ ID NO: 1526320 - DNA, 15 bp, Homo sapiens
aacttctctagtttg

SEQ ID NO: 1526321 - DNA, 15 bp, Homo sapiens
gaacttctctagttt

SEQ ID NO: 1526322 - DNA, 15 bp, Homo sapiens
tgaacttctctagtt

SEQ ID NO: 1526323 - DNA, 15 bp, Homo sapiens
atgaacttctctagt

SEQ ID NO: 1526324 - DNA, 15 bp, Homo sapiens
tatgaacttctctag

SEQ ID NO: 1526325 - DNA, 15 bp, Homo sapiens
ctatgaacttctcta

SEQ ID NO: 1526326 - DNA, 15 bp, Homo sapiens
actatgaacttctct

SEQ ID NO: 1526327 - DNA, 15 bp, Homo sapiens
aactatgaacttctc

SEQ ID NO: 1526328 - DNA, 15 bp, Homo sapiens
aaactatgaacttct

SEQ ID NO: 1526329 - DNA, 15 bp, Homo sapiens
aaaactatgaacttc

SEQ ID NO: 1526330 - DNA, 15 bp, Homo sapiens
taaaactatgaactt

SEQ ID NO: 1526331 - DNA, 15 bp, Homo sapiens
ttaaaactatgaact

SEQ ID NO: 1526332 - DNA, 15 bp, Homo sapiens
cttaaaactatgaac

SEQ ID NO: 1526333 - DNA, 15 bp, Homo sapiens
tcttaaaactatgaa

SEQ ID NO: 1526334 - DNA, 15 bp, Homo sapiens
atcttaaaactatga

SEQ ID NO: 1526335 - DNA, 15 bp, Homo sapiens
aatcttaaaactatg

SEQ ID NO: 1526336 - DNA, 15 bp, Homo sapiens
aaatcttaaaactat

SEQ ID NO: 1526337 - DNA, 15 bp, Homo sapiens
taaatcttaaaacta

SEQ ID NO: 1526338 - DNA, 15 bp, Homo sapiens
ctaaatcttaaaact

SEQ ID NO: 1526339 - DNA, 15 bp, Homo sapiens
tctaaatcttaaaac

SEQ ID NO: 1526340 - DNA, 15 bp, Homo sapiens
ttctaaatcttaaaa

SEQ ID NO: 1526341 - DNA, 15 bp, Homo sapiens
tttctaaatcttaaa

SEQ ID NO: 1526342 - DNA, 15 bp, Homo sapiens
atttctaaatcttaa

SEQ ID NO: 1526343 - DNA, 15 bp, Homo sapiens
catttctaaatctta

SEQ ID NO: 1526344 - DNA, 15 bp, Homo sapiens
tcatttctaaatctt

SEQ ID NO: 1526345 - DNA, 15 bp, Homo sapiens
ttcatttctaaatct

SEQ ID NO: 1526346 - DNA, 15 bp, Homo sapiens
gttcatttctaaatc

SEQ ID NO: 1526347 - DNA, 15 bp, Homo sapiens
tgttcatttctaaat

SEQ ID NO: 1526348 - DNA, 15 bp, Homo sapiens
ttgttcatttctaaa

SEQ ID NO: 1526349 - DNA, 15 bp, Homo sapiens
tttgttcatttctaa

SEQ ID NO: 1526350 - DNA, 15 bp, Homo sapiens
ttttgttcatttcta

SEQ ID NO: 1526351 - DNA, 15 bp, Homo sapiens
gttttgttcatttct

SEQ ID NO: 1526352 - DNA, 15 bp, Homo sapiens
ggttttgttcatttc

SEQ ID NO: 1526353 - DNA, 15 bp, Homo sapiens
tggttttgttcattt

SEQ ID NO: 1526354 - DNA, 15 bp, Homo sapiens
ttggttttgttcatt

SEQ ID NO: 1526355 - DNA, 15 bp, Homo sapiens
gttggttttgttcat

SEQ ID NO: 1526356 - DNA, 15 bp, Homo sapiens
agttggttttgttca

SEQ ID NO: 1526357 - DNA, 15 bp, Homo sapiens
gagttggttttgttc

SEQ ID NO: 1526358 - DNA, 15 bp, Homo sapiens
ggagttggttttgtt

SEQ ID NO: 1526359 - DNA, 15 bp, Homo sapiens
aggagttggttttgt

SEQ ID NO: 1526360 - DNA, 15 bp, Homo sapiens
aaggagttggttttg

SEQ ID NO: 1526361 - DNA, 15 bp, Homo sapiens
gaaggagttggtttt

SEQ ID NO: 1526362 - DNA, 15 bp, Homo sapiens
tgaaggagttggttt

SEQ ID NO: 1526363 - DNA, 15 bp, Homo sapiens
atgaaggagttggtt

SEQ ID NO: 1526364 - DNA, 15 bp, Homo sapiens
aatgaaggagttggt

SEQ ID NO: 1526365 - DNA, 15 bp, Homo sapiens
aaatgaaggagttgg

SEQ ID NO: 1526366 - DNA, 15 bp, Homo sapiens
aaaatgaaggagttg

SEQ ID NO: 1526367 - DNA, 15 bp, Homo sapiens
caaaatgaaggagtt

SEQ ID NO: 1526368 - DNA, 15 bp, Homo sapiens
gcaaaatgaaggagt

SEQ ID NO: 1526369 - DNA, 15 bp, Homo sapiens
tgcaaaatgaaggag

SEQ ID NO: 1526370 - DNA, 15 bp, Homo sapiens
ttgcaaaatgaagga

SEQ ID NO: 1526371 - DNA, 15 bp, Homo sapiens
tttgcaaaatgaagg

SEQ ID NO: 1526372 - DNA, 15 bp, Homo sapiens
atttgcaaaatgaag

SEQ ID NO: 1526373 - DNA, 15 bp, Homo sapiens
catttgcaaaatgaa

SEQ ID NO: 1526374 - DNA, 15 bp, Homo sapiens
ccatttgcaaaatga

SEQ ID NO: 1526375 - DNA, 15 bp, Homo sapiens
cccatttgcaaaatg

SEQ ID NO: 1526376 - DNA, 15 bp, Homo sapiens
gcccatttgcaaaat

SEQ ID NO: 1526377 - DNA, 15 bp, Homo sapiens
agcccatttgcaaaa

SEQ ID NO: 1526378 - DNA, 15 bp, Homo sapiens
gagcccatttgcaaa

SEQ ID NO: 1526379 - DNA, 15 bp, Homo sapiens
tgagcccatttgcaa

SEQ ID NO: 1526380 - DNA, 15 bp, Homo sapiens
ctgagcccatttgca

SEQ ID NO: 1526381 - DNA, 15 bp, Homo sapiens
tctgagcccatttgc

SEQ ID NO: 1526382 - DNA, 15 bp, Homo sapiens
gtctgagcccatttg

SEQ ID NO: 1526383 - DNA, 15 bp, Homo sapiens
tgtctgagcccattt

SEQ ID NO: 1526384 - DNA, 15 bp, Homo sapiens
ttgtctgagcccatt

SEQ ID NO: 1526385 - DNA, 15 bp, Homo sapiens
cttgtctgagcccat

SEQ ID NO: 1526386 - DNA, 15 bp, Homo sapiens
ccttgtctgagccca

SEQ ID NO: 1526387 - DNA, 15 bp, Homo sapiens
cccttgtctgagccc

SEQ ID NO: 1526388 - DNA, 15 bp, Homo sapiens
ccccttgtctgagcc

SEQ ID NO: 1526389 - DNA, 15 bp, Homo sapiens
gccccttgtctgagc

SEQ ID NO: 1526390 - DNA, 15 bp, Homo sapiens
tgccccttgtctgag

SEQ ID NO: 1526391 - DNA, 15 bp, Homo sapiens
atgccccttgtctga

SEQ ID NO: 1526392 - DNA, 15 bp, Homo sapiens
tatgccccttgtctg

SEQ ID NO: 1526393 - DNA, 15 bp, Homo sapiens
ttatgccccttgtct

SEQ ID NO: 1526394 - DNA, 15 bp, Homo sapiens
gttatgccccttgtc

SEQ ID NO: 1526395 - DNA, 15 bp, Homo sapiens
agttatgccccttgt

SEQ ID NO: 1526396 - DNA, 15 bp, Homo sapiens
aagttatgccccttg

SEQ ID NO: 1526397 - DNA, 15 bp, Homo sapiens
taagttatgcccctt

SEQ ID NO: 1526398 - DNA, 15 bp, Homo sapiens
gtaagttatgcccct

SEQ ID NO: 1526399 - DNA, 15 bp, Homo sapiens
ggtaagttatgcccc

SEQ ID NO: 1526400 - DNA, 15 bp, Homo sapiens
aggtaagttatgccc

SEQ ID NO: 1526401 - DNA, 15 bp, Homo sapiens
caggtaagttatgcc

SEQ ID NO: 1526402 - DNA, 15 bp, Homo sapiens
tcaggtaagttatgc

SEQ ID NO: 1526403 - DNA, 15 bp, Homo sapiens
ctcaggtaagttatg

SEQ ID NO: 1526404 - DNA, 15 bp, Homo sapiens
cctcaggtaagttat

SEQ ID NO: 1526405 - DNA, 15 bp, Homo sapiens
ccctcaggtaagtta

SEQ ID NO: 1526406 - DNA, 15 bp, Homo sapiens
accctcaggtaagtt

SEQ ID NO: 1526407 - DNA, 15 bp, Homo sapiens
caccctcaggtaagt

SEQ ID NO: 1526408 - DNA, 15 bp, Homo sapiens
gcaccctcaggtaag

SEQ ID NO: 1526409 - DNA, 15 bp, Homo sapiens
tgcaccctcaggtaa

SEQ ID NO: 1526410 - DNA, 15 bp, Homo sapiens
atgcaccctcaggta

SEQ ID NO: 1526411 - DNA, 15 bp, Homo sapiens
tatgcaccctcaggt

SEQ ID NO: 1526412 - DNA, 15 bp, Homo sapiens
atatgcaccctcagg

SEQ ID NO: 1526413 - DNA, 15 bp, Homo sapiens
gatatgcaccctcag

SEQ ID NO: 1526414 - DNA, 15 bp, Homo sapiens
agatatgcaccctca

SEQ ID NO: 1526415 - DNA, 15 bp, Homo sapiens
tagatatgcaccctc

SEQ ID NO: 1526416 - DNA, 15 bp, Homo sapiens
ttagatatgcaccct

SEQ ID NO: 1526417 - DNA, 15 bp, Homo sapiens
tttagatatgcaccc

SEQ ID NO: 1526418 - DNA, 15 bp, Homo sapiens
ttttagatatgcacc

SEQ ID NO: 1526419 - DNA, 15 bp, Homo sapiens
tttttagatatgcac

SEQ ID NO: 1526420 - DNA, 15 bp, Homo sapiens
atttttagatatgca

SEQ ID NO: 1526421 - DNA, 15 bp, Homo sapiens
catttttagatatgc

SEQ ID NO: 1526422 - DNA, 15 bp, Homo sapiens
tcatttttagatatg

SEQ ID NO: 1526423 - DNA, 15 bp, Homo sapiens
gtcatttttagatat

SEQ ID NO: 1526424 - DNA, 15 bp, Homo sapiens
ggtcatttttagata

SEQ ID NO: 1526425 - DNA, 15 bp, Homo sapiens
gggtcatttttagat

SEQ ID NO: 1526426 - DNA, 15 bp, Homo sapiens
tgggtcatttttaga

SEQ ID NO: 1526427 - DNA, 15 bp, Homo sapiens
ttgggtcatttttag

SEQ ID NO: 1526428 - DNA, 15 bp, Homo sapiens
cttgggtcattttta

SEQ ID NO: 1526429 - DNA, 15 bp, Homo sapiens
gcttgggtcattttt

SEQ ID NO: 1526430 - DNA, 15 bp, Homo sapiens
agcttgggtcatttt

SEQ ID NO: 1526431 - DNA, 15 bp, Homo sapiens
tagcttgggtcattt

SEQ ID NO: 1526432 - DNA, 15 bp, Homo sapiens
ctagcttgggtcatt

SEQ ID NO: 1526433 - DNA, 15 bp, Homo sapiens
tctagcttgggtcat

SEQ ID NO: 1526434 - DNA, 15 bp, Homo sapiens
ttctagcttgggtca

SEQ ID NO: 1526435 - DNA, 15 bp, Homo sapiens
gttctagcttgggtc

SEQ ID NO: 1526436 - DNA, 15 bp, Homo sapiens
agttctagcttgggt

SEQ ID NO: 1526437 - DNA, 15 bp, Homo sapiens
aagttctagcttggg

SEQ ID NO: 1526438 - DNA, 15 bp, Homo sapiens
taagttctagcttgg

SEQ ID NO: 1526439 - DNA, 15 bp, Homo sapiens
ttaagttctagcttg

SEQ ID NO: 1526440 - DNA, 15 bp, Homo sapiens
cttaagttctagctt

SEQ ID NO: 1526441 - DNA, 15 bp, Homo sapiens
acttaagttctagct

SEQ ID NO: 1526442 - DNA, 15 bp, Homo sapiens
gacttaagttctagc

SEQ ID NO: 1526443 - DNA, 15 bp, Homo sapiens
agacttaagttctag

SEQ ID NO: 1526444 - DNA, 15 bp, Homo sapiens
cagacttaagttcta

SEQ ID NO: 1526445 - DNA, 15 bp, Homo sapiens
acagacttaagttct

SEQ ID NO: 1526446 - DNA, 15 bp, Homo sapiens
cacagacttaagttc

SEQ ID NO: 1526447 - DNA, 15 bp, Homo sapiens
tcacagacttaagtt

SEQ ID NO: 1526448 - DNA, 15 bp, Homo sapiens
gtcacagacttaagt

SEQ ID NO: 1526449 - DNA, 15 bp, Homo sapiens
agtcacagacttaag

SEQ ID NO: 1526450 - DNA, 15 bp, Homo sapiens
aagtcacagacttaa

SEQ ID NO: 1526451 - DNA, 15 bp, Homo sapiens
taagtcacagactta

SEQ ID NO: 1526452 - DNA, 15 bp, Homo sapiens
ttaagtcacagactt

SEQ ID NO: 1526453 - DNA, 15 bp, Homo sapiens
tttaagtcacagact

SEQ ID NO: 1526454 - DNA, 15 bp, Homo sapiens
ctttaagtcacagac

SEQ ID NO: 1526455 - DNA, 15 bp, Homo sapiens
gctttaagtcacaga

SEQ ID NO: 1526456 - DNA, 15 bp, Homo sapiens
ggctttaagtcacag

SEQ ID NO: 1526457 - DNA, 15 bp, Homo sapiens
gggctttaagtcaca

SEQ ID NO: 1526458 - DNA, 15 bp, Homo sapiens
tgggctttaagtcac

SEQ ID NO: 1526459 - DNA, 15 bp, Homo sapiens
ttgggctttaagtca

SEQ ID NO: 1526460 - DNA, 15 bp, Homo sapiens
tttgggctttaagtc

SEQ ID NO: 1526461 - DNA, 15 bp, Homo sapiens
atttgggctttaagt

SEQ ID NO: 1526462 - DNA, 15 bp, Homo sapiens
aatttgggctttaag

SEQ ID NO: 1526463 - DNA, 15 bp, Homo sapiens
aaatttgggctttaa

SEQ ID NO: 1526464 - DNA, 15 bp, Homo sapiens
aaaatttgggcttta

SEQ ID NO: 1526465 - DNA, 15 bp, Homo sapiens
taaaatttgggcttt

SEQ ID NO: 1526466 - DNA, 15 bp, Homo sapiens
ttaaaatttgggctt

SEQ ID NO: 1526467 - DNA, 15 bp, Homo sapiens
gttaaaatttgggct

SEQ ID NO: 1526468 - DNA, 15 bp, Homo sapiens
agttaaaatttgggc

SEQ ID NO: 1526469 - DNA, 15 bp, Homo sapiens
cagttaaaatttggg

SEQ ID NO: 1526470 - DNA, 15 bp, Homo sapiens
acagttaaaatttgg

SEQ ID NO: 1526471 - DNA, 15 bp, Homo sapiens
tacagttaaaatttg

SEQ ID NO: 1526472 - DNA, 15 bp, Homo sapiens
ctacagttaaaattt

SEQ ID NO: 1526473 - DNA, 15 bp, Homo sapiens
tctacagttaaaatt

SEQ ID NO: 1526474 - DNA, 15 bp, Homo sapiens
ttctacagttaaaat

SEQ ID NO: 1526475 - DNA, 15 bp, Homo sapiens
gttctacagttaaaa

SEQ ID NO: 1526476 - DNA, 15 bp, Homo sapiens
agttctacagttaaa

SEQ ID NO: 1526477 - DNA, 15 bp, Homo sapiens
gagttctacagttaa

SEQ ID NO: 1526478 - DNA, 15 bp, Homo sapiens
agagttctacagtta

SEQ ID NO: 1526479 - DNA, 15 bp, Homo sapiens
tagagttctacagtt

SEQ ID NO: 1526480 - DNA, 15 bp, Homo sapiens
ttagagttctacagt

SEQ ID NO: 1526481 - DNA, 15 bp, Homo sapiens
gttagagttctacag

SEQ ID NO: 1526482 - DNA, 15 bp, Homo sapiens
tgttagagttctaca

SEQ ID NO: 1526483 - DNA, 15 bp, Homo sapiens
atgttagagttctac

SEQ ID NO: 1526484 - DNA, 15 bp, Homo sapiens
tatgttagagttcta

SEQ ID NO: 1526485 - DNA, 15 bp, Homo sapiens
atatgttagagttct

SEQ ID NO: 1526486 - DNA, 15 bp, Homo sapiens
tatatgttagagttc

SEQ ID NO: 1526487 - DNA, 15 bp, Homo sapiens
atatatgttagagtt

SEQ ID NO: 1526488 - DNA, 15 bp, Homo sapiens
tatatatgttagagt

SEQ ID NO: 1526489 - DNA, 15 bp, Homo sapiens
atatatatgttagag

SEQ ID NO: 1526490 - DNA, 15 bp, Homo sapiens
aatatatatgttaga

SEQ ID NO: 1526491 - DNA, 15 bp, Homo sapiens
taatatatatgttag

SEQ ID NO: 1526492 - DNA, 15 bp, Homo sapiens
ttaatatatatgtta

SEQ ID NO: 1526493 - DNA, 15 bp, Homo sapiens
tttaatatatatgtt

SEQ ID NO: 1526494 - DNA, 15 bp, Homo sapiens
ttttaatatatatgt

SEQ ID NO: 1526495 - DNA, 15 bp, Homo sapiens
cttttaatatatatg

SEQ ID NO: 1526496 - DNA, 15 bp, Homo sapiens
acttttaatatatat

SEQ ID NO: 1526497 - DNA, 15 bp, Homo sapiens
aacttttaatatata

SEQ ID NO: 1526498 - DNA, 15 bp, Homo sapiens
taacttttaatatat

SEQ ID NO: 1526499 - DNA, 15 bp, Homo sapiens
gtaacttttaatata

SEQ ID NO: 1526500 - DNA, 15 bp, Homo sapiens
tgtaacttttaatat

SEQ ID NO: 1526501 - DNA, 15 bp, Homo sapiens
atgtaacttttaata

SEQ ID NO: 1526502 - DNA, 15 bp, Homo sapiens
aatgtaacttttaat

SEQ ID NO: 1526503 - DNA, 15 bp, Homo sapiens
aaatgtaacttttaa

SEQ ID NO: 1526504 - DNA, 15 bp, Homo sapiens
caaatgtaactttta

SEQ ID NO: 1526505 - DNA, 15 bp, Homo sapiens
ccaaatgtaactttt

SEQ ID NO: 1526506 - DNA, 15 bp, Homo sapiens
gccaaatgtaacttt

SEQ ID NO: 1526507 - DNA, 15 bp, Homo sapiens
agccaaatgtaactt

SEQ ID NO: 1526508 - DNA, 15 bp, Homo sapiens
gagccaaatgtaact

SEQ ID NO: 1526509 - DNA, 15 bp, Homo sapiens
agagccaaatgtaac

SEQ ID NO: 1526510 - DNA, 15 bp, Homo sapiens
tagagccaaatgtaa

SEQ ID NO: 1526511 - DNA, 15 bp, Homo sapiens
ttagagccaaatgta

SEQ ID NO: 1526512 - DNA, 15 bp, Homo sapiens
attagagccaaatgt

SEQ ID NO: 1526513 - DNA, 15 bp, Homo sapiens
tattagagccaaatg

SEQ ID NO: 1526514 - DNA, 15 bp, Homo sapiens
atattagagccaaat

SEQ ID NO: 1526515 - DNA, 15 bp, Homo sapiens
catattagagccaaa

SEQ ID NO: 1526516 - DNA, 15 bp, Homo sapiens
acatattagagccaa

SEQ ID NO: 1526517 - DNA, 15 bp, Homo sapiens
tacatattagagcca

SEQ ID NO: 1526518 - DNA, 15 bp, Homo sapiens
ttacatattagagcc

SEQ ID NO: 1526519 - DNA, 15 bp, Homo sapiens
attacatattagagc

SEQ ID NO: 1526520 - DNA, 15 bp, Homo sapiens
aattacatattagag

SEQ ID NO: 1526521 - DNA, 15 bp, Homo sapiens
caattacatattaga

SEQ ID NO: 1526522 - DNA, 15 bp, Homo sapiens
tcaattacatattag

SEQ ID NO: 1526523 - DNA, 15 bp, Homo sapiens
ctcaattacatatta

SEQ ID NO: 1526524 - DNA, 15 bp, Homo sapiens
tctcaattacatatt

SEQ ID NO: 1526525 - DNA, 15 bp, Homo sapiens
ttctcaattacatat

SEQ ID NO: 1526526 - DNA, 15 bp, Homo sapiens
gttctcaattacata

SEQ ID NO: 1526527 - DNA, 15 bp, Homo sapiens
tgttctcaattacat

SEQ ID NO: 1526528 - DNA, 15 bp, Homo sapiens
atgttctcaattaca

SEQ ID NO: 1526529 - DNA, 15 bp, Homo sapiens
aatgttctcaattac

SEQ ID NO: 1526530 - DNA, 15 bp, Homo sapiens
aaatgttctcaatta

SEQ ID NO: 1526531 - DNA, 15 bp, Homo sapiens
gaaatgttctcaatt

SEQ ID NO: 1526532 - DNA, 15 bp, Homo sapiens
tgaaatgttctcaat

SEQ ID NO: 1526533 - DNA, 15 bp, Homo sapiens
ttgaaatgttctcaa

SEQ ID NO: 1526534 - DNA, 15 bp, Homo sapiens
tttgaaatgttctca

SEQ ID NO: 1526535 - DNA, 15 bp, Homo sapiens
atttgaaatgttctc

SEQ ID NO: 1526536 - DNA, 15 bp, Homo sapiens
aatttgaaatgttct

SEQ ID NO: 1526537 - DNA, 15 bp, Homo sapiens
taatttgaaatgttc

SEQ ID NO: 1526538 - DNA, 15 bp, Homo sapiens
ttaatttgaaatgtt

SEQ ID NO: 1526539 - DNA, 15 bp, Homo sapiens
attaatttgaaatgt

SEQ ID NO: 1526540 - DNA, 15 bp, Homo sapiens
cattaatttgaaatg

SEQ ID NO: 1526541 - DNA, 15 bp, Homo sapiens
acattaatttgaaat

SEQ ID NO: 1526542 - DNA, 15 bp, Homo sapiens
aacattaatttgaaa

SEQ ID NO: 1526543 - DNA, 15 bp, Homo sapiens
taacattaatttgaa

SEQ ID NO: 1526544 - DNA, 15 bp, Homo sapiens
gtaacattaatttga

SEQ ID NO: 1526545 - DNA, 15 bp, Homo sapiens
ggtaacattaatttg

SEQ ID NO: 1526546 - DNA, 15 bp, Homo sapiens
aggtaacattaattt

SEQ ID NO: 1526547 - DNA, 15 bp, Homo sapiens
aaggtaacattaatt

SEQ ID NO: 1526548 - DNA, 15 bp, Homo sapiens
aaaggtaacattaat

SEQ ID NO: 1526549 - DNA, 15 bp, Homo sapiens
aaaaggtaacattaa

SEQ ID NO: 1526550 - DNA, 15 bp, Homo sapiens
caaaaggtaacatta

SEQ ID NO: 1526551 - DNA, 15 bp, Homo sapiens
tcaaaaggtaacatt

SEQ ID NO: 1526552 - DNA, 15 bp, Homo sapiens
atcaaaaggtaacat

SEQ ID NO: 1526553 - DNA, 15 bp, Homo sapiens
tatcaaaaggtaaca

SEQ ID NO: 1526554 - DNA, 15 bp, Homo sapiens
atatcaaaaggtaac

SEQ ID NO: 1526555 - DNA, 15 bp, Homo sapiens
aatatcaaaaggtaa

SEQ ID NO: 1526556 - DNA, 15 bp, Homo sapiens
aaatatcaaaaggta

SEQ ID NO: 1526557 - DNA, 15 bp, Homo sapiens
aaaatatcaaaaggt

SEQ ID NO: 1526558 - DNA, 15 bp, Homo sapiens
aaaaatatcaaaagg

SEQ ID NO: 1526559 - DNA, 15 bp, Homo sapiens
gaaaaatatcaaaag

SEQ ID NO: 1526560 - DNA, 15 bp, Homo sapiens
agaaaaatatcaaaa

SEQ ID NO: 1526561 - DNA, 15 bp, Homo sapiens
aagaaaaatatcaaa

SEQ ID NO: 1526562 - DNA, 15 bp, Homo sapiens
aaagaaaaatatcaa

SEQ ID NO: 1526563 - DNA, 15 bp, Homo sapiens
caaagaaaaatatca

SEQ ID NO: 1526564 - DNA, 15 bp, Homo sapiens
tcaaagaaaaatatc

SEQ ID NO: 1526565 - DNA, 15 bp, Homo sapiens
ttcaaagaaaaatat

SEQ ID NO: 1526566 - DNA, 15 bp, Homo sapiens
cttcaaagaaaaata

SEQ ID NO: 1526567 - DNA, 15 bp, Homo sapiens
tcttcaaagaaaaat

SEQ ID NO: 1526568 - DNA, 15 bp, Homo sapiens
ctcttcaaagaaaaa

SEQ ID NO: 1526569 - DNA, 15 bp, Homo sapiens
actcttcaaagaaaa

SEQ ID NO: 1526570 - DNA, 15 bp, Homo sapiens
tactcttcaaagaaa

SEQ ID NO: 1526571 - DNA, 15 bp, Homo sapiens
ttactcttcaaagaa

SEQ ID NO: 1526572 - DNA, 15 bp, Homo sapiens
cttactcttcaaaga

SEQ ID NO: 1526573 - DNA, 15 bp, Homo sapiens
tcttactcttcaaag

SEQ ID NO: 1526574 - DNA, 15 bp, Homo sapiens
ttcttactcttcaaa

SEQ ID NO: 1526575 - DNA, 15 bp, Homo sapiens
attcttactcttcaa

SEQ ID NO: 1526576 - DNA, 15 bp, Homo sapiens
aattcttactcttca

SEQ ID NO: 1526577 - DNA, 15 bp, Homo sapiens
gaattcttactcttc

SEQ ID NO: 1526578 - DNA, 15 bp, Homo sapiens
tgaattcttactctt

SEQ ID NO: 1526579 - DNA, 15 bp, Homo sapiens
ctgaattcttactct

SEQ ID NO: 1526580 - DNA, 15 bp, Homo sapiens
actgaattcttactc

SEQ ID NO: 1526581 - DNA, 15 bp, Homo sapiens
gactgaattcttact

SEQ ID NO: 1526582 - DNA, 15 bp, Homo sapiens
agactgaattcttac

SEQ ID NO: 1526583 - DNA, 15 bp, Homo sapiens
aagactgaattctta

SEQ ID NO: 1526584 - DNA, 15 bp, Homo sapiens
aaagactgaattctt

SEQ ID NO: 1526585 - DNA, 15 bp, Homo sapiens
gaaagactgaattct

SEQ ID NO: 1526586 - DNA, 15 bp, Homo sapiens
agaaagactgaattc

SEQ ID NO: 1526587 - DNA, 15 bp, Homo sapiens
gagaaagactgaatt

SEQ ID NO: 1526588 - DNA, 15 bp, Homo sapiens
ggagaaagactgaat

SEQ ID NO: 1526589 - DNA, 15 bp, Homo sapiens
tggagaaagactgaa

SEQ ID NO: 1526590 - DNA, 15 bp, Homo sapiens
ctggagaaagactga

SEQ ID NO: 1526591 - DNA, 15 bp, Homo sapiens
gctggagaaagactg

SEQ ID NO: 1526592 - DNA, 15 bp, Homo sapiens
cgctggagaaagact

SEQ ID NO: 1526593 - DNA, 15 bp, Homo sapiens
acgctggagaaagac

SEQ ID NO: 1526594 - DNA, 15 bp, Homo sapiens
gacgctggagaaaga

SEQ ID NO: 1526595 - DNA, 15 bp, Homo sapiens
agacgctggagaaag

SEQ ID NO: 1526596 - DNA, 15 bp, Homo sapiens
tagacgctggagaaa

SEQ ID NO: 1526597 - DNA, 15 bp, Homo sapiens
atagacgctggagaa

SEQ ID NO: 1526598 - DNA, 15 bp, Homo sapiens
catagacgctggaga

SEQ ID NO: 1526599 - DNA, 15 bp, Homo sapiens
ccatagacgctggag

SEQ ID NO: 1526600 - DNA, 15 bp, Homo sapiens
cccatagacgctgga

SEQ ID NO: 1526601 - DNA, 15 bp, Homo sapiens
ccccatagacgctgg

SEQ ID NO: 1526602 - DNA, 15 bp, Homo sapiens
tccccatagacgctg

SEQ ID NO: 1526603 - DNA, 15 bp, Homo sapiens
ttccccatagacgct

SEQ ID NO: 1526604 - DNA, 15 bp, Homo sapiens
attccccatagacgc

SEQ ID NO: 1526605 - DNA, 15 bp, Homo sapiens
gattccccatagacg

SEQ ID NO: 1526606 - DNA, 15 bp, Homo sapiens
agattccccatagac

SEQ ID NO: 1526607 - DNA, 15 bp, Homo sapiens
cagattccccataga

SEQ ID NO: 1526608 - DNA, 15 bp, Homo sapiens
tcagattccccatag

SEQ ID NO: 1526609 - DNA, 15 bp, Homo sapiens
atcagattccccata

SEQ ID NO: 1526610 - DNA, 15 bp, Homo sapiens
aatcagattccccat

SEQ ID NO: 1526611 - DNA, 15 bp, Homo sapiens
aaatcagattcccca

SEQ ID NO: 1526612 - DNA, 15 bp, Homo sapiens
gaaatcagattcccc

SEQ ID NO: 1526613 - DNA, 15 bp, Homo sapiens
agaaatcagattccc

SEQ ID NO: 1526614 - DNA, 15 bp, Homo sapiens
gagaaatcagattcc

SEQ ID NO: 1526615 - DNA, 15 bp, Homo sapiens
tgagaaatcagattc

SEQ ID NO: 1526616 - DNA, 15 bp, Homo sapiens
gtgagaaatcagatt

SEQ ID NO: 1526617 - DNA, 15 bp, Homo sapiens
agtgagaaatcagat

SEQ ID NO: 1526618 - DNA, 15 bp, Homo sapiens
gagtgagaaatcaga

SEQ ID NO: 1526619 - DNA, 15 bp, Homo sapiens
tgagtgagaaatcag

SEQ ID NO: 1526620 - DNA, 15 bp, Homo sapiens
gtgagtgagaaatca

SEQ ID NO: 1526621 - DNA, 15 bp, Homo sapiens
agtgagtgagaaatc

SEQ ID NO: 1526622 - DNA, 15 bp, Homo sapiens
cagtgagtgagaaat

SEQ ID NO: 1526623 - DNA, 15 bp, Homo sapiens
gcagtgagtgagaaa

SEQ ID NO: 1526624 - DNA, 15 bp, Homo sapiens
tgcagtgagtgagaa

SEQ ID NO: 1526625 - DNA, 15 bp, Homo sapiens
atgcagtgagtgaga

SEQ ID NO: 1526626 - DNA, 15 bp, Homo sapiens
catgcagtgagtgag

SEQ ID NO: 1526627 - DNA, 15 bp, Homo sapiens
gcatgcagtgagtga

SEQ ID NO: 1526628 - DNA, 15 bp, Homo sapiens
agcatgcagtgagtg

SEQ ID NO: 1526629 - DNA, 15 bp, Homo sapiens
tagcatgcagtgagt

SEQ ID NO: 1526630 - DNA, 15 bp, Homo sapiens
atagcatgcagtgag

SEQ ID NO: 1526631 - DNA, 15 bp, Homo sapiens
aatagcatgcagtga

SEQ ID NO: 1526632 - DNA, 15 bp, Homo sapiens
aaatagcatgcagtg

SEQ ID NO: 1526633 - DNA, 15 bp, Homo sapiens
taaatagcatgcagt

SEQ ID NO: 1526634 - DNA, 15 bp, Homo sapiens
ttaaatagcatgcag

SEQ ID NO: 1526635 - DNA, 15 bp, Homo sapiens
tttaaatagcatgca

SEQ ID NO: 1526636 - DNA, 15 bp, Homo sapiens
atttaaatagcatgc

SEQ ID NO: 1526637 - DNA, 15 bp, Homo sapiens
tatttaaatagcatg

SEQ ID NO: 1526638 - DNA, 15 bp, Homo sapiens
atatttaaatagcat

SEQ ID NO: 1526639 - DNA, 15 bp, Homo sapiens
tatatttaaatagca

SEQ ID NO: 1526640 - DNA, 15 bp, Homo sapiens
ttatatttaaatagc

SEQ ID NO: 1526641 - DNA, 15 bp, Homo sapiens
attatatttaaatag

SEQ ID NO: 1526642 - DNA, 15 bp, Homo sapiens
aattatatttaaata

SEQ ID NO: 1526643 - DNA, 15 bp, Homo sapiens
taattatatttaaat

SEQ ID NO: 1526644 - DNA, 15 bp, Homo sapiens
ctaattatatttaaa

SEQ ID NO: 1526645 - DNA, 15 bp, Homo sapiens
actaattatatttaa

SEQ ID NO: 1526646 - DNA, 15 bp, Homo sapiens
cactaattatattta

SEQ ID NO: 1526647 - DNA, 15 bp, Homo sapiens
tcactaattatattt

SEQ ID NO: 1526648 - DNA, 15 bp, Homo sapiens
ctcactaattatatt

SEQ ID NO: 1526649 - DNA, 15 bp, Homo sapiens
cctcactaattatat

SEQ ID NO: 1526650 - DNA, 15 bp, Homo sapiens
tcctcactaattata

SEQ ID NO: 1526651 - DNA, 15 bp, Homo sapiens
ttcctcactaattat

SEQ ID NO: 1526652 - DNA, 15 bp, Homo sapiens
cttcctcactaatta

SEQ ID NO: 1526653 - DNA, 15 bp, Homo sapiens
acttcctcactaatt

SEQ ID NO: 1526654 - DNA, 15 bp, Homo sapiens
gacttcctcactaat

SEQ ID NO: 1526655 - DNA, 15 bp, Homo sapiens
tgacttcctcactaa

SEQ ID NO: 1526656 - DNA, 15 bp, Homo sapiens
atgacttcctcacta

SEQ ID NO: 1526657 - DNA, 15 bp, Homo sapiens
catgacttcctcact

SEQ ID NO: 1526658 - DNA, 15 bp, Homo sapiens
acatgacttcctcac

SEQ ID NO: 1526659 - DNA, 15 bp, Homo sapiens
cacatgacttcctca

SEQ ID NO: 1526660 - DNA, 15 bp, Homo sapiens
acacatgacttcctc

SEQ ID NO: 1526661 - DNA, 15 bp, Homo sapiens
aacacatgacttcct

SEQ ID NO: 1526662 - DNA, 15 bp, Homo sapiens
gaacacatgacttcc

SEQ ID NO: 1526663 - DNA, 15 bp, Homo sapiens
agaacacatgacttc

SEQ ID NO: 1526664 - DNA, 15 bp, Homo sapiens
tagaacacatgactt

SEQ ID NO: 1526665 - DNA, 15 bp, Homo sapiens
ttagaacacatgact

SEQ ID NO: 1526666 - DNA, 15 bp, Homo sapiens
tttagaacacatgac

SEQ ID NO: 1526667 - DNA, 15 bp, Homo sapiens
gtttagaacacatga

SEQ ID NO: 1526668 - DNA, 15 bp, Homo sapiens
agtttagaacacatg

SEQ ID NO: 1526669 - DNA, 15 bp, Homo sapiens
aagtttagaacacat

SEQ ID NO: 1526670 - DNA, 15 bp, Homo sapiens
caagtttagaacaca

SEQ ID NO: 1526671 - DNA, 15 bp, Homo sapiens
tcaagtttagaacac

SEQ ID NO: 1526672 - DNA, 15 bp, Homo sapiens
gtcaagtttagaaca

SEQ ID NO: 1526673 - DNA, 15 bp, Homo sapiens
ggtcaagtttagaac

SEQ ID NO: 1526674 - DNA, 15 bp, Homo sapiens
aggtcaagtttagaa

SEQ ID NO: 1526675 - DNA, 15 bp, Homo sapiens
caggtcaagtttaga

SEQ ID NO: 1526676 - DNA, 15 bp, Homo sapiens
gcaggtcaagtttag

SEQ ID NO: 1526677 - DNA, 15 bp, Homo sapiens
ggcaggtcaagttta

SEQ ID NO: 1526678 - DNA, 15 bp, Homo sapiens
tggcaggtcaagttt

SEQ ID NO: 1526679 - DNA, 15 bp, Homo sapiens
atggcaggtcaagtt

SEQ ID NO: 1526680 - DNA, 15 bp, Homo sapiens
aatggcaggtcaagt

SEQ ID NO: 1526681 - DNA, 15 bp, Homo sapiens
aaatggcaggtcaag

SEQ ID NO: 1526682 - DNA, 15 bp, Homo sapiens
caaatggcaggtcaa

SEQ ID NO: 1526683 - DNA, 15 bp, Homo sapiens
gcaaatggcaggtca

SEQ ID NO: 1526684 - DNA, 15 bp, Homo sapiens
agcaaatggcaggtc

SEQ ID NO: 1526685 - DNA, 15 bp, Homo sapiens
gagcaaatggcaggt

SEQ ID NO: 1526686 - DNA, 15 bp, Homo sapiens
agagcaaatggcagg

SEQ ID NO: 1526687 - DNA, 15 bp, Homo sapiens
aagagcaaatggcag

SEQ ID NO: 1526688 - DNA, 15 bp, Homo sapiens
aaagagcaaatggca

SEQ ID NO: 1526689 - DNA, 15 bp, Homo sapiens
caaagagcaaatggc

SEQ ID NO: 1526690 - DNA, 15 bp, Homo sapiens
ccaaagagcaaatgg

SEQ ID NO: 1526691 - DNA, 15 bp, Homo sapiens
tccaaagagcaaatg

SEQ ID NO: 1526692 - DNA, 15 bp, Homo sapiens
ttccaaagagcaaat

SEQ ID NO: 1526693 - DNA, 15 bp, Homo sapiens
cttccaaagagcaaa

SEQ ID NO: 1526694 - DNA, 15 bp, Homo sapiens
acttccaaagagcaa

SEQ ID NO: 1526695 - DNA, 15 bp, Homo sapiens
tacttccaaagagca

SEQ ID NO: 1526696 - DNA, 15 bp, Homo sapiens
atacttccaaagagc

SEQ ID NO: 1526697 - DNA, 15 bp, Homo sapiens
gatacttccaaagag

SEQ ID NO: 1526698 - DNA, 15 bp, Homo sapiens
ggatacttccaaaga

SEQ ID NO: 1526699 - DNA, 15 bp, Homo sapiens
tggatacttccaaag

SEQ ID NO: 1526700 - DNA, 15 bp, Homo sapiens
ttggatacttccaaa

SEQ ID NO: 1526701 - DNA, 15 bp, Homo sapiens
gttggatacttccaa

SEQ ID NO: 1526702 - DNA, 15 bp, Homo sapiens
agttggatacttcca

SEQ ID NO: 1526703 - DNA, 15 bp, Homo sapiens
ctcagttggatactt

SEQ ID NO: 1526704 - DNA, 15 bp, Homo sapiens
actcagttggatact

SEQ ID NO: 1526705 - DNA, 15 bp, Homo sapiens
cactcagttggatac

SEQ ID NO: 1526706 - DNA, 15 bp, Homo sapiens
acactcagttggata

SEQ ID NO: 1526707 - DNA, 15 bp, Homo sapiens
aacactcagttggat

SEQ ID NO: 1526708 - DNA, 15 bp, Homo sapiens
aaacactcagttgga

SEQ ID NO: 1526709 - DNA, 15 bp, Homo sapiens
gaaacactcagttgg

SEQ ID NO: 1526710 - DNA, 15 bp, Homo sapiens
ggaaacactcagttg

SEQ ID NO: 1526711 - DNA, 15 bp, Homo sapiens
tggaaacactcagtt

SEQ ID NO: 1526712 - DNA, 15 bp, Homo sapiens
ctggaaacactcagt

SEQ ID NO: 1526713 - DNA, 15 bp, Homo sapiens
tctggaaacactcag

SEQ ID NO: 1526714 - DNA, 15 bp, Homo sapiens
gtctggaaacactca

SEQ ID NO: 1526715 - DNA, 15 bp, Homo sapiens
tgtctggaaacactc

SEQ ID NO: 1526716 - DNA, 15 bp, Homo sapiens
ttgtctggaaacact

SEQ ID NO: 1526717 - DNA, 15 bp, Homo sapiens
gttgtctggaaacac

SEQ ID NO: 1526718 - DNA, 15 bp, Homo sapiens
agttgtctggaaaca

SEQ ID NO: 1526719 - DNA, 15 bp, Homo sapiens
tagttgtctggaaac

SEQ ID NO: 1526720 - DNA, 15 bp, Homo sapiens
gtagttgtctggaaa

SEQ ID NO: 1526721 - DNA, 15 bp, Homo sapiens
tgtagttgtctggaa

SEQ ID NO: 1526722 - DNA, 15 bp, Homo sapiens
atgtagttgtctgga

SEQ ID NO: 1526723 - DNA, 15 bp, Homo sapiens
tatgtagttgtctgg

SEQ ID NO: 1526724 - DNA, 15 bp, Homo sapiens
atatgtagttgtctg

SEQ ID NO: 1526725 - DNA, 15 bp, Homo sapiens
tatatgtagttgtct

SEQ ID NO: 1526726 - DNA, 15 bp, Homo sapiens
ttatatgtagttgtc

SEQ ID NO: 1526727 - DNA, 15 bp, Homo sapiens
tttatatgtagttgt

SEQ ID NO: 1526728 - DNA, 15 bp, Homo sapiens
gtttatatgtagttg

SEQ ID NO: 1526729 - DNA, 15 bp, Homo sapiens
tgtttatatgtagtt

SEQ ID NO: 1526730 - DNA, 15 bp, Homo sapiens
ctgtttatatgtagt

SEQ ID NO: 1526731 - DNA, 15 bp, Homo sapiens
tctgtttatatgtag

SEQ ID NO: 1526732 - DNA, 15 bp, Homo sapiens
atctgtttatatgta

SEQ ID NO: 1526733 - DNA, 15 bp, Homo sapiens
tatctgtttatatgt

SEQ ID NO: 1526734 - DNA, 15 bp, Homo sapiens
ctatctgtttatatg

SEQ ID NO: 1526735 - DNA, 15 bp, Homo sapiens
tctatctgtttatat

SEQ ID NO: 1526736 - DNA, 15 bp, Homo sapiens
gtctatctgtttata

SEQ ID NO: 1526737 - DNA, 15 bp, Homo sapiens
agtctatctgtttat

SEQ ID NO: 1526738 - DNA, 15 bp, Homo sapiens
aagtctatctgttta

SEQ ID NO: 1526739 - DNA, 15 bp, Homo sapiens
aaagtctatctgttt

SEQ ID NO: 1526740 - DNA, 15 bp, Homo sapiens
caaagtctatctgtt

SEQ ID NO: 1526741 - DNA, 15 bp, Homo sapiens
ccaaagtctatctgt

SEQ ID NO: 1526742 - DNA, 15 bp, Homo sapiens
gccaaagtctatctg

SEQ ID NO: 1526743 - DNA, 15 bp, Homo sapiens
tgccaaagtctatct

SEQ ID NO: 1526744 - DNA, 15 bp, Homo sapiens
ctgccaaagtctatc

SEQ ID NO: 1526745 - DNA, 15 bp, Homo sapiens
tctgccaaagtctat

SEQ ID NO: 1526746 - DNA, 15 bp, Homo sapiens
ctctgccaaagtcta

SEQ ID NO: 1526747 - DNA, 15 bp, Homo sapiens
tctctgccaaagtct

SEQ ID NO: 1526748 - DNA, 15 bp, Homo sapiens
atctctgccaaagtc

SEQ ID NO: 1526749 - DNA, 15 bp, Homo sapiens
aatctctgccaaagt

SEQ ID NO: 1526750 - DNA, 15 bp, Homo sapiens
taatctctgccaaag

SEQ ID NO: 1526751 - DNA, 15 bp, Homo sapiens
ttaatctctgccaaa

SEQ ID NO: 1526752 - DNA, 15 bp, Homo sapiens
tttaatctctgccaa

SEQ ID NO: 1526753 - DNA, 15 bp, Homo sapiens
ctttaatctctgcca

SEQ ID NO: 1526754 - DNA, 15 bp, Homo sapiens
tctttaatctctgcc

SEQ ID NO: 1526755 - DNA, 15 bp, Homo sapiens
ttctttaatctctgc

SEQ ID NO: 1526756 - DNA, 15 bp, Homo sapiens
attctttaatctctg

SEQ ID NO: 1526757 - DNA, 15 bp, Homo sapiens
aattctttaatctct

SEQ ID NO: 1526758 - DNA, 15 bp, Homo sapiens
gaattctttaatctc

SEQ ID NO: 1526759 - DNA, 15 bp, Homo sapiens
tgaattctttaatct

SEQ ID NO: 1526760 - DNA, 15 bp, Homo sapiens
ttgaattctttaatc

SEQ ID NO: 1526761 - DNA, 15 bp, Homo sapiens
tttgaattctttaat

SEQ ID NO: 1526762 - DNA, 15 bp, Homo sapiens
atttgaattctttaa

SEQ ID NO: 1526763 - DNA, 15 bp, Homo sapiens
tatttgaattcttta

SEQ ID NO: 1526764 - DNA, 15 bp, Homo sapiens
ttatttgaattcttt

SEQ ID NO: 1526765 - DNA, 15 bp, Homo sapiens
tttatttgaattctt

SEQ ID NO: 1526766 - DNA, 15 bp, Homo sapiens
ctttatttgaattct

SEQ ID NO: 1526767 - DNA, 15 bp, Homo sapiens
actttatttgaattc

SEQ ID NO: 1526768 - DNA, 15 bp, Homo sapiens
aactttatttgaatt

SEQ ID NO: 1526769 - DNA, 15 bp, Homo sapiens
gaactttatttgaat

SEQ ID NO: 1526770 - DNA, 15 bp, Homo sapiens
agaactttatttgaa

SEQ ID NO: 1526771 - DNA, 15 bp, Homo sapiens
tagaactttatttga

SEQ ID NO: 1526772 - DNA, 15 bp, Homo sapiens
ttagaactttatttg

SEQ ID NO: 1526773 - DNA, 15 bp, Homo sapiens
tttagaactttattt

SEQ ID NO: 1526774 - DNA, 15 bp, Homo sapiens
ttttagaactttatt

SEQ ID NO: 1526775 - DNA, 15 bp, Homo sapiens
attttagaactttat

SEQ ID NO: 1526776 - DNA, 15 bp, Homo sapiens
gattttagaacttta

SEQ ID NO: 1526777 - DNA, 15 bp, Homo sapiens
agattttagaacttt

SEQ ID NO: 1526778 - DNA, 15 bp, Homo sapiens
cagattttagaactt

SEQ ID NO: 1526779 - DNA, 15 bp, Homo sapiens
gcagattttagaact

SEQ ID NO: 1526780 - DNA, 15 bp, Homo sapiens
agcagattttagaac

SEQ ID NO: 1526781 - DNA, 15 bp, Homo sapiens
aagcagattttagaa

SEQ ID NO: 1526782 - DNA, 15 bp, Homo sapiens
caagcagattttaga

SEQ ID NO: 1526783 - DNA, 15 bp, Homo sapiens
gcaagcagattttag

SEQ ID NO: 1526784 - DNA, 15 bp, Homo sapiens
agcaagcagatttta

SEQ ID NO: 1526785 - DNA, 15 bp, Homo sapiens
tagcaagcagatttt

SEQ ID NO: 1526786 - DNA, 15 bp, Homo sapiens
ttagcaagcagattt

SEQ ID NO: 1526787 - DNA, 15 bp, Homo sapiens
attagcaagcagatt

SEQ ID NO: 1526788 - DNA, 15 bp, Homo sapiens
aattagcaagcagat

SEQ ID NO: 1526789 - DNA, 15 bp, Homo sapiens
aaattagcaagcaga

SEQ ID NO: 1526790 - DNA, 15 bp, Homo sapiens
taaattagcaagcag

SEQ ID NO: 1526791 - DNA, 15 bp, Homo sapiens
ttaaattagcaagca

SEQ ID NO: 1526792 - DNA, 15 bp, Homo sapiens
tttaaattagcaagc

SEQ ID NO: 1526793 - DNA, 15 bp, Homo sapiens
ctttaaattagcaag

SEQ ID NO: 1526794 - DNA, 15 bp, Homo sapiens
tctttaaattagcaa

SEQ ID NO: 1526795 - DNA, 15 bp, Homo sapiens
ttctttaaattagca

SEQ ID NO: 1526796 - DNA, 15 bp, Homo sapiens
attctttaaattagc

SEQ ID NO: 1526797 - DNA, 15 bp, Homo sapiens
gattctttaaattag

SEQ ID NO: 1526798 - DNA, 15 bp, Homo sapiens
ggattctttaaatta

SEQ ID NO: 1526799 - DNA, 15 bp, Homo sapiens
tggattctttaaatt

SEQ ID NO: 1526800 - DNA, 15 bp, Homo sapiens
ctggattctttaaat

SEQ ID NO: 1526801 - DNA, 15 bp, Homo sapiens
actggattctttaaa

SEQ ID NO: 1526802 - DNA, 15 bp, Homo sapiens
cactggattctttaa

SEQ ID NO: 1526803 - DNA, 15 bp, Homo sapiens
tcactggattcttta

SEQ ID NO: 1526804 - DNA, 15 bp, Homo sapiens
ttcactggattcttt

SEQ ID NO: 1526805 - DNA, 15 bp, Homo sapiens
attcactggattctt

SEQ ID NO: 1526806 - DNA, 15 bp, Homo sapiens
tattcactggattct

SEQ ID NO: 1526807 - DNA, 15 bp, Homo sapiens
ctattcactggattc

SEQ ID NO: 1526808 - DNA, 15 bp, Homo sapiens
gctattcactggatt

SEQ ID NO: 1526809 - DNA, 15 bp, Homo sapiens
tgctattcactggat

SEQ ID NO: 1526810 - DNA, 15 bp, Homo sapiens
atgctattcactgga

SEQ ID NO: 1526811 - DNA, 15 bp, Homo sapiens
aatgctattcactgg

SEQ ID NO: 1526812 - DNA, 15 bp, Homo sapiens
aaatgctattcactg

SEQ ID NO: 1526813 - DNA, 15 bp, Homo sapiens
caaatgctattcact

SEQ ID NO: 1526814 - DNA, 15 bp, Homo sapiens
acaaatgctattcac

SEQ ID NO: 1526815 - DNA, 15 bp, Homo sapiens
aacaaatgctattca

SEQ ID NO: 1526816 - DNA, 15 bp, Homo sapiens
taacaaatgctattc

SEQ ID NO: 1526817 - DNA, 15 bp, Homo sapiens
ataacaaatgctatt

SEQ ID NO: 1526818 - DNA, 15 bp, Homo sapiens
aataacaaatgctat

SEQ ID NO: 1526819 - DNA, 15 bp, Homo sapiens
gaataacaaatgcta

SEQ ID NO: 1526820 - DNA, 15 bp, Homo sapiens
ggaataacaaatgct

SEQ ID NO: 1526821 - DNA, 15 bp, Homo sapiens
aggaataacaaatgc

SEQ ID NO: 1526822 - DNA, 15 bp, Homo sapiens
gaggaataacaaatg

SEQ ID NO: 1526823 - DNA, 15 bp, Homo sapiens
agaggaataacaaat

SEQ ID NO: 1526824 - DNA, 15 bp, Homo sapiens
aagaggaataacaaa

SEQ ID NO: 1526825 - DNA, 15 bp, Homo sapiens
taagaggaataacaa

SEQ ID NO: 1526826 - DNA, 15 bp, Homo sapiens
gtaagaggaataaca

SEQ ID NO: 1526827 - DNA, 15 bp, Homo sapiens
ggtaagaggaataac

SEQ ID NO: 1526828 - DNA, 15 bp, Homo sapiens
tggtaagaggaataa

SEQ ID NO: 1526829 - DNA, 15 bp, Homo sapiens
atggtaagaggaata

SEQ ID NO: 1526830 - DNA, 15 bp, Homo sapiens
catggtaagaggaat

SEQ ID NO: 1526831 - DNA, 15 bp, Homo sapiens
acatggtaagaggaa

SEQ ID NO: 1526832 - DNA, 15 bp, Homo sapiens
tacatggtaagagga

SEQ ID NO: 1526833 - DNA, 15 bp, Homo sapiens
atacatggtaagagg

SEQ ID NO: 1526834 - DNA, 15 bp, Homo sapiens
tatacatggtaagag

SEQ ID NO: 1526835 - DNA, 15 bp, Homo sapiens
gtatacatggtaaga

SEQ ID NO: 1526836 - DNA, 15 bp, Homo sapiens
tgtatacatggtaag

SEQ ID NO: 1526837 - DNA, 15 bp, Homo sapiens
atgtatacatggtaa

SEQ ID NO: 1526838 - DNA, 15 bp, Homo sapiens
aatgtatacatggta

SEQ ID NO: 1526839 - DNA, 15 bp, Homo sapiens
taatgtatacatggt

SEQ ID NO: 1526840 - DNA, 15 bp, Homo sapiens
ttaatgtatacatgg

SEQ ID NO: 1526841 - DNA, 15 bp, Homo sapiens
attaatgtatacatg

SEQ ID NO: 1526842 - DNA, 15 bp, Homo sapiens
cattaatgtatacat

SEQ ID NO: 1526843 - DNA, 15 bp, Homo sapiens
tcattaatgtataca

SEQ ID NO: 1526844 - DNA, 15 bp, Homo sapiens
ttcattaatgtatac

SEQ ID NO: 1526845 - DNA, 15 bp, Homo sapiens
attcattaatgtata

SEQ ID NO: 1526846 - DNA, 15 bp, Homo sapiens
aattcattaatgtat

SEQ ID NO: 1526847 - DNA, 15 bp, Homo sapiens
caattcattaatgta

SEQ ID NO: 1526848 - DNA, 15 bp, Homo sapiens
gcaattcattaatgt

SEQ ID NO: 1526849 - DNA, 15 bp, Homo sapiens
agcaattcattaatg

SEQ ID NO: 1526850 - DNA, 15 bp, Homo sapiens
aagcaattcattaat

SEQ ID NO: 1526851 - DNA, 15 bp, Homo sapiens
gaagcaattcattaa

SEQ ID NO: 1526852 - DNA, 15 bp, Homo sapiens
tgaagcaattcatta

SEQ ID NO: 1526853 - DNA, 15 bp, Homo sapiens
gtgaagcaattcatt

SEQ ID NO: 1526854 - DNA, 15 bp, Homo sapiens
agtgaagcaattcat

SEQ ID NO: 1526855 - DNA, 15 bp, Homo sapiens
cagtgaagcaattca

SEQ ID NO: 1526856 - DNA, 15 bp, Homo sapiens
ccagtgaagcaattc

SEQ ID NO: 1526857 - DNA, 15 bp, Homo sapiens
tccagtgaagcaatt

SEQ ID NO: 1526858 - DNA, 15 bp, Homo sapiens
atccagtgaagcaat

SEQ ID NO: 1526859 - DNA, 15 bp, Homo sapiens
aatccagtgaagcaa

SEQ ID NO: 1526860 - DNA, 15 bp, Homo sapiens
caatccagtgaagca

SEQ ID NO: 1526861 - DNA, 15 bp, Homo sapiens
tcaatccagtgaagc

SEQ ID NO: 1526862 - DNA, 15 bp, Homo sapiens
gtcaatccagtgaag

SEQ ID NO: 1526863 - DNA, 15 bp, Homo sapiens
agtcaatccagtgaa

SEQ ID NO: 1526864 - DNA, 15 bp, Homo sapiens
gagtcaatccagtga

SEQ ID NO: 1526865 - DNA, 15 bp, Homo sapiens
agagtcaatccagtg

SEQ ID NO: 1526866 - DNA, 15 bp, Homo sapiens
tagagtcaatccagt

SEQ ID NO: 1526867 - DNA, 15 bp, Homo sapiens
ttagagtcaatccag

SEQ ID NO: 1526868 - DNA, 15 bp, Homo sapiens
gttagagtcaatcca

SEQ ID NO: 1526869 - DNA, 15 bp, Homo sapiens
agttagagtcaatcc

SEQ ID NO: 1526870 - DNA, 15 bp, Homo sapiens
tagttagagtcaatc

SEQ ID NO: 1526871 - DNA, 15 bp, Homo sapiens
ctagttagagtcaat

SEQ ID NO: 1526872 - DNA, 15 bp, Homo sapiens
tctagttagagtcaa

SEQ ID NO: 1526873 - DNA, 15 bp, Homo sapiens
atctagttagagtca

SEQ ID NO: 1526874 - DNA, 15 bp, Homo sapiens
catctagttagagtc

SEQ ID NO: 1526875 - DNA, 15 bp, Homo sapiens
tcatctagttagagt

SEQ ID NO: 1526876 - DNA, 15 bp, Homo sapiens
ttcatctagttagag

SEQ ID NO: 1526877 - DNA, 15 bp, Homo sapiens
attcatctagttaga

SEQ ID NO: 1526878 - DNA, 15 bp, Homo sapiens
aattcatctagttag

SEQ ID NO: 1526879 - DNA, 15 bp, Homo sapiens
aaattcatctagtta

SEQ ID NO: 1526880 - DNA, 15 bp, Homo sapiens
taaattcatctagtt

SEQ ID NO: 1526881 - DNA, 15 bp, Homo sapiens
gtaaattcatctagt

SEQ ID NO: 1526882 - DNA, 15 bp, Homo sapiens
agtaaattcatctag

SEQ ID NO: 1526883 - DNA, 15 bp, Homo sapiens
tagtaaattcatcta

SEQ ID NO: 1526884 - DNA, 15 bp, Homo sapiens
atagtaaattcatct

SEQ ID NO: 1526885 - DNA, 15 bp, Homo sapiens
aatagtaaattcatc

SEQ ID NO: 1526886 - DNA, 15 bp, Homo sapiens
aaatagtaaattcat

SEQ ID NO: 1526887 - DNA, 15 bp, Homo sapiens
aaaatagtaaattca

SEQ ID NO: 1526888 - DNA, 15 bp, Homo sapiens
caaaatagtaaattc

SEQ ID NO: 1526889 - DNA, 15 bp, Homo sapiens
gcaaaatagtaaatt

SEQ ID NO: 1526890 - DNA, 15 bp, Homo sapiens
ggcaaaatagtaaat

SEQ ID NO: 1526891 - DNA, 15 bp, Homo sapiens
aggcaaaatagtaaa

SEQ ID NO: 1526892 - DNA, 15 bp, Homo sapiens
caggcaaaatagtaa

SEQ ID NO: 1526893 - DNA, 15 bp, Homo sapiens
gcaggcaaaatagta

SEQ ID NO: 1526894 - DNA, 15 bp, Homo sapiens
agcaggcaaaatagt

SEQ ID NO: 1526895 - DNA, 15 bp, Homo sapiens
cagcaggcaaaatag

SEQ ID NO: 1526896 - DNA, 15 bp, Homo sapiens
acagcaggcaaaata

SEQ ID NO: 1526897 - DNA, 15 bp, Homo sapiens
cacagcaggcaaaat

SEQ ID NO: 1526898 - DNA, 15 bp, Homo sapiens
tcacagcaggcaaaa

SEQ ID NO: 1526899 - DNA, 15 bp, Homo sapiens
atcacagcaggcaaa

SEQ ID NO: 1526900 - DNA, 15 bp, Homo sapiens
aatcacagcaggcaa

SEQ ID NO: 1526901 - DNA, 15 bp, Homo sapiens
taatcacagcaggca

SEQ ID NO: 1526902 - DNA, 15 bp, Homo sapiens
ataatcacagcaggc

SEQ ID NO: 1526903 - DNA, 15 bp, Homo sapiens
aataatcacagcagg

SEQ ID NO: 1526904 - DNA, 15 bp, Homo sapiens
taataatcacagcag

SEQ ID NO: 1526905 - DNA, 15 bp, Homo sapiens
ataataatcacagca

SEQ ID NO: 1526906 - DNA, 15 bp, Homo sapiens
cataataatcacagc

SEQ ID NO: 1526907 - DNA, 15 bp, Homo sapiens
tcataataatcacag

SEQ ID NO: 1526908 - DNA, 15 bp, Homo sapiens
atcataataatcaca

SEQ ID NO: 1526909 - DNA, 15 bp, Homo sapiens
aatcataataatcac

SEQ ID NO: 1526910 - DNA, 15 bp, Homo sapiens
aaatcataataatca

SEQ ID NO: 1526911 - DNA, 15 bp, Homo sapiens
aaaatcataataatc

SEQ ID NO: 1526912 - DNA, 15 bp, Homo sapiens
taaaatcataataat

SEQ ID NO: 1526913 - DNA, 15 bp, Homo sapiens
ttaaaatcataataa

SEQ ID NO: 1526914 - DNA, 15 bp, Homo sapiens
tttaaaatcataata

SEQ ID NO: 1526915 - DNA, 15 bp, Homo sapiens
gtttaaaatcataat

SEQ ID NO: 1526916 - DNA, 15 bp, Homo sapiens
ggtttaaaatcataa

SEQ ID NO: 1526917 - DNA, 15 bp, Homo sapiens
tggtttaaaatcata

SEQ ID NO: 1526918 - DNA, 15 bp, Homo sapiens
ttggtttaaaatcat

SEQ ID NO: 1526919 - DNA, 15 bp, Homo sapiens
cttggtttaaaatca

SEQ ID NO: 1526920 - DNA, 15 bp, Homo sapiens
acttggtttaaaatc

SEQ ID NO: 1526921 - DNA, 15 bp, Homo sapiens
tacttggtttaaaat

SEQ ID NO: 1526922 - DNA, 15 bp, Homo sapiens
ttacttggtttaaaa

SEQ ID NO: 1526923 - DNA, 15 bp, Homo sapiens
cttacttggtttaaa

SEQ ID NO: 1526924 - DNA, 15 bp, Homo sapiens
acttacttggtttaa

SEQ ID NO: 1526925 - DNA, 15 bp, Homo sapiens
cacttacttggttta

SEQ ID NO: 1526926 - DNA, 15 bp, Homo sapiens
acacttacttggttt

SEQ ID NO: 1526927 - DNA, 15 bp, Homo sapiens
tacacttacttggtt

SEQ ID NO: 1526928 - DNA, 15 bp, Homo sapiens
atacacttacttggt

SEQ ID NO: 1526929 - DNA, 15 bp, Homo sapiens
aatacacttacttgg

SEQ ID NO: 1526930 - DNA, 15 bp, Homo sapiens
taatacacttacttg

SEQ ID NO: 1526931 - DNA, 15 bp, Homo sapiens
ttaatacacttactt

SEQ ID NO: 1526932 - DNA, 15 bp, Homo sapiens
tttaatacacttact

SEQ ID NO: 1526933 - DNA, 15 bp, Homo sapiens
ctttaatacacttac

SEQ ID NO: 1526934 - DNA, 15 bp, Homo sapiens
cctttaatacactta

SEQ ID NO: 1526935 - DNA, 15 bp, Homo sapiens
acctttaatacactt

SEQ ID NO: 1526936 - DNA, 15 bp, Homo sapiens
cacctttaatacact

SEQ ID NO: 1526937 - DNA, 15 bp, Homo sapiens
acacctttaatacac

SEQ ID NO: 1526938 - DNA, 15 bp, Homo sapiens
gacacctttaataca

SEQ ID NO: 1526939 - DNA, 15 bp, Homo sapiens
agacacctttaatac

SEQ ID NO: 1526940 - DNA, 15 bp, Homo sapiens
cagacacctttaata

SEQ ID NO: 1526941 - DNA, 15 bp, Homo sapiens
gcagacacctttaat

SEQ ID NO: 1526942 - DNA, 15 bp, Homo sapiens
cgcagacacctttaa

SEQ ID NO: 1526943 - DNA, 15 bp, Homo sapiens
acgcagacaccttta

SEQ ID NO: 1526944 - DNA, 15 bp, Homo sapiens
aacgcagacaccttt

SEQ ID NO: 1526945 - DNA, 15 bp, Homo sapiens
aaacgcagacacctt

SEQ ID NO: 1526946 - DNA, 15 bp, Homo sapiens
aaaacgcagacacct

SEQ ID NO: 1526947 - DNA, 15 bp, Homo sapiens
gaaaacgcagacacc

SEQ ID NO: 1526948 - DNA, 15 bp, Homo sapiens
ggaaaacgcagacac

SEQ ID NO: 1526949 - DNA, 15 bp, Homo sapiens
aggaaaacgcagaca

SEQ ID NO: 1526950 - DNA, 15 bp, Homo sapiens
aaggaaaacgcagac

SEQ ID NO: 1526951 - DNA, 15 bp, Homo sapiens
taaggaaaacgcaga

SEQ ID NO: 1526952 - DNA, 15 bp, Homo sapiens
ctaaggaaaacgcag

SEQ ID NO: 1526953 - DNA, 15 bp, Homo sapiens
tctaaggaaaacgca

SEQ ID NO: 1526954 - DNA, 15 bp, Homo sapiens
ttctaaggaaaacgc

SEQ ID NO: 1526955 - DNA, 15 bp, Homo sapiens
gttctaaggaaaacg

SEQ ID NO: 1526956 - DNA, 15 bp, Homo sapiens
tgttctaaggaaaac

SEQ ID NO: 1526957 - DNA, 15 bp, Homo sapiens
atgttctaaggaaaa

SEQ ID NO: 1526958 - DNA, 15 bp, Homo sapiens
gatgttctaaggaaa

SEQ ID NO: 1526959 - DNA, 15 bp, Homo sapiens
agatgttctaaggaa

SEQ ID NO: 1526960 - DNA, 15 bp, Homo sapiens
cagatgttctaagga

SEQ ID NO: 1526961 - DNA, 15 bp, Homo sapiens
acagatgttctaagg

SEQ ID NO: 1526962 - DNA, 15 bp, Homo sapiens
tacagatgttctaag

SEQ ID NO: 1526963 - DNA, 15 bp, Homo sapiens
gtacagatgttctaa

SEQ ID NO: 1526964 - DNA, 15 bp, Homo sapiens
tgtacagatgttcta

SEQ ID NO: 1526965 - DNA, 15 bp, Homo sapiens
atgtacagatgttct

SEQ ID NO: 1526966 - DNA, 15 bp, Homo sapiens
tatgtacagatgttc

SEQ ID NO: 1526967 - DNA, 15 bp, Homo sapiens
atatgtacagatgtt

SEQ ID NO: 1526968 - DNA, 15 bp, Homo sapiens
catatgtacagatgt

SEQ ID NO: 1526969 - DNA, 15 bp, Homo sapiens
acatatgtacagatg

SEQ ID NO: 1526970 - DNA, 15 bp, Homo sapiens
aacatatgtacagat

SEQ ID NO: 1526971 - DNA, 15 bp, Homo sapiens
aaacatatgtacaga

SEQ ID NO: 1526972 - DNA, 15 bp, Homo sapiens
taaacatatgtacag

SEQ ID NO: 1526973 - DNA, 15 bp, Homo sapiens
ataaacatatgtaca

SEQ ID NO: 1526974 - DNA, 15 bp, Homo sapiens
tataaacatatgtac

SEQ ID NO: 1526975 - DNA, 15 bp, Homo sapiens
ctataaacatatgta

SEQ ID NO: 1526976 - DNA, 15 bp, Homo sapiens
cctataaacatatgt

SEQ ID NO: 1526977 - DNA, 15 bp, Homo sapiens
ccctataaacatatg

SEQ ID NO: 1526978 - DNA, 15 bp, Homo sapiens
gccctataaacatat

SEQ ID NO: 1526979 - DNA, 15 bp, Homo sapiens
tgccctataaacata

SEQ ID NO: 1526980 - DNA, 15 bp, Homo sapiens
ctgccctataaacat

SEQ ID NO: 1526981 - DNA, 15 bp, Homo sapiens
actgccctataaaca

SEQ ID NO: 1526982 - DNA, 15 bp, Homo sapiens
aactgccctataaac

SEQ ID NO: 1526983 - DNA, 15 bp, Homo sapiens
aaactgccctataaa

SEQ ID NO: 1526984 - DNA, 15 bp, Homo sapiens
gaaactgccctataa

SEQ ID NO: 1526985 - DNA, 15 bp, Homo sapiens
agaaactgccctata

SEQ ID NO: 1526986 - DNA, 15 bp, Homo sapiens
tagaaactgccctat

SEQ ID NO: 1526987 - DNA, 15 bp, Homo sapiens
gtagaaactgcccta

SEQ ID NO: 1526988 - DNA, 15 bp, Homo sapiens
ggtagaaactgccct

SEQ ID NO: 1526989 - DNA, 15 bp, Homo sapiens
gggtagaaactgccc

SEQ ID NO: 1526990 - DNA, 15 bp, Homo sapiens
tgggtagaaactgcc

SEQ ID NO: 1526991 - DNA, 15 bp, Homo sapiens
atgggtagaaactgc

SEQ ID NO: 1526992 - DNA, 15 bp, Homo sapiens
catgggtagaaactg

SEQ ID NO: 1526993 - DNA, 15 bp, Homo sapiens
ccatgggtagaaact

SEQ ID NO: 1526994 - DNA, 15 bp, Homo sapiens
accatgggtagaaac

SEQ ID NO: 1526995 - DNA, 15 bp, Homo sapiens
aaccatgggtagaaa

SEQ ID NO: 1526996 - DNA, 15 bp, Homo sapiens
taaccatgggtagaa

SEQ ID NO: 1526997 - DNA, 15 bp, Homo sapiens
ataaccatgggtaga

SEQ ID NO: 1526998 - DNA, 15 bp, Homo sapiens
aataaccatgggtag

SEQ ID NO: 1526999 - DNA, 15 bp, Homo sapiens
aaataaccatgggta

SEQ ID NO: 1527000 - DNA, 15 bp, Homo sapiens
aaaataaccatgggt

SEQ ID NO: 1527001 - DNA, 15 bp, Homo sapiens
caaaataaccatggg

SEQ ID NO: 1527002 - DNA, 15 bp, Homo sapiens
tcaaaataaccatgg

SEQ ID NO: 1527003 - DNA, 15 bp, Homo sapiens
ttcaaaataaccatg

SEQ ID NO: 1527004 - DNA, 15 bp, Homo sapiens
cttcaaaataaccat

SEQ ID NO: 1527005 - DNA, 15 bp, Homo sapiens
acttcaaaataacca

SEQ ID NO: 1527006 - DNA, 15 bp, Homo sapiens
aacttcaaaataacc

SEQ ID NO: 1527007 - DNA, 15 bp, Homo sapiens
aaacttcaaaataac

SEQ ID NO: 1527008 - DNA, 15 bp, Homo sapiens
taaacttcaaaataa

SEQ ID NO: 1527009 - DNA, 15 bp, Homo sapiens
ttaaacttcaaaata

SEQ ID NO: 1527010 - DNA, 15 bp, Homo sapiens
tttaaacttcaaaat

SEQ ID NO: 1527011 - DNA, 15 bp, Homo sapiens
ttttaaacttcaaaa

SEQ ID NO: 1527012 - DNA, 15 bp, Homo sapiens
tttttaaacttcaaa

SEQ ID NO: 1527013 - DNA, 15 bp, Homo sapiens
ttttttaaacttcaa

SEQ ID NO: 1527014 - DNA, 15 bp, Homo sapiens
attttttaaacttca

SEQ ID NO: 1527015 - DNA, 15 bp, Homo sapiens
tattttttaaacttc

SEQ ID NO: 1527016 - DNA, 15 bp, Homo sapiens
ttattttttaaactt

SEQ ID NO: 1527017 - DNA, 15 bp, Homo sapiens
attattttttaaact

SEQ ID NO: 1527018 - DNA, 15 bp, Homo sapiens
aattattttttaaac

SEQ ID NO: 1527019 - DNA, 15 bp, Homo sapiens
ctgaattatttttta

SEQ ID NO: 1527020 - DNA, 15 bp, Homo sapiens
actgaattatttttt

SEQ ID NO: 1527021 - DNA, 15 bp, Homo sapiens
tactgaattattttt

SEQ ID NO: 1527022 - DNA, 15 bp, Homo sapiens
ttactgaattatttt

SEQ ID NO: 1527023 - DNA, 15 bp, Homo sapiens
attactgaattattt

SEQ ID NO: 1527024 - DNA, 15 bp, Homo sapiens
tattactgaattatt

SEQ ID NO: 1527025 - DNA, 15 bp, Homo sapiens
gtattactgaattat

SEQ ID NO: 1527026 - DNA, 15 bp, Homo sapiens
tgtattactgaatta

SEQ ID NO: 1527027 - DNA, 15 bp, Homo sapiens
ttgtattactgaatt

SEQ ID NO: 1527028 - DNA, 15 bp, Homo sapiens
gttgtattactgaat

SEQ ID NO: 1527029 - DNA, 15 bp, Homo sapiens
tgttgtattactgaa

SEQ ID NO: 1527030 - DNA, 15 bp, Homo sapiens
atgttgtattactga

SEQ ID NO: 1527031 - DNA, 15 bp, Homo sapiens
aatgttgtattactg

SEQ ID NO: 1527032 - DNA, 15 bp, Homo sapiens
aaatgttgtattact

SEQ ID NO: 1527033 - DNA, 15 bp, Homo sapiens
gaaatgttgtattac

SEQ ID NO: 1527034 - DNA, 15 bp, Homo sapiens
tgaaatgttgtatta

SEQ ID NO: 1527035 - DNA, 15 bp, Homo sapiens
ctgaaatgttgtatt

SEQ ID NO: 1527036 - DNA, 15 bp, Homo sapiens
cctgaaatgttgtat

SEQ ID NO: 1527037 - DNA, 15 bp, Homo sapiens
acctgaaatgttgta

SEQ ID NO: 1527038 - DNA, 15 bp, Homo sapiens
tacctgaaatgttgt

SEQ ID NO: 1527039 - DNA, 15 bp, Homo sapiens
atacctgaaatgttg

SEQ ID NO: 1527040 - DNA, 15 bp, Homo sapiens
aatacctgaaatgtt

SEQ ID NO: 1527041 - DNA, 15 bp, Homo sapiens
aaatacctgaaatgt

SEQ ID NO: 1527042 - DNA, 15 bp, Homo sapiens
taaatacctgaaatg

SEQ ID NO: 1527043 - DNA, 15 bp, Homo sapiens
ttaaatacctgaaat

SEQ ID NO: 1527044 - DNA, 15 bp, Homo sapiens
attaaatacctgaaa

SEQ ID NO: 1527045 - DNA, 15 bp, Homo sapiens
aattaaatacctgaa

SEQ ID NO: 1527046 - DNA, 15 bp, Homo sapiens
aaattaaatacctga

SEQ ID NO: 1527047 - DNA, 15 bp, Homo sapiens
aaaattaaatacctg

SEQ ID NO: 1527048 - DNA, 15 bp, Homo sapiens
aaaaattaaatacct

SEQ ID NO: 1527049 - DNA, 15 bp, Homo sapiens
caaaaattaaatacc

SEQ ID NO: 1527050 - DNA, 15 bp, Homo sapiens
ccaaaaattaaatac

SEQ ID NO: 1527051 - DNA, 15 bp, Homo sapiens
accaaaaattaaata

SEQ ID NO: 1527052 - DNA, 15 bp, Homo sapiens
taccaaaaattaaat

SEQ ID NO: 1527053 - DNA, 15 bp, Homo sapiens
ttaccaaaaattaaa

SEQ ID NO: 1527054 - DNA, 15 bp, Homo sapiens
tttaccaaaaattaa

SEQ ID NO: 1527055 - DNA, 15 bp, Homo sapiens
atttaccaaaaatta

SEQ ID NO: 1527056 - DNA, 15 bp, Homo sapiens
tatttaccaaaaatt

SEQ ID NO: 1527057 - DNA, 15 bp, Homo sapiens
ttatttaccaaaaat

SEQ ID NO: 1527058 - DNA, 15 bp, Homo sapiens
tttatttaccaaaaa

SEQ ID NO: 1527059 - DNA, 15 bp, Homo sapiens
ctttatttaccaaaa

SEQ ID NO: 1527060 - DNA, 15 bp, Homo sapiens
actttatttaccaaa

SEQ ID NO: 1527061 - DNA, 15 bp, Homo sapiens
tactttatttaccaa

SEQ ID NO: 1527062 - DNA, 15 bp, Homo sapiens
ttactttatttacca

SEQ ID NO: 1527063 - DNA, 15 bp, Homo sapiens
gttactttatttacc

SEQ ID NO: 1527064 - DNA, 15 bp, Homo sapiens
ggttactttatttac

SEQ ID NO: 1527065 - DNA, 15 bp, Homo sapiens
aggttactttattta

SEQ ID NO: 1527066 - DNA, 15 bp, Homo sapiens
aaggttactttattt

SEQ ID NO: 1527067 - DNA, 15 bp, Homo sapiens
taaggttactttatt

SEQ ID NO: 1527068 - DNA, 15 bp, Homo sapiens
ctaaggttactttat

SEQ ID NO: 1527069 - DNA, 15 bp, Homo sapiens
tctaaggttacttta

SEQ ID NO: 1527070 - DNA, 15 bp, Homo sapiens
ttctaaggttacttt

SEQ ID NO: 1527071 - DNA, 15 bp, Homo sapiens
tttctaaggttactt

SEQ ID NO: 1527072 - DNA, 15 bp, Homo sapiens
ttttctaaggttact

SEQ ID NO: 1527073 - DNA, 15 bp, Homo sapiens
cttttctaaggttac

SEQ ID NO: 1527074 - DNA, 15 bp, Homo sapiens
tcttttctaaggtta

SEQ ID NO: 1527075 - DNA, 15 bp, Homo sapiens
ttcttttctaaggtt

SEQ ID NO: 1527076 - DNA, 15 bp, Homo sapiens
cttcttttctaaggt

SEQ ID NO: 1527077 - DNA, 15 bp, Homo sapiens
acttcttttctaagg

SEQ ID NO: 1527078 - DNA, 15 bp, Homo sapiens
aacttcttttctaag

SEQ ID NO: 1527079 - DNA, 15 bp, Homo sapiens
taacttcttttctaa

SEQ ID NO: 1527080 - DNA, 15 bp, Homo sapiens
ttaacttcttttcta

SEQ ID NO: 1527081 - DNA, 15 bp, Homo sapiens
tttaacttcttttct

SEQ ID NO: 1527082 - DNA, 15 bp, Homo sapiens
gtttaacttcttttc

SEQ ID NO: 1527083 - DNA, 15 bp, Homo sapiens
agtttaacttctttt

SEQ ID NO: 1527084 - DNA, 15 bp, Homo sapiens
aagtttaacttcttt

SEQ ID NO: 1527085 - DNA, 15 bp, Homo sapiens
gaagtttaacttctt

SEQ ID NO: 1527086 - DNA, 15 bp, Homo sapiens
tgaagtttaacttct

SEQ ID NO: 1527087 - DNA, 15 bp, Homo sapiens
atgaagtttaacttc

SEQ ID NO: 1527088 - DNA, 15 bp, Homo sapiens
aatgaagtttaactt

SEQ ID NO: 1527089 - DNA, 15 bp, Homo sapiens
taatgaagtttaact

SEQ ID NO: 1527090 - DNA, 15 bp, Homo sapiens
ttaatgaagtttaac

SEQ ID NO: 1527091 - DNA, 15 bp, Homo sapiens
attaatgaagtttaa

SEQ ID NO: 1527092 - DNA, 15 bp, Homo sapiens
tattaatgaagttta

SEQ ID NO: 1527093 - DNA, 15 bp, Homo sapiens
atattaatgaagttt

SEQ ID NO: 1527094 - DNA, 15 bp, Homo sapiens
catattaatgaagtt

SEQ ID NO: 1527095 - DNA, 15 bp, Homo sapiens
tcatattaatgaagt

SEQ ID NO: 1527096 - DNA, 15 bp, Homo sapiens
ttcatattaatgaag

SEQ ID NO: 1527097 - DNA, 15 bp, Homo sapiens
tttcatattaatgaa

SEQ ID NO: 1527098 - DNA, 15 bp, Homo sapiens
gtttcatattaatga

SEQ ID NO: 1527099 - DNA, 15 bp, Homo sapiens
agtttcatattaatg

SEQ ID NO: 1527100 - DNA, 15 bp, Homo sapiens
aagtttcatattaat

SEQ ID NO: 1527101 - DNA, 15 bp, Homo sapiens
taagtttcatattaa

SEQ ID NO: 1527102 - DNA, 15 bp, Homo sapiens
cttaagtttcatatt

SEQ ID NO: 1527103 - DNA, 15 bp, Homo sapiens
tcttaagtttcatat

SEQ ID NO: 1527104 - DNA, 15 bp, Homo sapiens
ttcttaagtttcata

SEQ ID NO: 1527105 - DNA, 15 bp, Homo sapiens
tttcttaagtttcat

SEQ ID NO: 1527106 - DNA, 15 bp, Homo sapiens
ttttcttaagtttca

SEQ ID NO: 1527107 - DNA, 15 bp, Homo sapiens
cttttcttaagtttc

SEQ ID NO: 1527108 - DNA, 15 bp, Homo sapiens
ccttttcttaagttt

SEQ ID NO: 1527109 - DNA, 15 bp, Homo sapiens
tccttttcttaagtt

SEQ ID NO: 1527110 - DNA, 15 bp, Homo sapiens
atccttttcttaagt

SEQ ID NO: 1527111 - DNA, 15 bp, Homo sapiens
aatccttttcttaag

SEQ ID NO: 1527112 - DNA, 15 bp, Homo sapiens
taatccttttcttaa

SEQ ID NO: 1527113 - DNA, 15 bp, Homo sapiens
gtaatccttttctta

SEQ ID NO: 1527114 - DNA, 15 bp, Homo sapiens
tgtaatccttttctt

SEQ ID NO: 1527115 - DNA, 15 bp, Homo sapiens
atgtaatccttttct

SEQ ID NO: 1527116 - DNA, 15 bp, Homo sapiens
tatgtaatccttttc

SEQ ID NO: 1527117 - DNA, 15 bp, Homo sapiens
atatgtaatcctttt

SEQ ID NO: 1527118 - DNA, 15 bp, Homo sapiens
catatgtaatccttt

SEQ ID NO: 1527119 - DNA, 15 bp, Homo sapiens
tcatatgtaatcctt

SEQ ID NO: 1527120 - DNA, 15 bp, Homo sapiens
ttcatatgtaatcct

SEQ ID NO: 1527121 - DNA, 15 bp, Homo sapiens
tttcatatgtaatcc

SEQ ID NO: 1527122 - DNA, 15 bp, Homo sapiens
ctttcatatgtaatc

SEQ ID NO: 1527123 - DNA, 15 bp, Homo sapiens
actttcatatgtaat

SEQ ID NO: 1527124 - DNA, 15 bp, Homo sapiens
cactttcatatgtaa

SEQ ID NO: 1527125 - DNA, 15 bp, Homo sapiens
tcactttcatatgta

SEQ ID NO: 1527126 - DNA, 15 bp, Homo sapiens
atcactttcatatgt

SEQ ID NO: 1527127 - DNA, 15 bp, Homo sapiens
tatcactttcatatg

SEQ ID NO: 1527128 - DNA, 15 bp, Homo sapiens
gtatcactttcatat

SEQ ID NO: 1527129 - DNA, 15 bp, Homo sapiens
agtatcactttcata

SEQ ID NO: 1527130 - DNA, 15 bp, Homo sapiens
aagtatcactttcat

SEQ ID NO: 1527131 - DNA, 15 bp, Homo sapiens
aaagtatcactttca

SEQ ID NO: 1527132 - DNA, 15 bp, Homo sapiens
aaaagtatcactttc

SEQ ID NO: 1527133 - DNA, 15 bp, Homo sapiens
aaaaagtatcacttt

SEQ ID NO: 1527134 - DNA, 15 bp, Homo sapiens
gaaaaagtatcactt

SEQ ID NO: 1527135 - DNA, 15 bp, Homo sapiens
tgaaaaagtatcact

SEQ ID NO: 1527136 - DNA, 15 bp, Homo sapiens
atgaaaaagtatcac

SEQ ID NO: 1527137 - DNA, 15 bp, Homo sapiens
tatgaaaaagtatca

SEQ ID NO: 1527138 - DNA, 15 bp, Homo sapiens
gtatgaaaaagtatc

SEQ ID NO: 1527139 - DNA, 15 bp, Homo sapiens
agtatgaaaaagtat

SEQ ID NO: 1527140 - DNA, 15 bp, Homo sapiens
cagtatgaaaaagta

SEQ ID NO: 1527141 - DNA, 15 bp, Homo sapiens
tcagtatgaaaaagt

SEQ ID NO: 1527142 - DNA, 15 bp, Homo sapiens
ctcagtatgaaaaag

SEQ ID NO: 1527143 - DNA, 15 bp, Homo sapiens
actcagtatgaaaaa

SEQ ID NO: 1527144 - DNA, 15 bp, Homo sapiens
aactcagtatgaaaa

SEQ ID NO: 1527145 - DNA, 15 bp, Homo sapiens
aaactcagtatgaaa

SEQ ID NO: 1527146 - DNA, 15 bp, Homo sapiens
taaactcagtatgaa

SEQ ID NO: 1527147 - DNA, 15 bp, Homo sapiens
gtaaactcagtatga

SEQ ID NO: 1527148 - DNA, 15 bp, Homo sapiens
tgtaaactcagtatg

SEQ ID NO: 1527149 - DNA, 15 bp, Homo sapiens
ttgtaaactcagtat

SEQ ID NO: 1527150 - DNA, 15 bp, Homo sapiens
tttgtaaactcagta

SEQ ID NO: 1527151 - DNA, 15 bp, Homo sapiens
gtttgtaaactcagt

SEQ ID NO: 1527152 - DNA, 15 bp, Homo sapiens
agtttgtaaactcag

SEQ ID NO: 1527153 - DNA, 15 bp, Homo sapiens
aagtttgtaaactca

SEQ ID NO: 1527154 - DNA, 15 bp, Homo sapiens
aaagtttgtaaactc

SEQ ID NO: 1527155 - DNA, 15 bp, Homo sapiens
aaaagtttgtaaact

SEQ ID NO: 1527156 - DNA, 15 bp, Homo sapiens
caaaagtttgtaaac

SEQ ID NO: 1527157 - DNA, 15 bp, Homo sapiens
acaaaagtttgtaaa

SEQ ID NO: 1527158 - DNA, 15 bp, Homo sapiens
cacaaaagtttgtaa

SEQ ID NO: 1527159 - DNA, 15 bp, Homo sapiens
acacaaaagtttgta

SEQ ID NO: 1527160 - DNA, 15 bp, Homo sapiens
cacacaaaagtttgt

SEQ ID NO: 1527161 - DNA, 15 bp, Homo sapiens
acacacaaaagtttg

SEQ ID NO: 1527162 - DNA, 15 bp, Homo sapiens
aacacacaaaagttt

SEQ ID NO: 1527163 - DNA, 15 bp, Homo sapiens
aaacacacaaaagtt

SEQ ID NO: 1527164 - DNA, 15 bp, Homo sapiens
caaacacacaaaagt

SEQ ID NO: 1527165 - DNA, 15 bp, Homo sapiens
acaaacacacaaaag

SEQ ID NO: 1527166 - DNA, 15 bp, Homo sapiens
cacaaacacacaaaa

SEQ ID NO: 1527167 - DNA, 15 bp, Homo sapiens
acacaaacacacaaa

SEQ ID NO: 1527168 - DNA, 15 bp, Homo sapiens
tacacaaacacacaa

SEQ ID NO: 1527169 - DNA, 15 bp, Homo sapiens
atacacaaacacaca

SEQ ID NO: 1527170 - DNA, 15 bp, Homo sapiens
catacacaaacacac

SEQ ID NO: 1527171 - DNA, 15 bp, Homo sapiens
ccatacacaaacaca

SEQ ID NO: 1527172 - DNA, 15 bp, Homo sapiens
accatacacaaacac

SEQ ID NO: 1527173 - DNA, 15 bp, Homo sapiens
aaccatacacaaaca

SEQ ID NO: 1527174 - DNA, 15 bp, Homo sapiens
aaaccatacacaaac

SEQ ID NO: 1527175 - DNA, 15 bp, Homo sapiens
aaaaccatacacaaa

SEQ ID NO: 1527176 - DNA, 15 bp, Homo sapiens
aaaaaccatacacaa

SEQ ID NO: 1527177 - DNA, 15 bp, Homo sapiens
aaaaaaccatacaca

SEQ ID NO: 1527178 - DNA, 15 bp, Homo sapiens
taaaaaaccatacac

SEQ ID NO: 1527179 - DNA, 15 bp, Homo sapiens
ttaaaaaaccataca

SEQ ID NO: 1527180 - DNA, 15 bp, Homo sapiens
attaaaaaaccatac

SEQ ID NO: 1527181 - DNA, 15 bp, Homo sapiens
cattaaaaaaccata

SEQ ID NO: 1527182 - DNA, 15 bp, Homo sapiens
acattaaaaaaccat

SEQ ID NO: 1527183 - DNA, 15 bp, Homo sapiens
tacattaaaaaacca

SEQ ID NO: 1527184 - DNA, 15 bp, Homo sapiens
atacattaaaaaacc

SEQ ID NO: 1527185 - DNA, 15 bp, Homo sapiens
aatacattaaaaaac

SEQ ID NO: 1527186 - DNA, 15 bp, Homo sapiens
taatacattaaaaaa

SEQ ID NO: 1527187 - DNA, 15 bp, Homo sapiens
ttaatacattaaaaa

SEQ ID NO: 1527188 - DNA, 15 bp, Homo sapiens
tttaatacattaaaa

SEQ ID NO: 1527189 - DNA, 15 bp, Homo sapiens
gtttaatacattaaa

SEQ ID NO: 1527190 - DNA, 15 bp, Homo sapiens
ggtttaatacattaa

SEQ ID NO: 1527191 - DNA, 15 bp, Homo sapiens
tggtttaatacatta

SEQ ID NO: 1527192 - DNA, 15 bp, Homo sapiens
ctggtttaatacatt

SEQ ID NO: 1527193 - DNA, 15 bp, Homo sapiens
actggtttaatacat

SEQ ID NO: 1527194 - DNA, 15 bp, Homo sapiens
gactggtttaataca

SEQ ID NO: 1527195 - DNA, 15 bp, Homo sapiens
tgactggtttaatac

SEQ ID NO: 1527196 - DNA, 15 bp, Homo sapiens
gtgactggtttaata

SEQ ID NO: 1527197 - DNA, 15 bp, Homo sapiens
ggtgactggtttaat

SEQ ID NO: 1527198 - DNA, 15 bp, Homo sapiens
aggtgactggtttaa

SEQ ID NO: 1527199 - DNA, 15 bp, Homo sapiens
aaggtgactggttta

SEQ ID NO: 1527200 - DNA, 15 bp, Homo sapiens
caaggtgactggttt

SEQ ID NO: 1527201 - DNA, 15 bp, Homo sapiens
tcaaggtgactggtt

SEQ ID NO: 1527202 - DNA, 15 bp, Homo sapiens
ttcaaggtgactggt

SEQ ID NO: 1527203 - DNA, 15 bp, Homo sapiens
cttcaaggtgactgg

SEQ ID NO: 1527204 - DNA, 15 bp, Homo sapiens
acttcaaggtgactg

SEQ ID NO: 1527205 - DNA, 15 bp, Homo sapiens
cacttcaaggtgact

SEQ ID NO: 1527206 - DNA, 15 bp, Homo sapiens
gcacttcaaggtgac

SEQ ID NO: 1527207 - DNA, 15 bp, Homo sapiens
tgcacttcaaggtga

SEQ ID NO: 1527208 - DNA, 15 bp, Homo sapiens
atgcacttcaaggtg

SEQ ID NO: 1527209 - DNA, 15 bp, Homo sapiens
tatgcacttcaaggt

SEQ ID NO: 1527210 - DNA, 15 bp, Homo sapiens
ttatgcacttcaagg

SEQ ID NO: 1527211 - DNA, 15 bp, Homo sapiens
tttatgcacttcaag

SEQ ID NO: 1527212 - DNA, 15 bp, Homo sapiens
ctttatgcacttcaa

SEQ ID NO: 1527213 - DNA, 15 bp, Homo sapiens
actttatgcacttca

SEQ ID NO: 1527214 - DNA, 15 bp, Homo sapiens
tactttatgcacttc

SEQ ID NO: 1527215 - DNA, 15 bp, Homo sapiens
ttactttatgcactt

SEQ ID NO: 1527216 - DNA, 15 bp, Homo sapiens
tttactttatgcact

SEQ ID NO: 1527217 - DNA, 15 bp, Homo sapiens
atttactttatgcac

SEQ ID NO: 1527218 - DNA, 15 bp, Homo sapiens
aatttactttatgca

SEQ ID NO: 1527219 - DNA, 15 bp, Homo sapiens
aaatttactttatgc

SEQ ID NO: 1527220 - DNA, 15 bp, Homo sapiens
aaaatttactttatg

SEQ ID NO: 1527221 - DNA, 15 bp, Homo sapiens
aaaaatttactttat

SEQ ID NO: 1527222 - DNA, 15 bp, Homo sapiens
aaaaaatttacttta

SEQ ID NO: 1527223 - DNA, 15 bp, Homo sapiens
caaaaaatttacttt

SEQ ID NO: 1527224 - DNA, 15 bp, Homo sapiens
tcaaaaaatttactt

SEQ ID NO: 1527225 - DNA, 15 bp, Homo sapiens
ttcaaaaaatttact

SEQ ID NO: 1527226 - DNA, 15 bp, Homo sapiens
cttcaaaaaatttac

SEQ ID NO: 1527227 - DNA, 15 bp, Homo sapiens
ccttcaaaaaattta

SEQ ID NO: 1527228 - DNA, 15 bp, Homo sapiens
tccttcaaaaaattt

SEQ ID NO: 1527229 - DNA, 15 bp, Homo sapiens
ttccttcaaaaaatt

SEQ ID NO: 1527230 - DNA, 15 bp, Homo sapiens
attccttcaaaaaat

SEQ ID NO: 1527231 - DNA, 15 bp, Homo sapiens
aattccttcaaaaaa

SEQ ID NO: 1527232 - DNA, 15 bp, Homo sapiens
aaattccttcaaaaa

SEQ ID NO: 1527233 - DNA, 15 bp, Homo sapiens
aaaattccttcaaaa

SEQ ID NO: 1527234 - DNA, 15 bp, Homo sapiens
caaaattccttcaaa

SEQ ID NO: 1527235 - DNA, 15 bp, Homo sapiens
acaaaattccttcaa

SEQ ID NO: 1527236 - DNA, 15 bp, Homo sapiens
gacaaaattccttca

SEQ ID NO: 1527237 - DNA, 15 bp, Homo sapiens
agacaaaattccttc

SEQ ID NO: 1527238 - DNA, 15 bp, Homo sapiens
aagacaaaattcctt

SEQ ID NO: 1527239 - DNA, 15 bp, Homo sapiens
aaagacaaaattcct

SEQ ID NO: 1527240 - DNA, 15 bp, Homo sapiens
aaaagacaaaattcc

SEQ ID NO: 1527241 - DNA, 15 bp, Homo sapiens
caaaagacaaaattc

SEQ ID NO: 1527242 - DNA, 15 bp, Homo sapiens
ccaaaagacaaaatt

SEQ ID NO: 1527243 - DNA, 15 bp, Homo sapiens
accaaaagacaaaat

SEQ ID NO: 1527244 - DNA, 15 bp, Homo sapiens
gaccaaaagacaaaa

SEQ ID NO: 1527245 - DNA, 15 bp, Homo sapiens
tgaccaaaagacaaa

SEQ ID NO: 1527246 - DNA, 15 bp, Homo sapiens
ctgaccaaaagacaa

SEQ ID NO: 1527247 - DNA, 15 bp, Homo sapiens
gctgaccaaaagaca

SEQ ID NO: 1527248 - DNA, 15 bp, Homo sapiens
ggctgaccaaaagac

SEQ ID NO: 1527249 - DNA, 15 bp, Homo sapiens
cggctgaccaaaaga

SEQ ID NO: 1527250 - DNA, 15 bp, Homo sapiens
acggctgaccaaaag

SEQ ID NO: 1527251 - DNA, 15 bp, Homo sapiens
aacggctgaccaaaa

SEQ ID NO: 1527252 - DNA, 15 bp, Homo sapiens
aaacggctgaccaaa

SEQ ID NO: 1527253 - DNA, 15 bp, Homo sapiens
aaaacggctgaccaa

SEQ ID NO: 1527254 - DNA, 15 bp, Homo sapiens
gaaaacggctgacca

SEQ ID NO: 1527255 - DNA, 15 bp, Homo sapiens
ggaaaacggctgacc

SEQ ID NO: 1527256 - DNA, 15 bp, Homo sapiens
tggaaaacggctgac

SEQ ID NO: 1527257 - DNA, 15 bp, Homo sapiens
atggaaaacggctga

SEQ ID NO: 1527258 - DNA, 15 bp, Homo sapiens
catggaaaacggctg

SEQ ID NO: 1527259 - DNA, 15 bp, Homo sapiens
tcatggaaaacggct

SEQ ID NO: 1527260 - DNA, 15 bp, Homo sapiens
atcatggaaaacggc

SEQ ID NO: 1527261 - DNA, 15 bp, Homo sapiens
tatcatggaaaacgg

SEQ ID NO: 1527262 - DNA, 15 bp, Homo sapiens
ttatcatggaaaacg

SEQ ID NO: 1527263 - DNA, 15 bp, Homo sapiens
gttatcatggaaaac

SEQ ID NO: 1527264 - DNA, 15 bp, Homo sapiens
agttatcatggaaaa

SEQ ID NO: 1527265 - DNA, 15 bp, Homo sapiens
tagttatcatggaaa

SEQ ID NO: 1527266 - DNA, 15 bp, Homo sapiens
ctagttatcatggaa

SEQ ID NO: 1527267 - DNA, 15 bp, Homo sapiens
gctagttatcatgga

SEQ ID NO: 1527268 - DNA, 15 bp, Homo sapiens
tgctagttatcatgg

SEQ ID NO: 1527269 - DNA, 15 bp, Homo sapiens
atgctagttatcatg

SEQ ID NO: 1527270 - DNA, 15 bp, Homo sapiens
tatgctagttatcat

SEQ ID NO: 1527271 - DNA, 15 bp, Homo sapiens
atatgctagttatca

SEQ ID NO: 1527272 - DNA, 15 bp, Homo sapiens
tatatgctagttatc

SEQ ID NO: 1527273 - DNA, 15 bp, Homo sapiens
ctatatgctagttat

SEQ ID NO: 1527274 - DNA, 15 bp, Homo sapiens
cctatatgctagtta

SEQ ID NO: 1527275 - DNA, 15 bp, Homo sapiens
ccctatatgctagtt

SEQ ID NO: 1527276 - DNA, 15 bp, Homo sapiens
tccctatatgctagt

SEQ ID NO: 1527277 - DNA, 15 bp, Homo sapiens
ttccctatatgctag

SEQ ID NO: 1527278 - DNA, 15 bp, Homo sapiens
tttccctatatgcta

SEQ ID NO: 1527279 - DNA, 15 bp, Homo sapiens
atttccctatatgct

SEQ ID NO: 1527280 - DNA, 15 bp, Homo sapiens
aatttccctatatgc

SEQ ID NO: 1527281 - DNA, 15 bp, Homo sapiens
caatttccctatatg

SEQ ID NO: 1527282 - DNA, 15 bp, Homo sapiens
ccaatttccctatat

SEQ ID NO: 1527283 - DNA, 15 bp, Homo sapiens
cccaatttccctata

SEQ ID NO: 1527284 - DNA, 15 bp, Homo sapiens
acccaatttccctat

SEQ ID NO: 1527285 - DNA, 15 bp, Homo sapiens
aacccaatttcccta

SEQ ID NO: 1527286 - DNA, 15 bp, Homo sapiens
caacccaatttccct

SEQ ID NO: 1527287 - DNA, 15 bp, Homo sapiens
acaacccaatttccc

SEQ ID NO: 1527288 - DNA, 15 bp, Homo sapiens
tacaacccaatttcc

SEQ ID NO: 1527289 - DNA, 15 bp, Homo sapiens
atacaacccaatttc

SEQ ID NO: 1527290 - DNA, 15 bp, Homo sapiens
aatacaacccaattt

SEQ ID NO: 1527291 - DNA, 15 bp, Homo sapiens
gaatacaacccaatt

SEQ ID NO: 1527292 - DNA, 15 bp, Homo sapiens
agaatacaacccaat

SEQ ID NO: 1527293 - DNA, 15 bp, Homo sapiens
cagaatacaacccaa

SEQ ID NO: 1527294 - DNA, 15 bp, Homo sapiens
gcagaatacaaccca

SEQ ID NO: 1527295 - DNA, 15 bp, Homo sapiens
agcagaatacaaccc

SEQ ID NO: 1527296 - DNA, 15 bp, Homo sapiens
tagcagaatacaacc

SEQ ID NO: 1527297 - DNA, 15 bp, Homo sapiens
ttagcagaatacaac

SEQ ID NO: 1527298 - DNA, 15 bp, Homo sapiens
attagcagaatacaa

SEQ ID NO: 1527299 - DNA, 15 bp, Homo sapiens
cattagcagaataca

SEQ ID NO: 1527300 - DNA, 15 bp, Homo sapiens
acattagcagaatac

SEQ ID NO: 1527301 - DNA, 15 bp, Homo sapiens
aacattagcagaata

SEQ ID NO: 1527302 - DNA, 15 bp, Homo sapiens
aaacattagcagaat

SEQ ID NO: 1527303 - DNA, 15 bp, Homo sapiens
aaaacattagcagaa

SEQ ID NO: 1527304 - DNA, 15 bp, Homo sapiens
gaaaacattagcaga

SEQ ID NO: 1527305 - DNA, 15 bp, Homo sapiens
tgaaaacattagcag

SEQ ID NO: 1527306 - DNA, 15 bp, Homo sapiens
atgaaaacattagca

SEQ ID NO: 1527307 - DNA, 15 bp, Homo sapiens
gatgaaaacattagc

SEQ ID NO: 1527308 - DNA, 15 bp, Homo sapiens
tgatgaaaacattag

SEQ ID NO: 1527309 - DNA, 15 bp, Homo sapiens
atgatgaaaacatta

SEQ ID NO: 1527310 - DNA, 15 bp, Homo sapiens
tatgatgaaaacatt

SEQ ID NO: 1527311 - DNA, 15 bp, Homo sapiens
atatgatgaaaacat

SEQ ID NO: 1527312 - DNA, 15 bp, Homo sapiens
aatatgatgaaaaca

SEQ ID NO: 1527313 - DNA, 15 bp, Homo sapiens
caatatgatgaaaac

SEQ ID NO: 1527314 - DNA, 15 bp, Homo sapiens
ccaatatgatgaaaa

SEQ ID NO: 1527315 - DNA, 15 bp, Homo sapiens
gccaatatgatgaaa

SEQ ID NO: 1527316 - DNA, 15 bp, Homo sapiens
ggccaatatgatgaa

SEQ ID NO: 1527317 - DNA, 15 bp, Homo sapiens
tggccaatatgatga

SEQ ID NO: 1527318 - DNA, 15 bp, Homo sapiens
ctggccaatatgatg

SEQ ID NO: 1527319 - DNA, 15 bp, Homo sapiens
gctggccaatatgat

SEQ ID NO: 1527320 - DNA, 15 bp, Homo sapiens
tgctggccaatatga

SEQ ID NO: 1527321 - DNA, 15 bp, Homo sapiens
gtgctggccaatatg

SEQ ID NO: 1527322 - DNA, 15 bp, Homo sapiens
tgtgctggccaatat

SEQ ID NO: 1527323 - DNA, 15 bp, Homo sapiens
gtgtgctggccaata

SEQ ID NO: 1527324 - DNA, 15 bp, Homo sapiens
agtgtgctggccaat

SEQ ID NO: 1527325 - DNA, 15 bp, Homo sapiens
aagtgtgctggccaa

SEQ ID NO: 1527326 - DNA, 15 bp, Homo sapiens
aaagtgtgctggcca

SEQ ID NO: 1527327 - DNA, 15 bp, Homo sapiens
taaagtgtgctggcc

SEQ ID NO: 1527328 - DNA, 15 bp, Homo sapiens
ttaaagtgtgctggc

SEQ ID NO: 1527329 - DNA, 15 bp, Homo sapiens
tttaaagtgtgctgg

SEQ ID NO: 1527330 - DNA, 15 bp, Homo sapiens
ttttaaagtgtgctg

SEQ ID NO: 1527331 - DNA, 15 bp, Homo sapiens
tttttaaagtgtgct

SEQ ID NO: 1527332 - DNA, 15 bp, Homo sapiens
atttttaaagtgtgc

SEQ ID NO: 1527333 - DNA, 15 bp, Homo sapiens
aatttttaaagtgtg

SEQ ID NO: 1527334 - DNA, 15 bp, Homo sapiens
caatttttaaagtgt

SEQ ID NO: 1527335 - DNA, 15 bp, Homo sapiens
gcaatttttaaagtg

SEQ ID NO: 1527336 - DNA, 15 bp, Homo sapiens
tgcaatttttaaagt

SEQ ID NO: 1527337 - DNA, 15 bp, Homo sapiens
ctgcaatttttaaag

SEQ ID NO: 1527338 - DNA, 15 bp, Homo sapiens
cctgcaatttttaaa

SEQ ID NO: 1527339 - DNA, 15 bp, Homo sapiens
tcctgcaatttttaa

SEQ ID NO: 1527340 - DNA, 15 bp, Homo sapiens
gtcctgcaattttta

SEQ ID NO: 1527341 - DNA, 15 bp, Homo sapiens
agtcctgcaattttt

SEQ ID NO: 1527342 - DNA, 15 bp, Homo sapiens
cagtcctgcaatttt

SEQ ID NO: 1527343 - DNA, 15 bp, Homo sapiens
acagtcctgcaattt

SEQ ID NO: 1527344 - DNA, 15 bp, Homo sapiens
cacagtcctgcaatt

SEQ ID NO: 1527345 - DNA, 15 bp, Homo sapiens
tcacagtcctgcaat

SEQ ID NO: 1527346 - DNA, 15 bp, Homo sapiens
ttcacagtcctgcaa

SEQ ID NO: 1527347 - DNA, 15 bp, Homo sapiens
gttcacagtcctgca

SEQ ID NO: 1527348 - DNA, 15 bp, Homo sapiens
tgttcacagtcctgc

SEQ ID NO: 1527349 - DNA, 15 bp, Homo sapiens
ttgttcacagtcctg

SEQ ID NO: 1527350 - DNA, 15 bp, Homo sapiens
attgttcacagtcct

SEQ ID NO: 1527351 - DNA, 15 bp, Homo sapiens
cattgttcacagtcc

SEQ ID NO: 1527352 - DNA, 15 bp, Homo sapiens
ccattgttcacagtc

SEQ ID NO: 1527353 - DNA, 15 bp, Homo sapiens
accattgttcacagt

SEQ ID NO: 1527354 - DNA, 15 bp, Homo sapiens
caccattgttcacag

SEQ ID NO: 1527355 - DNA, 15 bp, Homo sapiens
acaccattgttcaca

SEQ ID NO: 1527356 - DNA, 15 bp, Homo sapiens
aacaccattgttcac

SEQ ID NO: 1527357 - DNA, 15 bp, Homo sapiens
caacaccattgttca

SEQ ID NO: 1527358 - DNA, 15 bp, Homo sapiens
tcaacaccattgttc

SEQ ID NO: 1527359 - DNA, 15 bp, Homo sapiens
gtcaacaccattgtt

SEQ ID NO: 1527360 - DNA, 15 bp, Homo sapiens
tgtcaacaccattgt

SEQ ID NO: 1527361 - DNA, 15 bp, Homo sapiens
atgtcaacaccattg

SEQ ID NO: 1527362 - DNA, 15 bp, Homo sapiens
tatgtcaacaccatt

SEQ ID NO: 1527363 - DNA, 15 bp, Homo sapiens
gtatgtcaacaccat

SEQ ID NO: 1527364 - DNA, 15 bp, Homo sapiens
tgtatgtcaacacca

SEQ ID NO: 1527365 - DNA, 15 bp, Homo sapiens
ttgtatgtcaacacc

SEQ ID NO: 1527366 - DNA, 15 bp, Homo sapiens
cttgtatgtcaacac

SEQ ID NO: 1527367 - DNA, 15 bp, Homo sapiens
ccttgtatgtcaaca

SEQ ID NO: 1527368 - DNA, 15 bp, Homo sapiens
tccttgtatgtcaac

SEQ ID NO: 1527369 - DNA, 15 bp, Homo sapiens
ttccttgtatgtcaa

SEQ ID NO: 1527370 - DNA, 15 bp, Homo sapiens
tttccttgtatgtca

SEQ ID NO: 1527371 - DNA, 15 bp, Homo sapiens
atttccttgtatgtc

SEQ ID NO: 1527372 - DNA, 15 bp, Homo sapiens
aatttccttgtatgt

SEQ ID NO: 1527373 - DNA, 15 bp, Homo sapiens
caatttccttgtatg

SEQ ID NO: 1527374 - DNA, 15 bp, Homo sapiens
gcaatttccttgtat

SEQ ID NO: 1527375 - DNA, 15 bp, Homo sapiens
tgcaatttccttgta

SEQ ID NO: 1527376 - DNA, 15 bp, Homo sapiens
ttgcaatttccttgt

SEQ ID NO: 1527377 - DNA, 15 bp, Homo sapiens
gttgcaatttccttg

SEQ ID NO: 1527378 - DNA, 15 bp, Homo sapiens
tgttgcaatttcctt

SEQ ID NO: 1527379 - DNA, 15 bp, Homo sapiens
atgttgcaatttcct

SEQ ID NO: 1527380 - DNA, 15 bp, Homo sapiens
tatgttgcaatttcc

SEQ ID NO: 1527381 - DNA, 15 bp, Homo sapiens
ttatgttgcaatttc

SEQ ID NO: 1527382 - DNA, 15 bp, Homo sapiens
tttatgttgcaattt

SEQ ID NO: 1527383 - DNA, 15 bp, Homo sapiens
atttatgttgcaatt

SEQ ID NO: 1527384 - DNA, 15 bp, Homo sapiens
catttatgttgcaat

SEQ ID NO: 1527385 - DNA, 15 bp, Homo sapiens
ccatttatgttgcaa

SEQ ID NO: 1527386 - DNA, 15 bp, Homo sapiens
gccatttatgttgca

SEQ ID NO: 1527387 - DNA, 15 bp, Homo sapiens
tgccatttatgttgc

SEQ ID NO: 1527388 - DNA, 15 bp, Homo sapiens
ctgccatttatgttg

SEQ ID NO: 1527389 - DNA, 15 bp, Homo sapiens
tctgccatttatgtt

SEQ ID NO: 1527390 - DNA, 15 bp, Homo sapiens
ttctgccatttatgt

SEQ ID NO: 1527391 - DNA, 15 bp, Homo sapiens
cttctgccatttatg

SEQ ID NO: 1527392 - DNA, 15 bp, Homo sapiens
acttctgccatttat

SEQ ID NO: 1527393 - DNA, 15 bp, Homo sapiens
tacttctgccattta

SEQ ID NO: 1527394 - DNA, 15 bp, Homo sapiens
gtacttctgccattt

SEQ ID NO: 1527395 - DNA, 15 bp, Homo sapiens
tgtacttctgccatt

SEQ ID NO: 1527396 - DNA, 15 bp, Homo sapiens
ttgtacttctgccat

SEQ ID NO: 1527397 - DNA, 15 bp, Homo sapiens
cttgtacttctgcca

SEQ ID NO: 1527398 - DNA, 15 bp, Homo sapiens
gcttgtacttctgcc

SEQ ID NO: 1527399 - DNA, 15 bp, Homo sapiens
ggcttgtacttctgc

SEQ ID NO: 1527400 - DNA, 15 bp, Homo sapiens
tggcttgtacttctg

SEQ ID NO: 1527401 - DNA, 15 bp, Homo sapiens
ctggcttgtacttct

SEQ ID NO: 1527402 - DNA, 15 bp, Homo sapiens
actggcttgtacttc

SEQ ID NO: 1527403 - DNA, 15 bp, Homo sapiens
tactggcttgtactt

SEQ ID NO: 1527404 - DNA, 15 bp, Homo sapiens
gtactggcttgtact

SEQ ID NO: 1527405 - DNA, 15 bp, Homo sapiens
tgtactggcttgtac

SEQ ID NO: 1527406 - DNA, 15 bp, Homo sapiens
atgtactggcttgta

SEQ ID NO: 1527407 - DNA, 15 bp, Homo sapiens
catgtactggcttgt

SEQ ID NO: 1527408 - DNA, 15 bp, Homo sapiens
acatgtactggcttg

SEQ ID NO: 1527409 - DNA, 15 bp, Homo sapiens
aacatgtactggctt

SEQ ID NO: 1527410 - DNA, 15 bp, Homo sapiens
gaacatgtactggct

SEQ ID NO: 1527411 - DNA, 15 bp, Homo sapiens
ggaacatgtactggc

SEQ ID NO: 1527412 - DNA, 15 bp, Homo sapiens
aggaacatgtactgg

SEQ ID NO: 1527413 - DNA, 15 bp, Homo sapiens
gaggaacatgtactg

SEQ ID NO: 1527414 - DNA, 15 bp, Homo sapiens
tgaggaacatgtact

SEQ ID NO: 1527415 - DNA, 15 bp, Homo sapiens
gtgaggaacatgtac

SEQ ID NO: 1527416 - DNA, 15 bp, Homo sapiens
agtgaggaacatgta

SEQ ID NO: 1527417 - DNA, 15 bp, Homo sapiens
aagtgaggaacatgt

SEQ ID NO: 1527418 - DNA, 15 bp, Homo sapiens
caagtgaggaacatg

SEQ ID NO: 1527419 - DNA, 15 bp, Homo sapiens
acaagtgaggaacat

SEQ ID NO: 1527420 - DNA, 15 bp, Homo sapiens
aacaagtgaggaaca

SEQ ID NO: 1527421 - DNA, 15 bp, Homo sapiens
aaacaagtgaggaac

SEQ ID NO: 1527422 - DNA, 15 bp, Homo sapiens
aaaacaagtgaggaa

SEQ ID NO: 1527423 - DNA, 15 bp, Homo sapiens
taaaacaagtgagga

SEQ ID NO: 1527424 - DNA, 15 bp, Homo sapiens
gtaaaacaagtgagg

SEQ ID NO: 1527425 - DNA, 15 bp, Homo sapiens
agtaaaacaagtgag

SEQ ID NO: 1527426 - DNA, 15 bp, Homo sapiens
cagtaaaacaagtga

SEQ ID NO: 1527427 - DNA, 15 bp, Homo sapiens
acagtaaaacaagtg

SEQ ID NO: 1527428 - DNA, 15 bp, Homo sapiens
cacagtaaaacaagt

SEQ ID NO: 1527429 - DNA, 15 bp, Homo sapiens
gcacagtaaaacaag

SEQ ID NO: 1527430 - DNA, 15 bp, Homo sapiens
agcacagtaaaacaa

SEQ ID NO: 1527431 - DNA, 15 bp, Homo sapiens
cagcacagtaaaaca

SEQ ID NO: 1527432 - DNA, 15 bp, Homo sapiens
acagcacagtaaaac

SEQ ID NO: 1527433 - DNA, 15 bp, Homo sapiens
cacagcacagtaaaa

SEQ ID NO: 1527434 - DNA, 15 bp, Homo sapiens
tcacagcacagtaaa

SEQ ID NO: 1527435 - DNA, 15 bp, Homo sapiens
ttcacagcacagtaa

SEQ ID NO: 1527436 - DNA, 15 bp, Homo sapiens
cttcacagcacagta

SEQ ID NO: 1527437 - DNA, 15 bp, Homo sapiens
tcttcacagcacagt

SEQ ID NO: 1527438 - DNA, 15 bp, Homo sapiens
atcttcacagcacag

SEQ ID NO: 1527439 - DNA, 15 bp, Homo sapiens
gatcttcacagcaca

SEQ ID NO: 1527440 - DNA, 15 bp, Homo sapiens
tgatcttcacagcac

SEQ ID NO: 1527441 - DNA, 15 bp, Homo sapiens
atgatcttcacagca

SEQ ID NO: 1527442 - DNA, 15 bp, Homo sapiens
aatgatcttcacagc

SEQ ID NO: 1527443 - DNA, 15 bp, Homo sapiens
aaatgatcttcacag

SEQ ID NO: 1527444 - DNA, 15 bp, Homo sapiens
aaaatgatcttcaca

SEQ ID NO: 1527445 - DNA, 15 bp, Homo sapiens
aaaaatgatcttcac

SEQ ID NO: 1527446 - DNA, 15 bp, Homo sapiens
gaaaaatgatcttca

SEQ ID NO: 1527447 - DNA, 15 bp, Homo sapiens
ggaaaaatgatcttc

SEQ ID NO: 1527448 - DNA, 15 bp, Homo sapiens
gggaaaaatgatctt

SEQ ID NO: 1527449 - DNA, 15 bp, Homo sapiens
ggggaaaaatgatct

SEQ ID NO: 1527450 - DNA, 15 bp, Homo sapiens
aggggaaaaatgatc

SEQ ID NO: 1527451 - DNA, 15 bp, Homo sapiens
caggggaaaaatgat

SEQ ID NO: 1527452 - DNA, 15 bp, Homo sapiens
tcaggggaaaaatga

SEQ ID NO: 1527453 - DNA, 15 bp, Homo sapiens
ttcaggggaaaaatg

SEQ ID NO: 1527454 - DNA, 15 bp, Homo sapiens
attcaggggaaaaat

SEQ ID NO: 1527455 - DNA, 15 bp, Homo sapiens
cattcaggggaaaaa

SEQ ID NO: 1527456 - DNA, 15 bp, Homo sapiens
tcattcaggggaaaa

SEQ ID NO: 1527457 - DNA, 15 bp, Homo sapiens
ttcattcaggggaaa

SEQ ID NO: 1527458 - DNA, 15 bp, Homo sapiens
attcattcaggggaa

SEQ ID NO: 1527459 - DNA, 15 bp, Homo sapiens
tattcattcagggga

SEQ ID NO: 1527460 - DNA, 15 bp, Homo sapiens
ttattcattcagggg

SEQ ID NO: 1527461 - DNA, 15 bp, Homo sapiens
tttattcattcaggg

SEQ ID NO: 1527462 - DNA, 15 bp, Homo sapiens
gtttattcattcagg

SEQ ID NO: 1527463 - DNA, 15 bp, Homo sapiens
ggtttattcattcag

SEQ ID NO: 1527464 - DNA, 15 bp, Homo sapiens
atggtttattcattc

SEQ ID NO: 1527465 - DNA, 15 bp, Homo sapiens
catggtttattcatt

SEQ ID NO: 1527466 - DNA, 15 bp, Homo sapiens
tcatggtttattcat

SEQ ID NO: 1527467 - DNA, 15 bp, Homo sapiens
ttcatggtttattca

SEQ ID NO: 1527468 - DNA, 15 bp, Homo sapiens
attcatggtttattc

SEQ ID NO: 1527469 - DNA, 15 bp, Homo sapiens
tattcatggtttatt

SEQ ID NO: 1527470 - DNA, 15 bp, Homo sapiens
ctattcatggtttat

SEQ ID NO: 1527471 - DNA, 15 bp, Homo sapiens
tctattcatggttta

SEQ ID NO: 1527472 - DNA, 15 bp, Homo sapiens
ttctattcatggttt

SEQ ID NO: 1527473 - DNA, 15 bp, Homo sapiens
gttctattcatggtt

SEQ ID NO: 1527474 - DNA, 15 bp, Homo sapiens
ggttctattcatggt

SEQ ID NO: 1527475 - DNA, 15 bp, Homo sapiens
tggttctattcatgg

SEQ ID NO: 1527476 - DNA, 15 bp, Homo sapiens
atggttctattcatg

SEQ ID NO: 1527477 - DNA, 15 bp, Homo sapiens
catggttctattcat

SEQ ID NO: 1527478 - DNA, 15 bp, Homo sapiens
gcatggttctattca

SEQ ID NO: 1527479 - DNA, 15 bp, Homo sapiens
agcatggttctattc

SEQ ID NO: 1527480 - DNA, 15 bp, Homo sapiens
aagcatggttctatt

SEQ ID NO: 1527481 - DNA, 15 bp, Homo sapiens
caagcatggttctat

SEQ ID NO: 1527482 - DNA, 15 bp, Homo sapiens
ccaagcatggttcta

SEQ ID NO: 1527483 - DNA, 15 bp, Homo sapiens
accaagcatggttct

SEQ ID NO: 1527484 - DNA, 15 bp, Homo sapiens
taccaagcatggttc

SEQ ID NO: 1527485 - DNA, 15 bp, Homo sapiens
ttaccaagcatggtt

SEQ ID NO: 1527486 - DNA, 15 bp, Homo sapiens
tttaccaagcatggt

SEQ ID NO: 1527487 - DNA, 15 bp, Homo sapiens
atttaccaagcatgg

SEQ ID NO: 1527488 - DNA, 15 bp, Homo sapiens
gatttaccaagcatg

SEQ ID NO: 1527489 - DNA, 15 bp, Homo sapiens
agatttaccaagcat

SEQ ID NO: 1527490 - DNA, 15 bp, Homo sapiens
aagatttaccaagca

SEQ ID NO: 1527491 - DNA, 15 bp, Homo sapiens
taagatttaccaagc

SEQ ID NO: 1527492 - DNA, 15 bp, Homo sapiens
ataagatttaccaag

SEQ ID NO: 1527493 - DNA, 15 bp, Homo sapiens
aataagatttaccaa

SEQ ID NO: 1527494 - DNA, 15 bp, Homo sapiens
aaataagatttacca

SEQ ID NO: 1527495 - DNA, 15 bp, Homo sapiens
taaataagatttacc

SEQ ID NO: 1527496 - DNA, 15 bp, Homo sapiens
ataaataagatttac

SEQ ID NO: 1527497 - DNA, 15 bp, Homo sapiens
tataaataagattta

SEQ ID NO: 1527498 - DNA, 15 bp, Homo sapiens
atataaataagattt

SEQ ID NO: 1527499 - DNA, 15 bp, Homo sapiens
catataaataagatt

SEQ ID NO: 1527500 - DNA, 15 bp, Homo sapiens
ccatataaataagat

SEQ ID NO: 1527501 - DNA, 15 bp, Homo sapiens
accatataaataaga

SEQ ID NO: 1527502 - DNA, 15 bp, Homo sapiens
taccatataaataag

SEQ ID NO: 1527503 - DNA, 15 bp, Homo sapiens
gtaccatataaataa

SEQ ID NO: 1527504 - DNA, 15 bp, Homo sapiens
tgtaccatataaata

SEQ ID NO: 1527505 - DNA, 15 bp, Homo sapiens
atgtaccatataaat

SEQ ID NO: 1527506 - DNA, 15 bp, Homo sapiens
tatgtaccatataaa

SEQ ID NO: 1527507 - DNA, 15 bp, Homo sapiens
atatgtaccatataa

SEQ ID NO: 1527508 - DNA, 15 bp, Homo sapiens
tatatgtaccatata

SEQ ID NO: 1527509 - DNA, 15 bp, Homo sapiens
ttatatgtaccatat

SEQ ID NO: 1527510 - DNA, 15 bp, Homo sapiens
attatatgtaccata

SEQ ID NO: 1527511 - DNA, 15 bp, Homo sapiens
tattatatgtaccat

SEQ ID NO: 1527512 - DNA, 15 bp, Homo sapiens
ttattatatgtacca

SEQ ID NO: 1527513 - DNA, 15 bp, Homo sapiens
gttattatatgtacc

SEQ ID NO: 1527514 - DNA, 15 bp, Homo sapiens
agttattatatgtac

SEQ ID NO: 1527515 - DNA, 15 bp, Homo sapiens
aagttattatatgta

SEQ ID NO: 1527516 - DNA, 15 bp, Homo sapiens
gaagttattatatgt

SEQ ID NO: 1527517 - DNA, 15 bp, Homo sapiens
tgaagttattatatg

SEQ ID NO: 1527518 - DNA, 15 bp, Homo sapiens
gtgaagttattatat

SEQ ID NO: 1527519 - DNA, 15 bp, Homo sapiens
agtgaagttattata

SEQ ID NO: 1527520 - DNA, 15 bp, Homo sapiens
aagtgaagttattat

SEQ ID NO: 1527521 - DNA, 15 bp, Homo sapiens
taagtgaagttatta

SEQ ID NO: 1527522 - DNA, 15 bp, Homo sapiens
ttaagtgaagttatt

SEQ ID NO: 1527523 - DNA, 15 bp, Homo sapiens
gttaagtgaagttat

SEQ ID NO: 1527524 - DNA, 15 bp, Homo sapiens
agttaagtgaagtta

SEQ ID NO: 1527525 - DNA, 15 bp, Homo sapiens
cagttaagtgaagtt

SEQ ID NO: 1527526 - DNA, 15 bp, Homo sapiens
ccagttaagtgaagt

SEQ ID NO: 1527527 - DNA, 15 bp, Homo sapiens
tccagttaagtgaag

SEQ ID NO: 1527528 - DNA, 15 bp, Homo sapiens
ctccagttaagtgaa

SEQ ID NO: 1527529 - DNA, 15 bp, Homo sapiens
cctccagttaagtga

SEQ ID NO: 1527530 - DNA, 15 bp, Homo sapiens
acctccagttaagtg

SEQ ID NO: 1527531 - DNA, 15 bp, Homo sapiens
aacctccagttaagt

SEQ ID NO: 1527532 - DNA, 15 bp, Homo sapiens
taacctccagttaag

SEQ ID NO: 1527533 - DNA, 15 bp, Homo sapiens
ttaacctccagttaa

SEQ ID NO: 1527534 - DNA, 15 bp, Homo sapiens
attaacctccagtta

SEQ ID NO: 1527535 - DNA, 15 bp, Homo sapiens
cattaacctccagtt

SEQ ID NO: 1527536 - DNA, 15 bp, Homo sapiens
acattaacctccagt

SEQ ID NO: 1527537 - DNA, 15 bp, Homo sapiens
cacattaacctccag

SEQ ID NO: 1527538 - DNA, 15 bp, Homo sapiens
ccacattaacctcca

SEQ ID NO: 1527539 - DNA, 15 bp, Homo sapiens
accacattaacctcc

SEQ ID NO: 1527540 - DNA, 15 bp, Homo sapiens
gaccacattaacctc

SEQ ID NO: 1527541 - DNA, 15 bp, Homo sapiens
tgaccacattaacct

SEQ ID NO: 1527542 - DNA, 15 bp, Homo sapiens
ctgaccacattaacc

SEQ ID NO: 1527543 - DNA, 15 bp, Homo sapiens
tctgaccacattaac

SEQ ID NO: 1527544 - DNA, 15 bp, Homo sapiens
atctgaccacattaa

SEQ ID NO: 1527545 - DNA, 15 bp, Homo sapiens
gatctgaccacatta

SEQ ID NO: 1527546 - DNA, 15 bp, Homo sapiens
agatctgaccacatt

SEQ ID NO: 1527547 - DNA, 15 bp, Homo sapiens
tagatctgaccacat

SEQ ID NO: 1527548 - DNA, 15 bp, Homo sapiens
ttagatctgaccaca

SEQ ID NO: 1527549 - DNA, 15 bp, Homo sapiens
cttagatctgaccac

SEQ ID NO: 1527550 - DNA, 15 bp, Homo sapiens
tcttagatctgacca

SEQ ID NO: 1527551 - DNA, 15 bp, Homo sapiens
ttcttagatctgacc

SEQ ID NO: 1527552 - DNA, 15 bp, Homo sapiens
cttcttagatctgac

SEQ ID NO: 1527553 - DNA, 15 bp, Homo sapiens
acttcttagatctga

SEQ ID NO: 1527554 - DNA, 15 bp, Homo sapiens
tacttcttagatctg

SEQ ID NO: 1527555 - DNA, 15 bp, Homo sapiens
ttacttcttagatct

SEQ ID NO: 1527556 - DNA, 15 bp, Homo sapiens
tttacttcttagatc

SEQ ID NO: 1527557 - DNA, 15 bp, Homo sapiens
gtttacttcttagat

SEQ ID NO: 1527558 - DNA, 15 bp, Homo sapiens
tgtttacttcttaga

SEQ ID NO: 1527559 - DNA, 15 bp, Homo sapiens
ttgtttacttcttag

SEQ ID NO: 1527560 - DNA, 15 bp, Homo sapiens
tttgtttacttctta

SEQ ID NO: 1527561 - DNA, 15 bp, Homo sapiens
gtttgtttacttctt

SEQ ID NO: 1527562 - DNA, 15 bp, Homo sapiens
tgtttgtttacttct

SEQ ID NO: 1527563 - DNA, 15 bp, Homo sapiens
ttgtttgtttacttc

SEQ ID NO: 1527564 - DNA, 15 bp, Homo sapiens
tttgtttgtttactt

SEQ ID NO: 1527565 - DNA, 15 bp, Homo sapiens
ttttgtttgtttact

SEQ ID NO: 1527566 - DNA, 15 bp, Homo sapiens
tttttgtttgtttac

SEQ ID NO: 1527567 - DNA, 15 bp, Homo sapiens
ttttttgtttgttta

SEQ ID NO: 1527568 - DNA, 15 bp, Homo sapiens
tttttttttgtttgt

SEQ ID NO: 1527569 - DNA, 15 bp, Homo sapiens
gtttttttttgtttg

SEQ ID NO: 1527570 - DNA, 15 bp, Homo sapiens
agtttttttttgttt

SEQ ID NO: 1527571 - DNA, 15 bp, Homo sapiens
tagtttttttttgtt

SEQ ID NO: 1527572 - DNA, 15 bp, Homo sapiens
gtagtttttttttgt

SEQ ID NO: 1527573 - DNA, 15 bp, Homo sapiens
agtagtttttttttg

SEQ ID NO: 1527574 - DNA, 15 bp, Homo sapiens
aagtagttttttttt

SEQ ID NO: 1527575 - DNA, 15 bp, Homo sapiens
caagtagtttttttt

SEQ ID NO: 1527576 - DNA, 15 bp, Homo sapiens
ccaagtagttttttt

SEQ ID NO: 1527577 - DNA, 15 bp, Homo sapiens
gccaagtagtttttt

SEQ ID NO: 1527578 - DNA, 15 bp, Homo sapiens
tgccaagtagttttt

SEQ ID NO: 1527579 - DNA, 15 bp, Homo sapiens
ttgccaagtagtttt

SEQ ID NO: 1527580 - DNA, 15 bp, Homo sapiens
gttgccaagtagttt

SEQ ID NO: 1527581 - DNA, 15 bp, Homo sapiens
ggttgccaagtagtt

SEQ ID NO: 1527582 - DNA, 15 bp, Homo sapiens
tggttgccaagtagt

SEQ ID NO: 1527583 - DNA, 15 bp, Homo sapiens
ctggttgccaagtag

SEQ ID NO: 1527584 - DNA, 15 bp, Homo sapiens
tctggttgccaagta

SEQ ID NO: 1527585 - DNA, 15 bp, Homo sapiens
ctctggttgccaagt

SEQ ID NO: 1527586 - DNA, 15 bp, Homo sapiens
actctggttgccaag

SEQ ID NO: 1527587 - DNA, 15 bp, Homo sapiens
tactctggttgccaa

SEQ ID NO: 1527588 - DNA, 15 bp, Homo sapiens
ctactctggttgcca

SEQ ID NO: 1527589 - DNA, 15 bp, Homo sapiens
tctactctggttgcc

SEQ ID NO: 1527590 - DNA, 15 bp, Homo sapiens
atctactctggttgc

SEQ ID NO: 1527591 - DNA, 15 bp, Homo sapiens
tatctactctggttg

SEQ ID NO: 1527592 - DNA, 15 bp, Homo sapiens
atatctactctggtt

SEQ ID NO: 1527593 - DNA, 15 bp, Homo sapiens
aatatctactctggt

SEQ ID NO: 1527594 - DNA, 15 bp, Homo sapiens
taatatctactctgg

SEQ ID NO: 1527595 - DNA, 15 bp, Homo sapiens
ataatatctactctg

SEQ ID NO: 1527596 - DNA, 15 bp, Homo sapiens
cataatatctactct

SEQ ID NO: 1527597 - DNA, 15 bp, Homo sapiens
tcataatatctactc

SEQ ID NO: 1527598 - DNA, 15 bp, Homo sapiens
ttcataatatctact

SEQ ID NO: 1527599 - DNA, 15 bp, Homo sapiens
attcataatatctac

SEQ ID NO: 1527600 - DNA, 15 bp, Homo sapiens
gattcataatatcta

SEQ ID NO: 1527601 - DNA, 15 bp, Homo sapiens
cgattcataatatct

SEQ ID NO: 1527602 - DNA, 15 bp, Homo sapiens
ccgattcataatatc

SEQ ID NO: 1527603 - DNA, 15 bp, Homo sapiens
tccgattcataatat

SEQ ID NO: 1527604 - DNA, 15 bp, Homo sapiens
ctccgattcataata

SEQ ID NO: 1527605 - DNA, 15 bp, Homo sapiens
actccgattcataat

SEQ ID NO: 1527606 - DNA, 15 bp, Homo sapiens
tactccgattcataa

SEQ ID NO: 1527607 - DNA, 15 bp, Homo sapiens
gtactccgattcata

SEQ ID NO: 1527608 - DNA, 15 bp, Homo sapiens
agtactccgattcat

SEQ ID NO: 1527609 - DNA, 15 bp, Homo sapiens
cagtactccgattca

SEQ ID NO: 1527610 - DNA, 15 bp, Homo sapiens
gcagtactccgattc

SEQ ID NO: 1527611 - DNA, 15 bp, Homo sapiens
tgcagtactccgatt

SEQ ID NO: 1527612 - DNA, 15 bp, Homo sapiens
ctgcagtactccgat

SEQ ID NO: 1527613 - DNA, 15 bp, Homo sapiens
actgcagtactccga

SEQ ID NO: 1527614 - DNA, 15 bp, Homo sapiens
tactgcagtactccg

SEQ ID NO: 1527615 - DNA, 15 bp, Homo sapiens
ttactgcagtactcc

SEQ ID NO: 1527616 - DNA, 15 bp, Homo sapiens
attactgcagtactc

SEQ ID NO: 1527617 - DNA, 15 bp, Homo sapiens
aattactgcagtact

SEQ ID NO: 1527618 - DNA, 15 bp, Homo sapiens
aaattactgcagtac

SEQ ID NO: 1527619 - DNA, 15 bp, Homo sapiens
taaattactgcagta

SEQ ID NO: 1527620 - DNA, 15 bp, Homo sapiens
gtaaattactgcagt

SEQ ID NO: 1527621 - DNA, 15 bp, Homo sapiens
tgtaaattactgcag

SEQ ID NO: 1527622 - DNA, 15 bp, Homo sapiens
ctgtaaattactgca

SEQ ID NO: 1527623 - DNA, 15 bp, Homo sapiens
cctgtaaattactgc

SEQ ID NO: 1527624 - DNA, 15 bp, Homo sapiens
tcctgtaaattactg

SEQ ID NO: 1527625 - DNA, 15 bp, Homo sapiens
ctcctgtaaattact

SEQ ID NO: 1527626 - DNA, 15 bp, Homo sapiens
actcctgtaaattac

SEQ ID NO: 1527627 - DNA, 15 bp, Homo sapiens
aactcctgtaaatta

SEQ ID NO: 1527628 - DNA, 15 bp, Homo sapiens
aaactcctgtaaatt

SEQ ID NO: 1527629 - DNA, 15 bp, Homo sapiens
caaactcctgtaaat

SEQ ID NO: 1527630 - DNA, 15 bp, Homo sapiens
acaaactcctgtaaa

SEQ ID NO: 1527631 - DNA, 15 bp, Homo sapiens
gacaaactcctgtaa

SEQ ID NO: 1527632 - DNA, 15 bp, Homo sapiens
tgacaaactcctgta

SEQ ID NO: 1527633 - DNA, 15 bp, Homo sapiens
atgacaaactcctgt

SEQ ID NO: 1527634 - DNA, 15 bp, Homo sapiens
aatgacaaactcctg

SEQ ID NO: 1527635 - DNA, 15 bp, Homo sapiens
caatgacaaactcct

SEQ ID NO: 1527636 - DNA, 15 bp, Homo sapiens
acaatgacaaactcc

SEQ ID NO: 1527637 - DNA, 15 bp, Homo sapiens
gacaatgacaaactc

SEQ ID NO: 1527638 - DNA, 15 bp, Homo sapiens
ggacaatgacaaact

SEQ ID NO: 1527639 - DNA, 15 bp, Homo sapiens
aggacaatgacaaac

SEQ ID NO: 1527640 - DNA, 15 bp, Homo sapiens
gaggacaatgacaaa

SEQ ID NO: 1527641 - DNA, 15 bp, Homo sapiens
agaggacaatgacaa

SEQ ID NO: 1527642 - DNA, 15 bp, Homo sapiens
gagaggacaatgaca

SEQ ID NO: 1527643 - DNA, 15 bp, Homo sapiens
agagaggacaatgac

SEQ ID NO: 1527644 - DNA, 15 bp, Homo sapiens
gagagaggacaatga

SEQ ID NO: 1527645 - DNA, 15 bp, Homo sapiens
agagagaggacaatg

SEQ ID NO: 1527646 - DNA, 15 bp, Homo sapiens
cagagagaggacaat

SEQ ID NO: 1527647 - DNA, 15 bp, Homo sapiens
gcagagagaggacaa

SEQ ID NO: 1527648 - DNA, 15 bp, Homo sapiens
agcagagagaggaca

SEQ ID NO: 1527649 - DNA, 15 bp, Homo sapiens
gagcagagagaggac

SEQ ID NO: 1527650 - DNA, 15 bp, Homo sapiens
tgagcagagagagga

SEQ ID NO: 1527651 - DNA, 15 bp, Homo sapiens
gtgagcagagagagg

SEQ ID NO: 1527652 - DNA, 15 bp, Homo sapiens
agtgagcagagagag

SEQ ID NO: 1527653 - DNA, 15 bp, Homo sapiens
aagtgagcagagaga

SEQ ID NO: 1527654 - DNA, 15 bp, Homo sapiens
caagtgagcagagag

SEQ ID NO: 1527655 - DNA, 15 bp, Homo sapiens
gcaagtgagcagaga

SEQ ID NO: 1527656 - DNA, 15 bp, Homo sapiens
agcaagtgagcagag

SEQ ID NO: 1527657 - DNA, 15 bp, Homo sapiens
gagcaagtgagcaga

SEQ ID NO: 1527658 - DNA, 15 bp, Homo sapiens
tgagcaagtgagcag

SEQ ID NO: 1527659 - DNA, 15 bp, Homo sapiens
atgagcaagtgagca

SEQ ID NO: 1527660 - DNA, 15 bp, Homo sapiens
aatgagcaagtgagc

SEQ ID NO: 1527661 - DNA, 15 bp, Homo sapiens
gaatgagcaagtgag

SEQ ID NO: 1527662 - DNA, 15 bp, Homo sapiens
agaatgagcaagtga

SEQ ID NO: 1527663 - DNA, 15 bp, Homo sapiens
cagaatgagcaagtg

SEQ ID NO: 1527664 - DNA, 15 bp, Homo sapiens
acagaatgagcaagt

SEQ ID NO: 1527665 - DNA, 15 bp, Homo sapiens
cacagaatgagcaag

SEQ ID NO: 1527666 - DNA, 15 bp, Homo sapiens
ccacagaatgagcaa

SEQ ID NO: 1527667 - DNA, 15 bp, Homo sapiens
tccacagaatgagca

SEQ ID NO: 1527668 - DNA, 15 bp, Homo sapiens
atccacagaatgagc

SEQ ID NO: 1527669 - DNA, 15 bp, Homo sapiens
aatccacagaatgag

SEQ ID NO: 1527670 - DNA, 15 bp, Homo sapiens
aaatccacagaatga

SEQ ID NO: 1527671 - DNA, 15 bp, Homo sapiens
gaaatccacagaatg

SEQ ID NO: 1527672 - DNA, 15 bp, Homo sapiens
agaaatccacagaat

SEQ ID NO: 1527673 - DNA, 15 bp, Homo sapiens
aagaaatccacagaa

SEQ ID NO: 1527674 - DNA, 15 bp, Homo sapiens
aaagaaatccacaga

SEQ ID NO: 1527675 - DNA, 15 bp, Homo sapiens
caaagaaatccacag

SEQ ID NO: 1527676 - DNA, 15 bp, Homo sapiens
ccaaagaaatccaca

SEQ ID NO: 1527677 - DNA, 15 bp, Homo sapiens
cccaaagaaatccac

SEQ ID NO: 1527678 - DNA, 15 bp, Homo sapiens
ccccaaagaaatcca

SEQ ID NO: 1527679 - DNA, 15 bp, Homo sapiens
cccccaaagaaatcc

SEQ ID NO: 1527680 - DNA, 15 bp, Homo sapiens
ccccccaaagaaatc

SEQ ID NO: 1527681 - DNA, 15 bp, Homo sapiens
accccccaaagaaat

SEQ ID NO: 1527682 - DNA, 15 bp, Homo sapiens
taccccccaaagaaa

SEQ ID NO: 1527683 - DNA, 15 bp, Homo sapiens
ataccccccaaagaa

SEQ ID NO: 1527684 - DNA, 15 bp, Homo sapiens
tataccccccaaaga

SEQ ID NO: 1527685 - DNA, 15 bp, Homo sapiens
atataccccccaaag

SEQ ID NO: 1527686 - DNA, 15 bp, Homo sapiens
tatataccccccaaa

SEQ ID NO: 1527687 - DNA, 15 bp, Homo sapiens
ctatataccccccaa

SEQ ID NO: 1527688 - DNA, 15 bp, Homo sapiens
actatatacccccca

SEQ ID NO: 1527689 - DNA, 15 bp, Homo sapiens
aactatatacccccc

SEQ ID NO: 1527690 - DNA, 15 bp, Homo sapiens
caactatataccccc

SEQ ID NO: 1527691 - DNA, 15 bp, Homo sapiens
ccaactatatacccc

SEQ ID NO: 1527692 - DNA, 15 bp, Homo sapiens
accaactatataccc

SEQ ID NO: 1527693 - DNA, 15 bp, Homo sapiens
taccaactatatacc

SEQ ID NO: 1527694 - DNA, 15 bp, Homo sapiens
ttaccaactatatac

SEQ ID NO: 1527695 - DNA, 15 bp, Homo sapiens
attaccaactatata

SEQ ID NO: 1527696 - DNA, 15 bp, Homo sapiens
tattaccaactatat

SEQ ID NO: 1527697 - DNA, 15 bp, Homo sapiens
ctattaccaactata

SEQ ID NO: 1527698 - DNA, 15 bp, Homo sapiens
actattaccaactat

SEQ ID NO: 1527699 - DNA, 15 bp, Homo sapiens
tactattaccaacta

SEQ ID NO: 1527700 - DNA, 15 bp, Homo sapiens
ttactattaccaact

SEQ ID NO: 1527701 - DNA, 15 bp, Homo sapiens
attactattaccaac

SEQ ID NO: 1527702 - DNA, 15 bp, Homo sapiens
tattactattaccaa

SEQ ID NO: 1527703 - DNA, 15 bp, Homo sapiens
ctattactattacca

SEQ ID NO: 1527704 - DNA, 15 bp, Homo sapiens
actattactattacc

SEQ ID NO: 1527705 - DNA, 15 bp, Homo sapiens
tactattactattac

SEQ ID NO: 1527706 - DNA, 15 bp, Homo sapiens
ttactattactatta

SEQ ID NO: 1527707 - DNA, 15 bp, Homo sapiens
attactattactatt

SEQ ID NO: 1527708 - DNA, 15 bp, Homo sapiens
tattactattactat

SEQ ID NO: 1527709 - DNA, 15 bp, Homo sapiens
ctattactattacta

SEQ ID NO: 1527710 - DNA, 15 bp, Homo sapiens
actattactattact

SEQ ID NO: 1527711 - DNA, 15 bp, Homo sapiens
cattactattactat

SEQ ID NO: 1527712 - DNA, 15 bp, Homo sapiens
acattactattacta

SEQ ID NO: 1527713 - DNA, 15 bp, Homo sapiens
aacattactattact

SEQ ID NO: 1527714 - DNA, 15 bp, Homo sapiens
aaacattactattac

SEQ ID NO: 1527715 - DNA, 15 bp, Homo sapiens
gaaacattactatta

SEQ ID NO: 1527716 - DNA, 15 bp, Homo sapiens
cgaaacattactatt

SEQ ID NO: 1527717 - DNA, 15 bp, Homo sapiens
tcgaaacattactat

SEQ ID NO: 1527718 - DNA, 15 bp, Homo sapiens
ttcgaaacattacta

SEQ ID NO: 1527719 - DNA, 15 bp, Homo sapiens
gttcgaaacattact

SEQ ID NO: 1527720 - DNA, 15 bp, Homo sapiens
agttcgaaacattac

SEQ ID NO: 1527721 - DNA, 15 bp, Homo sapiens
aagttcgaaacatta

SEQ ID NO: 1527722 - DNA, 15 bp, Homo sapiens
caagttcgaaacatt

SEQ ID NO: 1527723 - DNA, 15 bp, Homo sapiens
tcaagttcgaaacat

SEQ ID NO: 1527724 - DNA, 15 bp, Homo sapiens
ctcaagttcgaaaca

SEQ ID NO: 1527725 - DNA, 15 bp, Homo sapiens
gctcaagttcgaaac

SEQ ID NO: 1527726 - DNA, 15 bp, Homo sapiens
tgctcaagttcgaaa

SEQ ID NO: 1527727 - DNA, 15 bp, Homo sapiens
ttgctcaagttcgaa

SEQ ID NO: 1527728 - DNA, 15 bp, Homo sapiens
tttgctcaagttcga

SEQ ID NO: 1527729 - DNA, 15 bp, Homo sapiens
gtttgctcaagttcg

SEQ ID NO: 1527730 - DNA, 15 bp, Homo sapiens
agtttgctcaagttc

SEQ ID NO: 1527731 - DNA, 15 bp, Homo sapiens
cagtttgctcaagtt

SEQ ID NO: 1527732 - DNA, 15 bp, Homo sapiens
acagtttgctcaagt

SEQ ID NO: 1527733 - DNA, 15 bp, Homo sapiens
cacagtttgctcaag

SEQ ID NO: 1527734 - DNA, 15 bp, Homo sapiens
tcacagtttgctcaa

SEQ ID NO: 1527735 - DNA, 15 bp, Homo sapiens
gtcacagtttgctca

SEQ ID NO: 1527736 - DNA, 15 bp, Homo sapiens
agtcacagtttgctc

SEQ ID NO: 1527737 - DNA, 15 bp, Homo sapiens
aagtcacagtttgct

SEQ ID NO: 1527738 - DNA, 15 bp, Homo sapiens
taagtcacagtttgc

SEQ ID NO: 1527739 - DNA, 15 bp, Homo sapiens
ataagtcacagtttg

SEQ ID NO: 1527740 - DNA, 15 bp, Homo sapiens
aataagtcacagttt

SEQ ID NO: 1527741 - DNA, 15 bp, Homo sapiens
gaataagtcacagtt

SEQ ID NO: 1527742 - DNA, 15 bp, Homo sapiens
agaataagtcacagt

SEQ ID NO: 1527743 - DNA, 15 bp, Homo sapiens
tagaataagtcacag

SEQ ID NO: 1527744 - DNA, 15 bp, Homo sapiens
atagaataagtcaca

SEQ ID NO: 1527745 - DNA, 15 bp, Homo sapiens
aatagaataagtcac

SEQ ID NO: 1527746 - DNA, 15 bp, Homo sapiens
aaatagaataagtca

SEQ ID NO: 1527747 - DNA, 15 bp, Homo sapiens
aaaatagaataagtc

SEQ ID NO: 1527748 - DNA, 15 bp, Homo sapiens
aaaaatagaataagt

SEQ ID NO: 1527749 - DNA, 15 bp, Homo sapiens
gaaaaatagaataag

SEQ ID NO: 1527750 - DNA, 15 bp, Homo sapiens
agaaaaatagaataa

SEQ ID NO: 1527751 - DNA, 15 bp, Homo sapiens
tagaaaaatagaata

SEQ ID NO: 1527752 - DNA, 15 bp, Homo sapiens
ttagaaaaatagaat

SEQ ID NO: 1527753 - DNA, 15 bp, Homo sapiens
attagaaaaatagaa

SEQ ID NO: 1527754 - DNA, 15 bp, Homo sapiens
gattagaaaaataga

SEQ ID NO: 1527755 - DNA, 15 bp, Homo sapiens
agattagaaaaatag

SEQ ID NO: 1527756 - DNA, 15 bp, Homo sapiens
aagattagaaaaata

SEQ ID NO: 1527757 - DNA, 15 bp, Homo sapiens
caagattagaaaaat

SEQ ID NO: 1527758 - DNA, 15 bp, Homo sapiens
tcaagattagaaaaa

SEQ ID NO: 1527759 - DNA, 15 bp, Homo sapiens
gtcaagattagaaaa

SEQ ID NO: 1527760 - DNA, 15 bp, Homo sapiens
ggtcaagattagaaa

SEQ ID NO: 1527761 - DNA, 15 bp, Homo sapiens
aggtcaagattagaa

SEQ ID NO: 1527762 - DNA, 15 bp, Homo sapiens
aaggtcaagattaga

SEQ ID NO: 1527763 - DNA, 15 bp, Homo sapiens
aaaggtcaagattag

SEQ ID NO: 1527764 - DNA, 15 bp, Homo sapiens
aaaaggtcaagatta

SEQ ID NO: 1527765 - DNA, 15 bp, Homo sapiens
caaaaggtcaagatt

SEQ ID NO: 1527766 - DNA, 15 bp, Homo sapiens
tcaaaaggtcaagat

SEQ ID NO: 1527767 - DNA, 15 bp, Homo sapiens
ctcaaaaggtcaaga

SEQ ID NO: 1527768 - DNA, 15 bp, Homo sapiens
actcaaaaggtcaag

SEQ ID NO: 1527769 - DNA, 15 bp, Homo sapiens
tactcaaaaggtcaa

SEQ ID NO: 1527770 - DNA, 15 bp, Homo sapiens
gtactcaaaaggtca

SEQ ID NO: 1527771 - DNA, 15 bp, Homo sapiens
agtactcaaaaggtc

SEQ ID NO: 1527772 - DNA, 15 bp, Homo sapiens
tagtactcaaaaggt

SEQ ID NO: 1527773 - DNA, 15 bp, Homo sapiens
gtagtactcaaaagg

SEQ ID NO: 1527774 - DNA, 15 bp, Homo sapiens
tgtagtactcaaaag

SEQ ID NO: 1527775 - DNA, 15 bp, Homo sapiens
gtgtagtactcaaaa

SEQ ID NO: 1527776 - DNA, 15 bp, Homo sapiens
agtgtagtactcaaa

SEQ ID NO: 1527777 - DNA, 15 bp, Homo sapiens
aagtgtagtactcaa

SEQ ID NO: 1527778 - DNA, 15 bp, Homo sapiens
taagtgtagtactca

SEQ ID NO: 1527779 - DNA, 15 bp, Homo sapiens
gtaagtgtagtactc

SEQ ID NO: 1527780 - DNA, 15 bp, Homo sapiens
tgtaagtgtagtact

SEQ ID NO: 1527781 - DNA, 15 bp, Homo sapiens
gtgtaagtgtagtac

SEQ ID NO: 1527782 - DNA, 15 bp, Homo sapiens
tgtgtaagtgtagta

SEQ ID NO: 1527783 - DNA, 15 bp, Homo sapiens
ttgtgtaagtgtagt

SEQ ID NO: 1527784 - DNA, 15 bp, Homo sapiens
gttgtgtaagtgtag

SEQ ID NO: 1527785 - DNA, 15 bp, Homo sapiens
agttgtgtaagtgta

SEQ ID NO: 1527786 - DNA, 15 bp, Homo sapiens
gagttgtgtaagtgt

SEQ ID NO: 1527787 - DNA, 15 bp, Homo sapiens
agagttgtgtaagtg

SEQ ID NO: 1527788 - DNA, 15 bp, Homo sapiens
aagagttgtgtaagt

SEQ ID NO: 1527789 - DNA, 15 bp, Homo sapiens
aaagagttgtgtaag

SEQ ID NO: 1527790 - DNA, 15 bp, Homo sapiens
taaagagttgtgtaa

SEQ ID NO: 1527791 - DNA, 15 bp, Homo sapiens
ataaagagttgtgta

SEQ ID NO: 1527792 - DNA, 15 bp, Homo sapiens
aataaagagttgtgt

SEQ ID NO: 1527793 - DNA, 15 bp, Homo sapiens
caataaagagttgtg

SEQ ID NO: 1527794 - DNA, 15 bp, Homo sapiens
tcaataaagagttgt

SEQ ID NO: 1527795 - DNA, 15 bp, Homo sapiens
atcaataaagagttg

SEQ ID NO: 1527796 - DNA, 15 bp, Homo sapiens
catcaataaagagtt

SEQ ID NO: 1527797 - DNA, 15 bp, Homo sapiens
gcatcaataaagagt

SEQ ID NO: 1527798 - DNA, 15 bp, Homo sapiens
agcatcaataaagag

SEQ ID NO: 1527799 - DNA, 15 bp, Homo sapiens
aagcatcaataaaga

SEQ ID NO: 1527800 - DNA, 15 bp, Homo sapiens
gaagcatcaataaag

SEQ ID NO: 1527801 - DNA, 15 bp, Homo sapiens
tgaagcatcaataaa

SEQ ID NO: 1527802 - DNA, 15 bp, Homo sapiens
ttgaagcatcaataa

SEQ ID NO: 1527803 - DNA, 15 bp, Homo sapiens
tttgaagcatcaata

SEQ ID NO: 1527804 - DNA, 15 bp, Homo sapiens
gtttgaagcatcaat

SEQ ID NO: 1527805 - DNA, 15 bp, Homo sapiens
tgtttgaagcatcaa

SEQ ID NO: 1527806 - DNA, 15 bp, Homo sapiens
gtgtttgaagcatca

SEQ ID NO: 1527807 - DNA, 15 bp, Homo sapiens
ggtgtttgaagcatc

SEQ ID NO: 1527808 - DNA, 15 bp, Homo sapiens
aggtgtttgaagcat

SEQ ID NO: 1527809 - DNA, 15 bp, Homo sapiens
gaggtgtttgaagca

SEQ ID NO: 1527810 - DNA, 15 bp, Homo sapiens
tgaggtgtttgaagc

SEQ ID NO: 1527811 - DNA, 15 bp, Homo sapiens
ctgaggtgtttgaag

SEQ ID NO: 1527812 - DNA, 15 bp, Homo sapiens
actgaggtgtttgaa

SEQ ID NO: 1527813 - DNA, 15 bp, Homo sapiens
gactgaggtgtttga

SEQ ID NO: 1527814 - DNA, 15 bp, Homo sapiens
agactgaggtgtttg

SEQ ID NO: 1527815 - DNA, 15 bp, Homo sapiens
gagactgaggtgttt

SEQ ID NO: 1527816 - DNA, 15 bp, Homo sapiens
tgagactgaggtgtt

SEQ ID NO: 1527817 - DNA, 15 bp, Homo sapiens
ttgagactgaggtgt

SEQ ID NO: 1527818 - DNA, 15 bp, Homo sapiens
gttgagactgaggtg

SEQ ID NO: 1527819 - DNA, 15 bp, Homo sapiens
agttgagactgaggt

SEQ ID NO: 1527820 - DNA, 15 bp, Homo sapiens
aagttgagactgagg

SEQ ID NO: 1527821 - DNA, 15 bp, Homo sapiens
caagttgagactgag

SEQ ID NO: 1527822 - DNA, 15 bp, Homo sapiens
acaagttgagactga

SEQ ID NO: 1527823 - DNA, 15 bp, Homo sapiens
aacaagttgagactg

SEQ ID NO: 1527824 - DNA, 15 bp, Homo sapiens
aaacaagttgagact

SEQ ID NO: 1527825 - DNA, 15 bp, Homo sapiens
taaacaagttgagac

SEQ ID NO: 1527826 - DNA, 15 bp, Homo sapiens
ttaaacaagttgaga

SEQ ID NO: 1527827 - DNA, 15 bp, Homo sapiens
tttaaacaagttgag

SEQ ID NO: 1527828 - DNA, 15 bp, Homo sapiens
ttttaaacaagttga

SEQ ID NO: 1527829 - DNA, 15 bp, Homo sapiens
attttaaacaagttg

SEQ ID NO: 1527830 - DNA, 15 bp, Homo sapiens
aattttaaacaagtt

SEQ ID NO: 1527831 - DNA, 15 bp, Homo sapiens
gaattttaaacaagt

SEQ ID NO: 1527832 - DNA, 15 bp, Homo sapiens
tgaattttaaacaag

SEQ ID NO: 1527833 - DNA, 15 bp, Homo sapiens
ctgaattttaaacaa

SEQ ID NO: 1527834 - DNA, 15 bp, Homo sapiens
tctgaattttaaaca

SEQ ID NO: 1527835 - DNA, 15 bp, Homo sapiens
ttctgaattttaaac

SEQ ID NO: 1527836 - DNA, 15 bp, Homo sapiens
cttctgaattttaaa

SEQ ID NO: 1527837 - DNA, 15 bp, Homo sapiens
acttctgaattttaa

SEQ ID NO: 1527838 - DNA, 15 bp, Homo sapiens
aacttctgaatttta

SEQ ID NO: 1527839 - DNA, 15 bp, Homo sapiens
taacttctgaatttt

SEQ ID NO: 1527840 - DNA, 15 bp, Homo sapiens
ctaacttctgaattt

SEQ ID NO: 1527841 - DNA, 15 bp, Homo sapiens
actaacttctgaatt

SEQ ID NO: 1527842 - DNA, 15 bp, Homo sapiens
cactaacttctgaat

SEQ ID NO: 1527843 - DNA, 15 bp, Homo sapiens
acactaacttctgaa

SEQ ID NO: 1527844 - DNA, 15 bp, Homo sapiens
aacactaacttctga

SEQ ID NO: 1527845 - DNA, 15 bp, Homo sapiens
aaacactaacttctg

SEQ ID NO: 1527846 - DNA, 15 bp, Homo sapiens
aaaacactaacttct

SEQ ID NO: 1527847 - DNA, 15 bp, Homo sapiens
gaaaacactaacttc

SEQ ID NO: 1527848 - DNA, 15 bp, Homo sapiens
agaaaacactaactt

SEQ ID NO: 1527849 - DNA, 15 bp, Homo sapiens
gagaaaacactaact

SEQ ID NO: 1527850 - DNA, 15 bp, Homo sapiens
ggagaaaacactaac

SEQ ID NO: 1527851 - DNA, 15 bp, Homo sapiens
aggagaaaacactaa

SEQ ID NO: 1527852 - DNA, 15 bp, Homo sapiens
aaggagaaaacacta

SEQ ID NO: 1527853 - DNA, 15 bp, Homo sapiens
gaaggagaaaacact

SEQ ID NO: 1527854 - DNA, 15 bp, Homo sapiens
ggaaggagaaaacac

SEQ ID NO: 1527855 - DNA, 15 bp, Homo sapiens
aggaaggagaaaaca

SEQ ID NO: 1527856 - DNA, 15 bp, Homo sapiens
taggaaggagaaaac

SEQ ID NO: 1527857 - DNA, 15 bp, Homo sapiens
ataggaaggagaaaa

SEQ ID NO: 1527858 - DNA, 15 bp, Homo sapiens
aataggaaggagaaa

SEQ ID NO: 1527859 - DNA, 15 bp, Homo sapiens
aaataggaaggagaa

SEQ ID NO: 1527860 - DNA, 15 bp, Homo sapiens
aaaataggaaggaga

SEQ ID NO: 1527861 - DNA, 15 bp, Homo sapiens
aaaaataggaaggag

SEQ ID NO: 1527862 - DNA, 15 bp, Homo sapiens
caaaaataggaagga

SEQ ID NO: 1527863 - DNA, 15 bp, Homo sapiens
acaaaaataggaagg

SEQ ID NO: 1527864 - DNA, 15 bp, Homo sapiens
tacaaaaataggaag

SEQ ID NO: 1527865 - DNA, 15 bp, Homo sapiens
atacaaaaataggaa

SEQ ID NO: 1527866 - DNA, 15 bp, Homo sapiens
gatacaaaaatagga

SEQ ID NO: 1527867 - DNA, 15 bp, Homo sapiens
agatacaaaaatagg

SEQ ID NO: 1527868 - DNA, 15 bp, Homo sapiens
tagatacaaaaatag

SEQ ID NO: 1527869 - DNA, 15 bp, Homo sapiens
ctagatacaaaaata

SEQ ID NO: 1527870 - DNA, 15 bp, Homo sapiens
tctagatacaaaaat

SEQ ID NO: 1527871 - DNA, 15 bp, Homo sapiens
atctagatacaaaaa

SEQ ID NO: 1527872 - DNA, 15 bp, Homo sapiens
tatctagatacaaaa

SEQ ID NO: 1527873 - DNA, 15 bp, Homo sapiens
atatctagatacaaa

SEQ ID NO: 1527874 - DNA, 15 bp, Homo sapiens
tatatctagatacaa

SEQ ID NO: 1527875 - DNA, 15 bp, Homo sapiens
atatatctagataca

SEQ ID NO: 1527876 - DNA, 15 bp, Homo sapiens
aatatatctagatac

SEQ ID NO: 1527877 - DNA, 15 bp, Homo sapiens
gaatatatctagata

SEQ ID NO: 1527878 - DNA, 15 bp, Homo sapiens
agaatatatctagat

SEQ ID NO: 1527879 - DNA, 15 bp, Homo sapiens
aagaatatatctaga

SEQ ID NO: 1527880 - DNA, 15 bp, Homo sapiens
gaagaatatatctag

SEQ ID NO: 1527881 - DNA, 15 bp, Homo sapiens
agaagaatatatcta

SEQ ID NO: 1527882 - DNA, 15 bp, Homo sapiens
gagaagaatatatct

SEQ ID NO: 1527883 - DNA, 15 bp, Homo sapiens
tgagaagaatatatc

SEQ ID NO: 1527884 - DNA, 15 bp, Homo sapiens
atgagaagaatatat

SEQ ID NO: 1527885 - DNA, 15 bp, Homo sapiens
tatgagaagaatata

SEQ ID NO: 1527886 - DNA, 15 bp, Homo sapiens
ttatgagaagaatat

SEQ ID NO: 1527887 - DNA, 15 bp, Homo sapiens
attatgagaagaata

SEQ ID NO: 1527888 - DNA, 15 bp, Homo sapiens
gattatgagaagaat

SEQ ID NO: 1527889 - DNA, 15 bp, Homo sapiens
agattatgagaagaa

SEQ ID NO: 1527890 - DNA, 15 bp, Homo sapiens
gagattatgagaaga

SEQ ID NO: 1527891 - DNA, 15 bp, Homo sapiens
agagattatgagaag

SEQ ID NO: 1527892 - DNA, 15 bp, Homo sapiens
aagagattatgagaa

SEQ ID NO: 1527893 - DNA, 15 bp, Homo sapiens
caagagattatgaga

SEQ ID NO: 1527894 - DNA, 15 bp, Homo sapiens
ccaagagattatgag

SEQ ID NO: 1527895 - DNA, 15 bp, Homo sapiens
accaagagattatga

SEQ ID NO: 1527896 - DNA, 15 bp, Homo sapiens
aaccaagagattatg

SEQ ID NO: 1527897 - DNA, 15 bp, Homo sapiens
taaccaagagattat

SEQ ID NO: 1527898 - DNA, 15 bp, Homo sapiens
ttaaccaagagatta

SEQ ID NO: 1527899 - DNA, 15 bp, Homo sapiens
attaaccaagagatt

SEQ ID NO: 1527900 - DNA, 15 bp, Homo sapiens
aattaaccaagagat

SEQ ID NO: 1527901 - DNA, 15 bp, Homo sapiens
caattaaccaagaga

SEQ ID NO: 1527902 - DNA, 15 bp, Homo sapiens
acaattaaccaagag

SEQ ID NO: 1527903 - DNA, 15 bp, Homo sapiens
tacaattaaccaaga

SEQ ID NO: 1527904 - DNA, 15 bp, Homo sapiens
atacaattaaccaag

SEQ ID NO: 1527905 - DNA, 15 bp, Homo sapiens
gatacaattaaccaa

SEQ ID NO: 1527906 - DNA, 15 bp, Homo sapiens
tgatacaattaacca

SEQ ID NO: 1527907 - DNA, 15 bp, Homo sapiens
atgatacaattaacc

SEQ ID NO: 1527908 - DNA, 15 bp, Homo sapiens
gatgatacaattaac

SEQ ID NO: 1527909 - DNA, 15 bp, Homo sapiens
tgatgatacaattaa

SEQ ID NO: 1527910 - DNA, 15 bp, Homo sapiens
gtgatgatacaatta

SEQ ID NO: 1527911 - DNA, 15 bp, Homo sapiens
ggtgatgatacaatt

SEQ ID NO: 1527912 - DNA, 15 bp, Homo sapiens
aggtgatgatacaat

SEQ ID NO: 1527913 - DNA, 15 bp, Homo sapiens
taggtgatgatacaa

SEQ ID NO: 1527914 - DNA, 15 bp, Homo sapiens
ctaggtgatgataca

SEQ ID NO: 1527915 - DNA, 15 bp, Homo sapiens
gctaggtgatgatac

SEQ ID NO: 1527916 - DNA, 15 bp, Homo sapiens
ggctaggtgatgata

SEQ ID NO: 1527917 - DNA, 15 bp, Homo sapiens
tggctaggtgatgat

SEQ ID NO: 1527918 - DNA, 15 bp, Homo sapiens
ttggctaggtgatga

SEQ ID NO: 1527919 - DNA, 15 bp, Homo sapiens
tttggctaggtgatg

SEQ ID NO: 1527920 - DNA, 15 bp, Homo sapiens
atttggctaggtgat

SEQ ID NO: 1527921 - DNA, 15 bp, Homo sapiens
catttggctaggtga

SEQ ID NO: 1527922 - DNA, 15 bp, Homo sapiens
acatttggctaggtg

SEQ ID NO: 1527923 - DNA, 15 bp, Homo sapiens
aacatttggctaggt

SEQ ID NO: 1527924 - DNA, 15 bp, Homo sapiens
aaacatttggctagg

SEQ ID NO: 1527925 - DNA, 15 bp, Homo sapiens
gaaacatttggctag

SEQ ID NO: 1527926 - DNA, 15 bp, Homo sapiens
agaaacatttggcta

SEQ ID NO: 1527927 - DNA, 15 bp, Homo sapiens
gagaaacatttggct

SEQ ID NO: 1527928 - DNA, 15 bp, Homo sapiens
ggagaaacatttggc

SEQ ID NO: 1527929 - DNA, 15 bp, Homo sapiens
tggagaaacatttgg

SEQ ID NO: 1527930 - DNA, 15 bp, Homo sapiens
ttggagaaacatttg

SEQ ID NO: 1527931 - DNA, 15 bp, Homo sapiens
gttggagaaacattt

SEQ ID NO: 1527932 - DNA, 15 bp, Homo sapiens
tgttggagaaacatt

SEQ ID NO: 1527933 - DNA, 15 bp, Homo sapiens
gtgttggagaaacat

SEQ ID NO: 1527934 - DNA, 15 bp, Homo sapiens
agtgttggagaaaca

SEQ ID NO: 1527935 - DNA, 15 bp, Homo sapiens
cagtgttggagaaac

SEQ ID NO: 1527936 - DNA, 15 bp, Homo sapiens
ccagtgttggagaaa

SEQ ID NO: 1527937 - DNA, 15 bp, Homo sapiens
tccagtgttggagaa

SEQ ID NO: 1527938 - DNA, 15 bp, Homo sapiens
atccagtgttggaga

SEQ ID NO: 1527939 - DNA, 15 bp, Homo sapiens
aatccagtgttggag

SEQ ID NO: 1527940 - DNA, 15 bp, Homo sapiens
aaatccagtgttgga

SEQ ID NO: 1527941 - DNA, 15 bp, Homo sapiens
gaaatccagtgttgg

SEQ ID NO: 1527942 - DNA, 15 bp, Homo sapiens
agaaatccagtgttg

SEQ ID NO: 1527943 - DNA, 15 bp, Homo sapiens
gagaaatccagtgtt

SEQ ID NO: 1527944 - DNA, 15 bp, Homo sapiens
tgagaaatccagtgt

SEQ ID NO: 1527945 - DNA, 15 bp, Homo sapiens
atgagaaatccagtg

SEQ ID NO: 1527946 - DNA, 15 bp, Homo sapiens
aatgagaaatccagt

SEQ ID NO: 1527947 - DNA, 15 bp, Homo sapiens
taatgagaaatccag

SEQ ID NO: 1527948 - DNA, 15 bp, Homo sapiens
ataatgagaaatcca

SEQ ID NO: 1527949 - DNA, 15 bp, Homo sapiens
gataatgagaaatcc

SEQ ID NO: 1527950 - DNA, 15 bp, Homo sapiens
agataatgagaaatc

SEQ ID NO: 1527951 - DNA, 15 bp, Homo sapiens
aagataatgagaaat

SEQ ID NO: 1527952 - DNA, 15 bp, Homo sapiens
gaagataatgagaaa

SEQ ID NO: 1527953 - DNA, 15 bp, Homo sapiens
agaagataatgagaa

SEQ ID NO: 1527954 - DNA, 15 bp, Homo sapiens
gagaagataatgaga

SEQ ID NO: 1527955 - DNA, 15 bp, Homo sapiens
agagaagataatgag

SEQ ID NO: 1527956 - DNA, 15 bp, Homo sapiens
aagagaagataatga

SEQ ID NO: 1527957 - DNA, 15 bp, Homo sapiens
aaagagaagataatg

SEQ ID NO: 1527958 - DNA, 15 bp, Homo sapiens
gaaagagaagataat

SEQ ID NO: 1527959 - DNA, 15 bp, Homo sapiens
agaaagagaagataa

SEQ ID NO: 1527960 - DNA, 15 bp, Homo sapiens
aagaaagagaagata

SEQ ID NO: 1527961 - DNA, 15 bp, Homo sapiens
taagaaagagaagat

SEQ ID NO: 1527962 - DNA, 15 bp, Homo sapiens
ataagaaagagaaga

SEQ ID NO: 1527963 - DNA, 15 bp, Homo sapiens
aataagaaagagaag

SEQ ID NO: 1527964 - DNA, 15 bp, Homo sapiens
aaataagaaagagaa

SEQ ID NO: 1527965 - DNA, 15 bp, Homo sapiens
taaataagaaagaga

SEQ ID NO: 1527966 - DNA, 15 bp, Homo sapiens
ataaataagaaagag

SEQ ID NO: 1527967 - DNA, 15 bp, Homo sapiens
gataaataagaaaga

SEQ ID NO: 1527968 - DNA, 15 bp, Homo sapiens
agataaataagaaag

SEQ ID NO: 1527969 - DNA, 15 bp, Homo sapiens
aagataaataagaaa

SEQ ID NO: 1527970 - DNA, 15 bp, Homo sapiens
taagataaataagaa

SEQ ID NO: 1527971 - DNA, 15 bp, Homo sapiens
ttaagataaataaga

SEQ ID NO: 1527972 - DNA, 15 bp, Homo sapiens
cttaagataaataag

SEQ ID NO: 1527973 - DNA, 15 bp, Homo sapiens
gcttaagataaataa

SEQ ID NO: 1527974 - DNA, 15 bp, Homo sapiens
agcttaagataaata

SEQ ID NO: 1527975 - DNA, 15 bp, Homo sapiens
gagcttaagataaat

SEQ ID NO: 1527976 - DNA, 15 bp, Homo sapiens
agagcttaagataaa

SEQ ID NO: 1527977 - DNA, 15 bp, Homo sapiens
gagagcttaagataa

SEQ ID NO: 1527978 - DNA, 15 bp, Homo sapiens
ggagagcttaagata

SEQ ID NO: 1527979 - DNA, 15 bp, Homo sapiens
tggagagcttaagat

SEQ ID NO: 1527980 - DNA, 15 bp, Homo sapiens
ctggagagcttaaga

SEQ ID NO: 1527981 - DNA, 15 bp, Homo sapiens
cctggagagcttaag

SEQ ID NO: 1527982 - DNA, 15 bp, Homo sapiens
gcctggagagcttaa

SEQ ID NO: 1527983 - DNA, 15 bp, Homo sapiens
ggcctggagagctta

SEQ ID NO: 1527984 - DNA, 15 bp, Homo sapiens
aggcctggagagctt

SEQ ID NO: 1527985 - DNA, 15 bp, Homo sapiens
gaggcctggagagct

SEQ ID NO: 1527986 - DNA, 15 bp, Homo sapiens
agaggcctggagagc

SEQ ID NO: 1527987 - DNA, 15 bp, Homo sapiens
tgaagaggcctggag

SEQ ID NO: 1527988 - DNA, 15 bp, Homo sapiens
atgaagaggcctgga

SEQ ID NO: 1527989 - DNA, 15 bp, Homo sapiens
catgaagaggcctgg

SEQ ID NO: 1527990 - DNA, 15 bp, Homo sapiens
tcatgaagaggcctg

SEQ ID NO: 1527991 - DNA, 15 bp, Homo sapiens
atcatgaagaggcct

SEQ ID NO: 1527992 - DNA, 15 bp, Homo sapiens
catcatgaagaggcc

SEQ ID NO: 1527993 - DNA, 15 bp, Homo sapiens
tcatcatgaagaggc

SEQ ID NO: 1527994 - DNA, 15 bp, Homo sapiens
atcatcatgaagagg

SEQ ID NO: 1527995 - DNA, 15 bp, Homo sapiens
aatcatcatgaagag

SEQ ID NO: 1527996 - DNA, 15 bp, Homo sapiens
taatcatcatgaaga

SEQ ID NO: 1527997 - DNA, 15 bp, Homo sapiens
ttaatcatcatgaag

SEQ ID NO: 1527998 - DNA, 15 bp, Homo sapiens
cttaatcatcatgaa

SEQ ID NO: 1527999 - DNA, 15 bp, Homo sapiens
acttaatcatcatga

SEQ ID NO: 1528000 - DNA, 15 bp, Homo sapiens
tacttaatcatcatg

SEQ ID NO: 1528001 - DNA, 15 bp, Homo sapiens
ttacttaatcatcat

SEQ ID NO: 1528002 - DNA, 15 bp, Homo sapiens
tttacttaatcatca

SEQ ID NO: 1528003 - DNA, 15 bp, Homo sapiens
ttttacttaatcatc

SEQ ID NO: 1528004 - DNA, 15 bp, Homo sapiens
attttacttaatcat

SEQ ID NO: 1528005 - DNA, 15 bp, Homo sapiens
aattttacttaatca

SEQ ID NO: 1528006 - DNA, 15 bp, Homo sapiens
aaattttacttaatc

SEQ ID NO: 1528007 - DNA, 15 bp, Homo sapiens
taaattttacttaat

SEQ ID NO: 1528008 - DNA, 15 bp, Homo sapiens
ttaaattttacttaa

SEQ ID NO: 1528009 - DNA, 15 bp, Homo sapiens
tttaaattttactta

SEQ ID NO: 1528010 - DNA, 15 bp, Homo sapiens
atttaaattttactt

SEQ ID NO: 1528011 - DNA, 15 bp, Homo sapiens
gaatttaaattttac

SEQ ID NO: 1528012 - DNA, 15 bp, Homo sapiens
agaatttaaatttta

SEQ ID NO: 1528013 - DNA, 15 bp, Homo sapiens
tagaatttaaatttt

SEQ ID NO: 1528014 - DNA, 15 bp, Homo sapiens
atagaatttaaattt

SEQ ID NO: 1528015 - DNA, 15 bp, Homo sapiens
aatagaatttaaatt

SEQ ID NO: 1528016 - DNA, 15 bp, Homo sapiens
aaatagaatttaaat

SEQ ID NO: 1528017 - DNA, 15 bp, Homo sapiens
taaatagaatttaaa

SEQ ID NO: 1528018 - DNA, 15 bp, Homo sapiens
ctaaatagaatttaa

SEQ ID NO: 1528019 - DNA, 15 bp, Homo sapiens
actaaatagaattta

SEQ ID NO: 1528020 - DNA, 15 bp, Homo sapiens
tactaaatagaattt

SEQ ID NO: 1528021 - DNA, 15 bp, Homo sapiens
gtactaaatagaatt

SEQ ID NO: 1528022 - DNA, 15 bp, Homo sapiens
agtactaaatagaat

SEQ ID NO: 1528023 - DNA, 15 bp, Homo sapiens
gagtactaaatagaa

SEQ ID NO: 1528024 - DNA, 15 bp, Homo sapiens
tgagtactaaataga

SEQ ID NO: 1528025 - DNA, 15 bp, Homo sapiens
ttgagtactaaatag

SEQ ID NO: 1528026 - DNA, 15 bp, Homo sapiens
tttgagtactaaata

SEQ ID NO: 1528027 - DNA, 15 bp, Homo sapiens
atttgagtactaaat

SEQ ID NO: 1528028 - DNA, 15 bp, Homo sapiens
catttgagtactaaa

SEQ ID NO: 1528029 - DNA, 15 bp, Homo sapiens
acatttgagtactaa

SEQ ID NO: 1528030 - DNA, 15 bp, Homo sapiens
aacatttgagtacta

SEQ ID NO: 1528031 - DNA, 15 bp, Homo sapiens
gaacatttgagtact

SEQ ID NO: 1528032 - DNA, 15 bp, Homo sapiens
ggaacatttgagtac

SEQ ID NO: 1528033 - DNA, 15 bp, Homo sapiens
gggaacatttgagta

SEQ ID NO: 1528034 - DNA, 15 bp, Homo sapiens
tgggaacatttgagt

SEQ ID NO: 1528035 - DNA, 15 bp, Homo sapiens
ttgggaacatttgag

SEQ ID NO: 1528036 - DNA, 15 bp, Homo sapiens
tttgggaacatttga

SEQ ID NO: 1528037 - DNA, 15 bp, Homo sapiens
gtttgggaacatttg

SEQ ID NO: 1528038 - DNA, 15 bp, Homo sapiens
tgtttgggaacattt

SEQ ID NO: 1528039 - DNA, 15 bp, Homo sapiens
ttgtttgggaacatt

SEQ ID NO: 1528040 - DNA, 15 bp, Homo sapiens
tttgtttgggaacat

SEQ ID NO: 1528041 - DNA, 15 bp, Homo sapiens
gtttgtttgggaaca

SEQ ID NO: 1528042 - DNA, 15 bp, Homo sapiens
tgtttgtttgggaac

SEQ ID NO: 1528043 - DNA, 15 bp, Homo sapiens
ttgtttgtttgggaa

SEQ ID NO: 1528044 - DNA, 15 bp, Homo sapiens
attgtttgtttggga

SEQ ID NO: 1528045 - DNA, 15 bp, Homo sapiens
tattgtttgtttggg

SEQ ID NO: 1528046 - DNA, 15 bp, Homo sapiens
ctattgtttgtttgg

SEQ ID NO: 1528047 - DNA, 15 bp, Homo sapiens
actattgtttgtttg

SEQ ID NO: 1528048 - DNA, 15 bp, Homo sapiens
gactattgtttgttt

SEQ ID NO: 1528049 - DNA, 15 bp, Homo sapiens
tgactattgtttgtt

SEQ ID NO: 1528050 - DNA, 15 bp, Homo sapiens
ttgactattgtttgt

SEQ ID NO: 1528051 - DNA, 15 bp, Homo sapiens
attgactattgtttg

SEQ ID NO: 1528052 - DNA, 15 bp, Homo sapiens
aattgactattgttt

SEQ ID NO: 1528053 - DNA, 15 bp, Homo sapiens
aaattgactattgtt

SEQ ID NO: 1528054 - DNA, 15 bp, Homo sapiens
caaattgactattgt

SEQ ID NO: 1528055 - DNA, 15 bp, Homo sapiens
gcaaattgactattg

SEQ ID NO: 1528056 - DNA, 15 bp, Homo sapiens
ggcaaattgactatt

SEQ ID NO: 1528057 - DNA, 15 bp, Homo sapiens
tggcaaattgactat

SEQ ID NO: 1528058 - DNA, 15 bp, Homo sapiens
atggcaaattgacta

SEQ ID NO: 1528059 - DNA, 15 bp, Homo sapiens
aatggcaaattgact

SEQ ID NO: 1528060 - DNA, 15 bp, Homo sapiens
taatggcaaattgac

SEQ ID NO: 1528061 - DNA, 15 bp, Homo sapiens
ataatggcaaattga

SEQ ID NO: 1528062 - DNA, 15 bp, Homo sapiens
aataatggcaaattg

SEQ ID NO: 1528063 - DNA, 15 bp, Homo sapiens
gaataatggcaaatt

SEQ ID NO: 1528064 - DNA, 15 bp, Homo sapiens
tgaataatggcaaat

SEQ ID NO: 1528065 - DNA, 15 bp, Homo sapiens
ctgaataatggcaaa

SEQ ID NO: 1528066 - DNA, 15 bp, Homo sapiens
cctgaataatggcaa

SEQ ID NO: 1528067 - DNA, 15 bp, Homo sapiens
acctgaataatggca

SEQ ID NO: 1528068 - DNA, 15 bp, Homo sapiens
gacctgaataatggc

SEQ ID NO: 1528069 - DNA, 15 bp, Homo sapiens
agacctgaataatgg

SEQ ID NO: 1528070 - DNA, 15 bp, Homo sapiens
aagacctgaataatg

SEQ ID NO: 1528071 - DNA, 15 bp, Homo sapiens
gaagacctgaataat

SEQ ID NO: 1528072 - DNA, 15 bp, Homo sapiens
tgaagacctgaataa

SEQ ID NO: 1528073 - DNA, 15 bp, Homo sapiens
ttgaagacctgaata

SEQ ID NO: 1528074 - DNA, 15 bp, Homo sapiens
tttgaagacctgaat

SEQ ID NO: 1528075 - DNA, 15 bp, Homo sapiens
atttgaagacctgaa

SEQ ID NO: 1528076 - DNA, 15 bp, Homo sapiens
tatttgaagacctga

SEQ ID NO: 1528077 - DNA, 15 bp, Homo sapiens
gtatttgaagacctg

SEQ ID NO: 1528078 - DNA, 15 bp, Homo sapiens
ggtatttgaagacct

SEQ ID NO: 1528079 - DNA, 15 bp, Homo sapiens
gggtatttgaagacc

SEQ ID NO: 1528080 - DNA, 15 bp, Homo sapiens
tgggtatttgaagac

SEQ ID NO: 1528081 - DNA, 15 bp, Homo sapiens
gtgggtatttgaaga

SEQ ID NO: 1528082 - DNA, 15 bp, Homo sapiens
ggtgggtatttgaag

SEQ ID NO: 1528083 - DNA, 15 bp, Homo sapiens
tggtgggtatttgaa

SEQ ID NO: 1528084 - DNA, 15 bp, Homo sapiens
ttggtgggtatttga

SEQ ID NO: 1528085 - DNA, 15 bp, Homo sapiens
gttggtgggtatttg

SEQ ID NO: 1528086 - DNA, 15 bp, Homo sapiens
agttggtgggtattt

SEQ ID NO: 1528087 - DNA, 15 bp, Homo sapiens
aagttggtgggtatt

SEQ ID NO: 1528088 - DNA, 15 bp, Homo sapiens
aaagttggtgggtat

SEQ ID NO: 1528089 - DNA, 15 bp, Homo sapiens
caaagttggtgggta

SEQ ID NO: 1528090 - DNA, 15 bp, Homo sapiens
acaaagttggtgggt

SEQ ID NO: 1528091 - DNA, 15 bp, Homo sapiens
tacaaagttggtggg

SEQ ID NO: 1528092 - DNA, 15 bp, Homo sapiens
atacaaagttggtgg

SEQ ID NO: 1528093 - DNA, 15 bp, Homo sapiens
gatacaaagttggtg

SEQ ID NO: 1528094 - DNA, 15 bp, Homo sapiens
agatacaaagttggt

SEQ ID NO: 1528095 - DNA, 15 bp, Homo sapiens
aagatacaaagttgg

SEQ ID NO: 1528096 - DNA, 15 bp, Homo sapiens
aaagatacaaagttg

SEQ ID NO: 1528097 - DNA, 15 bp, Homo sapiens
caaagatacaaagtt

SEQ ID NO: 1528098 - DNA, 15 bp, Homo sapiens
acaaagatacaaagt

SEQ ID NO: 1528099 - DNA, 15 bp, Homo sapiens
cacaaagatacaaag

SEQ ID NO: 1528100 - DNA, 15 bp, Homo sapiens
gcacaaagatacaaa

SEQ ID NO: 1528101 - DNA, 15 bp, Homo sapiens
tgcacaaagatacaa

SEQ ID NO: 1528102 - DNA, 15 bp, Homo sapiens
ctgcacaaagataca

SEQ ID NO: 1528103 - DNA, 15 bp, Homo sapiens
gctgcacaaagatac

SEQ ID NO: 1528104 - DNA, 15 bp, Homo sapiens
ggctgcacaaagata

SEQ ID NO: 1528105 - DNA, 15 bp, Homo sapiens
aggctgcacaaagat

SEQ ID NO: 1528106 - DNA, 15 bp, Homo sapiens
gaggctgcacaaaga

SEQ ID NO: 1528107 - DNA, 15 bp, Homo sapiens
ggaggctgcacaaag

SEQ ID NO: 1528108 - DNA, 15 bp, Homo sapiens
gggaggctgcacaaa

SEQ ID NO: 1528109 - DNA, 15 bp, Homo sapiens
ggggaggctgcacaa

SEQ ID NO: 1528110 - DNA, 15 bp, Homo sapiens
tggggaggctgcaca

SEQ ID NO: 1528111 - DNA, 15 bp, Homo sapiens
ttggggaggctgcac

SEQ ID NO: 1528112 - DNA, 15 bp, Homo sapiens
gttggggaggctgca

SEQ ID NO: 1528113 - DNA, 15 bp, Homo sapiens
agttggggaggctgc

SEQ ID NO: 1528114 - DNA, 15 bp, Homo sapiens
aagttggggaggctg

SEQ ID NO: 1528115 - DNA, 15 bp, Homo sapiens
caagttggggaggct

SEQ ID NO: 1528116 - DNA, 15 bp, Homo sapiens
gcaagttggggaggc

SEQ ID NO: 1528117 - DNA, 15 bp, Homo sapiens
ggcaagttggggagg

SEQ ID NO: 1528118 - DNA, 15 bp, Homo sapiens
gggcaagttggggag

SEQ ID NO: 1528119 - DNA, 15 bp, Homo sapiens
tgggcaagttgggga

SEQ ID NO: 1528120 - DNA, 15 bp, Homo sapiens
ttgggcaagttgggg

SEQ ID NO: 1528121 - DNA, 15 bp, Homo sapiens
tttgggcaagttggg

SEQ ID NO: 1528122 - DNA, 15 bp, Homo sapiens
ctttgggcaagttgg

SEQ ID NO: 1528123 - DNA, 15 bp, Homo sapiens
actttgggcaagttg

SEQ ID NO: 1528124 - DNA, 15 bp, Homo sapiens
cactttgggcaagtt

SEQ ID NO: 1528125 - DNA, 15 bp, Homo sapiens
acactttgggcaagt

SEQ ID NO: 1528126 - DNA, 15 bp, Homo sapiens
tacactttgggcaag

SEQ ID NO: 1528127 - DNA, 15 bp, Homo sapiens
ttacactttgggcaa

SEQ ID NO: 1528128 - DNA, 15 bp, Homo sapiens
attacactttgggca

SEQ ID NO: 1528129 - DNA, 15 bp, Homo sapiens
tattacactttgggc

SEQ ID NO: 1528130 - DNA, 15 bp, Homo sapiens
ttattacactttggg

SEQ ID NO: 1528131 - DNA, 15 bp, Homo sapiens
attattacactttgg

SEQ ID NO: 1528132 - DNA, 15 bp, Homo sapiens
tattattacactttg

SEQ ID NO: 1528133 - DNA, 15 bp, Homo sapiens
ctattattacacttt

SEQ ID NO: 1528134 - DNA, 15 bp, Homo sapiens
gctattattacactt

SEQ ID NO: 1528135 - DNA, 15 bp, Homo sapiens
ggctattattacact

SEQ ID NO: 1528136 - DNA, 15 bp, Homo sapiens
gggctattattacac

SEQ ID NO: 1528137 - DNA, 15 bp, Homo sapiens
ggggctattattaca

SEQ ID NO: 1528138 - DNA, 15 bp, Homo sapiens
gggggctattattac

SEQ ID NO: 1528139 - DNA, 15 bp, Homo sapiens
agggggctattatta

SEQ ID NO: 1528140 - DNA, 15 bp, Homo sapiens
gagggggctattatt

SEQ ID NO: 1528141 - DNA, 15 bp, Homo sapiens
agagggggctattat

SEQ ID NO: 1528142 - DNA, 15 bp, Homo sapiens
aagagggggctatta

SEQ ID NO: 1528143 - DNA, 15 bp, Homo sapiens
taagagggggctatt

SEQ ID NO: 1528144 - DNA, 15 bp, Homo sapiens
ataagagggggctat

SEQ ID NO: 1528145 - DNA, 15 bp, Homo sapiens
gataagagggggcta

SEQ ID NO: 1528146 - DNA, 15 bp, Homo sapiens
ggataagagggggct

SEQ ID NO: 1528147 - DNA, 15 bp, Homo sapiens
aggataagagggggc

SEQ ID NO: 1528148 - DNA, 15 bp, Homo sapiens
taggataagaggggg

SEQ ID NO: 1528149 - DNA, 15 bp, Homo sapiens
ttaggataagagggg

SEQ ID NO: 1528150 - DNA, 15 bp, Homo sapiens
cttaggataagaggg

SEQ ID NO: 1528151 - DNA, 15 bp, Homo sapiens
acttaggataagagg

SEQ ID NO: 1528152 - DNA, 15 bp, Homo sapiens
aacttaggataagag

SEQ ID NO: 1528153 - DNA, 15 bp, Homo sapiens
aaacttaggataaga

SEQ ID NO: 1528154 - DNA, 15 bp, Homo sapiens
gaaacttaggataag

SEQ ID NO: 1528155 - DNA, 15 bp, Homo sapiens
tgaaacttaggataa

SEQ ID NO: 1528156 - DNA, 15 bp, Homo sapiens
gtgaaacttaggata

SEQ ID NO: 1528157 - DNA, 15 bp, Homo sapiens
agtgaaacttaggat

SEQ ID NO: 1528158 - DNA, 15 bp, Homo sapiens
aagtgaaacttagga

SEQ ID NO: 1528159 - DNA, 15 bp, Homo sapiens
aaagtgaaacttagg

SEQ ID NO: 1528160 - DNA, 15 bp, Homo sapiens
gaaagtgaaacttag

SEQ ID NO: 1528161 - DNA, 15 bp, Homo sapiens
ggaaagtgaaactta

SEQ ID NO: 1528162 - DNA, 15 bp, Homo sapiens
tggaaagtgaaactt

SEQ ID NO: 1528163 - DNA, 15 bp, Homo sapiens
atggaaagtgaaact

SEQ ID NO: 1528164 - DNA, 15 bp, Homo sapiens
tatggaaagtgaaac

SEQ ID NO: 1528165 - DNA, 15 bp, Homo sapiens
ctatggaaagtgaaa

SEQ ID NO: 1528166 - DNA, 15 bp, Homo sapiens
actatggaaagtgaa

SEQ ID NO: 1528167 - DNA, 15 bp, Homo sapiens
aactatggaaagtga

SEQ ID NO: 1528168 - DNA, 15 bp, Homo sapiens
aaactatggaaagtg

SEQ ID NO: 1528169 - DNA, 15 bp, Homo sapiens
gaaactatggaaagt

SEQ ID NO: 1528170 - DNA, 15 bp, Homo sapiens
tgaaactatggaaag

SEQ ID NO: 1528171 - DNA, 15 bp, Homo sapiens
ctgaaactatggaaa

SEQ ID NO: 1528172 - DNA, 15 bp, Homo sapiens
actgaaactatggaa

SEQ ID NO: 1528173 - DNA, 15 bp, Homo sapiens
aactgaaactatgga

SEQ ID NO: 1528174 - DNA, 15 bp, Homo sapiens
taactgaaactatgg

SEQ ID NO: 1528175 - DNA, 15 bp, Homo sapiens
gtaactgaaactatg

SEQ ID NO: 1528176 - DNA, 15 bp, Homo sapiens
ggtaactgaaactat

SEQ ID NO: 1528177 - DNA, 15 bp, Homo sapiens
gggtaactgaaacta

SEQ ID NO: 1528178 - DNA, 15 bp, Homo sapiens
tgggtaactgaaact

SEQ ID NO: 1528179 - DNA, 15 bp, Homo sapiens
atgggtaactgaaac

SEQ ID NO: 1528180 - DNA, 15 bp, Homo sapiens
catgggtaactgaaa

SEQ ID NO: 1528181 - DNA, 15 bp, Homo sapiens
ccatgggtaactgaa

SEQ ID NO: 1528182 - DNA, 15 bp, Homo sapiens
accatgggtaactga

SEQ ID NO: 1528183 - DNA, 15 bp, Homo sapiens
gaccatgggtaactg

SEQ ID NO: 1528184 - DNA, 15 bp, Homo sapiens
ggaccatgggtaact

SEQ ID NO: 1528185 - DNA, 15 bp, Homo sapiens
tggaccatgggtaac

SEQ ID NO: 1528186 - DNA, 15 bp, Homo sapiens
gtggaccatgggtaa

SEQ ID NO: 1528187 - DNA, 15 bp, Homo sapiens
ggtggaccatgggta

SEQ ID NO: 1528188 - DNA, 15 bp, Homo sapiens
tggtggaccatgggt

SEQ ID NO: 1528189 - DNA, 15 bp, Homo sapiens
atggtggaccatggg

SEQ ID NO: 1528190 - DNA, 15 bp, Homo sapiens
catggtggaccatgg

SEQ ID NO: 1528191 - DNA, 15 bp, Homo sapiens
ccatggtggaccatg

SEQ ID NO: 1528192 - DNA, 15 bp, Homo sapiens
accatggtggaccat

SEQ ID NO: 1528193 - DNA, 15 bp, Homo sapiens
gaccatggtggacca

SEQ ID NO: 1528194 - DNA, 15 bp, Homo sapiens
agaccatggtggacc

SEQ ID NO: 1528195 - DNA, 15 bp, Homo sapiens
cagaccatggtggac

SEQ ID NO: 1528196 - DNA, 15 bp, Homo sapiens
tcagaccatggtgga

SEQ ID NO: 1528197 - DNA, 15 bp, Homo sapiens
ttcagaccatggtgg

SEQ ID NO: 1528198 - DNA, 15 bp, Homo sapiens
tttcagaccatggtg

SEQ ID NO: 1528199 - DNA, 15 bp, Homo sapiens
ttttcagaccatggt

SEQ ID NO: 1528200 - DNA, 15 bp, Homo sapiens
attttcagaccatgg

SEQ ID NO: 1528201 - DNA, 15 bp, Homo sapiens
tattttcagaccatg

SEQ ID NO: 1528202 - DNA, 15 bp, Homo sapiens
gtattttcagaccat

SEQ ID NO: 1528203 - DNA, 15 bp, Homo sapiens
agtattttcagacca

SEQ ID NO: 1528204 - DNA, 15 bp, Homo sapiens
gagtattttcagacc

SEQ ID NO: 1528205 - DNA, 15 bp, Homo sapiens
tgagtattttcagac

SEQ ID NO: 1528206 - DNA, 15 bp, Homo sapiens
ttgagtattttcaga

SEQ ID NO: 1528207 - DNA, 15 bp, Homo sapiens
attgagtattttcag

SEQ ID NO: 1528208 - DNA, 15 bp, Homo sapiens
cattgagtattttca

SEQ ID NO: 1528209 - DNA, 15 bp, Homo sapiens
ccattgagtattttc

SEQ ID NO: 1528210 - DNA, 15 bp, Homo sapiens
tccattgagtatttt

SEQ ID NO: 1528211 - DNA, 15 bp, Homo sapiens
ttccattgagtattt

SEQ ID NO: 1528212 - DNA, 15 bp, Homo sapiens
tttccattgagtatt

SEQ ID NO: 1528213 - DNA, 15 bp, Homo sapiens
ttttccattgagtat

SEQ ID NO: 1528214 - DNA, 15 bp, Homo sapiens
attttccattgagta

SEQ ID NO: 1528215 - DNA, 15 bp, Homo sapiens
aattttccattgagt

SEQ ID NO: 1528216 - DNA, 15 bp, Homo sapiens
gaattttccattgag

SEQ ID NO: 1528217 - DNA, 15 bp, Homo sapiens
ggaattttccattga

SEQ ID NO: 1528218 - DNA, 15 bp, Homo sapiens
tggaattttccattg

SEQ ID NO: 1528219 - DNA, 15 bp, Homo sapiens
atgtttatttctgga

SEQ ID NO: 1528220 - DNA, 15 bp, Homo sapiens
tatgtttatttctgg

SEQ ID NO: 1528221 - DNA, 15 bp, Homo sapiens
ttatgtttatttctg

SEQ ID NO: 1528222 - DNA, 15 bp, Homo sapiens
cttatgtttatttct

SEQ ID NO: 1528223 - DNA, 15 bp, Homo sapiens
acttatgtttatttc

SEQ ID NO: 1528224 - DNA, 15 bp, Homo sapiens
aacttatgtttattt

SEQ ID NO: 1528225 - DNA, 15 bp, Homo sapiens
caacttatgtttatt

SEQ ID NO: 1528226 - DNA, 15 bp, Homo sapiens
ccaacttatgtttat

SEQ ID NO: 1528227 - DNA, 15 bp, Homo sapiens
tccaacttatgttta

SEQ ID NO: 1528228 - DNA, 15 bp, Homo sapiens
atccaacttatgttt

SEQ ID NO: 1528229 - DNA, 15 bp, Homo sapiens
catccaacttatgtt

SEQ ID NO: 1528230 - DNA, 15 bp, Homo sapiens
acatccaacttatgt

SEQ ID NO: 1528231 - DNA, 15 bp, Homo sapiens
tacatccaacttatg

SEQ ID NO: 1528232 - DNA, 15 bp, Homo sapiens
atacatccaacttat

SEQ ID NO: 1528233 - DNA, 15 bp, Homo sapiens
gatacatccaactta

SEQ ID NO: 1528234 - DNA, 15 bp, Homo sapiens
tgatacatccaactt

SEQ ID NO: 1528235 - DNA, 15 bp, Homo sapiens
atgatacatccaact

SEQ ID NO: 1528236 - DNA, 15 bp, Homo sapiens
catgatacatccaac

SEQ ID NO: 1528237 - DNA, 15 bp, Homo sapiens
tcatgatacatccaa

SEQ ID NO: 1528238 - DNA, 15 bp, Homo sapiens
ctcatgatacatcca

SEQ ID NO: 1528239 - DNA, 15 bp, Homo sapiens
cctcatgatacatcc

SEQ ID NO: 1528240 - DNA, 15 bp, Homo sapiens
acctcatgatacatc

SEQ ID NO: 1528241 - DNA, 15 bp, Homo sapiens
aacctcatgatacat

SEQ ID NO: 1528242 - DNA, 15 bp, Homo sapiens
taacctcatgataca

SEQ ID NO: 1528243 - DNA, 15 bp, Homo sapiens
ttaacctcatgatac

SEQ ID NO: 1528244 - DNA, 15 bp, Homo sapiens
attaacctcatgata

SEQ ID NO: 1528245 - DNA, 15 bp, Homo sapiens
tattaacctcatgat

SEQ ID NO: 1528246 - DNA, 15 bp, Homo sapiens
ctattaacctcatga

SEQ ID NO: 1528247 - DNA, 15 bp, Homo sapiens
actattaacctcatg

SEQ ID NO: 1528248 - DNA, 15 bp, Homo sapiens
tactattaacctcat

SEQ ID NO: 1528249 - DNA, 15 bp, Homo sapiens
ctactattaacctca

SEQ ID NO: 1528250 - DNA, 15 bp, Homo sapiens
gctactattaacctc

SEQ ID NO: 1528251 - DNA, 15 bp, Homo sapiens
ggctactattaacct

SEQ ID NO: 1528252 - DNA, 15 bp, Homo sapiens
aggctactattaacc

SEQ ID NO: 1528253 - DNA, 15 bp, Homo sapiens
taggctactattaac

SEQ ID NO: 1528254 - DNA, 15 bp, Homo sapiens
ctaggctactattaa

SEQ ID NO: 1528255 - DNA, 15 bp, Homo sapiens
gctaggctactatta

SEQ ID NO: 1528256 - DNA, 15 bp, Homo sapiens
tgctaggctactatt

SEQ ID NO: 1528257 - DNA, 15 bp, Homo sapiens
gtgctaggctactat

SEQ ID NO: 1528258 - DNA, 15 bp, Homo sapiens
agtgctaggctacta

SEQ ID NO: 1528259 - DNA, 15 bp, Homo sapiens
cagtgctaggctact

SEQ ID NO: 1528260 - DNA, 15 bp, Homo sapiens
acagtgctaggctac

SEQ ID NO: 1528261 - DNA, 15 bp, Homo sapiens
cacagtgctaggcta

SEQ ID NO: 1528262 - DNA, 15 bp, Homo sapiens
acacagtgctaggct

SEQ ID NO: 1528263 - DNA, 15 bp, Homo sapiens
gacacagtgctaggc

SEQ ID NO: 1528264 - DNA, 15 bp, Homo sapiens
tgacacagtgctagg

SEQ ID NO: 1528265 - DNA, 15 bp, Homo sapiens
gtgacacagtgctag

SEQ ID NO: 1528266 - DNA, 15 bp, Homo sapiens
tgtgacacagtgcta

SEQ ID NO: 1528267 - DNA, 15 bp, Homo sapiens
ctgtgacacagtgct

SEQ ID NO: 1528268 - DNA, 15 bp, Homo sapiens
actgtgacacagtgc

SEQ ID NO: 1528269 - DNA, 15 bp, Homo sapiens
cactgtgacacagtg

SEQ ID NO: 1528270 - DNA, 15 bp, Homo sapiens
gcactgtgacacagt

SEQ ID NO: 1528271 - DNA, 15 bp, Homo sapiens
agcactgtgacacag

SEQ ID NO: 1528272 - DNA, 15 bp, Homo sapiens
cagcactgtgacaca

SEQ ID NO: 1528273 - DNA, 15 bp, Homo sapiens
gcagcactgtgacac

SEQ ID NO: 1528274 - DNA, 15 bp, Homo sapiens
tgcagcactgtgaca

SEQ ID NO: 1528275 - DNA, 15 bp, Homo sapiens
atgcagcactgtgac

SEQ ID NO: 1528276 - DNA, 15 bp, Homo sapiens
aatgcagcactgtga

SEQ ID NO: 1528277 - DNA, 15 bp, Homo sapiens
taatgcagcactgtg

SEQ ID NO: 1528278 - DNA, 15 bp, Homo sapiens
ctaatgcagcactgt

SEQ ID NO: 1528279 - DNA, 15 bp, Homo sapiens
actaatgcagcactg

SEQ ID NO: 1528280 - DNA, 15 bp, Homo sapiens
gactaatgcagcact

SEQ ID NO: 1528281 - DNA, 15 bp, Homo sapiens
tgactaatgcagcac

SEQ ID NO: 1528282 - DNA, 15 bp, Homo sapiens
ttgactaatgcagca

SEQ ID NO: 1528283 - DNA, 15 bp, Homo sapiens
gttgactaatgcagc

SEQ ID NO: 1528284 - DNA, 15 bp, Homo sapiens
ggttgactaatgcag

SEQ ID NO: 1528285 - DNA, 15 bp, Homo sapiens
gggttgactaatgca

SEQ ID NO: 1528286 - DNA, 15 bp, Homo sapiens
tgggttgactaatgc

SEQ ID NO: 1528287 - DNA, 15 bp, Homo sapiens
gtgggttgactaatg

SEQ ID NO: 1528288 - DNA, 15 bp, Homo sapiens
agtgggttgactaat

SEQ ID NO: 1528289 - DNA, 15 bp, Homo sapiens
aagtgggttgactaa

SEQ ID NO: 1528290 - DNA, 15 bp, Homo sapiens
gaagtgggttgacta

SEQ ID NO: 1528291 - DNA, 15 bp, Homo sapiens
tgaagtgggttgact

SEQ ID NO: 1528292 - DNA, 15 bp, Homo sapiens
atgaagtgggttgac

SEQ ID NO: 1528293 - DNA, 15 bp, Homo sapiens
gatgaagtgggttga

SEQ ID NO: 1528294 - DNA, 15 bp, Homo sapiens
agatgaagtgggttg

SEQ ID NO: 1528295 - DNA, 15 bp, Homo sapiens
aagatgaagtgggtt

SEQ ID NO: 1528296 - DNA, 15 bp, Homo sapiens
taagatgaagtgggt

SEQ ID NO: 1528297 - DNA, 15 bp, Homo sapiens
ataagatgaagtggg

SEQ ID NO: 1528298 - DNA, 15 bp, Homo sapiens
gataagatgaagtgg

SEQ ID NO: 1528299 - DNA, 15 bp, Homo sapiens
tgataagatgaagtg

SEQ ID NO: 1528300 - DNA, 15 bp, Homo sapiens
gtgataagatgaagt

SEQ ID NO: 1528301 - DNA, 15 bp, Homo sapiens
tgtgataagatgaag

SEQ ID NO: 1528302 - DNA, 15 bp, Homo sapiens
atgtgataagatgaa

SEQ ID NO: 1528303 - DNA, 15 bp, Homo sapiens
tatgtgataagatga

SEQ ID NO: 1528304 - DNA, 15 bp, Homo sapiens
ctatgtgataagatg

SEQ ID NO: 1528305 - DNA, 15 bp, Homo sapiens
cctatgtgataagat

SEQ ID NO: 1528306 - DNA, 15 bp, Homo sapiens
gcctatgtgataaga

SEQ ID NO: 1528307 - DNA, 15 bp, Homo sapiens
tgcctatgtgataag

SEQ ID NO: 1528308 - DNA, 15 bp, Homo sapiens
atgcctatgtgataa

SEQ ID NO: 1528309 - DNA, 15 bp, Homo sapiens
aatgcctatgtgata

SEQ ID NO: 1528310 - DNA, 15 bp, Homo sapiens
caatgcctatgtgat

SEQ ID NO: 1528311 - DNA, 15 bp, Homo sapiens
acaatgcctatgtga

SEQ ID NO: 1528312 - DNA, 15 bp, Homo sapiens
cacaatgcctatgtg

SEQ ID NO: 1528313 - DNA, 15 bp, Homo sapiens
acacaatgcctatgt

SEQ ID NO: 1528314 - DNA, 15 bp, Homo sapiens
gacacaatgcctatg

SEQ ID NO: 1528315 - DNA, 15 bp, Homo sapiens
tgacacaatgcctat

SEQ ID NO: 1528316 - DNA, 15 bp, Homo sapiens
atgacacaatgccta

SEQ ID NO: 1528317 - DNA, 15 bp, Homo sapiens
tatgacacaatgcct

SEQ ID NO: 1528318 - DNA, 15 bp, Homo sapiens
atatgacacaatgcc

SEQ ID NO: 1528319 - DNA, 15 bp, Homo sapiens
gatatgacacaatgc

SEQ ID NO: 1528320 - DNA, 15 bp, Homo sapiens
tgatatgacacaatg

SEQ ID NO: 1528321 - DNA, 15 bp, Homo sapiens
gtgatatgacacaat

SEQ ID NO: 1528322 - DNA, 15 bp, Homo sapiens
tgtgatatgacacaa

SEQ ID NO: 1528323 - DNA, 15 bp, Homo sapiens
atgtgatatgacaca

SEQ ID NO: 1528324 - DNA, 15 bp, Homo sapiens
gatgtgatatgacac

SEQ ID NO: 1528325 - DNA, 15 bp, Homo sapiens
tgatgtgatatgaca

SEQ ID NO: 1528326 - DNA, 15 bp, Homo sapiens
atgatgtgatatgac

SEQ ID NO: 1528327 - DNA, 15 bp, Homo sapiens
gatgatgtgatatga

SEQ ID NO: 1528328 - DNA, 15 bp, Homo sapiens
tgatgatgtgatatg

SEQ ID NO: 1528329 - DNA, 15 bp, Homo sapiens
gtgatgatgtgatat

SEQ ID NO: 1528330 - DNA, 15 bp, Homo sapiens
tgtgatgatgtgata

SEQ ID NO: 1528331 - DNA, 15 bp, Homo sapiens
ttgtgatgatgtgat

SEQ ID NO: 1528332 - DNA, 15 bp, Homo sapiens
cttgtgatgatgtga

SEQ ID NO: 1528333 - DNA, 15 bp, Homo sapiens
tcttgtgatgatgtg

SEQ ID NO: 1528334 - DNA, 15 bp, Homo sapiens
ttcttgtgatgatgt

SEQ ID NO: 1528335 - DNA, 15 bp, Homo sapiens
cttcttgtgatgatg

SEQ ID NO: 1528336 - DNA, 15 bp, Homo sapiens
ccttcttgtgatgat

SEQ ID NO: 1528337 - DNA, 15 bp, Homo sapiens
cccttcttgtgatga

SEQ ID NO: 1528338 - DNA, 15 bp, Homo sapiens
gcccttcttgtgatg

SEQ ID NO: 1528339 - DNA, 15 bp, Homo sapiens
cgcccttcttgtgat

SEQ ID NO: 1528340 - DNA, 15 bp, Homo sapiens
tcgcccttcttgtga

SEQ ID NO: 1528341 - DNA, 15 bp, Homo sapiens
ctcgcccttcttgtg

SEQ ID NO: 1528342 - DNA, 15 bp, Homo sapiens
actcgcccttcttgt

SEQ ID NO: 1528343 - DNA, 15 bp, Homo sapiens
tactcgcccttcttg

SEQ ID NO: 1528344 - DNA, 15 bp, Homo sapiens
atactcgcccttctt

SEQ ID NO: 1528345 - DNA, 15 bp, Homo sapiens
tatactcgcccttct

SEQ ID NO: 1528346 - DNA, 15 bp, Homo sapiens
ctatactcgcccttc

SEQ ID NO: 1528347 - DNA, 15 bp, Homo sapiens
actatactcgccctt

SEQ ID NO: 1528348 - DNA, 15 bp, Homo sapiens
tactatactcgccct

SEQ ID NO: 1528349 - DNA, 15 bp, Homo sapiens
gtactatactcgccc

SEQ ID NO: 1528350 - DNA, 15 bp, Homo sapiens
tgtactatactcgcc

SEQ ID NO: 1528351 - DNA, 15 bp, Homo sapiens
ttgtactatactcgc

SEQ ID NO: 1528352 - DNA, 15 bp, Homo sapiens
attgtactatactcg

SEQ ID NO: 1528353 - DNA, 15 bp, Homo sapiens
tattgtactatactc

SEQ ID NO: 1528354 - DNA, 15 bp, Homo sapiens
ttattgtactatact

SEQ ID NO: 1528355 - DNA, 15 bp, Homo sapiens
cttattgtactatac

SEQ ID NO: 1528356 - DNA, 15 bp, Homo sapiens
tcttattgtactata

SEQ ID NO: 1528357 - DNA, 15 bp, Homo sapiens
atcttattgtactat

SEQ ID NO: 1528358 - DNA, 15 bp, Homo sapiens
tatcttattgtacta

SEQ ID NO: 1528359 - DNA, 15 bp, Homo sapiens
tctcaaaatatctta

SEQ ID NO: 1528360 - DNA, 15 bp, Homo sapiens
ctctcaaaatatctt

SEQ ID NO: 1528361 - DNA, 15 bp, Homo sapiens
tctctcaaaatatct

SEQ ID NO: 1528362 - DNA, 15 bp, Homo sapiens
ctctctcaaaatatc

SEQ ID NO: 1528363 - DNA, 15 bp, Homo sapiens
tctctctcaaaatat

SEQ ID NO: 1528364 - DNA, 15 bp, Homo sapiens
atctctctcaaaata

SEQ ID NO: 1528365 - DNA, 15 bp, Homo sapiens
catctctctcaaaat

SEQ ID NO: 1528366 - DNA, 15 bp, Homo sapiens
gcatctctctcaaaa

SEQ ID NO: 1528367 - DNA, 15 bp, Homo sapiens
ggcatctctctcaaa

SEQ ID NO: 1528368 - DNA, 15 bp, Homo sapiens
tggcatctctctcaa

SEQ ID NO: 1528369 - DNA, 15 bp, Homo sapiens
atggcatctctctca

SEQ ID NO: 1528370 - DNA, 15 bp, Homo sapiens
catggcatctctctc

SEQ ID NO: 1528371 - DNA, 15 bp, Homo sapiens
acatggcatctctct

SEQ ID NO: 1528372 - DNA, 15 bp, Homo sapiens
cacatggcatctctc

SEQ ID NO: 1528373 - DNA, 15 bp, Homo sapiens
gcacatggcatctct

SEQ ID NO: 1528374 - DNA, 15 bp, Homo sapiens
tgcacatggcatctc

SEQ ID NO: 1528375 - DNA, 15 bp, Homo sapiens
atgcacatggcatct

SEQ ID NO: 1528376 - DNA, 15 bp, Homo sapiens
catgcacatggcatc

SEQ ID NO: 1528377 - DNA, 15 bp, Homo sapiens
acatgcacatggcat

SEQ ID NO: 1528378 - DNA, 15 bp, Homo sapiens
cacatgcacatggca

SEQ ID NO: 1528379 - DNA, 15 bp, Homo sapiens
gcacatgcacatggc

SEQ ID NO: 1528380 - DNA, 15 bp, Homo sapiens
agcacatgcacatgg

SEQ ID NO: 1528381 - DNA, 15 bp, Homo sapiens
aagcacatgcacatg

SEQ ID NO: 1528382 - DNA, 15 bp, Homo sapiens
aaagcacatgcacat

SEQ ID NO: 1528383 - DNA, 15 bp, Homo sapiens
aaaagcacatgcaca

SEQ ID NO: 1528384 - DNA, 15 bp, Homo sapiens
taaaagcacatgcac

SEQ ID NO: 1528385 - DNA, 15 bp, Homo sapiens
ataaaagcacatgca

SEQ ID NO: 1528386 - DNA, 15 bp, Homo sapiens
aataaaagcacatgc

SEQ ID NO: 1528387 - DNA, 15 bp, Homo sapiens
caataaaagcacatg

SEQ ID NO: 1528388 - DNA, 15 bp, Homo sapiens
acaataaaagcacat

SEQ ID NO: 1528389 - DNA, 15 bp, Homo sapiens
tacaataaaagcaca

SEQ ID NO: 1528390 - DNA, 15 bp, Homo sapiens
ctacaataaaagcac

SEQ ID NO: 1528391 - DNA, 15 bp, Homo sapiens
actacaataaaagca

SEQ ID NO: 1528392 - DNA, 15 bp, Homo sapiens
tactacaataaaagc

SEQ ID NO: 1528393 - DNA, 15 bp, Homo sapiens
atactacaataaaag

SEQ ID NO: 1528394 - DNA, 15 bp, Homo sapiens
tatactacaataaaa

SEQ ID NO: 1528395 - DNA, 15 bp, Homo sapiens
atatactacaataaa

SEQ ID NO: 1528396 - DNA, 15 bp, Homo sapiens
aatatactacaataa

SEQ ID NO: 1528397 - DNA, 15 bp, Homo sapiens
caatatactacaata

SEQ ID NO: 1528398 - DNA, 15 bp, Homo sapiens
gcaatatactacaat

SEQ ID NO: 1528399 - DNA, 15 bp, Homo sapiens
agcaatatactacaa

SEQ ID NO: 1528400 - DNA, 15 bp, Homo sapiens
tagcaatatactaca

SEQ ID NO: 1528401 - DNA, 15 bp, Homo sapiens
atagcaatatactac

SEQ ID NO: 1528402 - DNA, 15 bp, Homo sapiens
tatagcaatatacta

SEQ ID NO: 1528403 - DNA, 15 bp, Homo sapiens
ttatagcaatatact

SEQ ID NO: 1528404 - DNA, 15 bp, Homo sapiens
gttatagcaatatac

SEQ ID NO: 1528405 - DNA, 15 bp, Homo sapiens
agttatagcaatata

SEQ ID NO: 1528406 - DNA, 15 bp, Homo sapiens
aagttatagcaatat

SEQ ID NO: 1528407 - DNA, 15 bp, Homo sapiens
gaagttatagcaata

SEQ ID NO: 1528408 - DNA, 15 bp, Homo sapiens
agaagttatagcaat

SEQ ID NO: 1528409 - DNA, 15 bp, Homo sapiens
tagaagttatagcaa

SEQ ID NO: 1528410 - DNA, 15 bp, Homo sapiens
atagaagttatagca

SEQ ID NO: 1528411 - DNA, 15 bp, Homo sapiens
aatagaagttatagc

SEQ ID NO: 1528412 - DNA, 15 bp, Homo sapiens
aaatagaagttatag

SEQ ID NO: 1528413 - DNA, 15 bp, Homo sapiens
aaaatagaagttata

SEQ ID NO: 1528414 - DNA, 15 bp, Homo sapiens
taaaatagaagttat

SEQ ID NO: 1528415 - DNA, 15 bp, Homo sapiens
ataaaatagaagtta

SEQ ID NO: 1528416 - DNA, 15 bp, Homo sapiens
aataaaatagaagtt

SEQ ID NO: 1528417 - DNA, 15 bp, Homo sapiens
taataaaatagaagt

SEQ ID NO: 1528418 - DNA, 15 bp, Homo sapiens
ataataaaatagaag

SEQ ID NO: 1528419 - DNA, 15 bp, Homo sapiens
acaataataaaatag

SEQ ID NO: 1528420 - DNA, 15 bp, Homo sapiens
aacaataataaaata

SEQ ID NO: 1528421 - DNA, 15 bp, Homo sapiens
aaacaataataaaat

SEQ ID NO: 1528422 - DNA, 15 bp, Homo sapiens
aaaacaataataaaa

SEQ ID NO: 1528423 - DNA, 15 bp, Homo sapiens
aaaaacaataataaa

SEQ ID NO: 1528424 - DNA, 15 bp, Homo sapiens
taaaaacaataataa

SEQ ID NO: 1528425 - DNA, 15 bp, Homo sapiens
ttaaaaacaataata

SEQ ID NO: 1528426 - DNA, 15 bp, Homo sapiens
attaaaaacaataat

SEQ ID NO: 1528427 - DNA, 15 bp, Homo sapiens
gattaaaaacaataa

SEQ ID NO: 1528428 - DNA, 15 bp, Homo sapiens
agattaaaaacaata

SEQ ID NO: 1528429 - DNA, 15 bp, Homo sapiens
gagattaaaaacaat

SEQ ID NO: 1528430 - DNA, 15 bp, Homo sapiens
agagattaaaaacaa

SEQ ID NO: 1528431 - DNA, 15 bp, Homo sapiens
aagagattaaaaaca

SEQ ID NO: 1528432 - DNA, 15 bp, Homo sapiens
taagagattaaaaac

SEQ ID NO: 1528433 - DNA, 15 bp, Homo sapiens
gtaagagattaaaaa

SEQ ID NO: 1528434 - DNA, 15 bp, Homo sapiens
agtaagagattaaaa

SEQ ID NO: 1528435 - DNA, 15 bp, Homo sapiens
cagtaagagattaaa

SEQ ID NO: 1528436 - DNA, 15 bp, Homo sapiens
acagtaagagattaa

SEQ ID NO: 1528437 - DNA, 15 bp, Homo sapiens
cacagtaagagatta

SEQ ID NO: 1528438 - DNA, 15 bp, Homo sapiens
gcacagtaagagatt

SEQ ID NO: 1528439 - DNA, 15 bp, Homo sapiens
ggcacagtaagagat

SEQ ID NO: 1528440 - DNA, 15 bp, Homo sapiens
aggcacagtaagaga

SEQ ID NO: 1528441 - DNA, 15 bp, Homo sapiens
taggcacagtaagag

SEQ ID NO: 1528442 - DNA, 15 bp, Homo sapiens
ttaggcacagtaaga

SEQ ID NO: 1528443 - DNA, 15 bp, Homo sapiens
attaggcacagtaag

SEQ ID NO: 1528444 - DNA, 15 bp, Homo sapiens
aattaggcacagtaa

SEQ ID NO: 1528445 - DNA, 15 bp, Homo sapiens
aaattaggcacagta

SEQ ID NO: 1528446 - DNA, 15 bp, Homo sapiens
taaattaggcacagt

SEQ ID NO: 1528447 - DNA, 15 bp, Homo sapiens
ataaattaggcacag

SEQ ID NO: 1528448 - DNA, 15 bp, Homo sapiens
tataaattaggcaca

SEQ ID NO: 1528449 - DNA, 15 bp, Homo sapiens
ttataaattaggcac

SEQ ID NO: 1528450 - DNA, 15 bp, Homo sapiens
attataaattaggca

SEQ ID NO: 1528451 - DNA, 15 bp, Homo sapiens
aattataaattaggc

SEQ ID NO: 1528452 - DNA, 15 bp, Homo sapiens
taattataaattagg

SEQ ID NO: 1528453 - DNA, 15 bp, Homo sapiens
ttaattataaattag

SEQ ID NO: 1528454 - DNA, 15 bp, Homo sapiens
tttaattataaatta

SEQ ID NO: 1528455 - DNA, 15 bp, Homo sapiens
gtttaattataaatt

SEQ ID NO: 1528456 - DNA, 15 bp, Homo sapiens
agtttaattataaat

SEQ ID NO: 1528457 - DNA, 15 bp, Homo sapiens
aagtttaattataaa

SEQ ID NO: 1528458 - DNA, 15 bp, Homo sapiens
aaagtttaattataa

SEQ ID NO: 1528459 - DNA, 15 bp, Homo sapiens
taaagtttaattata

SEQ ID NO: 1528460 - DNA, 15 bp, Homo sapiens
ataaagtttaattat

SEQ ID NO: 1528461 - DNA, 15 bp, Homo sapiens
gataaagtttaatta

SEQ ID NO: 1528462 - DNA, 15 bp, Homo sapiens
tgataaagtttaatt

SEQ ID NO: 1528463 - DNA, 15 bp, Homo sapiens
gtgataaagtttaat

SEQ ID NO: 1528464 - DNA, 15 bp, Homo sapiens
tgtgataaagtttaa

SEQ ID NO: 1528465 - DNA, 15 bp, Homo sapiens
ctgtgataaagttta

SEQ ID NO: 1528466 - DNA, 15 bp, Homo sapiens
cctgtgataaagttt

SEQ ID NO: 1528467 - DNA, 15 bp, Homo sapiens
acctgtgataaagtt

SEQ ID NO: 1528468 - DNA, 15 bp, Homo sapiens
tacctgtgataaagt

SEQ ID NO: 1528469 - DNA, 15 bp, Homo sapiens
atacctgtgataaag

SEQ ID NO: 1528470 - DNA, 15 bp, Homo sapiens
aatacctgtgataaa

SEQ ID NO: 1528471 - DNA, 15 bp, Homo sapiens
aaatacctgtgataa

SEQ ID NO: 1528472 - DNA, 15 bp, Homo sapiens
gaaatacctgtgata

SEQ ID NO: 1528473 - DNA, 15 bp, Homo sapiens
agaaatacctgtgat

SEQ ID NO: 1528474 - DNA, 15 bp, Homo sapiens
cagaaatacctgtga

SEQ ID NO: 1528475 - DNA, 15 bp, Homo sapiens
acagaaatacctgtg

SEQ ID NO: 1528476 - DNA, 15 bp, Homo sapiens
tacagaaatacctgt

SEQ ID NO: 1528477 - DNA, 15 bp, Homo sapiens
atacagaaatacctg

SEQ ID NO: 1528478 - DNA, 15 bp, Homo sapiens
tatacagaaatacct

SEQ ID NO: 1528479 - DNA, 15 bp, Homo sapiens
ctatacagaaatacc

SEQ ID NO: 1528480 - DNA, 15 bp, Homo sapiens
cctatacagaaatac

SEQ ID NO: 1528481 - DNA, 15 bp, Homo sapiens
tcctatacagaaata

SEQ ID NO: 1528482 - DNA, 15 bp, Homo sapiens
ctcctatacagaaat

SEQ ID NO: 1528483 - DNA, 15 bp, Homo sapiens
tctcctatacagaaa

SEQ ID NO: 1528484 - DNA, 15 bp, Homo sapiens
ttctcctatacagaa

SEQ ID NO: 1528485 - DNA, 15 bp, Homo sapiens
tttctcctatacaga

SEQ ID NO: 1528486 - DNA, 15 bp, Homo sapiens
ttttctcctatacag

SEQ ID NO: 1528487 - DNA, 15 bp, Homo sapiens
tttttctcctataca

SEQ ID NO: 1528488 - DNA, 15 bp, Homo sapiens
gtttttctcctatac

SEQ ID NO: 1528489 - DNA, 15 bp, Homo sapiens
tgtttttctcctata

SEQ ID NO: 1528490 - DNA, 15 bp, Homo sapiens
gtgtttttctcctat

SEQ ID NO: 1528491 - DNA, 15 bp, Homo sapiens
tgtgtttttctccta

SEQ ID NO: 1528492 - DNA, 15 bp, Homo sapiens
ctgtgtttttctcct

SEQ ID NO: 1528493 - DNA, 15 bp, Homo sapiens
gctgtgtttttctcc

SEQ ID NO: 1528494 - DNA, 15 bp, Homo sapiens
tgctgtgtttttctc

SEQ ID NO: 1528495 - DNA, 15 bp, Homo sapiens
atgctgtgtttttct

SEQ ID NO: 1528496 - DNA, 15 bp, Homo sapiens
tatgctgtgtttttc

SEQ ID NO: 1528497 - DNA, 15 bp, Homo sapiens
atatgctgtgttttt

SEQ ID NO: 1528498 - DNA, 15 bp, Homo sapiens
tatatgctgtgtttt

SEQ ID NO: 1528499 - DNA, 15 bp, Homo sapiens
atatatgctgtgttt

SEQ ID NO: 1528500 - DNA, 15 bp, Homo sapiens
aatatatgctgtgtt

SEQ ID NO: 1528501 - DNA, 15 bp, Homo sapiens
caatatatgctgtgt

SEQ ID NO: 1528502 - DNA, 15 bp, Homo sapiens
ccaatatatgctgtg

SEQ ID NO: 1528503 - DNA, 15 bp, Homo sapiens
cccaatatatgctgt

SEQ ID NO: 1528504 - DNA, 15 bp, Homo sapiens
acccaatatatgctg

SEQ ID NO: 1528505 - DNA, 15 bp, Homo sapiens
aacccaatatatgct

SEQ ID NO: 1528506 - DNA, 15 bp, Homo sapiens
gaacccaatatatgc

SEQ ID NO: 1528507 - DNA, 15 bp, Homo sapiens
tgaacccaatatatg

SEQ ID NO: 1528508 - DNA, 15 bp, Homo sapiens
ttgaacccaatatat

SEQ ID NO: 1528509 - DNA, 15 bp, Homo sapiens
attgaacccaatata

SEQ ID NO: 1528510 - DNA, 15 bp, Homo sapiens
tattgaacccaatat

SEQ ID NO: 1528511 - DNA, 15 bp, Homo sapiens
gtattgaacccaata

SEQ ID NO: 1528512 - DNA, 15 bp, Homo sapiens
agtattgaacccaat

SEQ ID NO: 1528513 - DNA, 15 bp, Homo sapiens
cagtattgaacccaa

SEQ ID NO: 1528514 - DNA, 15 bp, Homo sapiens
acagtattgaaccca

SEQ ID NO: 1528515 - DNA, 15 bp, Homo sapiens
tacagtattgaaccc

SEQ ID NO: 1528516 - DNA, 15 bp, Homo sapiens
ttacagtattgaacc

SEQ ID NO: 1528517 - DNA, 15 bp, Homo sapiens
attacagtattgaac

SEQ ID NO: 1528518 - DNA, 15 bp, Homo sapiens
aattacagtattgaa

SEQ ID NO: 1528519 - DNA, 15 bp, Homo sapiens
gaattacagtattga

SEQ ID NO: 1528520 - DNA, 15 bp, Homo sapiens
agaattacagtattg

SEQ ID NO: 1528521 - DNA, 15 bp, Homo sapiens
cagaattacagtatt

SEQ ID NO: 1528522 - DNA, 15 bp, Homo sapiens
acagaattacagtat

SEQ ID NO: 1528523 - DNA, 15 bp, Homo sapiens
cacagaattacagta

SEQ ID NO: 1528524 - DNA, 15 bp, Homo sapiens
ccacagaattacagt

SEQ ID NO: 1528525 - DNA, 15 bp, Homo sapiens
accacagaattacag

SEQ ID NO: 1528526 - DNA, 15 bp, Homo sapiens
aaccacagaattaca

SEQ ID NO: 1528527 - DNA, 15 bp, Homo sapiens
aaaccacagaattac

SEQ ID NO: 1528528 - DNA, 15 bp, Homo sapiens
gaaaccacagaatta

SEQ ID NO: 1528529 - DNA, 15 bp, Homo sapiens
tgaaaccacagaatt

SEQ ID NO: 1528530 - DNA, 15 bp, Homo sapiens
ctgaaaccacagaat

SEQ ID NO: 1528531 - DNA, 15 bp, Homo sapiens
cctgaaaccacagaa

SEQ ID NO: 1528532 - DNA, 15 bp, Homo sapiens
acctgaaaccacaga

SEQ ID NO: 1528533 - DNA, 15 bp, Homo sapiens
tacctgaaaccacag

SEQ ID NO: 1528534 - DNA, 15 bp, Homo sapiens
atacctgaaaccaca

SEQ ID NO: 1528535 - DNA, 15 bp, Homo sapiens
gatacctgaaaccac

SEQ ID NO: 1528536 - DNA, 15 bp, Homo sapiens
ggatacctgaaacca

SEQ ID NO: 1528537 - DNA, 15 bp, Homo sapiens
gggatacctgaaacc

SEQ ID NO: 1528538 - DNA, 15 bp, Homo sapiens
agggatacctgaaac

SEQ ID NO: 1528539 - DNA, 15 bp, Homo sapiens
cagggatacctgaaa

SEQ ID NO: 1528540 - DNA, 15 bp, Homo sapiens
tcagggatacctgaa

SEQ ID NO: 1528541 - DNA, 15 bp, Homo sapiens
ctcagggatacctga

SEQ ID NO: 1528542 - DNA, 15 bp, Homo sapiens
cctcagggatacctg

SEQ ID NO: 1528543 - DNA, 15 bp, Homo sapiens
ccctcagggatacct

SEQ ID NO: 1528544 - DNA, 15 bp, Homo sapiens
cccctcagggatacc

SEQ ID NO: 1528545 - DNA, 15 bp, Homo sapiens
acccctcagggatac

SEQ ID NO: 1528546 - DNA, 15 bp, Homo sapiens
gacccctcagggata

SEQ ID NO: 1528547 - DNA, 15 bp, Homo sapiens
agacccctcagggat

SEQ ID NO: 1528548 - DNA, 15 bp, Homo sapiens
aagacccctcaggga

SEQ ID NO: 1528549 - DNA, 15 bp, Homo sapiens
caagacccctcaggg

SEQ ID NO: 1528550 - DNA, 15 bp, Homo sapiens
ccaagacccctcagg

SEQ ID NO: 1528551 - DNA, 15 bp, Homo sapiens
tccaagacccctcag

SEQ ID NO: 1528552 - DNA, 15 bp, Homo sapiens
ttccaagacccctca

SEQ ID NO: 1528553 - DNA, 15 bp, Homo sapiens
gttccaagacccctc

SEQ ID NO: 1528554 - DNA, 15 bp, Homo sapiens
tgttccaagacccct

SEQ ID NO: 1528555 - DNA, 15 bp, Homo sapiens
atgttccaagacccc

SEQ ID NO: 1528556 - DNA, 15 bp, Homo sapiens
tatgttccaagaccc

SEQ ID NO: 1528557 - DNA, 15 bp, Homo sapiens
atatgttccaagacc

SEQ ID NO: 1528558 - DNA, 15 bp, Homo sapiens
gatatgttccaagac

SEQ ID NO: 1528559 - DNA, 15 bp, Homo sapiens
ggatatgttccaaga

SEQ ID NO: 1528560 - DNA, 15 bp, Homo sapiens
gggatatgttccaag

SEQ ID NO: 1528561 - DNA, 15 bp, Homo sapiens
ggggatatgttccaa

SEQ ID NO: 1528562 - DNA, 15 bp, Homo sapiens
gggggatatgttcca

SEQ ID NO: 1528563 - DNA, 15 bp, Homo sapiens
tgggggatatgttcc

SEQ ID NO: 1528564 - DNA, 15 bp, Homo sapiens
gtgggggatatgttc

SEQ ID NO: 1528565 - DNA, 15 bp, Homo sapiens
tgtgggggatatgtt

SEQ ID NO: 1528566 - DNA, 15 bp, Homo sapiens
ctgtgggggatatgt

SEQ ID NO: 1528567 - DNA, 15 bp, Homo sapiens
actgtgggggatatg

SEQ ID NO: 1528568 - DNA, 15 bp, Homo sapiens
aactgtgggggatat

SEQ ID NO: 1528569 - DNA, 15 bp, Homo sapiens
taactgtgggggata

SEQ ID NO: 1528570 - DNA, 15 bp, Homo sapiens
ttaactgtgggggat

SEQ ID NO: 1528571 - DNA, 15 bp, Homo sapiens
cttaactgtggggga

SEQ ID NO: 1528572 - DNA, 15 bp, Homo sapiens
ccttaactgtggggg

SEQ ID NO: 1528573 - DNA, 15 bp, Homo sapiens
cccttaactgtgggg

SEQ ID NO: 1528574 - DNA, 15 bp, Homo sapiens
ccccttaactgtggg

SEQ ID NO: 1528575 - DNA, 15 bp, Homo sapiens
cccccttaactgtgg

SEQ ID NO: 1528576 - DNA, 15 bp, Homo sapiens
acccccttaactgtg

SEQ ID NO: 1528577 - DNA, 15 bp, Homo sapiens
tacccccttaactgt

SEQ ID NO: 1528578 - DNA, 15 bp, Homo sapiens
gtacccccttaactg

SEQ ID NO: 1528579 - DNA, 15 bp, Homo sapiens
agtacccccttaact

SEQ ID NO: 1528580 - DNA, 15 bp, Homo sapiens
tagtacccccttaac

SEQ ID NO: 1528581 - DNA, 15 bp, Homo sapiens
gtagtacccccttaa

SEQ ID NO: 1528582 - DNA, 15 bp, Homo sapiens
agtagtaccccctta

SEQ ID NO: 1528583 - DNA, 15 bp, Homo sapiens
cagtagtaccccctt

SEQ ID NO: 1528584 - DNA, 15 bp, Homo sapiens
acagtagtaccccct

SEQ ID NO: 1528585 - DNA, 15 bp, Homo sapiens
tacagtagtaccccc

SEQ ID NO: 1528586 - DNA, 15 bp, Homo sapiens
gtacagtagtacccc

SEQ ID NO: 1528587 - DNA, 15 bp, Homo sapiens
agtacagtagtaccc

SEQ ID NO: 1528588 - DNA, 15 bp, Homo sapiens
aagtacagtagtacc

SEQ ID NO: 1528589 - DNA, 15 bp, Homo sapiens
aaagtacagtagtac

SEQ ID NO: 1528590 - DNA, 15 bp, Homo sapiens
gaaagtacagtagta

SEQ ID NO: 1528591 - DNA, 15 bp, Homo sapiens
ggaaagtacagtagt

SEQ ID NO: 1528592 - DNA, 15 bp, Homo sapiens
aggaaagtacagtag

SEQ ID NO: 1528593 - DNA, 15 bp, Homo sapiens
gaggaaagtacagta

SEQ ID NO: 1528594 - DNA, 15 bp, Homo sapiens
tgaggaaagtacagt

SEQ ID NO: 1528595 - DNA, 15 bp, Homo sapiens
atgaggaaagtacag

SEQ ID NO: 1528596 - DNA, 15 bp, Homo sapiens
aatgaggaaagtaca

SEQ ID NO: 1528597 - DNA, 15 bp, Homo sapiens
gaatgaggaaagtac

SEQ ID NO: 1528598 - DNA, 15 bp, Homo sapiens
tgaatgaggaaagta

SEQ ID NO: 1528599 - DNA, 15 bp, Homo sapiens
ttgaatgaggaaagt

SEQ ID NO: 1528600 - DNA, 15 bp, Homo sapiens
tttgaatgaggaaag

SEQ ID NO: 1528601 - DNA, 15 bp, Homo sapiens
ttttgaatgaggaaa

SEQ ID NO: 1528602 - DNA, 15 bp, Homo sapiens
attttgaatgaggaa

SEQ ID NO: 1528603 - DNA, 15 bp, Homo sapiens
aattttgaatgagga

SEQ ID NO: 1528604 - DNA, 15 bp, Homo sapiens
caattttgaatgagg

SEQ ID NO: 1528605 - DNA, 15 bp, Homo sapiens
acaattttgaatgag

SEQ ID NO: 1528606 - DNA, 15 bp, Homo sapiens
cacaattttgaatga

SEQ ID NO: 1528607 - DNA, 15 bp, Homo sapiens
acacaattttgaatg

SEQ ID NO: 1528608 - DNA, 15 bp, Homo sapiens
aacacaattttgaat

SEQ ID NO: 1528609 - DNA, 15 bp, Homo sapiens
caacacaattttgaa

SEQ ID NO: 1528610 - DNA, 15 bp, Homo sapiens
acaacacaattttga

SEQ ID NO: 1528611 - DNA, 15 bp, Homo sapiens
aacaacacaattttg

SEQ ID NO: 1528612 - DNA, 15 bp, Homo sapiens
aaacaacacaatttt

SEQ ID NO: 1528613 - DNA, 15 bp, Homo sapiens
gaaacaacacaattt

SEQ ID NO: 1528614 - DNA, 15 bp, Homo sapiens
agaaacaacacaatt

SEQ ID NO: 1528615 - DNA, 15 bp, Homo sapiens
aagaaacaacacaat

SEQ ID NO: 1528616 - DNA, 15 bp, Homo sapiens
gaagaaacaacacaa

SEQ ID NO: 1528617 - DNA, 15 bp, Homo sapiens
tgaagaaacaacaca

SEQ ID NO: 1528618 - DNA, 15 bp, Homo sapiens
ttgaagaaacaacac

SEQ ID NO: 1528619 - DNA, 15 bp, Homo sapiens
cttgaagaaacaaca

SEQ ID NO: 1528620 - DNA, 15 bp, Homo sapiens
gcttgaagaaacaac

SEQ ID NO: 1528621 - DNA, 15 bp, Homo sapiens
agcttgaagaaacaa

SEQ ID NO: 1528622 - DNA, 15 bp, Homo sapiens
gagcttgaagaaaca

SEQ ID NO: 1528623 - DNA, 15 bp, Homo sapiens
ggagcttgaagaaac

SEQ ID NO: 1528624 - DNA, 15 bp, Homo sapiens
tggagcttgaagaaa

SEQ ID NO: 1528625 - DNA, 15 bp, Homo sapiens
gtggagcttgaagaa

SEQ ID NO: 1528626 - DNA, 15 bp, Homo sapiens
agtggagcttgaaga

SEQ ID NO: 1528627 - DNA, 15 bp, Homo sapiens
gagtggagcttgaag

SEQ ID NO: 1528628 - DNA, 15 bp, Homo sapiens
tgagtggagcttgaa

SEQ ID NO: 1528629 - DNA, 15 bp, Homo sapiens
atgagtggagcttga

SEQ ID NO: 1528630 - DNA, 15 bp, Homo sapiens
catgagtggagcttg

SEQ ID NO: 1528631 - DNA, 15 bp, Homo sapiens
acatgagtggagctt

SEQ ID NO: 1528632 - DNA, 15 bp, Homo sapiens
gacatgagtggagct

SEQ ID NO: 1528633 - DNA, 15 bp, Homo sapiens
tgacatgagtggagc

SEQ ID NO: 1528634 - DNA, 15 bp, Homo sapiens
ctgacatgagtggag

SEQ ID NO: 1528635 - DNA, 15 bp, Homo sapiens
gctgacatgagtgga

SEQ ID NO: 1528636 - DNA, 15 bp, Homo sapiens
tgctgacatgagtgg

SEQ ID NO: 1528637 - DNA, 15 bp, Homo sapiens
gtgctgacatgagtg

SEQ ID NO: 1528638 - DNA, 15 bp, Homo sapiens
ggtgctgacatgagt

SEQ ID NO: 1528639 - DNA, 15 bp, Homo sapiens
aggtgctgacatgag

SEQ ID NO: 1528640 - DNA, 15 bp, Homo sapiens
aaggtgctgacatga

SEQ ID NO: 1528641 - DNA, 15 bp, Homo sapiens
aaaggtgctgacatg

SEQ ID NO: 1528642 - DNA, 15 bp, Homo sapiens
aaaaggtgctgacat

SEQ ID NO: 1528643 - DNA, 15 bp, Homo sapiens
taaaaggtgctgaca

SEQ ID NO: 1528644 - DNA, 15 bp, Homo sapiens
ataaaaggtgctgac

SEQ ID NO: 1528645 - DNA, 15 bp, Homo sapiens
tataaaaggtgctga

SEQ ID NO: 1528646 - DNA, 15 bp, Homo sapiens
gtataaaaggtgctg

SEQ ID NO: 1528647 - DNA, 15 bp, Homo sapiens
cgtataaaaggtgct

SEQ ID NO: 1528648 - DNA, 15 bp, Homo sapiens
tcgtataaaaggtgc

SEQ ID NO: 1528649 - DNA, 15 bp, Homo sapiens
atcgtataaaaggtg

SEQ ID NO: 1528650 - DNA, 15 bp, Homo sapiens
gatcgtataaaaggt

SEQ ID NO: 1528651 - DNA, 15 bp, Homo sapiens
ggatcgtataaaagg

SEQ ID NO: 1528652 - DNA, 15 bp, Homo sapiens
aggatcgtataaaag

SEQ ID NO: 1528653 - DNA, 15 bp, Homo sapiens
aaggatcgtataaaa

SEQ ID NO: 1528654 - DNA, 15 bp, Homo sapiens
gaaggatcgtataaa

SEQ ID NO: 1528655 - DNA, 15 bp, Homo sapiens
ggaaggatcgtataa

SEQ ID NO: 1528656 - DNA, 15 bp, Homo sapiens
gggaaggatcgtata

SEQ ID NO: 1528657 - DNA, 15 bp, Homo sapiens
agggaaggatcgtat

SEQ ID NO: 1528658 - DNA, 15 bp, Homo sapiens
tagggaaggatcgta

SEQ ID NO: 1528659 - DNA, 15 bp, Homo sapiens
ttagggaaggatcgt

SEQ ID NO: 1528660 - DNA, 15 bp, Homo sapiens
attagggaaggatcg

SEQ ID NO: 1528661 - DNA, 15 bp, Homo sapiens
aattagggaaggatc

SEQ ID NO: 1528662 - DNA, 15 bp, Homo sapiens
gaattagggaaggat

SEQ ID NO: 1528663 - DNA, 15 bp, Homo sapiens
gaggtgggaaaagat

SEQ ID NO: 1528664 - DNA, 15 bp, Homo sapiens
agaggtgggaaaaga

SEQ ID NO: 1528665 - DNA, 15 bp, Homo sapiens
tagaggtgggaaaag

SEQ ID NO: 1528666 - DNA, 15 bp, Homo sapiens
ctagaggtgggaaaa

SEQ ID NO: 1528667 - DNA, 15 bp, Homo sapiens
tctagaggtgggaaa

SEQ ID NO: 1528668 - DNA, 15 bp, Homo sapiens
ttctagaggtgggaa

SEQ ID NO: 1528669 - DNA, 15 bp, Homo sapiens
tttctagaggtggga

SEQ ID NO: 1528670 - DNA, 15 bp, Homo sapiens
atttctagaggtggg

SEQ ID NO: 1528671 - DNA, 15 bp, Homo sapiens
catttctagaggtgg

SEQ ID NO: 1528672 - DNA, 15 bp, Homo sapiens
gcatttctagaggtg

SEQ ID NO: 1528673 - DNA, 15 bp, Homo sapiens
agcatttctagaggt

SEQ ID NO: 1528674 - DNA, 15 bp, Homo sapiens
aagcatttctagagg

SEQ ID NO: 1528675 - DNA, 15 bp, Homo sapiens
caagcatttctagag

SEQ ID NO: 1528676 - DNA, 15 bp, Homo sapiens
tcaagcatttctaga

SEQ ID NO: 1528677 - DNA, 15 bp, Homo sapiens
ttcaagcatttctag

SEQ ID NO: 1528678 - DNA, 15 bp, Homo sapiens
tttcaagcatttcta

SEQ ID NO: 1528679 - DNA, 15 bp, Homo sapiens
atttcaagcatttct

SEQ ID NO: 1528680 - DNA, 15 bp, Homo sapiens
catttcaagcatttc

SEQ ID NO: 1528681 - DNA, 15 bp, Homo sapiens
tcatttcaagcattt

SEQ ID NO: 1528682 - DNA, 15 bp, Homo sapiens
ctcatttcaagcatt

SEQ ID NO: 1528683 - DNA, 15 bp, Homo sapiens
tctcatttcaagcat

SEQ ID NO: 1528684 - DNA, 15 bp, Homo sapiens
atctcatttcaagca

SEQ ID NO: 1528685 - DNA, 15 bp, Homo sapiens
aatctcatttcaagc

SEQ ID NO: 1528686 - DNA, 15 bp, Homo sapiens
gaatctcatttcaag

SEQ ID NO: 1528687 - DNA, 15 bp, Homo sapiens
agaatctcatttcaa

SEQ ID NO: 1528688 - DNA, 15 bp, Homo sapiens
cagaatctcatttca

SEQ ID NO: 1528689 - DNA, 15 bp, Homo sapiens
gcagaatctcatttc

SEQ ID NO: 1528690 - DNA, 15 bp, Homo sapiens
ggcagaatctcattt

SEQ ID NO: 1528691 - DNA, 15 bp, Homo sapiens
aggcagaatctcatt

SEQ ID NO: 1528692 - DNA, 15 bp, Homo sapiens
aaggcagaatctcat

SEQ ID NO: 1528693 - DNA, 15 bp, Homo sapiens
taaggcagaatctca

SEQ ID NO: 1528694 - DNA, 15 bp, Homo sapiens
gtaaggcagaatctc

SEQ ID NO: 1528695 - DNA, 15 bp, Homo sapiens
cgtaaggcagaatct

SEQ ID NO: 1528696 - DNA, 15 bp, Homo sapiens
acgtaaggcagaatc

SEQ ID NO: 1528697 - DNA, 15 bp, Homo sapiens
gacgtaaggcagaat

SEQ ID NO: 1528698 - DNA, 15 bp, Homo sapiens
agacgtaaggcagaa

SEQ ID NO: 1528699 - DNA, 15 bp, Homo sapiens
gagacgtaaggcaga

SEQ ID NO: 1528700 - DNA, 15 bp, Homo sapiens
tgagacgtaaggcag

SEQ ID NO: 1528701 - DNA, 15 bp, Homo sapiens
gtgagacgtaaggca

SEQ ID NO: 1528702 - DNA, 15 bp, Homo sapiens
tgtgagacgtaaggc

SEQ ID NO: 1528703 - DNA, 15 bp, Homo sapiens
ttgtgagacgtaagg

SEQ ID NO: 1528704 - DNA, 15 bp, Homo sapiens
tttgtgagacgtaag

SEQ ID NO: 1528705 - DNA, 15 bp, Homo sapiens
atttgtgagacgtaa

SEQ ID NO: 1528706 - DNA, 15 bp, Homo sapiens
aatttgtgagacgta

SEQ ID NO: 1528707 - DNA, 15 bp, Homo sapiens
taatttgtgagacgt

SEQ ID NO: 1528708 - DNA, 15 bp, Homo sapiens
ttaatttgtgagacg

SEQ ID NO: 1528709 - DNA, 15 bp, Homo sapiens
tttaatttgtgagac

SEQ ID NO: 1528710 - DNA, 15 bp, Homo sapiens
atttaatttgtgaga

SEQ ID NO: 1528711 - DNA, 15 bp, Homo sapiens
tatttaatttgtgag

SEQ ID NO: 1528712 - DNA, 15 bp, Homo sapiens
gtatttaatttgtga

SEQ ID NO: 1528713 - DNA, 15 bp, Homo sapiens
ggtatttaatttgtg

SEQ ID NO: 1528714 - DNA, 15 bp, Homo sapiens
tggtatttaatttgt

SEQ ID NO: 1528715 - DNA, 15 bp, Homo sapiens
gtggtatttaatttg

SEQ ID NO: 1528716 - DNA, 15 bp, Homo sapiens
tgtggtatttaattt

SEQ ID NO: 1528717 - DNA, 15 bp, Homo sapiens
atgtggtatttaatt

SEQ ID NO: 1528718 - DNA, 15 bp, Homo sapiens
aatgtggtatttaat

SEQ ID NO: 1528719 - DNA, 15 bp, Homo sapiens
aaatgtggtatttaa

SEQ ID NO: 1528720 - DNA, 15 bp, Homo sapiens
caaatgtggtattta

SEQ ID NO: 1528721 - DNA, 15 bp, Homo sapiens
acaaatgtggtattt

SEQ ID NO: 1528722 - DNA, 15 bp, Homo sapiens
cacaaatgtggtatt

SEQ ID NO: 1528723 - DNA, 15 bp, Homo sapiens
acacaaatgtggtat

SEQ ID NO: 1528724 - DNA, 15 bp, Homo sapiens
gacacaaatgtggta

SEQ ID NO: 1528725 - DNA, 15 bp, Homo sapiens
agacacaaatgtggt

SEQ ID NO: 1528726 - DNA, 15 bp, Homo sapiens
gagacacaaatgtgg

SEQ ID NO: 1528727 - DNA, 15 bp, Homo sapiens
tgagacacaaatgtg

SEQ ID NO: 1528728 - DNA, 15 bp, Homo sapiens
gtgagacacaaatgt

SEQ ID NO: 1528729 - DNA, 15 bp, Homo sapiens
ggtgagacacaaatg

SEQ ID NO: 1528730 - DNA, 15 bp, Homo sapiens
gggtgagacacaaat

SEQ ID NO: 1528731 - DNA, 15 bp, Homo sapiens
tgggtgagacacaaa

SEQ ID NO: 1528732 - DNA, 15 bp, Homo sapiens
atgggtgagacacaa

SEQ ID NO: 1528733 - DNA, 15 bp, Homo sapiens
gatgggtgagacaca

SEQ ID NO: 1528734 - DNA, 15 bp, Homo sapiens
agatgggtgagacac

SEQ ID NO: 1528735 - DNA, 15 bp, Homo sapiens
gagatgggtgagaca

SEQ ID NO: 1528736 - DNA, 15 bp, Homo sapiens
tgagatgggtgagac

SEQ ID NO: 1528737 - DNA, 15 bp, Homo sapiens
ctgagatgggtgaga

SEQ ID NO: 1528738 - DNA, 15 bp, Homo sapiens
actgagatgggtgag

SEQ ID NO: 1528739 - DNA, 15 bp, Homo sapiens
aactgagatgggtga

SEQ ID NO: 1528740 - DNA, 15 bp, Homo sapiens
taactgagatgggtg

SEQ ID NO: 1528741 - DNA, 15 bp, Homo sapiens
ataactgagatgggt

SEQ ID NO: 1528742 - DNA, 15 bp, Homo sapiens
cataactgagatggg

SEQ ID NO: 1528743 - DNA, 15 bp, Homo sapiens
gcataactgagatgg

SEQ ID NO: 1528744 - DNA, 15 bp, Homo sapiens
agcataactgagatg

SEQ ID NO: 1528745 - DNA, 15 bp, Homo sapiens
cagcataactgagat

SEQ ID NO: 1528746 - DNA, 15 bp, Homo sapiens
acagcataactgaga

SEQ ID NO: 1528747 - DNA, 15 bp, Homo sapiens
gacagcataactgag

SEQ ID NO: 1528748 - DNA, 15 bp, Homo sapiens
agacagcataactga

SEQ ID NO: 1528749 - DNA, 15 bp, Homo sapiens
aagacagcataactg

SEQ ID NO: 1528750 - DNA, 15 bp, Homo sapiens
caagacagcataact

SEQ ID NO: 1528751 - DNA, 15 bp, Homo sapiens
gcaagacagcataac

SEQ ID NO: 1528752 - DNA, 15 bp, Homo sapiens
tgcaagacagcataa

SEQ ID NO: 1528753 - DNA, 15 bp, Homo sapiens
atgcaagacagcata

SEQ ID NO: 1528754 - DNA, 15 bp, Homo sapiens
aatgcaagacagcat

SEQ ID NO: 1528755 - DNA, 15 bp, Homo sapiens
aaatgcaagacagca

SEQ ID NO: 1528756 - DNA, 15 bp, Homo sapiens
aaaatgcaagacagc

SEQ ID NO: 1528757 - DNA, 15 bp, Homo sapiens
taaaatgcaagacag

SEQ ID NO: 1528758 - DNA, 15 bp, Homo sapiens
ttaaaatgcaagaca

SEQ ID NO: 1528759 - DNA, 15 bp, Homo sapiens
attaaaatgcaagac

SEQ ID NO: 1528760 - DNA, 15 bp, Homo sapiens
gattaaaatgcaaga

SEQ ID NO: 1528761 - DNA, 15 bp, Homo sapiens
tgattaaaatgcaag

SEQ ID NO: 1528762 - DNA, 15 bp, Homo sapiens
ttgattaaaatgcaa

SEQ ID NO: 1528763 - DNA, 15 bp, Homo sapiens
attgattaaaatgca

SEQ ID NO: 1528764 - DNA, 15 bp, Homo sapiens
gattgattaaaatgc

SEQ ID NO: 1528765 - DNA, 15 bp, Homo sapiens
ggattgattaaaatg

SEQ ID NO: 1528766 - DNA, 15 bp, Homo sapiens
aggattgattaaaat

SEQ ID NO: 1528767 - DNA, 15 bp, Homo sapiens
caggattgattaaaa

SEQ ID NO: 1528768 - DNA, 15 bp, Homo sapiens
acaggattgattaaa

SEQ ID NO: 1528769 - DNA, 15 bp, Homo sapiens
aacaggattgattaa

SEQ ID NO: 1528770 - DNA, 15 bp, Homo sapiens
aaacaggattgatta

SEQ ID NO: 1528771 - DNA, 15 bp, Homo sapiens
gaaacaggattgatt

SEQ ID NO: 1528772 - DNA, 15 bp, Homo sapiens
tgaaacaggattgat

SEQ ID NO: 1528773 - DNA, 15 bp, Homo sapiens
ctgaaacaggattga

SEQ ID NO: 1528774 - DNA, 15 bp, Homo sapiens
cctgaaacaggattg

SEQ ID NO: 1528775 - DNA, 15 bp, Homo sapiens
tcctgaaacaggatt

SEQ ID NO: 1528776 - DNA, 15 bp, Homo sapiens
gtcctgaaacaggat

SEQ ID NO: 1528777 - DNA, 15 bp, Homo sapiens
agtcctgaaacagga

SEQ ID NO: 1528778 - DNA, 15 bp, Homo sapiens
aagtcctgaaacagg

SEQ ID NO: 1528779 - DNA, 15 bp, Homo sapiens
gaagtcctgaaacag

SEQ ID NO: 1528780 - DNA, 15 bp, Homo sapiens
agaagtcctgaaaca

SEQ ID NO: 1528781 - DNA, 15 bp, Homo sapiens
aagaagtcctgaaac

SEQ ID NO: 1528782 - DNA, 15 bp, Homo sapiens
aaagaagtcctgaaa

SEQ ID NO: 1528783 - DNA, 15 bp, Homo sapiens
aaaagaagtcctgaa

SEQ ID NO: 1528784 - DNA, 15 bp, Homo sapiens
caaaagaagtcctga

SEQ ID NO: 1528785 - DNA, 15 bp, Homo sapiens
gcaaaagaagtcctg

SEQ ID NO: 1528786 - DNA, 15 bp, Homo sapiens
agcaaaagaagtcct

SEQ ID NO: 1528787 - DNA, 15 bp, Homo sapiens
cagcaaaagaagtcc

SEQ ID NO: 1528788 - DNA, 15 bp, Homo sapiens
gcagcaaaagaagtc

SEQ ID NO: 1528789 - DNA, 15 bp, Homo sapiens
ggcagcaaaagaagt

SEQ ID NO: 1528790 - DNA, 15 bp, Homo sapiens
aggcagcaaaagaag

SEQ ID NO: 1528791 - DNA, 15 bp, Homo sapiens
aaggcagcaaaagaa

SEQ ID NO: 1528792 - DNA, 15 bp, Homo sapiens
caaggcagcaaaaga

SEQ ID NO: 1528793 - DNA, 15 bp, Homo sapiens
acaaggcagcaaaag

SEQ ID NO: 1528794 - DNA, 15 bp, Homo sapiens
cacaaggcagcaaaa

SEQ ID NO: 1528795 - DNA, 15 bp, Homo sapiens
ccacaaggcagcaaa

SEQ ID NO: 1528796 - DNA, 15 bp, Homo sapiens
gccacaaggcagcaa

SEQ ID NO: 1528797 - DNA, 15 bp, Homo sapiens
agccacaaggcagca

SEQ ID NO: 1528798 - DNA, 15 bp, Homo sapiens
cagccacaaggcagc

SEQ ID NO: 1528799 - DNA, 15 bp, Homo sapiens
acagccacaaggcag

SEQ ID NO: 1528800 - DNA, 15 bp, Homo sapiens
aacagccacaaggca

SEQ ID NO: 1528801 - DNA, 15 bp, Homo sapiens
aaacagccacaaggc

SEQ ID NO: 1528802 - DNA, 15 bp, Homo sapiens
gaaacagccacaagg

SEQ ID NO: 1528803 - DNA, 15 bp, Homo sapiens
agaaacagccacaag

SEQ ID NO: 1528804 - DNA, 15 bp, Homo sapiens
aagaaacagccacaa

SEQ ID NO: 1528805 - DNA, 15 bp, Homo sapiens
taagaaacagccaca

SEQ ID NO: 1528806 - DNA, 15 bp, Homo sapiens
ataagaaacagccac

SEQ ID NO: 1528807 - DNA, 15 bp, Homo sapiens
cataagaaacagcca

SEQ ID NO: 1528808 - DNA, 15 bp, Homo sapiens
acataagaaacagcc

SEQ ID NO: 1528809 - DNA, 15 bp, Homo sapiens
aacataagaaacagc

SEQ ID NO: 1528810 - DNA, 15 bp, Homo sapiens
aaacataagaaacag

SEQ ID NO: 1528811 - DNA, 15 bp, Homo sapiens
caaacataagaaaca

SEQ ID NO: 1528812 - DNA, 15 bp, Homo sapiens
acaaacataagaaac

SEQ ID NO: 1528813 - DNA, 15 bp, Homo sapiens
gacaaacataagaaa

SEQ ID NO: 1528814 - DNA, 15 bp, Homo sapiens
tgacaaacataagaa

SEQ ID NO: 1528815 - DNA, 15 bp, Homo sapiens
gtgacaaacataaga

SEQ ID NO: 1528816 - DNA, 15 bp, Homo sapiens
agtgacaaacataag

SEQ ID NO: 1528817 - DNA, 15 bp, Homo sapiens
tagtgacaaacataa

SEQ ID NO: 1528818 - DNA, 15 bp, Homo sapiens
ttagtgacaaacata

SEQ ID NO: 1528819 - DNA, 15 bp, Homo sapiens
attagtgacaaacat

SEQ ID NO: 1528820 - DNA, 15 bp, Homo sapiens
aattagtgacaaaca

SEQ ID NO: 1528821 - DNA, 15 bp, Homo sapiens
gaattagtgacaaac

SEQ ID NO: 1528822 - DNA, 15 bp, Homo sapiens
tgaattagtgacaaa

SEQ ID NO: 1528823 - DNA, 15 bp, Homo sapiens
atgaattagtgacaa

SEQ ID NO: 1528824 - DNA, 15 bp, Homo sapiens
tatgaattagtgaca

SEQ ID NO: 1528825 - DNA, 15 bp, Homo sapiens
ttatgaattagtgac

SEQ ID NO: 1528826 - DNA, 15 bp, Homo sapiens
cttatgaattagtga

SEQ ID NO: 1528827 - DNA, 15 bp, Homo sapiens
acttatgaattagtg

SEQ ID NO: 1528828 - DNA, 15 bp, Homo sapiens
aacttatgaattagt

SEQ ID NO: 1528829 - DNA, 15 bp, Homo sapiens
caacttatgaattag

SEQ ID NO: 1528830 - DNA, 15 bp, Homo sapiens
ccaacttatgaatta

SEQ ID NO: 1528831 - DNA, 15 bp, Homo sapiens
gccaacttatgaatt

SEQ ID NO: 1528832 - DNA, 15 bp, Homo sapiens
agccaacttatgaat

SEQ ID NO: 1528833 - DNA, 15 bp, Homo sapiens
tagccaacttatgaa

SEQ ID NO: 1528834 - DNA, 15 bp, Homo sapiens
ttagccaacttatga

SEQ ID NO: 1528835 - DNA, 15 bp, Homo sapiens
gttagccaacttatg

SEQ ID NO: 1528836 - DNA, 15 bp, Homo sapiens
agttagccaacttat

SEQ ID NO: 1528837 - DNA, 15 bp, Homo sapiens
aagttagccaactta

SEQ ID NO: 1528838 - DNA, 15 bp, Homo sapiens
aaagttagccaactt

SEQ ID NO: 1528839 - DNA, 15 bp, Homo sapiens
aaaagttagccaact

SEQ ID NO: 1528840 - DNA, 15 bp, Homo sapiens
taaaagttagccaac

SEQ ID NO: 1528841 - DNA, 15 bp, Homo sapiens
ataaaagttagccaa

SEQ ID NO: 1528842 - DNA, 15 bp, Homo sapiens
tataaaagttagcca

SEQ ID NO: 1528843 - DNA, 15 bp, Homo sapiens
atataaaagttagcc

SEQ ID NO: 1528844 - DNA, 15 bp, Homo sapiens
aatataaaagttagc

SEQ ID NO: 1528845 - DNA, 15 bp, Homo sapiens
aaatataaaagttag

SEQ ID NO: 1528846 - DNA, 15 bp, Homo sapiens
caaatataaaagtta

SEQ ID NO: 1528847 - DNA, 15 bp, Homo sapiens
acaaatataaaagtt

SEQ ID NO: 1528848 - DNA, 15 bp, Homo sapiens
tacaaatataaaagt

SEQ ID NO: 1528849 - DNA, 15 bp, Homo sapiens
ctacaaatataaaag

SEQ ID NO: 1528850 - DNA, 15 bp, Homo sapiens
tctacaaatataaaa

SEQ ID NO: 1528851 - DNA, 15 bp, Homo sapiens
ctctacaaatataaa

SEQ ID NO: 1528852 - DNA, 15 bp, Homo sapiens
tctctacaaatataa

SEQ ID NO: 1528853 - DNA, 15 bp, Homo sapiens
ttctctacaaatata

SEQ ID NO: 1528854 - DNA, 15 bp, Homo sapiens
attctctacaaatat

SEQ ID NO: 1528855 - DNA, 15 bp, Homo sapiens
aattctctacaaata

SEQ ID NO: 1528856 - DNA, 15 bp, Homo sapiens
aaattctctacaaat

SEQ ID NO: 1528857 - DNA, 15 bp, Homo sapiens
gaaattctctacaaa

SEQ ID NO: 1528858 - DNA, 15 bp, Homo sapiens
agaaattctctacaa

SEQ ID NO: 1528859 - DNA, 15 bp, Homo sapiens
gagaaattctctaca

SEQ ID NO: 1528860 - DNA, 15 bp, Homo sapiens
tgagaaattctctac

SEQ ID NO: 1528861 - DNA, 15 bp, Homo sapiens
ctgagaaattctcta

SEQ ID NO: 1528862 - DNA, 15 bp, Homo sapiens
actgagaaattctct

SEQ ID NO: 1528863 - DNA, 15 bp, Homo sapiens
cactgagaaattctc

SEQ ID NO: 1528864 - DNA, 15 bp, Homo sapiens
tcactgagaaattct

SEQ ID NO: 1528865 - DNA, 15 bp, Homo sapiens
atcactgagaaattc

SEQ ID NO: 1528866 - DNA, 15 bp, Homo sapiens
aatcactgagaaatt

SEQ ID NO: 1528867 - DNA, 15 bp, Homo sapiens
aaatcactgagaaat

SEQ ID NO: 1528868 - DNA, 15 bp, Homo sapiens
aaaatcactgagaaa

SEQ ID NO: 1528869 - DNA, 15 bp, Homo sapiens
gaaaatcactgagaa

SEQ ID NO: 1528870 - DNA, 15 bp, Homo sapiens
agaaaatcactgaga

SEQ ID NO: 1528871 - DNA, 15 bp, Homo sapiens
aagaaaatcactgag

SEQ ID NO: 1528872 - DNA, 15 bp, Homo sapiens
gaagaaaatcactga

SEQ ID NO: 1528873 - DNA, 15 bp, Homo sapiens
agaagaaaatcactg

SEQ ID NO: 1528874 - DNA, 15 bp, Homo sapiens
tagaagaaaatcact

SEQ ID NO: 1528875 - DNA, 15 bp, Homo sapiens
ctagaagaaaatcac

SEQ ID NO: 1528876 - DNA, 15 bp, Homo sapiens
actagaagaaaatca

SEQ ID NO: 1528877 - DNA, 15 bp, Homo sapiens
aactagaagaaaatc

SEQ ID NO: 1528878 - DNA, 15 bp, Homo sapiens
caactagaagaaaat

SEQ ID NO: 1528879 - DNA, 15 bp, Homo sapiens
ccaactagaagaaaa

SEQ ID NO: 1528880 - DNA, 15 bp, Homo sapiens
tccaactagaagaaa

SEQ ID NO: 1528881 - DNA, 15 bp, Homo sapiens
ctccaactagaagaa

SEQ ID NO: 1528882 - DNA, 15 bp, Homo sapiens
actccaactagaaga

SEQ ID NO: 1528883 - DNA, 15 bp, Homo sapiens
aactccaactagaag

SEQ ID NO: 1528884 - DNA, 15 bp, Homo sapiens
gaactccaactagaa

SEQ ID NO: 1528885 - DNA, 15 bp, Homo sapiens
ggaactccaactaga

SEQ ID NO: 1528886 - DNA, 15 bp, Homo sapiens
tggaactccaactag

SEQ ID NO: 1528887 - DNA, 15 bp, Homo sapiens
ctggaactccaacta

SEQ ID NO: 1528888 - DNA, 15 bp, Homo sapiens
actggaactccaact

SEQ ID NO: 1528889 - DNA, 15 bp, Homo sapiens
cactggaactccaac

SEQ ID NO: 1528890 - DNA, 15 bp, Homo sapiens
acactggaactccaa

SEQ ID NO: 1528891 - DNA, 15 bp, Homo sapiens
cacactggaactcca

SEQ ID NO: 1528892 - DNA, 15 bp, Homo sapiens
ccacactggaactcc

SEQ ID NO: 1528893 - DNA, 15 bp, Homo sapiens
accacactggaactc

SEQ ID NO: 1528894 - DNA, 15 bp, Homo sapiens
aaccacactggaact

SEQ ID NO: 1528895 - DNA, 15 bp, Homo sapiens
aaaccacactggaac

SEQ ID NO: 1528896 - DNA, 15 bp, Homo sapiens
caaaccacactggaa

SEQ ID NO: 1528897 - DNA, 15 bp, Homo sapiens
tcaaaccacactgga

SEQ ID NO: 1528898 - DNA, 15 bp, Homo sapiens
atcaaaccacactgg

SEQ ID NO: 1528899 - DNA, 15 bp, Homo sapiens
aatcaaaccacactg

SEQ ID NO: 1528900 - DNA, 15 bp, Homo sapiens
aaatcaaaccacact

SEQ ID NO: 1528901 - DNA, 15 bp, Homo sapiens
caaatcaaaccacac

SEQ ID NO: 1528902 - DNA, 15 bp, Homo sapiens
ccaaatcaaaccaca

SEQ ID NO: 1528903 - DNA, 15 bp, Homo sapiens
tccaaatcaaaccac

SEQ ID NO: 1528904 - DNA, 15 bp, Homo sapiens
ctccaaatcaaacca

SEQ ID NO: 1528905 - DNA, 15 bp, Homo sapiens
actccaaatcaaacc

SEQ ID NO: 1528906 - DNA, 15 bp, Homo sapiens
cactccaaatcaaac

SEQ ID NO: 1528907 - DNA, 15 bp, Homo sapiens
acactccaaatcaaa

SEQ ID NO: 1528908 - DNA, 15 bp, Homo sapiens
gacactccaaatcaa

SEQ ID NO: 1528909 - DNA, 15 bp, Homo sapiens
tgacactccaaatca

SEQ ID NO: 1528910 - DNA, 15 bp, Homo sapiens
ttgacactccaaatc

SEQ ID NO: 1528911 - DNA, 15 bp, Homo sapiens
cttgacactccaaat

SEQ ID NO: 1528912 - DNA, 15 bp, Homo sapiens
tcttgacactccaaa

SEQ ID NO: 1528913 - DNA, 15 bp, Homo sapiens
atcttgacactccaa

SEQ ID NO: 1528914 - DNA, 15 bp, Homo sapiens
gatcttgacactcca

SEQ ID NO: 1528915 - DNA, 15 bp, Homo sapiens
agatcttgacactcc

SEQ ID NO: 1528916 - DNA, 15 bp, Homo sapiens
gagatcttgacactc

SEQ ID NO: 1528917 - DNA, 15 bp, Homo sapiens
agagatcttgacact

SEQ ID NO: 1528918 - DNA, 15 bp, Homo sapiens
cagagatcttgacac

SEQ ID NO: 1528919 - DNA, 15 bp, Homo sapiens
acagagatcttgaca

SEQ ID NO: 1528920 - DNA, 15 bp, Homo sapiens
gacagagatcttgac

SEQ ID NO: 1528921 - DNA, 15 bp, Homo sapiens
ggacagagatcttga

SEQ ID NO: 1528922 - DNA, 15 bp, Homo sapiens
gggacagagatcttg

SEQ ID NO: 1528923 - DNA, 15 bp, Homo sapiens
tgggacagagatctt

SEQ ID NO: 1528924 - DNA, 15 bp, Homo sapiens
atgggacagagatct

SEQ ID NO: 1528925 - DNA, 15 bp, Homo sapiens
catgggacagagatc

SEQ ID NO: 1528926 - DNA, 15 bp, Homo sapiens
gcatgggacagagat

SEQ ID NO: 1528927 - DNA, 15 bp, Homo sapiens
ggcatgggacagaga

SEQ ID NO: 1528928 - DNA, 15 bp, Homo sapiens
aggcatgggacagag

SEQ ID NO: 1528929 - DNA, 15 bp, Homo sapiens
taggcatgggacaga

SEQ ID NO: 1528930 - DNA, 15 bp, Homo sapiens
ctaggcatgggacag

SEQ ID NO: 1528931 - DNA, 15 bp, Homo sapiens
gctaggcatgggaca

SEQ ID NO: 1528932 - DNA, 15 bp, Homo sapiens
ggctaggcatgggac

SEQ ID NO: 1528933 - DNA, 15 bp, Homo sapiens
aggctaggcatggga

SEQ ID NO: 1528934 - DNA, 15 bp, Homo sapiens
aaggctaggcatggg

SEQ ID NO: 1528935 - DNA, 15 bp, Homo sapiens
taaggctaggcatgg

SEQ ID NO: 1528936 - DNA, 15 bp, Homo sapiens
ctaaggctaggcatg

SEQ ID NO: 1528937 - DNA, 15 bp, Homo sapiens
actaaggctaggcat

SEQ ID NO: 1528938 - DNA, 15 bp, Homo sapiens
gactaaggctaggca

SEQ ID NO: 1528939 - DNA, 15 bp, Homo sapiens
ggactaaggctaggc

SEQ ID NO: 1528940 - DNA, 15 bp, Homo sapiens
aggactaaggctagg

SEQ ID NO: 1528941 - DNA, 15 bp, Homo sapiens
gaggactaaggctag

SEQ ID NO: 1528942 - DNA, 15 bp, Homo sapiens
tgaggactaaggcta

SEQ ID NO: 1528943 - DNA, 15 bp, Homo sapiens
ctgaggactaaggct

SEQ ID NO: 1528944 - DNA, 15 bp, Homo sapiens
actgaggactaaggc

SEQ ID NO: 1528945 - DNA, 15 bp, Homo sapiens
gactgaggactaagg

SEQ ID NO: 1528946 - DNA, 15 bp, Homo sapiens
agactgaggactaag

SEQ ID NO: 1528947 - DNA, 15 bp, Homo sapiens
cagactgaggactaa

SEQ ID NO: 1528948 - DNA, 15 bp, Homo sapiens
acagactgaggacta

SEQ ID NO: 1528949 - DNA, 15 bp, Homo sapiens
aacagactgaggact

SEQ ID NO: 1528950 - DNA, 15 bp, Homo sapiens
aaacagactgaggac

SEQ ID NO: 1528951 - DNA, 15 bp, Homo sapiens
aaaacagactgagga

SEQ ID NO: 1528952 - DNA, 15 bp, Homo sapiens
taaaacagactgagg

SEQ ID NO: 1528953 - DNA, 15 bp, Homo sapiens
gtaaaacagactgag

SEQ ID NO: 1528954 - DNA, 15 bp, Homo sapiens
agtaaaacagactga

SEQ ID NO: 1528955 - DNA, 15 bp, Homo sapiens
cagtaaaacagactg

SEQ ID NO: 1528956 - DNA, 15 bp, Homo sapiens
ccagtaaaacagact

SEQ ID NO: 1528957 - DNA, 15 bp, Homo sapiens
cccagtaaaacagac

SEQ ID NO: 1528958 - DNA, 15 bp, Homo sapiens
acccagtaaaacaga

SEQ ID NO: 1528959 - DNA, 15 bp, Homo sapiens
aacccagtaaaacag

SEQ ID NO: 1528960 - DNA, 15 bp, Homo sapiens
gaacccagtaaaaca

SEQ ID NO: 1528961 - DNA, 15 bp, Homo sapiens
tgaacccagtaaaac

SEQ ID NO: 1528962 - DNA, 15 bp, Homo sapiens
gtgaacccagtaaaa

SEQ ID NO: 1528963 - DNA, 15 bp, Homo sapiens
ggtgaacccagtaaa

SEQ ID NO: 1528964 - DNA, 15 bp, Homo sapiens
tggtgaacccagtaa

SEQ ID NO: 1528965 - DNA, 15 bp, Homo sapiens
gtggtgaacccagta

SEQ ID NO: 1528966 - DNA, 15 bp, Homo sapiens
ggtggtgaacccagt

SEQ ID NO: 1528967 - DNA, 15 bp, Homo sapiens
aggtggtgaacccag

SEQ ID NO: 1528968 - DNA, 15 bp, Homo sapiens
caggtggtgaaccca

SEQ ID NO: 1528969 - DNA, 15 bp, Homo sapiens
ccaggtggtgaaccc

SEQ ID NO: 1528970 - DNA, 15 bp, Homo sapiens
accaggtggtgaacc

SEQ ID NO: 1528971 - DNA, 15 bp, Homo sapiens
aaccaggtggtgaac

SEQ ID NO: 1528972 - DNA, 15 bp, Homo sapiens
caaccaggtggtgaa

SEQ ID NO: 1528973 - DNA, 15 bp, Homo sapiens
acaaccaggtggtga

SEQ ID NO: 1528974 - DNA, 15 bp, Homo sapiens
tacaaccaggtggtg

SEQ ID NO: 1528975 - DNA, 15 bp, Homo sapiens
ctacaaccaggtggt

SEQ ID NO: 1528976 - DNA, 15 bp, Homo sapiens
actacaaccaggtgg

SEQ ID NO: 1528977 - DNA, 15 bp, Homo sapiens
tactacaaccaggtg

SEQ ID NO: 1528978 - DNA, 15 bp, Homo sapiens
gtactacaaccaggt

SEQ ID NO: 1528979 - DNA, 15 bp, Homo sapiens
ggtactacaaccagg

SEQ ID NO: 1528980 - DNA, 15 bp, Homo sapiens
tggtactacaaccag

SEQ ID NO: 1528981 - DNA, 15 bp, Homo sapiens
ttggtactacaacca

SEQ ID NO: 1528982 - DNA, 15 bp, Homo sapiens
tttggtactacaacc

SEQ ID NO: 1528983 - DNA, 15 bp, Homo sapiens
atttggtactacaac

SEQ ID NO: 1528984 - DNA, 15 bp, Homo sapiens
catttggtactacaa

SEQ ID NO: 1528985 - DNA, 15 bp, Homo sapiens
gcatttggtactaca

SEQ ID NO: 1528986 - DNA, 15 bp, Homo sapiens
ggcatttggtactac

SEQ ID NO: 1528987 - DNA, 15 bp, Homo sapiens
gggcatttggtacta

SEQ ID NO: 1528988 - DNA, 15 bp, Homo sapiens
agggcatttggtact

SEQ ID NO: 1528989 - DNA, 15 bp, Homo sapiens
aagggcatttggtac

SEQ ID NO: 1528990 - DNA, 15 bp, Homo sapiens
aaagggcatttggta

SEQ ID NO: 1528991 - DNA, 15 bp, Homo sapiens
aaaagggcatttggt

SEQ ID NO: 1528992 - DNA, 15 bp, Homo sapiens
gaaaagggcatttgg

SEQ ID NO: 1528993 - DNA, 15 bp, Homo sapiens
ggaaaagggcatttg

SEQ ID NO: 1528994 - DNA, 15 bp, Homo sapiens
gggaaaagggcattt

SEQ ID NO: 1528995 - DNA, 15 bp, Homo sapiens
agggaaaagggcatt

SEQ ID NO: 1528996 - DNA, 15 bp, Homo sapiens
aagggaaaagggcat

SEQ ID NO: 1528997 - DNA, 15 bp, Homo sapiens
aaagggaaaagggca

SEQ ID NO: 1528998 - DNA, 15 bp, Homo sapiens
gaaagggaaaagggc

SEQ ID NO: 1528999 - DNA, 15 bp, Homo sapiens
ggaaagggaaaaggg

SEQ ID NO: 1529000 - DNA, 15 bp, Homo sapiens
gggaaagggaaaagg

SEQ ID NO: 1529001 - DNA, 15 bp, Homo sapiens
agggaaagggaaaag

SEQ ID NO: 1529002 - DNA, 15 bp, Homo sapiens
gagggaaagggaaaa

SEQ ID NO: 1529003 - DNA, 15 bp, Homo sapiens
agagggaaagggaaa

SEQ ID NO: 1529004 - DNA, 15 bp, Homo sapiens
gagagggaaagggaa

SEQ ID NO: 1529005 - DNA, 15 bp, Homo sapiens
agagagggaaaggga

SEQ ID NO: 1529006 - DNA, 15 bp, Homo sapiens
gagagagggaaaggg

SEQ ID NO: 1529007 - DNA, 15 bp, Homo sapiens
ggagagagggaaagg

SEQ ID NO: 1529008 - DNA, 15 bp, Homo sapiens
aggagagagggaaag

SEQ ID NO: 1529009 - DNA, 15 bp, Homo sapiens
aaggagagagggaaa

SEQ ID NO: 1529010 - DNA, 15 bp, Homo sapiens
gaaggagagagggaa

SEQ ID NO: 1529011 - DNA, 15 bp, Homo sapiens
ggaaggagagaggga

SEQ ID NO: 1529012 - DNA, 15 bp, Homo sapiens
aggaaggagagaggg

SEQ ID NO: 1529013 - DNA, 15 bp, Homo sapiens
gaggaaggagagagg

SEQ ID NO: 1529014 - DNA, 15 bp, Homo sapiens
tgaggaaggagagag

SEQ ID NO: 1529015 - DNA, 15 bp, Homo sapiens
gtgaggaaggagaga

SEQ ID NO: 1529016 - DNA, 15 bp, Homo sapiens
agtgaggaaggagag

SEQ ID NO: 1529017 - DNA, 15 bp, Homo sapiens
aagtgaggaaggaga

SEQ ID NO: 1529018 - DNA, 15 bp, Homo sapiens
gaagtgaggaaggag

SEQ ID NO: 1529019 - DNA, 15 bp, Homo sapiens
ggaagtgaggaagga

SEQ ID NO: 1529020 - DNA, 15 bp, Homo sapiens
aggaagtgaggaagg

SEQ ID NO: 1529021 - DNA, 15 bp, Homo sapiens
gaggaagtgaggaag

SEQ ID NO: 1529022 - DNA, 15 bp, Homo sapiens
tgaggaagtgaggaa

SEQ ID NO: 1529023 - DNA, 15 bp, Homo sapiens
ctgaggaagtgagga

SEQ ID NO: 1529024 - DNA, 15 bp, Homo sapiens
actgaggaagtgagg

SEQ ID NO: 1529025 - DNA, 15 bp, Homo sapiens
tactgaggaagtgag

SEQ ID NO: 1529026 - DNA, 15 bp, Homo sapiens
gtactgaggaagtga

SEQ ID NO: 1529027 - DNA, 15 bp, Homo sapiens
agtactgaggaagtg

SEQ ID NO: 1529028 - DNA, 15 bp, Homo sapiens
cagtactgaggaagt

SEQ ID NO: 1529029 - DNA, 15 bp, Homo sapiens
gcagtactgaggaag

SEQ ID NO: 1529030 - DNA, 15 bp, Homo sapiens
ggcagtactgaggaa

SEQ ID NO: 1529031 - DNA, 15 bp, Homo sapiens
gggcagtactgagga

SEQ ID NO: 1529032 - DNA, 15 bp, Homo sapiens
tgggcagtactgagg

SEQ ID NO: 1529033 - DNA, 15 bp, Homo sapiens
ttgggcagtactgag

SEQ ID NO: 1529034 - DNA, 15 bp, Homo sapiens
cttgggcagtactga

SEQ ID NO: 1529035 - DNA, 15 bp, Homo sapiens
acttgggcagtactg

SEQ ID NO: 1529036 - DNA, 15 bp, Homo sapiens
aacttgggcagtact

SEQ ID NO: 1529037 - DNA, 15 bp, Homo sapiens
gaacttgggcagtac

SEQ ID NO: 1529038 - DNA, 15 bp, Homo sapiens
cgaacttgggcagta

SEQ ID NO: 1529039 - DNA, 15 bp, Homo sapiens
acgaacttgggcagt

SEQ ID NO: 1529040 - DNA, 15 bp, Homo sapiens
gacgaacttgggcag

SEQ ID NO: 1529041 - DNA, 15 bp, Homo sapiens
tgacgaacttgggca

SEQ ID NO: 1529042 - DNA, 15 bp, Homo sapiens
ctgacgaacttgggc

SEQ ID NO: 1529043 - DNA, 15 bp, Homo sapiens
tctgacgaacttggg

SEQ ID NO: 1529044 - DNA, 15 bp, Homo sapiens
gtctgacgaacttgg

SEQ ID NO: 1529045 - DNA, 15 bp, Homo sapiens
ggtctgacgaacttg

SEQ ID NO: 1529046 - DNA, 15 bp, Homo sapiens
gggtctgacgaactt

SEQ ID NO: 1529047 - DNA, 15 bp, Homo sapiens
tgggtctgacgaact

SEQ ID NO: 1529048 - DNA, 15 bp, Homo sapiens
ttgggtctgacgaac

SEQ ID NO: 1529049 - DNA, 15 bp, Homo sapiens
attgggtctgacgaa

SEQ ID NO: 1529050 - DNA, 15 bp, Homo sapiens
cattgggtctgacga

SEQ ID NO: 1529051 - DNA, 15 bp, Homo sapiens
tcattgggtctgacg

SEQ ID NO: 1529052 - DNA, 15 bp, Homo sapiens
atcattgggtctgac

SEQ ID NO: 1529053 - DNA, 15 bp, Homo sapiens
aatcattgggtctga

SEQ ID NO: 1529054 - DNA, 15 bp, Homo sapiens
aaatcattgggtctg

SEQ ID NO: 1529055 - DNA, 15 bp, Homo sapiens
aaaatcattgggtct

SEQ ID NO: 1529056 - DNA, 15 bp, Homo sapiens
taaaatcattgggtc

SEQ ID NO: 1529057 - DNA, 15 bp, Homo sapiens
ataaaatcattgggt

SEQ ID NO: 1529058 - DNA, 15 bp, Homo sapiens
aataaaatcattggg

SEQ ID NO: 1529059 - DNA, 15 bp, Homo sapiens
gaataaaatcattgg

SEQ ID NO: 1529060 - DNA, 15 bp, Homo sapiens
agaataaaatcattg

SEQ ID NO: 1529061 - DNA, 15 bp, Homo sapiens
aagaataaaatcatt

SEQ ID NO: 1529062 - DNA, 15 bp, Homo sapiens
taagaataaaatcat

SEQ ID NO: 1529063 - DNA, 15 bp, Homo sapiens
ttaagaataaaatca

SEQ ID NO: 1529064 - DNA, 15 bp, Homo sapiens
cttaagaataaaatc

SEQ ID NO: 1529065 - DNA, 15 bp, Homo sapiens
gcttaagaataaaat

SEQ ID NO: 1529066 - DNA, 15 bp, Homo sapiens
agcttaagaataaaa

SEQ ID NO: 1529067 - DNA, 15 bp, Homo sapiens
tagcttaagaataaa

SEQ ID NO: 1529068 - DNA, 15 bp, Homo sapiens
ttagcttaagaataa

SEQ ID NO: 1529069 - DNA, 15 bp, Homo sapiens
attagcttaagaata

SEQ ID NO: 1529070 - DNA, 15 bp, Homo sapiens
gattagcttaagaat

SEQ ID NO: 1529071 - DNA, 15 bp, Homo sapiens
agattagcttaagaa

SEQ ID NO: 1529072 - DNA, 15 bp, Homo sapiens
aagattagcttaaga

SEQ ID NO: 1529073 - DNA, 15 bp, Homo sapiens
taagattagcttaag

SEQ ID NO: 1529074 - DNA, 15 bp, Homo sapiens
ataagattagcttaa

SEQ ID NO: 1529075 - DNA, 15 bp, Homo sapiens
aataagattagctta

SEQ ID NO: 1529076 - DNA, 15 bp, Homo sapiens
aaataagattagctt

SEQ ID NO: 1529077 - DNA, 15 bp, Homo sapiens
aaaataagattagct

SEQ ID NO: 1529078 - DNA, 15 bp, Homo sapiens
aaaaataagattagc

SEQ ID NO: 1529079 - DNA, 15 bp, Homo sapiens
taaaaataagattag

SEQ ID NO: 1529080 - DNA, 15 bp, Homo sapiens
ttaaaaataagatta

SEQ ID NO: 1529081 - DNA, 15 bp, Homo sapiens
attaaaaataagatt

SEQ ID NO: 1529082 - DNA, 15 bp, Homo sapiens
aattaaaaataagat

SEQ ID NO: 1529083 - DNA, 15 bp, Homo sapiens
aaattaaaaataaga

SEQ ID NO: 1529084 - DNA, 15 bp, Homo sapiens
taaattaaaaataag

SEQ ID NO: 1529085 - DNA, 15 bp, Homo sapiens
ctaaattaaaaataa

SEQ ID NO: 1529086 - DNA, 15 bp, Homo sapiens
cctaaattaaaaata

SEQ ID NO: 1529087 - DNA, 15 bp, Homo sapiens
acctaaattaaaaat

SEQ ID NO: 1529088 - DNA, 15 bp, Homo sapiens
tacctaaattaaaaa

SEQ ID NO: 1529089 - DNA, 15 bp, Homo sapiens
ttacctaaattaaaa

SEQ ID NO: 1529090 - DNA, 15 bp, Homo sapiens
attacctaaattaaa

SEQ ID NO: 1529091 - DNA, 15 bp, Homo sapiens
aattacctaaattaa

SEQ ID NO: 1529092 - DNA, 15 bp, Homo sapiens
gaattacctaaatta

SEQ ID NO: 1529093 - DNA, 15 bp, Homo sapiens
agaattacctaaatt

SEQ ID NO: 1529094 - DNA, 15 bp, Homo sapiens
cagaattacctaaat

SEQ ID NO: 1529095 - DNA, 15 bp, Homo sapiens
tcagaattacctaaa

SEQ ID NO: 1529096 - DNA, 15 bp, Homo sapiens
atcagaattacctaa

SEQ ID NO: 1529097 - DNA, 15 bp, Homo sapiens
aatcagaattaccta

SEQ ID NO: 1529098 - DNA, 15 bp, Homo sapiens
aaatcagaattacct

SEQ ID NO: 1529099 - DNA, 15 bp, Homo sapiens
gaaatcagaattacc

SEQ ID NO: 1529100 - DNA, 15 bp, Homo sapiens
agaaatcagaattac

SEQ ID NO: 1529101 - DNA, 15 bp, Homo sapiens
cagaaatcagaatta

SEQ ID NO: 1529102 - DNA, 15 bp, Homo sapiens
tcagaaatcagaatt

SEQ ID NO: 1529103 - DNA, 15 bp, Homo sapiens
atcagaaatcagaat

SEQ ID NO: 1529104 - DNA, 15 bp, Homo sapiens
aatcagaaatcagaa

SEQ ID NO: 1529105 - DNA, 15 bp, Homo sapiens
aaatcagaaatcaga

SEQ ID NO: 1529106 - DNA, 15 bp, Homo sapiens
caaatcagaaatcag

SEQ ID NO: 1529107 - DNA, 15 bp, Homo sapiens
acaaatcagaaatca

SEQ ID NO: 1529108 - DNA, 15 bp, Homo sapiens
tacaaatcagaaatc

SEQ ID NO: 1529109 - DNA, 15 bp, Homo sapiens
ttacaaatcagaaat

SEQ ID NO: 1529110 - DNA, 15 bp, Homo sapiens
tttacaaatcagaaa

SEQ ID NO: 1529111 - DNA, 15 bp, Homo sapiens
ttttacaaatcagaa

SEQ ID NO: 1529112 - DNA, 15 bp, Homo sapiens
cttttacaaatcaga

SEQ ID NO: 1529113 - DNA, 15 bp, Homo sapiens
tcttttacaaatcag

SEQ ID NO: 1529114 - DNA, 15 bp, Homo sapiens
atcttttacaaatca

SEQ ID NO: 1529115 - DNA, 15 bp, Homo sapiens
tatcttttacaaatc

SEQ ID NO: 1529116 - DNA, 15 bp, Homo sapiens
ttatcttttacaaat

SEQ ID NO: 1529117 - DNA, 15 bp, Homo sapiens
tttatcttttacaaa

SEQ ID NO: 1529118 - DNA, 15 bp, Homo sapiens
atttatcttttacaa

SEQ ID NO: 1529119 - DNA, 15 bp, Homo sapiens
aatttatcttttaca

SEQ ID NO: 1529120 - DNA, 15 bp, Homo sapiens
aaatttatcttttac

SEQ ID NO: 1529121 - DNA, 15 bp, Homo sapiens
aaaatttatctttta

SEQ ID NO: 1529122 - DNA, 15 bp, Homo sapiens
gaaaatttatctttt

SEQ ID NO: 1529123 - DNA, 15 bp, Homo sapiens
agaaaatttatcttt

SEQ ID NO: 1529124 - DNA, 15 bp, Homo sapiens
aagaaaatttatctt

SEQ ID NO: 1529125 - DNA, 15 bp, Homo sapiens
gaagaaaatttatct

SEQ ID NO: 1529126 - DNA, 15 bp, Homo sapiens
agaagaaaatttatc

SEQ ID NO: 1529127 - DNA, 15 bp, Homo sapiens
gagaagaaaatttat

SEQ ID NO: 1529128 - DNA, 15 bp, Homo sapiens
ggagaagaaaattta

SEQ ID NO: 1529129 - DNA, 15 bp, Homo sapiens
aggagaagaaaattt

SEQ ID NO: 1529130 - DNA, 15 bp, Homo sapiens
aaggagaagaaaatt

SEQ ID NO: 1529131 - DNA, 15 bp, Homo sapiens
gaaggagaagaaaat

SEQ ID NO: 1529132 - DNA, 15 bp, Homo sapiens
tgaaggagaagaaaa

SEQ ID NO: 1529133 - DNA, 15 bp, Homo sapiens
atgaaggagaagaaa

SEQ ID NO: 1529134 - DNA, 15 bp, Homo sapiens
catgaaggagaagaa

SEQ ID NO: 1529135 - DNA, 15 bp, Homo sapiens
acatgaaggagaaga

SEQ ID NO: 1529136 - DNA, 15 bp, Homo sapiens
tacatgaaggagaag

SEQ ID NO: 1529137 - DNA, 15 bp, Homo sapiens
ctacatgaaggagaa

SEQ ID NO: 1529138 - DNA, 15 bp, Homo sapiens
actacatgaaggaga

SEQ ID NO: 1529139 - DNA, 15 bp, Homo sapiens
tactacatgaaggag

SEQ ID NO: 1529140 - DNA, 15 bp, Homo sapiens
ctactacatgaagga

SEQ ID NO: 1529141 - DNA, 15 bp, Homo sapiens
cctactacatgaagg

SEQ ID NO: 1529142 - DNA, 15 bp, Homo sapiens
tcctactacatgaag

SEQ ID NO: 1529143 - DNA, 15 bp, Homo sapiens
atcctactacatgaa

SEQ ID NO: 1529144 - DNA, 15 bp, Homo sapiens
aatcctactacatga

SEQ ID NO: 1529145 - DNA, 15 bp, Homo sapiens
aaatcctactacatg

SEQ ID NO: 1529146 - DNA, 15 bp, Homo sapiens
aaaatcctactacat

SEQ ID NO: 1529147 - DNA, 15 bp, Homo sapiens
taaaatcctactaca

SEQ ID NO: 1529148 - DNA, 15 bp, Homo sapiens
ttaaaatcctactac

SEQ ID NO: 1529149 - DNA, 15 bp, Homo sapiens
attaaaatcctacta

SEQ ID NO: 1529150 - DNA, 15 bp, Homo sapiens
aattaaaatcctact

SEQ ID NO: 1529151 - DNA, 15 bp, Homo sapiens
aaattaaaatcctac

SEQ ID NO: 1529152 - DNA, 15 bp, Homo sapiens
aaaattaaaatccta

SEQ ID NO: 1529153 - DNA, 15 bp, Homo sapiens
caaaattaaaatcct

SEQ ID NO: 1529154 - DNA, 15 bp, Homo sapiens
acaaaattaaaatcc

SEQ ID NO: 1529155 - DNA, 15 bp, Homo sapiens
tacaaaattaaaatc

SEQ ID NO: 1529156 - DNA, 15 bp, Homo sapiens
ttacaaaattaaaat

SEQ ID NO: 1529157 - DNA, 15 bp, Homo sapiens
tttacaaaattaaaa

SEQ ID NO: 1529158 - DNA, 15 bp, Homo sapiens
atttacaaaattaaa

SEQ ID NO: 1529159 - DNA, 15 bp, Homo sapiens
tatttacaaaattaa

SEQ ID NO: 1529160 - DNA, 15 bp, Homo sapiens
atatttacaaaatta

SEQ ID NO: 1529161 - DNA, 15 bp, Homo sapiens
aatatttacaaaatt

SEQ ID NO: 1529162 - DNA, 15 bp, Homo sapiens
aaatatttacaaaat

SEQ ID NO: 1529163 - DNA, 15 bp, Homo sapiens
taaatatttacaaaa

SEQ ID NO: 1529164 - DNA, 15 bp, Homo sapiens
ttaaatatttacaaa

SEQ ID NO: 1529165 - DNA, 15 bp, Homo sapiens
tttaaatatttacaa

SEQ ID NO: 1529166 - DNA, 15 bp, Homo sapiens
atttaaatatttaca

SEQ ID NO: 1529167 - DNA, 15 bp, Homo sapiens
aatttaaatatttac

SEQ ID NO: 1529168 - DNA, 15 bp, Homo sapiens
gaatttaaatattta

SEQ ID NO: 1529169 - DNA, 15 bp, Homo sapiens
agaatttaaatattt

SEQ ID NO: 1529170 - DNA, 15 bp, Homo sapiens
gagaatttaaatatt

SEQ ID NO: 1529171 - DNA, 15 bp, Homo sapiens
ggagaatttaaatat

SEQ ID NO: 1529172 - DNA, 15 bp, Homo sapiens
tggagaatttaaata

SEQ ID NO: 1529173 - DNA, 15 bp, Homo sapiens
atggagaatttaaat

SEQ ID NO: 1529174 - DNA, 15 bp, Homo sapiens
aatggagaatttaaa

SEQ ID NO: 1529175 - DNA, 15 bp, Homo sapiens
taatggagaatttaa

SEQ ID NO: 1529176 - DNA, 15 bp, Homo sapiens
ttaatggagaattta

SEQ ID NO: 1529177 - DNA, 15 bp, Homo sapiens
attaatggagaattt

SEQ ID NO: 1529178 - DNA, 15 bp, Homo sapiens
cattaatggagaatt

SEQ ID NO: 1529179 - DNA, 15 bp, Homo sapiens
ccattaatggagaat

SEQ ID NO: 1529180 - DNA, 15 bp, Homo sapiens
accattaatggagaa

SEQ ID NO: 1529181 - DNA, 15 bp, Homo sapiens
caccattaatggaga

SEQ ID NO: 1529182 - DNA, 15 bp, Homo sapiens
acaccattaatggag

SEQ ID NO: 1529183 - DNA, 15 bp, Homo sapiens
cacaccattaatgga

SEQ ID NO: 1529184 - DNA, 15 bp, Homo sapiens
acacaccattaatgg

SEQ ID NO: 1529185 - DNA, 15 bp, Homo sapiens
aacacaccattaatg

SEQ ID NO: 1529186 - DNA, 15 bp, Homo sapiens
taacacaccattaat

SEQ ID NO: 1529187 - DNA, 15 bp, Homo sapiens
ttaacacaccattaa

SEQ ID NO: 1529188 - DNA, 15 bp, Homo sapiens
tttaacacaccatta

SEQ ID NO: 1529189 - DNA, 15 bp, Homo sapiens
atttaacacaccatt

SEQ ID NO: 1529190 - DNA, 15 bp, Homo sapiens
gatttaacacaccat

SEQ ID NO: 1529191 - DNA, 15 bp, Homo sapiens
agatttaacacacca

SEQ ID NO: 1529192 - DNA, 15 bp, Homo sapiens
cagatttaacacacc

SEQ ID NO: 1529193 - DNA, 15 bp, Homo sapiens
gcagatttaacacac

SEQ ID NO: 1529194 - DNA, 15 bp, Homo sapiens
tgcagatttaacaca

SEQ ID NO: 1529195 - DNA, 15 bp, Homo sapiens
gtgcagatttaacac

SEQ ID NO: 1529196 - DNA, 15 bp, Homo sapiens
agtgcagatttaaca

SEQ ID NO: 1529197 - DNA, 15 bp, Homo sapiens
tagtgcagatttaac

SEQ ID NO: 1529198 - DNA, 15 bp, Homo sapiens
ttagtgcagatttaa

SEQ ID NO: 1529199 - DNA, 15 bp, Homo sapiens
tttagtgcagattta

SEQ ID NO: 1529200 - DNA, 15 bp, Homo sapiens
ttttagtgcagattt

SEQ ID NO: 1529201 - DNA, 15 bp, Homo sapiens
gttttagtgcagatt

SEQ ID NO: 1529202 - DNA, 15 bp, Homo sapiens
agttttagtgcagat

SEQ ID NO: 1529203 - DNA, 15 bp, Homo sapiens
cagttttagtgcaga

SEQ ID NO: 1529204 - DNA, 15 bp, Homo sapiens
gcagttttagtgcag

SEQ ID NO: 1529205 - DNA, 15 bp, Homo sapiens
agcagttttagtgca

SEQ ID NO: 1529206 - DNA, 15 bp, Homo sapiens
aagcagttttagtgc

SEQ ID NO: 1529207 - DNA, 15 bp, Homo sapiens
gaagcagttttagtg

SEQ ID NO: 1529208 - DNA, 15 bp, Homo sapiens
agaagcagttttagt

SEQ ID NO: 1529209 - DNA, 15 bp, Homo sapiens
aagaagcagttttag

SEQ ID NO: 1529210 - DNA, 15 bp, Homo sapiens
aaagaagcagtttta

SEQ ID NO: 1529211 - DNA, 15 bp, Homo sapiens
taaagaagcagtttt

SEQ ID NO: 1529212 - DNA, 15 bp, Homo sapiens
gtaaagaagcagttt

SEQ ID NO: 1529213 - DNA, 15 bp, Homo sapiens
tgtaaagaagcagtt

SEQ ID NO: 1529214 - DNA, 15 bp, Homo sapiens
atgtaaagaagcagt

SEQ ID NO: 1529215 - DNA, 15 bp, Homo sapiens
catgtaaagaagcag

SEQ ID NO: 1529216 - DNA, 15 bp, Homo sapiens
acatgtaaagaagca

SEQ ID NO: 1529217 - DNA, 15 bp, Homo sapiens
aacatgtaaagaagc

SEQ ID NO: 1529218 - DNA, 15 bp, Homo sapiens
aaacatgtaaagaag

SEQ ID NO: 1529219 - DNA, 15 bp, Homo sapiens
aaaacatgtaaagaa

SEQ ID NO: 1529220 - DNA, 15 bp, Homo sapiens
aaaaacatgtaaaga

SEQ ID NO: 1529221 - DNA, 15 bp, Homo sapiens
taaaaacatgtaaag

SEQ ID NO: 1529222 - DNA, 15 bp, Homo sapiens
ttaaaaacatgtaaa

SEQ ID NO: 1529223 - DNA, 15 bp, Homo sapiens
tttaaaaacatgtaa

SEQ ID NO: 1529224 - DNA, 15 bp, Homo sapiens
atttaaaaacatgta

SEQ ID NO: 1529225 - DNA, 15 bp, Homo sapiens
aatttaaaaacatgt

SEQ ID NO: 1529226 - DNA, 15 bp, Homo sapiens
aaatttaaaaacatg

SEQ ID NO: 1529227 - DNA, 15 bp, Homo sapiens
aaaatttaaaaacat

SEQ ID NO: 1529228 - DNA, 15 bp, Homo sapiens
aaaaatttaaaaaca

SEQ ID NO: 1529229 - DNA, 15 bp, Homo sapiens
gaaaaaatttaaaaa

SEQ ID NO: 1529230 - DNA, 15 bp, Homo sapiens
tgaaaaaatttaaaa

SEQ ID NO: 1529231 - DNA, 15 bp, Homo sapiens
atgaaaaaatttaaa

SEQ ID NO: 1529232 - DNA, 15 bp, Homo sapiens
aatgaaaaaatttaa

SEQ ID NO: 1529233 - DNA, 15 bp, Homo sapiens
taatgaaaaaattta

SEQ ID NO: 1529234 - DNA, 15 bp, Homo sapiens
ataatgaaaaaattt

SEQ ID NO: 1529235 - DNA, 15 bp, Homo sapiens
cataatgaaaaaatt

SEQ ID NO: 1529236 - DNA, 15 bp, Homo sapiens
acataatgaaaaaat

SEQ ID NO: 1529237 - DNA, 15 bp, Homo sapiens
aacataatgaaaaaa

SEQ ID NO: 1529238 - DNA, 15 bp, Homo sapiens
aaacataatgaaaaa

SEQ ID NO: 1529239 - DNA, 15 bp, Homo sapiens
aaaacataatgaaaa

SEQ ID NO: 1529240 - DNA, 15 bp, Homo sapiens
aaaaacataatgaaa

SEQ ID NO: 1529241 - DNA, 15 bp, Homo sapiens
taaaaacataatgaa

SEQ ID NO: 1529242 - DNA, 15 bp, Homo sapiens
ttaaaaacataatga

SEQ ID NO: 1529243 - DNA, 15 bp, Homo sapiens
gttaaaaacataatg

SEQ ID NO: 1529244 - DNA, 15 bp, Homo sapiens
tgttaaaaacataat

SEQ ID NO: 1529245 - DNA, 15 bp, Homo sapiens
gtgttaaaaacataa

SEQ ID NO: 1529246 - DNA, 15 bp, Homo sapiens
agtgttaaaaacata

SEQ ID NO: 1529247 - DNA, 15 bp, Homo sapiens
aagtgttaaaaacat

SEQ ID NO: 1529248 - DNA, 15 bp, Homo sapiens
aaagtgttaaaaaca

SEQ ID NO: 1529249 - DNA, 15 bp, Homo sapiens
aaaagtgttaaaaac

SEQ ID NO: 1529250 - DNA, 15 bp, Homo sapiens
gaaaagtgttaaaaa

SEQ ID NO: 1529251 - DNA, 15 bp, Homo sapiens
agaaaagtgttaaaa

SEQ ID NO: 1529252 - DNA, 15 bp, Homo sapiens
aagaaaagtgttaaa

SEQ ID NO: 1529253 - DNA, 15 bp, Homo sapiens
taagaaaagtgttaa

SEQ ID NO: 1529254 - DNA, 15 bp, Homo sapiens
gtaagaaaagtgtta

SEQ ID NO: 1529255 - DNA, 15 bp, Homo sapiens
tgtaagaaaagtgtt

SEQ ID NO: 1529256 - DNA, 15 bp, Homo sapiens
atgtaagaaaagtgt

SEQ ID NO: 1529257 - DNA, 15 bp, Homo sapiens
catgtaagaaaagtg

SEQ ID NO: 1529258 - DNA, 15 bp, Homo sapiens
gcatgtaagaaaagt

SEQ ID NO: 1529259 - DNA, 15 bp, Homo sapiens
tgcatgtaagaaaag

SEQ ID NO: 1529260 - DNA, 15 bp, Homo sapiens
ttgcatgtaagaaaa

SEQ ID NO: 1529261 - DNA, 15 bp, Homo sapiens
tttgcatgtaagaaa

SEQ ID NO: 1529262 - DNA, 15 bp, Homo sapiens
ttttgcatgtaagaa

SEQ ID NO: 1529263 - DNA, 15 bp, Homo sapiens
tttttgcatgtaaga

SEQ ID NO: 1529264 - DNA, 15 bp, Homo sapiens
ttttttgcatgtaag

SEQ ID NO: 1529265 - DNA, 15 bp, Homo sapiens
gttttttgcatgtaa

SEQ ID NO: 1529266 - DNA, 15 bp, Homo sapiens
tgttttttgcatgta

SEQ ID NO: 1529267 - DNA, 15 bp, Homo sapiens
gtgttttttgcatgt

SEQ ID NO: 1529268 - DNA, 15 bp, Homo sapiens
tgtgttttttgcatg

SEQ ID NO: 1529269 - DNA, 15 bp, Homo sapiens
ttgtgttttttgcat

SEQ ID NO: 1529270 - DNA, 15 bp, Homo sapiens
gttgtgttttttgca

SEQ ID NO: 1529271 - DNA, 15 bp, Homo sapiens
ggttgtgttttttgc

SEQ ID NO: 1529272 - DNA, 15 bp, Homo sapiens
cggttgtgttttttg

SEQ ID NO: 1529273 - DNA, 15 bp, Homo sapiens
acggttgtgtttttt

SEQ ID NO: 1529274 - DNA, 15 bp, Homo sapiens
aacggttgtgttttt

SEQ ID NO: 1529275 - DNA, 15 bp, Homo sapiens
taacggttgtgtttt

SEQ ID NO: 1529276 - DNA, 15 bp, Homo sapiens
ttaacggttgtgttt

SEQ ID NO: 1529277 - DNA, 15 bp, Homo sapiens
tttaacggttgtgtt

SEQ ID NO: 1529278 - DNA, 15 bp, Homo sapiens
gtttaacggttgtgt

SEQ ID NO: 1529279 - DNA, 15 bp, Homo sapiens
agtttaacggttgtg

SEQ ID NO: 1529280 - DNA, 15 bp, Homo sapiens
aagtttaacggttgt

SEQ ID NO: 1529281 - DNA, 15 bp, Homo sapiens
aaagtttaacggttg

SEQ ID NO: 1529282 - DNA, 15 bp, Homo sapiens
aaaagtttaacggtt

SEQ ID NO: 1529283 - DNA, 15 bp, Homo sapiens
gaaaagtttaacggt

SEQ ID NO: 1529284 - DNA, 15 bp, Homo sapiens
agaaaagtttaacgg

SEQ ID NO: 1529285 - DNA, 15 bp, Homo sapiens
aagaaaagtttaacg

SEQ ID NO: 1529286 - DNA, 15 bp, Homo sapiens
taagaaaagtttaac

SEQ ID NO: 1529287 - DNA, 15 bp, Homo sapiens
ataagaaaagtttaa

SEQ ID NO: 1529288 - DNA, 15 bp, Homo sapiens
aataagaaaagttta

SEQ ID NO: 1529289 - DNA, 15 bp, Homo sapiens
taataagaaaagttt

SEQ ID NO: 1529290 - DNA, 15 bp, Homo sapiens
ttaataagaaaagtt

SEQ ID NO: 1529291 - DNA, 15 bp, Homo sapiens
tttaataagaaaagt

SEQ ID NO: 1529292 - DNA, 15 bp, Homo sapiens
ttttaataagaaaag

SEQ ID NO: 1529293 - DNA, 15 bp, Homo sapiens
attttaataagaaaa

SEQ ID NO: 1529294 - DNA, 15 bp, Homo sapiens
cattttaataagaaa

SEQ ID NO: 1529295 - DNA, 15 bp, Homo sapiens
gcattttaataagaa

SEQ ID NO: 1529296 - DNA, 15 bp, Homo sapiens
tgcattttaataaga

SEQ ID NO: 1529297 - DNA, 15 bp, Homo sapiens
ttgcattttaataag

SEQ ID NO: 1529298 - DNA, 15 bp, Homo sapiens
tttgcattttaataa

SEQ ID NO: 1529299 - DNA, 15 bp, Homo sapiens
ctttgcattttaata

SEQ ID NO: 1529300 - DNA, 15 bp, Homo sapiens
gctttgcattttaat

SEQ ID NO: 1529301 - DNA, 15 bp, Homo sapiens
ggctttgcattttaa

SEQ ID NO: 1529302 - DNA, 15 bp, Homo sapiens
aggctttgcatttta

SEQ ID NO: 1529303 - DNA, 15 bp, Homo sapiens
taggctttgcatttt

SEQ ID NO: 1529304 - DNA, 15 bp, Homo sapiens
ctaggctttgcattt

SEQ ID NO: 1529305 - DNA, 15 bp, Homo sapiens
actaggctttgcatt

SEQ ID NO: 1529306 - DNA, 15 bp, Homo sapiens
cactaggctttgcat

SEQ ID NO: 1529307 - DNA, 15 bp, Homo sapiens
acactaggctttgca

SEQ ID NO: 1529308 - DNA, 15 bp, Homo sapiens
gacactaggctttgc

SEQ ID NO: 1529309 - DNA, 15 bp, Homo sapiens
agacactaggctttg

SEQ ID NO: 1529310 - DNA, 15 bp, Homo sapiens
aagacactaggcttt

SEQ ID NO: 1529311 - DNA, 15 bp, Homo sapiens
gaagacactaggctt

SEQ ID NO: 1529312 - DNA, 15 bp, Homo sapiens
agaagacactaggct

SEQ ID NO: 1529313 - DNA, 15 bp, Homo sapiens
tagaagacactaggc

SEQ ID NO: 1529314 - DNA, 15 bp, Homo sapiens
ctagaagacactagg

SEQ ID NO: 1529315 - DNA, 15 bp, Homo sapiens
gctagaagacactag

SEQ ID NO: 1529316 - DNA, 15 bp, Homo sapiens
agctagaagacacta

SEQ ID NO: 1529317 - DNA, 15 bp, Homo sapiens
aagctagaagacact

SEQ ID NO: 1529318 - DNA, 15 bp, Homo sapiens
aaagctagaagacac

SEQ ID NO: 1529319 - DNA, 15 bp, Homo sapiens
aaaagctagaagaca

SEQ ID NO: 1529320 - DNA, 15 bp, Homo sapiens
aaaaagctagaagac

SEQ ID NO: 1529321 - DNA, 15 bp, Homo sapiens
caaaaagctagaaga

SEQ ID NO: 1529322 - DNA, 15 bp, Homo sapiens
tcaaaaagctagaag

SEQ ID NO: 1529323 - DNA, 15 bp, Homo sapiens
ttcaaaaagctagaa

SEQ ID NO: 1529324 - DNA, 15 bp, Homo sapiens
cttcaaaaagctaga

SEQ ID NO: 1529325 - DNA, 15 bp, Homo sapiens
tcttcaaaaagctag

SEQ ID NO: 1529326 - DNA, 15 bp, Homo sapiens
ctcttcaaaaagcta

SEQ ID NO: 1529327 - DNA, 15 bp, Homo sapiens
gctcttcaaaaagct

SEQ ID NO: 1529328 - DNA, 15 bp, Homo sapiens
agctcttcaaaaagc

SEQ ID NO: 1529329 - DNA, 15 bp, Homo sapiens
aagctcttcaaaaag

SEQ ID NO: 1529330 - DNA, 15 bp, Homo sapiens
aaagctcttcaaaaa

SEQ ID NO: 1529331 - DNA, 15 bp, Homo sapiens
aaaagctcttcaaaa

SEQ ID NO: 1529332 - DNA, 15 bp, Homo sapiens
caaaagctcttcaaa

SEQ ID NO: 1529333 - DNA, 15 bp, Homo sapiens
acaaaagctcttcaa

SEQ ID NO: 1529334 - DNA, 15 bp, Homo sapiens
gacaaaagctcttca

SEQ ID NO: 1529335 - DNA, 15 bp, Homo sapiens
ggacaaaagctcttc

SEQ ID NO: 1529336 - DNA, 15 bp, Homo sapiens
tggacaaaagctctt

SEQ ID NO: 1529337 - DNA, 15 bp, Homo sapiens
atggacaaaagctct

SEQ ID NO: 1529338 - DNA, 15 bp, Homo sapiens
aatggacaaaagctc

SEQ ID NO: 1529339 - DNA, 15 bp, Homo sapiens
taatggacaaaagct

SEQ ID NO: 1529340 - DNA, 15 bp, Homo sapiens
ataatggacaaaagc

SEQ ID NO: 1529341 - DNA, 15 bp, Homo sapiens
tataatggacaaaag

SEQ ID NO: 1529342 - DNA, 15 bp, Homo sapiens
atataatggacaaaa

SEQ ID NO: 1529343 - DNA, 15 bp, Homo sapiens
tatataatggacaaa

SEQ ID NO: 1529344 - DNA, 15 bp, Homo sapiens
ttatataatggacaa

SEQ ID NO: 1529345 - DNA, 15 bp, Homo sapiens
attatataatggaca

SEQ ID NO: 1529346 - DNA, 15 bp, Homo sapiens
gattatataatggac

SEQ ID NO: 1529347 - DNA, 15 bp, Homo sapiens
agattatataatgga

SEQ ID NO: 1529348 - DNA, 15 bp, Homo sapiens
cagattatataatgg

SEQ ID NO: 1529349 - DNA, 15 bp, Homo sapiens
acagattatataatg

SEQ ID NO: 1529350 - DNA, 15 bp, Homo sapiens
gacagattatataat

SEQ ID NO: 1529351 - DNA, 15 bp, Homo sapiens
tgacagattatataa

SEQ ID NO: 1529352 - DNA, 15 bp, Homo sapiens
ttgacagattatata

SEQ ID NO: 1529353 - DNA, 15 bp, Homo sapiens
cttgacagattatat

SEQ ID NO: 1529354 - DNA, 15 bp, Homo sapiens
acttgacagattata

SEQ ID NO: 1529355 - DNA, 15 bp, Homo sapiens
tacttgacagattat

SEQ ID NO: 1529356 - DNA, 15 bp, Homo sapiens
ctacttgacagatta

SEQ ID NO: 1529357 - DNA, 15 bp, Homo sapiens
gctacttgacagatt

SEQ ID NO: 1529358 - DNA, 15 bp, Homo sapiens
ggctacttgacagat

SEQ ID NO: 1529359 - DNA, 15 bp, Homo sapiens
tggctacttgacaga

SEQ ID NO: 1529360 - DNA, 15 bp, Homo sapiens
ttggctacttgacag

SEQ ID NO: 1529361 - DNA, 15 bp, Homo sapiens
cttggctacttgaca

SEQ ID NO: 1529362 - DNA, 15 bp, Homo sapiens
tcttggctacttgac

SEQ ID NO: 1529363 - DNA, 15 bp, Homo sapiens
ctcttggctacttga

SEQ ID NO: 1529364 - DNA, 15 bp, Homo sapiens
actcttggctacttg

SEQ ID NO: 1529365 - DNA, 15 bp, Homo sapiens
aactcttggctactt

SEQ ID NO: 1529366 - DNA, 15 bp, Homo sapiens
gaactcttggctact

SEQ ID NO: 1529367 - DNA, 15 bp, Homo sapiens
ggaactcttggctac

SEQ ID NO: 1529368 - DNA, 15 bp, Homo sapiens
aggaactcttggcta

SEQ ID NO: 1529369 - DNA, 15 bp, Homo sapiens
gaggaactcttggct

SEQ ID NO: 1529370 - DNA, 15 bp, Homo sapiens
tgaggaactcttggc

SEQ ID NO: 1529371 - DNA, 15 bp, Homo sapiens
ctgaggaactcttgg

SEQ ID NO: 1529372 - DNA, 15 bp, Homo sapiens
tctgaggaactcttg

SEQ ID NO: 1529373 - DNA, 15 bp, Homo sapiens
ttctgaggaactctt

SEQ ID NO: 1529374 - DNA, 15 bp, Homo sapiens
cttctgaggaactct

SEQ ID NO: 1529375 - DNA, 15 bp, Homo sapiens
gcttctgaggaactc

SEQ ID NO: 1529376 - DNA, 15 bp, Homo sapiens
tgcttctgaggaact

SEQ ID NO: 1529377 - DNA, 15 bp, Homo sapiens
ctgcttctgaggaac

SEQ ID NO: 1529378 - DNA, 15 bp, Homo sapiens
cctgcttctgaggaa

SEQ ID NO: 1529379 - DNA, 15 bp, Homo sapiens
tcctgcttctgagga

SEQ ID NO: 1529380 - DNA, 15 bp, Homo sapiens
gtcctgcttctgagg

SEQ ID NO: 1529381 - DNA, 15 bp, Homo sapiens
tgtcctgcttctgag

SEQ ID NO: 1529382 - DNA, 15 bp, Homo sapiens
atgtcctgcttctga

SEQ ID NO: 1529383 - DNA, 15 bp, Homo sapiens
gatgtcctgcttctg

SEQ ID NO: 1529384 - DNA, 15 bp, Homo sapiens
tgatgtcctgcttct

SEQ ID NO: 1529385 - DNA, 15 bp, Homo sapiens
atgatgtcctgcttc

SEQ ID NO: 1529386 - DNA, 15 bp, Homo sapiens
aatgatgtcctgctt

SEQ ID NO: 1529387 - DNA, 15 bp, Homo sapiens
aaatgatgtcctgct

SEQ ID NO: 1529388 - DNA, 15 bp, Homo sapiens
taaatgatgtcctgc

SEQ ID NO: 1529389 - DNA, 15 bp, Homo sapiens
ctaaatgatgtcctg

SEQ ID NO: 1529390 - DNA, 15 bp, Homo sapiens
tctaaatgatgtcct

SEQ ID NO: 1529391 - DNA, 15 bp, Homo sapiens
atctaaatgatgtcc

SEQ ID NO: 1529392 - DNA, 15 bp, Homo sapiens
aatctaaatgatgtc

SEQ ID NO: 1529393 - DNA, 15 bp, Homo sapiens
aaatctaaatgatgt

SEQ ID NO: 1529394 - DNA, 15 bp, Homo sapiens
taaatctaaatgatg

SEQ ID NO: 1529395 - DNA, 15 bp, Homo sapiens
ttaaatctaaatgat

SEQ ID NO: 1529396 - DNA, 15 bp, Homo sapiens
tttaaatctaaatga

SEQ ID NO: 1529397 - DNA, 15 bp, Homo sapiens
ttttaaatctaaatg

SEQ ID NO: 1529398 - DNA, 15 bp, Homo sapiens
gttttaaatctaaat

SEQ ID NO: 1529399 - DNA, 15 bp, Homo sapiens
tgttttaaatctaaa

SEQ ID NO: 1529400 - DNA, 15 bp, Homo sapiens
ttgttttaaatctaa

SEQ ID NO: 1529401 - DNA, 15 bp, Homo sapiens
attgttttaaatcta

SEQ ID NO: 1529402 - DNA, 15 bp, Homo sapiens
aattgttttaaatct

SEQ ID NO: 1529403 - DNA, 15 bp, Homo sapiens
taattgttttaaatc

SEQ ID NO: 1529404 - DNA, 15 bp, Homo sapiens
ataattgttttaaat

SEQ ID NO: 1529405 - DNA, 15 bp, Homo sapiens
cataattgttttaaa

SEQ ID NO: 1529406 - DNA, 15 bp, Homo sapiens
ccataattgttttaa

SEQ ID NO: 1529407 - DNA, 15 bp, Homo sapiens
gccataattgtttta

SEQ ID NO: 1529408 - DNA, 15 bp, Homo sapiens
agccataattgtttt

SEQ ID NO: 1529409 - DNA, 15 bp, Homo sapiens
aagccataattgttt

SEQ ID NO: 1529410 - DNA, 15 bp, Homo sapiens
caagccataattgtt

SEQ ID NO: 1529411 - DNA, 15 bp, Homo sapiens
acaagccataattgt

SEQ ID NO: 1529412 - DNA, 15 bp, Homo sapiens
gacaagccataattg

SEQ ID NO: 1529413 - DNA, 15 bp, Homo sapiens
agacaagccataatt

SEQ ID NO: 1529414 - DNA, 15 bp, Homo sapiens
cagacaagccataat

SEQ ID NO: 1529415 - DNA, 15 bp, Homo sapiens
acagacaagccataa

SEQ ID NO: 1529416 - DNA, 15 bp, Homo sapiens
tacagacaagccata

SEQ ID NO: 1529417 - DNA, 15 bp, Homo sapiens
ttacagacaagccat

SEQ ID NO: 1529418 - DNA, 15 bp, Homo sapiens
tttacagacaagcca

SEQ ID NO: 1529419 - DNA, 15 bp, Homo sapiens
ttttacagacaagcc

SEQ ID NO: 1529420 - DNA, 15 bp, Homo sapiens
attttacagacaagc

SEQ ID NO: 1529421 - DNA, 15 bp, Homo sapiens
attattttacagaca

SEQ ID NO: 1529422 - DNA, 15 bp, Homo sapiens
cattattttacagac

SEQ ID NO: 1529423 - DNA, 15 bp, Homo sapiens
acattattttacaga

SEQ ID NO: 1529424 - DNA, 15 bp, Homo sapiens
aacattattttacag

SEQ ID NO: 1529425 - DNA, 15 bp, Homo sapiens
caacattattttaca

SEQ ID NO: 1529426 - DNA, 15 bp, Homo sapiens
acaacattattttac

SEQ ID NO: 1529427 - DNA, 15 bp, Homo sapiens
tacaacattatttta

SEQ ID NO: 1529428 - DNA, 15 bp, Homo sapiens
ctacaacattatttt

SEQ ID NO: 1529429 - DNA, 15 bp, Homo sapiens
gctacaacattattt

SEQ ID NO: 1529430 - DNA, 15 bp, Homo sapiens
tgctacaacattatt

SEQ ID NO: 1529431 - DNA, 15 bp, Homo sapiens
atgctacaacattat

SEQ ID NO: 1529432 - DNA, 15 bp, Homo sapiens
tatgctacaacatta

SEQ ID NO: 1529433 - DNA, 15 bp, Homo sapiens
ttatgctacaacatt

SEQ ID NO: 1529434 - DNA, 15 bp, Homo sapiens
gttatgctacaacat

SEQ ID NO: 1529435 - DNA, 15 bp, Homo sapiens
ggttatgctacaaca

SEQ ID NO: 1529436 - DNA, 15 bp, Homo sapiens
tggttatgctacaac

SEQ ID NO: 1529437 - DNA, 15 bp, Homo sapiens
atggttatgctacaa

SEQ ID NO: 1529438 - DNA, 15 bp, Homo sapiens
aatggttatgctaca

SEQ ID NO: 1529439 - DNA, 15 bp, Homo sapiens
gaatggttatgctac

SEQ ID NO: 1529440 - DNA, 15 bp, Homo sapiens
tgaatggttatgcta

SEQ ID NO: 1529441 - DNA, 15 bp, Homo sapiens
atgaatggttatgct

SEQ ID NO: 1529442 - DNA, 15 bp, Homo sapiens
catgaatggttatgc

SEQ ID NO: 1529443 - DNA, 15 bp, Homo sapiens
ccatgaatggttatg

SEQ ID NO: 1529444 - DNA, 15 bp, Homo sapiens
cccatgaatggttat

SEQ ID NO: 1529445 - DNA, 15 bp, Homo sapiens
tcccatgaatggtta

SEQ ID NO: 1529446 - DNA, 15 bp, Homo sapiens
atcccatgaatggtt

SEQ ID NO: 1529447 - DNA, 15 bp, Homo sapiens
catcccatgaatggt

SEQ ID NO: 1529448 - DNA, 15 bp, Homo sapiens
ccatcccatgaatgg

SEQ ID NO: 1529449 - DNA, 15 bp, Homo sapiens
gccatcccatgaatg

SEQ ID NO: 1529450 - DNA, 15 bp, Homo sapiens
tgccatcccatgaat

SEQ ID NO: 1529451 - DNA, 15 bp, Homo sapiens
ctgccatcccatgaa

SEQ ID NO: 1529452 - DNA, 15 bp, Homo sapiens
gctgccatcccatga

SEQ ID NO: 1529453 - DNA, 15 bp, Homo sapiens
agctgccatcccatg

SEQ ID NO: 1529454 - DNA, 15 bp, Homo sapiens
tagctgccatcccat

SEQ ID NO: 1529455 - DNA, 15 bp, Homo sapiens
gtagctgccatccca

SEQ ID NO: 1529456 - DNA, 15 bp, Homo sapiens
cgtagctgccatccc

SEQ ID NO: 1529457 - DNA, 15 bp, Homo sapiens
tcgtagctgccatcc

SEQ ID NO: 1529458 - DNA, 15 bp, Homo sapiens
atcgtagctgccatc

SEQ ID NO: 1529459 - DNA, 15 bp, Homo sapiens
aatcgtagctgccat

SEQ ID NO: 1529460 - DNA, 15 bp, Homo sapiens
aaatcgtagctgcca

SEQ ID NO: 1529461 - DNA, 15 bp, Homo sapiens
aaaatcgtagctgcc

SEQ ID NO: 1529462 - DNA, 15 bp, Homo sapiens
taaaatcgtagctgc

SEQ ID NO: 1529463 - DNA, 15 bp, Homo sapiens
gtaaaatcgtagctg

SEQ ID NO: 1529464 - DNA, 15 bp, Homo sapiens
agtaaaatcgtagct

SEQ ID NO: 1529465 - DNA, 15 bp, Homo sapiens
aagtaaaatcgtagc

SEQ ID NO: 1529466 - DNA, 15 bp, Homo sapiens
gaagtaaaatcgtag

SEQ ID NO: 1529467 - DNA, 15 bp, Homo sapiens
tgaagtaaaatcgta

SEQ ID NO: 1529468 - DNA, 15 bp, Homo sapiens
ctgaagtaaaatcgt

SEQ ID NO: 1529469 - DNA, 15 bp, Homo sapiens
actgaagtaaaatcg

SEQ ID NO: 1529470 - DNA, 15 bp, Homo sapiens
tactgaagtaaaatc

SEQ ID NO: 1529471 - DNA, 15 bp, Homo sapiens
ttactgaagtaaaat

SEQ ID NO: 1529472 - DNA, 15 bp, Homo sapiens
tttactgaagtaaaa

SEQ ID NO: 1529473 - DNA, 15 bp, Homo sapiens
ttttactgaagtaaa

SEQ ID NO: 1529474 - DNA, 15 bp, Homo sapiens
attttactgaagtaa

SEQ ID NO: 1529475 - DNA, 15 bp, Homo sapiens
tattttactgaagta

SEQ ID NO: 1529476 - DNA, 15 bp, Homo sapiens
atattttactgaagt

SEQ ID NO: 1529477 - DNA, 15 bp, Homo sapiens
gatattttactgaag

SEQ ID NO: 1529478 - DNA, 15 bp, Homo sapiens
ggatattttactgaa

SEQ ID NO: 1529479 - DNA, 15 bp, Homo sapiens
aggatattttactga

SEQ ID NO: 1529480 - DNA, 15 bp, Homo sapiens
aaggatattttactg

SEQ ID NO: 1529481 - DNA, 15 bp, Homo sapiens
caaggatattttact

SEQ ID NO: 1529482 - DNA, 15 bp, Homo sapiens
ccaaggatattttac

SEQ ID NO: 1529483 - DNA, 15 bp, Homo sapiens
tccaaggatatttta

SEQ ID NO: 1529484 - DNA, 15 bp, Homo sapiens
atccaaggatatttt

SEQ ID NO: 1529485 - DNA, 15 bp, Homo sapiens
tatccaaggatattt

SEQ ID NO: 1529486 - DNA, 15 bp, Homo sapiens
gtatccaaggatatt

SEQ ID NO: 1529487 - DNA, 15 bp, Homo sapiens
agtatccaaggatat

SEQ ID NO: 1529488 - DNA, 15 bp, Homo sapiens
tagtatccaaggata

SEQ ID NO: 1529489 - DNA, 15 bp, Homo sapiens
gtagtatccaaggat

SEQ ID NO: 1529490 - DNA, 15 bp, Homo sapiens
ggtagtatccaagga

SEQ ID NO: 1529491 - DNA, 15 bp, Homo sapiens
cggtagtatccaagg

SEQ ID NO: 1529492 - DNA, 15 bp, Homo sapiens
gcggtagtatccaag

SEQ ID NO: 1529493 - DNA, 15 bp, Homo sapiens
ggcggtagtatccaa

SEQ ID NO: 1529494 - DNA, 15 bp, Homo sapiens
tggcggtagtatcca

SEQ ID NO: 1529495 - DNA, 15 bp, Homo sapiens
atggcggtagtatcc

SEQ ID NO: 1529496 - DNA, 15 bp, Homo sapiens
aatggcggtagtatc

SEQ ID NO: 1529497 - DNA, 15 bp, Homo sapiens
aaatggcggtagtat

SEQ ID NO: 1529498 - DNA, 15 bp, Homo sapiens
aaaatggcggtagta

SEQ ID NO: 1529499 - DNA, 15 bp, Homo sapiens
taaaatggcggtagt

SEQ ID NO: 1529500 - DNA, 15 bp, Homo sapiens
ataaaatggcggtag

SEQ ID NO: 1529501 - DNA, 15 bp, Homo sapiens
aataaaatggcggta

SEQ ID NO: 1529502 - DNA, 15 bp, Homo sapiens
aaataaaatggcggt

SEQ ID NO: 1529503 - DNA, 15 bp, Homo sapiens
taaataaaatggcgg

SEQ ID NO: 1529504 - DNA, 15 bp, Homo sapiens
gtaaataaaatggcg

SEQ ID NO: 1529505 - DNA, 15 bp, Homo sapiens
ggtaaataaaatggc

SEQ ID NO: 1529506 - DNA, 15 bp, Homo sapiens
aggtaaataaaatgg

SEQ ID NO: 1529507 - DNA, 15 bp, Homo sapiens
aaggtaaataaaatg

SEQ ID NO: 1529508 - DNA, 15 bp, Homo sapiens
taaggtaaataaaat

SEQ ID NO: 1529509 - DNA, 15 bp, Homo sapiens
ttaaggtaaataaaa

SEQ ID NO: 1529510 - DNA, 15 bp, Homo sapiens
tttaaggtaaataaa

SEQ ID NO: 1529511 - DNA, 15 bp, Homo sapiens
ctttaaggtaaataa

SEQ ID NO: 1529512 - DNA, 15 bp, Homo sapiens
tctttaaggtaaata

SEQ ID NO: 1529513 - DNA, 15 bp, Homo sapiens
atctttaaggtaaat

SEQ ID NO: 1529514 - DNA, 15 bp, Homo sapiens
aatctttaaggtaaa

SEQ ID NO: 1529515 - DNA, 15 bp, Homo sapiens
aaatctttaaggtaa

SEQ ID NO: 1529516 - DNA, 15 bp, Homo sapiens
aaaatctttaaggta

SEQ ID NO: 1529517 - DNA, 15 bp, Homo sapiens
taaaatctttaaggt

SEQ ID NO: 1529518 - DNA, 15 bp, Homo sapiens
gtaaaatctttaagg

SEQ ID NO: 1529519 - DNA, 15 bp, Homo sapiens
ggtaaaatctttaag

SEQ ID NO: 1529520 - DNA, 15 bp, Homo sapiens
tggtaaaatctttaa

SEQ ID NO: 1529521 - DNA, 15 bp, Homo sapiens
ttggtaaaatcttta

SEQ ID NO: 1529522 - DNA, 15 bp, Homo sapiens
cttggtaaaatcttt

SEQ ID NO: 1529523 - DNA, 15 bp, Homo sapiens
ccttggtaaaatctt

SEQ ID NO: 1529524 - DNA, 15 bp, Homo sapiens
accttggtaaaatct

SEQ ID NO: 1529525 - DNA, 15 bp, Homo sapiens
taccttggtaaaatc

SEQ ID NO: 1529526 - DNA, 15 bp, Homo sapiens
gtaccttggtaaaat

SEQ ID NO: 1529527 - DNA, 15 bp, Homo sapiens
ggtaccttggtaaaa

SEQ ID NO: 1529528 - DNA, 15 bp, Homo sapiens
gggtaccttggtaaa

SEQ ID NO: 1529529 - DNA, 15 bp, Homo sapiens
agggtaccttggtaa

SEQ ID NO: 1529530 - DNA, 15 bp, Homo sapiens
tagggtaccttggta

SEQ ID NO: 1529531 - DNA, 15 bp, Homo sapiens
ctagggtaccttggt

SEQ ID NO: 1529532 - DNA, 15 bp, Homo sapiens
tctagggtaccttgg

SEQ ID NO: 1529533 - DNA, 15 bp, Homo sapiens
ttctagggtaccttg

SEQ ID NO: 1529534 - DNA, 15 bp, Homo sapiens
gttctagggtacctt

SEQ ID NO: 1529535 - DNA, 15 bp, Homo sapiens
tgttctagggtacct

SEQ ID NO: 1529536 - DNA, 15 bp, Homo sapiens
ttgttctagggtacc

SEQ ID NO: 1529537 - DNA, 15 bp, Homo sapiens
tttgttctagggtac

SEQ ID NO: 1529538 - DNA, 15 bp, Homo sapiens
ttttgttctagggta

SEQ ID NO: 1529539 - DNA, 15 bp, Homo sapiens
tttttgttctagggt

SEQ ID NO: 1529540 - DNA, 15 bp, Homo sapiens
atttttgttctaggg

SEQ ID NO: 1529541 - DNA, 15 bp, Homo sapiens
catttttgttctagg

SEQ ID NO: 1529542 - DNA, 15 bp, Homo sapiens
ccatttttgttctag

SEQ ID NO: 1529543 - DNA, 15 bp, Homo sapiens
accatttttgttcta

SEQ ID NO: 1529544 - DNA, 15 bp, Homo sapiens
caccatttttgttct

SEQ ID NO: 1529545 - DNA, 15 bp, Homo sapiens
tcaccatttttgttc

SEQ ID NO: 1529546 - DNA, 15 bp, Homo sapiens
ctcaccatttttgtt

SEQ ID NO: 1529547 - DNA, 15 bp, Homo sapiens
cctcaccatttttgt

SEQ ID NO: 1529548 - DNA, 15 bp, Homo sapiens
acctcaccatttttg

SEQ ID NO: 1529549 - DNA, 15 bp, Homo sapiens
gacctcaccattttt

SEQ ID NO: 1529550 - DNA, 15 bp, Homo sapiens
tgacctcaccatttt

SEQ ID NO: 1529551 - DNA, 15 bp, Homo sapiens
atgacctcaccattt

SEQ ID NO: 1529552 - DNA, 15 bp, Homo sapiens
aatgacctcaccatt

SEQ ID NO: 1529553 - DNA, 15 bp, Homo sapiens
aaatgacctcaccat

SEQ ID NO: 1529554 - DNA, 15 bp, Homo sapiens
aaaatgacctcacca

SEQ ID NO: 1529555 - DNA, 15 bp, Homo sapiens
caaaatgacctcacc

SEQ ID NO: 1529556 - DNA, 15 bp, Homo sapiens
tcaaaatgacctcac

SEQ ID NO: 1529557 - DNA, 15 bp, Homo sapiens
atcaaaatgacctca

SEQ ID NO: 1529558 - DNA, 15 bp, Homo sapiens
aatcaaaatgacctc

SEQ ID NO: 1529559 - DNA, 15 bp, Homo sapiens
gaatcaaaatgacct

SEQ ID NO: 1529560 - DNA, 15 bp, Homo sapiens
agaatcaaaatgacc

SEQ ID NO: 1529561 - DNA, 15 bp, Homo sapiens
cagaatcaaaatgac

SEQ ID NO: 1529562 - DNA, 15 bp, Homo sapiens
gcagaatcaaaatga

SEQ ID NO: 1529563 - DNA, 15 bp, Homo sapiens
agcagaatcaaaatg

SEQ ID NO: 1529564 - DNA, 15 bp, Homo sapiens
tagcagaatcaaaat

SEQ ID NO: 1529565 - DNA, 15 bp, Homo sapiens
ttagcagaatcaaaa

SEQ ID NO: 1529566 - DNA, 15 bp, Homo sapiens
tttagcagaatcaaa

SEQ ID NO: 1529567 - DNA, 15 bp, Homo sapiens
ctttagcagaatcaa

SEQ ID NO: 1529568 - DNA, 15 bp, Homo sapiens
actttagcagaatca

SEQ ID NO: 1529569 - DNA, 15 bp, Homo sapiens
aactttagcagaatc

SEQ ID NO: 1529570 - DNA, 15 bp, Homo sapiens
caactttagcagaat

SEQ ID NO: 1529571 - DNA, 15 bp, Homo sapiens
ccaactttagcagaa

SEQ ID NO: 1529572 - DNA, 15 bp, Homo sapiens
accaactttagcaga

SEQ ID NO: 1529573 - DNA, 15 bp, Homo sapiens
taccaactttagcag

SEQ ID NO: 1529574 - DNA, 15 bp, Homo sapiens
ataccaactttagca

SEQ ID NO: 1529575 - DNA, 15 bp, Homo sapiens
cataccaactttagc

SEQ ID NO: 1529576 - DNA, 15 bp, Homo sapiens
tcataccaactttag

SEQ ID NO: 1529577 - DNA, 15 bp, Homo sapiens
gtcataccaacttta

SEQ ID NO: 1529578 - DNA, 15 bp, Homo sapiens
agtcataccaacttt

SEQ ID NO: 1529579 - DNA, 15 bp, Homo sapiens
cagtcataccaactt

SEQ ID NO: 1529580 - DNA, 15 bp, Homo sapiens
ccagtcataccaact

SEQ ID NO: 1529581 - DNA, 15 bp, Homo sapiens
tccagtcataccaac

SEQ ID NO: 1529582 - DNA, 15 bp, Homo sapiens
ttccagtcataccaa

SEQ ID NO: 1529583 - DNA, 15 bp, Homo sapiens
tttccagtcatacca

SEQ ID NO: 1529584 - DNA, 15 bp, Homo sapiens
ctttccagtcatacc

SEQ ID NO: 1529585 - DNA, 15 bp, Homo sapiens
gctttccagtcatac

SEQ ID NO: 1529586 - DNA, 15 bp, Homo sapiens
ggctttccagtcata

SEQ ID NO: 1529587 - DNA, 15 bp, Homo sapiens
tggctttccagtcat

SEQ ID NO: 1529588 - DNA, 15 bp, Homo sapiens
ttggctttccagtca

SEQ ID NO: 1529589 - DNA, 15 bp, Homo sapiens
tttggctttccagtc

SEQ ID NO: 1529590 - DNA, 15 bp, Homo sapiens
atttggctttccagt

SEQ ID NO: 1529591 - DNA, 15 bp, Homo sapiens
catttggctttccag

SEQ ID NO: 1529592 - DNA, 15 bp, Homo sapiens
tcatttggctttcca

SEQ ID NO: 1529593 - DNA, 15 bp, Homo sapiens
gtcatttggctttcc

SEQ ID NO: 1529594 - DNA, 15 bp, Homo sapiens
tgtcatttggctttc

SEQ ID NO: 1529595 - DNA, 15 bp, Homo sapiens
gtgtcatttggcttt

SEQ ID NO: 1529596 - DNA, 15 bp, Homo sapiens
tgtgtcatttggctt

SEQ ID NO: 1529597 - DNA, 15 bp, Homo sapiens
ctgtgtcatttggct

SEQ ID NO: 1529598 - DNA, 15 bp, Homo sapiens
actgtgtcatttggc

SEQ ID NO: 1529599 - DNA, 15 bp, Homo sapiens
aactgtgtcatttgg

SEQ ID NO: 1529600 - DNA, 15 bp, Homo sapiens
taactgtgtcatttg

SEQ ID NO: 1529601 - DNA, 15 bp, Homo sapiens
ataactgtgtcattt

SEQ ID NO: 1529602 - DNA, 15 bp, Homo sapiens
cataactgtgtcatt

SEQ ID NO: 1529603 - DNA, 15 bp, Homo sapiens
tcataactgtgtcat

SEQ ID NO: 1529604 - DNA, 15 bp, Homo sapiens
ctcataactgtgtca

SEQ ID NO: 1529605 - DNA, 15 bp, Homo sapiens
gctcataactgtgtc

SEQ ID NO: 1529606 - DNA, 15 bp, Homo sapiens
tgctcataactgtgt

SEQ ID NO: 1529607 - DNA, 15 bp, Homo sapiens
atgctcataactgtg

SEQ ID NO: 1529608 - DNA, 15 bp, Homo sapiens
tatgctcataactgt

SEQ ID NO: 1529609 - DNA, 15 bp, Homo sapiens
ctatgctcataactg

SEQ ID NO: 1529610 - DNA, 15 bp, Homo sapiens
tctatgctcataact

SEQ ID NO: 1529611 - DNA, 15 bp, Homo sapiens
gtctatgctcataac

SEQ ID NO: 1529612 - DNA, 15 bp, Homo sapiens
ggtctatgctcataa

SEQ ID NO: 1529613 - DNA, 15 bp, Homo sapiens
aggtctatgctcata

SEQ ID NO: 1529614 - DNA, 15 bp, Homo sapiens
aaggtctatgctcat

SEQ ID NO: 1529615 - DNA, 15 bp, Homo sapiens
aaaggtctatgctca

SEQ ID NO: 1529616 - DNA, 15 bp, Homo sapiens
aaaaggtctatgctc

SEQ ID NO: 1529617 - DNA, 15 bp, Homo sapiens
taaaaggtctatgct

SEQ ID NO: 1529618 - DNA, 15 bp, Homo sapiens
ataaaaggtctatgc

SEQ ID NO: 1529619 - DNA, 15 bp, Homo sapiens
aataaaaggtctatg

SEQ ID NO: 1529620 - DNA, 15 bp, Homo sapiens
aaataaaaggtctat

SEQ ID NO: 1529621 - DNA, 15 bp, Homo sapiens
aaaataaaaggtcta

SEQ ID NO: 1529622 - DNA, 15 bp, Homo sapiens
gaaaataaaaggtct

SEQ ID NO: 1529623 - DNA, 15 bp, Homo sapiens
ggaaaataaaaggtc

SEQ ID NO: 1529624 - DNA, 15 bp, Homo sapiens
tggaaaataaaaggt

SEQ ID NO: 1529625 - DNA, 15 bp, Homo sapiens
ctggaaaataaaagg

SEQ ID NO: 1529626 - DNA, 15 bp, Homo sapiens
tctggaaaataaaag

SEQ ID NO: 1529627 - DNA, 15 bp, Homo sapiens
atctggaaaataaaa

SEQ ID NO: 1529628 - DNA, 15 bp, Homo sapiens
catctggaaaataaa

SEQ ID NO: 1529629 - DNA, 15 bp, Homo sapiens
acatctggaaaataa

SEQ ID NO: 1529630 - DNA, 15 bp, Homo sapiens
aacatctggaaaata

SEQ ID NO: 1529631 - DNA, 15 bp, Homo sapiens
aaacatctggaaaat

SEQ ID NO: 1529632 - DNA, 15 bp, Homo sapiens
caaacatctggaaaa

SEQ ID NO: 1529633 - DNA, 15 bp, Homo sapiens
tcaaacatctggaaa

SEQ ID NO: 1529634 - DNA, 15 bp, Homo sapiens
gtcaaacatctggaa

SEQ ID NO: 1529635 - DNA, 15 bp, Homo sapiens
tgtcaaacatctgga

SEQ ID NO: 1529636 - DNA, 15 bp, Homo sapiens
ctgtcaaacatctgg

SEQ ID NO: 1529637 - DNA, 15 bp, Homo sapiens
actgtcaaacatctg

SEQ ID NO: 1529638 - DNA, 15 bp, Homo sapiens
cactgtcaaacatct

SEQ ID NO: 1529639 - DNA, 15 bp, Homo sapiens
acactgtcaaacatc

SEQ ID NO: 1529640 - DNA, 15 bp, Homo sapiens
tacactgtcaaacat

SEQ ID NO: 1529641 - DNA, 15 bp, Homo sapiens
ttacactgtcaaaca

SEQ ID NO: 1529642 - DNA, 15 bp, Homo sapiens
tttacactgtcaaac

SEQ ID NO: 1529643 - DNA, 15 bp, Homo sapiens
gtttacactgtcaaa

SEQ ID NO: 1529644 - DNA, 15 bp, Homo sapiens
tgtttacactgtcaa

SEQ ID NO: 1529645 - DNA, 15 bp, Homo sapiens
atgtttacactgtca

SEQ ID NO: 1529646 - DNA, 15 bp, Homo sapiens
tatgtttacactgtc

SEQ ID NO: 1529647 - DNA, 15 bp, Homo sapiens
gtatgtttacactgt

SEQ ID NO: 1529648 - DNA, 15 bp, Homo sapiens
tgtatgtttacactg

SEQ ID NO: 1529649 - DNA, 15 bp, Homo sapiens
atgtatgtttacact

SEQ ID NO: 1529650 - DNA, 15 bp, Homo sapiens
tatgtatgtttacac

SEQ ID NO: 1529651 - DNA, 15 bp, Homo sapiens
ttatgtatgtttaca

SEQ ID NO: 1529652 - DNA, 15 bp, Homo sapiens
tttatgtatgtttac

SEQ ID NO: 1529653 - DNA, 15 bp, Homo sapiens
ttttatgtatgttta

SEQ ID NO: 1529654 - DNA, 15 bp, Homo sapiens
attttatgtatgttt

SEQ ID NO: 1529655 - DNA, 15 bp, Homo sapiens
tattttatgtatgtt

SEQ ID NO: 1529656 - DNA, 15 bp, Homo sapiens
gtattttatgtatgt

SEQ ID NO: 1529657 - DNA, 15 bp, Homo sapiens
tgtattttatgtatg

SEQ ID NO: 1529658 - DNA, 15 bp, Homo sapiens
atgtattttatgtat

SEQ ID NO: 1529659 - DNA, 15 bp, Homo sapiens
tatgtattttatgta

SEQ ID NO: 1529660 - DNA, 15 bp, Homo sapiens
atatgtattttatgt

SEQ ID NO: 1529661 - DNA, 15 bp, Homo sapiens
aatatgtattttatg

SEQ ID NO: 1529662 - DNA, 15 bp, Homo sapiens
taatatgtattttat

SEQ ID NO: 1529663 - DNA, 15 bp, Homo sapiens
ttaatatgtatttta

SEQ ID NO: 1529664 - DNA, 15 bp, Homo sapiens
tttaatatgtatttt

SEQ ID NO: 1529665 - DNA, 15 bp, Homo sapiens
ctttaatatgtattt

SEQ ID NO: 1529666 - DNA, 15 bp, Homo sapiens
actttaatatgtatt

SEQ ID NO: 1529667 - DNA, 15 bp, Homo sapiens
aactttaatatgtat

SEQ ID NO: 1529668 - DNA, 15 bp, Homo sapiens
taaactttaatatgt

SEQ ID NO: 1529669 - DNA, 15 bp, Homo sapiens
ctaaactttaatatg

SEQ ID NO: 1529670 - DNA, 15 bp, Homo sapiens
tctaaactttaatat

SEQ ID NO: 1529671 - DNA, 15 bp, Homo sapiens
atctaaactttaata

SEQ ID NO: 1529672 - DNA, 15 bp, Homo sapiens
catctaaactttaat

SEQ ID NO: 1529673 - DNA, 15 bp, Homo sapiens
gcatctaaactttaa

SEQ ID NO: 1529674 - DNA, 15 bp, Homo sapiens
agcatctaaacttta

SEQ ID NO: 1529675 - DNA, 15 bp, Homo sapiens
aagcatctaaacttt

SEQ ID NO: 1529676 - DNA, 15 bp, Homo sapiens
aaagcatctaaactt

SEQ ID NO: 1529677 - DNA, 15 bp, Homo sapiens
taaagcatctaaact

SEQ ID NO: 1529678 - DNA, 15 bp, Homo sapiens
ataaagcatctaaac

SEQ ID NO: 1529679 - DNA, 15 bp, Homo sapiens
tataaagcatctaaa

SEQ ID NO: 1529680 - DNA, 15 bp, Homo sapiens
atataaagcatctaa

SEQ ID NO: 1529681 - DNA, 15 bp, Homo sapiens
aatataaagcatcta

SEQ ID NO: 1529682 - DNA, 15 bp, Homo sapiens
aaatataaagcatct

SEQ ID NO: 1529683 - DNA, 15 bp, Homo sapiens
aaaatataaagcatc

SEQ ID NO: 1529684 - DNA, 15 bp, Homo sapiens
caaaatataaagcat

SEQ ID NO: 1529685 - DNA, 15 bp, Homo sapiens
acaaaatataaagca

SEQ ID NO: 1529686 - DNA, 15 bp, Homo sapiens
cacaaaatataaagc

SEQ ID NO: 1529687 - DNA, 15 bp, Homo sapiens
gcacaaaatataaag

SEQ ID NO: 1529688 - DNA, 15 bp, Homo sapiens
tgcacaaaatataaa

SEQ ID NO: 1529689 - DNA, 15 bp, Homo sapiens
ttgcacaaaatataa

SEQ ID NO: 1529690 - DNA, 15 bp, Homo sapiens
attgcacaaaatata

SEQ ID NO: 1529691 - DNA, 15 bp, Homo sapiens
tattgcacaaaatat

SEQ ID NO: 1529692 - DNA, 15 bp, Homo sapiens
ttattgcacaaaata

SEQ ID NO: 1529693 - DNA, 15 bp, Homo sapiens
tttattgcacaaaat

SEQ ID NO: 1529694 - DNA, 15 bp, Homo sapiens
atttattgcacaaaa

SEQ ID NO: 1529695 - DNA, 15 bp, Homo sapiens
aatttattgcacaaa

SEQ ID NO: 1529696 - DNA, 15 bp, Homo sapiens
caatttattgcacaa

SEQ ID NO: 1529697 - DNA, 15 bp, Homo sapiens
tcaatttattgcaca

SEQ ID NO: 1529698 - DNA, 15 bp, Homo sapiens
ttcaatttattgcac

SEQ ID NO: 1529699 - DNA, 15 bp, Homo sapiens
cttcaatttattgca

SEQ ID NO: 1529700 - DNA, 15 bp, Homo sapiens
gcttcaatttattgc

SEQ ID NO: 1529701 - DNA, 15 bp, Homo sapiens
ggcttcaatttattg

SEQ ID NO: 1529702 - DNA, 15 bp, Homo sapiens
aggcttcaatttatt

SEQ ID NO: 1529703 - DNA, 15 bp, Homo sapiens
aaggcttcaatttat

SEQ ID NO: 1529704 - DNA, 15 bp, Homo sapiens
taaggcttcaattta

SEQ ID NO: 1529705 - DNA, 15 bp, Homo sapiens
ttaaggcttcaattt

SEQ ID NO: 1529706 - DNA, 15 bp, Homo sapiens
tttaaggcttcaatt

SEQ ID NO: 1529707 - DNA, 15 bp, Homo sapiens
ttttaaggcttcaat

SEQ ID NO: 1529708 - DNA, 15 bp, Homo sapiens
gttttaaggcttcaa

SEQ ID NO: 1529709 - DNA, 15 bp, Homo sapiens
tgttttaaggcttca

SEQ ID NO: 1529710 - DNA, 15 bp, Homo sapiens
atgttttaaggcttc

SEQ ID NO: 1529711 - DNA, 15 bp, Homo sapiens
aatgttttaaggctt

SEQ ID NO: 1529712 - DNA, 15 bp, Homo sapiens
aaatgttttaaggct

SEQ ID NO: 1529713 - DNA, 15 bp, Homo sapiens
gaaatgttttaaggc

SEQ ID NO: 1529714 - DNA, 15 bp, Homo sapiens
tgaaatgttttaagg

SEQ ID NO: 1529715 - DNA, 15 bp, Homo sapiens
atgaaatgttttaag

SEQ ID NO: 1529716 - DNA, 15 bp, Homo sapiens
aatgaaatgttttaa

SEQ ID NO: 1529717 - DNA, 15 bp, Homo sapiens
aaatgaaatgtttta

SEQ ID NO: 1529718 - DNA, 15 bp, Homo sapiens
aaaatgaaatgtttt

SEQ ID NO: 1529719 - DNA, 15 bp, Homo sapiens
aaaaaaaatgaaatg

SEQ ID NO: 1529720 - DNA, 15 bp, Homo sapiens
taaaaaaaatgaaat

SEQ ID NO: 1529721 - DNA, 15 bp, Homo sapiens
ataaaaaaaatgaaa

SEQ ID NO: 1529722 - DNA, 15 bp, Homo sapiens
tataaaaaaaatgaa

SEQ ID NO: 1529723 - DNA, 15 bp, Homo sapiens
ttataaaaaaaatga

SEQ ID NO: 1529724 - DNA, 15 bp, Homo sapiens
tttataaaaaaaatg

SEQ ID NO: 1529725 - DNA, 15 bp, Homo sapiens
ttttataaaaaaaat

SEQ ID NO: 1529726 - DNA, 15 bp, Homo sapiens
cttttataaaaaaaa

SEQ ID NO: 1529727 - DNA, 15 bp, Homo sapiens
tcttttataaaaaaa

SEQ ID NO: 1529728 - DNA, 15 bp, Homo sapiens
ttcttttataaaaaa

SEQ ID NO: 1529729 - DNA, 15 bp, Homo sapiens
tttcttttataaaaa

SEQ ID NO: 1529730 - DNA, 15 bp, Homo sapiens
gtttcttttataaaa

SEQ ID NO: 1529731 - DNA, 15 bp, Homo sapiens
agtttcttttataaa

SEQ ID NO: 1529732 - DNA, 15 bp, Homo sapiens
gagtttcttttataa

SEQ ID NO: 1529733 - DNA, 15 bp, Homo sapiens
tgagtttcttttata

SEQ ID NO: 1529734 - DNA, 15 bp, Homo sapiens
atgagtttcttttat

SEQ ID NO: 1529735 - DNA, 15 bp, Homo sapiens
aatgagtttctttta

SEQ ID NO: 1529736 - DNA, 15 bp, Homo sapiens
taatgagtttctttt

SEQ ID NO: 1529737 - DNA, 15 bp, Homo sapiens
ctaatgagtttcttt

SEQ ID NO: 1529738 - DNA, 15 bp, Homo sapiens
actaatgagtttctt

SEQ ID NO: 1529739 - DNA, 15 bp, Homo sapiens
aactaatgagtttct

SEQ ID NO: 1529740 - DNA, 15 bp, Homo sapiens
aaactaatgagtttc

SEQ ID NO: 1529741 - DNA, 15 bp, Homo sapiens
taaactaatgagttt

SEQ ID NO: 1529742 - DNA, 15 bp, Homo sapiens
gtaaactaatgagtt

SEQ ID NO: 1529743 - DNA, 15 bp, Homo sapiens
agtaaactaatgagt

SEQ ID NO: 1529744 - DNA, 15 bp, Homo sapiens
aagtaaactaatgag

SEQ ID NO: 1529745 - DNA, 15 bp, Homo sapiens
taagtaaactaatga

SEQ ID NO: 1529746 - DNA, 15 bp, Homo sapiens
ttaagtaaactaatg

SEQ ID NO: 1529747 - DNA, 15 bp, Homo sapiens
attaagtaaactaat

SEQ ID NO: 1529748 - DNA, 15 bp, Homo sapiens
aattaagtaaactaa

SEQ ID NO: 1529749 - DNA, 15 bp, Homo sapiens
taattaagtaaacta

SEQ ID NO: 1529750 - DNA, 15 bp, Homo sapiens
ttaattaagtaaact

SEQ ID NO: 1529751 - DNA, 15 bp, Homo sapiens
cttaattaagtaaac

SEQ ID NO: 1529752 - DNA, 15 bp, Homo sapiens
tcttaattaagtaaa

SEQ ID NO: 1529753 - DNA, 15 bp, Homo sapiens
gtcttaattaagtaa

SEQ ID NO: 1529754 - DNA, 15 bp, Homo sapiens
tgtcttaattaagta

SEQ ID NO: 1529755 - DNA, 15 bp, Homo sapiens
ctgtcttaattaagt

SEQ ID NO: 1529756 - DNA, 15 bp, Homo sapiens
actgtcttaattaag

SEQ ID NO: 1529757 - DNA, 15 bp, Homo sapiens
tactgtcttaattaa

SEQ ID NO: 1529758 - DNA, 15 bp, Homo sapiens
ttactgtcttaatta

SEQ ID NO: 1529759 - DNA, 15 bp, Homo sapiens
tttactgtcttaatt

SEQ ID NO: 1529760 - DNA, 15 bp, Homo sapiens
ttttactgtcttaat

SEQ ID NO: 1529761 - DNA, 15 bp, Homo sapiens
attttactgtcttaa

SEQ ID NO: 1529762 - DNA, 15 bp, Homo sapiens
tattttactgtctta

SEQ ID NO: 1529763 - DNA, 15 bp, Homo sapiens
ctattttactgtctt

SEQ ID NO: 1529764 - DNA, 15 bp, Homo sapiens
gctattttactgtct

SEQ ID NO: 1529765 - DNA, 15 bp, Homo sapiens
tgctattttactgtc

SEQ ID NO: 1529766 - DNA, 15 bp, Homo sapiens
ctgctattttactgt

SEQ ID NO: 1529767 - DNA, 15 bp, Homo sapiens
gctgctattttactg

SEQ ID NO: 1529768 - DNA, 15 bp, Homo sapiens
tgctgctattttact

SEQ ID NO: 1529769 - DNA, 15 bp, Homo sapiens
ttgctgctattttac

SEQ ID NO: 1529770 - DNA, 15 bp, Homo sapiens
cttgctgctatttta

SEQ ID NO: 1529771 - DNA, 15 bp, Homo sapiens
acttgctgctatttt

SEQ ID NO: 1529772 - DNA, 15 bp, Homo sapiens
tacttgctgctattt

SEQ ID NO: 1529773 - DNA, 15 bp, Homo sapiens
gtacttgctgctatt

SEQ ID NO: 1529774 - DNA, 15 bp, Homo sapiens
ggtacttgctgctat

SEQ ID NO: 1529775 - DNA, 15 bp, Homo sapiens
tggtacttgctgcta

SEQ ID NO: 1529776 - DNA, 15 bp, Homo sapiens
ttggtacttgctgct

SEQ ID NO: 1529777 - DNA, 15 bp, Homo sapiens
cttggtacttgctgc

SEQ ID NO: 1529778 - DNA, 15 bp, Homo sapiens
tcttggtacttgctg

SEQ ID NO: 1529779 - DNA, 15 bp, Homo sapiens
gtcttggtacttgct

SEQ ID NO: 1529780 - DNA, 15 bp, Homo sapiens
tgtcttggtacttgc

SEQ ID NO: 1529781 - DNA, 15 bp, Homo sapiens
atgtcttggtacttg

SEQ ID NO: 1529782 - DNA, 15 bp, Homo sapiens
aatgtcttggtactt

SEQ ID NO: 1529783 - DNA, 15 bp, Homo sapiens
caatgtcttggtact

SEQ ID NO: 1529784 - DNA, 15 bp, Homo sapiens
acaatgtcttggtac

SEQ ID NO: 1529785 - DNA, 15 bp, Homo sapiens
cacaatgtcttggta

SEQ ID NO: 1529786 - DNA, 15 bp, Homo sapiens
gcacaatgtcttggt

SEQ ID NO: 1529787 - DNA, 15 bp, Homo sapiens
tgcacaatgtcttgg

SEQ ID NO: 1529788 - DNA, 15 bp, Homo sapiens
atgcacaatgtcttg

SEQ ID NO: 1529789 - DNA, 15 bp, Homo sapiens
aatgcacaatgtctt

SEQ ID NO: 1529790 - DNA, 15 bp, Homo sapiens
aaatgcacaatgtct

SEQ ID NO: 1529791 - DNA, 15 bp, Homo sapiens
gaaatgcacaatgtc

SEQ ID NO: 1529792 - DNA, 15 bp, Homo sapiens
agaaatgcacaatgt

SEQ ID NO: 1529793 - DNA, 15 bp, Homo sapiens
aagaaatgcacaatg

SEQ ID NO: 1529794 - DNA, 15 bp, Homo sapiens
aaagaaatgcacaat

SEQ ID NO: 1529795 - DNA, 15 bp, Homo sapiens
aaaagaaatgcacaa

SEQ ID NO: 1529796 - DNA, 15 bp, Homo sapiens
taaaagaaatgcaca

SEQ ID NO: 1529797 - DNA, 15 bp, Homo sapiens
ataaaagaaatgcac

SEQ ID NO: 1529798 - DNA, 15 bp, Homo sapiens
aataaaagaaatgca

SEQ ID NO: 1529799 - DNA, 15 bp, Homo sapiens
aaataaaagaaatgc

SEQ ID NO: 1529800 - DNA, 15 bp, Homo sapiens
taaataaaagaaatg

SEQ ID NO: 1529801 - DNA, 15 bp, Homo sapiens
ttaaataaaagaaat

SEQ ID NO: 1529802 - DNA, 15 bp, Homo sapiens
cttaaataaaagaaa

SEQ ID NO: 1529803 - DNA, 15 bp, Homo sapiens
tcttaaataaaagaa

SEQ ID NO: 1529804 - DNA, 15 bp, Homo sapiens
gtcttaaataaaaga

SEQ ID NO: 1529805 - DNA, 15 bp, Homo sapiens
tgtcttaaataaaag

SEQ ID NO: 1529806 - DNA, 15 bp, Homo sapiens
ttgtcttaaataaaa

SEQ ID NO: 1529807 - DNA, 15 bp, Homo sapiens
cttgtcttaaataaa

SEQ ID NO: 1529808 - DNA, 15 bp, Homo sapiens
acttgtcttaaataa

SEQ ID NO: 1529809 - DNA, 15 bp, Homo sapiens
aacttgtcttaaata

SEQ ID NO: 1529810 - DNA, 15 bp, Homo sapiens
taacttgtcttaaat

SEQ ID NO: 1529811 - DNA, 15 bp, Homo sapiens
gtaacttgtcttaaa

SEQ ID NO: 1529812 - DNA, 15 bp, Homo sapiens
agtaacttgtcttaa

SEQ ID NO: 1529813 - DNA, 15 bp, Homo sapiens
aagtaacttgtctta

SEQ ID NO: 1529814 - DNA, 15 bp, Homo sapiens
gaagtaacttgtctt

SEQ ID NO: 1529815 - DNA, 15 bp, Homo sapiens
tgaagtaacttgtct

SEQ ID NO: 1529816 - DNA, 15 bp, Homo sapiens
atgaagtaacttgtc

SEQ ID NO: 1529817 - DNA, 15 bp, Homo sapiens
aatgaagtaacttgt

SEQ ID NO: 1529818 - DNA, 15 bp, Homo sapiens
aaatgaagtaacttg

SEQ ID NO: 1529819 - DNA, 15 bp, Homo sapiens
taaatgaagtaactt

SEQ ID NO: 1529820 - DNA, 15 bp, Homo sapiens
gtaaatgaagtaact

SEQ ID NO: 1529821 - DNA, 15 bp, Homo sapiens
tgtaaatgaagtaac

SEQ ID NO: 1529822 - DNA, 15 bp, Homo sapiens
atgtaaatgaagtaa

SEQ ID NO: 1529823 - DNA, 15 bp, Homo sapiens
gatgtaaatgaagta

SEQ ID NO: 1529824 - DNA, 15 bp, Homo sapiens
tgatgtaaatgaagt

SEQ ID NO: 1529825 - DNA, 15 bp, Homo sapiens
ctgatgtaaatgaag

SEQ ID NO: 1529826 - DNA, 15 bp, Homo sapiens
tctgatgtaaatgaa

SEQ ID NO: 1529827 - DNA, 15 bp, Homo sapiens
ctctgatgtaaatga

SEQ ID NO: 1529828 - DNA, 15 bp, Homo sapiens
actctgatgtaaatg

SEQ ID NO: 1529829 - DNA, 15 bp, Homo sapiens
aactctgatgtaaat

SEQ ID NO: 1529830 - DNA, 15 bp, Homo sapiens
taactctgatgtaaa

SEQ ID NO: 1529831 - DNA, 15 bp, Homo sapiens
ctaactctgatgtaa

SEQ ID NO: 1529832 - DNA, 15 bp, Homo sapiens
tctaactctgatgta

SEQ ID NO: 1529833 - DNA, 15 bp, Homo sapiens
ttctaactctgatgt

SEQ ID NO: 1529834 - DNA, 15 bp, Homo sapiens
tttctaactctgatg

SEQ ID NO: 1529835 - DNA, 15 bp, Homo sapiens
atttctaactctgat

SEQ ID NO: 1529836 - DNA, 15 bp, Homo sapiens
catttctaactctga

SEQ ID NO: 1529837 - DNA, 15 bp, Homo sapiens
acatttctaactctg

SEQ ID NO: 1529838 - DNA, 15 bp, Homo sapiens
aacatttctaactct

SEQ ID NO: 1529839 - DNA, 15 bp, Homo sapiens
taacatttctaactc

SEQ ID NO: 1529840 - DNA, 15 bp, Homo sapiens
ttaacatttctaact

SEQ ID NO: 1529841 - DNA, 15 bp, Homo sapiens
cttaacatttctaac

SEQ ID NO: 1529842 - DNA, 15 bp, Homo sapiens
tcttaacatttctaa

SEQ ID NO: 1529843 - DNA, 15 bp, Homo sapiens
gtcttaacatttcta

SEQ ID NO: 1529844 - DNA, 15 bp, Homo sapiens
agtcttaacatttct

SEQ ID NO: 1529845 - DNA, 15 bp, Homo sapiens
cagtcttaacatttc

SEQ ID NO: 1529846 - DNA, 15 bp, Homo sapiens
ccagtcttaacattt

SEQ ID NO: 1529847 - DNA, 15 bp, Homo sapiens
gccagtcttaacatt

SEQ ID NO: 1529848 - DNA, 15 bp, Homo sapiens
agccagtcttaacat

SEQ ID NO: 1529849 - DNA, 15 bp, Homo sapiens
aagccagtcttaaca

SEQ ID NO: 1529850 - DNA, 15 bp, Homo sapiens
aaagccagtcttaac

SEQ ID NO: 1529851 - DNA, 15 bp, Homo sapiens
gaaagccagtcttaa

SEQ ID NO: 1529852 - DNA, 15 bp, Homo sapiens
agaaagccagtctta

SEQ ID NO: 1529853 - DNA, 15 bp, Homo sapiens
aagaaagccagtctt

SEQ ID NO: 1529854 - DNA, 15 bp, Homo sapiens
caagaaagccagtct

SEQ ID NO: 1529855 - DNA, 15 bp, Homo sapiens
tcaagaaagccagtc

SEQ ID NO: 1529856 - DNA, 15 bp, Homo sapiens
ttcaagaaagccagt

SEQ ID NO: 1529857 - DNA, 15 bp, Homo sapiens
attcaagaaagccag

SEQ ID NO: 1529858 - DNA, 15 bp, Homo sapiens
tattcaagaaagcca

SEQ ID NO: 1529859 - DNA, 15 bp, Homo sapiens
gtattcaagaaagcc

SEQ ID NO: 1529860 - DNA, 15 bp, Homo sapiens
agtattcaagaaagc

SEQ ID NO: 1529861 - DNA, 15 bp, Homo sapiens
aagtattcaagaaag

SEQ ID NO: 1529862 - DNA, 15 bp, Homo sapiens
taagtattcaagaaa

SEQ ID NO: 1529863 - DNA, 15 bp, Homo sapiens
ttaagtattcaagaa

SEQ ID NO: 1529864 - DNA, 15 bp, Homo sapiens
tttaagtattcaaga

SEQ ID NO: 1529865 - DNA, 15 bp, Homo sapiens
atttaagtattcaag

SEQ ID NO: 1529866 - DNA, 15 bp, Homo sapiens
tatttaagtattcaa

SEQ ID NO: 1529867 - DNA, 15 bp, Homo sapiens
atatttaagtattca

SEQ ID NO: 1529868 - DNA, 15 bp, Homo sapiens
tatatttaagtattc

SEQ ID NO: 1529869 - DNA, 15 bp, Homo sapiens
ctatatttaagtatt

SEQ ID NO: 1529870 - DNA, 15 bp, Homo sapiens
gctatatttaagtat

SEQ ID NO: 1529871 - DNA, 15 bp, Homo sapiens
agctatatttaagta

SEQ ID NO: 1529872 - DNA, 15 bp, Homo sapiens
gagctatatttaagt

SEQ ID NO: 1529873 - DNA, 15 bp, Homo sapiens
cgagctatatttaag

SEQ ID NO: 1529874 - DNA, 15 bp, Homo sapiens
tcgagctatatttaa

SEQ ID NO: 1529875 - DNA, 15 bp, Homo sapiens
ttcgagctatattta

SEQ ID NO: 1529876 - DNA, 15 bp, Homo sapiens
attcgagctatattt

SEQ ID NO: 1529877 - DNA, 15 bp, Homo sapiens
gattcgagctatatt

SEQ ID NO: 1529878 - DNA, 15 bp, Homo sapiens
tgattcgagctatat

SEQ ID NO: 1529879 - DNA, 15 bp, Homo sapiens
gtgattcgagctata

SEQ ID NO: 1529880 - DNA, 15 bp, Homo sapiens
agtgattcgagctat

SEQ ID NO: 1529881 - DNA, 15 bp, Homo sapiens
cagtgattcgagcta

SEQ ID NO: 1529882 - DNA, 15 bp, Homo sapiens
ccagtgattcgagct

SEQ ID NO: 1529883 - DNA, 15 bp, Homo sapiens
accagtgattcgagc

SEQ ID NO: 1529884 - DNA, 15 bp, Homo sapiens
aaccagtgattcgag

SEQ ID NO: 1529885 - DNA, 15 bp, Homo sapiens
taaccagtgattcga

SEQ ID NO: 1529886 - DNA, 15 bp, Homo sapiens
ctaaccagtgattcg

SEQ ID NO: 1529887 - DNA, 15 bp, Homo sapiens
tctaaccagtgattc

SEQ ID NO: 1529888 - DNA, 15 bp, Homo sapiens
atctaaccagtgatt

SEQ ID NO: 1529889 - DNA, 15 bp, Homo sapiens
tatctaaccagtgat

SEQ ID NO: 1529890 - DNA, 15 bp, Homo sapiens
atatctaaccagtga

SEQ ID NO: 1529891 - DNA, 15 bp, Homo sapiens
catatctaaccagtg

SEQ ID NO: 1529892 - DNA, 15 bp, Homo sapiens
ccatatctaaccagt

SEQ ID NO: 1529893 - DNA, 15 bp, Homo sapiens
tccatatctaaccag

SEQ ID NO: 1529894 - DNA, 15 bp, Homo sapiens
gtccatatctaacca

SEQ ID NO: 1529895 - DNA, 15 bp, Homo sapiens
tgtccatatctaacc

SEQ ID NO: 1529896 - DNA, 15 bp, Homo sapiens
atgtccatatctaac

SEQ ID NO: 1529897 - DNA, 15 bp, Homo sapiens
tatgtccatatctaa

SEQ ID NO: 1529898 - DNA, 15 bp, Homo sapiens
atatgtccatatcta

SEQ ID NO: 1529899 - DNA, 15 bp, Homo sapiens
aatatgtccatatct

SEQ ID NO: 1529900 - DNA, 15 bp, Homo sapiens
aaatatgtccatatc

SEQ ID NO: 1529901 - DNA, 15 bp, Homo sapiens
aaaatatgtccatat

SEQ ID NO: 1529902 - DNA, 15 bp, Homo sapiens
gaaaatatgtccata

SEQ ID NO: 1529903 - DNA, 15 bp, Homo sapiens
ggaaaatatgtccat

SEQ ID NO: 1529904 - DNA, 15 bp, Homo sapiens
gggaaaatatgtcca

SEQ ID NO: 1529905 - DNA, 15 bp, Homo sapiens
tgggaaaatatgtcc

SEQ ID NO: 1529906 - DNA, 15 bp, Homo sapiens
ttgggaaaatatgtc

SEQ ID NO: 1529907 - DNA, 15 bp, Homo sapiens
gttgggaaaatatgt

SEQ ID NO: 1529908 - DNA, 15 bp, Homo sapiens
agttgggaaaatatg

SEQ ID NO: 1529909 - DNA, 15 bp, Homo sapiens
cagttgggaaaatat

SEQ ID NO: 1529910 - DNA, 15 bp, Homo sapiens
acagttgggaaaata

SEQ ID NO: 1529911 - DNA, 15 bp, Homo sapiens
tacagttgggaaaat

SEQ ID NO: 1529912 - DNA, 15 bp, Homo sapiens
gtacagttgggaaaa

SEQ ID NO: 1529913 - DNA, 15 bp, Homo sapiens
tgtacagttgggaaa

SEQ ID NO: 1529914 - DNA, 15 bp, Homo sapiens
atgtacagttgggaa

SEQ ID NO: 1529915 - DNA, 15 bp, Homo sapiens
gatgtacagttggga

SEQ ID NO: 1529916 - DNA, 15 bp, Homo sapiens
tgatgtacagttggg

SEQ ID NO: 1529917 - DNA, 15 bp, Homo sapiens
ctgatgtacagttgg

SEQ ID NO: 1529918 - DNA, 15 bp, Homo sapiens
cctgatgtacagttg

SEQ ID NO: 1529919 - DNA, 15 bp, Homo sapiens
ccctgatgtacagtt

SEQ ID NO: 1529920 - DNA, 15 bp, Homo sapiens
tccctgatgtacagt

SEQ ID NO: 1529921 - DNA, 15 bp, Homo sapiens
ctccctgatgtacag

SEQ ID NO: 1529922 - DNA, 15 bp, Homo sapiens
cctccctgatgtaca

SEQ ID NO: 1529923 - DNA, 15 bp, Homo sapiens
tcctccctgatgtac

SEQ ID NO: 1529924 - DNA, 15 bp, Homo sapiens
ctcctccctgatgta

SEQ ID NO: 1529925 - DNA, 15 bp, Homo sapiens
actcctccctgatgt

SEQ ID NO: 1529926 - DNA, 15 bp, Homo sapiens
cactcctccctgatg

SEQ ID NO: 1529927 - DNA, 15 bp, Homo sapiens
gcactcctccctgat

SEQ ID NO: 1529928 - DNA, 15 bp, Homo sapiens
agcactcctccctga

SEQ ID NO: 1529929 - DNA, 15 bp, Homo sapiens
aagcactcctccctg

SEQ ID NO: 1529930 - DNA, 15 bp, Homo sapiens
aaagcactcctccct

SEQ ID NO: 1529931 - DNA, 15 bp, Homo sapiens
gaaagcactcctccc

SEQ ID NO: 1529932 - DNA, 15 bp, Homo sapiens
tgaaagcactcctcc

SEQ ID NO: 1529933 - DNA, 15 bp, Homo sapiens
atgaaagcactcctc

SEQ ID NO: 1529934 - DNA, 15 bp, Homo sapiens
aatgaaagcactcct

SEQ ID NO: 1529935 - DNA, 15 bp, Homo sapiens
taatgaaagcactcc

SEQ ID NO: 1529936 - DNA, 15 bp, Homo sapiens
ctaatgaaagcactc

SEQ ID NO: 1529937 - DNA, 15 bp, Homo sapiens
actaatgaaagcact

SEQ ID NO: 1529938 - DNA, 15 bp, Homo sapiens
aactaatgaaagcac

SEQ ID NO: 1529939 - DNA, 15 bp, Homo sapiens
aaactaatgaaagca

SEQ ID NO: 1529940 - DNA, 15 bp, Homo sapiens
gaaactaatgaaagc

SEQ ID NO: 1529941 - DNA, 15 bp, Homo sapiens
tgaaactaatgaaag

SEQ ID NO: 1529942 - DNA, 15 bp, Homo sapiens
ctgaaactaatgaaa

SEQ ID NO: 1529943 - DNA, 15 bp, Homo sapiens
tctgaaactaatgaa

SEQ ID NO: 1529944 - DNA, 15 bp, Homo sapiens
ttctgaaactaatga

SEQ ID NO: 1529945 - DNA, 15 bp, Homo sapiens
tttctgaaactaatg

SEQ ID NO: 1529946 - DNA, 15 bp, Homo sapiens
ttttctgaaactaat

SEQ ID NO: 1529947 - DNA, 15 bp, Homo sapiens
attttctgaaactaa

SEQ ID NO: 1529948 - DNA, 15 bp, Homo sapiens
cattttctgaaacta

SEQ ID NO: 1529949 - DNA, 15 bp, Homo sapiens
gcattttctgaaact

SEQ ID NO: 1529950 - DNA, 15 bp, Homo sapiens
tgcattttctgaaac

SEQ ID NO: 1529951 - DNA, 15 bp, Homo sapiens
ctgcattttctgaaa

SEQ ID NO: 1529952 - DNA, 15 bp, Homo sapiens
tctgcattttctgaa

SEQ ID NO: 1529953 - DNA, 15 bp, Homo sapiens
gtctgcattttctga

SEQ ID NO: 1529954 - DNA, 15 bp, Homo sapiens
ggtctgcattttctg

SEQ ID NO: 1529955 - DNA, 15 bp, Homo sapiens
gggtctgcattttct

SEQ ID NO: 1529956 - DNA, 15 bp, Homo sapiens
agggtctgcattttc

SEQ ID NO: 1529957 - DNA, 15 bp, Homo sapiens
gagggtctgcatttt

SEQ ID NO: 1529958 - DNA, 15 bp, Homo sapiens
tgagggtctgcattt

SEQ ID NO: 1529959 - DNA, 15 bp, Homo sapiens
ctgagggtctgcatt

SEQ ID NO: 1529960 - DNA, 15 bp, Homo sapiens
tctgagggtctgcat

SEQ ID NO: 1529961 - DNA, 15 bp, Homo sapiens
gtctgagggtctgca

SEQ ID NO: 1529962 - DNA, 15 bp, Homo sapiens
tgtctgagggtctgc

SEQ ID NO: 1529963 - DNA, 15 bp, Homo sapiens
ctgtctgagggtctg

SEQ ID NO: 1529964 - DNA, 15 bp, Homo sapiens
gctgtctgagggtct

SEQ ID NO: 1529965 - DNA, 15 bp, Homo sapiens
ggctgtctgagggtc

SEQ ID NO: 1529966 - DNA, 15 bp, Homo sapiens
tggctgtctgagggt

SEQ ID NO: 1529967 - DNA, 15 bp, Homo sapiens
ctggctgtctgaggg

SEQ ID NO: 1529968 - DNA, 15 bp, Homo sapiens
gctggctgtctgagg

SEQ ID NO: 1529969 - DNA, 15 bp, Homo sapiens
tgctggctgtctgag

SEQ ID NO: 1529970 - DNA, 15 bp, Homo sapiens
atgctggctgtctga

SEQ ID NO: 1529971 - DNA, 15 bp, Homo sapiens
catgctggctgtctg

SEQ ID NO: 1529972 - DNA, 15 bp, Homo sapiens
tcatgctggctgtct

SEQ ID NO: 1529973 - DNA, 15 bp, Homo sapiens
gtcatgctggctgtc

SEQ ID NO: 1529974 - DNA, 15 bp, Homo sapiens
ggtcatgctggctgt

SEQ ID NO: 1529975 - DNA, 15 bp, Homo sapiens
tggtcatgctggctg

SEQ ID NO: 1529976 - DNA, 15 bp, Homo sapiens
gtggtcatgctggct

SEQ ID NO: 1529977 - DNA, 15 bp, Homo sapiens
tgtggtcatgctggc

SEQ ID NO: 1529978 - DNA, 15 bp, Homo sapiens
ttgtggtcatgctgg

SEQ ID NO: 1529979 - DNA, 15 bp, Homo sapiens
gttgtggtcatgctg

SEQ ID NO: 1529980 - DNA, 15 bp, Homo sapiens
tgttgtggtcatgct

SEQ ID NO: 1529981 - DNA, 15 bp, Homo sapiens
atgttgtggtcatgc

SEQ ID NO: 1529982 - DNA, 15 bp, Homo sapiens
aatgttgtggtcatg

SEQ ID NO: 1529983 - DNA, 15 bp, Homo sapiens
caatgttgtggtcat

SEQ ID NO: 1529984 - DNA, 15 bp, Homo sapiens
tcaatgttgtggtca

SEQ ID NO: 1529985 - DNA, 15 bp, Homo sapiens
ctcaatgttgtggtc

SEQ ID NO: 1529986 - DNA, 15 bp, Homo sapiens
gctcaatgttgtggt

SEQ ID NO: 1529987 - DNA, 15 bp, Homo sapiens
tgctcaatgttgtgg

SEQ ID NO: 1529988 - DNA, 15 bp, Homo sapiens
ttgctcaatgttgtg

SEQ ID NO: 1529989 - DNA, 15 bp, Homo sapiens
attgctcaatgttgt

SEQ ID NO: 1529990 - DNA, 15 bp, Homo sapiens
tattgctcaatgttg

SEQ ID NO: 1529991 - DNA, 15 bp, Homo sapiens
ttattgctcaatgtt

SEQ ID NO: 1529992 - DNA, 15 bp, Homo sapiens
cttattgctcaatgt

SEQ ID NO: 1529993 - DNA, 15 bp, Homo sapiens
tcttattgctcaatg

SEQ ID NO: 1529994 - DNA, 15 bp, Homo sapiens
ctcttattgctcaat

SEQ ID NO: 1529995 - DNA, 15 bp, Homo sapiens
tctcttattgctcaa

SEQ ID NO: 1529996 - DNA, 15 bp, Homo sapiens
ttctcttattgctca

SEQ ID NO: 1529997 - DNA, 15 bp, Homo sapiens
tttctcttattgctc

SEQ ID NO: 1529998 - DNA, 15 bp, Homo sapiens
atttctcttattgct

SEQ ID NO: 1529999 - DNA, 15 bp, Homo sapiens
catttctcttattgc

SEQ ID NO: 1530000 - DNA, 15 bp, Homo sapiens
tcatttctcttattg

SEQ ID NO: 1530001 - DNA, 15 bp, Homo sapiens
ttcatttctcttatt

SEQ ID NO: 1530002 - DNA, 15 bp, Homo sapiens
cttcatttctcttat

SEQ ID NO: 1530003 - DNA, 15 bp, Homo sapiens
gcttcatttctctta

SEQ ID NO: 1530004 - DNA, 15 bp, Homo sapiens
tgcttcatttctctt

SEQ ID NO: 1530005 - DNA, 15 bp, Homo sapiens
atgcttcatttctct

SEQ ID NO: 1530006 - DNA, 15 bp, Homo sapiens
aatgcttcatttctc

SEQ ID NO: 1530007 - DNA, 15 bp, Homo sapiens
aaatgcttcatttct

SEQ ID NO: 1530008 - DNA, 15 bp, Homo sapiens
taaatgcttcatttc

SEQ ID NO: 1530009 - DNA, 15 bp, Homo sapiens
gtaaatgcttcattt

SEQ ID NO: 1530010 - DNA, 15 bp, Homo sapiens
agtaaatgcttcatt

SEQ ID NO: 1530011 - DNA, 15 bp, Homo sapiens
aagtaaatgcttcat

SEQ ID NO: 1530012 - DNA, 15 bp, Homo sapiens
aaagtaaatgcttca

SEQ ID NO: 1530013 - DNA, 15 bp, Homo sapiens
gaaagtaaatgcttc

SEQ ID NO: 1530014 - DNA, 15 bp, Homo sapiens
ggaaagtaaatgctt

SEQ ID NO: 1530015 - DNA, 15 bp, Homo sapiens
tggaaagtaaatgct

SEQ ID NO: 1530016 - DNA, 15 bp, Homo sapiens
ttggaaagtaaatgc

SEQ ID NO: 1530017 - DNA, 15 bp, Homo sapiens
cttggaaagtaaatg

SEQ ID NO: 1530018 - DNA, 15 bp, Homo sapiens
gcttggaaagtaaat

SEQ ID NO: 1530019 - DNA, 15 bp, Homo sapiens
tgcttggaaagtaaa

SEQ ID NO: 1530020 - DNA, 15 bp, Homo sapiens
atgcttggaaagtaa

SEQ ID NO: 1530021 - DNA, 15 bp, Homo sapiens
aatgcttggaaagta

SEQ ID NO: 1530022 - DNA, 15 bp, Homo sapiens
aaatgcttggaaagt

SEQ ID NO: 1530023 - DNA, 15 bp, Homo sapiens
caaatgcttggaaag

SEQ ID NO: 1530024 - DNA, 15 bp, Homo sapiens
gcaaatgcttggaaa

SEQ ID NO: 1530025 - DNA, 15 bp, Homo sapiens
ggcaaatgcttggaa

SEQ ID NO: 1530026 - DNA, 15 bp, Homo sapiens
gtggcaaatgcttgg

SEQ ID NO: 1530027 - DNA, 15 bp, Homo sapiens
tgtggcaaatgcttg

SEQ ID NO: 1530028 - DNA, 15 bp, Homo sapiens
ctgtggcaaatgctt

SEQ ID NO: 1530029 - DNA, 15 bp, Homo sapiens
tctgtggcaaatgct

SEQ ID NO: 1530030 - DNA, 15 bp, Homo sapiens
ttctgtggcaaatgc

SEQ ID NO: 1530031 - DNA, 15 bp, Homo sapiens
cttctgtggcaaatg

SEQ ID NO: 1530032 - DNA, 15 bp, Homo sapiens
ccttctgtggcaaat

SEQ ID NO: 1530033 - DNA, 15 bp, Homo sapiens
accttctgtggcaaa

SEQ ID NO: 1530034 - DNA, 15 bp, Homo sapiens
taccttctgtggcaa

SEQ ID NO: 1530035 - DNA, 15 bp, Homo sapiens
ttaccttctgtggca

SEQ ID NO: 1530036 - DNA, 15 bp, Homo sapiens
attaccttctgtggc

SEQ ID NO: 1530037 - DNA, 15 bp, Homo sapiens
cattaccttctgtgg

SEQ ID NO: 1530038 - DNA, 15 bp, Homo sapiens
ccattaccttctgtg

SEQ ID NO: 1530039 - DNA, 15 bp, Homo sapiens
tccattaccttctgt

SEQ ID NO: 1530040 - DNA, 15 bp, Homo sapiens
ctccattaccttctg

SEQ ID NO: 1530041 - DNA, 15 bp, Homo sapiens
actccattaccttct

SEQ ID NO: 1530042 - DNA, 15 bp, Homo sapiens
gactccattaccttc

SEQ ID NO: 1530043 - DNA, 15 bp, Homo sapiens
agactccattacctt

SEQ ID NO: 1530044 - DNA, 15 bp, Homo sapiens
aagactccattacct

SEQ ID NO: 1530045 - DNA, 15 bp, Homo sapiens
aaagactccattacc

SEQ ID NO: 1530046 - DNA, 15 bp, Homo sapiens
taaagactccattac

SEQ ID NO: 1530047 - DNA, 15 bp, Homo sapiens
gtaaagactccatta

SEQ ID NO: 1530048 - DNA, 15 bp, Homo sapiens
tgtaaagactccatt

SEQ ID NO: 1530049 - DNA, 15 bp, Homo sapiens
atgtaaagactccat

SEQ ID NO: 1530050 - DNA, 15 bp, Homo sapiens
aatgtaaagactcca

SEQ ID NO: 1530051 - DNA, 15 bp, Homo sapiens
aaatgtaaagactcc

SEQ ID NO: 1530052 - DNA, 15 bp, Homo sapiens
caaatgtaaagactc

SEQ ID NO: 1530053 - DNA, 15 bp, Homo sapiens
acaaatgtaaagact

SEQ ID NO: 1530054 - DNA, 15 bp, Homo sapiens
cacaaatgtaaagac

SEQ ID NO: 1530055 - DNA, 15 bp, Homo sapiens
ccacaaatgtaaaga

SEQ ID NO: 1530056 - DNA, 15 bp, Homo sapiens
accacaaatgtaaag

SEQ ID NO: 1530057 - DNA, 15 bp, Homo sapiens
aaccacaaatgtaaa

SEQ ID NO: 1530058 - DNA, 15 bp, Homo sapiens
caaccacaaatgtaa

SEQ ID NO: 1530059 - DNA, 15 bp, Homo sapiens
acaaccacaaatgta

SEQ ID NO: 1530060 - DNA, 15 bp, Homo sapiens
gacaaccacaaatgt

SEQ ID NO: 1530061 - DNA, 15 bp, Homo sapiens
agacaaccacaaatg

SEQ ID NO: 1530062 - DNA, 15 bp, Homo sapiens
gagacaaccacaaat

SEQ ID NO: 1530063 - DNA, 15 bp, Homo sapiens
agagacaaccacaaa

SEQ ID NO: 1530064 - DNA, 15 bp, Homo sapiens
aagagacaaccacaa

SEQ ID NO: 1530065 - DNA, 15 bp, Homo sapiens
gaagagacaaccaca

SEQ ID NO: 1530066 - DNA, 15 bp, Homo sapiens
ggaagagacaaccac

SEQ ID NO: 1530067 - DNA, 15 bp, Homo sapiens
gggaagagacaacca

SEQ ID NO: 1530068 - DNA, 15 bp, Homo sapiens
agggaagagacaacc

SEQ ID NO: 1530069 - DNA, 15 bp, Homo sapiens
gagggaagagacaac

SEQ ID NO: 1530070 - DNA, 15 bp, Homo sapiens
ggagggaagagacaa

SEQ ID NO: 1530071 - DNA, 15 bp, Homo sapiens
tggagggaagagaca

SEQ ID NO: 1530072 - DNA, 15 bp, Homo sapiens
atggagggaagagac

SEQ ID NO: 1530073 - DNA, 15 bp, Homo sapiens
tatggagggaagaga

SEQ ID NO: 1530074 - DNA, 15 bp, Homo sapiens
ttatggagggaagag

SEQ ID NO: 1530075 - DNA, 15 bp, Homo sapiens
cttatggagggaaga

SEQ ID NO: 1530076 - DNA, 15 bp, Homo sapiens
acttatggagggaag

SEQ ID NO: 1530077 - DNA, 15 bp, Homo sapiens
aacttatggagggaa

SEQ ID NO: 1530078 - DNA, 15 bp, Homo sapiens
taacttatggaggga

SEQ ID NO: 1530079 - DNA, 15 bp, Homo sapiens
ttaacttatggaggg

SEQ ID NO: 1530080 - DNA, 15 bp, Homo sapiens
cttaacttatggagg

SEQ ID NO: 1530081 - DNA, 15 bp, Homo sapiens
ccttaacttatggag

SEQ ID NO: 1530082 - DNA, 15 bp, Homo sapiens
cccttaacttatgga

SEQ ID NO: 1530083 - DNA, 15 bp, Homo sapiens
acccttaacttatgg

SEQ ID NO: 1530084 - DNA, 15 bp, Homo sapiens
aacccttaacttatg

SEQ ID NO: 1530085 - DNA, 15 bp, Homo sapiens
caacccttaacttat

SEQ ID NO: 1530086 - DNA, 15 bp, Homo sapiens
acaacccttaactta

SEQ ID NO: 1530087 - DNA, 15 bp, Homo sapiens
cacaacccttaactt

SEQ ID NO: 1530088 - DNA, 15 bp, Homo sapiens
gcacaacccttaact

SEQ ID NO: 1530089 - DNA, 15 bp, Homo sapiens
agcacaacccttaac

SEQ ID NO: 1530090 - DNA, 15 bp, Homo sapiens
aagcacaacccttaa

SEQ ID NO: 1530091 - DNA, 15 bp, Homo sapiens
aaagcacaaccctta

SEQ ID NO: 1530092 - DNA, 15 bp, Homo sapiens
caaagcacaaccctt

SEQ ID NO: 1530093 - DNA, 15 bp, Homo sapiens
acaaagcacaaccct

SEQ ID NO: 1530094 - DNA, 15 bp, Homo sapiens
aacaaagcacaaccc

SEQ ID NO: 1530095 - DNA, 15 bp, Homo sapiens
caacaaagcacaacc

SEQ ID NO: 1530096 - DNA, 15 bp, Homo sapiens
tcaacaaagcacaac

SEQ ID NO: 1530097 - DNA, 15 bp, Homo sapiens
ctcaacaaagcacaa

SEQ ID NO: 1530098 - DNA, 15 bp, Homo sapiens
cctcaacaaagcaca

SEQ ID NO: 1530099 - DNA, 15 bp, Homo sapiens
gcctcaacaaagcac

SEQ ID NO: 1530100 - DNA, 15 bp, Homo sapiens
tgcctcaacaaagca

SEQ ID NO: 1530101 - DNA, 15 bp, Homo sapiens
atgcctcaacaaagc

SEQ ID NO: 1530102 - DNA, 15 bp, Homo sapiens
aatgcctcaacaaag

SEQ ID NO: 1530103 - DNA, 15 bp, Homo sapiens
aaatgcctcaacaaa

SEQ ID NO: 1530104 - DNA, 15 bp, Homo sapiens
gaaatgcctcaacaa

SEQ ID NO: 1530105 - DNA, 15 bp, Homo sapiens
tgaaatgcctcaaca

SEQ ID NO: 1530106 - DNA, 15 bp, Homo sapiens
ctgaaatgcctcaac

SEQ ID NO: 1530107 - DNA, 15 bp, Homo sapiens
tctgaaatgcctcaa

SEQ ID NO: 1530108 - DNA, 15 bp, Homo sapiens
ctctgaaatgcctca

SEQ ID NO: 1530109 - DNA, 15 bp, Homo sapiens
tctctgaaatgcctc

SEQ ID NO: 1530110 - DNA, 15 bp, Homo sapiens
ttctctgaaatgcct

SEQ ID NO: 1530111 - DNA, 15 bp, Homo sapiens
tttctctgaaatgcc

SEQ ID NO: 1530112 - DNA, 15 bp, Homo sapiens
atttctctgaaatgc

SEQ ID NO: 1530113 - DNA, 15 bp, Homo sapiens
aatttctctgaaatg

SEQ ID NO: 1530114 - DNA, 15 bp, Homo sapiens
taatttctctgaaat

SEQ ID NO: 1530115 - DNA, 15 bp, Homo sapiens
ataatttctctgaaa

SEQ ID NO: 1530116 - DNA, 15 bp, Homo sapiens
aataatttctctgaa

SEQ ID NO: 1530117 - DNA, 15 bp, Homo sapiens
aaataatttctctga

SEQ ID NO: 1530118 - DNA, 15 bp, Homo sapiens
caaataatttctctg

SEQ ID NO: 1530119 - DNA, 15 bp, Homo sapiens
ccaaataatttctct

SEQ ID NO: 1530120 - DNA, 15 bp, Homo sapiens
gccaaataatttctc

SEQ ID NO: 1530121 - DNA, 15 bp, Homo sapiens
tgccaaataatttct

SEQ ID NO: 1530122 - DNA, 15 bp, Homo sapiens
atgccaaataatttc

SEQ ID NO: 1530123 - DNA, 15 bp, Homo sapiens
catgccaaataattt

SEQ ID NO: 1530124 - DNA, 15 bp, Homo sapiens
gcatgccaaataatt

SEQ ID NO: 1530125 - DNA, 15 bp, Homo sapiens
ggcatgccaaataat

SEQ ID NO: 1530126 - DNA, 15 bp, Homo sapiens
tggcatgccaaataa

SEQ ID NO: 1530127 - DNA, 15 bp, Homo sapiens
gtggcatgccaaata

SEQ ID NO: 1530128 - DNA, 15 bp, Homo sapiens
agtggcatgccaaat

SEQ ID NO: 1530129 - DNA, 15 bp, Homo sapiens
tagtggcatgccaaa

SEQ ID NO: 1530130 - DNA, 15 bp, Homo sapiens
ctagtggcatgccaa

SEQ ID NO: 1530131 - DNA, 15 bp, Homo sapiens
actagtggcatgcca

SEQ ID NO: 1530132 - DNA, 15 bp, Homo sapiens
cactagtggcatgcc

SEQ ID NO: 1530133 - DNA, 15 bp, Homo sapiens
tcactagtggcatgc

SEQ ID NO: 1530134 - DNA, 15 bp, Homo sapiens
atcactagtggcatg

SEQ ID NO: 1530135 - DNA, 15 bp, Homo sapiens
tatcactagtggcat

SEQ ID NO: 1530136 - DNA, 15 bp, Homo sapiens
gtatcactagtggca

SEQ ID NO: 1530137 - DNA, 15 bp, Homo sapiens
agtatcactagtggc

SEQ ID NO: 1530138 - DNA, 15 bp, Homo sapiens
aagtatcactagtgg

SEQ ID NO: 1530139 - DNA, 15 bp, Homo sapiens
taagtatcactagtg

SEQ ID NO: 1530140 - DNA, 15 bp, Homo sapiens
ctaagtatcactagt

SEQ ID NO: 1530141 - DNA, 15 bp, Homo sapiens
cctaagtatcactag

SEQ ID NO: 1530142 - DNA, 15 bp, Homo sapiens
ccctaagtatcacta

SEQ ID NO: 1530143 - DNA, 15 bp, Homo sapiens
accctaagtatcact

SEQ ID NO: 1530144 - DNA, 15 bp, Homo sapiens
gaccctaagtatcac

SEQ ID NO: 1530145 - DNA, 15 bp, Homo sapiens
tgaccctaagtatca

SEQ ID NO: 1530146 - DNA, 15 bp, Homo sapiens
atgaccctaagtatc

SEQ ID NO: 1530147 - DNA, 15 bp, Homo sapiens
catgaccctaagtat

SEQ ID NO: 1530148 - DNA, 15 bp, Homo sapiens
ccatgaccctaagta

SEQ ID NO: 1530149 - DNA, 15 bp, Homo sapiens
cccatgaccctaagt

SEQ ID NO: 1530150 - DNA, 15 bp, Homo sapiens
acccatgaccctaag

SEQ ID NO: 1530151 - DNA, 15 bp, Homo sapiens
cacccatgaccctaa

SEQ ID NO: 1530152 - DNA, 15 bp, Homo sapiens
acacccatgacccta

SEQ ID NO: 1530153 - DNA, 15 bp, Homo sapiens
aacacccatgaccct

SEQ ID NO: 1530154 - DNA, 15 bp, Homo sapiens
caacacccatgaccc

SEQ ID NO: 1530155 - DNA, 15 bp, Homo sapiens
ccaacacccatgacc

SEQ ID NO: 1530156 - DNA, 15 bp, Homo sapiens
cccaacacccatgac

SEQ ID NO: 1530157 - DNA, 15 bp, Homo sapiens
ccccaacacccatga

SEQ ID NO: 1530158 - DNA, 15 bp, Homo sapiens
tccccaacacccatg

SEQ ID NO: 1530159 - DNA, 15 bp, Homo sapiens
atccccaacacccat

SEQ ID NO: 1530160 - DNA, 15 bp, Homo sapiens
catccccaacaccca

SEQ ID NO: 1530161 - DNA, 15 bp, Homo sapiens
tcatccccaacaccc

SEQ ID NO: 1530162 - DNA, 15 bp, Homo sapiens
atcatccccaacacc

SEQ ID NO: 1530163 - DNA, 15 bp, Homo sapiens
aatcatccccaacac

SEQ ID NO: 1530164 - DNA, 15 bp, Homo sapiens
aaatcatccccaaca

SEQ ID NO: 1530165 - DNA, 15 bp, Homo sapiens
aaaatcatccccaac

SEQ ID NO: 1530166 - DNA, 15 bp, Homo sapiens
caaaatcatccccaa

SEQ ID NO: 1530167 - DNA, 15 bp, Homo sapiens
acaaaatcatcccca

SEQ ID NO: 1530168 - DNA, 15 bp, Homo sapiens
aacaaaatcatcccc

SEQ ID NO: 1530169 - DNA, 15 bp, Homo sapiens
caacaaaatcatccc

SEQ ID NO: 1530170 - DNA, 15 bp, Homo sapiens
tcaacaaaatcatcc

SEQ ID NO: 1530171 - DNA, 15 bp, Homo sapiens
ctcaacaaaatcatc

SEQ ID NO: 1530172 - DNA, 15 bp, Homo sapiens
gctcaacaaaatcat

SEQ ID NO: 1530173 - DNA, 15 bp, Homo sapiens
agctcaacaaaatca

SEQ ID NO: 1530174 - DNA, 15 bp, Homo sapiens
tagctcaacaaaatc

SEQ ID NO: 1530175 - DNA, 15 bp, Homo sapiens
ctagctcaacaaaat

SEQ ID NO: 1530176 - DNA, 15 bp, Homo sapiens
actagctcaacaaaa

SEQ ID NO: 1530177 - DNA, 15 bp, Homo sapiens
cactagctcaacaaa

SEQ ID NO: 1530178 - DNA, 15 bp, Homo sapiens
tcactagctcaacaa

SEQ ID NO: 1530179 - DNA, 15 bp, Homo sapiens
ctcactagctcaaca

SEQ ID NO: 1530180 - DNA, 15 bp, Homo sapiens
cctcactagctcaac

SEQ ID NO: 1530181 - DNA, 15 bp, Homo sapiens
gcctcactagctcaa

SEQ ID NO: 1530182 - DNA, 15 bp, Homo sapiens
agcctcactagctca

SEQ ID NO: 1530183 - DNA, 15 bp, Homo sapiens
aagcctcactagctc

SEQ ID NO: 1530184 - DNA, 15 bp, Homo sapiens
caagcctcactagct

SEQ ID NO: 1530185 - DNA, 15 bp, Homo sapiens
acaagcctcactagc

SEQ ID NO: 1530186 - DNA, 15 bp, Homo sapiens
cacaagcctcactag

SEQ ID NO: 1530187 - DNA, 15 bp, Homo sapiens
acacaagcctcacta

SEQ ID NO: 1530188 - DNA, 15 bp, Homo sapiens
aacacaagcctcact

SEQ ID NO: 1530189 - DNA, 15 bp, Homo sapiens
aaacacaagcctcac

SEQ ID NO: 1530190 - DNA, 15 bp, Homo sapiens
caaacacaagcctca

SEQ ID NO: 1530191 - DNA, 15 bp, Homo sapiens
acaaacacaagcctc

SEQ ID NO: 1530192 - DNA, 15 bp, Homo sapiens
cacaaacacaagcct

SEQ ID NO: 1530193 - DNA, 15 bp, Homo sapiens
tcacaaacacaagcc

SEQ ID NO: 1530194 - DNA, 15 bp, Homo sapiens
gtcacaaacacaagc

SEQ ID NO: 1530195 - DNA, 15 bp, Homo sapiens
ggtcacaaacacaag

SEQ ID NO: 1530196 - DNA, 15 bp, Homo sapiens
tggtcacaaacacaa

SEQ ID NO: 1530197 - DNA, 15 bp, Homo sapiens
atggtcacaaacaca

SEQ ID NO: 1530198 - DNA, 15 bp, Homo sapiens
aatggtcacaaacac

SEQ ID NO: 1530199 - DNA, 15 bp, Homo sapiens
gaatggtcacaaaca

SEQ ID NO: 1530200 - DNA, 15 bp, Homo sapiens
ggaatggtcacaaac

SEQ ID NO: 1530201 - DNA, 15 bp, Homo sapiens
tggaatggtcacaaa

SEQ ID NO: 1530202 - DNA, 15 bp, Homo sapiens
atggaatggtcacaa

SEQ ID NO: 1530203 - DNA, 15 bp, Homo sapiens
gatggaatggtcaca

SEQ ID NO: 1530204 - DNA, 15 bp, Homo sapiens
agatggaatggtcac

SEQ ID NO: 1530205 - DNA, 15 bp, Homo sapiens
aagatggaatggtca

SEQ ID NO: 1530206 - DNA, 15 bp, Homo sapiens
caagatggaatggtc

SEQ ID NO: 1530207 - DNA, 15 bp, Homo sapiens
ccaagatggaatggt

SEQ ID NO: 1530208 - DNA, 15 bp, Homo sapiens
tccaagatggaatgg

SEQ ID NO: 1530209 - DNA, 15 bp, Homo sapiens
ctccaagatggaatg

SEQ ID NO: 1530210 - DNA, 15 bp, Homo sapiens
tctccaagatggaat

SEQ ID NO: 1530211 - DNA, 15 bp, Homo sapiens
atctccaagatggaa

SEQ ID NO: 1530212 - DNA, 15 bp, Homo sapiens
catctccaagatgga

SEQ ID NO: 1530213 - DNA, 15 bp, Homo sapiens
tcatctccaagatgg

SEQ ID NO: 1530214 - DNA, 15 bp, Homo sapiens
ttcatctccaagatg

SEQ ID NO: 1530215 - DNA, 15 bp, Homo sapiens
attcatctccaagat

SEQ ID NO: 1530216 - DNA, 15 bp, Homo sapiens
tattcatctccaaga

SEQ ID NO: 1530217 - DNA, 15 bp, Homo sapiens
ctattcatctccaag

SEQ ID NO: 1530218 - DNA, 15 bp, Homo sapiens
actattcatctccaa

SEQ ID NO: 1530219 - DNA, 15 bp, Homo sapiens
aactattcatctcca

SEQ ID NO: 1530220 - DNA, 15 bp, Homo sapiens
taactattcatctcc

SEQ ID NO: 1530221 - DNA, 15 bp, Homo sapiens
ctaactattcatctc

SEQ ID NO: 1530222 - DNA, 15 bp, Homo sapiens
tctaactattcatct

SEQ ID NO: 1530223 - DNA, 15 bp, Homo sapiens
ctctaactattcatc

SEQ ID NO: 1530224 - DNA, 15 bp, Homo sapiens
actctaactattcat

SEQ ID NO: 1530225 - DNA, 15 bp, Homo sapiens
aactctaactattca

SEQ ID NO: 1530226 - DNA, 15 bp, Homo sapiens
caactctaactattc

SEQ ID NO: 1530227 - DNA, 15 bp, Homo sapiens
gcaactctaactatt

SEQ ID NO: 1530228 - DNA, 15 bp, Homo sapiens
tgcaactctaactat

SEQ ID NO: 1530229 - DNA, 15 bp, Homo sapiens
ctgcaactctaacta

SEQ ID NO: 1530230 - DNA, 15 bp, Homo sapiens
gctgcaactctaact

SEQ ID NO: 1530231 - DNA, 15 bp, Homo sapiens
agctgcaactctaac

SEQ ID NO: 1530232 - DNA, 15 bp, Homo sapiens
cagctgcaactctaa

SEQ ID NO: 1530233 - DNA, 15 bp, Homo sapiens
gcagctgcaactcta

SEQ ID NO: 1530234 - DNA, 15 bp, Homo sapiens
agcagctgcaactct

SEQ ID NO: 1530235 - DNA, 15 bp, Homo sapiens
cagcagctgcaactc

SEQ ID NO: 1530236 - DNA, 15 bp, Homo sapiens
gcagcagctgcaact

SEQ ID NO: 1530237 - DNA, 15 bp, Homo sapiens
agcagcagctgcaac

SEQ ID NO: 1530238 - DNA, 15 bp, Homo sapiens
aagcagcagctgcaa

SEQ ID NO: 1530239 - DNA, 15 bp, Homo sapiens
gaagcagcagctgca

SEQ ID NO: 1530240 - DNA, 15 bp, Homo sapiens
tgaagcagcagctgc

SEQ ID NO: 1530241 - DNA, 15 bp, Homo sapiens
atgaagcagcagctg

SEQ ID NO: 1530242 - DNA, 15 bp, Homo sapiens
catgaagcagcagct

SEQ ID NO: 1530243 - DNA, 15 bp, Homo sapiens
acatgaagcagcagc

SEQ ID NO: 1530244 - DNA, 15 bp, Homo sapiens
cacatgaagcagcag

SEQ ID NO: 1530245 - DNA, 15 bp, Homo sapiens
tcacatgaagcagca

SEQ ID NO: 1530246 - DNA, 15 bp, Homo sapiens
ttcacatgaagcagc

SEQ ID NO: 1530247 - DNA, 15 bp, Homo sapiens
attcacatgaagcag

SEQ ID NO: 1530248 - DNA, 15 bp, Homo sapiens
aattcacatgaagca

SEQ ID NO: 1530249 - DNA, 15 bp, Homo sapiens
caattcacatgaagc

SEQ ID NO: 1530250 - DNA, 15 bp, Homo sapiens
tcaattcacatgaag

SEQ ID NO: 1530251 - DNA, 15 bp, Homo sapiens
atcaattcacatgaa

SEQ ID NO: 1530252 - DNA, 15 bp, Homo sapiens
tatcaattcacatga

SEQ ID NO: 1530253 - DNA, 15 bp, Homo sapiens
ctatcaattcacatg

SEQ ID NO: 1530254 - DNA, 15 bp, Homo sapiens
actatcaattcacat

SEQ ID NO: 1530255 - DNA, 15 bp, Homo sapiens
gactatcaattcaca

SEQ ID NO: 1530256 - DNA, 15 bp, Homo sapiens
agactatcaattcac

SEQ ID NO: 1530257 - DNA, 15 bp, Homo sapiens
gagactatcaattca

SEQ ID NO: 1530258 - DNA, 15 bp, Homo sapiens
agagactatcaattc

SEQ ID NO: 1530259 - DNA, 15 bp, Homo sapiens
cagagactatcaatt

SEQ ID NO: 1530260 - DNA, 15 bp, Homo sapiens
acagagactatcaat

SEQ ID NO: 1530261 - DNA, 15 bp, Homo sapiens
cacagagactatcaa

SEQ ID NO: 1530262 - DNA, 15 bp, Homo sapiens
ccacagagactatca

SEQ ID NO: 1530263 - DNA, 15 bp, Homo sapiens
tccacagagactatc

SEQ ID NO: 1530264 - DNA, 15 bp, Homo sapiens
atccacagagactat

SEQ ID NO: 1530265 - DNA, 15 bp, Homo sapiens
catccacagagacta

SEQ ID NO: 1530266 - DNA, 15 bp, Homo sapiens
acatccacagagact

SEQ ID NO: 1530267 - DNA, 15 bp, Homo sapiens
tacatccacagagac

SEQ ID NO: 1530268 - DNA, 15 bp, Homo sapiens
atacatccacagaga

SEQ ID NO: 1530269 - DNA, 15 bp, Homo sapiens
gatacatccacagag

SEQ ID NO: 1530270 - DNA, 15 bp, Homo sapiens
agatacatccacaga

SEQ ID NO: 1530271 - DNA, 15 bp, Homo sapiens
aagatacatccacag

SEQ ID NO: 1530272 - DNA, 15 bp, Homo sapiens
gaagatacatccaca

SEQ ID NO: 1530273 - DNA, 15 bp, Homo sapiens
agaagatacatccac

SEQ ID NO: 1530274 - DNA, 15 bp, Homo sapiens
cagaagatacatcca

SEQ ID NO: 1530275 - DNA, 15 bp, Homo sapiens
ccagaagatacatcc

SEQ ID NO: 1530276 - DNA, 15 bp, Homo sapiens
tccagaagatacatc

SEQ ID NO: 1530277 - DNA, 15 bp, Homo sapiens
atccagaagatacat

SEQ ID NO: 1530278 - DNA, 15 bp, Homo sapiens
tatccagaagataca

SEQ ID NO: 1530279 - DNA, 15 bp, Homo sapiens
ctatccagaagatac

SEQ ID NO: 1530280 - DNA, 15 bp, Homo sapiens
cctatccagaagata

SEQ ID NO: 1530281 - DNA, 15 bp, Homo sapiens
ccctatccagaagat

SEQ ID NO: 1530282 - DNA, 15 bp, Homo sapiens
gccctatccagaaga

SEQ ID NO: 1530283 - DNA, 15 bp, Homo sapiens
tgccctatccagaag

SEQ ID NO: 1530284 - DNA, 15 bp, Homo sapiens
gtgccctatccagaa

SEQ ID NO: 1530285 - DNA, 15 bp, Homo sapiens
tgtgccctatccaga

SEQ ID NO: 1530286 - DNA, 15 bp, Homo sapiens
ttgtgccctatccag

SEQ ID NO: 1530287 - DNA, 15 bp, Homo sapiens
tttgtgccctatcca

SEQ ID NO: 1530288 - DNA, 15 bp, Homo sapiens
ttttgtgccctatcc

SEQ ID NO: 1530289 - DNA, 15 bp, Homo sapiens
cttttgtgccctatc

SEQ ID NO: 1530290 - DNA, 15 bp, Homo sapiens
gcttttgtgccctat

SEQ ID NO: 1530291 - DNA, 15 bp, Homo sapiens
ggcttttgtgcccta

SEQ ID NO: 1530292 - DNA, 15 bp, Homo sapiens
aggcttttgtgccct

SEQ ID NO: 1530293 - DNA, 15 bp, Homo sapiens
aaggcttttgtgccc

SEQ ID NO: 1530294 - DNA, 15 bp, Homo sapiens
taaggcttttgtgcc

SEQ ID NO: 1530295 - DNA, 15 bp, Homo sapiens
ataaggcttttgtgc

SEQ ID NO: 1530296 - DNA, 15 bp, Homo sapiens
gataaggcttttgtg

SEQ ID NO: 1530297 - DNA, 15 bp, Homo sapiens
ctgataaggcttttg

SEQ ID NO: 1530298 - DNA, 15 bp, Homo sapiens
actgataaggctttt

SEQ ID NO: 1530299 - DNA, 15 bp, Homo sapiens
cactgataaggcttt

SEQ ID NO: 1530300 - DNA, 15 bp, Homo sapiens
gcactgataaggctt

SEQ ID NO: 1530301 - DNA, 15 bp, Homo sapiens
agcactgataaggct

SEQ ID NO: 1530302 - DNA, 15 bp, Homo sapiens
tagcactgataaggc

SEQ ID NO: 1530303 - DNA, 15 bp, Homo sapiens
ctagcactgataagg

SEQ ID NO: 1530304 - DNA, 15 bp, Homo sapiens
actagcactgataag

SEQ ID NO: 1530305 - DNA, 15 bp, Homo sapiens
tactagcactgataa

SEQ ID NO: 1530306 - DNA, 15 bp, Homo sapiens
ttactagcactgata

SEQ ID NO: 1530307 - DNA, 15 bp, Homo sapiens
tttactagcactgat

SEQ ID NO: 1530308 - DNA, 15 bp, Homo sapiens
ctttactagcactga

SEQ ID NO: 1530309 - DNA, 15 bp, Homo sapiens
cctttactagcactg

SEQ ID NO: 1530310 - DNA, 15 bp, Homo sapiens
acctttactagcact

SEQ ID NO: 1530311 - DNA, 15 bp, Homo sapiens
cacctttactagcac

SEQ ID NO: 1530312 - DNA, 15 bp, Homo sapiens
ccacctttactagca

SEQ ID NO: 1530313 - DNA, 15 bp, Homo sapiens
accacctttactagc

SEQ ID NO: 1530314 - DNA, 15 bp, Homo sapiens
caccacctttactag

SEQ ID NO: 1530315 - DNA, 15 bp, Homo sapiens
acaccacctttacta

SEQ ID NO: 1530316 - DNA, 15 bp, Homo sapiens
gacaccacctttact

SEQ ID NO: 1530317 - DNA, 15 bp, Homo sapiens
agacaccacctttac

SEQ ID NO: 1530318 - DNA, 15 bp, Homo sapiens
aagacaccaccttta

SEQ ID NO: 1530319 - DNA, 15 bp, Homo sapiens
aaagacaccaccttt

SEQ ID NO: 1530320 - DNA, 15 bp, Homo sapiens
caaagacaccacctt

SEQ ID NO: 1530321 - DNA, 15 bp, Homo sapiens
gcaaagacaccacct

SEQ ID NO: 1530322 - DNA, 15 bp, Homo sapiens
agcaaagacaccacc

SEQ ID NO: 1530323 - DNA, 15 bp, Homo sapiens
aagcaaagacaccac

SEQ ID NO: 1530324 - DNA, 15 bp, Homo sapiens
taagcaaagacacca

SEQ ID NO: 1530325 - DNA, 15 bp, Homo sapiens
ctaagcaaagacacc

SEQ ID NO: 1530326 - DNA, 15 bp, Homo sapiens
tctaagcaaagacac

SEQ ID NO: 1530327 - DNA, 15 bp, Homo sapiens
ctctaagcaaagaca

SEQ ID NO: 1530328 - DNA, 15 bp, Homo sapiens
actctaagcaaagac

SEQ ID NO: 1530329 - DNA, 15 bp, Homo sapiens
cactctaagcaaaga

SEQ ID NO: 1530330 - DNA, 15 bp, Homo sapiens
ccactctaagcaaag

SEQ ID NO: 1530331 - DNA, 15 bp, Homo sapiens
gccactctaagcaaa

SEQ ID NO: 1530332 - DNA, 15 bp, Homo sapiens
tgccactctaagcaa

SEQ ID NO: 1530333 - DNA, 15 bp, Homo sapiens
gtgccactctaagca

SEQ ID NO: 1530334 - DNA, 15 bp, Homo sapiens
ggtgccactctaagc

SEQ ID NO: 1530335 - DNA, 15 bp, Homo sapiens
tggtgccactctaag

SEQ ID NO: 1530336 - DNA, 15 bp, Homo sapiens
ttggtgccactctaa

SEQ ID NO: 1530337 - DNA, 15 bp, Homo sapiens
tttggtgccactcta

SEQ ID NO: 1530338 - DNA, 15 bp, Homo sapiens
gtttggtgccactct

SEQ ID NO: 1530339 - DNA, 15 bp, Homo sapiens
cgtttggtgccactc

SEQ ID NO: 1530340 - DNA, 15 bp, Homo sapiens
acgtttggtgccact

SEQ ID NO: 1530341 - DNA, 15 bp, Homo sapiens
aacgtttggtgccac

SEQ ID NO: 1530342 - DNA, 15 bp, Homo sapiens
caacgtttggtgcca

SEQ ID NO: 1530343 - DNA, 15 bp, Homo sapiens
acaacgtttggtgcc

SEQ ID NO: 1530344 - DNA, 15 bp, Homo sapiens
aacaacgtttggtgc

SEQ ID NO: 1530345 - DNA, 15 bp, Homo sapiens
aaacaacgtttggtg

SEQ ID NO: 1530346 - DNA, 15 bp, Homo sapiens
gaaacaacgtttggt

SEQ ID NO: 1530347 - DNA, 15 bp, Homo sapiens
ggaaacaacgtttgg

SEQ ID NO: 1530348 - DNA, 15 bp, Homo sapiens
aggaaacaacgtttg

SEQ ID NO: 1530349 - DNA, 15 bp, Homo sapiens
aaggaaacaacgttt

SEQ ID NO: 1530350 - DNA, 15 bp, Homo sapiens
aaaggaaacaacgtt

SEQ ID NO: 1530351 - DNA, 15 bp, Homo sapiens
caaaggaaacaacgt

SEQ ID NO: 1530352 - DNA, 15 bp, Homo sapiens
acaaaggaaacaacg

SEQ ID NO: 1530353 - DNA, 15 bp, Homo sapiens
aacaaaggaaacaac

SEQ ID NO: 1530354 - DNA, 15 bp, Homo sapiens
gaacaaaggaaacaa

SEQ ID NO: 1530355 - DNA, 15 bp, Homo sapiens
cgaacaaaggaaaca

SEQ ID NO: 1530356 - DNA, 15 bp, Homo sapiens
tcgaacaaaggaaac

SEQ ID NO: 1530357 - DNA, 15 bp, Homo sapiens
atcgaacaaaggaaa

SEQ ID NO: 1530358 - DNA, 15 bp, Homo sapiens
tatcgaacaaaggaa

SEQ ID NO: 1530359 - DNA, 15 bp, Homo sapiens
atatcgaacaaagga

SEQ ID NO: 1530360 - DNA, 15 bp, Homo sapiens
aatatcgaacaaagg

SEQ ID NO: 1530361 - DNA, 15 bp, Homo sapiens
caatatcgaacaaag

SEQ ID NO: 1530362 - DNA, 15 bp, Homo sapiens
acaatatcgaacaaa

SEQ ID NO: 1530363 - DNA, 15 bp, Homo sapiens
aacaatatcgaacaa

SEQ ID NO: 1530364 - DNA, 15 bp, Homo sapiens
aaacaatatcgaaca

SEQ ID NO: 1530365 - DNA, 15 bp, Homo sapiens
caaacaatatcgaac

SEQ ID NO: 1530366 - DNA, 15 bp, Homo sapiens
ccaaacaatatcgaa

SEQ ID NO: 1530367 - DNA, 15 bp, Homo sapiens
cccaaacaatatcga

SEQ ID NO: 1530368 - DNA, 15 bp, Homo sapiens
acccaaacaatatcg

SEQ ID NO: 1530369 - DNA, 15 bp, Homo sapiens
tacccaaacaatatc

SEQ ID NO: 1530370 - DNA, 15 bp, Homo sapiens
atacccaaacaatat

SEQ ID NO: 1530371 - DNA, 15 bp, Homo sapiens
aatacccaaacaata

SEQ ID NO: 1530372 - DNA, 15 bp, Homo sapiens
aaatacccaaacaat

SEQ ID NO: 1530373 - DNA, 15 bp, Homo sapiens
aaaatacccaaacaa

SEQ ID NO: 1530374 - DNA, 15 bp, Homo sapiens
caaaatacccaaaca

SEQ ID NO: 1530375 - DNA, 15 bp, Homo sapiens
ccaaaatacccaaac

SEQ ID NO: 1530376 - DNA, 15 bp, Homo sapiens
accaaaatacccaaa

SEQ ID NO: 1530377 - DNA, 15 bp, Homo sapiens
gaccaaaatacccaa

SEQ ID NO: 1530378 - DNA, 15 bp, Homo sapiens
tgaccaaaataccca

SEQ ID NO: 1530379 - DNA, 15 bp, Homo sapiens
gtgaccaaaataccc

SEQ ID NO: 1530380 - DNA, 15 bp, Homo sapiens
agtgaccaaaatacc

SEQ ID NO: 1530381 - DNA, 15 bp, Homo sapiens
aagtgaccaaaatac

SEQ ID NO: 1530382 - DNA, 15 bp, Homo sapiens
aaagtgaccaaaata

SEQ ID NO: 1530383 - DNA, 15 bp, Homo sapiens
caaagtgaccaaaat

SEQ ID NO: 1530384 - DNA, 15 bp, Homo sapiens
ccaaagtgaccaaaa

SEQ ID NO: 1530385 - DNA, 15 bp, Homo sapiens
cccaaagtgaccaaa

SEQ ID NO: 1530386 - DNA, 15 bp, Homo sapiens
acccaaagtgaccaa

SEQ ID NO: 1530387 - DNA, 15 bp, Homo sapiens
aacccaaagtgacca

SEQ ID NO: 1530388 - DNA, 15 bp, Homo sapiens
caacccaaagtgacc

SEQ ID NO: 1530389 - DNA, 15 bp, Homo sapiens
tcaacccaaagtgac

SEQ ID NO: 1530390 - DNA, 15 bp, Homo sapiens
ctcaacccaaagtga

SEQ ID NO: 1530391 - DNA, 15 bp, Homo sapiens
actcaacccaaagtg

SEQ ID NO: 1530392 - DNA, 15 bp, Homo sapiens
aactcaacccaaagt

SEQ ID NO: 1530393 - DNA, 15 bp, Homo sapiens
taactcaacccaaag

SEQ ID NO: 1530394 - DNA, 15 bp, Homo sapiens
gtaactcaacccaaa

SEQ ID NO: 1530395 - DNA, 15 bp, Homo sapiens
ggtaactcaacccaa

SEQ ID NO: 1530396 - DNA, 15 bp, Homo sapiens
tggtaactcaaccca

SEQ ID NO: 1530397 - DNA, 15 bp, Homo sapiens
gtggtaactcaaccc

SEQ ID NO: 1530398 - DNA, 15 bp, Homo sapiens
tgtggtaactcaacc

SEQ ID NO: 1530399 - DNA, 15 bp, Homo sapiens
gtgtggtaactcaac

SEQ ID NO: 1530400 - DNA, 15 bp, Homo sapiens
agtgtggtaactcaa

SEQ ID NO: 1530401 - DNA, 15 bp, Homo sapiens
gagtgtggtaactca

SEQ ID NO: 1530402 - DNA, 15 bp, Homo sapiens
tgagtgtggtaactc

SEQ ID NO: 1530403 - DNA, 15 bp, Homo sapiens
ctgagtgtggtaact

SEQ ID NO: 1530404 - DNA, 15 bp, Homo sapiens
tctgagtgtggtaac

SEQ ID NO: 1530405 - DNA, 15 bp, Homo sapiens
ctctgagtgtggtaa

SEQ ID NO: 1530406 - DNA, 15 bp, Homo sapiens
tctctgagtgtggta

SEQ ID NO: 1530407 - DNA, 15 bp, Homo sapiens
ctctctgagtgtggt

SEQ ID NO: 1530408 - DNA, 15 bp, Homo sapiens
actctctgagtgtgg

SEQ ID NO: 1530409 - DNA, 15 bp, Homo sapiens
aactctctgagtgtg

SEQ ID NO: 1530410 - DNA, 15 bp, Homo sapiens
taactctctgagtgt

SEQ ID NO: 1530411 - DNA, 15 bp, Homo sapiens
ttaactctctgagtg

SEQ ID NO: 1530412 - DNA, 15 bp, Homo sapiens
attaactctctgagt

SEQ ID NO: 1530413 - DNA, 15 bp, Homo sapiens
cattaactctctgag

SEQ ID NO: 1530414 - DNA, 15 bp, Homo sapiens
ccattaactctctga

SEQ ID NO: 1530415 - DNA, 15 bp, Homo sapiens
accattaactctctg

SEQ ID NO: 1530416 - DNA, 15 bp, Homo sapiens
caccattaactctct

SEQ ID NO: 1530417 - DNA, 15 bp, Homo sapiens
acaccattaactctc

SEQ ID NO: 1530418 - DNA, 15 bp, Homo sapiens
gacaccattaactct

SEQ ID NO: 1530419 - DNA, 15 bp, Homo sapiens
ggacaccattaactc

SEQ ID NO: 1530420 - DNA, 15 bp, Homo sapiens
tggacaccattaact

SEQ ID NO: 1530421 - DNA, 15 bp, Homo sapiens
gtggacaccattaac

SEQ ID NO: 1530422 - DNA, 15 bp, Homo sapiens
agtggacaccattaa

SEQ ID NO: 1530423 - DNA, 15 bp, Homo sapiens
cagtggacaccatta

SEQ ID NO: 1530424 - DNA, 15 bp, Homo sapiens
acagtggacaccatt

SEQ ID NO: 1530425 - DNA, 15 bp, Homo sapiens
gacagtggacaccat

SEQ ID NO: 1530426 - DNA, 15 bp, Homo sapiens
agacagtggacacca

SEQ ID NO: 1530427 - DNA, 15 bp, Homo sapiens
cagacagtggacacc

SEQ ID NO: 1530428 - DNA, 15 bp, Homo sapiens
gcagacagtggacac

SEQ ID NO: 1530429 - DNA, 15 bp, Homo sapiens
tgcagacagtggaca

SEQ ID NO: 1530430 - DNA, 15 bp, Homo sapiens
atgcagacagtggac

SEQ ID NO: 1530431 - DNA, 15 bp, Homo sapiens
gatgcagacagtgga

SEQ ID NO: 1530432 - DNA, 15 bp, Homo sapiens
ggatgcagacagtgg

SEQ ID NO: 1530433 - DNA, 15 bp, Homo sapiens
gggatgcagacagtg

SEQ ID NO: 1530434 - DNA, 15 bp, Homo sapiens
tgggatgcagacagt

SEQ ID NO: 1530435 - DNA, 15 bp, Homo sapiens
gtgggatgcagacag

SEQ ID NO: 1530436 - DNA, 15 bp, Homo sapiens
agtgggatgcagaca

SEQ ID NO: 1530437 - DNA, 15 bp, Homo sapiens
aagtgggatgcagac

SEQ ID NO: 1530438 - DNA, 15 bp, Homo sapiens
taagtgggatgcaga

SEQ ID NO: 1530439 - DNA, 15 bp, Homo sapiens
gtaagtgggatgcag

SEQ ID NO: 1530440 - DNA, 15 bp, Homo sapiens
tgtaagtgggatgca

SEQ ID NO: 1530441 - DNA, 15 bp, Homo sapiens
ctgtaagtgggatgc

SEQ ID NO: 1530442 - DNA, 15 bp, Homo sapiens
actgtaagtgggatg

SEQ ID NO: 1530443 - DNA, 15 bp, Homo sapiens
cactgtaagtgggat

SEQ ID NO: 1530444 - DNA, 15 bp, Homo sapiens
tcactgtaagtggga

SEQ ID NO: 1530445 - DNA, 15 bp, Homo sapiens
ttcactgtaagtggg

SEQ ID NO: 1530446 - DNA, 15 bp, Homo sapiens
attcactgtaagtgg

SEQ ID NO: 1530447 - DNA, 15 bp, Homo sapiens
tattcactgtaagtg

SEQ ID NO: 1530448 - DNA, 15 bp, Homo sapiens
ttattcactgtaagt

SEQ ID NO: 1530449 - DNA, 15 bp, Homo sapiens
cttattcactgtaag

SEQ ID NO: 1530450 - DNA, 15 bp, Homo sapiens
gcttattcactgtaa

SEQ ID NO: 1530451 - DNA, 15 bp, Homo sapiens
agcttattcactgta

SEQ ID NO: 1530452 - DNA, 15 bp, Homo sapiens
aagcttattcactgt

SEQ ID NO: 1530453 - DNA, 15 bp, Homo sapiens
caagcttattcactg

SEQ ID NO: 1530454 - DNA, 15 bp, Homo sapiens
tcaagcttattcact

SEQ ID NO: 1530455 - DNA, 15 bp, Homo sapiens
ctcaagcttattcac

SEQ ID NO: 1530456 - DNA, 15 bp, Homo sapiens
cctcaagcttattca

SEQ ID NO: 1530457 - DNA, 15 bp, Homo sapiens
acctcaagcttattc

SEQ ID NO: 1530458 - DNA, 15 bp, Homo sapiens
tacctcaagcttatt

SEQ ID NO: 1530459 - DNA, 15 bp, Homo sapiens
ttacctcaagcttat

SEQ ID NO: 1530460 - DNA, 15 bp, Homo sapiens
tttacctcaagctta

SEQ ID NO: 1530461 - DNA, 15 bp, Homo sapiens
atttacctcaagctt

SEQ ID NO: 1530462 - DNA, 15 bp, Homo sapiens
gatttacctcaagct

SEQ ID NO: 1530463 - DNA, 15 bp, Homo sapiens
ggatttacctcaagc

SEQ ID NO: 1530464 - DNA, 15 bp, Homo sapiens
tggatttacctcaag

SEQ ID NO: 1530465 - DNA, 15 bp, Homo sapiens
ctggatttacctcaa

SEQ ID NO: 1530466 - DNA, 15 bp, Homo sapiens
tctggatttacctca

SEQ ID NO: 1530467 - DNA, 15 bp, Homo sapiens
ttctggatttacctc

SEQ ID NO: 1530468 - DNA, 15 bp, Homo sapiens
cttctggatttacct

SEQ ID NO: 1530469 - DNA, 15 bp, Homo sapiens
ccttctggatttacc

SEQ ID NO: 1530470 - DNA, 15 bp, Homo sapiens
accttctggatttac

SEQ ID NO: 1530471 - DNA, 15 bp, Homo sapiens
caccttctggattta

SEQ ID NO: 1530472 - DNA, 15 bp, Homo sapiens
acaccttctggattt

SEQ ID NO: 1530473 - DNA, 15 bp, Homo sapiens
cacaccttctggatt

SEQ ID NO: 1530474 - DNA, 15 bp, Homo sapiens
ccacaccttctggat

SEQ ID NO: 1530475 - DNA, 15 bp, Homo sapiens
cccacaccttctgga

SEQ ID NO: 1530476 - DNA, 15 bp, Homo sapiens
tcccacaccttctgg

SEQ ID NO: 1530477 - DNA, 15 bp, Homo sapiens
atcccacaccttctg

SEQ ID NO: 1530478 - DNA, 15 bp, Homo sapiens
tatcccacaccttct

SEQ ID NO: 1530479 - DNA, 15 bp, Homo sapiens
gtatcccacaccttc

SEQ ID NO: 1530480 - DNA, 15 bp, Homo sapiens
tgtatcccacacctt

SEQ ID NO: 1530481 - DNA, 15 bp, Homo sapiens
atgtatcccacacct

SEQ ID NO: 1530482 - DNA, 15 bp, Homo sapiens
catgtatcccacacc

SEQ ID NO: 1530483 - DNA, 15 bp, Homo sapiens
acatgtatcccacac

SEQ ID NO: 1530484 - DNA, 15 bp, Homo sapiens
aacatgtatcccaca

SEQ ID NO: 1530485 - DNA, 15 bp, Homo sapiens
taacatgtatcccac

SEQ ID NO: 1530486 - DNA, 15 bp, Homo sapiens
ataacatgtatccca

SEQ ID NO: 1530487 - DNA, 15 bp, Homo sapiens
cataacatgtatccc

SEQ ID NO: 1530488 - DNA, 15 bp, Homo sapiens
acataacatgtatcc

SEQ ID NO: 1530489 - DNA, 15 bp, Homo sapiens
aacataacatgtatc

SEQ ID NO: 1530490 - DNA, 15 bp, Homo sapiens
gaacataacatgtat

SEQ ID NO: 1530491 - DNA, 15 bp, Homo sapiens
ggaacataacatgta

SEQ ID NO: 1530492 - DNA, 15 bp, Homo sapiens
aggaacataacatgt

SEQ ID NO: 1530493 - DNA, 15 bp, Homo sapiens
aaggaacataacatg

SEQ ID NO: 1530494 - DNA, 15 bp, Homo sapiens
aaaggaacataacat

SEQ ID NO: 1530495 - DNA, 15 bp, Homo sapiens
ttaaaggaacataac

SEQ ID NO: 1530496 - DNA, 15 bp, Homo sapiens
tttaaaggaacataa

SEQ ID NO: 1530497 - DNA, 15 bp, Homo sapiens
ctttaaaggaacata

SEQ ID NO: 1530498 - DNA, 15 bp, Homo sapiens
tctttaaaggaacat

SEQ ID NO: 1530499 - DNA, 15 bp, Homo sapiens
atctttaaaggaaca

SEQ ID NO: 1530500 - DNA, 15 bp, Homo sapiens
catctttaaaggaac

SEQ ID NO: 1530501 - DNA, 15 bp, Homo sapiens
atcatctttaaagga

SEQ ID NO: 1530502 - DNA, 15 bp, Homo sapiens
tatcatctttaaagg

SEQ ID NO: 1530503 - DNA, 15 bp, Homo sapiens
atatcatctttaaag

SEQ ID NO: 1530504 - DNA, 15 bp, Homo sapiens
aatatcatctttaaa

SEQ ID NO: 1530505 - DNA, 15 bp, Homo sapiens
aaatatcatctttaa

SEQ ID NO: 1530506 - DNA, 15 bp, Homo sapiens
caaatatcatcttta

SEQ ID NO: 1530507 - DNA, 15 bp, Homo sapiens
ccaaatatcatcttt

SEQ ID NO: 1530508 - DNA, 15 bp, Homo sapiens
cccaaatatcatctt

SEQ ID NO: 1530509 - DNA, 15 bp, Homo sapiens
acccaaatatcatct

SEQ ID NO: 1530510 - DNA, 15 bp, Homo sapiens
tacccaaatatcatc

SEQ ID NO: 1530511 - DNA, 15 bp, Homo sapiens
ctacccaaatatcat

SEQ ID NO: 1530512 - DNA, 15 bp, Homo sapiens
tctacccaaatatca

SEQ ID NO: 1530513 - DNA, 15 bp, Homo sapiens
ttctacccaaatatc

SEQ ID NO: 1530514 - DNA, 15 bp, Homo sapiens
gttctacccaaatat

SEQ ID NO: 1530515 - DNA, 15 bp, Homo sapiens
tgttctacccaaata

SEQ ID NO: 1530516 - DNA, 15 bp, Homo sapiens
atgttctacccaaat

SEQ ID NO: 1530517 - DNA, 15 bp, Homo sapiens
catgttctacccaaa

SEQ ID NO: 1530518 - DNA, 15 bp, Homo sapiens
ccatgttctacccaa

SEQ ID NO: 1530519 - DNA, 15 bp, Homo sapiens
tccatgttctaccca

SEQ ID NO: 1530520 - DNA, 15 bp, Homo sapiens
ctccatgttctaccc

SEQ ID NO: 1530521 - DNA, 15 bp, Homo sapiens
actccatgttctacc

SEQ ID NO: 1530522 - DNA, 15 bp, Homo sapiens
gactccatgttctac

SEQ ID NO: 1530523 - DNA, 15 bp, Homo sapiens
ggactccatgttcta

SEQ ID NO: 1530524 - DNA, 15 bp, Homo sapiens
gggactccatgttct

SEQ ID NO: 1530525 - DNA, 15 bp, Homo sapiens
agggactccatgttc

SEQ ID NO: 1530526 - DNA, 15 bp, Homo sapiens
tagggactccatgtt

SEQ ID NO: 1530527 - DNA, 15 bp, Homo sapiens
atagggactccatgt

SEQ ID NO: 1530528 - DNA, 15 bp, Homo sapiens
gatagggactccatg

SEQ ID NO: 1530529 - DNA, 15 bp, Homo sapiens
tgatagggactccat

SEQ ID NO: 1530530 - DNA, 15 bp, Homo sapiens
gtgatagggactcca

SEQ ID NO: 1530531 - DNA, 15 bp, Homo sapiens
tgtgatagggactcc

SEQ ID NO: 1530532 - DNA, 15 bp, Homo sapiens
atgtgatagggactc

SEQ ID NO: 1530533 - DNA, 15 bp, Homo sapiens
catgtgatagggact

SEQ ID NO: 1530534 - DNA, 15 bp, Homo sapiens
ccatgtgatagggac

SEQ ID NO: 1530535 - DNA, 15 bp, Homo sapiens
cccatgtgataggga

SEQ ID NO: 1530536 - DNA, 15 bp, Homo sapiens
gcccatgtgataggg

SEQ ID NO: 1530537 - DNA, 15 bp, Homo sapiens
agcccatgtgatagg

SEQ ID NO: 1530538 - DNA, 15 bp, Homo sapiens
aagcccatgtgatag

SEQ ID NO: 1530539 - DNA, 15 bp, Homo sapiens
aaagcccatgtgata

SEQ ID NO: 1530540 - DNA, 15 bp, Homo sapiens
aaaagcccatgtgat

SEQ ID NO: 1530541 - DNA, 15 bp, Homo sapiens
caaaagcccatgtga

SEQ ID NO: 1530542 - DNA, 15 bp, Homo sapiens
acaaaagcccatgtg

SEQ ID NO: 1530543 - DNA, 15 bp, Homo sapiens
aacaaaagcccatgt

SEQ ID NO: 1530544 - DNA, 15 bp, Homo sapiens
aaacaaaagcccatg

SEQ ID NO: 1530545 - DNA, 15 bp, Homo sapiens
gaaacaaaagcccat

SEQ ID NO: 1530546 - DNA, 15 bp, Homo sapiens
ggaaacaaaagccca

SEQ ID NO: 1530547 - DNA, 15 bp, Homo sapiens
tggaaacaaaagccc

SEQ ID NO: 1530548 - DNA, 15 bp, Homo sapiens
atggaaacaaaagcc

SEQ ID NO: 1530549 - DNA, 15 bp, Homo sapiens
gatggaaacaaaagc

SEQ ID NO: 1530550 - DNA, 15 bp, Homo sapiens
tgatggaaacaaaag

SEQ ID NO: 1530551 - DNA, 15 bp, Homo sapiens
atgatggaaacaaaa

SEQ ID NO: 1530552 - DNA, 15 bp, Homo sapiens
gatgatggaaacaaa

SEQ ID NO: 1530553 - DNA, 15 bp, Homo sapiens
ggatgatggaaacaa

SEQ ID NO: 1530554 - DNA, 15 bp, Homo sapiens
tggatgatggaaaca

SEQ ID NO: 1530555 - DNA, 15 bp, Homo sapiens
gtggatgatggaaac

SEQ ID NO: 1530556 - DNA, 15 bp, Homo sapiens
agtggatgatggaaa

SEQ ID NO: 1530557 - DNA, 15 bp, Homo sapiens
aagtggatgatggaa

SEQ ID NO: 1530558 - DNA, 15 bp, Homo sapiens
gaagtggatgatgga

SEQ ID NO: 1530559 - DNA, 15 bp, Homo sapiens
tgaagtggatgatgg

SEQ ID NO: 1530560 - DNA, 15 bp, Homo sapiens
ctgaagtggatgatg

SEQ ID NO: 1530561 - DNA, 15 bp, Homo sapiens
actgaagtggatgat

SEQ ID NO: 1530562 - DNA, 15 bp, Homo sapiens
tactgaagtggatga

SEQ ID NO: 1530563 - DNA, 15 bp, Homo sapiens
ttactgaagtggatg

SEQ ID NO: 1530564 - DNA, 15 bp, Homo sapiens
cttactgaagtggat

SEQ ID NO: 1530565 - DNA, 15 bp, Homo sapiens
acttactgaagtgga

SEQ ID NO: 1530566 - DNA, 15 bp, Homo sapiens
tacttactgaagtgg

SEQ ID NO: 1530567 - DNA, 15 bp, Homo sapiens
ttacttactgaagtg

SEQ ID NO: 1530568 - DNA, 15 bp, Homo sapiens
cttacttactgaagt

SEQ ID NO: 1530569 - DNA, 15 bp, Homo sapiens
acttacttactgaag

SEQ ID NO: 1530570 - DNA, 15 bp, Homo sapiens
tacttacttactgaa

SEQ ID NO: 1530571 - DNA, 15 bp, Homo sapiens
ttacttacttactga

SEQ ID NO: 1530572 - DNA, 15 bp, Homo sapiens
attacttacttactg

SEQ ID NO: 1530573 - DNA, 15 bp, Homo sapiens
cattacttacttact

SEQ ID NO: 1530574 - DNA, 15 bp, Homo sapiens
acattacttacttac

SEQ ID NO: 1530575 - DNA, 15 bp, Homo sapiens
aacattacttactta

SEQ ID NO: 1530576 - DNA, 15 bp, Homo sapiens
aaacattacttactt

SEQ ID NO: 1530577 - DNA, 15 bp, Homo sapiens
aaaacattacttact

SEQ ID NO: 1530578 - DNA, 15 bp, Homo sapiens
caaaacattacttac

SEQ ID NO: 1530579 - DNA, 15 bp, Homo sapiens
acaaaacattactta

SEQ ID NO: 1530580 - DNA, 15 bp, Homo sapiens
aacaaaacattactt

SEQ ID NO: 1530581 - DNA, 15 bp, Homo sapiens
aaacaaaacattact

SEQ ID NO: 1530582 - DNA, 15 bp, Homo sapiens
caaacaaaacattac

SEQ ID NO: 1530583 - DNA, 15 bp, Homo sapiens
acaaacaaaacatta

SEQ ID NO: 1530584 - DNA, 15 bp, Homo sapiens
cacaaacaaaacatt

SEQ ID NO: 1530585 - DNA, 15 bp, Homo sapiens
ccacaaacaaaacat

SEQ ID NO: 1530586 - DNA, 15 bp, Homo sapiens
accacaaacaaaaca

SEQ ID NO: 1530587 - DNA, 15 bp, Homo sapiens
gaccacaaacaaaac

SEQ ID NO: 1530588 - DNA, 15 bp, Homo sapiens
tgaccacaaacaaaa

SEQ ID NO: 1530589 - DNA, 15 bp, Homo sapiens
gtgaccacaaacaaa

SEQ ID NO: 1530590 - DNA, 15 bp, Homo sapiens
tgtgaccacaaacaa

SEQ ID NO: 1530591 - DNA, 15 bp, Homo sapiens
atgtgaccacaaaca

SEQ ID NO: 1530592 - DNA, 15 bp, Homo sapiens
catgtgaccacaaac

SEQ ID NO: 1530593 - DNA, 15 bp, Homo sapiens
tcatgtgaccacaaa

SEQ ID NO: 1530594 - DNA, 15 bp, Homo sapiens
gtcatgtgaccacaa

SEQ ID NO: 1530595 - DNA, 15 bp, Homo sapiens
ggtcatgtgaccaca

SEQ ID NO: 1530596 - DNA, 15 bp, Homo sapiens
tggtcatgtgaccac

SEQ ID NO: 1530597 - DNA, 15 bp, Homo sapiens
gtggtcatgtgacca

SEQ ID NO: 1530598 - DNA, 15 bp, Homo sapiens
ggtggtcatgtgacc

SEQ ID NO: 1530599 - DNA, 15 bp, Homo sapiens
aggtggtcatgtgac

SEQ ID NO: 1530600 - DNA, 15 bp, Homo sapiens
caggtggtcatgtga

SEQ ID NO: 1530601 - DNA, 15 bp, Homo sapiens
acaggtggtcatgtg

SEQ ID NO: 1530602 - DNA, 15 bp, Homo sapiens
aacaggtggtcatgt

SEQ ID NO: 1530603 - DNA, 15 bp, Homo sapiens
taacaggtggtcatg

SEQ ID NO: 1530604 - DNA, 15 bp, Homo sapiens
ataacaggtggtcat

SEQ ID NO: 1530605 - DNA, 15 bp, Homo sapiens
aataacaggtggtca

SEQ ID NO: 1530606 - DNA, 15 bp, Homo sapiens
caataacaggtggtc

SEQ ID NO: 1530607 - DNA, 15 bp, Homo sapiens
acaataacaggtggt

SEQ ID NO: 1530608 - DNA, 15 bp, Homo sapiens
tacaataacaggtgg

SEQ ID NO: 1530609 - DNA, 15 bp, Homo sapiens
ttacaataacaggtg

SEQ ID NO: 1530610 - DNA, 15 bp, Homo sapiens
tttacaataacaggt

SEQ ID NO: 1530611 - DNA, 15 bp, Homo sapiens
ctttacaataacagg

SEQ ID NO: 1530612 - DNA, 15 bp, Homo sapiens
cctttacaataacag

SEQ ID NO: 1530613 - DNA, 15 bp, Homo sapiens
ccctttacaataaca

SEQ ID NO: 1530614 - DNA, 15 bp, Homo sapiens
accctttacaataac

SEQ ID NO: 1530615 - DNA, 15 bp, Homo sapiens
aaccctttacaataa

SEQ ID NO: 1530616 - DNA, 15 bp, Homo sapiens
taaccctttacaata

SEQ ID NO: 1530617 - DNA, 15 bp, Homo sapiens
ataaccctttacaat

SEQ ID NO: 1530618 - DNA, 15 bp, Homo sapiens
gataaccctttacaa

SEQ ID NO: 1530619 - DNA, 15 bp, Homo sapiens
agataaccctttaca

SEQ ID NO: 1530620 - DNA, 15 bp, Homo sapiens
gagataaccctttac

SEQ ID NO: 1530621 - DNA, 15 bp, Homo sapiens
agagataacccttta

SEQ ID NO: 1530622 - DNA, 15 bp, Homo sapiens
aagagataacccttt

SEQ ID NO: 1530623 - DNA, 15 bp, Homo sapiens
caagagataaccctt

SEQ ID NO: 1530624 - DNA, 15 bp, Homo sapiens
gcaagagataaccct

SEQ ID NO: 1530625 - DNA, 15 bp, Homo sapiens
tgcaagagataaccc

SEQ ID NO: 1530626 - DNA, 15 bp, Homo sapiens
ttgcaagagataacc

SEQ ID NO: 1530627 - DNA, 15 bp, Homo sapiens
gttgcaagagataac

SEQ ID NO: 1530628 - DNA, 15 bp, Homo sapiens
agttgcaagagataa

SEQ ID NO: 1530629 - DNA, 15 bp, Homo sapiens
cagttgcaagagata

SEQ ID NO: 1530630 - DNA, 15 bp, Homo sapiens
tcagttgcaagagat

SEQ ID NO: 1530631 - DNA, 15 bp, Homo sapiens
ttcagttgcaagaga

SEQ ID NO: 1530632 - DNA, 15 bp, Homo sapiens
tttcagttgcaagag

SEQ ID NO: 1530633 - DNA, 15 bp, Homo sapiens
ctttcagttgcaaga

SEQ ID NO: 1530634 - DNA, 15 bp, Homo sapiens
tctttcagttgcaag

SEQ ID NO: 1530635 - DNA, 15 bp, Homo sapiens
ctctttcagttgcaa

SEQ ID NO: 1530636 - DNA, 15 bp, Homo sapiens
actctttcagttgca

SEQ ID NO: 1530637 - DNA, 15 bp, Homo sapiens
aactctttcagttgc

SEQ ID NO: 1530638 - DNA, 15 bp, Homo sapiens
caactctttcagttg

SEQ ID NO: 1530639 - DNA, 15 bp, Homo sapiens
ccaactctttcagtt

SEQ ID NO: 1530640 - DNA, 15 bp, Homo sapiens
accaactctttcagt

SEQ ID NO: 1530641 - DNA, 15 bp, Homo sapiens
gaccaactctttcag

SEQ ID NO: 1530642 - DNA, 15 bp, Homo sapiens
tgaccaactctttca

SEQ ID NO: 1530643 - DNA, 15 bp, Homo sapiens
ttgaccaactctttc

SEQ ID NO: 1530644 - DNA, 15 bp, Homo sapiens
tttgaccaactcttt

SEQ ID NO: 1530645 - DNA, 15 bp, Homo sapiens
ttttgaccaactctt

SEQ ID NO: 1530646 - DNA, 15 bp, Homo sapiens
cttttgaccaactct

SEQ ID NO: 1530647 - DNA, 15 bp, Homo sapiens
tcttttgaccaactc

SEQ ID NO: 1530648 - DNA, 15 bp, Homo sapiens
atcttttgaccaact

SEQ ID NO: 1530649 - DNA, 15 bp, Homo sapiens
aatcttttgaccaac

SEQ ID NO: 1530650 - DNA, 15 bp, Homo sapiens
caatcttttgaccaa

SEQ ID NO: 1530651 - DNA, 15 bp, Homo sapiens
ccaatcttttgacca

SEQ ID NO: 1530652 - DNA, 15 bp, Homo sapiens
accaatcttttgacc

SEQ ID NO: 1530653 - DNA, 15 bp, Homo sapiens
gaccaatcttttgac

SEQ ID NO: 1530654 - DNA, 15 bp, Homo sapiens
agaccaatcttttga

SEQ ID NO: 1530655 - DNA, 15 bp, Homo sapiens
cagaccaatcttttg

SEQ ID NO: 1530656 - DNA, 15 bp, Homo sapiens
ccagaccaatctttt

SEQ ID NO: 1530657 - DNA, 15 bp, Homo sapiens
tccagaccaatcttt

SEQ ID NO: 1530658 - DNA, 15 bp, Homo sapiens
ttccagaccaatctt

SEQ ID NO: 1530659 - DNA, 15 bp, Homo sapiens
attccagaccaatct

SEQ ID NO: 1530660 - DNA, 15 bp, Homo sapiens
cattccagaccaatc

SEQ ID NO: 1530661 - DNA, 15 bp, Homo sapiens
tcattccagaccaat

SEQ ID NO: 1530662 - DNA, 15 bp, Homo sapiens
ttcattccagaccaa

SEQ ID NO: 1530663 - DNA, 15 bp, Homo sapiens
attcattccagacca

SEQ ID NO: 1530664 - DNA, 15 bp, Homo sapiens
cattcattccagacc

SEQ ID NO: 1530665 - DNA, 15 bp, Homo sapiens
acattcattccagac

SEQ ID NO: 1530666 - DNA, 15 bp, Homo sapiens
cacattcattccaga

SEQ ID NO: 1530667 - DNA, 15 bp, Homo sapiens
tcacattcattccag

SEQ ID NO: 1530668 - DNA, 15 bp, Homo sapiens
ttcacattcattcca

SEQ ID NO: 1530669 - DNA, 15 bp, Homo sapiens
gttcacattcattcc

SEQ ID NO: 1530670 - DNA, 15 bp, Homo sapiens
agttcacattcattc

SEQ ID NO: 1530671 - DNA, 15 bp, Homo sapiens
aagttcacattcatt

SEQ ID NO: 1530672 - DNA, 15 bp, Homo sapiens
taagttcacattcat

SEQ ID NO: 1530673 - DNA, 15 bp, Homo sapiens
ataagttcacattca

SEQ ID NO: 1530674 - DNA, 15 bp, Homo sapiens
aataagttcacattc

SEQ ID NO: 1530675 - DNA, 15 bp, Homo sapiens
caataagttcacatt

SEQ ID NO: 1530676 - DNA, 15 bp, Homo sapiens
acaataagttcacat

SEQ ID NO: 1530677 - DNA, 15 bp, Homo sapiens
aacaataagttcaca

SEQ ID NO: 1530678 - DNA, 15 bp, Homo sapiens
caacaataagttcac

SEQ ID NO: 1530679 - DNA, 15 bp, Homo sapiens
acaacaataagttca

SEQ ID NO: 1530680 - DNA, 15 bp, Homo sapiens
cacaacaataagttc

SEQ ID NO: 1530681 - DNA, 15 bp, Homo sapiens
gcacaacaataagtt

SEQ ID NO: 1530682 - DNA, 15 bp, Homo sapiens
tgcacaacaataagt

SEQ ID NO: 1530683 - DNA, 15 bp, Homo sapiens
ctgcacaacaataag

SEQ ID NO: 1530684 - DNA, 15 bp, Homo sapiens
cctgcacaacaataa

SEQ ID NO: 1530685 - DNA, 15 bp, Homo sapiens
acctgcacaacaata

SEQ ID NO: 1530686 - DNA, 15 bp, Homo sapiens
tacctgcacaacaat

SEQ ID NO: 1530687 - DNA, 15 bp, Homo sapiens
ttacctgcacaacaa

SEQ ID NO: 1530688 - DNA, 15 bp, Homo sapiens
tttacctgcacaaca

SEQ ID NO: 1530689 - DNA, 15 bp, Homo sapiens
ctttacctgcacaac

SEQ ID NO: 1530690 - DNA, 15 bp, Homo sapiens
tctttacctgcacaa

SEQ ID NO: 1530691 - DNA, 15 bp, Homo sapiens
atctttacctgcaca

SEQ ID NO: 1530692 - DNA, 15 bp, Homo sapiens
catctttacctgcac

SEQ ID NO: 1530693 - DNA, 15 bp, Homo sapiens
acatctttacctgca

SEQ ID NO: 1530694 - DNA, 15 bp, Homo sapiens
cacatctttacctgc

SEQ ID NO: 1530695 - DNA, 15 bp, Homo sapiens
acacatctttacctg

SEQ ID NO: 1530696 - DNA, 15 bp, Homo sapiens
cacacatctttacct

SEQ ID NO: 1530697 - DNA, 15 bp, Homo sapiens
tcacacatctttacc

SEQ ID NO: 1530698 - DNA, 15 bp, Homo sapiens
ctcacacatctttac

SEQ ID NO: 1530699 - DNA, 15 bp, Homo sapiens
tctcacacatcttta

SEQ ID NO: 1530700 - DNA, 15 bp, Homo sapiens
atctcacacatcttt

SEQ ID NO: 1530701 - DNA, 15 bp, Homo sapiens
aatctcacacatctt

SEQ ID NO: 1530702 - DNA, 15 bp, Homo sapiens
aaatctcacacatct

SEQ ID NO: 1530703 - DNA, 15 bp, Homo sapiens
caaatctcacacatc

SEQ ID NO: 1530704 - DNA, 15 bp, Homo sapiens
acaaatctcacacat

SEQ ID NO: 1530705 - DNA, 15 bp, Homo sapiens
gacaaatctcacaca

SEQ ID NO: 1530706 - DNA, 15 bp, Homo sapiens
tgacaaatctcacac

SEQ ID NO: 1530707 - DNA, 15 bp, Homo sapiens
ctgacaaatctcaca

SEQ ID NO: 1530708 - DNA, 15 bp, Homo sapiens
cctgacaaatctcac

SEQ ID NO: 1530709 - DNA, 15 bp, Homo sapiens
acctgacaaatctca

SEQ ID NO: 1530710 - DNA, 15 bp, Homo sapiens
aacctgacaaatctc

SEQ ID NO: 1530711 - DNA, 15 bp, Homo sapiens
aaacctgacaaatct

SEQ ID NO: 1530712 - DNA, 15 bp, Homo sapiens
taaacctgacaaatc

SEQ ID NO: 1530713 - DNA, 15 bp, Homo sapiens
ataaacctgacaaat

SEQ ID NO: 1530714 - DNA, 15 bp, Homo sapiens
aataaacctgacaaa

SEQ ID NO: 1530715 - DNA, 15 bp, Homo sapiens
taataaacctgacaa

SEQ ID NO: 1530716 - DNA, 15 bp, Homo sapiens
ttaataaacctgaca

SEQ ID NO: 1530717 - DNA, 15 bp, Homo sapiens
attaataaacctgac

SEQ ID NO: 1530718 - DNA, 15 bp, Homo sapiens
cattaataaacctga

SEQ ID NO: 1530719 - DNA, 15 bp, Homo sapiens
acattaataaacctg

SEQ ID NO: 1530720 - DNA, 15 bp, Homo sapiens
tacattaataaacct

SEQ ID NO: 1530721 - DNA, 15 bp, Homo sapiens
gtacattaataaacc

SEQ ID NO: 1530722 - DNA, 15 bp, Homo sapiens
ggtacattaataaac

SEQ ID NO: 1530723 - DNA, 15 bp, Homo sapiens
aggtacattaataaa

SEQ ID NO: 1530724 - DNA, 15 bp, Homo sapiens
caggtacattaataa

SEQ ID NO: 1530725 - DNA, 15 bp, Homo sapiens
ccaggtacattaata

SEQ ID NO: 1530726 - DNA, 15 bp, Homo sapiens
tccaggtacattaat

SEQ ID NO: 1530727 - DNA, 15 bp, Homo sapiens
ttccaggtacattaa

SEQ ID NO: 1530728 - DNA, 15 bp, Homo sapiens
cttccaggtacatta

SEQ ID NO: 1530729 - DNA, 15 bp, Homo sapiens
tcttccaggtacatt

SEQ ID NO: 1530730 - DNA, 15 bp, Homo sapiens
ttcttccaggtacat

SEQ ID NO: 1530731 - DNA, 15 bp, Homo sapiens
attcttccaggtaca

SEQ ID NO: 1530732 - DNA, 15 bp, Homo sapiens
aattcttccaggtac

SEQ ID NO: 1530733 - DNA, 15 bp, Homo sapiens
aaattcttccaggta

SEQ ID NO: 1530734 - DNA, 15 bp, Homo sapiens
caaattcttccaggt

SEQ ID NO: 1530735 - DNA, 15 bp, Homo sapiens
acaaattcttccagg

SEQ ID NO: 1530736 - DNA, 15 bp, Homo sapiens
cacaaattcttccag

SEQ ID NO: 1530737 - DNA, 15 bp, Homo sapiens
acacaaattcttcca

SEQ ID NO: 1530738 - DNA, 15 bp, Homo sapiens
gacacaaattcttcc

SEQ ID NO: 1530739 - DNA, 15 bp, Homo sapiens
tgacacaaattcttc

SEQ ID NO: 1530740 - DNA, 15 bp, Homo sapiens
ttgacacaaattctt

SEQ ID NO: 1530741 - DNA, 15 bp, Homo sapiens
tttgacacaaattct

SEQ ID NO: 1530742 - DNA, 15 bp, Homo sapiens
ctttgacacaaattc

SEQ ID NO: 1530743 - DNA, 15 bp, Homo sapiens
tctttgacacaaatt

SEQ ID NO: 1530744 - DNA, 15 bp, Homo sapiens
ttctttgacacaaat

SEQ ID NO: 1530745 - DNA, 15 bp, Homo sapiens
attctttgacacaaa

SEQ ID NO: 1530746 - DNA, 15 bp, Homo sapiens
aattctttgacacaa

SEQ ID NO: 1530747 - DNA, 15 bp, Homo sapiens
taattctttgacaca

SEQ ID NO: 1530748 - DNA, 15 bp, Homo sapiens
ataattctttgacac

SEQ ID NO: 1530749 - DNA, 15 bp, Homo sapiens
aataattctttgaca

SEQ ID NO: 1530750 - DNA, 15 bp, Homo sapiens
taataattctttgac

SEQ ID NO: 1530751 - DNA, 15 bp, Homo sapiens
ctaataattctttga

SEQ ID NO: 1530752 - DNA, 15 bp, Homo sapiens
tctaataattctttg

SEQ ID NO: 1530753 - DNA, 15 bp, Homo sapiens
gtctaataattcttt

SEQ ID NO: 1530754 - DNA, 15 bp, Homo sapiens
tgtctaataattctt

SEQ ID NO: 1530755 - DNA, 15 bp, Homo sapiens
ctgtctaataattct

SEQ ID NO: 1530756 - DNA, 15 bp, Homo sapiens
cctgtctaataattc

SEQ ID NO: 1530757 - DNA, 15 bp, Homo sapiens
acctgtctaataatt

SEQ ID NO: 1530758 - DNA, 15 bp, Homo sapiens
gacctgtctaataat

SEQ ID NO: 1530759 - DNA, 15 bp, Homo sapiens
ggacctgtctaataa

SEQ ID NO: 1530760 - DNA, 15 bp, Homo sapiens
tggacctgtctaata

SEQ ID NO: 1530761 - DNA, 15 bp, Homo sapiens
gtggacctgtctaat

SEQ ID NO: 1530762 - DNA, 15 bp, Homo sapiens
cgtggacctgtctaa

SEQ ID NO: 1530763 - DNA, 15 bp, Homo sapiens
tcgtggacctgtcta

SEQ ID NO: 1530764 - DNA, 15 bp, Homo sapiens
atcgtggacctgtct

SEQ ID NO: 1530765 - DNA, 15 bp, Homo sapiens
tatcgtggacctgtc

SEQ ID NO: 1530766 - DNA, 15 bp, Homo sapiens
atatcgtggacctgt

SEQ ID NO: 1530767 - DNA, 15 bp, Homo sapiens
catatcgtggacctg

SEQ ID NO: 1530768 - DNA, 15 bp, Homo sapiens
acatatcgtggacct

SEQ ID NO: 1530769 - DNA, 15 bp, Homo sapiens
tacatatcgtggacc

SEQ ID NO: 1530770 - DNA, 15 bp, Homo sapiens
ctacatatcgtggac

SEQ ID NO: 1530771 - DNA, 15 bp, Homo sapiens
actacatatcgtgga

SEQ ID NO: 1530772 - DNA, 15 bp, Homo sapiens
aactacatatcgtgg

SEQ ID NO: 1530773 - DNA, 15 bp, Homo sapiens
aaactacatatcgtg

SEQ ID NO: 1530774 - DNA, 15 bp, Homo sapiens
caaactacatatcgt

SEQ ID NO: 1530775 - DNA, 15 bp, Homo sapiens
ccaaactacatatcg

SEQ ID NO: 1530776 - DNA, 15 bp, Homo sapiens
tccaaactacatatc

SEQ ID NO: 1530777 - DNA, 15 bp, Homo sapiens
ctccaaactacatat

SEQ ID NO: 1530778 - DNA, 15 bp, Homo sapiens
cctccaaactacata

SEQ ID NO: 1530779 - DNA, 15 bp, Homo sapiens
ccctccaaactacat

SEQ ID NO: 1530780 - DNA, 15 bp, Homo sapiens
gccctccaaactaca

SEQ ID NO: 1530781 - DNA, 15 bp, Homo sapiens
tgccctccaaactac

SEQ ID NO: 1530782 - DNA, 15 bp, Homo sapiens
atgccctccaaacta

SEQ ID NO: 1530783 - DNA, 15 bp, Homo sapiens
catgccctccaaact

SEQ ID NO: 1530784 - DNA, 15 bp, Homo sapiens
acatgccctccaaac

SEQ ID NO: 1530785 - DNA, 15 bp, Homo sapiens
aacatgccctccaaa

SEQ ID NO: 1530786 - DNA, 15 bp, Homo sapiens
caacatgccctccaa

SEQ ID NO: 1530787 - DNA, 15 bp, Homo sapiens
ccaacatgccctcca

SEQ ID NO: 1530788 - DNA, 15 bp, Homo sapiens
accaacatgccctcc

SEQ ID NO: 1530789 - DNA, 15 bp, Homo sapiens
aaccaacatgccctc

SEQ ID NO: 1530790 - DNA, 15 bp, Homo sapiens
caaccaacatgccct

SEQ ID NO: 1530791 - DNA, 15 bp, Homo sapiens
ccaaccaacatgccc

SEQ ID NO: 1530792 - DNA, 15 bp, Homo sapiens
tccaaccaacatgcc

SEQ ID NO: 1530793 - DNA, 15 bp, Homo sapiens
ttccaaccaacatgc

SEQ ID NO: 1530794 - DNA, 15 bp, Homo sapiens
gttccaaccaacatg

SEQ ID NO: 1530795 - DNA, 15 bp, Homo sapiens
agttccaaccaacat

SEQ ID NO: 1530796 - DNA, 15 bp, Homo sapiens
cagttccaaccaaca

SEQ ID NO: 1530797 - DNA, 15 bp, Homo sapiens
acagttccaaccaac

SEQ ID NO: 1530798 - DNA, 15 bp, Homo sapiens
gacagttccaaccaa

SEQ ID NO: 1530799 - DNA, 15 bp, Homo sapiens
ggacagttccaacca

SEQ ID NO: 1530800 - DNA, 15 bp, Homo sapiens
tggacagttccaacc

SEQ ID NO: 1530801 - DNA, 15 bp, Homo sapiens
ttggacagttccaac

SEQ ID NO: 1530802 - DNA, 15 bp, Homo sapiens
tttggacagttccaa

SEQ ID NO: 1530803 - DNA, 15 bp, Homo sapiens
ctttggacagttcca

SEQ ID NO: 1530804 - DNA, 15 bp, Homo sapiens
actttggacagttcc

SEQ ID NO: 1530805 - DNA, 15 bp, Homo sapiens
aactttggacagttc

SEQ ID NO: 1530806 - DNA, 15 bp, Homo sapiens
aaactttggacagtt

SEQ ID NO: 1530807 - DNA, 15 bp, Homo sapiens
caaactttggacagt

SEQ ID NO: 1530808 - DNA, 15 bp, Homo sapiens
acaaactttggacag

SEQ ID NO: 1530809 - DNA, 15 bp, Homo sapiens
aacaaactttggaca

SEQ ID NO: 1530810 - DNA, 15 bp, Homo sapiens
taacaaactttggac

SEQ ID NO: 1530811 - DNA, 15 bp, Homo sapiens
gtaacaaactttgga

SEQ ID NO: 1530812 - DNA, 15 bp, Homo sapiens
agtaacaaactttgg

SEQ ID NO: 1530813 - DNA, 15 bp, Homo sapiens
tagtaacaaactttg

SEQ ID NO: 1530814 - DNA, 15 bp, Homo sapiens
gtagtaacaaacttt

SEQ ID NO: 1530815 - DNA, 15 bp, Homo sapiens
agtagtaacaaactt

SEQ ID NO: 1530816 - DNA, 15 bp, Homo sapiens
cagtagtaacaaact

SEQ ID NO: 1530817 - DNA, 15 bp, Homo sapiens
tcagtagtaacaaac

SEQ ID NO: 1530818 - DNA, 15 bp, Homo sapiens
ctcagtagtaacaaa

SEQ ID NO: 1530819 - DNA, 15 bp, Homo sapiens
cctcagtagtaacaa

SEQ ID NO: 1530820 - DNA, 15 bp, Homo sapiens
acctcagtagtaaca

SEQ ID NO: 1530821 - DNA, 15 bp, Homo sapiens
aacctcagtagtaac

SEQ ID NO: 1530822 - DNA, 15 bp, Homo sapiens
caacctcagtagtaa

SEQ ID NO: 1530823 - DNA, 15 bp, Homo sapiens
tcaacctcagtagta

SEQ ID NO: 1530824 - DNA, 15 bp, Homo sapiens
ctcaacctcagtagt

SEQ ID NO: 1530825 - DNA, 15 bp, Homo sapiens
tctcaacctcagtag

SEQ ID NO: 1530826 - DNA, 15 bp, Homo sapiens
ttctcaacctcagta

SEQ ID NO: 1530827 - DNA, 15 bp, Homo sapiens
gttctcaacctcagt

SEQ ID NO: 1530828 - DNA, 15 bp, Homo sapiens
ggttctcaacctcag

SEQ ID NO: 1530829 - DNA, 15 bp, Homo sapiens
aggttctcaacctca

SEQ ID NO: 1530830 - DNA, 15 bp, Homo sapiens
gaggttctcaacctc

SEQ ID NO: 1530831 - DNA, 15 bp, Homo sapiens
cgaggttctcaacct

SEQ ID NO: 1530832 - DNA, 15 bp, Homo sapiens
tcgaggttctcaacc

SEQ ID NO: 1530833 - DNA, 15 bp, Homo sapiens
ctcgaggttctcaac

SEQ ID NO: 1530834 - DNA, 15 bp, Homo sapiens
tctcgaggttctcaa

SEQ ID NO: 1530835 - DNA, 15 bp, Homo sapiens
gtctcgaggttctca

SEQ ID NO: 1530836 - DNA, 15 bp, Homo sapiens
agtctcgaggttctc

SEQ ID NO: 1530837 - DNA, 15 bp, Homo sapiens
aagtctcgaggttct

SEQ ID NO: 1530838 - DNA, 15 bp, Homo sapiens
gaagtctcgaggttc

SEQ ID NO: 1530839 - DNA, 15 bp, Homo sapiens
agaagtctcgaggtt

SEQ ID NO: 1530840 - DNA, 15 bp, Homo sapiens
aagaagtctcgaggt

SEQ ID NO: 1530841 - DNA, 15 bp, Homo sapiens
taagaagtctcgagg

SEQ ID NO: 1530842 - DNA, 15 bp, Homo sapiens
ctaagaagtctcgag

SEQ ID NO: 1530843 - DNA, 15 bp, Homo sapiens
actaagaagtctcga

SEQ ID NO: 1530844 - DNA, 15 bp, Homo sapiens
cactaagaagtctcg

SEQ ID NO: 1530845 - DNA, 15 bp, Homo sapiens
acactaagaagtctc

SEQ ID NO: 1530846 - DNA, 15 bp, Homo sapiens
tacactaagaagtct

SEQ ID NO: 1530847 - DNA, 15 bp, Homo sapiens
atacactaagaagtc

SEQ ID NO: 1530848 - DNA, 15 bp, Homo sapiens
aatacactaagaagt

SEQ ID NO: 1530849 - DNA, 15 bp, Homo sapiens
aaatacactaagaag

SEQ ID NO: 1530850 - DNA, 15 bp, Homo sapiens
aaaatacactaagaa

SEQ ID NO: 1530851 - DNA, 15 bp, Homo sapiens
aaaaatacactaaga

SEQ ID NO: 1530852 - DNA, 15 bp, Homo sapiens
taaaaatacactaag

SEQ ID NO: 1530853 - DNA, 15 bp, Homo sapiens
ttaaaaatacactaa

SEQ ID NO: 1530854 - DNA, 15 bp, Homo sapiens
attaaaaatacacta

SEQ ID NO: 1530855 - DNA, 15 bp, Homo sapiens
cattaaaaatacact

SEQ ID NO: 1530856 - DNA, 15 bp, Homo sapiens
tcattaaaaatacac

SEQ ID NO: 1530857 - DNA, 15 bp, Homo sapiens
ctcattaaaaataca

SEQ ID NO: 1530858 - DNA, 15 bp, Homo sapiens
cctcattaaaaatac

SEQ ID NO: 1530859 - DNA, 15 bp, Homo sapiens
tcctcattaaaaata

SEQ ID NO: 1530860 - DNA, 15 bp, Homo sapiens
gtcctcattaaaaat

SEQ ID NO: 1530861 - DNA, 15 bp, Homo sapiens
tgtcctcattaaaaa

SEQ ID NO: 1530862 - DNA, 15 bp, Homo sapiens
ttgtcctcattaaaa

SEQ ID NO: 1530863 - DNA, 15 bp, Homo sapiens
gttgtcctcattaaa

SEQ ID NO: 1530864 - DNA, 15 bp, Homo sapiens
ggttgtcctcattaa

SEQ ID NO: 1530865 - DNA, 15 bp, Homo sapiens
aggttgtcctcatta

SEQ ID NO: 1530866 - DNA, 15 bp, Homo sapiens
aaggttgtcctcatt

SEQ ID NO: 1530867 - DNA, 15 bp, Homo sapiens
aaaggttgtcctcat

SEQ ID NO: 1530868 - DNA, 15 bp, Homo sapiens
aaaaggttgtcctca

SEQ ID NO: 1530869 - DNA, 15 bp, Homo sapiens
gaaaaggttgtcctc

SEQ ID NO: 1530870 - DNA, 15 bp, Homo sapiens
ggaaaaggttgtcct

SEQ ID NO: 1530871 - DNA, 15 bp, Homo sapiens
tggaaaaggttgtcc

SEQ ID NO: 1530872 - DNA, 15 bp, Homo sapiens
ctggaaaaggttgtc

SEQ ID NO: 1530873 - DNA, 15 bp, Homo sapiens
gctggaaaaggttgt

SEQ ID NO: 1530874 - DNA, 15 bp, Homo sapiens
tgctggaaaaggttg

SEQ ID NO: 1530875 - DNA, 15 bp, Homo sapiens
atgctggaaaaggtt

SEQ ID NO: 1530876 - DNA, 15 bp, Homo sapiens
catgctggaaaaggt

SEQ ID NO: 1530877 - DNA, 15 bp, Homo sapiens
acatgctggaaaagg

SEQ ID NO: 1530878 - DNA, 15 bp, Homo sapiens
aacatgctggaaaag

SEQ ID NO: 1530879 - DNA, 15 bp, Homo sapiens
gaacatgctggaaaa

SEQ ID NO: 1530880 - DNA, 15 bp, Homo sapiens
agaacatgctggaaa

SEQ ID NO: 1530881 - DNA, 15 bp, Homo sapiens
aagaacatgctggaa

SEQ ID NO: 1530882 - DNA, 15 bp, Homo sapiens
taagaacatgctgga

SEQ ID NO: 1530883 - DNA, 15 bp, Homo sapiens
ctaagaacatgctgg

SEQ ID NO: 1530884 - DNA, 15 bp, Homo sapiens
tctaagaacatgctg

SEQ ID NO: 1530885 - DNA, 15 bp, Homo sapiens
ttctaagaacatgct

SEQ ID NO: 1530886 - DNA, 15 bp, Homo sapiens
tttctaagaacatgc

SEQ ID NO: 1530887 - DNA, 15 bp, Homo sapiens
gtttctaagaacatg

SEQ ID NO: 1530888 - DNA, 15 bp, Homo sapiens
tgtttctaagaacat

SEQ ID NO: 1530889 - DNA, 15 bp, Homo sapiens
atgtttctaagaaca

SEQ ID NO: 1530890 - DNA, 15 bp, Homo sapiens
gatgtttctaagaac

SEQ ID NO: 1530891 - DNA, 15 bp, Homo sapiens
ggatgtttctaagaa

SEQ ID NO: 1530892 - DNA, 15 bp, Homo sapiens
tggatgtttctaaga

SEQ ID NO: 1530893 - DNA, 15 bp, Homo sapiens
ctggatgtttctaag

SEQ ID NO: 1530894 - DNA, 15 bp, Homo sapiens
tctggatgtttctaa

SEQ ID NO: 1530895 - DNA, 15 bp, Homo sapiens
atctggatgtttcta

SEQ ID NO: 1530896 - DNA, 15 bp, Homo sapiens
tatctggatgtttct

SEQ ID NO: 1530897 - DNA, 15 bp, Homo sapiens
atatctggatgtttc

SEQ ID NO: 1530898 - DNA, 15 bp, Homo sapiens
aatatctggatgttt

SEQ ID NO: 1530899 - DNA, 15 bp, Homo sapiens
aaatatctggatgtt

SEQ ID NO: 1530900 - DNA, 15 bp, Homo sapiens
taaatatctggatgt

SEQ ID NO: 1530901 - DNA, 15 bp, Homo sapiens
ttaaatatctggatg

SEQ ID NO: 1530902 - DNA, 15 bp, Homo sapiens
cttaaatatctggat

SEQ ID NO: 1530903 - DNA, 15 bp, Homo sapiens
tcttaaatatctgga

SEQ ID NO: 1530904 - DNA, 15 bp, Homo sapiens
atcttaaatatctgg

SEQ ID NO: 1530905 - DNA, 15 bp, Homo sapiens
aatcttaaatatctg

SEQ ID NO: 1530906 - DNA, 15 bp, Homo sapiens
gaatcttaaatatct

SEQ ID NO: 1530907 - DNA, 15 bp, Homo sapiens
ggaatcttaaatatc

SEQ ID NO: 1530908 - DNA, 15 bp, Homo sapiens
tggaatcttaaatat

SEQ ID NO: 1530909 - DNA, 15 bp, Homo sapiens
gtggaatcttaaata

SEQ ID NO: 1530910 - DNA, 15 bp, Homo sapiens
agtggaatcttaaat

SEQ ID NO: 1530911 - DNA, 15 bp, Homo sapiens
cagtggaatcttaaa

SEQ ID NO: 1530912 - DNA, 15 bp, Homo sapiens
tcagtggaatcttaa

SEQ ID NO: 1530913 - DNA, 15 bp, Homo sapiens
atcagtggaatctta

SEQ ID NO: 1530914 - DNA, 15 bp, Homo sapiens
tatcagtggaatctt

SEQ ID NO: 1530915 - DNA, 15 bp, Homo sapiens
ttatcagtggaatct

SEQ ID NO: 1530916 - DNA, 15 bp, Homo sapiens
cttatcagtggaatc

SEQ ID NO: 1530917 - DNA, 15 bp, Homo sapiens
gcttatcagtggaat

SEQ ID NO: 1530918 - DNA, 15 bp, Homo sapiens
tgcttatcagtggaa

SEQ ID NO: 1530919 - DNA, 15 bp, Homo sapiens
ctgcttatcagtgga

SEQ ID NO: 1530920 - DNA, 15 bp, Homo sapiens
actgcttatcagtgg

SEQ ID NO: 1530921 - DNA, 15 bp, Homo sapiens
tactgcttatcagtg

SEQ ID NO: 1530922 - DNA, 15 bp, Homo sapiens
atactgcttatcagt

SEQ ID NO: 1530923 - DNA, 15 bp, Homo sapiens
gatactgcttatcag

SEQ ID NO: 1530924 - DNA, 15 bp, Homo sapiens
tgatactgcttatca

SEQ ID NO: 1530925 - DNA, 15 bp, Homo sapiens
ctgatactgcttatc

SEQ ID NO: 1530926 - DNA, 15 bp, Homo sapiens
tctgatactgcttat

SEQ ID NO: 1530927 - DNA, 15 bp, Homo sapiens
atctgatactgctta

SEQ ID NO: 1530928 - DNA, 15 bp, Homo sapiens
aatctgatactgctt

SEQ ID NO: 1530929 - DNA, 15 bp, Homo sapiens
aaatctgatactgct

SEQ ID NO: 1530930 - DNA, 15 bp, Homo sapiens
caaatctgatactgc

SEQ ID NO: 1530931 - DNA, 15 bp, Homo sapiens
acaaatctgatactg

SEQ ID NO: 1530932 - DNA, 15 bp, Homo sapiens
gacaaatctgatact

SEQ ID NO: 1530933 - DNA, 15 bp, Homo sapiens
tgacaaatctgatac

SEQ ID NO: 1530934 - DNA, 15 bp, Homo sapiens
ttgacaaatctgata

SEQ ID NO: 1530935 - DNA, 15 bp, Homo sapiens
cttgacaaatctgat

SEQ ID NO: 1530936 - DNA, 15 bp, Homo sapiens
tcttgacaaatctga

SEQ ID NO: 1530937 - DNA, 15 bp, Homo sapiens
ttcttgacaaatctg

SEQ ID NO: 1530938 - DNA, 15 bp, Homo sapiens
cttcttgacaaatct

SEQ ID NO: 1530939 - DNA, 15 bp, Homo sapiens
acttcttgacaaatc

SEQ ID NO: 1530940 - DNA, 15 bp, Homo sapiens
aacttcttgacaaat

SEQ ID NO: 1530941 - DNA, 15 bp, Homo sapiens
aaacttcttgacaaa

SEQ ID NO: 1530942 - DNA, 15 bp, Homo sapiens
taaacttcttgacaa

SEQ ID NO: 1530943 - DNA, 15 bp, Homo sapiens
ttaaacttcttgaca

SEQ ID NO: 1530944 - DNA, 15 bp, Homo sapiens
attaaacttcttgac

SEQ ID NO: 1530945 - DNA, 15 bp, Homo sapiens
cattaaacttcttga

SEQ ID NO: 1530946 - DNA, 15 bp, Homo sapiens
acattaaacttcttg

SEQ ID NO: 1530947 - DNA, 15 bp, Homo sapiens
aacattaaacttctt

SEQ ID NO: 1530948 - DNA, 15 bp, Homo sapiens
caacattaaacttct

SEQ ID NO: 1530949 - DNA, 15 bp, Homo sapiens
acaacattaaacttc

SEQ ID NO: 1530950 - DNA, 15 bp, Homo sapiens
aacaacattaaactt

SEQ ID NO: 1530951 - DNA, 15 bp, Homo sapiens
caacaacattaaact

SEQ ID NO: 1530952 - DNA, 15 bp, Homo sapiens
acaacaacattaaac

SEQ ID NO: 1530953 - DNA, 15 bp, Homo sapiens
aacaacaacattaaa

SEQ ID NO: 1530954 - DNA, 15 bp, Homo sapiens
taacaacaacattaa

SEQ ID NO: 1530955 - DNA, 15 bp, Homo sapiens
ctaacaacaacatta

SEQ ID NO: 1530956 - DNA, 15 bp, Homo sapiens
gctaacaacaacatt

SEQ ID NO: 1530957 - DNA, 15 bp, Homo sapiens
tgctaacaacaacat

SEQ ID NO: 1530958 - DNA, 15 bp, Homo sapiens
ctgctaacaacaaca

SEQ ID NO: 1530959 - DNA, 15 bp, Homo sapiens
gctgctaacaacaac

SEQ ID NO: 1530960 - DNA, 15 bp, Homo sapiens
tgctgctaacaacaa

SEQ ID NO: 1530961 - DNA, 15 bp, Homo sapiens
ctgctgctaacaaca

SEQ ID NO: 1530962 - DNA, 15 bp, Homo sapiens
tctgctgctaacaac

SEQ ID NO: 1530963 - DNA, 15 bp, Homo sapiens
gtctgctgctaacaa

SEQ ID NO: 1530964 - DNA, 15 bp, Homo sapiens
tgtctgctgctaaca

SEQ ID NO: 1530965 - DNA, 15 bp, Homo sapiens
atgtctgctgctaac

SEQ ID NO: 1530966 - DNA, 15 bp, Homo sapiens
catgtctgctgctaa

SEQ ID NO: 1530967 - DNA, 15 bp, Homo sapiens
acatgtctgctgcta

SEQ ID NO: 1530968 - DNA, 15 bp, Homo sapiens
aacatgtctgctgct

SEQ ID NO: 1530969 - DNA, 15 bp, Homo sapiens
gaacatgtctgctgc

SEQ ID NO: 1530970 - DNA, 15 bp, Homo sapiens
ggaacatgtctgctg

SEQ ID NO: 1530971 - DNA, 15 bp, Homo sapiens
tggaacatgtctgct

SEQ ID NO: 1530972 - DNA, 15 bp, Homo sapiens
gtggaacatgtctgc

SEQ ID NO: 1530973 - DNA, 15 bp, Homo sapiens
tgtggaacatgtctg

SEQ ID NO: 1530974 - DNA, 15 bp, Homo sapiens
ctgtggaacatgtct

SEQ ID NO: 1530975 - DNA, 15 bp, Homo sapiens
tctgtggaacatgtc

SEQ ID NO: 1530976 - DNA, 15 bp, Homo sapiens
ctctgtggaacatgt

SEQ ID NO: 1530977 - DNA, 15 bp, Homo sapiens
tctctgtggaacatg

SEQ ID NO: 1530978 - DNA, 15 bp, Homo sapiens
gtctctgtggaacat

SEQ ID NO: 1530979 - DNA, 15 bp, Homo sapiens
ggtctctgtggaaca

SEQ ID NO: 1530980 - DNA, 15 bp, Homo sapiens
cggtctctgtggaac

SEQ ID NO: 1530981 - DNA, 15 bp, Homo sapiens
tcggtctctgtggaa

SEQ ID NO: 1530982 - DNA, 15 bp, Homo sapiens
ctcggtctctgtgga

SEQ ID NO: 1530983 - DNA, 15 bp, Homo sapiens
cctcggtctctgtgg

SEQ ID NO: 1530984 - DNA, 15 bp, Homo sapiens
acctcggtctctgtg

SEQ ID NO: 1530985 - DNA, 15 bp, Homo sapiens
tacctcggtctctgt

SEQ ID NO: 1530986 - DNA, 15 bp, Homo sapiens
ttacctcggtctctg

SEQ ID NO: 1530987 - DNA, 15 bp, Homo sapiens
cttacctcggtctct

SEQ ID NO: 1530988 - DNA, 15 bp, Homo sapiens
acttacctcggtctc

SEQ ID NO: 1530989 - DNA, 15 bp, Homo sapiens
cacttacctcggtct

SEQ ID NO: 1530990 - DNA, 15 bp, Homo sapiens
tcacttacctcggtc

SEQ ID NO: 1530991 - DNA, 15 bp, Homo sapiens
ctcacttacctcggt

SEQ ID NO: 1530992 - DNA, 15 bp, Homo sapiens
gctcacttacctcgg

SEQ ID NO: 1530993 - DNA, 15 bp, Homo sapiens
tgctcacttacctcg

SEQ ID NO: 1530994 - DNA, 15 bp, Homo sapiens
ctgctcacttacctc

SEQ ID NO: 1530995 - DNA, 15 bp, Homo sapiens
cctgctcacttacct

SEQ ID NO: 1530996 - DNA, 15 bp, Homo sapiens
gcctgctcacttacc

SEQ ID NO: 1530997 - DNA, 15 bp, Homo sapiens
tgcctgctcacttac

SEQ ID NO: 1530998 - DNA, 15 bp, Homo sapiens
ctgcctgctcactta

SEQ ID NO: 1530999 - DNA, 15 bp, Homo sapiens
cctgcctgctcactt

SEQ ID NO: 1531000 - DNA, 15 bp, Homo sapiens
gcctgcctgctcact

SEQ ID NO: 1531001 - DNA, 15 bp, Homo sapiens
agcctgcctgctcac

SEQ ID NO: 1531002 - DNA, 15 bp, Homo sapiens
aagcctgcctgctca

SEQ ID NO: 1531003 - DNA, 15 bp, Homo sapiens
aaagcctgcctgctc

SEQ ID NO: 1531004 - DNA, 15 bp, Homo sapiens
gaaagcctgcctgct

SEQ ID NO: 1531005 - DNA, 15 bp, Homo sapiens
tgaaagcctgcctgc

SEQ ID NO: 1531006 - DNA, 15 bp, Homo sapiens
ttgaaagcctgcctg

SEQ ID NO: 1531007 - DNA, 15 bp, Homo sapiens
cttgaaagcctgcct

SEQ ID NO: 1531008 - DNA, 15 bp, Homo sapiens
gcttgaaagcctgcc

SEQ ID NO: 1531009 - DNA, 15 bp, Homo sapiens
ggcttgaaagcctgc

SEQ ID NO: 1531010 - DNA, 15 bp, Homo sapiens
aggcttgaaagcctg

SEQ ID NO: 1531011 - DNA, 15 bp, Homo sapiens
caggcttgaaagcct

SEQ ID NO: 1531012 - DNA, 15 bp, Homo sapiens
acaggcttgaaagcc

SEQ ID NO: 1531013 - DNA, 15 bp, Homo sapiens
aacaggcttgaaagc

SEQ ID NO: 1531014 - DNA, 15 bp, Homo sapiens
caacaggcttgaaag

SEQ ID NO: 1531015 - DNA, 15 bp, Homo sapiens
acaacaggcttgaaa

SEQ ID NO: 1531016 - DNA, 15 bp, Homo sapiens
aacaacaggcttgaa

SEQ ID NO: 1531017 - DNA, 15 bp, Homo sapiens
aaacaacaggcttga

SEQ ID NO: 1531018 - DNA, 15 bp, Homo sapiens
caaacaacaggcttg

SEQ ID NO: 1531019 - DNA, 15 bp, Homo sapiens
tcaaacaacaggctt

SEQ ID NO: 1531020 - DNA, 15 bp, Homo sapiens
ttcaaacaacaggct

SEQ ID NO: 1531021 - DNA, 15 bp, Homo sapiens
tttcaaacaacaggc

SEQ ID NO: 1531022 - DNA, 15 bp, Homo sapiens
atttcaaacaacagg

SEQ ID NO: 1531023 - DNA, 15 bp, Homo sapiens
catttcaaacaacag

SEQ ID NO: 1531024 - DNA, 15 bp, Homo sapiens
acatttcaaacaaca

SEQ ID NO: 1531025 - DNA, 15 bp, Homo sapiens
gacatttcaaacaac

SEQ ID NO: 1531026 - DNA, 15 bp, Homo sapiens
ggacatttcaaacaa

SEQ ID NO: 1531027 - DNA, 15 bp, Homo sapiens
tggacatttcaaaca

SEQ ID NO: 1531028 - DNA, 15 bp, Homo sapiens
ctggacatttcaaac

SEQ ID NO: 1531029 - DNA, 15 bp, Homo sapiens
cctggacatttcaaa

SEQ ID NO: 1531030 - DNA, 15 bp, Homo sapiens
ccctggacatttcaa

SEQ ID NO: 1531031 - DNA, 15 bp, Homo sapiens
accctggacatttca

SEQ ID NO: 1531032 - DNA, 15 bp, Homo sapiens
gaccctggacatttc

SEQ ID NO: 1531033 - DNA, 15 bp, Homo sapiens
ggaccctggacattt

SEQ ID NO: 1531034 - DNA, 15 bp, Homo sapiens
aggaccctggacatt

SEQ ID NO: 1531035 - DNA, 15 bp, Homo sapiens
gaggaccctggacat

SEQ ID NO: 1531036 - DNA, 15 bp, Homo sapiens
tgaggaccctggaca

SEQ ID NO: 1531037 - DNA, 15 bp, Homo sapiens
ctgaggaccctggac

SEQ ID NO: 1531038 - DNA, 15 bp, Homo sapiens
tctgaggaccctgga

SEQ ID NO: 1531039 - DNA, 15 bp, Homo sapiens
atctgaggaccctgg

SEQ ID NO: 1531040 - DNA, 15 bp, Homo sapiens
aatctgaggaccctg

SEQ ID NO: 1531041 - DNA, 15 bp, Homo sapiens
caatctgaggaccct

SEQ ID NO: 1531042 - DNA, 15 bp, Homo sapiens
ccaatctgaggaccc

SEQ ID NO: 1531043 - DNA, 15 bp, Homo sapiens
accaatctgaggacc

SEQ ID NO: 1531044 - DNA, 15 bp, Homo sapiens
taccaatctgaggac

SEQ ID NO: 1531045 - DNA, 15 bp, Homo sapiens
ataccaatctgagga

SEQ ID NO: 1531046 - DNA, 15 bp, Homo sapiens
tataccaatctgagg

SEQ ID NO: 1531047 - DNA, 15 bp, Homo sapiens
atataccaatctgag

SEQ ID NO: 1531048 - DNA, 15 bp, Homo sapiens
aatataccaatctga

SEQ ID NO: 1531049 - DNA, 15 bp, Homo sapiens
caatataccaatctg

SEQ ID NO: 1531050 - DNA, 15 bp, Homo sapiens
ccaatataccaatct

SEQ ID NO: 1531051 - DNA, 15 bp, Homo sapiens
cccaatataccaatc

SEQ ID NO: 1531052 - DNA, 15 bp, Homo sapiens
acccaatataccaat

SEQ ID NO: 1531053 - DNA, 15 bp, Homo sapiens
aacccaatataccaa

SEQ ID NO: 1531054 - DNA, 15 bp, Homo sapiens
taacccaatatacca

SEQ ID NO: 1531055 - DNA, 15 bp, Homo sapiens
ttaacccaatatacc

SEQ ID NO: 1531056 - DNA, 15 bp, Homo sapiens
gttaacccaatatac

SEQ ID NO: 1531057 - DNA, 15 bp, Homo sapiens
agttaacccaatata

SEQ ID NO: 1531058 - DNA, 15 bp, Homo sapiens
cagttaacccaatat

SEQ ID NO: 1531059 - DNA, 15 bp, Homo sapiens
ccagttaacccaata

SEQ ID NO: 1531060 - DNA, 15 bp, Homo sapiens
accagttaacccaat

SEQ ID NO: 1531061 - DNA, 15 bp, Homo sapiens
aaccagttaacccaa

SEQ ID NO: 1531062 - DNA, 15 bp, Homo sapiens
taaccagttaaccca

SEQ ID NO: 1531063 - DNA, 15 bp, Homo sapiens
ataaccagttaaccc

SEQ ID NO: 1531064 - DNA, 15 bp, Homo sapiens
cataaccagttaacc

SEQ ID NO: 1531065 - DNA, 15 bp, Homo sapiens
gcataaccagttaac

SEQ ID NO: 1531066 - DNA, 15 bp, Homo sapiens
tgcataaccagttaa

SEQ ID NO: 1531067 - DNA, 15 bp, Homo sapiens
ctgcataaccagtta

SEQ ID NO: 1531068 - DNA, 15 bp, Homo sapiens
tctgcataaccagtt

SEQ ID NO: 1531069 - DNA, 15 bp, Homo sapiens
atctgcataaccagt

SEQ ID NO: 1531070 - DNA, 15 bp, Homo sapiens
gatctgcataaccag

SEQ ID NO: 1531071 - DNA, 15 bp, Homo sapiens
tgatctgcataacca

SEQ ID NO: 1531072 - DNA, 15 bp, Homo sapiens
ctgatctgcataacc

SEQ ID NO: 1531073 - DNA, 15 bp, Homo sapiens
actgatctgcataac

SEQ ID NO: 1531074 - DNA, 15 bp, Homo sapiens
tactgatctgcataa

SEQ ID NO: 1531075 - DNA, 15 bp, Homo sapiens
ttactgatctgcata

SEQ ID NO: 1531076 - DNA, 15 bp, Homo sapiens
tttactgatctgcat

SEQ ID NO: 1531077 - DNA, 15 bp, Homo sapiens
ctttactgatctgca

SEQ ID NO: 1531078 - DNA, 15 bp, Homo sapiens
actttactgatctgc

SEQ ID NO: 1531079 - DNA, 15 bp, Homo sapiens
cactttactgatctg

SEQ ID NO: 1531080 - DNA, 15 bp, Homo sapiens
ccactttactgatct

SEQ ID NO: 1531081 - DNA, 15 bp, Homo sapiens
accactttactgatc

SEQ ID NO: 1531082 - DNA, 15 bp, Homo sapiens
aaccactttactgat

SEQ ID NO: 1531083 - DNA, 15 bp, Homo sapiens
taaccactttactga

SEQ ID NO: 1531084 - DNA, 15 bp, Homo sapiens
ataaccactttactg

SEQ ID NO: 1531085 - DNA, 15 bp, Homo sapiens
tataaccactttact

SEQ ID NO: 1531086 - DNA, 15 bp, Homo sapiens
ttataaccactttac

SEQ ID NO: 1531087 - DNA, 15 bp, Homo sapiens
cttataaccacttta

SEQ ID NO: 1531088 - DNA, 15 bp, Homo sapiens
tcttataaccacttt

SEQ ID NO: 1531089 - DNA, 15 bp, Homo sapiens
gtcttataaccactt

SEQ ID NO: 1531090 - DNA, 15 bp, Homo sapiens
tgtcttataaccact

SEQ ID NO: 1531091 - DNA, 15 bp, Homo sapiens
ctgtcttataaccac

SEQ ID NO: 1531092 - DNA, 15 bp, Homo sapiens
cctgtcttataacca

SEQ ID NO: 1531093 - DNA, 15 bp, Homo sapiens
acctgtcttataacc

SEQ ID NO: 1531094 - DNA, 15 bp, Homo sapiens
aacctgtcttataac

SEQ ID NO: 1531095 - DNA, 15 bp, Homo sapiens
aaacctgtcttataa

SEQ ID NO: 1531096 - DNA, 15 bp, Homo sapiens
taaacctgtcttata

SEQ ID NO: 1531097 - DNA, 15 bp, Homo sapiens
ttaaacctgtcttat

SEQ ID NO: 1531098 - DNA, 15 bp, Homo sapiens
tttaaacctgtctta

SEQ ID NO: 1531099 - DNA, 15 bp, Homo sapiens
atttaaacctgtctt

SEQ ID NO: 1531100 - DNA, 15 bp, Homo sapiens
catttaaacctgtct

SEQ ID NO: 1531101 - DNA, 15 bp, Homo sapiens
acatttaaacctgtc

SEQ ID NO: 1531102 - DNA, 15 bp, Homo sapiens
tacatttaaacctgt

SEQ ID NO: 1531103 - DNA, 15 bp, Homo sapiens
atacatttaaacctg

SEQ ID NO: 1531104 - DNA, 15 bp, Homo sapiens
tatacatttaaacct

SEQ ID NO: 1531105 - DNA, 15 bp, Homo sapiens
ttatacatttaaacc

SEQ ID NO: 1531106 - DNA, 15 bp, Homo sapiens
aatattatacattta

SEQ ID NO: 1531107 - DNA, 15 bp, Homo sapiens
gaatattatacattt

SEQ ID NO: 1531108 - DNA, 15 bp, Homo sapiens
agaatattatacatt

SEQ ID NO: 1531109 - DNA, 15 bp, Homo sapiens
gagaatattatacat

SEQ ID NO: 1531110 - DNA, 15 bp, Homo sapiens
agagaatattataca

SEQ ID NO: 1531111 - DNA, 15 bp, Homo sapiens
aagagaatattatac

SEQ ID NO: 1531112 - DNA, 15 bp, Homo sapiens
caagagaatattata

SEQ ID NO: 1531113 - DNA, 15 bp, Homo sapiens
gcaagagaatattat

SEQ ID NO: 1531114 - DNA, 15 bp, Homo sapiens
tgcaagagaatatta

SEQ ID NO: 1531115 - DNA, 15 bp, Homo sapiens
ctgcaagagaatatt

SEQ ID NO: 1531116 - DNA, 15 bp, Homo sapiens
actgcaagagaatat

SEQ ID NO: 1531117 - DNA, 15 bp, Homo sapiens
gactgcaagagaata

SEQ ID NO: 1531118 - DNA, 15 bp, Homo sapiens
ggactgcaagagaat

SEQ ID NO: 1531119 - DNA, 15 bp, Homo sapiens
tggactgcaagagaa

SEQ ID NO: 1531120 - DNA, 15 bp, Homo sapiens
ctggactgcaagaga

SEQ ID NO: 1531121 - DNA, 15 bp, Homo sapiens
tctggactgcaagag

SEQ ID NO: 1531122 - DNA, 15 bp, Homo sapiens
atctggactgcaaga

SEQ ID NO: 1531123 - DNA, 15 bp, Homo sapiens
catctggactgcaag

SEQ ID NO: 1531124 - DNA, 15 bp, Homo sapiens
ccatctggactgcaa

SEQ ID NO: 1531125 - DNA, 15 bp, Homo sapiens
accatctggactgca

SEQ ID NO: 1531126 - DNA, 15 bp, Homo sapiens
taccatctggactgc

SEQ ID NO: 1531127 - DNA, 15 bp, Homo sapiens
ttaccatctggactg

SEQ ID NO: 1531128 - DNA, 15 bp, Homo sapiens
attaccatctggact

SEQ ID NO: 1531129 - DNA, 15 bp, Homo sapiens
cattaccatctggac

SEQ ID NO: 1531130 - DNA, 15 bp, Homo sapiens
acattaccatctgga

SEQ ID NO: 1531131 - DNA, 15 bp, Homo sapiens
tacattaccatctgg

SEQ ID NO: 1531132 - DNA, 15 bp, Homo sapiens
ctacattaccatctg

SEQ ID NO: 1531133 - DNA, 15 bp, Homo sapiens
tctacattaccatct

SEQ ID NO: 1531134 - DNA, 15 bp, Homo sapiens
gtctacattaccatc

SEQ ID NO: 1531135 - DNA, 15 bp, Homo sapiens
tgtctacattaccat

SEQ ID NO: 1531136 - DNA, 15 bp, Homo sapiens
ttgtctacattacca

SEQ ID NO: 1531137 - DNA, 15 bp, Homo sapiens
cttgtctacattacc

SEQ ID NO: 1531138 - DNA, 15 bp, Homo sapiens
acttgtctacattac

SEQ ID NO: 1531139 - DNA, 15 bp, Homo sapiens
aacttgtctacatta

SEQ ID NO: 1531140 - DNA, 15 bp, Homo sapiens
aaacttgtctacatt

SEQ ID NO: 1531141 - DNA, 15 bp, Homo sapiens
gaaacttgtctacat

SEQ ID NO: 1531142 - DNA, 15 bp, Homo sapiens
agaaacttgtctaca

SEQ ID NO: 1531143 - DNA, 15 bp, Homo sapiens
cagaaacttgtctac

SEQ ID NO: 1531144 - DNA, 15 bp, Homo sapiens
gcagaaacttgtcta

SEQ ID NO: 1531145 - DNA, 15 bp, Homo sapiens
ggcagaaacttgtct

SEQ ID NO: 1531146 - DNA, 15 bp, Homo sapiens
aggcagaaacttgtc

SEQ ID NO: 1531147 - DNA, 15 bp, Homo sapiens
caggcagaaacttgt

SEQ ID NO: 1531148 - DNA, 15 bp, Homo sapiens
tcaggcagaaacttg

SEQ ID NO: 1531149 - DNA, 15 bp, Homo sapiens
ttcaggcagaaactt

SEQ ID NO: 1531150 - DNA, 15 bp, Homo sapiens
gttcaggcagaaact

SEQ ID NO: 1531151 - DNA, 15 bp, Homo sapiens
tgttcaggcagaaac

SEQ ID NO: 1531152 - DNA, 15 bp, Homo sapiens
ctgttcaggcagaaa

SEQ ID NO: 1531153 - DNA, 15 bp, Homo sapiens
actgttcaggcagaa

SEQ ID NO: 1531154 - DNA, 15 bp, Homo sapiens
gactgttcaggcaga

SEQ ID NO: 1531155 - DNA, 15 bp, Homo sapiens
ggactgttcaggcag

SEQ ID NO: 1531156 - DNA, 15 bp, Homo sapiens
tggactgttcaggca

SEQ ID NO: 1531157 - DNA, 15 bp, Homo sapiens
gtggactgttcaggc

SEQ ID NO: 1531158 - DNA, 15 bp, Homo sapiens
tgtggactgttcagg

SEQ ID NO: 1531159 - DNA, 15 bp, Homo sapiens
atgtggactgttcag

SEQ ID NO: 1531160 - DNA, 15 bp, Homo sapiens
catgtggactgttca

SEQ ID NO: 1531161 - DNA, 15 bp, Homo sapiens
gcatgtggactgttc

SEQ ID NO: 1531162 - DNA, 15 bp, Homo sapiens
ggcatgtggactgtt

SEQ ID NO: 1531163 - DNA, 15 bp, Homo sapiens
aggcatgtggactgt

SEQ ID NO: 1531164 - DNA, 15 bp, Homo sapiens
caggcatgtggactg

SEQ ID NO: 1531165 - DNA, 15 bp, Homo sapiens
acaggcatgtggact

SEQ ID NO: 1531166 - DNA, 15 bp, Homo sapiens
cacaggcatgtggac

SEQ ID NO: 1531167 - DNA, 15 bp, Homo sapiens
gcacaggcatgtgga

SEQ ID NO: 1531168 - DNA, 15 bp, Homo sapiens
ggcacaggcatgtgg

SEQ ID NO: 1531169 - DNA, 15 bp, Homo sapiens
aggcacaggcatgtg

SEQ ID NO: 1531170 - DNA, 15 bp, Homo sapiens
gaggcacaggcatgt

SEQ ID NO: 1531171 - DNA, 15 bp, Homo sapiens
agaggcacaggcatg

SEQ ID NO: 1531172 - DNA, 15 bp, Homo sapiens
gagaggcacaggcat

SEQ ID NO: 1531173 - DNA, 15 bp, Homo sapiens
agagaggcacaggca

SEQ ID NO: 1531174 - DNA, 15 bp, Homo sapiens
cagagaggcacaggc

SEQ ID NO: 1531175 - DNA, 15 bp, Homo sapiens
acagagaggcacagg

SEQ ID NO: 1531176 - DNA, 15 bp, Homo sapiens
cacagagaggcacag

SEQ ID NO: 1531177 - DNA, 15 bp, Homo sapiens
gcacagagaggcaca

SEQ ID NO: 1531178 - DNA, 15 bp, Homo sapiens
tgcacagagaggcac

SEQ ID NO: 1531179 - DNA, 15 bp, Homo sapiens
atgcacagagaggca

SEQ ID NO: 1531180 - DNA, 15 bp, Homo sapiens
tatgcacagagaggc

SEQ ID NO: 1531181 - DNA, 15 bp, Homo sapiens
atatgcacagagagg

SEQ ID NO: 1531182 - DNA, 15 bp, Homo sapiens
tatatgcacagagag

SEQ ID NO: 1531183 - DNA, 15 bp, Homo sapiens
gtatatgcacagaga

SEQ ID NO: 1531184 - DNA, 15 bp, Homo sapiens
tgtatatgcacagag

SEQ ID NO: 1531185 - DNA, 15 bp, Homo sapiens
atgtatatgcacaga

SEQ ID NO: 1531186 - DNA, 15 bp, Homo sapiens
aatgtatatgcacag

SEQ ID NO: 1531187 - DNA, 15 bp, Homo sapiens
caatgtatatgcaca

SEQ ID NO: 1531188 - DNA, 15 bp, Homo sapiens
ccaatgtatatgcac

SEQ ID NO: 1531189 - DNA, 15 bp, Homo sapiens
tccaatgtatatgca

SEQ ID NO: 1531190 - DNA, 15 bp, Homo sapiens
ctccaatgtatatgc

SEQ ID NO: 1531191 - DNA, 15 bp, Homo sapiens
tctccaatgtatatg

SEQ ID NO: 1531192 - DNA, 15 bp, Homo sapiens
ctctccaatgtatat

SEQ ID NO: 1531193 - DNA, 15 bp, Homo sapiens
cctctccaatgtata

SEQ ID NO: 1531194 - DNA, 15 bp, Homo sapiens
tcctctccaatgtat

SEQ ID NO: 1531195 - DNA, 15 bp, Homo sapiens
gtcctctccaatgta

SEQ ID NO: 1531196 - DNA, 15 bp, Homo sapiens
tgtcctctccaatgt

SEQ ID NO: 1531197 - DNA, 15 bp, Homo sapiens
ttgtcctctccaatg

SEQ ID NO: 1531198 - DNA, 15 bp, Homo sapiens
tttgtcctctccaat

SEQ ID NO: 1531199 - DNA, 15 bp, Homo sapiens
atttgtcctctccaa

SEQ ID NO: 1531200 - DNA, 15 bp, Homo sapiens
catttgtcctctcca

SEQ ID NO: 1531201 - DNA, 15 bp, Homo sapiens
gcatttgtcctctcc

SEQ ID NO: 1531202 - DNA, 15 bp, Homo sapiens
tgcatttgtcctctc

SEQ ID NO: 1531203 - DNA, 15 bp, Homo sapiens
atgcatttgtcctct

SEQ ID NO: 1531204 - DNA, 15 bp, Homo sapiens
tatgcatttgtcctc

SEQ ID NO: 1531205 - DNA, 15 bp, Homo sapiens
ttatgcatttgtcct

SEQ ID NO: 1531206 - DNA, 15 bp, Homo sapiens
tttatgcatttgtcc

SEQ ID NO: 1531207 - DNA, 15 bp, Homo sapiens
ttttatgcatttgtc

SEQ ID NO: 1531208 - DNA, 15 bp, Homo sapiens
attttatgcatttgt

SEQ ID NO: 1531209 - DNA, 15 bp, Homo sapiens
tattttatgcatttg

SEQ ID NO: 1531210 - DNA, 15 bp, Homo sapiens
gtattttatgcattt

SEQ ID NO: 1531211 - DNA, 15 bp, Homo sapiens
ggtattttatgcatt

SEQ ID NO: 1531212 - DNA, 15 bp, Homo sapiens
tggtattttatgcat

SEQ ID NO: 1531213 - DNA, 15 bp, Homo sapiens
ctggtattttatgca

SEQ ID NO: 1531214 - DNA, 15 bp, Homo sapiens
cctggtattttatgc

SEQ ID NO: 1531215 - DNA, 15 bp, Homo sapiens
acctggtattttatg

SEQ ID NO: 1531216 - DNA, 15 bp, Homo sapiens
cacctggtattttat

SEQ ID NO: 1531217 - DNA, 15 bp, Homo sapiens
acacctggtatttta

SEQ ID NO: 1531218 - DNA, 15 bp, Homo sapiens
cacacctggtatttt

SEQ ID NO: 1531219 - DNA, 15 bp, Homo sapiens
tcacacctggtattt

SEQ ID NO: 1531220 - DNA, 15 bp, Homo sapiens
ctcacacctggtatt

SEQ ID NO: 1531221 - DNA, 15 bp, Homo sapiens
tctcacacctggtat

SEQ ID NO: 1531222 - DNA, 15 bp, Homo sapiens
ttctcacacctggta

SEQ ID NO: 1531223 - DNA, 15 bp, Homo sapiens
tttctcacacctggt

SEQ ID NO: 1531224 - DNA, 15 bp, Homo sapiens
gtttctcacacctgg

SEQ ID NO: 1531225 - DNA, 15 bp, Homo sapiens
tgtttctcacacctg

SEQ ID NO: 1531226 - DNA, 15 bp, Homo sapiens
ctgtttctcacacct

SEQ ID NO: 1531227 - DNA, 15 bp, Homo sapiens
tctgtttctcacacc

SEQ ID NO: 1531228 - DNA, 15 bp, Homo sapiens
ttctgtttctcacac

SEQ ID NO: 1531229 - DNA, 15 bp, Homo sapiens
cttctgtttctcaca

SEQ ID NO: 1531230 - DNA, 15 bp, Homo sapiens
ccttctgtttctcac

SEQ ID NO: 1531231 - DNA, 15 bp, Homo sapiens
tccttctgtttctca

SEQ ID NO: 1531232 - DNA, 15 bp, Homo sapiens
atccttctgtttctc

SEQ ID NO: 1531233 - DNA, 15 bp, Homo sapiens
catccttctgtttct

SEQ ID NO: 1531234 - DNA, 15 bp, Homo sapiens
tcatccttctgtttc

SEQ ID NO: 1531235 - DNA, 15 bp, Homo sapiens
ttcatccttctgttt

SEQ ID NO: 1531236 - DNA, 15 bp, Homo sapiens
gttcatccttctgtt

SEQ ID NO: 1531237 - DNA, 15 bp, Homo sapiens
tgttcatccttctgt

SEQ ID NO: 1531238 - DNA, 15 bp, Homo sapiens
ctgttcatccttctg

SEQ ID NO: 1531239 - DNA, 15 bp, Homo sapiens
cctgttcatccttct

SEQ ID NO: 1531240 - DNA, 15 bp, Homo sapiens
gcctgttcatccttc

SEQ ID NO: 1531241 - DNA, 15 bp, Homo sapiens
tgcctgttcatcctt

SEQ ID NO: 1531242 - DNA, 15 bp, Homo sapiens
ctgcctgttcatcct

SEQ ID NO: 1531243 - DNA, 15 bp, Homo sapiens
tctgcctgttcatcc

SEQ ID NO: 1531244 - DNA, 15 bp, Homo sapiens
ctctgcctgttcatc

SEQ ID NO: 1531245 - DNA, 15 bp, Homo sapiens
tctctgcctgttcat

SEQ ID NO: 1531246 - DNA, 15 bp, Homo sapiens
ctctctgcctgttca

SEQ ID NO: 1531247 - DNA, 15 bp, Homo sapiens
tctctctgcctgttc

SEQ ID NO: 1531248 - DNA, 15 bp, Homo sapiens
gtctctctgcctgtt

SEQ ID NO: 1531249 - DNA, 15 bp, Homo sapiens
tgtctctctgcctgt

SEQ ID NO: 1531250 - DNA, 15 bp, Homo sapiens
atgtctctctgcctg

SEQ ID NO: 1531251 - DNA, 15 bp, Homo sapiens
aatgtctctctgcct

SEQ ID NO: 1531252 - DNA, 15 bp, Homo sapiens
aaatgtctctctgcc

SEQ ID NO: 1531253 - DNA, 15 bp, Homo sapiens
aaaatgtctctctgc

SEQ ID NO: 1531254 - DNA, 15 bp, Homo sapiens
gaaaatgtctctctg

SEQ ID NO: 1531255 - DNA, 15 bp, Homo sapiens
tgaaaatgtctctct

SEQ ID NO: 1531256 - DNA, 15 bp, Homo sapiens
ttgaaaatgtctctc

SEQ ID NO: 1531257 - DNA, 15 bp, Homo sapiens
attgaaaatgtctct

SEQ ID NO: 1531258 - DNA, 15 bp, Homo sapiens
tattgaaaatgtctc

SEQ ID NO: 1531259 - DNA, 15 bp, Homo sapiens
atattgaaaatgtct

SEQ ID NO: 1531260 - DNA, 15 bp, Homo sapiens
gatattgaaaatgtc

SEQ ID NO: 1531261 - DNA, 15 bp, Homo sapiens
agatattgaaaatgt

SEQ ID NO: 1531262 - DNA, 15 bp, Homo sapiens
cagatattgaaaatg

SEQ ID NO: 1531263 - DNA, 15 bp, Homo sapiens
tcagatattgaaaat

SEQ ID NO: 1531264 - DNA, 15 bp, Homo sapiens
atcagatattgaaaa

SEQ ID NO: 1531265 - DNA, 15 bp, Homo sapiens
tatcagatattgaaa

SEQ ID NO: 1531266 - DNA, 15 bp, Homo sapiens
atatcagatattgaa

SEQ ID NO: 1531267 - DNA, 15 bp, Homo sapiens
aatatcagatattga

SEQ ID NO: 1531268 - DNA, 15 bp, Homo sapiens
gaatatcagatattg

SEQ ID NO: 1531269 - DNA, 15 bp, Homo sapiens
ggaatatcagatatt

SEQ ID NO: 1531270 - DNA, 15 bp, Homo sapiens
tggaatatcagatat

SEQ ID NO: 1531271 - DNA, 15 bp, Homo sapiens
atggaatatcagata

SEQ ID NO: 1531272 - DNA, 15 bp, Homo sapiens
gatggaatatcagat

SEQ ID NO: 1531273 - DNA, 15 bp, Homo sapiens
tgatggaatatcaga

SEQ ID NO: 1531274 - DNA, 15 bp, Homo sapiens
ttgatggaatatcag

SEQ ID NO: 1531275 - DNA, 15 bp, Homo sapiens
tttgatggaatatca

SEQ ID NO: 1531276 - DNA, 15 bp, Homo sapiens
ctttgatggaatatc

SEQ ID NO: 1531277 - DNA, 15 bp, Homo sapiens
gctttgatggaatat

SEQ ID NO: 1531278 - DNA, 15 bp, Homo sapiens
ggctttgatggaata

SEQ ID NO: 1531279 - DNA, 15 bp, Homo sapiens
aggctttgatggaat

SEQ ID NO: 1531280 - DNA, 15 bp, Homo sapiens
taggctttgatggaa

SEQ ID NO: 1531281 - DNA, 15 bp, Homo sapiens
ctaggctttgatgga

SEQ ID NO: 1531282 - DNA, 15 bp, Homo sapiens
tctaggctttgatgg

SEQ ID NO: 1531283 - DNA, 15 bp, Homo sapiens
ttctaggctttgatg

SEQ ID NO: 1531284 - DNA, 15 bp, Homo sapiens
tttctaggctttgat

SEQ ID NO: 1531285 - DNA, 15 bp, Homo sapiens
gtttctaggctttga

SEQ ID NO: 1531286 - DNA, 15 bp, Homo sapiens
tgtttctaggctttg

SEQ ID NO: 1531287 - DNA, 15 bp, Homo sapiens
ttgtttctaggcttt

SEQ ID NO: 1531288 - DNA, 15 bp, Homo sapiens
tttgtttctaggctt

SEQ ID NO: 1531289 - DNA, 15 bp, Homo sapiens
gtttgtttctaggct

SEQ ID NO: 1531290 - DNA, 15 bp, Homo sapiens
tgtttgtttctaggc

SEQ ID NO: 1531291 - DNA, 15 bp, Homo sapiens
ctgtttgtttctagg

SEQ ID NO: 1531292 - DNA, 15 bp, Homo sapiens
tctgtttgtttctag

SEQ ID NO: 1531293 - DNA, 15 bp, Homo sapiens
atctgtttgtttcta

SEQ ID NO: 1531294 - DNA, 15 bp, Homo sapiens
tatctgtttgtttct

SEQ ID NO: 1531295 - DNA, 15 bp, Homo sapiens
gtatctgtttgtttc

SEQ ID NO: 1531296 - DNA, 15 bp, Homo sapiens
tgtatctgtttgttt

SEQ ID NO: 1531297 - DNA, 15 bp, Homo sapiens
gtgtatctgtttgtt

SEQ ID NO: 1531298 - DNA, 15 bp, Homo sapiens
ggtgtatctgtttgt

SEQ ID NO: 1531299 - DNA, 15 bp, Homo sapiens
gggtgtatctgtttg

SEQ ID NO: 1531300 - DNA, 15 bp, Homo sapiens
agggtgtatctgttt

SEQ ID NO: 1531301 - DNA, 15 bp, Homo sapiens
aagggtgtatctgtt

SEQ ID NO: 1531302 - DNA, 15 bp, Homo sapiens
gaagggtgtatctgt

SEQ ID NO: 1531303 - DNA, 15 bp, Homo sapiens
agaagggtgtatctg

SEQ ID NO: 1531304 - DNA, 15 bp, Homo sapiens
aagaagggtgtatct

SEQ ID NO: 1531305 - DNA, 15 bp, Homo sapiens
aaagaagggtgtatc

SEQ ID NO: 1531306 - DNA, 15 bp, Homo sapiens
aaaagaagggtgtat

SEQ ID NO: 1531307 - DNA, 15 bp, Homo sapiens
taaaagaagggtgta

SEQ ID NO: 1531308 - DNA, 15 bp, Homo sapiens
ttaaaagaagggtgt

SEQ ID NO: 1531309 - DNA, 15 bp, Homo sapiens
attaaaagaagggtg

SEQ ID NO: 1531310 - DNA, 15 bp, Homo sapiens
tattaaaagaagggt

SEQ ID NO: 1531311 - DNA, 15 bp, Homo sapiens
atattaaaagaaggg

SEQ ID NO: 1531312 - DNA, 15 bp, Homo sapiens
catattaaaagaagg

SEQ ID NO: 1531313 - DNA, 15 bp, Homo sapiens
gcatattaaaagaag

SEQ ID NO: 1531314 - DNA, 15 bp, Homo sapiens
tgcatattaaaagaa

SEQ ID NO: 1531315 - DNA, 15 bp, Homo sapiens
ttgcatattaaaaga

SEQ ID NO: 1531316 - DNA, 15 bp, Homo sapiens
tttgcatattaaaag

SEQ ID NO: 1531317 - DNA, 15 bp, Homo sapiens
atttgcatattaaaa

SEQ ID NO: 1531318 - DNA, 15 bp, Homo sapiens
tatttgcatattaaa

SEQ ID NO: 1531319 - DNA, 15 bp, Homo sapiens
gtatttgcatattaa

SEQ ID NO: 1531320 - DNA, 15 bp, Homo sapiens
tgtatttgcatatta

SEQ ID NO: 1531321 - DNA, 15 bp, Homo sapiens
ctgtatttgcatatt

SEQ ID NO: 1531322 - DNA, 15 bp, Homo sapiens
actgtatttgcatat

SEQ ID NO: 1531323 - DNA, 15 bp, Homo sapiens
aactgtatttgcata

SEQ ID NO: 1531324 - DNA, 15 bp, Homo sapiens
aaactgtatttgcat

SEQ ID NO: 1531325 - DNA, 15 bp, Homo sapiens
taaactgtatttgca

SEQ ID NO: 1531326 - DNA, 15 bp, Homo sapiens
ctaaactgtatttgc

SEQ ID NO: 1531327 - DNA, 15 bp, Homo sapiens
cctaaactgtatttg

SEQ ID NO: 1531328 - DNA, 15 bp, Homo sapiens
gcctaaactgtattt

SEQ ID NO: 1531329 - DNA, 15 bp, Homo sapiens
tgcctaaactgtatt

SEQ ID NO: 1531330 - DNA, 15 bp, Homo sapiens
atgcctaaactgtat

SEQ ID NO: 1531331 - DNA, 15 bp, Homo sapiens
gatgcctaaactgta

SEQ ID NO: 1531332 - DNA, 15 bp, Homo sapiens
agatgcctaaactgt

SEQ ID NO: 1531333 - DNA, 15 bp, Homo sapiens
cagatgcctaaactg

SEQ ID NO: 1531334 - DNA, 15 bp, Homo sapiens
gcagatgcctaaact

SEQ ID NO: 1531335 - DNA, 15 bp, Homo sapiens
tgcagatgcctaaac

SEQ ID NO: 1531336 - DNA, 15 bp, Homo sapiens
atgcagatgcctaaa

SEQ ID NO: 1531337 - DNA, 15 bp, Homo sapiens
catgcagatgcctaa

SEQ ID NO: 1531338 - DNA, 15 bp, Homo sapiens
ccatgcagatgccta

SEQ ID NO: 1531339 - DNA, 15 bp, Homo sapiens
cccatgcagatgcct

SEQ ID NO: 1531340 - DNA, 15 bp, Homo sapiens
acccatgcagatgcc

SEQ ID NO: 1531341 - DNA, 15 bp, Homo sapiens
gacccatgcagatgc

SEQ ID NO: 1531342 - DNA, 15 bp, Homo sapiens
tgacccatgcagatg

SEQ ID NO: 1531343 - DNA, 15 bp, Homo sapiens
ctgacccatgcagat

SEQ ID NO: 1531344 - DNA, 15 bp, Homo sapiens
actgacccatgcaga

SEQ ID NO: 1531345 - DNA, 15 bp, Homo sapiens
aactgacccatgcag

SEQ ID NO: 1531346 - DNA, 15 bp, Homo sapiens
taactgacccatgca

SEQ ID NO: 1531347 - DNA, 15 bp, Homo sapiens
ctaactgacccatgc

SEQ ID NO: 1531348 - DNA, 15 bp, Homo sapiens
gctaactgacccatg

SEQ ID NO: 1531349 - DNA, 15 bp, Homo sapiens
tgctaactgacccat

SEQ ID NO: 1531350 - DNA, 15 bp, Homo sapiens
atgctaactgaccca

SEQ ID NO: 1531351 - DNA, 15 bp, Homo sapiens
aatgctaactgaccc

SEQ ID NO: 1531352 - DNA, 15 bp, Homo sapiens
taatgctaactgacc

SEQ ID NO: 1531353 - DNA, 15 bp, Homo sapiens
ctaatgctaactgac

SEQ ID NO: 1531354 - DNA, 15 bp, Homo sapiens
cctaatgctaactga

SEQ ID NO: 1531355 - DNA, 15 bp, Homo sapiens
gcctaatgctaactg

SEQ ID NO: 1531356 - DNA, 15 bp, Homo sapiens
tgcctaatgctaact

SEQ ID NO: 1531357 - DNA, 15 bp, Homo sapiens
ttgcctaatgctaac

SEQ ID NO: 1531358 - DNA, 15 bp, Homo sapiens
tttgcctaatgctaa

SEQ ID NO: 1531359 - DNA, 15 bp, Homo sapiens
ttttgcctaatgcta

SEQ ID NO: 1531360 - DNA, 15 bp, Homo sapiens
attttgcctaatgct

SEQ ID NO: 1531361 - DNA, 15 bp, Homo sapiens
aattttgcctaatgc

SEQ ID NO: 1531362 - DNA, 15 bp, Homo sapiens
aaattttgcctaatg

SEQ ID NO: 1531363 - DNA, 15 bp, Homo sapiens
aaaattttgcctaat

SEQ ID NO: 1531364 - DNA, 15 bp, Homo sapiens
gaaaattttgcctaa

SEQ ID NO: 1531365 - DNA, 15 bp, Homo sapiens
tgaaaattttgccta

SEQ ID NO: 1531366 - DNA, 15 bp, Homo sapiens
ttgaaaattttgcct

SEQ ID NO: 1531367 - DNA, 15 bp, Homo sapiens
attgaaaattttgcc

SEQ ID NO: 1531368 - DNA, 15 bp, Homo sapiens
tattgaaaattttgc

SEQ ID NO: 1531369 - DNA, 15 bp, Homo sapiens
ttattgaaaattttg

SEQ ID NO: 1531370 - DNA, 15 bp, Homo sapiens
tttattgaaaatttt

SEQ ID NO: 1531371 - DNA, 15 bp, Homo sapiens
gtttattgaaaattt

SEQ ID NO: 1531372 - DNA, 15 bp, Homo sapiens
ggtttattgaaaatt

SEQ ID NO: 1531373 - DNA, 15 bp, Homo sapiens
aggtttattgaaaat

SEQ ID NO: 1531374 - DNA, 15 bp, Homo sapiens
gaggtttattgaaaa

SEQ ID NO: 1531375 - DNA, 15 bp, Homo sapiens
cgaggtttattgaaa

SEQ ID NO: 1531376 - DNA, 15 bp, Homo sapiens
acgaggtttattgaa

SEQ ID NO: 1531377 - DNA, 15 bp, Homo sapiens
aacgaggtttattga

SEQ ID NO: 1531378 - DNA, 15 bp, Homo sapiens
caacgaggtttattg

SEQ ID NO: 1531379 - DNA, 15 bp, Homo sapiens
acaacgaggtttatt

SEQ ID NO: 1531380 - DNA, 15 bp, Homo sapiens
aacaacgaggtttat

SEQ ID NO: 1531381 - DNA, 15 bp, Homo sapiens
caacaacgaggttta

SEQ ID NO: 1531382 - DNA, 15 bp, Homo sapiens
acaacaacgaggttt

SEQ ID NO: 1531383 - DNA, 15 bp, Homo sapiens
gacaacaacgaggtt

SEQ ID NO: 1531384 - DNA, 15 bp, Homo sapiens
cgacaacaacgaggt

SEQ ID NO: 1531385 - DNA, 15 bp, Homo sapiens
tcgacaacaacgagg

SEQ ID NO: 1531386 - DNA, 15 bp, Homo sapiens
ctcgacaacaacgag

SEQ ID NO: 1531387 - DNA, 15 bp, Homo sapiens
actcgacaacaacga

SEQ ID NO: 1531388 - DNA, 15 bp, Homo sapiens
gactcgacaacaacg

SEQ ID NO: 1531389 - DNA, 15 bp, Homo sapiens
ggactcgacaacaac

SEQ ID NO: 1531390 - DNA, 15 bp, Homo sapiens
aggactcgacaacaa

SEQ ID NO: 1531391 - DNA, 15 bp, Homo sapiens
aaggactcgacaaca

SEQ ID NO: 1531392 - DNA, 15 bp, Homo sapiens
aaaggactcgacaac

SEQ ID NO: 1531393 - DNA, 15 bp, Homo sapiens
aaaaggactcgacaa

SEQ ID NO: 1531394 - DNA, 15 bp, Homo sapiens
taaaaggactcgaca

SEQ ID NO: 1531395 - DNA, 15 bp, Homo sapiens
ataaaaggactcgac

SEQ ID NO: 1531396 - DNA, 15 bp, Homo sapiens
tataaaaggactcga

SEQ ID NO: 1531397 - DNA, 15 bp, Homo sapiens
ttataaaaggactcg

SEQ ID NO: 1531398 - DNA, 15 bp, Homo sapiens
attataaaaggactc

SEQ ID NO: 1531399 - DNA, 15 bp, Homo sapiens
aattataaaaggact

SEQ ID NO: 1531400 - DNA, 15 bp, Homo sapiens
caattataaaaggac

SEQ ID NO: 1531401 - DNA, 15 bp, Homo sapiens
acaattataaaagga

SEQ ID NO: 1531402 - DNA, 15 bp, Homo sapiens
aacaattataaaagg

SEQ ID NO: 1531403 - DNA, 15 bp, Homo sapiens
gaacaattataaaag

SEQ ID NO: 1531404 - DNA, 15 bp, Homo sapiens
ggaacaattataaaa

SEQ ID NO: 1531405 - DNA, 15 bp, Homo sapiens
tggaacaattataaa

SEQ ID NO: 1531406 - DNA, 15 bp, Homo sapiens
ctggaacaattataa

SEQ ID NO: 1531407 - DNA, 15 bp, Homo sapiens
actggaacaattata

SEQ ID NO: 1531408 - DNA, 15 bp, Homo sapiens
cactggaacaattat

SEQ ID NO: 1531409 - DNA, 15 bp, Homo sapiens
tcactggaacaatta

SEQ ID NO: 1531410 - DNA, 15 bp, Homo sapiens
atcactggaacaatt

SEQ ID NO: 1531411 - DNA, 15 bp, Homo sapiens
aatcactggaacaat

SEQ ID NO: 1531412 - DNA, 15 bp, Homo sapiens
taatcactggaacaa

SEQ ID NO: 1531413 - DNA, 15 bp, Homo sapiens
ttaatcactggaaca

SEQ ID NO: 1531414 - DNA, 15 bp, Homo sapiens
tttaatcactggaac

SEQ ID NO: 1531415 - DNA, 15 bp, Homo sapiens
gtttaatcactggaa

SEQ ID NO: 1531416 - DNA, 15 bp, Homo sapiens
agtttaatcactgga

SEQ ID NO: 1531417 - DNA, 15 bp, Homo sapiens
tagtttaatcactgg

SEQ ID NO: 1531418 - DNA, 15 bp, Homo sapiens
ttagtttaatcactg

SEQ ID NO: 1531419 - DNA, 15 bp, Homo sapiens
gttagtttaatcact

SEQ ID NO: 1531420 - DNA, 15 bp, Homo sapiens
tgttagtttaatcac

SEQ ID NO: 1531421 - DNA, 15 bp, Homo sapiens
ttgttagtttaatca

SEQ ID NO: 1531422 - DNA, 15 bp, Homo sapiens
tttgttagtttaatc

SEQ ID NO: 1531423 - DNA, 15 bp, Homo sapiens
ctttgttagtttaat

SEQ ID NO: 1531424 - DNA, 15 bp, Homo sapiens
gctttgttagtttaa

SEQ ID NO: 1531425 - DNA, 15 bp, Homo sapiens
agctttgttagttta

SEQ ID NO: 1531426 - DNA, 15 bp, Homo sapiens
gagctttgttagttt

SEQ ID NO: 1531427 - DNA, 15 bp, Homo sapiens
ggagctttgttagtt

SEQ ID NO: 1531428 - DNA, 15 bp, Homo sapiens
gggagctttgttagt

SEQ ID NO: 1531429 - DNA, 15 bp, Homo sapiens
ggggagctttgttag

SEQ ID NO: 1531430 - DNA, 15 bp, Homo sapiens
aggggagctttgtta

SEQ ID NO: 1531431 - DNA, 15 bp, Homo sapiens
aaggggagctttgtt

SEQ ID NO: 1531432 - DNA, 15 bp, Homo sapiens
gaaggggagctttgt

SEQ ID NO: 1531433 - DNA, 15 bp, Homo sapiens
tgaaggggagctttg

SEQ ID NO: 1531434 - DNA, 15 bp, Homo sapiens
atgaaggggagcttt

SEQ ID NO: 1531435 - DNA, 15 bp, Homo sapiens
aatgaaggggagctt

SEQ ID NO: 1531436 - DNA, 15 bp, Homo sapiens
aaatgaaggggagct

SEQ ID NO: 1531437 - DNA, 15 bp, Homo sapiens
taaatgaaggggagc

SEQ ID NO: 1531438 - DNA, 15 bp, Homo sapiens
ataaatgaaggggag

SEQ ID NO: 1531439 - DNA, 15 bp, Homo sapiens
tataaatgaagggga

SEQ ID NO: 1531440 - DNA, 15 bp, Homo sapiens
ctataaatgaagggg

SEQ ID NO: 1531441 - DNA, 15 bp, Homo sapiens
actataaatgaaggg

SEQ ID NO: 1531442 - DNA, 15 bp, Homo sapiens
gactataaatgaagg

SEQ ID NO: 1531443 - DNA, 15 bp, Homo sapiens
ggactataaatgaag

SEQ ID NO: 1531444 - DNA, 15 bp, Homo sapiens
tggactataaatgaa

SEQ ID NO: 1531445 - DNA, 15 bp, Homo sapiens
ttggactataaatga

SEQ ID NO: 1531446 - DNA, 15 bp, Homo sapiens
tttggactataaatg

SEQ ID NO: 1531447 - DNA, 15 bp, Homo sapiens
atttggactataaat

SEQ ID NO: 1531448 - DNA, 15 bp, Homo sapiens
catttggactataaa

SEQ ID NO: 1531449 - DNA, 15 bp, Homo sapiens
gcatttggactataa

SEQ ID NO: 1531450 - DNA, 15 bp, Homo sapiens
agcatttggactata

SEQ ID NO: 1531451 - DNA, 15 bp, Homo sapiens
aagcatttggactat

SEQ ID NO: 1531452 - DNA, 15 bp, Homo sapiens
taagcatttggacta

SEQ ID NO: 1531453 - DNA, 15 bp, Homo sapiens
ttaagcatttggact

SEQ ID NO: 1531454 - DNA, 15 bp, Homo sapiens
attaagcatttggac

SEQ ID NO: 1531455 - DNA, 15 bp, Homo sapiens
gattaagcatttgga

SEQ ID NO: 1531456 - DNA, 15 bp, Homo sapiens
ggattaagcatttgg

SEQ ID NO: 1531457 - DNA, 15 bp, Homo sapiens
aggattaagcatttg

SEQ ID NO: 1531458 - DNA, 15 bp, Homo sapiens
aaggattaagcattt

SEQ ID NO: 1531459 - DNA, 15 bp, Homo sapiens
gaaggattaagcatt

SEQ ID NO: 1531460 - DNA, 15 bp, Homo sapiens
tgaaggattaagcat

SEQ ID NO: 1531461 - DNA, 15 bp, Homo sapiens
ttgaaggattaagca

SEQ ID NO: 1531462 - DNA, 15 bp, Homo sapiens
attgaaggattaagc

SEQ ID NO: 1531463 - DNA, 15 bp, Homo sapiens
aattgaaggattaag

SEQ ID NO: 1531464 - DNA, 15 bp, Homo sapiens
caattgaaggattaa

SEQ ID NO: 1531465 - DNA, 15 bp, Homo sapiens
ccaattgaaggatta

SEQ ID NO: 1531466 - DNA, 15 bp, Homo sapiens
cccaattgaaggatt

SEQ ID NO: 1531467 - DNA, 15 bp, Homo sapiens
gcccaattgaaggat

SEQ ID NO: 1531468 - DNA, 15 bp, Homo sapiens
agcccaattgaagga

SEQ ID NO: 1531469 - DNA, 15 bp, Homo sapiens
tagcccaattgaagg

SEQ ID NO: 1531470 - DNA, 15 bp, Homo sapiens
atagcccaattgaag

SEQ ID NO: 1531471 - DNA, 15 bp, Homo sapiens
catagcccaattgaa

SEQ ID NO: 1531472 - DNA, 15 bp, Homo sapiens
acatagcccaattga

SEQ ID NO: 1531473 - DNA, 15 bp, Homo sapiens
cacatagcccaattg

SEQ ID NO: 1531474 - DNA, 15 bp, Homo sapiens
ccacatagcccaatt

SEQ ID NO: 1531475 - DNA, 15 bp, Homo sapiens
accacatagcccaat

SEQ ID NO: 1531476 - DNA, 15 bp, Homo sapiens
taccacatagcccaa

SEQ ID NO: 1531477 - DNA, 15 bp, Homo sapiens
ctaccacatagccca

SEQ ID NO: 1531478 - DNA, 15 bp, Homo sapiens
tctaccacatagccc

SEQ ID NO: 1531479 - DNA, 15 bp, Homo sapiens
ctctaccacatagcc

SEQ ID NO: 1531480 - DNA, 15 bp, Homo sapiens
tctctaccacatagc

SEQ ID NO: 1531481 - DNA, 15 bp, Homo sapiens
ctctctaccacatag

SEQ ID NO: 1531482 - DNA, 15 bp, Homo sapiens
tctctctaccacata

SEQ ID NO: 1531483 - DNA, 15 bp, Homo sapiens
ctctctctaccacat

SEQ ID NO: 1531484 - DNA, 15 bp, Homo sapiens
tctctctctaccaca

SEQ ID NO: 1531485 - DNA, 15 bp, Homo sapiens
gtctctctctaccac

SEQ ID NO: 1531486 - DNA, 15 bp, Homo sapiens
agtctctctctacca

SEQ ID NO: 1531487 - DNA, 15 bp, Homo sapiens
gagtctctctctacc

SEQ ID NO: 1531488 - DNA, 15 bp, Homo sapiens
agagtctctctctac

SEQ ID NO: 1531489 - DNA, 15 bp, Homo sapiens
gagagtctctctcta

SEQ ID NO: 1531490 - DNA, 15 bp, Homo sapiens
agagagtctctctct

SEQ ID NO: 1531491 - DNA, 15 bp, Homo sapiens
gagagagtctctctc

SEQ ID NO: 1531492 - DNA, 15 bp, Homo sapiens
ggagagagtctctct

SEQ ID NO: 1531493 - DNA, 15 bp, Homo sapiens
gggagagagtctctc

SEQ ID NO: 1531494 - DNA, 15 bp, Homo sapiens
agggagagagtctct

SEQ ID NO: 1531495 - DNA, 15 bp, Homo sapiens
tagggagagagtctc

SEQ ID NO: 1531496 - DNA, 15 bp, Homo sapiens
gtagggagagagtct

SEQ ID NO: 1531497 - DNA, 15 bp, Homo sapiens
agtagggagagagtc

SEQ ID NO: 1531498 - DNA, 15 bp, Homo sapiens
gagtagggagagagt

SEQ ID NO: 1531499 - DNA, 15 bp, Homo sapiens
agagtagggagagag

SEQ ID NO: 1531500 - DNA, 15 bp, Homo sapiens
gagagtagggagaga

SEQ ID NO: 1531501 - DNA, 15 bp, Homo sapiens
agagagtagggagag

SEQ ID NO: 1531502 - DNA, 15 bp, Homo sapiens
gagagagtagggaga

SEQ ID NO: 1531503 - DNA, 15 bp, Homo sapiens
ggagagagtagggag

SEQ ID NO: 1531504 - DNA, 15 bp, Homo sapiens
aggagagagtaggga

SEQ ID NO: 1531505 - DNA, 15 bp, Homo sapiens
caggagagagtaggg

SEQ ID NO: 1531506 - DNA, 15 bp, Homo sapiens
gcaggagagagtagg

SEQ ID NO: 1531507 - DNA, 15 bp, Homo sapiens
tgcaggagagagtag

SEQ ID NO: 1531508 - DNA, 15 bp, Homo sapiens
atgcaggagagagta

SEQ ID NO: 1531509 - DNA, 15 bp, Homo sapiens
aatgcaggagagagt

SEQ ID NO: 1531510 - DNA, 15 bp, Homo sapiens
aaatgcaggagagag

SEQ ID NO: 1531511 - DNA, 15 bp, Homo sapiens
aaaatgcaggagaga

SEQ ID NO: 1531512 - DNA, 15 bp, Homo sapiens
gaaaatgcaggagag

SEQ ID NO: 1531513 - DNA, 15 bp, Homo sapiens
agaaaatgcaggaga

SEQ ID NO: 1531514 - DNA, 15 bp, Homo sapiens
gagaaaatgcaggag

SEQ ID NO: 1531515 - DNA, 15 bp, Homo sapiens
ggagaaaatgcagga

SEQ ID NO: 1531516 - DNA, 15 bp, Homo sapiens
aggagaaaatgcagg

SEQ ID NO: 1531517 - DNA, 15 bp, Homo sapiens
aaggagaaaatgcag

SEQ ID NO: 1531518 - DNA, 15 bp, Homo sapiens
aaaggagaaaatgca

SEQ ID NO: 1531519 - DNA, 15 bp, Homo sapiens
taaaggagaaaatgc

SEQ ID NO: 1531520 - DNA, 15 bp, Homo sapiens
ataaaggagaaaatg

SEQ ID NO: 1531521 - DNA, 15 bp, Homo sapiens
aataaaggagaaaat

SEQ ID NO: 1531522 - DNA, 15 bp, Homo sapiens
aaataaaggagaaaa

SEQ ID NO: 1531523 - DNA, 15 bp, Homo sapiens
aaaataaaggagaaa

SEQ ID NO: 1531524 - DNA, 15 bp, Homo sapiens
gaaaataaaggagaa

SEQ ID NO: 1531525 - DNA, 15 bp, Homo sapiens
gagaaaataaaggag

SEQ ID NO: 1531526 - DNA, 15 bp, Homo sapiens
agagaaaataaagga

SEQ ID NO: 1531527 - DNA, 15 bp, Homo sapiens
gagagaaaataaagg

SEQ ID NO: 1531528 - DNA, 15 bp, Homo sapiens
agagagaaaataaag

SEQ ID NO: 1531529 - DNA, 15 bp, Homo sapiens
gagagagaaaataaa

SEQ ID NO: 1531530 - DNA, 15 bp, Homo sapiens
ggagagagaaaataa

SEQ ID NO: 1531531 - DNA, 15 bp, Homo sapiens
gggagagagaaaata

SEQ ID NO: 1531532 - DNA, 15 bp, Homo sapiens
agggagagagaaaat

SEQ ID NO: 1531533 - DNA, 15 bp, Homo sapiens
gagggagagagaaaa

SEQ ID NO: 1531534 - DNA, 15 bp, Homo sapiens
ggagggagagagaaa

SEQ ID NO: 1531535 - DNA, 15 bp, Homo sapiens
gggagggagagagaa

SEQ ID NO: 1531536 - DNA, 15 bp, Homo sapiens
gggggagggagagag

SEQ ID NO: 1531537 - DNA, 15 bp, Homo sapiens
ggggggagggagaga

SEQ ID NO: 1531538 - DNA, 15 bp, Homo sapiens
aggggggagggagag

SEQ ID NO: 1531539 - DNA, 15 bp, Homo sapiens
aaggggggagggaga

SEQ ID NO: 1531540 - DNA, 15 bp, Homo sapiens
aaaggggggagggag

SEQ ID NO: 1531541 - DNA, 15 bp, Homo sapiens
aaaaggggggaggga

SEQ ID NO: 1531542 - DNA, 15 bp, Homo sapiens
gaaaaggggggaggg

SEQ ID NO: 1531543 - DNA, 15 bp, Homo sapiens
agaaaaggggggagg

SEQ ID NO: 1531544 - DNA, 15 bp, Homo sapiens
tagaaaaggggggag

SEQ ID NO: 1531545 - DNA, 15 bp, Homo sapiens
ttagaaaagggggga

SEQ ID NO: 1531546 - DNA, 15 bp, Homo sapiens
gttagaaaagggggg

SEQ ID NO: 1531547 - DNA, 15 bp, Homo sapiens
ggttagaaaaggggg

SEQ ID NO: 1531548 - DNA, 15 bp, Homo sapiens
tggttagaaaagggg

SEQ ID NO: 1531549 - DNA, 15 bp, Homo sapiens
atggttagaaaaggg

SEQ ID NO: 1531550 - DNA, 15 bp, Homo sapiens
tatggttagaaaagg

SEQ ID NO: 1531551 - DNA, 15 bp, Homo sapiens
atatggttagaaaag

SEQ ID NO: 1531552 - DNA, 15 bp, Homo sapiens
aatatggttagaaaa

SEQ ID NO: 1531553 - DNA, 15 bp, Homo sapiens
gaatatggttagaaa

SEQ ID NO: 1531554 - DNA, 15 bp, Homo sapiens
agaatatggttagaa

SEQ ID NO: 1531555 - DNA, 15 bp, Homo sapiens
aagaatatggttaga

SEQ ID NO: 1531556 - DNA, 15 bp, Homo sapiens
aaagaatatggttag

SEQ ID NO: 1531557 - DNA, 15 bp, Homo sapiens
gaaagaatatggtta

SEQ ID NO: 1531558 - DNA, 15 bp, Homo sapiens
agaaagaatatggtt

SEQ ID NO: 1531559 - DNA, 15 bp, Homo sapiens
aagaaagaatatggt

SEQ ID NO: 1531560 - DNA, 15 bp, Homo sapiens
taagaaagaatatgg

SEQ ID NO: 1531561 - DNA, 15 bp, Homo sapiens
ataagaaagaatatg

SEQ ID NO: 1531562 - DNA, 15 bp, Homo sapiens
aataagaaagaatat

SEQ ID NO: 1531563 - DNA, 15 bp, Homo sapiens
aaataagaaagaata

SEQ ID NO: 1531564 - DNA, 15 bp, Homo sapiens
taaataagaaagaat

SEQ ID NO: 1531565 - DNA, 15 bp, Homo sapiens
ataaataagaaagaa

SEQ ID NO: 1531566 - DNA, 15 bp, Homo sapiens
aaagataaataagaa

SEQ ID NO: 1531567 - DNA, 15 bp, Homo sapiens
gaaagataaataaga

SEQ ID NO: 1531568 - DNA, 15 bp, Homo sapiens
agaaagataaataag

SEQ ID NO: 1531569 - DNA, 15 bp, Homo sapiens
tagaaagataaataa

SEQ ID NO: 1531570 - DNA, 15 bp, Homo sapiens
ctagaaagataaata

SEQ ID NO: 1531571 - DNA, 15 bp, Homo sapiens
tctagaaagataaat

SEQ ID NO: 1531572 - DNA, 15 bp, Homo sapiens
ctctagaaagataaa

SEQ ID NO: 1531573 - DNA, 15 bp, Homo sapiens
gctctagaaagataa

SEQ ID NO: 1531574 - DNA, 15 bp, Homo sapiens
ggctctagaaagata

SEQ ID NO: 1531575 - DNA, 15 bp, Homo sapiens
aggctctagaaagat

SEQ ID NO: 1531576 - DNA, 15 bp, Homo sapiens
aaggctctagaaaga

SEQ ID NO: 1531577 - DNA, 15 bp, Homo sapiens
taaggctctagaaag

SEQ ID NO: 1531578 - DNA, 15 bp, Homo sapiens
ttaaggctctagaaa

SEQ ID NO: 1531579 - DNA, 15 bp, Homo sapiens
attaaggctctagaa

SEQ ID NO: 1531580 - DNA, 15 bp, Homo sapiens
tattaaggctctaga

SEQ ID NO: 1531581 - DNA, 15 bp, Homo sapiens
atattaaggctctag

SEQ ID NO: 1531582 - DNA, 15 bp, Homo sapiens
catattaaggctcta

SEQ ID NO: 1531583 - DNA, 15 bp, Homo sapiens
tcatattaaggctct

SEQ ID NO: 1531584 - DNA, 15 bp, Homo sapiens
atcatattaaggctc

SEQ ID NO: 1531585 - DNA, 15 bp, Homo sapiens
tatcatattaaggct

SEQ ID NO: 1531586 - DNA, 15 bp, Homo sapiens
ttatcatattaaggc

SEQ ID NO: 1531587 - DNA, 15 bp, Homo sapiens
tttatcatattaagg

SEQ ID NO: 1531588 - DNA, 15 bp, Homo sapiens
ttttatcatattaag

SEQ ID NO: 1531589 - DNA, 15 bp, Homo sapiens
attttatcatattaa

SEQ ID NO: 1531590 - DNA, 15 bp, Homo sapiens
tattttatcatatta

SEQ ID NO: 1531591 - DNA, 15 bp, Homo sapiens
ctattttatcatatt

SEQ ID NO: 1531592 - DNA, 15 bp, Homo sapiens
gctattttatcatat

SEQ ID NO: 1531593 - DNA, 15 bp, Homo sapiens
tgctattttatcata

SEQ ID NO: 1531594 - DNA, 15 bp, Homo sapiens
atgctattttatcat

SEQ ID NO: 1531595 - DNA, 15 bp, Homo sapiens
aatgctattttatca

SEQ ID NO: 1531596 - DNA, 15 bp, Homo sapiens
gaatgctattttatc

SEQ ID NO: 1531597 - DNA, 15 bp, Homo sapiens
agaatgctattttat

SEQ ID NO: 1531598 - DNA, 15 bp, Homo sapiens
aagaatgctatttta

SEQ ID NO: 1531599 - DNA, 15 bp, Homo sapiens
caaagaatgctattt

SEQ ID NO: 1531600 - DNA, 15 bp, Homo sapiens
gcaaagaatgctatt

SEQ ID NO: 1531601 - DNA, 15 bp, Homo sapiens
tgcaaagaatgctat

SEQ ID NO: 1531602 - DNA, 15 bp, Homo sapiens
ttgcaaagaatgcta

SEQ ID NO: 1531603 - DNA, 15 bp, Homo sapiens
tttgcaaagaatgct

SEQ ID NO: 1531604 - DNA, 15 bp, Homo sapiens
atttgcaaagaatgc

SEQ ID NO: 1531605 - DNA, 15 bp, Homo sapiens
tatttgcaaagaatg

SEQ ID NO: 1531606 - DNA, 15 bp, Homo sapiens
ttatttgcaaagaat

SEQ ID NO: 1531607 - DNA, 15 bp, Homo sapiens
tttatttgcaaagaa

SEQ ID NO: 1531608 - DNA, 15 bp, Homo sapiens
atttatttgcaaaga

SEQ ID NO: 1531609 - DNA, 15 bp, Homo sapiens
tatttatttgcaaag

SEQ ID NO: 1531610 - DNA, 15 bp, Homo sapiens
ctatttatttgcaaa

SEQ ID NO: 1531611 - DNA, 15 bp, Homo sapiens
actatttatttgcaa

SEQ ID NO: 1531612 - DNA, 15 bp, Homo sapiens
aactatttatttgca

SEQ ID NO: 1531613 - DNA, 15 bp, Homo sapiens
caactatttatttgc

SEQ ID NO: 1531614 - DNA, 15 bp, Homo sapiens
gcaactatttatttg

SEQ ID NO: 1531615 - DNA, 15 bp, Homo sapiens
tgcaactatttattt

SEQ ID NO: 1531616 - DNA, 15 bp, Homo sapiens
ctgcaactatttatt

SEQ ID NO: 1531617 - DNA, 15 bp, Homo sapiens
actgcaactatttat

SEQ ID NO: 1531618 - DNA, 15 bp, Homo sapiens
aactgcaactattta

SEQ ID NO: 1531619 - DNA, 15 bp, Homo sapiens
caactgcaactattt

SEQ ID NO: 1531620 - DNA, 15 bp, Homo sapiens
acaactgcaactatt

SEQ ID NO: 1531621 - DNA, 15 bp, Homo sapiens
tacaactgcaactat

SEQ ID NO: 1531622 - DNA, 15 bp, Homo sapiens
ctacaactgcaacta

SEQ ID NO: 1531623 - DNA, 15 bp, Homo sapiens
cctacaactgcaact

SEQ ID NO: 1531624 - DNA, 15 bp, Homo sapiens
gcctacaactgcaac

SEQ ID NO: 1531625 - DNA, 15 bp, Homo sapiens
agcctacaactgcaa

SEQ ID NO: 1531626 - DNA, 15 bp, Homo sapiens
tagcctacaactgca

SEQ ID NO: 1531627 - DNA, 15 bp, Homo sapiens
atagcctacaactgc

SEQ ID NO: 1531628 - DNA, 15 bp, Homo sapiens
aatagcctacaactg

SEQ ID NO: 1531629 - DNA, 15 bp, Homo sapiens
taatagcctacaact

SEQ ID NO: 1531630 - DNA, 15 bp, Homo sapiens
gtaatagcctacaac

SEQ ID NO: 1531631 - DNA, 15 bp, Homo sapiens
agtaatagcctacaa

SEQ ID NO: 1531632 - DNA, 15 bp, Homo sapiens
tagtaatagcctaca

SEQ ID NO: 1531633 - DNA, 15 bp, Homo sapiens
atagtaatagcctac

SEQ ID NO: 1531634 - DNA, 15 bp, Homo sapiens
aatagtaatagccta

SEQ ID NO: 1531635 - DNA, 15 bp, Homo sapiens
aaatagtaatagcct

SEQ ID NO: 1531636 - DNA, 15 bp, Homo sapiens
aaaatagtaatagcc

SEQ ID NO: 1531637 - DNA, 15 bp, Homo sapiens
aaaaatagtaatagc

SEQ ID NO: 1531638 - DNA, 15 bp, Homo sapiens
caaaaatagtaatag

SEQ ID NO: 1531639 - DNA, 15 bp, Homo sapiens
tcaaaaatagtaata

SEQ ID NO: 1531640 - DNA, 15 bp, Homo sapiens
atcaaaaatagtaat

SEQ ID NO: 1531641 - DNA, 15 bp, Homo sapiens
catcaaaaatagtaa

SEQ ID NO: 1531642 - DNA, 15 bp, Homo sapiens
tcatcaaaaatagta

SEQ ID NO: 1531643 - DNA, 15 bp, Homo sapiens
atcatcaaaaatagt

SEQ ID NO: 1531644 - DNA, 15 bp, Homo sapiens
tatcatcaaaaatag

SEQ ID NO: 1531645 - DNA, 15 bp, Homo sapiens
atatcatcaaaaata

SEQ ID NO: 1531646 - DNA, 15 bp, Homo sapiens
catatcatcaaaaat

SEQ ID NO: 1531647 - DNA, 15 bp, Homo sapiens
gcatatcatcaaaaa

SEQ ID NO: 1531648 - DNA, 15 bp, Homo sapiens
agcatatcatcaaaa

SEQ ID NO: 1531649 - DNA, 15 bp, Homo sapiens
aagcatatcatcaaa

SEQ ID NO: 1531650 - DNA, 15 bp, Homo sapiens
aaagcatatcatcaa

SEQ ID NO: 1531651 - DNA, 15 bp, Homo sapiens
gaaagcatatcatca

SEQ ID NO: 1531652 - DNA, 15 bp, Homo sapiens
agaaagcatatcatc

SEQ ID NO: 1531653 - DNA, 15 bp, Homo sapiens
aagaaagcatatcat

SEQ ID NO: 1531654 - DNA, 15 bp, Homo sapiens
taagaaagcatatca

SEQ ID NO: 1531655 - DNA, 15 bp, Homo sapiens
gtaagaaagcatatc

SEQ ID NO: 1531656 - DNA, 15 bp, Homo sapiens
agtaagaaagcatat

SEQ ID NO: 1531657 - DNA, 15 bp, Homo sapiens
gagtaagaaagcata

SEQ ID NO: 1531658 - DNA, 15 bp, Homo sapiens
tgagtaagaaagcat

SEQ ID NO: 1531659 - DNA, 15 bp, Homo sapiens
ctgagtaagaaagca

SEQ ID NO: 1531660 - DNA, 15 bp, Homo sapiens
tctgagtaagaaagc

SEQ ID NO: 1531661 - DNA, 15 bp, Homo sapiens
atctgagtaagaaag

SEQ ID NO: 1531662 - DNA, 15 bp, Homo sapiens
catctgagtaagaaa

SEQ ID NO: 1531663 - DNA, 15 bp, Homo sapiens
tcatctgagtaagaa

SEQ ID NO: 1531664 - DNA, 15 bp, Homo sapiens
ctcatctgagtaaga

SEQ ID NO: 1531665 - DNA, 15 bp, Homo sapiens
tctcatctgagtaag

SEQ ID NO: 1531666 - DNA, 15 bp, Homo sapiens
ttctcatctgagtaa

SEQ ID NO: 1531667 - DNA, 15 bp, Homo sapiens
tttctcatctgagta

SEQ ID NO: 1531668 - DNA, 15 bp, Homo sapiens
ttttctcatctgagt

SEQ ID NO: 1531669 - DNA, 15 bp, Homo sapiens
tttttctcatctgag

SEQ ID NO: 1531670 - DNA, 15 bp, Homo sapiens
ttttttctcatctga

SEQ ID NO: 1531671 - DNA, 15 bp, Homo sapiens
attttttctcatctg

SEQ ID NO: 1531672 - DNA, 15 bp, Homo sapiens
cattttttctcatct

SEQ ID NO: 1531673 - DNA, 15 bp, Homo sapiens
ccattttttctcatc

SEQ ID NO: 1531674 - DNA, 15 bp, Homo sapiens
gccattttttctcat

SEQ ID NO: 1531675 - DNA, 15 bp, Homo sapiens
agccattttttctca

SEQ ID NO: 1531676 - DNA, 15 bp, Homo sapiens
cagccattttttctc

SEQ ID NO: 1531677 - DNA, 15 bp, Homo sapiens
acagccattttttct

SEQ ID NO: 1531678 - DNA, 15 bp, Homo sapiens
gacagccattttttc

SEQ ID NO: 1531679 - DNA, 15 bp, Homo sapiens
cgacagccatttttt

SEQ ID NO: 1531680 - DNA, 15 bp, Homo sapiens
acgacagccattttt

SEQ ID NO: 1531681 - DNA, 15 bp, Homo sapiens
cacgacagccatttt

SEQ ID NO: 1531682 - DNA, 15 bp, Homo sapiens
acacgacagccattt

SEQ ID NO: 1531683 - DNA, 15 bp, Homo sapiens
gacacgacagccatt

SEQ ID NO: 1531684 - DNA, 15 bp, Homo sapiens
agacacgacagccat

SEQ ID NO: 1531685 - DNA, 15 bp, Homo sapiens
aagacacgacagcca

SEQ ID NO: 1531686 - DNA, 15 bp, Homo sapiens
aaagacacgacagcc

SEQ ID NO: 1531687 - DNA, 15 bp, Homo sapiens
aaaagacacgacagc

SEQ ID NO: 1531688 - DNA, 15 bp, Homo sapiens
aaaaagacacgacag

SEQ ID NO: 1531689 - DNA, 15 bp, Homo sapiens
aaaaaagacacgaca

SEQ ID NO: 1531690 - DNA, 15 bp, Homo sapiens
aaaaaaagacacgac

SEQ ID NO: 1531691 - DNA, 15 bp, Homo sapiens
aaaaaaaagacacga

SEQ ID NO: 1531692 - DNA, 15 bp, Homo sapiens
aaaaaaaaagacacg

SEQ ID NO: 1531693 - DNA, 15 bp, Homo sapiens
taaaaaaaaaagaca

SEQ ID NO: 1531694 - DNA, 15 bp, Homo sapiens
ttaaaaaaaaaagac

SEQ ID NO: 1531695 - DNA, 15 bp, Homo sapiens
attaaaaaaaaaaga

SEQ ID NO: 1531696 - DNA, 15 bp, Homo sapiens
gattaaaaaaaaaag

SEQ ID NO: 1531697 - DNA, 15 bp, Homo sapiens
agagattaaaaaaaa

SEQ ID NO: 1531698 - DNA, 15 bp, Homo sapiens
cagagattaaaaaaa

SEQ ID NO: 1531699 - DNA, 15 bp, Homo sapiens
gcagagattaaaaaa

SEQ ID NO: 1531700 - DNA, 15 bp, Homo sapiens
tgcagagattaaaaa

SEQ ID NO: 1531701 - DNA, 15 bp, Homo sapiens
ctgcagagattaaaa

SEQ ID NO: 1531702 - DNA, 15 bp, Homo sapiens
actgcagagattaaa

SEQ ID NO: 1531703 - DNA, 15 bp, Homo sapiens
tactgcagagattaa

SEQ ID NO: 1531704 - DNA, 15 bp, Homo sapiens
ttactgcagagatta

SEQ ID NO: 1531705 - DNA, 15 bp, Homo sapiens
attactgcagagatt

SEQ ID NO: 1531706 - DNA, 15 bp, Homo sapiens
cattactgcagagat

SEQ ID NO: 1531707 - DNA, 15 bp, Homo sapiens
acattactgcagaga

SEQ ID NO: 1531708 - DNA, 15 bp, Homo sapiens
tacattactgcagag

SEQ ID NO: 1531709 - DNA, 15 bp, Homo sapiens
ttacattactgcaga

SEQ ID NO: 1531710 - DNA, 15 bp, Homo sapiens
attacattactgcag

SEQ ID NO: 1531711 - DNA, 15 bp, Homo sapiens
aattacattactgca

SEQ ID NO: 1531712 - DNA, 15 bp, Homo sapiens
gaattacattactgc

SEQ ID NO: 1531713 - DNA, 15 bp, Homo sapiens
tgaattacattactg

SEQ ID NO: 1531714 - DNA, 15 bp, Homo sapiens
ttgaattacattact

SEQ ID NO: 1531715 - DNA, 15 bp, Homo sapiens
attgaattacattac

SEQ ID NO: 1531716 - DNA, 15 bp, Homo sapiens
cattgaattacatta

SEQ ID NO: 1531717 - DNA, 15 bp, Homo sapiens
acattgaattacatt

SEQ ID NO: 1531718 - DNA, 15 bp, Homo sapiens
cacattgaattacat

SEQ ID NO: 1531719 - DNA, 15 bp, Homo sapiens
acacattgaattaca

SEQ ID NO: 1531720 - DNA, 15 bp, Homo sapiens
cacacattgaattac

SEQ ID NO: 1531721 - DNA, 15 bp, Homo sapiens
acacacattgaatta

SEQ ID NO: 1531722 - DNA, 15 bp, Homo sapiens
tacacacattgaatt

SEQ ID NO: 1531723 - DNA, 15 bp, Homo sapiens
atacacacattgaat

SEQ ID NO: 1531724 - DNA, 15 bp, Homo sapiens
tatacacacattgaa

SEQ ID NO: 1531725 - DNA, 15 bp, Homo sapiens
atatacacacattga

SEQ ID NO: 1531726 - DNA, 15 bp, Homo sapiens
tatatacacacattg

SEQ ID NO: 1531727 - DNA, 15 bp, Homo sapiens
ctatatacacacatt

SEQ ID NO: 1531728 - DNA, 15 bp, Homo sapiens
cctatatacacacat

SEQ ID NO: 1531729 - DNA, 15 bp, Homo sapiens
ccctatatacacaca

SEQ ID NO: 1531730 - DNA, 15 bp, Homo sapiens
accctatatacacac

SEQ ID NO: 1531731 - DNA, 15 bp, Homo sapiens
taccctatatacaca

SEQ ID NO: 1531732 - DNA, 15 bp, Homo sapiens
ctaccctatatacac

SEQ ID NO: 1531733 - DNA, 15 bp, Homo sapiens
tctaccctatataca

SEQ ID NO: 1531734 - DNA, 15 bp, Homo sapiens
atctaccctatatac

SEQ ID NO: 1531735 - DNA, 15 bp, Homo sapiens
aatctaccctatata

SEQ ID NO: 1531736 - DNA, 15 bp, Homo sapiens
aaatctaccctatat

SEQ ID NO: 1531737 - DNA, 15 bp, Homo sapiens
aaaatctaccctata

SEQ ID NO: 1531738 - DNA, 15 bp, Homo sapiens
taaaatctaccctat

SEQ ID NO: 1531739 - DNA, 15 bp, Homo sapiens
ataaaatctacccta

SEQ ID NO: 1531740 - DNA, 15 bp, Homo sapiens
aataaaatctaccct

SEQ ID NO: 1531741 - DNA, 15 bp, Homo sapiens
aaataaaatctaccc

SEQ ID NO: 1531742 - DNA, 15 bp, Homo sapiens
taaataaaatctacc

SEQ ID NO: 1531743 - DNA, 15 bp, Homo sapiens
ctaaataaaatctac

SEQ ID NO: 1531744 - DNA, 15 bp, Homo sapiens
tctaaataaaatcta

SEQ ID NO: 1531745 - DNA, 15 bp, Homo sapiens
atctaaataaaatct

SEQ ID NO: 1531746 - DNA, 15 bp, Homo sapiens
tatctaaataaaatc

SEQ ID NO: 1531747 - DNA, 15 bp, Homo sapiens
atatctaaataaaat

SEQ ID NO: 1531748 - DNA, 15 bp, Homo sapiens
taatatctaaataaa

SEQ ID NO: 1531749 - DNA, 15 bp, Homo sapiens
ttaatatctaaataa

SEQ ID NO: 1531750 - DNA, 15 bp, Homo sapiens
tttaatatctaaata

SEQ ID NO: 1531751 - DNA, 15 bp, Homo sapiens
ctttaatatctaaat

SEQ ID NO: 1531752 - DNA, 15 bp, Homo sapiens
gctttaatatctaaa

SEQ ID NO: 1531753 - DNA, 15 bp, Homo sapiens
tgctttaatatctaa

SEQ ID NO: 1531754 - DNA, 15 bp, Homo sapiens
ctgctttaatatcta

SEQ ID NO: 1531755 - DNA, 15 bp, Homo sapiens
actgctttaatatct

SEQ ID NO: 1531756 - DNA, 15 bp, Homo sapiens
aactgctttaatatc

SEQ ID NO: 1531757 - DNA, 15 bp, Homo sapiens
gaactgctttaatat

SEQ ID NO: 1531758 - DNA, 15 bp, Homo sapiens
agaactgctttaata

SEQ ID NO: 1531759 - DNA, 15 bp, Homo sapiens
aagaactgctttaat

SEQ ID NO: 1531760 - DNA, 15 bp, Homo sapiens
gaagaactgctttaa

SEQ ID NO: 1531761 - DNA, 15 bp, Homo sapiens
cgaagaactgcttta

SEQ ID NO: 1531762 - DNA, 15 bp, Homo sapiens
tcgaagaactgcttt

SEQ ID NO: 1531763 - DNA, 15 bp, Homo sapiens
ttcgaagaactgctt

SEQ ID NO: 1531764 - DNA, 15 bp, Homo sapiens
tttcgaagaactgct

SEQ ID NO: 1531765 - DNA, 15 bp, Homo sapiens
atttcgaagaactgc

SEQ ID NO: 1531766 - DNA, 15 bp, Homo sapiens
aatttcgaagaactg

SEQ ID NO: 1531767 - DNA, 15 bp, Homo sapiens
aaatttcgaagaact

SEQ ID NO: 1531768 - DNA, 15 bp, Homo sapiens
aaaatttcgaagaac

SEQ ID NO: 1531769 - DNA, 15 bp, Homo sapiens
taaaatttcgaagaa

SEQ ID NO: 1531770 - DNA, 15 bp, Homo sapiens
ataaaatttcgaaga

SEQ ID NO: 1531771 - DNA, 15 bp, Homo sapiens
gataaaatttcgaag

SEQ ID NO: 1531772 - DNA, 15 bp, Homo sapiens
agataaaatttcgaa

SEQ ID NO: 1531773 - DNA, 15 bp, Homo sapiens
cagataaaatttcga

SEQ ID NO: 1531774 - DNA, 15 bp, Homo sapiens
acagataaaatttcg

SEQ ID NO: 1531775 - DNA, 15 bp, Homo sapiens
tacagataaaatttc

SEQ ID NO: 1531776 - DNA, 15 bp, Homo sapiens
atacagataaaattt

SEQ ID NO: 1531777 - DNA, 15 bp, Homo sapiens
catacagataaaatt

SEQ ID NO: 1531778 - DNA, 15 bp, Homo sapiens
acatacagataaaat

SEQ ID NO: 1531779 - DNA, 15 bp, Homo sapiens
aacatacagataaaa

SEQ ID NO: 1531780 - DNA, 15 bp, Homo sapiens
aaacatacagataaa

SEQ ID NO: 1531781 - DNA, 15 bp, Homo sapiens
aaaacatacagataa

SEQ ID NO: 1531782 - DNA, 15 bp, Homo sapiens
aaaaacatacagata

SEQ ID NO: 1531783 - DNA, 15 bp, Homo sapiens
taaaaacatacagat

SEQ ID NO: 1531784 - DNA, 15 bp, Homo sapiens
ctaaaaacatacaga

SEQ ID NO: 1531785 - DNA, 15 bp, Homo sapiens
cctaaaaacatacag

SEQ ID NO: 1531786 - DNA, 15 bp, Homo sapiens
tcctaaaaacataca

SEQ ID NO: 1531787 - DNA, 15 bp, Homo sapiens
atcctaaaaacatac

SEQ ID NO: 1531788 - DNA, 15 bp, Homo sapiens
tatcctaaaaacata

SEQ ID NO: 1531789 - DNA, 15 bp, Homo sapiens
ttatcctaaaaacat

SEQ ID NO: 1531790 - DNA, 15 bp, Homo sapiens
tttatcctaaaaaca

SEQ ID NO: 1531791 - DNA, 15 bp, Homo sapiens
atttatcctaaaaac

SEQ ID NO: 1531792 - DNA, 15 bp, Homo sapiens
tatttatcctaaaaa

SEQ ID NO: 1531793 - DNA, 15 bp, Homo sapiens
atatttatcctaaaa

SEQ ID NO: 1531794 - DNA, 15 bp, Homo sapiens
tatatttatcctaaa

SEQ ID NO: 1531795 - DNA, 15 bp, Homo sapiens
atatatttatcctaa

SEQ ID NO: 1531796 - DNA, 15 bp, Homo sapiens
gatatatttatccta

SEQ ID NO: 1531797 - DNA, 15 bp, Homo sapiens
agatatatttatcct

SEQ ID NO: 1531798 - DNA, 15 bp, Homo sapiens
aagatatatttatcc

SEQ ID NO: 1531799 - DNA, 15 bp, Homo sapiens
aaagatatatttatc

SEQ ID NO: 1531800 - DNA, 15 bp, Homo sapiens
caaagatatatttat

SEQ ID NO: 1531801 - DNA, 15 bp, Homo sapiens
acaaagatatattta

SEQ ID NO: 1531802 - DNA, 15 bp, Homo sapiens
tacaaagatatattt

SEQ ID NO: 1531803 - DNA, 15 bp, Homo sapiens
ttacaaagatatatt

SEQ ID NO: 1531804 - DNA, 15 bp, Homo sapiens
tttacaaagatatat

SEQ ID NO: 1531805 - DNA, 15 bp, Homo sapiens
ttttacaaagatata

SEQ ID NO: 1531806 - DNA, 15 bp, Homo sapiens
tttttacaaagatat

SEQ ID NO: 1531807 - DNA, 15 bp, Homo sapiens
ctttttacaaagata

SEQ ID NO: 1531808 - DNA, 15 bp, Homo sapiens
gctttttacaaagat

SEQ ID NO: 1531809 - DNA, 15 bp, Homo sapiens
tgctttttacaaaga

SEQ ID NO: 1531810 - DNA, 15 bp, Homo sapiens
gtgctttttacaaag

SEQ ID NO: 1531811 - DNA, 15 bp, Homo sapiens
agtgctttttacaaa

SEQ ID NO: 1531812 - DNA, 15 bp, Homo sapiens
aagtgctttttacaa

SEQ ID NO: 1531813 - DNA, 15 bp, Homo sapiens
caagtgctttttaca

SEQ ID NO: 1531814 - DNA, 15 bp, Homo sapiens
tcaagtgctttttac

SEQ ID NO: 1531815 - DNA, 15 bp, Homo sapiens
ttcaagtgcttttta

SEQ ID NO: 1531816 - DNA, 15 bp, Homo sapiens
tttcaagtgcttttt

SEQ ID NO: 1531817 - DNA, 15 bp, Homo sapiens
ttttcaagtgctttt

SEQ ID NO: 1531818 - DNA, 15 bp, Homo sapiens
tttttcaagtgcttt

SEQ ID NO: 1531819 - DNA, 15 bp, Homo sapiens
atttttcaagtgctt

SEQ ID NO: 1531820 - DNA, 15 bp, Homo sapiens
gatttttcaagtgct

SEQ ID NO: 1531821 - DNA, 15 bp, Homo sapiens
ggatttttcaagtgc

SEQ ID NO: 1531822 - DNA, 15 bp, Homo sapiens
tggatttttcaagtg

SEQ ID NO: 1531823 - DNA, 15 bp, Homo sapiens
ctggatttttcaagt

SEQ ID NO: 1531824 - DNA, 15 bp, Homo sapiens
tctggatttttcaag

SEQ ID NO: 1531825 - DNA, 15 bp, Homo sapiens
gtctggatttttcaa

SEQ ID NO: 1531826 - DNA, 15 bp, Homo sapiens
ggtctggatttttca

SEQ ID NO: 1531827 - DNA, 15 bp, Homo sapiens
tggtctggatttttc

SEQ ID NO: 1531828 - DNA, 15 bp, Homo sapiens
ttggtctggattttt

SEQ ID NO: 1531829 - DNA, 15 bp, Homo sapiens
gttggtctggatttt

SEQ ID NO: 1531830 - DNA, 15 bp, Homo sapiens
tgttggtctggattt

SEQ ID NO: 1531831 - DNA, 15 bp, Homo sapiens
gtgttggtctggatt

SEQ ID NO: 1531832 - DNA, 15 bp, Homo sapiens
tgtgttggtctggat

SEQ ID NO: 1531833 - DNA, 15 bp, Homo sapiens
ctgtgttggtctgga

SEQ ID NO: 1531834 - DNA, 15 bp, Homo sapiens
actgtgttggtctgg

SEQ ID NO: 1531835 - DNA, 15 bp, Homo sapiens
tactgtgttggtctg

SEQ ID NO: 1531836 - DNA, 15 bp, Homo sapiens
gtactgtgttggtct

SEQ ID NO: 1531837 - DNA, 15 bp, Homo sapiens
ggtactgtgttggtc

SEQ ID NO: 1531838 - DNA, 15 bp, Homo sapiens
aggtactgtgttggt

SEQ ID NO: 1531839 - DNA, 15 bp, Homo sapiens
taggtactgtgttgg

SEQ ID NO: 1531840 - DNA, 15 bp, Homo sapiens
ataggtactgtgttg

SEQ ID NO: 1531841 - DNA, 15 bp, Homo sapiens
tataggtactgtgtt

SEQ ID NO: 1531842 - DNA, 15 bp, Homo sapiens
ttataggtactgtgt

SEQ ID NO: 1531843 - DNA, 15 bp, Homo sapiens
tttataggtactgtg

SEQ ID NO: 1531844 - DNA, 15 bp, Homo sapiens
gtttataggtactgt

SEQ ID NO: 1531845 - DNA, 15 bp, Homo sapiens
ggtttataggtactg

SEQ ID NO: 1531846 - DNA, 15 bp, Homo sapiens
aggtttataggtact

SEQ ID NO: 1531847 - DNA, 15 bp, Homo sapiens
gaggtttataggtac

SEQ ID NO: 1531848 - DNA, 15 bp, Homo sapiens
tgaggtttataggta

SEQ ID NO: 1531849 - DNA, 15 bp, Homo sapiens
gtgaggtttataggt

SEQ ID NO: 1531850 - DNA, 15 bp, Homo sapiens
tgtgaggtttatagg

SEQ ID NO: 1531851 - DNA, 15 bp, Homo sapiens
atgtgaggtttatag

SEQ ID NO: 1531852 - DNA, 15 bp, Homo sapiens
aatgtgaggtttata

SEQ ID NO: 1531853 - DNA, 15 bp, Homo sapiens
aaatgtgaggtttat

SEQ ID NO: 1531854 - DNA, 15 bp, Homo sapiens
aaaatgtgaggttta

SEQ ID NO: 1531855 - DNA, 15 bp, Homo sapiens
taaaatgtgaggttt

SEQ ID NO: 1531856 - DNA, 15 bp, Homo sapiens
ataaaatgtgaggtt

SEQ ID NO: 1531857 - DNA, 15 bp, Homo sapiens
tataaaatgtgaggt

SEQ ID NO: 1531858 - DNA, 15 bp, Homo sapiens
ttataaaatgtgagg

SEQ ID NO: 1531859 - DNA, 15 bp, Homo sapiens
tttataaaatgtgag

SEQ ID NO: 1531860 - DNA, 15 bp, Homo sapiens
ctttataaaatgtga

SEQ ID NO: 1531861 - DNA, 15 bp, Homo sapiens
actttataaaatgtg

SEQ ID NO: 1531862 - DNA, 15 bp, Homo sapiens
cactttataaaatgt

SEQ ID NO: 1531863 - DNA, 15 bp, Homo sapiens
tcactttataaaatg

SEQ ID NO: 1531864 - DNA, 15 bp, Homo sapiens
atcactttataaaat

SEQ ID NO: 1531865 - DNA, 15 bp, Homo sapiens
aatcactttataaaa

SEQ ID NO: 1531866 - DNA, 15 bp, Homo sapiens
aaatcactttataaa

SEQ ID NO: 1531867 - DNA, 15 bp, Homo sapiens
aaaatcactttataa

SEQ ID NO: 1531868 - DNA, 15 bp, Homo sapiens
aaaaatcactttata

SEQ ID NO: 1531869 - DNA, 15 bp, Homo sapiens
aaaaaatcactttat

SEQ ID NO: 1531870 - DNA, 15 bp, Homo sapiens
aaaaaaatcacttta

SEQ ID NO: 1531871 - DNA, 15 bp, Homo sapiens
gaaaaaaatcacttt

SEQ ID NO: 1531872 - DNA, 15 bp, Homo sapiens
agaaaaaaatcactt

SEQ ID NO: 1531873 - DNA, 15 bp, Homo sapiens
cagaaaaaaatcact

SEQ ID NO: 1531874 - DNA, 15 bp, Homo sapiens
acagaaaaaaatcac

SEQ ID NO: 1531875 - DNA, 15 bp, Homo sapiens
tacagaaaaaaatca

SEQ ID NO: 1531876 - DNA, 15 bp, Homo sapiens
atacagaaaaaaatc

SEQ ID NO: 1531877 - DNA, 15 bp, Homo sapiens
tatacagaaaaaaat

SEQ ID NO: 1531878 - DNA, 15 bp, Homo sapiens
atatacagaaaaaaa

SEQ ID NO: 1531879 - DNA, 15 bp, Homo sapiens
aatatacagaaaaaa

SEQ ID NO: 1531880 - DNA, 15 bp, Homo sapiens
aaatatacagaaaaa

SEQ ID NO: 1531881 - DNA, 15 bp, Homo sapiens
gaaatatacagaaaa

SEQ ID NO: 1531882 - DNA, 15 bp, Homo sapiens
tgaaatatacagaaa

SEQ ID NO: 1531883 - DNA, 15 bp, Homo sapiens
ctgaaatatacagaa

SEQ ID NO: 1531884 - DNA, 15 bp, Homo sapiens
actgaaatatacaga

SEQ ID NO: 1531885 - DNA, 15 bp, Homo sapiens
cactgaaatatacag

SEQ ID NO: 1531886 - DNA, 15 bp, Homo sapiens
gcactgaaatataca

SEQ ID NO: 1531887 - DNA, 15 bp, Homo sapiens
ggcactgaaatatac

SEQ ID NO: 1531888 - DNA, 15 bp, Homo sapiens
gggcactgaaatata

SEQ ID NO: 1531889 - DNA, 15 bp, Homo sapiens
tgggcactgaaatat

SEQ ID NO: 1531890 - DNA, 15 bp, Homo sapiens
atgggcactgaaata

SEQ ID NO: 1531891 - DNA, 15 bp, Homo sapiens
aatgggcactgaaat

SEQ ID NO: 1531892 - DNA, 15 bp, Homo sapiens
aaatgggcactgaaa

SEQ ID NO: 1531893 - DNA, 15 bp, Homo sapiens
aaaatgggcactgaa

SEQ ID NO: 1531894 - DNA, 15 bp, Homo sapiens
taaaatgggcactga

SEQ ID NO: 1531895 - DNA, 15 bp, Homo sapiens
ttaaaatgggcactg

SEQ ID NO: 1531896 - DNA, 15 bp, Homo sapiens
tttaaaatgggcact

SEQ ID NO: 1531897 - DNA, 15 bp, Homo sapiens
ctttaaaatgggcac

SEQ ID NO: 1531898 - DNA, 15 bp, Homo sapiens
cctttaaaatgggca

SEQ ID NO: 1531899 - DNA, 15 bp, Homo sapiens
tcctttaaaatgggc

SEQ ID NO: 1531900 - DNA, 15 bp, Homo sapiens
ttcctttaaaatggg

SEQ ID NO: 1531901 - DNA, 15 bp, Homo sapiens
tttcctttaaaatgg

SEQ ID NO: 1531902 - DNA, 15 bp, Homo sapiens
ttttcctttaaaatg

SEQ ID NO: 1531903 - DNA, 15 bp, Homo sapiens
gttttcctttaaaat

SEQ ID NO: 1531904 - DNA, 15 bp, Homo sapiens
tgttttcctttaaaa

SEQ ID NO: 1531905 - DNA, 15 bp, Homo sapiens
ttgttttcctttaaa

SEQ ID NO: 1531906 - DNA, 15 bp, Homo sapiens
attgttttcctttaa

SEQ ID NO: 1531907 - DNA, 15 bp, Homo sapiens
tattgttttccttta

SEQ ID NO: 1531908 - DNA, 15 bp, Homo sapiens
atattgttttccttt

SEQ ID NO: 1531909 - DNA, 15 bp, Homo sapiens
catattgttttcctt

SEQ ID NO: 1531910 - DNA, 15 bp, Homo sapiens
acatattgttttcct

SEQ ID NO: 1531911 - DNA, 15 bp, Homo sapiens
tacatattgttttcc

SEQ ID NO: 1531912 - DNA, 15 bp, Homo sapiens
atacatattgttttc

SEQ ID NO: 1531913 - DNA, 15 bp, Homo sapiens
tatacatattgtttt

SEQ ID NO: 1531914 - DNA, 15 bp, Homo sapiens
atatacatattgttt

SEQ ID NO: 1531915 - DNA, 15 bp, Homo sapiens
aatatacatattgtt

SEQ ID NO: 1531916 - DNA, 15 bp, Homo sapiens
aaatatacatattgt

SEQ ID NO: 1531917 - DNA, 15 bp, Homo sapiens
taaatatacatattg

SEQ ID NO: 1531918 - DNA, 15 bp, Homo sapiens
gtaaatatacatatt

SEQ ID NO: 1531919 - DNA, 15 bp, Homo sapiens
tgtaaatatacatat

SEQ ID NO: 1531920 - DNA, 15 bp, Homo sapiens
ctgtaaatatacata

SEQ ID NO: 1531921 - DNA, 15 bp, Homo sapiens
tctgtaaatatacat

SEQ ID NO: 1531922 - DNA, 15 bp, Homo sapiens
ctctgtaaatataca

SEQ ID NO: 1531923 - DNA, 15 bp, Homo sapiens
actctgtaaatatac

SEQ ID NO: 1531924 - DNA, 15 bp, Homo sapiens
cactctgtaaatata

SEQ ID NO: 1531925 - DNA, 15 bp, Homo sapiens
tcactctgtaaatat

SEQ ID NO: 1531926 - DNA, 15 bp, Homo sapiens
gtcactctgtaaata

SEQ ID NO: 1531927 - DNA, 15 bp, Homo sapiens
agtcactctgtaaat

SEQ ID NO: 1531928 - DNA, 15 bp, Homo sapiens
cagtcactctgtaaa

SEQ ID NO: 1531929 - DNA, 15 bp, Homo sapiens
tcagtcactctgtaa

SEQ ID NO: 1531930 - DNA, 15 bp, Homo sapiens
ttcagtcactctgta

SEQ ID NO: 1531931 - DNA, 15 bp, Homo sapiens
attcagtcactctgt

SEQ ID NO: 1531932 - DNA, 15 bp, Homo sapiens
cattcagtcactctg

SEQ ID NO: 1531933 - DNA, 15 bp, Homo sapiens
acattcagtcactct

SEQ ID NO: 1531934 - DNA, 15 bp, Homo sapiens
tacattcagtcactc

SEQ ID NO: 1531935 - DNA, 15 bp, Homo sapiens
atacattcagtcact

SEQ ID NO: 1531936 - DNA, 15 bp, Homo sapiens
tatacattcagtcac

SEQ ID NO: 1531937 - DNA, 15 bp, Homo sapiens
ttatacattcagtca

SEQ ID NO: 1531938 - DNA, 15 bp, Homo sapiens
tttatacattcagtc

SEQ ID NO: 1531939 - DNA, 15 bp, Homo sapiens
ttttatacattcagt

SEQ ID NO: 1531940 - DNA, 15 bp, Homo sapiens
tttttatacattcag

SEQ ID NO: 1531941 - DNA, 15 bp, Homo sapiens
ttttttatacattca

SEQ ID NO: 1531942 - DNA, 15 bp, Homo sapiens
attttttatacattc

SEQ ID NO: 1531943 - DNA, 15 bp, Homo sapiens
tattttttatacatt

SEQ ID NO: 1531944 - DNA, 15 bp, Homo sapiens
atattttttatacat

SEQ ID NO: 1531945 - DNA, 15 bp, Homo sapiens
gatattttttataca

SEQ ID NO: 1531946 - DNA, 15 bp, Homo sapiens
ggatattttttatac

SEQ ID NO: 1531947 - DNA, 15 bp, Homo sapiens
gggatattttttata

SEQ ID NO: 1531948 - DNA, 15 bp, Homo sapiens
agggatattttttat

SEQ ID NO: 1531949 - DNA, 15 bp, Homo sapiens
gagggatatttttta

SEQ ID NO: 1531950 - DNA, 15 bp, Homo sapiens
tgagggatatttttt

SEQ ID NO: 1531951 - DNA, 15 bp, Homo sapiens
ttgagggatattttt

SEQ ID NO: 1531952 - DNA, 15 bp, Homo sapiens
gttgagggatatttt

SEQ ID NO: 1531953 - DNA, 15 bp, Homo sapiens
agttgagggatattt

SEQ ID NO: 1531954 - DNA, 15 bp, Homo sapiens
cagttgagggatatt

SEQ ID NO: 1531955 - DNA, 15 bp, Homo sapiens
tcagttgagggatat

SEQ ID NO: 1531956 - DNA, 15 bp, Homo sapiens
gtcagttgagggata

SEQ ID NO: 1531957 - DNA, 15 bp, Homo sapiens
tgtcagttgagggat

SEQ ID NO: 1531958 - DNA, 15 bp, Homo sapiens
gtgtcagttgaggga

SEQ ID NO: 1531959 - DNA, 15 bp, Homo sapiens
agtgtcagttgaggg

SEQ ID NO: 1531960 - DNA, 15 bp, Homo sapiens
cagtgtcagttgagg

SEQ ID NO: 1531961 - DNA, 15 bp, Homo sapiens
gcagtgtcagttgag

SEQ ID NO: 1531962 - DNA, 15 bp, Homo sapiens
tgcagtgtcagttga

SEQ ID NO: 1531963 - DNA, 15 bp, Homo sapiens
ctgcagtgtcagttg

SEQ ID NO: 1531964 - DNA, 15 bp, Homo sapiens
gctgcagtgtcagtt

SEQ ID NO: 1531965 - DNA, 15 bp, Homo sapiens
tgctgcagtgtcagt

SEQ ID NO: 1531966 - DNA, 15 bp, Homo sapiens
ttgctgcagtgtcag

SEQ ID NO: 1531967 - DNA, 15 bp, Homo sapiens
tttgctgcagtgtca

SEQ ID NO: 1531968 - DNA, 15 bp, Homo sapiens
atttgctgcagtgtc

SEQ ID NO: 1531969 - DNA, 15 bp, Homo sapiens
aatttgctgcagtgt

SEQ ID NO: 1531970 - DNA, 15 bp, Homo sapiens
aaatttgctgcagtg

SEQ ID NO: 1531971 - DNA, 15 bp, Homo sapiens
gaaatttgctgcagt

SEQ ID NO: 1531972 - DNA, 15 bp, Homo sapiens
agaaatttgctgcag

SEQ ID NO: 1531973 - DNA, 15 bp, Homo sapiens
cagaaatttgctgca

SEQ ID NO: 1531974 - DNA, 15 bp, Homo sapiens
ccagaaatttgctgc

SEQ ID NO: 1531975 - DNA, 15 bp, Homo sapiens
accagaaatttgctg

SEQ ID NO: 1531976 - DNA, 15 bp, Homo sapiens
caccagaaatttgct

SEQ ID NO: 1531977 - DNA, 15 bp, Homo sapiens
gcaccagaaatttgc

SEQ ID NO: 1531978 - DNA, 15 bp, Homo sapiens
tgcaccagaaatttg

SEQ ID NO: 1531979 - DNA, 15 bp, Homo sapiens
atgcaccagaaattt

SEQ ID NO: 1531980 - DNA, 15 bp, Homo sapiens
catgcaccagaaatt

SEQ ID NO: 1531981 - DNA, 15 bp, Homo sapiens
gcatgcaccagaaat

SEQ ID NO: 1531982 - DNA, 15 bp, Homo sapiens
tgcatgcaccagaaa

SEQ ID NO: 1531983 - DNA, 15 bp, Homo sapiens
gtgcatgcaccagaa

SEQ ID NO: 1531984 - DNA, 15 bp, Homo sapiens
agtgcatgcaccaga

SEQ ID NO: 1531985 - DNA, 15 bp, Homo sapiens
aagtgcatgcaccag

SEQ ID NO: 1531986 - DNA, 15 bp, Homo sapiens
caagtgcatgcacca

SEQ ID NO: 1531987 - DNA, 15 bp, Homo sapiens
gcaagtgcatgcacc

SEQ ID NO: 1531988 - DNA, 15 bp, Homo sapiens
agcaagtgcatgcac

SEQ ID NO: 1531989 - DNA, 15 bp, Homo sapiens
tagcaagtgcatgca

SEQ ID NO: 1531990 - DNA, 15 bp, Homo sapiens
atagcaagtgcatgc

SEQ ID NO: 1531991 - DNA, 15 bp, Homo sapiens
aatagcaagtgcatg

SEQ ID NO: 1531992 - DNA, 15 bp, Homo sapiens
caatagcaagtgcat

SEQ ID NO: 1531993 - DNA, 15 bp, Homo sapiens
tcaatagcaagtgca

SEQ ID NO: 1531994 - DNA, 15 bp, Homo sapiens
ttcaatagcaagtgc

SEQ ID NO: 1531995 - DNA, 15 bp, Homo sapiens
attcaatagcaagtg

SEQ ID NO: 1531996 - DNA, 15 bp, Homo sapiens
tattcaatagcaagt

SEQ ID NO: 1531997 - DNA, 15 bp, Homo sapiens
atattcaatagcaag

SEQ ID NO: 1531998 - DNA, 15 bp, Homo sapiens
tatattcaatagcaa

SEQ ID NO: 1531999 - DNA, 15 bp, Homo sapiens
atatattcaatagca

SEQ ID NO: 1532000 - DNA, 15 bp, Homo sapiens
tatatattcaatagc

SEQ ID NO: 1532001 - DNA, 15 bp, Homo sapiens
atatatattcaatag

SEQ ID NO: 1532002 - DNA, 15 bp, Homo sapiens
aatatatattcaata

SEQ ID NO: 1532003 - DNA, 15 bp, Homo sapiens
aaatatatattcaat

SEQ ID NO: 1532004 - DNA, 15 bp, Homo sapiens
taaatatatattcaa

SEQ ID NO: 1532005 - DNA, 15 bp, Homo sapiens
ttaaatatatattca

SEQ ID NO: 1532006 - DNA, 15 bp, Homo sapiens
attaaatatatattc

SEQ ID NO: 1532007 - DNA, 15 bp, Homo sapiens
ggattaaatatatat

SEQ ID NO: 1532008 - DNA, 15 bp, Homo sapiens
aggattaaatatata

SEQ ID NO: 1532009 - DNA, 15 bp, Homo sapiens
taggattaaatatat

SEQ ID NO: 1532010 - DNA, 15 bp, Homo sapiens
ttaggattaaatata

SEQ ID NO: 1532011 - DNA, 15 bp, Homo sapiens
gttaggattaaatat

SEQ ID NO: 1532012 - DNA, 15 bp, Homo sapiens
cgttaggattaaata

SEQ ID NO: 1532013 - DNA, 15 bp, Homo sapiens
acgttaggattaaat

SEQ ID NO: 1532014 - DNA, 15 bp, Homo sapiens
aacgttaggattaaa

SEQ ID NO: 1532015 - DNA, 15 bp, Homo sapiens
caacgttaggattaa

SEQ ID NO: 1532016 - DNA, 15 bp, Homo sapiens
tcaacgttaggatta

SEQ ID NO: 1532017 - DNA, 15 bp, Homo sapiens
gtcaacgttaggatt

SEQ ID NO: 1532018 - DNA, 15 bp, Homo sapiens
agtcaacgttaggat

SEQ ID NO: 1532019 - DNA, 15 bp, Homo sapiens
aagtcaacgttagga

SEQ ID NO: 1532020 - DNA, 15 bp, Homo sapiens
aaagtcaacgttagg

SEQ ID NO: 1532021 - DNA, 15 bp, Homo sapiens
aaaagtcaacgttag

SEQ ID NO: 1532022 - DNA, 15 bp, Homo sapiens
aaaaagtcaacgtta

SEQ ID NO: 1532023 - DNA, 15 bp, Homo sapiens
gaaaaagtcaacgtt

SEQ ID NO: 1532024 - DNA, 15 bp, Homo sapiens
agaaaaagtcaacgt

SEQ ID NO: 1532025 - DNA, 15 bp, Homo sapiens
aagaaaaagtcaacg

SEQ ID NO: 1532026 - DNA, 15 bp, Homo sapiens
taagaaaaagtcaac

SEQ ID NO: 1532027 - DNA, 15 bp, Homo sapiens
ttaagaaaaagtcaa

SEQ ID NO: 1532028 - DNA, 15 bp, Homo sapiens
tttaagaaaaagtca

SEQ ID NO: 1532029 - DNA, 15 bp, Homo sapiens
ttttaagaaaaagtc

SEQ ID NO: 1532030 - DNA, 15 bp, Homo sapiens
cttttaagaaaaagt

SEQ ID NO: 1532031 - DNA, 15 bp, Homo sapiens
tcttttaagaaaaag

SEQ ID NO: 1532032 - DNA, 15 bp, Homo sapiens
ttcttttaagaaaaa

SEQ ID NO: 1532033 - DNA, 15 bp, Homo sapiens
tttcttttaagaaaa

SEQ ID NO: 1532034 - DNA, 15 bp, Homo sapiens
ttttcttttaagaaa

SEQ ID NO: 1532035 - DNA, 15 bp, Homo sapiens
tttttcttttaagaa

SEQ ID NO: 1532036 - DNA, 15 bp, Homo sapiens
ctttttcttttaaga

SEQ ID NO: 1532037 - DNA, 15 bp, Homo sapiens
cctttttcttttaag

SEQ ID NO: 1532038 - DNA, 15 bp, Homo sapiens
tcctttttcttttaa

SEQ ID NO: 1532039 - DNA, 15 bp, Homo sapiens
ttttcctttttcttt

SEQ ID NO: 1532040 - DNA, 15 bp, Homo sapiens
tttttcctttttctt

SEQ ID NO: 1532041 - DNA, 15 bp, Homo sapiens
ctttttcctttttct

SEQ ID NO: 1532042 - DNA, 15 bp, Homo sapiens
tctttttcctttttc

SEQ ID NO: 1532043 - DNA, 15 bp, Homo sapiens
atctttttccttttt

SEQ ID NO: 1532044 - DNA, 15 bp, Homo sapiens
aatctttttcctttt

SEQ ID NO: 1532045 - DNA, 15 bp, Homo sapiens
gaatctttttccttt

SEQ ID NO: 1532046 - DNA, 15 bp, Homo sapiens
ggaatctttttcctt

SEQ ID NO: 1532047 - DNA, 15 bp, Homo sapiens
tggaatctttttcct

SEQ ID NO: 1532048 - DNA, 15 bp, Homo sapiens
ttggaatctttttcc

SEQ ID NO: 1532049 - DNA, 15 bp, Homo sapiens
tttggaatctttttc

SEQ ID NO: 1532050 - DNA, 15 bp, Homo sapiens
ctttggaatcttttt

SEQ ID NO: 1532051 - DNA, 15 bp, Homo sapiens
actttggaatctttt

SEQ ID NO: 1532052 - DNA, 15 bp, Homo sapiens
gactttggaatcttt

SEQ ID NO: 1532053 - DNA, 15 bp, Homo sapiens
tgactttggaatctt

SEQ ID NO: 1532054 - DNA, 15 bp, Homo sapiens
ctgactttggaatct

SEQ ID NO: 1532055 - DNA, 15 bp, Homo sapiens
gctgactttggaatc

SEQ ID NO: 1532056 - DNA, 15 bp, Homo sapiens
ggctgactttggaat

SEQ ID NO: 1532057 - DNA, 15 bp, Homo sapiens
aggctgactttggaa

SEQ ID NO: 1532058 - DNA, 15 bp, Homo sapiens
aaggctgactttgga

SEQ ID NO: 1532059 - DNA, 15 bp, Homo sapiens
aaaggctgactttgg

SEQ ID NO: 1532060 - DNA, 15 bp, Homo sapiens
aaaaggctgactttg

SEQ ID NO: 1532061 - DNA, 15 bp, Homo sapiens
taaaaggctgacttt

SEQ ID NO: 1532062 - DNA, 15 bp, Homo sapiens
gtaaaaggctgactt

SEQ ID NO: 1532063 - DNA, 15 bp, Homo sapiens
agtaaaaggctgact

SEQ ID NO: 1532064 - DNA, 15 bp, Homo sapiens
cagtaaaaggctgac

SEQ ID NO: 1532065 - DNA, 15 bp, Homo sapiens
tcagtaaaaggctga

SEQ ID NO: 1532066 - DNA, 15 bp, Homo sapiens
atcagtaaaaggctg

SEQ ID NO: 1532067 - DNA, 15 bp, Homo sapiens
aatcagtaaaaggct

SEQ ID NO: 1532068 - DNA, 15 bp, Homo sapiens
aaatcagtaaaaggc

SEQ ID NO: 1532069 - DNA, 15 bp, Homo sapiens
taaatcagtaaaagg

SEQ ID NO: 1532070 - DNA, 15 bp, Homo sapiens
ttaaatcagtaaaag

SEQ ID NO: 1532071 - DNA, 15 bp, Homo sapiens
tttaaatcagtaaaa

SEQ ID NO: 1532072 - DNA, 15 bp, Homo sapiens
atttaaatcagtaaa

SEQ ID NO: 1532073 - DNA, 15 bp, Homo sapiens
tatttaaatcagtaa

SEQ ID NO: 1532074 - DNA, 15 bp, Homo sapiens
ttatttaaatcagta

SEQ ID NO: 1532075 - DNA, 15 bp, Homo sapiens
gttatttaaatcagt

SEQ ID NO: 1532076 - DNA, 15 bp, Homo sapiens
tgttatttaaatcag

SEQ ID NO: 1532077 - DNA, 15 bp, Homo sapiens
atgttatttaaatca

SEQ ID NO: 1532078 - DNA, 15 bp, Homo sapiens
gatgttatttaaatc

SEQ ID NO: 1532079 - DNA, 15 bp, Homo sapiens
agatgttatttaaat

SEQ ID NO: 1532080 - DNA, 15 bp, Homo sapiens
aagatgttatttaaa

SEQ ID NO: 1532081 - DNA, 15 bp, Homo sapiens
taagatgttatttaa

SEQ ID NO: 1532082 - DNA, 15 bp, Homo sapiens
gtaagatgttattta

SEQ ID NO: 1532083 - DNA, 15 bp, Homo sapiens
ggtaagatgttattt

SEQ ID NO: 1532084 - DNA, 15 bp, Homo sapiens
cggtaagatgttatt

SEQ ID NO: 1532085 - DNA, 15 bp, Homo sapiens
acggtaagatgttat

SEQ ID NO: 1532086 - DNA, 15 bp, Homo sapiens
cacggtaagatgtta

SEQ ID NO: 1532087 - DNA, 15 bp, Homo sapiens
ccacggtaagatgtt

SEQ ID NO: 1532088 - DNA, 15 bp, Homo sapiens
accacggtaagatgt

SEQ ID NO: 1532089 - DNA, 15 bp, Homo sapiens
caccacggtaagatg

SEQ ID NO: 1532090 - DNA, 15 bp, Homo sapiens
acaccacggtaagat

SEQ ID NO: 1532091 - DNA, 15 bp, Homo sapiens
gacaccacggtaaga

SEQ ID NO: 1532092 - DNA, 15 bp, Homo sapiens
cgacaccacggtaag

SEQ ID NO: 1532093 - DNA, 15 bp, Homo sapiens
acgacaccacggtaa

SEQ ID NO: 1532094 - DNA, 15 bp, Homo sapiens
gacgacaccacggta

SEQ ID NO: 1532095 - DNA, 15 bp, Homo sapiens
agacgacaccacggt

SEQ ID NO: 1532096 - DNA, 15 bp, Homo sapiens
aagacgacaccacgg

SEQ ID NO: 1532097 - DNA, 15 bp, Homo sapiens
gaagacgacaccacg

SEQ ID NO: 1532098 - DNA, 15 bp, Homo sapiens
tgaagacgacaccac

SEQ ID NO: 1532099 - DNA, 15 bp, Homo sapiens
ttgaagacgacacca

SEQ ID NO: 1532100 - DNA, 15 bp, Homo sapiens
gttgaagacgacacc

SEQ ID NO: 1532101 - DNA, 15 bp, Homo sapiens
tgttgaagacgacac

SEQ ID NO: 1532102 - DNA, 15 bp, Homo sapiens
atgttgaagacgaca

SEQ ID NO: 1532103 - DNA, 15 bp, Homo sapiens
gatgttgaagacgac

SEQ ID NO: 1532104 - DNA, 15 bp, Homo sapiens
tgatgttgaagacga

SEQ ID NO: 1532105 - DNA, 15 bp, Homo sapiens
ctgatgttgaagacg

SEQ ID NO: 1532106 - DNA, 15 bp, Homo sapiens
gctgatgttgaagac

SEQ ID NO: 1532107 - DNA, 15 bp, Homo sapiens
tgctgatgttgaaga

SEQ ID NO: 1532108 - DNA, 15 bp, Homo sapiens
atgctgatgttgaag

SEQ ID NO: 1532109 - DNA, 15 bp, Homo sapiens
gatgctgatgttgaa

SEQ ID NO: 1532110 - DNA, 15 bp, Homo sapiens
agatgctgatgttga

SEQ ID NO: 1532111 - DNA, 15 bp, Homo sapiens
gagatgctgatgttg

SEQ ID NO: 1532112 - DNA, 15 bp, Homo sapiens
tgagatgctgatgtt

SEQ ID NO: 1532113 - DNA, 15 bp, Homo sapiens
atgagatgctgatgt

SEQ ID NO: 1532114 - DNA, 15 bp, Homo sapiens
aatgagatgctgatg

SEQ ID NO: 1532115 - DNA, 15 bp, Homo sapiens
aaatgagatgctgat

SEQ ID NO: 1532116 - DNA, 15 bp, Homo sapiens
aaaatgagatgctga

SEQ ID NO: 1532117 - DNA, 15 bp, Homo sapiens
gaaaatgagatgctg

SEQ ID NO: 1532118 - DNA, 15 bp, Homo sapiens
agaaaatgagatgct

SEQ ID NO: 1532119 - DNA, 15 bp, Homo sapiens
gagaaaatgagatgc

SEQ ID NO: 1532120 - DNA, 15 bp, Homo sapiens
agagaaaatgagatg

SEQ ID NO: 1532121 - DNA, 15 bp, Homo sapiens
cagagaaaatgagat

SEQ ID NO: 1532122 - DNA, 15 bp, Homo sapiens
ccagagaaaatgaga

SEQ ID NO: 1532123 - DNA, 15 bp, Homo sapiens
cccagagaaaatgag

SEQ ID NO: 1532124 - DNA, 15 bp, Homo sapiens
tcccagagaaaatga

SEQ ID NO: 1532125 - DNA, 15 bp, Homo sapiens
ttcccagagaaaatg

SEQ ID NO: 1532126 - DNA, 15 bp, Homo sapiens
tttcccagagaaaat

SEQ ID NO: 1532127 - DNA, 15 bp, Homo sapiens
gtttcccagagaaaa

SEQ ID NO: 1532128 - DNA, 15 bp, Homo sapiens
agtttcccagagaaa

SEQ ID NO: 1532129 - DNA, 15 bp, Homo sapiens
aagtttcccagagaa

SEQ ID NO: 1532130 - DNA, 15 bp, Homo sapiens
taagtttcccagaga

SEQ ID NO: 1532131 - DNA, 15 bp, Homo sapiens
ttaagtttcccagag

SEQ ID NO: 1532132 - DNA, 15 bp, Homo sapiens
tttaagtttcccaga

SEQ ID NO: 1532133 - DNA, 15 bp, Homo sapiens
ctttaagtttcccag

SEQ ID NO: 1532134 - DNA, 15 bp, Homo sapiens
cctttaagtttccca

SEQ ID NO: 1532135 - DNA, 15 bp, Homo sapiens
acctttaagtttccc

SEQ ID NO: 1532136 - DNA, 15 bp, Homo sapiens
gacctttaagtttcc

SEQ ID NO: 1532137 - DNA, 15 bp, Homo sapiens
cgacctttaagtttc

SEQ ID NO: 1532138 - DNA, 15 bp, Homo sapiens
acgacctttaagttt

SEQ ID NO: 1532139 - DNA, 15 bp, Homo sapiens
gacgacctttaagtt

SEQ ID NO: 1532140 - DNA, 15 bp, Homo sapiens
agacgacctttaagt

SEQ ID NO: 1532141 - DNA, 15 bp, Homo sapiens
aagacgacctttaag

SEQ ID NO: 1532142 - DNA, 15 bp, Homo sapiens
caagacgacctttaa

SEQ ID NO: 1532143 - DNA, 15 bp, Homo sapiens
acaagacgaccttta

SEQ ID NO: 1532144 - DNA, 15 bp, Homo sapiens
aacaagacgaccttt

SEQ ID NO: 1532145 - DNA, 15 bp, Homo sapiens
gaacaagacgacctt

SEQ ID NO: 1532146 - DNA, 15 bp, Homo sapiens
agaacaagacgacct

SEQ ID NO: 1532147 - DNA, 15 bp, Homo sapiens
cagaacaagacgacc

SEQ ID NO: 1532148 - DNA, 15 bp, Homo sapiens
acagaacaagacgac

SEQ ID NO: 1532149 - DNA, 15 bp, Homo sapiens
tacagaacaagacga

SEQ ID NO: 1532150 - DNA, 15 bp, Homo sapiens
ctacagaacaagacg

SEQ ID NO: 1532151 - DNA, 15 bp, Homo sapiens
tctacagaacaagac

SEQ ID NO: 1532152 - DNA, 15 bp, Homo sapiens
ctctacagaacaaga

SEQ ID NO: 1532153 - DNA, 15 bp, Homo sapiens
actctacagaacaag

SEQ ID NO: 1532154 - DNA, 15 bp, Homo sapiens
gactctacagaacaa

SEQ ID NO: 1532155 - DNA, 15 bp, Homo sapiens
cgactctacagaaca

SEQ ID NO: 1532156 - DNA, 15 bp, Homo sapiens
ccgactctacagaac

SEQ ID NO: 1532157 - DNA, 15 bp, Homo sapiens
tccgactctacagaa

SEQ ID NO: 1532158 - DNA, 15 bp, Homo sapiens
ttccgactctacaga

SEQ ID NO: 1532159 - DNA, 15 bp, Homo sapiens
gttccgactctacag

SEQ ID NO: 1532160 - DNA, 15 bp, Homo sapiens
agttccgactctaca

SEQ ID NO: 1532161 - DNA, 15 bp, Homo sapiens
cagttccgactctac

SEQ ID NO: 1532162 - DNA, 15 bp, Homo sapiens
acagttccgactcta

SEQ ID NO: 1532163 - DNA, 15 bp, Homo sapiens
aacagttccgactct

SEQ ID NO: 1532164 - DNA, 15 bp, Homo sapiens
aaacagttccgactc

SEQ ID NO: 1532165 - DNA, 15 bp, Homo sapiens
gaaacagttccgact

SEQ ID NO: 1532166 - DNA, 15 bp, Homo sapiens
agaaacagttccgac

SEQ ID NO: 1532167 - DNA, 15 bp, Homo sapiens
cagaaacagttccga

SEQ ID NO: 1532168 - DNA, 15 bp, Homo sapiens
ccagaaacagttccg

SEQ ID NO: 1532169 - DNA, 15 bp, Homo sapiens
gccagaaacagttcc

SEQ ID NO: 1532170 - DNA, 15 bp, Homo sapiens
agccagaaacagttc

SEQ ID NO: 1532171 - DNA, 15 bp, Homo sapiens
cagccagaaacagtt

SEQ ID NO: 1532172 - DNA, 15 bp, Homo sapiens
acagccagaaacagt

SEQ ID NO: 1532173 - DNA, 15 bp, Homo sapiens
cacagccagaaacag

SEQ ID NO: 1532174 - DNA, 15 bp, Homo sapiens
ccacagccagaaaca

SEQ ID NO: 1532175 - DNA, 15 bp, Homo sapiens
cccacagccagaaac

SEQ ID NO: 1532176 - DNA, 15 bp, Homo sapiens
gcccacagccagaaa

SEQ ID NO: 1532177 - DNA, 15 bp, Homo sapiens
agcccacagccagaa

SEQ ID NO: 1532178 - DNA, 15 bp, Homo sapiens
cagcccacagccaga

SEQ ID NO: 1532179 - DNA, 15 bp, Homo sapiens
acagcccacagccag

SEQ ID NO: 1532180 - DNA, 15 bp, Homo sapiens
cacagcccacagcca

SEQ ID NO: 1532181 - DNA, 15 bp, Homo sapiens
gcacagcccacagcc

SEQ ID NO: 1532182 - DNA, 15 bp, Homo sapiens
agcacagcccacagc

SEQ ID NO: 1532183 - DNA, 15 bp, Homo sapiens
aagcacagcccacag

SEQ ID NO: 1532184 - DNA, 15 bp, Homo sapiens
caagcacagcccaca

SEQ ID NO: 1532185 - DNA, 15 bp, Homo sapiens
gcaagcacagcccac

SEQ ID NO: 1532186 - DNA, 15 bp, Homo sapiens
ggcaagcacagccca

SEQ ID NO: 1532187 - DNA, 15 bp, Homo sapiens
aggcaagcacagccc

SEQ ID NO: 1532188 - DNA, 15 bp, Homo sapiens
caggcaagcacagcc

SEQ ID NO: 1532189 - DNA, 15 bp, Homo sapiens
gcaggcaagcacagc

SEQ ID NO: 1532190 - DNA, 15 bp, Homo sapiens
agcaggcaagcacag

SEQ ID NO: 1532191 - DNA, 15 bp, Homo sapiens
gagcaggcaagcaca

SEQ ID NO: 1532192 - DNA, 15 bp, Homo sapiens
tgagcaggcaagcac

SEQ ID NO: 1532193 - DNA, 15 bp, Homo sapiens
ctgagcaggcaagca

SEQ ID NO: 1532194 - DNA, 15 bp, Homo sapiens
gctgagcaggcaagc

SEQ ID NO: 1532195 - DNA, 15 bp, Homo sapiens
agctgagcaggcaag

SEQ ID NO: 1532196 - DNA, 15 bp, Homo sapiens
cagctgagcaggcaa

SEQ ID NO: 1532197 - DNA, 15 bp, Homo sapiens
gcagctgagcaggca

SEQ ID NO: 1532198 - DNA, 15 bp, Homo sapiens
tgcagctgagcaggc

SEQ ID NO: 1532199 - DNA, 15 bp, Homo sapiens
atgcagctgagcagg

SEQ ID NO: 1532200 - DNA, 15 bp, Homo sapiens
aatgcagctgagcag

SEQ ID NO: 1532201 - DNA, 15 bp, Homo sapiens
caatgcagctgagca

SEQ ID NO: 1532202 - DNA, 15 bp, Homo sapiens
acaatgcagctgagc

SEQ ID NO: 1532203 - DNA, 15 bp, Homo sapiens
cacaatgcagctgag

SEQ ID NO: 1532204 - DNA, 15 bp, Homo sapiens
acacaatgcagctga

SEQ ID NO: 1532205 - DNA, 15 bp, Homo sapiens
aacacaatgcagctg

SEQ ID NO: 1532206 - DNA, 15 bp, Homo sapiens
caacacaatgcagct

SEQ ID NO: 1532207 - DNA, 15 bp, Homo sapiens
gcaacacaatgcagc

SEQ ID NO: 1532208 - DNA, 15 bp, Homo sapiens
agcaacacaatgcag

SEQ ID NO: 1532209 - DNA, 15 bp, Homo sapiens
cagcaacacaatgca

SEQ ID NO: 1532210 - DNA, 15 bp, Homo sapiens
acagcaacacaatgc

SEQ ID NO: 1532211 - DNA, 15 bp, Homo sapiens
cacagcaacacaatg

SEQ ID NO: 1532212 - DNA, 15 bp, Homo sapiens
tcacagcaacacaat

SEQ ID NO: 1532213 - DNA, 15 bp, Homo sapiens
ctcacagcaacacaa

SEQ ID NO: 1532214 - DNA, 15 bp, Homo sapiens
gctcacagcaacaca

SEQ ID NO: 1532215 - DNA, 15 bp, Homo sapiens
agctcacagcaacac

SEQ ID NO: 1532216 - DNA, 15 bp, Homo sapiens
cagctcacagcaaca

SEQ ID NO: 1532217 - DNA, 15 bp, Homo sapiens
tcagctcacagcaac

SEQ ID NO: 1532218 - DNA, 15 bp, Homo sapiens
ttcagctcacagcaa

SEQ ID NO: 1532219 - DNA, 15 bp, Homo sapiens
cttcagctcacagca

SEQ ID NO: 1532220 - DNA, 15 bp, Homo sapiens
gcttcagctcacagc

SEQ ID NO: 1532221 - DNA, 15 bp, Homo sapiens
agcttcagctcacag

SEQ ID NO: 1532222 - DNA, 15 bp, Homo sapiens
gagcttcagctcaca

SEQ ID NO: 1532223 - DNA, 15 bp, Homo sapiens
agagcttcagctcac

SEQ ID NO: 1532224 - DNA, 15 bp, Homo sapiens
cagagcttcagctca

SEQ ID NO: 1532225 - DNA, 15 bp, Homo sapiens
gcagagcttcagctc

SEQ ID NO: 1532226 - DNA, 15 bp, Homo sapiens
tgcagagcttcagct

SEQ ID NO: 1532227 - DNA, 15 bp, Homo sapiens
ttgcagagcttcagc

SEQ ID NO: 1532228 - DNA, 15 bp, Homo sapiens
gttgcagagcttcag

SEQ ID NO: 1532229 - DNA, 15 bp, Homo sapiens
ggttgcagagcttca

SEQ ID NO: 1532230 - DNA, 15 bp, Homo sapiens
tggttgcagagcttc

SEQ ID NO: 1532231 - DNA, 15 bp, Homo sapiens
gtggttgcagagctt

SEQ ID NO: 1532232 - DNA, 15 bp, Homo sapiens
ggtggttgcagagct

SEQ ID NO: 1532233 - DNA, 15 bp, Homo sapiens
aggtggttgcagagc

SEQ ID NO: 1532234 - DNA, 15 bp, Homo sapiens
caggtggttgcagag

SEQ ID NO: 1532235 - DNA, 15 bp, Homo sapiens
tcaggtggttgcaga

SEQ ID NO: 1532236 - DNA, 15 bp, Homo sapiens
atcaggtggttgcag

SEQ ID NO: 1532237 - DNA, 15 bp, Homo sapiens
gatcaggtggttgca

SEQ ID NO: 1532238 - DNA, 15 bp, Homo sapiens
tgatcaggtggttgc

SEQ ID NO: 1532239 - DNA, 15 bp, Homo sapiens
ctgatcaggtggttg

SEQ ID NO: 1532240 - DNA, 15 bp, Homo sapiens
actgatcaggtggtt

SEQ ID NO: 1532241 - DNA, 15 bp, Homo sapiens
tactgatcaggtggt

SEQ ID NO: 1532242 - DNA, 15 bp, Homo sapiens
gtactgatcaggtgg

SEQ ID NO: 1532243 - DNA, 15 bp, Homo sapiens
ggtactgatcaggtg

SEQ ID NO: 1532244 - DNA, 15 bp, Homo sapiens
tggtactgatcaggt

SEQ ID NO: 1532245 - DNA, 15 bp, Homo sapiens
gtggtactgatcagg

SEQ ID NO: 1532246 - DNA, 15 bp, Homo sapiens
tgtggtactgatcag

SEQ ID NO: 1532247 - DNA, 15 bp, Homo sapiens
atgtggtactgatca

SEQ ID NO: 1532248 - DNA, 15 bp, Homo sapiens
tatgtggtactgatc

SEQ ID NO: 1532249 - DNA, 15 bp, Homo sapiens
ctatgtggtactgat

SEQ ID NO: 1532250 - DNA, 15 bp, Homo sapiens
cctatgtggtactga

SEQ ID NO: 1532251 - DNA, 15 bp, Homo sapiens
tcctatgtggtactg

SEQ ID NO: 1532252 - DNA, 15 bp, Homo sapiens
ctcctatgtggtact

SEQ ID NO: 1532253 - DNA, 15 bp, Homo sapiens
cctcctatgtggtac

SEQ ID NO: 1532254 - DNA, 15 bp, Homo sapiens
tcctcctatgtggta

SEQ ID NO: 1532255 - DNA, 15 bp, Homo sapiens
gtcctcctatgtggt

SEQ ID NO: 1532256 - DNA, 15 bp, Homo sapiens
agtcctcctatgtgg

SEQ ID NO: 1532257 - DNA, 15 bp, Homo sapiens
cagtcctcctatgtg

SEQ ID NO: 1532258 - DNA, 15 bp, Homo sapiens
gcagtcctcctatgt

SEQ ID NO: 1532259 - DNA, 15 bp, Homo sapiens
tgcagtcctcctatg

SEQ ID NO: 1532260 - DNA, 15 bp, Homo sapiens
ctgcagtcctcctat

SEQ ID NO: 1532261 - DNA, 15 bp, Homo sapiens
tctgcagtcctccta

SEQ ID NO: 1532262 - DNA, 15 bp, Homo sapiens
ctctgcagtcctcct

SEQ ID NO: 1532263 - DNA, 15 bp, Homo sapiens
gctctgcagtcctcc

SEQ ID NO: 1532264 - DNA, 15 bp, Homo sapiens
agctctgcagtcctc

SEQ ID NO: 1532265 - DNA, 15 bp, Homo sapiens
cagctctgcagtcct

SEQ ID NO: 1532266 - DNA, 15 bp, Homo sapiens
acagctctgcagtcc

SEQ ID NO: 1532267 - DNA, 15 bp, Homo sapiens
gacagctctgcagtc

SEQ ID NO: 1532268 - DNA, 15 bp, Homo sapiens
cgacagctctgcagt

SEQ ID NO: 1532269 - DNA, 15 bp, Homo sapiens
gcgacagctctgcag

SEQ ID NO: 1532270 - DNA, 15 bp, Homo sapiens
agcgacagctctgca

SEQ ID NO: 1532271 - DNA, 15 bp, Homo sapiens
cagcgacagctctgc

SEQ ID NO: 1532272 - DNA, 15 bp, Homo sapiens
ccagcgacagctctg

SEQ ID NO: 1532273 - DNA, 15 bp, Homo sapiens
accagcgacagctct

SEQ ID NO: 1532274 - DNA, 15 bp, Homo sapiens
caccagcgacagctc

SEQ ID NO: 1532275 - DNA, 15 bp, Homo sapiens
gcaccagcgacagct

SEQ ID NO: 1532276 - DNA, 15 bp, Homo sapiens
agcaccagcgacagc

SEQ ID NO: 1532277 - DNA, 15 bp, Homo sapiens
cagcaccagcgacag

SEQ ID NO: 1532278 - DNA, 15 bp, Homo sapiens
tcagcaccagcgaca

SEQ ID NO: 1532279 - DNA, 15 bp, Homo sapiens
gtcagcaccagcgac

SEQ ID NO: 1532280 - DNA, 15 bp, Homo sapiens
agtcagcaccagcga

SEQ ID NO: 1532281 - DNA, 15 bp, Homo sapiens
gagtcagcaccagcg

SEQ ID NO: 1532282 - DNA, 15 bp, Homo sapiens
tgagtcagcaccagc

SEQ ID NO: 1532283 - DNA, 15 bp, Homo sapiens
ttgagtcagcaccag

SEQ ID NO: 1532284 - DNA, 15 bp, Homo sapiens
tttgagtcagcacca

SEQ ID NO: 1532285 - DNA, 15 bp, Homo sapiens
atttgagtcagcacc

SEQ ID NO: 1532286 - DNA, 15 bp, Homo sapiens
aatttgagtcagcac

SEQ ID NO: 1532287 - DNA, 15 bp, Homo sapiens
aaatttgagtcagca

SEQ ID NO: 1532288 - DNA, 15 bp, Homo sapiens
taaatttgagtcagc

SEQ ID NO: 1532289 - DNA, 15 bp, Homo sapiens
ataaatttgagtcag

SEQ ID NO: 1532290 - DNA, 15 bp, Homo sapiens
cataaatttgagtca

SEQ ID NO: 1532291 - DNA, 15 bp, Homo sapiens
ccataaatttgagtc

SEQ ID NO: 1532292 - DNA, 15 bp, Homo sapiens
gccataaatttgagt

SEQ ID NO: 1532293 - DNA, 15 bp, Homo sapiens
tgccataaatttgag

SEQ ID NO: 1532294 - DNA, 15 bp, Homo sapiens
ttgccataaatttga

SEQ ID NO: 1532295 - DNA, 15 bp, Homo sapiens
cttgccataaatttg

SEQ ID NO: 1532296 - DNA, 15 bp, Homo sapiens
tcttgccataaattt

SEQ ID NO: 1532297 - DNA, 15 bp, Homo sapiens
ctcttgccataaatt

SEQ ID NO: 1532298 - DNA, 15 bp, Homo sapiens
cctcttgccataaat

SEQ ID NO: 1532299 - DNA, 15 bp, Homo sapiens
acctcttgccataaa

SEQ ID NO: 1532300 - DNA, 15 bp, Homo sapiens
cacctcttgccataa

SEQ ID NO: 1532301 - DNA, 15 bp, Homo sapiens
gcacctcttgccata

SEQ ID NO: 1532302 - DNA, 15 bp, Homo sapiens
tgcacctcttgccat

SEQ ID NO: 1532303 - DNA, 15 bp, Homo sapiens
gtgcacctcttgcca

SEQ ID NO: 1532304 - DNA, 15 bp, Homo sapiens
tgtgcacctcttgcc

SEQ ID NO: 1532305 - DNA, 15 bp, Homo sapiens
gtgtgcacctcttgc

SEQ ID NO: 1532306 - DNA, 15 bp, Homo sapiens
cgtgtgcacctcttg

SEQ ID NO: 1532307 - DNA, 15 bp, Homo sapiens
gcgtgtgcacctctt

SEQ ID NO: 1532308 - DNA, 15 bp, Homo sapiens
tgcgtgtgcacctct

SEQ ID NO: 1532309 - DNA, 15 bp, Homo sapiens
ttgcgtgtgcacctc

SEQ ID NO: 1532310 - DNA, 15 bp, Homo sapiens
gttgcgtgtgcacct

SEQ ID NO: 1532311 - DNA, 15 bp, Homo sapiens
tgttgcgtgtgcacc

SEQ ID NO: 1532312 - DNA, 15 bp, Homo sapiens
ttgttgcgtgtgcac

SEQ ID NO: 1532313 - DNA, 15 bp, Homo sapiens
tttgttgcgtgtgca

SEQ ID NO: 1532314 - DNA, 15 bp, Homo sapiens
ttttgttgcgtgtgc

SEQ ID NO: 1532315 - DNA, 15 bp, Homo sapiens
attttgttgcgtgtg

SEQ ID NO: 1532316 - DNA, 15 bp, Homo sapiens
cattttgttgcgtgt

SEQ ID NO: 1532317 - DNA, 15 bp, Homo sapiens
ccattttgttgcgtg

SEQ ID NO: 1532318 - DNA, 15 bp, Homo sapiens
tccattttgttgcgt

SEQ ID NO: 1532319 - DNA, 15 bp, Homo sapiens
gtccattttgttgcg

SEQ ID NO: 1532320 - DNA, 15 bp, Homo sapiens
tgtccattttgttgc

SEQ ID NO: 1532321 - DNA, 15 bp, Homo sapiens
ttgtccattttgttg

SEQ ID NO: 1532322 - DNA, 15 bp, Homo sapiens
attgtccattttgtt

SEQ ID NO: 1532323 - DNA, 15 bp, Homo sapiens
aattgtccattttgt

SEQ ID NO: 1532324 - DNA, 15 bp, Homo sapiens
aaattgtccattttg

SEQ ID NO: 1532325 - DNA, 15 bp, Homo sapiens
aaaaattgtccattt

SEQ ID NO: 1532326 - DNA, 15 bp, Homo sapiens
aaaaaattgtccatt

SEQ ID NO: 1532327 - DNA, 15 bp, Homo sapiens
taaaaaattgtccat

SEQ ID NO: 1532328 - DNA, 15 bp, Homo sapiens
ttaaaaaattgtcca

SEQ ID NO: 1532329 - DNA, 15 bp, Homo sapiens
tttaaaaaattgtcc

SEQ ID NO: 1532330 - DNA, 15 bp, Homo sapiens
ttttaaaaaattgtc

SEQ ID NO: 1532331 - DNA, 15 bp, Homo sapiens
tttttaaaaaattgt

SEQ ID NO: 1532332 - DNA, 15 bp, Homo sapiens
ttttttaaaaaattg

SEQ ID NO: 1532333 - DNA, 15 bp, Homo sapiens
attttttaaaaaatt

SEQ ID NO: 1532334 - DNA, 15 bp, Homo sapiens
aattttttaaaaaat

SEQ ID NO: 1532335 - DNA, 15 bp, Homo sapiens
aaattttttaaaaaa

SEQ ID NO: 1532336 - DNA, 15 bp, Homo sapiens
caaattttttaaaaa

SEQ ID NO: 1532337 - DNA, 15 bp, Homo sapiens
acaaattttttaaaa

SEQ ID NO: 1532338 - DNA, 15 bp, Homo sapiens
cacaaattttttaaa

SEQ ID NO: 1532339 - DNA, 15 bp, Homo sapiens
ccacaaattttttaa

SEQ ID NO: 1532340 - DNA, 15 bp, Homo sapiens
gccacaaatttttta

SEQ ID NO: 1532341 - DNA, 15 bp, Homo sapiens
tgccacaaatttttt

SEQ ID NO: 1532342 - DNA, 15 bp, Homo sapiens
atgccacaaattttt

SEQ ID NO: 1532343 - DNA, 15 bp, Homo sapiens
gatgccacaaatttt

SEQ ID NO: 1532344 - DNA, 15 bp, Homo sapiens
tgatgccacaaattt

SEQ ID NO: 1532345 - DNA, 15 bp, Homo sapiens
ttgatgccacaaatt

SEQ ID NO: 1532346 - DNA, 15 bp, Homo sapiens
cttgatgccacaaat

SEQ ID NO: 1532347 - DNA, 15 bp, Homo sapiens
gcttgatgccacaaa

SEQ ID NO: 1532348 - DNA, 15 bp, Homo sapiens
cgcttgatgccacaa

SEQ ID NO: 1532349 - DNA, 15 bp, Homo sapiens
acgcttgatgccaca

SEQ ID NO: 1532350 - DNA, 15 bp, Homo sapiens
tacgcttgatgccac

SEQ ID NO: 1532351 - DNA, 15 bp, Homo sapiens
gtacgcttgatgcca

SEQ ID NO: 1532352 - DNA, 15 bp, Homo sapiens
ggtacgcttgatgcc

SEQ ID NO: 1532353 - DNA, 15 bp, Homo sapiens
aggtacgcttgatgc

SEQ ID NO: 1532354 - DNA, 15 bp, Homo sapiens
taggtacgcttgatg

SEQ ID NO: 1532355 - DNA, 15 bp, Homo sapiens
ataggtacgcttgat

SEQ ID NO: 1532356 - DNA, 15 bp, Homo sapiens
tataggtacgcttga

SEQ ID NO: 1532357 - DNA, 15 bp, Homo sapiens
atataggtacgcttg

SEQ ID NO: 1532358 - DNA, 15 bp, Homo sapiens
tatataggtacgctt

SEQ ID NO: 1532359 - DNA, 15 bp, Homo sapiens
atatataggtacgct

SEQ ID NO: 1532360 - DNA, 15 bp, Homo sapiens
gatatataggtacgc

SEQ ID NO: 1532361 - DNA, 15 bp, Homo sapiens
agatatataggtacg

SEQ ID NO: 1532362 - DNA, 15 bp, Homo sapiens
cagatatataggtac

SEQ ID NO: 1532363 - DNA, 15 bp, Homo sapiens
tcagatatataggta

SEQ ID NO: 1532364 - DNA, 15 bp, Homo sapiens
atcagatatataggt

SEQ ID NO: 1532365 - DNA, 15 bp, Homo sapiens
aatcagatatatagg

SEQ ID NO: 1532366 - DNA, 15 bp, Homo sapiens
aaatcagatatatag

SEQ ID NO: 1532367 - DNA, 15 bp, Homo sapiens
caaatcagatatata

SEQ ID NO: 1532368 - DNA, 15 bp, Homo sapiens
gcaaatcagatatat

SEQ ID NO: 1532369 - DNA, 15 bp, Homo sapiens
agcaaatcagatata

SEQ ID NO: 1532370 - DNA, 15 bp, Homo sapiens
tagcaaatcagatat

SEQ ID NO: 1532371 - DNA, 15 bp, Homo sapiens
atagcaaatcagata

SEQ ID NO: 1532372 - DNA, 15 bp, Homo sapiens
tatagcaaatcagat

SEQ ID NO: 1532373 - DNA, 15 bp, Homo sapiens
ctatagcaaatcaga

SEQ ID NO: 1532374 - DNA, 15 bp, Homo sapiens
cctatagcaaatcag

SEQ ID NO: 1532375 - DNA, 15 bp, Homo sapiens
tcctatagcaaatca

SEQ ID NO: 1532376 - DNA, 15 bp, Homo sapiens
atcctatagcaaatc

SEQ ID NO: 1532377 - DNA, 15 bp, Homo sapiens
catcctatagcaaat

SEQ ID NO: 1532378 - DNA, 15 bp, Homo sapiens
ccatcctatagcaaa

SEQ ID NO: 1532379 - DNA, 15 bp, Homo sapiens
cccatcctatagcaa

SEQ ID NO: 1532380 - DNA, 15 bp, Homo sapiens
tcccatcctatagca

SEQ ID NO: 1532381 - DNA, 15 bp, Homo sapiens
atcccatcctatagc

SEQ ID NO: 1532382 - DNA, 15 bp, Homo sapiens
tatcccatcctatag

SEQ ID NO: 1532383 - DNA, 15 bp, Homo sapiens
gtatcccatcctata

SEQ ID NO: 1532384 - DNA, 15 bp, Homo sapiens
ggtatcccatcctat

SEQ ID NO: 1532385 - DNA, 15 bp, Homo sapiens
aggtatcccatccta

SEQ ID NO: 1532386 - DNA, 15 bp, Homo sapiens
aaggtatcccatcct

SEQ ID NO: 1532387 - DNA, 15 bp, Homo sapiens
taaggtatcccatcc

SEQ ID NO: 1532388 - DNA, 15 bp, Homo sapiens
ataaggtatcccatc

SEQ ID NO: 1532389 - DNA, 15 bp, Homo sapiens
cataaggtatcccat

SEQ ID NO: 1532390 - DNA, 15 bp, Homo sapiens
gcataaggtatccca

SEQ ID NO: 1532391 - DNA, 15 bp, Homo sapiens
tgcataaggtatccc

SEQ ID NO: 1532392 - DNA, 15 bp, Homo sapiens
atgcataaggtatcc

SEQ ID NO: 1532393 - DNA, 15 bp, Homo sapiens
catgcataaggtatc

SEQ ID NO: 1532394 - DNA, 15 bp, Homo sapiens
tcatgcataaggtat

SEQ ID NO: 1532395 - DNA, 15 bp, Homo sapiens
ctcatgcataaggta

SEQ ID NO: 1532396 - DNA, 15 bp, Homo sapiens
tctcatgcataaggt

SEQ ID NO: 1532397 - DNA, 15 bp, Homo sapiens
ctctcatgcataagg

SEQ ID NO: 1532398 - DNA, 15 bp, Homo sapiens
actctcatgcataag

SEQ ID NO: 1532399 - DNA, 15 bp, Homo sapiens
aactctcatgcataa

SEQ ID NO: 1532400 - DNA, 15 bp, Homo sapiens
caactctcatgcata

SEQ ID NO: 1532401 - DNA, 15 bp, Homo sapiens
ccaactctcatgcat

SEQ ID NO: 1532402 - DNA, 15 bp, Homo sapiens
gccaactctcatgca

SEQ ID NO: 1532403 - DNA, 15 bp, Homo sapiens
ggccaactctcatgc

SEQ ID NO: 1532404 - DNA, 15 bp, Homo sapiens
gggccaactctcatg

SEQ ID NO: 1532405 - DNA, 15 bp, Homo sapiens
agggccaactctcat

SEQ ID NO: 1532406 - DNA, 15 bp, Homo sapiens
aagggccaactctca

SEQ ID NO: 1532407 - DNA, 15 bp, Homo sapiens
taagggccaactctc

SEQ ID NO: 1532408 - DNA, 15 bp, Homo sapiens
gtaagggccaactct

SEQ ID NO: 1532409 - DNA, 15 bp, Homo sapiens
agtaagggccaactc

SEQ ID NO: 1532410 - DNA, 15 bp, Homo sapiens
gagtaagggccaact

SEQ ID NO: 1532411 - DNA, 15 bp, Homo sapiens
ggagtaagggccaac

SEQ ID NO: 1532412 - DNA, 15 bp, Homo sapiens
aggagtaagggccaa

SEQ ID NO: 1532413 - DNA, 15 bp, Homo sapiens
aaggagtaagggcca

SEQ ID NO: 1532414 - DNA, 15 bp, Homo sapiens
aaaggagtaagggcc

SEQ ID NO: 1532415 - DNA, 15 bp, Homo sapiens
gaaaggagtaagggc

SEQ ID NO: 1532416 - DNA, 15 bp, Homo sapiens
agaaaggagtaaggg

SEQ ID NO: 1532417 - DNA, 15 bp, Homo sapiens
tagaaaggagtaagg

SEQ ID NO: 1532418 - DNA, 15 bp, Homo sapiens
atagaaaggagtaag

SEQ ID NO: 1532419 - DNA, 15 bp, Homo sapiens
catagaaaggagtaa

SEQ ID NO: 1532420 - DNA, 15 bp, Homo sapiens
acatagaaaggagta

SEQ ID NO: 1532421 - DNA, 15 bp, Homo sapiens
tacatagaaaggagt

SEQ ID NO: 1532422 - DNA, 15 bp, Homo sapiens
atacatagaaaggag

SEQ ID NO: 1532423 - DNA, 15 bp, Homo sapiens
aatacatagaaagga

SEQ ID NO: 1532424 - DNA, 15 bp, Homo sapiens
aaatacatagaaagg

SEQ ID NO: 1532425 - DNA, 15 bp, Homo sapiens
caaatacatagaaag

SEQ ID NO: 1532426 - DNA, 15 bp, Homo sapiens
acaaatacatagaaa

SEQ ID NO: 1532427 - DNA, 15 bp, Homo sapiens
gacaaatacatagaa

SEQ ID NO: 1532428 - DNA, 15 bp, Homo sapiens
agacaaatacataga

SEQ ID NO: 1532429 - DNA, 15 bp, Homo sapiens
cagacaaatacatag

SEQ ID NO: 1532430 - DNA, 15 bp, Homo sapiens
tcagacaaatacata

SEQ ID NO: 1532431 - DNA, 15 bp, Homo sapiens
ctcagacaaatacat

SEQ ID NO: 1532432 - DNA, 15 bp, Homo sapiens
tctcagacaaataca

SEQ ID NO: 1532433 - DNA, 15 bp, Homo sapiens
atctcagacaaatac

SEQ ID NO: 1532434 - DNA, 15 bp, Homo sapiens
aatctcagacaaata

SEQ ID NO: 1532435 - DNA, 15 bp, Homo sapiens
caatctcagacaaat

SEQ ID NO: 1532436 - DNA, 15 bp, Homo sapiens
ccaatctcagacaaa

SEQ ID NO: 1532437 - DNA, 15 bp, Homo sapiens
cccaatctcagacaa

SEQ ID NO: 1532438 - DNA, 15 bp, Homo sapiens
acccaatctcagaca

SEQ ID NO: 1532439 - DNA, 15 bp, Homo sapiens
aacccaatctcagac

SEQ ID NO: 1532440 - DNA, 15 bp, Homo sapiens
gaacccaatctcaga

SEQ ID NO: 1532441 - DNA, 15 bp, Homo sapiens
ggaacccaatctcag

SEQ ID NO: 1532442 - DNA, 15 bp, Homo sapiens
tggaacccaatctca

SEQ ID NO: 1532443 - DNA, 15 bp, Homo sapiens
atggaacccaatctc

SEQ ID NO: 1532444 - DNA, 15 bp, Homo sapiens
tatggaacccaatct

SEQ ID NO: 1532445 - DNA, 15 bp, Homo sapiens
atatggaacccaatc

SEQ ID NO: 1532446 - DNA, 15 bp, Homo sapiens
aatatggaacccaat

SEQ ID NO: 1532447 - DNA, 15 bp, Homo sapiens
aaatatggaacccaa

SEQ ID NO: 1532448 - DNA, 15 bp, Homo sapiens
aaaatatggaaccca

SEQ ID NO: 1532449 - DNA, 15 bp, Homo sapiens
taaaatatggaaccc

SEQ ID NO: 1532450 - DNA, 15 bp, Homo sapiens
ttaaaatatggaacc

SEQ ID NO: 1532451 - DNA, 15 bp, Homo sapiens
gttaaaatatggaac

SEQ ID NO: 1532452 - DNA, 15 bp, Homo sapiens
tgttaaaatatggaa

SEQ ID NO: 1532453 - DNA, 15 bp, Homo sapiens
atgttaaaatatgga

SEQ ID NO: 1532454 - DNA, 15 bp, Homo sapiens
aatgttaaaatatgg

SEQ ID NO: 1532455 - DNA, 15 bp, Homo sapiens
aaatgttaaaatatg

SEQ ID NO: 1532456 - DNA, 15 bp, Homo sapiens
caaatgttaaaatat

SEQ ID NO: 1532457 - DNA, 15 bp, Homo sapiens
gcaaatgttaaaata

SEQ ID NO: 1532458 - DNA, 15 bp, Homo sapiens
ggcaaatgttaaaat

SEQ ID NO: 1532459 - DNA, 15 bp, Homo sapiens
aggcaaatgttaaaa

SEQ ID NO: 1532460 - DNA, 15 bp, Homo sapiens
gaggcaaatgttaaa

SEQ ID NO: 1532461 - DNA, 15 bp, Homo sapiens
tgaggcaaatgttaa

SEQ ID NO: 1532462 - DNA, 15 bp, Homo sapiens
atgaggcaaatgtta

SEQ ID NO: 1532463 - DNA, 15 bp, Homo sapiens
aatgaggcaaatgtt

SEQ ID NO: 1532464 - DNA, 15 bp, Homo sapiens
taatgaggcaaatgt

SEQ ID NO: 1532465 - DNA, 15 bp, Homo sapiens
ttaatgaggcaaatg

SEQ ID NO: 1532466 - DNA, 15 bp, Homo sapiens
cttaatgaggcaaat

SEQ ID NO: 1532467 - DNA, 15 bp, Homo sapiens
tcttaatgaggcaaa

SEQ ID NO: 1532468 - DNA, 15 bp, Homo sapiens
ttcttaatgaggcaa

SEQ ID NO: 1532469 - DNA, 15 bp, Homo sapiens
attcttaatgaggca

SEQ ID NO: 1532470 - DNA, 15 bp, Homo sapiens
gattcttaatgaggc

SEQ ID NO: 1532471 - DNA, 15 bp, Homo sapiens
agattcttaatgagg

SEQ ID NO: 1532472 - DNA, 15 bp, Homo sapiens
cagattcttaatgag

SEQ ID NO: 1532473 - DNA, 15 bp, Homo sapiens
acagattcttaatga

SEQ ID NO: 1532474 - DNA, 15 bp, Homo sapiens
cacagattcttaatg

SEQ ID NO: 1532475 - DNA, 15 bp, Homo sapiens
tcacagattcttaat

SEQ ID NO: 1532476 - DNA, 15 bp, Homo sapiens
ttcacagattcttaa

SEQ ID NO: 1532477 - DNA, 15 bp, Homo sapiens
attcacagattctta

SEQ ID NO: 1532478 - DNA, 15 bp, Homo sapiens
aattcacagattctt

SEQ ID NO: 1532479 - DNA, 15 bp, Homo sapiens
aaattcacagattct

SEQ ID NO: 1532480 - DNA, 15 bp, Homo sapiens
aaaattcacagattc

SEQ ID NO: 1532481 - DNA, 15 bp, Homo sapiens
aaaaattcacagatt

SEQ ID NO: 1532482 - DNA, 15 bp, Homo sapiens
taaaaattcacagat

SEQ ID NO: 1532483 - DNA, 15 bp, Homo sapiens
ttaaaaattcacaga

SEQ ID NO: 1532484 - DNA, 15 bp, Homo sapiens
tttaaaaattcacag

SEQ ID NO: 1532485 - DNA, 15 bp, Homo sapiens
ttttaaaaattcaca

SEQ ID NO: 1532486 - DNA, 15 bp, Homo sapiens
attttaaaaattcac

SEQ ID NO: 1532487 - DNA, 15 bp, Homo sapiens
tattttaaaaattca

SEQ ID NO: 1532488 - DNA, 15 bp, Homo sapiens
gtattttaaaaattc

SEQ ID NO: 1532489 - DNA, 15 bp, Homo sapiens
ggtattttaaaaatt

SEQ ID NO: 1532490 - DNA, 15 bp, Homo sapiens
aggtattttaaaaat

SEQ ID NO: 1532491 - DNA, 15 bp, Homo sapiens
gaggtattttaaaaa

SEQ ID NO: 1532492 - DNA, 15 bp, Homo sapiens
agaggtattttaaaa

SEQ ID NO: 1532493 - DNA, 15 bp, Homo sapiens
tagaggtattttaaa

SEQ ID NO: 1532494 - DNA, 15 bp, Homo sapiens
gtagaggtattttaa

SEQ ID NO: 1532495 - DNA, 15 bp, Homo sapiens
agtagaggtatttta

SEQ ID NO: 1532496 - DNA, 15 bp, Homo sapiens
gagtagaggtatttt

SEQ ID NO: 1532497 - DNA, 15 bp, Homo sapiens
agagtagaggtattt

SEQ ID NO: 1532498 - DNA, 15 bp, Homo sapiens
aagagtagaggtatt

SEQ ID NO: 1532499 - DNA, 15 bp, Homo sapiens
aaagagtagaggtat

SEQ ID NO: 1532500 - DNA, 15 bp, Homo sapiens
taaagagtagaggta

SEQ ID NO: 1532501 - DNA, 15 bp, Homo sapiens
ataaagagtagaggt

SEQ ID NO: 1532502 - DNA, 15 bp, Homo sapiens
gataaagagtagagg

SEQ ID NO: 1532503 - DNA, 15 bp, Homo sapiens
ggataaagagtagag

SEQ ID NO: 1532504 - DNA, 15 bp, Homo sapiens
aggataaagagtaga

SEQ ID NO: 1532505 - DNA, 15 bp, Homo sapiens
aaggataaagagtag

SEQ ID NO: 1532506 - DNA, 15 bp, Homo sapiens
aaaggataaagagta

SEQ ID NO: 1532507 - DNA, 15 bp, Homo sapiens
aaaaggataaagagt

SEQ ID NO: 1532508 - DNA, 15 bp, Homo sapiens
aaaaaggataaagag

SEQ ID NO: 1532509 - DNA, 15 bp, Homo sapiens
taaaaaggataaaga

SEQ ID NO: 1532510 - DNA, 15 bp, Homo sapiens
gtaaaaaggataaag

SEQ ID NO: 1532511 - DNA, 15 bp, Homo sapiens
tgtaaaaaggataaa

SEQ ID NO: 1532512 - DNA, 15 bp, Homo sapiens
atgtaaaaaggataa

SEQ ID NO: 1532513 - DNA, 15 bp, Homo sapiens
catgtaaaaaggata

SEQ ID NO: 1532514 - DNA, 15 bp, Homo sapiens
acatgtaaaaaggat

SEQ ID NO: 1532515 - DNA, 15 bp, Homo sapiens
aacatgtaaaaagga

SEQ ID NO: 1532516 - DNA, 15 bp, Homo sapiens
caacatgtaaaaagg

SEQ ID NO: 1532517 - DNA, 15 bp, Homo sapiens
tcaacatgtaaaaag

SEQ ID NO: 1532518 - DNA, 15 bp, Homo sapiens
ttcaacatgtaaaaa

SEQ ID NO: 1532519 - DNA, 15 bp, Homo sapiens
tttcaacatgtaaaa

SEQ ID NO: 1532520 - DNA, 15 bp, Homo sapiens
ttttcaacatgtaaa

SEQ ID NO: 1532521 - DNA, 15 bp, Homo sapiens
attttcaacatgtaa

SEQ ID NO: 1532522 - DNA, 15 bp, Homo sapiens
tattttcaacatgta

SEQ ID NO: 1532523 - DNA, 15 bp, Homo sapiens
ttattttcaacatgt

SEQ ID NO: 1532524 - DNA, 15 bp, Homo sapiens
tttattttcaacatg

SEQ ID NO: 1532525 - DNA, 15 bp, Homo sapiens
atttattttcaacat

SEQ ID NO: 1532526 - DNA, 15 bp, Homo sapiens
aatttattttcaaca

SEQ ID NO: 1532527 - DNA, 15 bp, Homo sapiens
aaatttattttcaac

SEQ ID NO: 1532528 - DNA, 15 bp, Homo sapiens
caaatttattttcaa

SEQ ID NO: 1532529 - DNA, 15 bp, Homo sapiens
tcaaatttattttca

SEQ ID NO: 1532530 - DNA, 15 bp, Homo sapiens
gtcaaatttattttc

SEQ ID NO: 1532531 - DNA, 15 bp, Homo sapiens
ggtcaaatttatttt

SEQ ID NO: 1532532 - DNA, 15 bp, Homo sapiens
aggtcaaatttattt

SEQ ID NO: 1532533 - DNA, 15 bp, Homo sapiens
aaggtcaaatttatt

SEQ ID NO: 1532534 - DNA, 15 bp, Homo sapiens
gaaggtcaaatttat

SEQ ID NO: 1532535 - DNA, 15 bp, Homo sapiens
ggaaggtcaaattta

SEQ ID NO: 1532536 - DNA, 15 bp, Homo sapiens
aggaaggtcaaattt

SEQ ID NO: 1532537 - DNA, 15 bp, Homo sapiens
gaggaaggtcaaatt

SEQ ID NO: 1532538 - DNA, 15 bp, Homo sapiens
tgaggaaggtcaaat

SEQ ID NO: 1532539 - DNA, 15 bp, Homo sapiens
atgaggaaggtcaaa

SEQ ID NO: 1532540 - DNA, 15 bp, Homo sapiens
catgaggaaggtcaa

SEQ ID NO: 1532541 - DNA, 15 bp, Homo sapiens
ccatgaggaaggtca

SEQ ID NO: 1532542 - DNA, 15 bp, Homo sapiens
tccatgaggaaggtc

SEQ ID NO: 1532543 - DNA, 15 bp, Homo sapiens
atccatgaggaaggt

SEQ ID NO: 1532544 - DNA, 15 bp, Homo sapiens
tatccatgaggaagg

SEQ ID NO: 1532545 - DNA, 15 bp, Homo sapiens
ctatccatgaggaag

SEQ ID NO: 1532546 - DNA, 15 bp, Homo sapiens
actatccatgaggaa

SEQ ID NO: 1532547 - DNA, 15 bp, Homo sapiens
aactatccatgagga

SEQ ID NO: 1532548 - DNA, 15 bp, Homo sapiens
aaactatccatgagg

SEQ ID NO: 1532549 - DNA, 15 bp, Homo sapiens
aaaactatccatgag

SEQ ID NO: 1532550 - DNA, 15 bp, Homo sapiens
gaaaactatccatga

SEQ ID NO: 1532551 - DNA, 15 bp, Homo sapiens
agaaaactatccatg

SEQ ID NO: 1532552 - DNA, 15 bp, Homo sapiens
tagaaaactatccat

SEQ ID NO: 1532553 - DNA, 15 bp, Homo sapiens
atagaaaactatcca

SEQ ID NO: 1532554 - DNA, 15 bp, Homo sapiens
catagaaaactatcc

SEQ ID NO: 1532555 - DNA, 15 bp, Homo sapiens
tcatagaaaactatc

SEQ ID NO: 1532556 - DNA, 15 bp, Homo sapiens
atcatagaaaactat

SEQ ID NO: 1532557 - DNA, 15 bp, Homo sapiens
tatcatagaaaacta

SEQ ID NO: 1532558 - DNA, 15 bp, Homo sapiens
atatcatagaaaact

SEQ ID NO: 1532559 - DNA, 15 bp, Homo sapiens
aatatcatagaaaac

SEQ ID NO: 1532560 - DNA, 15 bp, Homo sapiens
taatatcatagaaaa

SEQ ID NO: 1532561 - DNA, 15 bp, Homo sapiens
ctaatatcatagaaa

SEQ ID NO: 1532562 - DNA, 15 bp, Homo sapiens
actaatatcatagaa

SEQ ID NO: 1532563 - DNA, 15 bp, Homo sapiens
gactaatatcataga

SEQ ID NO: 1532564 - DNA, 15 bp, Homo sapiens
ggactaatatcatag

SEQ ID NO: 1532565 - DNA, 15 bp, Homo sapiens
gggactaatatcata

SEQ ID NO: 1532566 - DNA, 15 bp, Homo sapiens
tgggactaatatcat

SEQ ID NO: 1532567 - DNA, 15 bp, Homo sapiens
gtgggactaatatca

SEQ ID NO: 1532568 - DNA, 15 bp, Homo sapiens
agtgggactaatatc

SEQ ID NO: 1532569 - DNA, 15 bp, Homo sapiens
tagtgggactaatat

SEQ ID NO: 1532570 - DNA, 15 bp, Homo sapiens
atagtgggactaata

SEQ ID NO: 1532571 - DNA, 15 bp, Homo sapiens
aatagtgggactaat

SEQ ID NO: 1532572 - DNA, 15 bp, Homo sapiens
aaatagtgggactaa

SEQ ID NO: 1532573 - DNA, 15 bp, Homo sapiens
aaaatagtgggacta

SEQ ID NO: 1532574 - DNA, 15 bp, Homo sapiens
aaaaatagtgggact

SEQ ID NO: 1532575 - DNA, 15 bp, Homo sapiens
aaaaaatagtgggac

SEQ ID NO: 1532576 - DNA, 15 bp, Homo sapiens
taaaaaatagtggga

SEQ ID NO: 1532577 - DNA, 15 bp, Homo sapiens
ttaaaaaatagtggg

SEQ ID NO: 1532578 - DNA, 15 bp, Homo sapiens
gttaaaaaatagtgg

SEQ ID NO: 1532579 - DNA, 15 bp, Homo sapiens
agttaaaaaatagtg

SEQ ID NO: 1532580 - DNA, 15 bp, Homo sapiens
gagttaaaaaatagt

SEQ ID NO: 1532581 - DNA, 15 bp, Homo sapiens
ggagttaaaaaatag

SEQ ID NO: 1532582 - DNA, 15 bp, Homo sapiens
aggagttaaaaaata

SEQ ID NO: 1532583 - DNA, 15 bp, Homo sapiens
caggagttaaaaaat

SEQ ID NO: 1532584 - DNA, 15 bp, Homo sapiens
gcaggagttaaaaaa

SEQ ID NO: 1532585 - DNA, 15 bp, Homo sapiens
ggcaggagttaaaaa

SEQ ID NO: 1532586 - DNA, 15 bp, Homo sapiens
aggcaggagttaaaa

SEQ ID NO: 1532587 - DNA, 15 bp, Homo sapiens
aaggcaggagttaaa

SEQ ID NO: 1532588 - DNA, 15 bp, Homo sapiens
aaaggcaggagttaa

SEQ ID NO: 1532589 - DNA, 15 bp, Homo sapiens
aaaaggcaggagtta

SEQ ID NO: 1532590 - DNA, 15 bp, Homo sapiens
aaaaaggcaggagtt

SEQ ID NO: 1532591 - DNA, 15 bp, Homo sapiens
taaaaaggcaggagt

SEQ ID NO: 1532592 - DNA, 15 bp, Homo sapiens
ataaaaaggcaggag

SEQ ID NO: 1532593 - DNA, 15 bp, Homo sapiens
tataaaaaggcagga

SEQ ID NO: 1532594 - DNA, 15 bp, Homo sapiens
atataaaaaggcagg

SEQ ID NO: 1532595 - DNA, 15 bp, Homo sapiens
aatataaaaaggcag

SEQ ID NO: 1532596 - DNA, 15 bp, Homo sapiens
gaatataaaaaggca

SEQ ID NO: 1532597 - DNA, 15 bp, Homo sapiens
ggaatataaaaaggc

SEQ ID NO: 1532598 - DNA, 15 bp, Homo sapiens
aggaatataaaaagg

SEQ ID NO: 1532599 - DNA, 15 bp, Homo sapiens
aaggaatataaaaag

SEQ ID NO: 1532600 - DNA, 15 bp, Homo sapiens
aaaggaatataaaaa

SEQ ID NO: 1532601 - DNA, 15 bp, Homo sapiens
gaaaggaatataaaa

SEQ ID NO: 1532602 - DNA, 15 bp, Homo sapiens
agaaaggaatataaa

SEQ ID NO: 1532603 - DNA, 15 bp, Homo sapiens
tagaaaggaatataa

SEQ ID NO: 1532604 - DNA, 15 bp, Homo sapiens
ttagaaaggaatata

SEQ ID NO: 1532605 - DNA, 15 bp, Homo sapiens
tttagaaaggaatat

SEQ ID NO: 1532606 - DNA, 15 bp, Homo sapiens
ttttagaaaggaata

SEQ ID NO: 1532607 - DNA, 15 bp, Homo sapiens
attttagaaaggaat

SEQ ID NO: 1532608 - DNA, 15 bp, Homo sapiens
aattttagaaaggaa

SEQ ID NO: 1532609 - DNA, 15 bp, Homo sapiens
caattttagaaagga

SEQ ID NO: 1532610 - DNA, 15 bp, Homo sapiens
acaattttagaaagg

SEQ ID NO: 1532611 - DNA, 15 bp, Homo sapiens
tacaattttagaaag

SEQ ID NO: 1532612 - DNA, 15 bp, Homo sapiens
atacaattttagaaa

SEQ ID NO: 1532613 - DNA, 15 bp, Homo sapiens
tatacaattttagaa

SEQ ID NO: 1532614 - DNA, 15 bp, Homo sapiens
ttatacaattttaga

SEQ ID NO: 1532615 - DNA, 15 bp, Homo sapiens
attatacaattttag

SEQ ID NO: 1532616 - DNA, 15 bp, Homo sapiens
aattatacaatttta

SEQ ID NO: 1532617 - DNA, 15 bp, Homo sapiens
aaattatacaatttt

SEQ ID NO: 1532618 - DNA, 15 bp, Homo sapiens
aaaattatacaattt

SEQ ID NO: 1532619 - DNA, 15 bp, Homo sapiens
gaaaattatacaatt

SEQ ID NO: 1532620 - DNA, 15 bp, Homo sapiens
tgaaaattatacaat

SEQ ID NO: 1532621 - DNA, 15 bp, Homo sapiens
atgaaaattatacaa

SEQ ID NO: 1532622 - DNA, 15 bp, Homo sapiens
catgaaaattataca

SEQ ID NO: 1532623 - DNA, 15 bp, Homo sapiens
acatgaaaattatac

SEQ ID NO: 1532624 - DNA, 15 bp, Homo sapiens
gacatgaaaattata

SEQ ID NO: 1532625 - DNA, 15 bp, Homo sapiens
tgacatgaaaattat

SEQ ID NO: 1532626 - DNA, 15 bp, Homo sapiens
gtgacatgaaaatta

SEQ ID NO: 1532627 - DNA, 15 bp, Homo sapiens
agtgacatgaaaatt

SEQ ID NO: 1532628 - DNA, 15 bp, Homo sapiens
aagtgacatgaaaat

SEQ ID NO: 1532629 - DNA, 15 bp, Homo sapiens
aaagtgacatgaaaa

SEQ ID NO: 1532630 - DNA, 15 bp, Homo sapiens
aaaagtgacatgaaa

SEQ ID NO: 1532631 - DNA, 15 bp, Homo sapiens
aaaaagtgacatgaa

SEQ ID NO: 1532632 - DNA, 15 bp, Homo sapiens
aaaaaagtgacatga

SEQ ID NO: 1532633 - DNA, 15 bp, Homo sapiens
taaaaaagtgacatg

SEQ ID NO: 1532634 - DNA, 15 bp, Homo sapiens
ttaaaaaagtgacat

SEQ ID NO: 1532635 - DNA, 15 bp, Homo sapiens
attaaaaaagtgaca

SEQ ID NO: 1532636 - DNA, 15 bp, Homo sapiens
tattaaaaaagtgac

SEQ ID NO: 1532637 - DNA, 15 bp, Homo sapiens
atattaaaaaagtga

SEQ ID NO: 1532638 - DNA, 15 bp, Homo sapiens
aatattaaaaaagtg

SEQ ID NO: 1532639 - DNA, 15 bp, Homo sapiens
taatattaaaaaagt

SEQ ID NO: 1532640 - DNA, 15 bp, Homo sapiens
ataatattaaaaaag

SEQ ID NO: 1532641 - DNA, 15 bp, Homo sapiens
tataatattaaaaaa

SEQ ID NO: 1532642 - DNA, 15 bp, Homo sapiens
ttataatattaaaaa

SEQ ID NO: 1532643 - DNA, 15 bp, Homo sapiens
tttataatattaaaa

SEQ ID NO: 1532644 - DNA, 15 bp, Homo sapiens
ttttataatattaaa

SEQ ID NO: 1532645 - DNA, 15 bp, Homo sapiens
tttttataatattaa

SEQ ID NO: 1532646 - DNA, 15 bp, Homo sapiens
ttttttataatatta

SEQ ID NO: 1532647 - DNA, 15 bp, Homo sapiens
attttttataatatt

SEQ ID NO: 1532648 - DNA, 15 bp, Homo sapiens
gattttttataatat

SEQ ID NO: 1532649 - DNA, 15 bp, Homo sapiens
agattttttataata

SEQ ID NO: 1532650 - DNA, 15 bp, Homo sapiens
cagattttttataat

SEQ ID NO: 1532651 - DNA, 15 bp, Homo sapiens
acagattttttataa

SEQ ID NO: 1532652 - DNA, 15 bp, Homo sapiens
aacagattttttata

SEQ ID NO: 1532653 - DNA, 15 bp, Homo sapiens
aaacagattttttat

SEQ ID NO: 1532654 - DNA, 15 bp, Homo sapiens
aaaacagatttttta

SEQ ID NO: 1532655 - DNA, 15 bp, Homo sapiens
taaaacagatttttt

SEQ ID NO: 1532656 - DNA, 15 bp, Homo sapiens
ataaaacagattttt

SEQ ID NO: 1532657 - DNA, 15 bp, Homo sapiens
cataaaacagatttt

SEQ ID NO: 1532658 - DNA, 15 bp, Homo sapiens
tcataaaacagattt

SEQ ID NO: 1532659 - DNA, 15 bp, Homo sapiens
gtcataaaacagatt

SEQ ID NO: 1532660 - DNA, 15 bp, Homo sapiens
agtcataaaacagat

SEQ ID NO: 1532661 - DNA, 15 bp, Homo sapiens
aagtcataaaacaga

SEQ ID NO: 1532662 - DNA, 15 bp, Homo sapiens
aaagtcataaaacag

SEQ ID NO: 1532663 - DNA, 15 bp, Homo sapiens
aaaagtcataaaaca

SEQ ID NO: 1532664 - DNA, 15 bp, Homo sapiens
taaaagtcataaaac

SEQ ID NO: 1532665 - DNA, 15 bp, Homo sapiens
ataaaagtcataaaa

SEQ ID NO: 1532666 - DNA, 15 bp, Homo sapiens
cataaaagtcataaa

SEQ ID NO: 1532667 - DNA, 15 bp, Homo sapiens
acataaaagtcataa

SEQ ID NO: 1532668 - DNA, 15 bp, Homo sapiens
gacataaaagtcata

SEQ ID NO: 1532669 - DNA, 15 bp, Homo sapiens
agacataaaagtcat

SEQ ID NO: 1532670 - DNA, 15 bp, Homo sapiens
aagacataaaagtca

SEQ ID NO: 1532671 - DNA, 15 bp, Homo sapiens
gaagacataaaagtc

SEQ ID NO: 1532672 - DNA, 15 bp, Homo sapiens
ggaagacataaaagt

SEQ ID NO: 1532673 - DNA, 15 bp, Homo sapiens
gggaagacataaaag

SEQ ID NO: 1532674 - DNA, 15 bp, Homo sapiens
ggggaagacataaaa

SEQ ID NO: 1532675 - DNA, 15 bp, Homo sapiens
gggggaagacataaa

SEQ ID NO: 1532676 - DNA, 15 bp, Homo sapiens
tgggggaagacataa

SEQ ID NO: 1532677 - DNA, 15 bp, Homo sapiens
ttgggggaagacata

SEQ ID NO: 1532678 - DNA, 15 bp, Homo sapiens
gttgggggaagacat

SEQ ID NO: 1532679 - DNA, 15 bp, Homo sapiens
tgttgggggaagaca

SEQ ID NO: 1532680 - DNA, 15 bp, Homo sapiens
atgttgggggaagac

SEQ ID NO: 1532681 - DNA, 15 bp, Homo sapiens
catgttgggggaaga

SEQ ID NO: 1532682 - DNA, 15 bp, Homo sapiens
ccatgttgggggaag

SEQ ID NO: 1532683 - DNA, 15 bp, Homo sapiens
accatgttgggggaa

SEQ ID NO: 1532684 - DNA, 15 bp, Homo sapiens
caccatgttggggga

SEQ ID NO: 1532685 - DNA, 15 bp, Homo sapiens
tcaccatgttggggg

SEQ ID NO: 1532686 - DNA, 15 bp, Homo sapiens
atcaccatgttgggg

SEQ ID NO: 1532687 - DNA, 15 bp, Homo sapiens
aatcaccatgttggg

SEQ ID NO: 1532688 - DNA, 15 bp, Homo sapiens
taatcaccatgttgg

SEQ ID NO: 1532689 - DNA, 15 bp, Homo sapiens
ataatcaccatgttg

SEQ ID NO: 1532690 - DNA, 15 bp, Homo sapiens
aataatcaccatgtt

SEQ ID NO: 1532691 - DNA, 15 bp, Homo sapiens
taataatcaccatgt

SEQ ID NO: 1532692 - DNA, 15 bp, Homo sapiens
ataataatcaccatg

SEQ ID NO: 1532693 - DNA, 15 bp, Homo sapiens
cataataatcaccat

SEQ ID NO: 1532694 - DNA, 15 bp, Homo sapiens
acataataatcacca

SEQ ID NO: 1532695 - DNA, 15 bp, Homo sapiens
aacataataatcacc

SEQ ID NO: 1532696 - DNA, 15 bp, Homo sapiens
aaacataataatcac

SEQ ID NO: 1532697 - DNA, 15 bp, Homo sapiens
taaacataataatca

SEQ ID NO: 1532698 - DNA, 15 bp, Homo sapiens
ttaaacataataatc

SEQ ID NO: 1532699 - DNA, 15 bp, Homo sapiens
attaaacataataat

SEQ ID NO: 1532700 - DNA, 15 bp, Homo sapiens
gattaaacataataa

SEQ ID NO: 1532701 - DNA, 15 bp, Homo sapiens
tgattaaacataata

SEQ ID NO: 1532702 - DNA, 15 bp, Homo sapiens
ctgattaaacataat

SEQ ID NO: 1532703 - DNA, 15 bp, Homo sapiens
gctgattaaacataa

SEQ ID NO: 1532704 - DNA, 15 bp, Homo sapiens
agctgattaaacata

SEQ ID NO: 1532705 - DNA, 15 bp, Homo sapiens
aagctgattaaacat

SEQ ID NO: 1532706 - DNA, 15 bp, Homo sapiens
aaagctgattaaaca

SEQ ID NO: 1532707 - DNA, 15 bp, Homo sapiens
aaaagctgattaaac

SEQ ID NO: 1532708 - DNA, 15 bp, Homo sapiens
gaaaagctgattaaa

SEQ ID NO: 1532709 - DNA, 15 bp, Homo sapiens
tgaaaagctgattaa

SEQ ID NO: 1532710 - DNA, 15 bp, Homo sapiens
ttgaaaagctgatta

SEQ ID NO: 1532711 - DNA, 15 bp, Homo sapiens
tttgaaaagctgatt

SEQ ID NO: 1532712 - DNA, 15 bp, Homo sapiens
atttgaaaagctgat

SEQ ID NO: 1532713 - DNA, 15 bp, Homo sapiens
aatttgaaaagctga

SEQ ID NO: 1532714 - DNA, 15 bp, Homo sapiens
aaatttgaaaagctg

SEQ ID NO: 1532715 - DNA, 15 bp, Homo sapiens
taaatttgaaaagct

SEQ ID NO: 1532716 - DNA, 15 bp, Homo sapiens
ataaatttgaaaagc

SEQ ID NO: 1532717 - DNA, 15 bp, Homo sapiens
gataaatttgaaaag

SEQ ID NO: 1532718 - DNA, 15 bp, Homo sapiens
tgataaatttgaaaa

SEQ ID NO: 1532719 - DNA, 15 bp, Homo sapiens
ttgataaatttgaaa

SEQ ID NO: 1532720 - DNA, 15 bp, Homo sapiens
gttgataaatttgaa

SEQ ID NO: 1532721 - DNA, 15 bp, Homo sapiens
ggttgataaatttga

SEQ ID NO: 1532722 - DNA, 15 bp, Homo sapiens
tggttgataaatttg

SEQ ID NO: 1532723 - DNA, 15 bp, Homo sapiens
gtggttgataaattt

SEQ ID NO: 1532724 - DNA, 15 bp, Homo sapiens
agtggttgataaatt

SEQ ID NO: 1532725 - DNA, 15 bp, Homo sapiens
aagtggttgataaat

SEQ ID NO: 1532726 - DNA, 15 bp, Homo sapiens
taagtggttgataaa

SEQ ID NO: 1532727 - DNA, 15 bp, Homo sapiens
ttaagtggttgataa

SEQ ID NO: 1532728 - DNA, 15 bp, Homo sapiens
cttaagtggttgata

SEQ ID NO: 1532729 - DNA, 15 bp, Homo sapiens
acttaagtggttgat

SEQ ID NO: 1532730 - DNA, 15 bp, Homo sapiens
cacttaagtggttga

SEQ ID NO: 1532731 - DNA, 15 bp, Homo sapiens
acacttaagtggttg

SEQ ID NO: 1532732 - DNA, 15 bp, Homo sapiens
aacacttaagtggtt

SEQ ID NO: 1532733 - DNA, 15 bp, Homo sapiens
gaacacttaagtggt

SEQ ID NO: 1532734 - DNA, 15 bp, Homo sapiens
ggaacacttaagtgg

SEQ ID NO: 1532735 - DNA, 15 bp, Homo sapiens
cggaacacttaagtg

SEQ ID NO: 1532736 - DNA, 15 bp, Homo sapiens
acggaacacttaagt

SEQ ID NO: 1532737 - DNA, 15 bp, Homo sapiens
gacggaacacttaag

SEQ ID NO: 1532738 - DNA, 15 bp, Homo sapiens
agacggaacacttaa

SEQ ID NO: 1532739 - DNA, 15 bp, Homo sapiens
aagacggaacactta

SEQ ID NO: 1532740 - DNA, 15 bp, Homo sapiens
gaagacggaacactt

SEQ ID NO: 1532741 - DNA, 15 bp, Homo sapiens
ggaagacggaacact

SEQ ID NO: 1532742 - DNA, 15 bp, Homo sapiens
gggaagacggaacac

SEQ ID NO: 1532743 - DNA, 15 bp, Homo sapiens
agggaagacggaaca

SEQ ID NO: 1532744 - DNA, 15 bp, Homo sapiens
aagggaagacggaac

SEQ ID NO: 1532745 - DNA, 15 bp, Homo sapiens
aaagggaagacggaa

SEQ ID NO: 1532746 - DNA, 15 bp, Homo sapiens
aaaagggaagacgga

SEQ ID NO: 1532747 - DNA, 15 bp, Homo sapiens
taaaagggaagacgg

SEQ ID NO: 1532748 - DNA, 15 bp, Homo sapiens
ctaaaagggaagacg

SEQ ID NO: 1532749 - DNA, 15 bp, Homo sapiens
cctaaaagggaagac

SEQ ID NO: 1532750 - DNA, 15 bp, Homo sapiens
tcctaaaagggaaga

SEQ ID NO: 1532751 - DNA, 15 bp, Homo sapiens
atcctaaaagggaag

SEQ ID NO: 1532752 - DNA, 15 bp, Homo sapiens
catcctaaaagggaa

SEQ ID NO: 1532753 - DNA, 15 bp, Homo sapiens
acatcctaaaaggga

SEQ ID NO: 1532754 - DNA, 15 bp, Homo sapiens
tacatcctaaaaggg

SEQ ID NO: 1532755 - DNA, 15 bp, Homo sapiens
atacatcctaaaagg

SEQ ID NO: 1532756 - DNA, 15 bp, Homo sapiens
tatacatcctaaaag

SEQ ID NO: 1532757 - DNA, 15 bp, Homo sapiens
ctatacatcctaaaa

SEQ ID NO: 1532758 - DNA, 15 bp, Homo sapiens
tctatacatcctaaa

SEQ ID NO: 1532759 - DNA, 15 bp, Homo sapiens
ttctatacatcctaa

SEQ ID NO: 1532760 - DNA, 15 bp, Homo sapiens
cttctatacatccta

SEQ ID NO: 1532761 - DNA, 15 bp, Homo sapiens
acttctatacatcct

SEQ ID NO: 1532762 - DNA, 15 bp, Homo sapiens
tacttctatacatcc

SEQ ID NO: 1532763 - DNA, 15 bp, Homo sapiens
gtacttctatacatc

SEQ ID NO: 1532764 - DNA, 15 bp, Homo sapiens
agtacttctatacat

SEQ ID NO: 1532765 - DNA, 15 bp, Homo sapiens
cagtacttctataca

SEQ ID NO: 1532766 - DNA, 15 bp, Homo sapiens
tcagtacttctatac

SEQ ID NO: 1532767 - DNA, 15 bp, Homo sapiens
ttcagtacttctata

SEQ ID NO: 1532768 - DNA, 15 bp, Homo sapiens
tttcagtacttctat

SEQ ID NO: 1532769 - DNA, 15 bp, Homo sapiens
atttcagtacttcta

SEQ ID NO: 1532770 - DNA, 15 bp, Homo sapiens
tatttcagtacttct

SEQ ID NO: 1532771 - DNA, 15 bp, Homo sapiens
gtatttcagtacttc

SEQ ID NO: 1532772 - DNA, 15 bp, Homo sapiens
cgtatttcagtactt

SEQ ID NO: 1532773 - DNA, 15 bp, Homo sapiens
tcgtatttcagtact

SEQ ID NO: 1532774 - DNA, 15 bp, Homo sapiens
atcgtatttcagtac

SEQ ID NO: 1532775 - DNA, 15 bp, Homo sapiens
aatcgtatttcagta

SEQ ID NO: 1532776 - DNA, 15 bp, Homo sapiens
taatcgtatttcagt

SEQ ID NO: 1532777 - DNA, 15 bp, Homo sapiens
ataatcgtatttcag

SEQ ID NO: 1532778 - DNA, 15 bp, Homo sapiens
aataatcgtatttca

SEQ ID NO: 1532779 - DNA, 15 bp, Homo sapiens
aaataatcgtatttc

SEQ ID NO: 1532780 - DNA, 15 bp, Homo sapiens
aaaataatcgtattt

SEQ ID NO: 1532781 - DNA, 15 bp, Homo sapiens
aaaaataatcgtatt

SEQ ID NO: 1532782 - DNA, 15 bp, Homo sapiens
aaaaaataatcgtat

SEQ ID NO: 1532783 - DNA, 15 bp, Homo sapiens
gaaaaaataatcgta

SEQ ID NO: 1532784 - DNA, 15 bp, Homo sapiens
agaaaaaataatcgt

SEQ ID NO: 1532785 - DNA, 15 bp, Homo sapiens
aagaaaaaataatcg

SEQ ID NO: 1532786 - DNA, 15 bp, Homo sapiens
aaagaaaaaataatc

SEQ ID NO: 1532787 - DNA, 15 bp, Homo sapiens
taaagaaaaaataat

SEQ ID NO: 1532788 - DNA, 15 bp, Homo sapiens
ataaagaaaaaataa

SEQ ID NO: 1532789 - DNA, 15 bp, Homo sapiens
gataaagaaaaaata

SEQ ID NO: 1532790 - DNA, 15 bp, Homo sapiens
agataaagaaaaaat

SEQ ID NO: 1532791 - DNA, 15 bp, Homo sapiens
aagataaagaaaaaa

SEQ ID NO: 1532792 - DNA, 15 bp, Homo sapiens
aaagataaagaaaaa

SEQ ID NO: 1532793 - DNA, 15 bp, Homo sapiens
gaaagataaagaaaa

SEQ ID NO: 1532794 - DNA, 15 bp, Homo sapiens
agaaagataaagaaa

SEQ ID NO: 1532795 - DNA, 15 bp, Homo sapiens
cagaaagataaagaa

SEQ ID NO: 1532796 - DNA, 15 bp, Homo sapiens
tcagaaagataaaga

SEQ ID NO: 1532797 - DNA, 15 bp, Homo sapiens
atcagaaagataaag

SEQ ID NO: 1532798 - DNA, 15 bp, Homo sapiens
tatcagaaagataaa

SEQ ID NO: 1532799 - DNA, 15 bp, Homo sapiens
gtatcagaaagataa

SEQ ID NO: 1532800 - DNA, 15 bp, Homo sapiens
tgtatcagaaagata

SEQ ID NO: 1532801 - DNA, 15 bp, Homo sapiens
ttgtatcagaaagat

SEQ ID NO: 1532802 - DNA, 15 bp, Homo sapiens
attgtatcagaaaga

SEQ ID NO: 1532803 - DNA, 15 bp, Homo sapiens
cattgtatcagaaag

SEQ ID NO: 1532804 - DNA, 15 bp, Homo sapiens
tcattgtatcagaaa

SEQ ID NO: 1532805 - DNA, 15 bp, Homo sapiens
atcattgtatcagaa

SEQ ID NO: 1532806 - DNA, 15 bp, Homo sapiens
gatcattgtatcaga

SEQ ID NO: 1532807 - DNA, 15 bp, Homo sapiens
tgatcattgtatcag

SEQ ID NO: 1532808 - DNA, 15 bp, Homo sapiens
atgatcattgtatca

SEQ ID NO: 1532809 - DNA, 15 bp, Homo sapiens
aatgatcattgtatc

SEQ ID NO: 1532810 - DNA, 15 bp, Homo sapiens
aaatgatcattgtat

SEQ ID NO: 1532811 - DNA, 15 bp, Homo sapiens
caaatgatcattgta

SEQ ID NO: 1532812 - DNA, 15 bp, Homo sapiens
tcaaatgatcattgt

SEQ ID NO: 1532813 - DNA, 15 bp, Homo sapiens
gtcaaatgatcattg

SEQ ID NO: 1532814 - DNA, 15 bp, Homo sapiens
ggtcaaatgatcatt

SEQ ID NO: 1532815 - DNA, 15 bp, Homo sapiens
tggtcaaatgatcat

SEQ ID NO: 1532816 - DNA, 15 bp, Homo sapiens
ttggtcaaatgatca

SEQ ID NO: 1532817 - DNA, 15 bp, Homo sapiens
cttggtcaaatgatc

SEQ ID NO: 1532818 - DNA, 15 bp, Homo sapiens
ccttggtcaaatgat

SEQ ID NO: 1532819 - DNA, 15 bp, Homo sapiens
gccttggtcaaatga

SEQ ID NO: 1532820 - DNA, 15 bp, Homo sapiens
agccttggtcaaatg

SEQ ID NO: 1532821 - DNA, 15 bp, Homo sapiens
tagccttggtcaaat

SEQ ID NO: 1532822 - DNA, 15 bp, Homo sapiens
gtagccttggtcaaa

SEQ ID NO: 1532823 - DNA, 15 bp, Homo sapiens
tgtagccttggtcaa

SEQ ID NO: 1532824 - DNA, 15 bp, Homo sapiens
gtgtagccttggtca

SEQ ID NO: 1532825 - DNA, 15 bp, Homo sapiens
tgtgtagccttggtc

SEQ ID NO: 1532826 - DNA, 15 bp, Homo sapiens
gtgtgtagccttggt

SEQ ID NO: 1532827 - DNA, 15 bp, Homo sapiens
tgtgtgtagccttgg

SEQ ID NO: 1532828 - DNA, 15 bp, Homo sapiens
ttgtgtgtagccttg

SEQ ID NO: 1532829 - DNA, 15 bp, Homo sapiens
cttgtgtgtagcctt

SEQ ID NO: 1532830 - DNA, 15 bp, Homo sapiens
gcttgtgtgtagcct

SEQ ID NO: 1532831 - DNA, 15 bp, Homo sapiens
ggcttgtgtgtagcc

SEQ ID NO: 1532832 - DNA, 15 bp, Homo sapiens
tggcttgtgtgtagc

SEQ ID NO: 1532833 - DNA, 15 bp, Homo sapiens
ctggcttgtgtgtag

SEQ ID NO: 1532834 - DNA, 15 bp, Homo sapiens
cctggcttgtgtgta

SEQ ID NO: 1532835 - DNA, 15 bp, Homo sapiens
tcctggcttgtgtgt

SEQ ID NO: 1532836 - DNA, 15 bp, Homo sapiens
atcctggcttgtgtg

SEQ ID NO: 1532837 - DNA, 15 bp, Homo sapiens
tatcctggcttgtgt

SEQ ID NO: 1532838 - DNA, 15 bp, Homo sapiens
gtatcctggcttgtg

SEQ ID NO: 1532839 - DNA, 15 bp, Homo sapiens
tgtatcctggcttgt

SEQ ID NO: 1532840 - DNA, 15 bp, Homo sapiens
atgtatcctggcttg

SEQ ID NO: 1532841 - DNA, 15 bp, Homo sapiens
aatgtatcctggctt

SEQ ID NO: 1532842 - DNA, 15 bp, Homo sapiens
aaatgtatcctggct

SEQ ID NO: 1532843 - DNA, 15 bp, Homo sapiens
caaatgtatcctggc

SEQ ID NO: 1532844 - DNA, 15 bp, Homo sapiens
ccaaatgtatcctgg

SEQ ID NO: 1532845 - DNA, 15 bp, Homo sapiens
tccaaatgtatcctg

SEQ ID NO: 1532846 - DNA, 15 bp, Homo sapiens
ttccaaatgtatcct

SEQ ID NO: 1532847 - DNA, 15 bp, Homo sapiens
tttccaaatgtatcc

SEQ ID NO: 1532848 - DNA, 15 bp, Homo sapiens
atttccaaatgtatc

SEQ ID NO: 1532849 - DNA, 15 bp, Homo sapiens
aatttccaaatgtat

SEQ ID NO: 1532850 - DNA, 15 bp, Homo sapiens
taatttccaaatgta

SEQ ID NO: 1532851 - DNA, 15 bp, Homo sapiens
ctaatttccaaatgt

SEQ ID NO: 1532852 - DNA, 15 bp, Homo sapiens
gctaatttccaaatg

SEQ ID NO: 1532853 - DNA, 15 bp, Homo sapiens
tgctaatttccaaat

SEQ ID NO: 1532854 - DNA, 15 bp, Homo sapiens
atgctaatttccaaa

SEQ ID NO: 1532855 - DNA, 15 bp, Homo sapiens
gatgctaatttccaa

SEQ ID NO: 1532856 - DNA, 15 bp, Homo sapiens
agatgctaatttcca

SEQ ID NO: 1532857 - DNA, 15 bp, Homo sapiens
aagatgctaatttcc

SEQ ID NO: 1532858 - DNA, 15 bp, Homo sapiens
taagatgctaatttc

SEQ ID NO: 1532859 - DNA, 15 bp, Homo sapiens
ataagatgctaattt

SEQ ID NO: 1532860 - DNA, 15 bp, Homo sapiens
tataagatgctaatt

SEQ ID NO: 1532861 - DNA, 15 bp, Homo sapiens
gtataagatgctaat

SEQ ID NO: 1532862 - DNA, 15 bp, Homo sapiens
agtataagatgctaa

SEQ ID NO: 1532863 - DNA, 15 bp, Homo sapiens
aagtataagatgcta

SEQ ID NO: 1532864 - DNA, 15 bp, Homo sapiens
gaagtataagatgct

SEQ ID NO: 1532865 - DNA, 15 bp, Homo sapiens
tgaagtataagatgc

SEQ ID NO: 1532866 - DNA, 15 bp, Homo sapiens
ctgaagtataagatg

SEQ ID NO: 1532867 - DNA, 15 bp, Homo sapiens
tctgaagtataagat

SEQ ID NO: 1532868 - DNA, 15 bp, Homo sapiens
atctgaagtataaga

SEQ ID NO: 1532869 - DNA, 15 bp, Homo sapiens
aatctgaagtataag

SEQ ID NO: 1532870 - DNA, 15 bp, Homo sapiens
taatctgaagtataa

SEQ ID NO: 1532871 - DNA, 15 bp, Homo sapiens
ataatctgaagtata

SEQ ID NO: 1532872 - DNA, 15 bp, Homo sapiens
gataatctgaagtat

SEQ ID NO: 1532873 - DNA, 15 bp, Homo sapiens
tgataatctgaagta

SEQ ID NO: 1532874 - DNA, 15 bp, Homo sapiens
ctgataatctgaagt

SEQ ID NO: 1532875 - DNA, 15 bp, Homo sapiens
actgataatctgaag

SEQ ID NO: 1532876 - DNA, 15 bp, Homo sapiens
aactgataatctgaa

SEQ ID NO: 1532877 - DNA, 15 bp, Homo sapiens
gaactgataatctga

SEQ ID NO: 1532878 - DNA, 15 bp, Homo sapiens
ggaactgataatctg

SEQ ID NO: 1532879 - DNA, 15 bp, Homo sapiens
aggaactgataatct

SEQ ID NO: 1532880 - DNA, 15 bp, Homo sapiens
taggaactgataatc

SEQ ID NO: 1532881 - DNA, 15 bp, Homo sapiens
ataggaactgataat

SEQ ID NO: 1532882 - DNA, 15 bp, Homo sapiens
cataggaactgataa

SEQ ID NO: 1532883 - DNA, 15 bp, Homo sapiens
acataggaactgata

SEQ ID NO: 1532884 - DNA, 15 bp, Homo sapiens
tacataggaactgat

SEQ ID NO: 1532885 - DNA, 15 bp, Homo sapiens
ttacataggaactga

SEQ ID NO: 1532886 - DNA, 15 bp, Homo sapiens
tttacataggaactg

SEQ ID NO: 1532887 - DNA, 15 bp, Homo sapiens
ttttacataggaact

SEQ ID NO: 1532888 - DNA, 15 bp, Homo sapiens
attttacataggaac

SEQ ID NO: 1532889 - DNA, 15 bp, Homo sapiens
tattttacataggaa

SEQ ID NO: 1532890 - DNA, 15 bp, Homo sapiens
ttattttacatagga

SEQ ID NO: 1532891 - DNA, 15 bp, Homo sapiens
tttattttacatagg

SEQ ID NO: 1532892 - DNA, 15 bp, Homo sapiens
gtttattttacatag

SEQ ID NO: 1532893 - DNA, 15 bp, Homo sapiens
tgtttattttacata

SEQ ID NO: 1532894 - DNA, 15 bp, Homo sapiens
atgtttattttacat

SEQ ID NO: 1532895 - DNA, 15 bp, Homo sapiens
catgtttattttaca

SEQ ID NO: 1532896 - DNA, 15 bp, Homo sapiens
acatgtttattttac

SEQ ID NO: 1532897 - DNA, 15 bp, Homo sapiens
aacatgtttatttta

SEQ ID NO: 1532898 - DNA, 15 bp, Homo sapiens
aaacatgtttatttt

SEQ ID NO: 1532899 - DNA, 15 bp, Homo sapiens
aaaacatgtttattt

SEQ ID NO: 1532900 - DNA, 15 bp, Homo sapiens
taaaacatgtttatt

SEQ ID NO: 1532901 - DNA, 15 bp, Homo sapiens
ataaaacatgtttat

SEQ ID NO: 1532902 - DNA, 15 bp, Homo sapiens
aataaaacatgttta

SEQ ID NO: 1532903 - DNA, 15 bp, Homo sapiens
aaataaaacatgttt

SEQ ID NO: 1532904 - DNA, 15 bp, Homo sapiens
tataaaataaaacat

SEQ ID NO: 1532905 - DNA, 15 bp, Homo sapiens
aaatatataaaataa

SEQ ID NO: 1532906 - DNA, 15 bp, Homo sapiens
caaatatataaaata

SEQ ID NO: 1532907 - DNA, 15 bp, Homo sapiens
ccaaatatataaaat

SEQ ID NO: 1532908 - DNA, 15 bp, Homo sapiens
tccaaatatataaaa

SEQ ID NO: 1532909 - DNA, 15 bp, Homo sapiens
ctccaaatatataaa

SEQ ID NO: 1532910 - DNA, 15 bp, Homo sapiens
actccaaatatataa

SEQ ID NO: 1532911 - DNA, 15 bp, Homo sapiens
aactccaaatatata

SEQ ID NO: 1532912 - DNA, 15 bp, Homo sapiens
taactccaaatatat

SEQ ID NO: 1532913 - DNA, 15 bp, Homo sapiens
ttaactccaaatata

SEQ ID NO: 1532914 - DNA, 15 bp, Homo sapiens
tttaactccaaatat

SEQ ID NO: 1532915 - DNA, 15 bp, Homo sapiens
ctttaactccaaata

SEQ ID NO: 1532916 - DNA, 15 bp, Homo sapiens
actttaactccaaat

SEQ ID NO: 1532917 - DNA, 15 bp, Homo sapiens
aactttaactccaaa

SEQ ID NO: 1532918 - DNA, 15 bp, Homo sapiens
aaactttaactccaa

SEQ ID NO: 1532919 - DNA, 15 bp, Homo sapiens
aaaactttaactcca

SEQ ID NO: 1532920 - DNA, 15 bp, Homo sapiens
aaaaactttaactcc

SEQ ID NO: 1532921 - DNA, 15 bp, Homo sapiens
aaaaaactttaactc

SEQ ID NO: 1532922 - DNA, 15 bp, Homo sapiens
aaaaaaactttaact

SEQ ID NO: 1532923 - DNA, 15 bp, Homo sapiens
aaaaaaaactttaac

SEQ ID NO: 1532924 - DNA, 15 bp, Homo sapiens
aagaaaaaaaacttt

SEQ ID NO: 1532925 - DNA, 15 bp, Homo sapiens
aaagaaaaaaaactt

SEQ ID NO: 1532926 - DNA, 15 bp, Homo sapiens
taaagaaaaaaaact

SEQ ID NO: 1532927 - DNA, 15 bp, Homo sapiens
ataaagaaaaaaaac

SEQ ID NO: 1532928 - DNA, 15 bp, Homo sapiens
cataaagaaaaaaaa

SEQ ID NO: 1532929 - DNA, 15 bp, Homo sapiens
gcataaagaaaaaaa

SEQ ID NO: 1532930 - DNA, 15 bp, Homo sapiens
tgcataaagaaaaaa

SEQ ID NO: 1532931 - DNA, 15 bp, Homo sapiens
ttgcataaagaaaaa

SEQ ID NO: 1532932 - DNA, 15 bp, Homo sapiens
gttgcataaagaaaa

SEQ ID NO: 1532933 - DNA, 15 bp, Homo sapiens
ggttgcataaagaaa

SEQ ID NO: 1532934 - DNA, 15 bp, Homo sapiens
aggttgcataaagaa

SEQ ID NO: 1532935 - DNA, 15 bp, Homo sapiens
aaggttgcataaaga

SEQ ID NO: 1532936 - DNA, 15 bp, Homo sapiens
caaggttgcataaag

SEQ ID NO: 1532937 - DNA, 15 bp, Homo sapiens
ccaaggttgcataaa

SEQ ID NO: 1532938 - DNA, 15 bp, Homo sapiens
cccaaggttgcataa

SEQ ID NO: 1532939 - DNA, 15 bp, Homo sapiens
acccaaggttgcata

SEQ ID NO: 1532940 - DNA, 15 bp, Homo sapiens
cacccaaggttgcat

SEQ ID NO: 1532941 - DNA, 15 bp, Homo sapiens
ccacccaaggttgca

SEQ ID NO: 1532942 - DNA, 15 bp, Homo sapiens
accacccaaggttgc

SEQ ID NO: 1532943 - DNA, 15 bp, Homo sapiens
taccacccaaggttg

SEQ ID NO: 1532944 - DNA, 15 bp, Homo sapiens
ttaccacccaaggtt

SEQ ID NO: 1532945 - DNA, 15 bp, Homo sapiens
cttaccacccaaggt

SEQ ID NO: 1532946 - DNA, 15 bp, Homo sapiens
acttaccacccaagg

SEQ ID NO: 1532947 - DNA, 15 bp, Homo sapiens
cacttaccacccaag

SEQ ID NO: 1532948 - DNA, 15 bp, Homo sapiens
ccacttaccacccaa

SEQ ID NO: 1532949 - DNA, 15 bp, Homo sapiens
tccacttaccaccca

SEQ ID NO: 1532950 - DNA, 15 bp, Homo sapiens
atccacttaccaccc

SEQ ID NO: 1532951 - DNA, 15 bp, Homo sapiens
tatccacttaccacc

SEQ ID NO: 1532952 - DNA, 15 bp, Homo sapiens
atatccacttaccac

SEQ ID NO: 1532953 - DNA, 15 bp, Homo sapiens
catatccacttacca

SEQ ID NO: 1532954 - DNA, 15 bp, Homo sapiens
tcatatccacttacc

SEQ ID NO: 1532955 - DNA, 15 bp, Homo sapiens
ctcatatccacttac

SEQ ID NO: 1532956 - DNA, 15 bp, Homo sapiens
actcatatccactta

SEQ ID NO: 1532957 - DNA, 15 bp, Homo sapiens
tactcatatccactt

SEQ ID NO: 1532958 - DNA, 15 bp, Homo sapiens
atactcatatccact

SEQ ID NO: 1532959 - DNA, 15 bp, Homo sapiens
aatactcatatccac

SEQ ID NO: 1532960 - DNA, 15 bp, Homo sapiens
caatactcatatcca

SEQ ID NO: 1532961 - DNA, 15 bp, Homo sapiens
acaatactcatatcc

SEQ ID NO: 1532962 - DNA, 15 bp, Homo sapiens
aacaatactcatatc

SEQ ID NO: 1532963 - DNA, 15 bp, Homo sapiens
aaacaatactcatat

SEQ ID NO: 1532964 - DNA, 15 bp, Homo sapiens
aaaacaatactcata

SEQ ID NO: 1532965 - DNA, 15 bp, Homo sapiens
aaaaacaatactcat

SEQ ID NO: 1532966 - DNA, 15 bp, Homo sapiens
aaaaaacaatactca

SEQ ID NO: 1532967 - DNA, 15 bp, Homo sapiens
gaaaaaacaatactc

SEQ ID NO: 1532968 - DNA, 15 bp, Homo sapiens
ggaaaaaacaatact

SEQ ID NO: 1532969 - DNA, 15 bp, Homo sapiens
tggaaaaaacaatac

SEQ ID NO: 1532970 - DNA, 15 bp, Homo sapiens
ttggaaaaaacaata

SEQ ID NO: 1532971 - DNA, 15 bp, Homo sapiens
tttggaaaaaacaat

SEQ ID NO: 1532972 - DNA, 15 bp, Homo sapiens
ctttggaaaaaacaa

SEQ ID NO: 1532973 - DNA, 15 bp, Homo sapiens
tctttggaaaaaaca

SEQ ID NO: 1532974 - DNA, 15 bp, Homo sapiens
gtctttggaaaaaac

SEQ ID NO: 1532975 - DNA, 15 bp, Homo sapiens
tgtctttggaaaaaa

SEQ ID NO: 1532976 - DNA, 15 bp, Homo sapiens
atgtctttggaaaaa

SEQ ID NO: 1532977 - DNA, 15 bp, Homo sapiens
aatgtctttggaaaa

SEQ ID NO: 1532978 - DNA, 15 bp, Homo sapiens
aaatgtctttggaaa

SEQ ID NO: 1532979 - DNA, 15 bp, Homo sapiens
aaaatgtctttggaa

SEQ ID NO: 1532980 - DNA, 15 bp, Homo sapiens
aaaaatgtctttgga

SEQ ID NO: 1532981 - DNA, 15 bp, Homo sapiens
caaaaatgtctttgg

SEQ ID NO: 1532982 - DNA, 15 bp, Homo sapiens
ccaaaaatgtctttg

SEQ ID NO: 1532983 - DNA, 15 bp, Homo sapiens
accaaaaatgtcttt

SEQ ID NO: 1532984 - DNA, 15 bp, Homo sapiens
caccaaaaatgtctt

SEQ ID NO: 1532985 - DNA, 15 bp, Homo sapiens
gcaccaaaaatgtct

SEQ ID NO: 1532986 - DNA, 15 bp, Homo sapiens
agcaccaaaaatgtc

SEQ ID NO: 1532987 - DNA, 15 bp, Homo sapiens
cagcaccaaaaatgt

SEQ ID NO: 1532988 - DNA, 15 bp, Homo sapiens
acagcaccaaaaatg

SEQ ID NO: 1532989 - DNA, 15 bp, Homo sapiens
tacagcaccaaaaat

SEQ ID NO: 1532990 - DNA, 15 bp, Homo sapiens
atacagcaccaaaaa

SEQ ID NO: 1532991 - DNA, 15 bp, Homo sapiens
catacagcaccaaaa

SEQ ID NO: 1532992 - DNA, 15 bp, Homo sapiens
tcatacagcaccaaa

SEQ ID NO: 1532993 - DNA, 15 bp, Homo sapiens
ttcatacagcaccaa

SEQ ID NO: 1532994 - DNA, 15 bp, Homo sapiens
attcatacagcacca

SEQ ID NO: 1532995 - DNA, 15 bp, Homo sapiens
cattcatacagcacc

SEQ ID NO: 1532996 - DNA, 15 bp, Homo sapiens
tcattcatacagcac

SEQ ID NO: 1532997 - DNA, 15 bp, Homo sapiens
gtcattcatacagca

SEQ ID NO: 1532998 - DNA, 15 bp, Homo sapiens
ggtcattcatacagc

SEQ ID NO: 1532999 - DNA, 15 bp, Homo sapiens
tggtcattcatacag

SEQ ID NO: 1533000 - DNA, 15 bp, Homo sapiens
atggtcattcataca

SEQ ID NO: 1533001 - DNA, 15 bp, Homo sapiens
aatggtcattcatac

SEQ ID NO: 1533002 - DNA, 15 bp, Homo sapiens
aaatggtcattcata

SEQ ID NO: 1533003 - DNA, 15 bp, Homo sapiens
taaatggtcattcat

SEQ ID NO: 1533004 - DNA, 15 bp, Homo sapiens
ataaatggtcattca

SEQ ID NO: 1533005 - DNA, 15 bp, Homo sapiens
aataaatggtcattc

SEQ ID NO: 1533006 - DNA, 15 bp, Homo sapiens
aaataaatggtcatt

SEQ ID NO: 1533007 - DNA, 15 bp, Homo sapiens
caaataaatggtcat

SEQ ID NO: 1533008 - DNA, 15 bp, Homo sapiens
tcaaataaatggtca

SEQ ID NO: 1533009 - DNA, 15 bp, Homo sapiens
atcaaataaatggtc

SEQ ID NO: 1533010 - DNA, 15 bp, Homo sapiens
aatcaaataaatggt

SEQ ID NO: 1533011 - DNA, 15 bp, Homo sapiens
aaatcaaataaatgg

SEQ ID NO: 1533012 - DNA, 15 bp, Homo sapiens
aaaatcaaataaatg

SEQ ID NO: 1533013 - DNA, 15 bp, Homo sapiens
taaaatcaaataaat

SEQ ID NO: 1533014 - DNA, 15 bp, Homo sapiens
cataaaatcaaataa

SEQ ID NO: 1533015 - DNA, 15 bp, Homo sapiens
acataaaatcaaata

SEQ ID NO: 1533016 - DNA, 15 bp, Homo sapiens
aacataaaatcaaat

SEQ ID NO: 1533017 - DNA, 15 bp, Homo sapiens
aaacataaaatcaaa

SEQ ID NO: 1533018 - DNA, 15 bp, Homo sapiens
aaaacataaaatcaa

SEQ ID NO: 1533019 - DNA, 15 bp, Homo sapiens
ttaaaacataaaatc

SEQ ID NO: 1533020 - DNA, 15 bp, Homo sapiens
cttaaaacataaaat

SEQ ID NO: 1533021 - DNA, 15 bp, Homo sapiens
tcttaaaacataaaa

SEQ ID NO: 1533022 - DNA, 15 bp, Homo sapiens
ttcttaaaacataaa

SEQ ID NO: 1533023 - DNA, 15 bp, Homo sapiens
attcttaaaacataa

SEQ ID NO: 1533024 - DNA, 15 bp, Homo sapiens
tattcttaaaacata

SEQ ID NO: 1533025 - DNA, 15 bp, Homo sapiens
ctattcttaaaacat

SEQ ID NO: 1533026 - DNA, 15 bp, Homo sapiens
gctattcttaaaaca

SEQ ID NO: 1533027 - DNA, 15 bp, Homo sapiens
tgctattcttaaaac

SEQ ID NO: 1533028 - DNA, 15 bp, Homo sapiens
ctgctattcttaaaa

SEQ ID NO: 1533029 - DNA, 15 bp, Homo sapiens
actgctattcttaaa

SEQ ID NO: 1533030 - DNA, 15 bp, Homo sapiens
tactgctattcttaa

SEQ ID NO: 1533031 - DNA, 15 bp, Homo sapiens
atactgctattctta

SEQ ID NO: 1533032 - DNA, 15 bp, Homo sapiens
gatactgctattctt

SEQ ID NO: 1533033 - DNA, 15 bp, Homo sapiens
tgatactgctattct

SEQ ID NO: 1533034 - DNA, 15 bp, Homo sapiens
ttgatactgctattc

SEQ ID NO: 1533035 - DNA, 15 bp, Homo sapiens
attgatactgctatt

SEQ ID NO: 1533036 - DNA, 15 bp, Homo sapiens
aattgatactgctat

SEQ ID NO: 1533037 - DNA, 15 bp, Homo sapiens
aaattgatactgcta

SEQ ID NO: 1533038 - DNA, 15 bp, Homo sapiens
taaattgatactgct

SEQ ID NO: 1533039 - DNA, 15 bp, Homo sapiens
ctaaattgatactgc

SEQ ID NO: 1533040 - DNA, 15 bp, Homo sapiens
cctaaattgatactg

SEQ ID NO: 1533041 - DNA, 15 bp, Homo sapiens
acctaaattgatact

SEQ ID NO: 1533042 - DNA, 15 bp, Homo sapiens
cacctaaattgatac

SEQ ID NO: 1533043 - DNA, 15 bp, Homo sapiens
tcacctaaattgata

SEQ ID NO: 1533044 - DNA, 15 bp, Homo sapiens
atcacctaaattgat

SEQ ID NO: 1533045 - DNA, 15 bp, Homo sapiens
aatcacctaaattga

SEQ ID NO: 1533046 - DNA, 15 bp, Homo sapiens
aaatcacctaaattg

SEQ ID NO: 1533047 - DNA, 15 bp, Homo sapiens
gaaatcacctaaatt

SEQ ID NO: 1533048 - DNA, 15 bp, Homo sapiens
tgaaatcacctaaat

SEQ ID NO: 1533049 - DNA, 15 bp, Homo sapiens
ctgaaatcacctaaa

SEQ ID NO: 1533050 - DNA, 15 bp, Homo sapiens
tctgaaatcacctaa

SEQ ID NO: 1533051 - DNA, 15 bp, Homo sapiens
ctctgaaatcaccta

SEQ ID NO: 1533052 - DNA, 15 bp, Homo sapiens
actctgaaatcacct

SEQ ID NO: 1533053 - DNA, 15 bp, Homo sapiens
cactctgaaatcacc

SEQ ID NO: 1533054 - DNA, 15 bp, Homo sapiens
acactctgaaatcac

SEQ ID NO: 1533055 - DNA, 15 bp, Homo sapiens
aacactctgaaatca

SEQ ID NO: 1533056 - DNA, 15 bp, Homo sapiens
caacactctgaaatc

SEQ ID NO: 1533057 - DNA, 15 bp, Homo sapiens
gcaacactctgaaat

SEQ ID NO: 1533058 - DNA, 15 bp, Homo sapiens
tgcaacactctgaaa

SEQ ID NO: 1533059 - DNA, 15 bp, Homo sapiens
gtgcaacactctgaa

SEQ ID NO: 1533060 - DNA, 15 bp, Homo sapiens
tgtgcaacactctga

SEQ ID NO: 1533061 - DNA, 15 bp, Homo sapiens
atgtgcaacactctg

SEQ ID NO: 1533062 - DNA, 15 bp, Homo sapiens
aatgtgcaacactct

SEQ ID NO: 1533063 - DNA, 15 bp, Homo sapiens
aaatgtgcaacactc

SEQ ID NO: 1533064 - DNA, 15 bp, Homo sapiens
gaaatgtgcaacact

SEQ ID NO: 1533065 - DNA, 15 bp, Homo sapiens
tgaaatgtgcaacac

SEQ ID NO: 1533066 - DNA, 15 bp, Homo sapiens
atgaaatgtgcaaca

SEQ ID NO: 1533067 - DNA, 15 bp, Homo sapiens
gatgaaatgtgcaac

SEQ ID NO: 1533068 - DNA, 15 bp, Homo sapiens
agatgaaatgtgcaa

SEQ ID NO: 1533069 - DNA, 15 bp, Homo sapiens
aagatgaaatgtgca

SEQ ID NO: 1533070 - DNA, 15 bp, Homo sapiens
aaagatgaaatgtgc

SEQ ID NO: 1533071 - DNA, 15 bp, Homo sapiens
gaaagatgaaatgtg

SEQ ID NO: 1533072 - DNA, 15 bp, Homo sapiens
agaaagatgaaatgt

SEQ ID NO: 1533073 - DNA, 15 bp, Homo sapiens
cagaaagatgaaatg

SEQ ID NO: 1533074 - DNA, 15 bp, Homo sapiens
ccagaaagatgaaat

SEQ ID NO: 1533075 - DNA, 15 bp, Homo sapiens
cccagaaagatgaaa

SEQ ID NO: 1533076 - DNA, 15 bp, Homo sapiens
tcccagaaagatgaa

SEQ ID NO: 1533077 - DNA, 15 bp, Homo sapiens
ttcccagaaagatga

SEQ ID NO: 1533078 - DNA, 15 bp, Homo sapiens
tttcccagaaagatg

SEQ ID NO: 1533079 - DNA, 15 bp, Homo sapiens
ctttcccagaaagat

SEQ ID NO: 1533080 - DNA, 15 bp, Homo sapiens
actttcccagaaaga

SEQ ID NO: 1533081 - DNA, 15 bp, Homo sapiens
tactttcccagaaag

SEQ ID NO: 1533082 - DNA, 15 bp, Homo sapiens
ctactttcccagaaa

SEQ ID NO: 1533083 - DNA, 15 bp, Homo sapiens
actactttcccagaa

SEQ ID NO: 1533084 - DNA, 15 bp, Homo sapiens
aaactactttcccag

SEQ ID NO: 1533085 - DNA, 15 bp, Homo sapiens
taaactactttccca

SEQ ID NO: 1533086 - DNA, 15 bp, Homo sapiens
ataaactactttccc

SEQ ID NO: 1533087 - DNA, 15 bp, Homo sapiens
tataaactactttcc

SEQ ID NO: 1533088 - DNA, 15 bp, Homo sapiens
ctataaactactttc

SEQ ID NO: 1533089 - DNA, 15 bp, Homo sapiens
actataaactacttt

SEQ ID NO: 1533090 - DNA, 15 bp, Homo sapiens
aactataaactactt

SEQ ID NO: 1533091 - DNA, 15 bp, Homo sapiens
aaactataaactact

SEQ ID NO: 1533092 - DNA, 15 bp, Homo sapiens
aaaactataaactac

SEQ ID NO: 1533093 - DNA, 15 bp, Homo sapiens
taaaactataaacta

SEQ ID NO: 1533094 - DNA, 15 bp, Homo sapiens
ttaaaactataaact

SEQ ID NO: 1533095 - DNA, 15 bp, Homo sapiens
tttaaaactataaac

SEQ ID NO: 1533096 - DNA, 15 bp, Homo sapiens
ttttaaaactataaa

SEQ ID NO: 1533097 - DNA, 15 bp, Homo sapiens
attttaaaactataa

SEQ ID NO: 1533098 - DNA, 15 bp, Homo sapiens
aattttaaaactata

SEQ ID NO: 1533099 - DNA, 15 bp, Homo sapiens
taattttaaaactat

SEQ ID NO: 1533100 - DNA, 15 bp, Homo sapiens
gtaattttaaaacta

SEQ ID NO: 1533101 - DNA, 15 bp, Homo sapiens
tgtaattttaaaact

SEQ ID NO: 1533102 - DNA, 15 bp, Homo sapiens
atgtaattttaaaac

SEQ ID NO: 1533103 - DNA, 15 bp, Homo sapiens
catgtaattttaaaa

SEQ ID NO: 1533104 - DNA, 15 bp, Homo sapiens
tcatgtaattttaaa

SEQ ID NO: 1533105 - DNA, 15 bp, Homo sapiens
ttcatgtaattttaa

SEQ ID NO: 1533106 - DNA, 15 bp, Homo sapiens
tttcatgtaatttta

SEQ ID NO: 1533107 - DNA, 15 bp, Homo sapiens
atttcatgtaatttt

SEQ ID NO: 1533108 - DNA, 15 bp, Homo sapiens
catttcatgtaattt

SEQ ID NO: 1533109 - DNA, 15 bp, Homo sapiens
tcatttcatgtaatt

SEQ ID NO: 1533110 - DNA, 15 bp, Homo sapiens
atcatttcatgtaat

SEQ ID NO: 1533111 - DNA, 15 bp, Homo sapiens
tatcatttcatgtaa

SEQ ID NO: 1533112 - DNA, 15 bp, Homo sapiens
atatcatttcatgta

SEQ ID NO: 1533113 - DNA, 15 bp, Homo sapiens
tatatcatttcatgt

SEQ ID NO: 1533114 - DNA, 15 bp, Homo sapiens
ttatatcatttcatg

SEQ ID NO: 1533115 - DNA, 15 bp, Homo sapiens
tttatatcatttcat

SEQ ID NO: 1533116 - DNA, 15 bp, Homo sapiens
ttttatatcatttca

SEQ ID NO: 1533117 - DNA, 15 bp, Homo sapiens
cttttatatcatttc

SEQ ID NO: 1533118 - DNA, 15 bp, Homo sapiens
ccttttatatcattt

SEQ ID NO: 1533119 - DNA, 15 bp, Homo sapiens
tccttttatatcatt

SEQ ID NO: 1533120 - DNA, 15 bp, Homo sapiens
ttccttttatatcat

SEQ ID NO: 1533121 - DNA, 15 bp, Homo sapiens
tttccttttatatca

SEQ ID NO: 1533122 - DNA, 15 bp, Homo sapiens
ttttccttttatatc

SEQ ID NO: 1533123 - DNA, 15 bp, Homo sapiens
attttccttttatat

SEQ ID NO: 1533124 - DNA, 15 bp, Homo sapiens
aattttccttttata

SEQ ID NO: 1533125 - DNA, 15 bp, Homo sapiens
aaattttccttttat

SEQ ID NO: 1533126 - DNA, 15 bp, Homo sapiens
aaaattttcctttta

SEQ ID NO: 1533127 - DNA, 15 bp, Homo sapiens
aaaaattttcctttt

SEQ ID NO: 1533128 - DNA, 15 bp, Homo sapiens
gaaaaattttccttt

SEQ ID NO: 1533129 - DNA, 15 bp, Homo sapiens
tgaaaaattttcctt

SEQ ID NO: 1533130 - DNA, 15 bp, Homo sapiens
atgaaaaattttcct

SEQ ID NO: 1533131 - DNA, 15 bp, Homo sapiens
gatgaaaaattttcc

SEQ ID NO: 1533132 - DNA, 15 bp, Homo sapiens
tgatgaaaaattttc

SEQ ID NO: 1533133 - DNA, 15 bp, Homo sapiens
atgatgaaaaatttt

SEQ ID NO: 1533134 - DNA, 15 bp, Homo sapiens
catgatgaaaaattt

SEQ ID NO: 1533135 - DNA, 15 bp, Homo sapiens
tcatgatgaaaaatt

SEQ ID NO: 1533136 - DNA, 15 bp, Homo sapiens
ctcatgatgaaaaat

SEQ ID NO: 1533137 - DNA, 15 bp, Homo sapiens
actcatgatgaaaaa

SEQ ID NO: 1533138 - DNA, 15 bp, Homo sapiens
aactcatgatgaaaa

SEQ ID NO: 1533139 - DNA, 15 bp, Homo sapiens
aaactcatgatgaaa

SEQ ID NO: 1533140 - DNA, 15 bp, Homo sapiens
aaaactcatgatgaa

SEQ ID NO: 1533141 - DNA, 15 bp, Homo sapiens
taaaactcatgatga

SEQ ID NO: 1533142 - DNA, 15 bp, Homo sapiens
ataaaactcatgatg

SEQ ID NO: 1533143 - DNA, 15 bp, Homo sapiens
tataaaactcatgat

SEQ ID NO: 1533144 - DNA, 15 bp, Homo sapiens
ttataaaactcatga

SEQ ID NO: 1533145 - DNA, 15 bp, Homo sapiens
tttataaaactcatg

SEQ ID NO: 1533146 - DNA, 15 bp, Homo sapiens
ctttataaaactcat

SEQ ID NO: 1533147 - DNA, 15 bp, Homo sapiens
actttataaaactca

SEQ ID NO: 1533148 - DNA, 15 bp, Homo sapiens
cactttataaaactc

SEQ ID NO: 1533149 - DNA, 15 bp, Homo sapiens
tcactttataaaact

SEQ ID NO: 1533150 - DNA, 15 bp, Homo sapiens
ctcactttataaaac

SEQ ID NO: 1533151 - DNA, 15 bp, Homo sapiens
tctcactttataaaa

SEQ ID NO: 1533152 - DNA, 15 bp, Homo sapiens
atctcactttataaa

SEQ ID NO: 1533153 - DNA, 15 bp, Homo sapiens
gatctcactttataa

SEQ ID NO: 1533154 - DNA, 15 bp, Homo sapiens
tgatctcactttata

SEQ ID NO: 1533155 - DNA, 15 bp, Homo sapiens
ctgatctcactttat

SEQ ID NO: 1533156 - DNA, 15 bp, Homo sapiens
tctgatctcacttta

SEQ ID NO: 1533157 - DNA, 15 bp, Homo sapiens
atctgatctcacttt

SEQ ID NO: 1533158 - DNA, 15 bp, Homo sapiens
aatctgatctcactt

SEQ ID NO: 1533159 - DNA, 15 bp, Homo sapiens
aaatctgatctcact

SEQ ID NO: 1533160 - DNA, 15 bp, Homo sapiens
taaatctgatctcac

SEQ ID NO: 1533161 - DNA, 15 bp, Homo sapiens
ataaatctgatctca

SEQ ID NO: 1533162 - DNA, 15 bp, Homo sapiens
cataaatctgatctc

SEQ ID NO: 1533163 - DNA, 15 bp, Homo sapiens
tcataaatctgatct

SEQ ID NO: 1533164 - DNA, 15 bp, Homo sapiens
atcataaatctgatc

SEQ ID NO: 1533165 - DNA, 15 bp, Homo sapiens
tatcataaatctgat

SEQ ID NO: 1533166 - DNA, 15 bp, Homo sapiens
ttatcataaatctga

SEQ ID NO: 1533167 - DNA, 15 bp, Homo sapiens
tttatcataaatctg

SEQ ID NO: 1533168 - DNA, 15 bp, Homo sapiens
atttatcataaatct

SEQ ID NO: 1533169 - DNA, 15 bp, Homo sapiens
aatttatcataaatc

SEQ ID NO: 1533170 - DNA, 15 bp, Homo sapiens
aaatttatcataaat

SEQ ID NO: 1533171 - DNA, 15 bp, Homo sapiens
aaaatttatcataaa

SEQ ID NO: 1533172 - DNA, 15 bp, Homo sapiens
caaaatttatcataa

SEQ ID NO: 1533173 - DNA, 15 bp, Homo sapiens
gcaaaatttatcata

SEQ ID NO: 1533174 - DNA, 15 bp, Homo sapiens
agcaaaatttatcat

SEQ ID NO: 1533175 - DNA, 15 bp, Homo sapiens
gagcaaaatttatca

SEQ ID NO: 1533176 - DNA, 15 bp, Homo sapiens
ggagcaaaatttatc

SEQ ID NO: 1533177 - DNA, 15 bp, Homo sapiens
tggagcaaaatttat

SEQ ID NO: 1533178 - DNA, 15 bp, Homo sapiens
gtggagcaaaattta

SEQ ID NO: 1533179 - DNA, 15 bp, Homo sapiens
agtggagcaaaattt

SEQ ID NO: 1533180 - DNA, 15 bp, Homo sapiens
gagtggagcaaaatt

SEQ ID NO: 1533181 - DNA, 15 bp, Homo sapiens
agagtggagcaaaat

SEQ ID NO: 1533182 - DNA, 15 bp, Homo sapiens
aagagtggagcaaaa

SEQ ID NO: 1533183 - DNA, 15 bp, Homo sapiens
gaagagtggagcaaa

SEQ ID NO: 1533184 - DNA, 15 bp, Homo sapiens
tgaagagtggagcaa

SEQ ID NO: 1533185 - DNA, 15 bp, Homo sapiens
ctgaagagtggagca

SEQ ID NO: 1533186 - DNA, 15 bp, Homo sapiens
actgaagagtggagc

SEQ ID NO: 1533187 - DNA, 15 bp, Homo sapiens
cactgaagagtggag

SEQ ID NO: 1533188 - DNA, 15 bp, Homo sapiens
ccactgaagagtgga

SEQ ID NO: 1533189 - DNA, 15 bp, Homo sapiens
tccactgaagagtgg

SEQ ID NO: 1533190 - DNA, 15 bp, Homo sapiens
gtccactgaagagtg

SEQ ID NO: 1533191 - DNA, 15 bp, Homo sapiens
agtccactgaagagt

SEQ ID NO: 1533192 - DNA, 15 bp, Homo sapiens
cagtccactgaagag

SEQ ID NO: 1533193 - DNA, 15 bp, Homo sapiens
gcagtccactgaaga

SEQ ID NO: 1533194 - DNA, 15 bp, Homo sapiens
agcagtccactgaag

SEQ ID NO: 1533195 - DNA, 15 bp, Homo sapiens
aagcagtccactgaa

SEQ ID NO: 1533196 - DNA, 15 bp, Homo sapiens
caagcagtccactga

SEQ ID NO: 1533197 - DNA, 15 bp, Homo sapiens
acaagcagtccactg

SEQ ID NO: 1533198 - DNA, 15 bp, Homo sapiens
cacaagcagtccact

SEQ ID NO: 1533199 - DNA, 15 bp, Homo sapiens
acacaagcagtccac

SEQ ID NO: 1533200 - DNA, 15 bp, Homo sapiens
tacacaagcagtcca

SEQ ID NO: 1533201 - DNA, 15 bp, Homo sapiens
ttacacaagcagtcc

SEQ ID NO: 1533202 - DNA, 15 bp, Homo sapiens
tttacacaagcagtc

SEQ ID NO: 1533203 - DNA, 15 bp, Homo sapiens
atttacacaagcagt

SEQ ID NO: 1533204 - DNA, 15 bp, Homo sapiens
gatttacacaagcag

SEQ ID NO: 1533205 - DNA, 15 bp, Homo sapiens
agatttacacaagca

SEQ ID NO: 1533206 - DNA, 15 bp, Homo sapiens
cagatttacacaagc

SEQ ID NO: 1533207 - DNA, 15 bp, Homo sapiens
acagatttacacaag

SEQ ID NO: 1533208 - DNA, 15 bp, Homo sapiens
aacagatttacacaa

SEQ ID NO: 1533209 - DNA, 15 bp, Homo sapiens
taacagatttacaca

SEQ ID NO: 1533210 - DNA, 15 bp, Homo sapiens
ttaacagatttacac

SEQ ID NO: 1533211 - DNA, 15 bp, Homo sapiens
tttaacagatttaca

SEQ ID NO: 1533212 - DNA, 15 bp, Homo sapiens
ttttaacagatttac

SEQ ID NO: 1533213 - DNA, 15 bp, Homo sapiens
gttttaacagattta

SEQ ID NO: 1533214 - DNA, 15 bp, Homo sapiens
tgttttaacagattt

SEQ ID NO: 1533215 - DNA, 15 bp, Homo sapiens
gtgttttaacagatt

SEQ ID NO: 1533216 - DNA, 15 bp, Homo sapiens
tgtgttttaacagat

SEQ ID NO: 1533217 - DNA, 15 bp, Homo sapiens
ttgtgttttaacaga

SEQ ID NO: 1533218 - DNA, 15 bp, Homo sapiens
tttgtgttttaacag

SEQ ID NO: 1533219 - DNA, 15 bp, Homo sapiens
atttgtgttttaaca

SEQ ID NO: 1533220 - DNA, 15 bp, Homo sapiens
gatttgtgttttaac

SEQ ID NO: 1533221 - DNA, 15 bp, Homo sapiens
agatttgtgttttaa

SEQ ID NO: 1533222 - DNA, 15 bp, Homo sapiens
cagatttgtgtttta

SEQ ID NO: 1533223 - DNA, 15 bp, Homo sapiens
tcagatttgtgtttt

SEQ ID NO: 1533224 - DNA, 15 bp, Homo sapiens
atcagatttgtgttt

SEQ ID NO: 1533225 - DNA, 15 bp, Homo sapiens
aatcagatttgtgtt

SEQ ID NO: 1533226 - DNA, 15 bp, Homo sapiens
aaatcagatttgtgt

SEQ ID NO: 1533227 - DNA, 15 bp, Homo sapiens
gaaatcagatttgtg

SEQ ID NO: 1533228 - DNA, 15 bp, Homo sapiens
ggaaatcagatttgt

SEQ ID NO: 1533229 - DNA, 15 bp, Homo sapiens
tggaaatcagatttg

SEQ ID NO: 1533230 - DNA, 15 bp, Homo sapiens
ctggaaatcagattt

SEQ ID NO: 1533231 - DNA, 15 bp, Homo sapiens
tctggaaatcagatt

SEQ ID NO: 1533232 - DNA, 15 bp, Homo sapiens
ttctggaaatcagat

SEQ ID NO: 1533233 - DNA, 15 bp, Homo sapiens
attctggaaatcaga

SEQ ID NO: 1533234 - DNA, 15 bp, Homo sapiens
cattctggaaatcag

SEQ ID NO: 1533235 - DNA, 15 bp, Homo sapiens
ccattctggaaatca

SEQ ID NO: 1533236 - DNA, 15 bp, Homo sapiens
gccattctggaaatc

SEQ ID NO: 1533237 - DNA, 15 bp, Homo sapiens
tgccattctggaaat

SEQ ID NO: 1533238 - DNA, 15 bp, Homo sapiens
ttgccattctggaaa

SEQ ID NO: 1533239 - DNA, 15 bp, Homo sapiens
cttgccattctggaa

SEQ ID NO: 1533240 - DNA, 15 bp, Homo sapiens
acttgccattctgga

SEQ ID NO: 1533241 - DNA, 15 bp, Homo sapiens
aacttgccattctgg

SEQ ID NO: 1533242 - DNA, 15 bp, Homo sapiens
aaacttgccattctg

SEQ ID NO: 1533243 - DNA, 15 bp, Homo sapiens
taaacttgccattct

SEQ ID NO: 1533244 - DNA, 15 bp, Homo sapiens
ttaaacttgccattc

SEQ ID NO: 1533245 - DNA, 15 bp, Homo sapiens
tttaaacttgccatt

SEQ ID NO: 1533246 - DNA, 15 bp, Homo sapiens
ctttaaacttgccat

SEQ ID NO: 1533247 - DNA, 15 bp, Homo sapiens
tctttaaacttgcca

SEQ ID NO: 1533248 - DNA, 15 bp, Homo sapiens
ttctttaaacttgcc

SEQ ID NO: 1533249 - DNA, 15 bp, Homo sapiens
tttctttaaacttgc

SEQ ID NO: 1533250 - DNA, 15 bp, Homo sapiens
ctttctttaaacttg

SEQ ID NO: 1533251 - DNA, 15 bp, Homo sapiens
gctttctttaaactt

SEQ ID NO: 1533252 - DNA, 15 bp, Homo sapiens
tgctttctttaaact

SEQ ID NO: 1533253 - DNA, 15 bp, Homo sapiens
ttgctttctttaaac

SEQ ID NO: 1533254 - DNA, 15 bp, Homo sapiens
tttgctttctttaaa

SEQ ID NO: 1533255 - DNA, 15 bp, Homo sapiens
atttgctttctttaa

SEQ ID NO: 1533256 - DNA, 15 bp, Homo sapiens
tatttgctttcttta

SEQ ID NO: 1533257 - DNA, 15 bp, Homo sapiens
ttatttgctttcttt

SEQ ID NO: 1533258 - DNA, 15 bp, Homo sapiens
tttatttgctttctt

SEQ ID NO: 1533259 - DNA, 15 bp, Homo sapiens
ctttatttgctttct

SEQ ID NO: 1533260 - DNA, 15 bp, Homo sapiens
actttatttgctttc

SEQ ID NO: 1533261 - DNA, 15 bp, Homo sapiens
aactttatttgcttt

SEQ ID NO: 1533262 - DNA, 15 bp, Homo sapiens
taactttatttgctt

SEQ ID NO: 1533263 - DNA, 15 bp, Homo sapiens
gtaactttatttgct

SEQ ID NO: 1533264 - DNA, 15 bp, Homo sapiens
cgtaactttatttgc

SEQ ID NO: 1533265 - DNA, 15 bp, Homo sapiens
ccgtaactttatttg

SEQ ID NO: 1533266 - DNA, 15 bp, Homo sapiens
accgtaactttattt

SEQ ID NO: 1533267 - DNA, 15 bp, Homo sapiens
taccgtaactttatt

SEQ ID NO: 1533268 - DNA, 15 bp, Homo sapiens
ataccgtaactttat

SEQ ID NO: 1533269 - DNA, 15 bp, Homo sapiens
aataccgtaacttta

SEQ ID NO: 1533270 - DNA, 15 bp, Homo sapiens
aaataccgtaacttt

SEQ ID NO: 1533271 - DNA, 15 bp, Homo sapiens
aaaataccgtaactt

SEQ ID NO: 1533272 - DNA, 15 bp, Homo sapiens
gaaaataccgtaact

SEQ ID NO: 1533273 - DNA, 15 bp, Homo sapiens
cgaaaataccgtaac

SEQ ID NO: 1533274 - DNA, 15 bp, Homo sapiens
acgaaaataccgtaa

SEQ ID NO: 1533275 - DNA, 15 bp, Homo sapiens
aacgaaaataccgta

SEQ ID NO: 1533276 - DNA, 15 bp, Homo sapiens
taacgaaaataccgt

SEQ ID NO: 1533277 - DNA, 15 bp, Homo sapiens
gtaacgaaaataccg

SEQ ID NO: 1533278 - DNA, 15 bp, Homo sapiens
ggtaacgaaaatacc

SEQ ID NO: 1533279 - DNA, 15 bp, Homo sapiens
tggtaacgaaaatac

SEQ ID NO: 1533280 - DNA, 15 bp, Homo sapiens
ttggtaacgaaaata

SEQ ID NO: 1533281 - DNA, 15 bp, Homo sapiens
cttggtaacgaaaat

SEQ ID NO: 1533282 - DNA, 15 bp, Homo sapiens
acttggtaacgaaaa

SEQ ID NO: 1533283 - DNA, 15 bp, Homo sapiens
cacttggtaacgaaa

SEQ ID NO: 1533284 - DNA, 15 bp, Homo sapiens
ccacttggtaacgaa

SEQ ID NO: 1533285 - DNA, 15 bp, Homo sapiens
gccacttggtaacga

SEQ ID NO: 1533286 - DNA, 15 bp, Homo sapiens
tgccacttggtaacg

SEQ ID NO: 1533287 - DNA, 15 bp, Homo sapiens
gtgccacttggtaac

SEQ ID NO: 1533288 - DNA, 15 bp, Homo sapiens
ggtgccacttggtaa

SEQ ID NO: 1533289 - DNA, 15 bp, Homo sapiens
tggtgccacttggta

SEQ ID NO: 1533290 - DNA, 15 bp, Homo sapiens
atggtgccacttggt

SEQ ID NO: 1533291 - DNA, 15 bp, Homo sapiens
aatggtgccacttgg

SEQ ID NO: 1533292 - DNA, 15 bp, Homo sapiens
aaatggtgccacttg

SEQ ID NO: 1533293 - DNA, 15 bp, Homo sapiens
taaatggtgccactt

SEQ ID NO: 1533294 - DNA, 15 bp, Homo sapiens
ttaaatggtgccact

SEQ ID NO: 1533295 - DNA, 15 bp, Homo sapiens
tttaaatggtgccac

SEQ ID NO: 1533296 - DNA, 15 bp, Homo sapiens
ttttaaatggtgcca

SEQ ID NO: 1533297 - DNA, 15 bp, Homo sapiens
tttttaaatggtgcc

SEQ ID NO: 1533298 - DNA, 15 bp, Homo sapiens
gtttttaaatggtgc

SEQ ID NO: 1533299 - DNA, 15 bp, Homo sapiens
cgtttttaaatggtg

SEQ ID NO: 1533300 - DNA, 15 bp, Homo sapiens
tcgtttttaaatggt

SEQ ID NO: 1533301 - DNA, 15 bp, Homo sapiens
ctcgtttttaaatgg

SEQ ID NO: 1533302 - DNA, 15 bp, Homo sapiens
actcgtttttaaatg

SEQ ID NO: 1533303 - DNA, 15 bp, Homo sapiens
tactcgtttttaaat

SEQ ID NO: 1533304 - DNA, 15 bp, Homo sapiens
ttactcgtttttaaa

SEQ ID NO: 1533305 - DNA, 15 bp, Homo sapiens
attactcgtttttaa

SEQ ID NO: 1533306 - DNA, 15 bp, Homo sapiens
tattactcgttttta

SEQ ID NO: 1533307 - DNA, 15 bp, Homo sapiens
atattactcgttttt

SEQ ID NO: 1533308 - DNA, 15 bp, Homo sapiens
aatattactcgtttt

SEQ ID NO: 1533309 - DNA, 15 bp, Homo sapiens
aaatattactcgttt

SEQ ID NO: 1533310 - DNA, 15 bp, Homo sapiens
taaatattactcgtt

SEQ ID NO: 1533311 - DNA, 15 bp, Homo sapiens
ctaaatattactcgt

SEQ ID NO: 1533312 - DNA, 15 bp, Homo sapiens
gctaaatattactcg

SEQ ID NO: 1533313 - DNA, 15 bp, Homo sapiens
tgctaaatattactc

SEQ ID NO: 1533314 - DNA, 15 bp, Homo sapiens
atgctaaatattact

SEQ ID NO: 1533315 - DNA, 15 bp, Homo sapiens
catgctaaatattac

SEQ ID NO: 1533316 - DNA, 15 bp, Homo sapiens
acatgctaaatatta

SEQ ID NO: 1533317 - DNA, 15 bp, Homo sapiens
aacatgctaaatatt

SEQ ID NO: 1533318 - DNA, 15 bp, Homo sapiens
taacatgctaaatat

SEQ ID NO: 1533319 - DNA, 15 bp, Homo sapiens
ataacatgctaaata

SEQ ID NO: 1533320 - DNA, 15 bp, Homo sapiens
cataacatgctaaat

SEQ ID NO: 1533321 - DNA, 15 bp, Homo sapiens
acataacatgctaaa

SEQ ID NO: 1533322 - DNA, 15 bp, Homo sapiens
cacataacatgctaa

SEQ ID NO: 1533323 - DNA, 15 bp, Homo sapiens
acacataacatgcta

SEQ ID NO: 1533324 - DNA, 15 bp, Homo sapiens
tacacataacatgct

SEQ ID NO: 1533325 - DNA, 15 bp, Homo sapiens
ttacacataacatgc

SEQ ID NO: 1533326 - DNA, 15 bp, Homo sapiens
cttacacataacatg

SEQ ID NO: 1533327 - DNA, 15 bp, Homo sapiens
ccttacacataacat

SEQ ID NO: 1533328 - DNA, 15 bp, Homo sapiens
tccttacacataaca

SEQ ID NO: 1533329 - DNA, 15 bp, Homo sapiens
ttccttacacataac

SEQ ID NO: 1533330 - DNA, 15 bp, Homo sapiens
tttccttacacataa

SEQ ID NO: 1533331 - DNA, 15 bp, Homo sapiens
ctttccttacacata

SEQ ID NO: 1533332 - DNA, 15 bp, Homo sapiens
actttccttacacat

SEQ ID NO: 1533333 - DNA, 15 bp, Homo sapiens
gactttccttacaca

SEQ ID NO: 1533334 - DNA, 15 bp, Homo sapiens
agactttccttacac

SEQ ID NO: 1533335 - DNA, 15 bp, Homo sapiens
gagactttccttaca

SEQ ID NO: 1533336 - DNA, 15 bp, Homo sapiens
agagactttccttac

SEQ ID NO: 1533337 - DNA, 15 bp, Homo sapiens
aagagactttcctta

SEQ ID NO: 1533338 - DNA, 15 bp, Homo sapiens
aaagagactttcctt

SEQ ID NO: 1533339 - DNA, 15 bp, Homo sapiens
taaagagactttcct

SEQ ID NO: 1533340 - DNA, 15 bp, Homo sapiens
ataaagagactttcc

SEQ ID NO: 1533341 - DNA, 15 bp, Homo sapiens
cataaagagactttc

SEQ ID NO: 1533342 - DNA, 15 bp, Homo sapiens
gcataaagagacttt

SEQ ID NO: 1533343 - DNA, 15 bp, Homo sapiens
ggcataaagagactt

SEQ ID NO: 1533344 - DNA, 15 bp, Homo sapiens
aggcataaagagact

SEQ ID NO: 1533345 - DNA, 15 bp, Homo sapiens
aaggcataaagagac

SEQ ID NO: 1533346 - DNA, 15 bp, Homo sapiens
caaggcataaagaga

SEQ ID NO: 1533347 - DNA, 15 bp, Homo sapiens
acaaggcataaagag

SEQ ID NO: 1533348 - DNA, 15 bp, Homo sapiens
aacaaggcataaaga

SEQ ID NO: 1533349 - DNA, 15 bp, Homo sapiens
taacaaggcataaag

SEQ ID NO: 1533350 - DNA, 15 bp, Homo sapiens
gtaacaaggcataaa

SEQ ID NO: 1533351 - DNA, 15 bp, Homo sapiens
agtaacaaggcataa

SEQ ID NO: 1533352 - DNA, 15 bp, Homo sapiens
tagtaacaaggcata

SEQ ID NO: 1533353 - DNA, 15 bp, Homo sapiens
ttagtaacaaggcat

SEQ ID NO: 1533354 - DNA, 15 bp, Homo sapiens
tttagtaacaaggca

SEQ ID NO: 1533355 - DNA, 15 bp, Homo sapiens
atttagtaacaaggc

SEQ ID NO: 1533356 - DNA, 15 bp, Homo sapiens
gatttagtaacaagg

SEQ ID NO: 1533357 - DNA, 15 bp, Homo sapiens
cgatttagtaacaag

SEQ ID NO: 1533358 - DNA, 15 bp, Homo sapiens
acgatttagtaacaa

SEQ ID NO: 1533359 - DNA, 15 bp, Homo sapiens
aacgatttagtaaca

SEQ ID NO: 1533360 - DNA, 15 bp, Homo sapiens
aaacgatttagtaac

SEQ ID NO: 1533361 - DNA, 15 bp, Homo sapiens
caaacgatttagtaa

SEQ ID NO: 1533362 - DNA, 15 bp, Homo sapiens
acaaacgatttagta

SEQ ID NO: 1533363 - DNA, 15 bp, Homo sapiens
aacaaacgatttagt

SEQ ID NO: 1533364 - DNA, 15 bp, Homo sapiens
aaacaaacgatttag

SEQ ID NO: 1533365 - DNA, 15 bp, Homo sapiens
aaaacaaacgattta

SEQ ID NO: 1533366 - DNA, 15 bp, Homo sapiens
aaaaacaaacgattt

SEQ ID NO: 1533367 - DNA, 15 bp, Homo sapiens
gaaaaacaaacgatt

SEQ ID NO: 1533368 - DNA, 15 bp, Homo sapiens
agaaaaacaaacgat

SEQ ID NO: 1533369 - DNA, 15 bp, Homo sapiens
gagaaaaacaaacga

SEQ ID NO: 1533370 - DNA, 15 bp, Homo sapiens
agagaaaaacaaacg

SEQ ID NO: 1533371 - DNA, 15 bp, Homo sapiens
ttagagaaaaacaaa

SEQ ID NO: 1533372 - DNA, 15 bp, Homo sapiens
tttagagaaaaacaa

SEQ ID NO: 1533373 - DNA, 15 bp, Homo sapiens
atttagagaaaaaca

SEQ ID NO: 1533374 - DNA, 15 bp, Homo sapiens
aatttagagaaaaac

SEQ ID NO: 1533375 - DNA, 15 bp, Homo sapiens
taatttagagaaaaa

SEQ ID NO: 1533376 - DNA, 15 bp, Homo sapiens
ataatttagagaaaa

SEQ ID NO: 1533377 - DNA, 15 bp, Homo sapiens
tataatttagagaaa

SEQ ID NO: 1533378 - DNA, 15 bp, Homo sapiens
atataatttagagaa

SEQ ID NO: 1533379 - DNA, 15 bp, Homo sapiens
aatataatttagaga

SEQ ID NO: 1533380 - DNA, 15 bp, Homo sapiens
taatataatttagag

SEQ ID NO: 1533381 - DNA, 15 bp, Homo sapiens
ctaatataatttaga

SEQ ID NO: 1533382 - DNA, 15 bp, Homo sapiens
gctaatataatttag

SEQ ID NO: 1533383 - DNA, 15 bp, Homo sapiens
tgctaatataattta

SEQ ID NO: 1533384 - DNA, 15 bp, Homo sapiens
atgctaatataattt

SEQ ID NO: 1533385 - DNA, 15 bp, Homo sapiens
aatgctaatataatt

SEQ ID NO: 1533386 - DNA, 15 bp, Homo sapiens
taatgctaatataat

SEQ ID NO: 1533387 - DNA, 15 bp, Homo sapiens
ataatgctaatataa

SEQ ID NO: 1533388 - DNA, 15 bp, Homo sapiens
aataatgctaatata

SEQ ID NO: 1533389 - DNA, 15 bp, Homo sapiens
aaataatgctaatat

SEQ ID NO: 1533390 - DNA, 15 bp, Homo sapiens
taaataatgctaata

SEQ ID NO: 1533391 - DNA, 15 bp, Homo sapiens
ctaaataatgctaat

SEQ ID NO: 1533392 - DNA, 15 bp, Homo sapiens
tctaaataatgctaa

SEQ ID NO: 1533393 - DNA, 15 bp, Homo sapiens
atctaaataatgcta

SEQ ID NO: 1533394 - DNA, 15 bp, Homo sapiens
aatctaaataatgct

SEQ ID NO: 1533395 - DNA, 15 bp, Homo sapiens
taatctaaataatgc

SEQ ID NO: 1533396 - DNA, 15 bp, Homo sapiens
ataatctaaataatg

SEQ ID NO: 1533397 - DNA, 15 bp, Homo sapiens
tataatctaaataat

SEQ ID NO: 1533398 - DNA, 15 bp, Homo sapiens
gtataatctaaataa

SEQ ID NO: 1533399 - DNA, 15 bp, Homo sapiens
ggtataatctaaata

SEQ ID NO: 1533400 - DNA, 15 bp, Homo sapiens
tggtataatctaaat

SEQ ID NO: 1533401 - DNA, 15 bp, Homo sapiens
gtggtataatctaaa

SEQ ID NO: 1533402 - DNA, 15 bp, Homo sapiens
tgtggtataatctaa

SEQ ID NO: 1533403 - DNA, 15 bp, Homo sapiens
ttgtggtataatcta

SEQ ID NO: 1533404 - DNA, 15 bp, Homo sapiens
tttgtggtataatct

SEQ ID NO: 1533405 - DNA, 15 bp, Homo sapiens
atttgtggtataatc

SEQ ID NO: 1533406 - DNA, 15 bp, Homo sapiens
tatttgtggtataat

SEQ ID NO: 1533407 - DNA, 15 bp, Homo sapiens
ctatttgtggtataa

SEQ ID NO: 1533408 - DNA, 15 bp, Homo sapiens
tctatttgtggtata

SEQ ID NO: 1533409 - DNA, 15 bp, Homo sapiens
ttctatttgtggtat

SEQ ID NO: 1533410 - DNA, 15 bp, Homo sapiens
attctatttgtggta

SEQ ID NO: 1533411 - DNA, 15 bp, Homo sapiens
aattctatttgtggt

SEQ ID NO: 1533412 - DNA, 15 bp, Homo sapiens
aaattctatttgtgg

SEQ ID NO: 1533413 - DNA, 15 bp, Homo sapiens
caaattctatttgtg

SEQ ID NO: 1533414 - DNA, 15 bp, Homo sapiens
acaaattctatttgt

SEQ ID NO: 1533415 - DNA, 15 bp, Homo sapiens
aacaaattctatttg

SEQ ID NO: 1533416 - DNA, 15 bp, Homo sapiens
caacaaattctattt

SEQ ID NO: 1533417 - DNA, 15 bp, Homo sapiens
acaacaaattctatt

SEQ ID NO: 1533418 - DNA, 15 bp, Homo sapiens
tacaacaaattctat

SEQ ID NO: 1533419 - DNA, 15 bp, Homo sapiens
atacaacaaattcta

SEQ ID NO: 1533420 - DNA, 15 bp, Homo sapiens
aatacaacaaattct

SEQ ID NO: 1533421 - DNA, 15 bp, Homo sapiens
taatacaacaaattc

SEQ ID NO: 1533422 - DNA, 15 bp, Homo sapiens
ttaatacaacaaatt

SEQ ID NO: 1533423 - DNA, 15 bp, Homo sapiens
tttaatacaacaaat

SEQ ID NO: 1533424 - DNA, 15 bp, Homo sapiens
ttttaatacaacaaa

SEQ ID NO: 1533425 - DNA, 15 bp, Homo sapiens
attttaatacaacaa

SEQ ID NO: 1533426 - DNA, 15 bp, Homo sapiens
aattttaatacaaca

SEQ ID NO: 1533427 - DNA, 15 bp, Homo sapiens
aaattttaatacaac

SEQ ID NO: 1533428 - DNA, 15 bp, Homo sapiens
caaattttaatacaa

SEQ ID NO: 1533429 - DNA, 15 bp, Homo sapiens
tcaaattttaataca

SEQ ID NO: 1533430 - DNA, 15 bp, Homo sapiens
ttcaaattttaatac

SEQ ID NO: 1533431 - DNA, 15 bp, Homo sapiens
cttcaaattttaata

SEQ ID NO: 1533432 - DNA, 15 bp, Homo sapiens
acttcaaattttaat

SEQ ID NO: 1533433 - DNA, 15 bp, Homo sapiens
aacttcaaattttaa

SEQ ID NO: 1533434 - DNA, 15 bp, Homo sapiens
aaacttcaaatttta

SEQ ID NO: 1533435 - DNA, 15 bp, Homo sapiens
taaacttcaaatttt

SEQ ID NO: 1533436 - DNA, 15 bp, Homo sapiens
ataaacttcaaattt

SEQ ID NO: 1533437 - DNA, 15 bp, Homo sapiens
aataaacttcaaatt

SEQ ID NO: 1533438 - DNA, 15 bp, Homo sapiens
aaataaacttcaaat

SEQ ID NO: 1533439 - DNA, 15 bp, Homo sapiens
aaaataaacttcaaa

SEQ ID NO: 1533440 - DNA, 15 bp, Homo sapiens
gaaaataaacttcaa

SEQ ID NO: 1533441 - DNA, 15 bp, Homo sapiens
agaaaataaacttca

SEQ ID NO: 1533442 - DNA, 15 bp, Homo sapiens
aagaaaataaacttc

SEQ ID NO: 1533443 - DNA, 15 bp, Homo sapiens
taagaaaataaactt

SEQ ID NO: 1533444 - DNA, 15 bp, Homo sapiens
gtaagaaaataaact

SEQ ID NO: 1533445 - DNA, 15 bp, Homo sapiens
tgtaagaaaataaac

SEQ ID NO: 1533446 - DNA, 15 bp, Homo sapiens
ttgtaagaaaataaa

SEQ ID NO: 1533447 - DNA, 15 bp, Homo sapiens
cttgtaagaaaataa

SEQ ID NO: 1533448 - DNA, 15 bp, Homo sapiens
tcttgtaagaaaata

SEQ ID NO: 1533449 - DNA, 15 bp, Homo sapiens
ctcttgtaagaaaat

SEQ ID NO: 1533450 - DNA, 15 bp, Homo sapiens
tctcttgtaagaaaa

SEQ ID NO: 1533451 - DNA, 15 bp, Homo sapiens
ttctcttgtaagaaa

SEQ ID NO: 1533452 - DNA, 15 bp, Homo sapiens
tttctcttgtaagaa

SEQ ID NO: 1533453 - DNA, 15 bp, Homo sapiens
gtttctcttgtaaga

SEQ ID NO: 1533454 - DNA, 15 bp, Homo sapiens
agtttctcttgtaag

SEQ ID NO: 1533455 - DNA, 15 bp, Homo sapiens
tagtttctcttgtaa

SEQ ID NO: 1533456 - DNA, 15 bp, Homo sapiens
atagtttctcttgta

SEQ ID NO: 1533457 - DNA, 15 bp, Homo sapiens
tatagtttctcttgt

SEQ ID NO: 1533458 - DNA, 15 bp, Homo sapiens
gtatagtttctcttg

SEQ ID NO: 1533459 - DNA, 15 bp, Homo sapiens
agtatagtttctctt

SEQ ID NO: 1533460 - DNA, 15 bp, Homo sapiens
gagtatagtttctct

SEQ ID NO: 1533461 - DNA, 15 bp, Homo sapiens
agagtatagtttctc

SEQ ID NO: 1533462 - DNA, 15 bp, Homo sapiens
tagagtatagtttct

SEQ ID NO: 1533463 - DNA, 15 bp, Homo sapiens
ctagagtatagtttc

SEQ ID NO: 1533464 - DNA, 15 bp, Homo sapiens
cctagagtatagttt

SEQ ID NO: 1533465 - DNA, 15 bp, Homo sapiens
tcctagagtatagtt

SEQ ID NO: 1533466 - DNA, 15 bp, Homo sapiens
ctcctagagtatagt

SEQ ID NO: 1533467 - DNA, 15 bp, Homo sapiens
gctcctagagtatag

SEQ ID NO: 1533468 - DNA, 15 bp, Homo sapiens
ggctcctagagtata

SEQ ID NO: 1533469 - DNA, 15 bp, Homo sapiens
tggctcctagagtat

SEQ ID NO: 1533470 - DNA, 15 bp, Homo sapiens
gtggctcctagagta

SEQ ID NO: 1533471 - DNA, 15 bp, Homo sapiens
ggtggctcctagagt

SEQ ID NO: 1533472 - DNA, 15 bp, Homo sapiens
aggtggctcctagag

SEQ ID NO: 1533473 - DNA, 15 bp, Homo sapiens
aaggtggctcctaga

SEQ ID NO: 1533474 - DNA, 15 bp, Homo sapiens
aaaggtggctcctag

SEQ ID NO: 1533475 - DNA, 15 bp, Homo sapiens
aaaaggtggctccta

SEQ ID NO: 1533476 - DNA, 15 bp, Homo sapiens
caaaaggtggctcct

SEQ ID NO: 1533477 - DNA, 15 bp, Homo sapiens
acaaaaggtggctcc

SEQ ID NO: 1533478 - DNA, 15 bp, Homo sapiens
tacaaaaggtggctc

SEQ ID NO: 1533479 - DNA, 15 bp, Homo sapiens
atacaaaaggtggct

SEQ ID NO: 1533480 - DNA, 15 bp, Homo sapiens
tatacaaaaggtggc

SEQ ID NO: 1533481 - DNA, 15 bp, Homo sapiens
ttatacaaaaggtgg

SEQ ID NO: 1533482 - DNA, 15 bp, Homo sapiens
tttatacaaaaggtg

SEQ ID NO: 1533483 - DNA, 15 bp, Homo sapiens
ttttatacaaaaggt

SEQ ID NO: 1533484 - DNA, 15 bp, Homo sapiens
gttttatacaaaagg

SEQ ID NO: 1533485 - DNA, 15 bp, Homo sapiens
agttttatacaaaag

SEQ ID NO: 1533486 - DNA, 15 bp, Homo sapiens
tagttttatacaaaa

SEQ ID NO: 1533487 - DNA, 15 bp, Homo sapiens
ttagttttatacaaa

SEQ ID NO: 1533488 - DNA, 15 bp, Homo sapiens
attagttttatacaa

SEQ ID NO: 1533489 - DNA, 15 bp, Homo sapiens
cattagttttataca

SEQ ID NO: 1533490 - DNA, 15 bp, Homo sapiens
acattagttttatac

SEQ ID NO: 1533491 - DNA, 15 bp, Homo sapiens
aacattagttttata

SEQ ID NO: 1533492 - DNA, 15 bp, Homo sapiens
gaacattagttttat

SEQ ID NO: 1533493 - DNA, 15 bp, Homo sapiens
ggaacattagtttta

SEQ ID NO: 1533494 - DNA, 15 bp, Homo sapiens
aggaacattagtttt

SEQ ID NO: 1533495 - DNA, 15 bp, Homo sapiens
gaggaacattagttt

SEQ ID NO: 1533496 - DNA, 15 bp, Homo sapiens
cgaggaacattagtt

SEQ ID NO: 1533497 - DNA, 15 bp, Homo sapiens
tcgaggaacattagt

SEQ ID NO: 1533498 - DNA, 15 bp, Homo sapiens
ttcgaggaacattag

SEQ ID NO: 1533499 - DNA, 15 bp, Homo sapiens
tttcgaggaacatta

SEQ ID NO: 1533500 - DNA, 15 bp, Homo sapiens
ttttcgaggaacatt

SEQ ID NO: 1533501 - DNA, 15 bp, Homo sapiens
cttttcgaggaacat

SEQ ID NO: 1533502 - DNA, 15 bp, Homo sapiens
acttttcgaggaaca

SEQ ID NO: 1533503 - DNA, 15 bp, Homo sapiens
tacttttcgaggaac

SEQ ID NO: 1533504 - DNA, 15 bp, Homo sapiens
atacttttcgaggaa

SEQ ID NO: 1533505 - DNA, 15 bp, Homo sapiens
gatacttttcgagga

SEQ ID NO: 1533506 - DNA, 15 bp, Homo sapiens
agatacttttcgagg

SEQ ID NO: 1533507 - DNA, 15 bp, Homo sapiens
cagatacttttcgag

SEQ ID NO: 1533508 - DNA, 15 bp, Homo sapiens
gcagatacttttcga

SEQ ID NO: 1533509 - DNA, 15 bp, Homo sapiens
tgcagatacttttcg

SEQ ID NO: 1533510 - DNA, 15 bp, Homo sapiens
atgcagatacttttc

SEQ ID NO: 1533511 - DNA, 15 bp, Homo sapiens
aatgcagatactttt

SEQ ID NO: 1533512 - DNA, 15 bp, Homo sapiens
aaatgcagatacttt

SEQ ID NO: 1533513 - DNA, 15 bp, Homo sapiens
aaaatgcagatactt

SEQ ID NO: 1533514 - DNA, 15 bp, Homo sapiens
taaaatgcagatact

SEQ ID NO: 1533515 - DNA, 15 bp, Homo sapiens
ttaaaatgcagatac

SEQ ID NO: 1533516 - DNA, 15 bp, Homo sapiens
cttaaaatgcagata

SEQ ID NO: 1533517 - DNA, 15 bp, Homo sapiens
tcttaaaatgcagat

SEQ ID NO: 1533518 - DNA, 15 bp, Homo sapiens
ctcttaaaatgcaga

SEQ ID NO: 1533519 - DNA, 15 bp, Homo sapiens
actcttaaaatgcag

SEQ ID NO: 1533520 - DNA, 15 bp, Homo sapiens
gactcttaaaatgca

SEQ ID NO: 1533521 - DNA, 15 bp, Homo sapiens
ggactcttaaaatgc

SEQ ID NO: 1533522 - DNA, 15 bp, Homo sapiens
cggactcttaaaatg

SEQ ID NO: 1533523 - DNA, 15 bp, Homo sapiens
gcggactcttaaaat

SEQ ID NO: 1533524 - DNA, 15 bp, Homo sapiens
tgcggactcttaaaa

SEQ ID NO: 1533525 - DNA, 15 bp, Homo sapiens
ttgcggactcttaaa

SEQ ID NO: 1533526 - DNA, 15 bp, Homo sapiens
gttgcggactcttaa

SEQ ID NO: 1533527 - DNA, 15 bp, Homo sapiens
tgttgcggactctta

SEQ ID NO: 1533528 - DNA, 15 bp, Homo sapiens
atgttgcggactctt

SEQ ID NO: 1533529 - DNA, 15 bp, Homo sapiens
tatgttgcggactct

SEQ ID NO: 1533530 - DNA, 15 bp, Homo sapiens
ctatgttgcggactc

SEQ ID NO: 1533531 - DNA, 15 bp, Homo sapiens
tctatgttgcggact

SEQ ID NO: 1533532 - DNA, 15 bp, Homo sapiens
ttctatgttgcggac

SEQ ID NO: 1533533 - DNA, 15 bp, Homo sapiens
cttctatgttgcgga

SEQ ID NO: 1533534 - DNA, 15 bp, Homo sapiens
acttctatgttgcgg

SEQ ID NO: 1533535 - DNA, 15 bp, Homo sapiens
aacttctatgttgcg

SEQ ID NO: 1533536 - DNA, 15 bp, Homo sapiens
aaacttctatgttgc

SEQ ID NO: 1533537 - DNA, 15 bp, Homo sapiens
taaacttctatgttg

SEQ ID NO: 1533538 - DNA, 15 bp, Homo sapiens
ataaacttctatgtt

SEQ ID NO: 1533539 - DNA, 15 bp, Homo sapiens
aataaacttctatgt

SEQ ID NO: 1533540 - DNA, 15 bp, Homo sapiens
caataaacttctatg

SEQ ID NO: 1533541 - DNA, 15 bp, Homo sapiens
acaataaacttctat

SEQ ID NO: 1533542 - DNA, 15 bp, Homo sapiens
aacaataaacttcta

SEQ ID NO: 1533543 - DNA, 15 bp, Homo sapiens
caacaataaacttct

SEQ ID NO: 1533544 - DNA, 15 bp, Homo sapiens
tcaacaataaacttc

SEQ ID NO: 1533545 - DNA, 15 bp, Homo sapiens
atcaacaataaactt

SEQ ID NO: 1533546 - DNA, 15 bp, Homo sapiens
aatcaacaataaact

SEQ ID NO: 1533547 - DNA, 15 bp, Homo sapiens
caatcaacaataaac

SEQ ID NO: 1533548 - DNA, 15 bp, Homo sapiens
ccaatcaacaataaa

SEQ ID NO: 1533549 - DNA, 15 bp, Homo sapiens
cccaatcaacaataa

SEQ ID NO: 1533550 - DNA, 15 bp, Homo sapiens
acccaatcaacaata

SEQ ID NO: 1533551 - DNA, 15 bp, Homo sapiens
cacccaatcaacaat

SEQ ID NO: 1533552 - DNA, 15 bp, Homo sapiens
gcacccaatcaacaa

SEQ ID NO: 1533553 - DNA, 15 bp, Homo sapiens
agcacccaatcaaca

SEQ ID NO: 1533554 - DNA, 15 bp, Homo sapiens
aagcacccaatcaac

SEQ ID NO: 1533555 - DNA, 15 bp, Homo sapiens
aaagcacccaatcaa

SEQ ID NO: 1533556 - DNA, 15 bp, Homo sapiens
taaagcacccaatca

SEQ ID NO: 1533557 - DNA, 15 bp, Homo sapiens
ataaagcacccaatc

SEQ ID NO: 1533558 - DNA, 15 bp, Homo sapiens
aataaagcacccaat

SEQ ID NO: 1533559 - DNA, 15 bp, Homo sapiens
caataaagcacccaa

SEQ ID NO: 1533560 - DNA, 15 bp, Homo sapiens
gcaataaagcaccca

SEQ ID NO: 1533561 - DNA, 15 bp, Homo sapiens
ggcaataaagcaccc

SEQ ID NO: 1533562 - DNA, 15 bp, Homo sapiens
tggcaataaagcacc

SEQ ID NO: 1533563 - DNA, 15 bp, Homo sapiens
gtggcaataaagcac

SEQ ID NO: 1533564 - DNA, 15 bp, Homo sapiens
agtggcaataaagca

SEQ ID NO: 1533565 - DNA, 15 bp, Homo sapiens
aagtggcaataaagc

SEQ ID NO: 1533566 - DNA, 15 bp, Homo sapiens
aaagtggcaataaag

SEQ ID NO: 1533567 - DNA, 15 bp, Homo sapiens
taaagtggcaataaa

SEQ ID NO: 1533568 - DNA, 15 bp, Homo sapiens
gtaaagtggcaataa

SEQ ID NO: 1533569 - DNA, 15 bp, Homo sapiens
agtaaagtggcaata

SEQ ID NO: 1533570 - DNA, 15 bp, Homo sapiens
aagtaaagtggcaat

SEQ ID NO: 1533571 - DNA, 15 bp, Homo sapiens
aaagtaaagtggcaa

SEQ ID NO: 1533572 - DNA, 15 bp, Homo sapiens
caaagtaaagtggca

SEQ ID NO: 1533573 - DNA, 15 bp, Homo sapiens
tcaaagtaaagtggc

SEQ ID NO: 1533574 - DNA, 15 bp, Homo sapiens
ctcaaagtaaagtgg

SEQ ID NO: 1533575 - DNA, 15 bp, Homo sapiens
cctcaaagtaaagtg

SEQ ID NO: 1533576 - DNA, 15 bp, Homo sapiens
ccctcaaagtaaagt

SEQ ID NO: 1533577 - DNA, 15 bp, Homo sapiens
accctcaaagtaaag

SEQ ID NO: 1533578 - DNA, 15 bp, Homo sapiens
aaccctcaaagtaaa

SEQ ID NO: 1533579 - DNA, 15 bp, Homo sapiens
gaaccctcaaagtaa

SEQ ID NO: 1533580 - DNA, 15 bp, Homo sapiens
tgaaccctcaaagta

SEQ ID NO: 1533581 - DNA, 15 bp, Homo sapiens
ctgaaccctcaaagt

SEQ ID NO: 1533582 - DNA, 15 bp, Homo sapiens
actgaaccctcaaag

SEQ ID NO: 1533583 - DNA, 15 bp, Homo sapiens
aactgaaccctcaaa

SEQ ID NO: 1533584 - DNA, 15 bp, Homo sapiens
caactgaaccctcaa

SEQ ID NO: 1533585 - DNA, 15 bp, Homo sapiens
tcaactgaaccctca

SEQ ID NO: 1533586 - DNA, 15 bp, Homo sapiens
ttcaactgaaccctc

SEQ ID NO: 1533587 - DNA, 15 bp, Homo sapiens
gttcaactgaaccct

SEQ ID NO: 1533588 - DNA, 15 bp, Homo sapiens
agttcaactgaaccc

SEQ ID NO: 1533589 - DNA, 15 bp, Homo sapiens
gagttcaactgaacc

SEQ ID NO: 1533590 - DNA, 15 bp, Homo sapiens
agagttcaactgaac

SEQ ID NO: 1533591 - DNA, 15 bp, Homo sapiens
gagagttcaactgaa

SEQ ID NO: 1533592 - DNA, 15 bp, Homo sapiens
tgagagttcaactga

SEQ ID NO: 1533593 - DNA, 15 bp, Homo sapiens
ttgagagttcaactg

SEQ ID NO: 1533594 - DNA, 15 bp, Homo sapiens
attgagagttcaact

SEQ ID NO: 1533595 - DNA, 15 bp, Homo sapiens
aattgagagttcaac

SEQ ID NO: 1533596 - DNA, 15 bp, Homo sapiens
caattgagagttcaa

SEQ ID NO: 1533597 - DNA, 15 bp, Homo sapiens
ccaattgagagttca

SEQ ID NO: 1533598 - DNA, 15 bp, Homo sapiens
tccaattgagagttc

SEQ ID NO: 1533599 - DNA, 15 bp, Homo sapiens
atccaattgagagtt

SEQ ID NO: 1533600 - DNA, 15 bp, Homo sapiens
aatccaattgagagt

SEQ ID NO: 1533601 - DNA, 15 bp, Homo sapiens
gaatccaattgagag

SEQ ID NO: 1533602 - DNA, 15 bp, Homo sapiens
agaatccaattgaga

SEQ ID NO: 1533603 - DNA, 15 bp, Homo sapiens
aagaatccaattgag

SEQ ID NO: 1533604 - DNA, 15 bp, Homo sapiens
taagaatccaattga

SEQ ID NO: 1533605 - DNA, 15 bp, Homo sapiens
gtaagaatccaattg

SEQ ID NO: 1533606 - DNA, 15 bp, Homo sapiens
agtaagaatccaatt

SEQ ID NO: 1533607 - DNA, 15 bp, Homo sapiens
cagtaagaatccaat

SEQ ID NO: 1533608 - DNA, 15 bp, Homo sapiens
acagtaagaatccaa

SEQ ID NO: 1533609 - DNA, 15 bp, Homo sapiens
cacagtaagaatcca

SEQ ID NO: 1533610 - DNA, 15 bp, Homo sapiens
ccacagtaagaatcc

SEQ ID NO: 1533611 - DNA, 15 bp, Homo sapiens
tccacagtaagaatc

SEQ ID NO: 1533612 - DNA, 15 bp, Homo sapiens
atccacagtaagaat

SEQ ID NO: 1533613 - DNA, 15 bp, Homo sapiens
aatccacagtaagaa

SEQ ID NO: 1533614 - DNA, 15 bp, Homo sapiens
aaatccacagtaaga

SEQ ID NO: 1533615 - DNA, 15 bp, Homo sapiens
taaatccacagtaag

SEQ ID NO: 1533616 - DNA, 15 bp, Homo sapiens
ctaaatccacagtaa

SEQ ID NO: 1533617 - DNA, 15 bp, Homo sapiens
cctaaatccacagta

SEQ ID NO: 1533618 - DNA, 15 bp, Homo sapiens
tcctaaatccacagt

SEQ ID NO: 1533619 - DNA, 15 bp, Homo sapiens
ttcctaaatccacag

SEQ ID NO: 1533620 - DNA, 15 bp, Homo sapiens
tttcctaaatccaca

SEQ ID NO: 1533621 - DNA, 15 bp, Homo sapiens
gtttcctaaatccac

SEQ ID NO: 1533622 - DNA, 15 bp, Homo sapiens
ggtttcctaaatcca

SEQ ID NO: 1533623 - DNA, 15 bp, Homo sapiens
tggtttcctaaatcc

SEQ ID NO: 1533624 - DNA, 15 bp, Homo sapiens
ctggtttcctaaatc

SEQ ID NO: 1533625 - DNA, 15 bp, Homo sapiens
gctggtttcctaaat

SEQ ID NO: 1533626 - DNA, 15 bp, Homo sapiens
ggctggtttcctaaa

SEQ ID NO: 1533627 - DNA, 15 bp, Homo sapiens
tggctggtttcctaa

SEQ ID NO: 1533628 - DNA, 15 bp, Homo sapiens
atggctggtttccta

SEQ ID NO: 1533629 - DNA, 15 bp, Homo sapiens
gatggctggtttcct

SEQ ID NO: 1533630 - DNA, 15 bp, Homo sapiens
tgatggctggtttcc

SEQ ID NO: 1533631 - DNA, 15 bp, Homo sapiens
ttgatggctggtttc

SEQ ID NO: 1533632 - DNA, 15 bp, Homo sapiens
attgatggctggttt

SEQ ID NO: 1533633 - DNA, 15 bp, Homo sapiens
gattgatggctggtt

SEQ ID NO: 1533634 - DNA, 15 bp, Homo sapiens
tgattgatggctggt

SEQ ID NO: 1533635 - DNA, 15 bp, Homo sapiens
atgattgatggctgg

SEQ ID NO: 1533636 - DNA, 15 bp, Homo sapiens
tatgattgatggctg

SEQ ID NO: 1533637 - DNA, 15 bp, Homo sapiens
ctatgattgatggct

SEQ ID NO: 1533638 - DNA, 15 bp, Homo sapiens
actatgattgatggc

SEQ ID NO: 1533639 - DNA, 15 bp, Homo sapiens
cactatgattgatgg

SEQ ID NO: 1533640 - DNA, 15 bp, Homo sapiens
gcactatgattgatg

SEQ ID NO: 1533641 - DNA, 15 bp, Homo sapiens
agcactatgattgat

SEQ ID NO: 1533642 - DNA, 15 bp, Homo sapiens
aagcactatgattga

SEQ ID NO: 1533643 - DNA, 15 bp, Homo sapiens
taagcactatgattg

SEQ ID NO: 1533644 - DNA, 15 bp, Homo sapiens
ttaagcactatgatt

SEQ ID NO: 1533645 - DNA, 15 bp, Homo sapiens
tttaagcactatgat

SEQ ID NO: 1533646 - DNA, 15 bp, Homo sapiens
ttttaagcactatga

SEQ ID NO: 1533647 - DNA, 15 bp, Homo sapiens
attttaagcactatg

SEQ ID NO: 1533648 - DNA, 15 bp, Homo sapiens
tattttaagcactat

SEQ ID NO: 1533649 - DNA, 15 bp, Homo sapiens
ttattttaagcacta

SEQ ID NO: 1533650 - DNA, 15 bp, Homo sapiens
attattttaagcact

SEQ ID NO: 1533651 - DNA, 15 bp, Homo sapiens
cattattttaagcac

SEQ ID NO: 1533652 - DNA, 15 bp, Homo sapiens
acattattttaagca

SEQ ID NO: 1533653 - DNA, 15 bp, Homo sapiens
cacattattttaagc

SEQ ID NO: 1533654 - DNA, 15 bp, Homo sapiens
acacattattttaag

SEQ ID NO: 1533655 - DNA, 15 bp, Homo sapiens
aacacattattttaa

SEQ ID NO: 1533656 - DNA, 15 bp, Homo sapiens
taacacattatttta

SEQ ID NO: 1533657 - DNA, 15 bp, Homo sapiens
ttaacacattatttt

SEQ ID NO: 1533658 - DNA, 15 bp, Homo sapiens
tttaacacattattt

SEQ ID NO: 1533659 - DNA, 15 bp, Homo sapiens
ttttaacacattatt

SEQ ID NO: 1533660 - DNA, 15 bp, Homo sapiens
tttttaacacattat

SEQ ID NO: 1533661 - DNA, 15 bp, Homo sapiens
atttttaacacatta

SEQ ID NO: 1533662 - DNA, 15 bp, Homo sapiens
tatttttaacacatt

SEQ ID NO: 1533663 - DNA, 15 bp, Homo sapiens
gtatttttaacacat

SEQ ID NO: 1533664 - DNA, 15 bp, Homo sapiens
agtatttttaacaca

SEQ ID NO: 1533665 - DNA, 15 bp, Homo sapiens
tagtatttttaacac

SEQ ID NO: 1533666 - DNA, 15 bp, Homo sapiens
gtagtatttttaaca

SEQ ID NO: 1533667 - DNA, 15 bp, Homo sapiens
tgtagtatttttaac

SEQ ID NO: 1533668 - DNA, 15 bp, Homo sapiens
atgtagtatttttaa

SEQ ID NO: 1533669 - DNA, 15 bp, Homo sapiens
aatgtagtattttta

SEQ ID NO: 1533670 - DNA, 15 bp, Homo sapiens
gaatgtagtattttt

SEQ ID NO: 1533671 - DNA, 15 bp, Homo sapiens
tgaatgtagtatttt

SEQ ID NO: 1533672 - DNA, 15 bp, Homo sapiens
ctgaatgtagtattt

SEQ ID NO: 1533673 - DNA, 15 bp, Homo sapiens
gctgaatgtagtatt

SEQ ID NO: 1533674 - DNA, 15 bp, Homo sapiens
tgctgaatgtagtat

SEQ ID NO: 1533675 - DNA, 15 bp, Homo sapiens
ttgctgaatgtagta

SEQ ID NO: 1533676 - DNA, 15 bp, Homo sapiens
attgctgaatgtagt

SEQ ID NO: 1533677 - DNA, 15 bp, Homo sapiens
tattgctgaatgtag

SEQ ID NO: 1533678 - DNA, 15 bp, Homo sapiens
atattgctgaatgta

SEQ ID NO: 1533679 - DNA, 15 bp, Homo sapiens
aatattgctgaatgt

SEQ ID NO: 1533680 - DNA, 15 bp, Homo sapiens
caatattgctgaatg

SEQ ID NO: 1533681 - DNA, 15 bp, Homo sapiens
acaatattgctgaat

SEQ ID NO: 1533682 - DNA, 15 bp, Homo sapiens
cacaatattgctgaa

SEQ ID NO: 1533683 - DNA, 15 bp, Homo sapiens
ccacaatattgctga

SEQ ID NO: 1533684 - DNA, 15 bp, Homo sapiens
tccacaatattgctg

SEQ ID NO: 1533685 - DNA, 15 bp, Homo sapiens
ttccacaatattgct

SEQ ID NO: 1533686 - DNA, 15 bp, Homo sapiens
tttccacaatattgc

SEQ ID NO: 1533687 - DNA, 15 bp, Homo sapiens
atttccacaatattg

SEQ ID NO: 1533688 - DNA, 15 bp, Homo sapiens
tatttccacaatatt

SEQ ID NO: 1533689 - DNA, 15 bp, Homo sapiens
ctatttccacaatat

SEQ ID NO: 1533690 - DNA, 15 bp, Homo sapiens
cctatttccacaata

SEQ ID NO: 1533691 - DNA, 15 bp, Homo sapiens
ccctatttccacaat

SEQ ID NO: 1533692 - DNA, 15 bp, Homo sapiens
tccctatttccacaa

SEQ ID NO: 1533693 - DNA, 15 bp, Homo sapiens
ttccctatttccaca

SEQ ID NO: 1533694 - DNA, 15 bp, Homo sapiens
attccctatttccac

SEQ ID NO: 1533695 - DNA, 15 bp, Homo sapiens
cattccctatttcca

SEQ ID NO: 1533696 - DNA, 15 bp, Homo sapiens
gcattccctatttcc

SEQ ID NO: 1533697 - DNA, 15 bp, Homo sapiens
tgcattccctatttc

SEQ ID NO: 1533698 - DNA, 15 bp, Homo sapiens
atgcattccctattt

SEQ ID NO: 1533699 - DNA, 15 bp, Homo sapiens
aatgcattccctatt

SEQ ID NO: 1533700 - DNA, 15 bp, Homo sapiens
caatgcattccctat

SEQ ID NO: 1533701 - DNA, 15 bp, Homo sapiens
tcaatgcattcccta

SEQ ID NO: 1533702 - DNA, 15 bp, Homo sapiens
gtcaatgcattccct

SEQ ID NO: 1533703 - DNA, 15 bp, Homo sapiens
tgtcaatgcattccc

SEQ ID NO: 1533704 - DNA, 15 bp, Homo sapiens
atgtcaatgcattcc

SEQ ID NO: 1533705 - DNA, 15 bp, Homo sapiens
aatgtcaatgcattc

SEQ ID NO: 1533706 - DNA, 15 bp, Homo sapiens
aaatgtcaatgcatt

SEQ ID NO: 1533707 - DNA, 15 bp, Homo sapiens
taaatgtcaatgcat

SEQ ID NO: 1533708 - DNA, 15 bp, Homo sapiens
ctaaatgtcaatgca

SEQ ID NO: 1533709 - DNA, 15 bp, Homo sapiens
tctaaatgtcaatgc

SEQ ID NO: 1533710 - DNA, 15 bp, Homo sapiens
ctctaaatgtcaatg

SEQ ID NO: 1533711 - DNA, 15 bp, Homo sapiens
actctaaatgtcaat

SEQ ID NO: 1533712 - DNA, 15 bp, Homo sapiens
aactctaaatgtcaa

SEQ ID NO: 1533713 - DNA, 15 bp, Homo sapiens
gaactctaaatgtca

SEQ ID NO: 1533714 - DNA, 15 bp, Homo sapiens
agaactctaaatgtc

SEQ ID NO: 1533715 - DNA, 15 bp, Homo sapiens
tagaactctaaatgt

SEQ ID NO: 1533716 - DNA, 15 bp, Homo sapiens
atagaactctaaatg

SEQ ID NO: 1533717 - DNA, 15 bp, Homo sapiens
aatagaactctaaat

SEQ ID NO: 1533718 - DNA, 15 bp, Homo sapiens
aaatagaactctaaa

SEQ ID NO: 1533719 - DNA, 15 bp, Homo sapiens
taaatagaactctaa

SEQ ID NO: 1533720 - DNA, 15 bp, Homo sapiens
ttaaatagaactcta

SEQ ID NO: 1533721 - DNA, 15 bp, Homo sapiens
cttaaatagaactct

SEQ ID NO: 1533722 - DNA, 15 bp, Homo sapiens
gcttaaatagaactc

SEQ ID NO: 1533723 - DNA, 15 bp, Homo sapiens
agcttaaatagaact

SEQ ID NO: 1533724 - DNA, 15 bp, Homo sapiens
gagcttaaatagaac

SEQ ID NO: 1533725 - DNA, 15 bp, Homo sapiens
tgagcttaaatagaa

SEQ ID NO: 1533726 - DNA, 15 bp, Homo sapiens
atgagcttaaataga

SEQ ID NO: 1533727 - DNA, 15 bp, Homo sapiens
tatgagcttaaatag

SEQ ID NO: 1533728 - DNA, 15 bp, Homo sapiens
atatgagcttaaata

SEQ ID NO: 1533729 - DNA, 15 bp, Homo sapiens
tatatgagcttaaat

SEQ ID NO: 1533730 - DNA, 15 bp, Homo sapiens
atatatgagcttaaa

SEQ ID NO: 1533731 - DNA, 15 bp, Homo sapiens
tatatatgagcttaa

SEQ ID NO: 1533732 - DNA, 15 bp, Homo sapiens
gtatatatgagctta

SEQ ID NO: 1533733 - DNA, 15 bp, Homo sapiens
tgtatatatgagctt

SEQ ID NO: 1533734 - DNA, 15 bp, Homo sapiens
gtgtatatatgagct

SEQ ID NO: 1533735 - DNA, 15 bp, Homo sapiens
agtgtatatatgagc

SEQ ID NO: 1533736 - DNA, 15 bp, Homo sapiens
cagtgtatatatgag

SEQ ID NO: 1533737 - DNA, 15 bp, Homo sapiens
gcagtgtatatatga

SEQ ID NO: 1533738 - DNA, 15 bp, Homo sapiens
agcagtgtatatatg

SEQ ID NO: 1533739 - DNA, 15 bp, Homo sapiens
cagcagtgtatatat

SEQ ID NO: 1533740 - DNA, 15 bp, Homo sapiens
gcagcagtgtatata

SEQ ID NO: 1533741 - DNA, 15 bp, Homo sapiens
tgcagcagtgtatat

SEQ ID NO: 1533742 - DNA, 15 bp, Homo sapiens
gtgcagcagtgtata

SEQ ID NO: 1533743 - DNA, 15 bp, Homo sapiens
agtgcagcagtgtat

SEQ ID NO: 1533744 - DNA, 15 bp, Homo sapiens
aagtgcagcagtgta

SEQ ID NO: 1533745 - DNA, 15 bp, Homo sapiens
gaagtgcagcagtgt

SEQ ID NO: 1533746 - DNA, 15 bp, Homo sapiens
agaagtgcagcagtg

SEQ ID NO: 1533747 - DNA, 15 bp, Homo sapiens
tagaagtgcagcagt

SEQ ID NO: 1533748 - DNA, 15 bp, Homo sapiens
ttagaagtgcagcag

SEQ ID NO: 1533749 - DNA, 15 bp, Homo sapiens
tttagaagtgcagca

SEQ ID NO: 1533750 - DNA, 15 bp, Homo sapiens
ctttagaagtgcagc

SEQ ID NO: 1533751 - DNA, 15 bp, Homo sapiens
tctttagaagtgcag

SEQ ID NO: 1533752 - DNA, 15 bp, Homo sapiens
atctttagaagtgca

SEQ ID NO: 1533753 - DNA, 15 bp, Homo sapiens
catctttagaagtgc

SEQ ID NO: 1533754 - DNA, 15 bp, Homo sapiens
acatctttagaagtg

SEQ ID NO: 1533755 - DNA, 15 bp, Homo sapiens
cacatctttagaagt

SEQ ID NO: 1533756 - DNA, 15 bp, Homo sapiens
tcacatctttagaag

SEQ ID NO: 1533757 - DNA, 15 bp, Homo sapiens
gtcacatctttagaa

SEQ ID NO: 1533758 - DNA, 15 bp, Homo sapiens
agtcacatctttaga

SEQ ID NO: 1533759 - DNA, 15 bp, Homo sapiens
cagtcacatctttag

SEQ ID NO: 1533760 - DNA, 15 bp, Homo sapiens
tcagtcacatcttta

SEQ ID NO: 1533761 - DNA, 15 bp, Homo sapiens
ctcagtcacatcttt

SEQ ID NO: 1533762 - DNA, 15 bp, Homo sapiens
cctcagtcacatctt

SEQ ID NO: 1533763 - DNA, 15 bp, Homo sapiens
ccctcagtcacatct

SEQ ID NO: 1533764 - DNA, 15 bp, Homo sapiens
accctcagtcacatc

SEQ ID NO: 1533765 - DNA, 15 bp, Homo sapiens
gaccctcagtcacat

SEQ ID NO: 1533766 - DNA, 15 bp, Homo sapiens
tgaccctcagtcaca

SEQ ID NO: 1533767 - DNA, 15 bp, Homo sapiens
ttgaccctcagtcac

SEQ ID NO: 1533768 - DNA, 15 bp, Homo sapiens
attgaccctcagtca

SEQ ID NO: 1533769 - DNA, 15 bp, Homo sapiens
aattgaccctcagtc

SEQ ID NO: 1533770 - DNA, 15 bp, Homo sapiens
aaattgaccctcagt

SEQ ID NO: 1533771 - DNA, 15 bp, Homo sapiens
taaattgaccctcag

SEQ ID NO: 1533772 - DNA, 15 bp, Homo sapiens
gtaaattgaccctca

SEQ ID NO: 1533773 - DNA, 15 bp, Homo sapiens
ggtaaattgaccctc

SEQ ID NO: 1533774 - DNA, 15 bp, Homo sapiens
cggtaaattgaccct

SEQ ID NO: 1533775 - DNA, 15 bp, Homo sapiens
tcggtaaattgaccc

SEQ ID NO: 1533776 - DNA, 15 bp, Homo sapiens
gtcggtaaattgacc

SEQ ID NO: 1533777 - DNA, 15 bp, Homo sapiens
ggtcggtaaattgac

SEQ ID NO: 1533778 - DNA, 15 bp, Homo sapiens
tggtcggtaaattga

SEQ ID NO: 1533779 - DNA, 15 bp, Homo sapiens
gtggtcggtaaattg

SEQ ID NO: 1533780 - DNA, 15 bp, Homo sapiens
agtggtcggtaaatt

SEQ ID NO: 1533781 - DNA, 15 bp, Homo sapiens
aagtggtcggtaaat

SEQ ID NO: 1533782 - DNA, 15 bp, Homo sapiens
taagtggtcggtaaa

SEQ ID NO: 1533783 - DNA, 15 bp, Homo sapiens
ttaagtggtcggtaa

SEQ ID NO: 1533784 - DNA, 15 bp, Homo sapiens
tttaagtggtcggta

SEQ ID NO: 1533785 - DNA, 15 bp, Homo sapiens
atttaagtggtcggt

SEQ ID NO: 1533786 - DNA, 15 bp, Homo sapiens
gatttaagtggtcgg

SEQ ID NO: 1533787 - DNA, 15 bp, Homo sapiens
agatttaagtggtcg

SEQ ID NO: 1533788 - DNA, 15 bp, Homo sapiens
gagatttaagtggtc

SEQ ID NO: 1533789 - DNA, 15 bp, Homo sapiens
agagatttaagtggt

SEQ ID NO: 1533790 - DNA, 15 bp, Homo sapiens
aagagatttaagtgg

SEQ ID NO: 1533791 - DNA, 15 bp, Homo sapiens
taagagatttaagtg

SEQ ID NO: 1533792 - DNA, 15 bp, Homo sapiens
ttaagagatttaagt

SEQ ID NO: 1533793 - DNA, 15 bp, Homo sapiens
attaagagatttaag

SEQ ID NO: 1533794 - DNA, 15 bp, Homo sapiens
aattaagagatttaa

SEQ ID NO: 1533795 - DNA, 15 bp, Homo sapiens
aaattaagagattta

SEQ ID NO: 1533796 - DNA, 15 bp, Homo sapiens
aaaattaagagattt

SEQ ID NO: 1533797 - DNA, 15 bp, Homo sapiens
taaaattaagagatt

SEQ ID NO: 1533798 - DNA, 15 bp, Homo sapiens
ctaaaattaagagat

SEQ ID NO: 1533799 - DNA, 15 bp, Homo sapiens
cctaaaattaagaga

SEQ ID NO: 1533800 - DNA, 15 bp, Homo sapiens
tcctaaaattaagag

SEQ ID NO: 1533801 - DNA, 15 bp, Homo sapiens
ttcctaaaattaaga

SEQ ID NO: 1533802 - DNA, 15 bp, Homo sapiens
tttcctaaaattaag

SEQ ID NO: 1533803 - DNA, 15 bp, Homo sapiens
gtttcctaaaattaa

SEQ ID NO: 1533804 - DNA, 15 bp, Homo sapiens
ggtttcctaaaatta

SEQ ID NO: 1533805 - DNA, 15 bp, Homo sapiens
aggtttcctaaaatt

SEQ ID NO: 1533806 - DNA, 15 bp, Homo sapiens
gaggtttcctaaaat

SEQ ID NO: 1533807 - DNA, 15 bp, Homo sapiens
tgaggtttcctaaaa

SEQ ID NO: 1533808 - DNA, 15 bp, Homo sapiens
atgaggtttcctaaa

SEQ ID NO: 1533809 - DNA, 15 bp, Homo sapiens
aatgaggtttcctaa

SEQ ID NO: 1533810 - DNA, 15 bp, Homo sapiens
taatgaggtttccta

SEQ ID NO: 1533811 - DNA, 15 bp, Homo sapiens
ttaatgaggtttcct

SEQ ID NO: 1533812 - DNA, 15 bp, Homo sapiens
cttaatgaggtttcc

SEQ ID NO: 1533813 - DNA, 15 bp, Homo sapiens
acttaatgaggtttc

SEQ ID NO: 1533814 - DNA, 15 bp, Homo sapiens
gacttaatgaggttt

SEQ ID NO: 1533815 - DNA, 15 bp, Homo sapiens
tgacttaatgaggtt

SEQ ID NO: 1533816 - DNA, 15 bp, Homo sapiens
ctgacttaatgaggt

SEQ ID NO: 1533817 - DNA, 15 bp, Homo sapiens
actgacttaatgagg

SEQ ID NO: 1533818 - DNA, 15 bp, Homo sapiens
cactgacttaatgag

SEQ ID NO: 1533819 - DNA, 15 bp, Homo sapiens
acactgacttaatga

SEQ ID NO: 1533820 - DNA, 15 bp, Homo sapiens
tacactgacttaatg

SEQ ID NO: 1533821 - DNA, 15 bp, Homo sapiens
ctacactgacttaat

SEQ ID NO: 1533822 - DNA, 15 bp, Homo sapiens
tctacactgacttaa

SEQ ID NO: 1533823 - DNA, 15 bp, Homo sapiens
ttctacactgactta

SEQ ID NO: 1533824 - DNA, 15 bp, Homo sapiens
cttctacactgactt

SEQ ID NO: 1533825 - DNA, 15 bp, Homo sapiens
acttctacactgact

SEQ ID NO: 1533826 - DNA, 15 bp, Homo sapiens
tacttctacactgac

SEQ ID NO: 1533827 - DNA, 15 bp, Homo sapiens
ctacttctacactga

SEQ ID NO: 1533828 - DNA, 15 bp, Homo sapiens
tctacttctacactg

SEQ ID NO: 1533829 - DNA, 15 bp, Homo sapiens
ctctacttctacact

SEQ ID NO: 1533830 - DNA, 15 bp, Homo sapiens
actctacttctacac

SEQ ID NO: 1533831 - DNA, 15 bp, Homo sapiens
aactctacttctaca

SEQ ID NO: 1533832 - DNA, 15 bp, Homo sapiens
taactctacttctac

SEQ ID NO: 1533833 - DNA, 15 bp, Homo sapiens
ataactctacttcta

SEQ ID NO: 1533834 - DNA, 15 bp, Homo sapiens
cataactctacttct

SEQ ID NO: 1533835 - DNA, 15 bp, Homo sapiens
gcataactctacttc

SEQ ID NO: 1533836 - DNA, 15 bp, Homo sapiens
tgcataactctactt

SEQ ID NO: 1533837 - DNA, 15 bp, Homo sapiens
atgcataactctact

SEQ ID NO: 1533838 - DNA, 15 bp, Homo sapiens
aatgcataactctac

SEQ ID NO: 1533839 - DNA, 15 bp, Homo sapiens
aaatgcataactcta

SEQ ID NO: 1533840 - DNA, 15 bp, Homo sapiens
aaaatgcataactct

SEQ ID NO: 1533841 - DNA, 15 bp, Homo sapiens
gaaaatgcataactc

SEQ ID NO: 1533842 - DNA, 15 bp, Homo sapiens
tgaaaatgcataact

SEQ ID NO: 1533843 - DNA, 15 bp, Homo sapiens
atgaaaatgcataac

SEQ ID NO: 1533844 - DNA, 15 bp, Homo sapiens
aatgaaaatgcataa

SEQ ID NO: 1533845 - DNA, 15 bp, Homo sapiens
taatgaaaatgcata

SEQ ID NO: 1533846 - DNA, 15 bp, Homo sapiens
gtaatgaaaatgcat

SEQ ID NO: 1533847 - DNA, 15 bp, Homo sapiens
tgtaatgaaaatgca

SEQ ID NO: 1533848 - DNA, 15 bp, Homo sapiens
gtgtaatgaaaatgc

SEQ ID NO: 1533849 - DNA, 15 bp, Homo sapiens
agtgtaatgaaaatg

SEQ ID NO: 1533850 - DNA, 15 bp, Homo sapiens
aagtgtaatgaaaat

SEQ ID NO: 1533851 - DNA, 15 bp, Homo sapiens
taagtgtaatgaaaa

SEQ ID NO: 1533852 - DNA, 15 bp, Homo sapiens
ttaagtgtaatgaaa

SEQ ID NO: 1533853 - DNA, 15 bp, Homo sapiens
gttaagtgtaatgaa

SEQ ID NO: 1533854 - DNA, 15 bp, Homo sapiens
tgttaagtgtaatga

SEQ ID NO: 1533855 - DNA, 15 bp, Homo sapiens
ctgttaagtgtaatg

SEQ ID NO: 1533856 - DNA, 15 bp, Homo sapiens
actgttaagtgtaat

SEQ ID NO: 1533857 - DNA, 15 bp, Homo sapiens
tactgttaagtgtaa

SEQ ID NO: 1533858 - DNA, 15 bp, Homo sapiens
gtactgttaagtgta

SEQ ID NO: 1533859 - DNA, 15 bp, Homo sapiens
agtactgttaagtgt

SEQ ID NO: 1533860 - DNA, 15 bp, Homo sapiens
aagtactgttaagtg

SEQ ID NO: 1533861 - DNA, 15 bp, Homo sapiens
aaagtactgttaagt

SEQ ID NO: 1533862 - DNA, 15 bp, Homo sapiens
aaaagtactgttaag

SEQ ID NO: 1533863 - DNA, 15 bp, Homo sapiens
caaaagtactgttaa

SEQ ID NO: 1533864 - DNA, 15 bp, Homo sapiens
acaaaagtactgtta

SEQ ID NO: 1533865 - DNA, 15 bp, Homo sapiens
aacaaaagtactgtt

SEQ ID NO: 1533866 - DNA, 15 bp, Homo sapiens
aaacaaaagtactgt

SEQ ID NO: 1533867 - DNA, 15 bp, Homo sapiens
caaacaaaagtactg

SEQ ID NO: 1533868 - DNA, 15 bp, Homo sapiens
tcaaacaaaagtact

SEQ ID NO: 1533869 - DNA, 15 bp, Homo sapiens
ttcaaacaaaagtac

SEQ ID NO: 1533870 - DNA, 15 bp, Homo sapiens
tttcaaacaaaagta

SEQ ID NO: 1533871 - DNA, 15 bp, Homo sapiens
ctttcaaacaaaagt

SEQ ID NO: 1533872 - DNA, 15 bp, Homo sapiens
tctttcaaacaaaag

SEQ ID NO: 1533873 - DNA, 15 bp, Homo sapiens
ttctttcaaacaaaa

SEQ ID NO: 1533874 - DNA, 15 bp, Homo sapiens
tttctttcaaacaaa

SEQ ID NO: 1533875 - DNA, 15 bp, Homo sapiens
ttttctttcaaacaa

SEQ ID NO: 1533876 - DNA, 15 bp, Homo sapiens
cttttctttcaaaca

SEQ ID NO: 1533877 - DNA, 15 bp, Homo sapiens
tcttttctttcaaac

SEQ ID NO: 1533878 - DNA, 15 bp, Homo sapiens
gtcttttctttcaaa

SEQ ID NO: 1533879 - DNA, 15 bp, Homo sapiens
tgtcttttctttcaa

SEQ ID NO: 1533880 - DNA, 15 bp, Homo sapiens
atgtcttttctttca

SEQ ID NO: 1533881 - DNA, 15 bp, Homo sapiens
catgtcttttctttc

SEQ ID NO: 1533882 - DNA, 15 bp, Homo sapiens
acatgtcttttcttt

SEQ ID NO: 1533883 - DNA, 15 bp, Homo sapiens
aacatgtcttttctt

SEQ ID NO: 1533884 - DNA, 15 bp, Homo sapiens
taacatgtcttttct

SEQ ID NO: 1533885 - DNA, 15 bp, Homo sapiens
gtaacatgtcttttc

SEQ ID NO: 1533886 - DNA, 15 bp, Homo sapiens
agtaacatgtctttt

SEQ ID NO: 1533887 - DNA, 15 bp, Homo sapiens
aagtaacatgtcttt

SEQ ID NO: 1533888 - DNA, 15 bp, Homo sapiens
gaagtaacatgtctt

SEQ ID NO: 1533889 - DNA, 15 bp, Homo sapiens
tgaagtaacatgtct

SEQ ID NO: 1533890 - DNA, 15 bp, Homo sapiens
atgaagtaacatgtc

SEQ ID NO: 1533891 - DNA, 15 bp, Homo sapiens
aatgaagtaacatgt

SEQ ID NO: 1533892 - DNA, 15 bp, Homo sapiens
taatgaagtaacatg

SEQ ID NO: 1533893 - DNA, 15 bp, Homo sapiens
ttaatgaagtaacat

SEQ ID NO: 1533894 - DNA, 15 bp, Homo sapiens
attaatgaagtaaca

SEQ ID NO: 1533895 - DNA, 15 bp, Homo sapiens
cattaatgaagtaac

SEQ ID NO: 1533896 - DNA, 15 bp, Homo sapiens
ccattaatgaagtaa

SEQ ID NO: 1533897 - DNA, 15 bp, Homo sapiens
tccattaatgaagta

SEQ ID NO: 1533898 - DNA, 15 bp, Homo sapiens
atccattaatgaagt

SEQ ID NO: 1533899 - DNA, 15 bp, Homo sapiens
aatccattaatgaag

SEQ ID NO: 1533900 - DNA, 15 bp, Homo sapiens
gaatccattaatgaa

SEQ ID NO: 1533901 - DNA, 15 bp, Homo sapiens
tgaatccattaatga

SEQ ID NO: 1533902 - DNA, 15 bp, Homo sapiens
ttgaatccattaatg

SEQ ID NO: 1533903 - DNA, 15 bp, Homo sapiens
tttgaatccattaat

SEQ ID NO: 1533904 - DNA, 15 bp, Homo sapiens
atttgaatccattaa

SEQ ID NO: 1533905 - DNA, 15 bp, Homo sapiens
catttgaatccatta

SEQ ID NO: 1533906 - DNA, 15 bp, Homo sapiens
tcatttgaatccatt

SEQ ID NO: 1533907 - DNA, 15 bp, Homo sapiens
ttcatttgaatccat

SEQ ID NO: 1533908 - DNA, 15 bp, Homo sapiens
attcatttgaatcca

SEQ ID NO: 1533909 - DNA, 15 bp, Homo sapiens
aattcatttgaatcc

SEQ ID NO: 1533910 - DNA, 15 bp, Homo sapiens
aaattcatttgaatc

SEQ ID NO: 1533911 - DNA, 15 bp, Homo sapiens
caaattcatttgaat

SEQ ID NO: 1533912 - DNA, 15 bp, Homo sapiens
ccaaattcatttgaa

SEQ ID NO: 1533913 - DNA, 15 bp, Homo sapiens
cccaaattcatttga

SEQ ID NO: 1533914 - DNA, 15 bp, Homo sapiens
acccaaattcatttg

SEQ ID NO: 1533915 - DNA, 15 bp, Homo sapiens
aacccaaattcattt

SEQ ID NO: 1533916 - DNA, 15 bp, Homo sapiens
aaacccaaattcatt

SEQ ID NO: 1533917 - DNA, 15 bp, Homo sapiens
taaacccaaattcat

SEQ ID NO: 1533918 - DNA, 15 bp, Homo sapiens
ctaaacccaaattca

SEQ ID NO: 1533919 - DNA, 15 bp, Homo sapiens
cctaaacccaaattc

SEQ ID NO: 1533920 - DNA, 15 bp, Homo sapiens
gcctaaacccaaatt

SEQ ID NO: 1533921 - DNA, 15 bp, Homo sapiens
agcctaaacccaaat

SEQ ID NO: 1533922 - DNA, 15 bp, Homo sapiens
cagcctaaacccaaa

SEQ ID NO: 1533923 - DNA, 15 bp, Homo sapiens
acagcctaaacccaa

SEQ ID NO: 1533924 - DNA, 15 bp, Homo sapiens
tacagcctaaaccca

SEQ ID NO: 1533925 - DNA, 15 bp, Homo sapiens
atacagcctaaaccc

SEQ ID NO: 1533926 - DNA, 15 bp, Homo sapiens
gatacagcctaaacc

SEQ ID NO: 1533927 - DNA, 15 bp, Homo sapiens
tgatacagcctaaac

SEQ ID NO: 1533928 - DNA, 15 bp, Homo sapiens
ttgatacagcctaaa

SEQ ID NO: 1533929 - DNA, 15 bp, Homo sapiens
cttgatacagcctaa

SEQ ID NO: 1533930 - DNA, 15 bp, Homo sapiens
acttgatacagccta

SEQ ID NO: 1533931 - DNA, 15 bp, Homo sapiens
aacttgatacagcct

SEQ ID NO: 1533932 - DNA, 15 bp, Homo sapiens
aaacttgatacagcc

SEQ ID NO: 1533933 - DNA, 15 bp, Homo sapiens
taaacttgatacagc

SEQ ID NO: 1533934 - DNA, 15 bp, Homo sapiens
ctaaacttgatacag

SEQ ID NO: 1533935 - DNA, 15 bp, Homo sapiens
actaaacttgataca

SEQ ID NO: 1533936 - DNA, 15 bp, Homo sapiens
aactaaacttgatac

SEQ ID NO: 1533937 - DNA, 15 bp, Homo sapiens
aaactaaacttgata

SEQ ID NO: 1533938 - DNA, 15 bp, Homo sapiens
gaaactaaacttgat

SEQ ID NO: 1533939 - DNA, 15 bp, Homo sapiens
agaaactaaacttga

SEQ ID NO: 1533940 - DNA, 15 bp, Homo sapiens
cagaaactaaacttg

SEQ ID NO: 1533941 - DNA, 15 bp, Homo sapiens
acagaaactaaactt

SEQ ID NO: 1533942 - DNA, 15 bp, Homo sapiens
aacagaaactaaact

SEQ ID NO: 1533943 - DNA, 15 bp, Homo sapiens
caacagaaactaaac

SEQ ID NO: 1533944 - DNA, 15 bp, Homo sapiens
acaacagaaactaaa

SEQ ID NO: 1533945 - DNA, 15 bp, Homo sapiens
tacaacagaaactaa

SEQ ID NO: 1533946 - DNA, 15 bp, Homo sapiens
atacaacagaaacta

SEQ ID NO: 1533947 - DNA, 15 bp, Homo sapiens
tatacaacagaaact

SEQ ID NO: 1533948 - DNA, 15 bp, Homo sapiens
atatacaacagaaac

SEQ ID NO: 1533949 - DNA, 15 bp, Homo sapiens
tatatacaacagaaa

SEQ ID NO: 1533950 - DNA, 15 bp, Homo sapiens
ttatatacaacagaa

SEQ ID NO: 1533951 - DNA, 15 bp, Homo sapiens
attatatacaacaga

SEQ ID NO: 1533952 - DNA, 15 bp, Homo sapiens
tattatatacaacag

SEQ ID NO: 1533953 - DNA, 15 bp, Homo sapiens
ctattatatacaaca

SEQ ID NO: 1533954 - DNA, 15 bp, Homo sapiens
tctattatatacaac

SEQ ID NO: 1533955 - DNA, 15 bp, Homo sapiens
ttctattatatacaa

SEQ ID NO: 1533956 - DNA, 15 bp, Homo sapiens
tttctattatataca

SEQ ID NO: 1533957 - DNA, 15 bp, Homo sapiens
ttttctattatatac

SEQ ID NO: 1533958 - DNA, 15 bp, Homo sapiens
attttctattatata

SEQ ID NO: 1533959 - DNA, 15 bp, Homo sapiens
aattttctattatat

SEQ ID NO: 1533960 - DNA, 15 bp, Homo sapiens
gaattttctattata

SEQ ID NO: 1533961 - DNA, 15 bp, Homo sapiens
ggaattttctattat

SEQ ID NO: 1533962 - DNA, 15 bp, Homo sapiens
tggaattttctatta

SEQ ID NO: 1533963 - DNA, 15 bp, Homo sapiens
ctggaattttctatt

SEQ ID NO: 1533964 - DNA, 15 bp, Homo sapiens
actggaattttctat

SEQ ID NO: 1533965 - DNA, 15 bp, Homo sapiens
cactggaattttcta

SEQ ID NO: 1533966 - DNA, 15 bp, Homo sapiens
gcactggaattttct

SEQ ID NO: 1533967 - DNA, 15 bp, Homo sapiens
tgcactggaattttc

SEQ ID NO: 1533968 - DNA, 15 bp, Homo sapiens
ttgcactggaatttt

SEQ ID NO: 1533969 - DNA, 15 bp, Homo sapiens
attgcactggaattt

SEQ ID NO: 1533970 - DNA, 15 bp, Homo sapiens
tattgcactggaatt

SEQ ID NO: 1533971 - DNA, 15 bp, Homo sapiens
ctattgcactggaat

SEQ ID NO: 1533972 - DNA, 15 bp, Homo sapiens
actattgcactggaa

SEQ ID NO: 1533973 - DNA, 15 bp, Homo sapiens
tactattgcactgga

SEQ ID NO: 1533974 - DNA, 15 bp, Homo sapiens
ctactattgcactgg

SEQ ID NO: 1533975 - DNA, 15 bp, Homo sapiens
actactattgcactg

SEQ ID NO: 1533976 - DNA, 15 bp, Homo sapiens
cactactattgcact

SEQ ID NO: 1533977 - DNA, 15 bp, Homo sapiens
ccactactattgcac

SEQ ID NO: 1533978 - DNA, 15 bp, Homo sapiens
gccactactattgca

SEQ ID NO: 1533979 - DNA, 15 bp, Homo sapiens
tgccactactattgc

SEQ ID NO: 1533980 - DNA, 15 bp, Homo sapiens
ttgccactactattg

SEQ ID NO: 1533981 - DNA, 15 bp, Homo sapiens
attgccactactatt

SEQ ID NO: 1533982 - DNA, 15 bp, Homo sapiens
cattgccactactat

SEQ ID NO: 1533983 - DNA, 15 bp, Homo sapiens
acattgccactacta

SEQ ID NO: 1533984 - DNA, 15 bp, Homo sapiens
aacattgccactact

SEQ ID NO: 1533985 - DNA, 15 bp, Homo sapiens
aaacattgccactac

SEQ ID NO: 1533986 - DNA, 15 bp, Homo sapiens
gaaacattgccacta

SEQ ID NO: 1533987 - DNA, 15 bp, Homo sapiens
agaaacattgccact

SEQ ID NO: 1533988 - DNA, 15 bp, Homo sapiens
gagaaacattgccac

SEQ ID NO: 1533989 - DNA, 15 bp, Homo sapiens
tgagaaacattgcca

SEQ ID NO: 1533990 - DNA, 15 bp, Homo sapiens
atgagaaacattgcc

SEQ ID NO: 1533991 - DNA, 15 bp, Homo sapiens
aatgagaaacattgc

SEQ ID NO: 1533992 - DNA, 15 bp, Homo sapiens
aaatgagaaacattg

SEQ ID NO: 1533993 - DNA, 15 bp, Homo sapiens
gaaatgagaaacatt

SEQ ID NO: 1533994 - DNA, 15 bp, Homo sapiens
tgaaatgagaaacat

SEQ ID NO: 1533995 - DNA, 15 bp, Homo sapiens
ttgaaatgagaaaca

SEQ ID NO: 1533996 - DNA, 15 bp, Homo sapiens
cttgaaatgagaaac

SEQ ID NO: 1533997 - DNA, 15 bp, Homo sapiens
acttgaaatgagaaa

SEQ ID NO: 1533998 - DNA, 15 bp, Homo sapiens
aacttgaaatgagaa

SEQ ID NO: 1533999 - DNA, 15 bp, Homo sapiens
aaacttgaaatgaga

SEQ ID NO: 1534000 - DNA, 15 bp, Homo sapiens
caaacttgaaatgag

SEQ ID NO: 1534001 - DNA, 15 bp, Homo sapiens
ccaaacttgaaatga

SEQ ID NO: 1534002 - DNA, 15 bp, Homo sapiens
cccaaacttgaaatg

SEQ ID NO: 1534003 - DNA, 15 bp, Homo sapiens
tcccaaacttgaaat

SEQ ID NO: 1534004 - DNA, 15 bp, Homo sapiens
gtcccaaacttgaaa

SEQ ID NO: 1534005 - DNA, 15 bp, Homo sapiens
tgtcccaaacttgaa

SEQ ID NO: 1534006 - DNA, 15 bp, Homo sapiens
atgtcccaaacttga

SEQ ID NO: 1534007 - DNA, 15 bp, Homo sapiens
tatgtcccaaacttg

SEQ ID NO: 1534008 - DNA, 15 bp, Homo sapiens
gtatgtcccaaactt

SEQ ID NO: 1534009 - DNA, 15 bp, Homo sapiens
ggtatgtcccaaact

SEQ ID NO: 1534010 - DNA, 15 bp, Homo sapiens
tggtatgtcccaaac

SEQ ID NO: 1534011 - DNA, 15 bp, Homo sapiens
ttggtatgtcccaaa

SEQ ID NO: 1534012 - DNA, 15 bp, Homo sapiens
tttggtatgtcccaa

SEQ ID NO: 1534013 - DNA, 15 bp, Homo sapiens
atttggtatgtccca

SEQ ID NO: 1534014 - DNA, 15 bp, Homo sapiens
aatttggtatgtccc

SEQ ID NO: 1534015 - DNA, 15 bp, Homo sapiens
caatttggtatgtcc

SEQ ID NO: 1534016 - DNA, 15 bp, Homo sapiens
gcaatttggtatgtc

SEQ ID NO: 1534017 - DNA, 15 bp, Homo sapiens
agcaatttggtatgt

SEQ ID NO: 1534018 - DNA, 15 bp, Homo sapiens
aagcaatttggtatg

SEQ ID NO: 1534019 - DNA, 15 bp, Homo sapiens
gaagcaatttggtat

SEQ ID NO: 1534020 - DNA, 15 bp, Homo sapiens
tgaagcaatttggta

SEQ ID NO: 1534021 - DNA, 15 bp, Homo sapiens
atgaagcaatttggt

SEQ ID NO: 1534022 - DNA, 15 bp, Homo sapiens
tatgaagcaatttgg

SEQ ID NO: 1534023 - DNA, 15 bp, Homo sapiens
atatgaagcaatttg

SEQ ID NO: 1534024 - DNA, 15 bp, Homo sapiens
aatatgaagcaattt

SEQ ID NO: 1534025 - DNA, 15 bp, Homo sapiens
taatatgaagcaatt

SEQ ID NO: 1534026 - DNA, 15 bp, Homo sapiens
ataatatgaagcaat

SEQ ID NO: 1534027 - DNA, 15 bp, Homo sapiens
aataatatgaagcaa

SEQ ID NO: 1534028 - DNA, 15 bp, Homo sapiens
gaataatatgaagca

SEQ ID NO: 1534029 - DNA, 15 bp, Homo sapiens
tgaataatatgaagc

SEQ ID NO: 1534030 - DNA, 15 bp, Homo sapiens
ttgaataatatgaag

SEQ ID NO: 1534031 - DNA, 15 bp, Homo sapiens
tttgaataatatgaa

SEQ ID NO: 1534032 - DNA, 15 bp, Homo sapiens
ctttgaataatatga

SEQ ID NO: 1534033 - DNA, 15 bp, Homo sapiens
tctttgaataatatg

SEQ ID NO: 1534034 - DNA, 15 bp, Homo sapiens
atctttgaataatat

SEQ ID NO: 1534035 - DNA, 15 bp, Homo sapiens
aatctttgaataata

SEQ ID NO: 1534036 - DNA, 15 bp, Homo sapiens
taatctttgaataat

SEQ ID NO: 1534037 - DNA, 15 bp, Homo sapiens
ataatctttgaataa

SEQ ID NO: 1534038 - DNA, 15 bp, Homo sapiens
aataatctttgaata

SEQ ID NO: 1534039 - DNA, 15 bp, Homo sapiens
caataatctttgaat

SEQ ID NO: 1534040 - DNA, 15 bp, Homo sapiens
acaataatctttgaa

SEQ ID NO: 1534041 - DNA, 15 bp, Homo sapiens
tacaataatctttga

SEQ ID NO: 1534042 - DNA, 15 bp, Homo sapiens
ttacaataatctttg

SEQ ID NO: 1534043 - DNA, 15 bp, Homo sapiens
tttacaataatcttt

SEQ ID NO: 1534044 - DNA, 15 bp, Homo sapiens
ttttacaataatctt

SEQ ID NO: 1534045 - DNA, 15 bp, Homo sapiens
attttacaataatct

SEQ ID NO: 1534046 - DNA, 15 bp, Homo sapiens
aattttacaataatc

SEQ ID NO: 1534047 - DNA, 15 bp, Homo sapiens
gaattttacaataat

SEQ ID NO: 1534048 - DNA, 15 bp, Homo sapiens
agaattttacaataa

SEQ ID NO: 1534049 - DNA, 15 bp, Homo sapiens
gagaattttacaata

SEQ ID NO: 1534050 - DNA, 15 bp, Homo sapiens
tgagaattttacaat

SEQ ID NO: 1534051 - DNA, 15 bp, Homo sapiens
ttgagaattttacaa

SEQ ID NO: 1534052 - DNA, 15 bp, Homo sapiens
tttgagaattttaca

SEQ ID NO: 1534053 - DNA, 15 bp, Homo sapiens
ttttgagaattttac

SEQ ID NO: 1534054 - DNA, 15 bp, Homo sapiens
tttttgagaatttta

SEQ ID NO: 1534055 - DNA, 15 bp, Homo sapiens
tctttttgagaattt

SEQ ID NO: 1534056 - DNA, 15 bp, Homo sapiens
ttctttttgagaatt

SEQ ID NO: 1534057 - DNA, 15 bp, Homo sapiens
tttctttttgagaat

SEQ ID NO: 1534058 - DNA, 15 bp, Homo sapiens
ttttctttttgagaa

SEQ ID NO: 1534059 - DNA, 15 bp, Homo sapiens
ctttttctttttgag

SEQ ID NO: 1534060 - DNA, 15 bp, Homo sapiens
cctttttctttttga

SEQ ID NO: 1534061 - DNA, 15 bp, Homo sapiens
ccctttttctttttg

SEQ ID NO: 1534062 - DNA, 15 bp, Homo sapiens
tccctttttcttttt

SEQ ID NO: 1534063 - DNA, 15 bp, Homo sapiens
ctccctttttctttt

SEQ ID NO: 1534064 - DNA, 15 bp, Homo sapiens
tctccctttttcttt

SEQ ID NO: 1534065 - DNA, 15 bp, Homo sapiens
atctccctttttctt

SEQ ID NO: 1534066 - DNA, 15 bp, Homo sapiens
gatctccctttttct

SEQ ID NO: 1534067 - DNA, 15 bp, Homo sapiens
tgatctccctttttc

SEQ ID NO: 1534068 - DNA, 15 bp, Homo sapiens
atgatctcccttttt

SEQ ID NO: 1534069 - DNA, 15 bp, Homo sapiens
aatgatctccctttt

SEQ ID NO: 1534070 - DNA, 15 bp, Homo sapiens
aaatgatctcccttt

SEQ ID NO: 1534071 - DNA, 15 bp, Homo sapiens
gaaatgatctccctt

SEQ ID NO: 1534072 - DNA, 15 bp, Homo sapiens
tgaaatgatctccct

SEQ ID NO: 1534073 - DNA, 15 bp, Homo sapiens
ttgaaatgatctccc

SEQ ID NO: 1534074 - DNA, 15 bp, Homo sapiens
attgaaatgatctcc

SEQ ID NO: 1534075 - DNA, 15 bp, Homo sapiens
tattgaaatgatctc

SEQ ID NO: 1534076 - DNA, 15 bp, Homo sapiens
atattgaaatgatct

SEQ ID NO: 1534077 - DNA, 15 bp, Homo sapiens
tatattgaaatgatc

SEQ ID NO: 1534078 - DNA, 15 bp, Homo sapiens
atatattgaaatgat

SEQ ID NO: 1534079 - DNA, 15 bp, Homo sapiens
aatatattgaaatga

SEQ ID NO: 1534080 - DNA, 15 bp, Homo sapiens
aaatatattgaaatg

SEQ ID NO: 1534081 - DNA, 15 bp, Homo sapiens
caaatatattgaaat

SEQ ID NO: 1534082 - DNA, 15 bp, Homo sapiens
tcaaatatattgaaa

SEQ ID NO: 1534083 - DNA, 15 bp, Homo sapiens
ttcaaatatattgaa

SEQ ID NO: 1534084 - DNA, 15 bp, Homo sapiens
attcaaatatattga

SEQ ID NO: 1534085 - DNA, 15 bp, Homo sapiens
aattcaaatatattg

SEQ ID NO: 1534086 - DNA, 15 bp, Homo sapiens
gaattcaaatatatt

SEQ ID NO: 1534087 - DNA, 15 bp, Homo sapiens
agaattcaaatatat

SEQ ID NO: 1534088 - DNA, 15 bp, Homo sapiens
tagaattcaaatata

SEQ ID NO: 1534089 - DNA, 15 bp, Homo sapiens
ttagaattcaaatat

SEQ ID NO: 1534090 - DNA, 15 bp, Homo sapiens
gttagaattcaaata

SEQ ID NO: 1534091 - DNA, 15 bp, Homo sapiens
tgttagaattcaaat

SEQ ID NO: 1534092 - DNA, 15 bp, Homo sapiens
ttgttagaattcaaa

SEQ ID NO: 1534093 - DNA, 15 bp, Homo sapiens
attgttagaattcaa

SEQ ID NO: 1534094 - DNA, 15 bp, Homo sapiens
gattgttagaattca

SEQ ID NO: 1534095 - DNA, 15 bp, Homo sapiens
agattgttagaattc

SEQ ID NO: 1534096 - DNA, 15 bp, Homo sapiens
gagattgttagaatt

SEQ ID NO: 1534097 - DNA, 15 bp, Homo sapiens
agagattgttagaat

SEQ ID NO: 1534098 - DNA, 15 bp, Homo sapiens
aagagattgttagaa

SEQ ID NO: 1534099 - DNA, 15 bp, Homo sapiens
taagagattgttaga

SEQ ID NO: 1534100 - DNA, 15 bp, Homo sapiens
gtaagagattgttag

SEQ ID NO: 1534101 - DNA, 15 bp, Homo sapiens
tgtaagagattgtta

SEQ ID NO: 1534102 - DNA, 15 bp, Homo sapiens
gtgtaagagattgtt

SEQ ID NO: 1534103 - DNA, 15 bp, Homo sapiens
agtgtaagagattgt

SEQ ID NO: 1534104 - DNA, 15 bp, Homo sapiens
cagtgtaagagattg

SEQ ID NO: 1534105 - DNA, 15 bp, Homo sapiens
ccagtgtaagagatt

SEQ ID NO: 1534106 - DNA, 15 bp, Homo sapiens
cccagtgtaagagat

SEQ ID NO: 1534107 - DNA, 15 bp, Homo sapiens
acccagtgtaagaga

SEQ ID NO: 1534108 - DNA, 15 bp, Homo sapiens
cacccagtgtaagag

SEQ ID NO: 1534109 - DNA, 15 bp, Homo sapiens
gcacccagtgtaaga

SEQ ID NO: 1534110 - DNA, 15 bp, Homo sapiens
tgcacccagtgtaag

SEQ ID NO: 1534111 - DNA, 15 bp, Homo sapiens
ctgcacccagtgtaa

SEQ ID NO: 1534112 - DNA, 15 bp, Homo sapiens
gctgcacccagtgta

SEQ ID NO: 1534113 - DNA, 15 bp, Homo sapiens
tgctgcacccagtgt

SEQ ID NO: 1534114 - DNA, 15 bp, Homo sapiens
gtgctgcacccagtg

SEQ ID NO: 1534115 - DNA, 15 bp, Homo sapiens
tgtgctgcacccagt

SEQ ID NO: 1534116 - DNA, 15 bp, Homo sapiens
gtgtgctgcacccag

SEQ ID NO: 1534117 - DNA, 15 bp, Homo sapiens
gcatttattcatagc

SEQ ID NO: 1534118 - DNA, 15 bp, Homo sapiens
agcatttattcatag

SEQ ID NO: 1534119 - DNA, 15 bp, Homo sapiens
tagcatttattcata

SEQ ID NO: 1534120 - DNA, 15 bp, Homo sapiens
atagcatttattcat

SEQ ID NO: 1534121 - DNA, 15 bp, Homo sapiens
catagcatttattca

SEQ ID NO: 1534122 - DNA, 15 bp, Homo sapiens
acatagcatttattc

SEQ ID NO: 1534123 - DNA, 15 bp, Homo sapiens
aacatagcatttatt

SEQ ID NO: 1534124 - DNA, 15 bp, Homo sapiens
gaacatagcatttat

SEQ ID NO: 1534125 - DNA, 15 bp, Homo sapiens
agaacatagcattta

SEQ ID NO: 1534126 - DNA, 15 bp, Homo sapiens
tagaacatagcattt

SEQ ID NO: 1534127 - DNA, 15 bp, Homo sapiens
gtagaacatagcatt

SEQ ID NO: 1534128 - DNA, 15 bp, Homo sapiens
agtagaacatagcat

SEQ ID NO: 1534129 - DNA, 15 bp, Homo sapiens
gagtagaacatagca

SEQ ID NO: 1534130 - DNA, 15 bp, Homo sapiens
agagtagaacatagc

SEQ ID NO: 1534131 - DNA, 15 bp, Homo sapiens
cagagtagaacatag

SEQ ID NO: 1534132 - DNA, 15 bp, Homo sapiens
tcagagtagaacata

SEQ ID NO: 1534133 - DNA, 15 bp, Homo sapiens
ttcagagtagaacat

SEQ ID NO: 1534134 - DNA, 15 bp, Homo sapiens
tttcagagtagaaca

SEQ ID NO: 1534135 - DNA, 15 bp, Homo sapiens
ttttcagagtagaac

SEQ ID NO: 1534136 - DNA, 15 bp, Homo sapiens
attttcagagtagaa

SEQ ID NO: 1534137 - DNA, 15 bp, Homo sapiens
gattttcagagtaga

SEQ ID NO: 1534138 - DNA, 15 bp, Homo sapiens
ggattttcagagtag

SEQ ID NO: 1534139 - DNA, 15 bp, Homo sapiens
gggattttcagagta

SEQ ID NO: 1534140 - DNA, 15 bp, Homo sapiens
tgggattttcagagt

SEQ ID NO: 1534141 - DNA, 15 bp, Homo sapiens
ctgggattttcagag

SEQ ID NO: 1534142 - DNA, 15 bp, Homo sapiens
tctgggattttcaga

SEQ ID NO: 1534143 - DNA, 15 bp, Homo sapiens
ttctgggattttcag

SEQ ID NO: 1534144 - DNA, 15 bp, Homo sapiens
gttctgggattttca

SEQ ID NO: 1534145 - DNA, 15 bp, Homo sapiens
agttctgggattttc

SEQ ID NO: 1534146 - DNA, 15 bp, Homo sapiens
tagttctgggatttt

SEQ ID NO: 1534147 - DNA, 15 bp, Homo sapiens
atagttctgggattt

SEQ ID NO: 1534148 - DNA, 15 bp, Homo sapiens
catagttctgggatt

SEQ ID NO: 1534149 - DNA, 15 bp, Homo sapiens
tcatagttctgggat

SEQ ID NO: 1534150 - DNA, 15 bp, Homo sapiens
ctcatagttctggga

SEQ ID NO: 1534151 - DNA, 15 bp, Homo sapiens
actcatagttctggg

SEQ ID NO: 1534152 - DNA, 15 bp, Homo sapiens
cactcatagttctgg

SEQ ID NO: 1534153 - DNA, 15 bp, Homo sapiens
ccactcatagttctg

SEQ ID NO: 1534154 - DNA, 15 bp, Homo sapiens
accactcatagttct

SEQ ID NO: 1534155 - DNA, 15 bp, Homo sapiens
aaccactcatagttc

SEQ ID NO: 1534156 - DNA, 15 bp, Homo sapiens
gaaccactcatagtt

SEQ ID NO: 1534157 - DNA, 15 bp, Homo sapiens
agaaccactcatagt

SEQ ID NO: 1534158 - DNA, 15 bp, Homo sapiens
gagaaccactcatag

SEQ ID NO: 1534159 - DNA, 15 bp, Homo sapiens
ggagaaccactcata

SEQ ID NO: 1534160 - DNA, 15 bp, Homo sapiens
tggagaaccactcat

SEQ ID NO: 1534161 - DNA, 15 bp, Homo sapiens
ttggagaaccactca

SEQ ID NO: 1534162 - DNA, 15 bp, Homo sapiens
cttggagaaccactc

SEQ ID NO: 1534163 - DNA, 15 bp, Homo sapiens
tcttggagaaccact

SEQ ID NO: 1534164 - DNA, 15 bp, Homo sapiens
gtcttggagaaccac

SEQ ID NO: 1534165 - DNA, 15 bp, Homo sapiens
agtcttggagaacca

SEQ ID NO: 1534166 - DNA, 15 bp, Homo sapiens
cagtcttggagaacc

SEQ ID NO: 1534167 - DNA, 15 bp, Homo sapiens
ccagtcttggagaac

SEQ ID NO: 1534168 - DNA, 15 bp, Homo sapiens
cccagtcttggagaa

SEQ ID NO: 1534169 - DNA, 15 bp, Homo sapiens
gcccagtcttggaga

SEQ ID NO: 1534170 - DNA, 15 bp, Homo sapiens
agcccagtcttggag

SEQ ID NO: 1534171 - DNA, 15 bp, Homo sapiens
tagcccagtcttgga

SEQ ID NO: 1534172 - DNA, 15 bp, Homo sapiens
gtagcccagtcttgg

SEQ ID NO: 1534173 - DNA, 15 bp, Homo sapiens
ggtagcccagtcttg

SEQ ID NO: 1534174 - DNA, 15 bp, Homo sapiens
tggtagcccagtctt

SEQ ID NO: 1534175 - DNA, 15 bp, Homo sapiens
atggtagcccagtct

SEQ ID NO: 1534176 - DNA, 15 bp, Homo sapiens
aatggtagcccagtc

SEQ ID NO: 1534177 - DNA, 15 bp, Homo sapiens
aaatggtagcccagt

SEQ ID NO: 1534178 - DNA, 15 bp, Homo sapiens
aaaatggtagcccag

SEQ ID NO: 1534179 - DNA, 15 bp, Homo sapiens
taaaatggtagccca

SEQ ID NO: 1534180 - DNA, 15 bp, Homo sapiens
ataaaatggtagccc

SEQ ID NO: 1534181 - DNA, 15 bp, Homo sapiens
aataaaatggtagcc

SEQ ID NO: 1534182 - DNA, 15 bp, Homo sapiens
gaataaaatggtagc

SEQ ID NO: 1534183 - DNA, 15 bp, Homo sapiens
agaataaaatggtag

SEQ ID NO: 1534184 - DNA, 15 bp, Homo sapiens
tagaataaaatggta

SEQ ID NO: 1534185 - DNA, 15 bp, Homo sapiens
ttagaataaaatggt

SEQ ID NO: 1534186 - DNA, 15 bp, Homo sapiens
cttagaataaaatgg

SEQ ID NO: 1534187 - DNA, 15 bp, Homo sapiens
acttagaataaaatg

SEQ ID NO: 1534188 - DNA, 15 bp, Homo sapiens
cacttagaataaaat

SEQ ID NO: 1534189 - DNA, 15 bp, Homo sapiens
gcacttagaataaaa

SEQ ID NO: 1534190 - DNA, 15 bp, Homo sapiens
agcacttagaataaa

SEQ ID NO: 1534191 - DNA, 15 bp, Homo sapiens
aagcacttagaataa

SEQ ID NO: 1534192 - DNA, 15 bp, Homo sapiens
caagcacttagaata

SEQ ID NO: 1534193 - DNA, 15 bp, Homo sapiens
acaagcacttagaat

SEQ ID NO: 1534194 - DNA, 15 bp, Homo sapiens
aacaagcacttagaa

SEQ ID NO: 1534195 - DNA, 15 bp, Homo sapiens
aaacaagcacttaga

SEQ ID NO: 1534196 - DNA, 15 bp, Homo sapiens
gaaacaagcacttag

SEQ ID NO: 1534197 - DNA, 15 bp, Homo sapiens
ggaaacaagcactta

SEQ ID NO: 1534198 - DNA, 15 bp, Homo sapiens
gggaaacaagcactt

SEQ ID NO: 1534199 - DNA, 15 bp, Homo sapiens
ggggaaacaagcact

SEQ ID NO: 1534200 - DNA, 15 bp, Homo sapiens
gggggaaacaagcac

SEQ ID NO: 1534201 - DNA, 15 bp, Homo sapiens
agggggaaacaagca

SEQ ID NO: 1534202 - DNA, 15 bp, Homo sapiens
cagggggaaacaagc

SEQ ID NO: 1534203 - DNA, 15 bp, Homo sapiens
ccagggggaaacaag

SEQ ID NO: 1534204 - DNA, 15 bp, Homo sapiens
tccagggggaaacaa

SEQ ID NO: 1534205 - DNA, 15 bp, Homo sapiens
ctccagggggaaaca

SEQ ID NO: 1534206 - DNA, 15 bp, Homo sapiens
actccagggggaaac

SEQ ID NO: 1534207 - DNA, 15 bp, Homo sapiens
aactccagggggaaa

SEQ ID NO: 1534208 - DNA, 15 bp, Homo sapiens
taactccagggggaa

SEQ ID NO: 1534209 - DNA, 15 bp, Homo sapiens
ctaactccaggggga

SEQ ID NO: 1534210 - DNA, 15 bp, Homo sapiens
tctaactccaggggg

SEQ ID NO: 1534211 - DNA, 15 bp, Homo sapiens
atctaactccagggg

SEQ ID NO: 1534212 - DNA, 15 bp, Homo sapiens
catctaactccaggg

SEQ ID NO: 1534213 - DNA, 15 bp, Homo sapiens
ccatctaactccagg

SEQ ID NO: 1534214 - DNA, 15 bp, Homo sapiens
cccatctaactccag

SEQ ID NO: 1534215 - DNA, 15 bp, Homo sapiens
tcccatctaactcca

SEQ ID NO: 1534216 - DNA, 15 bp, Homo sapiens
gtcccatctaactcc

SEQ ID NO: 1534217 - DNA, 15 bp, Homo sapiens
agtcccatctaactc

SEQ ID NO: 1534218 - DNA, 15 bp, Homo sapiens
tagtcccatctaact

SEQ ID NO: 1534219 - DNA, 15 bp, Homo sapiens
ttagtcccatctaac

SEQ ID NO: 1534220 - DNA, 15 bp, Homo sapiens
attagtcccatctaa

SEQ ID NO: 1534221 - DNA, 15 bp, Homo sapiens
cattagtcccatcta

SEQ ID NO: 1534222 - DNA, 15 bp, Homo sapiens
tcattagtcccatct

SEQ ID NO: 1534223 - DNA, 15 bp, Homo sapiens
ctcattagtcccatc

SEQ ID NO: 1534224 - DNA, 15 bp, Homo sapiens
cctcattagtcccat

SEQ ID NO: 1534225 - DNA, 15 bp, Homo sapiens
tcctcattagtccca

SEQ ID NO: 1534226 - DNA, 15 bp, Homo sapiens
ttcctcattagtccc

SEQ ID NO: 1534227 - DNA, 15 bp, Homo sapiens
cttcctcattagtcc

SEQ ID NO: 1534228 - DNA, 15 bp, Homo sapiens
tcttcctcattagtc

SEQ ID NO: 1534229 - DNA, 15 bp, Homo sapiens
ttcttcctcattagt

SEQ ID NO: 1534230 - DNA, 15 bp, Homo sapiens
attcttcctcattag

SEQ ID NO: 1534231 - DNA, 15 bp, Homo sapiens
tattcttcctcatta

SEQ ID NO: 1534232 - DNA, 15 bp, Homo sapiens
atattcttcctcatt

SEQ ID NO: 1534233 - DNA, 15 bp, Homo sapiens
catattcttcctcat

SEQ ID NO: 1534234 - DNA, 15 bp, Homo sapiens
acatattcttcctca

SEQ ID NO: 1534235 - DNA, 15 bp, Homo sapiens
cacatattcttcctc

SEQ ID NO: 1534236 - DNA, 15 bp, Homo sapiens
gcacatattcttcct

SEQ ID NO: 1534237 - DNA, 15 bp, Homo sapiens
agcacatattcttcc

SEQ ID NO: 1534238 - DNA, 15 bp, Homo sapiens
aagcacatattcttc

SEQ ID NO: 1534239 - DNA, 15 bp, Homo sapiens
caagcacatattctt

SEQ ID NO: 1534240 - DNA, 15 bp, Homo sapiens
acaagcacatattct

SEQ ID NO: 1534241 - DNA, 15 bp, Homo sapiens
aacaagcacatattc

SEQ ID NO: 1534242 - DNA, 15 bp, Homo sapiens
caacaagcacatatt

SEQ ID NO: 1534243 - DNA, 15 bp, Homo sapiens
ccaacaagcacatat

SEQ ID NO: 1534244 - DNA, 15 bp, Homo sapiens
cccaacaagcacata

SEQ ID NO: 1534245 - DNA, 15 bp, Homo sapiens
gcccaacaagcacat

SEQ ID NO: 1534246 - DNA, 15 bp, Homo sapiens
tgcccaacaagcaca

SEQ ID NO: 1534247 - DNA, 15 bp, Homo sapiens
ttgcccaacaagcac

SEQ ID NO: 1534248 - DNA, 15 bp, Homo sapiens
tttgcccaacaagca

SEQ ID NO: 1534249 - DNA, 15 bp, Homo sapiens
ctttgcccaacaagc

SEQ ID NO: 1534250 - DNA, 15 bp, Homo sapiens
cctttgcccaacaag

SEQ ID NO: 1534251 - DNA, 15 bp, Homo sapiens
tcctttgcccaacaa

SEQ ID NO: 1534252 - DNA, 15 bp, Homo sapiens
ctcctttgcccaaca

SEQ ID NO: 1534253 - DNA, 15 bp, Homo sapiens
gctcctttgcccaac

SEQ ID NO: 1534254 - DNA, 15 bp, Homo sapiens
tgctcctttgcccaa

SEQ ID NO: 1534255 - DNA, 15 bp, Homo sapiens
gtgctcctttgccca

SEQ ID NO: 1534256 - DNA, 15 bp, Homo sapiens
agtgctcctttgccc

SEQ ID NO: 1534257 - DNA, 15 bp, Homo sapiens
aagtgctcctttgcc

SEQ ID NO: 1534258 - DNA, 15 bp, Homo sapiens
gaagtgctcctttgc

SEQ ID NO: 1534259 - DNA, 15 bp, Homo sapiens
agaagtgctcctttg

SEQ ID NO: 1534260 - DNA, 15 bp, Homo sapiens
cagaagtgctccttt

SEQ ID NO: 1534261 - DNA, 15 bp, Homo sapiens
gcagaagtgctcctt

SEQ ID NO: 1534262 - DNA, 15 bp, Homo sapiens
tgcagaagtgctcct

SEQ ID NO: 1534263 - DNA, 15 bp, Homo sapiens
ctgcagaagtgctcc

SEQ ID NO: 1534264 - DNA, 15 bp, Homo sapiens
tctgcagaagtgctc

SEQ ID NO: 1534265 - DNA, 15 bp, Homo sapiens
gtctgcagaagtgct

SEQ ID NO: 1534266 - DNA, 15 bp, Homo sapiens
tgtctgcagaagtgc

SEQ ID NO: 1534267 - DNA, 15 bp, Homo sapiens
ttgtctgcagaagtg

SEQ ID NO: 1534268 - DNA, 15 bp, Homo sapiens
tttgtctgcagaagt

SEQ ID NO: 1534269 - DNA, 15 bp, Homo sapiens
ctttgtctgcagaag

SEQ ID NO: 1534270 - DNA, 15 bp, Homo sapiens
cctttgtctgcagaa

SEQ ID NO: 1534271 - DNA, 15 bp, Homo sapiens
gcctttgtctgcaga

SEQ ID NO: 1534272 - DNA, 15 bp, Homo sapiens
agcctttgtctgcag

SEQ ID NO: 1534273 - DNA, 15 bp, Homo sapiens
cagcctttgtctgca

SEQ ID NO: 1534274 - DNA, 15 bp, Homo sapiens
ccagcctttgtctgc

SEQ ID NO: 1534275 - DNA, 15 bp, Homo sapiens
gccagcctttgtctg

SEQ ID NO: 1534276 - DNA, 15 bp, Homo sapiens
tgccagcctttgtct

SEQ ID NO: 1534277 - DNA, 15 bp, Homo sapiens
atgccagcctttgtc

SEQ ID NO: 1534278 - DNA, 15 bp, Homo sapiens
gatgccagcctttgt

SEQ ID NO: 1534279 - DNA, 15 bp, Homo sapiens
ggatgccagcctttg

SEQ ID NO: 1534280 - DNA, 15 bp, Homo sapiens
gggatgccagccttt

SEQ ID NO: 1534281 - DNA, 15 bp, Homo sapiens
ggggatgccagcctt

SEQ ID NO: 1534282 - DNA, 15 bp, Homo sapiens
tggggatgccagcct

SEQ ID NO: 1534283 - DNA, 15 bp, Homo sapiens
ttggggatgccagcc

SEQ ID NO: 1534284 - DNA, 15 bp, Homo sapiens
tttggggatgccagc

SEQ ID NO: 1534285 - DNA, 15 bp, Homo sapiens
ttttggggatgccag

SEQ ID NO: 1534286 - DNA, 15 bp, Homo sapiens
cttttggggatgcca

SEQ ID NO: 1534287 - DNA, 15 bp, Homo sapiens
acttttggggatgcc

SEQ ID NO: 1534288 - DNA, 15 bp, Homo sapiens
tacttttggggatgc

SEQ ID NO: 1534289 - DNA, 15 bp, Homo sapiens
atacttttggggatg

SEQ ID NO: 1534290 - DNA, 15 bp, Homo sapiens
tatacttttggggat

SEQ ID NO: 1534291 - DNA, 15 bp, Homo sapiens
ctatacttttgggga

SEQ ID NO: 1534292 - DNA, 15 bp, Homo sapiens
cctatacttttgggg

SEQ ID NO: 1534293 - DNA, 15 bp, Homo sapiens
gcctatacttttggg

SEQ ID NO: 1534294 - DNA, 15 bp, Homo sapiens
agcctatacttttgg

SEQ ID NO: 1534295 - DNA, 15 bp, Homo sapiens
cagcctatacttttg

SEQ ID NO: 1534296 - DNA, 15 bp, Homo sapiens
tcagcctatactttt

SEQ ID NO: 1534297 - DNA, 15 bp, Homo sapiens
atcagcctatacttt

SEQ ID NO: 1534298 - DNA, 15 bp, Homo sapiens
catcagcctatactt

SEQ ID NO: 1534299 - DNA, 15 bp, Homo sapiens
tcatcagcctatact

SEQ ID NO: 1534300 - DNA, 15 bp, Homo sapiens
gtcatcagcctatac

SEQ ID NO: 1534301 - DNA, 15 bp, Homo sapiens
ggtcatcagcctata

SEQ ID NO: 1534302 - DNA, 15 bp, Homo sapiens
tggtcatcagcctat

SEQ ID NO: 1534303 - DNA, 15 bp, Homo sapiens
gtggtcatcagccta

SEQ ID NO: 1534304 - DNA, 15 bp, Homo sapiens
agtggtcatcagcct

SEQ ID NO: 1534305 - DNA, 15 bp, Homo sapiens
gagtggtcatcagcc

SEQ ID NO: 1534306 - DNA, 15 bp, Homo sapiens
agagtggtcatcagc

SEQ ID NO: 1534307 - DNA, 15 bp, Homo sapiens
aagagtggtcatcag

SEQ ID NO: 1534308 - DNA, 15 bp, Homo sapiens
caagagtggtcatca

SEQ ID NO: 1534309 - DNA, 15 bp, Homo sapiens
tcaagagtggtcatc

SEQ ID NO: 1534310 - DNA, 15 bp, Homo sapiens
gtcaagagtggtcat

SEQ ID NO: 1534311 - DNA, 15 bp, Homo sapiens
agtcaagagtggtca

SEQ ID NO: 1534312 - DNA, 15 bp, Homo sapiens
aagtcaagagtggtc

SEQ ID NO: 1534313 - DNA, 15 bp, Homo sapiens
aaagtcaagagtggt

SEQ ID NO: 1534314 - DNA, 15 bp, Homo sapiens
caaagtcaagagtgg

SEQ ID NO: 1534315 - DNA, 15 bp, Homo sapiens
tcaaagtcaagagtg

SEQ ID NO: 1534316 - DNA, 15 bp, Homo sapiens
gtcaaagtcaagagt

SEQ ID NO: 1534317 - DNA, 15 bp, Homo sapiens
tgtcaaagtcaagag

SEQ ID NO: 1534318 - DNA, 15 bp, Homo sapiens
ttgtcaaagtcaaga

SEQ ID NO: 1534319 - DNA, 15 bp, Homo sapiens
tttgtcaaagtcaag

SEQ ID NO: 1534320 - DNA, 15 bp, Homo sapiens
ctttgtcaaagtcaa

SEQ ID NO: 1534321 - DNA, 15 bp, Homo sapiens
tctttgtcaaagtca

SEQ ID NO: 1534322 - DNA, 15 bp, Homo sapiens
atctttgtcaaagtc

SEQ ID NO: 1534323 - DNA, 15 bp, Homo sapiens
aatctttgtcaaagt

SEQ ID NO: 1534324 - DNA, 15 bp, Homo sapiens
caatctttgtcaaag

SEQ ID NO: 1534325 - DNA, 15 bp, Homo sapiens
ccaatctttgtcaaa

SEQ ID NO: 1534326 - DNA, 15 bp, Homo sapiens
cccaatctttgtcaa

SEQ ID NO: 1534327 - DNA, 15 bp, Homo sapiens
gcccaatctttgtca

SEQ ID NO: 1534328 - DNA, 15 bp, Homo sapiens
ggcccaatctttgtc

SEQ ID NO: 1534329 - DNA, 15 bp, Homo sapiens
gggcccaatctttgt

SEQ ID NO: 1534330 - DNA, 15 bp, Homo sapiens
tgggcccaatctttg

SEQ ID NO: 1534331 - DNA, 15 bp, Homo sapiens
atgggcccaatcttt

SEQ ID NO: 1534332 - DNA, 15 bp, Homo sapiens
aatgggcccaatctt

SEQ ID NO: 1534333 - DNA, 15 bp, Homo sapiens
gaatgggcccaatct

SEQ ID NO: 1534334 - DNA, 15 bp, Homo sapiens
ggaatgggcccaatc

SEQ ID NO: 1534335 - DNA, 15 bp, Homo sapiens
aggaatgggcccaat

SEQ ID NO: 1534336 - DNA, 15 bp, Homo sapiens
taggaatgggcccaa

SEQ ID NO: 1534337 - DNA, 15 bp, Homo sapiens
gtaggaatgggccca

SEQ ID NO: 1534338 - DNA, 15 bp, Homo sapiens
agtaggaatgggccc

SEQ ID NO: 1534339 - DNA, 15 bp, Homo sapiens
gagtaggaatgggcc

SEQ ID NO: 1534340 - DNA, 15 bp, Homo sapiens
agagtaggaatgggc

SEQ ID NO: 1534341 - DNA, 15 bp, Homo sapiens
tagagtaggaatggg

SEQ ID NO: 1534342 - DNA, 15 bp, Homo sapiens
ttagagtaggaatgg

SEQ ID NO: 1534343 - DNA, 15 bp, Homo sapiens
attagagtaggaatg

SEQ ID NO: 1534344 - DNA, 15 bp, Homo sapiens
tattagagtaggaat

SEQ ID NO: 1534345 - DNA, 15 bp, Homo sapiens
ttattagagtaggaa

SEQ ID NO: 1534346 - DNA, 15 bp, Homo sapiens
gttattagagtagga

SEQ ID NO: 1534347 - DNA, 15 bp, Homo sapiens
agttattagagtagg

SEQ ID NO: 1534348 - DNA, 15 bp, Homo sapiens
gagttattagagtag

SEQ ID NO: 1534349 - DNA, 15 bp, Homo sapiens
tgagttattagagta

SEQ ID NO: 1534350 - DNA, 15 bp, Homo sapiens
ctgagttattagagt

SEQ ID NO: 1534351 - DNA, 15 bp, Homo sapiens
tctgagttattagag

SEQ ID NO: 1534352 - DNA, 15 bp, Homo sapiens
gtctgagttattaga

SEQ ID NO: 1534353 - DNA, 15 bp, Homo sapiens
agtctgagttattag

SEQ ID NO: 1534354 - DNA, 15 bp, Homo sapiens
aagtctgagttatta

SEQ ID NO: 1534355 - DNA, 15 bp, Homo sapiens
taagtctgagttatt

SEQ ID NO: 1534356 - DNA, 15 bp, Homo sapiens
gtaagtctgagttat

SEQ ID NO: 1534357 - DNA, 15 bp, Homo sapiens
ggtaagtctgagtta

SEQ ID NO: 1534358 - DNA, 15 bp, Homo sapiens
tggtaagtctgagtt

SEQ ID NO: 1534359 - DNA, 15 bp, Homo sapiens
ttggtaagtctgagt

SEQ ID NO: 1534360 - DNA, 15 bp, Homo sapiens
attggtaagtctgag

SEQ ID NO: 1534361 - DNA, 15 bp, Homo sapiens
aattggtaagtctga

SEQ ID NO: 1534362 - DNA, 15 bp, Homo sapiens
caattggtaagtctg

SEQ ID NO: 1534363 - DNA, 15 bp, Homo sapiens
acaattggtaagtct

SEQ ID NO: 1534364 - DNA, 15 bp, Homo sapiens
gacaattggtaagtc

SEQ ID NO: 1534365 - DNA, 15 bp, Homo sapiens
tgacaattggtaagt

SEQ ID NO: 1534366 - DNA, 15 bp, Homo sapiens
ctgacaattggtaag

SEQ ID NO: 1534367 - DNA, 15 bp, Homo sapiens
tctgacaattggtaa

SEQ ID NO: 1534368 - DNA, 15 bp, Homo sapiens
atctgacaattggta

SEQ ID NO: 1534369 - DNA, 15 bp, Homo sapiens
tatctgacaattggt

SEQ ID NO: 1534370 - DNA, 15 bp, Homo sapiens
ttatctgacaattgg

SEQ ID NO: 1534371 - DNA, 15 bp, Homo sapiens
attatctgacaattg

SEQ ID NO: 1534372 - DNA, 15 bp, Homo sapiens
cattatctgacaatt

SEQ ID NO: 1534373 - DNA, 15 bp, Homo sapiens
ccattatctgacaat

SEQ ID NO: 1534374 - DNA, 15 bp, Homo sapiens
tccattatctgacaa

SEQ ID NO: 1534375 - DNA, 15 bp, Homo sapiens
atccattatctgaca

SEQ ID NO: 1534376 - DNA, 15 bp, Homo sapiens
tatccattatctgac

SEQ ID NO: 1534377 - DNA, 15 bp, Homo sapiens
ttatccattatctga

SEQ ID NO: 1534378 - DNA, 15 bp, Homo sapiens
tttatccattatctg

SEQ ID NO: 1534379 - DNA, 15 bp, Homo sapiens
ctttatccattatct

SEQ ID NO: 1534380 - DNA, 15 bp, Homo sapiens
tctttatccattatc

SEQ ID NO: 1534381 - DNA, 15 bp, Homo sapiens
atctttatccattat

SEQ ID NO: 1534382 - DNA, 15 bp, Homo sapiens
catctttatccatta

SEQ ID NO: 1534383 - DNA, 15 bp, Homo sapiens
tcatctttatccatt

SEQ ID NO: 1534384 - DNA, 15 bp, Homo sapiens
ttcatctttatccat

SEQ ID NO: 1534385 - DNA, 15 bp, Homo sapiens
tttcatctttatcca

SEQ ID NO: 1534386 - DNA, 15 bp, Homo sapiens
atttcatctttatcc

SEQ ID NO: 1534387 - DNA, 15 bp, Homo sapiens
aatttcatctttatc

SEQ ID NO: 1534388 - DNA, 15 bp, Homo sapiens
gaatttcatctttat

SEQ ID NO: 1534389 - DNA, 15 bp, Homo sapiens
agaatttcatcttta

SEQ ID NO: 1534390 - DNA, 15 bp, Homo sapiens
cagaatttcatcttt

SEQ ID NO: 1534391 - DNA, 15 bp, Homo sapiens
acagaatttcatctt

SEQ ID NO: 1534392 - DNA, 15 bp, Homo sapiens
cacagaatttcatct

SEQ ID NO: 1534393 - DNA, 15 bp, Homo sapiens
acacagaatttcatc

SEQ ID NO: 1534394 - DNA, 15 bp, Homo sapiens
tacacagaatttcat

SEQ ID NO: 1534395 - DNA, 15 bp, Homo sapiens
ttacacagaatttca

SEQ ID NO: 1534396 - DNA, 15 bp, Homo sapiens
cttacacagaatttc

SEQ ID NO: 1534397 - DNA, 15 bp, Homo sapiens
tcttacacagaattt

SEQ ID NO: 1534398 - DNA, 15 bp, Homo sapiens
ttcttacacagaatt

SEQ ID NO: 1534399 - DNA, 15 bp, Homo sapiens
tttcttacacagaat

SEQ ID NO: 1534400 - DNA, 15 bp, Homo sapiens
ctttcttacacagaa

SEQ ID NO: 1534401 - DNA, 15 bp, Homo sapiens
cctttcttacacaga

SEQ ID NO: 1534402 - DNA, 15 bp, Homo sapiens
acctttcttacacag

SEQ ID NO: 1534403 - DNA, 15 bp, Homo sapiens
cacctttcttacaca

SEQ ID NO: 1534404 - DNA, 15 bp, Homo sapiens
tcacctttcttacac

SEQ ID NO: 1534405 - DNA, 15 bp, Homo sapiens
gtcacctttcttaca

SEQ ID NO: 1534406 - DNA, 15 bp, Homo sapiens
agtcacctttcttac

SEQ ID NO: 1534407 - DNA, 15 bp, Homo sapiens
aagtcacctttctta

SEQ ID NO: 1534408 - DNA, 15 bp, Homo sapiens
taagtcacctttctt

SEQ ID NO: 1534409 - DNA, 15 bp, Homo sapiens
ttaagtcacctttct

SEQ ID NO: 1534410 - DNA, 15 bp, Homo sapiens
cttaagtcacctttc

SEQ ID NO: 1534411 - DNA, 15 bp, Homo sapiens
tcttaagtcaccttt

SEQ ID NO: 1534412 - DNA, 15 bp, Homo sapiens
ctcttaagtcacctt

SEQ ID NO: 1534413 - DNA, 15 bp, Homo sapiens
actcttaagtcacct

SEQ ID NO: 1534414 - DNA, 15 bp, Homo sapiens
cactcttaagtcacc

SEQ ID NO: 1534415 - DNA, 15 bp, Homo sapiens
ccactcttaagtcac

SEQ ID NO: 1534416 - DNA, 15 bp, Homo sapiens
tccactcttaagtca

SEQ ID NO: 1534417 - DNA, 15 bp, Homo sapiens
atccactcttaagtc

SEQ ID NO: 1534418 - DNA, 15 bp, Homo sapiens
tatccactcttaagt

SEQ ID NO: 1534419 - DNA, 15 bp, Homo sapiens
ctatccactcttaag

SEQ ID NO: 1534420 - DNA, 15 bp, Homo sapiens
gctatccactcttaa

SEQ ID NO: 1534421 - DNA, 15 bp, Homo sapiens
tgctatccactctta

SEQ ID NO: 1534422 - DNA, 15 bp, Homo sapiens
atgctatccactctt

SEQ ID NO: 1534423 - DNA, 15 bp, Homo sapiens
gatgctatccactct

SEQ ID NO: 1534424 - DNA, 15 bp, Homo sapiens
tgatgctatccactc

SEQ ID NO: 1534425 - DNA, 15 bp, Homo sapiens
ctgatgctatccact

SEQ ID NO: 1534426 - DNA, 15 bp, Homo sapiens
tctgatgctatccac

SEQ ID NO: 1534427 - DNA, 15 bp, Homo sapiens
ttctgatgctatcca

SEQ ID NO: 1534428 - DNA, 15 bp, Homo sapiens
tttctgatgctatcc

SEQ ID NO: 1534429 - DNA, 15 bp, Homo sapiens
ctttctgatgctatc

SEQ ID NO: 1534430 - DNA, 15 bp, Homo sapiens
actttctgatgctat

SEQ ID NO: 1534431 - DNA, 15 bp, Homo sapiens
tactttctgatgcta

SEQ ID NO: 1534432 - DNA, 15 bp, Homo sapiens
atactttctgatgct

SEQ ID NO: 1534433 - DNA, 15 bp, Homo sapiens
tatactttctgatgc

SEQ ID NO: 1534434 - DNA, 15 bp, Homo sapiens
ttatactttctgatg

SEQ ID NO: 1534435 - DNA, 15 bp, Homo sapiens
cttatactttctgat

SEQ ID NO: 1534436 - DNA, 15 bp, Homo sapiens
acttatactttctga

SEQ ID NO: 1534437 - DNA, 15 bp, Homo sapiens
aacttatactttctg

SEQ ID NO: 1534438 - DNA, 15 bp, Homo sapiens
aaacttatactttct

SEQ ID NO: 1534439 - DNA, 15 bp, Homo sapiens
taaacttatactttc

SEQ ID NO: 1534440 - DNA, 15 bp, Homo sapiens
ctaaacttatacttt

SEQ ID NO: 1534441 - DNA, 15 bp, Homo sapiens
actaaacttatactt

SEQ ID NO: 1534442 - DNA, 15 bp, Homo sapiens
tactaaacttatact

SEQ ID NO: 1534443 - DNA, 15 bp, Homo sapiens
ttactaaacttatac

SEQ ID NO: 1534444 - DNA, 15 bp, Homo sapiens
tttactaaacttata

SEQ ID NO: 1534445 - DNA, 15 bp, Homo sapiens
ttttactaaacttat

SEQ ID NO: 1534446 - DNA, 15 bp, Homo sapiens
tttttactaaactta

SEQ ID NO: 1534447 - DNA, 15 bp, Homo sapiens
ctttttactaaactt

SEQ ID NO: 1534448 - DNA, 15 bp, Homo sapiens
actttttactaaact

SEQ ID NO: 1534449 - DNA, 15 bp, Homo sapiens
aactttttactaaac

SEQ ID NO: 1534450 - DNA, 15 bp, Homo sapiens
caactttttactaaa

SEQ ID NO: 1534451 - DNA, 15 bp, Homo sapiens
tcaactttttactaa

SEQ ID NO: 1534452 - DNA, 15 bp, Homo sapiens
ctcaactttttacta

SEQ ID NO: 1534453 - DNA, 15 bp, Homo sapiens
tctcaactttttact

SEQ ID NO: 1534454 - DNA, 15 bp, Homo sapiens
ttctcaactttttac

SEQ ID NO: 1534455 - DNA, 15 bp, Homo sapiens
attctcaacttttta

SEQ ID NO: 1534456 - DNA, 15 bp, Homo sapiens
gattctcaacttttt

SEQ ID NO: 1534457 - DNA, 15 bp, Homo sapiens
tgattctcaactttt

SEQ ID NO: 1534458 - DNA, 15 bp, Homo sapiens
atgattctcaacttt

SEQ ID NO: 1534459 - DNA, 15 bp, Homo sapiens
gatgattctcaactt

SEQ ID NO: 1534460 - DNA, 15 bp, Homo sapiens
agatgattctcaact

SEQ ID NO: 1534461 - DNA, 15 bp, Homo sapiens
cagatgattctcaac

SEQ ID NO: 1534462 - DNA, 15 bp, Homo sapiens
acagatgattctcaa

SEQ ID NO: 1534463 - DNA, 15 bp, Homo sapiens
cacagatgattctca

SEQ ID NO: 1534464 - DNA, 15 bp, Homo sapiens
acacagatgattctc

SEQ ID NO: 1534465 - DNA, 15 bp, Homo sapiens
aacacagatgattct

SEQ ID NO: 1534466 - DNA, 15 bp, Homo sapiens
aaacacagatgattc

SEQ ID NO: 1534467 - DNA, 15 bp, Homo sapiens
aaaacacagatgatt

SEQ ID NO: 1534468 - DNA, 15 bp, Homo sapiens
caaaacacagatgat

SEQ ID NO: 1534469 - DNA, 15 bp, Homo sapiens
tcaaaacacagatga

SEQ ID NO: 1534470 - DNA, 15 bp, Homo sapiens
atcaaaacacagatg

SEQ ID NO: 1534471 - DNA, 15 bp, Homo sapiens
tatcaaaacacagat

SEQ ID NO: 1534472 - DNA, 15 bp, Homo sapiens
ctatcaaaacacaga

SEQ ID NO: 1534473 - DNA, 15 bp, Homo sapiens
actatcaaaacacag

SEQ ID NO: 1534474 - DNA, 15 bp, Homo sapiens
gactatcaaaacaca

SEQ ID NO: 1534475 - DNA, 15 bp, Homo sapiens
agactatcaaaacac

SEQ ID NO: 1534476 - DNA, 15 bp, Homo sapiens
gagactatcaaaaca

SEQ ID NO: 1534477 - DNA, 15 bp, Homo sapiens
agagactatcaaaac

SEQ ID NO: 1534478 - DNA, 15 bp, Homo sapiens
aagagactatcaaaa

SEQ ID NO: 1534479 - DNA, 15 bp, Homo sapiens
aaagagactatcaaa

SEQ ID NO: 1534480 - DNA, 15 bp, Homo sapiens
aaaagagactatcaa

SEQ ID NO: 1534481 - DNA, 15 bp, Homo sapiens
gaaaagagactatca

SEQ ID NO: 1534482 - DNA, 15 bp, Homo sapiens
ggaaaagagactatc

SEQ ID NO: 1534483 - DNA, 15 bp, Homo sapiens
aggaaaagagactat

SEQ ID NO: 1534484 - DNA, 15 bp, Homo sapiens
caggaaaagagacta

SEQ ID NO: 1534485 - DNA, 15 bp, Homo sapiens
tcaggaaaagagact

SEQ ID NO: 1534486 - DNA, 15 bp, Homo sapiens
ttcaggaaaagagac

SEQ ID NO: 1534487 - DNA, 15 bp, Homo sapiens
tttcaggaaaagaga

SEQ ID NO: 1534488 - DNA, 15 bp, Homo sapiens
ttttcaggaaaagag

SEQ ID NO: 1534489 - DNA, 15 bp, Homo sapiens
tttttcaggaaaaga

SEQ ID NO: 1534490 - DNA, 15 bp, Homo sapiens
ttttttcaggaaaag

SEQ ID NO: 1534491 - DNA, 15 bp, Homo sapiens
tttttttcaggaaaa

SEQ ID NO: 1534492 - DNA, 15 bp, Homo sapiens
ttttttttcaggaaa

SEQ ID NO: 1534493 - DNA, 15 bp, Homo sapiens
tttttttttcaggaa

SEQ ID NO: 1534494 - DNA, 15 bp, Homo sapiens
atttttttttcagga

SEQ ID NO: 1534495 - DNA, 15 bp, Homo sapiens
gatttttttttcagg

SEQ ID NO: 1534496 - DNA, 15 bp, Homo sapiens
tgatttttttttcag

SEQ ID NO: 1534497 - DNA, 15 bp, Homo sapiens
gtgatttttttttca

SEQ ID NO: 1534498 - DNA, 15 bp, Homo sapiens
ggtgatttttttttc

SEQ ID NO: 1534499 - DNA, 15 bp, Homo sapiens
gggtgattttttttt

SEQ ID NO: 1534500 - DNA, 15 bp, Homo sapiens
tgggtgatttttttt

SEQ ID NO: 1534501 - DNA, 15 bp, Homo sapiens
ttgggtgattttttt

SEQ ID NO: 1534502 - DNA, 15 bp, Homo sapiens
tttgggtgatttttt

SEQ ID NO: 1534503 - DNA, 15 bp, Homo sapiens
ctttgggtgattttt

SEQ ID NO: 1534504 - DNA, 15 bp, Homo sapiens
actttgggtgatttt

SEQ ID NO: 1534505 - DNA, 15 bp, Homo sapiens
gactttgggtgattt

SEQ ID NO: 1534506 - DNA, 15 bp, Homo sapiens
tgactttgggtgatt

SEQ ID NO: 1534507 - DNA, 15 bp, Homo sapiens
gtgactttgggtgat

SEQ ID NO: 1534508 - DNA, 15 bp, Homo sapiens
ggtgactttgggtga

SEQ ID NO: 1534509 - DNA, 15 bp, Homo sapiens
gggtgactttgggtg

SEQ ID NO: 1534510 - DNA, 15 bp, Homo sapiens
cgggtgactttgggt

SEQ ID NO: 1534511 - DNA, 15 bp, Homo sapiens
acgggtgactttggg

SEQ ID NO: 1534512 - DNA, 15 bp, Homo sapiens
tacgggtgactttgg

SEQ ID NO: 1534513 - DNA, 15 bp, Homo sapiens
atacgggtgactttg

SEQ ID NO: 1534514 - DNA, 15 bp, Homo sapiens
aatacgggtgacttt

SEQ ID NO: 1534515 - DNA, 15 bp, Homo sapiens
aaatacgggtgactt

SEQ ID NO: 1534516 - DNA, 15 bp, Homo sapiens
taaatacgggtgact

SEQ ID NO: 1534517 - DNA, 15 bp, Homo sapiens
ctaaatacgggtgac

SEQ ID NO: 1534518 - DNA, 15 bp, Homo sapiens
tctaaatacgggtga

SEQ ID NO: 1534519 - DNA, 15 bp, Homo sapiens
ttctaaatacgggtg

SEQ ID NO: 1534520 - DNA, 15 bp, Homo sapiens
attctaaatacgggt

SEQ ID NO: 1534521 - DNA, 15 bp, Homo sapiens
cattctaaatacggg

SEQ ID NO: 1534522 - DNA, 15 bp, Homo sapiens
tcattctaaatacgg

SEQ ID NO: 1534523 - DNA, 15 bp, Homo sapiens
ttcattctaaatacg

SEQ ID NO: 1534524 - DNA, 15 bp, Homo sapiens
cttcattctaaatac

SEQ ID NO: 1534525 - DNA, 15 bp, Homo sapiens
gcttcattctaaata

SEQ ID NO: 1534526 - DNA, 15 bp, Homo sapiens
ggcttcattctaaat

SEQ ID NO: 1534527 - DNA, 15 bp, Homo sapiens
tggcttcattctaaa

SEQ ID NO: 1534528 - DNA, 15 bp, Homo sapiens
atggcttcattctaa

SEQ ID NO: 1534529 - DNA, 15 bp, Homo sapiens
tatggcttcattcta

SEQ ID NO: 1534530 - DNA, 15 bp, Homo sapiens
ctatggcttcattct

SEQ ID NO: 1534531 - DNA, 15 bp, Homo sapiens
actatggcttcattc

SEQ ID NO: 1534532 - DNA, 15 bp, Homo sapiens
gactatggcttcatt

SEQ ID NO: 1534533 - DNA, 15 bp, Homo sapiens
agactatggcttcat

SEQ ID NO: 1534534 - DNA, 15 bp, Homo sapiens
aagactatggcttca

SEQ ID NO: 1534535 - DNA, 15 bp, Homo sapiens
gaagactatggcttc

SEQ ID NO: 1534536 - DNA, 15 bp, Homo sapiens
agaagactatggctt

SEQ ID NO: 1534537 - DNA, 15 bp, Homo sapiens
aagaagactatggct

SEQ ID NO: 1534538 - DNA, 15 bp, Homo sapiens
aaagaagactatggc

SEQ ID NO: 1534539 - DNA, 15 bp, Homo sapiens
aaaagaagactatgg

SEQ ID NO: 1534540 - DNA, 15 bp, Homo sapiens
gaaaagaagactatg

SEQ ID NO: 1534541 - DNA, 15 bp, Homo sapiens
ggaaaagaagactat

SEQ ID NO: 1534542 - DNA, 15 bp, Homo sapiens
aggaaaagaagacta

SEQ ID NO: 1534543 - DNA, 15 bp, Homo sapiens
aaggaaaagaagact

SEQ ID NO: 1534544 - DNA, 15 bp, Homo sapiens
aaaggaaaagaagac

SEQ ID NO: 1534545 - DNA, 15 bp, Homo sapiens
caaaaaaaaggaaaa

SEQ ID NO: 1534546 - DNA, 15 bp, Homo sapiens
gcaaaaaaaaggaaa

SEQ ID NO: 1534547 - DNA, 15 bp, Homo sapiens
agcaaaaaaaaggaa

SEQ ID NO: 1534548 - DNA, 15 bp, Homo sapiens
aagcaaaaaaaagga

SEQ ID NO: 1534549 - DNA, 15 bp, Homo sapiens
aaagcaaaaaaaagg

SEQ ID NO: 1534550 - DNA, 15 bp, Homo sapiens
taaagcaaaaaaaag

SEQ ID NO: 1534551 - DNA, 15 bp, Homo sapiens
ataaagcaaaaaaaa

SEQ ID NO: 1534552 - DNA, 15 bp, Homo sapiens
tataaagcaaaaaaa

SEQ ID NO: 1534553 - DNA, 15 bp, Homo sapiens
ttataaagcaaaaaa

SEQ ID NO: 1534554 - DNA, 15 bp, Homo sapiens
tttataaagcaaaaa

SEQ ID NO: 1534555 - DNA, 15 bp, Homo sapiens
ttttataaagcaaaa

SEQ ID NO: 1534556 - DNA, 15 bp, Homo sapiens
gttttataaagcaaa

SEQ ID NO: 1534557 - DNA, 15 bp, Homo sapiens
agttttataaagcaa

SEQ ID NO: 1534558 - DNA, 15 bp, Homo sapiens
aagttttataaagca

SEQ ID NO: 1534559 - DNA, 15 bp, Homo sapiens
caagttttataaagc

SEQ ID NO: 1534560 - DNA, 15 bp, Homo sapiens
tcaagttttataaag

SEQ ID NO: 1534561 - DNA, 15 bp, Homo sapiens
atcaagttttataaa

SEQ ID NO: 1534562 - DNA, 15 bp, Homo sapiens
aatcaagttttataa

SEQ ID NO: 1534563 - DNA, 15 bp, Homo sapiens
aaatcaagttttata

SEQ ID NO: 1534564 - DNA, 15 bp, Homo sapiens
aaaatcaagttttat

SEQ ID NO: 1534565 - DNA, 15 bp, Homo sapiens
caaaatcaagtttta

SEQ ID NO: 1534566 - DNA, 15 bp, Homo sapiens
acaaaatcaagtttt

SEQ ID NO: 1534567 - DNA, 15 bp, Homo sapiens
aacaaaatcaagttt

SEQ ID NO: 1534568 - DNA, 15 bp, Homo sapiens
aaacaaaatcaagtt

SEQ ID NO: 1534569 - DNA, 15 bp, Homo sapiens
caaacaaaatcaagt

SEQ ID NO: 1534570 - DNA, 15 bp, Homo sapiens
ccaaacaaaatcaag

SEQ ID NO: 1534571 - DNA, 15 bp, Homo sapiens
cccaaacaaaatcaa

SEQ ID NO: 1534572 - DNA, 15 bp, Homo sapiens
acccaaacaaaatca

SEQ ID NO: 1534573 - DNA, 15 bp, Homo sapiens
cacccaaacaaaatc

SEQ ID NO: 1534574 - DNA, 15 bp, Homo sapiens
acacccaaacaaaat

SEQ ID NO: 1534575 - DNA, 15 bp, Homo sapiens
aacacccaaacaaaa

SEQ ID NO: 1534576 - DNA, 15 bp, Homo sapiens
aaacacccaaacaaa

SEQ ID NO: 1534577 - DNA, 15 bp, Homo sapiens
taaacacccaaacaa

SEQ ID NO: 1534578 - DNA, 15 bp, Homo sapiens
ataaacacccaaaca

SEQ ID NO: 1534579 - DNA, 15 bp, Homo sapiens
tataaacacccaaac

SEQ ID NO: 1534580 - DNA, 15 bp, Homo sapiens
ttataaacacccaaa

SEQ ID NO: 1534581 - DNA, 15 bp, Homo sapiens
tttataaacacccaa

SEQ ID NO: 1534582 - DNA, 15 bp, Homo sapiens
ctttataaacaccca

SEQ ID NO: 1534583 - DNA, 15 bp, Homo sapiens
tctttataaacaccc

SEQ ID NO: 1534584 - DNA, 15 bp, Homo sapiens
ttctttataaacacc

SEQ ID NO: 1534585 - DNA, 15 bp, Homo sapiens
cttctttataaacac

SEQ ID NO: 1534586 - DNA, 15 bp, Homo sapiens
tcttctttataaaca

SEQ ID NO: 1534587 - DNA, 15 bp, Homo sapiens
ttcttctttataaac

SEQ ID NO: 1534588 - DNA, 15 bp, Homo sapiens
tttcttctttataaa

SEQ ID NO: 1534589 - DNA, 15 bp, Homo sapiens
gtttcttctttataa

SEQ ID NO: 1534590 - DNA, 15 bp, Homo sapiens
agtttcttctttata

SEQ ID NO: 1534591 - DNA, 15 bp, Homo sapiens
aagtttcttctttat

SEQ ID NO: 1534592 - DNA, 15 bp, Homo sapiens
caagtttcttcttta

SEQ ID NO: 1534593 - DNA, 15 bp, Homo sapiens
acaagtttcttcttt

SEQ ID NO: 1534594 - DNA, 15 bp, Homo sapiens
tacaagtttcttctt

SEQ ID NO: 1534595 - DNA, 15 bp, Homo sapiens
ttacaagtttcttct

SEQ ID NO: 1534596 - DNA, 15 bp, Homo sapiens
tttacaagtttcttc

SEQ ID NO: 1534597 - DNA, 15 bp, Homo sapiens
ctttacaagtttctt

SEQ ID NO: 1534598 - DNA, 15 bp, Homo sapiens
tctttacaagtttct

SEQ ID NO: 1534599 - DNA, 15 bp, Homo sapiens
atctttacaagtttc

SEQ ID NO: 1534600 - DNA, 15 bp, Homo sapiens
catctttacaagttt

SEQ ID NO: 1534601 - DNA, 15 bp, Homo sapiens
gcatctttacaagtt

SEQ ID NO: 1534602 - DNA, 15 bp, Homo sapiens
ggcatctttacaagt

SEQ ID NO: 1534603 - DNA, 15 bp, Homo sapiens
tggcatctttacaag

SEQ ID NO: 1534604 - DNA, 15 bp, Homo sapiens
ctggcatctttacaa

SEQ ID NO: 1534605 - DNA, 15 bp, Homo sapiens
actggcatctttaca

SEQ ID NO: 1534606 - DNA, 15 bp, Homo sapiens
aactggcatctttac

SEQ ID NO: 1534607 - DNA, 15 bp, Homo sapiens
aaactggcatcttta

SEQ ID NO: 1534608 - DNA, 15 bp, Homo sapiens
aaaactggcatcttt

SEQ ID NO: 1534609 - DNA, 15 bp, Homo sapiens
taaaactggcatctt

SEQ ID NO: 1534610 - DNA, 15 bp, Homo sapiens
ttaaaactggcatct

SEQ ID NO: 1534611 - DNA, 15 bp, Homo sapiens
tttaaaactggcatc

SEQ ID NO: 1534612 - DNA, 15 bp, Homo sapiens
ttttaaaactggcat

SEQ ID NO: 1534613 - DNA, 15 bp, Homo sapiens
attttaaaactggca

SEQ ID NO: 1534614 - DNA, 15 bp, Homo sapiens
aattttaaaactggc

SEQ ID NO: 1534615 - DNA, 15 bp, Homo sapiens
aaattttaaaactgg

SEQ ID NO: 1534616 - DNA, 15 bp, Homo sapiens
caaattttaaaactg

SEQ ID NO: 1534617 - DNA, 15 bp, Homo sapiens
acaaattttaaaact

SEQ ID NO: 1534618 - DNA, 15 bp, Homo sapiens
cacaaattttaaaac

SEQ ID NO: 1534619 - DNA, 15 bp, Homo sapiens
gcacaaattttaaaa

SEQ ID NO: 1534620 - DNA, 15 bp, Homo sapiens
ggcacaaattttaaa

SEQ ID NO: 1534621 - DNA, 15 bp, Homo sapiens
gggcacaaattttaa

SEQ ID NO: 1534622 - DNA, 15 bp, Homo sapiens
ggggcacaaatttta

SEQ ID NO: 1534623 - DNA, 15 bp, Homo sapiens
gggggcacaaatttt

SEQ ID NO: 1534624 - DNA, 15 bp, Homo sapiens
ggggggcacaaattt

SEQ ID NO: 1534625 - DNA, 15 bp, Homo sapiens
gggggggcacaaatt

SEQ ID NO: 1534626 - DNA, 15 bp, Homo sapiens
tgggggggcacaaat

SEQ ID NO: 1534627 - DNA, 15 bp, Homo sapiens
ttgggggggcacaaa

SEQ ID NO: 1534628 - DNA, 15 bp, Homo sapiens
gttgggggggcacaa

SEQ ID NO: 1534629 - DNA, 15 bp, Homo sapiens
tgttgggggggcaca

SEQ ID NO: 1534630 - DNA, 15 bp, Homo sapiens
atgttgggggggcac

SEQ ID NO: 1534631 - DNA, 15 bp, Homo sapiens
catgttgggggggca

SEQ ID NO: 1534632 - DNA, 15 bp, Homo sapiens
ccatgttgggggggc

SEQ ID NO: 1534633 - DNA, 15 bp, Homo sapiens
accatgttggggggg

SEQ ID NO: 1534634 - DNA, 15 bp, Homo sapiens
taccatgttgggggg

SEQ ID NO: 1534635 - DNA, 15 bp, Homo sapiens
ctaccatgttggggg

SEQ ID NO: 1534636 - DNA, 15 bp, Homo sapiens
cctaccatgttgggg

SEQ ID NO: 1534637 - DNA, 15 bp, Homo sapiens
tcctaccatgttggg

SEQ ID NO: 1534638 - DNA, 15 bp, Homo sapiens
ttcctaccatgttgg

SEQ ID NO: 1534639 - DNA, 15 bp, Homo sapiens
tttcctaccatgttg

SEQ ID NO: 1534640 - DNA, 15 bp, Homo sapiens
ttttcctaccatgtt

SEQ ID NO: 1534641 - DNA, 15 bp, Homo sapiens
attttcctaccatgt

SEQ ID NO: 1534642 - DNA, 15 bp, Homo sapiens
tattttcctaccatg

SEQ ID NO: 1534643 - DNA, 15 bp, Homo sapiens
atattttcctaccat

SEQ ID NO: 1534644 - DNA, 15 bp, Homo sapiens
aatattttcctacca

SEQ ID NO: 1534645 - DNA, 15 bp, Homo sapiens
aaatattttcctacc

SEQ ID NO: 1534646 - DNA, 15 bp, Homo sapiens
taaatattttcctac

SEQ ID NO: 1534647 - DNA, 15 bp, Homo sapiens
gtaaatattttccta

SEQ ID NO: 1534648 - DNA, 15 bp, Homo sapiens
tgtaaatattttcct

SEQ ID NO: 1534649 - DNA, 15 bp, Homo sapiens
atgtaaatattttcc

SEQ ID NO: 1534650 - DNA, 15 bp, Homo sapiens
aatgtaaatattttc

SEQ ID NO: 1534651 - DNA, 15 bp, Homo sapiens
aaatgtaaatatttt

SEQ ID NO: 1534652 - DNA, 15 bp, Homo sapiens
aaaatgtaaatattt

SEQ ID NO: 1534653 - DNA, 15 bp, Homo sapiens
taaaatgtaaatatt

SEQ ID NO: 1534654 - DNA, 15 bp, Homo sapiens
ataaaatgtaaatat

SEQ ID NO: 1534655 - DNA, 15 bp, Homo sapiens
cataaaatgtaaata

SEQ ID NO: 1534656 - DNA, 15 bp, Homo sapiens
tcataaaatgtaaat

SEQ ID NO: 1534657 - DNA, 15 bp, Homo sapiens
atcataaaatgtaaa

SEQ ID NO: 1534658 - DNA, 15 bp, Homo sapiens
catcataaaatgtaa

SEQ ID NO: 1534659 - DNA, 15 bp, Homo sapiens
gcatcataaaatgta

SEQ ID NO: 1534660 - DNA, 15 bp, Homo sapiens
tgcatcataaaatgt

SEQ ID NO: 1534661 - DNA, 15 bp, Homo sapiens
atgcatcataaaatg

SEQ ID NO: 1534662 - DNA, 15 bp, Homo sapiens
gatgcatcataaaat

SEQ ID NO: 1534663 - DNA, 15 bp, Homo sapiens
ggatgcatcataaaa

SEQ ID NO: 1534664 - DNA, 15 bp, Homo sapiens
aggatgcatcataaa

SEQ ID NO: 1534665 - DNA, 15 bp, Homo sapiens
gaggatgcatcataa

SEQ ID NO: 1534666 - DNA, 15 bp, Homo sapiens
tgaggatgcatcata

SEQ ID NO: 1534667 - DNA, 15 bp, Homo sapiens
atgaggatgcatcat

SEQ ID NO: 1534668 - DNA, 15 bp, Homo sapiens
tatgaggatgcatca

SEQ ID NO: 1534669 - DNA, 15 bp, Homo sapiens
atatgaggatgcatc

SEQ ID NO: 1534670 - DNA, 15 bp, Homo sapiens
aatatgaggatgcat

SEQ ID NO: 1534671 - DNA, 15 bp, Homo sapiens
aaatatgaggatgca

SEQ ID NO: 1534672 - DNA, 15 bp, Homo sapiens
aaaatatgaggatgc

SEQ ID NO: 1534673 - DNA, 15 bp, Homo sapiens
aaaaatatgaggatg

SEQ ID NO: 1534674 - DNA, 15 bp, Homo sapiens
aaaaaatatgaggat

SEQ ID NO: 1534675 - DNA, 15 bp, Homo sapiens
aaaaaaatatgagga

SEQ ID NO: 1534676 - DNA, 15 bp, Homo sapiens
gaaaaaaatatgagg

SEQ ID NO: 1534677 - DNA, 15 bp, Homo sapiens
tgaaaaaaatatgag

SEQ ID NO: 1534678 - DNA, 15 bp, Homo sapiens
ctgaaaaaaatatga

SEQ ID NO: 1534679 - DNA, 15 bp, Homo sapiens
cctgaaaaaaatatg

SEQ ID NO: 1534680 - DNA, 15 bp, Homo sapiens
ccctgaaaaaaatat

SEQ ID NO: 1534681 - DNA, 15 bp, Homo sapiens
accctgaaaaaaata

SEQ ID NO: 1534682 - DNA, 15 bp, Homo sapiens
taccctgaaaaaaat

SEQ ID NO: 1534683 - DNA, 15 bp, Homo sapiens
ttaccctgaaaaaaa

SEQ ID NO: 1534684 - DNA, 15 bp, Homo sapiens
tttaccctgaaaaaa

SEQ ID NO: 1534685 - DNA, 15 bp, Homo sapiens
atttaccctgaaaaa

SEQ ID NO: 1534686 - DNA, 15 bp, Homo sapiens
catttaccctgaaaa

SEQ ID NO: 1534687 - DNA, 15 bp, Homo sapiens
acatttaccctgaaa

SEQ ID NO: 1534688 - DNA, 15 bp, Homo sapiens
aacatttaccctgaa

SEQ ID NO: 1534689 - DNA, 15 bp, Homo sapiens
gaacatttaccctga

SEQ ID NO: 1534690 - DNA, 15 bp, Homo sapiens
ggaacatttaccctg

SEQ ID NO: 1534691 - DNA, 15 bp, Homo sapiens
aggaacatttaccct

SEQ ID NO: 1534692 - DNA, 15 bp, Homo sapiens
taggaacatttaccc

SEQ ID NO: 1534693 - DNA, 15 bp, Homo sapiens
ttaggaacatttacc

SEQ ID NO: 1534694 - DNA, 15 bp, Homo sapiens
gttaggaacatttac

SEQ ID NO: 1534695 - DNA, 15 bp, Homo sapiens
ggttaggaacattta

SEQ ID NO: 1534696 - DNA, 15 bp, Homo sapiens
gggttaggaacattt

SEQ ID NO: 1534697 - DNA, 15 bp, Homo sapiens
tgggttaggaacatt

SEQ ID NO: 1534698 - DNA, 15 bp, Homo sapiens
ttgggttaggaacat

SEQ ID NO: 1534699 - DNA, 15 bp, Homo sapiens
gttgggttaggaaca

SEQ ID NO: 1534700 - DNA, 15 bp, Homo sapiens
ggttgggttaggaac

SEQ ID NO: 1534701 - DNA, 15 bp, Homo sapiens
gggttgggttaggaa

SEQ ID NO: 1534702 - DNA, 15 bp, Homo sapiens
agggttgggttagga

SEQ ID NO: 1534703 - DNA, 15 bp, Homo sapiens
aagggttgggttagg

SEQ ID NO: 1534704 - DNA, 15 bp, Homo sapiens
gaagggttgggttag

SEQ ID NO: 1534705 - DNA, 15 bp, Homo sapiens
tgaagggttgggtta

SEQ ID NO: 1534706 - DNA, 15 bp, Homo sapiens
ctgaagggttgggtt

SEQ ID NO: 1534707 - DNA, 15 bp, Homo sapiens
actgaagggttgggt

SEQ ID NO: 1534708 - DNA, 15 bp, Homo sapiens
aactgaagggttggg

SEQ ID NO: 1534709 - DNA, 15 bp, Homo sapiens
caactgaagggttgg

SEQ ID NO: 1534710 - DNA, 15 bp, Homo sapiens
tcaactgaagggttg

SEQ ID NO: 1534711 - DNA, 15 bp, Homo sapiens
atcaactgaagggtt

SEQ ID NO: 1534712 - DNA, 15 bp, Homo sapiens
catcaactgaagggt

SEQ ID NO: 1534713 - DNA, 15 bp, Homo sapiens
acatcaactgaaggg

SEQ ID NO: 1534714 - DNA, 15 bp, Homo sapiens
aacatcaactgaagg

SEQ ID NO: 1534715 - DNA, 15 bp, Homo sapiens
aaacatcaactgaag

SEQ ID NO: 1534716 - DNA, 15 bp, Homo sapiens
aaaacatcaactgaa

SEQ ID NO: 1534717 - DNA, 15 bp, Homo sapiens
taaaacatcaactga

SEQ ID NO: 1534718 - DNA, 15 bp, Homo sapiens
ttaaaacatcaactg

SEQ ID NO: 1534719 - DNA, 15 bp, Homo sapiens
gttaaaacatcaact

SEQ ID NO: 1534720 - DNA, 15 bp, Homo sapiens
tgttaaaacatcaac

SEQ ID NO: 1534721 - DNA, 15 bp, Homo sapiens
atgttaaaacatcaa

SEQ ID NO: 1534722 - DNA, 15 bp, Homo sapiens
catgttaaaacatca

SEQ ID NO: 1534723 - DNA, 15 bp, Homo sapiens
acatgttaaaacatc

SEQ ID NO: 1534724 - DNA, 15 bp, Homo sapiens
aacatgttaaaacat

SEQ ID NO: 1534725 - DNA, 15 bp, Homo sapiens
aaacatgttaaaaca

SEQ ID NO: 1534726 - DNA, 15 bp, Homo sapiens
caaacatgttaaaac

SEQ ID NO: 1534727 - DNA, 15 bp, Homo sapiens
acaaacatgttaaaa

SEQ ID NO: 1534728 - DNA, 15 bp, Homo sapiens
aacaaacatgttaaa

SEQ ID NO: 1534729 - DNA, 15 bp, Homo sapiens
aaacaaacatgttaa

SEQ ID NO: 1534730 - DNA, 15 bp, Homo sapiens
aaaacaaacatgtta

SEQ ID NO: 1534731 - DNA, 15 bp, Homo sapiens
taaaacaaacatgtt

SEQ ID NO: 1534732 - DNA, 15 bp, Homo sapiens
gtaaaacaaacatgt

SEQ ID NO: 1534733 - DNA, 15 bp, Homo sapiens
agtaaaacaaacatg

SEQ ID NO: 1534734 - DNA, 15 bp, Homo sapiens
gagtaaaacaaacat

SEQ ID NO: 1534735 - DNA, 15 bp, Homo sapiens
agagtaaaacaaaca

SEQ ID NO: 1534736 - DNA, 15 bp, Homo sapiens
aagagtaaaacaaac

SEQ ID NO: 1534737 - DNA, 15 bp, Homo sapiens
aaagagtaaaacaaa

SEQ ID NO: 1534738 - DNA, 15 bp, Homo sapiens
caaagagtaaaacaa

SEQ ID NO: 1534739 - DNA, 15 bp, Homo sapiens
gcaaagagtaaaaca

SEQ ID NO: 1534740 - DNA, 15 bp, Homo sapiens
tgcaaagagtaaaac

SEQ ID NO: 1534741 - DNA, 15 bp, Homo sapiens
ttgcaaagagtaaaa

SEQ ID NO: 1534742 - DNA, 15 bp, Homo sapiens
attgcaaagagtaaa

SEQ ID NO: 1534743 - DNA, 15 bp, Homo sapiens
cattgcaaagagtaa

SEQ ID NO: 1534744 - DNA, 15 bp, Homo sapiens
tcattgcaaagagta

SEQ ID NO: 1534745 - DNA, 15 bp, Homo sapiens
ttcattgcaaagagt

SEQ ID NO: 1534746 - DNA, 15 bp, Homo sapiens
tttcattgcaaagag

SEQ ID NO: 1534747 - DNA, 15 bp, Homo sapiens
gtttcattgcaaaga

SEQ ID NO: 1534748 - DNA, 15 bp, Homo sapiens
ggtttcattgcaaag

SEQ ID NO: 1534749 - DNA, 15 bp, Homo sapiens
tggtttcattgcaaa

SEQ ID NO: 1534750 - DNA, 15 bp, Homo sapiens
ttggtttcattgcaa

SEQ ID NO: 1534751 - DNA, 15 bp, Homo sapiens
cttggtttcattgca

SEQ ID NO: 1534752 - DNA, 15 bp, Homo sapiens
tcttggtttcattgc

SEQ ID NO: 1534753 - DNA, 15 bp, Homo sapiens
ttcttggtttcattg

SEQ ID NO: 1534754 - DNA, 15 bp, Homo sapiens
cttcttggtttcatt

SEQ ID NO: 1534755 - DNA, 15 bp, Homo sapiens
tcttcttggtttcat

SEQ ID NO: 1534756 - DNA, 15 bp, Homo sapiens
ttcttcttggtttca

SEQ ID NO: 1534757 - DNA, 15 bp, Homo sapiens
tttcttcttggtttc

SEQ ID NO: 1534758 - DNA, 15 bp, Homo sapiens
ttttcttcttggttt

SEQ ID NO: 1534759 - DNA, 15 bp, Homo sapiens
attttcttcttggtt

SEQ ID NO: 1534760 - DNA, 15 bp, Homo sapiens
aattttcttcttggt

SEQ ID NO: 1534761 - DNA, 15 bp, Homo sapiens
aaattttcttcttgg

SEQ ID NO: 1534762 - DNA, 15 bp, Homo sapiens
gaaattttcttcttg

SEQ ID NO: 1534763 - DNA, 15 bp, Homo sapiens
agaaattttcttctt

SEQ ID NO: 1534764 - DNA, 15 bp, Homo sapiens
gagaaattttcttct

SEQ ID NO: 1534765 - DNA, 15 bp, Homo sapiens
agagaaattttcttc

SEQ ID NO: 1534766 - DNA, 15 bp, Homo sapiens
tagagaaattttctt

SEQ ID NO: 1534767 - DNA, 15 bp, Homo sapiens
atagagaaattttct

SEQ ID NO: 1534768 - DNA, 15 bp, Homo sapiens
aatagagaaattttc

SEQ ID NO: 1534769 - DNA, 15 bp, Homo sapiens
gaatagagaaatttt

SEQ ID NO: 1534770 - DNA, 15 bp, Homo sapiens
agaatagagaaattt

SEQ ID NO: 1534771 - DNA, 15 bp, Homo sapiens
gagaatagagaaatt

SEQ ID NO: 1534772 - DNA, 15 bp, Homo sapiens
tgagaatagagaaat

SEQ ID NO: 1534773 - DNA, 15 bp, Homo sapiens
ttgagaatagagaaa

SEQ ID NO: 1534774 - DNA, 15 bp, Homo sapiens
tttgagaatagagaa

SEQ ID NO: 1534775 - DNA, 15 bp, Homo sapiens
gtttgagaatagaga

SEQ ID NO: 1534776 - DNA, 15 bp, Homo sapiens
tgtttgagaatagag

SEQ ID NO: 1534777 - DNA, 15 bp, Homo sapiens
atgtttgagaataga

SEQ ID NO: 1534778 - DNA, 15 bp, Homo sapiens
catgtttgagaatag

SEQ ID NO: 1534779 - DNA, 15 bp, Homo sapiens
gcatgtttgagaata

SEQ ID NO: 1534780 - DNA, 15 bp, Homo sapiens
tgcatgtttgagaat

SEQ ID NO: 1534781 - DNA, 15 bp, Homo sapiens
atgcatgtttgagaa

SEQ ID NO: 1534782 - DNA, 15 bp, Homo sapiens
aatgcatgtttgaga

SEQ ID NO: 1534783 - DNA, 15 bp, Homo sapiens
aaatgcatgtttgag

SEQ ID NO: 1534784 - DNA, 15 bp, Homo sapiens
aaaatgcatgtttga

SEQ ID NO: 1534785 - DNA, 15 bp, Homo sapiens
taaaatgcatgtttg

SEQ ID NO: 1534786 - DNA, 15 bp, Homo sapiens
ttaaaatgcatgttt

SEQ ID NO: 1534787 - DNA, 15 bp, Homo sapiens
attaaaatgcatgtt

SEQ ID NO: 1534788 - DNA, 15 bp, Homo sapiens
gattaaaatgcatgt

SEQ ID NO: 1534789 - DNA, 15 bp, Homo sapiens
agattaaaatgcatg

SEQ ID NO: 1534790 - DNA, 15 bp, Homo sapiens
gagattaaaatgcat

SEQ ID NO: 1534791 - DNA, 15 bp, Homo sapiens
ggagattaaaatgca

SEQ ID NO: 1534792 - DNA, 15 bp, Homo sapiens
gggagattaaaatgc

SEQ ID NO: 1534793 - DNA, 15 bp, Homo sapiens
tgggagattaaaatg

SEQ ID NO: 1534794 - DNA, 15 bp, Homo sapiens
atgggagattaaaat

SEQ ID NO: 1534795 - DNA, 15 bp, Homo sapiens
aatgggagattaaaa

SEQ ID NO: 1534796 - DNA, 15 bp, Homo sapiens
gaatgggagattaaa

SEQ ID NO: 1534797 - DNA, 15 bp, Homo sapiens
ggaatgggagattaa

SEQ ID NO: 1534798 - DNA, 15 bp, Homo sapiens
gggaatgggagatta

SEQ ID NO: 1534799 - DNA, 15 bp, Homo sapiens
tgggaatgggagatt

SEQ ID NO: 1534800 - DNA, 15 bp, Homo sapiens
gtgggaatgggagat

SEQ ID NO: 1534801 - DNA, 15 bp, Homo sapiens
tgtgggaatgggaga

SEQ ID NO: 1534802 - DNA, 15 bp, Homo sapiens
ttgtgggaatgggag

SEQ ID NO: 1534803 - DNA, 15 bp, Homo sapiens
tttgtgggaatggga

SEQ ID NO: 1534804 - DNA, 15 bp, Homo sapiens
gtttgtgggaatggg

SEQ ID NO: 1534805 - DNA, 15 bp, Homo sapiens
agtttgtgggaatgg

SEQ ID NO: 1534806 - DNA, 15 bp, Homo sapiens
aagtttgtgggaatg

SEQ ID NO: 1534807 - DNA, 15 bp, Homo sapiens
caagtttgtgggaat

SEQ ID NO: 1534808 - DNA, 15 bp, Homo sapiens
ccaagtttgtgggaa

SEQ ID NO: 1534809 - DNA, 15 bp, Homo sapiens
tccaagtttgtggga

SEQ ID NO: 1534810 - DNA, 15 bp, Homo sapiens
ttccaagtttgtggg

SEQ ID NO: 1534811 - DNA, 15 bp, Homo sapiens
attccaagtttgtgg

SEQ ID NO: 1534812 - DNA, 15 bp, Homo sapiens
tattccaagtttgtg

SEQ ID NO: 1534813 - DNA, 15 bp, Homo sapiens
atattccaagtttgt

SEQ ID NO: 1534814 - DNA, 15 bp, Homo sapiens
aatattccaagtttg

SEQ ID NO: 1534815 - DNA, 15 bp, Homo sapiens
aaatattccaagttt

SEQ ID NO: 1534816 - DNA, 15 bp, Homo sapiens
taaatattccaagtt

SEQ ID NO: 1534817 - DNA, 15 bp, Homo sapiens
ataaatattccaagt

SEQ ID NO: 1534818 - DNA, 15 bp, Homo sapiens
aataaatattccaag

SEQ ID NO: 1534819 - DNA, 15 bp, Homo sapiens
aaataaatattccaa

SEQ ID NO: 1534820 - DNA, 15 bp, Homo sapiens
taaataaatattcca

SEQ ID NO: 1534821 - DNA, 15 bp, Homo sapiens
ttaaataaatattcc

SEQ ID NO: 1534822 - DNA, 15 bp, Homo sapiens
attaaataaatattc

SEQ ID NO: 1534823 - DNA, 15 bp, Homo sapiens
tattaaataaatatt

SEQ ID NO: 1534824 - DNA, 15 bp, Homo sapiens
gtattaaataaatat

SEQ ID NO: 1534825 - DNA, 15 bp, Homo sapiens
agtattaaataaata

SEQ ID NO: 1534826 - DNA, 15 bp, Homo sapiens
aagtattaaataaat

SEQ ID NO: 1534827 - DNA, 15 bp, Homo sapiens
caagtattaaataaa

SEQ ID NO: 1534828 - DNA, 15 bp, Homo sapiens
tcaagtattaaataa

SEQ ID NO: 1534829 - DNA, 15 bp, Homo sapiens
ctcaagtattaaata

SEQ ID NO: 1534830 - DNA, 15 bp, Homo sapiens
cctcaagtattaaat

SEQ ID NO: 1534831 - DNA, 15 bp, Homo sapiens
acctcaagtattaaa

SEQ ID NO: 1534832 - DNA, 15 bp, Homo sapiens
tacctcaagtattaa

SEQ ID NO: 1534833 - DNA, 15 bp, Homo sapiens
atacctcaagtatta

SEQ ID NO: 1534834 - DNA, 15 bp, Homo sapiens
aatacctcaagtatt

SEQ ID NO: 1534835 - DNA, 15 bp, Homo sapiens
taatacctcaagtat

SEQ ID NO: 1534836 - DNA, 15 bp, Homo sapiens
ttaatacctcaagta

SEQ ID NO: 1534837 - DNA, 15 bp, Homo sapiens
attaatacctcaagt

SEQ ID NO: 1534838 - DNA, 15 bp, Homo sapiens
aattaatacctcaag

SEQ ID NO: 1534839 - DNA, 15 bp, Homo sapiens
aaattaatacctcaa

SEQ ID NO: 1534840 - DNA, 15 bp, Homo sapiens
taaattaatacctca

SEQ ID NO: 1534841 - DNA, 15 bp, Homo sapiens
ttaaattaatacctc

SEQ ID NO: 1534842 - DNA, 15 bp, Homo sapiens
tttaaattaatacct

SEQ ID NO: 1534843 - DNA, 15 bp, Homo sapiens
ttttaaattaatacc

SEQ ID NO: 1534844 - DNA, 15 bp, Homo sapiens
gttttaaattaatac

SEQ ID NO: 1534845 - DNA, 15 bp, Homo sapiens
agttttaaattaata

SEQ ID NO: 1534846 - DNA, 15 bp, Homo sapiens
aagttttaaattaat

SEQ ID NO: 1534847 - DNA, 15 bp, Homo sapiens
caagttttaaattaa

SEQ ID NO: 1534848 - DNA, 15 bp, Homo sapiens
tcaagttttaaatta

SEQ ID NO: 1534849 - DNA, 15 bp, Homo sapiens
ttcaagttttaaatt

SEQ ID NO: 1534850 - DNA, 15 bp, Homo sapiens
cttcaagttttaaat

SEQ ID NO: 1534851 - DNA, 15 bp, Homo sapiens
gcttcaagttttaaa

SEQ ID NO: 1534852 - DNA, 15 bp, Homo sapiens
tgcttcaagttttaa

SEQ ID NO: 1534853 - DNA, 15 bp, Homo sapiens
atgcttcaagtttta

SEQ ID NO: 1534854 - DNA, 15 bp, Homo sapiens
tatgcttcaagtttt

SEQ ID NO: 1534855 - DNA, 15 bp, Homo sapiens
atatgcttcaagttt

SEQ ID NO: 1534856 - DNA, 15 bp, Homo sapiens
tatatgcttcaagtt

SEQ ID NO: 1534857 - DNA, 15 bp, Homo sapiens
gtatatgcttcaagt

SEQ ID NO: 1534858 - DNA, 15 bp, Homo sapiens
agtatatgcttcaag

SEQ ID NO: 1534859 - DNA, 15 bp, Homo sapiens
aagtatatgcttcaa

SEQ ID NO: 1534860 - DNA, 15 bp, Homo sapiens
taagtatatgcttca

SEQ ID NO: 1534861 - DNA, 15 bp, Homo sapiens
ctaagtatatgcttc

SEQ ID NO: 1534862 - DNA, 15 bp, Homo sapiens
actaagtatatgctt

SEQ ID NO: 1534863 - DNA, 15 bp, Homo sapiens
gactaagtatatgct

SEQ ID NO: 1534864 - DNA, 15 bp, Homo sapiens
agactaagtatatgc

SEQ ID NO: 1534865 - DNA, 15 bp, Homo sapiens
gagactaagtatatg

SEQ ID NO: 1534866 - DNA, 15 bp, Homo sapiens
agagactaagtatat

SEQ ID NO: 1534867 - DNA, 15 bp, Homo sapiens
aagagactaagtata

SEQ ID NO: 1534868 - DNA, 15 bp, Homo sapiens
taagagactaagtat

SEQ ID NO: 1534869 - DNA, 15 bp, Homo sapiens
ataagagactaagta

SEQ ID NO: 1534870 - DNA, 15 bp, Homo sapiens
aataagagactaagt

SEQ ID NO: 1534871 - DNA, 15 bp, Homo sapiens
gaataagagactaag

SEQ ID NO: 1534872 - DNA, 15 bp, Homo sapiens
ggaataagagactaa

SEQ ID NO: 1534873 - DNA, 15 bp, Homo sapiens
aggaataagagacta

SEQ ID NO: 1534874 - DNA, 15 bp, Homo sapiens
gaggaataagagact

SEQ ID NO: 1534875 - DNA, 15 bp, Homo sapiens
agaggaataagagac

SEQ ID NO: 1534876 - DNA, 15 bp, Homo sapiens
gagaggaataagaga

SEQ ID NO: 1534877 - DNA, 15 bp, Homo sapiens
ggagaggaataagag

SEQ ID NO: 1534878 - DNA, 15 bp, Homo sapiens
tggagaggaataaga

SEQ ID NO: 1534879 - DNA, 15 bp, Homo sapiens
gtggagaggaataag

SEQ ID NO: 1534880 - DNA, 15 bp, Homo sapiens
ggtggagaggaataa

SEQ ID NO: 1534881 - DNA, 15 bp, Homo sapiens
gggtggagaggaata

SEQ ID NO: 1534882 - DNA, 15 bp, Homo sapiens
agggtggagaggaat

SEQ ID NO: 1534883 - DNA, 15 bp, Homo sapiens
cagggtggagaggaa

SEQ ID NO: 1534884 - DNA, 15 bp, Homo sapiens
ccagggtggagagga

SEQ ID NO: 1534885 - DNA, 15 bp, Homo sapiens
accagggtggagagg

SEQ ID NO: 1534886 - DNA, 15 bp, Homo sapiens
gaccagggtggagag

SEQ ID NO: 1534887 - DNA, 15 bp, Homo sapiens
agaccagggtggaga

SEQ ID NO: 1534888 - DNA, 15 bp, Homo sapiens
aagaccagggtggag

SEQ ID NO: 1534889 - DNA, 15 bp, Homo sapiens
aaagaccagggtgga

SEQ ID NO: 1534890 - DNA, 15 bp, Homo sapiens
caaagaccagggtgg

SEQ ID NO: 1534891 - DNA, 15 bp, Homo sapiens
tcaaagaccagggtg

SEQ ID NO: 1534892 - DNA, 15 bp, Homo sapiens
ttcaaagaccagggt

SEQ ID NO: 1534893 - DNA, 15 bp, Homo sapiens
tttcaaagaccaggg

SEQ ID NO: 1534894 - DNA, 15 bp, Homo sapiens
atttcaaagaccagg

SEQ ID NO: 1534895 - DNA, 15 bp, Homo sapiens
catttcaaagaccag

SEQ ID NO: 1534896 - DNA, 15 bp, Homo sapiens
ccatttcaaagacca

SEQ ID NO: 1534897 - DNA, 15 bp, Homo sapiens
tccatttcaaagacc

SEQ ID NO: 1534898 - DNA, 15 bp, Homo sapiens
ttccatttcaaagac

SEQ ID NO: 1534899 - DNA, 15 bp, Homo sapiens
tttccatttcaaaga

SEQ ID NO: 1534900 - DNA, 15 bp, Homo sapiens
gtttccatttcaaag

SEQ ID NO: 1534901 - DNA, 15 bp, Homo sapiens
tgtttccatttcaaa

SEQ ID NO: 1534902 - DNA, 15 bp, Homo sapiens
atgtttccatttcaa

SEQ ID NO: 1534903 - DNA, 15 bp, Homo sapiens
tatgtttccatttca

SEQ ID NO: 1534904 - DNA, 15 bp, Homo sapiens
ttatgtttccatttc

SEQ ID NO: 1534905 - DNA, 15 bp, Homo sapiens
tttatgtttccattt

SEQ ID NO: 1534906 - DNA, 15 bp, Homo sapiens
ttttatgtttccatt

SEQ ID NO: 1534907 - DNA, 15 bp, Homo sapiens
cttttatgtttccat

SEQ ID NO: 1534908 - DNA, 15 bp, Homo sapiens
acttttatgtttcca

SEQ ID NO: 1534909 - DNA, 15 bp, Homo sapiens
aacttttatgtttcc

SEQ ID NO: 1534910 - DNA, 15 bp, Homo sapiens
aaacttttatgtttc

SEQ ID NO: 1534911 - DNA, 15 bp, Homo sapiens
taaacttttatgttt

SEQ ID NO: 1534912 - DNA, 15 bp, Homo sapiens
ataaacttttatgtt

SEQ ID NO: 1534913 - DNA, 15 bp, Homo sapiens
aataaacttttatgt

SEQ ID NO: 1534914 - DNA, 15 bp, Homo sapiens
gaataaacttttatg

SEQ ID NO: 1534915 - DNA, 15 bp, Homo sapiens
tgaataaacttttat

SEQ ID NO: 1534916 - DNA, 15 bp, Homo sapiens
gtgaataaactttta

SEQ ID NO: 1534917 - DNA, 15 bp, Homo sapiens
ggtgaataaactttt

SEQ ID NO: 1534918 - DNA, 15 bp, Homo sapiens
tggtgaataaacttt

SEQ ID NO: 1534919 - DNA, 15 bp, Homo sapiens
atggtgaataaactt

SEQ ID NO: 1534920 - DNA, 15 bp, Homo sapiens
tatggtgaataaact

SEQ ID NO: 1534921 - DNA, 15 bp, Homo sapiens
ttatggtgaataaac

SEQ ID NO: 1534922 - DNA, 15 bp, Homo sapiens
attatggtgaataaa

SEQ ID NO: 1534923 - DNA, 15 bp, Homo sapiens
aattatggtgaataa

SEQ ID NO: 1534924 - DNA, 15 bp, Homo sapiens
aaattatggtgaata

SEQ ID NO: 1534925 - DNA, 15 bp, Homo sapiens
aaaattatggtgaat

SEQ ID NO: 1534926 - DNA, 15 bp, Homo sapiens
taaaattatggtgaa

SEQ ID NO: 1534927 - DNA, 15 bp, Homo sapiens
ataaaattatggtga

SEQ ID NO: 1534928 - DNA, 15 bp, Homo sapiens
tataaaattatggtg

SEQ ID NO: 1534929 - DNA, 15 bp, Homo sapiens
gtataaaattatggt

SEQ ID NO: 1534930 - DNA, 15 bp, Homo sapiens
tgtataaaattatgg

SEQ ID NO: 1534931 - DNA, 15 bp, Homo sapiens
gtgtataaaattatg

SEQ ID NO: 1534932 - DNA, 15 bp, Homo sapiens
tgtgtataaaattat

SEQ ID NO: 1534933 - DNA, 15 bp, Homo sapiens
ctgtgtataaaatta

SEQ ID NO: 1534934 - DNA, 15 bp, Homo sapiens
gctgtgtataaaatt

SEQ ID NO: 1534935 - DNA, 15 bp, Homo sapiens
agctgtgtataaaat

SEQ ID NO: 1534936 - DNA, 15 bp, Homo sapiens
aagctgtgtataaaa

SEQ ID NO: 1534937 - DNA, 15 bp, Homo sapiens
aaagctgtgtataaa

SEQ ID NO: 1534938 - DNA, 15 bp, Homo sapiens
aaaagctgtgtataa

SEQ ID NO: 1534939 - DNA, 15 bp, Homo sapiens
ctgaaaagctgtgta

SEQ ID NO: 1534940 - DNA, 15 bp, Homo sapiens
cctgaaaagctgtgt

SEQ ID NO: 1534941 - DNA, 15 bp, Homo sapiens
ccctgaaaagctgtg

SEQ ID NO: 1534942 - DNA, 15 bp, Homo sapiens
cccctgaaaagctgt

SEQ ID NO: 1534943 - DNA, 15 bp, Homo sapiens
tcccctgaaaagctg

SEQ ID NO: 1534944 - DNA, 15 bp, Homo sapiens
ttcccctgaaaagct

SEQ ID NO: 1534945 - DNA, 15 bp, Homo sapiens
tttcccctgaaaagc

SEQ ID NO: 1534946 - DNA, 15 bp, Homo sapiens
ttttcccctgaaaag

SEQ ID NO: 1534947 - DNA, 15 bp, Homo sapiens
tttttcccctgaaaa

SEQ ID NO: 1534948 - DNA, 15 bp, Homo sapiens
ttttttcccctgaaa

SEQ ID NO: 1534949 - DNA, 15 bp, Homo sapiens
tttttttcccctgaa

SEQ ID NO: 1534950 - DNA, 15 bp, Homo sapiens
ttttttttcccctga

SEQ ID NO: 1534951 - DNA, 15 bp, Homo sapiens
gttttttttcccctg

SEQ ID NO: 1534952 - DNA, 15 bp, Homo sapiens
agttttttttcccct

SEQ ID NO: 1534953 - DNA, 15 bp, Homo sapiens
cagttttttttcccc

SEQ ID NO: 1534954 - DNA, 15 bp, Homo sapiens
acagttttttttccc

SEQ ID NO: 1534955 - DNA, 15 bp, Homo sapiens
tacagttttttttcc

SEQ ID NO: 1534956 - DNA, 15 bp, Homo sapiens
gtacagttttttttc

SEQ ID NO: 1534957 - DNA, 15 bp, Homo sapiens
agtacagtttttttt

SEQ ID NO: 1534958 - DNA, 15 bp, Homo sapiens
ccagtacagtttttt

SEQ ID NO: 1534959 - DNA, 15 bp, Homo sapiens
cccagtacagttttt

SEQ ID NO: 1534960 - DNA, 15 bp, Homo sapiens
acccagtacagtttt

SEQ ID NO: 1534961 - DNA, 15 bp, Homo sapiens
tacccagtacagttt

SEQ ID NO: 1534962 - DNA, 15 bp, Homo sapiens
ttacccagtacagtt

SEQ ID NO: 1534963 - DNA, 15 bp, Homo sapiens
attacccagtacagt

SEQ ID NO: 1534964 - DNA, 15 bp, Homo sapiens
tattacccagtacag

SEQ ID NO: 1534965 - DNA, 15 bp, Homo sapiens
ttattacccagtaca

SEQ ID NO: 1534966 - DNA, 15 bp, Homo sapiens
cttattacccagtac

SEQ ID NO: 1534967 - DNA, 15 bp, Homo sapiens
acttattacccagta

SEQ ID NO: 1534968 - DNA, 15 bp, Homo sapiens
tacttattacccagt

SEQ ID NO: 1534969 - DNA, 15 bp, Homo sapiens
atacttattacccag

SEQ ID NO: 1534970 - DNA, 15 bp, Homo sapiens
tatacttattaccca

SEQ ID NO: 1534971 - DNA, 15 bp, Homo sapiens
atatacttattaccc

SEQ ID NO: 1534972 - DNA, 15 bp, Homo sapiens
catatacttattacc

SEQ ID NO: 1534973 - DNA, 15 bp, Homo sapiens
acatatacttattac

SEQ ID NO: 1534974 - DNA, 15 bp, Homo sapiens
tacatatacttatta

SEQ ID NO: 1534975 - DNA, 15 bp, Homo sapiens
ctacatatacttatt

SEQ ID NO: 1534976 - DNA, 15 bp, Homo sapiens
tctacatatacttat

SEQ ID NO: 1534977 - DNA, 15 bp, Homo sapiens
atctacatatactta

SEQ ID NO: 1534978 - DNA, 15 bp, Homo sapiens
aatctacatatactt

SEQ ID NO: 1534979 - DNA, 15 bp, Homo sapiens
caatctacatatact

SEQ ID NO: 1534980 - DNA, 15 bp, Homo sapiens
acaatctacatatac

SEQ ID NO: 1534981 - DNA, 15 bp, Homo sapiens
aacaatctacatata

SEQ ID NO: 1534982 - DNA, 15 bp, Homo sapiens
aaacaatctacatat

SEQ ID NO: 1534983 - DNA, 15 bp, Homo sapiens
gaaacaatctacata

SEQ ID NO: 1534984 - DNA, 15 bp, Homo sapiens
tgaaacaatctacat

SEQ ID NO: 1534985 - DNA, 15 bp, Homo sapiens
ctgaaacaatctaca

SEQ ID NO: 1534986 - DNA, 15 bp, Homo sapiens
tctgaaacaatctac

SEQ ID NO: 1534987 - DNA, 15 bp, Homo sapiens
ctctgaaacaatcta

SEQ ID NO: 1534988 - DNA, 15 bp, Homo sapiens
actctgaaacaatct

SEQ ID NO: 1534989 - DNA, 15 bp, Homo sapiens
aactctgaaacaatc

SEQ ID NO: 1534990 - DNA, 15 bp, Homo sapiens
gaactctgaaacaat

SEQ ID NO: 1534991 - DNA, 15 bp, Homo sapiens
agaactctgaaacaa

SEQ ID NO: 1534992 - DNA, 15 bp, Homo sapiens
aagaactctgaaaca

SEQ ID NO: 1534993 - DNA, 15 bp, Homo sapiens
taagaactctgaaac

SEQ ID NO: 1534994 - DNA, 15 bp, Homo sapiens
ttaagaactctgaaa

SEQ ID NO: 1534995 - DNA, 15 bp, Homo sapiens
atttaagaactctga

SEQ ID NO: 1534996 - DNA, 15 bp, Homo sapiens
aatttaagaactctg

SEQ ID NO: 1534997 - DNA, 15 bp, Homo sapiens
taatttaagaactct

SEQ ID NO: 1534998 - DNA, 15 bp, Homo sapiens
caataatttaagaac

SEQ ID NO: 1534999 - DNA, 15 bp, Homo sapiens
tcaataatttaagaa

SEQ ID NO: 1535000 - DNA, 15 bp, Homo sapiens
ttcaataatttaaga

SEQ ID NO: 1535001 - DNA, 15 bp, Homo sapiens
tttcaataatttaag

SEQ ID NO: 1535002 - DNA, 15 bp, Homo sapiens
gtttcaataatttaa

SEQ ID NO: 1535003 - DNA, 15 bp, Homo sapiens
tgtttcaataattta

SEQ ID NO: 1535004 - DNA, 15 bp, Homo sapiens
atgtttcaataattt

SEQ ID NO: 1535005 - DNA, 15 bp, Homo sapiens
tatgtttcaataatt

SEQ ID NO: 1535006 - DNA, 15 bp, Homo sapiens
gtatgtttcaataat

SEQ ID NO: 1535007 - DNA, 15 bp, Homo sapiens
ggtatgtttcaataa

SEQ ID NO: 1535008 - DNA, 15 bp, Homo sapiens
tggtatgtttcaata

SEQ ID NO: 1535009 - DNA, 15 bp, Homo sapiens
atggtatgtttcaat

SEQ ID NO: 1535010 - DNA, 15 bp, Homo sapiens
aatggtatgtttcaa

SEQ ID NO: 1535011 - DNA, 15 bp, Homo sapiens
aaatggtatgtttca

SEQ ID NO: 1535012 - DNA, 15 bp, Homo sapiens
taaatggtatgtttc

SEQ ID NO: 1535013 - DNA, 15 bp, Homo sapiens
gtaaatggtatgttt

SEQ ID NO: 1535014 - DNA, 15 bp, Homo sapiens
tgtaaatggtatgtt

SEQ ID NO: 1535015 - DNA, 15 bp, Homo sapiens
atgtaaatggtatgt

SEQ ID NO: 1535016 - DNA, 15 bp, Homo sapiens
tatgtaaatggtatg

SEQ ID NO: 1535017 - DNA, 15 bp, Homo sapiens
atatgtaaatggtat

SEQ ID NO: 1535018 - DNA, 15 bp, Homo sapiens
catatgtaaatggta

SEQ ID NO: 1535019 - DNA, 15 bp, Homo sapiens
acatatgtaaatggt

SEQ ID NO: 1535020 - DNA, 15 bp, Homo sapiens
tacatatgtaaatgg

SEQ ID NO: 1535021 - DNA, 15 bp, Homo sapiens
ttacatatgtaaatg

SEQ ID NO: 1535022 - DNA, 15 bp, Homo sapiens
tttacatatgtaaat

SEQ ID NO: 1535023 - DNA, 15 bp, Homo sapiens
ttttacatatgtaaa

SEQ ID NO: 1535024 - DNA, 15 bp, Homo sapiens
attttacatatgtaa

SEQ ID NO: 1535025 - DNA, 15 bp, Homo sapiens
cattttacatatgta

SEQ ID NO: 1535026 - DNA, 15 bp, Homo sapiens
acattttacatatgt

SEQ ID NO: 1535027 - DNA, 15 bp, Homo sapiens
tacattttacatatg

SEQ ID NO: 1535028 - DNA, 15 bp, Homo sapiens
gtacattttacatat

SEQ ID NO: 1535029 - DNA, 15 bp, Homo sapiens
agtacattttacata

SEQ ID NO: 1535030 - DNA, 15 bp, Homo sapiens
tagtacattttacat

SEQ ID NO: 1535031 - DNA, 15 bp, Homo sapiens
tatagtacattttac

SEQ ID NO: 1535032 - DNA, 15 bp, Homo sapiens
gtatagtacatttta

SEQ ID NO: 1535033 - DNA, 15 bp, Homo sapiens
agtatagtacatttt

SEQ ID NO: 1535034 - DNA, 15 bp, Homo sapiens
aagtatagtacattt

SEQ ID NO: 1535035 - DNA, 15 bp, Homo sapiens
aaagtatagtacatt

SEQ ID NO: 1535036 - DNA, 15 bp, Homo sapiens
taaagtatagtacat

SEQ ID NO: 1535037 - DNA, 15 bp, Homo sapiens
ttaaagtatagtaca

SEQ ID NO: 1535038 - DNA, 15 bp, Homo sapiens
tttaaagtatagtac

SEQ ID NO: 1535039 - DNA, 15 bp, Homo sapiens
ctttaaagtatagta

SEQ ID NO: 1535040 - DNA, 15 bp, Homo sapiens
tctttaaagtatagt

SEQ ID NO: 1535041 - DNA, 15 bp, Homo sapiens
atctttaaagtatag

SEQ ID NO: 1535042 - DNA, 15 bp, Homo sapiens
tatctttaaagtata

SEQ ID NO: 1535043 - DNA, 15 bp, Homo sapiens
ctatctttaaagtat

SEQ ID NO: 1535044 - DNA, 15 bp, Homo sapiens
cctatctttaaagta

SEQ ID NO: 1535045 - DNA, 15 bp, Homo sapiens
acctatctttaaagt

SEQ ID NO: 1535046 - DNA, 15 bp, Homo sapiens
tacctatctttaaag

SEQ ID NO: 1535047 - DNA, 15 bp, Homo sapiens
gtacctatctttaaa

SEQ ID NO: 1535048 - DNA, 15 bp, Homo sapiens
agtacctatctttaa

SEQ ID NO: 1535049 - DNA, 15 bp, Homo sapiens
tagtacctatcttta

SEQ ID NO: 1535050 - DNA, 15 bp, Homo sapiens
atagtacctatcttt

SEQ ID NO: 1535051 - DNA, 15 bp, Homo sapiens
tatagtacctatctt

SEQ ID NO: 1535052 - DNA, 15 bp, Homo sapiens
ttatagtacctatct

SEQ ID NO: 1535053 - DNA, 15 bp, Homo sapiens
attatagtacctatc

SEQ ID NO: 1535054 - DNA, 15 bp, Homo sapiens
aattatagtacctat

SEQ ID NO: 1535055 - DNA, 15 bp, Homo sapiens
taattatagtaccta

SEQ ID NO: 1535056 - DNA, 15 bp, Homo sapiens
ctaattatagtacct

SEQ ID NO: 1535057 - DNA, 15 bp, Homo sapiens
actaattatagtacc

SEQ ID NO: 1535058 - DNA, 15 bp, Homo sapiens
tactaattatagtac

SEQ ID NO: 1535059 - DNA, 15 bp, Homo sapiens
ttactaattatagta

SEQ ID NO: 1535060 - DNA, 15 bp, Homo sapiens
tttactaattatagt

SEQ ID NO: 1535061 - DNA, 15 bp, Homo sapiens
atttactaattatag

SEQ ID NO: 1535062 - DNA, 15 bp, Homo sapiens
tatttactaattata

SEQ ID NO: 1535063 - DNA, 15 bp, Homo sapiens
ctatttactaattat

SEQ ID NO: 1535064 - DNA, 15 bp, Homo sapiens
tctatttactaatta

SEQ ID NO: 1535065 - DNA, 15 bp, Homo sapiens
atctatttactaatt

SEQ ID NO: 1535066 - DNA, 15 bp, Homo sapiens
aatctatttactaat

SEQ ID NO: 1535067 - DNA, 15 bp, Homo sapiens
taatctatttactaa

SEQ ID NO: 1535068 - DNA, 15 bp, Homo sapiens
gtaatctatttacta

SEQ ID NO: 1535069 - DNA, 15 bp, Homo sapiens
agtaatctatttact

SEQ ID NO: 1535070 - DNA, 15 bp, Homo sapiens
cagtaatctatttac

SEQ ID NO: 1535071 - DNA, 15 bp, Homo sapiens
acagtaatctattta

SEQ ID NO: 1535072 - DNA, 15 bp, Homo sapiens
aacagtaatctattt

SEQ ID NO: 1535073 - DNA, 15 bp, Homo sapiens
taacagtaatctatt

SEQ ID NO: 1535074 - DNA, 15 bp, Homo sapiens
ttaacagtaatctat

SEQ ID NO: 1535075 - DNA, 15 bp, Homo sapiens
tttaacagtaatcta

SEQ ID NO: 1535076 - DNA, 15 bp, Homo sapiens
atttaacagtaatct

SEQ ID NO: 1535077 - DNA, 15 bp, Homo sapiens
tatttaacagtaatc

SEQ ID NO: 1535078 - DNA, 15 bp, Homo sapiens
ttatttaacagtaat

SEQ ID NO: 1535079 - DNA, 15 bp, Homo sapiens
gttatttaacagtaa

SEQ ID NO: 1535080 - DNA, 15 bp, Homo sapiens
agttatttaacagta

SEQ ID NO: 1535081 - DNA, 15 bp, Homo sapiens
aagttatttaacagt

SEQ ID NO: 1535082 - DNA, 15 bp, Homo sapiens
aaagttatttaacag

SEQ ID NO: 1535083 - DNA, 15 bp, Homo sapiens
aaaagttatttaaca

SEQ ID NO: 1535084 - DNA, 15 bp, Homo sapiens
aaaaagttatttaac

SEQ ID NO: 1535085 - DNA, 15 bp, Homo sapiens
aaaaaagttatttaa

SEQ ID NO: 1535086 - DNA, 15 bp, Homo sapiens
aaaaaaagttattta

SEQ ID NO: 1535087 - DNA, 15 bp, Homo sapiens
taaaaaaagttattt

SEQ ID NO: 1535088 - DNA, 15 bp, Homo sapiens
ttaaaaaaagttatt

SEQ ID NO: 1535089 - DNA, 15 bp, Homo sapiens
tttaaaaaaagttat

SEQ ID NO: 1535090 - DNA, 15 bp, Homo sapiens
ttttaaaaaaagtta

SEQ ID NO: 1535091 - DNA, 15 bp, Homo sapiens
tttttaaaaaaagtt

SEQ ID NO: 1535092 - DNA, 15 bp, Homo sapiens
ttttttaaaaaaagt

SEQ ID NO: 1535093 - DNA, 15 bp, Homo sapiens
cttttttttaaaaaa

SEQ ID NO: 1535094 - DNA, 15 bp, Homo sapiens
acttttttttaaaaa

SEQ ID NO: 1535095 - DNA, 15 bp, Homo sapiens
aacttttttttaaaa

SEQ ID NO: 1535096 - DNA, 15 bp, Homo sapiens
aaacttttttttaaa

SEQ ID NO: 1535097 - DNA, 15 bp, Homo sapiens
gaaacttttttttaa

SEQ ID NO: 1535098 - DNA, 15 bp, Homo sapiens
tgaaactttttttta

SEQ ID NO: 1535099 - DNA, 15 bp, Homo sapiens
atgaaactttttttt

SEQ ID NO: 1535100 - DNA, 15 bp, Homo sapiens
gatgaaacttttttt

SEQ ID NO: 1535101 - DNA, 15 bp, Homo sapiens
agatgaaactttttt

SEQ ID NO: 1535102 - DNA, 15 bp, Homo sapiens
tagatgaaacttttt

SEQ ID NO: 1535103 - DNA, 15 bp, Homo sapiens
atagatgaaactttt

SEQ ID NO: 1535104 - DNA, 15 bp, Homo sapiens
catagatgaaacttt

SEQ ID NO: 1535105 - DNA, 15 bp, Homo sapiens
gcatagatgaaactt

SEQ ID NO: 1535106 - DNA, 15 bp, Homo sapiens
tgcatagatgaaact

SEQ ID NO: 1535107 - DNA, 15 bp, Homo sapiens
gtgcatagatgaaac

SEQ ID NO: 1535108 - DNA, 15 bp, Homo sapiens
tgtgcatagatgaaa

SEQ ID NO: 1535109 - DNA, 15 bp, Homo sapiens
atgtgcatagatgaa

SEQ ID NO: 1535110 - DNA, 15 bp, Homo sapiens
tatgtgcatagatga

SEQ ID NO: 1535111 - DNA, 15 bp, Homo sapiens
ctatgtgcatagatg

SEQ ID NO: 1535112 - DNA, 15 bp, Homo sapiens
cctatgtgcatagat

SEQ ID NO: 1535113 - DNA, 15 bp, Homo sapiens
gcctatgtgcataga

SEQ ID NO: 1535114 - DNA, 15 bp, Homo sapiens
agcctatgtgcatag

SEQ ID NO: 1535115 - DNA, 15 bp, Homo sapiens
gagcctatgtgcata

SEQ ID NO: 1535116 - DNA, 15 bp, Homo sapiens
agagcctatgtgcat

SEQ ID NO: 1535117 - DNA, 15 bp, Homo sapiens
cagagcctatgtgca

SEQ ID NO: 1535118 - DNA, 15 bp, Homo sapiens
tcagagcctatgtgc

SEQ ID NO: 1535119 - DNA, 15 bp, Homo sapiens
ctcagagcctatgtg

SEQ ID NO: 1535120 - DNA, 15 bp, Homo sapiens
gctcagagcctatgt

SEQ ID NO: 1535121 - DNA, 15 bp, Homo sapiens
tgctcagagcctatg

SEQ ID NO: 1535122 - DNA, 15 bp, Homo sapiens
ctgctcagagcctat

SEQ ID NO: 1535123 - DNA, 15 bp, Homo sapiens
tctgctcagagccta

SEQ ID NO: 1535124 - DNA, 15 bp, Homo sapiens
atctgctcagagcct

SEQ ID NO: 1535125 - DNA, 15 bp, Homo sapiens
aatctgctcagagcc

SEQ ID NO: 1535126 - DNA, 15 bp, Homo sapiens
aaatctgctcagagc

SEQ ID NO: 1535127 - DNA, 15 bp, Homo sapiens
gaaatctgctcagag

SEQ ID NO: 1535128 - DNA, 15 bp, Homo sapiens
tgaaatctgctcaga

SEQ ID NO: 1535129 - DNA, 15 bp, Homo sapiens
ctgaaatctgctcag

SEQ ID NO: 1535130 - DNA, 15 bp, Homo sapiens
tctgaaatctgctca

SEQ ID NO: 1535131 - DNA, 15 bp, Homo sapiens
atctgaaatctgctc

SEQ ID NO: 1535132 - DNA, 15 bp, Homo sapiens
tatctgaaatctgct

SEQ ID NO: 1535133 - DNA, 15 bp, Homo sapiens
ctatctgaaatctgc

SEQ ID NO: 1535134 - DNA, 15 bp, Homo sapiens
actatctgaaatctg

SEQ ID NO: 1535135 - DNA, 15 bp, Homo sapiens
aactatctgaaatct

SEQ ID NO: 1535136 - DNA, 15 bp, Homo sapiens
gaactatctgaaatc

SEQ ID NO: 1535137 - DNA, 15 bp, Homo sapiens
ggaactatctgaaat

SEQ ID NO: 1535138 - DNA, 15 bp, Homo sapiens
aggaactatctgaaa

SEQ ID NO: 1535139 - DNA, 15 bp, Homo sapiens
caggaactatctgaa

SEQ ID NO: 1535140 - DNA, 15 bp, Homo sapiens
tcaggaactatctga

SEQ ID NO: 1535141 - DNA, 15 bp, Homo sapiens
ttcaggaactatctg

SEQ ID NO: 1535142 - DNA, 15 bp, Homo sapiens
attcaggaactatct

SEQ ID NO: 1535143 - DNA, 15 bp, Homo sapiens
tattcaggaactatc

SEQ ID NO: 1535144 - DNA, 15 bp, Homo sapiens
ttattcaggaactat

SEQ ID NO: 1535145 - DNA, 15 bp, Homo sapiens
tttattcaggaacta

SEQ ID NO: 1535146 - DNA, 15 bp, Homo sapiens
ttttattcaggaact

SEQ ID NO: 1535147 - DNA, 15 bp, Homo sapiens
tttttattcaggaac

SEQ ID NO: 1535148 - DNA, 15 bp, Homo sapiens
atttttattcaggaa

SEQ ID NO: 1535149 - DNA, 15 bp, Homo sapiens
gatttttattcagga

SEQ ID NO: 1535150 - DNA, 15 bp, Homo sapiens
tgatttttattcagg

SEQ ID NO: 1535151 - DNA, 15 bp, Homo sapiens
ttgatttttattcag

SEQ ID NO: 1535152 - DNA, 15 bp, Homo sapiens
tttgatttttattca

SEQ ID NO: 1535153 - DNA, 15 bp, Homo sapiens
ttttgatttttattc

SEQ ID NO: 1535154 - DNA, 15 bp, Homo sapiens
attttgatttttatt

SEQ ID NO: 1535155 - DNA, 15 bp, Homo sapiens
aattttgatttttat

SEQ ID NO: 1535156 - DNA, 15 bp, Homo sapiens
caattttgattttta

SEQ ID NO: 1535157 - DNA, 15 bp, Homo sapiens
tcaattttgattttt

SEQ ID NO: 1535158 - DNA, 15 bp, Homo sapiens
gtcaattttgatttt

SEQ ID NO: 1535159 - DNA, 15 bp, Homo sapiens
agtcaattttgattt

SEQ ID NO: 1535160 - DNA, 15 bp, Homo sapiens
tagtcaattttgatt

SEQ ID NO: 1535161 - DNA, 15 bp, Homo sapiens
atagtcaattttgat

SEQ ID NO: 1535162 - DNA, 15 bp, Homo sapiens
gatagtcaattttga

SEQ ID NO: 1535163 - DNA, 15 bp, Homo sapiens
tgatagtcaattttg

SEQ ID NO: 1535164 - DNA, 15 bp, Homo sapiens
ctgatagtcaatttt

SEQ ID NO: 1535165 - DNA, 15 bp, Homo sapiens
actgatagtcaattt

SEQ ID NO: 1535166 - DNA, 15 bp, Homo sapiens
aactgatagtcaatt

SEQ ID NO: 1535167 - DNA, 15 bp, Homo sapiens
caactgatagtcaat

SEQ ID NO: 1535168 - DNA, 15 bp, Homo sapiens
gcaactgatagtcaa

SEQ ID NO: 1535169 - DNA, 15 bp, Homo sapiens
ggcaactgatagtca

SEQ ID NO: 1535170 - DNA, 15 bp, Homo sapiens
tggcaactgatagtc

SEQ ID NO: 1535171 - DNA, 15 bp, Homo sapiens
atggcaactgatagt

SEQ ID NO: 1535172 - DNA, 15 bp, Homo sapiens
aatggcaactgatag

SEQ ID NO: 1535173 - DNA, 15 bp, Homo sapiens
aaatggcaactgata

SEQ ID NO: 1535174 - DNA, 15 bp, Homo sapiens
aaaatggcaactgat

SEQ ID NO: 1535175 - DNA, 15 bp, Homo sapiens
taaaatggcaactga

SEQ ID NO: 1535176 - DNA, 15 bp, Homo sapiens
ataaaatggcaactg

SEQ ID NO: 1535177 - DNA, 15 bp, Homo sapiens
tataaaatggcaact

SEQ ID NO: 1535178 - DNA, 15 bp, Homo sapiens
atataaaatggcaac

SEQ ID NO: 1535179 - DNA, 15 bp, Homo sapiens
tatataaaatggcaa

SEQ ID NO: 1535180 - DNA, 15 bp, Homo sapiens
atatataaaatggca

SEQ ID NO: 1535181 - DNA, 15 bp, Homo sapiens
catatataaaatggc

SEQ ID NO: 1535182 - DNA, 15 bp, Homo sapiens
acatatataaaatgg

SEQ ID NO: 1535183 - DNA, 15 bp, Homo sapiens
aacatatataaaatg

SEQ ID NO: 1535184 - DNA, 15 bp, Homo sapiens
taacatatataaaat

SEQ ID NO: 1535185 - DNA, 15 bp, Homo sapiens
ttaacatatataaaa

SEQ ID NO: 1535186 - DNA, 15 bp, Homo sapiens
gttaacatatataaa

SEQ ID NO: 1535187 - DNA, 15 bp, Homo sapiens
tgttaacatatataa

SEQ ID NO: 1535188 - DNA, 15 bp, Homo sapiens
atgttaacatatata

SEQ ID NO: 1535189 - DNA, 15 bp, Homo sapiens
tatgttaacatatat

SEQ ID NO: 1535190 - DNA, 15 bp, Homo sapiens
atatgttaacatata

SEQ ID NO: 1535191 - DNA, 15 bp, Homo sapiens
tatatgttaacatat

SEQ ID NO: 1535192 - DNA, 15 bp, Homo sapiens
ttatatgttaacata

SEQ ID NO: 1535193 - DNA, 15 bp, Homo sapiens
tttatatgttaacat

SEQ ID NO: 1535194 - DNA, 15 bp, Homo sapiens
ctttatatgttaaca

SEQ ID NO: 1535195 - DNA, 15 bp, Homo sapiens
tctttatatgttaac

SEQ ID NO: 1535196 - DNA, 15 bp, Homo sapiens
ttctttatatgttaa

SEQ ID NO: 1535197 - DNA, 15 bp, Homo sapiens
tttctttatatgtta

SEQ ID NO: 1535198 - DNA, 15 bp, Homo sapiens
ttttctttatatgtt

SEQ ID NO: 1535199 - DNA, 15 bp, Homo sapiens
tttttctttatatgt

SEQ ID NO: 1535200 - DNA, 15 bp, Homo sapiens
ttttttctttatatg

SEQ ID NO: 1535201 - DNA, 15 bp, Homo sapiens
cttttttctttatat

SEQ ID NO: 1535202 - DNA, 15 bp, Homo sapiens
tcttttttctttata

SEQ ID NO: 1535203 - DNA, 15 bp, Homo sapiens
ctcttttttctttat

SEQ ID NO: 1535204 - DNA, 15 bp, Homo sapiens
actcttttttcttta

SEQ ID NO: 1535205 - DNA, 15 bp, Homo sapiens
gactcttttttcttt

SEQ ID NO: 1535206 - DNA, 15 bp, Homo sapiens
tgactcttttttctt

SEQ ID NO: 1535207 - DNA, 15 bp, Homo sapiens
atgactcttttttct

SEQ ID NO: 1535208 - DNA, 15 bp, Homo sapiens
aatgactcttttttc

SEQ ID NO: 1535209 - DNA, 15 bp, Homo sapiens
aaatgactctttttt

SEQ ID NO: 1535210 - DNA, 15 bp, Homo sapiens
caaatgactcttttt

SEQ ID NO: 1535211 - DNA, 15 bp, Homo sapiens
tcaaatgactctttt

SEQ ID NO: 1535212 - DNA, 15 bp, Homo sapiens
ctcaaatgactcttt

SEQ ID NO: 1535213 - DNA, 15 bp, Homo sapiens
cctcaaatgactctt

SEQ ID NO: 1535214 - DNA, 15 bp, Homo sapiens
tcctcaaatgactct

SEQ ID NO: 1535215 - DNA, 15 bp, Homo sapiens
atcctcaaatgactc

SEQ ID NO: 1535216 - DNA, 15 bp, Homo sapiens
catcctcaaatgact

SEQ ID NO: 1535217 - DNA, 15 bp, Homo sapiens
ccatcctcaaatgac

SEQ ID NO: 1535218 - DNA, 15 bp, Homo sapiens
tccatcctcaaatga

SEQ ID NO: 1535219 - DNA, 15 bp, Homo sapiens
ttccatcctcaaatg

SEQ ID NO: 1535220 - DNA, 15 bp, Homo sapiens
cttccatcctcaaat

SEQ ID NO: 1535221 - DNA, 15 bp, Homo sapiens
tcttccatcctcaaa

SEQ ID NO: 1535222 - DNA, 15 bp, Homo sapiens
atcttccatcctcaa

SEQ ID NO: 1535223 - DNA, 15 bp, Homo sapiens
gatcttccatcctca

SEQ ID NO: 1535224 - DNA, 15 bp, Homo sapiens
tgatcttccatcctc

SEQ ID NO: 1535225 - DNA, 15 bp, Homo sapiens
ctgatcttccatcct

SEQ ID NO: 1535226 - DNA, 15 bp, Homo sapiens
gctgatcttccatcc

SEQ ID NO: 1535227 - DNA, 15 bp, Homo sapiens
agctgatcttccatc

SEQ ID NO: 1535228 - DNA, 15 bp, Homo sapiens
tagctgatcttccat

SEQ ID NO: 1535229 - DNA, 15 bp, Homo sapiens
ttagctgatcttcca

SEQ ID NO: 1535230 - DNA, 15 bp, Homo sapiens
tttagctgatcttcc

SEQ ID NO: 1535231 - DNA, 15 bp, Homo sapiens
ttttagctgatcttc

SEQ ID NO: 1535232 - DNA, 15 bp, Homo sapiens
tttttagctgatctt

SEQ ID NO: 1535233 - DNA, 15 bp, Homo sapiens
ctttttagctgatct

SEQ ID NO: 1535234 - DNA, 15 bp, Homo sapiens
gctttttagctgatc

SEQ ID NO: 1535235 - DNA, 15 bp, Homo sapiens
tgctttttagctgat

SEQ ID NO: 1535236 - DNA, 15 bp, Homo sapiens
ttgctttttagctga

SEQ ID NO: 1535237 - DNA, 15 bp, Homo sapiens
cttgctttttagctg

SEQ ID NO: 1535238 - DNA, 15 bp, Homo sapiens
acttgctttttagct

SEQ ID NO: 1535239 - DNA, 15 bp, Homo sapiens
aacttgctttttagc

SEQ ID NO: 1535240 - DNA, 15 bp, Homo sapiens
caacttgctttttag

SEQ ID NO: 1535241 - DNA, 15 bp, Homo sapiens
acaacttgcttttta

SEQ ID NO: 1535242 - DNA, 15 bp, Homo sapiens
tacaacttgcttttt

SEQ ID NO: 1535243 - DNA, 15 bp, Homo sapiens
ttacaacttgctttt

SEQ ID NO: 1535244 - DNA, 15 bp, Homo sapiens
attacaacttgcttt

SEQ ID NO: 1535245 - DNA, 15 bp, Homo sapiens
tattacaacttgctt

SEQ ID NO: 1535246 - DNA, 15 bp, Homo sapiens
atattacaacttgct

SEQ ID NO: 1535247 - DNA, 15 bp, Homo sapiens
aatattacaacttgc

SEQ ID NO: 1535248 - DNA, 15 bp, Homo sapiens
aaatattacaacttg

SEQ ID NO: 1535249 - DNA, 15 bp, Homo sapiens
taaatattacaactt

SEQ ID NO: 1535250 - DNA, 15 bp, Homo sapiens
ataaatattacaact

SEQ ID NO: 1535251 - DNA, 15 bp, Homo sapiens
tataaatattacaac

SEQ ID NO: 1535252 - DNA, 15 bp, Homo sapiens
ttataaatattacaa

SEQ ID NO: 1535253 - DNA, 15 bp, Homo sapiens
gttataaatattaca

SEQ ID NO: 1535254 - DNA, 15 bp, Homo sapiens
tgttataaatattac

SEQ ID NO: 1535255 - DNA, 15 bp, Homo sapiens
ctgttataaatatta

SEQ ID NO: 1535256 - DNA, 15 bp, Homo sapiens
actgttataaatatt

SEQ ID NO: 1535257 - DNA, 15 bp, Homo sapiens
aactgttataaatat

SEQ ID NO: 1535258 - DNA, 15 bp, Homo sapiens
gaactgttataaata

SEQ ID NO: 1535259 - DNA, 15 bp, Homo sapiens
agaactgttataaat

SEQ ID NO: 1535260 - DNA, 15 bp, Homo sapiens
cagaactgttataaa

SEQ ID NO: 1535261 - DNA, 15 bp, Homo sapiens
gcagaactgttataa

SEQ ID NO: 1535262 - DNA, 15 bp, Homo sapiens
tgcagaactgttata

SEQ ID NO: 1535263 - DNA, 15 bp, Homo sapiens
ctgcagaactgttat

SEQ ID NO: 1535264 - DNA, 15 bp, Homo sapiens
cctgcagaactgtta

SEQ ID NO: 1535265 - DNA, 15 bp, Homo sapiens
acctgcagaactgtt

SEQ ID NO: 1535266 - DNA, 15 bp, Homo sapiens
cacctgcagaactgt

SEQ ID NO: 1535267 - DNA, 15 bp, Homo sapiens
ccacctgcagaactg

SEQ ID NO: 1535268 - DNA, 15 bp, Homo sapiens
tccacctgcagaact

SEQ ID NO: 1535269 - DNA, 15 bp, Homo sapiens
ctccacctgcagaac

SEQ ID NO: 1535270 - DNA, 15 bp, Homo sapiens
cctccacctgcagaa

SEQ ID NO: 1535271 - DNA, 15 bp, Homo sapiens
acctccacctgcaga

SEQ ID NO: 1535272 - DNA, 15 bp, Homo sapiens
cacctccacctgcag

SEQ ID NO: 1535273 - DNA, 15 bp, Homo sapiens
ccacctccacctgca

SEQ ID NO: 1535274 - DNA, 15 bp, Homo sapiens
gccacctccacctgc

SEQ ID NO: 1535275 - DNA, 15 bp, Homo sapiens
tgccacctccacctg

SEQ ID NO: 1535276 - DNA, 15 bp, Homo sapiens
ctgccacctccacct

SEQ ID NO: 1535277 - DNA, 15 bp, Homo sapiens
cctgccacctccacc

SEQ ID NO: 1535278 - DNA, 15 bp, Homo sapiens
ccctgccacctccac

SEQ ID NO: 1535279 - DNA, 15 bp, Homo sapiens
tccctgccacctcca

SEQ ID NO: 1535280 - DNA, 15 bp, Homo sapiens
atccctgccacctcc

SEQ ID NO: 1535281 - DNA, 15 bp, Homo sapiens
aatccctgccacctc

SEQ ID NO: 1535282 - DNA, 15 bp, Homo sapiens
gaatccctgccacct

SEQ ID NO: 1535283 - DNA, 15 bp, Homo sapiens
tgaatccctgccacc

SEQ ID NO: 1535284 - DNA, 15 bp, Homo sapiens
atgaatccctgccac

SEQ ID NO: 1535285 - DNA, 15 bp, Homo sapiens
aatgaatccctgcca

SEQ ID NO: 1535286 - DNA, 15 bp, Homo sapiens
taatgaatccctgcc

SEQ ID NO: 1535287 - DNA, 15 bp, Homo sapiens
ttaatgaatccctgc

SEQ ID NO: 1535288 - DNA, 15 bp, Homo sapiens
cttaatgaatccctg

SEQ ID NO: 1535289 - DNA, 15 bp, Homo sapiens
tcttaatgaatccct

SEQ ID NO: 1535290 - DNA, 15 bp, Homo sapiens
atcttaatgaatccc

SEQ ID NO: 1535291 - DNA, 15 bp, Homo sapiens
gatcttaatgaatcc

SEQ ID NO: 1535292 - DNA, 15 bp, Homo sapiens
agatcttaatgaatc

SEQ ID NO: 1535293 - DNA, 15 bp, Homo sapiens
aagatcttaatgaat

SEQ ID NO: 1535294 - DNA, 15 bp, Homo sapiens
caagatcttaatgaa

SEQ ID NO: 1535295 - DNA, 15 bp, Homo sapiens
tcaagatcttaatga

SEQ ID NO: 1535296 - DNA, 15 bp, Homo sapiens
atcaagatcttaatg

SEQ ID NO: 1535297 - DNA, 15 bp, Homo sapiens
gatcaagatcttaat

SEQ ID NO: 1535298 - DNA, 15 bp, Homo sapiens
tgatcaagatcttaa

SEQ ID NO: 1535299 - DNA, 15 bp, Homo sapiens
ctgatcaagatctta

SEQ ID NO: 1535300 - DNA, 15 bp, Homo sapiens
tctgatcaagatctt

SEQ ID NO: 1535301 - DNA, 15 bp, Homo sapiens
ctctgatcaagatct

SEQ ID NO: 1535302 - DNA, 15 bp, Homo sapiens
actctgatcaagatc

SEQ ID NO: 1535303 - DNA, 15 bp, Homo sapiens
aactctgatcaagat

SEQ ID NO: 1535304 - DNA, 15 bp, Homo sapiens
caactctgatcaaga

SEQ ID NO: 1535305 - DNA, 15 bp, Homo sapiens
ccaactctgatcaag

SEQ ID NO: 1535306 - DNA, 15 bp, Homo sapiens
cccaactctgatcaa

SEQ ID NO: 1535307 - DNA, 15 bp, Homo sapiens
tcccaactctgatca

SEQ ID NO: 1535308 - DNA, 15 bp, Homo sapiens
ctcccaactctgatc

SEQ ID NO: 1535309 - DNA, 15 bp, Homo sapiens
cctcccaactctgat

SEQ ID NO: 1535310 - DNA, 15 bp, Homo sapiens
tcctcccaactctga

SEQ ID NO: 1535311 - DNA, 15 bp, Homo sapiens
ttcctcccaactctg

SEQ ID NO: 1535312 - DNA, 15 bp, Homo sapiens
attcctcccaactct

SEQ ID NO: 1535313 - DNA, 15 bp, Homo sapiens
tattcctcccaactc

SEQ ID NO: 1535314 - DNA, 15 bp, Homo sapiens
ctattcctcccaact

SEQ ID NO: 1535315 - DNA, 15 bp, Homo sapiens
tctattcctcccaac

SEQ ID NO: 1535316 - DNA, 15 bp, Homo sapiens
ctctattcctcccaa

SEQ ID NO: 1535317 - DNA, 15 bp, Homo sapiens
tctctattcctccca

SEQ ID NO: 1535318 - DNA, 15 bp, Homo sapiens
ttctctattcctccc

SEQ ID NO: 1535319 - DNA, 15 bp, Homo sapiens
gttctctattcctcc

SEQ ID NO: 1535320 - DNA, 15 bp, Homo sapiens
agttctctattcctc

SEQ ID NO: 1535321 - DNA, 15 bp, Homo sapiens
gagttctctattcct

SEQ ID NO: 1535322 - DNA, 15 bp, Homo sapiens
ggagttctctattcc

SEQ ID NO: 1535323 - DNA, 15 bp, Homo sapiens
aggagttctctattc

SEQ ID NO: 1535324 - DNA, 15 bp, Homo sapiens
caggagttctctatt

SEQ ID NO: 1535325 - DNA, 15 bp, Homo sapiens
tcaggagttctctat

SEQ ID NO: 1535326 - DNA, 15 bp, Homo sapiens
gtcaggagttctcta

SEQ ID NO: 1535327 - DNA, 15 bp, Homo sapiens
tgtcaggagttctct

SEQ ID NO: 1535328 - DNA, 15 bp, Homo sapiens
gtgtcaggagttctc

SEQ ID NO: 1535329 - DNA, 15 bp, Homo sapiens
agtgtcaggagttct

SEQ ID NO: 1535330 - DNA, 15 bp, Homo sapiens
cagtgtcaggagttc

SEQ ID NO: 1535331 - DNA, 15 bp, Homo sapiens
ccagtgtcaggagtt

SEQ ID NO: 1535332 - DNA, 15 bp, Homo sapiens
tccagtgtcaggagt

SEQ ID NO: 1535333 - DNA, 15 bp, Homo sapiens
atccagtgtcaggag

SEQ ID NO: 1535334 - DNA, 15 bp, Homo sapiens
gatccagtgtcagga

SEQ ID NO: 1535335 - DNA, 15 bp, Homo sapiens
agatccagtgtcagg

SEQ ID NO: 1535336 - DNA, 15 bp, Homo sapiens
gagatccagtgtcag

SEQ ID NO: 1535337 - DNA, 15 bp, Homo sapiens
tgagatccagtgtca

SEQ ID NO: 1535338 - DNA, 15 bp, Homo sapiens
ttgagatccagtgtc

SEQ ID NO: 1535339 - DNA, 15 bp, Homo sapiens
cttgagatccagtgt

SEQ ID NO: 1535340 - DNA, 15 bp, Homo sapiens
ccttgagatccagtg

SEQ ID NO: 1535341 - DNA, 15 bp, Homo sapiens
accttgagatccagt

SEQ ID NO: 1535342 - DNA, 15 bp, Homo sapiens
aaccttgagatccag

SEQ ID NO: 1535343 - DNA, 15 bp, Homo sapiens
caaccttgagatcca

SEQ ID NO: 1535344 - DNA, 15 bp, Homo sapiens
ccaaccttgagatcc

SEQ ID NO: 1535345 - DNA, 15 bp, Homo sapiens
tccaaccttgagatc

SEQ ID NO: 1535346 - DNA, 15 bp, Homo sapiens
ttccaaccttgagat

SEQ ID NO: 1535347 - DNA, 15 bp, Homo sapiens
attccaaccttgaga

SEQ ID NO: 1535348 - DNA, 15 bp, Homo sapiens
gattccaaccttgag

SEQ ID NO: 1535349 - DNA, 15 bp, Homo sapiens
agattccaaccttga

SEQ ID NO: 1535350 - DNA, 15 bp, Homo sapiens
aagattccaaccttg

SEQ ID NO: 1535351 - DNA, 15 bp, Homo sapiens
gaagattccaacctt

SEQ ID NO: 1535352 - DNA, 15 bp, Homo sapiens
agaagattccaacct

SEQ ID NO: 1535353 - DNA, 15 bp, Homo sapiens
aagaagattccaacc

SEQ ID NO: 1535354 - DNA, 15 bp, Homo sapiens
caagaagattccaac

SEQ ID NO: 1535355 - DNA, 15 bp, Homo sapiens
ccaagaagattccaa

SEQ ID NO: 1535356 - DNA, 15 bp, Homo sapiens
accaagaagattcca

SEQ ID NO: 1535357 - DNA, 15 bp, Homo sapiens
aaccaagaagattcc

SEQ ID NO: 1535358 - DNA, 15 bp, Homo sapiens
aaaccaagaagattc

SEQ ID NO: 1535359 - DNA, 15 bp, Homo sapiens
aaaaccaagaagatt

SEQ ID NO: 1535360 - DNA, 15 bp, Homo sapiens
aaaaaccaagaagat

SEQ ID NO: 1535361 - DNA, 15 bp, Homo sapiens
gaaaaaccaagaaga

SEQ ID NO: 1535362 - DNA, 15 bp, Homo sapiens
tgaaaaaccaagaag

SEQ ID NO: 1535363 - DNA, 15 bp, Homo sapiens
atgaaaaaccaagaa

SEQ ID NO: 1535364 - DNA, 15 bp, Homo sapiens
tatgaaaaaccaaga

SEQ ID NO: 1535365 - DNA, 15 bp, Homo sapiens
ttatgaaaaaccaag

SEQ ID NO: 1535366 - DNA, 15 bp, Homo sapiens
tttatgaaaaaccaa

SEQ ID NO: 1535367 - DNA, 15 bp, Homo sapiens
ttttatgaaaaacca

SEQ ID NO: 1535368 - DNA, 15 bp, Homo sapiens
attttatgaaaaacc

SEQ ID NO: 1535369 - DNA, 15 bp, Homo sapiens
gattttatgaaaaac

SEQ ID NO: 1535370 - DNA, 15 bp, Homo sapiens
agattttatgaaaaa

SEQ ID NO: 1535371 - DNA, 15 bp, Homo sapiens
tagattttatgaaaa

SEQ ID NO: 1535372 - DNA, 15 bp, Homo sapiens
gtagattttatgaaa

SEQ ID NO: 1535373 - DNA, 15 bp, Homo sapiens
agtagattttatgaa

SEQ ID NO: 1535374 - DNA, 15 bp, Homo sapiens
cagtagattttatga

SEQ ID NO: 1535375 - DNA, 15 bp, Homo sapiens
ccagtagattttatg

SEQ ID NO: 1535376 - DNA, 15 bp, Homo sapiens
accagtagattttat

SEQ ID NO: 1535377 - DNA, 15 bp, Homo sapiens
caccagtagatttta

SEQ ID NO: 1535378 - DNA, 15 bp, Homo sapiens
ccaccagtagatttt

SEQ ID NO: 1535379 - DNA, 15 bp, Homo sapiens
gccaccagtagattt

SEQ ID NO: 1535380 - DNA, 15 bp, Homo sapiens
tgccaccagtagatt

SEQ ID NO: 1535381 - DNA, 15 bp, Homo sapiens
ctgccaccagtagat

SEQ ID NO: 1535382 - DNA, 15 bp, Homo sapiens
cctgccaccagtaga

SEQ ID NO: 1535383 - DNA, 15 bp, Homo sapiens
ccctgccaccagtag

SEQ ID NO: 1535384 - DNA, 15 bp, Homo sapiens
cccctgccaccagta

SEQ ID NO: 1535385 - DNA, 15 bp, Homo sapiens
gcccctgccaccagt

SEQ ID NO: 1535386 - DNA, 15 bp, Homo sapiens
tgcccctgccaccag

SEQ ID NO: 1535387 - DNA, 15 bp, Homo sapiens
ttgcccctgccacca

SEQ ID NO: 1535388 - DNA, 15 bp, Homo sapiens
cttgcccctgccacc

SEQ ID NO: 1535389 - DNA, 15 bp, Homo sapiens
acttgcccctgccac

SEQ ID NO: 1535390 - DNA, 15 bp, Homo sapiens
aacttgcccctgcca

SEQ ID NO: 1535391 - DNA, 15 bp, Homo sapiens
taacttgcccctgcc

SEQ ID NO: 1535392 - DNA, 15 bp, Homo sapiens
ttaacttgcccctgc

SEQ ID NO: 1535393 - DNA, 15 bp, Homo sapiens
cttaacttgcccctg

SEQ ID NO: 1535394 - DNA, 15 bp, Homo sapiens
acttaacttgcccct

SEQ ID NO: 1535395 - DNA, 15 bp, Homo sapiens
cacttaacttgcccc

SEQ ID NO: 1535396 - DNA, 15 bp, Homo sapiens
tcacttaacttgccc

SEQ ID NO: 1535397 - DNA, 15 bp, Homo sapiens
ctcacttaacttgcc

SEQ ID NO: 1535398 - DNA, 15 bp, Homo sapiens
actcacttaacttgc

SEQ ID NO: 1535399 - DNA, 15 bp, Homo sapiens
gactcacttaacttg

SEQ ID NO: 1535400 - DNA, 15 bp, Homo sapiens
tgactcacttaactt

SEQ ID NO: 1535401 - DNA, 15 bp, Homo sapiens
ttgactcacttaact

SEQ ID NO: 1535402 - DNA, 15 bp, Homo sapiens
cttgactcacttaac

SEQ ID NO: 1535403 - DNA, 15 bp, Homo sapiens
gcttgactcacttaa

SEQ ID NO: 1535404 - DNA, 15 bp, Homo sapiens
cgcttgactcactta

SEQ ID NO: 1535405 - DNA, 15 bp, Homo sapiens
ccgcttgactcactt

SEQ ID NO: 1535406 - DNA, 15 bp, Homo sapiens
accgcttgactcact

SEQ ID NO: 1535407 - DNA, 15 bp, Homo sapiens
caccgcttgactcac

SEQ ID NO: 1535408 - DNA, 15 bp, Homo sapiens
ccaccgcttgactca

SEQ ID NO: 1535409 - DNA, 15 bp, Homo sapiens
tccaccgcttgactc

SEQ ID NO: 1535410 - DNA, 15 bp, Homo sapiens
ttccaccgcttgact

SEQ ID NO: 1535411 - DNA, 15 bp, Homo sapiens
tttccaccgcttgac

SEQ ID NO: 1535412 - DNA, 15 bp, Homo sapiens
atttccaccgcttga

SEQ ID NO: 1535413 - DNA, 15 bp, Homo sapiens
catttccaccgcttg

SEQ ID NO: 1535414 - DNA, 15 bp, Homo sapiens
tcatttccaccgctt

SEQ ID NO: 1535415 - DNA, 15 bp, Homo sapiens
atcatttccaccgct

SEQ ID NO: 1535416 - DNA, 15 bp, Homo sapiens
aatcatttccaccgc

SEQ ID NO: 1535417 - DNA, 15 bp, Homo sapiens
caatcatttccaccg

SEQ ID NO: 1535418 - DNA, 15 bp, Homo sapiens
acaatcatttccacc

SEQ ID NO: 1535419 - DNA, 15 bp, Homo sapiens
tacaatcatttccac

SEQ ID NO: 1535420 - DNA, 15 bp, Homo sapiens
atacaatcatttcca

SEQ ID NO: 1535421 - DNA, 15 bp, Homo sapiens
aatacaatcatttcc

SEQ ID NO: 1535422 - DNA, 15 bp, Homo sapiens
taatacaatcatttc

SEQ ID NO: 1535423 - DNA, 15 bp, Homo sapiens
ataatacaatcattt

SEQ ID NO: 1535424 - DNA, 15 bp, Homo sapiens
gataatacaatcatt

SEQ ID NO: 1535425 - DNA, 15 bp, Homo sapiens
agataatacaatcat

SEQ ID NO: 1535426 - DNA, 15 bp, Homo sapiens
gagataatacaatca

SEQ ID NO: 1535427 - DNA, 15 bp, Homo sapiens
tgagataatacaatc

SEQ ID NO: 1535428 - DNA, 15 bp, Homo sapiens
ctgagataatacaat

SEQ ID NO: 1535429 - DNA, 15 bp, Homo sapiens
tctgagataatacaa

SEQ ID NO: 1535430 - DNA, 15 bp, Homo sapiens
atctgagataataca

SEQ ID NO: 1535431 - DNA, 15 bp, Homo sapiens
aatctgagataatac

SEQ ID NO: 1535432 - DNA, 15 bp, Homo sapiens
aaatctgagataata

SEQ ID NO: 1535433 - DNA, 15 bp, Homo sapiens
taaatctgagataat

SEQ ID NO: 1535434 - DNA, 15 bp, Homo sapiens
ataaatctgagataa

SEQ ID NO: 1535435 - DNA, 15 bp, Homo sapiens
cataaatctgagata

SEQ ID NO: 1535436 - DNA, 15 bp, Homo sapiens
tcataaatctgagat

SEQ ID NO: 1535437 - DNA, 15 bp, Homo sapiens
atcataaatctgaga

SEQ ID NO: 1535438 - DNA, 15 bp, Homo sapiens
gatcataaatctgag

SEQ ID NO: 1535439 - DNA, 15 bp, Homo sapiens
agatcataaatctga

SEQ ID NO: 1535440 - DNA, 15 bp, Homo sapiens
gagatcataaatctg

SEQ ID NO: 1535441 - DNA, 15 bp, Homo sapiens
ggagatcataaatct

SEQ ID NO: 1535442 - DNA, 15 bp, Homo sapiens
tggagatcataaatc

SEQ ID NO: 1535443 - DNA, 15 bp, Homo sapiens
gtggagatcataaat

SEQ ID NO: 1535444 - DNA, 15 bp, Homo sapiens
tgtggagatcataaa

SEQ ID NO: 1535445 - DNA, 15 bp, Homo sapiens
ctgtggagatcataa

SEQ ID NO: 1535446 - DNA, 15 bp, Homo sapiens
actgtggagatcata

SEQ ID NO: 1535447 - DNA, 15 bp, Homo sapiens
gactgtggagatcat

SEQ ID NO: 1535448 - DNA, 15 bp, Homo sapiens
agactgtggagatca

SEQ ID NO: 1535449 - DNA, 15 bp, Homo sapiens
aagactgtggagatc

SEQ ID NO: 1535450 - DNA, 15 bp, Homo sapiens
caagactgtggagat

SEQ ID NO: 1535451 - DNA, 15 bp, Homo sapiens
tcaagactgtggaga

SEQ ID NO: 1535452 - DNA, 15 bp, Homo sapiens
atcaagactgtggag

SEQ ID NO: 1535453 - DNA, 15 bp, Homo sapiens
aatcaagactgtgga

SEQ ID NO: 1535454 - DNA, 15 bp, Homo sapiens
caatcaagactgtgg

SEQ ID NO: 1535455 - DNA, 15 bp, Homo sapiens
tcaatcaagactgtg

SEQ ID NO: 1535456 - DNA, 15 bp, Homo sapiens
ctcaatcaagactgt

SEQ ID NO: 1535457 - DNA, 15 bp, Homo sapiens
tctcaatcaagactg

SEQ ID NO: 1535458 - DNA, 15 bp, Homo sapiens
gtctcaatcaagact

SEQ ID NO: 1535459 - DNA, 15 bp, Homo sapiens
tgtctcaatcaagac

SEQ ID NO: 1535460 - DNA, 15 bp, Homo sapiens
ctgtctcaatcaaga

SEQ ID NO: 1535461 - DNA, 15 bp, Homo sapiens
actgtctcaatcaag

SEQ ID NO: 1535462 - DNA, 15 bp, Homo sapiens
gactgtctcaatcaa

SEQ ID NO: 1535463 - DNA, 15 bp, Homo sapiens
ggactgtctcaatca

SEQ ID NO: 1535464 - DNA, 15 bp, Homo sapiens
tggactgtctcaatc

SEQ ID NO: 1535465 - DNA, 15 bp, Homo sapiens
ctggactgtctcaat

SEQ ID NO: 1535466 - DNA, 15 bp, Homo sapiens
tctggactgtctcaa

SEQ ID NO: 1535467 - DNA, 15 bp, Homo sapiens
ctctggactgtctca

SEQ ID NO: 1535468 - DNA, 15 bp, Homo sapiens
tctctggactgtctc

SEQ ID NO: 1535469 - DNA, 15 bp, Homo sapiens
atctctggactgtct

SEQ ID NO: 1535470 - DNA, 15 bp, Homo sapiens
catctctggactgtc

SEQ ID NO: 1535471 - DNA, 15 bp, Homo sapiens
ccatctctggactgt

SEQ ID NO: 1535472 - DNA, 15 bp, Homo sapiens
tccatctctggactg

SEQ ID NO: 1535473 - DNA, 15 bp, Homo sapiens
ctccatctctggact

SEQ ID NO: 1535474 - DNA, 15 bp, Homo sapiens
cctccatctctggac

SEQ ID NO: 1535475 - DNA, 15 bp, Homo sapiens
ccctccatctctgga

SEQ ID NO: 1535476 - DNA, 15 bp, Homo sapiens
tccctccatctctgg

SEQ ID NO: 1535477 - DNA, 15 bp, Homo sapiens
ctccctccatctctg

SEQ ID NO: 1535478 - DNA, 15 bp, Homo sapiens
tctccctccatctct

SEQ ID NO: 1535479 - DNA, 15 bp, Homo sapiens
gtctccctccatctc

SEQ ID NO: 1535480 - DNA, 15 bp, Homo sapiens
agtctccctccatct

SEQ ID NO: 1535481 - DNA, 15 bp, Homo sapiens
tagtctccctccatc

SEQ ID NO: 1535482 - DNA, 15 bp, Homo sapiens
ctagtctccctccat

SEQ ID NO: 1535483 - DNA, 15 bp, Homo sapiens
actagtctccctcca

SEQ ID NO: 1535484 - DNA, 15 bp, Homo sapiens
tactagtctccctcc

SEQ ID NO: 1535485 - DNA, 15 bp, Homo sapiens
ctactagtctccctc

SEQ ID NO: 1535486 - DNA, 15 bp, Homo sapiens
tctactagtctccct

SEQ ID NO: 1535487 - DNA, 15 bp, Homo sapiens
ttctactagtctccc

SEQ ID NO: 1535488 - DNA, 15 bp, Homo sapiens
attctactagtctcc

SEQ ID NO: 1535489 - DNA, 15 bp, Homo sapiens
gattctactagtctc

SEQ ID NO: 1535490 - DNA, 15 bp, Homo sapiens
tgattctactagtct

SEQ ID NO: 1535491 - DNA, 15 bp, Homo sapiens
atgattctactagtc

SEQ ID NO: 1535492 - DNA, 15 bp, Homo sapiens
aatgattctactagt

SEQ ID NO: 1535493 - DNA, 15 bp, Homo sapiens
aaatgattctactag

SEQ ID NO: 1535494 - DNA, 15 bp, Homo sapiens
caaatgattctacta

SEQ ID NO: 1535495 - DNA, 15 bp, Homo sapiens
ccaaatgattctact

SEQ ID NO: 1535496 - DNA, 15 bp, Homo sapiens
tccaaatgattctac

SEQ ID NO: 1535497 - DNA, 15 bp, Homo sapiens
ttccaaatgattcta

SEQ ID NO: 1535498 - DNA, 15 bp, Homo sapiens
cttccaaatgattct

SEQ ID NO: 1535499 - DNA, 15 bp, Homo sapiens
tcttccaaatgattc

SEQ ID NO: 1535500 - DNA, 15 bp, Homo sapiens
ctcttccaaatgatt

SEQ ID NO: 1535501 - DNA, 15 bp, Homo sapiens
cctcttccaaatgat

SEQ ID NO: 1535502 - DNA, 15 bp, Homo sapiens
tcctcttccaaatga

SEQ ID NO: 1535503 - DNA, 15 bp, Homo sapiens
ctcctcttccaaatg

SEQ ID NO: 1535504 - DNA, 15 bp, Homo sapiens
tctcctcttccaaat

SEQ ID NO: 1535505 - DNA, 15 bp, Homo sapiens
atctcctcttccaaa

SEQ ID NO: 1535506 - DNA, 15 bp, Homo sapiens
tatctcctcttccaa

SEQ ID NO: 1535507 - DNA, 15 bp, Homo sapiens
gtatctcctcttcca

SEQ ID NO: 1535508 - DNA, 15 bp, Homo sapiens
ttgtatctcctcttc

SEQ ID NO: 1535509 - DNA, 15 bp, Homo sapiens
attgtatctcctctt

SEQ ID NO: 1535510 - DNA, 15 bp, Homo sapiens
aattgtatctcctct

SEQ ID NO: 1535511 - DNA, 15 bp, Homo sapiens
caattgtatctcctc

SEQ ID NO: 1535512 - DNA, 15 bp, Homo sapiens
acaattgtatctcct

SEQ ID NO: 1535513 - DNA, 15 bp, Homo sapiens
gacaattgtatctcc

SEQ ID NO: 1535514 - DNA, 15 bp, Homo sapiens
tgacaattgtatctc

SEQ ID NO: 1535515 - DNA, 15 bp, Homo sapiens
atgacaattgtatct

SEQ ID NO: 1535516 - DNA, 15 bp, Homo sapiens
aatgacaattgtatc

SEQ ID NO: 1535517 - DNA, 15 bp, Homo sapiens
caatgacaattgtat

SEQ ID NO: 1535518 - DNA, 15 bp, Homo sapiens
acaatgacaattgta

SEQ ID NO: 1535519 - DNA, 15 bp, Homo sapiens
cacaatgacaattgt

SEQ ID NO: 1535520 - DNA, 15 bp, Homo sapiens
ccacaatgacaattg

SEQ ID NO: 1535521 - DNA, 15 bp, Homo sapiens
cccacaatgacaatt

SEQ ID NO: 1535522 - DNA, 15 bp, Homo sapiens
acccacaatgacaat

SEQ ID NO: 1535523 - DNA, 15 bp, Homo sapiens
aacccacaatgacaa

SEQ ID NO: 1535524 - DNA, 15 bp, Homo sapiens
aaacccacaatgaca

SEQ ID NO: 1535525 - DNA, 15 bp, Homo sapiens
caaacccacaatgac

SEQ ID NO: 1535526 - DNA, 15 bp, Homo sapiens
acaaacccacaatga

SEQ ID NO: 1535527 - DNA, 15 bp, Homo sapiens
gacaaacccacaatg

SEQ ID NO: 1535528 - DNA, 15 bp, Homo sapiens
tgacaaacccacaat

SEQ ID NO: 1535529 - DNA, 15 bp, Homo sapiens
ctgacaaacccacaa

SEQ ID NO: 1535530 - DNA, 15 bp, Homo sapiens
tctgacaaacccaca

SEQ ID NO: 1535531 - DNA, 15 bp, Homo sapiens
atctgacaaacccac

SEQ ID NO: 1535532 - DNA, 15 bp, Homo sapiens
aatctgacaaaccca

SEQ ID NO: 1535533 - DNA, 15 bp, Homo sapiens
caatctgacaaaccc

SEQ ID NO: 1535534 - DNA, 15 bp, Homo sapiens
ccaatctgacaaacc

SEQ ID NO: 1535535 - DNA, 15 bp, Homo sapiens
accaatctgacaaac

SEQ ID NO: 1535536 - DNA, 15 bp, Homo sapiens
aaccaatctgacaaa

SEQ ID NO: 1535537 - DNA, 15 bp, Homo sapiens
taaccaatctgacaa

SEQ ID NO: 1535538 - DNA, 15 bp, Homo sapiens
gtaaccaatctgaca

SEQ ID NO: 1535539 - DNA, 15 bp, Homo sapiens
agtaaccaatctgac

SEQ ID NO: 1535540 - DNA, 15 bp, Homo sapiens
aagtaaccaatctga

SEQ ID NO: 1535541 - DNA, 15 bp, Homo sapiens
aaagtaaccaatctg

SEQ ID NO: 1535542 - DNA, 15 bp, Homo sapiens
gaaagtaaccaatct

SEQ ID NO: 1535543 - DNA, 15 bp, Homo sapiens
ggaaagtaaccaatc

SEQ ID NO: 1535544 - DNA, 15 bp, Homo sapiens
aggaaagtaaccaat

SEQ ID NO: 1535545 - DNA, 15 bp, Homo sapiens
caggaaagtaaccaa

SEQ ID NO: 1535546 - DNA, 15 bp, Homo sapiens
acaggaaagtaacca

SEQ ID NO: 1535547 - DNA, 15 bp, Homo sapiens
gacaggaaagtaacc

SEQ ID NO: 1535548 - DNA, 15 bp, Homo sapiens
ggacaggaaagtaac

SEQ ID NO: 1535549 - DNA, 15 bp, Homo sapiens
aggacaggaaagtaa

SEQ ID NO: 1535550 - DNA, 15 bp, Homo sapiens
aaggacaggaaagta

SEQ ID NO: 1535551 - DNA, 15 bp, Homo sapiens
gaaggacaggaaagt

SEQ ID NO: 1535552 - DNA, 15 bp, Homo sapiens
ggaaggacaggaaag

SEQ ID NO: 1535553 - DNA, 15 bp, Homo sapiens
tggaaggacaggaaa

SEQ ID NO: 1535554 - DNA, 15 bp, Homo sapiens
ttggaaggacaggaa

SEQ ID NO: 1535555 - DNA, 15 bp, Homo sapiens
tttggaaggacagga

SEQ ID NO: 1535556 - DNA, 15 bp, Homo sapiens
atttggaaggacagg

SEQ ID NO: 1535557 - DNA, 15 bp, Homo sapiens
gatttggaaggacag

SEQ ID NO: 1535558 - DNA, 15 bp, Homo sapiens
ggatttggaaggaca

SEQ ID NO: 1535559 - DNA, 15 bp, Homo sapiens
tggatttggaaggac

SEQ ID NO: 1535560 - DNA, 15 bp, Homo sapiens
ctggatttggaagga

SEQ ID NO: 1535561 - DNA, 15 bp, Homo sapiens
tctggatttggaagg

SEQ ID NO: 1535562 - DNA, 15 bp, Homo sapiens
ttctggatttggaag

SEQ ID NO: 1535563 - DNA, 15 bp, Homo sapiens
cttctggatttggaa

SEQ ID NO: 1535564 - DNA, 15 bp, Homo sapiens
ccttctggatttgga

SEQ ID NO: 1535565 - DNA, 15 bp, Homo sapiens
cccttctggatttgg

SEQ ID NO: 1535566 - DNA, 15 bp, Homo sapiens
ccccttctggatttg

SEQ ID NO: 1535567 - DNA, 15 bp, Homo sapiens
tccccttctggattt

SEQ ID NO: 1535568 - DNA, 15 bp, Homo sapiens
ctccccttctggatt

SEQ ID NO: 1535569 - DNA, 15 bp, Homo sapiens
cctccccttctggat

SEQ ID NO: 1535570 - DNA, 15 bp, Homo sapiens
acctccccttctgga

SEQ ID NO: 1535571 - DNA, 15 bp, Homo sapiens
cacctccccttctgg

SEQ ID NO: 1535572 - DNA, 15 bp, Homo sapiens
ccacctccccttctg

SEQ ID NO: 1535573 - DNA, 15 bp, Homo sapiens
accacctccccttct

SEQ ID NO: 1535574 - DNA, 15 bp, Homo sapiens
caccacctccccttc

SEQ ID NO: 1535575 - DNA, 15 bp, Homo sapiens
ccaccacctcccctt

SEQ ID NO: 1535576 - DNA, 15 bp, Homo sapiens
tccaccacctcccct

SEQ ID NO: 1535577 - DNA, 15 bp, Homo sapiens
ctccaccacctcccc

SEQ ID NO: 1535578 - DNA, 15 bp, Homo sapiens
cctccaccacctccc

SEQ ID NO: 1535579 - DNA, 15 bp, Homo sapiens
gcctccaccacctcc

SEQ ID NO: 1535580 - DNA, 15 bp, Homo sapiens
tgcctccaccacctc

SEQ ID NO: 1535581 - DNA, 15 bp, Homo sapiens
ctgcctccaccacct

SEQ ID NO: 1535582 - DNA, 15 bp, Homo sapiens
tctgcctccaccacc

SEQ ID NO: 1535583 - DNA, 15 bp, Homo sapiens
atctgcctccaccac

SEQ ID NO: 1535584 - DNA, 15 bp, Homo sapiens
gatctgcctccacca

SEQ ID NO: 1535585 - DNA, 15 bp, Homo sapiens
agatctgcctccacc

SEQ ID NO: 1535586 - DNA, 15 bp, Homo sapiens
cagatctgcctccac

SEQ ID NO: 1535587 - DNA, 15 bp, Homo sapiens
gcagatctgcctcca

SEQ ID NO: 1535588 - DNA, 15 bp, Homo sapiens
tgcagatctgcctcc

SEQ ID NO: 1535589 - DNA, 15 bp, Homo sapiens
atgcagatctgcctc

SEQ ID NO: 1535590 - DNA, 15 bp, Homo sapiens
gatgcagatctgcct

SEQ ID NO: 1535591 - DNA, 15 bp, Homo sapiens
tgatgcagatctgcc

SEQ ID NO: 1535592 - DNA, 15 bp, Homo sapiens
atgatgcagatctgc

SEQ ID NO: 1535593 - DNA, 15 bp, Homo sapiens
gatgatgcagatctg

SEQ ID NO: 1535594 - DNA, 15 bp, Homo sapiens
agatgatgcagatct

SEQ ID NO: 1535595 - DNA, 15 bp, Homo sapiens
cagatgatgcagatc

SEQ ID NO: 1535596 - DNA, 15 bp, Homo sapiens
tcagatgatgcagat

SEQ ID NO: 1535597 - DNA, 15 bp, Homo sapiens
ttcagatgatgcaga

SEQ ID NO: 1535598 - DNA, 15 bp, Homo sapiens
cttcagatgatgcag

SEQ ID NO: 1535599 - DNA, 15 bp, Homo sapiens
tcttcagatgatgca

SEQ ID NO: 1535600 - DNA, 15 bp, Homo sapiens
ttcttcagatgatgc

SEQ ID NO: 1535601 - DNA, 15 bp, Homo sapiens
cttcttcagatgatg

SEQ ID NO: 1535602 - DNA, 15 bp, Homo sapiens
tcttcttcagatgat

SEQ ID NO: 1535603 - DNA, 15 bp, Homo sapiens
ttcttcttcagatga

SEQ ID NO: 1535604 - DNA, 15 bp, Homo sapiens
tttcttcttcagatg

SEQ ID NO: 1535605 - DNA, 15 bp, Homo sapiens
gtttcttcttcagat

SEQ ID NO: 1535606 - DNA, 15 bp, Homo sapiens
tgtttcttcttcaga

SEQ ID NO: 1535607 - DNA, 15 bp, Homo sapiens
ctgtttcttcttcag

SEQ ID NO: 1535608 - DNA, 15 bp, Homo sapiens
gctgtttcttcttca

SEQ ID NO: 1535609 - DNA, 15 bp, Homo sapiens
tgctgtttcttcttc

SEQ ID NO: 1535610 - DNA, 15 bp, Homo sapiens
ctgctgtttcttctt

SEQ ID NO: 1535611 - DNA, 15 bp, Homo sapiens
actgctgtttcttct

SEQ ID NO: 1535612 - DNA, 15 bp, Homo sapiens
aactgctgtttcttc

SEQ ID NO: 1535613 - DNA, 15 bp, Homo sapiens
gaactgctgtttctt

SEQ ID NO: 1535614 - DNA, 15 bp, Homo sapiens
ggaactgctgtttct

SEQ ID NO: 1535615 - DNA, 15 bp, Homo sapiens
tggaactgctgtttc

SEQ ID NO: 1535616 - DNA, 15 bp, Homo sapiens
ttggaactgctgttt

SEQ ID NO: 1535617 - DNA, 15 bp, Homo sapiens
gttggaactgctgtt

SEQ ID NO: 1535618 - DNA, 15 bp, Homo sapiens
agttggaactgctgt

SEQ ID NO: 1535619 - DNA, 15 bp, Homo sapiens
cagttggaactgctg

SEQ ID NO: 1535620 - DNA, 15 bp, Homo sapiens
acagttggaactgct

SEQ ID NO: 1535621 - DNA, 15 bp, Homo sapiens
aacagttggaactgc

SEQ ID NO: 1535622 - DNA, 15 bp, Homo sapiens
caacagttggaactg

SEQ ID NO: 1535623 - DNA, 15 bp, Homo sapiens
tcaacagttggaact

SEQ ID NO: 1535624 - DNA, 15 bp, Homo sapiens
ttcaacagttggaac

SEQ ID NO: 1535625 - DNA, 15 bp, Homo sapiens
gttcaacagttggaa

SEQ ID NO: 1535626 - DNA, 15 bp, Homo sapiens
ggttcaacagttgga

SEQ ID NO: 1535627 - DNA, 15 bp, Homo sapiens
tggttcaacagttgg

SEQ ID NO: 1535628 - DNA, 15 bp, Homo sapiens
atggttcaacagttg

SEQ ID NO: 1535629 - DNA, 15 bp, Homo sapiens
gatggttcaacagtt

SEQ ID NO: 1535630 - DNA, 15 bp, Homo sapiens
tgatggttcaacagt

SEQ ID NO: 1535631 - DNA, 15 bp, Homo sapiens
ctgatggttcaacag

SEQ ID NO: 1535632 - DNA, 15 bp, Homo sapiens
gctgatggttcaaca

SEQ ID NO: 1535633 - DNA, 15 bp, Homo sapiens
tgctgatggttcaac

SEQ ID NO: 1535634 - DNA, 15 bp, Homo sapiens
gtgctgatggttcaa

SEQ ID NO: 1535635 - DNA, 15 bp, Homo sapiens
agtgctgatggttca

SEQ ID NO: 1535636 - DNA, 15 bp, Homo sapiens
tagtgctgatggttc

SEQ ID NO: 1535637 - DNA, 15 bp, Homo sapiens
atagtgctgatggtt

SEQ ID NO: 1535638 - DNA, 15 bp, Homo sapiens
gatagtgctgatggt

SEQ ID NO: 1535639 - DNA, 15 bp, Homo sapiens
agatagtgctgatgg

SEQ ID NO: 1535640 - DNA, 15 bp, Homo sapiens
aagatagtgctgatg

SEQ ID NO: 1535641 - DNA, 15 bp, Homo sapiens
gaagatagtgctgat

SEQ ID NO: 1535642 - DNA, 15 bp, Homo sapiens
agaagatagtgctga

SEQ ID NO: 1535643 - DNA, 15 bp, Homo sapiens
cagaagatagtgctg

SEQ ID NO: 1535644 - DNA, 15 bp, Homo sapiens
tcagaagatagtgct

SEQ ID NO: 1535645 - DNA, 15 bp, Homo sapiens
atcagaagatagtgc

SEQ ID NO: 1535646 - DNA, 15 bp, Homo sapiens
catcagaagatagtg

SEQ ID NO: 1535647 - DNA, 15 bp, Homo sapiens
acatcagaagatagt

SEQ ID NO: 1535648 - DNA, 15 bp, Homo sapiens
tacatcagaagatag

SEQ ID NO: 1535649 - DNA, 15 bp, Homo sapiens
gtacatcagaagata

SEQ ID NO: 1535650 - DNA, 15 bp, Homo sapiens
ggtacatcagaagat

SEQ ID NO: 1535651 - DNA, 15 bp, Homo sapiens
tggtacatcagaaga

SEQ ID NO: 1535652 - DNA, 15 bp, Homo sapiens
atggtacatcagaag

SEQ ID NO: 1535653 - DNA, 15 bp, Homo sapiens
aatggtacatcagaa

SEQ ID NO: 1535654 - DNA, 15 bp, Homo sapiens
aaatggtacatcaga

SEQ ID NO: 1535655 - DNA, 15 bp, Homo sapiens
taaatggtacatcag

SEQ ID NO: 1535656 - DNA, 15 bp, Homo sapiens
gtaaatggtacatca

SEQ ID NO: 1535657 - DNA, 15 bp, Homo sapiens
agtaaatggtacatc

SEQ ID NO: 1535658 - DNA, 15 bp, Homo sapiens
aagtaaatggtacat

SEQ ID NO: 1535659 - DNA, 15 bp, Homo sapiens
caagtaaatggtaca

SEQ ID NO: 1535660 - DNA, 15 bp, Homo sapiens
tcaagtaaatggtac

SEQ ID NO: 1535661 - DNA, 15 bp, Homo sapiens
atcaagtaaatggta

SEQ ID NO: 1535662 - DNA, 15 bp, Homo sapiens
gatcaagtaaatggt

SEQ ID NO: 1535663 - DNA, 15 bp, Homo sapiens
agatcaagtaaatgg

SEQ ID NO: 1535664 - DNA, 15 bp, Homo sapiens
aagatcaagtaaatg

SEQ ID NO: 1535665 - DNA, 15 bp, Homo sapiens
aaagatcaagtaaat

SEQ ID NO: 1535666 - DNA, 15 bp, Homo sapiens
aaaagatcaagtaaa

SEQ ID NO: 1535667 - DNA, 15 bp, Homo sapiens
taaaagatcaagtaa

SEQ ID NO: 1535668 - DNA, 15 bp, Homo sapiens
ataaaagatcaagta

SEQ ID NO: 1535669 - DNA, 15 bp, Homo sapiens
aataaaagatcaagt

SEQ ID NO: 1535670 - DNA, 15 bp, Homo sapiens
aaataaaagatcaag

SEQ ID NO: 1535671 - DNA, 15 bp, Homo sapiens
aaaataaaagatcaa

SEQ ID NO: 1535672 - DNA, 15 bp, Homo sapiens
gaaaataaaagatca

SEQ ID NO: 1535673 - DNA, 15 bp, Homo sapiens
agaaaataaaagatc

SEQ ID NO: 1535674 - DNA, 15 bp, Homo sapiens
gagaaaataaaagat

SEQ ID NO: 1535675 - DNA, 15 bp, Homo sapiens
agagaaaataaaaga

SEQ ID NO: 1535676 - DNA, 15 bp, Homo sapiens
cagagaaaataaaag

SEQ ID NO: 1535677 - DNA, 15 bp, Homo sapiens
acagagaaaataaaa

SEQ ID NO: 1535678 - DNA, 15 bp, Homo sapiens
aacagagaaaataaa

SEQ ID NO: 1535679 - DNA, 15 bp, Homo sapiens
aaacagagaaaataa

SEQ ID NO: 1535680 - DNA, 15 bp, Homo sapiens
aaaacagagaaaata

SEQ ID NO: 1535681 - DNA, 15 bp, Homo sapiens
caaaacagagaaaat

SEQ ID NO: 1535682 - DNA, 15 bp, Homo sapiens
ccaaaacagagaaaa

SEQ ID NO: 1535683 - DNA, 15 bp, Homo sapiens
cccaaaacagagaaa

SEQ ID NO: 1535684 - DNA, 15 bp, Homo sapiens
accccaaaacagaga

SEQ ID NO: 1535685 - DNA, 15 bp, Homo sapiens
aaccccaaaacagag

SEQ ID NO: 1535686 - DNA, 15 bp, Homo sapiens
acaaccccaaaacag

SEQ ID NO: 1535687 - DNA, 15 bp, Homo sapiens
aacaaccccaaaaca

SEQ ID NO: 1535688 - DNA, 15 bp, Homo sapiens
tccaacaaccccaaa

SEQ ID NO: 1535689 - DNA, 15 bp, Homo sapiens
ctccaacaaccccaa

SEQ ID NO: 1535690 - DNA, 15 bp, Homo sapiens
actccaacaacccca

SEQ ID NO: 1535691 - DNA, 15 bp, Homo sapiens
gactccaacaacccc

SEQ ID NO: 1535692 - DNA, 15 bp, Homo sapiens
agactccaacaaccc

SEQ ID NO: 1535693 - DNA, 15 bp, Homo sapiens
aagactccaacaacc

SEQ ID NO: 1535694 - DNA, 15 bp, Homo sapiens
gaagactccaacaac

SEQ ID NO: 1535695 - DNA, 15 bp, Homo sapiens
tgaagactccaacaa

SEQ ID NO: 1535696 - DNA, 15 bp, Homo sapiens
ttgaagactccaaca

SEQ ID NO: 1535697 - DNA, 15 bp, Homo sapiens
attgaagactccaac

SEQ ID NO: 1535698 - DNA, 15 bp, Homo sapiens
cattgaagactccaa

SEQ ID NO: 1535699 - DNA, 15 bp, Homo sapiens
acattgaagactcca

SEQ ID NO: 1535700 - DNA, 15 bp, Homo sapiens
aacattgaagactcc

SEQ ID NO: 1535701 - DNA, 15 bp, Homo sapiens
aaacattgaagactc

SEQ ID NO: 1535702 - DNA, 15 bp, Homo sapiens
aaaacattgaagact

SEQ ID NO: 1535703 - DNA, 15 bp, Homo sapiens
gaaaacattgaagac

SEQ ID NO: 1535704 - DNA, 15 bp, Homo sapiens
tgaaaacattgaaga

SEQ ID NO: 1535705 - DNA, 15 bp, Homo sapiens
gtgaaaacattgaag

SEQ ID NO: 1535706 - DNA, 15 bp, Homo sapiens
agtgaaaacattgaa

SEQ ID NO: 1535707 - DNA, 15 bp, Homo sapiens
aagtgaaaacattga

SEQ ID NO: 1535708 - DNA, 15 bp, Homo sapiens
caagtgaaaacattg

SEQ ID NO: 1535709 - DNA, 15 bp, Homo sapiens
tcaagtgaaaacatt

SEQ ID NO: 1535710 - DNA, 15 bp, Homo sapiens
atcaagtgaaaacat

SEQ ID NO: 1535711 - DNA, 15 bp, Homo sapiens
aatcaagtgaaaaca

SEQ ID NO: 1535712 - DNA, 15 bp, Homo sapiens
gaatcaagtgaaaac

SEQ ID NO: 1535713 - DNA, 15 bp, Homo sapiens
tgaatcaagtgaaaa

SEQ ID NO: 1535714 - DNA, 15 bp, Homo sapiens
ttgaatcaagtgaaa

SEQ ID NO: 1535715 - DNA, 15 bp, Homo sapiens
tttgaatcaagtgaa

SEQ ID NO: 1535716 - DNA, 15 bp, Homo sapiens
gtttgaatcaagtga

SEQ ID NO: 1535717 - DNA, 15 bp, Homo sapiens
tgtttgaatcaagtg

SEQ ID NO: 1535718 - DNA, 15 bp, Homo sapiens
ttgtttgaatcaagt

SEQ ID NO: 1535719 - DNA, 15 bp, Homo sapiens
gttgtttgaatcaag

SEQ ID NO: 1535720 - DNA, 15 bp, Homo sapiens
agttgtttgaatcaa

SEQ ID NO: 1535721 - DNA, 15 bp, Homo sapiens
aagttgtttgaatca

SEQ ID NO: 1535722 - DNA, 15 bp, Homo sapiens
taagttgtttgaatc

SEQ ID NO: 1535723 - DNA, 15 bp, Homo sapiens
ttaagttgtttgaat

SEQ ID NO: 1535724 - DNA, 15 bp, Homo sapiens
attaagttgtttgaa

SEQ ID NO: 1535725 - DNA, 15 bp, Homo sapiens
aattaagttgtttga

SEQ ID NO: 1535726 - DNA, 15 bp, Homo sapiens
aaattaagttgtttg

SEQ ID NO: 1535727 - DNA, 15 bp, Homo sapiens
gaaattaagttgttt

SEQ ID NO: 1535728 - DNA, 15 bp, Homo sapiens
agaaattaagttgtt

SEQ ID NO: 1535729 - DNA, 15 bp, Homo sapiens
tagaaattaagttgt

SEQ ID NO: 1535730 - DNA, 15 bp, Homo sapiens
ttagaaattaagttg

SEQ ID NO: 1535731 - DNA, 15 bp, Homo sapiens
cttagaaattaagtt

SEQ ID NO: 1535732 - DNA, 15 bp, Homo sapiens
acttagaaattaagt

SEQ ID NO: 1535733 - DNA, 15 bp, Homo sapiens
gacttagaaattaag

SEQ ID NO: 1535734 - DNA, 15 bp, Homo sapiens
tgacttagaaattaa

SEQ ID NO: 1535735 - DNA, 15 bp, Homo sapiens
atgacttagaaatta

SEQ ID NO: 1535736 - DNA, 15 bp, Homo sapiens
gatgacttagaaatt

SEQ ID NO: 1535737 - DNA, 15 bp, Homo sapiens
agatgacttagaaat

SEQ ID NO: 1535738 - DNA, 15 bp, Homo sapiens
cagatgacttagaaa

SEQ ID NO: 1535739 - DNA, 15 bp, Homo sapiens
gcagatgacttagaa

SEQ ID NO: 1535740 - DNA, 15 bp, Homo sapiens
agcagatgacttaga

SEQ ID NO: 1535741 - DNA, 15 bp, Homo sapiens
tagcagatgacttag

SEQ ID NO: 1535742 - DNA, 15 bp, Homo sapiens
ttagcagatgactta

SEQ ID NO: 1535743 - DNA, 15 bp, Homo sapiens
tttagcagatgactt

SEQ ID NO: 1535744 - DNA, 15 bp, Homo sapiens
ttttagcagatgact

SEQ ID NO: 1535745 - DNA, 15 bp, Homo sapiens
cttttagcagatgac

SEQ ID NO: 1535746 - DNA, 15 bp, Homo sapiens
acttttagcagatga

SEQ ID NO: 1535747 - DNA, 15 bp, Homo sapiens
cacttttagcagatg

SEQ ID NO: 1535748 - DNA, 15 bp, Homo sapiens
acacttttagcagat

SEQ ID NO: 1535749 - DNA, 15 bp, Homo sapiens
cacacttttagcaga

SEQ ID NO: 1535750 - DNA, 15 bp, Homo sapiens
gcacacttttagcag

SEQ ID NO: 1535751 - DNA, 15 bp, Homo sapiens
agcacacttttagca

SEQ ID NO: 1535752 - DNA, 15 bp, Homo sapiens
aagcacacttttagc

SEQ ID NO: 1535753 - DNA, 15 bp, Homo sapiens
aaagcacacttttag

SEQ ID NO: 1535754 - DNA, 15 bp, Homo sapiens
aaaagcacactttta

SEQ ID NO: 1535755 - DNA, 15 bp, Homo sapiens
caaaagcacactttt

SEQ ID NO: 1535756 - DNA, 15 bp, Homo sapiens
gcaaaagcacacttt

SEQ ID NO: 1535757 - DNA, 15 bp, Homo sapiens
agcaaaagcacactt

SEQ ID NO: 1535758 - DNA, 15 bp, Homo sapiens
aagcaaaagcacact

SEQ ID NO: 1535759 - DNA, 15 bp, Homo sapiens
caagcaaaagcacac

SEQ ID NO: 1535760 - DNA, 15 bp, Homo sapiens
ccaagcaaaagcaca

SEQ ID NO: 1535761 - DNA, 15 bp, Homo sapiens
accaagcaaaagcac

SEQ ID NO: 1535762 - DNA, 15 bp, Homo sapiens
aaccaagcaaaagca

SEQ ID NO: 1535763 - DNA, 15 bp, Homo sapiens
aaaccaagcaaaagc

SEQ ID NO: 1535764 - DNA, 15 bp, Homo sapiens
gaaaccaagcaaaag

SEQ ID NO: 1535765 - DNA, 15 bp, Homo sapiens
ggaaaccaagcaaaa

SEQ ID NO: 1535766 - DNA, 15 bp, Homo sapiens
tggaaaccaagcaaa

SEQ ID NO: 1535767 - DNA, 15 bp, Homo sapiens
ctggaaaccaagcaa

SEQ ID NO: 1535768 - DNA, 15 bp, Homo sapiens
cctggaaaccaagca

SEQ ID NO: 1535769 - DNA, 15 bp, Homo sapiens
ccctggaaaccaagc

SEQ ID NO: 1535770 - DNA, 15 bp, Homo sapiens
accctggaaaccaag

SEQ ID NO: 1535771 - DNA, 15 bp, Homo sapiens
caccctggaaaccaa

SEQ ID NO: 1535772 - DNA, 15 bp, Homo sapiens
acaccctggaaacca

SEQ ID NO: 1535773 - DNA, 15 bp, Homo sapiens
tacaccctggaaacc

SEQ ID NO: 1535774 - DNA, 15 bp, Homo sapiens
ttacaccctggaaac

SEQ ID NO: 1535775 - DNA, 15 bp, Homo sapiens
cttacaccctggaaa

SEQ ID NO: 1535776 - DNA, 15 bp, Homo sapiens
acttacaccctggaa

SEQ ID NO: 1535777 - DNA, 15 bp, Homo sapiens
cacttacaccctgga

SEQ ID NO: 1535778 - DNA, 15 bp, Homo sapiens
tcacttacaccctgg

SEQ ID NO: 1535779 - DNA, 15 bp, Homo sapiens
ttcacttacaccctg

SEQ ID NO: 1535780 - DNA, 15 bp, Homo sapiens
tttcacttacaccct

SEQ ID NO: 1535781 - DNA, 15 bp, Homo sapiens
atttcacttacaccc

SEQ ID NO: 1535782 - DNA, 15 bp, Homo sapiens
catttcacttacacc

SEQ ID NO: 1535783 - DNA, 15 bp, Homo sapiens
tcatttcacttacac

SEQ ID NO: 1535784 - DNA, 15 bp, Homo sapiens
atcatttcacttaca

SEQ ID NO: 1535785 - DNA, 15 bp, Homo sapiens
aatcatttcacttac

SEQ ID NO: 1535786 - DNA, 15 bp, Homo sapiens
caatcatttcactta

SEQ ID NO: 1535787 - DNA, 15 bp, Homo sapiens
tcaatcatttcactt

SEQ ID NO: 1535788 - DNA, 15 bp, Homo sapiens
atcaatcatttcact

SEQ ID NO: 1535789 - DNA, 15 bp, Homo sapiens
catcaatcatttcac

SEQ ID NO: 1535790 - DNA, 15 bp, Homo sapiens
acatcaatcatttca

SEQ ID NO: 1535791 - DNA, 15 bp, Homo sapiens
tacatcaatcatttc

SEQ ID NO: 1535792 - DNA, 15 bp, Homo sapiens
gtacatcaatcattt

SEQ ID NO: 1535793 - DNA, 15 bp, Homo sapiens
cgtacatcaatcatt

SEQ ID NO: 1535794 - DNA, 15 bp, Homo sapiens
acgtacatcaatcat

SEQ ID NO: 1535795 - DNA, 15 bp, Homo sapiens
aacgtacatcaatca

SEQ ID NO: 1535796 - DNA, 15 bp, Homo sapiens
aaacgtacatcaatc

SEQ ID NO: 1535797 - DNA, 15 bp, Homo sapiens
aaaacgtacatcaat

SEQ ID NO: 1535798 - DNA, 15 bp, Homo sapiens
caaaacgtacatcaa

SEQ ID NO: 1535799 - DNA, 15 bp, Homo sapiens
acaaaacgtacatca

SEQ ID NO: 1535800 - DNA, 15 bp, Homo sapiens
cacaaaacgtacatc

SEQ ID NO: 1535801 - DNA, 15 bp, Homo sapiens
ccacaaaacgtacat

SEQ ID NO: 1535802 - DNA, 15 bp, Homo sapiens
tccacaaaacgtaca

SEQ ID NO: 1535803 - DNA, 15 bp, Homo sapiens
atccacaaaacgtac

SEQ ID NO: 1535804 - DNA, 15 bp, Homo sapiens
tatccacaaaacgta

SEQ ID NO: 1535805 - DNA, 15 bp, Homo sapiens
atatccacaaaacgt

SEQ ID NO: 1535806 - DNA, 15 bp, Homo sapiens
aatatccacaaaacg

SEQ ID NO: 1535807 - DNA, 15 bp, Homo sapiens
aaatatccacaaaac

SEQ ID NO: 1535808 - DNA, 15 bp, Homo sapiens
gaaatatccacaaaa

SEQ ID NO: 1535809 - DNA, 15 bp, Homo sapiens
tgaaatatccacaaa

SEQ ID NO: 1535810 - DNA, 15 bp, Homo sapiens
atgaaatatccacaa

SEQ ID NO: 1535811 - DNA, 15 bp, Homo sapiens
aatgaaatatccaca

SEQ ID NO: 1535812 - DNA, 15 bp, Homo sapiens
aaatgaaatatccac

SEQ ID NO: 1535813 - DNA, 15 bp, Homo sapiens
aaaatgaaatatcca

SEQ ID NO: 1535814 - DNA, 15 bp, Homo sapiens
gaaaatgaaatatcc

SEQ ID NO: 1535815 - DNA, 15 bp, Homo sapiens
agaaaatgaaatatc

SEQ ID NO: 1535816 - DNA, 15 bp, Homo sapiens
gagaaaatgaaatat

SEQ ID NO: 1535817 - DNA, 15 bp, Homo sapiens
agagaaaatgaaata

SEQ ID NO: 1535818 - DNA, 15 bp, Homo sapiens
cagagaaaatgaaat

SEQ ID NO: 1535819 - DNA, 15 bp, Homo sapiens
tcagagaaaatgaaa

SEQ ID NO: 1535820 - DNA, 15 bp, Homo sapiens
atcagagaaaatgaa

SEQ ID NO: 1535821 - DNA, 15 bp, Homo sapiens
catcagagaaaatga

SEQ ID NO: 1535822 - DNA, 15 bp, Homo sapiens
acatcagagaaaatg

SEQ ID NO: 1535823 - DNA, 15 bp, Homo sapiens
aacatcagagaaaat

SEQ ID NO: 1535824 - DNA, 15 bp, Homo sapiens
taacatcagagaaaa

SEQ ID NO: 1535825 - DNA, 15 bp, Homo sapiens
ataacatcagagaaa

SEQ ID NO: 1535826 - DNA, 15 bp, Homo sapiens
gataacatcagagaa

SEQ ID NO: 1535827 - DNA, 15 bp, Homo sapiens
ggataacatcagaga

SEQ ID NO: 1535828 - DNA, 15 bp, Homo sapiens
tggataacatcagag

SEQ ID NO: 1535829 - DNA, 15 bp, Homo sapiens
atggataacatcaga

SEQ ID NO: 1535830 - DNA, 15 bp, Homo sapiens
tatggataacatcag

SEQ ID NO: 1535831 - DNA, 15 bp, Homo sapiens
gtatggataacatca

SEQ ID NO: 1535832 - DNA, 15 bp, Homo sapiens
tgtatggataacatc

SEQ ID NO: 1535833 - DNA, 15 bp, Homo sapiens
ttgtatggataacat

SEQ ID NO: 1535834 - DNA, 15 bp, Homo sapiens
tttgtatggataaca

SEQ ID NO: 1535835 - DNA, 15 bp, Homo sapiens
atttgtatggataac

SEQ ID NO: 1535836 - DNA, 15 bp, Homo sapiens
catttgtatggataa

SEQ ID NO: 1535837 - DNA, 15 bp, Homo sapiens
acatttgtatggata

SEQ ID NO: 1535838 - DNA, 15 bp, Homo sapiens
gacatttgtatggat

SEQ ID NO: 1535839 - DNA, 15 bp, Homo sapiens
tgacatttgtatgga

SEQ ID NO: 1535840 - DNA, 15 bp, Homo sapiens
ctgacatttgtatgg

SEQ ID NO: 1535841 - DNA, 15 bp, Homo sapiens
cctgacatttgtatg

SEQ ID NO: 1535842 - DNA, 15 bp, Homo sapiens
ccctgacatttgtat

SEQ ID NO: 1535843 - DNA, 15 bp, Homo sapiens
cccctgacatttgta

SEQ ID NO: 1535844 - DNA, 15 bp, Homo sapiens
acccctgacatttgt

SEQ ID NO: 1535845 - DNA, 15 bp, Homo sapiens
aacccctgacatttg

SEQ ID NO: 1535846 - DNA, 15 bp, Homo sapiens
aaacccctgacattt

SEQ ID NO: 1535847 - DNA, 15 bp, Homo sapiens
gaaacccctgacatt

SEQ ID NO: 1535848 - DNA, 15 bp, Homo sapiens
agaaacccctgacat

SEQ ID NO: 1535849 - DNA, 15 bp, Homo sapiens
gagaaacccctgaca

SEQ ID NO: 1535850 - DNA, 15 bp, Homo sapiens
ggagaaacccctgac

SEQ ID NO: 1535851 - DNA, 15 bp, Homo sapiens
tggagaaacccctga

SEQ ID NO: 1535852 - DNA, 15 bp, Homo sapiens
atggagaaacccctg

SEQ ID NO: 1535853 - DNA, 15 bp, Homo sapiens
gatggagaaacccct

SEQ ID NO: 1535854 - DNA, 15 bp, Homo sapiens
tgatggagaaacccc

SEQ ID NO: 1535855 - DNA, 15 bp, Homo sapiens
ctgatggagaaaccc

SEQ ID NO: 1535856 - DNA, 15 bp, Homo sapiens
gctgatggagaaacc

SEQ ID NO: 1535857 - DNA, 15 bp, Homo sapiens
tgctgatggagaaac

SEQ ID NO: 1535858 - DNA, 15 bp, Homo sapiens
ttgctgatggagaaa

SEQ ID NO: 1535859 - DNA, 15 bp, Homo sapiens
tttgctgatggagaa

SEQ ID NO: 1535860 - DNA, 15 bp, Homo sapiens
atttgctgatggaga

SEQ ID NO: 1535861 - DNA, 15 bp, Homo sapiens
catttgctgatggag

SEQ ID NO: 1535862 - DNA, 15 bp, Homo sapiens
ccatttgctgatgga

SEQ ID NO: 1535863 - DNA, 15 bp, Homo sapiens
tccatttgctgatgg

SEQ ID NO: 1535864 - DNA, 15 bp, Homo sapiens
ctccatttgctgatg

SEQ ID NO: 1535865 - DNA, 15 bp, Homo sapiens
tctccatttgctgat

SEQ ID NO: 1535866 - DNA, 15 bp, Homo sapiens
atctccatttgctga

SEQ ID NO: 1535867 - DNA, 15 bp, Homo sapiens
gatctccatttgctg

SEQ ID NO: 1535868 - DNA, 15 bp, Homo sapiens
agatctccatttgct

SEQ ID NO: 1535869 - DNA, 15 bp, Homo sapiens
tagatctccatttgc

SEQ ID NO: 1535870 - DNA, 15 bp, Homo sapiens
gtagatctccatttg

SEQ ID NO: 1535871 - DNA, 15 bp, Homo sapiens
ggtagatctccattt

SEQ ID NO: 1535872 - DNA, 15 bp, Homo sapiens
aggtagatctccatt

SEQ ID NO: 1535873 - DNA, 15 bp, Homo sapiens
caggtagatctccat

SEQ ID NO: 1535874 - DNA, 15 bp, Homo sapiens
gcaggtagatctcca

SEQ ID NO: 1535875 - DNA, 15 bp, Homo sapiens
ggcaggtagatctcc

SEQ ID NO: 1535876 - DNA, 15 bp, Homo sapiens
gggcaggtagatctc

SEQ ID NO: 1535877 - DNA, 15 bp, Homo sapiens
tgggcaggtagatct

SEQ ID NO: 1535878 - DNA, 15 bp, Homo sapiens
ttgggcaggtagatc

SEQ ID NO: 1535879 - DNA, 15 bp, Homo sapiens
attgggcaggtagat

SEQ ID NO: 1535880 - DNA, 15 bp, Homo sapiens
aattgggcaggtaga

SEQ ID NO: 1535881 - DNA, 15 bp, Homo sapiens
aaattgggcaggtag

SEQ ID NO: 1535882 - DNA, 15 bp, Homo sapiens
aaaattgggcaggta

SEQ ID NO: 1535883 - DNA, 15 bp, Homo sapiens
caaaattgggcaggt

SEQ ID NO: 1535884 - DNA, 15 bp, Homo sapiens
tcaaaattgggcagg

SEQ ID NO: 1535885 - DNA, 15 bp, Homo sapiens
atcaaaattgggcag

SEQ ID NO: 1535886 - DNA, 15 bp, Homo sapiens
gatcaaaattgggca

SEQ ID NO: 1535887 - DNA, 15 bp, Homo sapiens
tgatcaaaattgggc

SEQ ID NO: 1535888 - DNA, 15 bp, Homo sapiens
atgatcaaaattggg

SEQ ID NO: 1535889 - DNA, 15 bp, Homo sapiens
aatgatcaaaattgg

SEQ ID NO: 1535890 - DNA, 15 bp, Homo sapiens
aaatgatcaaaattg

SEQ ID NO: 1535891 - DNA, 15 bp, Homo sapiens
taaatgatcaaaatt

SEQ ID NO: 1535892 - DNA, 15 bp, Homo sapiens
ttaaatgatcaaaat

SEQ ID NO: 1535893 - DNA, 15 bp, Homo sapiens
tttaaatgatcaaaa

SEQ ID NO: 1535894 - DNA, 15 bp, Homo sapiens
ttttaaatgatcaaa

SEQ ID NO: 1535895 - DNA, 15 bp, Homo sapiens
gttttaaatgatcaa

SEQ ID NO: 1535896 - DNA, 15 bp, Homo sapiens
agttttaaatgatca

SEQ ID NO: 1535897 - DNA, 15 bp, Homo sapiens
cagttttaaatgatc

SEQ ID NO: 1535898 - DNA, 15 bp, Homo sapiens
ccagttttaaatgat

SEQ ID NO: 1535899 - DNA, 15 bp, Homo sapiens
accagttttaaatga

SEQ ID NO: 1535900 - DNA, 15 bp, Homo sapiens
aaccagttttaaatg

SEQ ID NO: 1535901 - DNA, 15 bp, Homo sapiens
aaaccagttttaaat

SEQ ID NO: 1535902 - DNA, 15 bp, Homo sapiens
gaaaccagttttaaa

SEQ ID NO: 1535903 - DNA, 15 bp, Homo sapiens
ggaaaccagttttaa

SEQ ID NO: 1535904 - DNA, 15 bp, Homo sapiens
aggaaaccagtttta

SEQ ID NO: 1535905 - DNA, 15 bp, Homo sapiens
aaggaaaccagtttt

SEQ ID NO: 1535906 - DNA, 15 bp, Homo sapiens
taaggaaaccagttt

SEQ ID NO: 1535907 - DNA, 15 bp, Homo sapiens
ttaaggaaaccagtt

SEQ ID NO: 1535908 - DNA, 15 bp, Homo sapiens
cttaaggaaaccagt

SEQ ID NO: 1535909 - DNA, 15 bp, Homo sapiens
gcttaaggaaaccag

SEQ ID NO: 1535910 - DNA, 15 bp, Homo sapiens
tgcttaaggaaacca

SEQ ID NO: 1535911 - DNA, 15 bp, Homo sapiens
atgcttaaggaaacc

SEQ ID NO: 1535912 - DNA, 15 bp, Homo sapiens
aatgcttaaggaaac

SEQ ID NO: 1535913 - DNA, 15 bp, Homo sapiens
aaatgcttaaggaaa

SEQ ID NO: 1535914 - DNA, 15 bp, Homo sapiens
gaaatgcttaaggaa

SEQ ID NO: 1535915 - DNA, 15 bp, Homo sapiens
ggaaatgcttaagga

SEQ ID NO: 1535916 - DNA, 15 bp, Homo sapiens
tggaaatgcttaagg

SEQ ID NO: 1535917 - DNA, 15 bp, Homo sapiens
ttggaaatgcttaag

SEQ ID NO: 1535918 - DNA, 15 bp, Homo sapiens
tttggaaatgcttaa

SEQ ID NO: 1535919 - DNA, 15 bp, Homo sapiens
ctttggaaatgctta

SEQ ID NO: 1535920 - DNA, 15 bp, Homo sapiens
actttggaaatgctt

SEQ ID NO: 1535921 - DNA, 15 bp, Homo sapiens
tactttggaaatgct

SEQ ID NO: 1535922 - DNA, 15 bp, Homo sapiens
gtactttggaaatgc

SEQ ID NO: 1535923 - DNA, 15 bp, Homo sapiens
tgtactttggaaatg

SEQ ID NO: 1535924 - DNA, 15 bp, Homo sapiens
ttgtactttggaaat

SEQ ID NO: 1535925 - DNA, 15 bp, Homo sapiens
attgtactttggaaa

SEQ ID NO: 1535926 - DNA, 15 bp, Homo sapiens
cattgtactttggaa

SEQ ID NO: 1535927 - DNA, 15 bp, Homo sapiens
tcattgtactttgga

SEQ ID NO: 1535928 - DNA, 15 bp, Homo sapiens
atcattgtactttgg

SEQ ID NO: 1535929 - DNA, 15 bp, Homo sapiens
catcattgtactttg

SEQ ID NO: 1535930 - DNA, 15 bp, Homo sapiens
tcatcattgtacttt

SEQ ID NO: 1535931 - DNA, 15 bp, Homo sapiens
atcatcattgtactt

SEQ ID NO: 1535932 - DNA, 15 bp, Homo sapiens
aatcatcattgtact

SEQ ID NO: 1535933 - DNA, 15 bp, Homo sapiens
taatcatcattgtac

SEQ ID NO: 1535934 - DNA, 15 bp, Homo sapiens
ataatcatcattgta

SEQ ID NO: 1535935 - DNA, 15 bp, Homo sapiens
tataatcatcattgt

SEQ ID NO: 1535936 - DNA, 15 bp, Homo sapiens
ctataatcatcattg

SEQ ID NO: 1535937 - DNA, 15 bp, Homo sapiens
gctataatcatcatt

SEQ ID NO: 1535938 - DNA, 15 bp, Homo sapiens
agctataatcatcat

SEQ ID NO: 1535939 - DNA, 15 bp, Homo sapiens
tagctataatcatca

SEQ ID NO: 1535940 - DNA, 15 bp, Homo sapiens
gtagctataatcatc

SEQ ID NO: 1535941 - DNA, 15 bp, Homo sapiens
ggtagctataatcat

SEQ ID NO: 1535942 - DNA, 15 bp, Homo sapiens
tggtagctataatca

SEQ ID NO: 1535943 - DNA, 15 bp, Homo sapiens
ttggtagctataatc

SEQ ID NO: 1535944 - DNA, 15 bp, Homo sapiens
gttggtagctataat

SEQ ID NO: 1535945 - DNA, 15 bp, Homo sapiens
tgttggtagctataa

SEQ ID NO: 1535946 - DNA, 15 bp, Homo sapiens
atgttggtagctata

SEQ ID NO: 1535947 - DNA, 15 bp, Homo sapiens
tatgttggtagctat

SEQ ID NO: 1535948 - DNA, 15 bp, Homo sapiens
ctatgttggtagcta

SEQ ID NO: 1535949 - DNA, 15 bp, Homo sapiens
tctatgttggtagct

SEQ ID NO: 1535950 - DNA, 15 bp, Homo sapiens
ttctatgttggtagc

SEQ ID NO: 1535951 - DNA, 15 bp, Homo sapiens
cttctatgttggtag

SEQ ID NO: 1535952 - DNA, 15 bp, Homo sapiens
acttctatgttggta

SEQ ID NO: 1535953 - DNA, 15 bp, Homo sapiens
gacttctatgttggt

SEQ ID NO: 1535954 - DNA, 15 bp, Homo sapiens
tgacttctatgttgg

SEQ ID NO: 1535955 - DNA, 15 bp, Homo sapiens
ctgacttctatgttg

SEQ ID NO: 1535956 - DNA, 15 bp, Homo sapiens
tctgacttctatgtt

SEQ ID NO: 1535957 - DNA, 15 bp, Homo sapiens
ttctgacttctatgt

SEQ ID NO: 1535958 - DNA, 15 bp, Homo sapiens
cttctgacttctatg

SEQ ID NO: 1535959 - DNA, 15 bp, Homo sapiens
acttctgacttctat

SEQ ID NO: 1535960 - DNA, 15 bp, Homo sapiens
tacttctgacttcta

SEQ ID NO: 1535961 - DNA, 15 bp, Homo sapiens
gtacttctgacttct

SEQ ID NO: 1535962 - DNA, 15 bp, Homo sapiens
tgtacttctgacttc

SEQ ID NO: 1535963 - DNA, 15 bp, Homo sapiens
gtgtacttctgactt

SEQ ID NO: 1535964 - DNA, 15 bp, Homo sapiens
ggtgtacttctgact

SEQ ID NO: 1535965 - DNA, 15 bp, Homo sapiens
tggtgtacttctgac

SEQ ID NO: 1535966 - DNA, 15 bp, Homo sapiens
ttggtgtacttctga

SEQ ID NO: 1535967 - DNA, 15 bp, Homo sapiens
attggtgtacttctg

SEQ ID NO: 1535968 - DNA, 15 bp, Homo sapiens
aattggtgtacttct

SEQ ID NO: 1535969 - DNA, 15 bp, Homo sapiens
taattggtgtacttc

SEQ ID NO: 1535970 - DNA, 15 bp, Homo sapiens
ctaattggtgtactt

SEQ ID NO: 1535971 - DNA, 15 bp, Homo sapiens
actaattggtgtact

SEQ ID NO: 1535972 - DNA, 15 bp, Homo sapiens
tactaattggtgtac

SEQ ID NO: 1535973 - DNA, 15 bp, Homo sapiens
atactaattggtgta

SEQ ID NO: 1535974 - DNA, 15 bp, Homo sapiens
catactaattggtgt

SEQ ID NO: 1535975 - DNA, 15 bp, Homo sapiens
ccatactaattggtg

SEQ ID NO: 1535976 - DNA, 15 bp, Homo sapiens
gccatactaattggt

SEQ ID NO: 1535977 - DNA, 15 bp, Homo sapiens
tgccatactaattgg

SEQ ID NO: 1535978 - DNA, 15 bp, Homo sapiens
ctgccatactaattg

SEQ ID NO: 1535979 - DNA, 15 bp, Homo sapiens
gctgccatactaatt

SEQ ID NO: 1535980 - DNA, 15 bp, Homo sapiens
agctgccatactaat

SEQ ID NO: 1535981 - DNA, 15 bp, Homo sapiens
tagctgccatactaa

SEQ ID NO: 1535982 - DNA, 15 bp, Homo sapiens
atagctgccatacta

SEQ ID NO: 1535983 - DNA, 15 bp, Homo sapiens
aatagctgccatact

SEQ ID NO: 1535984 - DNA, 15 bp, Homo sapiens
caatagctgccatac

SEQ ID NO: 1535985 - DNA, 15 bp, Homo sapiens
tcaatagctgccata

SEQ ID NO: 1535986 - DNA, 15 bp, Homo sapiens
ttcaatagctgccat

SEQ ID NO: 1535987 - DNA, 15 bp, Homo sapiens
attcaatagctgcca

SEQ ID NO: 1535988 - DNA, 15 bp, Homo sapiens
aattcaatagctgcc

SEQ ID NO: 1535989 - DNA, 15 bp, Homo sapiens
taattcaatagctgc

SEQ ID NO: 1535990 - DNA, 15 bp, Homo sapiens
ataattcaatagctg

SEQ ID NO: 1535991 - DNA, 15 bp, Homo sapiens
tataattcaatagct

SEQ ID NO: 1535992 - DNA, 15 bp, Homo sapiens
ttataattcaatagc

SEQ ID NO: 1535993 - DNA, 15 bp, Homo sapiens
attataattcaatag

SEQ ID NO: 1535994 - DNA, 15 bp, Homo sapiens
aattataattcaata

SEQ ID NO: 1535995 - DNA, 15 bp, Homo sapiens
caattataattcaat

SEQ ID NO: 1535996 - DNA, 15 bp, Homo sapiens
acaattataattcaa

SEQ ID NO: 1535997 - DNA, 15 bp, Homo sapiens
aacaattataattca

SEQ ID NO: 1535998 - DNA, 15 bp, Homo sapiens
aaacaattataattc

SEQ ID NO: 1535999 - DNA, 15 bp, Homo sapiens
aaaacaattataatt

SEQ ID NO: 1536000 - DNA, 15 bp, Homo sapiens
aaaaacaattataat

SEQ ID NO: 1536001 - DNA, 15 bp, Homo sapiens
aaaaaacaattataa

SEQ ID NO: 1536002 - DNA, 15 bp, Homo sapiens
aaaaaaacaattata

SEQ ID NO: 1536003 - DNA, 15 bp, Homo sapiens
caaaaaaacaattat

SEQ ID NO: 1536004 - DNA, 15 bp, Homo sapiens
acaaaaaaacaatta

SEQ ID NO: 1536005 - DNA, 15 bp, Homo sapiens
cacaaaaaaacaatt

SEQ ID NO: 1536006 - DNA, 15 bp, Homo sapiens
ccacaaaaaaacaat

SEQ ID NO: 1536007 - DNA, 15 bp, Homo sapiens
cccacaaaaaaacaa

SEQ ID NO: 1536008 - DNA, 15 bp, Homo sapiens
ccccacaaaaaaaca

SEQ ID NO: 1536009 - DNA, 15 bp, Homo sapiens
accccacaaaaaaac

SEQ ID NO: 1536010 - DNA, 15 bp, Homo sapiens
aaccccacaaaaaaa

SEQ ID NO: 1536011 - DNA, 15 bp, Homo sapiens
aaaccccacaaaaaa

SEQ ID NO: 1536012 - DNA, 15 bp, Homo sapiens
caaaccccacaaaaa

SEQ ID NO: 1536013 - DNA, 15 bp, Homo sapiens
acaaaccccacaaaa

SEQ ID NO: 1536014 - DNA, 15 bp, Homo sapiens
aacaaaccccacaaa

SEQ ID NO: 1536015 - DNA, 15 bp, Homo sapiens
aaacaaaccccacaa

SEQ ID NO: 1536016 - DNA, 15 bp, Homo sapiens
caaacaaaccccaca

SEQ ID NO: 1536017 - DNA, 15 bp, Homo sapiens
acaaacaaaccccac

SEQ ID NO: 1536018 - DNA, 15 bp, Homo sapiens
aacaaacaaacccca

SEQ ID NO: 1536019 - DNA, 15 bp, Homo sapiens
taacaaacaaacccc

SEQ ID NO: 1536020 - DNA, 15 bp, Homo sapiens
gtaacaaacaaaccc

SEQ ID NO: 1536021 - DNA, 15 bp, Homo sapiens
agtaacaaacaaacc

SEQ ID NO: 1536022 - DNA, 15 bp, Homo sapiens
cagtaacaaacaaac

SEQ ID NO: 1536023 - DNA, 15 bp, Homo sapiens
ccagtaacaaacaaa

SEQ ID NO: 1536024 - DNA, 15 bp, Homo sapiens
accagtaacaaacaa

SEQ ID NO: 1536025 - DNA, 15 bp, Homo sapiens
taccagtaacaaaca

SEQ ID NO: 1536026 - DNA, 15 bp, Homo sapiens
ctaccagtaacaaac

SEQ ID NO: 1536027 - DNA, 15 bp, Homo sapiens
actaccagtaacaaa

SEQ ID NO: 1536028 - DNA, 15 bp, Homo sapiens
tactaccagtaacaa

SEQ ID NO: 1536029 - DNA, 15 bp, Homo sapiens
atactaccagtaaca

SEQ ID NO: 1536030 - DNA, 15 bp, Homo sapiens
gatactaccagtaac

SEQ ID NO: 1536031 - DNA, 15 bp, Homo sapiens
agatactaccagtaa

SEQ ID NO: 1536032 - DNA, 15 bp, Homo sapiens
tagatactaccagta

SEQ ID NO: 1536033 - DNA, 15 bp, Homo sapiens
ttagatactaccagt

SEQ ID NO: 1536034 - DNA, 15 bp, Homo sapiens
cttagatactaccag

SEQ ID NO: 1536035 - DNA, 15 bp, Homo sapiens
tcttagatactacca

SEQ ID NO: 1536036 - DNA, 15 bp, Homo sapiens
atcttagatactacc

SEQ ID NO: 1536037 - DNA, 15 bp, Homo sapiens
tatcttagatactac

SEQ ID NO: 1536038 - DNA, 15 bp, Homo sapiens
ttatcttagatacta

SEQ ID NO: 1536039 - DNA, 15 bp, Homo sapiens
tttatcttagatact

SEQ ID NO: 1536040 - DNA, 15 bp, Homo sapiens
atttatcttagatac

SEQ ID NO: 1536041 - DNA, 15 bp, Homo sapiens
gatttatcttagata

SEQ ID NO: 1536042 - DNA, 15 bp, Homo sapiens
ggatttatcttagat

SEQ ID NO: 1536043 - DNA, 15 bp, Homo sapiens
aggatttatcttaga

SEQ ID NO: 1536044 - DNA, 15 bp, Homo sapiens
caggatttatcttag

SEQ ID NO: 1536045 - DNA, 15 bp, Homo sapiens
ccaggatttatctta

SEQ ID NO: 1536046 - DNA, 15 bp, Homo sapiens
accaggatttatctt

SEQ ID NO: 1536047 - DNA, 15 bp, Homo sapiens
caccaggatttatct

SEQ ID NO: 1536048 - DNA, 15 bp, Homo sapiens
acaccaggatttatc

SEQ ID NO: 1536049 - DNA, 15 bp, Homo sapiens
tacaccaggatttat

SEQ ID NO: 1536050 - DNA, 15 bp, Homo sapiens
gtacaccaggattta

SEQ ID NO: 1536051 - DNA, 15 bp, Homo sapiens
agtacaccaggattt

SEQ ID NO: 1536052 - DNA, 15 bp, Homo sapiens
gagtacaccaggatt

SEQ ID NO: 1536053 - DNA, 15 bp, Homo sapiens
ggagtacaccaggat

SEQ ID NO: 1536054 - DNA, 15 bp, Homo sapiens
aggagtacaccagga

SEQ ID NO: 1536055 - DNA, 15 bp, Homo sapiens
taggagtacaccagg

SEQ ID NO: 1536056 - DNA, 15 bp, Homo sapiens
ctaggagtacaccag

SEQ ID NO: 1536057 - DNA, 15 bp, Homo sapiens
cctaggagtacacca

SEQ ID NO: 1536058 - DNA, 15 bp, Homo sapiens
acctaggagtacacc

SEQ ID NO: 1536059 - DNA, 15 bp, Homo sapiens
cacctaggagtacac

SEQ ID NO: 1536060 - DNA, 15 bp, Homo sapiens
tcacctaggagtaca

SEQ ID NO: 1536061 - DNA, 15 bp, Homo sapiens
ttcacctaggagtac

SEQ ID NO: 1536062 - DNA, 15 bp, Homo sapiens
attcacctaggagta

SEQ ID NO: 1536063 - DNA, 15 bp, Homo sapiens
aattcacctaggagt

SEQ ID NO: 1536064 - DNA, 15 bp, Homo sapiens
aaattcacctaggag

SEQ ID NO: 1536065 - DNA, 15 bp, Homo sapiens
aaaattcacctagga

SEQ ID NO: 1536066 - DNA, 15 bp, Homo sapiens
aaaaattcacctagg

SEQ ID NO: 1536067 - DNA, 15 bp, Homo sapiens
caaaaattcacctag

SEQ ID NO: 1536068 - DNA, 15 bp, Homo sapiens
tcaaaaattcaccta

SEQ ID NO: 1536069 - DNA, 15 bp, Homo sapiens
gtcaaaaattcacct

SEQ ID NO: 1536070 - DNA, 15 bp, Homo sapiens
tgtcaaaaattcacc

SEQ ID NO: 1536071 - DNA, 15 bp, Homo sapiens
ctgtcaaaaattcac

SEQ ID NO: 1536072 - DNA, 15 bp, Homo sapiens
actgtcaaaaattca

SEQ ID NO: 1536073 - DNA, 15 bp, Homo sapiens
aactgtcaaaaattc

SEQ ID NO: 1536074 - DNA, 15 bp, Homo sapiens
caactgtcaaaaatt

SEQ ID NO: 1536075 - DNA, 15 bp, Homo sapiens
atcaactgtcaaaaa

SEQ ID NO: 1536076 - DNA, 15 bp, Homo sapiens
catcaactgtcaaaa

SEQ ID NO: 1536077 - DNA, 15 bp, Homo sapiens
acatcaactgtcaaa

SEQ ID NO: 1536078 - DNA, 15 bp, Homo sapiens
aacatcaactgtcaa

SEQ ID NO: 1536079 - DNA, 15 bp, Homo sapiens
caacatcaactgtca

SEQ ID NO: 1536080 - DNA, 15 bp, Homo sapiens
ccaacatcaactgtc

SEQ ID NO: 1536081 - DNA, 15 bp, Homo sapiens
accaacatcaactgt

SEQ ID NO: 1536082 - DNA, 15 bp, Homo sapiens
aaccaacatcaactg

SEQ ID NO: 1536083 - DNA, 15 bp, Homo sapiens
caaccaacatcaact

SEQ ID NO: 1536084 - DNA, 15 bp, Homo sapiens
acaaccaacatcaac

SEQ ID NO: 1536085 - DNA, 15 bp, Homo sapiens
cacaaccaacatcaa

SEQ ID NO: 1536086 - DNA, 15 bp, Homo sapiens
acacaaccaacatca

SEQ ID NO: 1536087 - DNA, 15 bp, Homo sapiens
cacacaaccaacatc

SEQ ID NO: 1536088 - DNA, 15 bp, Homo sapiens
ccacacaaccaacat

SEQ ID NO: 1536089 - DNA, 15 bp, Homo sapiens
tccacacaaccaaca

SEQ ID NO: 1536090 - DNA, 15 bp, Homo sapiens
atccacacaaccaac

SEQ ID NO: 1536091 - DNA, 15 bp, Homo sapiens
catccacacaaccaa

SEQ ID NO: 1536092 - DNA, 15 bp, Homo sapiens
ccatccacacaacca

SEQ ID NO: 1536093 - DNA, 15 bp, Homo sapiens
tccatccacacaacc

SEQ ID NO: 1536094 - DNA, 15 bp, Homo sapiens
atccatccacacaac

SEQ ID NO: 1536095 - DNA, 15 bp, Homo sapiens
aatccatccacacaa

SEQ ID NO: 1536096 - DNA, 15 bp, Homo sapiens
taatccatccacaca

SEQ ID NO: 1536097 - DNA, 15 bp, Homo sapiens
ataatccatccacac

SEQ ID NO: 1536098 - DNA, 15 bp, Homo sapiens
cataatccatccaca

SEQ ID NO: 1536099 - DNA, 15 bp, Homo sapiens
tcataatccatccac

SEQ ID NO: 1536100 - DNA, 15 bp, Homo sapiens
ttcataatccatcca

SEQ ID NO: 1536101 - DNA, 15 bp, Homo sapiens
gttcataatccatcc

SEQ ID NO: 1536102 - DNA, 15 bp, Homo sapiens
tgttcataatccatc

SEQ ID NO: 1536103 - DNA, 15 bp, Homo sapiens
ctgttcataatccat

SEQ ID NO: 1536104 - DNA, 15 bp, Homo sapiens
actgttcataatcca

SEQ ID NO: 1536105 - DNA, 15 bp, Homo sapiens
aactgttcataatcc

SEQ ID NO: 1536106 - DNA, 15 bp, Homo sapiens
taactgttcataatc

SEQ ID NO: 1536107 - DNA, 15 bp, Homo sapiens
ataactgttcataat

SEQ ID NO: 1536108 - DNA, 15 bp, Homo sapiens
aataactgttcataa

SEQ ID NO: 1536109 - DNA, 15 bp, Homo sapiens
aaataactgttcata

SEQ ID NO: 1536110 - DNA, 15 bp, Homo sapiens
caaataactgttcat

SEQ ID NO: 1536111 - DNA, 15 bp, Homo sapiens
acaaataactgttca

SEQ ID NO: 1536112 - DNA, 15 bp, Homo sapiens
aacaaataactgttc

SEQ ID NO: 1536113 - DNA, 15 bp, Homo sapiens
aaacaaataactgtt

SEQ ID NO: 1536114 - DNA, 15 bp, Homo sapiens
aaaacaaataactgt

SEQ ID NO: 1536115 - DNA, 15 bp, Homo sapiens
gaaaacaaataactg

SEQ ID NO: 1536116 - DNA, 15 bp, Homo sapiens
ctagaaaacaaataa

SEQ ID NO: 1536117 - DNA, 15 bp, Homo sapiens
tctagaaaacaaata

SEQ ID NO: 1536118 - DNA, 15 bp, Homo sapiens
ttctagaaaacaaat

SEQ ID NO: 1536119 - DNA, 15 bp, Homo sapiens
cttctagaaaacaaa

SEQ ID NO: 1536120 - DNA, 15 bp, Homo sapiens
ccttctagaaaacaa

SEQ ID NO: 1536121 - DNA, 15 bp, Homo sapiens
cccttctagaaaaca

SEQ ID NO: 1536122 - DNA, 15 bp, Homo sapiens
tcccttctagaaaac

SEQ ID NO: 1536123 - DNA, 15 bp, Homo sapiens
atcccttctagaaaa

SEQ ID NO: 1536124 - DNA, 15 bp, Homo sapiens
gatcccttctagaaa

SEQ ID NO: 1536125 - DNA, 15 bp, Homo sapiens
agatcccttctagaa

SEQ ID NO: 1536126 - DNA, 15 bp, Homo sapiens
cagatcccttctaga

SEQ ID NO: 1536127 - DNA, 15 bp, Homo sapiens
ccagatcccttctag

SEQ ID NO: 1536128 - DNA, 15 bp, Homo sapiens
tccagatcccttcta

SEQ ID NO: 1536129 - DNA, 15 bp, Homo sapiens
gtccagatcccttct

SEQ ID NO: 1536130 - DNA, 15 bp, Homo sapiens
tgtccagatcccttc

SEQ ID NO: 1536131 - DNA, 15 bp, Homo sapiens
ctgtccagatccctt

SEQ ID NO: 1536132 - DNA, 15 bp, Homo sapiens
tctgtccagatccct

SEQ ID NO: 1536133 - DNA, 15 bp, Homo sapiens
atctgtccagatccc

SEQ ID NO: 1536134 - DNA, 15 bp, Homo sapiens
catctgtccagatcc

SEQ ID NO: 1536135 - DNA, 15 bp, Homo sapiens
tcatctgtccagatc

SEQ ID NO: 1536136 - DNA, 15 bp, Homo sapiens
atcatctgtccagat

SEQ ID NO: 1536137 - DNA, 15 bp, Homo sapiens
catcatctgtccaga

SEQ ID NO: 1536138 - DNA, 15 bp, Homo sapiens
tcatcatctgtccag

SEQ ID NO: 1536139 - DNA, 15 bp, Homo sapiens
atcatcatctgtcca

SEQ ID NO: 1536140 - DNA, 15 bp, Homo sapiens
aatcatcatctgtcc

SEQ ID NO: 1536141 - DNA, 15 bp, Homo sapiens
caatcatcatctgtc

SEQ ID NO: 1536142 - DNA, 15 bp, Homo sapiens
acaatcatcatctgt

SEQ ID NO: 1536143 - DNA, 15 bp, Homo sapiens
aacaatcatcatctg

SEQ ID NO: 1536144 - DNA, 15 bp, Homo sapiens
caacaatcatcatct

SEQ ID NO: 1536145 - DNA, 15 bp, Homo sapiens
tcaacaatcatcatc

SEQ ID NO: 1536146 - DNA, 15 bp, Homo sapiens
ctcaacaatcatcat

SEQ ID NO: 1536147 - DNA, 15 bp, Homo sapiens
actcaacaatcatca

SEQ ID NO: 1536148 - DNA, 15 bp, Homo sapiens
tactcaacaatcatc

SEQ ID NO: 1536149 - DNA, 15 bp, Homo sapiens
ttactcaacaatcat

SEQ ID NO: 1536150 - DNA, 15 bp, Homo sapiens
tttactcaacaatca

SEQ ID NO: 1536151 - DNA, 15 bp, Homo sapiens
ttttactcaacaatc

SEQ ID NO: 1536152 - DNA, 15 bp, Homo sapiens
cttttactcaacaat

SEQ ID NO: 1536153 - DNA, 15 bp, Homo sapiens
acttttactcaacaa

SEQ ID NO: 1536154 - DNA, 15 bp, Homo sapiens
tacttttactcaaca

SEQ ID NO: 1536155 - DNA, 15 bp, Homo sapiens
atacttttactcaac

SEQ ID NO: 1536156 - DNA, 15 bp, Homo sapiens
tatacttttactcaa

SEQ ID NO: 1536157 - DNA, 15 bp, Homo sapiens
ctatacttttactca

SEQ ID NO: 1536158 - DNA, 15 bp, Homo sapiens
tctatacttttactc

SEQ ID NO: 1536159 - DNA, 15 bp, Homo sapiens
gtctatacttttact

SEQ ID NO: 1536160 - DNA, 15 bp, Homo sapiens
tgtctatacttttac

SEQ ID NO: 1536161 - DNA, 15 bp, Homo sapiens
ttgtctatactttta

SEQ ID NO: 1536162 - DNA, 15 bp, Homo sapiens
tttgtctatactttt

SEQ ID NO: 1536163 - DNA, 15 bp, Homo sapiens
atttgtctatacttt

SEQ ID NO: 1536164 - DNA, 15 bp, Homo sapiens
catttgtctatactt

SEQ ID NO: 1536165 - DNA, 15 bp, Homo sapiens
tcatttgtctatact

SEQ ID NO: 1536166 - DNA, 15 bp, Homo sapiens
gtcatttgtctatac

SEQ ID NO: 1536167 - DNA, 15 bp, Homo sapiens
agtcatttgtctata

SEQ ID NO: 1536168 - DNA, 15 bp, Homo sapiens
aagtcatttgtctat

SEQ ID NO: 1536169 - DNA, 15 bp, Homo sapiens
aaagtcatttgtcta

SEQ ID NO: 1536170 - DNA, 15 bp, Homo sapiens
caaagtcatttgtct

SEQ ID NO: 1536171 - DNA, 15 bp, Homo sapiens
ccaaagtcatttgtc

SEQ ID NO: 1536172 - DNA, 15 bp, Homo sapiens
accaaagtcatttgt

SEQ ID NO: 1536173 - DNA, 15 bp, Homo sapiens
caccaaagtcatttg

SEQ ID NO: 1536174 - DNA, 15 bp, Homo sapiens
ccaccaaagtcattt

SEQ ID NO: 1536175 - DNA, 15 bp, Homo sapiens
accaccaaagtcatt

SEQ ID NO: 1536176 - DNA, 15 bp, Homo sapiens
aaccaccaaagtcat

SEQ ID NO: 1536177 - DNA, 15 bp, Homo sapiens
caaccaccaaagtca

SEQ ID NO: 1536178 - DNA, 15 bp, Homo sapiens
acaaccaccaaagtc

SEQ ID NO: 1536179 - DNA, 15 bp, Homo sapiens
cacaaccaccaaagt

SEQ ID NO: 1536180 - DNA, 15 bp, Homo sapiens
acacaaccaccaaag

SEQ ID NO: 1536181 - DNA, 15 bp, Homo sapiens
cacacaaccaccaaa

SEQ ID NO: 1536182 - DNA, 15 bp, Homo sapiens
ccacacaaccaccaa

SEQ ID NO: 1536183 - DNA, 15 bp, Homo sapiens
accacacaaccacca

SEQ ID NO: 1536184 - DNA, 15 bp, Homo sapiens
taccacacaaccacc

SEQ ID NO: 1536185 - DNA, 15 bp, Homo sapiens
ctaccacacaaccac

SEQ ID NO: 1536186 - DNA, 15 bp, Homo sapiens
tctaccacacaacca

SEQ ID NO: 1536187 - DNA, 15 bp, Homo sapiens
ttctaccacacaacc

SEQ ID NO: 1536188 - DNA, 15 bp, Homo sapiens
cttctaccacacaac

SEQ ID NO: 1536189 - DNA, 15 bp, Homo sapiens
acttctaccacacaa

SEQ ID NO: 1536190 - DNA, 15 bp, Homo sapiens
tacttctaccacaca

SEQ ID NO: 1536191 - DNA, 15 bp, Homo sapiens
gtacttctaccacac

SEQ ID NO: 1536192 - DNA, 15 bp, Homo sapiens
cgtacttctaccaca

SEQ ID NO: 1536193 - DNA, 15 bp, Homo sapiens
ccgtacttctaccac

SEQ ID NO: 1536194 - DNA, 15 bp, Homo sapiens
cccgtacttctacca

SEQ ID NO: 1536195 - DNA, 15 bp, Homo sapiens
gcccgtacttctacc

SEQ ID NO: 1536196 - DNA, 15 bp, Homo sapiens
tgcccgtacttctac

SEQ ID NO: 1536197 - DNA, 15 bp, Homo sapiens
ctgcccgtacttcta

SEQ ID NO: 1536198 - DNA, 15 bp, Homo sapiens
tctgcccgtacttct

SEQ ID NO: 1536199 - DNA, 15 bp, Homo sapiens
atctgcccgtacttc

SEQ ID NO: 1536200 - DNA, 15 bp, Homo sapiens
catctgcccgtactt

SEQ ID NO: 1536201 - DNA, 15 bp, Homo sapiens
ccatctgcccgtact

SEQ ID NO: 1536202 - DNA, 15 bp, Homo sapiens
accatctgcccgtac

SEQ ID NO: 1536203 - DNA, 15 bp, Homo sapiens
taccatctgcccgta

SEQ ID NO: 1536204 - DNA, 15 bp, Homo sapiens
ctaccatctgcccgt

SEQ ID NO: 1536205 - DNA, 15 bp, Homo sapiens
actaccatctgcccg

SEQ ID NO: 1536206 - DNA, 15 bp, Homo sapiens
aactaccatctgccc

SEQ ID NO: 1536207 - DNA, 15 bp, Homo sapiens
caactaccatctgcc

SEQ ID NO: 1536208 - DNA, 15 bp, Homo sapiens
acaactaccatctgc

SEQ ID NO: 1536209 - DNA, 15 bp, Homo sapiens
gacaactaccatctg

SEQ ID NO: 1536210 - DNA, 15 bp, Homo sapiens
agacaactaccatct

SEQ ID NO: 1536211 - DNA, 15 bp, Homo sapiens
cagacaactaccatc

SEQ ID NO: 1536212 - DNA, 15 bp, Homo sapiens
ccagacaactaccat

SEQ ID NO: 1536213 - DNA, 15 bp, Homo sapiens
gccagacaactacca

SEQ ID NO: 1536214 - DNA, 15 bp, Homo sapiens
tgccagacaactacc

SEQ ID NO: 1536215 - DNA, 15 bp, Homo sapiens
ctgccagacaactac

SEQ ID NO: 1536216 - DNA, 15 bp, Homo sapiens
tctgccagacaacta

SEQ ID NO: 1536217 - DNA, 15 bp, Homo sapiens
ctctgccagacaact

SEQ ID NO: 1536218 - DNA, 15 bp, Homo sapiens
cctctgccagacaac

SEQ ID NO: 1536219 - DNA, 15 bp, Homo sapiens
acctctgccagacaa

SEQ ID NO: 1536220 - DNA, 15 bp, Homo sapiens
cacctctgccagaca

SEQ ID NO: 1536221 - DNA, 15 bp, Homo sapiens
tcacctctgccagac

SEQ ID NO: 1536222 - DNA, 15 bp, Homo sapiens
ttcacctctgccaga

SEQ ID NO: 1536223 - DNA, 15 bp, Homo sapiens
gttcacctctgccag

SEQ ID NO: 1536224 - DNA, 15 bp, Homo sapiens
tgttcacctctgcca

SEQ ID NO: 1536225 - DNA, 15 bp, Homo sapiens
gtgttcacctctgcc

SEQ ID NO: 1536226 - DNA, 15 bp, Homo sapiens
cgtgttcacctctgc

SEQ ID NO: 1536227 - DNA, 15 bp, Homo sapiens
ccgtgttcacctctg

SEQ ID NO: 1536228 - DNA, 15 bp, Homo sapiens
gccgtgttcacctct

SEQ ID NO: 1536229 - DNA, 15 bp, Homo sapiens
agccgtgttcacctc

SEQ ID NO: 1536230 - DNA, 15 bp, Homo sapiens
aagccgtgttcacct

SEQ ID NO: 1536231 - DNA, 15 bp, Homo sapiens
caagccgtgttcacc

SEQ ID NO: 1536232 - DNA, 15 bp, Homo sapiens
gcaagccgtgttcac

SEQ ID NO: 1536233 - DNA, 15 bp, Homo sapiens
agcaagccgtgttca

SEQ ID NO: 1536234 - DNA, 15 bp, Homo sapiens
cagcaagccgtgttc

SEQ ID NO: 1536235 - DNA, 15 bp, Homo sapiens
ccagcaagccgtgtt

SEQ ID NO: 1536236 - DNA, 15 bp, Homo sapiens
cccagcaagccgtgt

SEQ ID NO: 1536237 - DNA, 15 bp, Homo sapiens
tcccagcaagccgtg

SEQ ID NO: 1536238 - DNA, 15 bp, Homo sapiens
ctcccagcaagccgt

SEQ ID NO: 1536239 - DNA, 15 bp, Homo sapiens
cctcccagcaagccg

SEQ ID NO: 1536240 - DNA, 15 bp, Homo sapiens
tcctcccagcaagcc

SEQ ID NO: 1536241 - DNA, 15 bp, Homo sapiens
ctcctcccagcaagc

SEQ ID NO: 1536242 - DNA, 15 bp, Homo sapiens
cctcctcccagcaag

SEQ ID NO: 1536243 - DNA, 15 bp, Homo sapiens
acctcctcccagcaa

SEQ ID NO: 1536244 - DNA, 15 bp, Homo sapiens
cacctcctcccagca

SEQ ID NO: 1536245 - DNA, 15 bp, Homo sapiens
acacctcctcccagc

SEQ ID NO: 1536246 - DNA, 15 bp, Homo sapiens
aacacctcctcccag

SEQ ID NO: 1536247 - DNA, 15 bp, Homo sapiens
caacacctcctccca

SEQ ID NO: 1536248 - DNA, 15 bp, Homo sapiens
ccaacacctcctccc

SEQ ID NO: 1536249 - DNA, 15 bp, Homo sapiens
gccaacacctcctcc

SEQ ID NO: 1536250 - DNA, 15 bp, Homo sapiens
agccaacacctcctc

SEQ ID NO: 1536251 - DNA, 15 bp, Homo sapiens
tagccaacacctcct

SEQ ID NO: 1536252 - DNA, 15 bp, Homo sapiens
atagccaacacctcc

SEQ ID NO: 1536253 - DNA, 15 bp, Homo sapiens
aatagccaacacctc

SEQ ID NO: 1536254 - DNA, 15 bp, Homo sapiens
caatagccaacacct

SEQ ID NO: 1536255 - DNA, 15 bp, Homo sapiens
ccaatagccaacacc

SEQ ID NO: 1536256 - DNA, 15 bp, Homo sapiens
accaatagccaacac

SEQ ID NO: 1536257 - DNA, 15 bp, Homo sapiens
caccaatagccaaca

SEQ ID NO: 1536258 - DNA, 15 bp, Homo sapiens
acaccaatagccaac

SEQ ID NO: 1536259 - DNA, 15 bp, Homo sapiens
aacaccaatagccaa

SEQ ID NO: 1536260 - DNA, 15 bp, Homo sapiens
caacaccaatagcca

SEQ ID NO: 1536261 - DNA, 15 bp, Homo sapiens
ccaacaccaatagcc

SEQ ID NO: 1536262 - DNA, 15 bp, Homo sapiens
accaacaccaatagc

SEQ ID NO: 1536263 - DNA, 15 bp, Homo sapiens
aaccaacaccaatag

SEQ ID NO: 1536264 - DNA, 15 bp, Homo sapiens
caaccaacaccaata

SEQ ID NO: 1536265 - DNA, 15 bp, Homo sapiens
acaaccaacaccaat

SEQ ID NO: 1536266 - DNA, 15 bp, Homo sapiens
aacaaccaacaccaa

SEQ ID NO: 1536267 - DNA, 15 bp, Homo sapiens
aaacaaccaacacca

SEQ ID NO: 1536268 - DNA, 15 bp, Homo sapiens
caaacaaccaacacc

SEQ ID NO: 1536269 - DNA, 15 bp, Homo sapiens
ccaaacaaccaacac

SEQ ID NO: 1536270 - DNA, 15 bp, Homo sapiens
accaaacaaccaaca

SEQ ID NO: 1536271 - DNA, 15 bp, Homo sapiens
caccaaacaaccaac

SEQ ID NO: 1536272 - DNA, 15 bp, Homo sapiens
acaccaaacaaccaa

SEQ ID NO: 1536273 - DNA, 15 bp, Homo sapiens
aacaccaaacaacca

SEQ ID NO: 1536274 - DNA, 15 bp, Homo sapiens
caacaccaaacaacc

SEQ ID NO: 1536275 - DNA, 15 bp, Homo sapiens
acaacaccaaacaac

SEQ ID NO: 1536276 - DNA, 15 bp, Homo sapiens
tacaacaccaaacaa

SEQ ID NO: 1536277 - DNA, 15 bp, Homo sapiens
ctacaacaccaaaca

SEQ ID NO: 1536278 - DNA, 15 bp, Homo sapiens
cctacaacaccaaac

SEQ ID NO: 1536279 - DNA, 15 bp, Homo sapiens
gcctacaacaccaaa

SEQ ID NO: 1536280 - DNA, 15 bp, Homo sapiens
tgcctacaacaccaa

SEQ ID NO: 1536281 - DNA, 15 bp, Homo sapiens
ttgcctacaacacca

SEQ ID NO: 1536282 - DNA, 15 bp, Homo sapiens
cttgcctacaacacc

SEQ ID NO: 1536283 - DNA, 15 bp, Homo sapiens
acttgcctacaacac

SEQ ID NO: 1536284 - DNA, 15 bp, Homo sapiens
cacttgcctacaaca

SEQ ID NO: 1536285 - DNA, 15 bp, Homo sapiens
ccacttgcctacaac

SEQ ID NO: 1536286 - DNA, 15 bp, Homo sapiens
accacttgcctacaa

SEQ ID NO: 1536287 - DNA, 15 bp, Homo sapiens
aaccacttgcctaca

SEQ ID NO: 1536288 - DNA, 15 bp, Homo sapiens
caaccacttgcctac

SEQ ID NO: 1536289 - DNA, 15 bp, Homo sapiens
acaaccacttgccta

SEQ ID NO: 1536290 - DNA, 15 bp, Homo sapiens
gacaaccacttgcct

SEQ ID NO: 1536291 - DNA, 15 bp, Homo sapiens
ggacaaccacttgcc

SEQ ID NO: 1536292 - DNA, 15 bp, Homo sapiens
tggacaaccacttgc

SEQ ID NO: 1536293 - DNA, 15 bp, Homo sapiens
ctggacaaccacttg

SEQ ID NO: 1536294 - DNA, 15 bp, Homo sapiens
gctggacaaccactt

SEQ ID NO: 1536295 - DNA, 15 bp, Homo sapiens
tgctggacaaccact

SEQ ID NO: 1536296 - DNA, 15 bp, Homo sapiens
ctgctggacaaccac

SEQ ID NO: 1536297 - DNA, 15 bp, Homo sapiens
tctgctggacaacca

SEQ ID NO: 1536298 - DNA, 15 bp, Homo sapiens
ttctgctggacaacc

SEQ ID NO: 1536299 - DNA, 15 bp, Homo sapiens
cttctgctggacaac

SEQ ID NO: 1536300 - DNA, 15 bp, Homo sapiens
acttctgctggacaa

SEQ ID NO: 1536301 - DNA, 15 bp, Homo sapiens
tacttctgctggaca

SEQ ID NO: 1536302 - DNA, 15 bp, Homo sapiens
atacttctgctggac

SEQ ID NO: 1536303 - DNA, 15 bp, Homo sapiens
catacttctgctgga

SEQ ID NO: 1536304 - DNA, 15 bp, Homo sapiens
acatacttctgctgg

SEQ ID NO: 1536305 - DNA, 15 bp, Homo sapiens
cacatacttctgctg

SEQ ID NO: 1536306 - DNA, 15 bp, Homo sapiens
gcacatacttctgct

SEQ ID NO: 1536307 - DNA, 15 bp, Homo sapiens
agcacatacttctgc

SEQ ID NO: 1536308 - DNA, 15 bp, Homo sapiens
aagcacatacttctg

SEQ ID NO: 1536309 - DNA, 15 bp, Homo sapiens
gaagcacatacttct

SEQ ID NO: 1536310 - DNA, 15 bp, Homo sapiens
agaagcacatacttc

SEQ ID NO: 1536311 - DNA, 15 bp, Homo sapiens
cagaagcacatactt

SEQ ID NO: 1536312 - DNA, 15 bp, Homo sapiens
ccagaagcacatact

SEQ ID NO: 1536313 - DNA, 15 bp, Homo sapiens
accagaagcacatac

SEQ ID NO: 1536314 - DNA, 15 bp, Homo sapiens
aaccagaagcacata

SEQ ID NO: 1536315 - DNA, 15 bp, Homo sapiens
aaaccagaagcacat

SEQ ID NO: 1536316 - DNA, 15 bp, Homo sapiens
aaaaccagaagcaca

SEQ ID NO: 1536317 - DNA, 15 bp, Homo sapiens
aaaaaccagaagcac

SEQ ID NO: 1536318 - DNA, 15 bp, Homo sapiens
gaaaaaccagaagca

SEQ ID NO: 1536319 - DNA, 15 bp, Homo sapiens
tgaaaaaccagaagc

SEQ ID NO: 1536320 - DNA, 15 bp, Homo sapiens
ctgaaaaaccagaag

SEQ ID NO: 1536321 - DNA, 15 bp, Homo sapiens
tctgaaaaaccagaa

SEQ ID NO: 1536322 - DNA, 15 bp, Homo sapiens
ttctgaaaaaccaga

SEQ ID NO: 1536323 - DNA, 15 bp, Homo sapiens
cttctgaaaaaccag

SEQ ID NO: 1536324 - DNA, 15 bp, Homo sapiens
tcttctgaaaaacca

SEQ ID NO: 1536325 - DNA, 15 bp, Homo sapiens
ctcttctgaaaaacc

SEQ ID NO: 1536326 - DNA, 15 bp, Homo sapiens
cctcttctgaaaaac

SEQ ID NO: 1536327 - DNA, 15 bp, Homo sapiens
acctcttctgaaaaa

SEQ ID NO: 1536328 - DNA, 15 bp, Homo sapiens
tacctcttctgaaaa

SEQ ID NO: 1536329 - DNA, 15 bp, Homo sapiens
atacctcttctgaaa

SEQ ID NO: 1536330 - DNA, 15 bp, Homo sapiens
tatacctcttctgaa

SEQ ID NO: 1536331 - DNA, 15 bp, Homo sapiens
ctatacctcttctga

SEQ ID NO: 1536332 - DNA, 15 bp, Homo sapiens
tctatacctcttctg

SEQ ID NO: 1536333 - DNA, 15 bp, Homo sapiens
gtctatacctcttct

SEQ ID NO: 1536334 - DNA, 15 bp, Homo sapiens
tgtctatacctcttc

SEQ ID NO: 1536335 - DNA, 15 bp, Homo sapiens
ctgtctatacctctt

SEQ ID NO: 1536336 - DNA, 15 bp, Homo sapiens
gctgtctatacctct

SEQ ID NO: 1536337 - DNA, 15 bp, Homo sapiens
agctgtctatacctc

SEQ ID NO: 1536338 - DNA, 15 bp, Homo sapiens
cagctgtctatacct

SEQ ID NO: 1536339 - DNA, 15 bp, Homo sapiens
ccagctgtctatacc

SEQ ID NO: 1536340 - DNA, 15 bp, Homo sapiens
accagctgtctatac

SEQ ID NO: 1536341 - DNA, 15 bp, Homo sapiens
caccagctgtctata

SEQ ID NO: 1536342 - DNA, 15 bp, Homo sapiens
acaccagctgtctat

SEQ ID NO: 1536343 - DNA, 15 bp, Homo sapiens
aacaccagctgtcta

SEQ ID NO: 1536344 - DNA, 15 bp, Homo sapiens
caacaccagctgtct

SEQ ID NO: 1536345 - DNA, 15 bp, Homo sapiens
ccaacaccagctgtc

SEQ ID NO: 1536346 - DNA, 15 bp, Homo sapiens
accaacaccagctgt

SEQ ID NO: 1536347 - DNA, 15 bp, Homo sapiens
aaccaacaccagctg

SEQ ID NO: 1536348 - DNA, 15 bp, Homo sapiens
caaccaacaccagct

SEQ ID NO: 1536349 - DNA, 15 bp, Homo sapiens
acaaccaacaccagc

SEQ ID NO: 1536350 - DNA, 15 bp, Homo sapiens
gacaaccaacaccag

SEQ ID NO: 1536351 - DNA, 15 bp, Homo sapiens
ggacaaccaacacca

SEQ ID NO: 1536352 - DNA, 15 bp, Homo sapiens
tggacaaccaacacc

SEQ ID NO: 1536353 - DNA, 15 bp, Homo sapiens
ctggacaaccaacac

SEQ ID NO: 1536354 - DNA, 15 bp, Homo sapiens
gctggacaaccaaca

SEQ ID NO: 1536355 - DNA, 15 bp, Homo sapiens
tgctggacaaccaac

SEQ ID NO: 1536356 - DNA, 15 bp, Homo sapiens
ctgctggacaaccaa

SEQ ID NO: 1536357 - DNA, 15 bp, Homo sapiens
actgctggacaacca

SEQ ID NO: 1536358 - DNA, 15 bp, Homo sapiens
cactgctggacaacc

SEQ ID NO: 1536359 - DNA, 15 bp, Homo sapiens
tcactgctggacaac

SEQ ID NO: 1536360 - DNA, 15 bp, Homo sapiens
gtcactgctggacaa

SEQ ID NO: 1536361 - DNA, 15 bp, Homo sapiens
agtcactgctggaca

SEQ ID NO: 1536362 - DNA, 15 bp, Homo sapiens
aagtcactgctggac

SEQ ID NO: 1536363 - DNA, 15 bp, Homo sapiens
aaagtcactgctgga

SEQ ID NO: 1536364 - DNA, 15 bp, Homo sapiens
caaagtcactgctgg

SEQ ID NO: 1536365 - DNA, 15 bp, Homo sapiens
ccaaagtcactgctg

SEQ ID NO: 1536366 - DNA, 15 bp, Homo sapiens
gccaaagtcactgct

SEQ ID NO: 1536367 - DNA, 15 bp, Homo sapiens
tgccaaagtcactgc

SEQ ID NO: 1536368 - DNA, 15 bp, Homo sapiens
ctgccaaagtcactg

SEQ ID NO: 1536369 - DNA, 15 bp, Homo sapiens
cctgccaaagtcact

SEQ ID NO: 1536370 - DNA, 15 bp, Homo sapiens
acctgccaaagtcac

SEQ ID NO: 1536371 - DNA, 15 bp, Homo sapiens
cacctgccaaagtca

SEQ ID NO: 1536372 - DNA, 15 bp, Homo sapiens
tcacctgccaaagtc

SEQ ID NO: 1536373 - DNA, 15 bp, Homo sapiens
atcacctgccaaagt

SEQ ID NO: 1536374 - DNA, 15 bp, Homo sapiens
tatcacctgccaaag

SEQ ID NO: 1536375 - DNA, 15 bp, Homo sapiens
atatcacctgccaaa

SEQ ID NO: 1536376 - DNA, 15 bp, Homo sapiens
aatatcacctgccaa

SEQ ID NO: 1536377 - DNA, 15 bp, Homo sapiens
caatatcacctgcca

SEQ ID NO: 1536378 - DNA, 15 bp, Homo sapiens
tcaatatcacctgcc

SEQ ID NO: 1536379 - DNA, 15 bp, Homo sapiens
atcaatatcacctgc

SEQ ID NO: 1536380 - DNA, 15 bp, Homo sapiens
aatcaatatcacctg

SEQ ID NO: 1536381 - DNA, 15 bp, Homo sapiens
caatcaatatcacct

SEQ ID NO: 1536382 - DNA, 15 bp, Homo sapiens
acaatcaatatcacc

SEQ ID NO: 1536383 - DNA, 15 bp, Homo sapiens
gacaatcaatatcac

SEQ ID NO: 1536384 - DNA, 15 bp, Homo sapiens
ggacaatcaatatca

SEQ ID NO: 1536385 - DNA, 15 bp, Homo sapiens
tggacaatcaatatc

SEQ ID NO: 1536386 - DNA, 15 bp, Homo sapiens
ctggacaatcaatat

SEQ ID NO: 1536387 - DNA, 15 bp, Homo sapiens
tctggacaatcaata

SEQ ID NO: 1536388 - DNA, 15 bp, Homo sapiens
ttctggacaatcaat

SEQ ID NO: 1536389 - DNA, 15 bp, Homo sapiens
tttctggacaatcaa

SEQ ID NO: 1536390 - DNA, 15 bp, Homo sapiens
ttttctggacaatca

SEQ ID NO: 1536391 - DNA, 15 bp, Homo sapiens
tttttctggacaatc

SEQ ID NO: 1536392 - DNA, 15 bp, Homo sapiens
ctttttctggacaat

SEQ ID NO: 1536393 - DNA, 15 bp, Homo sapiens
actttttctggacaa

SEQ ID NO: 1536394 - DNA, 15 bp, Homo sapiens
cactttttctggaca

SEQ ID NO: 1536395 - DNA, 15 bp, Homo sapiens
acactttttctggac

SEQ ID NO: 1536396 - DNA, 15 bp, Homo sapiens
gacactttttctgga

SEQ ID NO: 1536397 - DNA, 15 bp, Homo sapiens
cgacactttttctgg

SEQ ID NO: 1536398 - DNA, 15 bp, Homo sapiens
gcgacactttttctg

SEQ ID NO: 1536399 - DNA, 15 bp, Homo sapiens
agcgacactttttct

SEQ ID NO: 1536400 - DNA, 15 bp, Homo sapiens
cagcgacactttttc

SEQ ID NO: 1536401 - DNA, 15 bp, Homo sapiens
tcagcgacacttttt

SEQ ID NO: 1536402 - DNA, 15 bp, Homo sapiens
ttcagcgacactttt

SEQ ID NO: 1536403 - DNA, 15 bp, Homo sapiens
attcagcgacacttt

SEQ ID NO: 1536404 - DNA, 15 bp, Homo sapiens
aattcagcgacactt

SEQ ID NO: 1536405 - DNA, 15 bp, Homo sapiens
caattcagcgacact

SEQ ID NO: 1536406 - DNA, 15 bp, Homo sapiens
acaattcagcgacac

SEQ ID NO: 1536407 - DNA, 15 bp, Homo sapiens
cacaattcagcgaca

SEQ ID NO: 1536408 - DNA, 15 bp, Homo sapiens
acacaattcagcgac

SEQ ID NO: 1536409 - DNA, 15 bp, Homo sapiens
aacacaattcagcga

SEQ ID NO: 1536410 - DNA, 15 bp, Homo sapiens
caacacaattcagcg

SEQ ID NO: 1536411 - DNA, 15 bp, Homo sapiens
ccaacacaattcagc

SEQ ID NO: 1536412 - DNA, 15 bp, Homo sapiens
accaacacaattcag

SEQ ID NO: 1536413 - DNA, 15 bp, Homo sapiens
aaccaacacaattca

SEQ ID NO: 1536414 - DNA, 15 bp, Homo sapiens
caaccaacacaattc

SEQ ID NO: 1536415 - DNA, 15 bp, Homo sapiens
tcaaccaacacaatt

SEQ ID NO: 1536416 - DNA, 15 bp, Homo sapiens
gtcaaccaacacaat

SEQ ID NO: 1536417 - DNA, 15 bp, Homo sapiens
ggtcaaccaacacaa

SEQ ID NO: 1536418 - DNA, 15 bp, Homo sapiens
gggtcaaccaacaca

SEQ ID NO: 1536419 - DNA, 15 bp, Homo sapiens
tgggtcaaccaacac

SEQ ID NO: 1536420 - DNA, 15 bp, Homo sapiens
ttgggtcaaccaaca

SEQ ID NO: 1536421 - DNA, 15 bp, Homo sapiens
tttgggtcaaccaac

SEQ ID NO: 1536422 - DNA, 15 bp, Homo sapiens
ctttgggtcaaccaa

SEQ ID NO: 1536423 - DNA, 15 bp, Homo sapiens
cctttgggtcaacca

SEQ ID NO: 1536424 - DNA, 15 bp, Homo sapiens
tcctttgggtcaacc

SEQ ID NO: 1536425 - DNA, 15 bp, Homo sapiens
atcctttgggtcaac

SEQ ID NO: 1536426 - DNA, 15 bp, Homo sapiens
aatcctttgggtcaa

SEQ ID NO: 1536427 - DNA, 15 bp, Homo sapiens
gaatcctttgggtca

SEQ ID NO: 1536428 - DNA, 15 bp, Homo sapiens
ggaatcctttgggtc

SEQ ID NO: 1536429 - DNA, 15 bp, Homo sapiens
gggaatcctttgggt

SEQ ID NO: 1536430 - DNA, 15 bp, Homo sapiens
agggaatcctttggg

SEQ ID NO: 1536431 - DNA, 15 bp, Homo sapiens
cagggaatcctttgg

SEQ ID NO: 1536432 - DNA, 15 bp, Homo sapiens
acagggaatcctttg

SEQ ID NO: 1536433 - DNA, 15 bp, Homo sapiens
aacagggaatccttt

SEQ ID NO: 1536434 - DNA, 15 bp, Homo sapiens
caacagggaatcctt

SEQ ID NO: 1536435 - DNA, 15 bp, Homo sapiens
acaacagggaatcct

SEQ ID NO: 1536436 - DNA, 15 bp, Homo sapiens
cacaacagggaatcc

SEQ ID NO: 1536437 - DNA, 15 bp, Homo sapiens
acacaacagggaatc

SEQ ID NO: 1536438 - DNA, 15 bp, Homo sapiens
aacacaacagggaat

SEQ ID NO: 1536439 - DNA, 15 bp, Homo sapiens
aaacacaacagggaa

SEQ ID NO: 1536440 - DNA, 15 bp, Homo sapiens
aaaacacaacaggga

SEQ ID NO: 1536441 - DNA, 15 bp, Homo sapiens
caaaacacaacaggg

SEQ ID NO: 1536442 - DNA, 15 bp, Homo sapiens
tcaaaacacaacagg

SEQ ID NO: 1536443 - DNA, 15 bp, Homo sapiens
ctcaaaacacaacag

SEQ ID NO: 1536444 - DNA, 15 bp, Homo sapiens
tctcaaaacacaaca

SEQ ID NO: 1536445 - DNA, 15 bp, Homo sapiens
ttctcaaaacacaac

SEQ ID NO: 1536446 - DNA, 15 bp, Homo sapiens
attctcaaaacacaa

SEQ ID NO: 1536447 - DNA, 15 bp, Homo sapiens
aattctcaaaacaca

SEQ ID NO: 1536448 - DNA, 15 bp, Homo sapiens
taattctcaaaacac

SEQ ID NO: 1536449 - DNA, 15 bp, Homo sapiens
ctaattctcaaaaca

SEQ ID NO: 1536450 - DNA, 15 bp, Homo sapiens
gctaattctcaaaac

SEQ ID NO: 1536451 - DNA, 15 bp, Homo sapiens
ggctaattctcaaaa

SEQ ID NO: 1536452 - DNA, 15 bp, Homo sapiens
tggctaattctcaaa

SEQ ID NO: 1536453 - DNA, 15 bp, Homo sapiens
ttggctaattctcaa

SEQ ID NO: 1536454 - DNA, 15 bp, Homo sapiens
attggctaattctca

SEQ ID NO: 1536455 - DNA, 15 bp, Homo sapiens
tattggctaattctc

SEQ ID NO: 1536456 - DNA, 15 bp, Homo sapiens
gtattggctaattct

SEQ ID NO: 1536457 - DNA, 15 bp, Homo sapiens
ggtattggctaattc

SEQ ID NO: 1536458 - DNA, 15 bp, Homo sapiens
aggtattggctaatt

SEQ ID NO: 1536459 - DNA, 15 bp, Homo sapiens
caggtattggctaat

SEQ ID NO: 1536460 - DNA, 15 bp, Homo sapiens
acaggtattggctaa

SEQ ID NO: 1536461 - DNA, 15 bp, Homo sapiens
cacaggtattggcta

SEQ ID NO: 1536462 - DNA, 15 bp, Homo sapiens
tcacaggtattggct

SEQ ID NO: 1536463 - DNA, 15 bp, Homo sapiens
gtcacaggtattggc

SEQ ID NO: 1536464 - DNA, 15 bp, Homo sapiens
tgtcacaggtattgg

SEQ ID NO: 1536465 - DNA, 15 bp, Homo sapiens
atgtcacaggtattg

SEQ ID NO: 1536466 - DNA, 15 bp, Homo sapiens
aatgtcacaggtatt

SEQ ID NO: 1536467 - DNA, 15 bp, Homo sapiens
caatgtcacaggtat

SEQ ID NO: 1536468 - DNA, 15 bp, Homo sapiens
tcaatgtcacaggta

SEQ ID NO: 1536469 - DNA, 15 bp, Homo sapiens
atcaatgtcacaggt

SEQ ID NO: 1536470 - DNA, 15 bp, Homo sapiens
catcaatgtcacagg

SEQ ID NO: 1536471 - DNA, 15 bp, Homo sapiens
tcatcaatgtcacag

SEQ ID NO: 1536472 - DNA, 15 bp, Homo sapiens
atcatcaatgtcaca

SEQ ID NO: 1536473 - DNA, 15 bp, Homo sapiens
catcatcaatgtcac

SEQ ID NO: 1536474 - DNA, 15 bp, Homo sapiens
acatcatcaatgtca

SEQ ID NO: 1536475 - DNA, 15 bp, Homo sapiens
cacatcatcaatgtc

SEQ ID NO: 1536476 - DNA, 15 bp, Homo sapiens
tcacatcatcaatgt

SEQ ID NO: 1536477 - DNA, 15 bp, Homo sapiens
ttcacatcatcaatg

SEQ ID NO: 1536478 - DNA, 15 bp, Homo sapiens
attcacatcatcaat

SEQ ID NO: 1536479 - DNA, 15 bp, Homo sapiens
tattcacatcatcaa

SEQ ID NO: 1536480 - DNA, 15 bp, Homo sapiens
ttattcacatcatca

SEQ ID NO: 1536481 - DNA, 15 bp, Homo sapiens
cttattcacatcatc

SEQ ID NO: 1536482 - DNA, 15 bp, Homo sapiens
ccttattcacatcat

SEQ ID NO: 1536483 - DNA, 15 bp, Homo sapiens
accttattcacatca

SEQ ID NO: 1536484 - DNA, 15 bp, Homo sapiens
taccttattcacatc

SEQ ID NO: 1536485 - DNA, 15 bp, Homo sapiens
ctaccttattcacat

SEQ ID NO: 1536486 - DNA, 15 bp, Homo sapiens
cctaccttattcaca

SEQ ID NO: 1536487 - DNA, 15 bp, Homo sapiens
gcctaccttattcac

SEQ ID NO: 1536488 - DNA, 15 bp, Homo sapiens
agcctaccttattca

SEQ ID NO: 1536489 - DNA, 15 bp, Homo sapiens
cagcctaccttattc

SEQ ID NO: 1536490 - DNA, 15 bp, Homo sapiens
acagcctaccttatt

SEQ ID NO: 1536491 - DNA, 15 bp, Homo sapiens
cacagcctaccttat

SEQ ID NO: 1536492 - DNA, 15 bp, Homo sapiens
tcacagcctacctta

SEQ ID NO: 1536493 - DNA, 15 bp, Homo sapiens
gtcacagcctacctt

SEQ ID NO: 1536494 - DNA, 15 bp, Homo sapiens
agtcacagcctacct

SEQ ID NO: 1536495 - DNA, 15 bp, Homo sapiens
cagtcacagcctacc

SEQ ID NO: 1536496 - DNA, 15 bp, Homo sapiens
gcagtcacagcctac

SEQ ID NO: 1536497 - DNA, 15 bp, Homo sapiens
agcagtcacagccta

SEQ ID NO: 1536498 - DNA, 15 bp, Homo sapiens
aagcagtcacagcct

SEQ ID NO: 1536499 - DNA, 15 bp, Homo sapiens
gaagcagtcacagcc

SEQ ID NO: 1536500 - DNA, 15 bp, Homo sapiens
agaagcagtcacagc

SEQ ID NO: 1536501 - DNA, 15 bp, Homo sapiens
gagaagcagtcacag

SEQ ID NO: 1536502 - DNA, 15 bp, Homo sapiens
agagaagcagtcaca

SEQ ID NO: 1536503 - DNA, 15 bp, Homo sapiens
cagagaagcagtcac

SEQ ID NO: 1536504 - DNA, 15 bp, Homo sapiens
aacagagaagcagtc

SEQ ID NO: 1536505 - DNA, 15 bp, Homo sapiens
caacagagaagcagt

SEQ ID NO: 1536506 - DNA, 15 bp, Homo sapiens
acaacagagaagcag

SEQ ID NO: 1536507 - DNA, 15 bp, Homo sapiens
tacaacagagaagca

SEQ ID NO: 1536508 - DNA, 15 bp, Homo sapiens
ttacaacagagaagc

SEQ ID NO: 1536509 - DNA, 15 bp, Homo sapiens
attacaacagagaag

SEQ ID NO: 1536510 - DNA, 15 bp, Homo sapiens
aattacaacagagaa

SEQ ID NO: 1536511 - DNA, 15 bp, Homo sapiens
caattacaacagaga

SEQ ID NO: 1536512 - DNA, 15 bp, Homo sapiens
acaattacaacagag

SEQ ID NO: 1536513 - DNA, 15 bp, Homo sapiens
gacaattacaacaga

SEQ ID NO: 1536514 - DNA, 15 bp, Homo sapiens
agacaattacaacag

SEQ ID NO: 1536515 - DNA, 15 bp, Homo sapiens
gagacaattacaaca

SEQ ID NO: 1536516 - DNA, 15 bp, Homo sapiens
agagacaattacaac

SEQ ID NO: 1536517 - DNA, 15 bp, Homo sapiens
cagagacaattacaa

SEQ ID NO: 1536518 - DNA, 15 bp, Homo sapiens
acagagacaattaca

SEQ ID NO: 1536519 - DNA, 15 bp, Homo sapiens
gacagagacaattac

SEQ ID NO: 1536520 - DNA, 15 bp, Homo sapiens
agacagagacaatta

SEQ ID NO: 1536521 - DNA, 15 bp, Homo sapiens
aagacagagacaatt

SEQ ID NO: 1536522 - DNA, 15 bp, Homo sapiens
aaagacagagacaat

SEQ ID NO: 1536523 - DNA, 15 bp, Homo sapiens
caaagacagagacaa

SEQ ID NO: 1536524 - DNA, 15 bp, Homo sapiens
tcaaagacagagaca

SEQ ID NO: 1536525 - DNA, 15 bp, Homo sapiens
ttcaaagacagagac

SEQ ID NO: 1536526 - DNA, 15 bp, Homo sapiens
tttcaaagacagaga

SEQ ID NO: 1536527 - DNA, 15 bp, Homo sapiens
ttttcaaagacagag

SEQ ID NO: 1536528 - DNA, 15 bp, Homo sapiens
tttttcaaagacaga

SEQ ID NO: 1536529 - DNA, 15 bp, Homo sapiens
ttttttcaaagacag

SEQ ID NO: 1536530 - DNA, 15 bp, Homo sapiens
atttttttcaaagac

SEQ ID NO: 1536531 - DNA, 15 bp, Homo sapiens
catttttttcaaaga

SEQ ID NO: 1536532 - DNA, 15 bp, Homo sapiens
acatttttttcaaag

SEQ ID NO: 1536533 - DNA, 15 bp, Homo sapiens
tacatttttttcaaa

SEQ ID NO: 1536534 - DNA, 15 bp, Homo sapiens
atacatttttttcaa

SEQ ID NO: 1536535 - DNA, 15 bp, Homo sapiens
aatacatttttttca

SEQ ID NO: 1536536 - DNA, 15 bp, Homo sapiens
caatacatttttttc

SEQ ID NO: 1536537 - DNA, 15 bp, Homo sapiens
acaatacattttttt

SEQ ID NO: 1536538 - DNA, 15 bp, Homo sapiens
aacaatacatttttt

SEQ ID NO: 1536539 - DNA, 15 bp, Homo sapiens
gaacaatacattttt

SEQ ID NO: 1536540 - DNA, 15 bp, Homo sapiens
tgaacaatacatttt

SEQ ID NO: 1536541 - DNA, 15 bp, Homo sapiens
ctgaacaatacattt

SEQ ID NO: 1536542 - DNA, 15 bp, Homo sapiens
cctgaacaatacatt

SEQ ID NO: 1536543 - DNA, 15 bp, Homo sapiens
acctgaacaatacat

SEQ ID NO: 1536544 - DNA, 15 bp, Homo sapiens
cacctgaacaataca

SEQ ID NO: 1536545 - DNA, 15 bp, Homo sapiens
acacctgaacaatac

SEQ ID NO: 1536546 - DNA, 15 bp, Homo sapiens
gacacctgaacaata

SEQ ID NO: 1536547 - DNA, 15 bp, Homo sapiens
ggacacctgaacaat

SEQ ID NO: 1536548 - DNA, 15 bp, Homo sapiens
tggacacctgaacaa

SEQ ID NO: 1536549 - DNA, 15 bp, Homo sapiens
gtggacacctgaaca

SEQ ID NO: 1536550 - DNA, 15 bp, Homo sapiens
tgtggacacctgaac

SEQ ID NO: 1536551 - DNA, 15 bp, Homo sapiens
ttgtggacacctgaa

SEQ ID NO: 1536552 - DNA, 15 bp, Homo sapiens
tttgtggacacctga

SEQ ID NO: 1536553 - DNA, 15 bp, Homo sapiens
ttttgtggacacctg

SEQ ID NO: 1536554 - DNA, 15 bp, Homo sapiens
gttttgtggacacct

SEQ ID NO: 1536555 - DNA, 15 bp, Homo sapiens
tgttttgtggacacc

SEQ ID NO: 1536556 - DNA, 15 bp, Homo sapiens
ttgttttgtggacac

SEQ ID NO: 1536557 - DNA, 15 bp, Homo sapiens
tttgttttgtggaca

SEQ ID NO: 1536558 - DNA, 15 bp, Homo sapiens
ttttgttttgtggac

SEQ ID NO: 1536559 - DNA, 15 bp, Homo sapiens
attttgttttgtgga

SEQ ID NO: 1536560 - DNA, 15 bp, Homo sapiens
aattttgttttgtgg

SEQ ID NO: 1536561 - DNA, 15 bp, Homo sapiens
taattttgttttgtg

SEQ ID NO: 1536562 - DNA, 15 bp, Homo sapiens
ttaattttgttttgt

SEQ ID NO: 1536563 - DNA, 15 bp, Homo sapiens
cttaattttgttttg

SEQ ID NO: 1536564 - DNA, 15 bp, Homo sapiens
tcttaattttgtttt

SEQ ID NO: 1536565 - DNA, 15 bp, Homo sapiens
atcttaattttgttt

SEQ ID NO: 1536566 - DNA, 15 bp, Homo sapiens
catcttaattttgtt

SEQ ID NO: 1536567 - DNA, 15 bp, Homo sapiens
tcatcttaattttgt

SEQ ID NO: 1536568 - DNA, 15 bp, Homo sapiens
ttcatcttaattttg

SEQ ID NO: 1536569 - DNA, 15 bp, Homo sapiens
tttcatcttaatttt

SEQ ID NO: 1536570 - DNA, 15 bp, Homo sapiens
atttcatcttaattt

SEQ ID NO: 1536571 - DNA, 15 bp, Homo sapiens
tatttcatcttaatt

SEQ ID NO: 1536572 - DNA, 15 bp, Homo sapiens
atatttcatcttaat

SEQ ID NO: 1536573 - DNA, 15 bp, Homo sapiens
aatatttcatcttaa

SEQ ID NO: 1536574 - DNA, 15 bp, Homo sapiens
aaatatttcatctta

SEQ ID NO: 1536575 - DNA, 15 bp, Homo sapiens
caaatatttcatctt

SEQ ID NO: 1536576 - DNA, 15 bp, Homo sapiens
ccaaatatttcatct

SEQ ID NO: 1536577 - DNA, 15 bp, Homo sapiens
cccaaatatttcatc

SEQ ID NO: 1536578 - DNA, 15 bp, Homo sapiens
tcccaaatatttcat

SEQ ID NO: 1536579 - DNA, 15 bp, Homo sapiens
atcccaaatatttca

SEQ ID NO: 1536580 - DNA, 15 bp, Homo sapiens
gatcccaaatatttc

SEQ ID NO: 1536581 - DNA, 15 bp, Homo sapiens
ggatcccaaatattt

SEQ ID NO: 1536582 - DNA, 15 bp, Homo sapiens
tggatcccaaatatt

SEQ ID NO: 1536583 - DNA, 15 bp, Homo sapiens
atggatcccaaatat

SEQ ID NO: 1536584 - DNA, 15 bp, Homo sapiens
aatggatcccaaata

SEQ ID NO: 1536585 - DNA, 15 bp, Homo sapiens
aaatggatcccaaat

SEQ ID NO: 1536586 - DNA, 15 bp, Homo sapiens
gaaatggatcccaaa

SEQ ID NO: 1536587 - DNA, 15 bp, Homo sapiens
tgaaatggatcccaa

SEQ ID NO: 1536588 - DNA, 15 bp, Homo sapiens
ctgaaatggatccca

SEQ ID NO: 1536589 - DNA, 15 bp, Homo sapiens
tctgaaatggatccc

SEQ ID NO: 1536590 - DNA, 15 bp, Homo sapiens
ttctgaaatggatcc

SEQ ID NO: 1536591 - DNA, 15 bp, Homo sapiens
attctgaaatggatc

SEQ ID NO: 1536592 - DNA, 15 bp, Homo sapiens
tattctgaaatggat

SEQ ID NO: 1536593 - DNA, 15 bp, Homo sapiens
atattctgaaatgga

SEQ ID NO: 1536594 - DNA, 15 bp, Homo sapiens
aatattctgaaatgg

SEQ ID NO: 1536595 - DNA, 15 bp, Homo sapiens
aaatattctgaaatg

SEQ ID NO: 1536596 - DNA, 15 bp, Homo sapiens
gaaatattctgaaat

SEQ ID NO: 1536597 - DNA, 15 bp, Homo sapiens
ggaaatattctgaaa

SEQ ID NO: 1536598 - DNA, 15 bp, Homo sapiens
aggaaatattctgaa

SEQ ID NO: 1536599 - DNA, 15 bp, Homo sapiens
gaggaaatattctga

SEQ ID NO: 1536600 - DNA, 15 bp, Homo sapiens
cgaggaaatattctg

SEQ ID NO: 1536601 - DNA, 15 bp, Homo sapiens
acgaggaaatattct

SEQ ID NO: 1536602 - DNA, 15 bp, Homo sapiens
aacgaggaaatattc

SEQ ID NO: 1536603 - DNA, 15 bp, Homo sapiens
taacgaggaaatatt

SEQ ID NO: 1536604 - DNA, 15 bp, Homo sapiens
ataacgaggaaatat

SEQ ID NO: 1536605 - DNA, 15 bp, Homo sapiens
gataacgaggaaata

SEQ ID NO: 1536606 - DNA, 15 bp, Homo sapiens
agataacgaggaaat

SEQ ID NO: 1536607 - DNA, 15 bp, Homo sapiens
tagataacgaggaaa

SEQ ID NO: 1536608 - DNA, 15 bp, Homo sapiens
atagataacgaggaa

SEQ ID NO: 1536609 - DNA, 15 bp, Homo sapiens
tatagataacgagga

SEQ ID NO: 1536610 - DNA, 15 bp, Homo sapiens
ctatagataacgagg

SEQ ID NO: 1536611 - DNA, 15 bp, Homo sapiens
gctatagataacgag

SEQ ID NO: 1536612 - DNA, 15 bp, Homo sapiens
cgctatagataacga

SEQ ID NO: 1536613 - DNA, 15 bp, Homo sapiens
ccgctatagataacg

SEQ ID NO: 1536614 - DNA, 15 bp, Homo sapiens
cccgctatagataac

SEQ ID NO: 1536615 - DNA, 15 bp, Homo sapiens
acccgctatagataa

SEQ ID NO: 1536616 - DNA, 15 bp, Homo sapiens
aacccgctatagata

SEQ ID NO: 1536617 - DNA, 15 bp, Homo sapiens
aaacccgctatagat

SEQ ID NO: 1536618 - DNA, 15 bp, Homo sapiens
taaacccgctataga

SEQ ID NO: 1536619 - DNA, 15 bp, Homo sapiens
ataaacccgctatag

SEQ ID NO: 1536620 - DNA, 15 bp, Homo sapiens
tataaacccgctata

SEQ ID NO: 1536621 - DNA, 15 bp, Homo sapiens
ttataaacccgctat

SEQ ID NO: 1536622 - DNA, 15 bp, Homo sapiens
attataaacccgcta

SEQ ID NO: 1536623 - DNA, 15 bp, Homo sapiens
cattataaacccgct

SEQ ID NO: 1536624 - DNA, 15 bp, Homo sapiens
tcattataaacccgc

SEQ ID NO: 1536625 - DNA, 15 bp, Homo sapiens
ttcattataaacccg

SEQ ID NO: 1536626 - DNA, 15 bp, Homo sapiens
tttcattataaaccc

SEQ ID NO: 1536627 - DNA, 15 bp, Homo sapiens
ctttcattataaacc

SEQ ID NO: 1536628 - DNA, 15 bp, Homo sapiens
tctttcattataaac

SEQ ID NO: 1536629 - DNA, 15 bp, Homo sapiens
ctctttcattataaa

SEQ ID NO: 1536630 - DNA, 15 bp, Homo sapiens
tctctttcattataa

SEQ ID NO: 1536631 - DNA, 15 bp, Homo sapiens
ttctctttcattata

SEQ ID NO: 1536632 - DNA, 15 bp, Homo sapiens
tttctctttcattat

SEQ ID NO: 1536633 - DNA, 15 bp, Homo sapiens
ctttctctttcatta

SEQ ID NO: 1536634 - DNA, 15 bp, Homo sapiens
tctttctctttcatt

SEQ ID NO: 1536635 - DNA, 15 bp, Homo sapiens
gtctttctctttcat

SEQ ID NO: 1536636 - DNA, 15 bp, Homo sapiens
tgtctttctctttca

SEQ ID NO: 1536637 - DNA, 15 bp, Homo sapiens
ctgtctttctctttc

SEQ ID NO: 1536638 - DNA, 15 bp, Homo sapiens
actgtctttctcttt

SEQ ID NO: 1536639 - DNA, 15 bp, Homo sapiens
aactgtctttctctt

SEQ ID NO: 1536640 - DNA, 15 bp, Homo sapiens
taactgtctttctct

SEQ ID NO: 1536641 - DNA, 15 bp, Homo sapiens
ctaactgtctttctc

SEQ ID NO: 1536642 - DNA, 15 bp, Homo sapiens
cctaactgtctttct

SEQ ID NO: 1536643 - DNA, 15 bp, Homo sapiens
gcctaactgtctttc

SEQ ID NO: 1536644 - DNA, 15 bp, Homo sapiens
cgcctaactgtcttt

SEQ ID NO: 1536645 - DNA, 15 bp, Homo sapiens
acgcctaactgtctt

SEQ ID NO: 1536646 - DNA, 15 bp, Homo sapiens
gacgcctaactgtct

SEQ ID NO: 1536647 - DNA, 15 bp, Homo sapiens
tgacgcctaactgtc

SEQ ID NO: 1536648 - DNA, 15 bp, Homo sapiens
atgacgcctaactgt

SEQ ID NO: 1536649 - DNA, 15 bp, Homo sapiens
aatgacgcctaactg

SEQ ID NO: 1536650 - DNA, 15 bp, Homo sapiens
caatgacgcctaact

SEQ ID NO: 1536651 - DNA, 15 bp, Homo sapiens
ccaatgacgcctaac

SEQ ID NO: 1536652 - DNA, 15 bp, Homo sapiens
accaatgacgcctaa

SEQ ID NO: 1536653 - DNA, 15 bp, Homo sapiens
caccaatgacgccta

SEQ ID NO: 1536654 - DNA, 15 bp, Homo sapiens
acaccaatgacgcct

SEQ ID NO: 1536655 - DNA, 15 bp, Homo sapiens
gacaccaatgacgcc

SEQ ID NO: 1536656 - DNA, 15 bp, Homo sapiens
agacaccaatgacgc

SEQ ID NO: 1536657 - DNA, 15 bp, Homo sapiens
tagacaccaatgacg

SEQ ID NO: 1536658 - DNA, 15 bp, Homo sapiens
ctagacaccaatgac

SEQ ID NO: 1536659 - DNA, 15 bp, Homo sapiens
actagacaccaatga

SEQ ID NO: 1536660 - DNA, 15 bp, Homo sapiens
aactagacaccaatg

SEQ ID NO: 1536661 - DNA, 15 bp, Homo sapiens
taactagacaccaat

SEQ ID NO: 1536662 - DNA, 15 bp, Homo sapiens
ttaactagacaccaa

SEQ ID NO: 1536663 - DNA, 15 bp, Homo sapiens
tttaactagacacca

SEQ ID NO: 1536664 - DNA, 15 bp, Homo sapiens
ttttaactagacacc

SEQ ID NO: 1536665 - DNA, 15 bp, Homo sapiens
tttttaactagacac

SEQ ID NO: 1536666 - DNA, 15 bp, Homo sapiens
atttttaactagaca

SEQ ID NO: 1536667 - DNA, 15 bp, Homo sapiens
aatttttaactagac

SEQ ID NO: 1536668 - DNA, 15 bp, Homo sapiens
aaatttttaactaga

SEQ ID NO: 1536669 - DNA, 15 bp, Homo sapiens
caaatttttaactag

SEQ ID NO: 1536670 - DNA, 15 bp, Homo sapiens
tcaaatttttaacta

SEQ ID NO: 1536671 - DNA, 15 bp, Homo sapiens
gtcaaatttttaact

SEQ ID NO: 1536672 - DNA, 15 bp, Homo sapiens
agtcaaatttttaac

SEQ ID NO: 1536673 - DNA, 15 bp, Homo sapiens
aagtcaaatttttaa

SEQ ID NO: 1536674 - DNA, 15 bp, Homo sapiens
aaagtcaaattttta

SEQ ID NO: 1536675 - DNA, 15 bp, Homo sapiens
aaaagtcaaattttt

SEQ ID NO: 1536676 - DNA, 15 bp, Homo sapiens
gaaaagtcaaatttt

SEQ ID NO: 1536677 - DNA, 15 bp, Homo sapiens
tgaaaagtcaaattt

SEQ ID NO: 1536678 - DNA, 15 bp, Homo sapiens
atgaaaagtcaaatt

SEQ ID NO: 1536679 - DNA, 15 bp, Homo sapiens
aatgaaaagtcaaat

SEQ ID NO: 1536680 - DNA, 15 bp, Homo sapiens
taatgaaaagtcaaa

SEQ ID NO: 1536681 - DNA, 15 bp, Homo sapiens
ataatgaaaagtcaa

SEQ ID NO: 1536682 - DNA, 15 bp, Homo sapiens
cataatgaaaagtca

SEQ ID NO: 1536683 - DNA, 15 bp, Homo sapiens
tcataatgaaaagtc

SEQ ID NO: 1536684 - DNA, 15 bp, Homo sapiens
atcataatgaaaagt

SEQ ID NO: 1536685 - DNA, 15 bp, Homo sapiens
aatcataatgaaaag

SEQ ID NO: 1536686 - DNA, 15 bp, Homo sapiens
gaatcataatgaaaa

SEQ ID NO: 1536687 - DNA, 15 bp, Homo sapiens
ggaatcataatgaaa

SEQ ID NO: 1536688 - DNA, 15 bp, Homo sapiens
aggaatcataatgaa

SEQ ID NO: 1536689 - DNA, 15 bp, Homo sapiens
caggaatcataatga

SEQ ID NO: 1536690 - DNA, 15 bp, Homo sapiens
ccaggaatcataatg

SEQ ID NO: 1536691 - DNA, 15 bp, Homo sapiens
gccaggaatcataat

SEQ ID NO: 1536692 - DNA, 15 bp, Homo sapiens
tgccaggaatcataa

SEQ ID NO: 1536693 - DNA, 15 bp, Homo sapiens
atgccaggaatcata

SEQ ID NO: 1536694 - DNA, 15 bp, Homo sapiens
tatgccaggaatcat

SEQ ID NO: 1536695 - DNA, 15 bp, Homo sapiens
ttatgccaggaatca

SEQ ID NO: 1536696 - DNA, 15 bp, Homo sapiens
tttatgccaggaatc

SEQ ID NO: 1536697 - DNA, 15 bp, Homo sapiens
ctttatgccaggaat

SEQ ID NO: 1536698 - DNA, 15 bp, Homo sapiens
actttatgccaggaa

SEQ ID NO: 1536699 - DNA, 15 bp, Homo sapiens
tactttatgccagga

SEQ ID NO: 1536700 - DNA, 15 bp, Homo sapiens
ctactttatgccagg

SEQ ID NO: 1536701 - DNA, 15 bp, Homo sapiens
cctactttatgccag

SEQ ID NO: 1536702 - DNA, 15 bp, Homo sapiens
acctactttatgcca

SEQ ID NO: 1536703 - DNA, 15 bp, Homo sapiens
tacctactttatgcc

SEQ ID NO: 1536704 - DNA, 15 bp, Homo sapiens
ctacctactttatgc

SEQ ID NO: 1536705 - DNA, 15 bp, Homo sapiens
tctacctactttatg

SEQ ID NO: 1536706 - DNA, 15 bp, Homo sapiens
gtctacctactttat

SEQ ID NO: 1536707 - DNA, 15 bp, Homo sapiens
tgtctacctacttta

SEQ ID NO: 1536708 - DNA, 15 bp, Homo sapiens
atgtctacctacttt

SEQ ID NO: 1536709 - DNA, 15 bp, Homo sapiens
aatgtctacctactt

SEQ ID NO: 1536710 - DNA, 15 bp, Homo sapiens
taatgtctacctact

SEQ ID NO: 1536711 - DNA, 15 bp, Homo sapiens
ataatgtctacctac

SEQ ID NO: 1536712 - DNA, 15 bp, Homo sapiens
aataatgtctaccta

SEQ ID NO: 1536713 - DNA, 15 bp, Homo sapiens
gaataatgtctacct

SEQ ID NO: 1536714 - DNA, 15 bp, Homo sapiens
ggaataatgtctacc

SEQ ID NO: 1536715 - DNA, 15 bp, Homo sapiens
aggaataatgtctac

SEQ ID NO: 1536716 - DNA, 15 bp, Homo sapiens
taggaataatgtcta

SEQ ID NO: 1536717 - DNA, 15 bp, Homo sapiens
ttaggaataatgtct

SEQ ID NO: 1536718 - DNA, 15 bp, Homo sapiens
attaggaataatgtc

SEQ ID NO: 1536719 - DNA, 15 bp, Homo sapiens
aattaggaataatgt

SEQ ID NO: 1536720 - DNA, 15 bp, Homo sapiens
taattaggaataatg

SEQ ID NO: 1536721 - DNA, 15 bp, Homo sapiens
ctaattaggaataat

SEQ ID NO: 1536722 - DNA, 15 bp, Homo sapiens
actaattaggaataa

SEQ ID NO: 1536723 - DNA, 15 bp, Homo sapiens
tactaattaggaata

SEQ ID NO: 1536724 - DNA, 15 bp, Homo sapiens
ctactaattaggaat

SEQ ID NO: 1536725 - DNA, 15 bp, Homo sapiens
actactaattaggaa

SEQ ID NO: 1536726 - DNA, 15 bp, Homo sapiens
tactactaattagga

SEQ ID NO: 1536727 - DNA, 15 bp, Homo sapiens
ctactactaattagg

SEQ ID NO: 1536728 - DNA, 15 bp, Homo sapiens
actactactaattag

SEQ ID NO: 1536729 - DNA, 15 bp, Homo sapiens
aactactactaatta

SEQ ID NO: 1536730 - DNA, 15 bp, Homo sapiens
caactactactaatt

SEQ ID NO: 1536731 - DNA, 15 bp, Homo sapiens
tcaactactactaat

SEQ ID NO: 1536732 - DNA, 15 bp, Homo sapiens
atcaactactactaa

SEQ ID NO: 1536733 - DNA, 15 bp, Homo sapiens
aatcaactactacta

SEQ ID NO: 1536734 - DNA, 15 bp, Homo sapiens
taatcaactactact

SEQ ID NO: 1536735 - DNA, 15 bp, Homo sapiens
ctaatcaactactac

SEQ ID NO: 1536736 - DNA, 15 bp, Homo sapiens
actaatcaactacta

SEQ ID NO: 1536737 - DNA, 15 bp, Homo sapiens
tactaatcaactact

SEQ ID NO: 1536738 - DNA, 15 bp, Homo sapiens
ctactaatcaactac

SEQ ID NO: 1536739 - DNA, 15 bp, Homo sapiens
actactaatcaacta

SEQ ID NO: 1536740 - DNA, 15 bp, Homo sapiens
aactactaatcaact

SEQ ID NO: 1536741 - DNA, 15 bp, Homo sapiens
taactactaatcaac

SEQ ID NO: 1536742 - DNA, 15 bp, Homo sapiens
ataactactaatcaa

SEQ ID NO: 1536743 - DNA, 15 bp, Homo sapiens
aataactactaatca

SEQ ID NO: 1536744 - DNA, 15 bp, Homo sapiens
taataactactaatc

SEQ ID NO: 1536745 - DNA, 15 bp, Homo sapiens
ataataactactaat

SEQ ID NO: 1536746 - DNA, 15 bp, Homo sapiens
aataataactactaa

SEQ ID NO: 1536747 - DNA, 15 bp, Homo sapiens
gaataataactacta

SEQ ID NO: 1536748 - DNA, 15 bp, Homo sapiens
ggaataataactact

SEQ ID NO: 1536749 - DNA, 15 bp, Homo sapiens
aggaataataactac

SEQ ID NO: 1536750 - DNA, 15 bp, Homo sapiens
taggaataataacta

SEQ ID NO: 1536751 - DNA, 15 bp, Homo sapiens
ttaggaataataact

SEQ ID NO: 1536752 - DNA, 15 bp, Homo sapiens
attaggaataataac

SEQ ID NO: 1536753 - DNA, 15 bp, Homo sapiens
aattaggaataataa

SEQ ID NO: 1536754 - DNA, 15 bp, Homo sapiens
aaattaggaataata

SEQ ID NO: 1536755 - DNA, 15 bp, Homo sapiens
taaattaggaataat

SEQ ID NO: 1536756 - DNA, 15 bp, Homo sapiens
ctaaattaggaataa

SEQ ID NO: 1536757 - DNA, 15 bp, Homo sapiens
tctaaattaggaata

SEQ ID NO: 1536758 - DNA, 15 bp, Homo sapiens
gtctaaattaggaat

SEQ ID NO: 1536759 - DNA, 15 bp, Homo sapiens
agtctaaattaggaa

SEQ ID NO: 1536760 - DNA, 15 bp, Homo sapiens
caagtctaaattagg

SEQ ID NO: 1536761 - DNA, 15 bp, Homo sapiens
tcaagtctaaattag

SEQ ID NO: 1536762 - DNA, 15 bp, Homo sapiens
atcaagtctaaatta

SEQ ID NO: 1536763 - DNA, 15 bp, Homo sapiens
tatcaagtctaaatt

SEQ ID NO: 1536764 - DNA, 15 bp, Homo sapiens
gtatcaagtctaaat

SEQ ID NO: 1536765 - DNA, 15 bp, Homo sapiens
tgtatcaagtctaaa

SEQ ID NO: 1536766 - DNA, 15 bp, Homo sapiens
gtgtatcaagtctaa

SEQ ID NO: 1536767 - DNA, 15 bp, Homo sapiens
agtgtatcaagtcta

SEQ ID NO: 1536768 - DNA, 15 bp, Homo sapiens
cagtgtatcaagtct

SEQ ID NO: 1536769 - DNA, 15 bp, Homo sapiens
acagtgtatcaagtc

SEQ ID NO: 1536770 - DNA, 15 bp, Homo sapiens
tacagtgtatcaagt

SEQ ID NO: 1536771 - DNA, 15 bp, Homo sapiens
ctacagtgtatcaag

SEQ ID NO: 1536772 - DNA, 15 bp, Homo sapiens
cctacagtgtatcaa

SEQ ID NO: 1536773 - DNA, 15 bp, Homo sapiens
acctacagtgtatca

SEQ ID NO: 1536774 - DNA, 15 bp, Homo sapiens
aacctacagtgtatc

SEQ ID NO: 1536775 - DNA, 15 bp, Homo sapiens
aaacctacagtgtat

SEQ ID NO: 1536776 - DNA, 15 bp, Homo sapiens
caaacctacagtgta

SEQ ID NO: 1536777 - DNA, 15 bp, Homo sapiens
ccaaacctacagtgt

SEQ ID NO: 1536778 - DNA, 15 bp, Homo sapiens
accaaacctacagtg

SEQ ID NO: 1536779 - DNA, 15 bp, Homo sapiens
caccaaacctacagt

SEQ ID NO: 1536780 - DNA, 15 bp, Homo sapiens
acaccaaacctacag

SEQ ID NO: 1536781 - DNA, 15 bp, Homo sapiens
tacaccaaacctaca

SEQ ID NO: 1536782 - DNA, 15 bp, Homo sapiens
ttacaccaaacctac

SEQ ID NO: 1536783 - DNA, 15 bp, Homo sapiens
gttacaccaaaccta

SEQ ID NO: 1536784 - DNA, 15 bp, Homo sapiens
tgttacaccaaacct

SEQ ID NO: 1536785 - DNA, 15 bp, Homo sapiens
ttgttacaccaaacc

SEQ ID NO: 1536786 - DNA, 15 bp, Homo sapiens
gttgttacaccaaac

SEQ ID NO: 1536787 - DNA, 15 bp, Homo sapiens
agttgttacaccaaa

SEQ ID NO: 1536788 - DNA, 15 bp, Homo sapiens
gagttgttacaccaa

SEQ ID NO: 1536789 - DNA, 15 bp, Homo sapiens
agagttgttacacca

SEQ ID NO: 1536790 - DNA, 15 bp, Homo sapiens
aagagttgttacacc

SEQ ID NO: 1536791 - DNA, 15 bp, Homo sapiens
caagagttgttacac

SEQ ID NO: 1536792 - DNA, 15 bp, Homo sapiens
ccaagagttgttaca

SEQ ID NO: 1536793 - DNA, 15 bp, Homo sapiens
tccaagagttgttac

SEQ ID NO: 1536794 - DNA, 15 bp, Homo sapiens
atccaagagttgtta

SEQ ID NO: 1536795 - DNA, 15 bp, Homo sapiens
tatccaagagttgtt

SEQ ID NO: 1536796 - DNA, 15 bp, Homo sapiens
atatccaagagttgt

SEQ ID NO: 1536797 - DNA, 15 bp, Homo sapiens
tatatccaagagttg

SEQ ID NO: 1536798 - DNA, 15 bp, Homo sapiens
gtatatccaagagtt

SEQ ID NO: 1536799 - DNA, 15 bp, Homo sapiens
agtatatccaagagt

SEQ ID NO: 1536800 - DNA, 15 bp, Homo sapiens
gagtatatccaagag

SEQ ID NO: 1536801 - DNA, 15 bp, Homo sapiens
agagtatatccaaga

SEQ ID NO: 1536802 - DNA, 15 bp, Homo sapiens
tagagtatatccaag

SEQ ID NO: 1536803 - DNA, 15 bp, Homo sapiens
ttagagtatatccaa

SEQ ID NO: 1536804 - DNA, 15 bp, Homo sapiens
gttagagtatatcca

SEQ ID NO: 1536805 - DNA, 15 bp, Homo sapiens
ggttagagtatatcc

SEQ ID NO: 1536806 - DNA, 15 bp, Homo sapiens
gggttagagtatatc

SEQ ID NO: 1536807 - DNA, 15 bp, Homo sapiens
tgggttagagtatat

SEQ ID NO: 1536808 - DNA, 15 bp, Homo sapiens
atgggttagagtata

SEQ ID NO: 1536809 - DNA, 15 bp, Homo sapiens
gatgggttagagtat

SEQ ID NO: 1536810 - DNA, 15 bp, Homo sapiens
tgatgggttagagta

SEQ ID NO: 1536811 - DNA, 15 bp, Homo sapiens
atgatgggttagagt

SEQ ID NO: 1536812 - DNA, 15 bp, Homo sapiens
tatgatgggttagag

SEQ ID NO: 1536813 - DNA, 15 bp, Homo sapiens
gtatgatgggttaga

SEQ ID NO: 1536814 - DNA, 15 bp, Homo sapiens
tgtatgatgggttag

SEQ ID NO: 1536815 - DNA, 15 bp, Homo sapiens
ctgtatgatgggtta

SEQ ID NO: 1536816 - DNA, 15 bp, Homo sapiens
gctgtatgatgggtt

SEQ ID NO: 1536817 - DNA, 15 bp, Homo sapiens
tgctgtatgatgggt

SEQ ID NO: 1536818 - DNA, 15 bp, Homo sapiens
atgctgtatgatggg

SEQ ID NO: 1536819 - DNA, 15 bp, Homo sapiens
aatgctgtatgatgg

SEQ ID NO: 1536820 - DNA, 15 bp, Homo sapiens
aaatgctgtatgatg

SEQ ID NO: 1536821 - DNA, 15 bp, Homo sapiens
caaatgctgtatgat

SEQ ID NO: 1536822 - DNA, 15 bp, Homo sapiens
ccaaatgctgtatga

SEQ ID NO: 1536823 - DNA, 15 bp, Homo sapiens
tccaaatgctgtatg

SEQ ID NO: 1536824 - DNA, 15 bp, Homo sapiens
gtccaaatgctgtat

SEQ ID NO: 1536825 - DNA, 15 bp, Homo sapiens
ggtccaaatgctgta

SEQ ID NO: 1536826 - DNA, 15 bp, Homo sapiens
aggtccaaatgctgt

SEQ ID NO: 1536827 - DNA, 15 bp, Homo sapiens
gaggtccaaatgctg

SEQ ID NO: 1536828 - DNA, 15 bp, Homo sapiens
tgaggtccaaatgct

SEQ ID NO: 1536829 - DNA, 15 bp, Homo sapiens
atgaggtccaaatgc

SEQ ID NO: 1536830 - DNA, 15 bp, Homo sapiens
tatgaggtccaaatg

SEQ ID NO: 1536831 - DNA, 15 bp, Homo sapiens
ttatgaggtccaaat

SEQ ID NO: 1536832 - DNA, 15 bp, Homo sapiens
cttatgaggtccaaa

SEQ ID NO: 1536833 - DNA, 15 bp, Homo sapiens
gcttatgaggtccaa

SEQ ID NO: 1536834 - DNA, 15 bp, Homo sapiens
tgcttatgaggtcca

SEQ ID NO: 1536835 - DNA, 15 bp, Homo sapiens
ctgcttatgaggtcc

SEQ ID NO: 1536836 - DNA, 15 bp, Homo sapiens
actgcttatgaggtc

SEQ ID NO: 1536837 - DNA, 15 bp, Homo sapiens
cactgcttatgaggt

SEQ ID NO: 1536838 - DNA, 15 bp, Homo sapiens
tcactgcttatgagg

SEQ ID NO: 1536839 - DNA, 15 bp, Homo sapiens
atcactgcttatgag

SEQ ID NO: 1536840 - DNA, 15 bp, Homo sapiens
gatcactgcttatga

SEQ ID NO: 1536841 - DNA, 15 bp, Homo sapiens
agatcactgcttatg

SEQ ID NO: 1536842 - DNA, 15 bp, Homo sapiens
gagatcactgcttat

SEQ ID NO: 1536843 - DNA, 15 bp, Homo sapiens
agagatcactgctta

SEQ ID NO: 1536844 - DNA, 15 bp, Homo sapiens
gagagatcactgctt

SEQ ID NO: 1536845 - DNA, 15 bp, Homo sapiens
agagagatcactgct

SEQ ID NO: 1536846 - DNA, 15 bp, Homo sapiens
aagagagatcactgc

SEQ ID NO: 1536847 - DNA, 15 bp, Homo sapiens
gaagagagatcactg

SEQ ID NO: 1536848 - DNA, 15 bp, Homo sapiens
agaagagagatcact

SEQ ID NO: 1536849 - DNA, 15 bp, Homo sapiens
aagaagagagatcac

SEQ ID NO: 1536850 - DNA, 15 bp, Homo sapiens
aaagaagagagatca

SEQ ID NO: 1536851 - DNA, 15 bp, Homo sapiens
aaaagaagagagatc

SEQ ID NO: 1536852 - DNA, 15 bp, Homo sapiens
taaaagaagagagat

SEQ ID NO: 1536853 - DNA, 15 bp, Homo sapiens
ataaaagaagagaga

SEQ ID NO: 1536854 - DNA, 15 bp, Homo sapiens
aataaaagaagagag

SEQ ID NO: 1536855 - DNA, 15 bp, Homo sapiens
taataaaagaagaga

SEQ ID NO: 1536856 - DNA, 15 bp, Homo sapiens
ttaataaaagaagag

SEQ ID NO: 1536857 - DNA, 15 bp, Homo sapiens
attaataaaagaaga

SEQ ID NO: 1536858 - DNA, 15 bp, Homo sapiens
tattaataaaagaag

SEQ ID NO: 1536859 - DNA, 15 bp, Homo sapiens
gtattaataaaagaa

SEQ ID NO: 1536860 - DNA, 15 bp, Homo sapiens
tgtattaataaaaga

SEQ ID NO: 1536861 - DNA, 15 bp, Homo sapiens
ttgtattaataaaag

SEQ ID NO: 1536862 - DNA, 15 bp, Homo sapiens
cttgtattaataaaa

SEQ ID NO: 1536863 - DNA, 15 bp, Homo sapiens
acttgtattaataaa

SEQ ID NO: 1536864 - DNA, 15 bp, Homo sapiens
aacttgtattaataa

SEQ ID NO: 1536865 - DNA, 15 bp, Homo sapiens
gaacttgtattaata

SEQ ID NO: 1536866 - DNA, 15 bp, Homo sapiens
agaacttgtattaat

SEQ ID NO: 1536867 - DNA, 15 bp, Homo sapiens
cagaacttgtattaa

SEQ ID NO: 1536868 - DNA, 15 bp, Homo sapiens
acagaacttgtatta

SEQ ID NO: 1536869 - DNA, 15 bp, Homo sapiens
tacagaacttgtatt

SEQ ID NO: 1536870 - DNA, 15 bp, Homo sapiens
gtacagaacttgtat

SEQ ID NO: 1536871 - DNA, 15 bp, Homo sapiens
agtacagaacttgta

SEQ ID NO: 1536872 - DNA, 15 bp, Homo sapiens
aagtacagaacttgt

SEQ ID NO: 1536873 - DNA, 15 bp, Homo sapiens
caagtacagaacttg

SEQ ID NO: 1536874 - DNA, 15 bp, Homo sapiens
ccaagtacagaactt

SEQ ID NO: 1536875 - DNA, 15 bp, Homo sapiens
gccaagtacagaact

SEQ ID NO: 1536876 - DNA, 15 bp, Homo sapiens
agccaagtacagaac

SEQ ID NO: 1536877 - DNA, 15 bp, Homo sapiens
gagccaagtacagaa

SEQ ID NO: 1536878 - DNA, 15 bp, Homo sapiens
agagccaagtacaga

SEQ ID NO: 1536879 - DNA, 15 bp, Homo sapiens
cagagccaagtacag

SEQ ID NO: 1536880 - DNA, 15 bp, Homo sapiens
gcagagccaagtaca

SEQ ID NO: 1536881 - DNA, 15 bp, Homo sapiens
agcagagccaagtac

SEQ ID NO: 1536882 - DNA, 15 bp, Homo sapiens
cagcagagccaagta

SEQ ID NO: 1536883 - DNA, 15 bp, Homo sapiens
gcagcagagccaagt

SEQ ID NO: 1536884 - DNA, 15 bp, Homo sapiens
ggcagcagagccaag

SEQ ID NO: 1536885 - DNA, 15 bp, Homo sapiens
gggcagcagagccaa

SEQ ID NO: 1536886 - DNA, 15 bp, Homo sapiens
ggggcagcagagcca

SEQ ID NO: 1536887 - DNA, 15 bp, Homo sapiens
aggggcagcagagcc

SEQ ID NO: 1536888 - DNA, 15 bp, Homo sapiens
gaggggcagcagagc

SEQ ID NO: 1536889 - DNA, 15 bp, Homo sapiens
agaggggcagcagag

SEQ ID NO: 1536890 - DNA, 15 bp, Homo sapiens
tagaggggcagcaga

SEQ ID NO: 1536891 - DNA, 15 bp, Homo sapiens
ctagaggggcagcag

SEQ ID NO: 1536892 - DNA, 15 bp, Homo sapiens
gctagaggggcagca

SEQ ID NO: 1536893 - DNA, 15 bp, Homo sapiens
agctagaggggcagc

SEQ ID NO: 1536894 - DNA, 15 bp, Homo sapiens
aagctagaggggcag

SEQ ID NO: 1536895 - DNA, 15 bp, Homo sapiens
gaagctagaggggca

SEQ ID NO: 1536896 - DNA, 15 bp, Homo sapiens
tgaagctagaggggc

SEQ ID NO: 1536897 - DNA, 15 bp, Homo sapiens
atgaagctagagggg

SEQ ID NO: 1536898 - DNA, 15 bp, Homo sapiens
aatgaagctagaggg

SEQ ID NO: 1536899 - DNA, 15 bp, Homo sapiens
taatgaagctagagg

SEQ ID NO: 1536900 - DNA, 15 bp, Homo sapiens
ataatgaagctagag

SEQ ID NO: 1536901 - DNA, 15 bp, Homo sapiens
tataatgaagctaga

SEQ ID NO: 1536902 - DNA, 15 bp, Homo sapiens
atataatgaagctag

SEQ ID NO: 1536903 - DNA, 15 bp, Homo sapiens
aatataatgaagcta

SEQ ID NO: 1536904 - DNA, 15 bp, Homo sapiens
aaatataatgaagct

SEQ ID NO: 1536905 - DNA, 15 bp, Homo sapiens
gaaatataatgaagc

SEQ ID NO: 1536906 - DNA, 15 bp, Homo sapiens
tgaaatataatgaag

SEQ ID NO: 1536907 - DNA, 15 bp, Homo sapiens
ctgaaatataatgaa

SEQ ID NO: 1536908 - DNA, 15 bp, Homo sapiens
actgaaatataatga

SEQ ID NO: 1536909 - DNA, 15 bp, Homo sapiens
tactgaaatataatg

SEQ ID NO: 1536910 - DNA, 15 bp, Homo sapiens
gtactgaaatataat

SEQ ID NO: 1536911 - DNA, 15 bp, Homo sapiens
agtactgaaatataa

SEQ ID NO: 1536912 - DNA, 15 bp, Homo sapiens
gaagtactgaaatat

SEQ ID NO: 1536913 - DNA, 15 bp, Homo sapiens
tgaagtactgaaata

SEQ ID NO: 1536914 - DNA, 15 bp, Homo sapiens
gtgaagtactgaaat

SEQ ID NO: 1536915 - DNA, 15 bp, Homo sapiens
agtgaagtactgaaa

SEQ ID NO: 1536916 - DNA, 15 bp, Homo sapiens
aagtgaagtactgaa

SEQ ID NO: 1536917 - DNA, 15 bp, Homo sapiens
taagtgaagtactga

SEQ ID NO: 1536918 - DNA, 15 bp, Homo sapiens
ctaagtgaagtactg

SEQ ID NO: 1536919 - DNA, 15 bp, Homo sapiens
actaagtgaagtact

SEQ ID NO: 1536920 - DNA, 15 bp, Homo sapiens
gactaagtgaagtac

SEQ ID NO: 1536921 - DNA, 15 bp, Homo sapiens
tgactaagtgaagta

SEQ ID NO: 1536922 - DNA, 15 bp, Homo sapiens
atgactaagtgaagt

SEQ ID NO: 1536923 - DNA, 15 bp, Homo sapiens
tatgactaagtgaag

SEQ ID NO: 1536924 - DNA, 15 bp, Homo sapiens
gtatgactaagtgaa

SEQ ID NO: 1536925 - DNA, 15 bp, Homo sapiens
agtatgactaagtga

SEQ ID NO: 1536926 - DNA, 15 bp, Homo sapiens
aagtatgactaagtg

SEQ ID NO: 1536927 - DNA, 15 bp, Homo sapiens
gaagtatgactaagt

SEQ ID NO: 1536928 - DNA, 15 bp, Homo sapiens
agaagtatgactaag

SEQ ID NO: 1536929 - DNA, 15 bp, Homo sapiens
gagaagtatgactaa

SEQ ID NO: 1536930 - DNA, 15 bp, Homo sapiens
tgagaagtatgacta

SEQ ID NO: 1536931 - DNA, 15 bp, Homo sapiens
ttgagaagtatgact

SEQ ID NO: 1536932 - DNA, 15 bp, Homo sapiens
tttgagaagtatgac

SEQ ID NO: 1536933 - DNA, 15 bp, Homo sapiens
ttttgagaagtatga

SEQ ID NO: 1536934 - DNA, 15 bp, Homo sapiens
gttttgagaagtatg

SEQ ID NO: 1536935 - DNA, 15 bp, Homo sapiens
cgttttgagaagtat

SEQ ID NO: 1536936 - DNA, 15 bp, Homo sapiens
gcgttttgagaagta

SEQ ID NO: 1536937 - DNA, 15 bp, Homo sapiens
tgcgttttgagaagt

SEQ ID NO: 1536938 - DNA, 15 bp, Homo sapiens
atgcgttttgagaag

SEQ ID NO: 1536939 - DNA, 15 bp, Homo sapiens
tatgcgttttgagaa

SEQ ID NO: 1536940 - DNA, 15 bp, Homo sapiens
ctatgcgttttgaga

SEQ ID NO: 1536941 - DNA, 15 bp, Homo sapiens
cctatgcgttttgag

SEQ ID NO: 1536942 - DNA, 15 bp, Homo sapiens
gcctatgcgttttga

SEQ ID NO: 1536943 - DNA, 15 bp, Homo sapiens
agcctatgcgttttg

SEQ ID NO: 1536944 - DNA, 15 bp, Homo sapiens
gagcctatgcgtttt

SEQ ID NO: 1536945 - DNA, 15 bp, Homo sapiens
agagcctatgcgttt

SEQ ID NO: 1536946 - DNA, 15 bp, Homo sapiens
tagagcctatgcgtt

SEQ ID NO: 1536947 - DNA, 15 bp, Homo sapiens
atagagcctatgcgt

SEQ ID NO: 1536948 - DNA, 15 bp, Homo sapiens
tatagagcctatgcg

SEQ ID NO: 1536949 - DNA, 15 bp, Homo sapiens
atatagagcctatgc

SEQ ID NO: 1536950 - DNA, 15 bp, Homo sapiens
catatagagcctatg

SEQ ID NO: 1536951 - DNA, 15 bp, Homo sapiens
gcatatagagcctat

SEQ ID NO: 1536952 - DNA, 15 bp, Homo sapiens
agcatatagagccta

SEQ ID NO: 1536953 - DNA, 15 bp, Homo sapiens
cagcatatagagcct

SEQ ID NO: 1536954 - DNA, 15 bp, Homo sapiens
ccagcatatagagcc

SEQ ID NO: 1536955 - DNA, 15 bp, Homo sapiens
tccagcatatagagc

SEQ ID NO: 1536956 - DNA, 15 bp, Homo sapiens
atccagcatatagag

SEQ ID NO: 1536957 - DNA, 15 bp, Homo sapiens
gatccagcatataga

SEQ ID NO: 1536958 - DNA, 15 bp, Homo sapiens
ggatccagcatatag

SEQ ID NO: 1536959 - DNA, 15 bp, Homo sapiens
tggatccagcatata

SEQ ID NO: 1536960 - DNA, 15 bp, Homo sapiens
atggatccagcatat

SEQ ID NO: 1536961 - DNA, 15 bp, Homo sapiens
catggatccagcata

SEQ ID NO: 1536962 - DNA, 15 bp, Homo sapiens
acatggatccagcat

SEQ ID NO: 1536963 - DNA, 15 bp, Homo sapiens
cacatggatccagca

SEQ ID NO: 1536964 - DNA, 15 bp, Homo sapiens
acacatggatccagc

SEQ ID NO: 1536965 - DNA, 15 bp, Homo sapiens
aacacatggatccag

SEQ ID NO: 1536966 - DNA, 15 bp, Homo sapiens
gaacacatggatcca

SEQ ID NO: 1536967 - DNA, 15 bp, Homo sapiens
agaacacatggatcc

SEQ ID NO: 1536968 - DNA, 15 bp, Homo sapiens
gagaacacatggatc

SEQ ID NO: 1536969 - DNA, 15 bp, Homo sapiens
agagaacacatggat

SEQ ID NO: 1536970 - DNA, 15 bp, Homo sapiens
tagagaacacatgga

SEQ ID NO: 1536971 - DNA, 15 bp, Homo sapiens
gtagagaacacatgg

SEQ ID NO: 1536972 - DNA, 15 bp, Homo sapiens
ggtagagaacacatg

SEQ ID NO: 1536973 - DNA, 15 bp, Homo sapiens
aggtagagaacacat

SEQ ID NO: 1536974 - DNA, 15 bp, Homo sapiens
aaggtagagaacaca

SEQ ID NO: 1536975 - DNA, 15 bp, Homo sapiens
aaaggtagagaacac

SEQ ID NO: 1536976 - DNA, 15 bp, Homo sapiens
aaaaggtagagaaca

SEQ ID NO: 1536977 - DNA, 15 bp, Homo sapiens
aaaaaggtagagaac

SEQ ID NO: 1536978 - DNA, 15 bp, Homo sapiens
aaaaaaggtagagaa

SEQ ID NO: 1536979 - DNA, 15 bp, Homo sapiens
gaaaaaaggtagaga

SEQ ID NO: 1536980 - DNA, 15 bp, Homo sapiens
tgaaaaaaggtagag

SEQ ID NO: 1536981 - DNA, 15 bp, Homo sapiens
gtgaaaaaaggtaga

SEQ ID NO: 1536982 - DNA, 15 bp, Homo sapiens
ggtgaaaaaaggtag

SEQ ID NO: 1536983 - DNA, 15 bp, Homo sapiens
tggtgaaaaaaggta

SEQ ID NO: 1536984 - DNA, 15 bp, Homo sapiens
atggtgaaaaaaggt

SEQ ID NO: 1536985 - DNA, 15 bp, Homo sapiens
aatggtgaaaaaagg

SEQ ID NO: 1536986 - DNA, 15 bp, Homo sapiens
aaatggtgaaaaaag

SEQ ID NO: 1536987 - DNA, 15 bp, Homo sapiens
aaaatggtgaaaaaa

SEQ ID NO: 1536988 - DNA, 15 bp, Homo sapiens
gaaaatggtgaaaaa

SEQ ID NO: 1536989 - DNA, 15 bp, Homo sapiens
agaaaatggtgaaaa

SEQ ID NO: 1536990 - DNA, 15 bp, Homo sapiens
tagaaaatggtgaaa

SEQ ID NO: 1536991 - DNA, 15 bp, Homo sapiens
gtagaaaatggtgaa

SEQ ID NO: 1536992 - DNA, 15 bp, Homo sapiens
agtagaaaatggtga

SEQ ID NO: 1536993 - DNA, 15 bp, Homo sapiens
tagtagaaaatggtg

SEQ ID NO: 1536994 - DNA, 15 bp, Homo sapiens
ctagtagaaaatggt

SEQ ID NO: 1536995 - DNA, 15 bp, Homo sapiens
tctagtagaaaatgg

SEQ ID NO: 1536996 - DNA, 15 bp, Homo sapiens
ttctagtagaaaatg

SEQ ID NO: 1536997 - DNA, 15 bp, Homo sapiens
tttctagtagaaaat

SEQ ID NO: 1536998 - DNA, 15 bp, Homo sapiens
atttctagtagaaaa

SEQ ID NO: 1536999 - DNA, 15 bp, Homo sapiens
tatttctagtagaaa

SEQ ID NO: 1537000 - DNA, 15 bp, Homo sapiens
atatttctagtagaa

SEQ ID NO: 1537001 - DNA, 15 bp, Homo sapiens
tatatttctagtaga

SEQ ID NO: 1537002 - DNA, 15 bp, Homo sapiens
atatatttctagtag

SEQ ID NO: 1537003 - DNA, 15 bp, Homo sapiens
aatatatttctagta

SEQ ID NO: 1537004 - DNA, 15 bp, Homo sapiens
caatatatttctagt

SEQ ID NO: 1537005 - DNA, 15 bp, Homo sapiens
tcaatatatttctag

SEQ ID NO: 1537006 - DNA, 15 bp, Homo sapiens
atcaatatatttcta

SEQ ID NO: 1537007 - DNA, 15 bp, Homo sapiens
aatcaatatatttct

SEQ ID NO: 1537008 - DNA, 15 bp, Homo sapiens
gaatcaatatatttc

SEQ ID NO: 1537009 - DNA, 15 bp, Homo sapiens
agaatcaatatattt

SEQ ID NO: 1537010 - DNA, 15 bp, Homo sapiens
gagaatcaatatatt

SEQ ID NO: 1537011 - DNA, 15 bp, Homo sapiens
ggagaatcaatatat

SEQ ID NO: 1537012 - DNA, 15 bp, Homo sapiens
aggagaatcaatata

SEQ ID NO: 1537013 - DNA, 15 bp, Homo sapiens
caggagaatcaatat

SEQ ID NO: 1537014 - DNA, 15 bp, Homo sapiens
gcaggagaatcaata

SEQ ID NO: 1537015 - DNA, 15 bp, Homo sapiens
ggcaggagaatcaat

SEQ ID NO: 1537016 - DNA, 15 bp, Homo sapiens
aggcaggagaatcaa

SEQ ID NO: 1537017 - DNA, 15 bp, Homo sapiens
aaggcaggagaatca

SEQ ID NO: 1537018 - DNA, 15 bp, Homo sapiens
caaggcaggagaatc

SEQ ID NO: 1537019 - DNA, 15 bp, Homo sapiens
tcaaggcaggagaat

SEQ ID NO: 1537020 - DNA, 15 bp, Homo sapiens
ttcaaggcaggagaa

SEQ ID NO: 1537021 - DNA, 15 bp, Homo sapiens
cttcaaggcaggaga

SEQ ID NO: 1537022 - DNA, 15 bp, Homo sapiens
tcttcaaggcaggag

SEQ ID NO: 1537023 - DNA, 15 bp, Homo sapiens
ttcttcaaggcagga

SEQ ID NO: 1537024 - DNA, 15 bp, Homo sapiens
gttcttcaaggcagg

SEQ ID NO: 1537025 - DNA, 15 bp, Homo sapiens
tgttcttcaaggcag

SEQ ID NO: 1537026 - DNA, 15 bp, Homo sapiens
gtgttcttcaaggca

SEQ ID NO: 1537027 - DNA, 15 bp, Homo sapiens
ggtgttcttcaaggc

SEQ ID NO: 1537028 - DNA, 15 bp, Homo sapiens
tggtgttcttcaagg

SEQ ID NO: 1537029 - DNA, 15 bp, Homo sapiens
ctggtgttcttcaag

SEQ ID NO: 1537030 - DNA, 15 bp, Homo sapiens
actggtgttcttcaa

SEQ ID NO: 1537031 - DNA, 15 bp, Homo sapiens
cactggtgttcttca

SEQ ID NO: 1537032 - DNA, 15 bp, Homo sapiens
tcactggtgttcttc

SEQ ID NO: 1537033 - DNA, 15 bp, Homo sapiens
atcactggtgttctt

SEQ ID NO: 1537034 - DNA, 15 bp, Homo sapiens
gatcactggtgttct

SEQ ID NO: 1537035 - DNA, 15 bp, Homo sapiens
tgatcactggtgttc

SEQ ID NO: 1537036 - DNA, 15 bp, Homo sapiens
atgatcactggtgtt

SEQ ID NO: 1537037 - DNA, 15 bp, Homo sapiens
gatgatcactggtgt

SEQ ID NO: 1537038 - DNA, 15 bp, Homo sapiens
agatgatcactggtg

SEQ ID NO: 1537039 - DNA, 15 bp, Homo sapiens
cagatgatcactggt

SEQ ID NO: 1537040 - DNA, 15 bp, Homo sapiens
acagatgatcactgg

SEQ ID NO: 1537041 - DNA, 15 bp, Homo sapiens
aacagatgatcactg

SEQ ID NO: 1537042 - DNA, 15 bp, Homo sapiens
taacagatgatcact

SEQ ID NO: 1537043 - DNA, 15 bp, Homo sapiens
gtaacagatgatcac

SEQ ID NO: 1537044 - DNA, 15 bp, Homo sapiens
ggtaacagatgatca

SEQ ID NO: 1537045 - DNA, 15 bp, Homo sapiens
aggtaacagatgatc

SEQ ID NO: 1537046 - DNA, 15 bp, Homo sapiens
taggtaacagatgat

SEQ ID NO: 1537047 - DNA, 15 bp, Homo sapiens
ttaggtaacagatga

SEQ ID NO: 1537048 - DNA, 15 bp, Homo sapiens
attaggtaacagatg

SEQ ID NO: 1537049 - DNA, 15 bp, Homo sapiens
gattaggtaacagat

SEQ ID NO: 1537050 - DNA, 15 bp, Homo sapiens
agattaggtaacaga

SEQ ID NO: 1537051 - DNA, 15 bp, Homo sapiens
tagattaggtaacag

SEQ ID NO: 1537052 - DNA, 15 bp, Homo sapiens
ttagattaggtaaca

SEQ ID NO: 1537053 - DNA, 15 bp, Homo sapiens
attagattaggtaac

SEQ ID NO: 1537054 - DNA, 15 bp, Homo sapiens
aattagattaggtaa

SEQ ID NO: 1537055 - DNA, 15 bp, Homo sapiens
caattagattaggta

SEQ ID NO: 1537056 - DNA, 15 bp, Homo sapiens
acaattagattaggt

SEQ ID NO: 1537057 - DNA, 15 bp, Homo sapiens
aacaattagattagg

SEQ ID NO: 1537058 - DNA, 15 bp, Homo sapiens
gaacaattagattag

SEQ ID NO: 1537059 - DNA, 15 bp, Homo sapiens
agaacaattagatta

SEQ ID NO: 1537060 - DNA, 15 bp, Homo sapiens
aagaacaattagatt

SEQ ID NO: 1537061 - DNA, 15 bp, Homo sapiens
aaagaacaattagat

SEQ ID NO: 1537062 - DNA, 15 bp, Homo sapiens
taaagaacaattaga

SEQ ID NO: 1537063 - DNA, 15 bp, Homo sapiens
ataaagaacaattag

SEQ ID NO: 1537064 - DNA, 15 bp, Homo sapiens
aataaagaacaatta

SEQ ID NO: 1537065 - DNA, 15 bp, Homo sapiens
aaataaagaacaatt

SEQ ID NO: 1537066 - DNA, 15 bp, Homo sapiens
gaaataaagaacaat

SEQ ID NO: 1537067 - DNA, 15 bp, Homo sapiens
agaaataaagaacaa

SEQ ID NO: 1537068 - DNA, 15 bp, Homo sapiens
aagaaataaagaaca

SEQ ID NO: 1537069 - DNA, 15 bp, Homo sapiens
gaagaaataaagaac

SEQ ID NO: 1537070 - DNA, 15 bp, Homo sapiens
agaagaaataaagaa

SEQ ID NO: 1537071 - DNA, 15 bp, Homo sapiens
gagaagaaataaaga

SEQ ID NO: 1537072 - DNA, 15 bp, Homo sapiens
agagaagaaataaag

SEQ ID NO: 1537073 - DNA, 15 bp, Homo sapiens
gagagaagaaataaa

SEQ ID NO: 1537074 - DNA, 15 bp, Homo sapiens
ggagagaagaaataa

SEQ ID NO: 1537075 - DNA, 15 bp, Homo sapiens
gggagagaagaaata

SEQ ID NO: 1537076 - DNA, 15 bp, Homo sapiens
ggggagagaagaaat

SEQ ID NO: 1537077 - DNA, 15 bp, Homo sapiens
gaggggagagaagaa

SEQ ID NO: 1537078 - DNA, 15 bp, Homo sapiens
ggaggggagagaaga

SEQ ID NO: 1537079 - DNA, 15 bp, Homo sapiens
gggaggggagagaag

SEQ ID NO: 1537080 - DNA, 15 bp, Homo sapiens
ggggaggggagagaa

SEQ ID NO: 1537081 - DNA, 15 bp, Homo sapiens
aggggaggggagaga

SEQ ID NO: 1537082 - DNA, 15 bp, Homo sapiens
gaggggaggggagag

SEQ ID NO: 1537083 - DNA, 15 bp, Homo sapiens
aggaggggaggggag

SEQ ID NO: 1537084 - DNA, 15 bp, Homo sapiens
aaggaggggagggga

SEQ ID NO: 1537085 - DNA, 15 bp, Homo sapiens
caaggaggggagggg

SEQ ID NO: 1537086 - DNA, 15 bp, Homo sapiens
tcaaggaggggaggg

SEQ ID NO: 1537087 - DNA, 15 bp, Homo sapiens
gtcaaggaggggagg

SEQ ID NO: 1537088 - DNA, 15 bp, Homo sapiens
ggtcaaggaggggag

SEQ ID NO: 1537089 - DNA, 15 bp, Homo sapiens
tggtcaaggagggga

SEQ ID NO: 1537090 - DNA, 15 bp, Homo sapiens
gtggtcaaggagggg

SEQ ID NO: 1537091 - DNA, 15 bp, Homo sapiens
tgtggtcaaggaggg

SEQ ID NO: 1537092 - DNA, 15 bp, Homo sapiens
atgtggtcaaggagg

SEQ ID NO: 1537093 - DNA, 15 bp, Homo sapiens
aatgtggtcaaggag

SEQ ID NO: 1537094 - DNA, 15 bp, Homo sapiens
taatgtggtcaagga

SEQ ID NO: 1537095 - DNA, 15 bp, Homo sapiens
ctaatgtggtcaagg

SEQ ID NO: 1537096 - DNA, 15 bp, Homo sapiens
tctaatgtggtcaag

SEQ ID NO: 1537097 - DNA, 15 bp, Homo sapiens
gtctaatgtggtcaa

SEQ ID NO: 1537098 - DNA, 15 bp, Homo sapiens
tgtctaatgtggtca

SEQ ID NO: 1537099 - DNA, 15 bp, Homo sapiens
gtgtctaatgtggtc

SEQ ID NO: 1537100 - DNA, 15 bp, Homo sapiens
agtgtctaatgtggt

SEQ ID NO: 1537101 - DNA, 15 bp, Homo sapiens
tagtgtctaatgtgg

SEQ ID NO: 1537102 - DNA, 15 bp, Homo sapiens
gtagtgtctaatgtg

SEQ ID NO: 1537103 - DNA, 15 bp, Homo sapiens
agtagtgtctaatgt

SEQ ID NO: 1537104 - DNA, 15 bp, Homo sapiens
cagtagtgtctaatg

SEQ ID NO: 1537105 - DNA, 15 bp, Homo sapiens
acagtagtgtctaat

SEQ ID NO: 1537106 - DNA, 15 bp, Homo sapiens
aacagtagtgtctaa

SEQ ID NO: 1537107 - DNA, 15 bp, Homo sapiens
gaacagtagtgtcta

SEQ ID NO: 1537108 - DNA, 15 bp, Homo sapiens
ggaacagtagtgtct

SEQ ID NO: 1537109 - DNA, 15 bp, Homo sapiens
aggaacagtagtgtc

SEQ ID NO: 1537110 - DNA, 15 bp, Homo sapiens
aaggaacagtagtgt

SEQ ID NO: 1537111 - DNA, 15 bp, Homo sapiens
gaaggaacagtagtg

SEQ ID NO: 1537112 - DNA, 15 bp, Homo sapiens
tgaaggaacagtagt

SEQ ID NO: 1537113 - DNA, 15 bp, Homo sapiens
gtgaaggaacagtag

SEQ ID NO: 1537114 - DNA, 15 bp, Homo sapiens
agtgaaggaacagta

SEQ ID NO: 1537115 - DNA, 15 bp, Homo sapiens
tagtgaaggaacagt

SEQ ID NO: 1537116 - DNA, 15 bp, Homo sapiens
ttagtgaaggaacag

SEQ ID NO: 1537117 - DNA, 15 bp, Homo sapiens
attagtgaaggaaca

SEQ ID NO: 1537118 - DNA, 15 bp, Homo sapiens
tattagtgaaggaac

SEQ ID NO: 1537119 - DNA, 15 bp, Homo sapiens
atattagtgaaggaa

SEQ ID NO: 1537120 - DNA, 15 bp, Homo sapiens
aatattagtgaagga

SEQ ID NO: 1537121 - DNA, 15 bp, Homo sapiens
gaatattagtgaagg

SEQ ID NO: 1537122 - DNA, 15 bp, Homo sapiens
tgaatattagtgaag

SEQ ID NO: 1537123 - DNA, 15 bp, Homo sapiens
ttgaatattagtgaa

SEQ ID NO: 1537124 - DNA, 15 bp, Homo sapiens
cttgaatattagtga

SEQ ID NO: 1537125 - DNA, 15 bp, Homo sapiens
acttgaatattagtg

SEQ ID NO: 1537126 - DNA, 15 bp, Homo sapiens
tacttgaatattagt

SEQ ID NO: 1537127 - DNA, 15 bp, Homo sapiens
ctacttgaatattag

SEQ ID NO: 1537128 - DNA, 15 bp, Homo sapiens
gctacttgaatatta

SEQ ID NO: 1537129 - DNA, 15 bp, Homo sapiens
agctacttgaatatt

SEQ ID NO: 1537130 - DNA, 15 bp, Homo sapiens
aagctacttgaatat

SEQ ID NO: 1537131 - DNA, 15 bp, Homo sapiens
aaagctacttgaata

SEQ ID NO: 1537132 - DNA, 15 bp, Homo sapiens
aaaagctacttgaat

SEQ ID NO: 1537133 - DNA, 15 bp, Homo sapiens
aaaaagctacttgaa

SEQ ID NO: 1537134 - DNA, 15 bp, Homo sapiens
caaaaagctacttga

SEQ ID NO: 1537135 - DNA, 15 bp, Homo sapiens
acaaaaagctacttg

SEQ ID NO: 1537136 - DNA, 15 bp, Homo sapiens
tacaaaaagctactt

SEQ ID NO: 1537137 - DNA, 15 bp, Homo sapiens
ttacaaaaagctact

SEQ ID NO: 1537138 - DNA, 15 bp, Homo sapiens
attacaaaaagctac

SEQ ID NO: 1537139 - DNA, 15 bp, Homo sapiens
gattacaaaaagcta

SEQ ID NO: 1537140 - DNA, 15 bp, Homo sapiens
tgattacaaaaagct

SEQ ID NO: 1537141 - DNA, 15 bp, Homo sapiens
ctgattacaaaaagc

SEQ ID NO: 1537142 - DNA, 15 bp, Homo sapiens
actgattacaaaaag

SEQ ID NO: 1537143 - DNA, 15 bp, Homo sapiens
gactgattacaaaaa

SEQ ID NO: 1537144 - DNA, 15 bp, Homo sapiens
agactgattacaaaa

SEQ ID NO: 1537145 - DNA, 15 bp, Homo sapiens
aagactgattacaaa

SEQ ID NO: 1537146 - DNA, 15 bp, Homo sapiens
gaagactgattacaa

SEQ ID NO: 1537147 - DNA, 15 bp, Homo sapiens
ggaagactgattaca

SEQ ID NO: 1537148 - DNA, 15 bp, Homo sapiens
aggaagactgattac

SEQ ID NO: 1537149 - DNA, 15 bp, Homo sapiens
aaggaagactgatta

SEQ ID NO: 1537150 - DNA, 15 bp, Homo sapiens
aaaggaagactgatt

SEQ ID NO: 1537151 - DNA, 15 bp, Homo sapiens
gaaaggaagactgat

SEQ ID NO: 1537152 - DNA, 15 bp, Homo sapiens
tgaaaggaagactga

SEQ ID NO: 1537153 - DNA, 15 bp, Homo sapiens
atgaaaggaagactg

SEQ ID NO: 1537154 - DNA, 15 bp, Homo sapiens
catgaaaggaagact

SEQ ID NO: 1537155 - DNA, 15 bp, Homo sapiens
acatgaaaggaagac

SEQ ID NO: 1537156 - DNA, 15 bp, Homo sapiens
aacatgaaaggaaga

SEQ ID NO: 1537157 - DNA, 15 bp, Homo sapiens
taacatgaaaggaag

SEQ ID NO: 1537158 - DNA, 15 bp, Homo sapiens
gtaacatgaaaggaa

SEQ ID NO: 1537159 - DNA, 15 bp, Homo sapiens
agtaacatgaaagga

SEQ ID NO: 1537160 - DNA, 15 bp, Homo sapiens
gagtaacatgaaagg

SEQ ID NO: 1537161 - DNA, 15 bp, Homo sapiens
agagtaacatgaaag

SEQ ID NO: 1537162 - DNA, 15 bp, Homo sapiens
gagagtaacatgaaa

SEQ ID NO: 1537163 - DNA, 15 bp, Homo sapiens
tgagagtaacatgaa

SEQ ID NO: 1537164 - DNA, 15 bp, Homo sapiens
gtgagagtaacatga

SEQ ID NO: 1537165 - DNA, 15 bp, Homo sapiens
agtgagagtaacatg

SEQ ID NO: 1537166 - DNA, 15 bp, Homo sapiens
tagtgagagtaacat

SEQ ID NO: 1537167 - DNA, 15 bp, Homo sapiens
ctagtgagagtaaca

SEQ ID NO: 1537168 - DNA, 15 bp, Homo sapiens
gctagtgagagtaac

SEQ ID NO: 1537169 - DNA, 15 bp, Homo sapiens
agctagtgagagtaa

SEQ ID NO: 1537170 - DNA, 15 bp, Homo sapiens
gagctagtgagagta

SEQ ID NO: 1537171 - DNA, 15 bp, Homo sapiens
agagctagtgagagt

SEQ ID NO: 1537172 - DNA, 15 bp, Homo sapiens
aagagctagtgagag

SEQ ID NO: 1537173 - DNA, 15 bp, Homo sapiens
aaagagctagtgaga

SEQ ID NO: 1537174 - DNA, 15 bp, Homo sapiens
aaaagagctagtgag

SEQ ID NO: 1537175 - DNA, 15 bp, Homo sapiens
aaaaagagctagtga

SEQ ID NO: 1537176 - DNA, 15 bp, Homo sapiens
gaaaaagagctagtg

SEQ ID NO: 1537177 - DNA, 15 bp, Homo sapiens
agaaaaagagctagt

SEQ ID NO: 1537178 - DNA, 15 bp, Homo sapiens
aagaaaaagagctag

SEQ ID NO: 1537179 - DNA, 15 bp, Homo sapiens
gaagaaaaagagcta

SEQ ID NO: 1537180 - DNA, 15 bp, Homo sapiens
agaagaaaaagagct

SEQ ID NO: 1537181 - DNA, 15 bp, Homo sapiens
cagaagaaaaagagc

SEQ ID NO: 1537182 - DNA, 15 bp, Homo sapiens
gcagaagaaaaagag

SEQ ID NO: 1537183 - DNA, 15 bp, Homo sapiens
ggcagaagaaaaaga

SEQ ID NO: 1537184 - DNA, 15 bp, Homo sapiens
aggcagaagaaaaag

SEQ ID NO: 1537185 - DNA, 15 bp, Homo sapiens
gaggcagaagaaaaa

SEQ ID NO: 1537186 - DNA, 15 bp, Homo sapiens
ggaggcagaagaaaa

SEQ ID NO: 1537187 - DNA, 15 bp, Homo sapiens
aggaggcagaagaaa

SEQ ID NO: 1537188 - DNA, 15 bp, Homo sapiens
taggaggcagaagaa

SEQ ID NO: 1537189 - DNA, 15 bp, Homo sapiens
ttaggaggcagaaga

SEQ ID NO: 1537190 - DNA, 15 bp, Homo sapiens
tttaggaggcagaag

SEQ ID NO: 1537191 - DNA, 15 bp, Homo sapiens
atttaggaggcagaa

SEQ ID NO: 1537192 - DNA, 15 bp, Homo sapiens
tatttaggaggcaga

SEQ ID NO: 1537193 - DNA, 15 bp, Homo sapiens
atatttaggaggcag

SEQ ID NO: 1537194 - DNA, 15 bp, Homo sapiens
catatttaggaggca

SEQ ID NO: 1537195 - DNA, 15 bp, Homo sapiens
ccatatttaggaggc

SEQ ID NO: 1537196 - DNA, 15 bp, Homo sapiens
accatatttaggagg

SEQ ID NO: 1537197 - DNA, 15 bp, Homo sapiens
aaccatatttaggag

SEQ ID NO: 1537198 - DNA, 15 bp, Homo sapiens
taaccatatttagga

SEQ ID NO: 1537199 - DNA, 15 bp, Homo sapiens
ttaaccatatttagg

SEQ ID NO: 1537200 - DNA, 15 bp, Homo sapiens
attaaccatatttag

SEQ ID NO: 1537201 - DNA, 15 bp, Homo sapiens
aattaaccatattta

SEQ ID NO: 1537202 - DNA, 15 bp, Homo sapiens
caattaaccatattt

SEQ ID NO: 1537203 - DNA, 15 bp, Homo sapiens
tcaattaaccatatt

SEQ ID NO: 1537204 - DNA, 15 bp, Homo sapiens
atcaattaaccatat

SEQ ID NO: 1537205 - DNA, 15 bp, Homo sapiens
tatcaattaaccata

SEQ ID NO: 1537206 - DNA, 15 bp, Homo sapiens
atatcaattaaccat

SEQ ID NO: 1537207 - DNA, 15 bp, Homo sapiens
aatatcaattaacca

SEQ ID NO: 1537208 - DNA, 15 bp, Homo sapiens
gaatatcaattaacc

SEQ ID NO: 1537209 - DNA, 15 bp, Homo sapiens
agaatatcaattaac

SEQ ID NO: 1537210 - DNA, 15 bp, Homo sapiens
cagaatatcaattaa

SEQ ID NO: 1537211 - DNA, 15 bp, Homo sapiens
acagaatatcaatta

SEQ ID NO: 1537212 - DNA, 15 bp, Homo sapiens
gacagaatatcaatt

SEQ ID NO: 1537213 - DNA, 15 bp, Homo sapiens
ggacagaatatcaat

SEQ ID NO: 1537214 - DNA, 15 bp, Homo sapiens
aggacagaatatcaa

SEQ ID NO: 1537215 - DNA, 15 bp, Homo sapiens
gaggacagaatatca

SEQ ID NO: 1537216 - DNA, 15 bp, Homo sapiens
tgaggacagaatatc

SEQ ID NO: 1537217 - DNA, 15 bp, Homo sapiens
gtgaggacagaatat

SEQ ID NO: 1537218 - DNA, 15 bp, Homo sapiens
ggtgaggacagaata

SEQ ID NO: 1537219 - DNA, 15 bp, Homo sapiens
gggtgaggacagaat

SEQ ID NO: 1537220 - DNA, 15 bp, Homo sapiens
agggtgaggacagaa

SEQ ID NO: 1537221 - DNA, 15 bp, Homo sapiens
aagggtgaggacaga

SEQ ID NO: 1537222 - DNA, 15 bp, Homo sapiens
taagggtgaggacag

SEQ ID NO: 1537223 - DNA, 15 bp, Homo sapiens
gtaagggtgaggaca

SEQ ID NO: 1537224 - DNA, 15 bp, Homo sapiens
ggtaagggtgaggac

SEQ ID NO: 1537225 - DNA, 15 bp, Homo sapiens
aggtaagggtgagga

SEQ ID NO: 1537226 - DNA, 15 bp, Homo sapiens
taggtaagggtgagg

SEQ ID NO: 1537227 - DNA, 15 bp, Homo sapiens
gtaggtaagggtgag

SEQ ID NO: 1537228 - DNA, 15 bp, Homo sapiens
agtaggtaagggtga

SEQ ID NO: 1537229 - DNA, 15 bp, Homo sapiens
aagtaggtaagggtg

SEQ ID NO: 1537230 - DNA, 15 bp, Homo sapiens
aaagtaggtaagggt

SEQ ID NO: 1537231 - DNA, 15 bp, Homo sapiens
aaaagtaggtaaggg

SEQ ID NO: 1537232 - DNA, 15 bp, Homo sapiens
gaaaagtaggtaagg

SEQ ID NO: 1537233 - DNA, 15 bp, Homo sapiens
agaaaagtaggtaag

SEQ ID NO: 1537234 - DNA, 15 bp, Homo sapiens
aagaaaagtaggtaa

SEQ ID NO: 1537235 - DNA, 15 bp, Homo sapiens
aaagaaaagtaggta

SEQ ID NO: 1537236 - DNA, 15 bp, Homo sapiens
caaagaaaagtaggt

SEQ ID NO: 1537237 - DNA, 15 bp, Homo sapiens
acaaagaaaagtagg

SEQ ID NO: 1537238 - DNA, 15 bp, Homo sapiens
aacaaagaaaagtag

SEQ ID NO: 1537239 - DNA, 15 bp, Homo sapiens
gaacaaagaaaagta

SEQ ID NO: 1537240 - DNA, 15 bp, Homo sapiens
ggaacaaagaaaagt

SEQ ID NO: 1537241 - DNA, 15 bp, Homo sapiens
aggaacaaagaaaag

SEQ ID NO: 1537242 - DNA, 15 bp, Homo sapiens
caggaacaaagaaaa

SEQ ID NO: 1537243 - DNA, 15 bp, Homo sapiens
tcaggaacaaagaaa

SEQ ID NO: 1537244 - DNA, 15 bp, Homo sapiens
atcaggaacaaagaa

SEQ ID NO: 1537245 - DNA, 15 bp, Homo sapiens
aatcaggaacaaaga

SEQ ID NO: 1537246 - DNA, 15 bp, Homo sapiens
gaatcaggaacaaag

SEQ ID NO: 1537247 - DNA, 15 bp, Homo sapiens
agaatcaggaacaaa

SEQ ID NO: 1537248 - DNA, 15 bp, Homo sapiens
cagaatcaggaacaa

SEQ ID NO: 1537249 - DNA, 15 bp, Homo sapiens
acagaatcaggaaca

SEQ ID NO: 1537250 - DNA, 15 bp, Homo sapiens
tacagaatcaggaac

SEQ ID NO: 1537251 - DNA, 15 bp, Homo sapiens
ttacagaatcaggaa

SEQ ID NO: 1537252 - DNA, 15 bp, Homo sapiens
cttacagaatcagga

SEQ ID NO: 1537253 - DNA, 15 bp, Homo sapiens
tcttacagaatcagg

SEQ ID NO: 1537254 - DNA, 15 bp, Homo sapiens
atcttacagaatcag

SEQ ID NO: 1537255 - DNA, 15 bp, Homo sapiens
aatcttacagaatca

SEQ ID NO: 1537256 - DNA, 15 bp, Homo sapiens
aaatcttacagaatc

SEQ ID NO: 1537257 - DNA, 15 bp, Homo sapiens
aaaatcttacagaat

SEQ ID NO: 1537258 - DNA, 15 bp, Homo sapiens
taaaatcttacagaa

SEQ ID NO: 1537259 - DNA, 15 bp, Homo sapiens
ctaaaatcttacaga

SEQ ID NO: 1537260 - DNA, 15 bp, Homo sapiens
actaaaatcttacag

SEQ ID NO: 1537261 - DNA, 15 bp, Homo sapiens
aactaaaatcttaca

SEQ ID NO: 1537262 - DNA, 15 bp, Homo sapiens
gaactaaaatcttac

SEQ ID NO: 1537263 - DNA, 15 bp, Homo sapiens
agaactaaaatctta

SEQ ID NO: 1537264 - DNA, 15 bp, Homo sapiens
gagaactaaaatctt

SEQ ID NO: 1537265 - DNA, 15 bp, Homo sapiens
tgagaactaaaatct

SEQ ID NO: 1537266 - DNA, 15 bp, Homo sapiens
ctgagaactaaaatc

SEQ ID NO: 1537267 - DNA, 15 bp, Homo sapiens
gctgagaactaaaat

SEQ ID NO: 1537268 - DNA, 15 bp, Homo sapiens
agctgagaactaaaa

SEQ ID NO: 1537269 - DNA, 15 bp, Homo sapiens
aagctgagaactaaa

SEQ ID NO: 1537270 - DNA, 15 bp, Homo sapiens
aaagctgagaactaa

SEQ ID NO: 1537271 - DNA, 15 bp, Homo sapiens
taaagctgagaacta

SEQ ID NO: 1537272 - DNA, 15 bp, Homo sapiens
ataaagctgagaact

SEQ ID NO: 1537273 - DNA, 15 bp, Homo sapiens
cataaagctgagaac

SEQ ID NO: 1537274 - DNA, 15 bp, Homo sapiens
gcataaagctgagaa

SEQ ID NO: 1537275 - DNA, 15 bp, Homo sapiens
ggcataaagctgaga

SEQ ID NO: 1537276 - DNA, 15 bp, Homo sapiens
tggcataaagctgag

SEQ ID NO: 1537277 - DNA, 15 bp, Homo sapiens
gtggcataaagctga

SEQ ID NO: 1537278 - DNA, 15 bp, Homo sapiens
tgtggcataaagctg

SEQ ID NO: 1537279 - DNA, 15 bp, Homo sapiens
ttgtggcataaagct

SEQ ID NO: 1537280 - DNA, 15 bp, Homo sapiens
attgtggcataaagc

SEQ ID NO: 1537281 - DNA, 15 bp, Homo sapiens
aattgtggcataaag

SEQ ID NO: 1537282 - DNA, 15 bp, Homo sapiens
gaattgtggcataaa

SEQ ID NO: 1537283 - DNA, 15 bp, Homo sapiens
ggaattgtggcataa

SEQ ID NO: 1537284 - DNA, 15 bp, Homo sapiens
aggaattgtggcata

SEQ ID NO: 1537285 - DNA, 15 bp, Homo sapiens
taggaattgtggcat

SEQ ID NO: 1537286 - DNA, 15 bp, Homo sapiens
ttaggaattgtggca

SEQ ID NO: 1537287 - DNA, 15 bp, Homo sapiens
tttaggaattgtggc

SEQ ID NO: 1537288 - DNA, 15 bp, Homo sapiens
gtttaggaattgtgg

SEQ ID NO: 1537289 - DNA, 15 bp, Homo sapiens
ggtttaggaattgtg

SEQ ID NO: 1537290 - DNA, 15 bp, Homo sapiens
aggtttaggaattgt

SEQ ID NO: 1537291 - DNA, 15 bp, Homo sapiens
caggtttaggaattg

SEQ ID NO: 1537292 - DNA, 15 bp, Homo sapiens
acaggtttaggaatt

SEQ ID NO: 1537293 - DNA, 15 bp, Homo sapiens
tacaggtttaggaat

SEQ ID NO: 1537294 - DNA, 15 bp, Homo sapiens
gtacaggtttaggaa

SEQ ID NO: 1537295 - DNA, 15 bp, Homo sapiens
ggtacaggtttagga

SEQ ID NO: 1537296 - DNA, 15 bp, Homo sapiens
aggtacaggtttagg

SEQ ID NO: 1537297 - DNA, 15 bp, Homo sapiens
gaggtacaggtttag

SEQ ID NO: 1537298 - DNA, 15 bp, Homo sapiens
ggaggtacaggttta

SEQ ID NO: 1537299 - DNA, 15 bp, Homo sapiens
tggaggtacaggttt

SEQ ID NO: 1537300 - DNA, 15 bp, Homo sapiens
ctggaggtacaggtt

SEQ ID NO: 1537301 - DNA, 15 bp, Homo sapiens
gctggaggtacaggt

SEQ ID NO: 1537302 - DNA, 15 bp, Homo sapiens
ggctggaggtacagg

SEQ ID NO: 1537303 - DNA, 15 bp, Homo sapiens
aggctggaggtacag

SEQ ID NO: 1537304 - DNA, 15 bp, Homo sapiens
taggctggaggtaca

SEQ ID NO: 1537305 - DNA, 15 bp, Homo sapiens
gtaggctggaggtac

SEQ ID NO: 1537306 - DNA, 15 bp, Homo sapiens
tgtaggctggaggta

SEQ ID NO: 1537307 - DNA, 15 bp, Homo sapiens
atgtaggctggaggt

SEQ ID NO: 1537308 - DNA, 15 bp, Homo sapiens
gatgtaggctggagg

SEQ ID NO: 1537309 - DNA, 15 bp, Homo sapiens
agatgtaggctggag

SEQ ID NO: 1537310 - DNA, 15 bp, Homo sapiens
aagatgtaggctgga

SEQ ID NO: 1537311 - DNA, 15 bp, Homo sapiens
gaagatgtaggctgg

SEQ ID NO: 1537312 - DNA, 15 bp, Homo sapiens
agaagatgtaggctg

SEQ ID NO: 1537313 - DNA, 15 bp, Homo sapiens
aagaagatgtaggct

SEQ ID NO: 1537314 - DNA, 15 bp, Homo sapiens
aaagaagatgtaggc

SEQ ID NO: 1537315 - DNA, 15 bp, Homo sapiens
caaagaagatgtagg

SEQ ID NO: 1537316 - DNA, 15 bp, Homo sapiens
acaaagaagatgtag

SEQ ID NO: 1537317 - DNA, 15 bp, Homo sapiens
gacaaagaagatgta

SEQ ID NO: 1537318 - DNA, 15 bp, Homo sapiens
ggacaaagaagatgt

SEQ ID NO: 1537319 - DNA, 15 bp, Homo sapiens
aggacaaagaagatg

SEQ ID NO: 1537320 - DNA, 15 bp, Homo sapiens
taggacaaagaagat

SEQ ID NO: 1537321 - DNA, 15 bp, Homo sapiens
ttaggacaaagaaga

SEQ ID NO: 1537322 - DNA, 15 bp, Homo sapiens
attaggacaaagaag

SEQ ID NO: 1537323 - DNA, 15 bp, Homo sapiens
aattaggacaaagaa

SEQ ID NO: 1537324 - DNA, 15 bp, Homo sapiens
gaattaggacaaaga

SEQ ID NO: 1537325 - DNA, 15 bp, Homo sapiens
agaattaggacaaag

SEQ ID NO: 1537326 - DNA, 15 bp, Homo sapiens
tagaattaggacaaa

SEQ ID NO: 1537327 - DNA, 15 bp, Homo sapiens
atagaattaggacaa

SEQ ID NO: 1537328 - DNA, 15 bp, Homo sapiens
aatagaattaggaca

SEQ ID NO: 1537329 - DNA, 15 bp, Homo sapiens
aaatagaattaggac

SEQ ID NO: 1537330 - DNA, 15 bp, Homo sapiens
caaatagaattagga

SEQ ID NO: 1537331 - DNA, 15 bp, Homo sapiens
acaaatagaattagg

SEQ ID NO: 1537332 - DNA, 15 bp, Homo sapiens
cacaaatagaattag

SEQ ID NO: 1537333 - DNA, 15 bp, Homo sapiens
acacaaatagaatta

SEQ ID NO: 1537334 - DNA, 15 bp, Homo sapiens
cacacaaatagaatt

SEQ ID NO: 1537335 - DNA, 15 bp, Homo sapiens
tcacacaaatagaat

SEQ ID NO: 1537336 - DNA, 15 bp, Homo sapiens
gtcacacaaatagaa

SEQ ID NO: 1537337 - DNA, 15 bp, Homo sapiens
agtcacacaaataga

SEQ ID NO: 1537338 - DNA, 15 bp, Homo sapiens
aagtcacacaaatag

SEQ ID NO: 1537339 - DNA, 15 bp, Homo sapiens
gaagtcacacaaata

SEQ ID NO: 1537340 - DNA, 15 bp, Homo sapiens
agaagtcacacaaat

SEQ ID NO: 1537341 - DNA, 15 bp, Homo sapiens
aagaagtcacacaaa

SEQ ID NO: 1537342 - DNA, 15 bp, Homo sapiens
caagaagtcacacaa

SEQ ID NO: 1537343 - DNA, 15 bp, Homo sapiens
ccaagaagtcacaca

SEQ ID NO: 1537344 - DNA, 15 bp, Homo sapiens
accaagaagtcacac

SEQ ID NO: 1537345 - DNA, 15 bp, Homo sapiens
caccaagaagtcaca

SEQ ID NO: 1537346 - DNA, 15 bp, Homo sapiens
ccaccaagaagtcac

SEQ ID NO: 1537347 - DNA, 15 bp, Homo sapiens
tccaccaagaagtca

SEQ ID NO: 1537348 - DNA, 15 bp, Homo sapiens
atccaccaagaagtc

SEQ ID NO: 1537349 - DNA, 15 bp, Homo sapiens
aatccaccaagaagt

SEQ ID NO: 1537350 - DNA, 15 bp, Homo sapiens
aaatccaccaagaag

SEQ ID NO: 1537351 - DNA, 15 bp, Homo sapiens
aaaatccaccaagaa

SEQ ID NO: 1537352 - DNA, 15 bp, Homo sapiens
aaaaatccaccaaga

SEQ ID NO: 1537353 - DNA, 15 bp, Homo sapiens
gaaaaatccaccaag

SEQ ID NO: 1537354 - DNA, 15 bp, Homo sapiens
ggaaaaatccaccaa

SEQ ID NO: 1537355 - DNA, 15 bp, Homo sapiens
tggaaaaatccacca

SEQ ID NO: 1537356 - DNA, 15 bp, Homo sapiens
atggaaaaatccacc

SEQ ID NO: 1537357 - DNA, 15 bp, Homo sapiens
tatggaaaaatccac

SEQ ID NO: 1537358 - DNA, 15 bp, Homo sapiens
atatggaaaaatcca

SEQ ID NO: 1537359 - DNA, 15 bp, Homo sapiens
aatatggaaaaatcc

SEQ ID NO: 1537360 - DNA, 15 bp, Homo sapiens
aaatatggaaaaatc

SEQ ID NO: 1537361 - DNA, 15 bp, Homo sapiens
aaaatatggaaaaat

SEQ ID NO: 1537362 - DNA, 15 bp, Homo sapiens
taaaatatggaaaaa

SEQ ID NO: 1537363 - DNA, 15 bp, Homo sapiens
ataaaatatggaaaa

SEQ ID NO: 1537364 - DNA, 15 bp, Homo sapiens
tataaaatatggaaa

SEQ ID NO: 1537365 - DNA, 15 bp, Homo sapiens
atataaaatatggaa

SEQ ID NO: 1537366 - DNA, 15 bp, Homo sapiens
tatataaaatatgga

SEQ ID NO: 1537367 - DNA, 15 bp, Homo sapiens
atatataaaatatgg

SEQ ID NO: 1537368 - DNA, 15 bp, Homo sapiens
tatatataaaatatg

SEQ ID NO: 1537369 - DNA, 15 bp, Homo sapiens
ctatatatataaaat

SEQ ID NO: 1537370 - DNA, 15 bp, Homo sapiens
tctatatatataaaa

SEQ ID NO: 1537371 - DNA, 15 bp, Homo sapiens
atctatatatataaa

SEQ ID NO: 1537372 - DNA, 15 bp, Homo sapiens
tatctatatatataa

SEQ ID NO: 1537373 - DNA, 15 bp, Homo sapiens
ctatctatatatata

SEQ ID NO: 1537374 - DNA, 15 bp, Homo sapiens
tctatctatatatat

SEQ ID NO: 1537375 - DNA, 15 bp, Homo sapiens
atctatctatatata

SEQ ID NO: 1537376 - DNA, 15 bp, Homo sapiens
tatctatctatatat

SEQ ID NO: 1537377 - DNA, 15 bp, Homo sapiens
ctatctatctatata

SEQ ID NO: 1537378 - DNA, 15 bp, Homo sapiens
tctatctatctatat

SEQ ID NO: 1537379 - DNA, 15 bp, Homo sapiens
gtctatctatctata

SEQ ID NO: 1537380 - DNA, 15 bp, Homo sapiens
tgtctatctatctat

SEQ ID NO: 1537381 - DNA, 15 bp, Homo sapiens
atgtctatctatcta

SEQ ID NO: 1537382 - DNA, 15 bp, Homo sapiens
tatgtctatctatct

SEQ ID NO: 1537383 - DNA, 15 bp, Homo sapiens
ctatgtctatctatc

SEQ ID NO: 1537384 - DNA, 15 bp, Homo sapiens
tctatgtctatctat

SEQ ID NO: 1537385 - DNA, 15 bp, Homo sapiens
atctatgtctatcta

SEQ ID NO: 1537386 - DNA, 15 bp, Homo sapiens
tatctatgtctatct

SEQ ID NO: 1537387 - DNA, 15 bp, Homo sapiens
atatctatgtctatc

SEQ ID NO: 1537388 - DNA, 15 bp, Homo sapiens
tatatctatgtctat

SEQ ID NO: 1537389 - DNA, 15 bp, Homo sapiens
ctatatctatgtcta

SEQ ID NO: 1537390 - DNA, 15 bp, Homo sapiens
tctatatctatgtct

SEQ ID NO: 1537391 - DNA, 15 bp, Homo sapiens
atctatatctatgtc

SEQ ID NO: 1537392 - DNA, 15 bp, Homo sapiens
tatctatatctatgt

SEQ ID NO: 1537393 - DNA, 15 bp, Homo sapiens
atatctatatctatg

SEQ ID NO: 1537394 - DNA, 15 bp, Homo sapiens
tatatctatatctat

SEQ ID NO: 1537395 - DNA, 15 bp, Homo sapiens
ttatatctatatcta

SEQ ID NO: 1537396 - DNA, 15 bp, Homo sapiens
tttatatctatatct

SEQ ID NO: 1537397 - DNA, 15 bp, Homo sapiens
atttatatctatatc

SEQ ID NO: 1537398 - DNA, 15 bp, Homo sapiens
tatttatatctatat

SEQ ID NO: 1537399 - DNA, 15 bp, Homo sapiens
atatttatatctata

SEQ ID NO: 1537400 - DNA, 15 bp, Homo sapiens
gatatttatatctat

SEQ ID NO: 1537401 - DNA, 15 bp, Homo sapiens
agatatttatatcta

SEQ ID NO: 1537402 - DNA, 15 bp, Homo sapiens
gagatatttatatct

SEQ ID NO: 1537403 - DNA, 15 bp, Homo sapiens
ggagatatttatatc

SEQ ID NO: 1537404 - DNA, 15 bp, Homo sapiens
gggagatatttatat

SEQ ID NO: 1537405 - DNA, 15 bp, Homo sapiens
tgggagatatttata

SEQ ID NO: 1537406 - DNA, 15 bp, Homo sapiens
gtgggagatatttat

SEQ ID NO: 1537407 - DNA, 15 bp, Homo sapiens
agtgggagatattta

SEQ ID NO: 1537408 - DNA, 15 bp, Homo sapiens
tagtgggagatattt

SEQ ID NO: 1537409 - DNA, 15 bp, Homo sapiens
atagtgggagatatt

SEQ ID NO: 1537410 - DNA, 15 bp, Homo sapiens
gatagtgggagatat

SEQ ID NO: 1537411 - DNA, 15 bp, Homo sapiens
tgatagtgggagata

SEQ ID NO: 1537412 - DNA, 15 bp, Homo sapiens
ctgatagtgggagat

SEQ ID NO: 1537413 - DNA, 15 bp, Homo sapiens
gctgatagtgggaga

SEQ ID NO: 1537414 - DNA, 15 bp, Homo sapiens
tgctgatagtgggag

SEQ ID NO: 1537415 - DNA, 15 bp, Homo sapiens
ttgctgatagtggga

SEQ ID NO: 1537416 - DNA, 15 bp, Homo sapiens
tttgctgatagtggg

SEQ ID NO: 1537417 - DNA, 15 bp, Homo sapiens
atttgctgatagtgg

SEQ ID NO: 1537418 - DNA, 15 bp, Homo sapiens
aatttgctgatagtg

SEQ ID NO: 1537419 - DNA, 15 bp, Homo sapiens
gaatttgctgatagt

SEQ ID NO: 1537420 - DNA, 15 bp, Homo sapiens
tgaatttgctgatag

SEQ ID NO: 1537421 - DNA, 15 bp, Homo sapiens
ttgaatttgctgata

SEQ ID NO: 1537422 - DNA, 15 bp, Homo sapiens
gttgaatttgctgat

SEQ ID NO: 1537423 - DNA, 15 bp, Homo sapiens
tgttgaatttgctga

SEQ ID NO: 1537424 - DNA, 15 bp, Homo sapiens
atgttgaatttgctg

SEQ ID NO: 1537425 - DNA, 15 bp, Homo sapiens
tatgttgaatttgct

SEQ ID NO: 1537426 - DNA, 15 bp, Homo sapiens
atatgttgaatttgc

SEQ ID NO: 1537427 - DNA, 15 bp, Homo sapiens
aatatgttgaatttg

SEQ ID NO: 1537428 - DNA, 15 bp, Homo sapiens
aaatatgttgaattt

SEQ ID NO: 1537429 - DNA, 15 bp, Homo sapiens
taaatatgttgaatt

SEQ ID NO: 1537430 - DNA, 15 bp, Homo sapiens
ttaaatatgttgaat

SEQ ID NO: 1537431 - DNA, 15 bp, Homo sapiens
tttaaatatgttgaa

SEQ ID NO: 1537432 - DNA, 15 bp, Homo sapiens
ttttaaatatgttga

SEQ ID NO: 1537433 - DNA, 15 bp, Homo sapiens
attttaaatatgttg

SEQ ID NO: 1537434 - DNA, 15 bp, Homo sapiens
cattttaaatatgtt

SEQ ID NO: 1537435 - DNA, 15 bp, Homo sapiens
ccattttaaatatgt

SEQ ID NO: 1537436 - DNA, 15 bp, Homo sapiens
tccattttaaatatg

SEQ ID NO: 1537437 - DNA, 15 bp, Homo sapiens
ctccattttaaatat

SEQ ID NO: 1537438 - DNA, 15 bp, Homo sapiens
actccattttaaata

SEQ ID NO: 1537439 - DNA, 15 bp, Homo sapiens
aactccattttaaat

SEQ ID NO: 1537440 - DNA, 15 bp, Homo sapiens
gaactccattttaaa

SEQ ID NO: 1537441 - DNA, 15 bp, Homo sapiens
tgaactccattttaa

SEQ ID NO: 1537442 - DNA, 15 bp, Homo sapiens
atgaactccatttta

SEQ ID NO: 1537443 - DNA, 15 bp, Homo sapiens
gatgaactccatttt

SEQ ID NO: 1537444 - DNA, 15 bp, Homo sapiens
agatgaactccattt

SEQ ID NO: 1537445 - DNA, 15 bp, Homo sapiens
aagatgaactccatt

SEQ ID NO: 1537446 - DNA, 15 bp, Homo sapiens
aaagatgaactccat

SEQ ID NO: 1537447 - DNA, 15 bp, Homo sapiens
taaagatgaactcca

SEQ ID NO: 1537448 - DNA, 15 bp, Homo sapiens
gtaaagatgaactcc

SEQ ID NO: 1537449 - DNA, 15 bp, Homo sapiens
ggtaaagatgaactc

SEQ ID NO: 1537450 - DNA, 15 bp, Homo sapiens
gggtaaagatgaact

SEQ ID NO: 1537451 - DNA, 15 bp, Homo sapiens
agggtaaagatgaac

SEQ ID NO: 1537452 - DNA, 15 bp, Homo sapiens
gagggtaaagatgaa

SEQ ID NO: 1537453 - DNA, 15 bp, Homo sapiens
tgagggtaaagatga

SEQ ID NO: 1537454 - DNA, 15 bp, Homo sapiens
gtgagggtaaagatg

SEQ ID NO: 1537455 - DNA, 15 bp, Homo sapiens
tgtgagggtaaagat

SEQ ID NO: 1537456 - DNA, 15 bp, Homo sapiens
ttgtgagggtaaaga

SEQ ID NO: 1537457 - DNA, 15 bp, Homo sapiens
gttgtgagggtaaag

SEQ ID NO: 1537458 - DNA, 15 bp, Homo sapiens
agttgtgagggtaaa

SEQ ID NO: 1537459 - DNA, 15 bp, Homo sapiens
cagttgtgagggtaa

SEQ ID NO: 1537460 - DNA, 15 bp, Homo sapiens
tcagttgtgagggta

SEQ ID NO: 1537461 - DNA, 15 bp, Homo sapiens
gtcagttgtgagggt

SEQ ID NO: 1537462 - DNA, 15 bp, Homo sapiens
tgtcagttgtgaggg

SEQ ID NO: 1537463 - DNA, 15 bp, Homo sapiens
ttgtcagttgtgagg

SEQ ID NO: 1537464 - DNA, 15 bp, Homo sapiens
gttgtcagttgtgag

SEQ ID NO: 1537465 - DNA, 15 bp, Homo sapiens
agttgtcagttgtga

SEQ ID NO: 1537466 - DNA, 15 bp, Homo sapiens
cagttgtcagttgtg

SEQ ID NO: 1537467 - DNA, 15 bp, Homo sapiens
tcagttgtcagttgt

SEQ ID NO: 1537468 - DNA, 15 bp, Homo sapiens
gtcagttgtcagttg

SEQ ID NO: 1537469 - DNA, 15 bp, Homo sapiens
agtcagttgtcagtt

SEQ ID NO: 1537470 - DNA, 15 bp, Homo sapiens
gagtcagttgtcagt

SEQ ID NO: 1537471 - DNA, 15 bp, Homo sapiens
agagtcagttgtcag

SEQ ID NO: 1537472 - DNA, 15 bp, Homo sapiens
aagagtcagttgtca

SEQ ID NO: 1537473 - DNA, 15 bp, Homo sapiens
gaagagtcagttgtc

SEQ ID NO: 1537474 - DNA, 15 bp, Homo sapiens
agaagagtcagttgt

SEQ ID NO: 1537475 - DNA, 15 bp, Homo sapiens
gagaagagtcagttg

SEQ ID NO: 1537476 - DNA, 15 bp, Homo sapiens
ggagaagagtcagtt

SEQ ID NO: 1537477 - DNA, 15 bp, Homo sapiens
gggagaagagtcagt

SEQ ID NO: 1537478 - DNA, 15 bp, Homo sapiens
tgggagaagagtcag

SEQ ID NO: 1537479 - DNA, 15 bp, Homo sapiens
ttgggagaagagtca

SEQ ID NO: 1537480 - DNA, 15 bp, Homo sapiens
gttgggagaagagtc

SEQ ID NO: 1537481 - DNA, 15 bp, Homo sapiens
agttgggagaagagt

SEQ ID NO: 1537482 - DNA, 15 bp, Homo sapiens
aagttgggagaagag

SEQ ID NO: 1537483 - DNA, 15 bp, Homo sapiens
gaagttgggagaaga

SEQ ID NO: 1537484 - DNA, 15 bp, Homo sapiens
agaagttgggagaag

SEQ ID NO: 1537485 - DNA, 15 bp, Homo sapiens
gagaagttgggagaa

SEQ ID NO: 1537486 - DNA, 15 bp, Homo sapiens
agagaagttgggaga

SEQ ID NO: 1537487 - DNA, 15 bp, Homo sapiens
cagagaagttgggag

SEQ ID NO: 1537488 - DNA, 15 bp, Homo sapiens
acagagaagttggga

SEQ ID NO: 1537489 - DNA, 15 bp, Homo sapiens
tacagagaagttggg

SEQ ID NO: 1537490 - DNA, 15 bp, Homo sapiens
atacagagaagttgg

SEQ ID NO: 1537491 - DNA, 15 bp, Homo sapiens
gatacagagaagttg

SEQ ID NO: 1537492 - DNA, 15 bp, Homo sapiens
agatacagagaagtt

SEQ ID NO: 1537493 - DNA, 15 bp, Homo sapiens
cagatacagagaagt

SEQ ID NO: 1537494 - DNA, 15 bp, Homo sapiens
acagatacagagaag

SEQ ID NO: 1537495 - DNA, 15 bp, Homo sapiens
aacagatacagagaa

SEQ ID NO: 1537496 - DNA, 15 bp, Homo sapiens
taacagatacagaga

SEQ ID NO: 1537497 - DNA, 15 bp, Homo sapiens
ttaacagatacagag

SEQ ID NO: 1537498 - DNA, 15 bp, Homo sapiens
attaacagatacaga

SEQ ID NO: 1537499 - DNA, 15 bp, Homo sapiens
cattaacagatacag

SEQ ID NO: 1537500 - DNA, 15 bp, Homo sapiens
ccattaacagataca

SEQ ID NO: 1537501 - DNA, 15 bp, Homo sapiens
accattaacagatac

SEQ ID NO: 1537502 - DNA, 15 bp, Homo sapiens
taccattaacagata

SEQ ID NO: 1537503 - DNA, 15 bp, Homo sapiens
gtaccattaacagat

SEQ ID NO: 1537504 - DNA, 15 bp, Homo sapiens
ggtaccattaacaga

SEQ ID NO: 1537505 - DNA, 15 bp, Homo sapiens
tggtaccattaacag

SEQ ID NO: 1537506 - DNA, 15 bp, Homo sapiens
gtggtaccattaaca

SEQ ID NO: 1537507 - DNA, 15 bp, Homo sapiens
agtggtaccattaac

SEQ ID NO: 1537508 - DNA, 15 bp, Homo sapiens
tagtggtaccattaa

SEQ ID NO: 1537509 - DNA, 15 bp, Homo sapiens
ttagtggtaccatta

SEQ ID NO: 1537510 - DNA, 15 bp, Homo sapiens
cttagtggtaccatt

SEQ ID NO: 1537511 - DNA, 15 bp, Homo sapiens
acttagtggtaccat

SEQ ID NO: 1537512 - DNA, 15 bp, Homo sapiens
aacttagtggtacca

SEQ ID NO: 1537513 - DNA, 15 bp, Homo sapiens
aaacttagtggtacc

SEQ ID NO: 1537514 - DNA, 15 bp, Homo sapiens
gaaacttagtggtac

SEQ ID NO: 1537515 - DNA, 15 bp, Homo sapiens
agaaacttagtggta

SEQ ID NO: 1537516 - DNA, 15 bp, Homo sapiens
aagaaacttagtggt

SEQ ID NO: 1537517 - DNA, 15 bp, Homo sapiens
taagaaacttagtgg

SEQ ID NO: 1537518 - DNA, 15 bp, Homo sapiens
ctaagaaacttagtg

SEQ ID NO: 1537519 - DNA, 15 bp, Homo sapiens
cctaagaaacttagt

SEQ ID NO: 1537520 - DNA, 15 bp, Homo sapiens
gcctaagaaacttag

SEQ ID NO: 1537521 - DNA, 15 bp, Homo sapiens
tgcctaagaaactta

SEQ ID NO: 1537522 - DNA, 15 bp, Homo sapiens
gtgcctaagaaactt

SEQ ID NO: 1537523 - DNA, 15 bp, Homo sapiens
tgtgcctaagaaact

SEQ ID NO: 1537524 - DNA, 15 bp, Homo sapiens
ctgtgcctaagaaac

SEQ ID NO: 1537525 - DNA, 15 bp, Homo sapiens
tctgtgcctaagaaa

SEQ ID NO: 1537526 - DNA, 15 bp, Homo sapiens
ctctgtgcctaagaa

SEQ ID NO: 1537527 - DNA, 15 bp, Homo sapiens
actctgtgcctaaga

SEQ ID NO: 1537528 - DNA, 15 bp, Homo sapiens
gactctgtgcctaag

SEQ ID NO: 1537529 - DNA, 15 bp, Homo sapiens
agactctgtgcctaa

SEQ ID NO: 1537530 - DNA, 15 bp, Homo sapiens
tagactctgtgccta

SEQ ID NO: 1537531 - DNA, 15 bp, Homo sapiens
atagactctgtgcct

SEQ ID NO: 1537532 - DNA, 15 bp, Homo sapiens
aatagactctgtgcc

SEQ ID NO: 1537533 - DNA, 15 bp, Homo sapiens
taatagactctgtgc

SEQ ID NO: 1537534 - DNA, 15 bp, Homo sapiens
ctaatagactctgtg

SEQ ID NO: 1537535 - DNA, 15 bp, Homo sapiens
actaatagactctgt

SEQ ID NO: 1537536 - DNA, 15 bp, Homo sapiens
tactaatagactctg

SEQ ID NO: 1537537 - DNA, 15 bp, Homo sapiens
ttactaatagactct

SEQ ID NO: 1537538 - DNA, 15 bp, Homo sapiens
attactaatagactc

SEQ ID NO: 1537539 - DNA, 15 bp, Homo sapiens
gattactaatagact

SEQ ID NO: 1537540 - DNA, 15 bp, Homo sapiens
agattactaatagac

SEQ ID NO: 1537541 - DNA, 15 bp, Homo sapiens
aagattactaataga

SEQ ID NO: 1537542 - DNA, 15 bp, Homo sapiens
aaagattactaatag

SEQ ID NO: 1537543 - DNA, 15 bp, Homo sapiens
caaagattactaata

SEQ ID NO: 1537544 - DNA, 15 bp, Homo sapiens
tcaaagattactaat

SEQ ID NO: 1537545 - DNA, 15 bp, Homo sapiens
ttcaaagattactaa

SEQ ID NO: 1537546 - DNA, 15 bp, Homo sapiens
cttcaaagattacta

SEQ ID NO: 1537547 - DNA, 15 bp, Homo sapiens
gcttcaaagattact

SEQ ID NO: 1537548 - DNA, 15 bp, Homo sapiens
tgcttcaaagattac

SEQ ID NO: 1537549 - DNA, 15 bp, Homo sapiens
atgcttcaaagatta

SEQ ID NO: 1537550 - DNA, 15 bp, Homo sapiens
gatgcttcaaagatt

SEQ ID NO: 1537551 - DNA, 15 bp, Homo sapiens
ggatgcttcaaagat

SEQ ID NO: 1537552 - DNA, 15 bp, Homo sapiens
aggatgcttcaaaga

SEQ ID NO: 1537553 - DNA, 15 bp, Homo sapiens
aaggatgcttcaaag

SEQ ID NO: 1537554 - DNA, 15 bp, Homo sapiens
taaggatgcttcaaa

SEQ ID NO: 1537555 - DNA, 15 bp, Homo sapiens
ctaaggatgcttcaa

SEQ ID NO: 1537556 - DNA, 15 bp, Homo sapiens
actaaggatgcttca

SEQ ID NO: 1537557 - DNA, 15 bp, Homo sapiens
cactaaggatgcttc

SEQ ID NO: 1537558 - DNA, 15 bp, Homo sapiens
acactaaggatgctt

SEQ ID NO: 1537559 - DNA, 15 bp, Homo sapiens
gacactaaggatgct

SEQ ID NO: 1537560 - DNA, 15 bp, Homo sapiens
agacactaaggatgc

SEQ ID NO: 1537561 - DNA, 15 bp, Homo sapiens
gagacactaaggatg

SEQ ID NO: 1537562 - DNA, 15 bp, Homo sapiens
agagacactaaggat

SEQ ID NO: 1537563 - DNA, 15 bp, Homo sapiens
cagagacactaagga

SEQ ID NO: 1537564 - DNA, 15 bp, Homo sapiens
acagagacactaagg

SEQ ID NO: 1537565 - DNA, 15 bp, Homo sapiens
tacagagacactaag

SEQ ID NO: 1537566 - DNA, 15 bp, Homo sapiens
ctacagagacactaa

SEQ ID NO: 1537567 - DNA, 15 bp, Homo sapiens
gctacagagacacta

SEQ ID NO: 1537568 - DNA, 15 bp, Homo sapiens
cgctacagagacact

SEQ ID NO: 1537569 - DNA, 15 bp, Homo sapiens
acgctacagagacac

SEQ ID NO: 1537570 - DNA, 15 bp, Homo sapiens
cacgctacagagaca

SEQ ID NO: 1537571 - DNA, 15 bp, Homo sapiens
ccacgctacagagac

SEQ ID NO: 1537572 - DNA, 15 bp, Homo sapiens
accacgctacagaga

SEQ ID NO: 1537573 - DNA, 15 bp, Homo sapiens
taccacgctacagag

SEQ ID NO: 1537574 - DNA, 15 bp, Homo sapiens
ctaccacgctacaga

SEQ ID NO: 1537575 - DNA, 15 bp, Homo sapiens
gctaccacgctacag

SEQ ID NO: 1537576 - DNA, 15 bp, Homo sapiens
ggctaccacgctaca

SEQ ID NO: 1537577 - DNA, 15 bp, Homo sapiens
aggctaccacgctac

SEQ ID NO: 1537578 - DNA, 15 bp, Homo sapiens
aaggctaccacgcta

SEQ ID NO: 1537579 - DNA, 15 bp, Homo sapiens
taaggctaccacgct

SEQ ID NO: 1537580 - DNA, 15 bp, Homo sapiens
ataaggctaccacgc

SEQ ID NO: 1537581 - DNA, 15 bp, Homo sapiens
cataaggctaccacg

SEQ ID NO: 1537582 - DNA, 15 bp, Homo sapiens
acataaggctaccac

SEQ ID NO: 1537583 - DNA, 15 bp, Homo sapiens
aacataaggctacca

SEQ ID NO: 1537584 - DNA, 15 bp, Homo sapiens
taacataaggctacc

SEQ ID NO: 1537585 - DNA, 15 bp, Homo sapiens
ttaacataaggctac

SEQ ID NO: 1537586 - DNA, 15 bp, Homo sapiens
attaacataaggcta

SEQ ID NO: 1537587 - DNA, 15 bp, Homo sapiens
tattaacataaggct

SEQ ID NO: 1537588 - DNA, 15 bp, Homo sapiens
atattaacataaggc

SEQ ID NO: 1537589 - DNA, 15 bp, Homo sapiens
aatattaacataagg

SEQ ID NO: 1537590 - DNA, 15 bp, Homo sapiens
caatattaacataag

SEQ ID NO: 1537591 - DNA, 15 bp, Homo sapiens
gcaatattaacataa

SEQ ID NO: 1537592 - DNA, 15 bp, Homo sapiens
tgcaatattaacata

SEQ ID NO: 1537593 - DNA, 15 bp, Homo sapiens
atgcaatattaacat

SEQ ID NO: 1537594 - DNA, 15 bp, Homo sapiens
tatgcaatattaaca

SEQ ID NO: 1537595 - DNA, 15 bp, Homo sapiens
atatgcaatattaac

SEQ ID NO: 1537596 - DNA, 15 bp, Homo sapiens
aatatgcaatattaa

SEQ ID NO: 1537597 - DNA, 15 bp, Homo sapiens
aaatatgcaatatta

SEQ ID NO: 1537598 - DNA, 15 bp, Homo sapiens
aaaatatgcaatatt

SEQ ID NO: 1537599 - DNA, 15 bp, Homo sapiens
aaaaatatgcaatat

SEQ ID NO: 1537600 - DNA, 15 bp, Homo sapiens
taaaaatatgcaata

SEQ ID NO: 1537601 - DNA, 15 bp, Homo sapiens
ttaaaaatatgcaat

SEQ ID NO: 1537602 - DNA, 15 bp, Homo sapiens
tttaaaaatatgcaa

SEQ ID NO: 1537603 - DNA, 15 bp, Homo sapiens
ctttaaaaatatgca

SEQ ID NO: 1537604 - DNA, 15 bp, Homo sapiens
tctttaaaaatatgc

SEQ ID NO: 1537605 - DNA, 15 bp, Homo sapiens
ttctttaaaaatatg

SEQ ID NO: 1537606 - DNA, 15 bp, Homo sapiens
attctttaaaaatat

SEQ ID NO: 1537607 - DNA, 15 bp, Homo sapiens
aattctttaaaaata

SEQ ID NO: 1537608 - DNA, 15 bp, Homo sapiens
aaattctttaaaaat

SEQ ID NO: 1537609 - DNA, 15 bp, Homo sapiens
gaaattctttaaaaa

SEQ ID NO: 1537610 - DNA, 15 bp, Homo sapiens
tgaaattctttaaaa

SEQ ID NO: 1537611 - DNA, 15 bp, Homo sapiens
atgaaattctttaaa

SEQ ID NO: 1537612 - DNA, 15 bp, Homo sapiens
aatgaaattctttaa

SEQ ID NO: 1537613 - DNA, 15 bp, Homo sapiens
gaatgaaattcttta

SEQ ID NO: 1537614 - DNA, 15 bp, Homo sapiens
tgaatgaaattcttt

SEQ ID NO: 1537615 - DNA, 15 bp, Homo sapiens
ttgaatgaaattctt

SEQ ID NO: 1537616 - DNA, 15 bp, Homo sapiens
gttgaatgaaattct

SEQ ID NO: 1537617 - DNA, 15 bp, Homo sapiens
agttgaatgaaattc

SEQ ID NO: 1537618 - DNA, 15 bp, Homo sapiens
gagttgaatgaaatt

SEQ ID NO: 1537619 - DNA, 15 bp, Homo sapiens
tgagttgaatgaaat

SEQ ID NO: 1537620 - DNA, 15 bp, Homo sapiens
ctgagttgaatgaaa

SEQ ID NO: 1537621 - DNA, 15 bp, Homo sapiens
tctgagttgaatgaa

SEQ ID NO: 1537622 - DNA, 15 bp, Homo sapiens
ctctgagttgaatga

SEQ ID NO: 1537623 - DNA, 15 bp, Homo sapiens
actctgagttgaatg

SEQ ID NO: 1537624 - DNA, 15 bp, Homo sapiens
gactctgagttgaat

SEQ ID NO: 1537625 - DNA, 15 bp, Homo sapiens
agactctgagttgaa

SEQ ID NO: 1537626 - DNA, 15 bp, Homo sapiens
aagactctgagttga

SEQ ID NO: 1537627 - DNA, 15 bp, Homo sapiens
taagactctgagttg

SEQ ID NO: 1537628 - DNA, 15 bp, Homo sapiens
ctaagactctgagtt

SEQ ID NO: 1537629 - DNA, 15 bp, Homo sapiens
cctaagactctgagt

SEQ ID NO: 1537630 - DNA, 15 bp, Homo sapiens
gcctaagactctgag

SEQ ID NO: 1537631 - DNA, 15 bp, Homo sapiens
agcctaagactctga

SEQ ID NO: 1537632 - DNA, 15 bp, Homo sapiens
aagcctaagactctg

SEQ ID NO: 1537633 - DNA, 15 bp, Homo sapiens
taagcctaagactct

SEQ ID NO: 1537634 - DNA, 15 bp, Homo sapiens
ttaagcctaagactc

SEQ ID NO: 1537635 - DNA, 15 bp, Homo sapiens
tttaagcctaagact

SEQ ID NO: 1537636 - DNA, 15 bp, Homo sapiens
ttttaagcctaagac

SEQ ID NO: 1537637 - DNA, 15 bp, Homo sapiens
attttaagcctaaga

SEQ ID NO: 1537638 - DNA, 15 bp, Homo sapiens
gattttaagcctaag

SEQ ID NO: 1537639 - DNA, 15 bp, Homo sapiens
ggattttaagcctaa

SEQ ID NO: 1537640 - DNA, 15 bp, Homo sapiens
aggattttaagccta

SEQ ID NO: 1537641 - DNA, 15 bp, Homo sapiens
taggattttaagcct

SEQ ID NO: 1537642 - DNA, 15 bp, Homo sapiens
ctaggattttaagcc

SEQ ID NO: 1537643 - DNA, 15 bp, Homo sapiens
tctaggattttaagc

SEQ ID NO: 1537644 - DNA, 15 bp, Homo sapiens
ctctaggattttaag

SEQ ID NO: 1537645 - DNA, 15 bp, Homo sapiens
actctaggattttaa

SEQ ID NO: 1537646 - DNA, 15 bp, Homo sapiens
cactctaggatttta

SEQ ID NO: 1537647 - DNA, 15 bp, Homo sapiens
tcactctaggatttt

SEQ ID NO: 1537648 - DNA, 15 bp, Homo sapiens
atcactctaggattt

SEQ ID NO: 1537649 - DNA, 15 bp, Homo sapiens
gatcactctaggatt

SEQ ID NO: 1537650 - DNA, 15 bp, Homo sapiens
agatcactctaggat

SEQ ID NO: 1537651 - DNA, 15 bp, Homo sapiens
gagatcactctagga

SEQ ID NO: 1537652 - DNA, 15 bp, Homo sapiens
agagatcactctagg

SEQ ID NO: 1537653 - DNA, 15 bp, Homo sapiens
cagagatcactctag

SEQ ID NO: 1537654 - DNA, 15 bp, Homo sapiens
tcagagatcactcta

SEQ ID NO: 1537655 - DNA, 15 bp, Homo sapiens
ttcagagatcactct

SEQ ID NO: 1537656 - DNA, 15 bp, Homo sapiens
attcagagatcactc

SEQ ID NO: 1537657 - DNA, 15 bp, Homo sapiens
gattcagagatcact

SEQ ID NO: 1537658 - DNA, 15 bp, Homo sapiens
agattcagagatcac

SEQ ID NO: 1537659 - DNA, 15 bp, Homo sapiens
cagattcagagatca

SEQ ID NO: 1537660 - DNA, 15 bp, Homo sapiens
ccagattcagagatc

SEQ ID NO: 1537661 - DNA, 15 bp, Homo sapiens
accagattcagagat

SEQ ID NO: 1537662 - DNA, 15 bp, Homo sapiens
caccagattcagaga

SEQ ID NO: 1537663 - DNA, 15 bp, Homo sapiens
ccaccagattcagag

SEQ ID NO: 1537664 - DNA, 15 bp, Homo sapiens
tccaccagattcaga

SEQ ID NO: 1537665 - DNA, 15 bp, Homo sapiens
ctccaccagattcag

SEQ ID NO: 1537666 - DNA, 15 bp, Homo sapiens
actccaccagattca

SEQ ID NO: 1537667 - DNA, 15 bp, Homo sapiens
tactccaccagattc

SEQ ID NO: 1537668 - DNA, 15 bp, Homo sapiens
ttactccaccagatt

SEQ ID NO: 1537669 - DNA, 15 bp, Homo sapiens
tttactccaccagat

SEQ ID NO: 1537670 - DNA, 15 bp, Homo sapiens
atttactccaccaga

SEQ ID NO: 1537671 - DNA, 15 bp, Homo sapiens
aatttactccaccag

SEQ ID NO: 1537672 - DNA, 15 bp, Homo sapiens
gaatttactccacca

SEQ ID NO: 1537673 - DNA, 15 bp, Homo sapiens
tgaatttactccacc

SEQ ID NO: 1537674 - DNA, 15 bp, Homo sapiens
ttgaatttactccac

SEQ ID NO: 1537675 - DNA, 15 bp, Homo sapiens
attgaatttactcca

SEQ ID NO: 1537676 - DNA, 15 bp, Homo sapiens
gattgaatttactcc

SEQ ID NO: 1537677 - DNA, 15 bp, Homo sapiens
ggattgaatttactc

SEQ ID NO: 1537678 - DNA, 15 bp, Homo sapiens
tggattgaatttact

SEQ ID NO: 1537679 - DNA, 15 bp, Homo sapiens
ctggattgaatttac

SEQ ID NO: 1537680 - DNA, 15 bp, Homo sapiens
actggattgaattta

SEQ ID NO: 1537681 - DNA, 15 bp, Homo sapiens
aactggattgaattt

SEQ ID NO: 1537682 - DNA, 15 bp, Homo sapiens
caactggattgaatt

SEQ ID NO: 1537683 - DNA, 15 bp, Homo sapiens
ccaactggattgaat

SEQ ID NO: 1537684 - DNA, 15 bp, Homo sapiens
accaactggattgaa

SEQ ID NO: 1537685 - DNA, 15 bp, Homo sapiens
gaccaactggattga

SEQ ID NO: 1537686 - DNA, 15 bp, Homo sapiens
tgaccaactggattg

SEQ ID NO: 1537687 - DNA, 15 bp, Homo sapiens
ttgaccaactggatt

SEQ ID NO: 1537688 - DNA, 15 bp, Homo sapiens
cttgaccaactggat

SEQ ID NO: 1537689 - DNA, 15 bp, Homo sapiens
acttgaccaactgga

SEQ ID NO: 1537690 - DNA, 15 bp, Homo sapiens
tacttgaccaactgg

SEQ ID NO: 1537691 - DNA, 15 bp, Homo sapiens
ctacttgaccaactg

SEQ ID NO: 1537692 - DNA, 15 bp, Homo sapiens
actacttgaccaact

SEQ ID NO: 1537693 - DNA, 15 bp, Homo sapiens
gactacttgaccaac

SEQ ID NO: 1537694 - DNA, 15 bp, Homo sapiens
ggactacttgaccaa

SEQ ID NO: 1537695 - DNA, 15 bp, Homo sapiens
aggactacttgacca

SEQ ID NO: 1537696 - DNA, 15 bp, Homo sapiens
caggactacttgacc

SEQ ID NO: 1537697 - DNA, 15 bp, Homo sapiens
gcaggactacttgac

SEQ ID NO: 1537698 - DNA, 15 bp, Homo sapiens
agcaggactacttga

SEQ ID NO: 1537699 - DNA, 15 bp, Homo sapiens
cagcaggactacttg

SEQ ID NO: 1537700 - DNA, 15 bp, Homo sapiens
gcagcaggactactt

SEQ ID NO: 1537701 - DNA, 15 bp, Homo sapiens
agcagcaggactact

SEQ ID NO: 1537702 - DNA, 15 bp, Homo sapiens
cagcagcaggactac

SEQ ID NO: 1537703 - DNA, 15 bp, Homo sapiens
gcagcagcaggacta

SEQ ID NO: 1537704 - DNA, 15 bp, Homo sapiens
agcagcagcaggact

SEQ ID NO: 1537705 - DNA, 15 bp, Homo sapiens
aagcagcagcaggac

SEQ ID NO: 1537706 - DNA, 15 bp, Homo sapiens
aaagcagcagcagga

SEQ ID NO: 1537707 - DNA, 15 bp, Homo sapiens
gaaagcagcagcagg

SEQ ID NO: 1537708 - DNA, 15 bp, Homo sapiens
tgaaagcagcagcag

SEQ ID NO: 1537709 - DNA, 15 bp, Homo sapiens
atgaaagcagcagca

SEQ ID NO: 1537710 - DNA, 15 bp, Homo sapiens
aatgaaagcagcagc

SEQ ID NO: 1537711 - DNA, 15 bp, Homo sapiens
gaatgaaagcagcag

SEQ ID NO: 1537712 - DNA, 15 bp, Homo sapiens
tgaatgaaagcagca

SEQ ID NO: 1537713 - DNA, 15 bp, Homo sapiens
atgaatgaaagcagc

SEQ ID NO: 1537714 - DNA, 15 bp, Homo sapiens
gatgaatgaaagcag

SEQ ID NO: 1537715 - DNA, 15 bp, Homo sapiens
agatgaatgaaagca

SEQ ID NO: 1537716 - DNA, 15 bp, Homo sapiens
tagatgaatgaaagc

SEQ ID NO: 1537717 - DNA, 15 bp, Homo sapiens
atagatgaatgaaag

SEQ ID NO: 1537718 - DNA, 15 bp, Homo sapiens
aatagatgaatgaaa

SEQ ID NO: 1537719 - DNA, 15 bp, Homo sapiens
caatagatgaatgaa

SEQ ID NO: 1537720 - DNA, 15 bp, Homo sapiens
ccaatagatgaatga

SEQ ID NO: 1537721 - DNA, 15 bp, Homo sapiens
accaatagatgaatg

SEQ ID NO: 1537722 - DNA, 15 bp, Homo sapiens
taccaatagatgaat

SEQ ID NO: 1537723 - DNA, 15 bp, Homo sapiens
ttaccaatagatgaa

SEQ ID NO: 1537724 - DNA, 15 bp, Homo sapiens
tttaccaatagatga

SEQ ID NO: 1537725 - DNA, 15 bp, Homo sapiens
atttaccaatagatg

SEQ ID NO: 1537726 - DNA, 15 bp, Homo sapiens
catttaccaatagat

SEQ ID NO: 1537727 - DNA, 15 bp, Homo sapiens
gcatttaccaataga

SEQ ID NO: 1537728 - DNA, 15 bp, Homo sapiens
ggcatttaccaatag

SEQ ID NO: 1537729 - DNA, 15 bp, Homo sapiens
tggcatttaccaata

SEQ ID NO: 1537730 - DNA, 15 bp, Homo sapiens
gtggcatttaccaat

SEQ ID NO: 1537731 - DNA, 15 bp, Homo sapiens
tgtggcatttaccaa

SEQ ID NO: 1537732 - DNA, 15 bp, Homo sapiens
atgtggcatttacca

SEQ ID NO: 1537733 - DNA, 15 bp, Homo sapiens
aatgtggcatttacc

SEQ ID NO: 1537734 - DNA, 15 bp, Homo sapiens
aaatgtggcatttac

SEQ ID NO: 1537735 - DNA, 15 bp, Homo sapiens
caaatgtggcattta

SEQ ID NO: 1537736 - DNA, 15 bp, Homo sapiens
acaaatgtggcattt

SEQ ID NO: 1537737 - DNA, 15 bp, Homo sapiens
cacaaatgtggcatt

SEQ ID NO: 1537738 - DNA, 15 bp, Homo sapiens
acacaaatgtggcat

SEQ ID NO: 1537739 - DNA, 15 bp, Homo sapiens
cacacaaatgtggca

SEQ ID NO: 1537740 - DNA, 15 bp, Homo sapiens
ccacacaaatgtggc

SEQ ID NO: 1537741 - DNA, 15 bp, Homo sapiens
tccacacaaatgtgg

SEQ ID NO: 1537742 - DNA, 15 bp, Homo sapiens
ctccacacaaatgtg

SEQ ID NO: 1537743 - DNA, 15 bp, Homo sapiens
gctccacacaaatgt

SEQ ID NO: 1537744 - DNA, 15 bp, Homo sapiens
agctccacacaaatg

SEQ ID NO: 1537745 - DNA, 15 bp, Homo sapiens
gagctccacacaaat

SEQ ID NO: 1537746 - DNA, 15 bp, Homo sapiens
agagctccacacaaa

SEQ ID NO: 1537747 - DNA, 15 bp, Homo sapiens
cagagctccacacaa

SEQ ID NO: 1537748 - DNA, 15 bp, Homo sapiens
acagagctccacaca

SEQ ID NO: 1537749 - DNA, 15 bp, Homo sapiens
aacagagctccacac

SEQ ID NO: 1537750 - DNA, 15 bp, Homo sapiens
gaacagagctccaca

SEQ ID NO: 1537751 - DNA, 15 bp, Homo sapiens
agaacagagctccac

SEQ ID NO: 1537752 - DNA, 15 bp, Homo sapiens
tagaacagagctcca

SEQ ID NO: 1537753 - DNA, 15 bp, Homo sapiens
ctagaacagagctcc

SEQ ID NO: 1537754 - DNA, 15 bp, Homo sapiens
cctagaacagagctc

SEQ ID NO: 1537755 - DNA, 15 bp, Homo sapiens
acctagaacagagct

SEQ ID NO: 1537756 - DNA, 15 bp, Homo sapiens
aacctagaacagagc

SEQ ID NO: 1537757 - DNA, 15 bp, Homo sapiens
aaacctagaacagag

SEQ ID NO: 1537758 - DNA, 15 bp, Homo sapiens
taaacctagaacaga

SEQ ID NO: 1537759 - DNA, 15 bp, Homo sapiens
ctaaacctagaacag

SEQ ID NO: 1537760 - DNA, 15 bp, Homo sapiens
cctaaacctagaaca

SEQ ID NO: 1537761 - DNA, 15 bp, Homo sapiens
tcctaaacctagaac

SEQ ID NO: 1537762 - DNA, 15 bp, Homo sapiens
ctcctaaacctagaa

SEQ ID NO: 1537763 - DNA, 15 bp, Homo sapiens
tctcctaaacctaga

SEQ ID NO: 1537764 - DNA, 15 bp, Homo sapiens
atctcctaaacctag

SEQ ID NO: 1537765 - DNA, 15 bp, Homo sapiens
aatctcctaaaccta

SEQ ID NO: 1537766 - DNA, 15 bp, Homo sapiens
taatctcctaaacct

SEQ ID NO: 1537767 - DNA, 15 bp, Homo sapiens
ttaatctcctaaacc

SEQ ID NO: 1537768 - DNA, 15 bp, Homo sapiens
tttaatctcctaaac

SEQ ID NO: 1537769 - DNA, 15 bp, Homo sapiens
ttttaatctcctaaa

SEQ ID NO: 1537770 - DNA, 15 bp, Homo sapiens
tttttaatctcctaa

SEQ ID NO: 1537771 - DNA, 15 bp, Homo sapiens
ttttttaatctccta

SEQ ID NO: 1537772 - DNA, 15 bp, Homo sapiens
tttttttaatctcct

SEQ ID NO: 1537773 - DNA, 15 bp, Homo sapiens
ttttttttaatctcc

SEQ ID NO: 1537774 - DNA, 15 bp, Homo sapiens
tttttttttaatctc

SEQ ID NO: 1537775 - DNA, 15 bp, Homo sapiens
tttttttttttaatc

SEQ ID NO: 1537776 - DNA, 15 bp, Homo sapiens
ctatctttttttttt

SEQ ID NO: 1537777 - DNA, 15 bp, Homo sapiens
actatcttttttttt

SEQ ID NO: 1537778 - DNA, 15 bp, Homo sapiens
gactatctttttttt

SEQ ID NO: 1537779 - DNA, 15 bp, Homo sapiens
tgactatcttttttt

SEQ ID NO: 1537780 - DNA, 15 bp, Homo sapiens
gtgactatctttttt

SEQ ID NO: 1537781 - DNA, 15 bp, Homo sapiens
agtgactatcttttt

SEQ ID NO: 1537782 - DNA, 15 bp, Homo sapiens
cagtgactatctttt

SEQ ID NO: 1537783 - DNA, 15 bp, Homo sapiens
gcagtgactatcttt

SEQ ID NO: 1537784 - DNA, 15 bp, Homo sapiens
ggcagtgactatctt

SEQ ID NO: 1537785 - DNA, 15 bp, Homo sapiens
aggcagtgactatct

SEQ ID NO: 1537786 - DNA, 15 bp, Homo sapiens
aaggcagtgactatc

SEQ ID NO: 1537787 - DNA, 15 bp, Homo sapiens
aaaggcagtgactat

SEQ ID NO: 1537788 - DNA, 15 bp, Homo sapiens
taaaggcagtgacta

SEQ ID NO: 1537789 - DNA, 15 bp, Homo sapiens
ttaaaggcagtgact

SEQ ID NO: 1537790 - DNA, 15 bp, Homo sapiens
cttaaaggcagtgac

SEQ ID NO: 1537791 - DNA, 15 bp, Homo sapiens
acttaaaggcagtga

SEQ ID NO: 1537792 - DNA, 15 bp, Homo sapiens
cacttaaaggcagtg

SEQ ID NO: 1537793 - DNA, 15 bp, Homo sapiens
acacttaaaggcagt

SEQ ID NO: 1537794 - DNA, 15 bp, Homo sapiens
aacacttaaaggcag

SEQ ID NO: 1537795 - DNA, 15 bp, Homo sapiens
aaacacttaaaggca

SEQ ID NO: 1537796 - DNA, 15 bp, Homo sapiens
gaaacacttaaaggc

SEQ ID NO: 1537797 - DNA, 15 bp, Homo sapiens
tgaaacacttaaagg

SEQ ID NO: 1537798 - DNA, 15 bp, Homo sapiens
ctgaaacacttaaag

SEQ ID NO: 1537799 - DNA, 15 bp, Homo sapiens
tctgaaacacttaaa

SEQ ID NO: 1537800 - DNA, 15 bp, Homo sapiens
atctgaaacacttaa

SEQ ID NO: 1537801 - DNA, 15 bp, Homo sapiens
aatctgaaacactta

SEQ ID NO: 1537802 - DNA, 15 bp, Homo sapiens
gaatctgaaacactt

SEQ ID NO: 1537803 - DNA, 15 bp, Homo sapiens
agaatctgaaacact

SEQ ID NO: 1537804 - DNA, 15 bp, Homo sapiens
tagaatctgaaacac

SEQ ID NO: 1537805 - DNA, 15 bp, Homo sapiens
ctagaatctgaaaca

SEQ ID NO: 1537806 - DNA, 15 bp, Homo sapiens
actagaatctgaaac

SEQ ID NO: 1537807 - DNA, 15 bp, Homo sapiens
cactagaatctgaaa

SEQ ID NO: 1537808 - DNA, 15 bp, Homo sapiens
tcactagaatctgaa

SEQ ID NO: 1537809 - DNA, 15 bp, Homo sapiens
atcactagaatctga

SEQ ID NO: 1537810 - DNA, 15 bp, Homo sapiens
tatcactagaatctg

SEQ ID NO: 1537811 - DNA, 15 bp, Homo sapiens
ctatcactagaatct

SEQ ID NO: 1537812 - DNA, 15 bp, Homo sapiens
tctatcactagaatc

SEQ ID NO: 1537813 - DNA, 15 bp, Homo sapiens
ttctatcactagaat

SEQ ID NO: 1537814 - DNA, 15 bp, Homo sapiens
cttctatcactagaa

SEQ ID NO: 1537815 - DNA, 15 bp, Homo sapiens
gcttctatcactaga

SEQ ID NO: 1537816 - DNA, 15 bp, Homo sapiens
tgcttctatcactag

SEQ ID NO: 1537817 - DNA, 15 bp, Homo sapiens
ttgcttctatcacta

SEQ ID NO: 1537818 - DNA, 15 bp, Homo sapiens
tttgcttctatcact

SEQ ID NO: 1537819 - DNA, 15 bp, Homo sapiens
gtttgcttctatcac

SEQ ID NO: 1537820 - DNA, 15 bp, Homo sapiens
tgtttgcttctatca

SEQ ID NO: 1537821 - DNA, 15 bp, Homo sapiens
ctgtttgcttctatc

SEQ ID NO: 1537822 - DNA, 15 bp, Homo sapiens
actgtttgcttctat

SEQ ID NO: 1537823 - DNA, 15 bp, Homo sapiens
tactgtttgcttcta

SEQ ID NO: 1537824 - DNA, 15 bp, Homo sapiens
ttactgtttgcttct

SEQ ID NO: 1537825 - DNA, 15 bp, Homo sapiens
tttactgtttgcttc

SEQ ID NO: 1537826 - DNA, 15 bp, Homo sapiens
ctttactgtttgctt

SEQ ID NO: 1537827 - DNA, 15 bp, Homo sapiens
cctttactgtttgct

SEQ ID NO: 1537828 - DNA, 15 bp, Homo sapiens
gcctttactgtttgc

SEQ ID NO: 1537829 - DNA, 15 bp, Homo sapiens
ggcctttactgtttg

SEQ ID NO: 1537830 - DNA, 15 bp, Homo sapiens
tggcctttactgttt

SEQ ID NO: 1537831 - DNA, 15 bp, Homo sapiens
ctggcctttactgtt

SEQ ID NO: 1537832 - DNA, 15 bp, Homo sapiens
cctggcctttactgt

SEQ ID NO: 1537833 - DNA, 15 bp, Homo sapiens
gcctggcctttactg

SEQ ID NO: 1537834 - DNA, 15 bp, Homo sapiens
cgcctggcctttact

SEQ ID NO: 1537835 - DNA, 15 bp, Homo sapiens
acgcctggcctttac

SEQ ID NO: 1537836 - DNA, 15 bp, Homo sapiens
tacgcctggccttta

SEQ ID NO: 1537837 - DNA, 15 bp, Homo sapiens
ctacgcctggccttt

SEQ ID NO: 1537838 - DNA, 15 bp, Homo sapiens
actacgcctggcctt

SEQ ID NO: 1537839 - DNA, 15 bp, Homo sapiens
aatgagccactacgc

SEQ ID NO: 1537840 - DNA, 15 bp, Homo sapiens
gaatgagccactacg

SEQ ID NO: 1537841 - DNA, 15 bp, Homo sapiens
ggaatgagccactac

SEQ ID NO: 1537842 - DNA, 15 bp, Homo sapiens
aggaatgagccacta

SEQ ID NO: 1537843 - DNA, 15 bp, Homo sapiens
caggaatgagccact

SEQ ID NO: 1537844 - DNA, 15 bp, Homo sapiens
acaggaatgagccac

SEQ ID NO: 1537845 - DNA, 15 bp, Homo sapiens
tacaggaatgagcca

SEQ ID NO: 1537846 - DNA, 15 bp, Homo sapiens
ttacaggaatgagcc

SEQ ID NO: 1537847 - DNA, 15 bp, Homo sapiens
attacaggaatgagc

SEQ ID NO: 1537848 - DNA, 15 bp, Homo sapiens
gattacaggaatgag

SEQ ID NO: 1537849 - DNA, 15 bp, Homo sapiens
ggattacaggaatga

SEQ ID NO: 1537850 - DNA, 15 bp, Homo sapiens
gggattacaggaatg

SEQ ID NO: 1537851 - DNA, 15 bp, Homo sapiens
tgggattacaggaat

SEQ ID NO: 1537852 - DNA, 15 bp, Homo sapiens
ctgggattacaggaa

SEQ ID NO: 1537853 - DNA, 15 bp, Homo sapiens
tcttggcttcccaaa

SEQ ID NO: 1537854 - DNA, 15 bp, Homo sapiens
atcttggcttcccaa

SEQ ID NO: 1537855 - DNA, 15 bp, Homo sapiens
catcttggcttccca

SEQ ID NO: 1537856 - DNA, 15 bp, Homo sapiens
ccatcttggcttccc

SEQ ID NO: 1537857 - DNA, 15 bp, Homo sapiens
cccatcttggcttcc

SEQ ID NO: 1537858 - DNA, 15 bp, Homo sapiens
tcccatcttggcttc

SEQ ID NO: 1537859 - DNA, 15 bp, Homo sapiens
ctcccatcttggctt

SEQ ID NO: 1537860 - DNA, 15 bp, Homo sapiens
cctcccatcttggct

SEQ ID NO: 1537861 - DNA, 15 bp, Homo sapiens
tcctcccatcttggc

SEQ ID NO: 1537862 - DNA, 15 bp, Homo sapiens
atcctcccatcttgg

SEQ ID NO: 1537863 - DNA, 15 bp, Homo sapiens
gatcctcccatcttg

SEQ ID NO: 1537864 - DNA, 15 bp, Homo sapiens
cgatcctcccatctt

SEQ ID NO: 1537865 - DNA, 15 bp, Homo sapiens
acgatcctcccatct

SEQ ID NO: 1537866 - DNA, 15 bp, Homo sapiens
aacgatcctcccatc

SEQ ID NO: 1537867 - DNA, 15 bp, Homo sapiens
aaacgatcctcccat

SEQ ID NO: 1537868 - DNA, 15 bp, Homo sapiens
caaacgatcctccca

SEQ ID NO: 1537869 - DNA, 15 bp, Homo sapiens
tcaaacgatcctccc

SEQ ID NO: 1537870 - DNA, 15 bp, Homo sapiens
ctcaaacgatcctcc

SEQ ID NO: 1537871 - DNA, 15 bp, Homo sapiens
cctcaaacgatcctc

SEQ ID NO: 1537872 - DNA, 15 bp, Homo sapiens
gcctcaaacgatcct

SEQ ID NO: 1537873 - DNA, 15 bp, Homo sapiens
ggcctcaaacgatcc

SEQ ID NO: 1537874 - DNA, 15 bp, Homo sapiens
tggcctcaaacgatc

SEQ ID NO: 1537875 - DNA, 15 bp, Homo sapiens
ctggcctcaaacgat

SEQ ID NO: 1537876 - DNA, 15 bp, Homo sapiens
cctggcctcaaacga

SEQ ID NO: 1537877 - DNA, 15 bp, Homo sapiens
tcctggcctcaaacg

SEQ ID NO: 1537878 - DNA, 15 bp, Homo sapiens
ctcctggcctcaaac

SEQ ID NO: 1537879 - DNA, 15 bp, Homo sapiens
ttcttgaactcctgg

SEQ ID NO: 1537880 - DNA, 15 bp, Homo sapiens
gttcttgaactcctg

SEQ ID NO: 1537881 - DNA, 15 bp, Homo sapiens
tgttcttgaactcct

SEQ ID NO: 1537882 - DNA, 15 bp, Homo sapiens
ctgttcttgaactcc

SEQ ID NO: 1537883 - DNA, 15 bp, Homo sapiens
gctgttcttgaactc

SEQ ID NO: 1537884 - DNA, 15 bp, Homo sapiens
tgctgttcttgaact

SEQ ID NO: 1537885 - DNA, 15 bp, Homo sapiens
atgctgttcttgaac

SEQ ID NO: 1537886 - DNA, 15 bp, Homo sapiens
catgctgttcttgaa

SEQ ID NO: 1537887 - DNA, 15 bp, Homo sapiens
ccatgctgttcttga

SEQ ID NO: 1537888 - DNA, 15 bp, Homo sapiens
tccatgctgttcttg

SEQ ID NO: 1537889 - DNA, 15 bp, Homo sapiens
gtccatgctgttctt

SEQ ID NO: 1537890 - DNA, 15 bp, Homo sapiens
ggtccatgctgttct

SEQ ID NO: 1537891 - DNA, 15 bp, Homo sapiens
tggtccatgctgttc

SEQ ID NO: 1537892 - DNA, 15 bp, Homo sapiens
gtggtccatgctgtt

SEQ ID NO: 1537893 - DNA, 15 bp, Homo sapiens
tgtggtccatgctgt

SEQ ID NO: 1537894 - DNA, 15 bp, Homo sapiens
atgtggtccatgctg

SEQ ID NO: 1537895 - DNA, 15 bp, Homo sapiens
tatgtggtccatgct

SEQ ID NO: 1537896 - DNA, 15 bp, Homo sapiens
ctatgtggtccatgc

SEQ ID NO: 1537897 - DNA, 15 bp, Homo sapiens
actatgtggtccatg

SEQ ID NO: 1537898 - DNA, 15 bp, Homo sapiens
tactatgtggtccat

SEQ ID NO: 1537899 - DNA, 15 bp, Homo sapiens
ttactatgtggtcca

SEQ ID NO: 1537900 - DNA, 15 bp, Homo sapiens
cttactatgtggtcc

SEQ ID NO: 1537901 - DNA, 15 bp, Homo sapiens
tcttactatgtggtc

SEQ ID NO: 1537902 - DNA, 15 bp, Homo sapiens
atcttactatgtggt

SEQ ID NO: 1537903 - DNA, 15 bp, Homo sapiens
gatcttactatgtgg

SEQ ID NO: 1537904 - DNA, 15 bp, Homo sapiens
ggatcttactatgtg

SEQ ID NO: 1537905 - DNA, 15 bp, Homo sapiens
gggatcttactatgt

SEQ ID NO: 1537906 - DNA, 15 bp, Homo sapiens
tgggatcttactatg

SEQ ID NO: 1537907 - DNA, 15 bp, Homo sapiens
atgggatcttactat

SEQ ID NO: 1537908 - DNA, 15 bp, Homo sapiens
gatgggatcttacta

SEQ ID NO: 1537909 - DNA, 15 bp, Homo sapiens
agatgggatcttact

SEQ ID NO: 1537910 - DNA, 15 bp, Homo sapiens
gagatgggatcttac

SEQ ID NO: 1537911 - DNA, 15 bp, Homo sapiens
agagatgggatctta

SEQ ID NO: 1537912 - DNA, 15 bp, Homo sapiens
atttagagatgggat

SEQ ID NO: 1537913 - DNA, 15 bp, Homo sapiens
tatttagagatggga

SEQ ID NO: 1537914 - DNA, 15 bp, Homo sapiens
ttatttagagatggg

SEQ ID NO: 1537915 - DNA, 15 bp, Homo sapiens
tttatttagagatgg

SEQ ID NO: 1537916 - DNA, 15 bp, Homo sapiens
ttttatttagagatg

SEQ ID NO: 1537917 - DNA, 15 bp, Homo sapiens
tttttatttagagat

SEQ ID NO: 1537918 - DNA, 15 bp, Homo sapiens
ctttttatttagaga

SEQ ID NO: 1537919 - DNA, 15 bp, Homo sapiens
tctttttatttagag

SEQ ID NO: 1537920 - DNA, 15 bp, Homo sapiens
ttctttttatttaga

SEQ ID NO: 1537921 - DNA, 15 bp, Homo sapiens
cttctttttatttag

SEQ ID NO: 1537922 - DNA, 15 bp, Homo sapiens
tcttctttttattta

SEQ ID NO: 1537923 - DNA, 15 bp, Homo sapiens
ttcttctttttattt

SEQ ID NO: 1537924 - DNA, 15 bp, Homo sapiens
tttcttctttttatt

SEQ ID NO: 1537925 - DNA, 15 bp, Homo sapiens
ctttcttctttttat

SEQ ID NO: 1537926 - DNA, 15 bp, Homo sapiens
tctttcttcttttta

SEQ ID NO: 1537927 - DNA, 15 bp, Homo sapiens
ttctttcttcttttt

SEQ ID NO: 1537928 - DNA, 15 bp, Homo sapiens
ttttctttcttcttt

SEQ ID NO: 1537929 - DNA, 15 bp, Homo sapiens
tttttctttcttctt

SEQ ID NO: 1537930 - DNA, 15 bp, Homo sapiens
ttttttctttcttct

SEQ ID NO: 1537931 - DNA, 15 bp, Homo sapiens
gctttttttctttct

SEQ ID NO: 1537932 - DNA, 15 bp, Homo sapiens
agctttttttctttc

SEQ ID NO: 1537933 - DNA, 15 bp, Homo sapiens
tagctttttttcttt

SEQ ID NO: 1537934 - DNA, 15 bp, Homo sapiens
ttagctttttttctt

SEQ ID NO: 1537935 - DNA, 15 bp, Homo sapiens
tttagctttttttct

SEQ ID NO: 1537936 - DNA, 15 bp, Homo sapiens
ttttagctttttttc

SEQ ID NO: 1537937 - DNA, 15 bp, Homo sapiens
tttttagcttttttt

SEQ ID NO: 1537938 - DNA, 15 bp, Homo sapiens
attttttagcttttt

SEQ ID NO: 1537939 - DNA, 15 bp, Homo sapiens
tattttttagctttt

SEQ ID NO: 1537940 - DNA, 15 bp, Homo sapiens
ttattttttagcttt

SEQ ID NO: 1537941 - DNA, 15 bp, Homo sapiens
attattttttagctt

SEQ ID NO: 1537942 - DNA, 15 bp, Homo sapiens
aattattttttagct

SEQ ID NO: 1537943 - DNA, 15 bp, Homo sapiens
taattattttttagc

SEQ ID NO: 1537944 - DNA, 15 bp, Homo sapiens
gtaattattttttag

SEQ ID NO: 1537945 - DNA, 15 bp, Homo sapiens
tgtaattatttttta

SEQ ID NO: 1537946 - DNA, 15 bp, Homo sapiens
ttgtaattatttttt

SEQ ID NO: 1537947 - DNA, 15 bp, Homo sapiens
attgtaattattttt

SEQ ID NO: 1537948 - DNA, 15 bp, Homo sapiens
tattgtaattatttt

SEQ ID NO: 1537949 - DNA, 15 bp, Homo sapiens
ttattgtaattattt

SEQ ID NO: 1537950 - DNA, 15 bp, Homo sapiens
attattgtaattatt

SEQ ID NO: 1537951 - DNA, 15 bp, Homo sapiens
aattattgtaattat

SEQ ID NO: 1537952 - DNA, 15 bp, Homo sapiens
aaattattgtaatta

SEQ ID NO: 1537953 - DNA, 15 bp, Homo sapiens
aaaattattgtaatt

SEQ ID NO: 1537954 - DNA, 15 bp, Homo sapiens
aaaaattattgtaat

SEQ ID NO: 1537955 - DNA, 15 bp, Homo sapiens
aaaaaattattgtaa

SEQ ID NO: 1537956 - DNA, 15 bp, Homo sapiens
aaaaaaattattgta

SEQ ID NO: 1537957 - DNA, 15 bp, Homo sapiens
aaaaaaaattattgt

SEQ ID NO: 1537958 - DNA, 15 bp, Homo sapiens
aaaaaaaaattattg

SEQ ID NO: 1537959 - DNA, 15 bp, Homo sapiens
tgaaaaaaaaaaaat

SEQ ID NO: 1537960 - DNA, 15 bp, Homo sapiens
cttgaaaaaaaaaaa

SEQ ID NO: 1537961 - DNA, 15 bp, Homo sapiens
tcttgaaaaaaaaaa

SEQ ID NO: 1537962 - DNA, 15 bp, Homo sapiens
gtcttgaaaaaaaaa

SEQ ID NO: 1537963 - DNA, 15 bp, Homo sapiens
tgtcttgaaaaaaaa

SEQ ID NO: 1537964 - DNA, 15 bp, Homo sapiens
ctgtcttgaaaaaaa

SEQ ID NO: 1537965 - DNA, 15 bp, Homo sapiens
actgtcttgaaaaaa

SEQ ID NO: 1537966 - DNA, 15 bp, Homo sapiens
gactgtcttgaaaaa

SEQ ID NO: 1537967 - DNA, 15 bp, Homo sapiens
agactgtcttgaaaa

SEQ ID NO: 1537968 - DNA, 15 bp, Homo sapiens
aagactgtcttgaaa

SEQ ID NO: 1537969 - DNA, 15 bp, Homo sapiens
taagactgtcttgaa

SEQ ID NO: 1537970 - DNA, 15 bp, Homo sapiens
gtaagactgtcttga

SEQ ID NO: 1537971 - DNA, 15 bp, Homo sapiens
agtaagactgtcttg

SEQ ID NO: 1537972 - DNA, 15 bp, Homo sapiens
gagtaagactgtctt

SEQ ID NO: 1537973 - DNA, 15 bp, Homo sapiens
agagtaagactgtct

SEQ ID NO: 1537974 - DNA, 15 bp, Homo sapiens
cagagtaagactgtc

SEQ ID NO: 1537975 - DNA, 15 bp, Homo sapiens
acagagtaagactgt

SEQ ID NO: 1537976 - DNA, 15 bp, Homo sapiens
gacagagtaagactg

SEQ ID NO: 1537977 - DNA, 15 bp, Homo sapiens
ctgggtgacagagta

SEQ ID NO: 1537978 - DNA, 15 bp, Homo sapiens
tgtgccactacactc

SEQ ID NO: 1537979 - DNA, 15 bp, Homo sapiens
ttgtgccactacact

SEQ ID NO: 1537980 - DNA, 15 bp, Homo sapiens
attgtgccactacac

SEQ ID NO: 1537981 - DNA, 15 bp, Homo sapiens
gattgtgccactaca

SEQ ID NO: 1537982 - DNA, 15 bp, Homo sapiens
agattgtgccactac

SEQ ID NO: 1537983 - DNA, 15 bp, Homo sapiens
cagattgtgccacta

SEQ ID NO: 1537984 - DNA, 15 bp, Homo sapiens
ccagattgtgccact

SEQ ID NO: 1537985 - DNA, 15 bp, Homo sapiens
cccagattgtgccac

SEQ ID NO: 1537986 - DNA, 15 bp, Homo sapiens
gcccagattgtgcca

SEQ ID NO: 1537987 - DNA, 15 bp, Homo sapiens
agcccagattgtgcc

SEQ ID NO: 1537988 - DNA, 15 bp, Homo sapiens
gagcccagattgtgc

SEQ ID NO: 1537989 - DNA, 15 bp, Homo sapiens
tgagcccagattgtg

SEQ ID NO: 1537990 - DNA, 15 bp, Homo sapiens
gtgagcccagattgt

SEQ ID NO: 1537991 - DNA, 15 bp, Homo sapiens
agtgagcccagattg

SEQ ID NO: 1537992 - DNA, 15 bp, Homo sapiens
cagtgagcccagatt

SEQ ID NO: 1537993 - DNA, 15 bp, Homo sapiens
tttgcagtgagccca

SEQ ID NO: 1537994 - DNA, 15 bp, Homo sapiens
atttgcagtgagccc

SEQ ID NO: 1537995 - DNA, 15 bp, Homo sapiens
ggaatttgcagtgag

SEQ ID NO: 1537996 - DNA, 15 bp, Homo sapiens
cggaatttgcagtga

SEQ ID NO: 1537997 - DNA, 15 bp, Homo sapiens
gcggaatttgcagtg

SEQ ID NO: 1537998 - DNA, 15 bp, Homo sapiens
agcggaatttgcagt

SEQ ID NO: 1537999 - DNA, 15 bp, Homo sapiens
aagcggaatttgcag

SEQ ID NO: 1538000 - DNA, 15 bp, Homo sapiens
gaagcggaatttgca

SEQ ID NO: 1538001 - DNA, 15 bp, Homo sapiens
ggaagcggaatttgc

SEQ ID NO: 1538002 - DNA, 15 bp, Homo sapiens
gggaagcggaatttg

SEQ ID NO: 1538003 - DNA, 15 bp, Homo sapiens
tgggaagcggaattt

SEQ ID NO: 1538004 - DNA, 15 bp, Homo sapiens
ctgggaagcggaatt

SEQ ID NO: 1538005 - DNA, 15 bp, Homo sapiens
cctgggaagcggaat

SEQ ID NO: 1538006 - DNA, 15 bp, Homo sapiens
acctgggaagcggaa

SEQ ID NO: 1538007 - DNA, 15 bp, Homo sapiens
aacctgggaagcgga

SEQ ID NO: 1538008 - DNA, 15 bp, Homo sapiens
gaacctgggaagcgg

SEQ ID NO: 1538009 - DNA, 15 bp, Homo sapiens
tgaacctgggaagcg

SEQ ID NO: 1538010 - DNA, 15 bp, Homo sapiens
ttgaacctgggaagc

SEQ ID NO: 1538011 - DNA, 15 bp, Homo sapiens
gttgaacctgggaag

SEQ ID NO: 1538012 - DNA, 15 bp, Homo sapiens
agttgaacctgggaa

SEQ ID NO: 1538013 - DNA, 15 bp, Homo sapiens
cagttgaacctggga

SEQ ID NO: 1538014 - DNA, 15 bp, Homo sapiens
tcagttgaacctggg

SEQ ID NO: 1538015 - DNA, 15 bp, Homo sapiens
atcagttgaacctgg

SEQ ID NO: 1538016 - DNA, 15 bp, Homo sapiens
aatcagttgaacctg

SEQ ID NO: 1538017 - DNA, 15 bp, Homo sapiens
gaatcagttgaacct

SEQ ID NO: 1538018 - DNA, 15 bp, Homo sapiens
gaggagaatcagttg

SEQ ID NO: 1538019 - DNA, 15 bp, Homo sapiens
agaggagaatcagtt

SEQ ID NO: 1538020 - DNA, 15 bp, Homo sapiens
gagaggagaatcagt

SEQ ID NO: 1538021 - DNA, 15 bp, Homo sapiens
agagaggagaatcag

SEQ ID NO: 1538022 - DNA, 15 bp, Homo sapiens
gagagaggagaatca

SEQ ID NO: 1538023 - DNA, 15 bp, Homo sapiens
tgagagaggagaatc

SEQ ID NO: 1538024 - DNA, 15 bp, Homo sapiens
ctgagagaggagaat

SEQ ID NO: 1538025 - DNA, 15 bp, Homo sapiens
gctgagagaggagaa

SEQ ID NO: 1538026 - DNA, 15 bp, Homo sapiens
ggctgagagaggaga

SEQ ID NO: 1538027 - DNA, 15 bp, Homo sapiens
aggctgagagaggag

SEQ ID NO: 1538028 - DNA, 15 bp, Homo sapiens
gaggctgagagagga

SEQ ID NO: 1538029 - DNA, 15 bp, Homo sapiens
ggaggctgagagagg

SEQ ID NO: 1538030 - DNA, 15 bp, Homo sapiens
tggaggctgagagag

SEQ ID NO: 1538031 - DNA, 15 bp, Homo sapiens
ttggaggctgagaga

SEQ ID NO: 1538032 - DNA, 15 bp, Homo sapiens
cttggaggctgagag

SEQ ID NO: 1538033 - DNA, 15 bp, Homo sapiens
acttggaggctgaga

SEQ ID NO: 1538034 - DNA, 15 bp, Homo sapiens
tacttggaggctgag

SEQ ID NO: 1538035 - DNA, 15 bp, Homo sapiens
ctacttggaggctga

SEQ ID NO: 1538036 - DNA, 15 bp, Homo sapiens
gctacttggaggctg

SEQ ID NO: 1538037 - DNA, 15 bp, Homo sapiens
agctacttggaggct

SEQ ID NO: 1538038 - DNA, 15 bp, Homo sapiens
cagctacttggaggc

SEQ ID NO: 1538039 - DNA, 15 bp, Homo sapiens
ccagctacttggagg

SEQ ID NO: 1538040 - DNA, 15 bp, Homo sapiens
cccagctacttggag

SEQ ID NO: 1538041 - DNA, 15 bp, Homo sapiens
gtacctgtaatccca

SEQ ID NO: 1538042 - DNA, 15 bp, Homo sapiens
tgtacctgtaatccc

SEQ ID NO: 1538043 - DNA, 15 bp, Homo sapiens
gtgtacctgtaatcc

SEQ ID NO: 1538044 - DNA, 15 bp, Homo sapiens
tgtgtacctgtaatc

SEQ ID NO: 1538045 - DNA, 15 bp, Homo sapiens
atgtgtacctgtaat

SEQ ID NO: 1538046 - DNA, 15 bp, Homo sapiens
attaatatcatcata

SEQ ID NO: 1538047 - DNA, 15 bp, Homo sapiens
aattaatatcatcat

SEQ ID NO: 1538048 - DNA, 15 bp, Homo sapiens
aaattaatatcatca

SEQ ID NO: 1538049 - DNA, 15 bp, Homo sapiens
gaaattaatatcatc

SEQ ID NO: 1538050 - DNA, 15 bp, Homo sapiens
agaaattaatatcat

SEQ ID NO: 1538051 - DNA, 15 bp, Homo sapiens
aagaaattaatatca

SEQ ID NO: 1538052 - DNA, 15 bp, Homo sapiens
aaagaaattaatatc

SEQ ID NO: 1538053 - DNA, 15 bp, Homo sapiens
aaaagaaattaatat

SEQ ID NO: 1538054 - DNA, 15 bp, Homo sapiens
taaaagaaattaata

SEQ ID NO: 1538055 - DNA, 15 bp, Homo sapiens
ttaaaagaaattaat

SEQ ID NO: 1538056 - DNA, 15 bp, Homo sapiens
attaaaagaaattaa

SEQ ID NO: 1538057 - DNA, 15 bp, Homo sapiens
aattaaaagaaatta

SEQ ID NO: 1538058 - DNA, 15 bp, Homo sapiens
aaattaaaagaaatt

SEQ ID NO: 1538059 - DNA, 15 bp, Homo sapiens
aaaattaaaagaaat

SEQ ID NO: 1538060 - DNA, 15 bp, Homo sapiens
gaaaattaaaagaaa

SEQ ID NO: 1538061 - DNA, 15 bp, Homo sapiens
agaaaattaaaagaa

SEQ ID NO: 1538062 - DNA, 15 bp, Homo sapiens
gagaaaattaaaaga

SEQ ID NO: 1538063 - DNA, 15 bp, Homo sapiens
agagaaaattaaaag

SEQ ID NO: 1538064 - DNA, 15 bp, Homo sapiens
cagagaaaattaaaa

SEQ ID NO: 1538065 - DNA, 15 bp, Homo sapiens
tcagagaaaattaaa

SEQ ID NO: 1538066 - DNA, 15 bp, Homo sapiens
gtcagagaaaattaa

SEQ ID NO: 1538067 - DNA, 15 bp, Homo sapiens
tgtcagagaaaatta

SEQ ID NO: 1538068 - DNA, 15 bp, Homo sapiens
gtgtcagagaaaatt

SEQ ID NO: 1538069 - DNA, 15 bp, Homo sapiens
cgtgtcagagaaaat

SEQ ID NO: 1538070 - DNA, 15 bp, Homo sapiens
acgtgtcagagaaaa

SEQ ID NO: 1538071 - DNA, 15 bp, Homo sapiens
cacgtgtcagagaaa

SEQ ID NO: 1538072 - DNA, 15 bp, Homo sapiens
acacgtgtcagagaa

SEQ ID NO: 1538073 - DNA, 15 bp, Homo sapiens
aacacgtgtcagaga

SEQ ID NO: 1538074 - DNA, 15 bp, Homo sapiens
aaacacgtgtcagag

SEQ ID NO: 1538075 - DNA, 15 bp, Homo sapiens
taaacacgtgtcaga

SEQ ID NO: 1538076 - DNA, 15 bp, Homo sapiens
ataaacacgtgtcag

SEQ ID NO: 1538077 - DNA, 15 bp, Homo sapiens
aataaacacgtgtca

SEQ ID NO: 1538078 - DNA, 15 bp, Homo sapiens
aaataaacacgtgtc

SEQ ID NO: 1538079 - DNA, 15 bp, Homo sapiens
taaataaacacgtgt

SEQ ID NO: 1538080 - DNA, 15 bp, Homo sapiens
ataaataaacacgtg

SEQ ID NO: 1538081 - DNA, 15 bp, Homo sapiens
cataaataaacacgt

SEQ ID NO: 1538082 - DNA, 15 bp, Homo sapiens
tcataaataaacacg

SEQ ID NO: 1538083 - DNA, 15 bp, Homo sapiens
gtcataaataaacac

SEQ ID NO: 1538084 - DNA, 15 bp, Homo sapiens
ggtcataaataaaca

SEQ ID NO: 1538085 - DNA, 15 bp, Homo sapiens
gggtcataaataaac

SEQ ID NO: 1538086 - DNA, 15 bp, Homo sapiens
agggtcataaataaa

SEQ ID NO: 1538087 - DNA, 15 bp, Homo sapiens
aagggtcataaataa

SEQ ID NO: 1538088 - DNA, 15 bp, Homo sapiens
caagggtcataaata

SEQ ID NO: 1538089 - DNA, 15 bp, Homo sapiens
tcaagggtcataaat

SEQ ID NO: 1538090 - DNA, 15 bp, Homo sapiens
atcaagggtcataaa

SEQ ID NO: 1538091 - DNA, 15 bp, Homo sapiens
aatcaagggtcataa

SEQ ID NO: 1538092 - DNA, 15 bp, Homo sapiens
gaatcaagggtcata

SEQ ID NO: 1538093 - DNA, 15 bp, Homo sapiens
tgaatcaagggtcat

SEQ ID NO: 1538094 - DNA, 15 bp, Homo sapiens
ttgaatcaagggtca

SEQ ID NO: 1538095 - DNA, 15 bp, Homo sapiens
cttgaatcaagggtc

SEQ ID NO: 1538096 - DNA, 15 bp, Homo sapiens
ccttgaatcaagggt

SEQ ID NO: 1538097 - DNA, 15 bp, Homo sapiens
tccttgaatcaaggg

SEQ ID NO: 1538098 - DNA, 15 bp, Homo sapiens
ctccttgaatcaagg

SEQ ID NO: 1538099 - DNA, 15 bp, Homo sapiens
actccttgaatcaag

SEQ ID NO: 1538100 - DNA, 15 bp, Homo sapiens
cactccttgaatcaa

SEQ ID NO: 1538101 - DNA, 15 bp, Homo sapiens
gcactccttgaatca

SEQ ID NO: 1538102 - DNA, 15 bp, Homo sapiens
agcactccttgaatc

SEQ ID NO: 1538103 - DNA, 15 bp, Homo sapiens
aagcactccttgaat

SEQ ID NO: 1538104 - DNA, 15 bp, Homo sapiens
aaagcactccttgaa

SEQ ID NO: 1538105 - DNA, 15 bp, Homo sapiens
caaagcactccttga

SEQ ID NO: 1538106 - DNA, 15 bp, Homo sapiens
acaaagcactccttg

SEQ ID NO: 1538107 - DNA, 15 bp, Homo sapiens
cacaaagcactcctt

SEQ ID NO: 1538108 - DNA, 15 bp, Homo sapiens
acacaaagcactcct

SEQ ID NO: 1538109 - DNA, 15 bp, Homo sapiens
aacacaaagcactcc

SEQ ID NO: 1538110 - DNA, 15 bp, Homo sapiens
taacacaaagcactc

SEQ ID NO: 1538111 - DNA, 15 bp, Homo sapiens
gtaacacaaagcact

SEQ ID NO: 1538112 - DNA, 15 bp, Homo sapiens
agtaacacaaagcac

SEQ ID NO: 1538113 - DNA, 15 bp, Homo sapiens
gagtaacacaaagca

SEQ ID NO: 1538114 - DNA, 15 bp, Homo sapiens
ggagtaacacaaagc

SEQ ID NO: 1538115 - DNA, 15 bp, Homo sapiens
aggagtaacacaaag

SEQ ID NO: 1538116 - DNA, 15 bp, Homo sapiens
caggagtaacacaaa

SEQ ID NO: 1538117 - DNA, 15 bp, Homo sapiens
ccaggagtaacacaa

SEQ ID NO: 1538118 - DNA, 15 bp, Homo sapiens
tccaggagtaacaca

SEQ ID NO: 1538119 - DNA, 15 bp, Homo sapiens
atccaggagtaacac

SEQ ID NO: 1538120 - DNA, 15 bp, Homo sapiens
catccaggagtaaca

SEQ ID NO: 1538121 - DNA, 15 bp, Homo sapiens
acatccaggagtaac

SEQ ID NO: 1538122 - DNA, 15 bp, Homo sapiens
tacatccaggagtaa

SEQ ID NO: 1538123 - DNA, 15 bp, Homo sapiens
gtacatccaggagta

SEQ ID NO: 1538124 - DNA, 15 bp, Homo sapiens
agtacatccaggagt

SEQ ID NO: 1538125 - DNA, 15 bp, Homo sapiens
cagtacatccaggag

SEQ ID NO: 1538126 - DNA, 15 bp, Homo sapiens
ccagtacatccagga

SEQ ID NO: 1538127 - DNA, 15 bp, Homo sapiens
accagtacatccagg

SEQ ID NO: 1538128 - DNA, 15 bp, Homo sapiens
caccagtacatccag

SEQ ID NO: 1538129 - DNA, 15 bp, Homo sapiens
gcaccagtacatcca

SEQ ID NO: 1538130 - DNA, 15 bp, Homo sapiens
tgcaccagtacatcc

SEQ ID NO: 1538131 - DNA, 15 bp, Homo sapiens
gtgcaccagtacatc

SEQ ID NO: 1538132 - DNA, 15 bp, Homo sapiens
tgtgcaccagtacat

SEQ ID NO: 1538133 - DNA, 15 bp, Homo sapiens
ttgtgcaccagtaca

SEQ ID NO: 1538134 - DNA, 15 bp, Homo sapiens
attgtgcaccagtac

SEQ ID NO: 1538135 - DNA, 15 bp, Homo sapiens
gattgtgcaccagta

SEQ ID NO: 1538136 - DNA, 15 bp, Homo sapiens
agattgtgcaccagt

SEQ ID NO: 1538137 - DNA, 15 bp, Homo sapiens
gagattgtgcaccag

SEQ ID NO: 1538138 - DNA, 15 bp, Homo sapiens
tgagattgtgcacca

SEQ ID NO: 1538139 - DNA, 15 bp, Homo sapiens
ttgagattgtgcacc

SEQ ID NO: 1538140 - DNA, 15 bp, Homo sapiens
tttgagattgtgcac

SEQ ID NO: 1538141 - DNA, 15 bp, Homo sapiens
atttgagattgtgca

SEQ ID NO: 1538142 - DNA, 15 bp, Homo sapiens
aatttgagattgtgc

SEQ ID NO: 1538143 - DNA, 15 bp, Homo sapiens
aaatttgagattgtg

SEQ ID NO: 1538144 - DNA, 15 bp, Homo sapiens
aaaatttgagattgt

SEQ ID NO: 1538145 - DNA, 15 bp, Homo sapiens
gaaaatttgagattg

SEQ ID NO: 1538146 - DNA, 15 bp, Homo sapiens
tgaaaatttgagatt

SEQ ID NO: 1538147 - DNA, 15 bp, Homo sapiens
ttgaaaatttgagat

SEQ ID NO: 1538148 - DNA, 15 bp, Homo sapiens
attgaaaatttgaga

SEQ ID NO: 1538149 - DNA, 15 bp, Homo sapiens
aattgaaaatttgag

SEQ ID NO: 1538150 - DNA, 15 bp, Homo sapiens
aaattgaaaatttga

SEQ ID NO: 1538151 - DNA, 15 bp, Homo sapiens
aaaattgaaaatttg

SEQ ID NO: 1538152 - DNA, 15 bp, Homo sapiens
aaaaattgaaaattt

SEQ ID NO: 1538153 - DNA, 15 bp, Homo sapiens
caaaaattgaaaatt

SEQ ID NO: 1538154 - DNA, 15 bp, Homo sapiens
gcaaaaattgaaaat

SEQ ID NO: 1538155 - DNA, 15 bp, Homo sapiens
tgcaaaaattgaaaa

SEQ ID NO: 1538156 - DNA, 15 bp, Homo sapiens
gtgcaaaaattgaaa

SEQ ID NO: 1538157 - DNA, 15 bp, Homo sapiens
tgtgcaaaaattgaa

SEQ ID NO: 1538158 - DNA, 15 bp, Homo sapiens
ctgtgcaaaaattga

SEQ ID NO: 1538159 - DNA, 15 bp, Homo sapiens
tctgtgcaaaaattg

SEQ ID NO: 1538160 - DNA, 15 bp, Homo sapiens
ttctgtgcaaaaatt

SEQ ID NO: 1538161 - DNA, 15 bp, Homo sapiens
attctgtgcaaaaat

SEQ ID NO: 1538162 - DNA, 15 bp, Homo sapiens
cattctgtgcaaaaa

SEQ ID NO: 1538163 - DNA, 15 bp, Homo sapiens
ccattctgtgcaaaa

SEQ ID NO: 1538164 - DNA, 15 bp, Homo sapiens
cccattctgtgcaaa

SEQ ID NO: 1538165 - DNA, 15 bp, Homo sapiens
tcccattctgtgcaa

SEQ ID NO: 1538166 - DNA, 15 bp, Homo sapiens
ttcccattctgtgca

SEQ ID NO: 1538167 - DNA, 15 bp, Homo sapiens
cttcccattctgtgc

SEQ ID NO: 1538168 - DNA, 15 bp, Homo sapiens
acttcccattctgtg

SEQ ID NO: 1538169 - DNA, 15 bp, Homo sapiens
gacttcccattctgt

SEQ ID NO: 1538170 - DNA, 15 bp, Homo sapiens
agacttcccattctg

SEQ ID NO: 1538171 - DNA, 15 bp, Homo sapiens
cagacttcccattct

SEQ ID NO: 1538172 - DNA, 15 bp, Homo sapiens
gcagacttcccattc

SEQ ID NO: 1538173 - DNA, 15 bp, Homo sapiens
ggcagacttcccatt

SEQ ID NO: 1538174 - DNA, 15 bp, Homo sapiens
gggcagacttcccat

SEQ ID NO: 1538175 - DNA, 15 bp, Homo sapiens
tgggcagacttccca

SEQ ID NO: 1538176 - DNA, 15 bp, Homo sapiens
ctgggcagacttccc

SEQ ID NO: 1538177 - DNA, 15 bp, Homo sapiens
actgggcagacttcc

SEQ ID NO: 1538178 - DNA, 15 bp, Homo sapiens
aactgggcagacttc

SEQ ID NO: 1538179 - DNA, 15 bp, Homo sapiens
aaactgggcagactt

SEQ ID NO: 1538180 - DNA, 15 bp, Homo sapiens
gaaactgggcagact

SEQ ID NO: 1538181 - DNA, 15 bp, Homo sapiens
tgaaactgggcagac

SEQ ID NO: 1538182 - DNA, 15 bp, Homo sapiens
atgaaactgggcaga

SEQ ID NO: 1538183 - DNA, 15 bp, Homo sapiens
aatgaaactgggcag

SEQ ID NO: 1538184 - DNA, 15 bp, Homo sapiens
aaatgaaactgggca

SEQ ID NO: 1538185 - DNA, 15 bp, Homo sapiens
gaaatgaaactgggc

SEQ ID NO: 1538186 - DNA, 15 bp, Homo sapiens
agaaatgaaactggg

SEQ ID NO: 1538187 - DNA, 15 bp, Homo sapiens
tagaaatgaaactgg

SEQ ID NO: 1538188 - DNA, 15 bp, Homo sapiens
ttagaaatgaaactg

SEQ ID NO: 1538189 - DNA, 15 bp, Homo sapiens
attagaaatgaaact

SEQ ID NO: 1538190 - DNA, 15 bp, Homo sapiens
gattagaaatgaaac

SEQ ID NO: 1538191 - DNA, 15 bp, Homo sapiens
agattagaaatgaaa

SEQ ID NO: 1538192 - DNA, 15 bp, Homo sapiens
cagattagaaatgaa

SEQ ID NO: 1538193 - DNA, 15 bp, Homo sapiens
ccagattagaaatga

SEQ ID NO: 1538194 - DNA, 15 bp, Homo sapiens
cccagattagaaatg

SEQ ID NO: 1538195 - DNA, 15 bp, Homo sapiens
acccagattagaaat

SEQ ID NO: 1538196 - DNA, 15 bp, Homo sapiens
aacccagattagaaa

SEQ ID NO: 1538197 - DNA, 15 bp, Homo sapiens
taacccagattagaa

SEQ ID NO: 1538198 - DNA, 15 bp, Homo sapiens
ataacccagattaga

SEQ ID NO: 1538199 - DNA, 15 bp, Homo sapiens
aataacccagattag

SEQ ID NO: 1538200 - DNA, 15 bp, Homo sapiens
aaataacccagatta

SEQ ID NO: 1538201 - DNA, 15 bp, Homo sapiens
aaaataacccagatt

SEQ ID NO: 1538202 - DNA, 15 bp, Homo sapiens
aaaaataacccagat

SEQ ID NO: 1538203 - DNA, 15 bp, Homo sapiens
gaaaaataacccaga

SEQ ID NO: 1538204 - DNA, 15 bp, Homo sapiens
ggaaaaataacccag

SEQ ID NO: 1538205 - DNA, 15 bp, Homo sapiens
gggaaaaataaccca

SEQ ID NO: 1538206 - DNA, 15 bp, Homo sapiens
ggggaaaaataaccc

SEQ ID NO: 1538207 - DNA, 15 bp, Homo sapiens
aggggaaaaataacc

SEQ ID NO: 1538208 - DNA, 15 bp, Homo sapiens
gaggggaaaaataac

SEQ ID NO: 1538209 - DNA, 15 bp, Homo sapiens
tgaggggaaaaataa

SEQ ID NO: 1538210 - DNA, 15 bp, Homo sapiens
ttgaggggaaaaata

SEQ ID NO: 1538211 - DNA, 15 bp, Homo sapiens
tttgaggggaaaaat

SEQ ID NO: 1538212 - DNA, 15 bp, Homo sapiens
ttttgaggggaaaaa

SEQ ID NO: 1538213 - DNA, 15 bp, Homo sapiens
cttttgaggggaaaa

SEQ ID NO: 1538214 - DNA, 15 bp, Homo sapiens
tcttttgaggggaaa

SEQ ID NO: 1538215 - DNA, 15 bp, Homo sapiens
atcttttgaggggaa

SEQ ID NO: 1538216 - DNA, 15 bp, Homo sapiens
tatcttttgagggga

SEQ ID NO: 1538217 - DNA, 15 bp, Homo sapiens
ttatcttttgagggg

SEQ ID NO: 1538218 - DNA, 15 bp, Homo sapiens
gttatcttttgaggg

SEQ ID NO: 1538219 - DNA, 15 bp, Homo sapiens
ggttatcttttgagg

SEQ ID NO: 1538220 - DNA, 15 bp, Homo sapiens
aggttatcttttgag

SEQ ID NO: 1538221 - DNA, 15 bp, Homo sapiens
caggttatcttttga

SEQ ID NO: 1538222 - DNA, 15 bp, Homo sapiens
tcaggttatcttttg

SEQ ID NO: 1538223 - DNA, 15 bp, Homo sapiens
atcaggttatctttt

SEQ ID NO: 1538224 - DNA, 15 bp, Homo sapiens
aatcaggttatcttt

SEQ ID NO: 1538225 - DNA, 15 bp, Homo sapiens
aaatcaggttatctt

SEQ ID NO: 1538226 - DNA, 15 bp, Homo sapiens
gaaatcaggttatct

SEQ ID NO: 1538227 - DNA, 15 bp, Homo sapiens
tgaaatcaggttatc

SEQ ID NO: 1538228 - DNA, 15 bp, Homo sapiens
ctgaaatcaggttat

SEQ ID NO: 1538229 - DNA, 15 bp, Homo sapiens
actgaaatcaggtta

SEQ ID NO: 1538230 - DNA, 15 bp, Homo sapiens
gactgaaatcaggtt

SEQ ID NO: 1538231 - DNA, 15 bp, Homo sapiens
tgactgaaatcaggt

SEQ ID NO: 1538232 - DNA, 15 bp, Homo sapiens
gtgactgaaatcagg

SEQ ID NO: 1538233 - DNA, 15 bp, Homo sapiens
ggtgactgaaatcag

SEQ ID NO: 1538234 - DNA, 15 bp, Homo sapiens
tggtgactgaaatca

SEQ ID NO: 1538235 - DNA, 15 bp, Homo sapiens
atggtgactgaaatc

SEQ ID NO: 1538236 - DNA, 15 bp, Homo sapiens
catggtgactgaaat

SEQ ID NO: 1538237 - DNA, 15 bp, Homo sapiens
tcatggtgactgaaa

SEQ ID NO: 1538238 - DNA, 15 bp, Homo sapiens
gtcatggtgactgaa

SEQ ID NO: 1538239 - DNA, 15 bp, Homo sapiens
agtcatggtgactga

SEQ ID NO: 1538240 - DNA, 15 bp, Homo sapiens
cagtcatggtgactg

SEQ ID NO: 1538241 - DNA, 15 bp, Homo sapiens
ccagtcatggtgact

SEQ ID NO: 1538242 - DNA, 15 bp, Homo sapiens
gccagtcatggtgac

SEQ ID NO: 1538243 - DNA, 15 bp, Homo sapiens
tgccagtcatggtga

SEQ ID NO: 1538244 - DNA, 15 bp, Homo sapiens
atgccagtcatggtg

SEQ ID NO: 1538245 - DNA, 15 bp, Homo sapiens
catgccagtcatggt

SEQ ID NO: 1538246 - DNA, 15 bp, Homo sapiens
tcatgccagtcatgg

SEQ ID NO: 1538247 - DNA, 15 bp, Homo sapiens
ttcatgccagtcatg

SEQ ID NO: 1538248 - DNA, 15 bp, Homo sapiens
attcatgccagtcat

SEQ ID NO: 1538249 - DNA, 15 bp, Homo sapiens
tattcatgccagtca

SEQ ID NO: 1538250 - DNA, 15 bp, Homo sapiens
atattcatgccagtc

SEQ ID NO: 1538251 - DNA, 15 bp, Homo sapiens
aatattcatgccagt

SEQ ID NO: 1538252 - DNA, 15 bp, Homo sapiens
gaatattcatgccag

SEQ ID NO: 1538253 - DNA, 15 bp, Homo sapiens
agaatattcatgcca

SEQ ID NO: 1538254 - DNA, 15 bp, Homo sapiens
gagaatattcatgcc

SEQ ID NO: 1538255 - DNA, 15 bp, Homo sapiens
tgagaatattcatgc

SEQ ID NO: 1538256 - DNA, 15 bp, Homo sapiens
atgagaatattcatg

SEQ ID NO: 1538257 - DNA, 15 bp, Homo sapiens
catgagaatattcat

SEQ ID NO: 1538258 - DNA, 15 bp, Homo sapiens
gcatgagaatattca

SEQ ID NO: 1538259 - DNA, 15 bp, Homo sapiens
agcatgagaatattc

SEQ ID NO: 1538260 - DNA, 15 bp, Homo sapiens
aagcatgagaatatt

SEQ ID NO: 1538261 - DNA, 15 bp, Homo sapiens
aaagcatgagaatat

SEQ ID NO: 1538262 - DNA, 15 bp, Homo sapiens
gaaagcatgagaata

SEQ ID NO: 1538263 - DNA, 15 bp, Homo sapiens
ggaaagcatgagaat

SEQ ID NO: 1538264 - DNA, 15 bp, Homo sapiens
aggaaagcatgagaa

SEQ ID NO: 1538265 - DNA, 15 bp, Homo sapiens
aaggaaagcatgaga

SEQ ID NO: 1538266 - DNA, 15 bp, Homo sapiens
aaaggaaagcatgag

SEQ ID NO: 1538267 - DNA, 15 bp, Homo sapiens
aaaaggaaagcatga

SEQ ID NO: 1538268 - DNA, 15 bp, Homo sapiens
aaaaaggaaagcatg

SEQ ID NO: 1538269 - DNA, 15 bp, Homo sapiens
taaaaaggaaagcat

SEQ ID NO: 1538270 - DNA, 15 bp, Homo sapiens
gtaaaaaggaaagca

SEQ ID NO: 1538271 - DNA, 15 bp, Homo sapiens
agtaaaaaggaaagc

SEQ ID NO: 1538272 - DNA, 15 bp, Homo sapiens
aagtaaaaaggaaag

SEQ ID NO: 1538273 - DNA, 15 bp, Homo sapiens
aaagtaaaaaggaaa

SEQ ID NO: 1538274 - DNA, 15 bp, Homo sapiens
caaagtaaaaaggaa

SEQ ID NO: 1538275 - DNA, 15 bp, Homo sapiens
acaaagtaaaaagga

SEQ ID NO: 1538276 - DNA, 15 bp, Homo sapiens
aacaaagtaaaaagg

SEQ ID NO: 1538277 - DNA, 15 bp, Homo sapiens
taacaaagtaaaaag

SEQ ID NO: 1538278 - DNA, 15 bp, Homo sapiens
ttaacaaagtaaaaa

SEQ ID NO: 1538279 - DNA, 15 bp, Homo sapiens
gttaacaaagtaaaa

SEQ ID NO: 1538280 - DNA, 15 bp, Homo sapiens
tgttaacaaagtaaa

SEQ ID NO: 1538281 - DNA, 15 bp, Homo sapiens
gtgttaacaaagtaa

SEQ ID NO: 1538282 - DNA, 15 bp, Homo sapiens
agtgttaacaaagta

SEQ ID NO: 1538283 - DNA, 15 bp, Homo sapiens
aagtgttaacaaagt

SEQ ID NO: 1538284 - DNA, 15 bp, Homo sapiens
taagtgttaacaaag

SEQ ID NO: 1538285 - DNA, 15 bp, Homo sapiens
ttaagtgttaacaaa

SEQ ID NO: 1538286 - DNA, 15 bp, Homo sapiens
gttaagtgttaacaa

SEQ ID NO: 1538287 - DNA, 15 bp, Homo sapiens
agttaagtgttaaca

SEQ ID NO: 1538288 - DNA, 15 bp, Homo sapiens
aagttaagtgttaac

SEQ ID NO: 1538289 - DNA, 15 bp, Homo sapiens
aaagttaagtgttaa

SEQ ID NO: 1538290 - DNA, 15 bp, Homo sapiens
taaagttaagtgtta

SEQ ID NO: 1538291 - DNA, 15 bp, Homo sapiens
ataaagttaagtgtt

SEQ ID NO: 1538292 - DNA, 15 bp, Homo sapiens
gataaagttaagtgt

SEQ ID NO: 1538293 - DNA, 15 bp, Homo sapiens
agataaagttaagtg

SEQ ID NO: 1538294 - DNA, 15 bp, Homo sapiens
cagataaagttaagt

SEQ ID NO: 1538295 - DNA, 15 bp, Homo sapiens
ccagataaagttaag

SEQ ID NO: 1538296 - DNA, 15 bp, Homo sapiens
tccagataaagttaa

SEQ ID NO: 1538297 - DNA, 15 bp, Homo sapiens
ttccagataaagtta

SEQ ID NO: 1538298 - DNA, 15 bp, Homo sapiens
attccagataaagtt

SEQ ID NO: 1538299 - DNA, 15 bp, Homo sapiens
tattccagataaagt

SEQ ID NO: 1538300 - DNA, 15 bp, Homo sapiens
ttattccagataaag

SEQ ID NO: 1538301 - DNA, 15 bp, Homo sapiens
attattccagataaa

SEQ ID NO: 1538302 - DNA, 15 bp, Homo sapiens
tattattccagataa

SEQ ID NO: 1538303 - DNA, 15 bp, Homo sapiens
atattattccagata

SEQ ID NO: 1538304 - DNA, 15 bp, Homo sapiens
aatattattccagat

SEQ ID NO: 1538305 - DNA, 15 bp, Homo sapiens
caatattattccaga

SEQ ID NO: 1538306 - DNA, 15 bp, Homo sapiens
acaatattattccag

SEQ ID NO: 1538307 - DNA, 15 bp, Homo sapiens
aacaatattattcca

SEQ ID NO: 1538308 - DNA, 15 bp, Homo sapiens
taacaatattattcc

SEQ ID NO: 1538309 - DNA, 15 bp, Homo sapiens
ataacaatattattc

SEQ ID NO: 1538310 - DNA, 15 bp, Homo sapiens
cataacaatattatt

SEQ ID NO: 1538311 - DNA, 15 bp, Homo sapiens
tcataacaatattat

SEQ ID NO: 1538312 - DNA, 15 bp, Homo sapiens
atcataacaatatta

SEQ ID NO: 1538313 - DNA, 15 bp, Homo sapiens
aatcataacaatatt

SEQ ID NO: 1538314 - DNA, 15 bp, Homo sapiens
aaatcataacaatat

SEQ ID NO: 1538315 - DNA, 15 bp, Homo sapiens
gaaatcataacaata

SEQ ID NO: 1538316 - DNA, 15 bp, Homo sapiens
agaaatcataacaat

SEQ ID NO: 1538317 - DNA, 15 bp, Homo sapiens
gagaaatcataacaa

SEQ ID NO: 1538318 - DNA, 15 bp, Homo sapiens
cgagaaatcataaca

SEQ ID NO: 1538319 - DNA, 15 bp, Homo sapiens
acgagaaatcataac

SEQ ID NO: 1538320 - DNA, 15 bp, Homo sapiens
aacgagaaatcataa

SEQ ID NO: 1538321 - DNA, 15 bp, Homo sapiens
aaacgagaaatcata

SEQ ID NO: 1538322 - DNA, 15 bp, Homo sapiens
taaacgagaaatcat

SEQ ID NO: 1538323 - DNA, 15 bp, Homo sapiens
ctaaacgagaaatca

SEQ ID NO: 1538324 - DNA, 15 bp, Homo sapiens
tctaaacgagaaatc

SEQ ID NO: 1538325 - DNA, 15 bp, Homo sapiens
ctctaaacgagaaat

SEQ ID NO: 1538326 - DNA, 15 bp, Homo sapiens
tctctaaacgagaaa

SEQ ID NO: 1538327 - DNA, 15 bp, Homo sapiens
ttctctaaacgagaa

SEQ ID NO: 1538328 - DNA, 15 bp, Homo sapiens
attctctaaacgaga

SEQ ID NO: 1538329 - DNA, 15 bp, Homo sapiens
tattctctaaacgag

SEQ ID NO: 1538330 - DNA, 15 bp, Homo sapiens
ctattctctaaacga

SEQ ID NO: 1538331 - DNA, 15 bp, Homo sapiens
tctattctctaaacg

SEQ ID NO: 1538332 - DNA, 15 bp, Homo sapiens
atctattctctaaac

SEQ ID NO: 1538333 - DNA, 15 bp, Homo sapiens
aatctattctctaaa

SEQ ID NO: 1538334 - DNA, 15 bp, Homo sapiens
aaatctattctctaa

SEQ ID NO: 1538335 - DNA, 15 bp, Homo sapiens
caaatctattctcta

SEQ ID NO: 1538336 - DNA, 15 bp, Homo sapiens
acaaatctattctct

SEQ ID NO: 1538337 - DNA, 15 bp, Homo sapiens
aacaaatctattctc

SEQ ID NO: 1538338 - DNA, 15 bp, Homo sapiens
aaacaaatctattct

SEQ ID NO: 1538339 - DNA, 15 bp, Homo sapiens
aaaacaaatctattc

SEQ ID NO: 1538340 - DNA, 15 bp, Homo sapiens
aaaaacaaatctatt

SEQ ID NO: 1538341 - DNA, 15 bp, Homo sapiens
aaaaaacaaatctat

SEQ ID NO: 1538342 - DNA, 15 bp, Homo sapiens
taaaaaacaaatcta

SEQ ID NO: 1538343 - DNA, 15 bp, Homo sapiens
gtaaaaaacaaatct

SEQ ID NO: 1538344 - DNA, 15 bp, Homo sapiens
tgtaaaaaacaaatc

SEQ ID NO: 1538345 - DNA, 15 bp, Homo sapiens
ttgtaaaaaacaaat

SEQ ID NO: 1538346 - DNA, 15 bp, Homo sapiens
tttgtaaaaaacaaa

SEQ ID NO: 1538347 - DNA, 15 bp, Homo sapiens
atttgtaaaaaacaa

SEQ ID NO: 1538348 - DNA, 15 bp, Homo sapiens
aatttgtaaaaaaca

SEQ ID NO: 1538349 - DNA, 15 bp, Homo sapiens
caatttgtaaaaaac

SEQ ID NO: 1538350 - DNA, 15 bp, Homo sapiens
gcaatttgtaaaaaa

SEQ ID NO: 1538351 - DNA, 15 bp, Homo sapiens
agcaatttgtaaaaa

SEQ ID NO: 1538352 - DNA, 15 bp, Homo sapiens
tagcaatttgtaaaa

SEQ ID NO: 1538353 - DNA, 15 bp, Homo sapiens
ttagcaatttgtaaa

SEQ ID NO: 1538354 - DNA, 15 bp, Homo sapiens
attagcaatttgtaa

SEQ ID NO: 1538355 - DNA, 15 bp, Homo sapiens
tattagcaatttgta

SEQ ID NO: 1538356 - DNA, 15 bp, Homo sapiens
ttattagcaatttgt

SEQ ID NO: 1538357 - DNA, 15 bp, Homo sapiens
tttattagcaatttg

SEQ ID NO: 1538358 - DNA, 15 bp, Homo sapiens
atttattagcaattt

SEQ ID NO: 1538359 - DNA, 15 bp, Homo sapiens
aatttattagcaatt

SEQ ID NO: 1538360 - DNA, 15 bp, Homo sapiens
caatttattagcaat

SEQ ID NO: 1538361 - DNA, 15 bp, Homo sapiens
tcaatttattagcaa

SEQ ID NO: 1538362 - DNA, 15 bp, Homo sapiens
atcaatttattagca

SEQ ID NO: 1538363 - DNA, 15 bp, Homo sapiens
tatcaatttattagc

SEQ ID NO: 1538364 - DNA, 15 bp, Homo sapiens
ttatcaatttattag

SEQ ID NO: 1538365 - DNA, 15 bp, Homo sapiens
attatcaatttatta

SEQ ID NO: 1538366 - DNA, 15 bp, Homo sapiens
tattatcaatttatt

SEQ ID NO: 1538367 - DNA, 15 bp, Homo sapiens
ttattatcaatttat

SEQ ID NO: 1538368 - DNA, 15 bp, Homo sapiens
tttattatcaattta

SEQ ID NO: 1538369 - DNA, 15 bp, Homo sapiens
ttttattatcaattt

SEQ ID NO: 1538370 - DNA, 15 bp, Homo sapiens
tttttattatcaatt

SEQ ID NO: 1538371 - DNA, 15 bp, Homo sapiens
atttttattatcaat

SEQ ID NO: 1538372 - DNA, 15 bp, Homo sapiens
catttttattatcaa

SEQ ID NO: 1538373 - DNA, 15 bp, Homo sapiens
tcatttttattatca

SEQ ID NO: 1538374 - DNA, 15 bp, Homo sapiens
atcatttttattatc

SEQ ID NO: 1538375 - DNA, 15 bp, Homo sapiens
catcatttttattat

SEQ ID NO: 1538376 - DNA, 15 bp, Homo sapiens
gcatcatttttatta

SEQ ID NO: 1538377 - DNA, 15 bp, Homo sapiens
agcatcatttttatt

SEQ ID NO: 1538378 - DNA, 15 bp, Homo sapiens
aagcatcatttttat

SEQ ID NO: 1538379 - DNA, 15 bp, Homo sapiens
aaagcatcattttta

SEQ ID NO: 1538380 - DNA, 15 bp, Homo sapiens
taaagcatcattttt

SEQ ID NO: 1538381 - DNA, 15 bp, Homo sapiens
ataaagcatcatttt

SEQ ID NO: 1538382 - DNA, 15 bp, Homo sapiens
aataaagcatcattt

SEQ ID NO: 1538383 - DNA, 15 bp, Homo sapiens
aaataaagcatcatt

SEQ ID NO: 1538384 - DNA, 15 bp, Homo sapiens
aaaataaagcatcat

SEQ ID NO: 1538385 - DNA, 15 bp, Homo sapiens
aaaaataaagcatca

SEQ ID NO: 1538386 - DNA, 15 bp, Homo sapiens
aaaaaataaagcatc

SEQ ID NO: 1538387 - DNA, 15 bp, Homo sapiens
aaaaaaataaagcat

SEQ ID NO: 1538388 - DNA, 15 bp, Homo sapiens
gaaaaaaataaagca

SEQ ID NO: 1538389 - DNA, 15 bp, Homo sapiens
ggaaaaaaataaagc

SEQ ID NO: 1538390 - DNA, 15 bp, Homo sapiens
aggaaaaaaataaag

SEQ ID NO: 1538391 - DNA, 15 bp, Homo sapiens
gaggaaaaaaataaa

SEQ ID NO: 1538392 - DNA, 15 bp, Homo sapiens
agaggaaaaaaataa

SEQ ID NO: 1538393 - DNA, 15 bp, Homo sapiens
gagaggaaaaaaata

SEQ ID NO: 1538394 - DNA, 15 bp, Homo sapiens
tgagaggaaaaaaat

SEQ ID NO: 1538395 - DNA, 15 bp, Homo sapiens
atgagaggaaaaaaa

SEQ ID NO: 1538396 - DNA, 15 bp, Homo sapiens
aatgagaggaaaaaa

SEQ ID NO: 1538397 - DNA, 15 bp, Homo sapiens
aaatgagaggaaaaa

SEQ ID NO: 1538398 - DNA, 15 bp, Homo sapiens
aaaatgagaggaaaa

SEQ ID NO: 1538399 - DNA, 15 bp, Homo sapiens
taaaatgagaggaaa

SEQ ID NO: 1538400 - DNA, 15 bp, Homo sapiens
ttaaaatgagaggaa

SEQ ID NO: 1538401 - DNA, 15 bp, Homo sapiens
attaaaatgagagga

SEQ ID NO: 1538402 - DNA, 15 bp, Homo sapiens
tattaaaatgagagg

SEQ ID NO: 1538403 - DNA, 15 bp, Homo sapiens
ttattaaaatgagag

SEQ ID NO: 1538404 - DNA, 15 bp, Homo sapiens
attattaaaatgaga

SEQ ID NO: 1538405 - DNA, 15 bp, Homo sapiens
tattattaaaatgag

SEQ ID NO: 1538406 - DNA, 15 bp, Homo sapiens
ctattattaaaatga

SEQ ID NO: 1538407 - DNA, 15 bp, Homo sapiens
gctattattaaaatg

SEQ ID NO: 1538408 - DNA, 15 bp, Homo sapiens
agctattattaaaat

SEQ ID NO: 1538409 - DNA, 15 bp, Homo sapiens
tagctattattaaaa

SEQ ID NO: 1538410 - DNA, 15 bp, Homo sapiens
ctagctattattaaa

SEQ ID NO: 1538411 - DNA, 15 bp, Homo sapiens
tctagctattattaa

SEQ ID NO: 1538412 - DNA, 15 bp, Homo sapiens
gtctagctattatta

SEQ ID NO: 1538413 - DNA, 15 bp, Homo sapiens
cgtctagctattatt

SEQ ID NO: 1538414 - DNA, 15 bp, Homo sapiens
acgtctagctattat

SEQ ID NO: 1538415 - DNA, 15 bp, Homo sapiens
aacgtctagctatta

SEQ ID NO: 1538416 - DNA, 15 bp, Homo sapiens
aaacgtctagctatt

SEQ ID NO: 1538417 - DNA, 15 bp, Homo sapiens
caaacgtctagctat

SEQ ID NO: 1538418 - DNA, 15 bp, Homo sapiens
tcaaacgtctagcta

SEQ ID NO: 1538419 - DNA, 15 bp, Homo sapiens
ttcaaacgtctagct

SEQ ID NO: 1538420 - DNA, 15 bp, Homo sapiens
attcaaacgtctagc

SEQ ID NO: 1538421 - DNA, 15 bp, Homo sapiens
aattcaaacgtctag

SEQ ID NO: 1538422 - DNA, 15 bp, Homo sapiens
aaattcaaacgtcta

SEQ ID NO: 1538423 - DNA, 15 bp, Homo sapiens
caaattcaaacgtct

SEQ ID NO: 1538424 - DNA, 15 bp, Homo sapiens
tcaaattcaaacgtc

SEQ ID NO: 1538425 - DNA, 15 bp, Homo sapiens
atcaaattcaaacgt

SEQ ID NO: 1538426 - DNA, 15 bp, Homo sapiens
catcaaattcaaacg

SEQ ID NO: 1538427 - DNA, 15 bp, Homo sapiens
tcatcaaattcaaac

SEQ ID NO: 1538428 - DNA, 15 bp, Homo sapiens
gtcatcaaattcaaa

SEQ ID NO: 1538429 - DNA, 15 bp, Homo sapiens
ggtcatcaaattcaa

SEQ ID NO: 1538430 - DNA, 15 bp, Homo sapiens
tggtcatcaaattca

SEQ ID NO: 1538431 - DNA, 15 bp, Homo sapiens
ttggtcatcaaattc

SEQ ID NO: 1538432 - DNA, 15 bp, Homo sapiens
cttggtcatcaaatt

SEQ ID NO: 1538433 - DNA, 15 bp, Homo sapiens
tcttggtcatcaaat

SEQ ID NO: 1538434 - DNA, 15 bp, Homo sapiens
ctcttggtcatcaaa

SEQ ID NO: 1538435 - DNA, 15 bp, Homo sapiens
gctcttggtcatcaa

SEQ ID NO: 1538436 - DNA, 15 bp, Homo sapiens
tgctcttggtcatca

SEQ ID NO: 1538437 - DNA, 15 bp, Homo sapiens
ctgctcttggtcatc

SEQ ID NO: 1538438 - DNA, 15 bp, Homo sapiens
actgctcttggtcat

SEQ ID NO: 1538439 - DNA, 15 bp, Homo sapiens
aactgctcttggtca

SEQ ID NO: 1538440 - DNA, 15 bp, Homo sapiens
taactgctcttggtc

SEQ ID NO: 1538441 - DNA, 15 bp, Homo sapiens
ataactgctcttggt

SEQ ID NO: 1538442 - DNA, 15 bp, Homo sapiens
gataactgctcttgg

SEQ ID NO: 1538443 - DNA, 15 bp, Homo sapiens
tgataactgctcttg

SEQ ID NO: 1538444 - DNA, 15 bp, Homo sapiens
gtgataactgctctt

SEQ ID NO: 1538445 - DNA, 15 bp, Homo sapiens
ggtgataactgctct

SEQ ID NO: 1538446 - DNA, 15 bp, Homo sapiens
aggtgataactgctc

SEQ ID NO: 1538447 - DNA, 15 bp, Homo sapiens
aaggtgataactgct

SEQ ID NO: 1538448 - DNA, 15 bp, Homo sapiens
caaggtgataactgc

SEQ ID NO: 1538449 - DNA, 15 bp, Homo sapiens
tcaaggtgataactg

SEQ ID NO: 1538450 - DNA, 15 bp, Homo sapiens
ctcaaggtgataact

SEQ ID NO: 1538451 - DNA, 15 bp, Homo sapiens
tctcaaggtgataac

SEQ ID NO: 1538452 - DNA, 15 bp, Homo sapiens
ctctcaaggtgataa

SEQ ID NO: 1538453 - DNA, 15 bp, Homo sapiens
actctcaaggtgata

SEQ ID NO: 1538454 - DNA, 15 bp, Homo sapiens
aactctcaaggtgat

SEQ ID NO: 1538455 - DNA, 15 bp, Homo sapiens
taactctcaaggtga

SEQ ID NO: 1538456 - DNA, 15 bp, Homo sapiens
gtaactctcaaggtg

SEQ ID NO: 1538457 - DNA, 15 bp, Homo sapiens
cgtaactctcaaggt

SEQ ID NO: 1538458 - DNA, 15 bp, Homo sapiens
acgtaactctcaagg

SEQ ID NO: 1538459 - DNA, 15 bp, Homo sapiens
tacgtaactctcaag

SEQ ID NO: 1538460 - DNA, 15 bp, Homo sapiens
ttacgtaactctcaa

SEQ ID NO: 1538461 - DNA, 15 bp, Homo sapiens
tttacgtaactctca

SEQ ID NO: 1538462 - DNA, 15 bp, Homo sapiens
ttttacgtaactctc

SEQ ID NO: 1538463 - DNA, 15 bp, Homo sapiens
tttttacgtaactct

SEQ ID NO: 1538464 - DNA, 15 bp, Homo sapiens
atttttacgtaactc

SEQ ID NO: 1538465 - DNA, 15 bp, Homo sapiens
aatttttacgtaact

SEQ ID NO: 1538466 - DNA, 15 bp, Homo sapiens
taatttttacgtaac

SEQ ID NO: 1538467 - DNA, 15 bp, Homo sapiens
gtaatttttacgtaa

SEQ ID NO: 1538468 - DNA, 15 bp, Homo sapiens
ggtaatttttacgta

SEQ ID NO: 1538469 - DNA, 15 bp, Homo sapiens
tggtaatttttacgt

SEQ ID NO: 1538470 - DNA, 15 bp, Homo sapiens
ttggtaatttttacg

SEQ ID NO: 1538471 - DNA, 15 bp, Homo sapiens
attggtaatttttac

SEQ ID NO: 1538472 - DNA, 15 bp, Homo sapiens
cattggtaattttta

SEQ ID NO: 1538473 - DNA, 15 bp, Homo sapiens
gcattggtaattttt

SEQ ID NO: 1538474 - DNA, 15 bp, Homo sapiens
agcattggtaatttt

SEQ ID NO: 1538475 - DNA, 15 bp, Homo sapiens
aagcattggtaattt

SEQ ID NO: 1538476 - DNA, 15 bp, Homo sapiens
taagcattggtaatt

SEQ ID NO: 1538477 - DNA, 15 bp, Homo sapiens
ctaagcattggtaat

SEQ ID NO: 1538478 - DNA, 15 bp, Homo sapiens
tctaagcattggtaa

SEQ ID NO: 1538479 - DNA, 15 bp, Homo sapiens
ctctaagcattggta

SEQ ID NO: 1538480 - DNA, 15 bp, Homo sapiens
actctaagcattggt

SEQ ID NO: 1538481 - DNA, 15 bp, Homo sapiens
aactctaagcattgg

SEQ ID NO: 1538482 - DNA, 15 bp, Homo sapiens
gaactctaagcattg

SEQ ID NO: 1538483 - DNA, 15 bp, Homo sapiens
tgaactctaagcatt

SEQ ID NO: 1538484 - DNA, 15 bp, Homo sapiens
gtgaactctaagcat

SEQ ID NO: 1538485 - DNA, 15 bp, Homo sapiens
ggtgaactctaagca

SEQ ID NO: 1538486 - DNA, 15 bp, Homo sapiens
gggtgaactctaagc

SEQ ID NO: 1538487 - DNA, 15 bp, Homo sapiens
ggggtgaactctaag

SEQ ID NO: 1538488 - DNA, 15 bp, Homo sapiens
tggggtgaactctaa

SEQ ID NO: 1538489 - DNA, 15 bp, Homo sapiens
atggggtgaactcta

SEQ ID NO: 1538490 - DNA, 15 bp, Homo sapiens
aatggggtgaactct

SEQ ID NO: 1538491 - DNA, 15 bp, Homo sapiens
gaatggggtgaactc

SEQ ID NO: 1538492 - DNA, 15 bp, Homo sapiens
ggaatggggtgaact

SEQ ID NO: 1538493 - DNA, 15 bp, Homo sapiens
tggaatggggtgaac

SEQ ID NO: 1538494 - DNA, 15 bp, Homo sapiens
ctggaatggggtgaa

SEQ ID NO: 1538495 - DNA, 15 bp, Homo sapiens
actggaatggggtga

SEQ ID NO: 1538496 - DNA, 15 bp, Homo sapiens
aactggaatggggtg

SEQ ID NO: 1538497 - DNA, 15 bp, Homo sapiens
caactggaatggggt

SEQ ID NO: 1538498 - DNA, 15 bp, Homo sapiens
gcaactggaatgggg

SEQ ID NO: 1538499 - DNA, 15 bp, Homo sapiens
tgcaactggaatggg

SEQ ID NO: 1538500 - DNA, 15 bp, Homo sapiens
atgcaactggaatgg

SEQ ID NO: 1538501 - DNA, 15 bp, Homo sapiens
gatgcaactggaatg

SEQ ID NO: 1538502 - DNA, 15 bp, Homo sapiens
tgatgcaactggaat

SEQ ID NO: 1538503 - DNA, 15 bp, Homo sapiens
ctgatgcaactggaa

SEQ ID NO: 1538504 - DNA, 15 bp, Homo sapiens
tctgatgcaactgga

SEQ ID NO: 1538505 - DNA, 15 bp, Homo sapiens
ttctgatgcaactgg

SEQ ID NO: 1538506 - DNA, 15 bp, Homo sapiens
cttctgatgcaactg

SEQ ID NO: 1538507 - DNA, 15 bp, Homo sapiens
ccttctgatgcaact

SEQ ID NO: 1538508 - DNA, 15 bp, Homo sapiens
tccttctgatgcaac

SEQ ID NO: 1538509 - DNA, 15 bp, Homo sapiens
ttccttctgatgcaa

SEQ ID NO: 1538510 - DNA, 15 bp, Homo sapiens
cttccttctgatgca

SEQ ID NO: 1538511 - DNA, 15 bp, Homo sapiens
tcttccttctgatgc

SEQ ID NO: 1538512 - DNA, 15 bp, Homo sapiens
gtcttccttctgatg

SEQ ID NO: 1538513 - DNA, 15 bp, Homo sapiens
tgtcttccttctgat

SEQ ID NO: 1538514 - DNA, 15 bp, Homo sapiens
atgtcttccttctga

SEQ ID NO: 1538515 - DNA, 15 bp, Homo sapiens
catgtcttccttctg

SEQ ID NO: 1538516 - DNA, 15 bp, Homo sapiens
ccatgtcttccttct

SEQ ID NO: 1538517 - DNA, 15 bp, Homo sapiens
cccatgtcttccttc

SEQ ID NO: 1538518 - DNA, 15 bp, Homo sapiens
tcccatgtcttcctt

SEQ ID NO: 1538519 - DNA, 15 bp, Homo sapiens
attcccatgtcttcc

SEQ ID NO: 1538520 - DNA, 15 bp, Homo sapiens
aattcccatgtcttc

SEQ ID NO: 1538521 - DNA, 15 bp, Homo sapiens
taattcccatgtctt

SEQ ID NO: 1538522 - DNA, 15 bp, Homo sapiens
ctaattcccatgtct

SEQ ID NO: 1538523 - DNA, 15 bp, Homo sapiens
cctaattcccatgtc

SEQ ID NO: 1538524 - DNA, 15 bp, Homo sapiens
gcctaattcccatgt

SEQ ID NO: 1538525 - DNA, 15 bp, Homo sapiens
tgcctaattcccatg

SEQ ID NO: 1538526 - DNA, 15 bp, Homo sapiens
atgcctaattcccat

SEQ ID NO: 1538527 - DNA, 15 bp, Homo sapiens
aatgcctaattccca

SEQ ID NO: 1538528 - DNA, 15 bp, Homo sapiens
caatgcctaattccc

SEQ ID NO: 1538529 - DNA, 15 bp, Homo sapiens
ccaatgcctaattcc

SEQ ID NO: 1538530 - DNA, 15 bp, Homo sapiens
accaatgcctaattc

SEQ ID NO: 1538531 - DNA, 15 bp, Homo sapiens
caccaatgcctaatt

SEQ ID NO: 1538532 - DNA, 15 bp, Homo sapiens
acaccaatgcctaat

SEQ ID NO: 1538533 - DNA, 15 bp, Homo sapiens
aacaccaatgcctaa

SEQ ID NO: 1538534 - DNA, 15 bp, Homo sapiens
aaacaccaatgccta

SEQ ID NO: 1538535 - DNA, 15 bp, Homo sapiens
aaaacaccaatgcct

SEQ ID NO: 1538536 - DNA, 15 bp, Homo sapiens
aaaaacaccaatgcc

SEQ ID NO: 1538537 - DNA, 15 bp, Homo sapiens
aaaaaacaccaatgc

SEQ ID NO: 1538538 - DNA, 15 bp, Homo sapiens
taaaaaacaccaatg

SEQ ID NO: 1538539 - DNA, 15 bp, Homo sapiens
ttaaaaaacaccaat

SEQ ID NO: 1538540 - DNA, 15 bp, Homo sapiens
tttaaaaaacaccaa

SEQ ID NO: 1538541 - DNA, 15 bp, Homo sapiens
ttttaaaaaacacca

SEQ ID NO: 1538542 - DNA, 15 bp, Homo sapiens
tttttaaaaaacacc

SEQ ID NO: 1538543 - DNA, 15 bp, Homo sapiens
gtttttaaaaaacac

SEQ ID NO: 1538544 - DNA, 15 bp, Homo sapiens
agtttttaaaaaaca

SEQ ID NO: 1538545 - DNA, 15 bp, Homo sapiens
gagtttttaaaaaac

SEQ ID NO: 1538546 - DNA, 15 bp, Homo sapiens
agagtttttaaaaaa

SEQ ID NO: 1538547 - DNA, 15 bp, Homo sapiens
aagagtttttaaaaa

SEQ ID NO: 1538548 - DNA, 15 bp, Homo sapiens
gaagagtttttaaaa

SEQ ID NO: 1538549 - DNA, 15 bp, Homo sapiens
tgaagagtttttaaa

SEQ ID NO: 1538550 - DNA, 15 bp, Homo sapiens
ctgaagagtttttaa

SEQ ID NO: 1538551 - DNA, 15 bp, Homo sapiens
cctgaagagttttta

SEQ ID NO: 1538552 - DNA, 15 bp, Homo sapiens
acctgaagagttttt

SEQ ID NO: 1538553 - DNA, 15 bp, Homo sapiens
cacctgaagagtttt

SEQ ID NO: 1538554 - DNA, 15 bp, Homo sapiens
tcacctgaagagttt

SEQ ID NO: 1538555 - DNA, 15 bp, Homo sapiens
atcacctgaagagtt

SEQ ID NO: 1538556 - DNA, 15 bp, Homo sapiens
aatcacctgaagagt

SEQ ID NO: 1538557 - DNA, 15 bp, Homo sapiens
gaatcacctgaagag

SEQ ID NO: 1538558 - DNA, 15 bp, Homo sapiens
agaatcacctgaaga

SEQ ID NO: 1538559 - DNA, 15 bp, Homo sapiens
cagaatcacctgaag

SEQ ID NO: 1538560 - DNA, 15 bp, Homo sapiens
tcagaatcacctgaa

SEQ ID NO: 1538561 - DNA, 15 bp, Homo sapiens
gtcagaatcacctga

SEQ ID NO: 1538562 - DNA, 15 bp, Homo sapiens
tgtcagaatcacctg

SEQ ID NO: 1538563 - DNA, 15 bp, Homo sapiens
atgtcagaatcacct

SEQ ID NO: 1538564 - DNA, 15 bp, Homo sapiens
catgtcagaatcacc

SEQ ID NO: 1538565 - DNA, 15 bp, Homo sapiens
gcatgtcagaatcac

SEQ ID NO: 1538566 - DNA, 15 bp, Homo sapiens
tgcatgtcagaatca

SEQ ID NO: 1538567 - DNA, 15 bp, Homo sapiens
ctgcatgtcagaatc

SEQ ID NO: 1538568 - DNA, 15 bp, Homo sapiens
gctgcatgtcagaat

SEQ ID NO: 1538569 - DNA, 15 bp, Homo sapiens
ggctgcatgtcagaa

SEQ ID NO: 1538570 - DNA, 15 bp, Homo sapiens
tggctgcatgtcaga

SEQ ID NO: 1538571 - DNA, 15 bp, Homo sapiens
ctggctgcatgtcag

SEQ ID NO: 1538572 - DNA, 15 bp, Homo sapiens
cctggctgcatgtca

SEQ ID NO: 1538573 - DNA, 15 bp, Homo sapiens
ccctggctgcatgtc

SEQ ID NO: 1538574 - DNA, 15 bp, Homo sapiens
accctggctgcatgt

SEQ ID NO: 1538575 - DNA, 15 bp, Homo sapiens
taccctggctgcatg

SEQ ID NO: 1538576 - DNA, 15 bp, Homo sapiens
ttaccctggctgcat

SEQ ID NO: 1538577 - DNA, 15 bp, Homo sapiens
cttaccctggctgca

SEQ ID NO: 1538578 - DNA, 15 bp, Homo sapiens
tcttaccctggctgc

SEQ ID NO: 1538579 - DNA, 15 bp, Homo sapiens
ttcttaccctggctg

SEQ ID NO: 1538580 - DNA, 15 bp, Homo sapiens
attcttaccctggct

SEQ ID NO: 1538581 - DNA, 15 bp, Homo sapiens
gattcttaccctggc

SEQ ID NO: 1538582 - DNA, 15 bp, Homo sapiens
tgattcttaccctgg

SEQ ID NO: 1538583 - DNA, 15 bp, Homo sapiens
gtgattcttaccctg

SEQ ID NO: 1538584 - DNA, 15 bp, Homo sapiens
agtgattcttaccct

SEQ ID NO: 1538585 - DNA, 15 bp, Homo sapiens
tagtgattcttaccc

SEQ ID NO: 1538586 - DNA, 15 bp, Homo sapiens
ctagtgattcttacc

SEQ ID NO: 1538587 - DNA, 15 bp, Homo sapiens
gctagtgattcttac

SEQ ID NO: 1538588 - DNA, 15 bp, Homo sapiens
agctagtgattctta

SEQ ID NO: 1538589 - DNA, 15 bp, Homo sapiens
aagctagtgattctt

SEQ ID NO: 1538590 - DNA, 15 bp, Homo sapiens
taagctagtgattct

SEQ ID NO: 1538591 - DNA, 15 bp, Homo sapiens
ctaagctagtgattc

SEQ ID NO: 1538592 - DNA, 15 bp, Homo sapiens
tctaagctagtgatt

SEQ ID NO: 1538593 - DNA, 15 bp, Homo sapiens
ttctaagctagtgat

SEQ ID NO: 1538594 - DNA, 15 bp, Homo sapiens
cttctaagctagtga

SEQ ID NO: 1538595 - DNA, 15 bp, Homo sapiens
ccttctaagctagtg

SEQ ID NO: 1538596 - DNA, 15 bp, Homo sapiens
cccttctaagctagt

SEQ ID NO: 1538597 - DNA, 15 bp, Homo sapiens
tcccttctaagctag

SEQ ID NO: 1538598 - DNA, 15 bp, Homo sapiens
ctcccttctaagcta

SEQ ID NO: 1538599 - DNA, 15 bp, Homo sapiens
tctcccttctaagct

SEQ ID NO: 1538600 - DNA, 15 bp, Homo sapiens
ctctcccttctaagc

SEQ ID NO: 1538601 - DNA, 15 bp, Homo sapiens
actctcccttctaag

SEQ ID NO: 1538602 - DNA, 15 bp, Homo sapiens
tactctcccttctaa

SEQ ID NO: 1538603 - DNA, 15 bp, Homo sapiens
ttactctcccttcta

SEQ ID NO: 1538604 - DNA, 15 bp, Homo sapiens
cttactctcccttct

SEQ ID NO: 1538605 - DNA, 15 bp, Homo sapiens
tcttactctcccttc

SEQ ID NO: 1538606 - DNA, 15 bp, Homo sapiens
atcttactctccctt

SEQ ID NO: 1538607 - DNA, 15 bp, Homo sapiens
aatcttactctccct

SEQ ID NO: 1538608 - DNA, 15 bp, Homo sapiens
caatcttactctccc

SEQ ID NO: 1538609 - DNA, 15 bp, Homo sapiens
acaatcttactctcc

SEQ ID NO: 1538610 - DNA, 15 bp, Homo sapiens
tacaatcttactctc

SEQ ID NO: 1538611 - DNA, 15 bp, Homo sapiens
ctacaatcttactct

SEQ ID NO: 1538612 - DNA, 15 bp, Homo sapiens
actacaatcttactc

SEQ ID NO: 1538613 - DNA, 15 bp, Homo sapiens
gactacaatcttact

SEQ ID NO: 1538614 - DNA, 15 bp, Homo sapiens
tgactacaatcttac

SEQ ID NO: 1538615 - DNA, 15 bp, Homo sapiens
atgactacaatctta

SEQ ID NO: 1538616 - DNA, 15 bp, Homo sapiens
tatgactacaatctt

SEQ ID NO: 1538617 - DNA, 15 bp, Homo sapiens
gtatgactacaatct

SEQ ID NO: 1538618 - DNA, 15 bp, Homo sapiens
agtatgactacaatc

SEQ ID NO: 1538619 - DNA, 15 bp, Homo sapiens
aagtatgactacaat

SEQ ID NO: 1538620 - DNA, 15 bp, Homo sapiens
caagtatgactacaa

SEQ ID NO: 1538621 - DNA, 15 bp, Homo sapiens
ccaagtatgactaca

SEQ ID NO: 1538622 - DNA, 15 bp, Homo sapiens
cccaagtatgactac

SEQ ID NO: 1538623 - DNA, 15 bp, Homo sapiens
tcccaagtatgacta

SEQ ID NO: 1538624 - DNA, 15 bp, Homo sapiens
ttcccaagtatgact

SEQ ID NO: 1538625 - DNA, 15 bp, Homo sapiens
tttcccaagtatgac

SEQ ID NO: 1538626 - DNA, 15 bp, Homo sapiens
ttttcccaagtatga

SEQ ID NO: 1538627 - DNA, 15 bp, Homo sapiens
tttttcccaagtatg

SEQ ID NO: 1538628 - DNA, 15 bp, Homo sapiens
ttttttcccaagtat

SEQ ID NO: 1538629 - DNA, 15 bp, Homo sapiens
gttttttcccaagta

SEQ ID NO: 1538630 - DNA, 15 bp, Homo sapiens
tgttttttcccaagt

SEQ ID NO: 1538631 - DNA, 15 bp, Homo sapiens
atgttttttcccaag

SEQ ID NO: 1538632 - DNA, 15 bp, Homo sapiens
tatgttttttcccaa

SEQ ID NO: 1538633 - DNA, 15 bp, Homo sapiens
atatgttttttccca

SEQ ID NO: 1538634 - DNA, 15 bp, Homo sapiens
tatatgttttttccc

SEQ ID NO: 1538635 - DNA, 15 bp, Homo sapiens
ttatatgttttttcc

SEQ ID NO: 1538636 - DNA, 15 bp, Homo sapiens
tttatatgttttttc

SEQ ID NO: 1538637 - DNA, 15 bp, Homo sapiens
ttttatatgtttttt

SEQ ID NO: 1538638 - DNA, 15 bp, Homo sapiens
tttttatatgttttt

SEQ ID NO: 1538639 - DNA, 15 bp, Homo sapiens
ttttttatatgtttt

SEQ ID NO: 1538640 - DNA, 15 bp, Homo sapiens
attttttatatgttt

SEQ ID NO: 1538641 - DNA, 15 bp, Homo sapiens
tattttttatatgtt

SEQ ID NO: 1538642 - DNA, 15 bp, Homo sapiens
atattttttatatgt

SEQ ID NO: 1538643 - DNA, 15 bp, Homo sapiens
aatattttttatatg

SEQ ID NO: 1538644 - DNA, 15 bp, Homo sapiens
aaatattttttatat

SEQ ID NO: 1538645 - DNA, 15 bp, Homo sapiens
ttaaaaatatttttt

SEQ ID NO: 1538646 - DNA, 15 bp, Homo sapiens
cattttaaaaatatt

SEQ ID NO: 1538647 - DNA, 15 bp, Homo sapiens
ccattttaaaaatat

SEQ ID NO: 1538648 - DNA, 15 bp, Homo sapiens
accattttaaaaata

SEQ ID NO: 1538649 - DNA, 15 bp, Homo sapiens
aaccattttaaaaat

SEQ ID NO: 1538650 - DNA, 15 bp, Homo sapiens
taaccattttaaaaa

SEQ ID NO: 1538651 - DNA, 15 bp, Homo sapiens
gtaaccattttaaaa

SEQ ID NO: 1538652 - DNA, 15 bp, Homo sapiens
agtaaccattttaaa

SEQ ID NO: 1538653 - DNA, 15 bp, Homo sapiens
tagtaaccattttaa

SEQ ID NO: 1538654 - DNA, 15 bp, Homo sapiens
atagtaaccatttta

SEQ ID NO: 1538655 - DNA, 15 bp, Homo sapiens
tatagtaaccatttt

SEQ ID NO: 1538656 - DNA, 15 bp, Homo sapiens
atatagtaaccattt

SEQ ID NO: 1538657 - DNA, 15 bp, Homo sapiens
aatatagtaaccatt

SEQ ID NO: 1538658 - DNA, 15 bp, Homo sapiens
caatatagtaaccat

SEQ ID NO: 1538659 - DNA, 15 bp, Homo sapiens
gcaatatagtaacca

SEQ ID NO: 1538660 - DNA, 15 bp, Homo sapiens
ggcaatatagtaacc

SEQ ID NO: 1538661 - DNA, 15 bp, Homo sapiens
gggcaatatagtaac

SEQ ID NO: 1538662 - DNA, 15 bp, Homo sapiens
cgggcaatatagtaa

SEQ ID NO: 1538663 - DNA, 15 bp, Homo sapiens
tcgggcaatatagta

SEQ ID NO: 1538664 - DNA, 15 bp, Homo sapiens
ttcgggcaatatagt

SEQ ID NO: 1538665 - DNA, 15 bp, Homo sapiens
tttcgggcaatatag

SEQ ID NO: 1538666 - DNA, 15 bp, Homo sapiens
atttcgggcaatata

SEQ ID NO: 1538667 - DNA, 15 bp, Homo sapiens
tatttcgggcaatat

SEQ ID NO: 1538668 - DNA, 15 bp, Homo sapiens
ttatttcgggcaata

SEQ ID NO: 1538669 - DNA, 15 bp, Homo sapiens
tttatttcgggcaat

SEQ ID NO: 1538670 - DNA, 15 bp, Homo sapiens
atttatttcgggcaa

SEQ ID NO: 1538671 - DNA, 15 bp, Homo sapiens
catttatttcgggca

SEQ ID NO: 1538672 - DNA, 15 bp, Homo sapiens
gcatttatttcgggc

SEQ ID NO: 1538673 - DNA, 15 bp, Homo sapiens
ggcatttatttcggg

SEQ ID NO: 1538674 - DNA, 15 bp, Homo sapiens
gggcatttatttcgg

SEQ ID NO: 1538675 - DNA, 15 bp, Homo sapiens
tgggcatttatttcg

SEQ ID NO: 1538676 - DNA, 15 bp, Homo sapiens
ctgggcatttatttc

SEQ ID NO: 1538677 - DNA, 15 bp, Homo sapiens
actgggcatttattt

SEQ ID NO: 1538678 - DNA, 15 bp, Homo sapiens
tactgggcatttatt

SEQ ID NO: 1538679 - DNA, 15 bp, Homo sapiens
ttactgggcatttat

SEQ ID NO: 1538680 - DNA, 15 bp, Homo sapiens
cttactgggcattta

SEQ ID NO: 1538681 - DNA, 15 bp, Homo sapiens
ccttactgggcattt

SEQ ID NO: 1538682 - DNA, 15 bp, Homo sapiens
cccttactgggcatt

SEQ ID NO: 1538683 - DNA, 15 bp, Homo sapiens
tcccttactgggcat

SEQ ID NO: 1538684 - DNA, 15 bp, Homo sapiens
atcccttactgggca

SEQ ID NO: 1538685 - DNA, 15 bp, Homo sapiens
catcccttactgggc

SEQ ID NO: 1538686 - DNA, 15 bp, Homo sapiens
tcatcccttactggg

SEQ ID NO: 1538687 - DNA, 15 bp, Homo sapiens
ctcatcccttactgg

SEQ ID NO: 1538688 - DNA, 15 bp, Homo sapiens
tctcatcccttactg

SEQ ID NO: 1538689 - DNA, 15 bp, Homo sapiens
atctcatcccttact

SEQ ID NO: 1538690 - DNA, 15 bp, Homo sapiens
aatctcatcccttac

SEQ ID NO: 1538691 - DNA, 15 bp, Homo sapiens
aaatctcatccctta

SEQ ID NO: 1538692 - DNA, 15 bp, Homo sapiens
aaaatctcatccctt

SEQ ID NO: 1538693 - DNA, 15 bp, Homo sapiens
aaaaatctcatccct

SEQ ID NO: 1538694 - DNA, 15 bp, Homo sapiens
caaaaatctcatccc

SEQ ID NO: 1538695 - DNA, 15 bp, Homo sapiens
tcaaaaatctcatcc

SEQ ID NO: 1538696 - DNA, 15 bp, Homo sapiens
ttcaaaaatctcatc

SEQ ID NO: 1538697 - DNA, 15 bp, Homo sapiens
tttcaaaaatctcat

SEQ ID NO: 1538698 - DNA, 15 bp, Homo sapiens
atttcaaaaatctca

SEQ ID NO: 1538699 - DNA, 15 bp, Homo sapiens
catttcaaaaatctc

SEQ ID NO: 1538700 - DNA, 15 bp, Homo sapiens
acatttcaaaaatct

SEQ ID NO: 1538701 - DNA, 15 bp, Homo sapiens
cacatttcaaaaatc

SEQ ID NO: 1538702 - DNA, 15 bp, Homo sapiens
ccacatttcaaaaat

SEQ ID NO: 1538703 - DNA, 15 bp, Homo sapiens
gccacatttcaaaaa

SEQ ID NO: 1538704 - DNA, 15 bp, Homo sapiens
ggccacatttcaaaa

SEQ ID NO: 1538705 - DNA, 15 bp, Homo sapiens
aggccacatttcaaa

SEQ ID NO: 1538706 - DNA, 15 bp, Homo sapiens
caggccacatttcaa

SEQ ID NO: 1538707 - DNA, 15 bp, Homo sapiens
tcaggccacatttca

SEQ ID NO: 1538708 - DNA, 15 bp, Homo sapiens
atcaggccacatttc

SEQ ID NO: 1538709 - DNA, 15 bp, Homo sapiens
gatcaggccacattt

SEQ ID NO: 1538710 - DNA, 15 bp, Homo sapiens
agatcaggccacatt

SEQ ID NO: 1538711 - DNA, 15 bp, Homo sapiens
aagatcaggccacat

SEQ ID NO: 1538712 - DNA, 15 bp, Homo sapiens
taagatcaggccaca

SEQ ID NO: 1538713 - DNA, 15 bp, Homo sapiens
ctaagatcaggccac

SEQ ID NO: 1538714 - DNA, 15 bp, Homo sapiens
gctaagatcaggcca

SEQ ID NO: 1538715 - DNA, 15 bp, Homo sapiens
ggctaagatcaggcc

SEQ ID NO: 1538716 - DNA, 15 bp, Homo sapiens
gggctaagatcaggc

SEQ ID NO: 1538717 - DNA, 15 bp, Homo sapiens
agggctaagatcagg

SEQ ID NO: 1538718 - DNA, 15 bp, Homo sapiens
cagggctaagatcag

SEQ ID NO: 1538719 - DNA, 15 bp, Homo sapiens
acagggctaagatca

SEQ ID NO: 1538720 - DNA, 15 bp, Homo sapiens
cacagggctaagatc

SEQ ID NO: 1538721 - DNA, 15 bp, Homo sapiens
acacagggctaagat

SEQ ID NO: 1538722 - DNA, 15 bp, Homo sapiens
aacacagggctaaga

SEQ ID NO: 1538723 - DNA, 15 bp, Homo sapiens
taacacagggctaag

SEQ ID NO: 1538724 - DNA, 15 bp, Homo sapiens
ttaacacagggctaa

SEQ ID NO: 1538725 - DNA, 15 bp, Homo sapiens
attaacacagggcta

SEQ ID NO: 1538726 - DNA, 15 bp, Homo sapiens
aattaacacagggct

SEQ ID NO: 1538727 - DNA, 15 bp, Homo sapiens
aaattaacacagggc

SEQ ID NO: 1538728 - DNA, 15 bp, Homo sapiens
gaaattaacacaggg

SEQ ID NO: 1538729 - DNA, 15 bp, Homo sapiens
tgaaattaacacagg

SEQ ID NO: 1538730 - DNA, 15 bp, Homo sapiens
ctgaaattaacacag

SEQ ID NO: 1538731 - DNA, 15 bp, Homo sapiens
actgaaattaacaca

SEQ ID NO: 1538732 - DNA, 15 bp, Homo sapiens
tactgaaattaacac

SEQ ID NO: 1538733 - DNA, 15 bp, Homo sapiens
ctactgaaattaaca

SEQ ID NO: 1538734 - DNA, 15 bp, Homo sapiens
tctactgaaattaac

SEQ ID NO: 1538735 - DNA, 15 bp, Homo sapiens
atctactgaaattaa

SEQ ID NO: 1538736 - DNA, 15 bp, Homo sapiens
tatctactgaaatta

SEQ ID NO: 1538737 - DNA, 15 bp, Homo sapiens
atatctactgaaatt

SEQ ID NO: 1538738 - DNA, 15 bp, Homo sapiens
aatatctactgaaat

SEQ ID NO: 1538739 - DNA, 15 bp, Homo sapiens
aaatatctactgaaa

SEQ ID NO: 1538740 - DNA, 15 bp, Homo sapiens
caaatatctactgaa

SEQ ID NO: 1538741 - DNA, 15 bp, Homo sapiens
ccaaatatctactga

SEQ ID NO: 1538742 - DNA, 15 bp, Homo sapiens
tccaaatatctactg

SEQ ID NO: 1538743 - DNA, 15 bp, Homo sapiens
ttccaaatatctact

SEQ ID NO: 1538744 - DNA, 15 bp, Homo sapiens
tttccaaatatctac

SEQ ID NO: 1538745 - DNA, 15 bp, Homo sapiens
ctttccaaatatcta

SEQ ID NO: 1538746 - DNA, 15 bp, Homo sapiens
actttccaaatatct

SEQ ID NO: 1538747 - DNA, 15 bp, Homo sapiens
gactttccaaatatc

SEQ ID NO: 1538748 - DNA, 15 bp, Homo sapiens
agactttccaaatat

SEQ ID NO: 1538749 - DNA, 15 bp, Homo sapiens
gagactttccaaata

SEQ ID NO: 1538750 - DNA, 15 bp, Homo sapiens
agagactttccaaat

SEQ ID NO: 1538751 - DNA, 15 bp, Homo sapiens
gagagactttccaaa

SEQ ID NO: 1538752 - DNA, 15 bp, Homo sapiens
tgagagactttccaa

SEQ ID NO: 1538753 - DNA, 15 bp, Homo sapiens
ttgagagactttcca

SEQ ID NO: 1538754 - DNA, 15 bp, Homo sapiens
tttgagagactttcc

SEQ ID NO: 1538755 - DNA, 15 bp, Homo sapiens
gtttgagagactttc

SEQ ID NO: 1538756 - DNA, 15 bp, Homo sapiens
ggtttgagagacttt

SEQ ID NO: 1538757 - DNA, 15 bp, Homo sapiens
tggtttgagagactt

SEQ ID NO: 1538758 - DNA, 15 bp, Homo sapiens
ttggtttgagagact

SEQ ID NO: 1538759 - DNA, 15 bp, Homo sapiens
attggtttgagagac

SEQ ID NO: 1538760 - DNA, 15 bp, Homo sapiens
aattggtttgagaga

SEQ ID NO: 1538761 - DNA, 15 bp, Homo sapiens
aaattggtttgagag

SEQ ID NO: 1538762 - DNA, 15 bp, Homo sapiens
aaaattggtttgaga

SEQ ID NO: 1538763 - DNA, 15 bp, Homo sapiens
aaaaattggtttgag

SEQ ID NO: 1538764 - DNA, 15 bp, Homo sapiens
caaaaattggtttga

SEQ ID NO: 1538765 - DNA, 15 bp, Homo sapiens
acaaaaattggtttg

SEQ ID NO: 1538766 - DNA, 15 bp, Homo sapiens
tacaaaaattggttt

SEQ ID NO: 1538767 - DNA, 15 bp, Homo sapiens
ttacaaaaattggtt

SEQ ID NO: 1538768 - DNA, 15 bp, Homo sapiens
attacaaaaattggt

SEQ ID NO: 1538769 - DNA, 15 bp, Homo sapiens
tattacaaaaattgg

SEQ ID NO: 1538770 - DNA, 15 bp, Homo sapiens
atattacaaaaattg

SEQ ID NO: 1538771 - DNA, 15 bp, Homo sapiens
tatattacaaaaatt

SEQ ID NO: 1538772 - DNA, 15 bp, Homo sapiens
atatattacaaaaat

SEQ ID NO: 1538773 - DNA, 15 bp, Homo sapiens
aatatattacaaaaa

SEQ ID NO: 1538774 - DNA, 15 bp, Homo sapiens
aaatatattacaaaa

SEQ ID NO: 1538775 - DNA, 15 bp, Homo sapiens
taaatatattacaaa

SEQ ID NO: 1538776 - DNA, 15 bp, Homo sapiens
ttaaatatattacaa

SEQ ID NO: 1538777 - DNA, 15 bp, Homo sapiens
attaaatatattaca

SEQ ID NO: 1538778 - DNA, 15 bp, Homo sapiens
aattaaatatattac

SEQ ID NO: 1538779 - DNA, 15 bp, Homo sapiens
caattaaatatatta

SEQ ID NO: 1538780 - DNA, 15 bp, Homo sapiens
tcaattaaatatatt

SEQ ID NO: 1538781 - DNA, 15 bp, Homo sapiens
ttcaattaaatatat

SEQ ID NO: 1538782 - DNA, 15 bp, Homo sapiens
cttcaattaaatata

SEQ ID NO: 1538783 - DNA, 15 bp, Homo sapiens
tcttcaattaaatat

SEQ ID NO: 1538784 - DNA, 15 bp, Homo sapiens
atcttcaattaaata

SEQ ID NO: 1538785 - DNA, 15 bp, Homo sapiens
catcttcaattaaat

SEQ ID NO: 1538786 - DNA, 15 bp, Homo sapiens
ccatcttcaattaaa

SEQ ID NO: 1538787 - DNA, 15 bp, Homo sapiens
cccatcttcaattaa

SEQ ID NO: 1538788 - DNA, 15 bp, Homo sapiens
ccccatcttcaatta

SEQ ID NO: 1538789 - DNA, 15 bp, Homo sapiens
cccccatcttcaatt

SEQ ID NO: 1538790 - DNA, 15 bp, Homo sapiens
ccccccatcttcaat

SEQ ID NO: 1538791 - DNA, 15 bp, Homo sapiens
cccccccatcttcaa

SEQ ID NO: 1538792 - DNA, 15 bp, Homo sapiens
acccccccatcttca

SEQ ID NO: 1538793 - DNA, 15 bp, Homo sapiens
aacccccccatcttc

SEQ ID NO: 1538794 - DNA, 15 bp, Homo sapiens
gaacccccccatctt

SEQ ID NO: 1538795 - DNA, 15 bp, Homo sapiens
agaacccccccatct

SEQ ID NO: 1538796 - DNA, 15 bp, Homo sapiens
gagaacccccccatc

SEQ ID NO: 1538797 - DNA, 15 bp, Homo sapiens
tgagaacccccccat

SEQ ID NO: 1538798 - DNA, 15 bp, Homo sapiens
ttgagaaccccccca

SEQ ID NO: 1538799 - DNA, 15 bp, Homo sapiens
gttgagaaccccccc

SEQ ID NO: 1538800 - DNA, 15 bp, Homo sapiens
agttgagaacccccc

SEQ ID NO: 1538801 - DNA, 15 bp, Homo sapiens
aagttgagaaccccc

SEQ ID NO: 1538802 - DNA, 15 bp, Homo sapiens
taagttgagaacccc

SEQ ID NO: 1538803 - DNA, 15 bp, Homo sapiens
ttaagttgagaaccc

SEQ ID NO: 1538804 - DNA, 15 bp, Homo sapiens
tttaagttgagaacc

SEQ ID NO: 1538805 - DNA, 15 bp, Homo sapiens
atttaagttgagaac

SEQ ID NO: 1538806 - DNA, 15 bp, Homo sapiens
catttaagttgagaa

SEQ ID NO: 1538807 - DNA, 15 bp, Homo sapiens
acatttaagttgaga

SEQ ID NO: 1538808 - DNA, 15 bp, Homo sapiens
tacatttaagttgag

SEQ ID NO: 1538809 - DNA, 15 bp, Homo sapiens
ttacatttaagttga

SEQ ID NO: 1538810 - DNA, 15 bp, Homo sapiens
cttacatttaagttg

SEQ ID NO: 1538811 - DNA, 15 bp, Homo sapiens
acttacatttaagtt

SEQ ID NO: 1538812 - DNA, 15 bp, Homo sapiens
gacttacatttaagt

SEQ ID NO: 1538813 - DNA, 15 bp, Homo sapiens
tgacttacatttaag

SEQ ID NO: 1538814 - DNA, 15 bp, Homo sapiens
atgacttacatttaa

SEQ ID NO: 1538815 - DNA, 15 bp, Homo sapiens
aatgacttacattta

SEQ ID NO: 1538816 - DNA, 15 bp, Homo sapiens
taatgacttacattt

SEQ ID NO: 1538817 - DNA, 15 bp, Homo sapiens
ataatgacttacatt

SEQ ID NO: 1538818 - DNA, 15 bp, Homo sapiens
aataatgacttacat

SEQ ID NO: 1538819 - DNA, 15 bp, Homo sapiens
aaataatgacttaca

SEQ ID NO: 1538820 - DNA, 15 bp, Homo sapiens
aaaataatgacttac

SEQ ID NO: 1538821 - DNA, 15 bp, Homo sapiens
taaaataatgactta

SEQ ID NO: 1538822 - DNA, 15 bp, Homo sapiens
gtaaaataatgactt

SEQ ID NO: 1538823 - DNA, 15 bp, Homo sapiens
agtaaaataatgact

SEQ ID NO: 1538824 - DNA, 15 bp, Homo sapiens
aagtaaaataatgac

SEQ ID NO: 1538825 - DNA, 15 bp, Homo sapiens
caagtaaaataatga

SEQ ID NO: 1538826 - DNA, 15 bp, Homo sapiens
tcaagtaaaataatg

SEQ ID NO: 1538827 - DNA, 15 bp, Homo sapiens
ttcaagtaaaataat

SEQ ID NO: 1538828 - DNA, 15 bp, Homo sapiens
cttcaagtaaaataa

SEQ ID NO: 1538829 - DNA, 15 bp, Homo sapiens
gcttcaagtaaaata

SEQ ID NO: 1538830 - DNA, 15 bp, Homo sapiens
ggcttcaagtaaaat

SEQ ID NO: 1538831 - DNA, 15 bp, Homo sapiens
tggcttcaagtaaaa

SEQ ID NO: 1538832 - DNA, 15 bp, Homo sapiens
ctggcttcaagtaaa

SEQ ID NO: 1538833 - DNA, 15 bp, Homo sapiens
actggcttcaagtaa

SEQ ID NO: 1538834 - DNA, 15 bp, Homo sapiens
aactggcttcaagta

SEQ ID NO: 1538835 - DNA, 15 bp, Homo sapiens
aaactggcttcaagt

SEQ ID NO: 1538836 - DNA, 15 bp, Homo sapiens
gaaactggcttcaag

SEQ ID NO: 1538837 - DNA, 15 bp, Homo sapiens
agaaactggcttcaa

SEQ ID NO: 1538838 - DNA, 15 bp, Homo sapiens
aagaaactggcttca

SEQ ID NO: 1538839 - DNA, 15 bp, Homo sapiens
aaagaaactggcttc

SEQ ID NO: 1538840 - DNA, 15 bp, Homo sapiens
taaagaaactggctt

SEQ ID NO: 1538841 - DNA, 15 bp, Homo sapiens
ttaaagaaactggct

SEQ ID NO: 1538842 - DNA, 15 bp, Homo sapiens
tttaaagaaactggc

SEQ ID NO: 1538843 - DNA, 15 bp, Homo sapiens
ctttaaagaaactgg

SEQ ID NO: 1538844 - DNA, 15 bp, Homo sapiens
cctttaaagaaactg

SEQ ID NO: 1538845 - DNA, 15 bp, Homo sapiens
acctttaaagaaact

SEQ ID NO: 1538846 - DNA, 15 bp, Homo sapiens
aacctttaaagaaac

SEQ ID NO: 1538847 - DNA, 15 bp, Homo sapiens
taacctttaaagaaa

SEQ ID NO: 1538848 - DNA, 15 bp, Homo sapiens
ttaacctttaaagaa

SEQ ID NO: 1538849 - DNA, 15 bp, Homo sapiens
tttaacctttaaaga

SEQ ID NO: 1538850 - DNA, 15 bp, Homo sapiens
atttaacctttaaag

SEQ ID NO: 1538851 - DNA, 15 bp, Homo sapiens
aatttaacctttaaa

SEQ ID NO: 1538852 - DNA, 15 bp, Homo sapiens
taatttaacctttaa

SEQ ID NO: 1538853 - DNA, 15 bp, Homo sapiens
ataatttaaccttta

SEQ ID NO: 1538854 - DNA, 15 bp, Homo sapiens
tataatttaaccttt

SEQ ID NO: 1538855 - DNA, 15 bp, Homo sapiens
ttataatttaacctt

SEQ ID NO: 1538856 - DNA, 15 bp, Homo sapiens
gttataatttaacct

SEQ ID NO: 1538857 - DNA, 15 bp, Homo sapiens
ggttataatttaacc

SEQ ID NO: 1538858 - DNA, 15 bp, Homo sapiens
aggttataatttaac

SEQ ID NO: 1538859 - DNA, 15 bp, Homo sapiens
caggttataatttaa

SEQ ID NO: 1538860 - DNA, 15 bp, Homo sapiens
tcaggttataattta

SEQ ID NO: 1538861 - DNA, 15 bp, Homo sapiens
ttcaggttataattt

SEQ ID NO: 1538862 - DNA, 15 bp, Homo sapiens
cttcaggttataatt

SEQ ID NO: 1538863 - DNA, 15 bp, Homo sapiens
acttcaggttataat

SEQ ID NO: 1538864 - DNA, 15 bp, Homo sapiens
tacttcaggttataa

SEQ ID NO: 1538865 - DNA, 15 bp, Homo sapiens
atacttcaggttata

SEQ ID NO: 1538866 - DNA, 15 bp, Homo sapiens
catacttcaggttat

SEQ ID NO: 1538867 - DNA, 15 bp, Homo sapiens
gcatacttcaggtta

SEQ ID NO: 1538868 - DNA, 15 bp, Homo sapiens
tgcatacttcaggtt

SEQ ID NO: 1538869 - DNA, 15 bp, Homo sapiens
ctgcatacttcaggt

SEQ ID NO: 1538870 - DNA, 15 bp, Homo sapiens
actgcatacttcagg

SEQ ID NO: 1538871 - DNA, 15 bp, Homo sapiens
aactgcatacttcag

SEQ ID NO: 1538872 - DNA, 15 bp, Homo sapiens
aaactgcatacttca

SEQ ID NO: 1538873 - DNA, 15 bp, Homo sapiens
aaaactgcatacttc

SEQ ID NO: 1538874 - DNA, 15 bp, Homo sapiens
gaaaactgcatactt

SEQ ID NO: 1538875 - DNA, 15 bp, Homo sapiens
ggaaaactgcatact

SEQ ID NO: 1538876 - DNA, 15 bp, Homo sapiens
tggaaaactgcatac

SEQ ID NO: 1538877 - DNA, 15 bp, Homo sapiens
ctggaaaactgcata

SEQ ID NO: 1538878 - DNA, 15 bp, Homo sapiens
tctggaaaactgcat

SEQ ID NO: 1538879 - DNA, 15 bp, Homo sapiens
atctggaaaactgca

SEQ ID NO: 1538880 - DNA, 15 bp, Homo sapiens
aatctggaaaactgc

SEQ ID NO: 1538881 - DNA, 15 bp, Homo sapiens
aaatctggaaaactg

SEQ ID NO: 1538882 - DNA, 15 bp, Homo sapiens
caaatctggaaaact

SEQ ID NO: 1538883 - DNA, 15 bp, Homo sapiens
tcaaatctggaaaac

SEQ ID NO: 1538884 - DNA, 15 bp, Homo sapiens
ttcaaatctggaaaa

SEQ ID NO: 1538885 - DNA, 15 bp, Homo sapiens
gttcaaatctggaaa

SEQ ID NO: 1538886 - DNA, 15 bp, Homo sapiens
tgttcaaatctggaa

SEQ ID NO: 1538887 - DNA, 15 bp, Homo sapiens
gtgttcaaatctgga

SEQ ID NO: 1538888 - DNA, 15 bp, Homo sapiens
tgtgttcaaatctgg

SEQ ID NO: 1538889 - DNA, 15 bp, Homo sapiens
gtgtgttcaaatctg

SEQ ID NO: 1538890 - DNA, 15 bp, Homo sapiens
tgtgtgttcaaatct

SEQ ID NO: 1538891 - DNA, 15 bp, Homo sapiens
gtgtgtgttcaaatc

SEQ ID NO: 1538892 - DNA, 15 bp, Homo sapiens
tgtgtgtgttcaaat

SEQ ID NO: 1538893 - DNA, 15 bp, Homo sapiens
gtgtgtgtgttcaaa

SEQ ID NO: 1538894 - DNA, 15 bp, Homo sapiens
tgtgtgtgtgttcaa

SEQ ID NO: 1538895 - DNA, 15 bp, Homo sapiens
gtgtgtgtgtgttca

SEQ ID NO: 1538896 - DNA, 15 bp, Homo sapiens
taggggtgtgtgtgt

SEQ ID NO: 1538897 - DNA, 15 bp, Homo sapiens
ttaggggtgtgtgtg

SEQ ID NO: 1538898 - DNA, 15 bp, Homo sapiens
attaggggtgtgtgt

SEQ ID NO: 1538899 - DNA, 15 bp, Homo sapiens
tattaggggtgtgtg

SEQ ID NO: 1538900 - DNA, 15 bp, Homo sapiens
ttattaggggtgtgt

SEQ ID NO: 1538901 - DNA, 15 bp, Homo sapiens
tttattaggggtgtg

SEQ ID NO: 1538902 - DNA, 15 bp, Homo sapiens
atttattaggggtgt

SEQ ID NO: 1538903 - DNA, 15 bp, Homo sapiens
gatttattaggggtg

SEQ ID NO: 1538904 - DNA, 15 bp, Homo sapiens
tgatttattaggggt

SEQ ID NO: 1538905 - DNA, 15 bp, Homo sapiens
atgatttattagggg

SEQ ID NO: 1538906 - DNA, 15 bp, Homo sapiens
aatgatttattaggg

SEQ ID NO: 1538907 - DNA, 15 bp, Homo sapiens
taatgatttattagg

SEQ ID NO: 1538908 - DNA, 15 bp, Homo sapiens
ctaatgatttattag

SEQ ID NO: 1538909 - DNA, 15 bp, Homo sapiens
cctaatgatttatta

SEQ ID NO: 1538910 - DNA, 15 bp, Homo sapiens
gcctaatgatttatt

SEQ ID NO: 1538911 - DNA, 15 bp, Homo sapiens
agcctaatgatttat

SEQ ID NO: 1538912 - DNA, 15 bp, Homo sapiens
tagcctaatgattta

SEQ ID NO: 1538913 - DNA, 15 bp, Homo sapiens
gtagcctaatgattt

SEQ ID NO: 1538914 - DNA, 15 bp, Homo sapiens
agtagcctaatgatt

SEQ ID NO: 1538915 - DNA, 15 bp, Homo sapiens
aagtagcctaatgat

SEQ ID NO: 1538916 - DNA, 15 bp, Homo sapiens
caagtagcctaatga

SEQ ID NO: 1538917 - DNA, 15 bp, Homo sapiens
ccaagtagcctaatg

SEQ ID NO: 1538918 - DNA, 15 bp, Homo sapiens
gccaagtagcctaat

SEQ ID NO: 1538919 - DNA, 15 bp, Homo sapiens
tgccaagtagcctaa

SEQ ID NO: 1538920 - DNA, 15 bp, Homo sapiens
atgccaagtagccta

SEQ ID NO: 1538921 - DNA, 15 bp, Homo sapiens
gatgccaagtagcct

SEQ ID NO: 1538922 - DNA, 15 bp, Homo sapiens
ggatgccaagtagcc

SEQ ID NO: 1538923 - DNA, 15 bp, Homo sapiens
aggatgccaagtagc

SEQ ID NO: 1538924 - DNA, 15 bp, Homo sapiens
aaggatgccaagtag

SEQ ID NO: 1538925 - DNA, 15 bp, Homo sapiens
caaggatgccaagta

SEQ ID NO: 1538926 - DNA, 15 bp, Homo sapiens
tcaaggatgccaagt

SEQ ID NO: 1538927 - DNA, 15 bp, Homo sapiens
ttcaaggatgccaag

SEQ ID NO: 1538928 - DNA, 15 bp, Homo sapiens
cttcaaggatgccaa

SEQ ID NO: 1538929 - DNA, 15 bp, Homo sapiens
acttcaaggatgcca

SEQ ID NO: 1538930 - DNA, 15 bp, Homo sapiens
gacttcaaggatgcc

SEQ ID NO: 1538931 - DNA, 15 bp, Homo sapiens
ggacttcaaggatgc

SEQ ID NO: 1538932 - DNA, 15 bp, Homo sapiens
tggacttcaaggatg

SEQ ID NO: 1538933 - DNA, 15 bp, Homo sapiens
ttggacttcaaggat

SEQ ID NO: 1538934 - DNA, 15 bp, Homo sapiens
tttggacttcaagga

SEQ ID NO: 1538935 - DNA, 15 bp, Homo sapiens
ttttggacttcaagg

SEQ ID NO: 1538936 - DNA, 15 bp, Homo sapiens
tttttggacttcaag

SEQ ID NO: 1538937 - DNA, 15 bp, Homo sapiens
atttttggacttcaa

SEQ ID NO: 1538938 - DNA, 15 bp, Homo sapiens
aatttttggacttca

SEQ ID NO: 1538939 - DNA, 15 bp, Homo sapiens
taatttttggacttc

SEQ ID NO: 1538940 - DNA, 15 bp, Homo sapiens
ttaatttttggactt

SEQ ID NO: 1538941 - DNA, 15 bp, Homo sapiens
attaatttttggact

SEQ ID NO: 1538942 - DNA, 15 bp, Homo sapiens
gattaatttttggac

SEQ ID NO: 1538943 - DNA, 15 bp, Homo sapiens
tgattaatttttgga

SEQ ID NO: 1538944 - DNA, 15 bp, Homo sapiens
ttgattaatttttgg

SEQ ID NO: 1538945 - DNA, 15 bp, Homo sapiens
gttgattaatttttg

SEQ ID NO: 1538946 - DNA, 15 bp, Homo sapiens
ggttgattaattttt

SEQ ID NO: 1538947 - DNA, 15 bp, Homo sapiens
aggttgattaatttt

SEQ ID NO: 1538948 - DNA, 15 bp, Homo sapiens
aaggttgattaattt

SEQ ID NO: 1538949 - DNA, 15 bp, Homo sapiens
aaaggttgattaatt

SEQ ID NO: 1538950 - DNA, 15 bp, Homo sapiens
caaaggttgattaat

SEQ ID NO: 1538951 - DNA, 15 bp, Homo sapiens
ccaaaggttgattaa

SEQ ID NO: 1538952 - DNA, 15 bp, Homo sapiens
accaaaggttgatta

SEQ ID NO: 1538953 - DNA, 15 bp, Homo sapiens
taccaaaggttgatt

SEQ ID NO: 1538954 - DNA, 15 bp, Homo sapiens
gtaccaaaggttgat

SEQ ID NO: 1538955 - DNA, 15 bp, Homo sapiens
agtaccaaaggttga

SEQ ID NO: 1538956 - DNA, 15 bp, Homo sapiens
aagtaccaaaggttg

SEQ ID NO: 1538957 - DNA, 15 bp, Homo sapiens
caagtaccaaaggtt

SEQ ID NO: 1538958 - DNA, 15 bp, Homo sapiens
acaagtaccaaaggt

SEQ ID NO: 1538959 - DNA, 15 bp, Homo sapiens
aacaagtaccaaagg

SEQ ID NO: 1538960 - DNA, 15 bp, Homo sapiens
caacaagtaccaaag

SEQ ID NO: 1538961 - DNA, 15 bp, Homo sapiens
acaacaagtaccaaa

SEQ ID NO: 1538962 - DNA, 15 bp, Homo sapiens
aacaacaagtaccaa

SEQ ID NO: 1538963 - DNA, 15 bp, Homo sapiens
taacaacaagtacca

SEQ ID NO: 1538964 - DNA, 15 bp, Homo sapiens
ttaacaacaagtacc

SEQ ID NO: 1538965 - DNA, 15 bp, Homo sapiens
attaacaacaagtac

SEQ ID NO: 1538966 - DNA, 15 bp, Homo sapiens
cattaacaacaagta

SEQ ID NO: 1538967 - DNA, 15 bp, Homo sapiens
acattaacaacaagt

SEQ ID NO: 1538968 - DNA, 15 bp, Homo sapiens
aacattaacaacaag

SEQ ID NO: 1538969 - DNA, 15 bp, Homo sapiens
gaacattaacaacaa

SEQ ID NO: 1538970 - DNA, 15 bp, Homo sapiens
ggaacattaacaaca

SEQ ID NO: 1538971 - DNA, 15 bp, Homo sapiens
tggaacattaacaac

SEQ ID NO: 1538972 - DNA, 15 bp, Homo sapiens
ctggaacattaacaa

SEQ ID NO: 1538973 - DNA, 15 bp, Homo sapiens
actggaacattaaca

SEQ ID NO: 1538974 - DNA, 15 bp, Homo sapiens
tactggaacattaac

SEQ ID NO: 1538975 - DNA, 15 bp, Homo sapiens
ttactggaacattaa

SEQ ID NO: 1538976 - DNA, 15 bp, Homo sapiens
cttactggaacatta

SEQ ID NO: 1538977 - DNA, 15 bp, Homo sapiens
acttactggaacatt

SEQ ID NO: 1538978 - DNA, 15 bp, Homo sapiens
tacttactggaacat

SEQ ID NO: 1538979 - DNA, 15 bp, Homo sapiens
ctacttactggaaca

SEQ ID NO: 1538980 - DNA, 15 bp, Homo sapiens
actacttactggaac

SEQ ID NO: 1538981 - DNA, 15 bp, Homo sapiens
tactacttactggaa

SEQ ID NO: 1538982 - DNA, 15 bp, Homo sapiens
atactacttactgga

SEQ ID NO: 1538983 - DNA, 15 bp, Homo sapiens
aatactacttactgg

SEQ ID NO: 1538984 - DNA, 15 bp, Homo sapiens
aaatactacttactg

SEQ ID NO: 1538985 - DNA, 15 bp, Homo sapiens
taaatactacttact

SEQ ID NO: 1538986 - DNA, 15 bp, Homo sapiens
ataaatactacttac

SEQ ID NO: 1538987 - DNA, 15 bp, Homo sapiens
tataaatactactta

SEQ ID NO: 1538988 - DNA, 15 bp, Homo sapiens
ctataaatactactt

SEQ ID NO: 1538989 - DNA, 15 bp, Homo sapiens
tctataaatactact

SEQ ID NO: 1538990 - DNA, 15 bp, Homo sapiens
ttctataaatactac

SEQ ID NO: 1538991 - DNA, 15 bp, Homo sapiens
tttctataaatacta

SEQ ID NO: 1538992 - DNA, 15 bp, Homo sapiens
ttttctataaatact

SEQ ID NO: 1538993 - DNA, 15 bp, Homo sapiens
cttttctataaatac

SEQ ID NO: 1538994 - DNA, 15 bp, Homo sapiens
tcttttctataaata

SEQ ID NO: 1538995 - DNA, 15 bp, Homo sapiens
atcttttctataaat

SEQ ID NO: 1538996 - DNA, 15 bp, Homo sapiens
catcttttctataaa

SEQ ID NO: 1538997 - DNA, 15 bp, Homo sapiens
tcatcttttctataa

SEQ ID NO: 1538998 - DNA, 15 bp, Homo sapiens
ttcatcttttctata

SEQ ID NO: 1538999 - DNA, 15 bp, Homo sapiens
attcatcttttctat

SEQ ID NO: 1539000 - DNA, 15 bp, Homo sapiens
tattcatcttttcta

SEQ ID NO: 1539001 - DNA, 15 bp, Homo sapiens
atattcatcttttct

SEQ ID NO: 1539002 - DNA, 15 bp, Homo sapiens
aatattcatcttttc

SEQ ID NO: 1539003 - DNA, 15 bp, Homo sapiens
taatattcatctttt

SEQ ID NO: 1539004 - DNA, 15 bp, Homo sapiens
ataatattcatcttt

SEQ ID NO: 1539005 - DNA, 15 bp, Homo sapiens
aataatattcatctt

SEQ ID NO: 1539006 - DNA, 15 bp, Homo sapiens
taataatattcatct

SEQ ID NO: 1539007 - DNA, 15 bp, Homo sapiens
ttaataatattcatc

SEQ ID NO: 1539008 - DNA, 15 bp, Homo sapiens
attaataatattcat

SEQ ID NO: 1539009 - DNA, 15 bp, Homo sapiens
gattaataatattca

SEQ ID NO: 1539010 - DNA, 15 bp, Homo sapiens
tgattaataatattc

SEQ ID NO: 1539011 - DNA, 15 bp, Homo sapiens
atgattaataatatt

SEQ ID NO: 1539012 - DNA, 15 bp, Homo sapiens
tatgattaataatat

SEQ ID NO: 1539013 - DNA, 15 bp, Homo sapiens
tttatgattaataat

SEQ ID NO: 1539014 - DNA, 15 bp, Homo sapiens
gtttatgattaataa

SEQ ID NO: 1539015 - DNA, 15 bp, Homo sapiens
tgtttatgattaata

SEQ ID NO: 1539016 - DNA, 15 bp, Homo sapiens
ctgtttatgattaat

SEQ ID NO: 1539017 - DNA, 15 bp, Homo sapiens
actgtttatgattaa

SEQ ID NO: 1539018 - DNA, 15 bp, Homo sapiens
cactgtttatgatta

SEQ ID NO: 1539019 - DNA, 15 bp, Homo sapiens
tcactgtttatgatt

SEQ ID NO: 1539020 - DNA, 15 bp, Homo sapiens
ttcactgtttatgat

SEQ ID NO: 1539021 - DNA, 15 bp, Homo sapiens
tttcactgtttatga

SEQ ID NO: 1539022 - DNA, 15 bp, Homo sapiens
gtttcactgtttatg

SEQ ID NO: 1539023 - DNA, 15 bp, Homo sapiens
tgtttcactgtttat

SEQ ID NO: 1539024 - DNA, 15 bp, Homo sapiens
atgtttcactgttta

SEQ ID NO: 1539025 - DNA, 15 bp, Homo sapiens
tatgtttcactgttt

SEQ ID NO: 1539026 - DNA, 15 bp, Homo sapiens
gtatgtttcactgtt

SEQ ID NO: 1539027 - DNA, 15 bp, Homo sapiens
agtatgtttcactgt

SEQ ID NO: 1539028 - DNA, 15 bp, Homo sapiens
aagtatgtttcactg

SEQ ID NO: 1539029 - DNA, 15 bp, Homo sapiens
aaagtatgtttcact

SEQ ID NO: 1539030 - DNA, 15 bp, Homo sapiens
caaagtatgtttcac

SEQ ID NO: 1539031 - DNA, 15 bp, Homo sapiens
gcaaagtatgtttca

SEQ ID NO: 1539032 - DNA, 15 bp, Homo sapiens
cgcaaagtatgtttc

SEQ ID NO: 1539033 - DNA, 15 bp, Homo sapiens
acgcaaagtatgttt

SEQ ID NO: 1539034 - DNA, 15 bp, Homo sapiens
aacgcaaagtatgtt

SEQ ID NO: 1539035 - DNA, 15 bp, Homo sapiens
aaacgcaaagtatgt

SEQ ID NO: 1539036 - DNA, 15 bp, Homo sapiens
taaacgcaaagtatg

SEQ ID NO: 1539037 - DNA, 15 bp, Homo sapiens
gtaaacgcaaagtat

SEQ ID NO: 1539038 - DNA, 15 bp, Homo sapiens
tgtaaacgcaaagta

SEQ ID NO: 1539039 - DNA, 15 bp, Homo sapiens
gtgtaaacgcaaagt

SEQ ID NO: 1539040 - DNA, 15 bp, Homo sapiens
agtgtaaacgcaaag

SEQ ID NO: 1539041 - DNA, 15 bp, Homo sapiens
aagtgtaaacgcaaa

SEQ ID NO: 1539042 - DNA, 15 bp, Homo sapiens
taagtgtaaacgcaa

SEQ ID NO: 1539043 - DNA, 15 bp, Homo sapiens
ctaagtgtaaacgca

SEQ ID NO: 1539044 - DNA, 15 bp, Homo sapiens
gctaagtgtaaacgc

SEQ ID NO: 1539045 - DNA, 15 bp, Homo sapiens
ggctaagtgtaaacg

SEQ ID NO: 1539046 - DNA, 15 bp, Homo sapiens
aggctaagtgtaaac

SEQ ID NO: 1539047 - DNA, 15 bp, Homo sapiens
taggctaagtgtaaa

SEQ ID NO: 1539048 - DNA, 15 bp, Homo sapiens
ataggctaagtgtaa

SEQ ID NO: 1539049 - DNA, 15 bp, Homo sapiens
aataggctaagtgta

SEQ ID NO: 1539050 - DNA, 15 bp, Homo sapiens
caataggctaagtgt

SEQ ID NO: 1539051 - DNA, 15 bp, Homo sapiens
ccaataggctaagtg

SEQ ID NO: 1539052 - DNA, 15 bp, Homo sapiens
accaataggctaagt

SEQ ID NO: 1539053 - DNA, 15 bp, Homo sapiens
caccaataggctaag

SEQ ID NO: 1539054 - DNA, 15 bp, Homo sapiens
acaccaataggctaa

SEQ ID NO: 1539055 - DNA, 15 bp, Homo sapiens
cacaccaataggcta

SEQ ID NO: 1539056 - DNA, 15 bp, Homo sapiens
ccacaccaataggct

SEQ ID NO: 1539057 - DNA, 15 bp, Homo sapiens
gccacaccaataggc

SEQ ID NO: 1539058 - DNA, 15 bp, Homo sapiens
agccacaccaatagg

SEQ ID NO: 1539059 - DNA, 15 bp, Homo sapiens
tagccacaccaatag

SEQ ID NO: 1539060 - DNA, 15 bp, Homo sapiens
atagccacaccaata

SEQ ID NO: 1539061 - DNA, 15 bp, Homo sapiens
tatagccacaccaat

SEQ ID NO: 1539062 - DNA, 15 bp, Homo sapiens
ttatagccacaccaa

SEQ ID NO: 1539063 - DNA, 15 bp, Homo sapiens
tttatagccacacca

SEQ ID NO: 1539064 - DNA, 15 bp, Homo sapiens
atttatagccacacc

SEQ ID NO: 1539065 - DNA, 15 bp, Homo sapiens
gatttatagccacac

SEQ ID NO: 1539066 - DNA, 15 bp, Homo sapiens
agatttatagccaca

SEQ ID NO: 1539067 - DNA, 15 bp, Homo sapiens
aagatttatagccac

SEQ ID NO: 1539068 - DNA, 15 bp, Homo sapiens
ataagatttatagcc

SEQ ID NO: 1539069 - DNA, 15 bp, Homo sapiens
aataagatttatagc

SEQ ID NO: 1539070 - DNA, 15 bp, Homo sapiens
aaataagatttatag

SEQ ID NO: 1539071 - DNA, 15 bp, Homo sapiens
taaataagatttata

SEQ ID NO: 1539072 - DNA, 15 bp, Homo sapiens
ataaataagatttat

SEQ ID NO: 1539073 - DNA, 15 bp, Homo sapiens
aataaataagattta

SEQ ID NO: 1539074 - DNA, 15 bp, Homo sapiens
aaataaataagattt

SEQ ID NO: 1539075 - DNA, 15 bp, Homo sapiens
aaaataaataagatt

SEQ ID NO: 1539076 - DNA, 15 bp, Homo sapiens
taaaataaataagat

SEQ ID NO: 1539077 - DNA, 15 bp, Homo sapiens
ctaaaataaataaga

SEQ ID NO: 1539078 - DNA, 15 bp, Homo sapiens
actaaaataaataag

SEQ ID NO: 1539079 - DNA, 15 bp, Homo sapiens
aactaaaataaataa

SEQ ID NO: 1539080 - DNA, 15 bp, Homo sapiens
caactaaaataaata

SEQ ID NO: 1539081 - DNA, 15 bp, Homo sapiens
acaactaaaataaat

SEQ ID NO: 1539082 - DNA, 15 bp, Homo sapiens
cacaactaaaataaa

SEQ ID NO: 1539083 - DNA, 15 bp, Homo sapiens
gcacaactaaaataa

SEQ ID NO: 1539084 - DNA, 15 bp, Homo sapiens
agcacaactaaaata

SEQ ID NO: 1539085 - DNA, 15 bp, Homo sapiens
gagcacaactaaaat

SEQ ID NO: 1539086 - DNA, 15 bp, Homo sapiens
agagcacaactaaaa

SEQ ID NO: 1539087 - DNA, 15 bp, Homo sapiens
tagagcacaactaaa

SEQ ID NO: 1539088 - DNA, 15 bp, Homo sapiens
atagagcacaactaa

SEQ ID NO: 1539089 - DNA, 15 bp, Homo sapiens
aatagagcacaacta

SEQ ID NO: 1539090 - DNA, 15 bp, Homo sapiens
aaatagagcacaact

SEQ ID NO: 1539091 - DNA, 15 bp, Homo sapiens
gaaatagagcacaac

SEQ ID NO: 1539092 - DNA, 15 bp, Homo sapiens
agaaatagagcacaa

SEQ ID NO: 1539093 - DNA, 15 bp, Homo sapiens
aagaaatagagcaca

SEQ ID NO: 1539094 - DNA, 15 bp, Homo sapiens
taagaaatagagcac

SEQ ID NO: 1539095 - DNA, 15 bp, Homo sapiens
ataagaaatagagca

SEQ ID NO: 1539096 - DNA, 15 bp, Homo sapiens
aataagaaatagagc

SEQ ID NO: 1539097 - DNA, 15 bp, Homo sapiens
caataagaaatagag

SEQ ID NO: 1539098 - DNA, 15 bp, Homo sapiens
tcaataagaaataga

SEQ ID NO: 1539099 - DNA, 15 bp, Homo sapiens
atcaataagaaatag

SEQ ID NO: 1539100 - DNA, 15 bp, Homo sapiens
gatcaataagaaata

SEQ ID NO: 1539101 - DNA, 15 bp, Homo sapiens
agatcaataagaaat

SEQ ID NO: 1539102 - DNA, 15 bp, Homo sapiens
aagatcaataagaaa

SEQ ID NO: 1539103 - DNA, 15 bp, Homo sapiens
aaagatcaataagaa

SEQ ID NO: 1539104 - DNA, 15 bp, Homo sapiens
taaagatcaataaga

SEQ ID NO: 1539105 - DNA, 15 bp, Homo sapiens
gtaaagatcaataag

SEQ ID NO: 1539106 - DNA, 15 bp, Homo sapiens
tgtaaagatcaataa

SEQ ID NO: 1539107 - DNA, 15 bp, Homo sapiens
ttgtaaagatcaata

SEQ ID NO: 1539108 - DNA, 15 bp, Homo sapiens
attgtaaagatcaat

SEQ ID NO: 1539109 - DNA, 15 bp, Homo sapiens
cattgtaaagatcaa

SEQ ID NO: 1539110 - DNA, 15 bp, Homo sapiens
acattgtaaagatca

SEQ ID NO: 1539111 - DNA, 15 bp, Homo sapiens
cacattgtaaagatc

SEQ ID NO: 1539112 - DNA, 15 bp, Homo sapiens
acacattgtaaagat

SEQ ID NO: 1539113 - DNA, 15 bp, Homo sapiens
aacacattgtaaaga

SEQ ID NO: 1539114 - DNA, 15 bp, Homo sapiens
gaacacattgtaaag

SEQ ID NO: 1539115 - DNA, 15 bp, Homo sapiens
agaacacattgtaaa

SEQ ID NO: 1539116 - DNA, 15 bp, Homo sapiens
gagaacacattgtaa

SEQ ID NO: 1539117 - DNA, 15 bp, Homo sapiens
agagaacacattgta

SEQ ID NO: 1539118 - DNA, 15 bp, Homo sapiens
tagagaacacattgt

SEQ ID NO: 1539119 - DNA, 15 bp, Homo sapiens
ttagagaacacattg

SEQ ID NO: 1539120 - DNA, 15 bp, Homo sapiens
tttagagaacacatt

SEQ ID NO: 1539121 - DNA, 15 bp, Homo sapiens
ctttagagaacacat

SEQ ID NO: 1539122 - DNA, 15 bp, Homo sapiens
actttagagaacaca

SEQ ID NO: 1539123 - DNA, 15 bp, Homo sapiens
tactttagagaacac

SEQ ID NO: 1539124 - DNA, 15 bp, Homo sapiens
ttactttagagaaca

SEQ ID NO: 1539125 - DNA, 15 bp, Homo sapiens
attactttagagaac

SEQ ID NO: 1539126 - DNA, 15 bp, Homo sapiens
tttattactttagag

SEQ ID NO: 1539127 - DNA, 15 bp, Homo sapiens
ctttattactttaga

SEQ ID NO: 1539128 - DNA, 15 bp, Homo sapiens
actttattactttag

SEQ ID NO: 1539129 - DNA, 15 bp, Homo sapiens
cactttattacttta

SEQ ID NO: 1539130 - DNA, 15 bp, Homo sapiens
tcactttattacttt

SEQ ID NO: 1539131 - DNA, 15 bp, Homo sapiens
ttcactttattactt

SEQ ID NO: 1539132 - DNA, 15 bp, Homo sapiens
attcactttattact

SEQ ID NO: 1539133 - DNA, 15 bp, Homo sapiens
cattcactttattac

SEQ ID NO: 1539134 - DNA, 15 bp, Homo sapiens
gcattcactttatta

SEQ ID NO: 1539135 - DNA, 15 bp, Homo sapiens
tgcattcactttatt

SEQ ID NO: 1539136 - DNA, 15 bp, Homo sapiens
ttgcattcactttat

SEQ ID NO: 1539137 - DNA, 15 bp, Homo sapiens
tttgcattcacttta

SEQ ID NO: 1539138 - DNA, 15 bp, Homo sapiens
atttgcattcacttt

SEQ ID NO: 1539139 - DNA, 15 bp, Homo sapiens
tatttgcattcactt

SEQ ID NO: 1539140 - DNA, 15 bp, Homo sapiens
atatttgcattcact

SEQ ID NO: 1539141 - DNA, 15 bp, Homo sapiens
tatatttgcattcac

SEQ ID NO: 1539142 - DNA, 15 bp, Homo sapiens
gtatatttgcattca

SEQ ID NO: 1539143 - DNA, 15 bp, Homo sapiens
cgtatatttgcattc

SEQ ID NO: 1539144 - DNA, 15 bp, Homo sapiens
acgtatatttgcatt

SEQ ID NO: 1539145 - DNA, 15 bp, Homo sapiens
cacgtatatttgcat

SEQ ID NO: 1539146 - DNA, 15 bp, Homo sapiens
ccacgtatatttgca

SEQ ID NO: 1539147 - DNA, 15 bp, Homo sapiens
accacgtatatttgc

SEQ ID NO: 1539148 - DNA, 15 bp, Homo sapiens
gaccacgtatatttg

SEQ ID NO: 1539149 - DNA, 15 bp, Homo sapiens
tgaccacgtatattt

SEQ ID NO: 1539150 - DNA, 15 bp, Homo sapiens
gtgaccacgtatatt

SEQ ID NO: 1539151 - DNA, 15 bp, Homo sapiens
tgtgaccacgtatat

SEQ ID NO: 1539152 - DNA, 15 bp, Homo sapiens
ctgtgaccacgtata

SEQ ID NO: 1539153 - DNA, 15 bp, Homo sapiens
cctgtgaccacgtat

SEQ ID NO: 1539154 - DNA, 15 bp, Homo sapiens
acctgtgaccacgta

SEQ ID NO: 1539155 - DNA, 15 bp, Homo sapiens
aacctgtgaccacgt

SEQ ID NO: 1539156 - DNA, 15 bp, Homo sapiens
aaacctgtgaccacg

SEQ ID NO: 1539157 - DNA, 15 bp, Homo sapiens
taaacctgtgaccac

SEQ ID NO: 1539158 - DNA, 15 bp, Homo sapiens
ataaacctgtgacca

SEQ ID NO: 1539159 - DNA, 15 bp, Homo sapiens
aataaacctgtgacc

SEQ ID NO: 1539160 - DNA, 15 bp, Homo sapiens
gaataaacctgtgac

SEQ ID NO: 1539161 - DNA, 15 bp, Homo sapiens
agaataaacctgtga

SEQ ID NO: 1539162 - DNA, 15 bp, Homo sapiens
cagaataaacctgtg

SEQ ID NO: 1539163 - DNA, 15 bp, Homo sapiens
tcagaataaacctgt

SEQ ID NO: 1539164 - DNA, 15 bp, Homo sapiens
ctcagaataaacctg

SEQ ID NO: 1539165 - DNA, 15 bp, Homo sapiens
actcagaataaacct

SEQ ID NO: 1539166 - DNA, 15 bp, Homo sapiens
aactcagaataaacc

SEQ ID NO: 1539167 - DNA, 15 bp, Homo sapiens
aaactcagaataaac

SEQ ID NO: 1539168 - DNA, 15 bp, Homo sapiens
aaaactcagaataaa

SEQ ID NO: 1539169 - DNA, 15 bp, Homo sapiens
taaaactcagaataa

SEQ ID NO: 1539170 - DNA, 15 bp, Homo sapiens
ttaaaactcagaata

SEQ ID NO: 1539171 - DNA, 15 bp, Homo sapiens
attaaaactcagaat

SEQ ID NO: 1539172 - DNA, 15 bp, Homo sapiens
aattaaaactcagaa

SEQ ID NO: 1539173 - DNA, 15 bp, Homo sapiens
aaattaaaactcaga

SEQ ID NO: 1539174 - DNA, 15 bp, Homo sapiens
taaattaaaactcag

SEQ ID NO: 1539175 - DNA, 15 bp, Homo sapiens
ataaattaaaactca

SEQ ID NO: 1539176 - DNA, 15 bp, Homo sapiens
aataaattaaaactc

SEQ ID NO: 1539177 - DNA, 15 bp, Homo sapiens
taataaattaaaact

SEQ ID NO: 1539178 - DNA, 15 bp, Homo sapiens
ataataaattaaaac

SEQ ID NO: 1539179 - DNA, 15 bp, Homo sapiens
tataataaattaaaa

SEQ ID NO: 1539180 - DNA, 15 bp, Homo sapiens
gtataataaattaaa

SEQ ID NO: 1539181 - DNA, 15 bp, Homo sapiens
tgtataataaattaa

SEQ ID NO: 1539182 - DNA, 15 bp, Homo sapiens
ttgtataataaatta

SEQ ID NO: 1539183 - DNA, 15 bp, Homo sapiens
tttgtataataaatt

SEQ ID NO: 1539184 - DNA, 15 bp, Homo sapiens
ttttgtataataaat

SEQ ID NO: 1539185 - DNA, 15 bp, Homo sapiens
cttttgtataataaa

SEQ ID NO: 1539186 - DNA, 15 bp, Homo sapiens
acttttgtataataa

SEQ ID NO: 1539187 - DNA, 15 bp, Homo sapiens
tacttttgtataata

SEQ ID NO: 1539188 - DNA, 15 bp, Homo sapiens
ttacttttgtataat

SEQ ID NO: 1539189 - DNA, 15 bp, Homo sapiens
tttacttttgtataa

SEQ ID NO: 1539190 - DNA, 15 bp, Homo sapiens
ctttacttttgtata

SEQ ID NO: 1539191 - DNA, 15 bp, Homo sapiens
cctttacttttgtat

SEQ ID NO: 1539192 - DNA, 15 bp, Homo sapiens
acctttacttttgta

SEQ ID NO: 1539193 - DNA, 15 bp, Homo sapiens
aacctttacttttgt

SEQ ID NO: 1539194 - DNA, 15 bp, Homo sapiens
aaacctttacttttg

SEQ ID NO: 1539195 - DNA, 15 bp, Homo sapiens
aaaacctttactttt

SEQ ID NO: 1539196 - DNA, 15 bp, Homo sapiens
taaaacctttacttt

SEQ ID NO: 1539197 - DNA, 15 bp, Homo sapiens
ttaaaacctttactt

SEQ ID NO: 1539198 - DNA, 15 bp, Homo sapiens
attaaaacctttact

SEQ ID NO: 1539199 - DNA, 15 bp, Homo sapiens
aattaaaacctttac

SEQ ID NO: 1539200 - DNA, 15 bp, Homo sapiens
aaattaaaaccttta

SEQ ID NO: 1539201 - DNA, 15 bp, Homo sapiens
taaattaaaaccttt

SEQ ID NO: 1539202 - DNA, 15 bp, Homo sapiens
ttaaattaaaacctt

SEQ ID NO: 1539203 - DNA, 15 bp, Homo sapiens
attaaattaaaacct

SEQ ID NO: 1539204 - DNA, 15 bp, Homo sapiens
tattaaattaaaacc

SEQ ID NO: 1539205 - DNA, 15 bp, Homo sapiens
atattaaattaaaac

SEQ ID NO: 1539206 - DNA, 15 bp, Homo sapiens
aatattaaattaaaa

SEQ ID NO: 1539207 - DNA, 15 bp, Homo sapiens
taatattaaattaaa

SEQ ID NO: 1539208 - DNA, 15 bp, Homo sapiens
ttaatattaaattaa

SEQ ID NO: 1539209 - DNA, 15 bp, Homo sapiens
attaatattaaatta

SEQ ID NO: 1539210 - DNA, 15 bp, Homo sapiens
tattaatattaaatt

SEQ ID NO: 1539211 - DNA, 15 bp, Homo sapiens
ctattaatattaaat

SEQ ID NO: 1539212 - DNA, 15 bp, Homo sapiens
actattaatattaaa

SEQ ID NO: 1539213 - DNA, 15 bp, Homo sapiens
tactattaatattaa

SEQ ID NO: 1539214 - DNA, 15 bp, Homo sapiens
ctactattaatatta

SEQ ID NO: 1539215 - DNA, 15 bp, Homo sapiens
tctactattaatatt

SEQ ID NO: 1539216 - DNA, 15 bp, Homo sapiens
ttctactattaatat

SEQ ID NO: 1539217 - DNA, 15 bp, Homo sapiens
tttctactattaata

SEQ ID NO: 1539218 - DNA, 15 bp, Homo sapiens
ttttctactattaat

SEQ ID NO: 1539219 - DNA, 15 bp, Homo sapiens
tttttctactattaa

SEQ ID NO: 1539220 - DNA, 15 bp, Homo sapiens
gtttttctactatta

SEQ ID NO: 1539221 - DNA, 15 bp, Homo sapiens
tgtttttctactatt

SEQ ID NO: 1539222 - DNA, 15 bp, Homo sapiens
gtgtttttctactat

SEQ ID NO: 1539223 - DNA, 15 bp, Homo sapiens
agtgtttttctacta

SEQ ID NO: 1539224 - DNA, 15 bp, Homo sapiens
aagtgtttttctact

SEQ ID NO: 1539225 - DNA, 15 bp, Homo sapiens
aaagtgtttttctac

SEQ ID NO: 1539226 - DNA, 15 bp, Homo sapiens
gaaagtgtttttcta

SEQ ID NO: 1539227 - DNA, 15 bp, Homo sapiens
agaaagtgtttttct

SEQ ID NO: 1539228 - DNA, 15 bp, Homo sapiens
aagaaagtgtttttc

SEQ ID NO: 1539229 - DNA, 15 bp, Homo sapiens
taagaaagtgttttt

SEQ ID NO: 1539230 - DNA, 15 bp, Homo sapiens
gtaagaaagtgtttt

SEQ ID NO: 1539231 - DNA, 15 bp, Homo sapiens
cgtaagaaagtgttt

SEQ ID NO: 1539232 - DNA, 15 bp, Homo sapiens
acgtaagaaagtgtt

SEQ ID NO: 1539233 - DNA, 15 bp, Homo sapiens
cacgtaagaaagtgt

SEQ ID NO: 1539234 - DNA, 15 bp, Homo sapiens
acacgtaagaaagtg

SEQ ID NO: 1539235 - DNA, 15 bp, Homo sapiens
cacacgtaagaaagt

SEQ ID NO: 1539236 - DNA, 15 bp, Homo sapiens
gcacacgtaagaaag

SEQ ID NO: 1539237 - DNA, 15 bp, Homo sapiens
ggcacacgtaagaaa

SEQ ID NO: 1539238 - DNA, 15 bp, Homo sapiens
tggcacacgtaagaa

SEQ ID NO: 1539239 - DNA, 15 bp, Homo sapiens
atggcacacgtaaga

SEQ ID NO: 1539240 - DNA, 15 bp, Homo sapiens
tatggcacacgtaag

SEQ ID NO: 1539241 - DNA, 15 bp, Homo sapiens
atatggcacacgtaa

SEQ ID NO: 1539242 - DNA, 15 bp, Homo sapiens
catatggcacacgta

SEQ ID NO: 1539243 - DNA, 15 bp, Homo sapiens
ccatatggcacacgt

SEQ ID NO: 1539244 - DNA, 15 bp, Homo sapiens
tccatatggcacacg

SEQ ID NO: 1539245 - DNA, 15 bp, Homo sapiens
ttccatatggcacac

SEQ ID NO: 1539246 - DNA, 15 bp, Homo sapiens
tttccatatggcaca

SEQ ID NO: 1539247 - DNA, 15 bp, Homo sapiens
ctttccatatggcac

SEQ ID NO: 1539248 - DNA, 15 bp, Homo sapiens
tctttccatatggca

SEQ ID NO: 1539249 - DNA, 15 bp, Homo sapiens
atctttccatatggc

SEQ ID NO: 1539250 - DNA, 15 bp, Homo sapiens
tatctttccatatgg

SEQ ID NO: 1539251 - DNA, 15 bp, Homo sapiens
ttatctttccatatg

SEQ ID NO: 1539252 - DNA, 15 bp, Homo sapiens
tttatctttccatat

SEQ ID NO: 1539253 - DNA, 15 bp, Homo sapiens
ctttatctttccata

SEQ ID NO: 1539254 - DNA, 15 bp, Homo sapiens
cctttatctttccat

SEQ ID NO: 1539255 - DNA, 15 bp, Homo sapiens
tcctttatctttcca

SEQ ID NO: 1539256 - DNA, 15 bp, Homo sapiens
atcctttatctttcc

SEQ ID NO: 1539257 - DNA, 15 bp, Homo sapiens
gatcctttatctttc

SEQ ID NO: 1539258 - DNA, 15 bp, Homo sapiens
agatcctttatcttt

SEQ ID NO: 1539259 - DNA, 15 bp, Homo sapiens
tagatcctttatctt

SEQ ID NO: 1539260 - DNA, 15 bp, Homo sapiens
atagatcctttatct

SEQ ID NO: 1539261 - DNA, 15 bp, Homo sapiens
aatagatcctttatc

SEQ ID NO: 1539262 - DNA, 15 bp, Homo sapiens
gaatagatcctttat

SEQ ID NO: 1539263 - DNA, 15 bp, Homo sapiens
agaatagatccttta

SEQ ID NO: 1539264 - DNA, 15 bp, Homo sapiens
tagaatagatccttt

SEQ ID NO: 1539265 - DNA, 15 bp, Homo sapiens
ttagaatagatcctt

SEQ ID NO: 1539266 - DNA, 15 bp, Homo sapiens
tttagaatagatcct

SEQ ID NO: 1539267 - DNA, 15 bp, Homo sapiens
ttttagaatagatcc

SEQ ID NO: 1539268 - DNA, 15 bp, Homo sapiens
attttagaatagatc

SEQ ID NO: 1539269 - DNA, 15 bp, Homo sapiens
aattttagaatagat

SEQ ID NO: 1539270 - DNA, 15 bp, Homo sapiens
taattttagaataga

SEQ ID NO: 1539271 - DNA, 15 bp, Homo sapiens
ctaattttagaatag

SEQ ID NO: 1539272 - DNA, 15 bp, Homo sapiens
gctaattttagaata

SEQ ID NO: 1539273 - DNA, 15 bp, Homo sapiens
agctaattttagaat

SEQ ID NO: 1539274 - DNA, 15 bp, Homo sapiens
cagctaattttagaa

SEQ ID NO: 1539275 - DNA, 15 bp, Homo sapiens
acagctaattttaga

SEQ ID NO: 1539276 - DNA, 15 bp, Homo sapiens
cacagctaattttag

SEQ ID NO: 1539277 - DNA, 15 bp, Homo sapiens
acacagctaatttta

SEQ ID NO: 1539278 - DNA, 15 bp, Homo sapiens
aacacagctaatttt

SEQ ID NO: 1539279 - DNA, 15 bp, Homo sapiens
caacacagctaattt

SEQ ID NO: 1539280 - DNA, 15 bp, Homo sapiens
ccaacacagctaatt

SEQ ID NO: 1539281 - DNA, 15 bp, Homo sapiens
accaacacagctaat

SEQ ID NO: 1539282 - DNA, 15 bp, Homo sapiens
aaccaacacagctaa

SEQ ID NO: 1539283 - DNA, 15 bp, Homo sapiens
caaccaacacagcta

SEQ ID NO: 1539284 - DNA, 15 bp, Homo sapiens
tcaaccaacacagct

SEQ ID NO: 1539285 - DNA, 15 bp, Homo sapiens
atcaaccaacacagc

SEQ ID NO: 1539286 - DNA, 15 bp, Homo sapiens
tatcaaccaacacag

SEQ ID NO: 1539287 - DNA, 15 bp, Homo sapiens
ttatcaaccaacaca

SEQ ID NO: 1539288 - DNA, 15 bp, Homo sapiens
cttatcaaccaacac

SEQ ID NO: 1539289 - DNA, 15 bp, Homo sapiens
gcttatcaaccaaca

SEQ ID NO: 1539290 - DNA, 15 bp, Homo sapiens
agcttatcaaccaac

SEQ ID NO: 1539291 - DNA, 15 bp, Homo sapiens
cagcttatcaaccaa

SEQ ID NO: 1539292 - DNA, 15 bp, Homo sapiens
ccagcttatcaacca

SEQ ID NO: 1539293 - DNA, 15 bp, Homo sapiens
accagcttatcaacc

SEQ ID NO: 1539294 - DNA, 15 bp, Homo sapiens
caccagcttatcaac

SEQ ID NO: 1539295 - DNA, 15 bp, Homo sapiens
acaccagcttatcaa

SEQ ID NO: 1539296 - DNA, 15 bp, Homo sapiens
cacaccagcttatca

SEQ ID NO: 1539297 - DNA, 15 bp, Homo sapiens
ccacaccagcttatc

SEQ ID NO: 1539298 - DNA, 15 bp, Homo sapiens
tccacaccagcttat

SEQ ID NO: 1539299 - DNA, 15 bp, Homo sapiens
atccacaccagctta

SEQ ID NO: 1539300 - DNA, 15 bp, Homo sapiens
aatccacaccagctt

SEQ ID NO: 1539301 - DNA, 15 bp, Homo sapiens
gaatccacaccagct

SEQ ID NO: 1539302 - DNA, 15 bp, Homo sapiens
agaatccacaccagc

SEQ ID NO: 1539303 - DNA, 15 bp, Homo sapiens
cagaatccacaccag

SEQ ID NO: 1539304 - DNA, 15 bp, Homo sapiens
gcagaatccacacca

SEQ ID NO: 1539305 - DNA, 15 bp, Homo sapiens
ggcagaatccacacc

SEQ ID NO: 1539306 - DNA, 15 bp, Homo sapiens
tggcagaatccacac

SEQ ID NO: 1539307 - DNA, 15 bp, Homo sapiens
gtggcagaatccaca

SEQ ID NO: 1539308 - DNA, 15 bp, Homo sapiens
tgtggcagaatccac

SEQ ID NO: 1539309 - DNA, 15 bp, Homo sapiens
atgtggcagaatcca

SEQ ID NO: 1539310 - DNA, 15 bp, Homo sapiens
gatgtggcagaatcc

SEQ ID NO: 1539311 - DNA, 15 bp, Homo sapiens
ggatgtggcagaatc

SEQ ID NO: 1539312 - DNA, 15 bp, Homo sapiens
tggatgtggcagaat

SEQ ID NO: 1539313 - DNA, 15 bp, Homo sapiens
ctggatgtggcagaa

SEQ ID NO: 1539314 - DNA, 15 bp, Homo sapiens
gctggatgtggcaga

SEQ ID NO: 1539315 - DNA, 15 bp, Homo sapiens
tgctggatgtggcag

SEQ ID NO: 1539316 - DNA, 15 bp, Homo sapiens
ttgctggatgtggca

SEQ ID NO: 1539317 - DNA, 15 bp, Homo sapiens
cttgctggatgtggc

SEQ ID NO: 1539318 - DNA, 15 bp, Homo sapiens
ccttgctggatgtgg

SEQ ID NO: 1539319 - DNA, 15 bp, Homo sapiens
tccttgctggatgtg

SEQ ID NO: 1539320 - DNA, 15 bp, Homo sapiens
ttccttgctggatgt

SEQ ID NO: 1539321 - DNA, 15 bp, Homo sapiens
cttccttgctggatg

SEQ ID NO: 1539322 - DNA, 15 bp, Homo sapiens
tcttccttgctggat

SEQ ID NO: 1539323 - DNA, 15 bp, Homo sapiens
atcttccttgctgga

SEQ ID NO: 1539324 - DNA, 15 bp, Homo sapiens
tatcttccttgctgg

SEQ ID NO: 1539325 - DNA, 15 bp, Homo sapiens
gtatcttccttgctg

SEQ ID NO: 1539326 - DNA, 15 bp, Homo sapiens
ggtatcttccttgct

SEQ ID NO: 1539327 - DNA, 15 bp, Homo sapiens
tggtatcttccttgc

SEQ ID NO: 1539328 - DNA, 15 bp, Homo sapiens
atggtatcttccttg

SEQ ID NO: 1539329 - DNA, 15 bp, Homo sapiens
aatggtatcttcctt

SEQ ID NO: 1539330 - DNA, 15 bp, Homo sapiens
taatggtatcttcct

SEQ ID NO: 1539331 - DNA, 15 bp, Homo sapiens
ttaatggtatcttcc

SEQ ID NO: 1539332 - DNA, 15 bp, Homo sapiens
tttaatggtatcttc

SEQ ID NO: 1539333 - DNA, 15 bp, Homo sapiens
atttaatggtatctt

SEQ ID NO: 1539334 - DNA, 15 bp, Homo sapiens
aatttaatggtatct

SEQ ID NO: 1539335 - DNA, 15 bp, Homo sapiens
taatttaatggtatc

SEQ ID NO: 1539336 - DNA, 15 bp, Homo sapiens
gtaatttaatggtat

SEQ ID NO: 1539337 - DNA, 15 bp, Homo sapiens
tgtaatttaatggta

SEQ ID NO: 1539338 - DNA, 15 bp, Homo sapiens
gtgtaatttaatggt

SEQ ID NO: 1539339 - DNA, 15 bp, Homo sapiens
tgtgtaatttaatgg

SEQ ID NO: 1539340 - DNA, 15 bp, Homo sapiens
ctgtgtaatttaatg

SEQ ID NO: 1539341 - DNA, 15 bp, Homo sapiens
actgtgtaatttaat

SEQ ID NO: 1539342 - DNA, 15 bp, Homo sapiens
aactgtgtaatttaa

SEQ ID NO: 1539343 - DNA, 15 bp, Homo sapiens
aaactgtgtaattta

SEQ ID NO: 1539344 - DNA, 15 bp, Homo sapiens
taaactgtgtaattt

SEQ ID NO: 1539345 - DNA, 15 bp, Homo sapiens
ctaaactgtgtaatt

SEQ ID NO: 1539346 - DNA, 15 bp, Homo sapiens
gctaaactgtgtaat

SEQ ID NO: 1539347 - DNA, 15 bp, Homo sapiens
agctaaactgtgtaa

SEQ ID NO: 1539348 - DNA, 15 bp, Homo sapiens
gagctaaactgtgta

SEQ ID NO: 1539349 - DNA, 15 bp, Homo sapiens
agagctaaactgtgt

SEQ ID NO: 1539350 - DNA, 15 bp, Homo sapiens
gagagctaaactgtg

SEQ ID NO: 1539351 - DNA, 15 bp, Homo sapiens
agagagctaaactgt

SEQ ID NO: 1539352 - DNA, 15 bp, Homo sapiens
gagagagctaaactg

SEQ ID NO: 1539353 - DNA, 15 bp, Homo sapiens
agagagagctaaact

SEQ ID NO: 1539354 - DNA, 15 bp, Homo sapiens
tagagagagctaaac

SEQ ID NO: 1539355 - DNA, 15 bp, Homo sapiens
atagagagagctaaa

SEQ ID NO: 1539356 - DNA, 15 bp, Homo sapiens
gatagagagagctaa

SEQ ID NO: 1539357 - DNA, 15 bp, Homo sapiens
agatagagagagcta

SEQ ID NO: 1539358 - DNA, 15 bp, Homo sapiens
tagatagagagagct

SEQ ID NO: 1539359 - DNA, 15 bp, Homo sapiens
atagatagagagagc

SEQ ID NO: 1539360 - DNA, 15 bp, Homo sapiens
catagatagagagag

SEQ ID NO: 1539361 - DNA, 15 bp, Homo sapiens
gcatagatagagaga

SEQ ID NO: 1539362 - DNA, 15 bp, Homo sapiens
tgcatagatagagag

SEQ ID NO: 1539363 - DNA, 15 bp, Homo sapiens
atgcatagatagaga

SEQ ID NO: 1539364 - DNA, 15 bp, Homo sapiens
aatgcatagatagag

SEQ ID NO: 1539365 - DNA, 15 bp, Homo sapiens
taatgcatagataga

SEQ ID NO: 1539366 - DNA, 15 bp, Homo sapiens
ctaatgcatagatag

SEQ ID NO: 1539367 - DNA, 15 bp, Homo sapiens
cctaatgcatagata

SEQ ID NO: 1539368 - DNA, 15 bp, Homo sapiens
tcctaatgcatagat

SEQ ID NO: 1539369 - DNA, 15 bp, Homo sapiens
ttcctaatgcataga

SEQ ID NO: 1539370 - DNA, 15 bp, Homo sapiens
attcctaatgcatag

SEQ ID NO: 1539371 - DNA, 15 bp, Homo sapiens
aattcctaatgcata

SEQ ID NO: 1539372 - DNA, 15 bp, Homo sapiens
aaattcctaatgcat

SEQ ID NO: 1539373 - DNA, 15 bp, Homo sapiens
caaattcctaatgca

SEQ ID NO: 1539374 - DNA, 15 bp, Homo sapiens
tcaaattcctaatgc

SEQ ID NO: 1539375 - DNA, 15 bp, Homo sapiens
gtcaaattcctaatg

SEQ ID NO: 1539376 - DNA, 15 bp, Homo sapiens
agtcaaattcctaat

SEQ ID NO: 1539377 - DNA, 15 bp, Homo sapiens
aagtcaaattcctaa

SEQ ID NO: 1539378 - DNA, 15 bp, Homo sapiens
gaagtcaaattccta

SEQ ID NO: 1539379 - DNA, 15 bp, Homo sapiens
ggaagtcaaattcct

SEQ ID NO: 1539380 - DNA, 15 bp, Homo sapiens
tggaagtcaaattcc

SEQ ID NO: 1539381 - DNA, 15 bp, Homo sapiens
atggaagtcaaattc

SEQ ID NO: 1539382 - DNA, 15 bp, Homo sapiens
aatggaagtcaaatt

SEQ ID NO: 1539383 - DNA, 15 bp, Homo sapiens
aaatggaagtcaaat

SEQ ID NO: 1539384 - DNA, 15 bp, Homo sapiens
caaatggaagtcaaa

SEQ ID NO: 1539385 - DNA, 15 bp, Homo sapiens
tcaaatggaagtcaa

SEQ ID NO: 1539386 - DNA, 15 bp, Homo sapiens
atcaaatggaagtca

SEQ ID NO: 1539387 - DNA, 15 bp, Homo sapiens
catcaaatggaagtc

SEQ ID NO: 1539388 - DNA, 15 bp, Homo sapiens
acatcaaatggaagt

SEQ ID NO: 1539389 - DNA, 15 bp, Homo sapiens
aacatcaaatggaag

SEQ ID NO: 1539390 - DNA, 15 bp, Homo sapiens
taacatcaaatggaa

SEQ ID NO: 1539391 - DNA, 15 bp, Homo sapiens
ttaacatcaaatgga

SEQ ID NO: 1539392 - DNA, 15 bp, Homo sapiens
tttaacatcaaatgg

SEQ ID NO: 1539393 - DNA, 15 bp, Homo sapiens
ctttaacatcaaatg

SEQ ID NO: 1539394 - DNA, 15 bp, Homo sapiens
gctttaacatcaaat

SEQ ID NO: 1539395 - DNA, 15 bp, Homo sapiens
tgctttaacatcaaa

SEQ ID NO: 1539396 - DNA, 15 bp, Homo sapiens
atgctttaacatcaa

SEQ ID NO: 1539397 - DNA, 15 bp, Homo sapiens
tatgctttaacatca

SEQ ID NO: 1539398 - DNA, 15 bp, Homo sapiens
atatgctttaacatc

SEQ ID NO: 1539399 - DNA, 15 bp, Homo sapiens
tatatgctttaacat

SEQ ID NO: 1539400 - DNA, 15 bp, Homo sapiens
gtatatgctttaaca

SEQ ID NO: 1539401 - DNA, 15 bp, Homo sapiens
agtatatgctttaac

SEQ ID NO: 1539402 - DNA, 15 bp, Homo sapiens
aagtatatgctttaa

SEQ ID NO: 1539403 - DNA, 15 bp, Homo sapiens
caagtatatgcttta

SEQ ID NO: 1539404 - DNA, 15 bp, Homo sapiens
ccaagtatatgcttt

SEQ ID NO: 1539405 - DNA, 15 bp, Homo sapiens
gccaagtatatgctt

SEQ ID NO: 1539406 - DNA, 15 bp, Homo sapiens
agccaagtatatgct

SEQ ID NO: 1539407 - DNA, 15 bp, Homo sapiens
aagccaagtatatgc

SEQ ID NO: 1539408 - DNA, 15 bp, Homo sapiens
aaagccaagtatatg

SEQ ID NO: 1539409 - DNA, 15 bp, Homo sapiens
taaagccaagtatat

SEQ ID NO: 1539410 - DNA, 15 bp, Homo sapiens
ttaaagccaagtata

SEQ ID NO: 1539411 - DNA, 15 bp, Homo sapiens
cttaaagccaagtat

SEQ ID NO: 1539412 - DNA, 15 bp, Homo sapiens
ccttaaagccaagta

SEQ ID NO: 1539413 - DNA, 15 bp, Homo sapiens
tccttaaagccaagt

SEQ ID NO: 1539414 - DNA, 15 bp, Homo sapiens
gtccttaaagccaag

SEQ ID NO: 1539415 - DNA, 15 bp, Homo sapiens
tgtccttaaagccaa

SEQ ID NO: 1539416 - DNA, 15 bp, Homo sapiens
gtgtccttaaagcca

SEQ ID NO: 1539417 - DNA, 15 bp, Homo sapiens
tgtgtccttaaagcc

SEQ ID NO: 1539418 - DNA, 15 bp, Homo sapiens
gtgtgtccttaaagc

SEQ ID NO: 1539419 - DNA, 15 bp, Homo sapiens
agtgtgtccttaaag

SEQ ID NO: 1539420 - DNA, 15 bp, Homo sapiens
tagtgtgtccttaaa

SEQ ID NO: 1539421 - DNA, 15 bp, Homo sapiens
ttagtgtgtccttaa

SEQ ID NO: 1539422 - DNA, 15 bp, Homo sapiens
tttagtgtgtcctta

SEQ ID NO: 1539423 - DNA, 15 bp, Homo sapiens
ttttagtgtgtcctt

SEQ ID NO: 1539424 - DNA, 15 bp, Homo sapiens
gttttagtgtgtcct

SEQ ID NO: 1539425 - DNA, 15 bp, Homo sapiens
agttttagtgtgtcc

SEQ ID NO: 1539426 - DNA, 15 bp, Homo sapiens
tagttttagtgtgtc

SEQ ID NO: 1539427 - DNA, 15 bp, Homo sapiens
atagttttagtgtgt

SEQ ID NO: 1539428 - DNA, 15 bp, Homo sapiens
aatagttttagtgtg

SEQ ID NO: 1539429 - DNA, 15 bp, Homo sapiens
gaatagttttagtgt

SEQ ID NO: 1539430 - DNA, 15 bp, Homo sapiens
tgaatagttttagtg

SEQ ID NO: 1539431 - DNA, 15 bp, Homo sapiens
ttgaatagttttagt

SEQ ID NO: 1539432 - DNA, 15 bp, Homo sapiens
tttgaatagttttag

SEQ ID NO: 1539433 - DNA, 15 bp, Homo sapiens
ctttgaatagtttta

SEQ ID NO: 1539434 - DNA, 15 bp, Homo sapiens
actttgaatagtttt

SEQ ID NO: 1539435 - DNA, 15 bp, Homo sapiens
aactttgaatagttt

SEQ ID NO: 1539436 - DNA, 15 bp, Homo sapiens
aaactttgaatagtt

SEQ ID NO: 1539437 - DNA, 15 bp, Homo sapiens
taaactttgaatagt

SEQ ID NO: 1539438 - DNA, 15 bp, Homo sapiens
ttaaactttgaatag

SEQ ID NO: 1539439 - DNA, 15 bp, Homo sapiens
attaaactttgaata

SEQ ID NO: 1539440 - DNA, 15 bp, Homo sapiens
aattaaactttgaat

SEQ ID NO: 1539441 - DNA, 15 bp, Homo sapiens
taattaaactttgaa

SEQ ID NO: 1539442 - DNA, 15 bp, Homo sapiens
gtaattaaactttga

SEQ ID NO: 1539443 - DNA, 15 bp, Homo sapiens
tgtaattaaactttg

SEQ ID NO: 1539444 - DNA, 15 bp, Homo sapiens
atgtaattaaacttt

SEQ ID NO: 1539445 - DNA, 15 bp, Homo sapiens
aatgtaattaaactt

SEQ ID NO: 1539446 - DNA, 15 bp, Homo sapiens
gaatgtaattaaact

SEQ ID NO: 1539447 - DNA, 15 bp, Homo sapiens
tgaatgtaattaaac

SEQ ID NO: 1539448 - DNA, 15 bp, Homo sapiens
ctgaatgtaattaaa

SEQ ID NO: 1539449 - DNA, 15 bp, Homo sapiens
tctgaatgtaattaa

SEQ ID NO: 1539450 - DNA, 15 bp, Homo sapiens
gtctgaatgtaatta

SEQ ID NO: 1539451 - DNA, 15 bp, Homo sapiens
tgtctgaatgtaatt

SEQ ID NO: 1539452 - DNA, 15 bp, Homo sapiens
ttgtctgaatgtaat

SEQ ID NO: 1539453 - DNA, 15 bp, Homo sapiens
tttgtctgaatgtaa

SEQ ID NO: 1539454 - DNA, 15 bp, Homo sapiens
ctttgtctgaatgta

SEQ ID NO: 1539455 - DNA, 15 bp, Homo sapiens
tctttgtctgaatgt

SEQ ID NO: 1539456 - DNA, 15 bp, Homo sapiens
atctttgtctgaatg

SEQ ID NO: 1539457 - DNA, 15 bp, Homo sapiens
gatctttgtctgaat

SEQ ID NO: 1539458 - DNA, 15 bp, Homo sapiens
tgatctttgtctgaa

SEQ ID NO: 1539459 - DNA, 15 bp, Homo sapiens
atgatctttgtctga

SEQ ID NO: 1539460 - DNA, 15 bp, Homo sapiens
gatgatctttgtctg

SEQ ID NO: 1539461 - DNA, 15 bp, Homo sapiens
agatgatctttgtct

SEQ ID NO: 1539462 - DNA, 15 bp, Homo sapiens
tagatgatctttgtc

SEQ ID NO: 1539463 - DNA, 15 bp, Homo sapiens
ttagatgatctttgt

SEQ ID NO: 1539464 - DNA, 15 bp, Homo sapiens
gttagatgatctttg

SEQ ID NO: 1539465 - DNA, 15 bp, Homo sapiens
ggttagatgatcttt

SEQ ID NO: 1539466 - DNA, 15 bp, Homo sapiens
tggttagatgatctt

SEQ ID NO: 1539467 - DNA, 15 bp, Homo sapiens
gtggttagatgatct

SEQ ID NO: 1539468 - DNA, 15 bp, Homo sapiens
agtggttagatgatc

SEQ ID NO: 1539469 - DNA, 15 bp, Homo sapiens
cagtggttagatgat

SEQ ID NO: 1539470 - DNA, 15 bp, Homo sapiens
acagtggttagatga

SEQ ID NO: 1539471 - DNA, 15 bp, Homo sapiens
aacagtggttagatg

SEQ ID NO: 1539472 - DNA, 15 bp, Homo sapiens
caacagtggttagat

SEQ ID NO: 1539473 - DNA, 15 bp, Homo sapiens
gcaacagtggttaga

SEQ ID NO: 1539474 - DNA, 15 bp, Homo sapiens
agcaacagtggttag

SEQ ID NO: 1539475 - DNA, 15 bp, Homo sapiens
tagcaacagtggtta

SEQ ID NO: 1539476 - DNA, 15 bp, Homo sapiens
gtagcaacagtggtt

SEQ ID NO: 1539477 - DNA, 15 bp, Homo sapiens
tgtagcaacagtggt

SEQ ID NO: 1539478 - DNA, 15 bp, Homo sapiens
atgtagcaacagtgg

SEQ ID NO: 1539479 - DNA, 15 bp, Homo sapiens
tatgtagcaacagtg

SEQ ID NO: 1539480 - DNA, 15 bp, Homo sapiens
ctatgtagcaacagt

SEQ ID NO: 1539481 - DNA, 15 bp, Homo sapiens
cctatgtagcaacag

SEQ ID NO: 1539482 - DNA, 15 bp, Homo sapiens
ccctatgtagcaaca

SEQ ID NO: 1539483 - DNA, 15 bp, Homo sapiens
tccctatgtagcaac

SEQ ID NO: 1539484 - DNA, 15 bp, Homo sapiens
ttccctatgtagcaa

SEQ ID NO: 1539485 - DNA, 15 bp, Homo sapiens
attccctatgtagca

SEQ ID NO: 1539486 - DNA, 15 bp, Homo sapiens
tattccctatgtagc

SEQ ID NO: 1539487 - DNA, 15 bp, Homo sapiens
atattccctatgtag

SEQ ID NO: 1539488 - DNA, 15 bp, Homo sapiens
aatattccctatgta

SEQ ID NO: 1539489 - DNA, 15 bp, Homo sapiens
aaatattccctatgt

SEQ ID NO: 1539490 - DNA, 15 bp, Homo sapiens
taaatattccctatg

SEQ ID NO: 1539491 - DNA, 15 bp, Homo sapiens
ataaatattccctat

SEQ ID NO: 1539492 - DNA, 15 bp, Homo sapiens
aataaatattcccta

SEQ ID NO: 1539493 - DNA, 15 bp, Homo sapiens
aaataaatattccct

SEQ ID NO: 1539494 - DNA, 15 bp, Homo sapiens
taaataaatattccc

SEQ ID NO: 1539495 - DNA, 15 bp, Homo sapiens
aattaaataaatatt

SEQ ID NO: 1539496 - DNA, 15 bp, Homo sapiens
taattaaataaatat

SEQ ID NO: 1539497 - DNA, 15 bp, Homo sapiens
ataattaaataaata

SEQ ID NO: 1539498 - DNA, 15 bp, Homo sapiens
gataattaaataaat

SEQ ID NO: 1539499 - DNA, 15 bp, Homo sapiens
ggataattaaataaa

SEQ ID NO: 1539500 - DNA, 15 bp, Homo sapiens
gggataattaaataa

SEQ ID NO: 1539501 - DNA, 15 bp, Homo sapiens
agggataattaaata

SEQ ID NO: 1539502 - DNA, 15 bp, Homo sapiens
aagggataattaaat

SEQ ID NO: 1539503 - DNA, 15 bp, Homo sapiens
caagggataattaaa

SEQ ID NO: 1539504 - DNA, 15 bp, Homo sapiens
gcaagggataattaa

SEQ ID NO: 1539505 - DNA, 15 bp, Homo sapiens
agcaagggataatta

SEQ ID NO: 1539506 - DNA, 15 bp, Homo sapiens
tagcaagggataatt

SEQ ID NO: 1539507 - DNA, 15 bp, Homo sapiens
atagcaagggataat

SEQ ID NO: 1539508 - DNA, 15 bp, Homo sapiens
gatagcaagggataa

SEQ ID NO: 1539509 - DNA, 15 bp, Homo sapiens
agatagcaagggata

SEQ ID NO: 1539510 - DNA, 15 bp, Homo sapiens
gagatagcaagggat

SEQ ID NO: 1539511 - DNA, 15 bp, Homo sapiens
agagatagcaaggga

SEQ ID NO: 1539512 - DNA, 15 bp, Homo sapiens
tagagatagcaaggg

SEQ ID NO: 1539513 - DNA, 15 bp, Homo sapiens
atagagatagcaagg

SEQ ID NO: 1539514 - DNA, 15 bp, Homo sapiens
aatagagatagcaag

SEQ ID NO: 1539515 - DNA, 15 bp, Homo sapiens
taatagagatagcaa

SEQ ID NO: 1539516 - DNA, 15 bp, Homo sapiens
ttaatagagatagca

SEQ ID NO: 1539517 - DNA, 15 bp, Homo sapiens
attaatagagatagc

SEQ ID NO: 1539518 - DNA, 15 bp, Homo sapiens
gattaatagagatag

SEQ ID NO: 1539519 - DNA, 15 bp, Homo sapiens
tgattaatagagata

SEQ ID NO: 1539520 - DNA, 15 bp, Homo sapiens
ctgattaatagagat

SEQ ID NO: 1539521 - DNA, 15 bp, Homo sapiens
actgattaatagaga

SEQ ID NO: 1539522 - DNA, 15 bp, Homo sapiens
aactgattaatagag

SEQ ID NO: 1539523 - DNA, 15 bp, Homo sapiens
aaactgattaataga

SEQ ID NO: 1539524 - DNA, 15 bp, Homo sapiens
gaaactgattaatag

SEQ ID NO: 1539525 - DNA, 15 bp, Homo sapiens
ggaaactgattaata

SEQ ID NO: 1539526 - DNA, 15 bp, Homo sapiens
aggaaactgattaat

SEQ ID NO: 1539527 - DNA, 15 bp, Homo sapiens
gaggaaactgattaa

SEQ ID NO: 1539528 - DNA, 15 bp, Homo sapiens
tgaggaaactgatta

SEQ ID NO: 1539529 - DNA, 15 bp, Homo sapiens
ttgaggaaactgatt

SEQ ID NO: 1539530 - DNA, 15 bp, Homo sapiens
attgaggaaactgat

SEQ ID NO: 1539531 - DNA, 15 bp, Homo sapiens
aattgaggaaactga

SEQ ID NO: 1539532 - DNA, 15 bp, Homo sapiens
aaattgaggaaactg

SEQ ID NO: 1539533 - DNA, 15 bp, Homo sapiens
taaattgaggaaact

SEQ ID NO: 1539534 - DNA, 15 bp, Homo sapiens
ataaattgaggaaac

SEQ ID NO: 1539535 - DNA, 15 bp, Homo sapiens
gataaattgaggaaa

SEQ ID NO: 1539536 - DNA, 15 bp, Homo sapiens
ggataaattgaggaa

SEQ ID NO: 1539537 - DNA, 15 bp, Homo sapiens
aggataaattgagga

SEQ ID NO: 1539538 - DNA, 15 bp, Homo sapiens
aaggataaattgagg

SEQ ID NO: 1539539 - DNA, 15 bp, Homo sapiens
taaggataaattgag

SEQ ID NO: 1539540 - DNA, 15 bp, Homo sapiens
ttaaggataaattga

SEQ ID NO: 1539541 - DNA, 15 bp, Homo sapiens
tttaaggataaattg

SEQ ID NO: 1539542 - DNA, 15 bp, Homo sapiens
ttttaaggataaatt

SEQ ID NO: 1539543 - DNA, 15 bp, Homo sapiens
attttaaggataaat

SEQ ID NO: 1539544 - DNA, 15 bp, Homo sapiens
aattttaaggataaa

SEQ ID NO: 1539545 - DNA, 15 bp, Homo sapiens
aaattttaaggataa

SEQ ID NO: 1539546 - DNA, 15 bp, Homo sapiens
aaaattttaaggata

SEQ ID NO: 1539547 - DNA, 15 bp, Homo sapiens
gaaaattttaaggat

SEQ ID NO: 1539548 - DNA, 15 bp, Homo sapiens
ggaaaattttaagga

SEQ ID NO: 1539549 - DNA, 15 bp, Homo sapiens
aggaaaattttaagg

SEQ ID NO: 1539550 - DNA, 15 bp, Homo sapiens
gaggaaaattttaag

SEQ ID NO: 1539551 - DNA, 15 bp, Homo sapiens
tgaggaaaattttaa

SEQ ID NO: 1539552 - DNA, 15 bp, Homo sapiens
ttgaggaaaatttta

SEQ ID NO: 1539553 - DNA, 15 bp, Homo sapiens
tttgaggaaaatttt

SEQ ID NO: 1539554 - DNA, 15 bp, Homo sapiens
atttgaggaaaattt

SEQ ID NO: 1539555 - DNA, 15 bp, Homo sapiens
catttgaggaaaatt

SEQ ID NO: 1539556 - DNA, 15 bp, Homo sapiens
gcatttgaggaaaat

SEQ ID NO: 1539557 - DNA, 15 bp, Homo sapiens
agcatttgaggaaaa

SEQ ID NO: 1539558 - DNA, 15 bp, Homo sapiens
aagcatttgaggaaa

SEQ ID NO: 1539559 - DNA, 15 bp, Homo sapiens
taagcatttgaggaa

SEQ ID NO: 1539560 - DNA, 15 bp, Homo sapiens
ctaagcatttgagga

SEQ ID NO: 1539561 - DNA, 15 bp, Homo sapiens
actaagcatttgagg

SEQ ID NO: 1539562 - DNA, 15 bp, Homo sapiens
aactaagcatttgag

SEQ ID NO: 1539563 - DNA, 15 bp, Homo sapiens
taactaagcatttga

SEQ ID NO: 1539564 - DNA, 15 bp, Homo sapiens
ataactaagcatttg

SEQ ID NO: 1539565 - DNA, 15 bp, Homo sapiens
aataactaagcattt

SEQ ID NO: 1539566 - DNA, 15 bp, Homo sapiens
aaataactaagcatt

SEQ ID NO: 1539567 - DNA, 15 bp, Homo sapiens
aaaataactaagcat

SEQ ID NO: 1539568 - DNA, 15 bp, Homo sapiens
taaaataactaagca

SEQ ID NO: 1539569 - DNA, 15 bp, Homo sapiens
ataaaataactaagc

SEQ ID NO: 1539570 - DNA, 15 bp, Homo sapiens
aataaaataactaag

SEQ ID NO: 1539571 - DNA, 15 bp, Homo sapiens
taataaaataactaa

SEQ ID NO: 1539572 - DNA, 15 bp, Homo sapiens
ataataaaataacta

SEQ ID NO: 1539573 - DNA, 15 bp, Homo sapiens
aataataaaataact

SEQ ID NO: 1539574 - DNA, 15 bp, Homo sapiens
aaataataaaataac

SEQ ID NO: 1539575 - DNA, 15 bp, Homo sapiens
caaataataaaataa

SEQ ID NO: 1539576 - DNA, 15 bp, Homo sapiens
gcaaataataaaata

SEQ ID NO: 1539577 - DNA, 15 bp, Homo sapiens
agcaaataataaaat

SEQ ID NO: 1539578 - DNA, 15 bp, Homo sapiens
aagcaaataataaaa

SEQ ID NO: 1539579 - DNA, 15 bp, Homo sapiens
aaagcaaataataaa

SEQ ID NO: 1539580 - DNA, 15 bp, Homo sapiens
aaaagcaaataataa

SEQ ID NO: 1539581 - DNA, 15 bp, Homo sapiens
aaaaagcaaataata

SEQ ID NO: 1539582 - DNA, 15 bp, Homo sapiens
taaaaagcaaataat

SEQ ID NO: 1539583 - DNA, 15 bp, Homo sapiens
ttaaaaagcaaataa

SEQ ID NO: 1539584 - DNA, 15 bp, Homo sapiens
tttaaaaagcaaata

SEQ ID NO: 1539585 - DNA, 15 bp, Homo sapiens
ttttaaaaagcaaat

SEQ ID NO: 1539586 - DNA, 15 bp, Homo sapiens
attttaaaaagcaaa

SEQ ID NO: 1539587 - DNA, 15 bp, Homo sapiens
tattttaaaaagcaa

SEQ ID NO: 1539588 - DNA, 15 bp, Homo sapiens
atattttaaaaagca

SEQ ID NO: 1539589 - DNA, 15 bp, Homo sapiens
aatattttaaaaagc

SEQ ID NO: 1539590 - DNA, 15 bp, Homo sapiens
gaatattttaaaaag

SEQ ID NO: 1539591 - DNA, 15 bp, Homo sapiens
tgaatattttaaaaa

SEQ ID NO: 1539592 - DNA, 15 bp, Homo sapiens
ctgaatattttaaaa

SEQ ID NO: 1539593 - DNA, 15 bp, Homo sapiens
actgaatattttaaa

SEQ ID NO: 1539594 - DNA, 15 bp, Homo sapiens
cactgaatattttaa

SEQ ID NO: 1539595 - DNA, 15 bp, Homo sapiens
acactgaatatttta

SEQ ID NO: 1539596 - DNA, 15 bp, Homo sapiens
gacactgaatatttt

SEQ ID NO: 1539597 - DNA, 15 bp, Homo sapiens
tgacactgaatattt

SEQ ID NO: 1539598 - DNA, 15 bp, Homo sapiens
ttgacactgaatatt

SEQ ID NO: 1539599 - DNA, 15 bp, Homo sapiens
tttgacactgaatat

SEQ ID NO: 1539600 - DNA, 15 bp, Homo sapiens
ttttgacactgaata

SEQ ID NO: 1539601 - DNA, 15 bp, Homo sapiens
gttttgacactgaat

SEQ ID NO: 1539602 - DNA, 15 bp, Homo sapiens
tgttttgacactgaa

SEQ ID NO: 1539603 - DNA, 15 bp, Homo sapiens
ttgttttgacactga

SEQ ID NO: 1539604 - DNA, 15 bp, Homo sapiens
tttgttttgacactg

SEQ ID NO: 1539605 - DNA, 15 bp, Homo sapiens
ttttgttttgacact

SEQ ID NO: 1539606 - DNA, 15 bp, Homo sapiens
cttttgttttgacac

SEQ ID NO: 1539607 - DNA, 15 bp, Homo sapiens
acttttgttttgaca

SEQ ID NO: 1539608 - DNA, 15 bp, Homo sapiens
tacttttgttttgac

SEQ ID NO: 1539609 - DNA, 15 bp, Homo sapiens
gtacttttgttttga

SEQ ID NO: 1539610 - DNA, 15 bp, Homo sapiens
tgtacttttgttttg

SEQ ID NO: 1539611 - DNA, 15 bp, Homo sapiens
gtgtacttttgtttt

SEQ ID NO: 1539612 - DNA, 15 bp, Homo sapiens
tgtgtacttttgttt

SEQ ID NO: 1539613 - DNA, 15 bp, Homo sapiens
ctgtgtacttttgtt

SEQ ID NO: 1539614 - DNA, 15 bp, Homo sapiens
actgtgtacttttgt

SEQ ID NO: 1539615 - DNA, 15 bp, Homo sapiens
aactgtgtacttttg

SEQ ID NO: 1539616 - DNA, 15 bp, Homo sapiens
aaactgtgtactttt

SEQ ID NO: 1539617 - DNA, 15 bp, Homo sapiens
taaactgtgtacttt

SEQ ID NO: 1539618 - DNA, 15 bp, Homo sapiens
ttaaactgtgtactt

SEQ ID NO: 1539619 - DNA, 15 bp, Homo sapiens
tttaaactgtgtact

SEQ ID NO: 1539620 - DNA, 15 bp, Homo sapiens
atttaaactgtgtac

SEQ ID NO: 1539621 - DNA, 15 bp, Homo sapiens
tatttaaactgtgta

SEQ ID NO: 1539622 - DNA, 15 bp, Homo sapiens
ttatttaaactgtgt

SEQ ID NO: 1539623 - DNA, 15 bp, Homo sapiens
attatttaaactgtg

SEQ ID NO: 1539624 - DNA, 15 bp, Homo sapiens
aattatttaaactgt

SEQ ID NO: 1539625 - DNA, 15 bp, Homo sapiens
taattatttaaactg

SEQ ID NO: 1539626 - DNA, 15 bp, Homo sapiens
ttaattatttaaact

SEQ ID NO: 1539627 - DNA, 15 bp, Homo sapiens
cttaattatttaaac

SEQ ID NO: 1539628 - DNA, 15 bp, Homo sapiens
gcttaattatttaaa

SEQ ID NO: 1539629 - DNA, 15 bp, Homo sapiens
tgcttaattatttaa

SEQ ID NO: 1539630 - DNA, 15 bp, Homo sapiens
ctgcttaattattta

SEQ ID NO: 1539631 - DNA, 15 bp, Homo sapiens
cctgcttaattattt

SEQ ID NO: 1539632 - DNA, 15 bp, Homo sapiens
gcctgcttaattatt

SEQ ID NO: 1539633 - DNA, 15 bp, Homo sapiens
tgcctgcttaattat

SEQ ID NO: 1539634 - DNA, 15 bp, Homo sapiens
atgcctgcttaatta

SEQ ID NO: 1539635 - DNA, 15 bp, Homo sapiens
tatgcctgcttaatt

SEQ ID NO: 1539636 - DNA, 15 bp, Homo sapiens
gtatgcctgcttaat

SEQ ID NO: 1539637 - DNA, 15 bp, Homo sapiens
agtatgcctgcttaa

SEQ ID NO: 1539638 - DNA, 15 bp, Homo sapiens
aagtatgcctgctta

SEQ ID NO: 1539639 - DNA, 15 bp, Homo sapiens
gaagtatgcctgctt

SEQ ID NO: 1539640 - DNA, 15 bp, Homo sapiens
agaagtatgcctgct

SEQ ID NO: 1539641 - DNA, 15 bp, Homo sapiens
gagaagtatgcctgc

SEQ ID NO: 1539642 - DNA, 15 bp, Homo sapiens
ggagaagtatgcctg

SEQ ID NO: 1539643 - DNA, 15 bp, Homo sapiens
gggagaagtatgcct

SEQ ID NO: 1539644 - DNA, 15 bp, Homo sapiens
agggagaagtatgcc

SEQ ID NO: 1539645 - DNA, 15 bp, Homo sapiens
cagggagaagtatgc

SEQ ID NO: 1539646 - DNA, 15 bp, Homo sapiens
acagggagaagtatg

SEQ ID NO: 1539647 - DNA, 15 bp, Homo sapiens
gacagggagaagtat

SEQ ID NO: 1539648 - DNA, 15 bp, Homo sapiens
agacagggagaagta

SEQ ID NO: 1539649 - DNA, 15 bp, Homo sapiens
gagacagggagaagt

SEQ ID NO: 1539650 - DNA, 15 bp, Homo sapiens
tgagacagggagaag

SEQ ID NO: 1539651 - DNA, 15 bp, Homo sapiens
gtgagacagggagaa

SEQ ID NO: 1539652 - DNA, 15 bp, Homo sapiens
ggtgagacagggaga

SEQ ID NO: 1539653 - DNA, 15 bp, Homo sapiens
aggtgagacagggag

SEQ ID NO: 1539654 - DNA, 15 bp, Homo sapiens
caggtgagacaggga

SEQ ID NO: 1539655 - DNA, 15 bp, Homo sapiens
gcaggtgagacaggg

SEQ ID NO: 1539656 - DNA, 15 bp, Homo sapiens
agcaggtgagacagg

SEQ ID NO: 1539657 - DNA, 15 bp, Homo sapiens
aagcaggtgagacag

SEQ ID NO: 1539658 - DNA, 15 bp, Homo sapiens
caagcaggtgagaca

SEQ ID NO: 1539659 - DNA, 15 bp, Homo sapiens
tcaagcaggtgagac

SEQ ID NO: 1539660 - DNA, 15 bp, Homo sapiens
atcaagcaggtgaga

SEQ ID NO: 1539661 - DNA, 15 bp, Homo sapiens
aatcaagcaggtgag

SEQ ID NO: 1539662 - DNA, 15 bp, Homo sapiens
gaatcaagcaggtga

SEQ ID NO: 1539663 - DNA, 15 bp, Homo sapiens
agaatcaagcaggtg

SEQ ID NO: 1539664 - DNA, 15 bp, Homo sapiens
tagaatcaagcaggt

SEQ ID NO: 1539665 - DNA, 15 bp, Homo sapiens
ttagaatcaagcagg

SEQ ID NO: 1539666 - DNA, 15 bp, Homo sapiens
tttagaatcaagcag

SEQ ID NO: 1539667 - DNA, 15 bp, Homo sapiens
atttagaatcaagca

SEQ ID NO: 1539668 - DNA, 15 bp, Homo sapiens
aatttagaatcaagc

SEQ ID NO: 1539669 - DNA, 15 bp, Homo sapiens
caatttagaatcaag

SEQ ID NO: 1539670 - DNA, 15 bp, Homo sapiens
gcaatttagaatcaa

SEQ ID NO: 1539671 - DNA, 15 bp, Homo sapiens
tgcaatttagaatca

SEQ ID NO: 1539672 - DNA, 15 bp, Homo sapiens
ttgcaatttagaatc

SEQ ID NO: 1539673 - DNA, 15 bp, Homo sapiens
cttgcaatttagaat

SEQ ID NO: 1539674 - DNA, 15 bp, Homo sapiens
ccttgcaatttagaa

SEQ ID NO: 1539675 - DNA, 15 bp, Homo sapiens
accttgcaatttaga

SEQ ID NO: 1539676 - DNA, 15 bp, Homo sapiens
gaccttgcaatttag

SEQ ID NO: 1539677 - DNA, 15 bp, Homo sapiens
agaccttgcaattta

SEQ ID NO: 1539678 - DNA, 15 bp, Homo sapiens
tagaccttgcaattt

SEQ ID NO: 1539679 - DNA, 15 bp, Homo sapiens
gtagaccttgcaatt

SEQ ID NO: 1539680 - DNA, 15 bp, Homo sapiens
ggtagaccttgcaat

SEQ ID NO: 1539681 - DNA, 15 bp, Homo sapiens
tggtagaccttgcaa

SEQ ID NO: 1539682 - DNA, 15 bp, Homo sapiens
atggtagaccttgca

SEQ ID NO: 1539683 - DNA, 15 bp, Homo sapiens
catggtagaccttgc

SEQ ID NO: 1539684 - DNA, 15 bp, Homo sapiens
acatggtagaccttg

SEQ ID NO: 1539685 - DNA, 15 bp, Homo sapiens
gacatggtagacctt

SEQ ID NO: 1539686 - DNA, 15 bp, Homo sapiens
tgacatggtagacct

SEQ ID NO: 1539687 - DNA, 15 bp, Homo sapiens
ttgacatggtagacc

SEQ ID NO: 1539688 - DNA, 15 bp, Homo sapiens
tttgacatggtagac

SEQ ID NO: 1539689 - DNA, 15 bp, Homo sapiens
atttgacatggtaga

SEQ ID NO: 1539690 - DNA, 15 bp, Homo sapiens
aatttgacatggtag

SEQ ID NO: 1539691 - DNA, 15 bp, Homo sapiens
aaatttgacatggta

SEQ ID NO: 1539692 - DNA, 15 bp, Homo sapiens
aaaatttgacatggt

SEQ ID NO: 1539693 - DNA, 15 bp, Homo sapiens
taaaatttgacatgg

SEQ ID NO: 1539694 - DNA, 15 bp, Homo sapiens
ctaaaatttgacatg

SEQ ID NO: 1539695 - DNA, 15 bp, Homo sapiens
tctaaaatttgacat

SEQ ID NO: 1539696 - DNA, 15 bp, Homo sapiens
atctaaaatttgaca

SEQ ID NO: 1539697 - DNA, 15 bp, Homo sapiens
tatctaaaatttgac

SEQ ID NO: 1539698 - DNA, 15 bp, Homo sapiens
ttatctaaaatttga

SEQ ID NO: 1539699 - DNA, 15 bp, Homo sapiens
attatctaaaatttg

SEQ ID NO: 1539700 - DNA, 15 bp, Homo sapiens
gattatctaaaattt

SEQ ID NO: 1539701 - DNA, 15 bp, Homo sapiens
tgattatctaaaatt

SEQ ID NO: 1539702 - DNA, 15 bp, Homo sapiens
ctgattatctaaaat

SEQ ID NO: 1539703 - DNA, 15 bp, Homo sapiens
tctgattatctaaaa

SEQ ID NO: 1539704 - DNA, 15 bp, Homo sapiens
ttctgattatctaaa

SEQ ID NO: 1539705 - DNA, 15 bp, Homo sapiens
gttctgattatctaa

SEQ ID NO: 1539706 - DNA, 15 bp, Homo sapiens
tgttctgattatcta

SEQ ID NO: 1539707 - DNA, 15 bp, Homo sapiens
ttgttctgattatct

SEQ ID NO: 1539708 - DNA, 15 bp, Homo sapiens
gttgttctgattatc

SEQ ID NO: 1539709 - DNA, 15 bp, Homo sapiens
tgttgttctgattat

SEQ ID NO: 1539710 - DNA, 15 bp, Homo sapiens
gtgttgttctgatta

SEQ ID NO: 1539711 - DNA, 15 bp, Homo sapiens
agtgttgttctgatt

SEQ ID NO: 1539712 - DNA, 15 bp, Homo sapiens
aagtgttgttctgat

SEQ ID NO: 1539713 - DNA, 15 bp, Homo sapiens
aaagtgttgttctga

SEQ ID NO: 1539714 - DNA, 15 bp, Homo sapiens
caaagtgttgttctg

SEQ ID NO: 1539715 - DNA, 15 bp, Homo sapiens
ccaaagtgttgttct

SEQ ID NO: 1539716 - DNA, 15 bp, Homo sapiens
cccaaagtgttgttc

SEQ ID NO: 1539717 - DNA, 15 bp, Homo sapiens
tcccaaagtgttgtt

SEQ ID NO: 1539718 - DNA, 15 bp, Homo sapiens
atcccaaagtgttgt

SEQ ID NO: 1539719 - DNA, 15 bp, Homo sapiens
aatcccaaagtgttg

SEQ ID NO: 1539720 - DNA, 15 bp, Homo sapiens
taatcccaaagtgtt

SEQ ID NO: 1539721 - DNA, 15 bp, Homo sapiens
ttaatcccaaagtgt

SEQ ID NO: 1539722 - DNA, 15 bp, Homo sapiens
tttaatcccaaagtg

SEQ ID NO: 1539723 - DNA, 15 bp, Homo sapiens
atttaatcccaaagt

SEQ ID NO: 1539724 - DNA, 15 bp, Homo sapiens
tatttaatcccaaag

SEQ ID NO: 1539725 - DNA, 15 bp, Homo sapiens
gtatttaatcccaaa

SEQ ID NO: 1539726 - DNA, 15 bp, Homo sapiens
ggtatttaatcccaa

SEQ ID NO: 1539727 - DNA, 15 bp, Homo sapiens
tggtatttaatccca

SEQ ID NO: 1539728 - DNA, 15 bp, Homo sapiens
ttggtatttaatccc

SEQ ID NO: 1539729 - DNA, 15 bp, Homo sapiens
gttggtatttaatcc

SEQ ID NO: 1539730 - DNA, 15 bp, Homo sapiens
agttggtatttaatc

SEQ ID NO: 1539731 - DNA, 15 bp, Homo sapiens
cagttggtatttaat

SEQ ID NO: 1539732 - DNA, 15 bp, Homo sapiens
tcagttggtatttaa

SEQ ID NO: 1539733 - DNA, 15 bp, Homo sapiens
gtcagttggtattta

SEQ ID NO: 1539734 - DNA, 15 bp, Homo sapiens
agtcagttggtattt

SEQ ID NO: 1539735 - DNA, 15 bp, Homo sapiens
aagtcagttggtatt

SEQ ID NO: 1539736 - DNA, 15 bp, Homo sapiens
gaagtcagttggtat

SEQ ID NO: 1539737 - DNA, 15 bp, Homo sapiens
tgaagtcagttggta

SEQ ID NO: 1539738 - DNA, 15 bp, Homo sapiens
atgaagtcagttggt

SEQ ID NO: 1539739 - DNA, 15 bp, Homo sapiens
aatgaagtcagttgg

SEQ ID NO: 1539740 - DNA, 15 bp, Homo sapiens
aaatgaagtcagttg

SEQ ID NO: 1539741 - DNA, 15 bp, Homo sapiens
aaaatgaagtcagtt

SEQ ID NO: 1539742 - DNA, 15 bp, Homo sapiens
aaaaatgaagtcagt

SEQ ID NO: 1539743 - DNA, 15 bp, Homo sapiens
taaaaatgaagtcag

SEQ ID NO: 1539744 - DNA, 15 bp, Homo sapiens
gtaaaaatgaagtca

SEQ ID NO: 1539745 - DNA, 15 bp, Homo sapiens
agtaaaaatgaagtc

SEQ ID NO: 1539746 - DNA, 15 bp, Homo sapiens
gagtaaaaatgaagt

SEQ ID NO: 1539747 - DNA, 15 bp, Homo sapiens
ggagtaaaaatgaag

SEQ ID NO: 1539748 - DNA, 15 bp, Homo sapiens
tggagtaaaaatgaa

SEQ ID NO: 1539749 - DNA, 15 bp, Homo sapiens
atggagtaaaaatga

SEQ ID NO: 1539750 - DNA, 15 bp, Homo sapiens
tatggagtaaaaatg

SEQ ID NO: 1539751 - DNA, 15 bp, Homo sapiens
ttatggagtaaaaat

SEQ ID NO: 1539752 - DNA, 15 bp, Homo sapiens
cttatggagtaaaaa

SEQ ID NO: 1539753 - DNA, 15 bp, Homo sapiens
gcttatggagtaaaa

SEQ ID NO: 1539754 - DNA, 15 bp, Homo sapiens
ggcttatggagtaaa

SEQ ID NO: 1539755 - DNA, 15 bp, Homo sapiens
aggcttatggagtaa

SEQ ID NO: 1539756 - DNA, 15 bp, Homo sapiens
aaggcttatggagta

SEQ ID NO: 1539757 - DNA, 15 bp, Homo sapiens
gaaggcttatggagt

SEQ ID NO: 1539758 - DNA, 15 bp, Homo sapiens
agaaggcttatggag

SEQ ID NO: 1539759 - DNA, 15 bp, Homo sapiens
gagaaggcttatgga

SEQ ID NO: 1539760 - DNA, 15 bp, Homo sapiens
tgagaaggcttatgg

SEQ ID NO: 1539761 - DNA, 15 bp, Homo sapiens
atgagaaggcttatg

SEQ ID NO: 1539762 - DNA, 15 bp, Homo sapiens
aatgagaaggcttat

SEQ ID NO: 1539763 - DNA, 15 bp, Homo sapiens
caatgagaaggctta

SEQ ID NO: 1539764 - DNA, 15 bp, Homo sapiens
gcaatgagaaggctt

SEQ ID NO: 1539765 - DNA, 15 bp, Homo sapiens
agcaatgagaaggct

SEQ ID NO: 1539766 - DNA, 15 bp, Homo sapiens
tagcaatgagaaggc

SEQ ID NO: 1539767 - DNA, 15 bp, Homo sapiens
gtagcaatgagaagg

SEQ ID NO: 1539768 - DNA, 15 bp, Homo sapiens
agtagcaatgagaag

SEQ ID NO: 1539769 - DNA, 15 bp, Homo sapiens
aagtagcaatgagaa

SEQ ID NO: 1539770 - DNA, 15 bp, Homo sapiens
aaagtagcaatgaga

SEQ ID NO: 1539771 - DNA, 15 bp, Homo sapiens
caaagtagcaatgag

SEQ ID NO: 1539772 - DNA, 15 bp, Homo sapiens
gcaaagtagcaatga

SEQ ID NO: 1539773 - DNA, 15 bp, Homo sapiens
tgcaaagtagcaatg

SEQ ID NO: 1539774 - DNA, 15 bp, Homo sapiens
atgcaaagtagcaat

SEQ ID NO: 1539775 - DNA, 15 bp, Homo sapiens
aatgcaaagtagcaa

SEQ ID NO: 1539776 - DNA, 15 bp, Homo sapiens
aaatgcaaagtagca

SEQ ID NO: 1539777 - DNA, 15 bp, Homo sapiens
aaaatgcaaagtagc

SEQ ID NO: 1539778 - DNA, 15 bp, Homo sapiens
aaaaatgcaaagtag

SEQ ID NO: 1539779 - DNA, 15 bp, Homo sapiens
gaaaaatgcaaagta

SEQ ID NO: 1539780 - DNA, 15 bp, Homo sapiens
agaaaaatgcaaagt

SEQ ID NO: 1539781 - DNA, 15 bp, Homo sapiens
aagaaaaatgcaaag

SEQ ID NO: 1539782 - DNA, 15 bp, Homo sapiens
gaagaaaaatgcaaa

SEQ ID NO: 1539783 - DNA, 15 bp, Homo sapiens
tgaagaaaaatgcaa

SEQ ID NO: 1539784 - DNA, 15 bp, Homo sapiens
gtgaagaaaaatgca

SEQ ID NO: 1539785 - DNA, 15 bp, Homo sapiens
agtgaagaaaaatgc

SEQ ID NO: 1539786 - DNA, 15 bp, Homo sapiens
tagtgaagaaaaatg

SEQ ID NO: 1539787 - DNA, 15 bp, Homo sapiens
ttagtgaagaaaaat

SEQ ID NO: 1539788 - DNA, 15 bp, Homo sapiens
gttagtgaagaaaaa

SEQ ID NO: 1539789 - DNA, 15 bp, Homo sapiens
ggttagtgaagaaaa

SEQ ID NO: 1539790 - DNA, 15 bp, Homo sapiens
aggttagtgaagaaa

SEQ ID NO: 1539791 - DNA, 15 bp, Homo sapiens
taggttagtgaagaa

SEQ ID NO: 1539792 - DNA, 15 bp, Homo sapiens
ataggttagtgaaga

SEQ ID NO: 1539793 - DNA, 15 bp, Homo sapiens
gataggttagtgaag
